United States Patent Application Publication US 2006/0003322 A1 - sequence listing, part 28

SEQ ID NO: 1194007 - RNA, 19 nt, Human
ucucccgcuccccacccua

SEQ ID NO: 1194008 - RNA, 19 nt, Human
ugaaaccccaccucuacua

SEQ ID NO: 1194009 - RNA, 26 nt, Human
ugaaccccaaaucaucaggacccguc

SEQ ID NO: 1194010 - RNA, 18 nt, Human
ugaauaauagccucugcg

SEQ ID NO: 1194011 - RNA, 18 nt, Human
ugaccagcauggugaaac

SEQ ID NO: 1194012 - RNA, 23 nt, Human
ugagcagaguccccaguagguag

SEQ ID NO: 1194013 - RNA, 20 nt, Human
ugaggcaggagaaucgcuug

SEQ ID NO: 1194014 - RNA, 24 nt, Human
ugaggcaggagaaucgcuugaacc

SEQ ID NO: 1194015 - RNA, 25 nt, Human
ugaggcaggagaaucgcuugaaccc

SEQ ID NO: 1194016 - RNA, 24 nt, Human
ugauggugucugccuguaauccca

SEQ ID NO: 1194017 - RNA, 22 nt, Human
ugcacuccagccugggcaacag

SEQ ID NO: 1194018 - RNA, 24 nt, Human
ugccauugcacuccagccugggca

SEQ ID NO: 1194019 - RNA, 24 nt, Human
ugccuguaaucccagcuacucagg

SEQ ID NO: 1194020 - RNA, 18 nt, Human
uggcaucagguuauaaag

SEQ ID NO: 1194021 - RNA, 21 nt, Human
uggcucacaucuguaaucuca

SEQ ID NO: 1194022 - RNA, 24 nt, Human
uggcucacaucuguaaucucagca

SEQ ID NO: 1194023 - RNA, 23 nt, Human
ugggaggccaagguggguggauc

SEQ ID NO: 1194024 - RNA, 24 nt, Human
ugggaggccaagguggguggauca

SEQ ID NO: 1194025 - RNA, 24 nt, Human
uggugucugccuguaaucccagcu

SEQ ID NO: 1194026 - RNA, 21 nt, Human
ugucaaaguuuaaacacugga

SEQ ID NO: 1194027 - RNA, 23 nt, Human
uguuugauguugagguuuggggu

SEQ ID NO: 1194028 - RNA, 19 nt, Human
uuagcugggcgugauggug

SEQ ID NO: 1194029 - RNA, 20 nt, Human
uuagcugggcgugauggugu

SEQ ID NO: 1194030 - RNA, 24 nt, Human
uuaggcaggacgcaguggcucaca

SEQ ID NO: 1194031 - RNA, 22 nt, Human
uugcagugagcugaaauugugc

SEQ ID NO: 1194032 - RNA, 23 nt, Human
uugugccauugcacuccagccug

SEQ ID NO: 1194033 - RNA, 18 nt, Human
uuucaaacaaaaugcagu

SEQ ID NO: 1194034 - RNA, 21 nt, Human
uuucuucaugaaguuugucau

SEQ ID NO: 1194035 - RNA, 18 nt, Human
uuugauucagggaacaca

SEQ ID NO: 1194036 - RNA, 21 nt, Human
uuuggggguggggauacuaaa

SEQ ID NO: 1194037 - RNA, 24 nt, Human
uuugguuuuuuuuuuuucguauca

SEQ ID NO: 1194038 - RNA, 22 nt, Human
uuuugauucagggaacacaugg

SEQ ID NO: 1194039 - RNA, 18 nt, Human
uuuuucuuuuuuaaaaaa

SEQ ID NO: 1194040 - RNA, 20 nt, Human
uuuuucuuuuuuaaaaaaau

SEQ ID NO: 1194041 - RNA, 24 nt, Human
acccugaaauuccuccucggucac

SEQ ID NO: 1194042 - RNA, 19 nt, Human
agaacuucccaagccagca

SEQ ID NO: 1194043 - RNA, 20 nt, Human
agaacuucccaagccagcau

SEQ ID NO: 1194044 - RNA, 18 nt, Human
cacaccuucagaccaguc

SEQ ID NO: 1194045 - RNA, 26 nt, Human
cagagggcaccugcacaccuucagac

SEQ ID NO: 1194046 - RNA, 22 nt, Human
cagcagcagccuacucuucuuu

SEQ ID NO: 1194047 - RNA, 18 nt, Human
ccuccucggucacugccu

SEQ ID NO: 1194048 - RNA, 19 nt, Human
ccuccucggucacugccuu

SEQ ID NO: 1194049 - RNA, 21 nt, Human
cgggaaauggugccaugcaug

SEQ ID NO: 1194050 - RNA, 20 nt, Human
cuggagcaguccauucaccc

SEQ ID NO: 1194051 - RNA, 22 nt, Human
cuggagcaguccauucacccug

SEQ ID NO: 1194052 - RNA, 24 nt, Human
gaaauuccuccucggucacugccu

SEQ ID NO: 1194053 - RNA, 20 nt, Human
gaacucaggagcuggagcag

SEQ ID NO: 1194054 - RNA, 18 nt, Human
gaaguagagaucaggcau

SEQ ID NO: 1194055 - RNA, 23 nt, Human
ucaggccgaguagcagugaacuc

SEQ ID NO: 1194056 - RNA, 24 nt, Human
ucaggccgaguagcagugaacuca

SEQ ID NO: 1194057 - RNA, 20 nt, Human
ucccaagccagcauccacca

SEQ ID NO: 1194058 - RNA, 23 nt, Human
ucccuuuaaguuaugacgggaau

SEQ ID NO: 1194059 - RNA, 24 nt, Human
ucucuccaggaucucuguagaagu

SEQ ID NO: 1194060 - RNA, 25 nt, Human
ucugcaaccucaggccgaguagcag

SEQ ID NO: 1194061 - RNA, 21 nt, Human
ugaacucaggagcuggagcag

SEQ ID NO: 1194062 - RNA, 19 nt, Human
ugcgcagaacuucccaagc

SEQ ID NO: 1194063 - RNA, 21 nt, Human
uuccuccucggucacugccuu

SEQ ID NO: 1194064 - RNA, 23 nt, Human
uuccuccucggucacugccuuuu

SEQ ID NO: 1194065 - RNA, 22 nt, Human
uuuucaaucucuccaggaucuc

SEQ ID NO: 1194066 - RNA, 24 nt, Human
aaaauuuuguauuuuuaguagaga

SEQ ID NO: 1194067 - RNA, 19 nt, Human
aaagugcugggauuacagg

SEQ ID NO: 1194068 - RNA, 21 nt, Human
aaagugcugggauuacaggca

SEQ ID NO: 1194069 - RNA, 22 nt, Human
aaagugcugggauuacaggcag

SEQ ID NO: 1194070 - RNA, 20 nt, Human
aaccuccgccucccugguuc

SEQ ID NO: 1194071 - RNA, 19 nt, Human
aaguagcugggauuacagg

SEQ ID NO: 1194072 - RNA, 18 nt, Human
aagugcugggauuacagg

SEQ ID NO: 1194073 - RNA, 19 nt, Human
aagugcugggauuacaggc

SEQ ID NO: 1194074 - RNA, 23 nt, Human
aagugcugggauuacaggcagcc

SEQ ID NO: 1194075 - RNA, 24 nt, Human
aauuuuguauuuuuaguagagaca

SEQ ID NO: 1194076 - RNA, 18 nt, Human
acagcccccuuuuuuuuu

SEQ ID NO: 1194077 - RNA, 24 nt, Human
acaggguacaauaauggaccacaa

SEQ ID NO: 1194078 - RNA, 18 nt, Human
acaggguuucgccauguu

SEQ ID NO: 1194079 - RNA, 23 nt, Human
acaggguuucgccauguuggcca

SEQ ID NO: 1194080 - RNA, 24 nt, Human
acaggguuucgccauguuggccag

SEQ ID NO: 1194081 - RNA, 19 nt, Human
acccaggcuggagugcagu

SEQ ID NO: 1194082 - RNA, 23 nt, Human
accucagcuucccaaagugcugg

SEQ ID NO: 1194083 - RNA, 25 nt, Human
acugcaauuguauucagacucaauc

SEQ ID NO: 1194084 - RNA, 18 nt, Human
agacaggguuucgccaug

SEQ ID NO: 1194085 - RNA, 18 nt, Human
agacaggguuucgccaug

SEQ ID NO: 1194086 - RNA, 25 nt, Human
aggcuggagugcaguggcaaaaucu

SEQ ID NO: 1194087 - RNA, 22 nt, Human
aguagagacaggguuucgccau

SEQ ID NO: 1194088 - RNA, 19 nt, Human
agugaucuacccaccucag

SEQ ID NO: 1194089 - RNA, 24 nt, Human
agugcaguggcaaaaucuuggcuc

SEQ ID NO: 1194090 - RNA, 18 nt, Human
agugcugggauuacaggc

SEQ ID NO: 1194091 - RNA, 18 nt, Human
auugagugcauaugcccc

SEQ ID NO: 1194092 - RNA, 21 nt, Human
caaaguagcugggauuacagg

SEQ ID NO: 1194093 - RNA, 27 nt, Human
caaagugcugggauuacaggcagcccu

SEQ ID NO: 1194094 - RNA, 19 nt, Human
caagugaucuacccaccuc

SEQ ID NO: 1194095 - RNA, 27 nt, Human
cagcccccuuuuuuuuuuuuugugaga

SEQ ID NO: 1194096 - RNA, 24 nt, Human
caggguuucgccauguuggccagg

SEQ ID NO: 1194097 - RNA, 21 nt, Human
caggugcccaccauaacaccc

SEQ ID NO: 1194098 - RNA, 24 nt, Human
cauguuggccaggcuggucucgaa

SEQ ID NO: 1194099 - RNA, 19 nt, Human
ccaaagugcugggauuaca

SEQ ID NO: 1194100 - RNA, 23 nt, Human
ccaaagugcugggauuacaggca

SEQ ID NO: 1194101 - RNA, 19 nt, Human
ccauguuggccaggcuggu

SEQ ID NO: 1194102 - RNA, 22 nt, Human
ccauguuggccaggcuggucuc

SEQ ID NO: 1194103 - RNA, 23 nt, Human
ccauguuggccaggcuggucucg

SEQ ID NO: 1194104 - RNA, 24 nt, Human
cccaaagugcugggauuacaggca

SEQ ID NO: 1194105 - RNA, 23 nt, Human
cccuuuuuuuuuuuuugugagac

SEQ ID NO: 1194106 - RNA, 24 nt, Human
ccugaccucaagugaucuacccac

SEQ ID NO: 1194107 - RNA, 27 nt, Human
cgccauguuggccaggcuggucucgaa

SEQ ID NO: 1194108 - RNA, 24 nt, Human
cucaagugaucuacccaccucagc

SEQ ID NO: 1194109 - RNA, 24 nt, Human
cugcaaccuccgccucccugguuc

SEQ ID NO: 1194110 - RNA, 21 nt, Human
cugcaauuguauucagacuca

SEQ ID NO: 1194111 - RNA, 19 nt, Human
cugucacccaggcuggagu

SEQ ID NO: 1194112 - RNA, 21 nt, Human
cuugcucugucacccaggcug

SEQ ID NO: 1194113 - RNA, 24 nt, Human
cuugcucugucacccaggcuggag

SEQ ID NO: 1194114 - RNA, 24 nt, Human
gaccucaagugaucuacccaccuc

SEQ ID NO: 1194115 - RNA, 22 nt, Human
gcaaccuccgccucccugguuc

SEQ ID NO: 1194116 - RNA, 25 nt, Human
gcucugucacccaggcuggagugca

SEQ ID NO: 1194117 - RNA, 23 nt, Human
gcugcauucaagcggcuuuaacu

SEQ ID NO: 1194118 - RNA, 23 nt, Human
gcuggucucgaacuccugaccuc

SEQ ID NO: 1194119 - RNA, 24 nt, Human
ggcuggucucgaacuccugaccuc

SEQ ID NO: 1194120 - RNA, 22 nt, Human
ggguuucgccauguuggccagg

SEQ ID NO: 1194121 - RNA, 19 nt, Human
ggucucgaacuccugaccu

SEQ ID NO: 1194122 - RNA, 18 nt, Human
guagcugggauuacaggu

SEQ ID NO: 1194123 - RNA, 24 nt, Human
gucuugcucugucacccaggcugg

SEQ ID NO: 1194124 - RNA, 24 nt, Human
gugaucuacccaccucagcuuccc

SEQ ID NO: 1194125 - RNA, 24 nt, Human
uaaaauuuuguauuuuuaguagag

SEQ ID NO: 1194126 - RNA, 19 nt, Human
uaaaguagaccaucagagc

SEQ ID NO: 1194127 - RNA, 20 nt, Human
uaauggaccacaaacugugg

SEQ ID NO: 1194128 - RNA, 22 nt, Human
uacagcccccuuuuuuuuuuuu

SEQ ID NO: 1194129 - RNA, 23 nt, Human
uacccaccucagcuucccaaagu

SEQ ID NO: 1194130 - RNA, 22 nt, Human
uagagacaggguuucgccaugu

SEQ ID NO: 1194131 - RNA, 24 nt, Human
uaguagagacaggguuucgccaug

SEQ ID NO: 1194132 - RNA, 22 nt, Human
uauucuaggccuacccugauug

SEQ ID NO: 1194133 - RNA, 19 nt, Human
ucaaaguagcugggauuac

SEQ ID NO: 1194134 - RNA, 22 nt, Human
ucaaaguagcugggauuacagg

SEQ ID NO: 1194135 - RNA, 24 nt, Human
ucaaaguagcugggauuacaggug

SEQ ID NO: 1194136 - RNA, 24 nt, Human
ucacccaggcuggagugcaguggc

SEQ ID NO: 1194137 - RNA, 19 nt, Human
ucacugcaaccuccgccuc

SEQ ID NO: 1194138 - RNA, 24 nt, Human
ucacugcaaccuccgccucccugg

SEQ ID NO: 1194139 - RNA, 24 nt, Human
ucacugcaaccuccgccucccugg

SEQ ID NO: 1194140 - RNA, 25 nt, Human
ucacugcaaccuccgccucccuggu

SEQ ID NO: 1194141 - RNA, 28 nt, Human
ucacugcaaccuccgccucccugguuca

SEQ ID NO: 1194142 - RNA, 24 nt, Human
ucacugcagcuuaguuugcugccu

SEQ ID NO: 1194143 - RNA, 24 nt, Human
ucccaaagugcugggauuacaggc

SEQ ID NO: 1194144 - RNA, 19 nt, Human
ucccugguucaagugaguc

SEQ ID NO: 1194145 - RNA, 21 nt, Human
ucccugguucaagugagucug

SEQ ID NO: 1194146 - RNA, 22 nt, Human
ucgccauguuggccaggcuggu

SEQ ID NO: 1194147 - RNA, 24 nt, Human
ucgccauguuggccaggcuggucu

SEQ ID NO: 1194148 - RNA, 21 nt, Human
ucuacccaccucagcuuccca

SEQ ID NO: 1194149 - RNA, 21 nt, Human
ucucgaacuccugaccucaag

SEQ ID NO: 1194150 - RNA, 24 nt, Human
ucugucacccaggcuggagugcag

SEQ ID NO: 1194151 - RNA, 23 nt, Human
ucuugcucugucacccaggcugg

SEQ ID NO: 1194152 - RNA, 24 nt, Human
ucuugcucugucacccaggcugga

SEQ ID NO: 1194153 - RNA, 20 nt, Human
ugaccucaagugaucuaccc

SEQ ID NO: 1194154 - RNA, 18 nt, Human
ugagacagagucuugcuc

SEQ ID NO: 1194155 - RNA, 22 nt, Human
ugagacagagucuugcucuguc

SEQ ID NO: 1194156 - RNA, 23 nt, Human
ugaucuacccaccucagcuuccc

SEQ ID NO: 1194157 - RNA, 22 nt, Human
ugcaguggcaaaaucuuggcuc

SEQ ID NO: 1194158 - RNA, 24 nt, Human
ugcucugucacccaggcuggagug

SEQ ID NO: 1194159 - RNA, 23 nt, Human
ugcugggauuacaggcagcccua

SEQ ID NO: 1194160 - RNA, 18 nt, Human
uggagugcaguggcaaaa

SEQ ID NO: 1194161 - RNA, 23 nt, Human
uggagugcaguggcaaaaucuug

SEQ ID NO: 1194162 - RNA, 24 nt, Human
uggagugcaguggcaaaaucuugg

SEQ ID NO: 1194163 - RNA, 24 nt, Human
uggccaggcuggucucgaacuccu

SEQ ID NO: 1194164 - RNA, 19 nt, Human
ugggauuacaggcagcccu

SEQ ID NO: 1194165 - RNA, 21 nt, Human
ugggauuacaggugcccacca

SEQ ID NO: 1194166 - RNA, 22 nt, Human
ugggauuacaggugcccaccau

SEQ ID NO: 1194167 - RNA, 21 nt, Human
uguacagcccccuuuuuuuuu

SEQ ID NO: 1194168 - RNA, 21 nt, Human
uuacugcaauuguauucagac

SEQ ID NO: 1194169 - RNA, 24 nt, Human
uuaguagagacaggguuucgccau

SEQ ID NO: 1194170 - RNA, 24 nt, Human
uucaaaguagcugggauuacaggu

SEQ ID NO: 1194171 - RNA, 24 nt, Human
uuucgccauguuggccaggcuggu

SEQ ID NO: 1194172 - RNA, 20 nt, Human
uuuuguauuuuuaguagaga

SEQ ID NO: 1194173 - RNA, 22 nt, Human
uuuuuaguagagacaggguuuc

SEQ ID NO: 1194174 - RNA, 23 nt, Human
uuuuuaguagagacaggguuucg

SEQ ID NO: 1194175 - RNA, 18 nt, Human
uuuuuauguaguguauau

SEQ ID NO: 1194176 - RNA, 22 nt, Human
uuuuuugugagacagagucuug

SEQ ID NO: 1194177 - RNA, 26 nt, Human
uuuuuuuuuuuugugagacagagucu

SEQ ID NO: 1194178 - RNA, 24 nt, Human
acccugaaauuccuccuuggucac

SEQ ID NO: 1194179 - RNA, 19 nt, Human
agaacuucccgagccagca

SEQ ID NO: 1194180 - RNA, 20 nt, Human
agaacuucccgagccagcau

SEQ ID NO: 1194181 - RNA, 27 nt, Human
auccagaacaacgccauauggaccccu

SEQ ID NO: 1194182 - RNA, 26 nt, Human
cagagggcaccuguacaccuucagac

SEQ ID NO: 1194183 - RNA, 22 nt, Human
cagcagcagccugcucuucuuu

SEQ ID NO: 1194184 - RNA, 23 nt, Human
cagcagcagccugcucuucuuuu

SEQ ID NO: 1194185 - RNA, 20 nt, Human
caggagcaggagcaguccau

SEQ ID NO: 1194186 - RNA, 18 nt, Human
ccuccuuggucacugccu

SEQ ID NO: 1194187 - RNA, 22 nt, Human
cgaugggaauccagaacaacgc

SEQ ID NO: 1194188 - RNA, 21 nt, Human
cugagcagugggagcugcaga

SEQ ID NO: 1194189 - RNA, 24 nt, Human
gaaauuccuccuuggucacugccu

SEQ ID NO: 1194190 - RNA, 20 nt, Human
gaacucaggagcaggagcag

SEQ ID NO: 1194191 - RNA, 18 nt, Human
gaaguagagaucaggcau

SEQ ID NO: 1194192 - RNA, 25 nt, Human
uacaccuucagacaagucugcaacc

SEQ ID NO: 1194193 - RNA, 20 nt, Human
ucccgagccagcauccacca

SEQ ID NO: 1194194 - RNA, 23 nt, Human
ucccuuuaaguuacgaugggaau

SEQ ID NO: 1194195 - RNA, 24 nt, Human
ucucuucaggaucucuguagaagu

SEQ ID NO: 1194196 - RNA, 25 nt, Human
ucugcaaccucaggcugaguggcag

SEQ ID NO: 1194197 - RNA, 24 nt, Human
ugaauaggcacagagggcaccugu

SEQ ID NO: 1194198 - RNA, 25 nt, Human
ugaauaggcacagagggcaccugua

SEQ ID NO: 1194199 - RNA, 20 nt, Human
ugagcagugggagcugcaga

SEQ ID NO: 1194200 - RNA, 24 nt, Human
ugagcagugggagcugcagaccag

SEQ ID NO: 1194201 - RNA, 20 nt, Human
uggcaggcugagugcuccag

SEQ ID NO: 1194202 - RNA, 19 nt, Human
ugggagcugcagaccaguu

SEQ ID NO: 1194203 - RNA, 20 nt, Human
ugggagcugcagaccaguuu

SEQ ID NO: 1194204 - RNA, 18 nt, Human
uggugccacgcaugcgca

SEQ ID NO: 1194205 - RNA, 24 nt, Human
uuccuccuuggucacugccuuuuc

SEQ ID NO: 1194206 - RNA, 19 nt, Human
aaaauacccauuccaaaug

SEQ ID NO: 1194207 - RNA, 20 nt, Human
aaacuauggcacaucucuac

SEQ ID NO: 1194208 - RNA, 23 nt, Human
aaaugccagaugcuuauaaaacc

SEQ ID NO: 1194209 - RNA, 22 nt, Human
aacagguuuguauaugauacag

SEQ ID NO: 1194210 - RNA, 33 nt, Human
acacacacacacauacaaauuaguguauguagu

SEQ ID NO: 1194211 - RNA, 27 nt, Human
acacacacacauacaaauuaguguagu

SEQ ID NO: 1194212 - RNA, 33 nt, Human
acacauaaacgugcacgcacacacacacacagu

SEQ ID NO: 1194213 - RNA, 20 nt, Human
acaggguggcaggagagaga

SEQ ID NO: 1194214 - RNA, 18 nt, Human
acauuaacccagaagucc

SEQ ID NO: 1194215 - RNA, 23 nt, Human
acgcacacacacacacacauaca

SEQ ID NO: 1194216 - RNA, 29 nt, Human
acgcacacacacacacacauacaaauuag

SEQ ID NO: 1194217 - RNA, 24 nt, Human
acgcauuugucaauacacaugaau

SEQ ID NO: 1194218 - RNA, 21 nt, Human
acucugugggggagcuccaac

SEQ ID NO: 1194219 - RNA, 20 nt, Human
acugaaagaaaccccagugg

SEQ ID NO: 1194220 - RNA, 20 nt, Human
acugauauacacaacaguuu

SEQ ID NO: 1194221 - RNA, 19 nt, Human
agaaagaacacaaauguug

SEQ ID NO: 1194222 - RNA, 22 nt, Human
agaaguccaaguccaaagucuc

SEQ ID NO: 1194223 - RNA, 18 nt, Human
agcuauugguggaucuac

SEQ ID NO: 1194224 - RNA, 21 nt, Human
aggaaaaaaaaauuguuucag

SEQ ID NO: 1194225 - RNA, 21 nt, Human
aguugauaccacuagaggaac

SEQ ID NO: 1194226 - RNA, 21 nt, Human
auaaagaaauacccaagacua

SEQ ID NO: 1194227 - RNA, 23 nt, Human
auucaaggagagauuuggguggg

SEQ ID NO: 1194228 - RNA, 23 nt, Human
caaaaccaaaccauaucauucug

SEQ ID NO: 1194229 - RNA, 19 nt, Human
caaauauacacauguggua

SEQ ID NO: 1194230 - RNA, 21 nt, Human
caaccccacauuucccuucug

SEQ ID NO: 1194231 - RNA, 23 nt, Human
caagaaauauagaaauauuaaac

SEQ ID NO: 1194232 - RNA, 20 nt, Human
caaguccaaagucucaucug

SEQ ID NO: 1194233 - RNA, 24 nt, Human
caagucccuuccaccuauaagccu

SEQ ID NO: 1194234 - RNA, 26 nt, Human
cacaaaaccaaaccauaucauucuga

SEQ ID NO: 1194235 - RNA, 19 nt, Human
cacacacacacacacauac

SEQ ID NO: 1194236 - RNA, 31 nt, Human
cacacacacacacauacaaauuaguguaugg

SEQ ID NO: 1194237 - RNA, 26 nt, Human
cacacacacauacaaauuaguguaug

SEQ ID NO: 1194238 - RNA, 25 nt, Human
caggaugcagccacccucacagcuc

SEQ ID NO: 1194239 - RNA, 22 nt, Human
caucugagacaaagcaaguccc

SEQ ID NO: 1194240 - RNA, 23 nt, Human
cauucugacccuaguuccuccca

SEQ ID NO: 1194241 - RNA, 25 nt, Human
cauucugacccuaguuccucccaaa

SEQ ID NO: 1194242 - RNA, 26 nt, Human
cauuucucccccaagaaauauagaaa

SEQ ID NO: 1194243 - RNA, 24 nt, Human
ccaaaacaaaggggcuauaggccc

SEQ ID NO: 1194244 - RNA, 22 nt, Human
ccaaaccauaucauucugaccc

SEQ ID NO: 1194245 - RNA, 22 nt, Human
ccaagauacaauggggguacag

SEQ ID NO: 1194246 - RNA, 24 nt, Human
ccacauuucccuucugcacugccc

SEQ ID NO: 1194247 - RNA, 18 nt, Human
ccaccuggucccaccccu

SEQ ID NO: 1194248 - RNA, 18 nt, Human
ccaguggacccacuugag

SEQ ID NO: 1194249 - RNA, 19 nt, Human
ccaguggcuuuuccaggug

SEQ ID NO: 1194250 - RNA, 24 nt, Human
cccaaaaguagaaagaacacaaau

SEQ ID NO: 1194251 - RNA, 18 nt, Human
cccacagccuugggcagc

SEQ ID NO: 1194252 - RNA, 18 nt, Human
ccccaugauucaguccuc

SEQ ID NO: 1194253 - RNA, 20 nt, Human
cgcacacacacacacacaua

SEQ ID NO: 1194254 - RNA, 21 nt, Human
cuauaagccuguaaaaucuaa

SEQ ID NO: 1194255 - RNA, 18 nt, Human
cuauggcacaucucuacc

SEQ ID NO: 1194256 - RNA, 18 nt, Human
cuucucagagcuccacua

SEQ ID NO: 1194257 - RNA, 22 nt, Human
cuugaucauuguagugguuacc

SEQ ID NO: 1194258 - RNA, 19 nt, Human
gaaacugaaagaaacccca

SEQ ID NO: 1194259 - RNA, 18 nt, Human
gagaagucugaguaaugu

SEQ ID NO: 1194260 - RNA, 28 nt, Human
gagaauagcaugagggaaaccgguaccc

SEQ ID NO: 1194261 - RNA, 22 nt, Human
gauauacacaacaguuuggaug

SEQ ID NO: 1194262 - RNA, 25 nt, Human
gcacacacacacacacauacaaauu

SEQ ID NO: 1194263 - RNA, 23 nt, Human
gcauagaccuacacacauaaacg

SEQ ID NO: 1194264 - RNA, 25 nt, Human
gccacccucacagcucuuuucaugg

SEQ ID NO: 1194265 - RNA, 21 nt, Human
gggaacaguugaaauauuggc

SEQ ID NO: 1194266 - RNA, 18 nt, Human
guggaucuaccauucugg

SEQ ID NO: 1194267 - RNA, 31 nt, Human
uaaacgugcacgcacacacacacacacauag

SEQ ID NO: 1194268 - RNA, 22 nt, Human
uaaacucuacuuccugauaugc

SEQ ID NO: 1194269 - RNA, 19 nt, Human
uaaagaaauacccaagacu

SEQ ID NO: 1194270 - RNA, 18 nt, Human
uaaaucacuaucaugaga

SEQ ID NO: 1194271 - RNA, 18 nt, Human
uaacagguuuguauauga

SEQ ID NO: 1194272 - RNA, 20 nt, Human
uaacagguuuguauaugaua

SEQ ID NO: 1194273 - RNA, 22 nt, Human
uaacccagaaguccaaguccaa

SEQ ID NO: 1194274 - RNA, 23 nt, Human
uaauagcccaaaaguagaaagaa

SEQ ID NO: 1194275 - RNA, 23 nt, Human
uacacacauaaacgugcacgcac

SEQ ID NO: 1194276 - RNA, 19 nt, Human
uacacaugaauugauauac

SEQ ID NO: 1194277 - RNA, 22 nt, Human
uaccauggaauacuacacagaa

SEQ ID NO: 1194278 - RNA, 25 nt, Human
uagaaagaacacaaauguuguucaa

SEQ ID NO: 1194279 - RNA, 20 nt, Human
uagcaacuuuauuuguaaua

SEQ ID NO: 1194280 - RNA, 21 nt, Human
uagcagagguucucccugaga

SEQ ID NO: 1194281 - RNA, 23 nt, Human
uagcccaaaaguagaaagaacac

SEQ ID NO: 1194282 - RNA, 25 nt, Human
uagcccaaaaguagaaagaacacaa

SEQ ID NO: 1194283 - RNA, 24 nt, Human
uauagaaauauuaaacucuacuuc

SEQ ID NO: 1194284 - RNA, 18 nt, Human
uauagcacuucccuauac

SEQ ID NO: 1194285 - RNA, 18 nt, Human
uauaugauacugcaguua

SEQ ID NO: 1194286 - RNA, 21 nt, Human
uaucaugagaauagcaugagg

SEQ ID NO: 1194287 - RNA, 18 nt, Human
uauccaggucacaaugau

SEQ ID NO: 1194288 - RNA, 20 nt, Human
uaugaagauaagguauaggg

SEQ ID NO: 1194289 - RNA, 21 nt, Human
uccgcauggcuucggaggccu

SEQ ID NO: 1194290 - RNA, 23 nt, Human
ucucauguucucacauuucaaaa

SEQ ID NO: 1194291 - RNA, 21 nt, Human
ucuuccccuguggcuuugcag

SEQ ID NO: 1194292 - RNA, 22 nt, Human
ugaaagaaaccccaguggaccc

SEQ ID NO: 1194293 - RNA, 25 nt, Human
ugaaaggaguuucuguuacauggug

SEQ ID NO: 1194294 - RNA, 21 nt, Human
ugagacaaagcaagucccuuc

SEQ ID NO: 1194295 - RNA, 24 nt, Human
ugauauacacaacaguuuggaugc

SEQ ID NO: 1194296 - RNA, 22 nt, Human
ugauucaguccuccaccugguc

SEQ ID NO: 1194297 - RNA, 25 nt, Human
ugcacgcacacacacacacacauac

SEQ ID NO: 1194298 - RNA, 22 nt, Human
ugcauagaccuacacacauaaa

SEQ ID NO: 1194299 - RNA, 20 nt, Human
ugccagaugcuuauaaaacc

SEQ ID NO: 1194300 - RNA, 21 nt, Human
ugccaguggcuuuuccaggug

SEQ ID NO: 1194301 - RNA, 23 nt, Human
uggcaggaaaaaaaaauuguuuc

SEQ ID NO: 1194302 - RNA, 26 nt, Human
uggcaggaaaaaaaaauuguuucaga

SEQ ID NO: 1194303 - RNA, 22 nt, Human
ugggaaacugaaagaaacccca

SEQ ID NO: 1194304 - RNA, 19 nt, Human
ugggaacacaaaaccaaac

SEQ ID NO: 1194305 - RNA, 21 nt, Human
ugggaacacaaaaccaaacca

SEQ ID NO: 1194306 - RNA, 28 nt, Human
uggugcacgcauuugucaauacacaugg

SEQ ID NO: 1194307 - RNA, 23 nt, Human
ugguggaucuaccauucuggggu

SEQ ID NO: 1194308 - RNA, 21 nt, Human
uguaaaacuagagaagucuga

SEQ ID NO: 1194309 - RNA, 23 nt, Human
uuaaacuauggcacaucucuacc

SEQ ID NO: 1194310 - RNA, 21 nt, Human
uuaaaguuccaaaaugaucuc

SEQ ID NO: 1194311 - RNA, 19 nt, Human
uuauaaggaugaagaacag

SEQ ID NO: 1194312 - RNA, 24 nt, Human
uucaaggagagauuugggugggaa

SEQ ID NO: 1194313 - RNA, 22 nt, Human
uuccaggugcauggugcaagcu

SEQ ID NO: 1194314 - RNA, 23 nt, Human
uugcauagaccuacacacauaaa

SEQ ID NO: 1194315 - RNA, 19 nt, Human
uugcauuuguauguuuguu

SEQ ID NO: 1194316 - RNA, 21 nt, Human
uuggaugcaucucaagggaau

SEQ ID NO: 1194317 - RNA, 24 nt, Human
uuuguuuuuaaauuuuuacccugu

SEQ ID NO: 1194318 - RNA, 21 nt, Human
aaaauagacagaugauaggua

SEQ ID NO: 1194319 - RNA, 20 nt, Human
aauaacagauagguagauac

SEQ ID NO: 1194320 - RNA, 20 nt, Human
agaacacagagucuacaagc

SEQ ID NO: 1194321 - RNA, 18 nt, Human
agagagcugagccacaau

SEQ ID NO: 1194322 - RNA, 23 nt, Human
agcaaaggcauauaccuucucca

SEQ ID NO: 1194323 - RNA, 24 nt, Human
agcacuuugggaggcugaggcggg

SEQ ID NO: 1194324 - RNA, 22 nt, Human
agcuguugaagagagcugagcc

SEQ ID NO: 1194325 - RNA, 20 nt, Human
aggaggaaccagcccugccc

SEQ ID NO: 1194326 - RNA, 24 nt, Human
aggcauuauuugguuauaacgucu

SEQ ID NO: 1194327 - RNA, 21 nt, Human
aggcauugcauggauuuacug

SEQ ID NO: 1194328 - RNA, 23 nt, Human
agggcugcugcuaccagcugcug

SEQ ID NO: 1194329 - RNA, 22 nt, Human
agucaaguguaucaagaucaaa

SEQ ID NO: 1194330 - RNA, 21 nt, Human
auaacagguacuuugcccaca

SEQ ID NO: 1194331 - RNA, 23 nt, Human
aucaccagccaaccagaaacaca

SEQ ID NO: 1194332 - RNA, 22 nt, Human
caauacaaagagagaagauaau

SEQ ID NO: 1194333 - RNA, 24 nt, Human
caccucauaagaagagaugaggac

SEQ ID NO: 1194334 - RNA, 24 nt, Human
cacgccuguaaucccagcacuuug

SEQ ID NO: 1194335 - RNA, 23 nt, Human
cacucuuuccuuguguccucuga

SEQ ID NO: 1194336 - RNA, 24 nt, Human
cagcacuuugggaggcugaggcgg

SEQ ID NO: 1194337 - RNA, 19 nt, Human
cagggcugcugcuaccagc

SEQ ID NO: 1194338 - RNA, 18 nt, Human
cauaacagguacuuugcc

SEQ ID NO: 1194339 - RNA, 24 nt, Human
cauauaccuucuccauccccucuc

SEQ ID NO: 1194340 - RNA, 23 nt, Human
caugcagcucuacaaucuuguac

SEQ ID NO: 1194341 - RNA, 18 nt, Human
cauggcccuaacuaacaa

SEQ ID NO: 1194342 - RNA, 23 nt, Human
cauugcauggauuuacugguacc

SEQ ID NO: 1194343 - RNA, 25 nt, Human
ccagaaacacacacuuugggcuuaa

SEQ ID NO: 1194344 - RNA, 20 nt, Human
ccagccaaccagaaacacac

SEQ ID NO: 1194345 - RNA, 24 nt, Human
cccacaccuugaucucagacuucc

SEQ ID NO: 1194346 - RNA, 23 nt, Human
ccuccaggauuguaaggaaauaa

SEQ ID NO: 1194347 - RNA, 22 nt, Human
ccuguaaucccagcacuuuggg

SEQ ID NO: 1194348 - RNA, 19 nt, Human
ccuuguguccucugagagu

SEQ ID NO: 1194349 - RNA, 23 nt, Human
cgccuguaaucccagcacuuugg

SEQ ID NO: 1194350 - RNA, 22 nt, Human
cucacgccuguaaucccagcac

SEQ ID NO: 1194351 - RNA, 24 nt, Human
cucacgccuguaaucccagcacuu

SEQ ID NO: 1194352 - RNA, 20 nt, Human
cucagucuacaguccuuugu

SEQ ID NO: 1194353 - RNA, 18 nt, Human
cuccaagacaaugggaga

SEQ ID NO: 1194354 - RNA, 20 nt, Human
cuguuauagcagcuugaaau

SEQ ID NO: 1194355 - RNA, 24 nt, Human
gacacagacacacacagagagacg

SEQ ID NO: 1194356 - RNA, 21 nt, Human
gaggacacagacacacacaga

SEQ ID NO: 1194357 - RNA, 20 nt, Human
gaugaugugcuacaccuuug

SEQ ID NO: 1194358 - RNA, 20 nt, Human
gcgguggcucacgccuguaa

SEQ ID NO: 1194359 - RNA, 19 nt, Human
gcugggugcgguggcucac

SEQ ID NO: 1194360 - RNA, 19 nt, Human
ggagaacacagagucuaca

SEQ ID NO: 1194361 - RNA, 22 nt, Human
ggaggaaccagcccugcccaca

SEQ ID NO: 1194362 - RNA, 21 nt, Human
ggcucacgccuguaaucccag

SEQ ID NO: 1194363 - RNA, 19 nt, Human
ggcugggugcgguggcuca

SEQ ID NO: 1194364 - RNA, 22 nt, Human
gggagaacacagagucuacaag

SEQ ID NO: 1194365 - RNA, 19 nt, Human
gguauuuguuagaaaaaaa

SEQ ID NO: 1194366 - RNA, 23 nt, Human
gguggcucacgccuguaauccca

SEQ ID NO: 1194367 - RNA, 24 nt, Human
gguggcucacgccuguaaucccag

SEQ ID NO: 1194368 - RNA, 23 nt, Human
guaugaggacaaagggagaacac

SEQ ID NO: 1194369 - RNA, 21 nt, Human
gugaugaugauacacaaauac

SEQ ID NO: 1194370 - RNA, 22 nt, Human
uaagaaagguguugagagcuag

SEQ ID NO: 1194371 - RNA, 22 nt, Human
uaagaagagaugaggacacaga

SEQ ID NO: 1194372 - RNA, 22 nt, Human
uaagaagcaugcagcucuacaa

SEQ ID NO: 1194373 - RNA, 20 nt, Human
uaagcagcuuaucauggccc

SEQ ID NO: 1194374 - RNA, 21 nt, Human
uacacagaugauagauagaug

SEQ ID NO: 1194375 - RNA, 21 nt, Human
uagaagaaaaaaaguguaaua

SEQ ID NO: 1194376 - RNA, 19 nt, Human
uaggaguagagauauagaa

SEQ ID NO: 1194377 - RNA, 24 nt, Human
uaguuuguaaguggaggcuacuuu

SEQ ID NO: 1194378 - RNA, 19 nt, Human
ucauuguuuuuuuuuuuuu

SEQ ID NO: 1194379 - RNA, 19 nt, Human
uccaagacaaugggagaau

SEQ ID NO: 1194380 - RNA, 24 nt, Human
uccuuguguccucugagagucuac

SEQ ID NO: 1194381 - RNA, 21 nt, Human
uccuuuguuauggcagcucua

SEQ ID NO: 1194382 - RNA, 23 nt, Human
ucuacaagccaaggagagaggcc

SEQ ID NO: 1194383 - RNA, 18 nt, Human
ucuacaaucuuguacagu

SEQ ID NO: 1194384 - RNA, 20 nt, Human
ucuacagcauuuuuucccau

SEQ ID NO: 1194385 - RNA, 22 nt, Human
ugaaauggacuaagacaccuca

SEQ ID NO: 1194386 - RNA, 20 nt, Human
ugaagagagcugagccacaa

SEQ ID NO: 1194387 - RNA, 22 nt, Human
ugaagagagcugagccacaaug

SEQ ID NO: 1194388 - RNA, 25 nt, Human
ugaccaaaauaacagauagguagau

SEQ ID NO: 1194389 - RNA, 21 nt, Human
ugaggacaaagggagaacaca

SEQ ID NO: 1194390 - RNA, 18 nt, Human
ugauguggaaaaacagca

SEQ ID NO: 1194391 - RNA, 24 nt, Human
ugcaaaacuagagaacggcucuga

SEQ ID NO: 1194392 - RNA, 18 nt, Human
ugcugcuaccagcugcug

SEQ ID NO: 1194393 - RNA, 18 nt, Human
uggagaacaaaaucugua

SEQ ID NO: 1194394 - RNA, 24 nt, Human
uggcucacgccuguaaucccagca

SEQ ID NO: 1194395 - RNA, 19 nt, Human
ugggaggcugaggcgggcg

SEQ ID NO: 1194396 - RNA, 20 nt, Human
ugggaggcugaggcgggcgg

SEQ ID NO: 1194397 - RNA, 20 nt, Human
uggucauagccuugguguuc

SEQ ID NO: 1194398 - RNA, 22 nt, Human
ugguguucuguuauagcagcuu

SEQ ID NO: 1194399 - RNA, 19 nt, Human
uguaaggaaauaaauuucu

SEQ ID NO: 1194400 - RNA, 22 nt, Human
uguacagugaaacguugggcac

SEQ ID NO: 1194401 - RNA, 22 nt, Human
uguuauggcagcucuagcaaag

SEQ ID NO: 1194402 - RNA, 23 nt, Human
uuccgaccuccaggauuguaagg

SEQ ID NO: 1194403 - RNA, 24 nt, Human
uugcauggauuuacugguaccuaa

SEQ ID NO: 1194404 - RNA, 18 nt, Human
uuguaaguggaggcuacu

SEQ ID NO: 1194405 - RNA, 19 nt, Human
uuugcccacagucaagugu

SEQ ID NO: 1194406 - RNA, 23 nt, Human
uuuuauauuauguauauuugacc

SEQ ID NO: 1194407 - RNA, 20 nt, Human
uuuuccaggcauuauuuggu

SEQ ID NO: 1194408 - RNA, 20 nt, Human
aaaaucuucuccaccaagug

SEQ ID NO: 1194409 - RNA, 19 nt, Human
aaagaucagcauguuucuu

SEQ ID NO: 1194410 - RNA, 21 nt, Human
aagagcagcaaaucuugaaca

SEQ ID NO: 1194411 - RNA, 19 nt, Human
aagcaccaccagagggagg

SEQ ID NO: 1194412 - RNA, 19 nt, Human
aagcagguugucguccuug

SEQ ID NO: 1194413 - RNA, 19 nt, Human
aaguacauugagaccagca

SEQ ID NO: 1194414 - RNA, 25 nt, Human
acacccacacaagaguauguggugc

SEQ ID NO: 1194415 - RNA, 22 nt, Human
acagcauugguaacagucuucc

SEQ ID NO: 1194416 - RNA, 21 nt, Human
accacagcauugguaacaguc

SEQ ID NO: 1194417 - RNA, 22 nt, Human
acccugagagcugcaggcaagc

SEQ ID NO: 1194418 - RNA, 18 nt, Human
agacuggacaacagcauc

SEQ ID NO: 1194419 - RNA, 19 nt, Human
agccggcacugugaccaca

SEQ ID NO: 1194420 - RNA, 21 nt, Human
aggaacccugagagcugcagg

SEQ ID NO: 1194421 - RNA, 24 nt, Human
auuuucuuuauuuuuucuaagaac

SEQ ID NO: 1194422 - RNA, 24 nt, Human
caaacagacguuuggcaucaaaaa

SEQ ID NO: 1194423 - RNA, 20 nt, Human
caccagagggaggagcucca

SEQ ID NO: 1194424 - RNA, 22 nt, Human
cagacuggacaacagcaucauc

SEQ ID NO: 1194425 - RNA, 21 nt, Human
cagagggaggagcuccaccac

SEQ ID NO: 1194426 - RNA, 19 nt, Human
cagcugcaccauaagcaac

SEQ ID NO: 1194427 - RNA, 23 nt, Human
cauauucaagcauuaggaaugcc

SEQ ID NO: 1194428 - RNA, 25 nt, Human
ccacacaagaguauguggugccaag

SEQ ID NO: 1194429 - RNA, 25 nt, Human
ccagggaaucccccaggcauuccuc

SEQ ID NO: 1194430 - RNA, 20 nt, Human
cccacacaagaguauguggu

SEQ ID NO: 1194431 - RNA, 24 nt, Human
ccucuggauagaagcuuuuggucu

SEQ ID NO: 1194432 - RNA, 21 nt, Human
cucaaagauuccauccucaau

SEQ ID NO: 1194433 - RNA, 24 nt, Human
cuccaacgaugaagaaagucacag

SEQ ID NO: 1194434 - RNA, 18 nt, Human
gaacccugagagcugcag

SEQ ID NO: 1194435 - RNA, 20 nt, Human
gaugaagaaagucacaggaa

SEQ ID NO: 1194436 - RNA, 23 nt, Human
gcagacuggacaacagcaucauc

SEQ ID NO: 1194437 - RNA, 23 nt, Human
gcugcaggcaagcucaaugagcu

SEQ ID NO: 1194438 - RNA, 20 nt, Human
ggauugacacaucaaaaaug

SEQ ID NO: 1194439 - RNA, 27 nt, Human
guaacagucuucccaagguaggcuucu

SEQ ID NO: 1194440 - RNA, 20 nt, Human
gugggcccugaggaagcacc

SEQ ID NO: 1194441 - RNA, 22 nt, Human
uaccaagggaaagaggagugac

SEQ ID NO: 1194442 - RNA, 23 nt, Human
uaccaagggaaagaggagugaca

SEQ ID NO: 1194443 - RNA, 19 nt, Human
uacugggcuaugcauuuuc

SEQ ID NO: 1194444 - RNA, 19 nt, Human
uacugggcuaugcauuuuc

SEQ ID NO: 1194445 - RNA, 21 nt, Human
uacugggcuaugcauuuucuu

SEQ ID NO: 1194446 - RNA, 19 nt, Human
uagcagcagcaguuggcuc

SEQ ID NO: 1194447 - RNA, 26 nt, Human
uccaccaccagggaaucccccaggca

SEQ ID NO: 1194448 - RNA, 19 nt, Human
ucccccaggcauuccuccu

SEQ ID NO: 1194449 - RNA, 23 nt, Human
uccucuggauagaagcuuuuggu

SEQ ID NO: 1194450 - RNA, 24 nt, Human
uccucuggauagaagcuuuugguc

SEQ ID NO: 1194451 - RNA, 21 nt, Human
ucguucaguguccauaaaggu

SEQ ID NO: 1194452 - RNA, 25 nt, Human
ugaacuuuuaaaaacugccacagaa

SEQ ID NO: 1194453 - RNA, 19 nt, Human
ugacauccaagagcagcaa

SEQ ID NO: 1194454 - RNA, 26 nt, Human
ugaccacagcauugguaacagucuuc

SEQ ID NO: 1194455 - RNA, 19 nt, Human
ugacucuaccagcaguuuc

SEQ ID NO: 1194456 - RNA, 19 nt, Human
ugagagcugcaggcaagcu

SEQ ID NO: 1194457 - RNA, 21 nt, Human
ugaggcaucacugaucaaucg

SEQ ID NO: 1194458 - RNA, 18 nt, Human
ugcaccauaagcaacagc

SEQ ID NO: 1194459 - RNA, 21 nt, Human
ugccacagaauuugcuacaaa

SEQ ID NO: 1194460 - RNA, 18 nt, Human
ugccugugaguucaaacu

SEQ ID NO: 1194461 - RNA, 22 nt, Human
ugcuucauagcagacuggacaa

SEQ ID NO: 1194462 - RNA, 25 nt, Human
ugcuuuauucauuuuuuugcuuuca

SEQ ID NO: 1194463 - RNA, 23 nt, Human
uggaaaacacccacacaagagua

SEQ ID NO: 1194464 - RNA, 24 nt, Human
uggaccuuaggccugccagcauca

SEQ ID NO: 1194465 - RNA, 26 nt, Human
ugguaacagucuucccaagguaggcu

SEQ ID NO: 1194466 - RNA, 20 nt, Human
uuaaaguaagccggcacugu

SEQ ID NO: 1194467 - RNA, 21 nt, Human
uuauauccuuccccugugcau

SEQ ID NO: 1194468 - RNA, 21 nt, Human
uucucucuucuuuucuagguu

SEQ ID NO: 1194469 - RNA, 20 nt, Human
uucugcucuaaccuuuuugu

SEQ ID NO: 1194470 - RNA, 18 nt, Human
uucuuugaggcaucacug

SEQ ID NO: 1194471 - RNA, 23 nt, Human
uuuccauguacaauaguguuuau

SEQ ID NO: 1194472 - RNA, 26 nt, Human
uuucuaauugaacuuauuugaaucuu

SEQ ID NO: 1194473 - RNA, 18 nt, Human
uuucuagguuaaucuagu

SEQ ID NO: 1194474 - RNA, 19 nt, Human
uuuggccucaaagauucca

SEQ ID NO: 1194475 - RNA, 21 nt, Human
aaaaaagaaaccaaauagagc

SEQ ID NO: 1194476 - RNA, 21 nt, Human
aaaaagaaaccaaauagagca

SEQ ID NO: 1194477 - RNA, 20 nt, Human
aaagaagcuuuaugaccuuu

SEQ ID NO: 1194478 - RNA, 21 nt, Human
aacuaguuugacuggaaauug

SEQ ID NO: 1194479 - RNA, 23 nt, Human
aagaaaagcuucccucaaccucc

SEQ ID NO: 1194480 - RNA, 20 nt, Human
aagaaaccaaauagagcagu

SEQ ID NO: 1194481 - RNA, 22 nt, Human
aagauaagguagacacugaaaa

SEQ ID NO: 1194482 - RNA, 20 nt, Human
acugaccccugcaaaugugc

SEQ ID NO: 1194483 - RNA, 21 nt, Human
acuugagcaaagacacaaagg

SEQ ID NO: 1194484 - RNA, 20 nt, Human
agaaaagcuucccucaaccu

SEQ ID NO: 1194485 - RNA, 20 nt, Human
agaacagccucacaucuaga

SEQ ID NO: 1194486 - RNA, 18 nt, Human
agacacaaaggauaggag

SEQ ID NO: 1194487 - RNA, 22 nt, Human
aggauccugcagccccaggcau

SEQ ID NO: 1194488 - RNA, 22 nt, Human
aggcugacaccaguagccccag

SEQ ID NO: 1194489 - RNA, 18 nt, Human
agggaaaucaggagagcu

SEQ ID NO: 1194490 - RNA, 27 nt, Human
agguagcucagaagcuacacugacccc

SEQ ID NO: 1194491 - RNA, 18 nt, Human
aggugcaccgagcaaggg

SEQ ID NO: 1194492 - RNA, 19 nt, Human
aguguuuauuguauguuag

SEQ ID NO: 1194493 - RNA, 25 nt, Human
auacauacauaugcauaugcauaca

SEQ ID NO: 1194494 - RNA, 22 nt, Human
caauuaagaaaagcuucccuca

SEQ ID NO: 1194495 - RNA, 18 nt, Human
cacaauuaagaaaagcuu

SEQ ID NO: 1194496 - RNA, 18 nt, Human
cagaaaaaauuuccaaga

SEQ ID NO: 1194497 - RNA, 21 nt, Human
cagaaugugauaaaggucuua

SEQ ID NO: 1194498 - RNA, 23 nt, Human
cagcaaguuuucuucccacagcu

SEQ ID NO: 1194499 - RNA, 25 nt, Human
cagcaaguuuucuucccacagcugu

SEQ ID NO: 1194500 - RNA, 24 nt, Human
caggaaccaacuaggauccugcag

SEQ ID NO: 1194501 - RNA, 22 nt, Human
caggcaucagaugagcugcacu

SEQ ID NO: 1194502 - RNA, 18 nt, Human
caucuagaaaagacacag

SEQ ID NO: 1194503 - RNA, 23 nt, Human
ccaacuaggauccugcagcccca

SEQ ID NO: 1194504 - RNA, 22 nt, Human
ccaccaggcugacaccaguagc

SEQ ID NO: 1194505 - RNA, 21 nt, Human
cccaggcucaguauaccaaaa

SEQ ID NO: 1194506 - RNA, 20 nt, Human
cccaguacugggcaggcccc

SEQ ID NO: 1194507 - RNA, 21 nt, Human
ccccagacuccaggcuuuacc

SEQ ID NO: 1194508 - RNA, 22 nt, Human
ccccugcaaaugugccaagaac

SEQ ID NO: 1194509 - RNA, 18 nt, Human
cccuaugaccccagacuc

SEQ ID NO: 1194510 - RNA, 21 nt, Human
ccuaugaccccagacuccagg

SEQ ID NO: 1194511 - RNA, 20 nt, Human
ccuggaguugacauucuacu

SEQ ID NO: 1194512 - RNA, 19 nt, Human
cuagcauguuacaacugau

SEQ ID NO: 1194513 - RNA, 22 nt, Human
cucagaagcuacacugaccccu

SEQ ID NO: 1194514 - RNA, 20 nt, Human
cuggaaaauuaaauacagca

SEQ ID NO: 1194515 - RNA, 24 nt, Human
gaaaauuauaauuuuucuccaaua

SEQ ID NO: 1194516 - RNA, 19 nt, Human
gaagcuacacugaccccug

SEQ ID NO: 1194517 - RNA, 19 nt, Human
gaccccugcaaaugugcca

SEQ ID NO: 1194518 - RNA, 20 nt, Human
gauaggagaaagacagacac

SEQ ID NO: 1194519 - RNA, 20 nt, Human
gggaagaagagggaagugag

SEQ ID NO: 1194520 - RNA, 23 nt, Human
ggggaggugggacuugagcaaag

SEQ ID NO: 1194521 - RNA, 19 nt, Human
guccaacacuggacgugcc

SEQ ID NO: 1194522 - RNA, 19 nt, Human
gugccaagaacagccucac

SEQ ID NO: 1194523 - RNA, 22 nt, Human
uaaaaacagcaaguuuucuucc

SEQ ID NO: 1194524 - RNA, 22 nt, Human
uaaaaguuucaacuaguuugac

SEQ ID NO: 1194525 - RNA, 21 nt, Human
uaaauaaaugaucuagcaugu

SEQ ID NO: 1194526 - RNA, 27 nt, Human
uaacauuuacuaaagaagcuuuaugac

SEQ ID NO: 1194527 - RNA, 22 nt, Human
uaagaaaagcuucccucaaccc

SEQ ID NO: 1194528 - RNA, 20 nt, Human
uacacaauacucuuguguaa

SEQ ID NO: 1194529 - RNA, 22 nt, Human
uacggacuucauuaacaaacau

SEQ ID NO: 1194530 - RNA, 25 nt, Human
uagagcagaguuagggaaaucagga

SEQ ID NO: 1194531 - RNA, 23 nt, Human
uaggauccugcagccccaggcau

SEQ ID NO: 1194532 - RNA, 19 nt, Human
uaugaccccagacuccagg

SEQ ID NO: 1194533 - RNA, 18 nt, Human
uaugcauaugcauacaua

SEQ ID NO: 1194534 - RNA, 27 nt, Human
uaugcauaugcauacauauacacuuuu

SEQ ID NO: 1194535 - RNA, 24 nt, Human
uauuauggacucaaaguuaaauuu

SEQ ID NO: 1194536 - RNA, 23 nt, Human
uauucuaaaaguuucaacuaguu

SEQ ID NO: 1194537 - RNA, 21 nt, Human
uccaagauuuauuauggacuc

SEQ ID NO: 1194538 - RNA, 24 nt, Human
ucccaaggucugucacaggaaccc

SEQ ID NO: 1194539 - RNA, 26 nt, Human
ucuauacauacauaugcauaugcaua

SEQ ID NO: 1194540 - RNA, 23 nt, Human
ucuuuuaugcuguacaauuuccu

SEQ ID NO: 1194541 - RNA, 21 nt, Human
ugaagcagaggcucuaaaaac

SEQ ID NO: 1194542 - RNA, 19 nt, Human
ugagggaagaagagggaag

SEQ ID NO: 1194543 - RNA, 21 nt, Human
ugcaaaugugccaagaacagc

SEQ ID NO: 1194544 - RNA, 20 nt, Human
ugcccuggggauuugaaauu

SEQ ID NO: 1194545 - RNA, 18 nt, Human
ugcugugagguccaacac

SEQ ID NO: 1194546 - RNA, 23 nt, Human
uggaaaggguacagaaugugaua

SEQ ID NO: 1194547 - RNA, 19 nt, Human
uggagggagaaacuuucug

SEQ ID NO: 1194548 - RNA, 18 nt, Human
ugggacuugagcaaagac

SEQ ID NO: 1194549 - RNA, 18 nt, Human
ugggauauaucagugaaa

SEQ ID NO: 1194550 - RNA, 19 nt, Human
ugggcaggccccuaugacc

SEQ ID NO: 1194551 - RNA, 21 nt, Human
ugugccaagaacagccucaca

SEQ ID NO: 1194552 - RNA, 28 nt, Human
uuagaaaauucugacuuugcaauuuuca

SEQ ID NO: 1194553 - RNA, 25 nt, Human
uuagcaguggucagauauuaugaga

SEQ ID NO: 1194554 - RNA, 25 nt, Human
uucccacagcuguuagcagugguca

SEQ ID NO: 1194555 - RNA, 22 nt, Human
uugcuguaguaaaaaaaagaaa

SEQ ID NO: 1194556 - RNA, 20 nt, Human
uuuaugcuguacaauuuccu

SEQ ID NO: 1194557 - RNA, 22 nt, Human
aaacagauuccugauggauucu

SEQ ID NO: 1194558 - RNA, 21 nt, Human
caagaaauacccaauugagua

SEQ ID NO: 1194559 - RNA, 21 nt, Human
cagcucccaggucuccagccc

SEQ ID NO: 1194560 - RNA, 22 nt, Human
caguucauuaagaaauauugau

SEQ ID NO: 1194561 - RNA, 23 nt, Human
cuuuacuuucuuaaacuuuuggu

SEQ ID NO: 1194562 - RNA, 20 nt, Human
ugaauuuacagauguugcca

SEQ ID NO: 1194563 - RNA, 21 nt, Human
ugauggauucuucaucagcuc

SEQ ID NO: 1194564 - RNA, 26 nt, Human
ugcuguacuucagcucugaggaacac

SEQ ID NO: 1194565 - RNA, 21 nt, Human
aacauaaagacuaacaaggaa

SEQ ID NO: 1194566 - RNA, 24 nt, Human
accaagaaauauuuuggaaaaaaa

SEQ ID NO: 1194567 - RNA, 24 nt, Human
agacauuuagcuuuauuagcaacg

SEQ ID NO: 1194568 - RNA, 19 nt, Human
augcauauuucaaaauaug

SEQ ID NO: 1194569 - RNA, 20 nt, Human
cacaaauauacaccugcacu

SEQ ID NO: 1194570 - RNA, 23 nt, Human
cagaaauauuccaaaagaugaaa

SEQ ID NO: 1194571 - RNA, 25 nt, Human
ccucagaaauauuccaaaagaugaa

SEQ ID NO: 1194572 - RNA, 26 nt, Human
gaaccaauuccaauguucgcaaccaa

SEQ ID NO: 1194573 - RNA, 25 nt, Human
uauacaauguuuaguugucaauuaa

SEQ ID NO: 1194574 - RNA, 24 nt, Human
uauguuguauaccauaaauauaua

SEQ ID NO: 1194575 - RNA, 23 nt, Human
ucaaaauauguuguauaccauaa

SEQ ID NO: 1194576 - RNA, 24 nt, Human
ucaaaguucuaccugagaccaaga

SEQ ID NO: 1194577 - RNA, 22 nt, Human
uccaaaagaugaaauaauaguc

SEQ ID NO: 1194578 - RNA, 23 nt, Human
uccaaaagaugaaauaauagucc

SEQ ID NO: 1194579 - RNA, 24 nt, Human
ucgcaaccaaaaaacauucauaac

SEQ ID NO: 1194580 - RNA, 21 nt, Human
uguauaccauaaauauauaca

SEQ ID NO: 1194581 - RNA, 20 nt, Human
uuaaaacauaaagacuaaca

SEQ ID NO: 1194582 - RNA, 23 nt, Human
acucugcugugaaugaagaaucu

SEQ ID NO: 1194583 - RNA, 20 nt, Human
cacagauuaggaaacucugc

SEQ ID NO: 1194584 - RNA, 18 nt, Human
ccuuugaaaauauuacug

SEQ ID NO: 1194585 - RNA, 20 nt, Human
cgaccgaguaucucaucacc

SEQ ID NO: 1194586 - RNA, 26 nt, Human
cgaguaucucaucacccggcaguccc

SEQ ID NO: 1194587 - RNA, 23 nt, Human
cgccgaccgaguaucucaucacc

SEQ ID NO: 1194588 - RNA, 18 nt, Human
uucugguguuuaugauga

SEQ ID NO: 1194589 - RNA, 21 nt, Human
uucugguguuuaugaugacug

SEQ ID NO: 1194590 - RNA, 19 nt, Human
ucagaaaaaugugagagca

SEQ ID NO: 1194591 - RNA, 23 nt, Human
agccaccgcgguuccccauccca

SEQ ID NO: 1194592 - RNA, 21 nt, Human
cacuccuuauccucggccuug

SEQ ID NO: 1194593 - RNA, 19 nt, Human
ccacugccgaaaccuccgc

SEQ ID NO: 1194594 - RNA, 19 nt, Human
cccagggccaccagggccu

SEQ ID NO: 1194595 - RNA, 20 nt, Human
ccuccggacccuccucgcug

SEQ ID NO: 1194596 - RNA, 19 nt, Human
cgccggaugccacugccga

SEQ ID NO: 1194597 - RNA, 19 nt, Human
cggaugccacugccgaaac

SEQ ID NO: 1194598 - RNA, 23 nt, Human
ucccagggccaccagggccuccg

SEQ ID NO: 1194599 - RNA, 25 nt, Human
uccgcggaagccaccgcgguucccc

SEQ ID NO: 1194600 - RNA, 19 nt, Human
ucuuucuuucuuuccuuuu

SEQ ID NO: 1194601 - RNA, 18 nt, Human
ucuuucuuucuuucuuuc

SEQ ID NO: 1194602 - RNA, 23 nt, Human
ucuuucuuucuuucuuuccuuuu

SEQ ID NO: 1194603 - RNA, 19 nt, Human
aacagcacuacucauuacc

SEQ ID NO: 1194604 - RNA, 19 nt, Human
aagcaggcaugauuguaau

SEQ ID NO: 1194605 - RNA, 25 nt, Human
aaugcaaauaugcuauagaacuaaa

SEQ ID NO: 1194606 - RNA, 19 nt, Human
acacaaagcuaaaccugua

SEQ ID NO: 1194607 - RNA, 20 nt, Human
augcaaauaugcuauagaac

SEQ ID NO: 1194608 - RNA, 18 nt, Human
cauucaaacggccuguca

SEQ ID NO: 1194609 - RNA, 18 nt, Human
ccaaagaaggaaacugga

SEQ ID NO: 1194610 - RNA, 22 nt, Human
ccucagaaauggugugguccau

SEQ ID NO: 1194611 - RNA, 21 nt, Human
ccucuguaaaaccaggauaag

SEQ ID NO: 1194612 - RNA, 22 nt, Human
cuaaaguaauaugaacagcacu

SEQ ID NO: 1194613 - RNA, 20 nt, Human
cuacaacuauuuggaaaucu

SEQ ID NO: 1194614 - RNA, 21 nt, Human
cucuccaaaauucuguuugag

SEQ ID NO: 1194615 - RNA, 25 nt, Human
cuuaauaauauguucaaagauaaaa

SEQ ID NO: 1194616 - RNA, 18 nt, Human
ggaaagucaguaaaucuc

SEQ ID NO: 1194617 - RNA, 19 nt, Human
gugaauuuuaaaccucaga

SEQ ID NO: 1194618 - RNA, 19 nt, Human
uaaaaaugcaaauaugcua

SEQ ID NO: 1194619 - RNA, 23 nt, Human
uaaaaccaacauguccagugcua

SEQ ID NO: 1194620 - RNA, 19 nt, Human
uaauaguaacuacaguccc

SEQ ID NO: 1194621 - RNA, 21 nt, Human
uagaaagguccucaugcagca

SEQ ID NO: 1194622 - RNA, 24 nt, Human
uauucuaggaaagucaguaaaucu

SEQ ID NO: 1194623 - RNA, 20 nt, Human
uauuuggaaaucugaacaag

SEQ ID NO: 1194624 - RNA, 19 nt, Human
ucacacaaagcuaaaccug

SEQ ID NO: 1194625 - RNA, 18 nt, Human
ucacagauguuauguucu

SEQ ID NO: 1194626 - RNA, 21 nt, Human
ucaugaauggucaugguaauc

SEQ ID NO: 1194627 - RNA, 23 nt, Human
ucaugguaaucucuccaaaauuc

SEQ ID NO: 1194628 - RNA, 21 nt, Human
ucccagauguugacaguaugu

SEQ ID NO: 1194629 - RNA, 24 nt, Human
ucgcuggcucugggaaagcuacau

SEQ ID NO: 1194630 - RNA, 21 nt, Human
ucugcaguuugagaguccuuc

SEQ ID NO: 1194631 - RNA, 19 nt, Human
ugagaagaccauuucuggc

SEQ ID NO: 1194632 - RNA, 25 nt, Human
ugcaguuugagaguccuucgauuca

SEQ ID NO: 1194633 - RNA, 20 nt, Human
ugccaaagaaggaaacugga

SEQ ID NO: 1194634 - RNA, 22 nt, Human
ugggaaagcuacaugugcauaa

SEQ ID NO: 1194635 - RNA, 24 nt, Human
uggugccaucugcuuaauaauaug

SEQ ID NO: 1194636 - RNA, 19 nt, Human
uggugugguccauuaggcu

SEQ ID NO: 1194637 - RNA, 22 nt, Human
uguccauugauuucacagaugu

SEQ ID NO: 1194638 - RNA, 20 nt, Human
uuaaaaaugcaaauaugcua

SEQ ID NO: 1194639 - RNA, 18 nt, Human
uuggugccaucugcuuaa

SEQ ID NO: 1194640 - RNA, 18 nt, Human
uuucacacaaagcuaaac

SEQ ID NO: 1194641 - RNA, 25 nt, Human
uuuguccauuuuuaaagauaaaacc

SEQ ID NO: 1194642 - RNA, 21 nt, Human
caucaaaacaaaacaagcuga

SEQ ID NO: 1194643 - RNA, 19 nt, Human
uccuggagaggguacacac

SEQ ID NO: 1194644 - RNA, 21 nt, Human
uuauugacaucaaaacaaaac

SEQ ID NO: 1194645 - RNA, 18 nt, Human
uugacaucaaaacaaaac

SEQ ID NO: 1194646 - RNA, 21 nt, Human
uugacaucaaaacaaaacaag

SEQ ID NO: 1194647 - RNA, 23 nt, Human
agauggaauguuugcaagugcua

SEQ ID NO: 1194648 - RNA, 20 nt, Human
agcuucucuucagccgaaga

SEQ ID NO: 1194649 - RNA, 19 nt, Human
aggagcagugguagguggc

SEQ ID NO: 1194650 - RNA, 20 nt, Human
cagugguagguggcuggggg

SEQ ID NO: 1194651 - RNA, 21 nt, Human
cccuaugauaugccagucacu

SEQ ID NO: 1194652 - RNA, 22 nt, Human
ccggagugagcagaucuucuuu

SEQ ID NO: 1194653 - RNA, 18 nt, Human
cggagugagcagaucuuc

SEQ ID NO: 1194654 - RNA, 21 nt, Human
cugguauguauugggcauccc

SEQ ID NO: 1194655 - RNA, 22 nt, Human
cuucucuucagccgaagaugag

SEQ ID NO: 1194656 - RNA, 20 nt, Human
gagugagcagaucuucuuug

SEQ ID NO: 1194657 - RNA, 22 nt, Human
gaugagaaaaacaauccuaaga

SEQ ID NO: 1194658 - RNA, 18 nt, Human
gggaugucucaggauucu

SEQ ID NO: 1194659 - RNA, 25 nt, Human
ggggaugucucaggauucucucagu

SEQ ID NO: 1194660 - RNA, 25 nt, Human
gguagguggcuggggaugucucagg

SEQ ID NO: 1194661 - RNA, 23 nt, Human
uacagggccaugccaggaagaac

SEQ ID NO: 1194662 - RNA, 26 nt, Human
ucaggauucucucaguagcuucucuc

SEQ ID NO: 1194663 - RNA, 21 nt, Human
ucuuugcuuggaacaggagcu

SEQ ID NO: 1194664 - RNA, 18 nt, Human
ugccaggaagaacagugg

SEQ ID NO: 1194665 - RNA, 18 nt, Human
ugguauguauugggcauc

SEQ ID NO: 1194666 - RNA, 22 nt, Human
uuugcaagugcuagcuucucuu

SEQ ID NO: 1194667 - RNA, 22 nt, Human
aaaacccagcccgcgcaaccgc

SEQ ID NO: 1194668 - RNA, 18 nt, Human
aaacaugcugaauuguuu

SEQ ID NO: 1194669 - RNA, 20 nt, Human
aaacccagcccgcgcaaccg

SEQ ID NO: 1194670 - RNA, 24 nt, Human
aauaaaaauuaaaggaaaaaaucu

SEQ ID NO: 1194671 - RNA, 21 nt, Human
caaaaacccagcccgcgcaac

SEQ ID NO: 1194672 - RNA, 19 nt, Human
cccgcgcaaccgcugggag

SEQ ID NO: 1194673 - RNA, 21 nt, Human
cccgcgcaaccgcugggagca

SEQ ID NO: 1194674 - RNA, 21 nt, Human
ccucagcaguauccguugccu

SEQ ID NO: 1194675 - RNA, 20 nt, Human
cuccaaaaacccagcccgcg

SEQ ID NO: 1194676 - RNA, 22 nt, Human
cuucuuguguuuucuuuuugau

SEQ ID NO: 1194677 - RNA, 24 nt, Human
cuuuuccauaauaaaaauuaaagg

SEQ ID NO: 1194678 - RNA, 18 nt, Human
gagcaaaggaaaccaugg

SEQ ID NO: 1194679 - RNA, 18 nt, Human
uaaaugacauuauaccug

SEQ ID NO: 1194680 - RNA, 22 nt, Human
ucuuucuuccuuucuuggaccu

SEQ ID NO: 1194681 - RNA, 25 nt, Human
ugccuuugcuccaaaaacccagccc

SEQ ID NO: 1194682 - RNA, 22 nt, Human
uggcaauuucccacaaguuguu

SEQ ID NO: 1194683 - RNA, 18 nt, Human
ugugucuucaucacugga

SEQ ID NO: 1194684 - RNA, 19 nt, Human
uguuucagaaucagaguca

SEQ ID NO: 1194685 - RNA, 21 nt, Human
uuuccuuuuucuuagcugucu

SEQ ID NO: 1194686 - RNA, 25 nt, Human
uuuuucuuagcugucuuugcucuca

SEQ ID NO: 1194687 - RNA, 25 nt, Human
aaauggacucuuucuucucaaacuu

SEQ ID NO: 1194688 - RNA, 18 nt, Human
agaagaucugggacgccu

SEQ ID NO: 1194689 - RNA, 18 nt, Human
agacuaggaaggcuggca

SEQ ID NO: 1194690 - RNA, 23 nt, Human
aggaguguggguaggaagacuag

SEQ ID NO: 1194691 - RNA, 19 nt, Human
caaaggccaccaccaaaug

SEQ ID NO: 1194692 - RNA, 23 nt, Human
caacgccaaaggccaccaccaaa

SEQ ID NO: 1194693 - RNA, 20 nt, Human
caccaagacagcugagaaga

SEQ ID NO: 1194694 - RNA, 22 nt, Human
caccaagacagcugagaagauc

SEQ ID NO: 1194695 - RNA, 20 nt, Human
cagcugagaagaucugggac

SEQ ID NO: 1194696 - RNA, 23 nt, Human
caucuuugcuuaagcgcuuaaaa

SEQ ID NO: 1194697 - RNA, 19 nt, Human
cgccaaaggccaccaccaa

SEQ ID NO: 1194698 - RNA, 20 nt, Human
cgccaaaggccaccaccaaa

SEQ ID NO: 1194699 - RNA, 20 nt, Human
gacagcagguaggagugugg

SEQ ID NO: 1194700 - RNA, 18 nt, Human
uagcuugcugacaagggu

SEQ ID NO: 1194701 - RNA, 18 nt, Human
uaggaagacuaggaaggc

SEQ ID NO: 1194702 - RNA, 21 nt, Human
uaggaguguggguaggaagac

SEQ ID NO: 1194703 - RNA, 27 nt, Human
ugacaaggguguaggacucgccgcugg

SEQ ID NO: 1194704 - RNA, 18 nt, Human
ugacagcacuuuucaggc

SEQ ID NO: 1194705 - RNA, 18 nt, Human
ugacagcagguaggagug

SEQ ID NO: 1194706 - RNA, 20 nt, Human
ugcacgccuucuucuuuaca

SEQ ID NO: 1194707 - RNA, 19 nt, Human
ugcugacaaggguguagga

SEQ ID NO: 1194708 - RNA, 19 nt, Human
uggaauccauuucuuucaa

SEQ ID NO: 1194709 - RNA, 19 nt, Human
uuaaaaaugauggcuuucu

SEQ ID NO: 1194710 - RNA, 23 nt, Human
uucaaaauggacucuuucuucuc

SEQ ID NO: 1194711 - RNA, 23 nt, Human
uucacugacuguaugauugauga

SEQ ID NO: 1194712 - RNA, 23 nt, Human
uucacugacuguaugauugauga

SEQ ID NO: 1194713 - RNA, 24 nt, Human
ccucucugguucuaggaugggggu

SEQ ID NO: 1194714 - RNA, 18 nt, Human
cgcuccugggaaacccgg

SEQ ID NO: 1194715 - RNA, 21 nt, Human
cgcuccugggaaacccgggaa

SEQ ID NO: 1194716 - RNA, 19 nt, Human
cuaucccaucuggcuuagu

SEQ ID NO: 1194717 - RNA, 21 nt, Human
cucacuguccaccacagucca

SEQ ID NO: 1194718 - RNA, 26 nt, Human
gcuucguguuggguuacugcggucuc

SEQ ID NO: 1194719 - RNA, 22 nt, Human
ggaaucaagaucauuguccucu

SEQ ID NO: 1194720 - RNA, 23 nt, Human
gggaaucaagaucauuguccucu

SEQ ID NO: 1194721 - RNA, 21 nt, Human
gggccaagacgcuccugggaa

SEQ ID NO: 1194722 - RNA, 22 nt, Human
guagaucugggcuggggcugua

SEQ ID NO: 1194723 - RNA, 18 nt, Human
uaggauggggguccacag

SEQ ID NO: 1194724 - RNA, 20 nt, Human
ucacagagaugcucuugaag

SEQ ID NO: 1194725 - RNA, 21 nt, Human
ucgcagaaaggggaaaccugc

SEQ ID NO: 1194726 - RNA, 18 nt, Human
ucucugguucuaggaugg

SEQ ID NO: 1194727 - RNA, 21 nt, Human
ucugggcuggggcuguagaac

SEQ ID NO: 1194728 - RNA, 20 nt, Human
aaaaaaccuaucacacagga

SEQ ID NO: 1194729 - RNA, 20 nt, Human
aaagaaacagcucauaagag

SEQ ID NO: 1194730 - RNA, 24 nt, Human
aaagugcugggauuacaggcguga

SEQ ID NO: 1194731 - RNA, 24 nt, Human
aaagugcugggauuacagguguga

SEQ ID NO: 1194732 - RNA, 20 nt, Human
aacaaauucaguucaaaacc

SEQ ID NO: 1194733 - RNA, 20 nt, Human
aacaugaugacagcaacaac

SEQ ID NO: 1194734 - RNA, 22 nt, Human
aagaagcugggauuacaggcau

SEQ ID NO: 1194735 - RNA, 24 nt, Human
aagaagcugggauuacaggcaugc

SEQ ID NO: 1194736 - RNA, 20 nt, Human
aagauggcaaugggaguggg

SEQ ID NO: 1194737 - RNA, 24 nt, Human
aagcgauucuugugccuuggccuc

SEQ ID NO: 1194738 - RNA, 25 nt, Human
aagcgauucuugugccuuggccucc

SEQ ID NO: 1194739 - RNA, 19 nt, Human
aaguagcugggauuacagg

SEQ ID NO: 1194740 - RNA, 25 nt, Human
aaguagcugggauuacaggcgccca

SEQ ID NO: 1194741 - RNA, 18 nt, Human
aagugcugggauuacagg

SEQ ID NO: 1194742 - RNA, 19 nt, Human
aagugcugggauuacaggc

SEQ ID NO: 1194743 - RNA, 19 nt, Human
aagugcugggauuacaggc

SEQ ID NO: 1194744 - RNA, 19 nt, Human
aagugcugggauuacaggu

SEQ ID NO: 1194745 - RNA, 26 nt, Human
aagugcugggauuacaggugugagcc

SEQ ID NO: 1194746 - RNA, 24 nt, Human
acagaaaaaaaccuaucacacagg

SEQ ID NO: 1194747 - RNA, 23 nt, Human
acaggcgcccaccaccacgcccg

SEQ ID NO: 1194748 - RNA, 19 nt, Human
acaggggaggaaagaggag

SEQ ID NO: 1194749 - RNA, 22 nt, Human
accaucuuggccaggcuggucu

SEQ ID NO: 1194750 - RNA, 22 nt, Human
accauguuggccaggcuggucu

SEQ ID NO: 1194751 - RNA, 19 nt, Human
acccaggcuggagugcagu

SEQ ID NO: 1194752 - RNA, 25 nt, Human
acccgccucagccucccaaagugcu

SEQ ID NO: 1194753 - RNA, 20 nt, Human
acgggauuucaccaucuugg

SEQ ID NO: 1194754 - RNA, 24 nt, Human
acgggauuucaccaucuuggccag

SEQ ID NO: 1194755 - RNA, 18 nt, Human
acgggguuucaccauguu

SEQ ID NO: 1194756 - RNA, 23 nt, Human
acgggguuucaccauguuggcca

SEQ ID NO: 1194757 - RNA, 24 nt, Human
acgggguuucaccauguuggccag

SEQ ID NO: 1194758 - RNA, 21 nt, Human
acuuuauguuucaguuuacua

SEQ ID NO: 1194759 - RNA, 24 nt, Human
acuuuuguauuuuuaguagagacg

SEQ ID NO: 1194760 - RNA, 23 nt, Human
agaaaaaaaccuaucacacagga

SEQ ID NO: 1194761 - RNA, 24 nt, Human
agagucacaaaaaccucagccucc

SEQ ID NO: 1194762 - RNA, 21 nt, Human
agauuggggaggggucugugu

SEQ ID NO: 1194763 - RNA, 22 nt, Human
agcaaaauagagauguuuuuga

SEQ ID NO: 1194764 - RNA, 21 nt, Human
aggaaaagauacagaaaaaaa

SEQ ID NO: 1194765 - RNA, 23 nt, Human
aggaaaagauacagaaaaaaacc

SEQ ID NO: 1194766 - RNA, 25 nt, Human
aggaaaaugaauauuuauucaaugu

SEQ ID NO: 1194767 - RNA, 22 nt, Human
aggagggagguagggauaggcc

SEQ ID NO: 1194768 - RNA, 22 nt, Human
aggaugaagaacagcaaagaaa

SEQ ID NO: 1194769 - RNA, 23 nt, Human
aggaugaagaacagcaaagaaaa

SEQ ID NO: 1194770 - RNA, 18 nt, Human
aggcaagggaaagguggg

SEQ ID NO: 1194771 - RNA, 18 nt, Human
aggcagcaagagagcagg

SEQ ID NO: 1194772 - RNA, 20 nt, Human
aggcaugcaccaccacaccc

SEQ ID NO: 1194773 - RNA, 25 nt, Human
aggcuggagugcaguggcacgaucu

SEQ ID NO: 1194774 - RNA, 21 nt, Human
aggggaggaaagaggaggggu

SEQ ID NO: 1194775 - RNA, 22 nt, Human
aguaaagguaaagaacugugga

SEQ ID NO: 1194776 - RNA, 20 nt, Human
agugcaguggcacgaucuug

SEQ ID NO: 1194777 - RNA, 23 nt, Human
agugcaguggcacgaucuuggcu

SEQ ID NO: 1194778 - RNA, 24 nt, Human
agugcaguggcacgaucuuggcuc

SEQ ID NO: 1194779 - RNA, 18 nt, Human
agugcugggauuacaggc

SEQ ID NO: 1194780 - RNA, 22 nt, Human
auaaagccaaaugcacugaacu

SEQ ID NO: 1194781 - RNA, 19 nt, Human
auccuaagggaauaaucug

SEQ ID NO: 1194782 - RNA, 24 nt, Human
augacagcaacaacgaggaugaag

SEQ ID NO: 1194783 - RNA, 22 nt, Human
augcaggauaaagaaacagcuc

SEQ ID NO: 1194784 - RNA, 19 nt, Human
auggucaugaaugaauggg

SEQ ID NO: 1194785 - RNA, 18 nt, Human
auuaccaucagguugcuu

SEQ ID NO: 1194786 - RNA, 24 nt, Human
auuuuuguauuuuuaguagagacg

SEQ ID NO: 1194787 - RNA, 24 nt, Human
caaaaaccucagccuccuucggga

SEQ ID NO: 1194788 - RNA, 24 nt, Human
caaagugcugggauuacaggcgug

SEQ ID NO: 1194789 - RNA, 24 nt, Human
caaagugcugggauuacaggugug

SEQ ID NO: 1194790 - RNA, 24 nt, Human
caacaaauucaguucaaaaccaca

SEQ ID NO: 1194791 - RNA, 26 nt, Human
caagcaauucucugccucagccuccc

SEQ ID NO: 1194792 - RNA, 20 nt, Human
caauacugaaaaucuggaaa

SEQ ID NO: 1194793 - RNA, 24 nt, Human
caccacgcccggcuaauuuuugua

SEQ ID NO: 1194794 - RNA, 21 nt, Human
caccaucuuggccaggcuggu

SEQ ID NO: 1194795 - RNA, 23 nt, Human
caccaucuuggccaggcuggucu

SEQ ID NO: 1194796 - RNA, 24 nt, Human
caccaucuuggccaggcuggucuu

SEQ ID NO: 1194797 - RNA, 21 nt, Human
caccauguuggccaggcuggu

SEQ ID NO: 1194798 - RNA, 23 nt, Human
caccauguuggccaggcuggucu

SEQ ID NO: 1194799 - RNA, 24 nt, Human
caccauguuggccaggcuggucuu

SEQ ID NO: 1194800 - RNA, 27 nt, Human
caccauguuggccaggcuggucuugaa

SEQ ID NO: 1194801 - RNA, 23 nt, Human
cacccgccucagccucccaaagu

SEQ ID NO: 1194802 - RNA, 21 nt, Human
cacugcaaccuccgccuccug

SEQ ID NO: 1194803 - RNA, 23 nt, Human
cacugcaaccuccgccuccuggg

SEQ ID NO: 1194804 - RNA, 21 nt, Human
caggcgcccaccaccacgccc

SEQ ID NO: 1194805 - RNA, 22 nt, Human
caguaguaggcacugacggugu

SEQ ID NO: 1194806 - RNA, 19 nt, Human
caguggcacgaucuuggcu

SEQ ID NO: 1194807 - RNA, 24 nt, Human
cauguuggccaggcuggucuugaa

SEQ ID NO: 1194808 - RNA, 20 nt, Human
ccaaagugcugggauuacag

SEQ ID NO: 1194809 - RNA, 21 nt, Human
ccaaagugcugggauuacagg

SEQ ID NO: 1194810 - RNA, 21 nt, Human
ccaaagugcugggauuacagg

SEQ ID NO: 1194811 - RNA, 22 nt, Human
ccaaagugcugggauuacaggc

SEQ ID NO: 1194812 - RNA, 22 nt, Human
ccaaagugcugggauuacaggc

SEQ ID NO: 1194813 - RNA, 24 nt, Human
ccaaagugcugggauuacaggcgu

SEQ ID NO: 1194814 - RNA, 24 nt, Human
ccaaagugcugggauuacaggugu

SEQ ID NO: 1194815 - RNA, 24 nt, Human
ccaagaagcugggauuacaggcau

SEQ ID NO: 1194816 - RNA, 22 nt, Human
ccaaguagcugggauuacaggc

SEQ ID NO: 1194817 - RNA, 26 nt, Human
ccacccgccucagccucccaaagugc

SEQ ID NO: 1194818 - RNA, 20 nt, Human
ccaccgcauccgacuucuaa

SEQ ID NO: 1194819 - RNA, 19 nt, Human
cccaagaagcugggauuac

SEQ ID NO: 1194820 - RNA, 24 nt, Human
cccaagaagcugggauuacaggca

SEQ ID NO: 1194821 - RNA, 23 nt, Human
cccaaguagcugggauuacaggc

SEQ ID NO: 1194822 - RNA, 24 nt, Human
cccaaguagcugggauuacaggcg

SEQ ID NO: 1194823 - RNA, 22 nt, Human
cccacaauagagucuagagagu

SEQ ID NO: 1194824 - RNA, 22 nt, Human
cccccuaaggcagcaagagagc

SEQ ID NO: 1194825 - RNA, 24 nt, Human
ccccuaaggcagcaagagagcagg

SEQ ID NO: 1194826 - RNA, 24 nt, Human
ccgccucagccucccaaagugcug

SEQ ID NO: 1194827 - RNA, 26 nt, Human
ccgccuccuggguucaagcaauucuu

SEQ ID NO: 1194828 - RNA, 18 nt, Human
ccuaaccucaagugaucc

SEQ ID NO: 1194829 - RNA, 23 nt, Human
ccuaaccucaagugauccgccug

SEQ ID NO: 1194830 - RNA, 23 nt, Human
ccuaagggaauaaucugaaauac

SEQ ID NO: 1194831 - RNA, 19 nt, Human
ccuccgccuccuggguuca

SEQ ID NO: 1194832 - RNA, 24 nt, Human
ccuccuggguucaagcaauucucu

SEQ ID NO: 1194833 - RNA, 20 nt, Human
ccugaccucgugauccaccc

SEQ ID NO: 1194834 - RNA, 20 nt, Human
ccuggguucaagcaauucuc

SEQ ID NO: 1194835 - RNA, 24 nt, Human
cgccucagccucccaaagugcugg

SEQ ID NO: 1194836 - RNA, 24 nt, Human
cgcucugucacccaggcuggagug

SEQ ID NO: 1194837 - RNA, 24 nt, Human
cguacaaagagaaccaugaucaag

SEQ ID NO: 1194838 - RNA, 24 nt, Human
cgugauccacccgccucagccucc

SEQ ID NO: 1194839 - RNA, 26 nt, Human
cuaacgcacuggguuuuaacaagccc

SEQ ID NO: 1194840 - RNA, 24 nt, Human
cucacugcaaccuccgccuccugg

SEQ ID NO: 1194841 - RNA, 24 nt, Human
cucagccucccaaguagcugggau

SEQ ID NO: 1194842 - RNA, 26 nt, Human
cuccuaaccucaagugauccgccugc

SEQ ID NO: 1194843 - RNA, 24 nt, Human
cuccugaccucgugauccacccgc

SEQ ID NO: 1194844 - RNA, 21 nt, Human
cuccuggguucaagcaauucu

SEQ ID NO: 1194845 - RNA, 24 nt, Human
cucgcucugucacccaggcuggag

SEQ ID NO: 1194846 - RNA, 22 nt, Human
cucuaagccaaguaaagguaaa

SEQ ID NO: 1194847 - RNA, 20 nt, Human
cucugacugcucaacagagg

SEQ ID NO: 1194848 - RNA, 24 nt, Human
cucugccucagccucccaaguagc

SEQ ID NO: 1194849 - RNA, 23 nt, Human
cugcaaccuccgccuccuggguu

SEQ ID NO: 1194850 - RNA, 24 nt, Human
cugcaaccuccgccuccuggguuc

SEQ ID NO: 1194851 - RNA, 23 nt, Human
cugccucagccucccaaguagcu

SEQ ID NO: 1194852 - RNA, 22 nt, Human
cuggaaauagccuaaauuucua

SEQ ID NO: 1194853 - RNA, 21 nt, Human
cugggccucccaaagugcugg

SEQ ID NO: 1194854 - RNA, 19 nt, Human
cuggucagccaaggaaagg

SEQ ID NO: 1194855 - RNA, 22 nt, Human
cuggucagccaaggaaaggggc

SEQ ID NO: 1194856 - RNA, 19 nt, Human
cugucacccaggcuggagu

SEQ ID NO: 1194857 - RNA, 21 nt, Human
cugucagcuaaaccacaugaa

SEQ ID NO: 1194858 - RNA, 18 nt, Human
cuuagugggguuggggaa

SEQ ID NO: 1194859 - RNA, 24 nt, Human
cuuggccucccaagaagcugggau

SEQ ID NO: 1194860 - RNA, 25 nt, Human
cuugugccuuggccucccaagaagc

SEQ ID NO: 1194861 - RNA, 20 nt, Human
cuuuuguauuuuuaguagag

SEQ ID NO: 1194862 - RNA, 23 nt, Human
gaaagaaccccugcucaugugaa

SEQ ID NO: 1194863 - RNA, 18 nt, Human
gaacaugaugacagcaac

SEQ ID NO: 1194864 - RNA, 18 nt, Human
gaagcugggauuacaggc

SEQ ID NO: 1194865 - RNA, 26 nt, Human
gacaggggaggaaagaggaggggugg

SEQ ID NO: 1194866 - RNA, 22 nt, Human
gaccucgugauccacccgccuc

SEQ ID NO: 1194867 - RNA, 24 nt, Human
gaccucgugauccacccgccucag

SEQ ID NO: 1194868 - RNA, 22 nt, Human
gagaaggacugagaagauggca

SEQ ID NO: 1194869 - RNA, 24 nt, Human
gagacgggguuucaccauguuggc

SEQ ID NO: 1194870 - RNA, 19 nt, Human
gagcaggcaauaaagccaa

SEQ ID NO: 1194871 - RNA, 21 nt, Human
gaguggggaggaaggggcuga

SEQ ID NO: 1194872 - RNA, 22 nt, Human
gauaaagaaacagcucauaaga

SEQ ID NO: 1194873 - RNA, 20 nt, Human
gaugacagcaacaacgagga

SEQ ID NO: 1194874 - RNA, 21 nt, Human
gauuacaggcgugagcaccgc

SEQ ID NO: 1194875 - RNA, 18 nt, Human
gauuacaggugugagcca

SEQ ID NO: 1194876 - RNA, 22 nt, Human
gauuacaggugugagccaccgc

SEQ ID NO: 1194877 - RNA, 23 nt, Human
gauuacaggugugagccaccgca

SEQ ID NO: 1194878 - RNA, 26 nt, Human
gcaagagagcaggaagauaagcaaaa

SEQ ID NO: 1194879 - RNA, 20 nt, Human
gcaccaccacacccggcuaa

SEQ ID NO: 1194880 - RNA, 20 nt, Human
gcaggauaaagaaacagcuc

SEQ ID NO: 1194881 - RNA, 22 nt, Human
gcccggcuaauuuuuguauuuu

SEQ ID NO: 1194882 - RNA, 25 nt, Human
gcucugucacccaggcuggagugca

SEQ ID NO: 1194883 - RNA, 19 nt, Human
gcuggagugcaguggcacg

SEQ ID NO: 1194884 - RNA, 23 nt, Human
gcuggucuugaacuccuaaccuc

SEQ ID NO: 1194885 - RNA, 23 nt, Human
gcuggucuugaacuccugaccuc

SEQ ID NO: 1194886 - RNA, 22 nt, Human
ggaggaaagaggaggggugggu

SEQ ID NO: 1194887 - RNA, 22 nt, Human
ggauuucaccaucuuggccagg

SEQ ID NO: 1194888 - RNA, 21 nt, Human
ggcaaugggaguggggaggaa

SEQ ID NO: 1194889 - RNA, 24 nt, Human
ggcuggucuugaacuccuaaccuc

SEQ ID NO: 1194890 - RNA, 24 nt, Human
ggcuggucuugaacuccugaccuc

SEQ ID NO: 1194891 - RNA, 23 nt, Human
gggauuucaccaucuuggccagg

SEQ ID NO: 1194892 - RNA, 23 nt, Human
gggguggguaaacuacuuggaaa

SEQ ID NO: 1194893 - RNA, 23 nt, Human
gggguuucaccauguuggccagg

SEQ ID NO: 1194894 - RNA, 22 nt, Human
ggguuucaccauguuggccagg

SEQ ID NO: 1194895 - RNA, 19 nt, Human
gguaaagaacuguggagca

SEQ ID NO: 1194896 - RNA, 19 nt, Human
ggucuugaacuccugaccu

SEQ ID NO: 1194897 - RNA, 23 nt, Human
guagagacgggguuucaccaugu

SEQ ID NO: 1194898 - RNA, 18 nt, Human
guagcugggauuacaggc

SEQ ID NO: 1194899 - RNA, 18 nt, Human
guaggagggagguaggga

SEQ ID NO: 1194900 - RNA, 20 nt, Human
gugaaagagagauuucuaca

SEQ ID NO: 1194901 - RNA, 24 nt, Human
gugauccacccgccucagccuccc

SEQ ID NO: 1194902 - RNA, 23 nt, Human
gugccuuggccucccaagaagcu

SEQ ID NO: 1194903 - RNA, 22 nt, Human
guuuuugacaacuuggcacuga

SEQ ID NO: 1194904 - RNA, 23 nt, Human
uaaaagccacagugaacaugaug

SEQ ID NO: 1194905 - RNA, 20 nt, Human
uaacaagcaaagaauuuuaa

SEQ ID NO: 1194906 - RNA, 25 nt, Human
uaacaggaaaagauacagaaaaaaa

SEQ ID NO: 1194907 - RNA, 18 nt, Human
uaaccucaagugauccgc

SEQ ID NO: 1194908 - RNA, 24 nt, Human
uaacuuuuguauuuuuaguagaga

SEQ ID NO: 1194909 - RNA, 22 nt, Human
uaaggcagcaagagagcaggaa

SEQ ID NO: 1194910 - RNA, 24 nt, Human
uaauuuuuguauuuuuaguagaga

SEQ ID NO: 1194911 - RNA, 23 nt, Human
uacaggcaugcaccaccacaccc

SEQ ID NO: 1194912 - RNA, 23 nt, Human
uacaggugugagccaccgcaucc

SEQ ID NO: 1194913 - RNA, 22 nt, Human
uagagacgggguuucaccaugu

SEQ ID NO: 1194914 - RNA, 23 nt, Human
uaguagagacgggauuucaccau

SEQ ID NO: 1194915 - RNA, 26 nt, Human
uaguagagacgggauuucaccaucuu

SEQ ID NO: 1194916 - RNA, 24 nt, Human
uaguagagacgggguuucaccaug

SEQ ID NO: 1194917 - RNA, 26 nt, Human
uaguagagacgggguuucaccauguu

SEQ ID NO: 1194918 - RNA, 24 nt, Human
ucacccaggcuggagugcaguggc

SEQ ID NO: 1194919 - RNA, 23 nt, Human
ucacugaaaccuccgucuccugg

SEQ ID NO: 1194920 - RNA, 24 nt, Human
ucacugaaaccuccgucuccuggu

SEQ ID NO: 1194921 - RNA, 23 nt, Human
ucacugcaaccuccgccuccugg

SEQ ID NO: 1194922 - RNA, 24 nt, Human
ucacugcaaccuccgccuccuggg

SEQ ID NO: 1194923 - RNA, 25 nt, Human
ucacugcaaccuccgccuccugggu

SEQ ID NO: 1194924 - RNA, 27 nt, Human
ucacugcaaccuccgccuccuggguuc

SEQ ID NO: 1194925 - RNA, 20 nt, Human
ucagccucccaaguagcugg

SEQ ID NO: 1194926 - RNA, 21 nt, Human
uccacccgccucagccuccca

SEQ ID NO: 1194927 - RNA, 23 nt, Human
ucccaaagugcugggauuacagg

SEQ ID NO: 1194928 - RNA, 24 nt, Human
ucccaaagugcugggauuacaggc

SEQ ID NO: 1194929 - RNA, 24 nt, Human
ucccaagaagcugggauuacaggc

SEQ ID NO: 1194930 - RNA, 24 nt, Human
ucccaaguagcugggauuacaggc

SEQ ID NO: 1194931 - RNA, 24 nt, Human
uccgccuccuggguucaagcaauu

SEQ ID NO: 1194932 - RNA, 24 nt, Human
uccugcuguguugccgaggcugga

SEQ ID NO: 1194933 - RNA, 21 nt, Human
uccuggguucaagcaauucuc

SEQ ID NO: 1194934 - RNA, 23 nt, Human
uccuggguucaagcaauucucug

SEQ ID NO: 1194935 - RNA, 19 nt, Human
uccugguucaagcgauucu

SEQ ID NO: 1194936 - RNA, 21 nt, Human
uccugguucaagcgauucuug

SEQ ID NO: 1194937 - RNA, 22 nt, Human
ucguacaaagagaaccaugauc

SEQ ID NO: 1194938 - RNA, 21 nt, Human
ucuaagccaaguaaagguaaa

SEQ ID NO: 1194939 - RNA, 19 nt, Human
ucucgcucugucacccagg

SEQ ID NO: 1194940 - RNA, 23 nt, Human
ucucgcucugucacccaggcugg

SEQ ID NO: 1194941 - RNA, 24 nt, Human
ucucgcucugucacccaggcugga

SEQ ID NO: 1194942 - RNA, 26 nt, Human
ucucgcucugucacccaggcuggagu

SEQ ID NO: 1194943 - RNA, 27 nt, Human
ucucgcucugucacccaggcuggagug

SEQ ID NO: 1194944 - RNA, 18 nt, Human
ucugaaauacauaaaaac

SEQ ID NO: 1194945 - RNA, 24 nt, Human
ucugucacccaggcuggagugcag

SEQ ID NO: 1194946 - RNA, 19 nt, Human
ucuugaacuccugaccucg

SEQ ID NO: 1194947 - RNA, 22 nt, Human
ucuuggccaggcuggucuugaa

SEQ ID NO: 1194948 - RNA, 23 nt, Human
ugaagcaacaaagauacaguuuc

SEQ ID NO: 1194949 - RNA, 22 nt, Human
ugaaugaaugggugaagagagg

SEQ ID NO: 1194950 - RNA, 18 nt, Human
ugaccucacuaccaaaca

SEQ ID NO: 1194951 - RNA, 20 nt, Human
ugaccucacuaccaaacaua

SEQ ID NO: 1194952 - RNA, 23 nt, Human
ugaccucgugauccacccgccuc

SEQ ID NO: 1194953 - RNA, 26 nt, Human
ugagaagauggcaaugggagugggga

SEQ ID NO: 1194954 - RNA, 22 nt, Human
ugagacggagucucgcucuguc

SEQ ID NO: 1194955 - RNA, 18 nt, Human
ugaugacagcaacaacga

SEQ ID NO: 1194956 - RNA, 22 nt, Human
ugcacugaacuaugucauaagg

SEQ ID NO: 1194957 - RNA, 22 nt, Human
ugcaguggcacgaucuuggcuc

SEQ ID NO: 1194958 - RNA, 24 nt, Human
ugccucagccucccaaguagcugg

SEQ ID NO: 1194959 - RNA, 21 nt, Human
ugccugggccucccaaagugc

SEQ ID NO: 1194960 - RNA, 23 nt, Human
ugcugggauuacaggcgugagca

SEQ ID NO: 1194961 - RNA, 24 nt, Human
ugcugggauuacaggugugagcca

SEQ ID NO: 1194962 - RNA, 22 nt, Human
uggaaauacagaugcccaacua

SEQ ID NO: 1194963 - RNA, 23 nt, Human
uggagucagggaagacucugacu

SEQ ID NO: 1194964 - RNA, 23 nt, Human
uggagugcaguggcacgaucuug

SEQ ID NO: 1194965 - RNA, 24 nt, Human
uggagugcaguggcacgaucuugg

SEQ ID NO: 1194966 - RNA, 24 nt, Human
uggccaggcuggucuugaacuccu

SEQ ID NO: 1194967 - RNA, 24 nt, Human
uggccaggcuggucuugaacuccu

SEQ ID NO: 1194968 - RNA, 21 nt, Human
ugggauuacaggcaugcacca

SEQ ID NO: 1194969 - RNA, 24 nt, Human
ugggauuacaggcaugcaccacca

SEQ ID NO: 1194970 - RNA, 21 nt, Human
ugggauuacaggcgcccacca

SEQ ID NO: 1194971 - RNA, 24 nt, Human
ugggauuacaggcgcccaccacca

SEQ ID NO: 1194972 - RNA, 18 nt, Human
ugggauuacaggcgugag

SEQ ID NO: 1194973 - RNA, 19 nt, Human
ugggauuacaggcgugagc

SEQ ID NO: 1194974 - RNA, 20 nt, Human
ugggauuacaggcgugagca

SEQ ID NO: 1194975 - RNA, 22 nt, Human
ugggauuacaggcgugagcacc

SEQ ID NO: 1194976 - RNA, 23 nt, Human
ugggauuacaggcgugagcaccg

SEQ ID NO: 1194977 - RNA, 18 nt, Human
ugggauuacaggugugag

SEQ ID NO: 1194978 - RNA, 19 nt, Human
ugggauuacaggugugagc

SEQ ID NO: 1194979 - RNA, 21 nt, Human
ugggauuacaggugugagcca

SEQ ID NO: 1194980 - RNA, 22 nt, Human
ugggauuacaggugugagccac

SEQ ID NO: 1194981 - RNA, 23 nt, Human
ugggauuacaggugugagccacc

SEQ ID NO: 1194982 - RNA, 24 nt, Human
ugggauuacaggugugagccaccg

SEQ ID NO: 1194983 - RNA, 22 nt, Human
uggggaggaaggggcugauugc

SEQ ID NO: 1194984 - RNA, 21 nt, Human
uguauuuuuaguagagacggg

SEQ ID NO: 1194985 - RNA, 19 nt, Human
ugucuagaaucacuaguuc

SEQ ID NO: 1194986 - RNA, 22 nt, Human
ugugaccucacuaccaaacaua

SEQ ID NO: 1194987 - RNA, 22 nt, Human
uguggagucagggaagacucug

SEQ ID NO: 1194988 - RNA, 19 nt, Human
uuacaggcgugagcaccgc

SEQ ID NO: 1194989 - RNA, 18 nt, Human
uuaccaucagguugcuua

SEQ ID NO: 1194990 - RNA, 18 nt, Human
uuaguagagacgggauuu

SEQ ID NO: 1194991 - RNA, 24 nt, Human
uuaguagagacgggauuucaccau

SEQ ID NO: 1194992 - RNA, 18 nt, Human
uuaguagagacgggguuu

SEQ ID NO: 1194993 - RNA, 22 nt, Human
uuaguagagacgggguuucacc

SEQ ID NO: 1194994 - RNA, 24 nt, Human
uuaguagagacgggguuucaccau

SEQ ID NO: 1194995 - RNA, 20 nt, Human
uucaagcgauucuugugccu

SEQ ID NO: 1194996 - RNA, 26 nt, Human
uucacugaaaccuccgucuccugguu

SEQ ID NO: 1194997 - RNA, 21 nt, Human
uuggaaagaaagggagaagga

SEQ ID NO: 1194998 - RNA, 23 nt, Human
uuguauuuuuaguagagacgggg

SEQ ID NO: 1194999 - RNA, 25 nt, Human
uuuaacaggaaaagauacagaaaaa

SEQ ID NO: 1195000 - RNA, 24 nt, Human
uuucaccaucuuggccaggcuggu

SEQ ID NO: 1195001 - RNA, 24 nt, Human
uuucaccauguuggccaggcuggu

SEQ ID NO: 1195002 - RNA, 24 nt, Human
uuuuuaguagagacgggauuucac

SEQ ID NO: 1195003 - RNA, 24 nt, Human
uuuuuaguagagacgggguuucac

SEQ ID NO: 1195004 - RNA, 20 nt, Human
uuuuuguauuuuuaguagag

SEQ ID NO: 1195005 - RNA, 19 nt, Human
aaugcagaggaagagagga

SEQ ID NO: 1195006 - RNA, 23 nt, Human
agaggaagagaggaagcccuggc

SEQ ID NO: 1195007 - RNA, 22 nt, Human
augagaacgacuuuauuucaaa

SEQ ID NO: 1195008 - RNA, 27 nt, Human
cugaacaggauauggagggaacccgcu

SEQ ID NO: 1195009 - RNA, 20 nt, Human
gagcuccaaagguggcagcu

SEQ ID NO: 1195010 - RNA, 22 nt, Human
gcaaaugcagaggaagagagga

SEQ ID NO: 1195011 - RNA, 19 nt, Human
ggaagaugcuggcuccaac

SEQ ID NO: 1195012 - RNA, 19 nt, Human
ggagguggccggcccuggg

SEQ ID NO: 1195013 - RNA, 24 nt, Human
ggcugggagguggccggcccuggg

SEQ ID NO: 1195014 - RNA, 26 nt, Human
uaggaagaugcuggcuccaacuucaa

SEQ ID NO: 1195015 - RNA, 20 nt, Human
uggcugaacaggauauggag

SEQ ID NO: 1195016 - RNA, 18 nt, Human
uggcugcagcuccggagc

SEQ ID NO: 1195017 - RNA, 18 nt, Human
ugggagguggccggcccu

SEQ ID NO: 1195018 - RNA, 22 nt, Human
ugggagguggccggcccugggg

SEQ ID NO: 1195019 - RNA, 21 nt, Human
uucaucuuguaggaagaugcu

SEQ ID NO: 1195020 - RNA, 21 nt, Human
aaaaaaccaaggccagcucag

SEQ ID NO: 1195021 - RNA, 22 nt, Human
aaaagcaacagggaggaauggc

SEQ ID NO: 1195022 - RNA, 19 nt, Human
aaagcaacagggaggaaug

SEQ ID NO: 1195023 - RNA, 18 nt, Human
aaccacaacaacaaaagc

SEQ ID NO: 1195024 - RNA, 21 nt, Human
aaccacaacaacaaaagcaac

SEQ ID NO: 1195025 - RNA, 28 nt, Human
aagacaagaaccacaacaacaaaagcaa

SEQ ID NO: 1195026 - RNA, 19 nt, Human
acaacaacaaaagcaacag

SEQ ID NO: 1195027 - RNA, 22 nt, Human
accacaacaacaaaagcaacag

SEQ ID NO: 1195028 - RNA, 19 nt, Human
agacaagaaccacaacaac

SEQ ID NO: 1195029 - RNA, 28 nt, Human
agacaagaaccacaacaacaaaagcaac

SEQ ID NO: 1195030 - RNA, 19 nt, Human
aggaaggagguauguaaac

SEQ ID NO: 1195031 - RNA, 19 nt, Human
agggaggaauggcuccggg

SEQ ID NO: 1195032 - RNA, 23 nt, Human
aguaaaaaaccaaggccagcuca

SEQ ID NO: 1195033 - RNA, 20 nt, Human
auccugggggaggucagagg

SEQ ID NO: 1195034 - RNA, 25 nt, Human
caacaacaaaagcaacagggaggaa

SEQ ID NO: 1195035 - RNA, 20 nt, Human
caacagggaggaauggcucc

SEQ ID NO: 1195036 - RNA, 27 nt, Human
cauuuuuaaucuuuucaaaaucagagg

SEQ ID NO: 1195037 - RNA, 20 nt, Human
ccagcucauccugggggagg

SEQ ID NO: 1195038 - RNA, 22 nt, Human
cucaaguaacuacuucuuuugc

SEQ ID NO: 1195039 - RNA, 23 nt, Human
gacaaacacacaagccaccucuu

SEQ ID NO: 1195040 - RNA, 20 nt, Human
gacaaugaaaaagacaagaa

SEQ ID NO: 1195041 - RNA, 27 nt, Human
gccaccucuucauuuacuguaaaaucc

SEQ ID NO: 1195042 - RNA, 18 nt, Human
ggucagagguugcaggag

SEQ ID NO: 1195043 - RNA, 19 nt, Human
uaaaaaaccaaggccagcu

SEQ ID NO: 1195044 - RNA, 21 nt, Human
uaaaaaaccaaggccagcuca

SEQ ID NO: 1195045 - RNA, 19 nt, Human
uaaagcuguuauuagacaa

SEQ ID NO: 1195046 - RNA, 23 nt, Human
uaaaucccaauaaagcuguuauu

SEQ ID NO: 1195047 - RNA, 25 nt, Human
uacagugauuuccucauuugcagcu

SEQ ID NO: 1195048 - RNA, 22 nt, Human
ucauccugggggaggucagagg

SEQ ID NO: 1195049 - RNA, 24 nt, Human
ugacaaacacacaagccaccucuu

SEQ ID NO: 1195050 - RNA, 22 nt, Human
uggcuccggggcuggcucugcg

SEQ ID NO: 1195051 - RNA, 23 nt, Human
uggcuccggggcuggcucugcgg

SEQ ID NO: 1195052 - RNA, 19 nt, Human
uuccucauuugcagcuuca

SEQ ID NO: 1195053 - RNA, 20 nt, Human
uugacaaacacacaagccac

SEQ ID NO: 1195054 - RNA, 19 nt, Human
uugcagcuucagcuacuca

SEQ ID NO: 1195055 - RNA, 22 nt, Human
gccucacucuucacaaagugcc

SEQ ID NO: 1195056 - RNA, 24 nt, Human
ucgccucacucuucacaaagugcc

SEQ ID NO: 1195057 - RNA, 20 nt, Human
acuccugugcuccugggcau

SEQ ID NO: 1195058 - RNA, 21 nt, Human
aguggcagaugagucucuucu

SEQ ID NO: 1195059 - RNA, 18 nt, Human
uggcagaugagucucuuc

SEQ ID NO: 1195060 - RNA, 21 nt, Human
uggcagaugagucucuucuuc

SEQ ID NO: 1195061 - RNA, 27 nt, Human
uugguuaguggcagaugagucucuucu

SEQ ID NO: 1195062 - RNA, 21 nt, Human
aaaaacacuuuauggaagcuc

SEQ ID NO: 1195063 - RNA, 24 nt, Human
aaaaacacuuuauggaagcucagg

SEQ ID NO: 1195064 - RNA, 24 nt, Human
aaacagaguaguuggugcacacgg

SEQ ID NO: 1195065 - RNA, 23 nt, Human
aaagacagcagaaaagcagaagc

SEQ ID NO: 1195066 - RNA, 19 nt, Human
aacggccuuugagguaagc

SEQ ID NO: 1195067 - RNA, 18 nt, Human
aagaagaaaggaggcuca

SEQ ID NO: 1195068 - RNA, 20 nt, Human
aagaagaaaggaggcucaga

SEQ ID NO: 1195069 - RNA, 20 nt, Human
aagaaguaacaaagacagca

SEQ ID NO: 1195070 - RNA, 20 nt, Human
aagacagcagaaaagcagaa

SEQ ID NO: 1195071 - RNA, 18 nt, Human
aagagucugagagacuug

SEQ ID NO: 1195072 - RNA, 22 nt, Human
aagucacauggcuugaaguugg

SEQ ID NO: 1195073 - RNA, 21 nt, Human
acaagaaguaacaaagacagc

SEQ ID NO: 1195074 - RNA, 27 nt, Human
agaaaagagcuuccagccagggugaag

SEQ ID NO: 1195075 - RNA, 19 nt, Human
agaagaaaggaggcucaga

SEQ ID NO: 1195076 - RNA, 24 nt, Human
agaagaaaggaggcucagagguga

SEQ ID NO: 1195077 - RNA, 23 nt, Human
agaagaagaaaggaggcucagag

SEQ ID NO: 1195078 - RNA, 19 nt, Human
agacagcagaaaagcagaa

SEQ ID NO: 1195079 - RNA, 18 nt, Human
agacaugcaucccagagc

SEQ ID NO: 1195080 - RNA, 20 nt, Human
agaccaagagucugagagac

SEQ ID NO: 1195081 - RNA, 24 nt, Human
agagacaugcaucccagagccuuc

SEQ ID NO: 1195082 - RNA, 24 nt, Human
agcagaaaagcagaagcaugucuu

SEQ ID NO: 1195083 - RNA, 22 nt, Human
agcaugucuuuggccacuguau

SEQ ID NO: 1195084 - RNA, 24 nt, Human
agccaggcgccucauuuucauccu

SEQ ID NO: 1195085 - RNA, 22 nt, Human
aggaaauggguaaaaugguugg

SEQ ID NO: 1195086 - RNA, 21 nt, Human
aggccccaguccuacuccugu

SEQ ID NO: 1195087 - RNA, 26 nt, Human
aguaacaaagacagcagaaaagcaga

SEQ ID NO: 1195088 - RNA, 18 nt, Human
aguggccaaaccauccau

SEQ ID NO: 1195089 - RNA, 19 nt, Human
auaaaguucaaucacaucc

SEQ ID NO: 1195090 - RNA, 23 nt, Human
aucccagagccuucaaaacagag

SEQ ID NO: 1195091 - RNA, 24 nt, Human
augcagguaaaucacuggaccaaa

SEQ ID NO: 1195092 - RNA, 19 nt, Human
caagagucugagagacuug

SEQ ID NO: 1195093 - RNA, 21 nt, Human
cacccaggauagaggcagcag

SEQ ID NO: 1195094 - RNA, 21 nt, Human
cagaaaagagcuuccagccag

SEQ ID NO: 1195095 - RNA, 21 nt, Human
cagccauuagaccaagagucu

SEQ ID NO: 1195096 - RNA, 18 nt, Human
caggcacccaggauagag

SEQ ID NO: 1195097 - RNA, 19 nt, Human
cauuuucauccugagcagg

SEQ ID NO: 1195098 - RNA, 23 nt, Human
ccaaaccauccaugggcaaagag

SEQ ID NO: 1195099 - RNA, 21 nt, Human
ccaguccuacuccuguaggaa

SEQ ID NO: 1195100 - RNA, 22 nt, Human
cccaggauagaggcagcagcuc

SEQ ID NO: 1195101 - RNA, 18 nt, Human
ccccaaagucacauggcu

SEQ ID NO: 1195102 - RNA, 23 nt, Human
ccugucauugcaacagccauuag

SEQ ID NO: 1195103 - RNA, 23 nt, Human
cucaaagcccacuggcucucaag

SEQ ID NO: 1195104 - RNA, 21 nt, Human
cucaaggccccaguccuacuc

SEQ ID NO: 1195105 - RNA, 24 nt, Human
cucaaggccccaguccuacuccug

SEQ ID NO: 1195106 - RNA, 18 nt, Human
cuggcacaagaaguaaca

SEQ ID NO: 1195107 - RNA, 23 nt, Human
gaccaaauggcacccacccaaga

SEQ ID NO: 1195108 - RNA, 24 nt, Human
gagaaggagagacaugcaucccag

SEQ ID NO: 1195109 - RNA, 19 nt, Human
gccccaguccuacuccugu

SEQ ID NO: 1195110 - RNA, 22 nt, Human
gcucagaggugacugauugccc

SEQ ID NO: 1195111 - RNA, 22 nt, Human
gcugacucucaaacaaaggcca

SEQ ID NO: 1195112 - RNA, 18 nt, Human
ggcaaaguggccaaacca

SEQ ID NO: 1195113 - RNA, 22 nt, Human
ggcacaagaaguaacaaagaca

SEQ ID NO: 1195114 - RNA, 18 nt, Human
ggcagaaaagagcuuccg

SEQ ID NO: 1195115 - RNA, 23 nt, Human
gggaaugacagagaaaauuaggc

SEQ ID NO: 1195116 - RNA, 21 nt, Human
gggcagaugucaugagucuuc

SEQ ID NO: 1195117 - RNA, 22 nt, Human
gggcguuguuugcucagggaca

SEQ ID NO: 1195118 - RNA, 19 nt, Human
uaacaaagacagcagaaaa

SEQ ID NO: 1195119 - RNA, 23 nt, Human
uacaaaucaucacaugaggcagg

SEQ ID NO: 1195120 - RNA, 21 nt, Human
uagcugcaaagaaagggcaga

SEQ ID NO: 1195121 - RNA, 18 nt, Human
uaucucaccaguagcugc

SEQ ID NO: 1195122 - RNA, 24 nt, Human
ucaaaacagaguaguuggugcaca

SEQ ID NO: 1195123 - RNA, 22 nt, Human
ucaaugcuggcaccaaagugcc

SEQ ID NO: 1195124 - RNA, 20 nt, Human
ucagaagcuugagagggaaa

SEQ ID NO: 1195125 - RNA, 19 nt, Human
ucaugagucuucagaagcu

SEQ ID NO: 1195126 - RNA, 20 nt, Human
uccccuaggcucuucccuga

SEQ ID NO: 1195127 - RNA, 20 nt, Human
uccugagcaggcuggcugac

SEQ ID NO: 1195128 - RNA, 21 nt, Human
ucuugggacuaucucaccagu

SEQ ID NO: 1195129 - RNA, 21 nt, Human
ugacucucaaacaaaggccag

SEQ ID NO: 1195130 - RNA, 20 nt, Human
ugaggcaggcacccaggauu

SEQ ID NO: 1195131 - RNA, 26 nt, Human
ugaugccaggaaauaucuuggagaag

SEQ ID NO: 1195132 - RNA, 18 nt, Human
uggaagcucagggaaaac

SEQ ID NO: 1195133 - RNA, 20 nt, Human
uggccaaaccauccaugggc

SEQ ID NO: 1195134 - RNA, 23 nt, Human
uggcugacucucaaacaaaggcu

SEQ ID NO: 1195135 - RNA, 20 nt, Human
ugggcaaagagcccaugagg

SEQ ID NO: 1195136 - RNA, 26 nt, Human
ugucaugagucuucagaagcuugaga

SEQ ID NO: 1195137 - RNA, 20 nt, Human
uguggcaaaguggccaaacc

SEQ ID NO: 1195138 - RNA, 24 nt, Human
uguuguagaccaaauugaccaacg

SEQ ID NO: 1195139 - RNA, 18 nt, Human
uguuuuccucaaugcugg

SEQ ID NO: 1195140 - RNA, 25 nt, Human
aaaaagaacaucuuuuacuaacaga

SEQ ID NO: 1195141 - RNA, 18 nt, Human
aaacacaguuucaggauc

SEQ ID NO: 1195142 - RNA, 21 nt, Human
aaacacaguuucaggaucuac

SEQ ID NO: 1195143 - RNA, 28 nt, Human
aacacaguuucaggaucuacagccaccu

SEQ ID NO: 1195144 - RNA, 18 nt, Human
aggagacuucagcaauau

SEQ ID NO: 1195145 - RNA, 18 nt, Human
auccuuuucucuccucaa

SEQ ID NO: 1195146 - RNA, 22 nt, Human
ccucuggaaggccaguugauuc

SEQ ID NO: 1195147 - RNA, 24 nt, Human
cgguaacauaugccaggagacuuc

SEQ ID NO: 1195148 - RNA, 20 nt, Human
cuuagccucuggaaggccag

SEQ ID NO: 1195149 - RNA, 21 nt, Human
gggaaaaagaacaucuuuuac

SEQ ID NO: 1195150 - RNA, 20 nt, Human
uacaucagugugagcugcug

SEQ ID NO: 1195151 - RNA, 19 nt, Human
ugggaaaaagaacaucuuu

SEQ ID NO: 1195152 - RNA, 19 nt, Human
ugggaauacaaaauaacca

SEQ ID NO: 1195153 - RNA, 25 nt, Human
aaaaagaacaucuuuuacuaacaga

SEQ ID NO: 1195154 - RNA, 18 nt, Human
agccagccacagcgugcc

SEQ ID NO: 1195155 - RNA, 18 nt, Human
aggagacuucagcaauau

SEQ ID NO: 1195156 - RNA, 21 nt, Human
agggggaugggaggaagggaa

SEQ ID NO: 1195157 - RNA, 18 nt, Human
auccuuuucucuccucaa

SEQ ID NO: 1195158 - RNA, 18 nt, Human
cacaaaauggcagugaag

SEQ ID NO: 1195159 - RNA, 19 nt, Human
caccugggagugaugugca

SEQ ID NO: 1195160 - RNA, 22 nt, Human
ccucuggaaggcuauuugauuc

SEQ ID NO: 1195161 - RNA, 20 nt, Human
ccuugcuggaggagagacgg

SEQ ID NO: 1195162 - RNA, 22 nt, Human
cggcggcaccucacaaaauggc

SEQ ID NO: 1195163 - RNA, 21 nt, Human
cucacaaaauggcagugaagu

SEQ ID NO: 1195164 - RNA, 23 nt, Human
cuuucuagaaaccugcccucugg

SEQ ID NO: 1195165 - RNA, 21 nt, Human
gggaaaaagaacaucuuuuac

SEQ ID NO: 1195166 - RNA, 18 nt, Human
ggggaugggaggaaggga

SEQ ID NO: 1195167 - RNA, 21 nt, Human
uaacauaugccaggagacuuc

SEQ ID NO: 1195168 - RNA, 22 nt, Human
ucccguuuggcccaagggggau

SEQ ID NO: 1195169 - RNA, 19 nt, Human
ucuagaaaccugcccucug

SEQ ID NO: 1195170 - RNA, 19 nt, Human
ugaaguuguggcgccuccc

SEQ ID NO: 1195171 - RNA, 22 nt, Human
uggcagugaaguuguggcgccu

SEQ ID NO: 1195172 - RNA, 19 nt, Human
ugggaaaaagaacaucuuu

SEQ ID NO: 1195173 - RNA, 19 nt, Human
ugggaauacaaaauaacca

SEQ ID NO: 1195174 - RNA, 18 nt, Human
aaauacaccucucucaca

SEQ ID NO: 1195175 - RNA, 20 nt, Human
aagacuggggaggggugugg

SEQ ID NO: 1195176 - RNA, 20 nt, Human
aaggcgccguacgagccucg

SEQ ID NO: 1195177 - RNA, 21 nt, Human
aaguuccagggccagaggugc

SEQ ID NO: 1195178 - RNA, 21 nt, Human
accccugggccccucucuccc

SEQ ID NO: 1195179 - RNA, 20 nt, Human
accgcagccggggccagggc

SEQ ID NO: 1195180 - RNA, 22 nt, Human
acgcugccucugcccaggcaag

SEQ ID NO: 1195181 - RNA, 19 nt, Human
agcccgauggcaggggccc

SEQ ID NO: 1195182 - RNA, 22 nt, Human
agccgccccgccuccgcccccc

SEQ ID NO: 1195183 - RNA, 23 nt, Human
aggcaacaggucggccgagccca

SEQ ID NO: 1195184 - RNA, 18 nt, Human
aggcaaguuccagggcca

SEQ ID NO: 1195185 - RNA, 24 nt, Human
aggcccuucacgcugccucugccc

SEQ ID NO: 1195186 - RNA, 18 nt, Human
agggccgccgcagccgcc

SEQ ID NO: 1195187 - RNA, 24 nt, Human
augucaagggcaaauccaccccuc

SEQ ID NO: 1195188 - RNA, 24 nt, Human
caaauccaccccucccugaagccu

SEQ ID NO: 1195189 - RNA, 19 nt, Human
cacgcugccucugcccagg

SEQ ID NO: 1195190 - RNA, 22 nt, Human
cacugggcacccccaccccugu

SEQ ID NO: 1195191 - RNA, 22 nt, Human
cacuucccccucccuccuccca

SEQ ID NO: 1195192 - RNA, 21 nt, Human
cagacagagccgccgacgccu

SEQ ID NO: 1195193 - RNA, 22 nt, Human
cagccgcaccgccaggccagac

SEQ ID NO: 1195194 - RNA, 23 nt, Human
cagccggggccagggcugggccg

SEQ ID NO: 1195195 - RNA, 22 nt, Human
cagcugagcgcgacagccgcac

SEQ ID NO: 1195196 - RNA, 18 nt, Human
caggccccgccgaccgac

SEQ ID NO: 1195197 - RNA, 19 nt, Human
ccacuucccccucccuccu

SEQ ID NO: 1195198 - RNA, 22 nt, Human
ccagacagggccgccgcagccg

SEQ ID NO: 1195199 - RNA, 26 nt, Human
ccagagccgcggccgccccgcccccg

SEQ ID NO: 1195200 - RNA, 18 nt, Human
ccaggccagacagggccg

SEQ ID NO: 1195201 - RNA, 22 nt, Human
cccaagccaggacucgaucacu

SEQ ID NO: 1195202 - RNA, 20 nt, Human
cccaaggccgagcggggcuc

SEQ ID NO: 1195203 - RNA, 22 nt, Human
ccccaggagcccuaugcucccc

SEQ ID NO: 1195204 - RNA, 25 nt, Human
ccccaggagcccuaugcuccccucu

SEQ ID NO: 1195205 - RNA, 27 nt, Human
cccccgggcugagaccgcagccggggc

SEQ ID NO: 1195206 - RNA, 18 nt, Human
ccccgcgcaggccccgcc

SEQ ID NO: 1195207 - RNA, 22 nt, Human
ccccgcgcaggccccgccgacc

SEQ ID NO: 1195208 - RNA, 19 nt, Human
ccccucccuccucccacca

SEQ ID NO: 1195209 - RNA, 21 nt, Human
ccccucucucccuuggugccc

SEQ ID NO: 1195210 - RNA, 22 nt, Human
cccgcgcaggccccgccgaccg

SEQ ID NO: 1195211 - RNA, 21 nt, Human
cccgggcugagaccgcagccg

SEQ ID NO: 1195212 - RNA, 20 nt, Human
cccucuccacuucccccucc

SEQ ID NO: 1195213 - RNA, 18 nt, Human
ccgcaccgccaggccaga

SEQ ID NO: 1195214 - RNA, 20 nt, Human
ccgcagccggggccagggcu

SEQ ID NO: 1195215 - RNA, 18 nt, Human
ccgccccgccuccgcccc

SEQ ID NO: 1195216 - RNA, 19 nt, Human
ccgccgccgccgccggcgc

SEQ ID NO: 1195217 - RNA, 20 nt, Human
ccgccgcggcccagcuuucc

SEQ ID NO: 1195218 - RNA, 22 nt, Human
ccgccgcggcccagcuuuccuu

SEQ ID NO: 1195219 - RNA, 21 nt, Human
ccucuacuaggaaggcccuuc

SEQ ID NO: 1195220 - RNA, 20 nt, Human
cgacugacccgcucgagcgc

SEQ ID NO: 1195221 - RNA, 23 nt, Human
cgcagcugagcgcgacagccgca

SEQ ID NO: 1195222 - RNA, 21 nt, Human
cgcccagagccgcggccgccc

SEQ ID NO: 1195223 - RNA, 21 nt, Human
cgccuccgccccccgccgcgg

SEQ ID NO: 1195224 - RNA, 24 nt, Human
cgccuccgccccccgccgcggccc

SEQ ID NO: 1195225 - RNA, 22 nt, Human
cggcgcucacucgauccgcacc

SEQ ID NO: 1195226 - RNA, 22 nt, Human
cuaucugcaugucaagggcaaa

SEQ ID NO: 1195227 - RNA, 28 nt, Human
cucacagugcugcuagcagauuucaguu

SEQ ID NO: 1195228 - RNA, 19 nt, Human
cucagaccuuccuucccaa

SEQ ID NO: 1195229 - RNA, 18 nt, Human
cuccgggccuggaaaguc

SEQ ID NO: 1195230 - RNA, 21 nt, Human
cuccuaucugcaugucaaggg

SEQ ID NO: 1195231 - RNA, 21 nt, Human
cugagaccgcagccggggcca

SEQ ID NO: 1195232 - RNA, 19 nt, Human
cuggggagggguguggggg

SEQ ID NO: 1195233 - RNA, 19 nt, Human
cuucccccucccuccuccc

SEQ ID NO: 1195234 - RNA, 20 nt, Human
cuucccccucccuccuccca

SEQ ID NO: 1195235 - RNA, 19 nt, Human
cuucccggcuccccucugg

SEQ ID NO: 1195236 - RNA, 22 nt, Human
cuucugguuucccccucuuugg

SEQ ID NO: 1195237 - RNA, 25 nt, Human
gaagacuggggaggggugugggggc

SEQ ID NO: 1195238 - RNA, 27 nt, Human
gaaggugagcagcgugcgcgugagccc

SEQ ID NO: 1195239 - RNA, 19 nt, Human
gagccgccccgccuccgcc

SEQ ID NO: 1195240 - RNA, 18 nt, Human
gcaacaggucggccgagc

SEQ ID NO: 1195241 - RNA, 18 nt, Human
gccagaggugccccuggg

SEQ ID NO: 1195242 - RNA, 21 nt, Human
gcccagagccgcggccgcccc

SEQ ID NO: 1195243 - RNA, 24 nt, Human
gccccaggagcccuaugcuccccu

SEQ ID NO: 1195244 - RNA, 18 nt, Human
gccccgccuccgcccccc

SEQ ID NO: 1195245 - RNA, 21 nt, Human
gcccgggccccgcgcaggccc

SEQ ID NO: 1195246 - RNA, 28 nt, Human
gccgggccuucgccgccgccgccgccgg

SEQ ID NO: 1195247 - RNA, 24 nt, Human
gccucaguuuccucugucauuagg

SEQ ID NO: 1195248 - RNA, 20 nt, Human
gccuggaaagucaagucgcc

SEQ ID NO: 1195249 - RNA, 22 nt, Human
gcgacagccgcaccgccaggcc

SEQ ID NO: 1195250 - RNA, 20 nt, Human
gcgauccagggcccccgggc

SEQ ID NO: 1195251 - RNA, 19 nt, Human
gcucaggcggccgcugccu

SEQ ID NO: 1195252 - RNA, 23 nt, Human
ggccagacagggccgccgcagcc

SEQ ID NO: 1195253 - RNA, 19 nt, Human
ggccugcaggcccaggggc

SEQ ID NO: 1195254 - RNA, 22 nt, Human
gggcacccccaccccugugagg

SEQ ID NO: 1195255 - RNA, 19 nt, Human
gggcugggccgucgugccc

SEQ ID NO: 1195256 - RNA, 20 nt, Human
ggggcgggcggggacacggg

SEQ ID NO: 1195257 - RNA, 19 nt, Human
gucccuucccggcuccccu

SEQ ID NO: 1195258 - RNA, 22 nt, Human
guuccagggccagaggugcccc

SEQ ID NO: 1195259 - RNA, 19 nt, Human
uagaaguaggggaaguuca

SEQ ID NO: 1195260 - RNA, 20 nt, Human
ucacugggcacccccacccc

SEQ ID NO: 1195261 - RNA, 19 nt, Human
ucagccgggccuucgccgc

SEQ ID NO: 1195262 - RNA, 23 nt, Human
uccacuucccccucccuccuccc

SEQ ID NO: 1195263 - RNA, 19 nt, Human
ucccaccaugccaggucuu

SEQ ID NO: 1195264 - RNA, 20 nt, Human
ucccagggaacucagaccuu

SEQ ID NO: 1195265 - RNA, 21 nt, Human
ucccagggaacucagaccuuc

SEQ ID NO: 1195266 - RNA, 23 nt, Human
ucccuaccccugggccccucucu

SEQ ID NO: 1195267 - RNA, 19 nt, Human
uccuagauucccuaccccu

SEQ ID NO: 1195268 - RNA, 20 nt, Human
ucgccgccgccgccgccggg

SEQ ID NO: 1195269 - RNA, 21 nt, Human
ucucacagugcugcuagcaga

SEQ ID NO: 1195270 - RNA, 22 nt, Human
ucuccacuucccccucccuccu

SEQ ID NO: 1195271 - RNA, 20 nt, Human
ugaagccucaguuuccucug

SEQ ID NO: 1195272 - RNA, 18 nt, Human
ugacccgcucgagcgcga

SEQ ID NO: 1195273 - RNA, 21 nt, Human
ugagccuuuguccaugcugug

SEQ ID NO: 1195274 - RNA, 22 nt, Human
ugcagacagagccgccgacgcc

SEQ ID NO: 1195275 - RNA, 19 nt, Human
ugccaaugccuuucugcuc

SEQ ID NO: 1195276 - RNA, 22 nt, Human
ugccaaugccuuucugcuccgg

SEQ ID NO: 1195277 - RNA, 25 nt, Human
ugccucggccccaccuccacgaucc

SEQ ID NO: 1195278 - RNA, 21 nt, Human
uggcaaggccagagaaggggc

SEQ ID NO: 1195279 - RNA, 26 nt, Human
ugggcacccccaccccugugagccuu

SEQ ID NO: 1195280 - RNA, 21 nt, Human
uggggaggggugugggggccu

SEQ ID NO: 1195281 - RNA, 19 nt, Human
ugucaagggcaaauccacc

SEQ ID NO: 1195282 - RNA, 21 nt, Human
agagggaccuuauucaggcuu

SEQ ID NO: 1195283 - RNA, 19 nt, Human
agauggcuucaggaagaca

SEQ ID NO: 1195284 - RNA, 19 nt, Human
aggaagacagcacagaaga

SEQ ID NO: 1195285 - RNA, 23 nt, Human
cagaagagggaccuuauucaggc

SEQ ID NO: 1195286 - RNA, 22 nt, Human
cagaaggaagccaggcauggug

SEQ ID NO: 1195287 - RNA, 20 nt, Human
caggaagacagcacagaaga

SEQ ID NO: 1195288 - RNA, 23 nt, Human
cuccacagauggcuucaggaaga

SEQ ID NO: 1195289 - RNA, 18 nt, Human
cuuggugcugaaccaauc

SEQ ID NO: 1195290 - RNA, 21 nt, Human
ucaggcuugaaccagaaggaa

SEQ ID NO: 1195291 - RNA, 18 nt, Human
aaaaagcuccugagagaa

SEQ ID NO: 1195292 - RNA, 20 nt, Human
aaaaaucuucugugcugcaa

SEQ ID NO: 1195293 - RNA, 24 nt, Human
aaaguguugggauuacagguguga

SEQ ID NO: 1195294 - RNA, 18 nt, Human
aaccauagcagaaaaacc

SEQ ID NO: 1195295 - RNA, 22 nt, Human
aaccauagcagaaaaaccucag

SEQ ID NO: 1195296 - RNA, 25 nt, Human
aagaagccaaaguacuacuaaggca

SEQ ID NO: 1195297 - RNA, 19 nt, Human
aaggacacagaaaaaagua

SEQ ID NO: 1195298 - RNA, 27 nt, Human
aaggacacagaaaaaaguuggagaccc

SEQ ID NO: 1195299 - RNA, 19 nt, Human
aaggcacuacuaccaucag

SEQ ID NO: 1195300 - RNA, 21 nt, Human
aaguguugggauuacaggugu

SEQ ID NO: 1195301 - RNA, 26 nt, Human
aaguguugggauuacaggugugagcc

SEQ ID NO: 1195302 - RNA, 19 nt, Human
acaggguuucacuaugcug

SEQ ID NO: 1195303 - RNA, 20 nt, Human
acaggguuucacuaugcugg

SEQ ID NO: 1195304 - RNA, 24 nt, Human
acaggguuucacuaugcuggccag

SEQ ID NO: 1195305 - RNA, 24 nt, Human
acuaugcuggccaggcuggucuug

SEQ ID NO: 1195306 - RNA, 22 nt, Human
agaguacugaauacaaggugca

SEQ ID NO: 1195307 - RNA, 20 nt, Human
agcagaaaaaccucaguuga

SEQ ID NO: 1195308 - RNA, 19 nt, Human
agugaagacaggguuucac

SEQ ID NO: 1195309 - RNA, 19 nt, Human
auagagaccuaaguguuuc

SEQ ID NO: 1195310 - RNA, 24 nt, Human
auguugcaguauucccuugggaac

SEQ ID NO: 1195311 - RNA, 24 nt, Human
caaaguguugggauuacaggugug

SEQ ID NO: 1195312 - RNA, 28 nt, Human
caagcaaaaggcacuacuaaucaacggg

SEQ ID NO: 1195313 - RNA, 19 nt, Human
caccgcauacagucaaagg

SEQ ID NO: 1195314 - RNA, 21 nt, Human
cacuaugcuggccaggcuggu

SEQ ID NO: 1195315 - RNA, 24 nt, Human
cacuaugcuggccaggcuggucuu

SEQ ID NO: 1195316 - RNA, 23 nt, Human
cacuccaaggacacagaaaaaag

SEQ ID NO: 1195317 - RNA, 24 nt, Human
caggguuucacuaugcuggccagg

SEQ ID NO: 1195318 - RNA, 19 nt, Human
cagguaaaugguucagaac

SEQ ID NO: 1195319 - RNA, 18 nt, Human
caucacagagcucuuuug

SEQ ID NO: 1195320 - RNA, 21 nt, Human
ccaaaguguugggauuacagg

SEQ ID NO: 1195321 - RNA, 21 nt, Human
ccaaaguguugggauuacagg

SEQ ID NO: 1195322 - RNA, 24 nt, Human
ccaaaguguugggauuacaggugu

SEQ ID NO: 1195323 - RNA, 23 nt, Human
ccacaauuaagcaauucugauuu

SEQ ID NO: 1195324 - RNA, 26 nt, Human
ccacacuccaaggacacagaaaaaag

SEQ ID NO: 1195325 - RNA, 21 nt, Human
ccacgaaucccacccacacuc

SEQ ID NO: 1195326 - RNA, 26 nt, Human
ccucaguugacaaaaaaaaaaaaaaa

SEQ ID NO: 1195327 - RNA, 22 nt, Human
cgaccucagcaucccaaagugu

SEQ ID NO: 1195328 - RNA, 24 nt, Human
cgcacuaauaccaucaagaacucc

SEQ ID NO: 1195329 - RNA, 21 nt, Human
cgccgaccucagcaucccaaa

SEQ ID NO: 1195330 - RNA, 24 nt, Human
cuaaaaacuaaguacaauaagcac

SEQ ID NO: 1195331 - RNA, 24 nt, Human
cuggucccuaucaucuugucaagg

SEQ ID NO: 1195332 - RNA, 25 nt, Human
gaacaaauguacagugcuggucccu

SEQ ID NO: 1195333 - RNA, 22 nt, Human
gaacugcugacccugugauccg

SEQ ID NO: 1195334 - RNA, 23 nt, Human
gacccugugauccgccgaccuca

SEQ ID NO: 1195335 - RNA, 24 nt, Human
gacccugugauccgccgaccucag

SEQ ID NO: 1195336 - RNA, 18 nt, Human
gaguacugaauacaaggu

SEQ ID NO: 1195337 - RNA, 18 nt, Human
gauuacaggugugagcca

SEQ ID NO: 1195338 - RNA, 21 nt, Human
gauuacaggugugagccacca

SEQ ID NO: 1195339 - RNA, 24 nt, Human
gauuacaggugugagccaccaugc

SEQ ID NO: 1195340 - RNA, 23 nt, Human
gcacuaauaccaucaagaacucc

SEQ ID NO: 1195341 - RNA, 18 nt, Human
gccaaaucauucuuuucc

SEQ ID NO: 1195342 - RNA, 23 nt, Human
gccacaauuaagcaauucugauu

SEQ ID NO: 1195343 - RNA, 22 nt, Human
gcucuuuuggcuacauguacca

SEQ ID NO: 1195344 - RNA, 24 nt, Human
ggauuacaggugugagccaccaug

SEQ ID NO: 1195345 - RNA, 23 nt, Human
gguaaacucucaucuaaaauuuu

SEQ ID NO: 1195346 - RNA, 20 nt, Human
ggucuugaacugcugacccu

SEQ ID NO: 1195347 - RNA, 26 nt, Human
gugaagacaggguuucacuaugcugg

SEQ ID NO: 1195348 - RNA, 21 nt, Human
uaauuaaguggcuacuaauau

SEQ ID NO: 1195349 - RNA, 24 nt, Human
uacaggugugagccaccaugccca

SEQ ID NO: 1195350 - RNA, 24 nt, Human
uagugaagacaggguuucacuaug

SEQ ID NO: 1195351 - RNA, 19 nt, Human
uauauaacccagucuauca

SEQ ID NO: 1195352 - RNA, 24 nt, Human
uaugcuggccaggcuggucuugaa

SEQ ID NO: 1195353 - RNA, 18 nt, Human
ucaguugacaaaaaaaaa

SEQ ID NO: 1195354 - RNA, 24 nt, Human
ucaguugacaaaaaaaaaaaaaaa

SEQ ID NO: 1195355 - RNA, 26 nt, Human
ucaguugacaaaaaaaaaaaaaaaaa

SEQ ID NO: 1195356 - RNA, 18 nt, Human
uccaaggacacagaaaaa

SEQ ID NO: 1195357 - RNA, 24 nt, Human
uccacgaaucccacccacacucca

SEQ ID NO: 1195358 - RNA, 23 nt, Human
ucccaaaguguugggauuacagg

SEQ ID NO: 1195359 - RNA, 21 nt, Human
ucccucaugcauaaaauccaa

SEQ ID NO: 1195360 - RNA, 19 nt, Human
ucugugcugcaacaugagg

SEQ ID NO: 1195361 - RNA, 19 nt, Human
ucuucugugcugcaacaug

SEQ ID NO: 1195362 - RNA, 24 nt, Human
ugaaaauaauuaaguggcuacuaa

SEQ ID NO: 1195363 - RNA, 22 nt, Human
ugaccaaagauuaccuuucuca

SEQ ID NO: 1195364 - RNA, 23 nt, Human
ugaccaaagauuaccuuucucaa

SEQ ID NO: 1195365 - RNA, 20 nt, Human
ugaccaagggcugugccugc

SEQ ID NO: 1195366 - RNA, 18 nt, Human
ugcacuggccaauccagc

SEQ ID NO: 1195367 - RNA, 18 nt, Human
ugcuggccaggcuggucu

SEQ ID NO: 1195368 - RNA, 24 nt, Human
uggccaggcuggucuugaacugcu

SEQ ID NO: 1195369 - RNA, 18 nt, Human
ugggauuacaggugugag

SEQ ID NO: 1195370 - RNA, 22 nt, Human
ugggauuacaggugugagccac

SEQ ID NO: 1195371 - RNA, 23 nt, Human
ugggauuacaggugugagccacc

SEQ ID NO: 1195372 - RNA, 24 nt, Human
ugggauuacaggugugagccacca

SEQ ID NO: 1195373 - RNA, 25 nt, Human
ugggauuacaggugugagccaccau

SEQ ID NO: 1195374 - RNA, 22 nt, Human
ugguaaacucucaucuaaaauu

SEQ ID NO: 1195375 - RNA, 22 nt, Human
uguauccacgaaucccacccac

SEQ ID NO: 1195376 - RNA, 21 nt, Human
ugucaaggcauucucaucacc

SEQ ID NO: 1195377 - RNA, 24 nt, Human
ugucaaggcauucucaucaccuuu

SEQ ID NO: 1195378 - RNA, 18 nt, Human
uuaaaauaagccaaauca

SEQ ID NO: 1195379 - RNA, 21 nt, Human
uuagugaagacaggguuucac

SEQ ID NO: 1195380 - RNA, 24 nt, Human
uuagugaagacaggguuucacuau

SEQ ID NO: 1195381 - RNA, 23 nt, Human
uucagaaccauagcagaaaaacc

SEQ ID NO: 1195382 - RNA, 21 nt, Human
uugggauuacaggugugagcc

SEQ ID NO: 1195383 - RNA, 22 nt, Human
uuucacaaauacauguauuagg

SEQ ID NO: 1195384 - RNA, 21 nt, Human
uuucacuaugcuggccaggcu

SEQ ID NO: 1195385 - RNA, 18 nt, Human
aaauuaacaagguggcuc

SEQ ID NO: 1195386 - RNA, 20 nt, Human
aacacggugaaguccccauc

SEQ ID NO: 1195387 - RNA, 21 nt, Human
aacacggugaaguccccaucu

SEQ ID NO: 1195388 - RNA, 22 nt, Human
aacacggugaaguccccaucuc

SEQ ID NO: 1195389 - RNA, 23 nt, Human
aaccucaacuuuggcuggacaug

SEQ ID NO: 1195390 - RNA, 19 nt, Human
aagcauauuaugugauaac

SEQ ID NO: 1195391 - RNA, 23 nt, Human
aagguacagaauacuucagaaag

SEQ ID NO: 1195392 - RNA, 20 nt, Human
aauugcuugaacccaggagg

SEQ ID NO: 1195393 - RNA, 24 nt, Human
aauugcuugaacccaggaggcaga

SEQ ID NO: 1195394 - RNA, 21 nt, Human
acacggugaaguccccaucuc

SEQ ID NO: 1195395 - RNA, 19 nt, Human
acagaaaagacauguuaug

SEQ ID NO: 1195396 - RNA, 22 nt, Human
acaggagaauugcuugaaccca

SEQ ID NO: 1195397 - RNA, 24 nt, Human
acccaggaggcagagguugcagug

SEQ ID NO: 1195398 - RNA, 24 nt, Human
acuugaggucaggaguucaagacc

SEQ ID NO: 1195399 - RNA, 23 nt, Human
agacaggagaauugcuugaaccc

SEQ ID NO: 1195400 - RNA, 24 nt, Human
agacaggagaauugcuugaaccca

SEQ ID NO: 1195401 - RNA, 24 nt, Human
agagguugcagugagccgagaucg

SEQ ID NO: 1195402 - RNA, 23 nt, Human
agccaggugugguggcaugcgcc

SEQ ID NO: 1195403 - RNA, 24 nt, Human
agccuggccaacacggugaagucc

SEQ ID NO: 1195404 - RNA, 19 nt, Human
aggauacuuggcacagaaa

SEQ ID NO: 1195405 - RNA, 21 nt, Human
aggcagagguugcagugagcc

SEQ ID NO: 1195406 - RNA, 24 nt, Human
aggcagagguugcagugagccgag

SEQ ID NO: 1195407 - RNA, 22 nt, Human
aggcaggcacaucacuugaggu

SEQ ID NO: 1195408 - RNA, 26 nt, Human
aggcaggcacaucacuugaggucagg

SEQ ID NO: 1195409 - RNA, 21 nt, Human
aggccgaggcaggcacaucac

SEQ ID NO: 1195410 - RNA, 24 nt, Human
aggcugagacaggagaauugcuug

SEQ ID NO: 1195411 - RNA, 24 nt, Human
aggugugguggcaugcgccuguaa

SEQ ID NO: 1195412 - RNA, 21 nt, Human
aucacuugaggucaggaguuc

SEQ ID NO: 1195413 - RNA, 23 nt, Human
aucacuugaggucaggaguucaa

SEQ ID NO: 1195414 - RNA, 24 nt, Human
aucacuugaggucaggaguucaag

SEQ ID NO: 1195415 - RNA, 26 nt, Human
caaucaguuuccuaaucuuaagguuu

SEQ ID NO: 1195416 - RNA, 24 nt, Human
cacaucacuugaggucaggaguuc

SEQ ID NO: 1195417 - RNA, 23 nt, Human
cacgccuguaaucccagcauuuu

SEQ ID NO: 1195418 - RNA, 23 nt, Human
cacuugaggucaggaguucaaga

SEQ ID NO: 1195419 - RNA, 23 nt, Human
cagaaaagacauguuauggggcg

SEQ ID NO: 1195420 - RNA, 20 nt, Human
cagaauacuucagaaaguaa

SEQ ID NO: 1195421 - RNA, 24 nt, Human
cagcauuuucggaggccgaggcag

SEQ ID NO: 1195422 - RNA, 24 nt, Human
caucacuugaggucaggaguucaa

SEQ ID NO: 1195423 - RNA, 23 nt, Human
ccuggccaacacggugaaguccc

SEQ ID NO: 1195424 - RNA, 25 nt, Human
ccuggccaacacggugaagucccca

SEQ ID NO: 1195425 - RNA, 20 nt, Human
ccuguaaucccagcuacucg

SEQ ID NO: 1195426 - RNA, 22 nt, Human
ccuguaaucccagcuacucgag

SEQ ID NO: 1195427 - RNA, 24 nt, Human
cgccuguaaucccagcauuuucgg

SEQ ID NO: 1195428 - RNA, 23 nt, Human
cgccuguaaucccagcuacucga

SEQ ID NO: 1195429 - RNA, 21 nt, Human
cucacgccuguaaucccagca

SEQ ID NO: 1195430 - RNA, 25 nt, Human
cucacgccuguaaucccagcauuuu

SEQ ID NO: 1195431 - RNA, 24 nt, Human
cuggccaacacggugaagucccca

SEQ ID NO: 1195432 - RNA, 25 nt, Human
gacacugacacuaggagaggauacu

SEQ ID NO: 1195433 - RNA, 23 nt, Human
gacaugguggcucacgccuguaa

SEQ ID NO: 1195434 - RNA, 23 nt, Human
gagaauugcuugaacccaggagg

SEQ ID NO: 1195435 - RNA, 25 nt, Human
gagaggcugagacaggagaauugcu

SEQ ID NO: 1195436 - RNA, 25 nt, Human
gaggcaggcacaucacuugagguca

SEQ ID NO: 1195437 - RNA, 25 nt, Human
gccaacacggugaaguccccaucuc

SEQ ID NO: 1195438 - RNA, 22 nt, Human
ggaggcagagguugcagugagc

SEQ ID NO: 1195439 - RNA, 21 nt, Human
ggcaugcgccuguaaucccag

SEQ ID NO: 1195440 - RNA, 21 nt, Human
ggcucacgccuguaaucccag

SEQ ID NO: 1195441 - RNA, 21 nt, Human
ggcuggacaugguggcucacg

SEQ ID NO: 1195442 - RNA, 22 nt, Human
ggugcuaaaggucuuauaaacu

SEQ ID NO: 1195443 - RNA, 24 nt, Human
gguggcaugcgccuguaaucccag

SEQ ID NO: 1195444 - RNA, 24 nt, Human
gguggcucacgccuguaaucccag

SEQ ID NO: 1195445 - RNA, 21 nt, Human
gguggcucaucuucuauagug

SEQ ID NO: 1195446 - RNA, 21 nt, Human
guugcagugagccgagaucgc

SEQ ID NO: 1195447 - RNA, 25 nt, Human
uaaaccucaacuuuggcuggacaug

SEQ ID NO: 1195448 - RNA, 24 nt, Human
uaaauauaauuugagacacugaca

SEQ ID NO: 1195449 - RNA, 19 nt, Human
uaggagaggauacuuggca

SEQ ID NO: 1195450 - RNA, 20 nt, Human
uauuuuauuuccuggugcua

SEQ ID NO: 1195451 - RNA, 24 nt, Human
ucaauccccaccuccauuaacacc

SEQ ID NO: 1195452 - RNA, 21 nt, Human
ucacgccuguaaucccagcau

SEQ ID NO: 1195453 - RNA, 18 nt, Human
ucagagcaaauauuccaa

SEQ ID NO: 1195454 - RNA, 21 nt, Human
uccuggugcuaaaggucuuau

SEQ ID NO: 1195455 - RNA, 24 nt, Human
ucggaggccgaggcaggcacauca

SEQ ID NO: 1195456 - RNA, 21 nt, Human
ucuauaguguugauacaaagu

SEQ ID NO: 1195457 - RNA, 23 nt, Human
ucucuacuaaaaauauaaaaacu

SEQ ID NO: 1195458 - RNA, 24 nt, Human
ugagacaggagaauugcuugaacc

SEQ ID NO: 1195459 - RNA, 25 nt, Human
ugagacaggagaauugcuugaaccc

SEQ ID NO: 1195460 - RNA, 20 nt, Human
ugauacaaagucagcaaacu

SEQ ID NO: 1195461 - RNA, 21 nt, Human
uggcaugcgccuguaauccca

SEQ ID NO: 1195462 - RNA, 22 nt, Human
uggcucacgccuguaaucccag

SEQ ID NO: 1195463 - RNA, 24 nt, Human
uggcucacgccuguaaucccagca

SEQ ID NO: 1195464 - RNA, 24 nt, Human
ugggaagcagguaguuaaauacaa

SEQ ID NO: 1195465 - RNA, 24 nt, Human
ugguggcaugcgccuguaauccca

SEQ ID NO: 1195466 - RNA, 24 nt, Human
ugguggcucacgccuguaauccca

SEQ ID NO: 1195467 - RNA, 23 nt, Human
uguguguacacacacauauuuua

SEQ ID NO: 1195468 - RNA, 20 nt, Human
uguguguguacacacacaua

SEQ ID NO: 1195469 - RNA, 18 nt, Human
uugcagugagccgagauc

SEQ ID NO: 1195470 - RNA, 19 nt, Human
uugcagugagccgagaucg

SEQ ID NO: 1195471 - RNA, 20 nt, Human
uugcagugagccgagaucgc

SEQ ID NO: 1195472 - RNA, 24 nt, Human
uugcuugaacccaggaggcagagg

SEQ ID NO: 1195473 - RNA, 18 nt, Human
uuggcuggacaugguggc

SEQ ID NO: 1195474 - RNA, 18 nt, Human
uuuggcuggacauggugg

SEQ ID NO: 1195475 - RNA, 22 nt, Human
uuuucggaggccgaggcaggca

SEQ ID NO: 1195476 - RNA, 21 nt, Human
aacuucuuucagcauugcacu

SEQ ID NO: 1195477 - RNA, 21 nt, Human
acaggcaagggcaagaucaug

SEQ ID NO: 1195478 - RNA, 25 nt, Human
agaaaaaaaauccaaaaugauuagu

SEQ ID NO: 1195479 - RNA, 18 nt, Human
aggcaagggcaagaucau

SEQ ID NO: 1195480 - RNA, 19 nt, Human
agguuuuucuuccuuguua

SEQ ID NO: 1195481 - RNA, 22 nt, Human
aucacuuuccucacuugacggu

SEQ ID NO: 1195482 - RNA, 22 nt, Human
auggcuuucuggaguucaccau

SEQ ID NO: 1195483 - RNA, 18 nt, Human
caaagcaccccagcucuc

SEQ ID NO: 1195484 - RNA, 18 nt, Human
caauggcuuucuggaguu

SEQ ID NO: 1195485 - RNA, 21 nt, Human
caauuucuagaucacuuuccu

SEQ ID NO: 1195486 - RNA, 20 nt, Human
cagcuugauggcaucuguga

SEQ ID NO: 1195487 - RNA, 26 nt, Human
cauuuucgucucccauuucuugagga

SEQ ID NO: 1195488 - RNA, 20 nt, Human
cccaguggccuagaagucug

SEQ ID NO: 1195489 - RNA, 20 nt, Human
ccgccauuucuaaggcugag

SEQ ID NO: 1195490 - RNA, 23 nt, Human
ccuccauuaucuccgcauuuucg

SEQ ID NO: 1195491 - RNA, 21 nt, Human
cuagaagucugugugcuuucc

SEQ ID NO: 1195492 - RNA, 20 nt, Human
cuuuaagucuuccuccaccu

SEQ ID NO: 1195493 - RNA, 23 nt, Human
gccuuauccaucaucuccuccau

SEQ ID NO: 1195494 - RNA, 29 nt, Human
gggagagggguagggauuaucuucaaagg

SEQ ID NO: 1195495 - RNA, 18 nt, Human
guugaacuucuuucagca

SEQ ID NO: 1195496 - RNA, 25 nt, Human
uaacagacccuuuaaauuuguuuua

SEQ ID NO: 1195497 - RNA, 18 nt, Human
uaacuuuuauuucacuca

SEQ ID NO: 1195498 - RNA, 22 nt, Human
uaagaauuaacagacccuuuaa

SEQ ID NO: 1195499 - RNA, 20 nt, Human
uaagcaucuucccugcccaa

SEQ ID NO: 1195500 - RNA, 24 nt, Human
uaauaacuuuuauuucacucaaau

SEQ ID NO: 1195501 - RNA, 20 nt, Human
uagaagucugugugcuuucc

SEQ ID NO: 1195502 - RNA, 19 nt, Human
uauaagaauuaacagaccc

SEQ ID NO: 1195503 - RNA, 24 nt, Human
ucaauuucuagaucacuuuccuca

SEQ ID NO: 1195504 - RNA, 22 nt, Human
uccaauuuacaggcaagggcaa

SEQ ID NO: 1195505 - RNA, 18 nt, Human
uccuccaccuucuuacua

SEQ ID NO: 1195506 - RNA, 21 nt, Human
ucuaaggcugagcugaaucag

SEQ ID NO: 1195507 - RNA, 23 nt, Human
ucucggauggcaguauuuggcuu

SEQ ID NO: 1195508 - RNA, 22 nt, Human
ucucucgcucuucacuuuuuca

SEQ ID NO: 1195509 - RNA, 21 nt, Human
ucuuccuccaccuucuuacua

SEQ ID NO: 1195510 - RNA, 25 nt, Human
ugaaugaauacccuaauggcaaacc

SEQ ID NO: 1195511 - RNA, 23 nt, Human
ugagaaggacagcgguacauugg

SEQ ID NO: 1195512 - RNA, 24 nt, Human
ugaggagcaugagugucugguuca

SEQ ID NO: 1195513 - RNA, 21 nt, Human
ugaucuagguugcuuuuccuu

SEQ ID NO: 1195514 - RNA, 23 nt, Human
ugccuuauccaucaucuccucca

SEQ ID NO: 1195515 - RNA, 23 nt, Human
uggaguucaccaucauuuagggc

SEQ ID NO: 1195516 - RNA, 19 nt, Human
uggcugacaauuuacugau

SEQ ID NO: 1195517 - RNA, 21 nt, Human
ugucacagucucggauggcag

SEQ ID NO: 1195518 - RNA, 18 nt, Human
uucaaagaaaaaaaaucc

SEQ ID NO: 1195519 - RNA, 22 nt, Human
uucccaguggccuagaagucug

SEQ ID NO: 1195520 - RNA, 23 nt, Human
uucccaguggccuagaagucugu

SEQ ID NO: 1195521 - RNA, 25 nt, Human
uucuuccuuguuauuuucuucugau

SEQ ID NO: 1195522 - RNA, 20 nt, Human
uugcuuuuccuucagcaagg

SEQ ID NO: 1195523 - RNA, 18 nt, Human
uuuaaaaaguguuuaaag

SEQ ID NO: 1195524 - RNA, 22 nt, Human
uuuagggcuucgauagcagcca

SEQ ID NO: 1195525 - RNA, 23 nt, Human
uuucuggaguucaccaucauuua

SEQ ID NO: 1195526 - RNA, 20 nt, Human
ccgccauuucuaaggcugag

SEQ ID NO: 1195527 - RNA, 22 nt, Human
ccugugugcuuucccccgccau

SEQ ID NO: 1195528 - RNA, 21 nt, Human
ucuaaggcugagcugaaucag

SEQ ID NO: 1195529 - RNA, 23 nt, Human
ucucggauggcaguauuuggcuu

SEQ ID NO: 1195530 - RNA, 22 nt, Human
ucucucgcucuucacuuuuuca

SEQ ID NO: 1195531 - RNA, 20 nt, Human
ucugugccugugugcuuucc

SEQ ID NO: 1195532 - RNA, 18 nt, Human
ugccugugugcuuucccc

SEQ ID NO: 1195533 - RNA, 19 nt, Human
uggcugacaauuuacugau

SEQ ID NO: 1195534 - RNA, 21 nt, Human
ugucacagucucggauggcag

SEQ ID NO: 1195535 - RNA, 23 nt, Human
uugacgaagacacuggcccucuu

SEQ ID NO: 1195536 - RNA, 22 nt, Human
cacugccaaaugcucuucugcc

SEQ ID NO: 1195537 - RNA, 19 nt, Human
cagucccugccuucucugu

SEQ ID NO: 1195538 - RNA, 21 nt, Human
ucuucauagcagucccugccu

SEQ ID NO: 1195539 - RNA, 24 nt, Human
uucauagcagucccugccuucucu

SEQ ID NO: 1195540 - RNA, 24 nt, Human
uucucuguagucaucaucccugcg

SEQ ID NO: 1195541 - RNA, 20 nt, Human
cuccaaaaacuucugagccu

SEQ ID NO: 1195542 - RNA, 21 nt, Human
cugcucaccaagacucaguug

SEQ ID NO: 1195543 - RNA, 24 nt, Human
gagcaauuucaaacacuaagcuga

SEQ ID NO: 1195544 - RNA, 28 nt, Human
gagcaggcccucuuuaauccagaaguuu

SEQ ID NO: 1195545 - RNA, 18 nt, Human
gcaggcccucuuuaaucc

SEQ ID NO: 1195546 - RNA, 18 nt, Human
ggacucuauugaaacggg

SEQ ID NO: 1195547 - RNA, 21 nt, Human
gucccucacggcuccaaaaac

SEQ ID NO: 1195548 - RNA, 20 nt, Human
gugguccacuuucuuuaauu

SEQ ID NO: 1195549 - RNA, 18 nt, Human
guuugggaagcguagauu

SEQ ID NO: 1195550 - RNA, 23 nt, Human
uaccagauacauugcaguuuucu

SEQ ID NO: 1195551 - RNA, 20 nt, Human
uauguggugguccacuuucu

SEQ ID NO: 1195552 - RNA, 23 nt, Human
uauuucaguucagagcaauuuca

SEQ ID NO: 1195553 - RNA, 19 nt, Human
ucaaagcuuuauuaccgac

SEQ ID NO: 1195554 - RNA, 18 nt, Human
ucagaacuaacagguaua

SEQ ID NO: 1195555 - RNA, 27 nt, Human
ugagaacaucuuugaaugagcaggccc

SEQ ID NO: 1195556 - RNA, 28 nt, Human
ugagcaggcccucuuuaauccagaaguu

SEQ ID NO: 1195557 - RNA, 25 nt, Human
ugagccuuggucaaauuacuuugug

SEQ ID NO: 1195558 - RNA, 23 nt, Human
ugaucauaugauuuuuguuuuug

SEQ ID NO: 1195559 - RNA, 22 nt, Human
ugcugugucccucacggcucca

SEQ ID NO: 1195560 - RNA, 23 nt, Human
uggaugucuuucauugcagcauu

SEQ ID NO: 1195561 - RNA, 22 nt, Human
uggcaggcucugccccuuuuca

SEQ ID NO: 1195562 - RNA, 19 nt, Human
ugggaauggcuuuggaucu

SEQ ID NO: 1195563 - RNA, 24 nt, Human
ugucugcucaccaagacucaguug

SEQ ID NO: 1195564 - RNA, 19 nt, Human
uguuauacagccuggguua

SEQ ID NO: 1195565 - RNA, 27 nt, Human
uuauacugcugccuucggauucccaug

SEQ ID NO: 1195566 - RNA, 23 nt, Human
uucuuuauacugcugccuucgga

SEQ ID NO: 1195567 - RNA, 19 nt, Human
uugcacugagaacaucuuu

SEQ ID NO: 1195568 - RNA, 23 nt, Human
uuuguguaucuuugaguucuucu

SEQ ID NO: 1195569 - RNA, 21 nt, Human
cagaauggaaggccaaaggca

SEQ ID NO: 1195570 - RNA, 22 nt, Human
cauugggccuggcaaauaucua

SEQ ID NO: 1195571 - RNA, 18 nt, Human
ccagggaaagcaggguug

SEQ ID NO: 1195572 - RNA, 21 nt, Human
gcugguaacgagauugacauc

SEQ ID NO: 1195573 - RNA, 20 nt, Human
uaacgagauugacaucuaaa

SEQ ID NO: 1195574 - RNA, 22 nt, Human
uaccagggaaagcaggguugac

SEQ ID NO: 1195575 - RNA, 23 nt, Human
uggaaggccaaaggcauuaaagg

SEQ ID NO: 1195576 - RNA, 19 nt, Human
uggccccuaccuccacccc

SEQ ID NO: 1195577 - RNA, 20 nt, Human
uugggucaaaaggcugcugg

SEQ ID NO: 1195578 - RNA, 19 nt, Human
aaaugaaagaauaaaaacc

SEQ ID NO: 1195579 - RNA, 27 nt, Human
aaugaaagaauaaaaaccgaaaaagaa

SEQ ID NO: 1195580 - RNA, 18 nt, Human
acucguagcuccuucccu

SEQ ID NO: 1195581 - RNA, 26 nt, Human
cucggcggcuacucguagcuccuucc

SEQ ID NO: 1195582 - RNA, 20 nt, Human
cucguagcuccuucccucca

SEQ ID NO: 1195583 - RNA, 18 nt, Human
gcgcggcgggggcggcgg

SEQ ID NO: 1195584 - RNA, 23 nt, Human
gcgggggcggcggcucagcuggg

SEQ ID NO: 1195585 - RNA, 22 nt, Human
gggcgcggcgggggcggcggcu

SEQ ID NO: 1195586 - RNA, 22 nt, Human
gggggcgcggcgggggcggcgg

SEQ ID NO: 1195587 - RNA, 21 nt, Human
ucccuuguaaaaaugaaagaa

SEQ ID NO: 1195588 - RNA, 22 nt, Human
ucccuuguaaaaaugaaagaau

SEQ ID NO: 1195589 - RNA, 18 nt, Human
ucgcuggcuccgcggccu

SEQ ID NO: 1195590 - RNA, 19 nt, Human
ucgcuggcuccgcggccuc

SEQ ID NO: 1195591 - RNA, 24 nt, Human
aaaaauaucucaauccagacaaga

SEQ ID NO: 1195592 - RNA, 25 nt, Human
aaacauaaguccacacaaaggacca

SEQ ID NO: 1195593 - RNA, 22 nt, Human
aaggaccaaagauuaccuuacu

SEQ ID NO: 1195594 - RNA, 22 nt, Human
aaugcaauuuacaaugugcauu

SEQ ID NO: 1195595 - RNA, 22 nt, Human
acacaaaggaccaaagauuacc

SEQ ID NO: 1195596 - RNA, 19 nt, Human
acuaaaaauaucucaaucc

SEQ ID NO: 1195597 - RNA, 18 nt, Human
agacaagauaaaaaucaa

SEQ ID NO: 1195598 - RNA, 19 nt, Human
agcuauagaccaucauagg

SEQ ID NO: 1195599 - RNA, 25 nt, Human
auaaaaaucaacacauguauuuuua

SEQ ID NO: 1195600 - RNA, 21 nt, Human
augguaaacagcccuacugca

SEQ ID NO: 1195601 - RNA, 21 nt, Human
caaacagugcuacaccgaacu

SEQ ID NO: 1195602 - RNA, 24 nt, Human
caauccagacaagauaaaaaucaa

SEQ ID NO: 1195603 - RNA, 26 nt, Human
caccgaacuacugcuccgcuuucccc

SEQ ID NO: 1195604 - RNA, 18 nt, Human
ccagugcaguuuucuccu

SEQ ID NO: 1195605 - RNA, 21 nt, Human
ccccgggcccgaugccagccc

SEQ ID NO: 1195606 - RNA, 23 nt, Human
cccgccgagcgcagggcagcggg

SEQ ID NO: 1195607 - RNA, 19 nt, Human
ccucgccgcaaacagugcu

SEQ ID NO: 1195608 - RNA, 18 nt, Human
ccucuccuuccuuucucc

SEQ ID NO: 1195609 - RNA, 20 nt, Human
cuccucuccuuccuuucucc

SEQ ID NO: 1195610 - RNA, 23 nt, Human
cucuccuuccuuucuccucgccg

SEQ ID NO: 1195611 - RNA, 18 nt, Human
gaauucauuugguguuca

SEQ ID NO: 1195612 - RNA, 24 nt, Human
gcaaaaccaaaauauuacucaaau

SEQ ID NO: 1195613 - RNA, 20 nt, Human
gcaaacagugcuacaccgaa

SEQ ID NO: 1195614 - RNA, 22 nt, Human
gcuuccaaugguaaacagcccu

SEQ ID NO: 1195615 - RNA, 19 nt, Human
gcuucuagauugaucuccu

SEQ ID NO: 1195616 - RNA, 20 nt, Human
ggcagaucuccaugcuucua

SEQ ID NO: 1195617 - RNA, 19 nt, Human
uaaaaugguccagcuauag

SEQ ID NO: 1195618 - RNA, 18 nt, Human
uaucucaauccagacaag

SEQ ID NO: 1195619 - RNA, 18 nt, Human
ucaaaguuauaaugcaau

SEQ ID NO: 1195620 - RNA, 21 nt, Human
uccacacaaaggaccaaagau

SEQ ID NO: 1195621 - RNA, 20 nt, Human
uccagagugcaaaaccaaaa

SEQ ID NO: 1195622 - RNA, 21 nt, Human
ucuccucuccuuccuuucucc

SEQ ID NO: 1195623 - RNA, 22 nt, Human
ugaagaauccauucaguuucug

SEQ ID NO: 1195624 - RNA, 19 nt, Human
ugaucuccuccucuuuccc

SEQ ID NO: 1195625 - RNA, 19 nt, Human
ugaugacauaaaaauaguc

SEQ ID NO: 1195626 - RNA, 24 nt, Human
ugcaaaaccaaaauauuacucaaa

SEQ ID NO: 1195627 - RNA, 23 nt, Human
uuauugaugacauaaaaauaguc

SEQ ID NO: 1195628 - RNA, 21 nt, Human
uuccccgggcccgaugccagc

SEQ ID NO: 1195629 - RNA, 21 nt, Human
uugaauucauuugguguucau

SEQ ID NO: 1195630 - RNA, 22 nt, Human
aaaccagcuucaggucggccgg

SEQ ID NO: 1195631 - RNA, 20 nt, Human
aauaaaaucaaagucuauga

SEQ ID NO: 1195632 - RNA, 21 nt, Human
gggaauccaugauuugguagg

SEQ ID NO: 1195633 - RNA, 28 nt, Human
aaaaauaaugcagggauaaccgguaccc

SEQ ID NO: 1195634 - RNA, 20 nt, Human
aaagaugccacucucauuuc

SEQ ID NO: 1195635 - RNA, 20 nt, Human
aaagcuuucccuggauccac

SEQ ID NO: 1195636 - RNA, 26 nt, Human
aagaugccacucucauuucuggaaca

SEQ ID NO: 1195637 - RNA, 21 nt, Human
acaaagcuuuucagucucauu

SEQ ID NO: 1195638 - RNA, 21 nt, Human
acaaaggaaaaaucucccuuu

SEQ ID NO: 1195639 - RNA, 26 nt, Human
acagagcaguaaaagccaucucaaag

SEQ ID NO: 1195640 - RNA, 21 nt, Human
accuguuuauaguacacugau

SEQ ID NO: 1195641 - RNA, 26 nt, Human
acucucugagggugucugaggggagu

SEQ ID NO: 1195642 - RNA, 18 nt, Human
agcaguaaaagccaucuc

SEQ ID NO: 1195643 - RNA, 25 nt, Human
agccaucucaaagucagugagacuc

SEQ ID NO: 1195644 - RNA, 22 nt, Human
aggcauuuguuggauuucucac

SEQ ID NO: 1195645 - RNA, 20 nt, Human
auuuccacauuucccuacua

SEQ ID NO: 1195646 - RNA, 23 nt, Human
caaaccagacagcuuuuuacuga

SEQ ID NO: 1195647 - RNA, 21 nt, Human
cacuucccccccacccaaaaa

SEQ ID NO: 1195648 - RNA, 20 nt, Human
cagggauaacuaaaaaccug

SEQ ID NO: 1195649 - RNA, 24 nt, Human
caguaaaagccaucucaaagucag

SEQ ID NO: 1195650 - RNA, 18 nt, Human
cccauacaaagcuuuuca

SEQ ID NO: 1195651 - RNA, 22 nt, Human
cggugaauccuuggacaaaagc

SEQ ID NO: 1195652 - RNA, 20 nt, Human
cuacuauuuggaugcaggga

SEQ ID NO: 1195653 - RNA, 18 nt, Human
cugaggggagugcugugu

SEQ ID NO: 1195654 - RNA, 20 nt, Human
gaacagagcaguaaaagcca

SEQ ID NO: 1195655 - RNA, 23 nt, Human
gacaaaagcuuucccuggaucca

SEQ ID NO: 1195656 - RNA, 22 nt, Human
gaugaccuagagcuuggugguc

SEQ ID NO: 1195657 - RNA, 24 nt, Human
gccauguacccugaucaaacaaua

SEQ ID NO: 1195658 - RNA, 25 nt, Human
ggacaaaagcuuucccuggauccac

SEQ ID NO: 1195659 - RNA, 20 nt, Human
gggauaacuaaaaaccuguu

SEQ ID NO: 1195660 - RNA, 18 nt, Human
guagagggagaacagagc

SEQ ID NO: 1195661 - RNA, 22 nt, Human
gucagugagacucuauggaagc

SEQ ID NO: 1195662 - RNA, 24 nt, Human
gucauuucccaucagugugaacuc

SEQ ID NO: 1195663 - RNA, 21 nt, Human
uaaaacaaauaucuguguugc

SEQ ID NO: 1195664 - RNA, 27 nt, Human
uaaaacaaauaucuguguugcuaaugc

SEQ ID NO: 1195665 - RNA, 19 nt, Human
uagaaaaggaugagcuaug

SEQ ID NO: 1195666 - RNA, 20 nt, Human
uauggcuuaaggucuuccca

SEQ ID NO: 1195667 - RNA, 19 nt, Human
ucagagucaaccugcaccg

SEQ ID NO: 1195668 - RNA, 21 nt, Human
uccauagugauuccauaaaga

SEQ ID NO: 1195669 - RNA, 18 nt, Human
uccccagcacauguggag

SEQ ID NO: 1195670 - RNA, 21 nt, Human
ucccuggauccacuacacuug

SEQ ID NO: 1195671 - RNA, 21 nt, Human
ucuggaacacucugccauauu

SEQ ID NO: 1195672 - RNA, 19 nt, Human
ugaauccuuggacaaaagc

SEQ ID NO: 1195673 - RNA, 22 nt, Human
ugagacucuauggaagcagcuu

SEQ ID NO: 1195674 - RNA, 19 nt, Human
ugaugguuuaacaaaggaa

SEQ ID NO: 1195675 - RNA, 28 nt, Human
ugcaccguucauaagcacuuccccccca

SEQ ID NO: 1195676 - RNA, 21 nt, Human
uggaugcagggauggaugacc

SEQ ID NO: 1195677 - RNA, 23 nt, Human
uggcuuaaggucuucccaugucc

SEQ ID NO: 1195678 - RNA, 21 nt, Human
uggguguucgaggcugaaggu

SEQ ID NO: 1195679 - RNA, 21 nt, Human
uguauauaugaaaggcauuug

SEQ ID NO: 1195680 - RNA, 21 nt, Human
uguuggauuucucaccaauuu

SEQ ID NO: 1195681 - RNA, 21 nt, Human
uuaaggucuucccaugucccc

SEQ ID NO: 1195682 - RNA, 27 nt, Human
uucccauacaaagcuuuucagucucau

SEQ ID NO: 1195683 - RNA, 22 nt, Human
uucgcuguuguugggugaggug

SEQ ID NO: 1195684 - RNA, 24 nt, Human
uugguggucccauggucauuuccc

SEQ ID NO: 1195685 - RNA, 26 nt, Human
uuuccacauuucccuacuauuuggau

SEQ ID NO: 1195686 - RNA, 22 nt, Human
accgcagcccagaucugcagca

SEQ ID NO: 1195687 - RNA, 22 nt, Human
agcccagaucugcagcaggaaa

SEQ ID NO: 1195688 - RNA, 19 nt, Human
cagcccagaucugcagcag

SEQ ID NO: 1195689 - RNA, 24 nt, Human
ccuggcaccgcagcccagaucugc

SEQ ID NO: 1195690 - RNA, 18 nt, Human
cgcuggggucagcuugcu

SEQ ID NO: 1195691 - RNA, 19 nt, Human
cugcacggccugcuccggg

SEQ ID NO: 1195692 - RNA, 19 nt, Human
cuggggucagcuugcucug

SEQ ID NO: 1195693 - RNA, 23 nt, Human
gagugcucggcguagagcuucug

SEQ ID NO: 1195694 - RNA, 18 nt, Human
gcagggagugcucggcgu

SEQ ID NO: 1195695 - RNA, 18 nt, Human
gcccuggcaccgcagccc

SEQ ID NO: 1195696 - RNA, 19 nt, Human
uaggaacggaaauacagua

SEQ ID NO: 1195697 - RNA, 20 nt, Human
ucgcuggggucagcuugcuu

SEQ ID NO: 1195698 - RNA, 20 nt, Human
ucugcacggccugcuccggg

SEQ ID NO: 1195699 - RNA, 21 nt, Human
uggcaccgcagcccagaucuu

SEQ ID NO: 1195700 - RNA, 24 nt, Human
uggggucagcuugcucuguggcuc

SEQ ID NO: 1195701 - RNA, 25 nt, Human
aaaaaacaacaugggaauagaagua

SEQ ID NO: 1195702 - RNA, 24 nt, Human
aaaccacaaccaaagauguuacag

SEQ ID NO: 1195703 - RNA, 21 nt, Human
aaagagugguuuucuuuagga

SEQ ID NO: 1195704 - RNA, 27 nt, Human
aaccaagugauuaggaaaaccacaacc

SEQ ID NO: 1195705 - RNA, 23 nt, Human
acaaccagcaaaugauuucaccu

SEQ ID NO: 1195706 - RNA, 21 nt, Human
acagagugcacacaauucuga

SEQ ID NO: 1195707 - RNA, 18 nt, Human
acuuuccagcuuaaaauu

SEQ ID NO: 1195708 - RNA, 20 nt, Human
agcuacuaaaaaacuugcau

SEQ ID NO: 1195709 - RNA, 24 nt, Human
aggacugacuccauauugccauuu

SEQ ID NO: 1195710 - RNA, 21 nt, Human
agugcacacaauucugacagg

SEQ ID NO: 1195711 - RNA, 22 nt, Human
auaaaaacuaacccccccaucu

SEQ ID NO: 1195712 - RNA, 25 nt, Human
caaaaaauaaacaaccagcaaauga

SEQ ID NO: 1195713 - RNA, 24 nt, Human
caauaucccacacuauuuucuggu

SEQ ID NO: 1195714 - RNA, 22 nt, Human
cacaacugaauagcacguacac

SEQ ID NO: 1195715 - RNA, 21 nt, Human
cagcaaaugauuucaccucuu

SEQ ID NO: 1195716 - RNA, 19 nt, Human
ccgcugccacuccucccgc

SEQ ID NO: 1195717 - RNA, 20 nt, Human
ccgcugccacuccucccgcc

SEQ ID NO: 1195718 - RNA, 23 nt, Human
ccuggccgcugccacuccucccg

SEQ ID NO: 1195719 - RNA, 19 nt, Human
cugguggcagggagggugu

SEQ ID NO: 1195720 - RNA, 21 nt, Human
cugguggcagggagggugugu

SEQ ID NO: 1195721 - RNA, 20 nt, Human
gugugccgggugccugcggg

SEQ ID NO: 1195722 - RNA, 25 nt, Human
uaaaaaaagcauuuacacuuaaaaa

SEQ ID NO: 1195723 - RNA, 23 nt, Human
uaaccaagugauuaggaaaacca

SEQ ID NO: 1195724 - RNA, 23 nt, Human
uaagaggcuaucaaguaccagua

SEQ ID NO: 1195725 - RNA, 19 nt, Human
uacacuuaaaaagugggau

SEQ ID NO: 1195726 - RNA, 26 nt, Human
uaccaaaaaauaaacaaccagcaaau

SEQ ID NO: 1195727 - RNA, 27 nt, Human
uaccaaaaaauaaacaaccagcaaaug

SEQ ID NO: 1195728 - RNA, 20 nt, Human
uagaaguaauuuaaaauguu

SEQ ID NO: 1195729 - RNA, 21 nt, Human
uaggaaaaccacaaccaaaga

SEQ ID NO: 1195730 - RNA, 22 nt, Human
uaggaaacaauucuacuaaaaa

SEQ ID NO: 1195731 - RNA, 24 nt, Human
uaggaaacaauucuacuaaaaaac

SEQ ID NO: 1195732 - RNA, 23 nt, Human
uauaaaaacuaacccccccaucu

SEQ ID NO: 1195733 - RNA, 22 nt, Human
uauggaauguuaagcugacacc

SEQ ID NO: 1195734 - RNA, 23 nt, Human
uauuccagugacuuuccagcuua

SEQ ID NO: 1195735 - RNA, 18 nt, Human
ucaagacauuaaaugcag

SEQ ID NO: 1195736 - RNA, 21 nt, Human
ucuagagcuacuaaaaaacuu

SEQ ID NO: 1195737 - RNA, 23 nt, Human
ucuuucacagcacaguaaccaag

SEQ ID NO: 1195738 - RNA, 25 nt, Human
ugacacccgagacagucagagccuc

SEQ ID NO: 1195739 - RNA, 24 nt, Human
ugacuccauauugccauuuaauau

SEQ ID NO: 1195740 - RNA, 21 nt, Human
ugcacacaauucugacaggga

SEQ ID NO: 1195741 - RNA, 21 nt, Human
ugccgggugccugcgggcugc

SEQ ID NO: 1195742 - RNA, 21 nt, Human
uggccgcugccacuccucccg

SEQ ID NO: 1195743 - RNA, 21 nt, Human
ugguggcagggagggugugug

SEQ ID NO: 1195744 - RNA, 24 nt, Human
uuaggaaaaccacaaccaaagaug

SEQ ID NO: 1195745 - RNA, 24 nt, Human
uuauuccagugacuuuccagcuua

SEQ ID NO: 1195746 - RNA, 27 nt, Human
uucaauaucccacacuauuuucugguu

SEQ ID NO: 1195747 - RNA, 24 nt, Human
uucacagcacaguaaccaagugau

SEQ ID NO: 1195748 - RNA, 28 nt, Human
uucacagcacaguaaccaagugauucua

SEQ ID NO: 1195749 - RNA, 22 nt, Human
uucuacuaaaaaacaacauggg

SEQ ID NO: 1195750 - RNA, 22 nt, Human
uuguaccaaaaaauaaacaacc

SEQ ID NO: 1195751 - RNA, 20 nt, Human
uuuacacuuaaaaaguggga

SEQ ID NO: 1195752 - RNA, 23 nt, Human
uuuauuuucauaauugagauuuu

SEQ ID NO: 1195753 - RNA, 21 nt, Human
uuucacagcacaguaaccaag

SEQ ID NO: 1195754 - RNA, 25 nt, Human
caaguuggaagacgauuuaauuuca

SEQ ID NO: 1195755 - RNA, 26 nt, Human
ccccacucuuuuggaguccaacugga

SEQ ID NO: 1195756 - RNA, 22 nt, Human
gccccacucuuuuggaguccaa

SEQ ID NO: 1195757 - RNA, 20 nt, Human
uaagcagauagcaaaugcug

SEQ ID NO: 1195758 - RNA, 25 nt, Human
ugccccacucuuuuggaguccaacu

SEQ ID NO: 1195759 - RNA, 18 nt, Human
uuggaguccaacuggaga

SEQ ID NO: 1195760 - RNA, 19 nt, Human
aaaagcccaaagacaaagg

SEQ ID NO: 1195761 - RNA, 22 nt, Human
aaacaggcaagacuuuccccau

SEQ ID NO: 1195762 - RNA, 19 nt, Human
aaacaggguucacuuaugc

SEQ ID NO: 1195763 - RNA, 20 nt, Human
aaccaaaguaaaugggacag

SEQ ID NO: 1195764 - RNA, 23 nt, Human
aagaaaaugauagcaaugaccac

SEQ ID NO: 1195765 - RNA, 22 nt, Human
aagcacuggggacccuggaacu

SEQ ID NO: 1195766 - RNA, 18 nt, Human
aagcaguggcggugggga

SEQ ID NO: 1195767 - RNA, 18 nt, Human
aaggaaaaacacaaaugu

SEQ ID NO: 1195768 - RNA, 18 nt, Human
aaggagucgauucuucuu

SEQ ID NO: 1195769 - RNA, 19 nt, Human
aaggcaccauugaaggaaa

SEQ ID NO: 1195770 - RNA, 18 nt, Human
aagggcaaaagcccaaag

SEQ ID NO: 1195771 - RNA, 21 nt, Human
aauugcuccucaucaggagac

SEQ ID NO: 1195772 - RNA, 22 nt, Human
acaaaaacaccugaugaaaaaa

SEQ ID NO: 1195773 - RNA, 22 nt, Human
acaacccaaauguccaucaaca

SEQ ID NO: 1195774 - RNA, 21 nt, Human
acacagcaagagggagggagc

SEQ ID NO: 1195775 - RNA, 22 nt, Human
acccaaaagaaaaugauagcaa

SEQ ID NO: 1195776 - RNA, 24 nt, Human
acccuggaacuuuucccggcacuc

SEQ ID NO: 1195777 - RNA, 19 nt, Human
accucauacuuucccuucu

SEQ ID NO: 1195778 - RNA, 21 nt, Human
agaaaaacccagacuucccaa

SEQ ID NO: 1195779 - RNA, 22 nt, Human
agaauaaccucucuacacuaga

SEQ ID NO: 1195780 - RNA, 19 nt, Human
agacuguuagagcccaaac

SEQ ID NO: 1195781 - RNA, 19 nt, Human
agcagaaaaacccagacuu

SEQ ID NO: 1195782 - RNA, 22 nt, Human
agcagaaaaacccagacuuccc

SEQ ID NO: 1195783 - RNA, 27 nt, Human
agcuguccagaacuccuggaggacccc

SEQ ID NO: 1195784 - RNA, 18 nt, Human
aggaacgaaaucauuuac

SEQ ID NO: 1195785 - RNA, 21 nt, Human
aggaagccuuggaaaacaggc

SEQ ID NO: 1195786 - RNA, 19 nt, Human
aggcaagacuuuccccaua

SEQ ID NO: 1195787 - RNA, 20 nt, Human
augaagcaagacuagagccc

SEQ ID NO: 1195788 - RNA, 18 nt, Human
caaagggcaaaagcccaa

SEQ ID NO: 1195789 - RNA, 22 nt, Human
caaggacucccuuccuuugcuu

SEQ ID NO: 1195790 - RNA, 23 nt, Human
cacaacgaauccagccaggacaa

SEQ ID NO: 1195791 - RNA, 23 nt, Human
cacaguuucaaagggcaaaagcc

SEQ ID NO: 1195792 - RNA, 20 nt, Human
caccucauacuuucccuucu

SEQ ID NO: 1195793 - RNA, 19 nt, Human
cagagcagcuguccagaac

SEQ ID NO: 1195794 - RNA, 20 nt, Human
cagcaggccuccauuucccu

SEQ ID NO: 1195795 - RNA, 20 nt, Human
cagcccuugcaaagacuguc

SEQ ID NO: 1195796 - RNA, 23 nt, Human
caggaaagagggguugcuggagg

SEQ ID NO: 1195797 - RNA, 20 nt, Human
caucaugcccccagcccaac

SEQ ID NO: 1195798 - RNA, 18 nt, Human
caucggauggaaccagcu

SEQ ID NO: 1195799 - RNA, 19 nt, Human
cauugaccuucaggucugc

SEQ ID NO: 1195800 - RNA, 24 nt, Human
ccaaaaccugguaacaacccaaau

SEQ ID NO: 1195801 - RNA, 23 nt, Human
ccaauugcauggccuccugccac

SEQ ID NO: 1195802 - RNA, 18 nt, Human
ccacccauacaaugggau

SEQ ID NO: 1195803 - RNA, 23 nt, Human
ccacccauacaaugggauccuac

SEQ ID NO: 1195804 - RNA, 24 nt, Human
ccagcaucucuccuggcaacucca

SEQ ID NO: 1195805 - RNA, 20 nt, Human
ccauacaaugggauccuacc

SEQ ID NO: 1195806 - RNA, 30 nt, Human
cccaaaagaaaaugauagcaaugaccaccc

SEQ ID NO: 1195807 - RNA, 19 nt, Human
cccaaagacaaaggggucc

SEQ ID NO: 1195808 - RNA, 20 nt, Human
cccccagcccaacaccucau

SEQ ID NO: 1195809 - RNA, 21 nt, Human
ccccggcgguggagaaggcuc

SEQ ID NO: 1195810 - RNA, 23 nt, Human
ccgaacccaagcacuucccagcc

SEQ ID NO: 1195811 - RNA, 21 nt, Human
ccuaacugccacacccaaaag

SEQ ID NO: 1195812 - RNA, 19 nt, Human
ccuccuagaacaacggaaa

SEQ ID NO: 1195813 - RNA, 23 nt, Human
ccuccuagaacaacggaaauggg

SEQ ID NO: 1195814 - RNA, 22 nt, Human
ccuguaaccuugaacccaaggc

SEQ ID NO: 1195815 - RNA, 22 nt, Human
ccuucaggucugcagcaggccu

SEQ ID NO: 1195816 - RNA, 19 nt, Human
cggcacuccaaagucacag

SEQ ID NO: 1195817 - RNA, 18 nt, Human
cuaacugccacacccaaa

SEQ ID NO: 1195818 - RNA, 19 nt, Human
cuagacagucuuggguagg

SEQ ID NO: 1195819 - RNA, 19 nt, Human
cuagagcccaauugcaugg

SEQ ID NO: 1195820 - RNA, 20 nt, Human
cuagagcccaauugcauggc

SEQ ID NO: 1195821 - RNA, 23 nt, Human
cuauacccucccaguuccccaca

SEQ ID NO: 1195822 - RNA, 20 nt, Human
cucauguugccucagcguca

SEQ ID NO: 1195823 - RNA, 18 nt, Human
cuccucucaaaaguccaa

SEQ ID NO: 1195824 - RNA, 23 nt, Human
cucuacacuagagggcucauuuc

SEQ ID NO: 1195825 - RNA, 23 nt, Human
cugcagcaggccuccauuucccc

SEQ ID NO: 1195826 - RNA, 18 nt, Human
cugccaguaucuagacag

SEQ ID NO: 1195827 - RNA, 20 nt, Human
cuucuaagcuucccugaaca

SEQ ID NO: 1195828 - RNA, 19 nt, Human
gaacuccuggaggaccccc

SEQ ID NO: 1195829 - RNA, 20 nt, Human
gacagugauagaugcacugg

SEQ ID NO: 1195830 - RNA, 23 nt, Human
gacuguuagagcccaaacuuuug

SEQ ID NO: 1195831 - RNA, 18 nt, Human
gacuucccaauggccuca

SEQ ID NO: 1195832 - RNA, 23 nt, Human
gaugggggacagugaggagcagg

SEQ ID NO: 1195833 - RNA, 18 nt, Human
gccaguaucuagacaguc

SEQ ID NO: 1195834 - RNA, 25 nt, Human
gggagcuaaauuagacuaagcaaug

SEQ ID NO: 1195835 - RNA, 19 nt, Human
guggaggaagccuuggaaa

SEQ ID NO: 1195836 - RNA, 22 nt, Human
guggaggaagccuuggaaaaca

SEQ ID NO: 1195837 - RNA, 21 nt, Human
uaaacccucagaauaaccucu

SEQ ID NO: 1195838 - RNA, 18 nt, Human
uaacugacccuuuagccc

SEQ ID NO: 1195839 - RNA, 19 nt, Human
uacagccuuuccuguaacc

SEQ ID NO: 1195840 - RNA, 22 nt, Human
uacugaaaccucucugcccuuc

SEQ ID NO: 1195841 - RNA, 23 nt, Human
uagguccugaggugaaaaaaaag

SEQ ID NO: 1195842 - RNA, 24 nt, Human
uagguccugaggugaaaaaaaagg

SEQ ID NO: 1195843 - RNA, 18 nt, Human
uaucuagacagucuuggg

SEQ ID NO: 1195844 - RNA, 19 nt, Human
uauguggcucuugaagcau

SEQ ID NO: 1195845 - RNA, 22 nt, Human
ucaaagggcaaaagcccaaaga

SEQ ID NO: 1195846 - RNA, 18 nt, Human
ucaaauacaccauuccua

SEQ ID NO: 1195847 - RNA, 21 nt, Human
ucacaguuucaaagggcaaaa

SEQ ID NO: 1195848 - RNA, 23 nt, Human
ucacugucuugauuaugggggag

SEQ ID NO: 1195849 - RNA, 23 nt, Human
ucaggagacuguuagagcccaaa

SEQ ID NO: 1195850 - RNA, 21 nt, Human
ucauuuccaggccaauacuca

SEQ ID NO: 1195851 - RNA, 19 nt, Human
uccacccauacaaugggau

SEQ ID NO: 1195852 - RNA, 21 nt, Human
uccagaacuccuggaggaccc

SEQ ID NO: 1195853 - RNA, 18 nt, Human
ucccagccaaggacuccc

SEQ ID NO: 1195854 - RNA, 20 nt, Human
ucccauggcaagugggagcc

SEQ ID NO: 1195855 - RNA, 22 nt, Human
uccuguaaccuugaacccaagg

SEQ ID NO: 1195856 - RNA, 21 nt, Human
ucgguggcaggguggaggaag

SEQ ID NO: 1195857 - RNA, 18 nt, Human
ucuaagcuucccugaaca

SEQ ID NO: 1195858 - RNA, 22 nt, Human
ucuauagugacagcaagccaag

SEQ ID NO: 1195859 - RNA, 21 nt, Human
ugaaaaaaaaggagcuuccgu

SEQ ID NO: 1195860 - RNA, 18 nt, Human
ugaaaacuccuguaccuu

SEQ ID NO: 1195861 - RNA, 23 nt, Human
ugaaaccucucugcccuucuaag

SEQ ID NO: 1195862 - RNA, 18 nt, Human
ugaagcauucacaguuuc

SEQ ID NO: 1195863 - RNA, 18 nt, Human
ugauagcaaugaccaccu

SEQ ID NO: 1195864 - RNA, 32 nt, Human
ugauaugcacaaaaacaccugaugaaaaaaag

SEQ ID NO: 1195865 - RNA, 20 nt, Human
ugcacagcagaaaaacccag

SEQ ID NO: 1195866 - RNA, 19 nt, Human
ugccaaaaacccuccaacu

SEQ ID NO: 1195867 - RNA, 18 nt, Human
ugccacacccaaaagaaa

SEQ ID NO: 1195868 - RNA, 22 nt, Human
ugcugaaaacuccuguaccuug

SEQ ID NO: 1195869 - RNA, 18 nt, Human
ugcuggaggcgcaaggcc

SEQ ID NO: 1195870 - RNA, 22 nt, Human
uggaaaacaggcaagacuuucc

SEQ ID NO: 1195871 - RNA, 24 nt, Human
uggaaaacaggcaagacuuucccc

SEQ ID NO: 1195872 - RNA, 23 nt, Human
uggaaaauugcuccucaucagga

SEQ ID NO: 1195873 - RNA, 24 nt, Human
uggaggacccccguuuugugaaga

SEQ ID NO: 1195874 - RNA, 18 nt, Human
uggccaaaaccugguaac

SEQ ID NO: 1195875 - RNA, 22 nt, Human
uggcgguggggaugggggacag

SEQ ID NO: 1195876 - RNA, 22 nt, Human
ugucauggccaaaaccugguaa

SEQ ID NO: 1195877 - RNA, 24 nt, Human
uguccugccaguaucuagacaguc

SEQ ID NO: 1195878 - RNA, 21 nt, Human
ugugcugagugaaagaggcca

SEQ ID NO: 1195879 - RNA, 23 nt, Human
uuaaacaaucauugaccuucagg

SEQ ID NO: 1195880 - RNA, 22 nt, Human
uuacagccuuuccuguaaccuu

SEQ ID NO: 1195881 - RNA, 21 nt, Human
uuccugguucaguugaaugaa

SEQ ID NO: 1195882 - RNA, 20 nt, Human
uucgaacauucugacuuuga

SEQ ID NO: 1195883 - RNA, 25 nt, Human
uucuauggaauucuagaaaauggga

SEQ ID NO: 1195884 - RNA, 19 nt, Human
uugauuaugggggagguuu

SEQ ID NO: 1195885 - RNA, 18 nt, Human
uugcauggccuccugcca

SEQ ID NO: 1195886 - RNA, 22 nt, Human
uugugguggucaguguguaaau

SEQ ID NO: 1195887 - RNA, 20 nt, Human
uuuaagcuuuuacauucuag

SEQ ID NO: 1195888 - RNA, 18 nt, Human
uuucccuucuucccuguc

SEQ ID NO: 1195889 - RNA, 22 nt, Human
aaaccaccaggaagacuccagu

SEQ ID NO: 1195890 - RNA, 22 nt, Human
aaagaaacauuucaacagagaa

SEQ ID NO: 1195891 - RNA, 19 nt, Human
aaaugcuggagaugagacg

SEQ ID NO: 1195892 - RNA, 18 nt, Human
aacucccaucccuaccuc

SEQ ID NO: 1195893 - RNA, 24 nt, Human
aagcuaaaggcaguuccuucccaa

SEQ ID NO: 1195894 - RNA, 25 nt, Human
acagaagcagcaagaagggcgggaa

SEQ ID NO: 1195895 - RNA, 22 nt, Human
acugcaauucacucagcaaacu

SEQ ID NO: 1195896 - RNA, 24 nt, Human
agaagagacuccucuguucacaga

SEQ ID NO: 1195897 - RNA, 22 nt, Human
agaccaagaaccggaaggagga

SEQ ID NO: 1195898 - RNA, 21 nt, Human
agagaccagauauucagagac

SEQ ID NO: 1195899 - RNA, 20 nt, Human
agcaagaagggcgggaacac

SEQ ID NO: 1195900 - RNA, 21 nt, Human
agcaagaagggcgggaacacu

SEQ ID NO: 1195901 - RNA, 21 nt, Human
agcacacccugccugcauggc

SEQ ID NO: 1195902 - RNA, 24 nt, Human
agcgauucuccuuccucagccucc

SEQ ID NO: 1195903 - RNA, 18 nt, Human
aggaagcagaccaugaga

SEQ ID NO: 1195904 - RNA, 21 nt, Human
agggaggaagaggaggggcgg

SEQ ID NO: 1195905 - RNA, 19 nt, Human
agggcuggugucauuggca

SEQ ID NO: 1195906 - RNA, 19 nt, Human
aggggcuuguucuucugug

SEQ ID NO: 1195907 - RNA, 23 nt, Human
agggggugggcugaugcugcggg

SEQ ID NO: 1195908 - RNA, 21 nt, Human
aggucuggcaacuagccugcc

SEQ ID NO: 1195909 - RNA, 18 nt, Human
caaccaggacaaggccgg

SEQ ID NO: 1195910 - RNA, 20 nt, Human
caaguucugggucccugccu

SEQ ID NO: 1195911 - RNA, 23 nt, Human
caccaaaggucuggcaacuagcc

SEQ ID NO: 1195912 - RNA, 23 nt, Human
caccacuaccucugccuucuggg

SEQ ID NO: 1195913 - RNA, 18 nt, Human
caccuuagcaaguccugg

SEQ ID NO: 1195914 - RNA, 18 nt, Human
caccuuagcaaguccugg

SEQ ID NO: 1195915 - RNA, 23 nt, Human
caccuucacucuggucacggguc

SEQ ID NO: 1195916 - RNA, 18 nt, Human
cacuccaaauuacccagc

SEQ ID NO: 1195917 - RNA, 19 nt, Human
cacucuggaacccacuguc

SEQ ID NO: 1195918 - RNA, 19 nt, Human
cagauuguguccuccagga

SEQ ID NO: 1195919 - RNA, 24 nt, Human
cagcaaaaguucuaacaccaaagg

SEQ ID NO: 1195920 - RNA, 19 nt, Human
cagcacacccugccugcau

SEQ ID NO: 1195921 - RNA, 19 nt, Human
cagccuccugagugcuggg

SEQ ID NO: 1195922 - RNA, 27 nt, Human
cagcuuguacuaaagaaacauuucaac

SEQ ID NO: 1195923 - RNA, 25 nt, Human
ccaaagauuuacuggggcuaacuaa

SEQ ID NO: 1195924 - RNA, 18 nt, Human
ccaaaggucuggcaacua

SEQ ID NO: 1195925 - RNA, 19 nt, Human
ccaccaggcaagaguccaa

SEQ ID NO: 1195926 - RNA, 18 nt, Human
ccaggcaagaguccaaac

SEQ ID NO: 1195927 - RNA, 18 nt, Human
ccaggcauccgcccugcc

SEQ ID NO: 1195928 - RNA, 19 nt, Human
cccagcacacccugccugc

SEQ ID NO: 1195929 - RNA, 24 nt, Human
cccaggcuggugcaaucucggcuc

SEQ ID NO: 1195930 - RNA, 18 nt, Human
cccaucccuaccucagaa

SEQ ID NO: 1195931 - RNA, 24 nt, Human
ccccagagggcacagaagcagcaa

SEQ ID NO: 1195932 - RNA, 18 nt, Human
ccccccaggccugcucuc

SEQ ID NO: 1195933 - RNA, 18 nt, Human
cccuggagaagcuugagg

SEQ ID NO: 1195934 - RNA, 19 nt, Human
ccgcuccgucagugccugc

SEQ ID NO: 1195935 - RNA, 20 nt, Human
ccuagaccaagaaccggaag

SEQ ID NO: 1195936 - RNA, 19 nt, Human
ccucugccuucugggcuca

SEQ ID NO: 1195937 - RNA, 23 nt, Human
ccucuguucacagaagcuaaagg

SEQ ID NO: 1195938 - RNA, 22 nt, Human
ccugccaggaacuuccucucca

SEQ ID NO: 1195939 - RNA, 18 nt, Human
ccugccaucuugugccug

SEQ ID NO: 1195940 - RNA, 22 nt, Human
ccugccaucuugugccuggagc

SEQ ID NO: 1195941 - RNA, 24 nt, Human
ccuucugggcucaagcgauucucc

SEQ ID NO: 1195942 - RNA, 22 nt, Human
cggccaucccagcaaaaguucu

SEQ ID NO: 1195943 - RNA, 18 nt, Human
cggcucaccacuaccucu

SEQ ID NO: 1195944 - RNA, 21 nt, Human
cggcuccucguccugcauccc

SEQ ID NO: 1195945 - RNA, 20 nt, Human
cgggacgagaccaccaggca

SEQ ID NO: 1195946 - RNA, 24 nt, Human
cucaagcgauucuccuuccucagc

SEQ ID NO: 1195947 - RNA, 19 nt, Human
cucaccacuaccucugccu

SEQ ID NO: 1195948 - RNA, 23 nt, Human
cucagaccacucuggaacccacu

SEQ ID NO: 1195949 - RNA, 24 nt, Human
cucagaguccugaacucccauccc

SEQ ID NO: 1195950 - RNA, 20 nt, Human
cuccuguguccuggccgcuc

SEQ ID NO: 1195951 - RNA, 18 nt, Human
cugaacucccaucccuac

SEQ ID NO: 1195952 - RNA, 21 nt, Human
cugccuggaucuccucaccug

SEQ ID NO: 1195953 - RNA, 20 nt, Human
cugggcucaagcgauucucc

SEQ ID NO: 1195954 - RNA, 19 nt, Human
cugggguccaugcagcucu

SEQ ID NO: 1195955 - RNA, 21 nt, Human
cuuuuagcacugcaauucacu

SEQ ID NO: 1195956 - RNA, 23 nt, Human
gagacaggcagccuagaccaaga

SEQ ID NO: 1195957 - RNA, 22 nt, Human
gagccccccaggccugcucucc

SEQ ID NO: 1195958 - RNA, 20 nt, Human
gcaauccuguaccaagaccc

SEQ ID NO: 1195959 - RNA, 24 nt, Human
gcauccccgcugcuacuuccagaa

SEQ ID NO: 1195960 - RNA, 22 nt, Human
gccaggaacuuccucuccacaa

SEQ ID NO: 1195961 - RNA, 19 nt, Human
gccaguugggcagaugcgg

SEQ ID NO: 1195962 - RNA, 20 nt, Human
gcucuuguugcccaggcugg

SEQ ID NO: 1195963 - RNA, 19 nt, Human
ggaggaagaggaggggcgg

SEQ ID NO: 1195964 - RNA, 19 nt, Human
ggagggaggaagaggaggg

SEQ ID NO: 1195965 - RNA, 22 nt, Human
ggagggaggaagaggaggggcg

SEQ ID NO: 1195966 - RNA, 21 nt, Human
ggaguuggcagggccaaagau

SEQ ID NO: 1195967 - RNA, 19 nt, Human
ggcacagaagcagcaagaa

SEQ ID NO: 1195968 - RNA, 25 nt, Human
ggccugcucuccuguguccuggccg

SEQ ID NO: 1195969 - RNA, 22 nt, Human
ggggugggcugaugcugcgggc

SEQ ID NO: 1195970 - RNA, 24 nt, Human
ggugagggccacuccugggaggga

SEQ ID NO: 1195971 - RNA, 23 nt, Human
guccaugcagcucuaggcugagu

SEQ ID NO: 1195972 - RNA, 20 nt, Human
gucuggagccugcacuguuc

SEQ ID NO: 1195973 - RNA, 25 nt, Human
guuaucuucucagaguccugaacuc

SEQ ID NO: 1195974 - RNA, 19 nt, Human
uaccucugccuucugggcu

SEQ ID NO: 1195975 - RNA, 21 nt, Human
uaugacauguuaucuucucag

SEQ ID NO: 1195976 - RNA, 24 nt, Human
ucaccacuaccucugccuucuggg

SEQ ID NO: 1195977 - RNA, 20 nt, Human
ucaccacugucuguucucug

SEQ ID NO: 1195978 - RNA, 21 nt, Human
ucauccaggaaacauacucac

SEQ ID NO: 1195979 - RNA, 20 nt, Human
ucccuggagaagcuugagga

SEQ ID NO: 1195980 - RNA, 19 nt, Human
ucccugggacuugccggcu

SEQ ID NO: 1195981 - RNA, 23 nt, Human
uccugaacucccaucccuaccuc

SEQ ID NO: 1195982 - RNA, 20 nt, Human
uccugagcaaccuggagucc

SEQ ID NO: 1195983 - RNA, 19 nt, Human
uccuguguccuggccgcuc

SEQ ID NO: 1195984 - RNA, 24 nt, Human
ucucuucacucgagagaugaggac

SEQ ID NO: 1195985 - RNA, 21 nt, Human
ucuggcaacuagccugccauc

SEQ ID NO: 1195986 - RNA, 24 nt, Human
ugacagaccugccuuggcugagcg

SEQ ID NO: 1195987 - RNA, 22 nt, Human
ugagcaaccuggaguccucugu

SEQ ID NO: 1195988 - RNA, 23 nt, Human
ugaggaagcagaaaugcuggaga

SEQ ID NO: 1195989 - RNA, 18 nt, Human
ugcacuguuccaugagcc

SEQ ID NO: 1195990 - RNA, 26 nt, Human
ugcccaggcuggugcaaucucggcuc

SEQ ID NO: 1195991 - RNA, 20 nt, Human
ugccuggaucuccucaccuc

SEQ ID NO: 1195992 - RNA, 23 nt, Human
ugccuuggcugagcguucaccug

SEQ ID NO: 1195993 - RNA, 21 nt, Human
ugcucuuguugcccaggcugg

SEQ ID NO: 1195994 - RNA, 21 nt, Human
uggcugagcguucaccugucu

SEQ ID NO: 1195995 - RNA, 19 nt, Human
ugggaaccuuguugccagu

SEQ ID NO: 1195996 - RNA, 20 nt, Human
ugggagggggugggcugaug

SEQ ID NO: 1195997 - RNA, 21 nt, Human
ugggagggggugggcugaugc

SEQ ID NO: 1195998 - RNA, 18 nt, Human
ugggguccagagggaccg

SEQ ID NO: 1195999 - RNA, 22 nt, Human
ugggguccaugcagcucuaggc

SEQ ID NO: 1196000 - RNA, 18 nt, Human
uggugcaaucucggcuca

SEQ ID NO: 1196001 - RNA, 24 nt, Human
uuaacgccucuuuugcagucuccc

SEQ ID NO: 1196002 - RNA, 28 nt, Human
uuagauguuuguuaauugcucuuggucu

SEQ ID NO: 1196003 - RNA, 19 nt, Human
uucccugggacuugccggc

SEQ ID NO: 1196004 - RNA, 25 nt, Human
uucccugggacuugccggcuuuuag

SEQ ID NO: 1196005 - RNA, 23 nt, Human
uuccucagccuccugagugcugg

SEQ ID NO: 1196006 - RNA, 23 nt, Human
uucugggcucaagcgauucuccu

SEQ ID NO: 1196007 - RNA, 18 nt, Human
uucuucagacuuugcugc

SEQ ID NO: 1196008 - RNA, 21 nt, Human
uuguugcccaggcuggugcaa

SEQ ID NO: 1196009 - RNA, 27 nt, Human
uuuagcacugcaauucacucagcaaac

SEQ ID NO: 1196010 - RNA, 19 nt, Human
uuugccucagcuuguacua

SEQ ID NO: 1196011 - RNA, 21 nt, Human
uuuguaaaccaccaggaagac

SEQ ID NO: 1196012 - RNA, 24 nt, Human
uuuugcucuuguugcccaggcugg

SEQ ID NO: 1196013 - RNA, 23 nt, Human
caggaaaagcaggacuggcaaua

SEQ ID NO: 1196014 - RNA, 20 nt, Human
cagggcuguagggcaguugc

SEQ ID NO: 1196015 - RNA, 20 nt, Human
caguugccuucucuguccuu

SEQ ID NO: 1196016 - RNA, 21 nt, Human
ccgauacugcaggucuuuccu

SEQ ID NO: 1196017 - RNA, 19 nt, Human
ccggcaaaugccugccagg

SEQ ID NO: 1196018 - RNA, 19 nt, Human
ccuccacggaaacagggau

SEQ ID NO: 1196019 - RNA, 21 nt, Human
cuaaaagacagagcacuguaa

SEQ ID NO: 1196020 - RNA, 21 nt, Human
cugguaacaagagugacaccu

SEQ ID NO: 1196021 - RNA, 19 nt, Human
cuuuccuuuucuugucugg

SEQ ID NO: 1196022 - RNA, 20 nt, Human
gauacugcaggucuuuccuu

SEQ ID NO: 1196023 - RNA, 22 nt, Human
ggaaacagggaucugguaccug

SEQ ID NO: 1196024 - RNA, 24 nt, Human
uaccuggaggagagggacuucugc

SEQ ID NO: 1196025 - RNA, 21 nt, Human
ucccuaguuccccucccaccc

SEQ ID NO: 1196026 - RNA, 23 nt, Human
ucuuuccuuuucuugucuggguu

SEQ ID NO: 1196027 - RNA, 18 nt, Human
ugcugguaacaagaguga

SEQ ID NO: 1196028 - RNA, 19 nt, Human
uggguuagugcccacaacc

SEQ ID NO: 1196029 - RNA, 20 nt, Human
ugucuggguuagugcccaca

SEQ ID NO: 1196030 - RNA, 18 nt, Human
aagcgaaaacaauuagca

SEQ ID NO: 1196031 - RNA, 23 nt, Human
accguccagagcgauuuaguugu

SEQ ID NO: 1196032 - RNA, 18 nt, Human
cagugagcauuucucuuc

SEQ ID NO: 1196033 - RNA, 23 nt, Human
caugacauuuuucuaauauucuu

SEQ ID NO: 1196034 - RNA, 22 nt, Human
uaaugagaaauaagucacugag

SEQ ID NO: 1196035 - RNA, 19 nt, Human
ucacugagugagaugcggu

SEQ ID NO: 1196036 - RNA, 20 nt, Human
uggcugauuucguggggggu

SEQ ID NO: 1196037 - RNA, 22 nt, Human
uguggcugauuucguggggggu

SEQ ID NO: 1196038 - RNA, 22 nt, Human
uugugcagugagcauuucucuu

SEQ ID NO: 1196039 - RNA, 21 nt, Human
aaaaaugcugcuuagccaccc

SEQ ID NO: 1196040 - RNA, 18 nt, Human
aaaaaugcugcuuagccc

SEQ ID NO: 1196041 - RNA, 20 nt, Human
aaaauaauacucccacacca

SEQ ID NO: 1196042 - RNA, 24 nt, Human
aaagugcugggauaacagguguga

SEQ ID NO: 1196043 - RNA, 24 nt, Human
aaaguguugggauuacaggcguga

SEQ ID NO: 1196044 - RNA, 23 nt, Human
aaccuccuggacucaagcaaucc

SEQ ID NO: 1196045 - RNA, 25 nt, Human
aagcaauccucccaucucagccucc

SEQ ID NO: 1196046 - RNA, 24 nt, Human
aaguaccugggauuacaggcacau

SEQ ID NO: 1196047 - RNA, 22 nt, Human
aagugaguuccagaccucauaa

SEQ ID NO: 1196048 - RNA, 21 nt, Human
aaguguugggauuacaggcgu

SEQ ID NO: 1196049 - RNA, 26 nt, Human
aaguguugggauuacaggcgugagcc

SEQ ID NO: 1196050 - RNA, 18 nt, Human
acaccacuuggaacaccc

SEQ ID NO: 1196051 - RNA, 18 nt, Human
acaggguuucaccauguu

SEQ ID NO: 1196052 - RNA, 21 nt, Human
acaggguuucaccauguuggc

SEQ ID NO: 1196053 - RNA, 24 nt, Human
acaggguuucaccauguuggccag

SEQ ID NO: 1196054 - RNA, 21 nt, Human
acaguggcgcaaucuuggcuc

SEQ ID NO: 1196055 - RNA, 24 nt, Human
accacuuggaacaccccaguuuug

SEQ ID NO: 1196056 - RNA, 18 nt, Human
accauguuggccaggcug

SEQ ID NO: 1196057 - RNA, 19 nt, Human
acccaggcuggaguacagu

SEQ ID NO: 1196058 - RNA, 23 nt, Human
accuccuccuccucucucuccca

SEQ ID NO: 1196059 - RNA, 25 nt, Human
acuauguugcccaggcuggacucca

SEQ ID NO: 1196060 - RNA, 25 nt, Human
acucaaaaaaugcugcuuagccacc

SEQ ID NO: 1196061 - RNA, 20 nt, Human
acucaagcaauccucccauc

SEQ ID NO: 1196062 - RNA, 19 nt, Human
acugcagccucaaccuccu

SEQ ID NO: 1196063 - RNA, 18 nt, Human
acugcagccuccaccucc

SEQ ID NO: 1196064 - RNA, 18 nt, Human
agccaccgcaccuggccu

SEQ ID NO: 1196065 - RNA, 20 nt, Human
aggagcugccuugagagagu

SEQ ID NO: 1196066 - RNA, 22 nt, Human
aggagcugccuugagagagugg

SEQ ID NO: 1196067 - RNA, 25 nt, Human
aggcuggagugcaguggcacagucu

SEQ ID NO: 1196068 - RNA, 24 nt, Human
aggugauccgccugacucagccuc

SEQ ID NO: 1196069 - RNA, 20 nt, Human
aguacaguggcgcaaucuug

SEQ ID NO: 1196070 - RNA, 24 nt, Human
aguacaguggcgcaaucuuggcuc

SEQ ID NO: 1196071 - RNA, 21 nt, Human
agugcaguggcacagucuuug

SEQ ID NO: 1196072 - RNA, 19 nt, Human
auaccuccuccuccucucu

SEQ ID NO: 1196073 - RNA, 25 nt, Human
aucccaaugugcgugcguuguccau

SEQ ID NO: 1196074 - RNA, 21 nt, Human
augggcuguuuuuguguccag

SEQ ID NO: 1196075 - RNA, 19 nt, Human
auguagucucccguuuucu

SEQ ID NO: 1196076 - RNA, 20 nt, Human
auguugcccaggcuggacuc

SEQ ID NO: 1196077 - RNA, 24 nt, Human
auuuuuuuauuuuugguagagaca

SEQ ID NO: 1196078 - RNA, 21 nt, Human
caaaaaaugcugcuuagccac

SEQ ID NO: 1196079 - RNA, 23 nt, Human
caaaaaaugcugcuuagccaccc

SEQ ID NO: 1196080 - RNA, 24 nt, Human
caaagugcugggauaacaggugug

SEQ ID NO: 1196081 - RNA, 24 nt, Human
caaaguguugggauuacaggcgug

SEQ ID NO: 1196082 - RNA, 25 nt, Human
caaccuccuggacucaagcaauccu

SEQ ID NO: 1196083 - RNA, 28 nt, Human
caacuccuggacucgagugauccucccu

SEQ ID NO: 1196084 - RNA, 27 nt, Human
caagcaauccucccaucucagccuccc

SEQ ID NO: 1196085 - RNA, 22 nt, Human
caaguaccugggauuacaggca

SEQ ID NO: 1196086 - RNA, 21 nt, Human
cacaaacaucacacugccuuc

SEQ ID NO: 1196087 - RNA, 24 nt, Human
cacacaaacaucacacugccuucc

SEQ ID NO: 1196088 - RNA, 18 nt, Human
caccacuuggaacacccc

SEQ ID NO: 1196089 - RNA, 21 nt, Human
caccauguuggccaggcuggu

SEQ ID NO: 1196090 - RNA, 24 nt, Human
caccauguuggccaggcuggucuc

SEQ ID NO: 1196091 - RNA, 27 nt, Human
caccauguuggccaggcuggucucaaa

SEQ ID NO: 1196092 - RNA, 20 nt, Human
caccgcaccuggccuggucc

SEQ ID NO: 1196093 - RNA, 22 nt, Human
caccggcacacacaaacaucac

SEQ ID NO: 1196094 - RNA, 19 nt, Human
cacuauguugcccaggcug

SEQ ID NO: 1196095 - RNA, 24 nt, Human
cacuauguugcccaggcuggacuc

SEQ ID NO: 1196096 - RNA, 19 nt, Human
cacugcagccucaaccucc

SEQ ID NO: 1196097 - RNA, 23 nt, Human
cacugcagccuccaccuccuggg

SEQ ID NO: 1196098 - RNA, 20 nt, Human
cagccucaaccuccuggacu

SEQ ID NO: 1196099 - RNA, 25 nt, Human
cagccucaaccuccuggacucaagc

SEQ ID NO: 1196100 - RNA, 23 nt, Human
cagccuccaccuccuggguucaa

SEQ ID NO: 1196101 - RNA, 24 nt, Human
caggguuucaccauguuggccagg

SEQ ID NO: 1196102 - RNA, 19 nt, Human
caugcccccacacccagcu

SEQ ID NO: 1196103 - RNA, 24 nt, Human
cauguuggccaggcuggucucaaa

SEQ ID NO: 1196104 - RNA, 21 nt, Human
ccaaagugcugggauaacagg

SEQ ID NO: 1196105 - RNA, 24 nt, Human
ccaaagugcugggauaacaggugu

SEQ ID NO: 1196106 - RNA, 22 nt, Human
ccaaaguguugggauuacaggc

SEQ ID NO: 1196107 - RNA, 22 nt, Human
ccaaaguguugggauuacaggc

SEQ ID NO: 1196108 - RNA, 24 nt, Human
ccaaaguguugggauuacaggcgu

SEQ ID NO: 1196109 - RNA, 21 nt, Human
ccacaccacuuggaacacccc

SEQ ID NO: 1196110 - RNA, 26 nt, Human
ccaccuccuggguucaagcaauucuu

SEQ ID NO: 1196111 - RNA, 22 nt, Human
ccauaccuccuccuccucucuc

SEQ ID NO: 1196112 - RNA, 19 nt, Human
ccaugccugaccucacugg

SEQ ID NO: 1196113 - RNA, 23 nt, Human
cccauaccuccuccuccucucuc

SEQ ID NO: 1196114 - RNA, 24 nt, Human
cccucuguugcccaggcuggagug

SEQ ID NO: 1196115 - RNA, 20 nt, Human
ccucaaccuccuggacucaa

SEQ ID NO: 1196116 - RNA, 22 nt, Human
ccucaggugauccgccugacuc

SEQ ID NO: 1196117 - RNA, 19 nt, Human
ccuccaccuccuggguuca

SEQ ID NO: 1196118 - RNA, 26 nt, Human
ccucccaccuuggccucccaaagugc

SEQ ID NO: 1196119 - RNA, 24 nt, Human
ccuccuggguucaagcaauucucc

SEQ ID NO: 1196120 - RNA, 18 nt, Human
ccugaccucaggugaucc

SEQ ID NO: 1196121 - RNA, 23 nt, Human
ccugaccucaggugauccgccug

SEQ ID NO: 1196122 - RNA, 24 nt, Human
ccugaccucaggugauccgccuga

SEQ ID NO: 1196123 - RNA, 20 nt, Human
ccuggacucaagcaauccuc

SEQ ID NO: 1196124 - RNA, 22 nt, Human
ccuggacucgagugauccuccc

SEQ ID NO: 1196125 - RNA, 22 nt, Human
ccuggguucaagcaauucuccc

SEQ ID NO: 1196126 - RNA, 19 nt, Human
ccuuugugcuauaaaguuu

SEQ ID NO: 1196127 - RNA, 27 nt, Human
cgagugauccucccaccuuggccuccc

SEQ ID NO: 1196128 - RNA, 25 nt, Human
cguguaggagcugccuugagagagu

SEQ ID NO: 1196129 - RNA, 24 nt, Human
cucaaaaaaugcugcuuagccacc

SEQ ID NO: 1196130 - RNA, 24 nt, Human
cucaagcaauccucccaucucagc

SEQ ID NO: 1196131 - RNA, 19 nt, Human
cucaaguaccugggauuac

SEQ ID NO: 1196132 - RNA, 21 nt, Human
cucacugcagccuccaccucc

SEQ ID NO: 1196133 - RNA, 24 nt, Human
cucacugcagccuccaccuccugg

SEQ ID NO: 1196134 - RNA, 21 nt, Human
cucagccucccaaguagcugg

SEQ ID NO: 1196135 - RNA, 24 nt, Human
cucagccucccaaguagcuggggc

SEQ ID NO: 1196136 - RNA, 24 nt, Human
cucccacaccacuuggaacacccc

SEQ ID NO: 1196137 - RNA, 23 nt, Human
cucccucuguugcccaggcugga

SEQ ID NO: 1196138 - RNA, 24 nt, Human
cucccucuguugcccaggcuggag

SEQ ID NO: 1196139 - RNA, 19 nt, Human
cucccugccucagccucuc

SEQ ID NO: 1196140 - RNA, 21 nt, Human
cuccuggguucaagcaauucu

SEQ ID NO: 1196141 - RNA, 24 nt, Human
cucgagugauccucccaccuuggc

SEQ ID NO: 1196142 - RNA, 24 nt, Human
cucgcucugucacccaggcuggag

SEQ ID NO: 1196143 - RNA, 20 nt, Human
cucugucacccaggcuggag

SEQ ID NO: 1196144 - RNA, 23 nt, Human
cucugucacccaggcuggaguac

SEQ ID NO: 1196145 - RNA, 23 nt, Human
cucuguugcccaggcuggagugc

SEQ ID NO: 1196146 - RNA, 22 nt, Human
cugcagccucaaccuccuggac

SEQ ID NO: 1196147 - RNA, 23 nt, Human
cugcagccuccaccuccuggguu

SEQ ID NO: 1196148 - RNA, 24 nt, Human
cugcagccuccaccuccuggguuc

SEQ ID NO: 1196149 - RNA, 21 nt, Human
cuggcacaugcccccacaccc

SEQ ID NO: 1196150 - RNA, 19 nt, Human
cugucacccaggcuggagu

SEQ ID NO: 1196151 - RNA, 24 nt, Human
gaccucaggugauccgccugacuc

SEQ ID NO: 1196152 - RNA, 24 nt, Human
gagggucucacuauguugcccagg

SEQ ID NO: 1196153 - RNA, 25 nt, Human
gagugauccucccaccuuggccucc

SEQ ID NO: 1196154 - RNA, 25 nt, Human
gagugauccucccaccuuggccucc

SEQ ID NO: 1196155 - RNA, 18 nt, Human
gauaacaggugugagcca

SEQ ID NO: 1196156 - RNA, 24 nt, Human
gauuacaggcacaugcuaccaugc

SEQ ID NO: 1196157 - RNA, 18 nt, Human
gauuacaggcgugagcca

SEQ ID NO: 1196158 - RNA, 22 nt, Human
gauuacaggcgugagccaccgc

SEQ ID NO: 1196159 - RNA, 23 nt, Human
gauuacaggcgugagccaccgca

SEQ ID NO: 1196160 - RNA, 19 nt, Human
gcccaggcuggagugcagu

SEQ ID NO: 1196161 - RNA, 18 nt, Human
gccucaaccuccuggacu

SEQ ID NO: 1196162 - RNA, 21 nt, Human
gcucacugcagccuccaccuc

SEQ ID NO: 1196163 - RNA, 24 nt, Human
gcucccucuguugcccaggcugga

SEQ ID NO: 1196164 - RNA, 19 nt, Human
gcuggaguacaguggcgca

SEQ ID NO: 1196165 - RNA, 19 nt, Human
gcuggagugcaguggcaca

SEQ ID NO: 1196166 - RNA, 23 nt, Human
gcuggucucaaacuccugaccuc

SEQ ID NO: 1196167 - RNA, 21 nt, Human
ggagucauccccauaccuccu

SEQ ID NO: 1196168 - RNA, 24 nt, Human
ggcuggucucaaacuccugaccuc

SEQ ID NO: 1196169 - RNA, 22 nt, Human
ggguuucaccauguuggccagg

SEQ ID NO: 1196170 - RNA, 21 nt, Human
guagagacaggguuucaccau

SEQ ID NO: 1196171 - RNA, 22 nt, Human
guagagacaggguuucaccaug

SEQ ID NO: 1196172 - RNA, 25 nt, Human
guccauuuccuuuuaacccugccuu

SEQ ID NO: 1196173 - RNA, 24 nt, Human
gugauccgccugacucagccuccc

SEQ ID NO: 1196174 - RNA, 18 nt, Human
uaaagugaguuccagacc

SEQ ID NO: 1196175 - RNA, 23 nt, Human
uaacagcagaccuucccauccca

SEQ ID NO: 1196176 - RNA, 24 nt, Human
uaauuucuguauuuuuuauugaga

SEQ ID NO: 1196177 - RNA, 23 nt, Human
uaauuuuuuuauuuuugguagag

SEQ ID NO: 1196178 - RNA, 24 nt, Human
uaauuuuuuuauuuuugguagaga

SEQ ID NO: 1196179 - RNA, 22 nt, Human
uacaggcacaugcuaccaugcc

SEQ ID NO: 1196180 - RNA, 22 nt, Human
uacaggcgugagccaccgcacc

SEQ ID NO: 1196181 - RNA, 23 nt, Human
uacaggcgugagccaccgcaccu

SEQ ID NO: 1196182 - RNA, 23 nt, Human
uacaguggcgcaaucuuggcuca

SEQ ID NO: 1196183 - RNA, 24 nt, Human
uaccuccuccuccucucucuccca

SEQ ID NO: 1196184 - RNA, 21 nt, Human
uacuggcacaugcccccacac

SEQ ID NO: 1196185 - RNA, 22 nt, Human
uagagacaggguuucaccaugu

SEQ ID NO: 1196186 - RNA, 23 nt, Human
uaugggcuguuuuuguguccagu

SEQ ID NO: 1196187 - RNA, 18 nt, Human
uauguugcccaggcugga

SEQ ID NO: 1196188 - RNA, 24 nt, Human
uauguugcccaggcuggacuccaa

SEQ ID NO: 1196189 - RNA, 23 nt, Human
ucaaguaccugggauuacaggca

SEQ ID NO: 1196190 - RNA, 18 nt, Human
ucacugagcgcugcugua

SEQ ID NO: 1196191 - RNA, 19 nt, Human
ucacugcagccucaaccuc

SEQ ID NO: 1196192 - RNA, 20 nt, Human
ucacugcagccucaaccucc

SEQ ID NO: 1196193 - RNA, 23 nt, Human
ucacugcagccucaaccuccugg

SEQ ID NO: 1196194 - RNA, 23 nt, Human
ucacugcagccuccaccuccugg

SEQ ID NO: 1196195 - RNA, 24 nt, Human
ucacugcagccuccaccuccuggg

SEQ ID NO: 1196196 - RNA, 25 nt, Human
ucacugcagccuccaccuccugggu

SEQ ID NO: 1196197 - RNA, 27 nt, Human
ucacugcagccuccaccuccuggguuc

SEQ ID NO: 1196198 - RNA, 22 nt, Human
ucacugggcucugccuggucac

SEQ ID NO: 1196199 - RNA, 23 nt, Human
ucacugggcucugccuggucacu

SEQ ID NO: 1196200 - RNA, 20 nt, Human
ucagccucccaaguagcugg

SEQ ID NO: 1196201 - RNA, 23 nt, Human
ucagccucccaaguagcuggggc

SEQ ID NO: 1196202 - RNA, 20 nt, Human
ucauccccauaccuccuccu

SEQ ID NO: 1196203 - RNA, 23 nt, Human
ucccaaagugcugggauaacagg

SEQ ID NO: 1196204 - RNA, 24 nt, Human
ucccaaaguguugggauuacaggc

SEQ ID NO: 1196205 - RNA, 24 nt, Human
ucccaaguagcuggggcuacuggc

SEQ ID NO: 1196206 - RNA, 20 nt, Human
ucccucuguugcccaggcug

SEQ ID NO: 1196207 - RNA, 22 nt, Human
ucccucuguugcccaggcugga

SEQ ID NO: 1196208 - RNA, 24 nt, Human
ucccucuguugcccaggcuggagu

SEQ ID NO: 1196209 - RNA, 19 nt, Human
ucccugucacccacccaaa

SEQ ID NO: 1196210 - RNA, 27 nt, Human
uccucccaucucagccucccaaguagc

SEQ ID NO: 1196211 - RNA, 21 nt, Human
uccuggguucaagcaauucuc

SEQ ID NO: 1196212 - RNA, 25 nt, Human
uccuggguucaagcaauucucccug

SEQ ID NO: 1196213 - RNA, 24 nt, Human
ucucaaguaccugggauuacaggc

SEQ ID NO: 1196214 - RNA, 22 nt, Human
ucucacuauguugcccaggcug

SEQ ID NO: 1196215 - RNA, 23 nt, Human
ucucacuauguugcccaggcugg

SEQ ID NO: 1196216 - RNA, 24 nt, Human
ucucacuauguugcccaggcugga

SEQ ID NO: 1196217 - RNA, 19 nt, Human
ucucccugccucagccucu

SEQ ID NO: 1196218 - RNA, 19 nt, Human
ucucgcucugucacccagg

SEQ ID NO: 1196219 - RNA, 23 nt, Human
ucucgcucugucacccaggcugg

SEQ ID NO: 1196220 - RNA, 24 nt, Human
ucucgcucugucacccaggcugga

SEQ ID NO: 1196221 - RNA, 25 nt, Human
ucucgcucugucacccaggcuggag

SEQ ID NO: 1196222 - RNA, 26 nt, Human
ucucgcucugucacccaggcuggagu

SEQ ID NO: 1196223 - RNA, 18 nt, Human
ucugucacccaggcugga

SEQ ID NO: 1196224 - RNA, 24 nt, Human
ucugucacccaggcuggaguacag

SEQ ID NO: 1196225 - RNA, 18 nt, Human
ucuguugcccaggcugga

SEQ ID NO: 1196226 - RNA, 24 nt, Human
ucuguugcccaggcuggagugcag

SEQ ID NO: 1196227 - RNA, 21 nt, Human
ucuuuguucacugcagccuca

SEQ ID NO: 1196228 - RNA, 18 nt, Human
ugaccucaggugauccgc

SEQ ID NO: 1196229 - RNA, 24 nt, Human
ugacucagccucccaaaguguugg

SEQ ID NO: 1196230 - RNA, 22 nt, Human
ugagacaagggcucccucuguu

SEQ ID NO: 1196231 - RNA, 18 nt, Human
ugagaugggggagggucu

SEQ ID NO: 1196232 - RNA, 20 nt, Human
ugcccaggcuggacuccaac

SEQ ID NO: 1196233 - RNA, 18 nt, Human
ugcccaggcuggagugca

SEQ ID NO: 1196234 - RNA, 21 nt, Human
ugcccaggcuggagugcagug

SEQ ID NO: 1196235 - RNA, 22 nt, Human
ugcccaggcuggagugcagugg

SEQ ID NO: 1196236 - RNA, 24 nt, Human
ugcccaggcuggagugcaguggca

SEQ ID NO: 1196237 - RNA, 24 nt, Human
ugccucagccucucaaguaccugg

SEQ ID NO: 1196238 - RNA, 23 nt, Human
ugcuauaaaguuugcagagcacu

SEQ ID NO: 1196239 - RNA, 18 nt, Human
ugcuggagggucauuugg

SEQ ID NO: 1196240 - RNA, 21 nt, Human
uggaacaccccaguuuuggga

SEQ ID NO: 1196241 - RNA, 24 nt, Human
uggaguacaguggcgcaaucuugg

SEQ ID NO: 1196242 - RNA, 21 nt, Human
uggagugcaguggcacagucu

SEQ ID NO: 1196243 - RNA, 22 nt, Human
uggagugcaguggcacagucuu

SEQ ID NO: 1196244 - RNA, 23 nt, Human
uggagugcaguggcacagucuuu

SEQ ID NO: 1196245 - RNA, 23 nt, Human
uggcaagugauuagcuuugggag

SEQ ID NO: 1196246 - RNA, 24 nt, Human
uggccaggcuggucucaaacuccu

SEQ ID NO: 1196247 - RNA, 20 nt, Human
uggcuccccggcacuguuuu

SEQ ID NO: 1196248 - RNA, 21 nt, Human
ugggauaacaggugugagcca

SEQ ID NO: 1196249 - RNA, 22 nt, Human
ugggauaacaggugugagccau

SEQ ID NO: 1196250 - RNA, 22 nt, Human
ugggauuacaggcacaugcuac

SEQ ID NO: 1196251 - RNA, 24 nt, Human
ugggauuacaggcacaugcuacca

SEQ ID NO: 1196252 - RNA, 25 nt, Human
ugggauuacaggcacaugcuaccau

SEQ ID NO: 1196253 - RNA, 18 nt, Human
ugggauuacaggcgugag

SEQ ID NO: 1196254 - RNA, 19 nt, Human
ugggauuacaggcgugagc

SEQ ID NO: 1196255 - RNA, 21 nt, Human
ugggauuacaggcgugagcca

SEQ ID NO: 1196256 - RNA, 22 nt, Human
ugggauuacaggcgugagccac

SEQ ID NO: 1196257 - RNA, 23 nt, Human
ugggauuacaggcgugagccacc

SEQ ID NO: 1196258 - RNA, 24 nt, Human
ugggauuacaggcgugagccaccg

SEQ ID NO: 1196259 - RNA, 21 nt, Human
ugggguacaguggcaagugau

SEQ ID NO: 1196260 - RNA, 22 nt, Human
uggguucaagcaauucucccug

SEQ ID NO: 1196261 - RNA, 23 nt, Human
ugguagagacaggguuucaccau

SEQ ID NO: 1196262 - RNA, 24 nt, Human
ugguagagacaggguuucaccaug

SEQ ID NO: 1196263 - RNA, 22 nt, Human
uuacugcaagggaaaaaauaau

SEQ ID NO: 1196264 - RNA, 22 nt, Human
uucaagcaauucucccugccuc

SEQ ID NO: 1196265 - RNA, 24 nt, Human
uucacugcagccucaaccuccugg

SEQ ID NO: 1196266 - RNA, 24 nt, Human
uugcccaggcuggagugcaguggc

SEQ ID NO: 1196267 - RNA, 18 nt, Human
uuggccucccaaagugcu

SEQ ID NO: 1196268 - RNA, 24 nt, Human
uugguagagacaggguuucaccau

SEQ ID NO: 1196269 - RNA, 24 nt, Human
uuucaccauguuggccaggcuggu

SEQ ID NO: 1196270 - RNA, 23 nt, Human
uuugggaaaaggcagcguccaga

SEQ ID NO: 1196271 - RNA, 23 nt, Human
uuuuauuuuugguagagacaggg

SEQ ID NO: 1196272 - RNA, 22 nt, Human
uuuuugguagagacaggguuuc

SEQ ID NO: 1196273 - RNA, 24 nt, Human
uuuuugguagagacaggguuucac

SEQ ID NO: 1196274 - RNA, 26 nt, Human
uuuuuuuauuuuugguagagacaggg

SEQ ID NO: 1196275 - RNA, 18 nt, Human
aaacaagcaguuuauuua

SEQ ID NO: 1196276 - RNA, 22 nt, Human
aagcgccggaaucuccucagcu

SEQ ID NO: 1196277 - RNA, 25 nt, Human
agcaccaggagcugcagaagaagga

SEQ ID NO: 1196278 - RNA, 21 nt, Human
agcagcuauguacgaaaaagu

SEQ ID NO: 1196279 - RNA, 18 nt, Human
aggcggcagcgauggacc

SEQ ID NO: 1196280 - RNA, 24 nt, Human
caaacgagcacacaagcagcacca

SEQ ID NO: 1196281 - RNA, 25 nt, Human
cacagaaucaguauuuuuccccauc

SEQ ID NO: 1196282 - RNA, 18 nt, Human
caugccacuaauggagaa

SEQ ID NO: 1196283 - RNA, 25 nt, Human
ccagguccgcaccaaacgagcacac

SEQ ID NO: 1196284 - RNA, 24 nt, Human
cggcagcgauggaccagggcagag

SEQ ID NO: 1196285 - RNA, 18 nt, Human
cuacauguagcagcuaug

SEQ ID NO: 1196286 - RNA, 19 nt, Human
cuggaguaaagaagcaggu

SEQ ID NO: 1196287 - RNA, 19 nt, Human
gagcaugccacuaauggag

SEQ ID NO: 1196288 - RNA, 18 nt, Human
gaguaaagaagcagguuc

SEQ ID NO: 1196289 - RNA, 23 nt, Human
gguauuuucacagaaucaguauu

SEQ ID NO: 1196290 - RNA, 21 nt, Human
gugguggaaccaaauugcagu

SEQ ID NO: 1196291 - RNA, 19 nt, Human
uaagagcugaaugagcaug

SEQ ID NO: 1196292 - RNA, 23 nt, Human
uaguagucaggaugugguggaac

SEQ ID NO: 1196293 - RNA, 21 nt, Human
ucagcugccguuucacaaaag

SEQ ID NO: 1196294 - RNA, 18 nt, Human
ugacuugaagggaaaagu

SEQ ID NO: 1196295 - RNA, 21 nt, Human
uguuguuguuguuguuuuuga

SEQ ID NO: 1196296 - RNA, 26 nt, Human
uucacagaaucaguauuuuuccccau

SEQ ID NO: 1196297 - RNA, 23 nt, Human
uuucacagaaucaguauuuuucc

SEQ ID NO: 1196298 - RNA, 21 nt, Human
uuuuuauguuguuguuguugu

SEQ ID NO: 1196299 - RNA, 24 nt, Human
aaagugcugggauuacaggcauga

SEQ ID NO: 1196300 - RNA, 25 nt, Human
aagcgauucuccugccucagccucc

SEQ ID NO: 1196301 - RNA, 20 nt, Human
aagggguuucaccauauugg

SEQ ID NO: 1196302 - RNA, 21 nt, Human
aagggguuucaccauauuggu

SEQ ID NO: 1196303 - RNA, 24 nt, Human
aagggguuucaccauauuggucag

SEQ ID NO: 1196304 - RNA, 20 nt, Human
aaguagcugggauuacaggc

SEQ ID NO: 1196305 - RNA, 26 nt, Human
aaguagcugggauuacaggcgccugc

SEQ ID NO: 1196306 - RNA, 19 nt, Human
aagugcugggauuacaggc

SEQ ID NO: 1196307 - RNA, 21 nt, Human
aagugcugggauuacaggcau

SEQ ID NO: 1196308 - RNA, 26 nt, Human
aagugcugggauuacaggcaugagcc

SEQ ID NO: 1196309 - RNA, 20 nt, Human
aauccacccgccuuggcuuc

SEQ ID NO: 1196310 - RNA, 19 nt, Human
acaggcgccugccaccacg

SEQ ID NO: 1196311 - RNA, 24 nt, Human
accauauuggucaggcugguuuug

SEQ ID NO: 1196312 - RNA, 25 nt, Human
acccgccuuggcuucccaaagugcu

SEQ ID NO: 1196313 - RNA, 24 nt, Human
accucguaauccacccgccuuggc

SEQ ID NO: 1196314 - RNA, 19 nt, Human
acucaucugacaccccccc

SEQ ID NO: 1196315 - RNA, 25 nt, Human
acucugucgcccaggcuggagugca

SEQ ID NO: 1196316 - RNA, 23 nt, Human
agaguuucauuuggcaagcaccu

SEQ ID NO: 1196317 - RNA, 24 nt, Human
agcgauucuccugccucagccucc

SEQ ID NO: 1196318 - RNA, 21 nt, Human
aggcaaagguggagaguaggg

SEQ ID NO: 1196319 - RNA, 25 nt, Human
aggcuggagugcagugucacgaucu

SEQ ID NO: 1196320 - RNA, 24 nt, Human
agggguuucaccauauuggucagg

SEQ ID NO: 1196321 - RNA, 24 nt, Human
agugcagugucacgaucuuggcuc

SEQ ID NO: 1196322 - RNA, 22 nt, Human
auaacccguguuaaggagcaag

SEQ ID NO: 1196323 - RNA, 21 nt, Human
aucucguuaugauaacccgug

SEQ ID NO: 1196324 - RNA, 20 nt, Human
caaagaaacuguacuaaugc

SEQ ID NO: 1196325 - RNA, 24 nt, Human
caaagugcugggauuacaggcaug

SEQ ID NO: 1196326 - RNA, 22 nt, Human
caagcgauucuccugccucagc

SEQ ID NO: 1196327 - RNA, 19 nt, Human
caccauauuggucaggcug

SEQ ID NO: 1196328 - RNA, 21 nt, Human
caccauauuggucaggcuggu

SEQ ID NO: 1196329 - RNA, 24 nt, Human
caccauauuggucaggcugguuuu

SEQ ID NO: 1196330 - RNA, 23 nt, Human
cacccgccuuggcuucccaaagu

SEQ ID NO: 1196331 - RNA, 24 nt, Human
cacccgccuuggcuucccaaagug

SEQ ID NO: 1196332 - RNA, 24 nt, Human
cacucugucgcccaggcuggagug

SEQ ID NO: 1196333 - RNA, 23 nt, Human
cacugugaccucugcccuguggg

SEQ ID NO: 1196334 - RNA, 18 nt, Human
cagacucugaauccaacu

SEQ ID NO: 1196335 - RNA, 20 nt, Human
cagaguuucauuuggcaagc

SEQ ID NO: 1196336 - RNA, 26 nt, Human
caggcgccugccaccacgguaauuuu

SEQ ID NO: 1196337 - RNA, 24 nt, Human
cauucuuccuuuuuccuccuuacu

SEQ ID NO: 1196338 - RNA, 23 nt, Human
ccaaagugcugggauuacaggca

SEQ ID NO: 1196339 - RNA, 24 nt, Human
ccaaagugcugggauuacaggcau

SEQ ID NO: 1196340 - RNA, 22 nt, Human
ccaaguagcugggauuacaggc

SEQ ID NO: 1196341 - RNA, 23 nt, Human
ccaucuuuccagacucugaaucc

SEQ ID NO: 1196342 - RNA, 24 nt, Human
cccaaagugcugggauuacaggca

SEQ ID NO: 1196343 - RNA, 23 nt, Human
cccaaguagcugggauuacaggc

SEQ ID NO: 1196344 - RNA, 24 nt, Human
cccaaguagcugggauuacaggcg

SEQ ID NO: 1196345 - RNA, 21 nt, Human
cccccuucuuccuccuaacuu

SEQ ID NO: 1196346 - RNA, 19 nt, Human
cccuccuuccuacuuccuu

SEQ ID NO: 1196347 - RNA, 18 nt, Human
cccuccuuccuccuuucu

SEQ ID NO: 1196348 - RNA, 19 nt, Human
cccucucccuccuuccucc

SEQ ID NO: 1196349 - RNA, 19 nt, Human
ccuacuucccucucccucc

SEQ ID NO: 1196350 - RNA, 19 nt, Human
ccuacuucccucucccucc

SEQ ID NO: 1196351 - RNA, 19 nt, Human
ccuacuuccucuuccucca

SEQ ID NO: 1196352 - RNA, 24 nt, Human
ccucacucugucgcccaggcugga

SEQ ID NO: 1196353 - RNA, 26 nt, Human
ccucacucugucgcccaggcuggagu

SEQ ID NO: 1196354 - RNA, 27 nt, Human
ccucacucugucgcccaggcuggagug

SEQ ID NO: 1196355 - RNA, 18 nt, Human
ccucccuccuuccuacuu

SEQ ID NO: 1196356 - RNA, 20 nt, Human
ccucccuccuuccuacuucc

SEQ ID NO: 1196357 - RNA, 22 nt, Human
ccucuuccuccauuuucuuucc

SEQ ID NO: 1196358 - RNA, 20 nt, Human
ccugaccucguaauccaccc

SEQ ID NO: 1196359 - RNA, 21 nt, Human
ccugccaucaaacuucccuug

SEQ ID NO: 1196360 - RNA, 26 nt, Human
ccugccaucaaacuucccuuguggca

SEQ ID NO: 1196361 - RNA, 23 nt, Human
ccugccucagccucccaaguagc

SEQ ID NO: 1196362 - RNA, 24 nt, Human
ccugccucagccucccaaguagcu

SEQ ID NO: 1196363 - RNA, 22 nt, Human
ccugucuuccuuuuuucuucuu

SEQ ID NO: 1196364 - RNA, 23 nt, Human
ccuucauucuuccuuuuuccucc

SEQ ID NO: 1196365 - RNA, 18 nt, Human
ccuucgucuucuucuucc

SEQ ID NO: 1196366 - RNA, 19 nt, Human
ccuucuuccuccucccucc

SEQ ID NO: 1196367 - RNA, 19 nt, Human
cgcugaaguuuggaaagga

SEQ ID NO: 1196368 - RNA, 24 nt, Human
cucacucugucgcccaggcuggag

SEQ ID NO: 1196369 - RNA, 19 nt, Human
cucacugugaccucugccc

SEQ ID NO: 1196370 - RNA, 21 nt, Human
cucacugugaccucugcccug

SEQ ID NO: 1196371 - RNA, 24 nt, Human
cucagccucccaaguagcugggau

SEQ ID NO: 1196372 - RNA, 20 nt, Human
cucccuccuuccuacuuccu

SEQ ID NO: 1196373 - RNA, 22 nt, Human
cuccuccuucgucuucuucuuc

SEQ ID NO: 1196374 - RNA, 24 nt, Human
cuccugaccucguaauccacccgc

SEQ ID NO: 1196375 - RNA, 24 nt, Human
cucuacacucaucugacacccccc

SEQ ID NO: 1196376 - RNA, 18 nt, Human
cucucugacggagccuca

SEQ ID NO: 1196377 - RNA, 24 nt, Human
cuguaaagauuguaucuuccaucu

SEQ ID NO: 1196378 - RNA, 24 nt, Human
cugugaccucugcccuguggguuc

SEQ ID NO: 1196379 - RNA, 24 nt, Human
cuguggguucaagcgauucuccug

SEQ ID NO: 1196380 - RNA, 24 nt, Human
cuucccucucccuccuuccuccuu

SEQ ID NO: 1196381 - RNA, 18 nt, Human
cuuccuacuuccucuucc

SEQ ID NO: 1196382 - RNA, 19 nt, Human
cuuccuccuuucuacuucc

SEQ ID NO: 1196383 - RNA, 19 nt, Human
cuuccuucuuccuccuccc

SEQ ID NO: 1196384 - RNA, 25 nt, Human
cuuccuuuuucccccuucuuccucc

SEQ ID NO: 1196385 - RNA, 19 nt, Human
cuucuuccuccucccuccu

SEQ ID NO: 1196386 - RNA, 23 nt, Human
cuucuucuuccuuuuucccccuu

SEQ ID NO: 1196387 - RNA, 26 nt, Human
cuucuucuuuuuucuuccuuccaucu

SEQ ID NO: 1196388 - RNA, 21 nt, Human
gaccucguaauccacccgccu

SEQ ID NO: 1196389 - RNA, 25 nt, Human
gaccucguaauccacccgccuuggc

SEQ ID NO: 1196390 - RNA, 24 nt, Human
gagaagggguuucaccauauuggu

SEQ ID NO: 1196391 - RNA, 18 nt, Human
gauuacaggcaugagccg

SEQ ID NO: 1196392 - RNA, 22 nt, Human
gauuacaggcaugagccgcugc

SEQ ID NO: 1196393 - RNA, 22 nt, Human
gauuacaggcaugagccgcugc

SEQ ID NO: 1196394 - RNA, 18 nt, Human
gauuacaggcgccugcca

SEQ ID NO: 1196395 - RNA, 21 nt, Human
gcccaggcuggagugcagugu

SEQ ID NO: 1196396 - RNA, 22 nt, Human
gccuuggcuucccaaagugcug

SEQ ID NO: 1196397 - RNA, 24 nt, Human
gccuuggcuucccaaagugcuggg

SEQ ID NO: 1196398 - RNA, 24 nt, Human
gcgauucuccugccucagccuccc

SEQ ID NO: 1196399 - RNA, 23 nt, Human
gcugguuuugaacuccugaccuc

SEQ ID NO: 1196400 - RNA, 22 nt, Human
ggauuacaggcaugagccgcug

SEQ ID NO: 1196401 - RNA, 24 nt, Human
ggcugguuuugaacuccugaccuc

SEQ ID NO: 1196402 - RNA, 22 nt, Human
gggguuucaccauauuggucag

SEQ ID NO: 1196403 - RNA, 23 nt, Human
gggguuucaccauauuggucagg

SEQ ID NO: 1196404 - RNA, 20 nt, Human
ggguucaagcgauucuccug

SEQ ID NO: 1196405 - RNA, 20 nt, Human
gguuuggcuuauuaccggcu

SEQ ID NO: 1196406 - RNA, 24 nt, Human
guaauccacccgccuuggcuuccc

SEQ ID NO: 1196407 - RNA, 18 nt, Human
guagcugggauuacaggc

SEQ ID NO: 1196408 - RNA, 24 nt, Human
guguguccuccuccuucgucuucu

SEQ ID NO: 1196409 - RNA, 23 nt, Human
uaaaaaguguguccuccuccuuc

SEQ ID NO: 1196410 - RNA, 24 nt, Human
uaauuuuuguauuuuuaguagaga

SEQ ID NO: 1196411 - RNA, 19 nt, Human
uacacacuccaaguccugc

SEQ ID NO: 1196412 - RNA, 21 nt, Human
uacuaagauuccaaacgcuga

SEQ ID NO: 1196413 - RNA, 21 nt, Human
uacuuccuucuuccuccuccc

SEQ ID NO: 1196414 - RNA, 24 nt, Human
uaguacaucaugcauacacacucc

SEQ ID NO: 1196415 - RNA, 23 nt, Human
uaguagagaagggguuucaccau

SEQ ID NO: 1196416 - RNA, 24 nt, Human
uaguagagaagggguuucaccaua

SEQ ID NO: 1196417 - RNA, 20 nt, Human
ucaaaacacaauuuguugua

SEQ ID NO: 1196418 - RNA, 19 nt, Human
ucaagcgauucuccugccu

SEQ ID NO: 1196419 - RNA, 24 nt, Human
ucacucugucgcccaggcuggagu

SEQ ID NO: 1196420 - RNA, 24 nt, Human
ucacugugaccucugcccuguggg

SEQ ID NO: 1196421 - RNA, 20 nt, Human
ucagccucccaaguagcugg

SEQ ID NO: 1196422 - RNA, 19 nt, Human
ucaucugacacccccccaa

SEQ ID NO: 1196423 - RNA, 24 nt, Human
ucaugcauacacacuccaaguccu

SEQ ID NO: 1196424 - RNA, 23 nt, Human
uccaucuuccuucuucccucuga

SEQ ID NO: 1196425 - RNA, 24 nt, Human
ucccaaagugcugggauuacaggc

SEQ ID NO: 1196426 - RNA, 24 nt, Human
ucccaaguagcugggauuacaggc

SEQ ID NO: 1196427 - RNA, 20 nt, Human
ucccuccuuccuccuuucuc

SEQ ID NO: 1196428 - RNA, 18 nt, Human
ucccucucccuccuuccu

SEQ ID NO: 1196429 - RNA, 22 nt, Human
ucccuuguggcagcaacaguuu

SEQ ID NO: 1196430 - RNA, 25 nt, Human
uccuaacuucuuccuccuuucuacu

SEQ ID NO: 1196431 - RNA, 22 nt, Human
uccuccuccuucgucuucuucu

SEQ ID NO: 1196432 - RNA, 25 nt, Human
uccuucauucuuccuuuuuccuccu

SEQ ID NO: 1196433 - RNA, 24 nt, Human
uccuucuuccuccucccuccuucc

SEQ ID NO: 1196434 - RNA, 22 nt, Human
uccuucuucuuuuuucuucccu

SEQ ID NO: 1196435 - RNA, 24 nt, Human
uccuuucuacugccuucuuccucc

SEQ ID NO: 1196436 - RNA, 21 nt, Human
uccuuuucccugauuccuccu

SEQ ID NO: 1196437 - RNA, 24 nt, Human
ucgcccaggcuggagugcaguguc

SEQ ID NO: 1196438 - RNA, 27 nt, Human
ucuacuuccuccugucuuccuuuuuuc

SEQ ID NO: 1196439 - RNA, 24 nt, Human
ucucccuccuuccuccuuucuacu

SEQ ID NO: 1196440 - RNA, 26 nt, Human
ucuccugccucagccucccaaguagc

SEQ ID NO: 1196441 - RNA, 18 nt, Human
ucugucucucucucucuc

SEQ ID NO: 1196442 - RNA, 19 nt, Human
ucuuccuacuuccucuucc

SEQ ID NO: 1196443 - RNA, 20 nt, Human
ucuuccuccuuucuacuucc

SEQ ID NO: 1196444 - RNA, 19 nt, Human
ucuuccuuuuuucuucuuc

SEQ ID NO: 1196445 - RNA, 24 nt, Human
ucuucuuccuuuuucccccuucuc

SEQ ID NO: 1196446 - RNA, 22 nt, Human
ugaacuccugaccucguaaucc

SEQ ID NO: 1196447 - RNA, 21 nt, Human
ugaacuggagcaauuuaaaua

SEQ ID NO: 1196448 - RNA, 20 nt, Human
ugacacccccccaaagaaac

SEQ ID NO: 1196449 - RNA, 22 nt, Human
ugaggcugauuauuacguuggc

SEQ ID NO: 1196450 - RNA, 24 nt, Human
ugauuauuacguuggcaccaaucu

SEQ ID NO: 1196451 - RNA, 24 nt, Human
ugccucagccucccaaguagcugg

SEQ ID NO: 1196452 - RNA, 18 nt, Human
ugcugggauuacaggcau

SEQ ID NO: 1196453 - RNA, 23 nt, Human
uggagcaauuuaaauauuucuuu

SEQ ID NO: 1196454 - RNA, 19 nt, Human
uggagugcagugucacgau

SEQ ID NO: 1196455 - RNA, 23 nt, Human
uggagugcagugucacgaucuug

SEQ ID NO: 1196456 - RNA, 24 nt, Human
uggagugcagugucacgaucuugg

SEQ ID NO: 1196457 - RNA, 18 nt, Human
ugggauuacaggcaugag

SEQ ID NO: 1196458 - RNA, 19 nt, Human
ugggauuacaggcaugagc

SEQ ID NO: 1196459 - RNA, 20 nt, Human
ugggauuacaggcaugagcc

SEQ ID NO: 1196460 - RNA, 20 nt, Human
ugggauuacaggcaugagcc

SEQ ID NO: 1196461 - RNA, 20 nt, Human
ugggauuacaggcaugagcc

SEQ ID NO: 1196462 - RNA, 21 nt, Human
ugggauuacaggcaugagccg

SEQ ID NO: 1196463 - RNA, 22 nt, Human
ugggauuacaggcaugagccgc

SEQ ID NO: 1196464 - RNA, 24 nt, Human
ugggauuacaggcaugagccgcug

SEQ ID NO: 1196465 - RNA, 24 nt, Human
ugggauuacaggcaugagccgcug

SEQ ID NO: 1196466 - RNA, 21 nt, Human
ugggauuacaggcgccugcca

SEQ ID NO: 1196467 - RNA, 22 nt, Human
ugggauuacaggcgccugccac

SEQ ID NO: 1196468 - RNA, 24 nt, Human
ugggauuacaggcgccugccacca

SEQ ID NO: 1196469 - RNA, 23 nt, Human
uggguucaagcgauucuccugcc

SEQ ID NO: 1196470 - RNA, 24 nt, Human
uggguucaagcgauucuccugccu

SEQ ID NO: 1196471 - RNA, 24 nt, Human
uggucaggcugguuuugaacuccu

SEQ ID NO: 1196472 - RNA, 21 nt, Human
ugucgcccaggcuggagugca

SEQ ID NO: 1196473 - RNA, 21 nt, Human
uguguaaaaaguguguccucc

SEQ ID NO: 1196474 - RNA, 18 nt, Human
uuaguagagaagggguuu

SEQ ID NO: 1196475 - RNA, 22 nt, Human
uuaguagagaagggguuucacc

SEQ ID NO: 1196476 - RNA, 24 nt, Human
uuaguagagaagggguuucaccau

SEQ ID NO: 1196477 - RNA, 21 nt, Human
uucaagcgauucuccugccuc

SEQ ID NO: 1196478 - RNA, 23 nt, Human
uucaagcgauucuccugccucag

SEQ ID NO: 1196479 - RNA, 24 nt, Human
uucaagcgauucuccugccucagc

SEQ ID NO: 1196480 - RNA, 21 nt, Human
uucccccuucuuccuccuaac

SEQ ID NO: 1196481 - RNA, 21 nt, Human
uucccuuguggcagcaacagu

SEQ ID NO: 1196482 - RNA, 21 nt, Human
uuccuacuucccucucccucc

SEQ ID NO: 1196483 - RNA, 22 nt, Human
uuccuccuuucuacugccuucu

SEQ ID NO: 1196484 - RNA, 24 nt, Human
uuccucuacacucaucugacaccc

SEQ ID NO: 1196485 - RNA, 21 nt, Human
uuccuucuuccuccucccucc

SEQ ID NO: 1196486 - RNA, 18 nt, Human
uuccuucuucuuuuuucu

SEQ ID NO: 1196487 - RNA, 23 nt, Human
uucuuccuccuuucuacuuccuc

SEQ ID NO: 1196488 - RNA, 24 nt, Human
uuucaccauauuggucaggcuggu

SEQ ID NO: 1196489 - RNA, 24 nt, Human
uuuuuaguagagaagggguuucac

SEQ ID NO: 1196490 - RNA, 23 nt, Human
uuuuucuuccuuccaucuuccuu

SEQ ID NO: 1196491 - RNA, 20 nt, Human
uuuuuguauuuuuaguagag

SEQ ID NO: 1196492 - RNA, 21 nt, Human
agagggaccuuauucaggcuu

SEQ ID NO: 1196493 - RNA, 19 nt, Human
agauggcuucaggaagaca

SEQ ID NO: 1196494 - RNA, 19 nt, Human
aggaagacagcacagaaga

SEQ ID NO: 1196495 - RNA, 23 nt, Human
cagaagagggaccuuauucaggc

SEQ ID NO: 1196496 - RNA, 22 nt, Human
cagaaggaagccaggcauggug

SEQ ID NO: 1196497 - RNA, 20 nt, Human
caggaagacagcacagaaga

SEQ ID NO: 1196498 - RNA, 23 nt, Human
cuccacagauggcuucaggaaga

SEQ ID NO: 1196499 - RNA, 18 nt, Human
cuuggugcugaaccaauc

SEQ ID NO: 1196500 - RNA, 21 nt, Human
ucaggcuugaaccagaaggaa

SEQ ID NO: 1196501 - RNA, 20 nt, Human
aaaacaggaaaacacugagc

SEQ ID NO: 1196502 - RNA, 20 nt, Human
aaacaaaauagucuagaagc

SEQ ID NO: 1196503 - RNA, 23 nt, Human
aaacacugagcuaaagaaccaaa

SEQ ID NO: 1196504 - RNA, 21 nt, Human
aaagaaacuggucuuccagag

SEQ ID NO: 1196505 - RNA, 23 nt, Human
aaagaaauaggaagguaaaauua

SEQ ID NO: 1196506 - RNA, 19 nt, Human
aaagaugaugaaagaaucc

SEQ ID NO: 1196507 - RNA, 23 nt, Human
aaaguccugggauuacaggcgua

SEQ ID NO: 1196508 - RNA, 27 nt, Human
aaauagccuuagauugaaagaaacugg

SEQ ID NO: 1196509 - RNA, 25 nt, Human
aagaaaacaggaaaacacugagcua

SEQ ID NO: 1196510 - RNA, 24 nt, Human
aagucacaaaaauuggacuagaau

SEQ ID NO: 1196511 - RNA, 24 nt, Human
aaugcaguagcgugaucucagcuc

SEQ ID NO: 1196512 - RNA, 18 nt, Human
acaggcguaagccaccau

SEQ ID NO: 1196513 - RNA, 18 nt, Human
acaggguuucaccguguu

SEQ ID NO: 1196514 - RNA, 19 nt, Human
acaggguuucaccguguua

SEQ ID NO: 1196515 - RNA, 20 nt, Human
acaggguuucaccguguuag

SEQ ID NO: 1196516 - RNA, 24 nt, Human
acaggguuucaccguguuagccag

SEQ ID NO: 1196517 - RNA, 18 nt, Human
accauguuggccaggcug

SEQ ID NO: 1196518 - RNA, 18 nt, Human
acgggguuucaccauguu

SEQ ID NO: 1196519 - RNA, 23 nt, Human
acgggguuucaccauguuggcca

SEQ ID NO: 1196520 - RNA, 24 nt, Human
acgggguuucaccauguuggccag

SEQ ID NO: 1196521 - RNA, 25 nt, Human
acucugucgcccaagcaggaaugca

SEQ ID NO: 1196522 - RNA, 19 nt, Human
acuggaaccagacaaaccu

SEQ ID NO: 1196523 - RNA, 18 nt, Human
agacaaaccuggacuuga

SEQ ID NO: 1196524 - RNA, 18 nt, Human
agacaggguuucaccgug

SEQ ID NO: 1196525 - RNA, 19 nt, Human
agagacaggguuucaccgu

SEQ ID NO: 1196526 - RNA, 19 nt, Human
agagauuguuggauagaua

SEQ ID NO: 1196527 - RNA, 21 nt, Human
agauagauagauagauagaua

SEQ ID NO: 1196528 - RNA, 18 nt, Human
agccuucugaauagcugg

SEQ ID NO: 1196529 - RNA, 25 nt, Human
aggcuggagugcaguggcgugaucu

SEQ ID NO: 1196530 - RNA, 19 nt, Human
agguaggggacugaggaag

SEQ ID NO: 1196531 - RNA, 22 nt, Human
agguaggggacugaggaaggug

SEQ ID NO: 1196532 - RNA, 24 nt, Human
aggugaucugcccgccuuggccuc

SEQ ID NO: 1196533 - RNA, 18 nt, Human
aguagcugggacuacagg

SEQ ID NO: 1196534 - RNA, 19 nt, Human
aguagcugggacuacaggc

SEQ ID NO: 1196535 - RNA, 19 nt, Human
agugcaguggcgugaucuc

SEQ ID NO: 1196536 - RNA, 20 nt, Human
agugcaguggcgugaucucg

SEQ ID NO: 1196537 - RNA, 23 nt, Human
agugcaguggcgugaucucggcu

SEQ ID NO: 1196538 - RNA, 24 nt, Human
agugcaguggcgugaucucggcuc

SEQ ID NO: 1196539 - RNA, 24 nt, Human
aguuuaugcuucuuucaguuccau

SEQ ID NO: 1196540 - RNA, 21 nt, Human
auaauuuuuaaaacguuggag

SEQ ID NO: 1196541 - RNA, 23 nt, Human
aucuacuaucuucuuugguuagg

SEQ ID NO: 1196542 - RNA, 18 nt, Human
auucuccugccucagccu

SEQ ID NO: 1196543 - RNA, 21 nt, Human
auucuccugccucagccuccc

SEQ ID NO: 1196544 - RNA, 24 nt, Human
caaaguccugggauuacaggcgua

SEQ ID NO: 1196545 - RNA, 23 nt, Human
caaccuccaccucccggguucaa

SEQ ID NO: 1196546 - RNA, 22 nt, Human
caagugauucuccugccucagc

SEQ ID NO: 1196547 - RNA, 21 nt, Human
cacacauauauagucuagggu

SEQ ID NO: 1196548 - RNA, 24 nt, Human
caccacgcccggcuaauuuuugua

SEQ ID NO: 1196549 - RNA, 21 nt, Human
caccauguuggccaggcuggu

SEQ ID NO: 1196550 - RNA, 22 nt, Human
caccauguuggccaggcugguc

SEQ ID NO: 1196551 - RNA, 27 nt, Human
caccauguuggccaggcuggucccaaa

SEQ ID NO: 1196552 - RNA, 18 nt, Human
caccguguuagccaggau

SEQ ID NO: 1196553 - RNA, 24 nt, Human
caccguguuagccaggauggucuc

SEQ ID NO: 1196554 - RNA, 24 nt, Human
cacgccaccacgcccggcuaauuu

SEQ ID NO: 1196555 - RNA, 22 nt, Human
cacgccauucuccugccucagc

SEQ ID NO: 1196556 - RNA, 19 nt, Human
cacucugucgcccaagcag

SEQ ID NO: 1196557 - RNA, 19 nt, Human
cacugagcuaaagaaccaa

SEQ ID NO: 1196558 - RNA, 21 nt, Human
cacugcaaccuccaccucccg

SEQ ID NO: 1196559 - RNA, 23 nt, Human
cacugcaaccuccaccucccggg

SEQ ID NO: 1196560 - RNA, 22 nt, Human
cagagucucacuguugcccagg

SEQ ID NO: 1196561 - RNA, 22 nt, Human
caggaaaacacugagcuaaaga

SEQ ID NO: 1196562 - RNA, 21 nt, Human
caggcgcccaccaucacgccc

SEQ ID NO: 1196563 - RNA, 24 nt, Human
caggguuucaccguguuagccagg

SEQ ID NO: 1196564 - RNA, 18 nt, Human
cauauaaacacacauaua

SEQ ID NO: 1196565 - RNA, 22 nt, Human
cauccuuauacuguuuuguggg

SEQ ID NO: 1196566 - RNA, 24 nt, Human
cauguuggccaggcuggucccaaa

SEQ ID NO: 1196567 - RNA, 22 nt, Human
ccaaaguccugggauuacaggc

SEQ ID NO: 1196568 - RNA, 24 nt, Human
ccaaaguccugggauuacaggcgu

SEQ ID NO: 1196569 - RNA, 25 nt, Human
ccaaaguguuguugggauuacaggc

SEQ ID NO: 1196570 - RNA, 27 nt, Human
ccaaaguguuguugggauuacaggcgu

SEQ ID NO: 1196571 - RNA, 24 nt, Human
ccaccucccggguucaagugauuc

SEQ ID NO: 1196572 - RNA, 20 nt, Human
cccagguucacgccauucuc

SEQ ID NO: 1196573 - RNA, 23 nt, Human
cccgaguagcugggacuacaggc

SEQ ID NO: 1196574 - RNA, 24 nt, Human
cccgaguagcugggacuacaggcg

SEQ ID NO: 1196575 - RNA, 23 nt, Human
cccggguucaagugauucuccuc

SEQ ID NO: 1196576 - RNA, 23 nt, Human
cccggguucaagugauucuccug

SEQ ID NO: 1196577 - RNA, 24 nt, Human
ccucccggguucaagugauucucc

SEQ ID NO: 1196578 - RNA, 19 nt, Human
ccugacaggugaucugccc

SEQ ID NO: 1196579 - RNA, 23 nt, Human
ccugacaggugaucugcccgccu

SEQ ID NO: 1196580 - RNA, 23 nt, Human
ccugccucagccucccgaguagc

SEQ ID NO: 1196581 - RNA, 24 nt, Human
ccugccucagccucccgaguagcu

SEQ ID NO: 1196582 - RNA, 24 nt, Human
cgggguuucaccauguuggccagg

SEQ ID NO: 1196583 - RNA, 24 nt, Human
cucacugcaaccuccaccucccgg

SEQ ID NO: 1196584 - RNA, 19 nt, Human
cucacuguugcccaggcug

SEQ ID NO: 1196585 - RNA, 24 nt, Human
cucacuguugcccaggcuggagug

SEQ ID NO: 1196586 - RNA, 24 nt, Human
cucagccucccgaguagcugggac

SEQ ID NO: 1196587 - RNA, 24 nt, Human
cucagccuucugaauagcugggac

SEQ ID NO: 1196588 - RNA, 20 nt, Human
cucccggguucaagugauuc

SEQ ID NO: 1196589 - RNA, 23 nt, Human
cuccugacaggugaucugcccgc

SEQ ID NO: 1196590 - RNA, 24 nt, Human
cuccugaccucaugacccgccugc

SEQ ID NO: 1196591 - RNA, 18 nt, Human
cugcaaccuccaccuccc

SEQ ID NO: 1196592 - RNA, 23 nt, Human
cugcaaccuccaccucccggguu

SEQ ID NO: 1196593 - RNA, 24 nt, Human
cugcaaccuccaccucccggguuc

SEQ ID NO: 1196594 - RNA, 23 nt, Human
cugccucagccuucugaauagcu

SEQ ID NO: 1196595 - RNA, 24 nt, Human
cugcgagcuccgcuucccagguuc

SEQ ID NO: 1196596 - RNA, 21 nt, Human
cugcuguuacuuacuagcucu

SEQ ID NO: 1196597 - RNA, 18 nt, Human
cugugcuagagggaaauu

SEQ ID NO: 1196598 - RNA, 18 nt, Human
cugugguccuguccaaaa

SEQ ID NO: 1196599 - RNA, 23 nt, Human
cuucugaauagcugggacuacag

SEQ ID NO: 1196600 - RNA, 22 nt, Human
cuuuccagcacagaauuucugg

SEQ ID NO: 1196601 - RNA, 26 nt, Human
gaauagcugggacuacaguggcacac

SEQ ID NO: 1196602 - RNA, 20 nt, Human
gaccucaugacccgccugcc

SEQ ID NO: 1196603 - RNA, 19 nt, Human
gagcuaaagaaccaaauug

SEQ ID NO: 1196604 - RNA, 25 nt, Human
gaguagcugggacuacaggcgccca

SEQ ID NO: 1196605 - RNA, 19 nt, Human
gaucauguguaaaccccug

SEQ ID NO: 1196606 - RNA, 18 nt, Human
gauuacaggcguaagcca

SEQ ID NO: 1196607 - RNA, 21 nt, Human
gauuacaggcguaagccacca

SEQ ID NO: 1196608 - RNA, 24 nt, Human
gauuacaggcguaagccaccaugc

SEQ ID NO: 1196609 - RNA, 18 nt, Human
gauuacaggcgugagcca

SEQ ID NO: 1196610 - RNA, 19 nt, Human
gauuacaggcgugagccac

SEQ ID NO: 1196611 - RNA, 22 nt, Human
gauuacaggcgugagccacugc

SEQ ID NO: 1196612 - RNA, 19 nt, Human
gauucuccugccucagccu

SEQ ID NO: 1196613 - RNA, 22 nt, Human
gccaccaugcccggccccuuau

SEQ ID NO: 1196614 - RNA, 23 nt, Human
gcccagcuaauuuuuuguauuuu

SEQ ID NO: 1196615 - RNA, 20 nt, Human
gcccaggcuggagugcagug

SEQ ID NO: 1196616 - RNA, 24 nt, Human
gcccaggcuggagugcaguggcgu

SEQ ID NO: 1196617 - RNA, 22 nt, Human
gcccggcuaauuuuuguauuuu

SEQ ID NO: 1196618 - RNA, 19 nt, Human
gcuggagugcaguggcgug

SEQ ID NO: 1196619 - RNA, 18 nt, Human
ggaggaaagguaaucagu

SEQ ID NO: 1196620 - RNA, 19 nt, Human
ggauagagucuagaagcau

SEQ ID NO: 1196621 - RNA, 24 nt, Human
ggauggucucaaucuccugaccuc

SEQ ID NO: 1196622 - RNA, 24 nt, Human
ggauuacaggcguaagccaccaug

SEQ ID NO: 1196623 - RNA, 19 nt, Human
ggcacacgccaccacgccc

SEQ ID NO: 1196624 - RNA, 22 nt, Human
ggcuggagugcaguggcgugau

SEQ ID NO: 1196625 - RNA, 18 nt, Human
gggagggaaacugguagg

SEQ ID NO: 1196626 - RNA, 23 nt, Human
gggguuucaccauguuggccagg

SEQ ID NO: 1196627 - RNA, 22 nt, Human
ggguucaagugauucuccugcc

SEQ ID NO: 1196628 - RNA, 23 nt, Human
ggguucaagugauucuccugccu

SEQ ID NO: 1196629 - RNA, 21 nt, Human
guagaaacgggguuucaccau

SEQ ID NO: 1196630 - RNA, 22 nt, Human
guagaaacgggguuucaccaug

SEQ ID NO: 1196631 - RNA, 23 nt, Human
gucucacuguugcccaggcugga

SEQ ID NO: 1196632 - RNA, 24 nt, Human
gugauucuccugccucagccuucu

SEQ ID NO: 1196633 - RNA, 23 nt, Human
gugcuagagggaaauuuuggaaa

SEQ ID NO: 1196634 - RNA, 20 nt, Human
guguuguugggauuacaggc

SEQ ID NO: 1196635 - RNA, 25 nt, Human
guuaacaacccaaauaaaugagggg

SEQ ID NO: 1196636 - RNA, 21 nt, Human
guugcuucuggggagggaaac

SEQ ID NO: 1196637 - RNA, 22 nt, Human
guuguugggauuacaggcguga

SEQ ID NO: 1196638 - RNA, 21 nt, Human
uaaaaggacaggaaagaaaua

SEQ ID NO: 1196639 - RNA, 22 nt, Human
uaaaaggacaggaaagaaauag

SEQ ID NO: 1196640 - RNA, 21 nt, Human
uaaacaaaauagucuagaagc

SEQ ID NO: 1196641 - RNA, 22 nt, Human
uaauuuuuguauuuuugguaga

SEQ ID NO: 1196642 - RNA, 24 nt, Human
uaauuuuuuguauuuuuaguagag

SEQ ID NO: 1196643 - RNA, 25 nt, Human
uaauuuuuuguauuuuuaguagaga

SEQ ID NO: 1196644 - RNA, 23 nt, Human
uacaggcguaagccaccaugccc

SEQ ID NO: 1196645 - RNA, 19 nt, Human
uacaggcgugagccacugc

SEQ ID NO: 1196646 - RNA, 23 nt, Human
uacaggcgugagccacugcgccc

SEQ ID NO: 1196647 - RNA, 22 nt, Human
uagaaacgggguuucaccaugu

SEQ ID NO: 1196648 - RNA, 20 nt, Human
uagaauuccugaguacccau

SEQ ID NO: 1196649 - RNA, 22 nt, Human
uagagacaggguuucaccgugu

SEQ ID NO: 1196650 - RNA, 22 nt, Human
uagauagauagauagauagaua

SEQ ID NO: 1196651 - RNA, 22 nt, Human
uagauagauagauagauagaua

SEQ ID NO: 1196652 - RNA, 22 nt, Human
uagauagauagauagauagaua

SEQ ID NO: 1196653 - RNA, 22 nt, Human
uagauagauagauagauagaua

SEQ ID NO: 1196654 - RNA, 22 nt, Human
uagauagauagauagauagaua

SEQ ID NO: 1196655 - RNA, 22 nt, Human
uagauagauagauagauaggua

SEQ ID NO: 1196656 - RNA, 26 nt, Human
uagauagauagguacacacaugggua

SEQ ID NO: 1196657 - RNA, 24 nt, Human
uagcgugaucucagcucacugcaa

SEQ ID NO: 1196658 - RNA, 26 nt, Human
uaggaaaaagucacaaaaauuggacu

SEQ ID NO: 1196659 - RNA, 21 nt, Human
uaguagagacaggguuucacc

SEQ ID NO: 1196660 - RNA, 24 nt, Human
uaguagagacaggguuucaccgug

SEQ ID NO: 1196661 - RNA, 25 nt, Human
uaguagagacaggguuucaccgugu

SEQ ID NO: 1196662 - RNA, 18 nt, Human
uaugggaguuuaugcuuc

SEQ ID NO: 1196663 - RNA, 19 nt, Human
uauuuuugguagaaacggg

SEQ ID NO: 1196664 - RNA, 19 nt, Human
ucaagugauucuccugccu

SEQ ID NO: 1196665 - RNA, 24 nt, Human
ucaccguguuagccaggauggucu

SEQ ID NO: 1196666 - RNA, 23 nt, Human
ucacugcaaccuccaccucccgg

SEQ ID NO: 1196667 - RNA, 24 nt, Human
ucacugcaaccuccaccucccggg

SEQ ID NO: 1196668 - RNA, 25 nt, Human
ucacugcaaccuccaccucccgggu

SEQ ID NO: 1196669 - RNA, 27 nt, Human
ucacugcaaccuccaccucccggguuc

SEQ ID NO: 1196670 - RNA, 19 nt, Human
ucacugcgagcuccgcuuc

SEQ ID NO: 1196671 - RNA, 23 nt, Human
ucagccucccgaguagcugggac

SEQ ID NO: 1196672 - RNA, 24 nt, Human
ucccaaaguccugggauuacaggc

SEQ ID NO: 1196673 - RNA, 27 nt, Human
ucccaaaguguuguugggauuacaggc

SEQ ID NO: 1196674 - RNA, 19 nt, Human
ucccagguucacgccauuc

SEQ ID NO: 1196675 - RNA, 21 nt, Human
ucccagguucacgccauucuc

SEQ ID NO: 1196676 - RNA, 22 nt, Human
ucccagguucacgccauucucc

SEQ ID NO: 1196677 - RNA, 24 nt, Human
ucccagguucacgccauucuccug

SEQ ID NO: 1196678 - RNA, 24 nt, Human
ucccgaguagcugggacuacaggc

SEQ ID NO: 1196679 - RNA, 21 nt, Human
ucccggguucaagugauucuc

SEQ ID NO: 1196680 - RNA, 24 nt, Human
ucccggguucaagugauucuccug

SEQ ID NO: 1196681 - RNA, 24 nt, Human
uccuucagaacauaaaugcucuua

SEQ ID NO: 1196682 - RNA, 21 nt, Human
ucuaggugcuggguuuauggg

SEQ ID NO: 1196683 - RNA, 24 nt, Human
ucucacucugucgcccaagcagga

SEQ ID NO: 1196684 - RNA, 21 nt, Human
ucucacuguugcccaggcugg

SEQ ID NO: 1196685 - RNA, 21 nt, Human
ucucacuguugcccaggcugg

SEQ ID NO: 1196686 - RNA, 22 nt, Human
ucucacuguugcccaggcugga

SEQ ID NO: 1196687 - RNA, 24 nt, Human
ucucacuguugcccaggcuggagu

SEQ ID NO: 1196688 - RNA, 24 nt, Human
ucuccugccucagccucccgagua

SEQ ID NO: 1196689 - RNA, 24 nt, Human
ucuccugccucagccuucugaaua

SEQ ID NO: 1196690 - RNA, 24 nt, Human
ucugcauauaaacacacauauaua

SEQ ID NO: 1196691 - RNA, 22 nt, Human
ugacuggagauucccccauuca

SEQ ID NO: 1196692 - RNA, 21 nt, Human
ugagcuuucaaauuucuguuu

SEQ ID NO: 1196693 - RNA, 20 nt, Human
ugaggcagagucucacucug

SEQ ID NO: 1196694 - RNA, 22 nt, Human
ugaggcagagucucacucuguc

SEQ ID NO: 1196695 - RNA, 26 nt, Human
ugcagaaacaugguacaauuuaaaau

SEQ ID NO: 1196696 - RNA, 22 nt, Human
ugcaguggcgugaucucggcuc

SEQ ID NO: 1196697 - RNA, 18 nt, Human
ugcccaggcuggagugca

SEQ ID NO: 1196698 - RNA, 21 nt, Human
ugcccaggcuggagugcagug

SEQ ID NO: 1196699 - RNA, 22 nt, Human
ugcccaggcuggagugcagugg

SEQ ID NO: 1196700 - RNA, 24 nt, Human
ugcccaggcuggagugcaguggcg

SEQ ID NO: 1196701 - RNA, 24 nt, Human
ugccucagccucccgaguagcugg

SEQ ID NO: 1196702 - RNA, 24 nt, Human
ugccucagccuucugaauagcugg

SEQ ID NO: 1196703 - RNA, 20 nt, Human
uggaaacaguccaguagaaa

SEQ ID NO: 1196704 - RNA, 19 nt, Human
uggagugcaguggcgugau

SEQ ID NO: 1196705 - RNA, 23 nt, Human
uggagugcaguggcgugaucucg

SEQ ID NO: 1196706 - RNA, 24 nt, Human
uggagugcaguggcgugaucucgg

SEQ ID NO: 1196707 - RNA, 18 nt, Human
uggauagauaauguuggc

SEQ ID NO: 1196708 - RNA, 24 nt, Human
uggauagauaauguuggcaauugu

SEQ ID NO: 1196709 - RNA, 24 nt, Human
uggccaggcuggucccaaacuccu

SEQ ID NO: 1196710 - RNA, 20 nt, Human
uggcgugaucucggcucacu

SEQ ID NO: 1196711 - RNA, 22 nt, Human
uggcuuuuucaaaucauguuua

SEQ ID NO: 1196712 - RNA, 21 nt, Human
ugggacuacaggcgcccacca

SEQ ID NO: 1196713 - RNA, 22 nt, Human
ugggacuacaggcgcccaccau

SEQ ID NO: 1196714 - RNA, 26 nt, Human
ugggacuacaguggcacacgccacca

SEQ ID NO: 1196715 - RNA, 18 nt, Human
ugggauuacaggcguaag

SEQ ID NO: 1196716 - RNA, 22 nt, Human
ugggauuacaggcguaagccac

SEQ ID NO: 1196717 - RNA, 24 nt, Human
ugggauuacaggcguaagccacca

SEQ ID NO: 1196718 - RNA, 25 nt, Human
ugggauuacaggcguaagccaccau

SEQ ID NO: 1196719 - RNA, 18 nt, Human
ugggauuacaggcgugag

SEQ ID NO: 1196720 - RNA, 19 nt, Human
ugggauuacaggcgugagc

SEQ ID NO: 1196721 - RNA, 21 nt, Human
ugggauuacaggcgugagcca

SEQ ID NO: 1196722 - RNA, 22 nt, Human
ugggauuacaggcgugagccac

SEQ ID NO: 1196723 - RNA, 22 nt, Human
ugggauuacaggcgugagccac

SEQ ID NO: 1196724 - RNA, 24 nt, Human
ugggauuacaggcgugagccacug

SEQ ID NO: 1196725 - RNA, 26 nt, Human
ugggauuacaggcgugagccacugcg

SEQ ID NO: 1196726 - RNA, 20 nt, Human
uggggagggaaacugguagg

SEQ ID NO: 1196727 - RNA, 24 nt, Human
ugguagaaacgggguuucaccaug

SEQ ID NO: 1196728 - RNA, 20 nt, Human
ugguagguaggggacugagg

SEQ ID NO: 1196729 - RNA, 22 nt, Human
ugucccuaaaggugaaauacau

SEQ ID NO: 1196730 - RNA, 21 nt, Human
uguugcccaggcuggagugca

SEQ ID NO: 1196731 - RNA, 19 nt, Human
uguuuaccucugcucucuc

SEQ ID NO: 1196732 - RNA, 19 nt, Human
uuaaagcauacaccuuugc

SEQ ID NO: 1196733 - RNA, 22 nt, Human
uuaguagagacaggguuucacc

SEQ ID NO: 1196734 - RNA, 24 nt, Human
uuaguagagacaggguuucaccgu

SEQ ID NO: 1196735 - RNA, 22 nt, Human
uucaaaucauguuuaccucugc

SEQ ID NO: 1196736 - RNA, 21 nt, Human
uucaagugauucuccugccuc

SEQ ID NO: 1196737 - RNA, 23 nt, Human
uucaagugauucuccugccucag

SEQ ID NO: 1196738 - RNA, 24 nt, Human
uucaagugauucuccugccucagc

SEQ ID NO: 1196739 - RNA, 23 nt, Human
uucugcauauaaacacacauaua

SEQ ID NO: 1196740 - RNA, 24 nt, Human
uugguagaaacgggguuucaccau

SEQ ID NO: 1196741 - RNA, 21 nt, Human
uuuaauauaucuauauacaga

SEQ ID NO: 1196742 - RNA, 24 nt, Human
uuucaccauguuggccaggcuggu

SEQ ID NO: 1196743 - RNA, 19 nt, Human
uuucaccguguuagccagg

SEQ ID NO: 1196744 - RNA, 24 nt, Human
uuuuuaguagagacaggguuucac

SEQ ID NO: 1196745 - RNA, 24 nt, Human
uuuuugguagaaacgggguuucac

SEQ ID NO: 1196746 - RNA, 21 nt, Human
uuuuuguauuuuuaguagaga

SEQ ID NO: 1196747 - RNA, 18 nt, Human
uuuuuguauuuuugguag

SEQ ID NO: 1196748 - RNA, 24 nt, Human
uuuuuuguauuuuuaguagagaca

SEQ ID NO: 1196749 - RNA, 18 nt, Human
aaucacggcagaagacaa

SEQ ID NO: 1196750 - RNA, 25 nt, Human
acagaaaaggugugaggaaggaccc

SEQ ID NO: 1196751 - RNA, 20 nt, Human
acagaguugagauuguugac

SEQ ID NO: 1196752 - RNA, 21 nt, Human
acuugaugauaaauaggagag

SEQ ID NO: 1196753 - RNA, 20 nt, Human
aggcaagagagggagcuugg

SEQ ID NO: 1196754 - RNA, 21 nt, Human
aggcaagagagggagcuugug

SEQ ID NO: 1196755 - RNA, 20 nt, Human
auugcccuuccuuaagcaca

SEQ ID NO: 1196756 - RNA, 24 nt, Human
cacaaaacccugggcuuccucauu

SEQ ID NO: 1196757 - RNA, 26 nt, Human
cacagaaaaggugugaggaaggaccc

SEQ ID NO: 1196758 - RNA, 21 nt, Human
caccgcgccucuuugcaggau

SEQ ID NO: 1196759 - RNA, 20 nt, Human
cagccacacaaaacccuggg

SEQ ID NO: 1196760 - RNA, 21 nt, Human
cagccacacaaaacccugggc

SEQ ID NO: 1196761 - RNA, 23 nt, Human
ccaaagggacuucuuacauggug

SEQ ID NO: 1196762 - RNA, 21 nt, Human
cccacagugaaccggacaguc

SEQ ID NO: 1196763 - RNA, 21 nt, Human
ccucucacagagcaggcugag

SEQ ID NO: 1196764 - RNA, 18 nt, Human
cuccaggggacaagcagc

SEQ ID NO: 1196765 - RNA, 21 nt, Human
cucuuugcaggaucagccauc

SEQ ID NO: 1196766 - RNA, 24 nt, Human
cuuuucagccacacaaaacccugg

SEQ ID NO: 1196767 - RNA, 22 nt, Human
gccugaaaggcuuuucagccac

SEQ ID NO: 1196768 - RNA, 25 nt, Human
ggcagaagacaaaggaagaccaaag

SEQ ID NO: 1196769 - RNA, 22 nt, Human
gggaacuccucuuuauaaaacc

SEQ ID NO: 1196770 - RNA, 21 nt, Human
gugcaggggaacuccucuuua

SEQ ID NO: 1196771 - RNA, 21 nt, Human
gugccacuuggcaguuuucaa

SEQ ID NO: 1196772 - RNA, 19 nt, Human
uccacauggcuggggaggc

SEQ ID NO: 1196773 - RNA, 21 nt, Human
uccccacagugaaccggacag

SEQ ID NO: 1196774 - RNA, 19 nt, Human
ugaaaggcuuuucagccac

SEQ ID NO: 1196775 - RNA, 21 nt, Human
uggcaggcaagagagggagcu

SEQ ID NO: 1196776 - RNA, 22 nt, Human
aaaaaacauuaucuauaggguu

SEQ ID NO: 1196777 - RNA, 27 nt, Human
aaacaacaaaaacuaaaaagggaggcc

SEQ ID NO: 1196778 - RNA, 24 nt, Human
aagcaguaaucaugaaacagugau

SEQ ID NO: 1196779 - RNA, 21 nt, Human
aaggccccucuuccaccauac

SEQ ID NO: 1196780 - RNA, 21 nt, Human
aaguagagacuuuucccagau

SEQ ID NO: 1196781 - RNA, 25 nt, Human
aagugucccuuuaaggcaaagaaga

SEQ ID NO: 1196782 - RNA, 22 nt, Human
aaucaucuugucuccuaguucu

SEQ ID NO: 1196783 - RNA, 19 nt, Human
accugugaugacuaaucca

SEQ ID NO: 1196784 - RNA, 18 nt, Human
acuagucucugagugccu

SEQ ID NO: 1196785 - RNA, 22 nt, Human
auaacaaucgcuuuucaaauau

SEQ ID NO: 1196786 - RNA, 21 nt, Human
auagacaacccaaccacagua

SEQ ID NO: 1196787 - RNA, 26 nt, Human
caaaacaaucccugcaaaaacuuaaa

SEQ ID NO: 1196788 - RNA, 20 nt, Human
caaauagaagccugaaauau

SEQ ID NO: 1196789 - RNA, 25 nt, Human
caccugaggccucauaauaccacuc

SEQ ID NO: 1196790 - RNA, 18 nt, Human
caggaauuucuucuccuu

SEQ ID NO: 1196791 - RNA, 21 nt, Human
caucuugucuccuaguucuca

SEQ ID NO: 1196792 - RNA, 18 nt, Human
cauguauacacacuuuau

SEQ ID NO: 1196793 - RNA, 22 nt, Human
cauuuaaacaacaaaaacuaaa

SEQ ID NO: 1196794 - RNA, 27 nt, Human
cauuuaaacaacaaaaacuaaaaauga

SEQ ID NO: 1196795 - RNA, 18 nt, Human
ccaccuagaaauaucaac

SEQ ID NO: 1196796 - RNA, 23 nt, Human
ccaccuagaaauaucaacaauau

SEQ ID NO: 1196797 - RNA, 19 nt, Human
ccacucgagacacugacag

SEQ ID NO: 1196798 - RNA, 19 nt, Human
cccaccauugaauuucaaa

SEQ ID NO: 1196799 - RNA, 23 nt, Human
cuaauucuaucccaccauugaau

SEQ ID NO: 1196800 - RNA, 26 nt, Human
cuccuaguucucacaccauuggaaca

SEQ ID NO: 1196801 - RNA, 24 nt, Human
cugaacguuaaaagaaaucuauca

SEQ ID NO: 1196802 - RNA, 19 nt, Human
cuuccauuuccugaccuaa

SEQ ID NO: 1196803 - RNA, 20 nt, Human
gacaagcuucauaauagauu

SEQ ID NO: 1196804 - RNA, 20 nt, Human
gagccuaaaaaugauggcca

SEQ ID NO: 1196805 - RNA, 19 nt, Human
gauaaauauccugaaagac

SEQ ID NO: 1196806 - RNA, 23 nt, Human
uaaagugaaucaucuugucuccu

SEQ ID NO: 1196807 - RNA, 20 nt, Human
uaaauauagacaacccaacc

SEQ ID NO: 1196808 - RNA, 23 nt, Human
uaacguaacaauagaucacacuc

SEQ ID NO: 1196809 - RNA, 19 nt, Human
uaagaaccugugaugacua

SEQ ID NO: 1196810 - RNA, 18 nt, Human
uaagauauacacaaggcc

SEQ ID NO: 1196811 - RNA, 18 nt, Human
uaagucaaucaagcaaaa

SEQ ID NO: 1196812 - RNA, 26 nt, Human
uaauggcauacuaggggacaagcuuc

SEQ ID NO: 1196813 - RNA, 24 nt, Human
uacaaacagaauagauacacugca

SEQ ID NO: 1196814 - RNA, 23 nt, Human
uacauucacuuaaaaauggauua

SEQ ID NO: 1196815 - RNA, 20 nt, Human
uaccaucgaagaauuuuuuc

SEQ ID NO: 1196816 - RNA, 20 nt, Human
uaccccaaggcaccugaggc

SEQ ID NO: 1196817 - RNA, 20 nt, Human
uaccuaguuauaaauaacgu

SEQ ID NO: 1196818 - RNA, 18 nt, Human
uaccucacacuuauagca

SEQ ID NO: 1196819 - RNA, 23 nt, Human
uacucuuccuuuaaaauccaagg

SEQ ID NO: 1196820 - RNA, 19 nt, Human
uauaacaaucgcuuuucaa

SEQ ID NO: 1196821 - RNA, 20 nt, Human
uaucacgacagacauuuuac

SEQ ID NO: 1196822 - RNA, 21 nt, Human
uaugauauauauuagaauagg

SEQ ID NO: 1196823 - RNA, 18 nt, Human
ucaaaagacacaaaugca

SEQ ID NO: 1196824 - RNA, 21 nt, Human
ucaaaagacacaaaugcagua

SEQ ID NO: 1196825 - RNA, 21 nt, Human
ucaacugugguagcaaaguca

SEQ ID NO: 1196826 - RNA, 20 nt, Human
uccacacaucuggucaaggc

SEQ ID NO: 1196827 - RNA, 21 nt, Human
uccacacaucuggucaaggca

SEQ ID NO: 1196828 - RNA, 21 nt, Human
uccuugauaacaccaccuaga

SEQ ID NO: 1196829 - RNA, 24 nt, Human
ucuaagauauacacaaggccagca

SEQ ID NO: 1196830 - RNA, 18 nt, Human
ucugaacguuaaaagaaa

SEQ ID NO: 1196831 - RNA, 21 nt, Human
ucuuuuacaaacagaauagau

SEQ ID NO: 1196832 - RNA, 23 nt, Human
ugaaacagugauuauauaaguca

SEQ ID NO: 1196833 - RNA, 21 nt, Human
ugaagaaguagagacuuuucc

SEQ ID NO: 1196834 - RNA, 21 nt, Human
ugacuaauccaagcauccugu

SEQ ID NO: 1196835 - RNA, 23 nt, Human
ugcauucuaagauauacacaagg

SEQ ID NO: 1196836 - RNA, 22 nt, Human
ugccuucaaaagacacaaaugc

SEQ ID NO: 1196837 - RNA, 24 nt, Human
ugguaccucacacuuauagcacau

SEQ ID NO: 1196838 - RNA, 20 nt, Human
uguacacagugguuugugug

SEQ ID NO: 1196839 - RNA, 22 nt, Human
uguacacagugguuugugugua

SEQ ID NO: 1196840 - RNA, 24 nt, Human
uguuaaguucgagccuaaaaauga

SEQ ID NO: 1196841 - RNA, 24 nt, Human
uucaaaacaaucccugcaaaaacu

SEQ ID NO: 1196842 - RNA, 20 nt, Human
uuuaaaauccaaggauccuu

SEQ ID NO: 1196843 - RNA, 26 nt, Human
uuuaaacaacaaaaacuaaaaaugaa

SEQ ID NO: 1196844 - RNA, 22 nt, Human
uuuguacacagugguuugugug

SEQ ID NO: 1196845 - RNA, 19 nt, Human
aaaaaaaaaucucucaagc

SEQ ID NO: 1196846 - RNA, 21 nt, Human
aaaagaagcgcaggggcggga

SEQ ID NO: 1196847 - RNA, 20 nt, Human
aaaaucucucaagcaagaga

SEQ ID NO: 1196848 - RNA, 22 nt, Human
aaacauuuuauguaggaaacag

SEQ ID NO: 1196849 - RNA, 23 nt, Human
aaagggagaggaagggggcggag

SEQ ID NO: 1196850 - RNA, 19 nt, Human
aacauuuuauguaggaaac

SEQ ID NO: 1196851 - RNA, 22 nt, Human
aaccugcagucucuuccgccuc

SEQ ID NO: 1196852 - RNA, 26 nt, Human
aagaaggagguggucugggaagagga

SEQ ID NO: 1196853 - RNA, 27 nt, Human
aagcaagagaauuucugaucaaaucug

SEQ ID NO: 1196854 - RNA, 18 nt, Human
aagcaaucaaaaaucagc

SEQ ID NO: 1196855 - RNA, 26 nt, Human
aagcaggaggacagagaggagggacc

SEQ ID NO: 1196856 - RNA, 20 nt, Human
aagcggggccgggcuacaga

SEQ ID NO: 1196857 - RNA, 26 nt, Human
aaggauggagggaaaacaaggauggg

SEQ ID NO: 1196858 - RNA, 19 nt, Human
aaggauggagggaggaggg

SEQ ID NO: 1196859 - RNA, 23 nt, Human
aaugaaggaaaaggaugaaggaa

SEQ ID NO: 1196860 - RNA, 19 nt, Human
aauugaacuuuggagaaga

SEQ ID NO: 1196861 - RNA, 25 nt, Human
agagaggagggagaagaggaggggg

SEQ ID NO: 1196862 - RNA, 19 nt, Human
agagaggauaagaggaggg

SEQ ID NO: 1196863 - RNA, 30 nt, Human
agaggaggagggaaggaggaugaugaugaa

SEQ ID NO: 1196864 - RNA, 22 nt, Human
agaggagggagaagaggagggg

SEQ ID NO: 1196865 - RNA, 21 nt, Human
agagggagggaaaaggauagg

SEQ ID NO: 1196866 - RNA, 28 nt, Human
agagggcagaggggagggaggaggacag

SEQ ID NO: 1196867 - RNA, 25 nt, Human
agaggggagggaggaggacagaggg

SEQ ID NO: 1196868 - RNA, 20 nt, Human
agaggggggaaagggagagg

SEQ ID NO: 1196869 - RNA, 23 nt, Human
agaggguaagggaaaagaagcgc

SEQ ID NO: 1196870 - RNA, 23 nt, Human
agaugccaaagaguaauaauagc

SEQ ID NO: 1196871 - RNA, 21 nt, Human
agauuuaaucacuaaauccaa

SEQ ID NO: 1196872 - RNA, 20 nt, Human
agcugcuggggacuggcagc

SEQ ID NO: 1196873 - RNA, 21 nt, Human
aggaagggggcggaggaggga

SEQ ID NO: 1196874 - RNA, 25 nt, Human
aggagagaggagggagaagaggagg

SEQ ID NO: 1196875 - RNA, 18 nt, Human
aggagaggaggagggaag

SEQ ID NO: 1196876 - RNA, 19 nt, Human
aggagggaagagggaggga

SEQ ID NO: 1196877 - RNA, 18 nt, Human
aggagggaggggaaggga

SEQ ID NO: 1196878 - RNA, 18 nt, Human
aggaugaaggaaagaagg

SEQ ID NO: 1196879 - RNA, 21 nt, Human
aggcacuaagaaaaaagauuc

SEQ ID NO: 1196880 - RNA, 19 nt, Human
aggcagcggcggaacucau

SEQ ID NO: 1196881 - RNA, 18 nt, Human
aggcucacaaaauugaac

SEQ ID NO: 1196882 - RNA, 21 nt, Human
agggagagggcagaggggagg

SEQ ID NO: 1196883 - RNA, 20 nt, Human
agggagggaaaaggauaggu

SEQ ID NO: 1196884 - RNA, 19 nt, Human
agggaggggaagggagagg

SEQ ID NO: 1196885 - RNA, 21 nt, Human
agggcagaggggggaaaggga

SEQ ID NO: 1196886 - RNA, 21 nt, Human
auggugaggcaggagaggagg

SEQ ID NO: 1196887 - RNA, 22 nt, Human
caaaauagguguuuuuugaggc

SEQ ID NO: 1196888 - RNA, 21 nt, Human
caaaaugagaucagcaaaacc

SEQ ID NO: 1196889 - RNA, 22 nt, Human
caaaaugagaucagcaaaacca

SEQ ID NO: 1196890 - RNA, 18 nt, Human
caaaguucucugcguucc

SEQ ID NO: 1196891 - RNA, 26 nt, Human
caacagaggacaaaaaaaaaucucuc

SEQ ID NO: 1196892 - RNA, 24 nt, Human
caagcaagagaauuucugaucaaa

SEQ ID NO: 1196893 - RNA, 24 nt, Human
caauuuauauaucaucaugaaaua

SEQ ID NO: 1196894 - RNA, 20 nt, Human
cacugcugcggaaaaggacc

SEQ ID NO: 1196895 - RNA, 21 nt, Human
cagagaggauaagaggagggc

SEQ ID NO: 1196896 - RNA, 22 nt, Human
caggagaggaggacgaagaggu

SEQ ID NO: 1196897 - RNA, 18 nt, Human
caggggcgggaaagaagg

SEQ ID NO: 1196898 - RNA, 19 nt, Human
cccggccgggcggccuugg

SEQ ID NO: 1196899 - RNA, 21 nt, Human
ccgccgcggugccuccucuuc

SEQ ID NO: 1196900 - RNA, 20 nt, Human
ccguuggggccaagaccaaa

SEQ ID NO: 1196901 - RNA, 20 nt, Human
ccucccgccucgaggacagg

SEQ ID NO: 1196902 - RNA, 18 nt, Human
ccuccucuuccucucucg

SEQ ID NO: 1196903 - RNA, 22 nt, Human
ccuccucuuccucucucggguu

SEQ ID NO: 1196904 - RNA, 19 nt, Human
ccugcagucucuuccgccu

SEQ ID NO: 1196905 - RNA, 25 nt, Human
cggaaaaggaccauuaaaggcaaua

SEQ ID NO: 1196906 - RNA, 20 nt, Human
cggaggcuccucagcccugg

SEQ ID NO: 1196907 - RNA, 18 nt, Human
cgggaaagaaggaggugg

SEQ ID NO: 1196908 - RNA, 21 nt, Human
cggggacccgguccagccccc

SEQ ID NO: 1196909 - RNA, 22 nt, Human
cuaaauccaaaaugagaucagc

SEQ ID NO: 1196910 - RNA, 19 nt, Human
cuccagcuccccaugcucg

SEQ ID NO: 1196911 - RNA, 23 nt, Human
cucccggacccggucccggaggc

SEQ ID NO: 1196912 - RNA, 22 nt, Human
cugccccccucccgccucgagg

SEQ ID NO: 1196913 - RNA, 22 nt, Human
cugggaagaggagagaggaggg

SEQ ID NO: 1196914 - RNA, 19 nt, Human
cugggggaacccguugggg

SEQ ID NO: 1196915 - RNA, 22 nt, Human
cugggggcgggggcuaaggggc

SEQ ID NO: 1196916 - RNA, 25 nt, Human
gaaaaaagauuccucuaagcaauca

SEQ ID NO: 1196917 - RNA, 18 nt, Human
gaaaagcaggaggacaga

SEQ ID NO: 1196918 - RNA, 19 nt, Human
gaaaagcaggaggacagag

SEQ ID NO: 1196919 - RNA, 27 nt, Human
gaaagaaggagguggucugggaagagg

SEQ ID NO: 1196920 - RNA, 19 nt, Human
gacagagaggauaagagga

SEQ ID NO: 1196921 - RNA, 23 nt, Human
gacuggcagcugggggcgggggc

SEQ ID NO: 1196922 - RNA, 18 nt, Human
gagcugcuggggacuggc

SEQ ID NO: 1196923 - RNA, 18 nt, Human
gagcugcuggggacuggc

SEQ ID NO: 1196924 - RNA, 22 nt, Human
gagggaagagggagggaaaagg

SEQ ID NO: 1196925 - RNA, 23 nt, Human
gagggaaggaggaugaugaugag

SEQ ID NO: 1196926 - RNA, 19 nt, Human
gagggaggaggacagaggg

SEQ ID NO: 1196927 - RNA, 19 nt, Human
gaugaugaggaagggagga

SEQ ID NO: 1196928 - RNA, 20 nt, Human
gcaggcacagcgggcagugc

SEQ ID NO: 1196929 - RNA, 19 nt, Human
gccgggcuacagaugcugc

SEQ ID NO: 1196930 - RNA, 19 nt, Human
ggaaagaaggauggaggga

SEQ ID NO: 1196931 - RNA, 18 nt, Human
ggaagaggagagaggagg

SEQ ID NO: 1196932 - RNA, 22 nt, Human
ggaaggaggaugaugaugagga

SEQ ID NO: 1196933 - RNA, 22 nt, Human
ggagaaaaguaggagaggagga

SEQ ID NO: 1196934 - RNA, 22 nt, Human
ggagaaaaguaggagaggagga

SEQ ID NO: 1196935 - RNA, 24 nt, Human
ggagaaaaguaggagaggaggagg

SEQ ID NO: 1196936 - RNA, 24 nt, Human
ggagagaggagggagaagaggagg

SEQ ID NO: 1196937 - RNA, 29 nt, Human
ggagaggaagggggcggaggagggagggg

SEQ ID NO: 1196938 - RNA, 20 nt, Human
ggagagggcagaggggaggg

SEQ ID NO: 1196939 - RNA, 21 nt, Human
ggagagggcagaggggaggga

SEQ ID NO: 1196940 - RNA, 21 nt, Human
ggaggagggaagagggaggua

SEQ ID NO: 1196941 - RNA, 25 nt, Human
ggaggagggaggggaagggagaggg

SEQ ID NO: 1196942 - RNA, 29 nt, Human
ggaggagggaggggaagggagagggcagg

SEQ ID NO: 1196943 - RNA, 21 nt, Human
ggagggaaaacaaggauggag

SEQ ID NO: 1196944 - RNA, 22 nt, Human
ggagguggucugggaagaggag

SEQ ID NO: 1196945 - RNA, 20 nt, Human
ggauaagaggagggcagagg

SEQ ID NO: 1196946 - RNA, 22 nt, Human
ggcggagaaaaguaggagagga

SEQ ID NO: 1196947 - RNA, 21 nt, Human
gggaaaacaaggauggaggga

SEQ ID NO: 1196948 - RNA, 19 nt, Human
gggaagaggagagaggagg

SEQ ID NO: 1196949 - RNA, 23 nt, Human
gggaaggaggaugaugaugagga

SEQ ID NO: 1196950 - RNA, 20 nt, Human
gggagaagaggagggggagg

SEQ ID NO: 1196951 - RNA, 21 nt, Human
gggagggaggaggacagaggg

SEQ ID NO: 1196952 - RNA, 19 nt, Human
gggcggaggcuuggggacg

SEQ ID NO: 1196953 - RNA, 24 nt, Human
ggggaagggagagggcagagggga

SEQ ID NO: 1196954 - RNA, 18 nt, Human
ggggacuggcagcugggg

SEQ ID NO: 1196955 - RNA, 19 nt, Human
ggggagggaggaggacaga

SEQ ID NO: 1196956 - RNA, 22 nt, Human
ggggagggaggaggacagaggg

SEQ ID NO: 1196957 - RNA, 19 nt, Human
ggggcgggggcuaaggggc

SEQ ID NO: 1196958 - RNA, 18 nt, Human
ggggcgggggcugggggc

SEQ ID NO: 1196959 - RNA, 19 nt, Human
ggggcgggggcugggggcg

SEQ ID NO: 1196960 - RNA, 23 nt, Human
ggugacagaaugaaggaaaagga

SEQ ID NO: 1196961 - RNA, 25 nt, Human
guccagccccccaugcucccggacc

SEQ ID NO: 1196962 - RNA, 24 nt, Human
gugaggcaggagaggaggacgaag

SEQ ID NO: 1196963 - RNA, 20 nt, Human
gugcucagcuccuggugcuu

SEQ ID NO: 1196964 - RNA, 20 nt, Human
gugcuucuccccucccugcc

SEQ ID NO: 1196965 - RNA, 22 nt, Human
guggaaaagcaggaggacagag

SEQ ID NO: 1196966 - RNA, 19 nt, Human
uaagaaaaaagauuccucu

SEQ ID NO: 1196967 - RNA, 28 nt, Human
uaagaggagggcagaggggggaaaggga

SEQ ID NO: 1196968 - RNA, 23 nt, Human
uaauuaaaagcaauuuauauauc

SEQ ID NO: 1196969 - RNA, 21 nt, Human
uaggagaggaggagggaagga

SEQ ID NO: 1196970 - RNA, 19 nt, Human
uaguaaggucacuaggcuc

SEQ ID NO: 1196971 - RNA, 22 nt, Human
ucacuaaauccaaaaugagauc

SEQ ID NO: 1196972 - RNA, 22 nt, Human
ucagcaaaaccagauacuagua

SEQ ID NO: 1196973 - RNA, 23 nt, Human
uccaaaaugagaucagcaaaacc

SEQ ID NO: 1196974 - RNA, 21 nt, Human
ucccaagacucucacugcagg

SEQ ID NO: 1196975 - RNA, 19 nt, Human
uccccucccugccccccuc

SEQ ID NO: 1196976 - RNA, 19 nt, Human
ucccugccccccucccgcc

SEQ ID NO: 1196977 - RNA, 23 nt, Human
ucuuuccggcugaggaccacaag

SEQ ID NO: 1196978 - RNA, 18 nt, Human
ugaaggaaaaggaugaag

SEQ ID NO: 1196979 - RNA, 23 nt, Human
ugagaucagcaaaaccagauacu

SEQ ID NO: 1196980 - RNA, 19 nt, Human
ugaggaagggaggaugaug

SEQ ID NO: 1196981 - RNA, 22 nt, Human
ugaggaagggaggaugauggug

SEQ ID NO: 1196982 - RNA, 23 nt, Human
ugaggaagggaggaugaugguga

SEQ ID NO: 1196983 - RNA, 18 nt, Human
ugaggcaggagaggagga

SEQ ID NO: 1196984 - RNA, 22 nt, Human
ugaugaggaagggaggaugaug

SEQ ID NO: 1196985 - RNA, 19 nt, Human
ugcggaaaaggaccauuaa

SEQ ID NO: 1196986 - RNA, 21 nt, Human
ugcugcggcugcccgggcagc

SEQ ID NO: 1196987 - RNA, 22 nt, Human
uggagaagagagaugccaaaga

SEQ ID NO: 1196988 - RNA, 22 nt, Human
uggagggaggagggaagaggga

SEQ ID NO: 1196989 - RNA, 18 nt, Human
ugggaagaggagagagga

SEQ ID NO: 1196990 - RNA, 21 nt, Human
uggugaggcaggagaggagga

SEQ ID NO: 1196991 - RNA, 23 nt, Human
uuuuauguaggaaacagcaguua

SEQ ID NO: 1196992 - RNA, 19 nt, Human
aacaaaaacuacaaucugc

SEQ ID NO: 1196993 - RNA, 26 nt, Human
acaugguucugauuuggaaaacaucu

SEQ ID NO: 1196994 - RNA, 19 nt, Human
auagcagccuaacaauuua

SEQ ID NO: 1196995 - RNA, 18 nt, Human
caagguacagcauuuucu

SEQ ID NO: 1196996 - RNA, 18 nt, Human
caggugauguaaggagag

SEQ ID NO: 1196997 - RNA, 19 nt, Human
cccaccuuugcagcccuag

SEQ ID NO: 1196998 - RNA, 24 nt, Human
ccgcgaauccuucuccaucucucu

SEQ ID NO: 1196999 - RNA, 21 nt, Human
ccggccaaaacaaaaacuaca

SEQ ID NO: 1197000 - RNA, 22 nt, Human
ccggccaaaacaaaaacuacaa

SEQ ID NO: 1197001 - RNA, 19 nt, Human
ccuaacaucagugaacaca

SEQ ID NO: 1197002 - RNA, 22 nt, Human
cgcgaauccuucuccaucucuc

SEQ ID NO: 1197003 - RNA, 21 nt, Human
cggccaaaacaaaaacuacaa

SEQ ID NO: 1197004 - RNA, 22 nt, Human
cuagaaaauagcagccuaacaa

SEQ ID NO: 1197005 - RNA, 20 nt, Human
cuauaauguaacuggggaau

SEQ ID NO: 1197006 - RNA, 22 nt, Human
cuuugcagcccuagcagcccua

SEQ ID NO: 1197007 - RNA, 20 nt, Human
gaagaucccccaccuccaag

SEQ ID NO: 1197008 - RNA, 22 nt, Human
gaauccuucuccaucucucuca

SEQ ID NO: 1197009 - RNA, 23 nt, Human
gcagcccuaacaucagugaacac

SEQ ID NO: 1197010 - RNA, 23 nt, Human
gccaaaacaaaaacuacaaucug

SEQ ID NO: 1197011 - RNA, 19 nt, Human
gccgccuuugacaaucagu

SEQ ID NO: 1197012 - RNA, 21 nt, Human
ggcaggugauguaaggagaga

SEQ ID NO: 1197013 - RNA, 19 nt, Human
ggccaaaacaaaaacuaca

SEQ ID NO: 1197014 - RNA, 19 nt, Human
guguguguuucuccacugg

SEQ ID NO: 1197015 - RNA, 19 nt, Human
uacaaucugccgccuuuga

SEQ ID NO: 1197016 - RNA, 21 nt, Human
ucaacaugguucugauuugga

SEQ ID NO: 1197017 - RNA, 18 nt, Human
ucagcccuggcaacucau

SEQ ID NO: 1197018 - RNA, 21 nt, Human
ucuagaaaauagcagccuaac

SEQ ID NO: 1197019 - RNA, 21 nt, Human
ugaggaaaaaagauaaauagg

SEQ ID NO: 1197020 - RNA, 22 nt, Human
ugaucggggccucuaacgauga

SEQ ID NO: 1197021 - RNA, 21 nt, Human
ugauguguguguuucuccacu

SEQ ID NO: 1197022 - RNA, 23 nt, Human
uggcuccgaaccgccuaucuccc

SEQ ID NO: 1197023 - RNA, 20 nt, Human
ugggcaggugauguaaggag

SEQ ID NO: 1197024 - RNA, 19 nt, Human
ugucaccgccgcgaauccu

SEQ ID NO: 1197025 - RNA, 24 nt, Human
uuaggaaauugaggaaaaaagaua

SEQ ID NO: 1197026 - RNA, 19 nt, Human
uuccggccaaaacaaaaac

SEQ ID NO: 1197027 - RNA, 22 nt, Human
uugauguguguguuucuccacu

SEQ ID NO: 1197028 - RNA, 18 nt, Human
uuuuuuuuuuuuccuuug

SEQ ID NO: 1197029 - RNA, 22 nt, Human
uuuuuuuuuuuuuuuuuccuuu

SEQ ID NO: 1197030 - RNA, 23 nt, Human
uuuuuuuuuuuuuuuuuuccuuu

SEQ ID NO: 1197031 - RNA, 20 nt, Human
aaaaaauagauacaacuaga

SEQ ID NO: 1197032 - RNA, 18 nt, Human
aaacagaguaaaaaucaa

SEQ ID NO: 1197033 - RNA, 19 nt, Human
aaagugcugggauuacaga

SEQ ID NO: 1197034 - RNA, 26 nt, Human
aaccaggacaucuucuacguccuucc

SEQ ID NO: 1197035 - RNA, 24 nt, Human
aagaggcaccauuuccucaccacc

SEQ ID NO: 1197036 - RNA, 24 nt, Human
aagauagcuacgaauaaccccaca

SEQ ID NO: 1197037 - RNA, 24 nt, Human
aagcgauucaccugccucagccuc

SEQ ID NO: 1197038 - RNA, 19 nt, Human
aaguagcuaggauuacagg

SEQ ID NO: 1197039 - RNA, 20 nt, Human
aagugcugggauuacagacu

SEQ ID NO: 1197040 - RNA, 23 nt, Human
aagugcugggauuacagacuugu

SEQ ID NO: 1197041 - RNA, 22 nt, Human
aaguugggggaaaaucuaaagc

SEQ ID NO: 1197042 - RNA, 21 nt, Human
acacugggcuaauuuuuguau

SEQ ID NO: 1197043 - RNA, 19 nt, Human
acagacaggguuucaccau

SEQ ID NO: 1197044 - RNA, 22 nt, Human
acaggguaagaauucccagaac

SEQ ID NO: 1197045 - RNA, 18 nt, Human
acaggguuucaccauguu

SEQ ID NO: 1197046 - RNA, 23 nt, Human
acaggguuucaccauguuggcca

SEQ ID NO: 1197047 - RNA, 24 nt, Human
acaggguuucaccauguuggccag

SEQ ID NO: 1197048 - RNA, 18 nt, Human
accauguuggccaggcug

SEQ ID NO: 1197049 - RNA, 24 nt, Human
agcgauucaccugccucagccucc

SEQ ID NO: 1197050 - RNA, 22 nt, Human
aggaggagguggaaucggagag

SEQ ID NO: 1197051 - RNA, 18 nt, Human
aggugcucaccaccacac

SEQ ID NO: 1197052 - RNA, 22 nt, Human
aguacagacaggguuucaccau

SEQ ID NO: 1197053 - RNA, 22 nt, Human
agugcugggauuacagacuugu

SEQ ID NO: 1197054 - RNA, 24 nt, Human
aguggcaugaucucagcucacugc

SEQ ID NO: 1197055 - RNA, 24 nt, Human
auaaaauuuuauuaaaugaacuuc

SEQ ID NO: 1197056 - RNA, 20 nt, Human
auagauacaacuagauaaag

SEQ ID NO: 1197057 - RNA, 26 nt, Human
caaagugcugggauuacagacuugug

SEQ ID NO: 1197058 - RNA, 23 nt, Human
cacacagugaagucuacaauuaa

SEQ ID NO: 1197059 - RNA, 22 nt, Human
cacacccucggacaaccacucc

SEQ ID NO: 1197060 - RNA, 24 nt, Human
caccacacugggcuaauuuuugua

SEQ ID NO: 1197061 - RNA, 21 nt, Human
caccauguuggccaggcuggu

SEQ ID NO: 1197062 - RNA, 24 nt, Human
caccauguuggccaggcuggucuc

SEQ ID NO: 1197063 - RNA, 23 nt, Human
caccugucuuggccucccaaagu

SEQ ID NO: 1197064 - RNA, 24 nt, Human
caccugucuuggccucccaaagug

SEQ ID NO: 1197065 - RNA, 23 nt, Human
cacugcaaacucugccuccuggg

SEQ ID NO: 1197066 - RNA, 22 nt, Human
cagcaaacagaguaaaaaucaa

SEQ ID NO: 1197067 - RNA, 24 nt, Human
caggguuucaccauguuggccagg

SEQ ID NO: 1197068 - RNA, 24 nt, Human
caggugcucaccaccacacugggc

SEQ ID NO: 1197069 - RNA, 23 nt, Human
cauguuggccaggcuggucucaa

SEQ ID NO: 1197070 - RNA, 19 nt, Human
ccaaagugcugggauuaca

SEQ ID NO: 1197071 - RNA, 23 nt, Human
ccaaagugcugggauuacagacu

SEQ ID NO: 1197072 - RNA, 21 nt, Human
ccaagccggcccaccuuugcu

SEQ ID NO: 1197073 - RNA, 23 nt, Human
ccaccuuugcugccaucuaacuc

SEQ ID NO: 1197074 - RNA, 18 nt, Human
ccacugaucuucccuccu

SEQ ID NO: 1197075 - RNA, 22 nt, Human
cccaaguagcuaggauuacagg

SEQ ID NO: 1197076 - RNA, 23 nt, Human
cccaaguagcuaggauuacaggu

SEQ ID NO: 1197077 - RNA, 23 nt, Human
cccaggcuggcaugcaguggcau

SEQ ID NO: 1197078 - RNA, 22 nt, Human
cccagggcucgcggaaggaccc

SEQ ID NO: 1197079 - RNA, 22 nt, Human
cccaucggccaccacugggcac

SEQ ID NO: 1197080 - RNA, 18 nt, Human
cccgcaguuccccacucu

SEQ ID NO: 1197081 - RNA, 20 nt, Human
cccucggacaaccacuccug

SEQ ID NO: 1197082 - RNA, 24 nt, Human
ccuccuggguucaagcgauucacc

SEQ ID NO: 1197083 - RNA, 23 nt, Human
ccugccucagccucccaaguagc

SEQ ID NO: 1197084 - RNA, 24 nt, Human
ccugccucagccucccaaguagcu

SEQ ID NO: 1197085 - RNA, 19 nt, Human
ccugggguggggagagggg

SEQ ID NO: 1197086 - RNA, 21 nt, Human
ccuggguucaagcgauucacc

SEQ ID NO: 1197087 - RNA, 22 nt, Human
ccuggguucaagcgauucaccu

SEQ ID NO: 1197088 - RNA, 23 nt, Human
ccuggguucaagcgauucaccug

SEQ ID NO: 1197089 - RNA, 24 nt, Human
ccuuugcugccaucuaacuccgcc

SEQ ID NO: 1197090 - RNA, 23 nt, Human
cgaggaggagguggaaucggaga

SEQ ID NO: 1197091 - RNA, 26 nt, Human
cggggcagcggagagaggaggaaagc

SEQ ID NO: 1197092 - RNA, 23 nt, Human
cucacugcaaacucugccuccug

SEQ ID NO: 1197093 - RNA, 24 nt, Human
cucacugcaaacucugccuccugg

SEQ ID NO: 1197094 - RNA, 24 nt, Human
cucccaaguagcuaggauuacagg

SEQ ID NO: 1197095 - RNA, 25 nt, Human
cuccugguuuuaacuucauaucacu

SEQ ID NO: 1197096 - RNA, 19 nt, Human
cucggacaaccacuccuga

SEQ ID NO: 1197097 - RNA, 23 nt, Human
cuguaucuuuaaggaguuucaug

SEQ ID NO: 1197098 - RNA, 23 nt, Human
cugucuuggccucccaaagugcu

SEQ ID NO: 1197099 - RNA, 21 nt, Human
gaccucaacugaugcaccugu

SEQ ID NO: 1197100 - RNA, 18 nt, Human
gccaaaucagccaguacu

SEQ ID NO: 1197101 - RNA, 18 nt, Human
gcgauucaccugccucag

SEQ ID NO: 1197102 - RNA, 24 nt, Human
gcgauucaccugccucagccuccc

SEQ ID NO: 1197103 - RNA, 18 nt, Human
gcggaaggacccaguugg

SEQ ID NO: 1197104 - RNA, 22 nt, Human
ggaaaaucuaaagcauaggcuc

SEQ ID NO: 1197105 - RNA, 21 nt, Human
ggacaggaaccgcaggggcac

SEQ ID NO: 1197106 - RNA, 18 nt, Human
ggagagguggaaggagga

SEQ ID NO: 1197107 - RNA, 22 nt, Human
ggauuacaggugcucaccacca

SEQ ID NO: 1197108 - RNA, 22 nt, Human
ggcagaaagaaggcuccacuga

SEQ ID NO: 1197109 - RNA, 18 nt, Human
gggcagcggagagaggag

SEQ ID NO: 1197110 - RNA, 24 nt, Human
ggguucaagcgauucaccugccuc

SEQ ID NO: 1197111 - RNA, 22 nt, Human
ggguuucaccauguuggccagg

SEQ ID NO: 1197112 - RNA, 24 nt, Human
gguaacacaagauggcagaaagaa

SEQ ID NO: 1197113 - RNA, 22 nt, Human
ggugcucaccaccacacugggc

SEQ ID NO: 1197114 - RNA, 18 nt, Human
gugcugggauuacagacu

SEQ ID NO: 1197115 - RNA, 24 nt, Human
guucaagcgauucaccugccucag

SEQ ID NO: 1197116 - RNA, 19 nt, Human
guucugaaagcuuuucuua

SEQ ID NO: 1197117 - RNA, 19 nt, Human
guucugaaagcuuuucuua

SEQ ID NO: 1197118 - RNA, 22 nt, Human
uaaaacuacuacagcaaacaga

SEQ ID NO: 1197119 - RNA, 22 nt, Human
uaacacaagauggcagaaagaa

SEQ ID NO: 1197120 - RNA, 24 nt, Human
uaauuuuuguauuuuuaguacaga

SEQ ID NO: 1197121 - RNA, 22 nt, Human
uacaacuagauaaauagagaaa

SEQ ID NO: 1197122 - RNA, 22 nt, Human
uacagacaggguuucaccaugu

SEQ ID NO: 1197123 - RNA, 23 nt, Human
uacgaauaaccccacacagugaa

SEQ ID NO: 1197124 - RNA, 23 nt, Human
uagauacaacuagauaaauagag

SEQ ID NO: 1197125 - RNA, 20 nt, Human
uagcuacgaauaaccccaca

SEQ ID NO: 1197126 - RNA, 19 nt, Human
uaggauuacaggugcucac

SEQ ID NO: 1197127 - RNA, 21 nt, Human
uaggauuacaggugcucacca

SEQ ID NO: 1197128 - RNA, 24 nt, Human
uaggauuacaggugcucaccacca

SEQ ID NO: 1197129 - RNA, 19 nt, Human
uaggcucacaaaaaucugg

SEQ ID NO: 1197130 - RNA, 24 nt, Human
uaguacagacaggguuucaccaug

SEQ ID NO: 1197131 - RNA, 22 nt, Human
uaucccaucgccgcgcgccugg

SEQ ID NO: 1197132 - RNA, 24 nt, Human
uaucccaucgccgcgcgccugggg

SEQ ID NO: 1197133 - RNA, 22 nt, Human
ucacaccaagccggcccaccuu

SEQ ID NO: 1197134 - RNA, 22 nt, Human
ucaccaggcucggugaauccaa

SEQ ID NO: 1197135 - RNA, 18 nt, Human
ucacugcaaacucugccu

SEQ ID NO: 1197136 - RNA, 24 nt, Human
ucacugcaaacucugccuccuggg

SEQ ID NO: 1197137 - RNA, 18 nt, Human
ucagccucccaaguagcu

SEQ ID NO: 1197138 - RNA, 20 nt, Human
ucagccucccaaguagcuag

SEQ ID NO: 1197139 - RNA, 18 nt, Human
ucauaucacugaaagagg

SEQ ID NO: 1197140 - RNA, 18 nt, Human
ucccaaagugcugggauu

SEQ ID NO: 1197141 - RNA, 24 nt, Human
ucccaaagugcugggauuacagac

SEQ ID NO: 1197142 - RNA, 23 nt, Human
ucccaagaaagauagcuacgaau

SEQ ID NO: 1197143 - RNA, 23 nt, Human
ucccaaguagcuaggauuacagg

SEQ ID NO: 1197144 - RNA, 24 nt, Human
ucccaaguagcuaggauuacaggu

SEQ ID NO: 1197145 - RNA, 19 nt, Human
uccuggguucaagcgauuc

SEQ ID NO: 1197146 - RNA, 24 nt, Human
uccuggguucaagcgauucaccug

SEQ ID NO: 1197147 - RNA, 20 nt, Human
uccuguucuguugcccaggc

SEQ ID NO: 1197148 - RNA, 22 nt, Human
uccuguucuguugcccaggcug

SEQ ID NO: 1197149 - RNA, 23 nt, Human
uccuguucuguugcccaggcugg

SEQ ID NO: 1197150 - RNA, 20 nt, Human
ucggacaaccacuccugagu

SEQ ID NO: 1197151 - RNA, 22 nt, Human
ucugggauucaaagaugacaca

SEQ ID NO: 1197152 - RNA, 24 nt, Human
ucuguugcccaggcuggcaugcag

SEQ ID NO: 1197153 - RNA, 20 nt, Human
ucuuggccucccaaagugcu

SEQ ID NO: 1197154 - RNA, 19 nt, Human
ugaaaacuuuacaagcuug

SEQ ID NO: 1197155 - RNA, 20 nt, Human
ugaccggggcagcggagaga

SEQ ID NO: 1197156 - RNA, 24 nt, Human
ugagucauucucaccaggcucggu

SEQ ID NO: 1197157 - RNA, 22 nt, Human
ugcaguggcaugaucucagcuc

SEQ ID NO: 1197158 - RNA, 22 nt, Human
ugccaucuaacuccgccgaccu

SEQ ID NO: 1197159 - RNA, 23 nt, Human
ugccucagccucccaaguagcua

SEQ ID NO: 1197160 - RNA, 24 nt, Human
ugccucagccucccaaguagcuag

SEQ ID NO: 1197161 - RNA, 25 nt, Human
ugcugggauuacagacuugugaaga

SEQ ID NO: 1197162 - RNA, 24 nt, Human
uggcaugaucucagcucacugcaa

SEQ ID NO: 1197163 - RNA, 23 nt, Human
uggcaugcaguggcaugaucuca

SEQ ID NO: 1197164 - RNA, 24 nt, Human
uggcaugcaguggcaugaucucag

SEQ ID NO: 1197165 - RNA, 23 nt, Human
uggccaggcuggucucaaucccu

SEQ ID NO: 1197166 - RNA, 18 nt, Human
uggccucccaaagugcug

SEQ ID NO: 1197167 - RNA, 21 nt, Human
uggggagaggggccgugaccc

SEQ ID NO: 1197168 - RNA, 19 nt, Human
ugggguggggagaggggcc

SEQ ID NO: 1197169 - RNA, 20 nt, Human
ugggguggggagaggggccg

SEQ ID NO: 1197170 - RNA, 21 nt, Human
ugggguggggagaggggccgu

SEQ ID NO: 1197171 - RNA, 21 nt, Human
ugguugaccggggcagcggag

SEQ ID NO: 1197172 - RNA, 22 nt, Human
ugguugaccggggcagcggaga

SEQ ID NO: 1197173 - RNA, 31 nt, Human
uguggaaauccuucccaagaaagauagcuag

SEQ ID NO: 1197174 - RNA, 19 nt, Human
uguucuguugcccaggcug

SEQ ID NO: 1197175 - RNA, 22 nt, Human
uguucuguugcccaggcuggca

SEQ ID NO: 1197176 - RNA, 24 nt, Human
uuaguacagacaggguuucaccau

SEQ ID NO: 1197177 - RNA, 21 nt, Human
uucaagcgauucaccugccuc

SEQ ID NO: 1197178 - RNA, 23 nt, Human
uucaagcgauucaccugccucag

SEQ ID NO: 1197179 - RNA, 21 nt, Human
uucccaagaaagauagcuacg

SEQ ID NO: 1197180 - RNA, 21 nt, Human
uuccugguucugaaagcuuuu

SEQ ID NO: 1197181 - RNA, 24 nt, Human
uuucaccauguuggccaggcuggu

SEQ ID NO: 1197182 - RNA, 22 nt, Human
uuuuguauuuuuaguacagaca

SEQ ID NO: 1197183 - RNA, 24 nt, Human
uuuuuaguacagacaggguuucac

SEQ ID NO: 1197184 - RNA, 20 nt, Human
uuuuuguauuuuuaguacag

SEQ ID NO: 1197185 - RNA, 20 nt, Human
aaaaaauagauacaacuaga

SEQ ID NO: 1197186 - RNA, 18 nt, Human
aaacagaguaaaaaucaa

SEQ ID NO: 1197187 - RNA, 26 nt, Human
aaagauagcuacgaauaaccccacac

SEQ ID NO: 1197188 - RNA, 19 nt, Human
aaagugcugggauuacaga

SEQ ID NO: 1197189 - RNA, 26 nt, Human
aaccaggacaucuucuacguccuucc

SEQ ID NO: 1197190 - RNA, 24 nt, Human
aagaggcaccauuuccucaccacc

SEQ ID NO: 1197191 - RNA, 24 nt, Human
aagcgauucaccugccucagccuc

SEQ ID NO: 1197192 - RNA, 19 nt, Human
aaguagcuaggauuacagg

SEQ ID NO: 1197193 - RNA, 20 nt, Human
aagugcugggauuacagacu

SEQ ID NO: 1197194 - RNA, 23 nt, Human
aagugcugggauuacagacuugu

SEQ ID NO: 1197195 - RNA, 22 nt, Human
aaguugggggaaaaucuaaagc

SEQ ID NO: 1197196 - RNA, 21 nt, Human
acacugggcuaauuuuuguau

SEQ ID NO: 1197197 - RNA, 19 nt, Human
acagacaggguuucaccau

SEQ ID NO: 1197198 - RNA, 22 nt, Human
acaggguaagaauucccagaac

SEQ ID NO: 1197199 - RNA, 18 nt, Human
acaggguuucaccauguu

SEQ ID NO: 1197200 - RNA, 23 nt, Human
acaggguuucaccauguuggcca

SEQ ID NO: 1197201 - RNA, 24 nt, Human
acaggguuucaccauguuggccag

SEQ ID NO: 1197202 - RNA, 18 nt, Human
accauguuggccaggcug

SEQ ID NO: 1197203 - RNA, 24 nt, Human
agcgauucaccugccucagccucc

SEQ ID NO: 1197204 - RNA, 22 nt, Human
aggaggagguggaaucggagag

SEQ ID NO: 1197205 - RNA, 18 nt, Human
aggugcucaccaccacac

SEQ ID NO: 1197206 - RNA, 22 nt, Human
agugcugggauuacagacuugu

SEQ ID NO: 1197207 - RNA, 24 nt, Human
aguggcaugaucucagcucacugc

SEQ ID NO: 1197208 - RNA, 24 nt, Human
auaaaauuuuauuaaaugaacuuc

SEQ ID NO: 1197209 - RNA, 20 nt, Human
auagauacaacuagauaaag

SEQ ID NO: 1197210 - RNA, 23 nt, Human
augcaguggcaugaucucagcuc

SEQ ID NO: 1197211 - RNA, 26 nt, Human
caaagugcugggauuacagacuugug

SEQ ID NO: 1197212 - RNA, 23 nt, Human
cacacagugaagucuacaauuaa

SEQ ID NO: 1197213 - RNA, 22 nt, Human
cacacccucggacaaccacucc

SEQ ID NO: 1197214 - RNA, 24 nt, Human
caccacacugggcuaauuuuugua

SEQ ID NO: 1197215 - RNA, 21 nt, Human
caccauguuggccaggcuggu

SEQ ID NO: 1197216 - RNA, 24 nt, Human
caccauguuggccaggcuggucuc

SEQ ID NO: 1197217 - RNA, 23 nt, Human
caccugucuuggccucccaaagu

SEQ ID NO: 1197218 - RNA, 24 nt, Human
caccugucuuggccucccaaagug

SEQ ID NO: 1197219 - RNA, 23 nt, Human
cacugcaaacucugccuccuggg

SEQ ID NO: 1197220 - RNA, 22 nt, Human
cagcaaacagaguaaaaaucaa

SEQ ID NO: 1197221 - RNA, 24 nt, Human
caggguuucaccauguuggccagg

SEQ ID NO: 1197222 - RNA, 24 nt, Human
caggugcucaccaccacacugggc

SEQ ID NO: 1197223 - RNA, 23 nt, Human
cauguuggccaggcuggucucaa

SEQ ID NO: 1197224 - RNA, 19 nt, Human
ccaaagugcugggauuaca

SEQ ID NO: 1197225 - RNA, 23 nt, Human
ccaaagugcugggauuacagacu

SEQ ID NO: 1197226 - RNA, 21 nt, Human
ccaagccggcccaccuuugcu

SEQ ID NO: 1197227 - RNA, 23 nt, Human
ccaccuuugcugccaucuaacuc

SEQ ID NO: 1197228 - RNA, 18 nt, Human
ccacugaucuucccuccu

SEQ ID NO: 1197229 - RNA, 22 nt, Human
cccaaguagcuaggauuacagg

SEQ ID NO: 1197230 - RNA, 23 nt, Human
cccaaguagcuaggauuacaggu

SEQ ID NO: 1197231 - RNA, 23 nt, Human
cccaggcuggcaugcaguggcau

SEQ ID NO: 1197232 - RNA, 22 nt, Human
cccagggcucgcggaaggaccc

SEQ ID NO: 1197233 - RNA, 22 nt, Human
cccaucggccaccacugggcac

SEQ ID NO: 1197234 - RNA, 18 nt, Human
cccgcaguuccccacucu

SEQ ID NO: 1197235 - RNA, 20 nt, Human
cccucggacaaccacuccug

SEQ ID NO: 1197236 - RNA, 24 nt, Human
ccuccuggguucaagcgauucacc

SEQ ID NO: 1197237 - RNA, 23 nt, Human
ccugccucagccucccaaguagc

SEQ ID NO: 1197238 - RNA, 19 nt, Human
ccugggguggggagagggg

SEQ ID NO: 1197239 - RNA, 21 nt, Human
ccuggguucaagcgauucacc

SEQ ID NO: 1197240 - RNA, 22 nt, Human
ccuggguucaagcgauucaccu

SEQ ID NO: 1197241 - RNA, 23 nt, Human
ccuggguucaagcgauucaccug

SEQ ID NO: 1197242 - RNA, 24 nt, Human
ccugucuuggccucccaaagugcu

SEQ ID NO: 1197243 - RNA, 24 nt, Human
ccuuugcugccaucuaacuccgcc

SEQ ID NO: 1197244 - RNA, 23 nt, Human
cgaggaggagguggaaucggaga

SEQ ID NO: 1197245 - RNA, 20 nt, Human
cgcggaaggacccaguugga

SEQ ID NO: 1197246 - RNA, 26 nt, Human
cggggcagcggagagaggaggaaagc

SEQ ID NO: 1197247 - RNA, 23 nt, Human
cucacugcaaacucugccuccug

SEQ ID NO: 1197248 - RNA, 24 nt, Human
cucacugcaaacucugccuccugg

SEQ ID NO: 1197249 - RNA, 24 nt, Human
cucccaaguagcuaggauuacagg

SEQ ID NO: 1197250 - RNA, 25 nt, Human
cuccugguuuuaacuucauaucacu

SEQ ID NO: 1197251 - RNA, 19 nt, Human
cucggacaaccacuccuga

SEQ ID NO: 1197252 - RNA, 23 nt, Human
cugccucagccucccaaguagcu

SEQ ID NO: 1197253 - RNA, 23 nt, Human
cuguaucuuuaaggaguuucaug

SEQ ID NO: 1197254 - RNA, 21 nt, Human
gaccucaacugaugcaccugu

SEQ ID NO: 1197255 - RNA, 18 nt, Human
gccaaaucagccaguacu

SEQ ID NO: 1197256 - RNA, 18 nt, Human
gccccuggaggaguuccc

SEQ ID NO: 1197257 - RNA, 18 nt, Human
gcgauucaccugccucag

SEQ ID NO: 1197258 - RNA, 24 nt, Human
gcgauucaccugccucagccuccc

SEQ ID NO: 1197259 - RNA, 18 nt, Human
gcucaccaccacacuggg

SEQ ID NO: 1197260 - RNA, 22 nt, Human
ggaaaaucuaaagcauaggcuc

SEQ ID NO: 1197261 - RNA, 22 nt, Human
ggauuacaggugcucaccacca

SEQ ID NO: 1197262 - RNA, 22 nt, Human
ggcagaaagaaggcuccacuga

SEQ ID NO: 1197263 - RNA, 18 nt, Human
gggcagcggagagaggag

SEQ ID NO: 1197264 - RNA, 24 nt, Human
ggguucaagcgauucaccugccuc

SEQ ID NO: 1197265 - RNA, 22 nt, Human
ggguuucaccauguuggccagg

SEQ ID NO: 1197266 - RNA, 24 nt, Human
gguaacacaagauggcagaaagaa

SEQ ID NO: 1197267 - RNA, 22 nt, Human
gucuuggccucccaaagugcug

SEQ ID NO: 1197268 - RNA, 18 nt, Human
gugcugggauuacagacu

SEQ ID NO: 1197269 - RNA, 19 nt, Human
guucugaaagcuuuucuua

SEQ ID NO: 1197270 - RNA, 19 nt, Human
guucugaaagcuuuucuua

SEQ ID NO: 1197271 - RNA, 22 nt, Human
uaaaacuacuacagcaaacaga

SEQ ID NO: 1197272 - RNA, 22 nt, Human
uaacacaagauggcagaaagaa

SEQ ID NO: 1197273 - RNA, 24 nt, Human
uaauuuuuguauuuuuaguacaga

SEQ ID NO: 1197274 - RNA, 22 nt, Human
uacaacuagauaaauagagaaa

SEQ ID NO: 1197275 - RNA, 22 nt, Human
uacagacaggguuucaccaugu

SEQ ID NO: 1197276 - RNA, 23 nt, Human
uacgaauaaccccacacagugaa

SEQ ID NO: 1197277 - RNA, 23 nt, Human
uagauacaacuagauaaauagag

SEQ ID NO: 1197278 - RNA, 20 nt, Human
uagcuacgaauaaccccaca

SEQ ID NO: 1197279 - RNA, 19 nt, Human
uaggauuacaggugcucac

SEQ ID NO: 1197280 - RNA, 21 nt, Human
uaggauuacaggugcucacca

SEQ ID NO: 1197281 - RNA, 24 nt, Human
uaggauuacaggugcucaccacca

SEQ ID NO: 1197282 - RNA, 19 nt, Human
uaggcucacaaaaaucugg

SEQ ID NO: 1197283 - RNA, 24 nt, Human
uaguacagacaggguuucaccaug

SEQ ID NO: 1197284 - RNA, 22 nt, Human
uaucccaucgccgcgcgccugg

SEQ ID NO: 1197285 - RNA, 24 nt, Human
uaucccaucgccgcgcgccugggg

SEQ ID NO: 1197286 - RNA, 22 nt, Human
ucacaccaagccggcccaccuu

SEQ ID NO: 1197287 - RNA, 22 nt, Human
ucaccaggcucggugaauccaa

SEQ ID NO: 1197288 - RNA, 18 nt, Human
ucacugcaaacucugccu

SEQ ID NO: 1197289 - RNA, 24 nt, Human
ucacugcaaacucugccuccuggg

SEQ ID NO: 1197290 - RNA, 20 nt, Human
ucagccucccaaguagcuag

SEQ ID NO: 1197291 - RNA, 18 nt, Human
ucauaucacugaaagagg

SEQ ID NO: 1197292 - RNA, 18 nt, Human
ucccaaagugcugggauu

SEQ ID NO: 1197293 - RNA, 24 nt, Human
ucccaaagugcugggauuacagac

SEQ ID NO: 1197294 - RNA, 23 nt, Human
ucccaagaaagauagcuacgaau

SEQ ID NO: 1197295 - RNA, 23 nt, Human
ucccaaguagcuaggauuacagg

SEQ ID NO: 1197296 - RNA, 24 nt, Human
ucccaaguagcuaggauuacaggu

SEQ ID NO: 1197297 - RNA, 19 nt, Human
uccuggguucaagcgauuc

SEQ ID NO: 1197298 - RNA, 24 nt, Human
uccuggguucaagcgauucaccug

SEQ ID NO: 1197299 - RNA, 20 nt, Human
uccuguucuguugcccaggc

SEQ ID NO: 1197300 - RNA, 23 nt, Human
uccuguucuguugcccaggcugg

SEQ ID NO: 1197301 - RNA, 20 nt, Human
ucggacaaccacuccugagu

SEQ ID NO: 1197302 - RNA, 22 nt, Human
ucugggauucaaagaugacaca

SEQ ID NO: 1197303 - RNA, 24 nt, Human
ucuguugcccaggcuggcaugcag

SEQ ID NO: 1197304 - RNA, 20 nt, Human
ucuuggccucccaaagugcu

SEQ ID NO: 1197305 - RNA, 19 nt, Human
ugaaaacuuuacaagcuug

SEQ ID NO: 1197306 - RNA, 20 nt, Human
ugaccggggcagcggagaga

SEQ ID NO: 1197307 - RNA, 24 nt, Human
ugagucauucucaccaggcucggu

SEQ ID NO: 1197308 - RNA, 22 nt, Human
ugccaucuaacuccgccgaccu

SEQ ID NO: 1197309 - RNA, 23 nt, Human
ugccucagccucccaaguagcua

SEQ ID NO: 1197310 - RNA, 24 nt, Human
ugccucagccucccaaguagcuag

SEQ ID NO: 1197311 - RNA, 25 nt, Human
ugcugggauuacagacuugugaaga

SEQ ID NO: 1197312 - RNA, 24 nt, Human
uggcaugaucucagcucacugcaa

SEQ ID NO: 1197313 - RNA, 23 nt, Human
uggcaugcaguggcaugaucuca

SEQ ID NO: 1197314 - RNA, 24 nt, Human
uggcaugcaguggcaugaucucag

SEQ ID NO: 1197315 - RNA, 23 nt, Human
uggccaggcuggucucaaucccu

SEQ ID NO: 1197316 - RNA, 21 nt, Human
uggggagaggggccgugaccc

SEQ ID NO: 1197317 - RNA, 19 nt, Human
ugggguggggagaggggcc

SEQ ID NO: 1197318 - RNA, 20 nt, Human
ugggguggggagaggggccg

SEQ ID NO: 1197319 - RNA, 21 nt, Human
ugggguggggagaggggccgu

SEQ ID NO: 1197320 - RNA, 21 nt, Human
ugguugaccggggcagcggag

SEQ ID NO: 1197321 - RNA, 22 nt, Human
ugguugaccggggcagcggaga

SEQ ID NO: 1197322 - RNA, 31 nt, Human; identical to SEQ ID NO: 1197173

SEQ ID NO: 1197323 - RNA, 19 nt, Human
uguucuguugcccaggcug

SEQ ID NO: 1197324 - RNA, 22 nt, Human
uguucuguugcccaggcuggca

SEQ ID NO: 1197325 - RNA, 24 nt, Human
uuaguacagacaggguuucaccau

SEQ ID NO: 1197326 - RNA, 21 nt, Human
uucaagcgauucaccugccuc

SEQ ID NO: 1197327 - RNA, 23 nt, Human
uucaagcgauucaccugccucag

SEQ ID NO: 1197328 - RNA, 21 nt, Human
uucccaagaaagauagcuacg

SEQ ID NO: 1197329 - RNA, 21 nt, Human
uuccugguucugaaagcuuuu

SEQ ID NO: 1197330 - RNA, 24 nt, Human
uuucaccauguuggccaggcuggu

SEQ ID NO: 1197331 - RNA, 24 nt, Human
uuuuuaguacagacaggguuucac

SEQ ID NO: 1197332 - RNA, 20 nt, Human
uuuuuguauuuuuaguacag

SEQ ID NO: 1197333 - RNA, 23 nt, Human
uuuuuguauuuuuaguacagaca

SEQ ID NO: 1197334 - RNA, 19 nt, Human
auaauugcagaaauuuuua

SEQ ID NO: 1197335 - RNA, 20 nt, Human
cugcaugguuuucaggacug

SEQ ID NO: 1197336 - RNA, 18 nt, Human
uacucuuccggccugcau

SEQ ID NO: 1197337 - RNA, 22 nt, Human
uuugucaauguaaauguuaguc

SEQ ID NO: 1197338 - RNA, 20 nt, Human
aaaaaugguuauggcagagc

SEQ ID NO: 1197339 - RNA, 18 nt, Human
aaagccuagcuaagagcc

SEQ ID NO: 1197340 - RNA, 24 nt, Human
aaagcuccuuccuucaugcugccu

SEQ ID NO: 1197341 - RNA, 20 nt, Human
aaaggagaagccauauuggg

SEQ ID NO: 1197342 - RNA, 21 nt, Human
aacaccaucccugcucuucug

SEQ ID NO: 1197343 - RNA, 26 nt, Human
aacucuccgcuccuuaaauucacucc

SEQ ID NO: 1197344 - RNA, 21 nt, Human
aagcauaucaaacaccgacuc

SEQ ID NO: 1197345 - RNA, 19 nt, Human
acaaggacggugccagacc

SEQ ID NO: 1197346 - RNA, 27 nt, Human
acaccauuagaaacuggguccacccaa

SEQ ID NO: 1197347 - RNA, 24 nt, Human
acacugggcaacaaagauaacacc

SEQ ID NO: 1197348 - RNA, 24 nt, Human
acauggccaccucgacauaucccc

SEQ ID NO: 1197349 - RNA, 23 nt, Human
accuugaggacucauuuaagaaa

SEQ ID NO: 1197350 - RNA, 21 nt, Human
acgcuacccucgggaccccag

SEQ ID NO: 1197351 - RNA, 21 nt, Human
agaaagcagugagaaaaugug

SEQ ID NO: 1197352 - RNA, 26 nt, Human
agaaagcagugagaaaaugugguggc

SEQ ID NO: 1197353 - RNA, 19 nt, Human
agaguucuccagucaccuc

SEQ ID NO: 1197354 - RNA, 20 nt, Human
aggaaaucagaaagagucag

SEQ ID NO: 1197355 - RNA, 23 nt, Human
agggaucccaauucaaggaucuu

SEQ ID NO: 1197356 - RNA, 20 nt, Human
agggcacagagcagagagga

SEQ ID NO: 1197357 - RNA, 20 nt, Human
aggggaaaaaggguccuuga

SEQ ID NO: 1197358 - RNA, 23 nt, Human
aggggaaaaaggguccuugaaaa

SEQ ID NO: 1197359 - RNA, 23 nt, Human
caaaugcacaccauuagaaacug

SEQ ID NO: 1197360 - RNA, 23 nt, Human
caaggucacuggugcuggugacc

SEQ ID NO: 1197361 - RNA, 20 nt, Human
cacuucucacucccuccuca

SEQ ID NO: 1197362 - RNA, 22 nt, Human
cacuucucacucccuccucacu

SEQ ID NO: 1197363 - RNA, 20 nt, Human
cagaaagaguguuucuggug

SEQ ID NO: 1197364 - RNA, 20 nt, Human
cagagccaguaggccaacag

SEQ ID NO: 1197365 - RNA, 26 nt, Human
cagcaaggcaauguaauucuauagaa

SEQ ID NO: 1197366 - RNA, 22 nt, Human
cagcagaaagcagugagaaaaa

SEQ ID NO: 1197367 - RNA, 19 nt, Human
cagcagugagcacuguggc

SEQ ID NO: 1197368 - RNA, 20 nt, Human
caggaggcaccugacccaga

SEQ ID NO: 1197369 - RNA, 21 nt, Human
caggaggcaccugacccagac

SEQ ID NO: 1197370 - RNA, 18 nt, Human
cagugagaaaauguggug

SEQ ID NO: 1197371 - RNA, 24 nt, Human
cauuucccaggacagguccugcuc

SEQ ID NO: 1197372 - RNA, 23 nt, Human
ccaccagagccaguaggccaaca

SEQ ID NO: 1197373 - RNA, 18 nt, Human
ccagcccgcggcucuggg

SEQ ID NO: 1197374 - RNA, 21 nt, Human
ccagcccgcggcucugggacg

SEQ ID NO: 1197375 - RNA, 23 nt, Human
ccagcucccaauggugcugcaaa

SEQ ID NO: 1197376 - RNA, 21 nt, Human
ccaguaggccaacaggcaguc

SEQ ID NO: 1197377 - RNA, 22 nt, Human
cccccggagaagccuuagcugc

SEQ ID NO: 1197378 - RNA, 19 nt, Human
cccccuggggcugcccucu

SEQ ID NO: 1197379 - RNA, 19 nt, Human
cccccuggggcugcccucu

SEQ ID NO: 1197380 - RNA, 26 nt, Human
ccccgcugccauccacagcgccuccc

SEQ ID NO: 1197381 - RNA, 22 nt, Human
cccucccauugucuagccucag

SEQ ID NO: 1197382 - RNA, 21 nt, Human
cccucgggaccccagcugcac

SEQ ID NO: 1197383 - RNA, 19 nt, Human
ccgcugccauccacagcgc

SEQ ID NO: 1197384 - RNA, 19 nt, Human
ccucaguaccucuugauac

SEQ ID NO: 1197385 - RNA, 21 nt, Human
ccuggacaagggaggagagga

SEQ ID NO: 1197386 - RNA, 18 nt, Human
ccuggcaacauggccacc

SEQ ID NO: 1197387 - RNA, 19 nt, Human
ccuggggcugcccucucag

SEQ ID NO: 1197388 - RNA, 24 nt, Human
cgccccgcugccauccacagcgcc

SEQ ID NO: 1197389 - RNA, 24 nt, Human
cuacccucgggaccccagcugcac

SEQ ID NO: 1197390 - RNA, 19 nt, Human
cucacagcgccccgcugcc

SEQ ID NO: 1197391 - RNA, 19 nt, Human
cucaucccugacccccugg

SEQ ID NO: 1197392 - RNA, 26 nt, Human
cucccauugucucccaucagccucgg

SEQ ID NO: 1197393 - RNA, 19 nt, Human
cucuucuaaagcagcucca

SEQ ID NO: 1197394 - RNA, 19 nt, Human
cugcucuucuggcuggugg

SEQ ID NO: 1197395 - RNA, 20 nt, Human
cuggacaagggaggagagga

SEQ ID NO: 1197396 - RNA, 21 nt, Human
cuguggcugggagcucagggc

SEQ ID NO: 1197397 - RNA, 22 nt, Human
cuucaugcugccuauuaaacuc

SEQ ID NO: 1197398 - RNA, 21 nt, Human
cuucucacucccuccucacug

SEQ ID NO: 1197399 - RNA, 22 nt, Human
cuuguguguggaaaaaggagaa

SEQ ID NO: 1197400 - RNA, 21 nt, Human
gagcacacaccuggacaaggg

SEQ ID NO: 1197401 - RNA, 21 nt, Human
gagcagcuggagcugcuugug

SEQ ID NO: 1197402 - RNA, 21 nt, Human
gagcccgcuggcaaccuuuga

SEQ ID NO: 1197403 - RNA, 23 nt, Human
gagcugcuuguggugcagcuggu

SEQ ID NO: 1197404 - RNA, 20 nt, Human
gaggagaagauguugcagca

SEQ ID NO: 1197405 - RNA, 20 nt, Human
gaggaucccugagcucuugu

SEQ ID NO: 1197406 - RNA, 19 nt, Human
gauucucacgguuuuccuc

SEQ ID NO: 1197407 - RNA, 22 nt, Human
gcaacaaagauaacaccauccc

SEQ ID NO: 1197408 - RNA, 23 nt, Human
gcaauagugagcacacaccugga

SEQ ID NO: 1197409 - RNA, 21 nt, Human
gcacuggagcugcaggaggua

SEQ ID NO: 1197410 - RNA, 18 nt, Human
gcagagcaggaaaucaga

SEQ ID NO: 1197411 - RNA, 20 nt, Human
gcauuucccaggacaggucc

SEQ ID NO: 1197412 - RNA, 20 nt, Human
gcggcucugggacgcuaccc

SEQ ID NO: 1197413 - RNA, 22 nt, Human
gcugguuggcaguuacaugaag

SEQ ID NO: 1197414 - RNA, 18 nt, Human
ggacaagggaggagagga

SEQ ID NO: 1197415 - RNA, 18 nt, Human
ggagcagcuggagcugcu

SEQ ID NO: 1197416 - RNA, 18 nt, Human
ggugaccuugaggacuca

SEQ ID NO: 1197417 - RNA, 22 nt, Human
guaaaagaaagcuccuuccuuc

SEQ ID NO: 1197418 - RNA, 18 nt, Human
guggagcagcuggagcug

SEQ ID NO: 1197419 - RNA, 20 nt, Human
gugggaggcacagcaagugg

SEQ ID NO: 1197420 - RNA, 18 nt, Human
guucuuauucccgaucca

SEQ ID NO: 1197421 - RNA, 19 nt, Human
uaaaagcaauccagcuccc

SEQ ID NO: 1197422 - RNA, 21 nt, Human
uaaaaggcuaaggugcaaggg

SEQ ID NO: 1197423 - RNA, 22 nt, Human
uaaaccacgcaugaauaugcca

SEQ ID NO: 1197424 - RNA, 19 nt, Human
uaacuuguucagaaggagg

SEQ ID NO: 1197425 - RNA, 22 nt, Human
uaacuuguucagaaggaggaau

SEQ ID NO: 1197426 - RNA, 18 nt, Human
uaguggauaaccagagcc

SEQ ID NO: 1197427 - RNA, 18 nt, Human
uauagaacaucagggccc

SEQ ID NO: 1197428 - RNA, 19 nt, Human
ucaaacaccgacuccucau

SEQ ID NO: 1197429 - RNA, 24 nt, Human
ucaaacaccgacuccucauauaac

SEQ ID NO: 1197430 - RNA, 22 nt, Human
ucaacagaaaacaaaaaacccu

SEQ ID NO: 1197431 - RNA, 23 nt, Human
ucacaggaggcaccugacccaga

SEQ ID NO: 1197432 - RNA, 22 nt, Human
uccacagcgccucccagcccgc

SEQ ID NO: 1197433 - RNA, 22 nt, Human
uccagaaaaugacaauaauagg

SEQ ID NO: 1197434 - RNA, 20 nt, Human
uccagccagugaagugaggu

SEQ ID NO: 1197435 - RNA, 27 nt, Human
ucccugcucuucuggcuggugguggac

SEQ ID NO: 1197436 - RNA, 18 nt, Human
uccuggaggagaagaugu

SEQ ID NO: 1197437 - RNA, 19 nt, Human
ucucacagcgccccgcugc

SEQ ID NO: 1197438 - RNA, 19 nt, Human
ucuccgcuccuuaaauuca

SEQ ID NO: 1197439 - RNA, 20 nt, Human
ucucuucuaaagcagcucca

SEQ ID NO: 1197440 - RNA, 18 nt, Human
ucuggugggaggcacagc

SEQ ID NO: 1197441 - RNA, 18 nt, Human
ugagaaaaugugguggcc

SEQ ID NO: 1197442 - RNA, 23 nt, Human
ugagcacacaccuggacaaggga

SEQ ID NO: 1197443 - RNA, 18 nt, Human
ugagucagggcagagcag

SEQ ID NO: 1197444 - RNA, 21 nt, Human
ugcaggagguaggggaugaag

SEQ ID NO: 1197445 - RNA, 21 nt, Human
ugcucaaggucacuggugcug

SEQ ID NO: 1197446 - RNA, 20 nt, Human
ugcugccuauuaaacucucc

SEQ ID NO: 1197447 - RNA, 23 nt, Human
ugcuguguuccccuauuggcuaa

SEQ ID NO: 1197448 - RNA, 19 nt, Human
ugcuuguggugcagcuggu

SEQ ID NO: 1197449 - RNA, 19 nt, Human
uggaaaaaggagaagccau

SEQ ID NO: 1197450 - RNA, 19 nt, Human
uggaaaaaugguuauggca

SEQ ID NO: 1197451 - RNA, 21 nt, Human
uggagcagcuggagcugcuug

SEQ ID NO: 1197452 - RNA, 20 nt, Human
uggcaacauggccaccucga

SEQ ID NO: 1197453 - RNA, 18 nt, Human
uggcagagcaggaaauca

SEQ ID NO: 1197454 - RNA, 21 nt, Human
uggcagagcaggaaaucagaa

SEQ ID NO: 1197455 - RNA, 22 nt, Human
uggcagagcaggaaaucagaaa

SEQ ID NO: 1197456 - RNA, 19 nt, Human
uggccccaggguugggcgu

SEQ ID NO: 1197457 - RNA, 21 nt, Human
uggcuaguaucucggggcacu

SEQ ID NO: 1197458 - RNA, 21 nt, Human
uggcucaucccugacccccug

SEQ ID NO: 1197459 - RNA, 18 nt, Human
uggcuggggugcaguugg

SEQ ID NO: 1197460 - RNA, 18 nt, Human
uggcuggggugcaguugg

SEQ ID NO: 1197461 - RNA, 25 nt, Human
uggcuggggugcaguugggggugca

SEQ ID NO: 1197462 - RNA, 25 nt, Human
uggcuggugguggacacaaacauug

SEQ ID NO: 1197463 - RNA, 18 nt, Human
ugggaaggccgagaggug

SEQ ID NO: 1197464 - RNA, 19 nt, Human
ugggaggcacagcaagugg

SEQ ID NO: 1197465 - RNA, 22 nt, Human
ugggaggcacagcaagugggaa

SEQ ID NO: 1197466 - RNA, 19 nt, Human
uggugcuggugaccuugag

SEQ ID NO: 1197467 - RNA, 24 nt, Human
ugucagaguggagcagcuggagcu

SEQ ID NO: 1197468 - RNA, 20 nt, Human
uguggaaaaaggagaagcca

SEQ ID NO: 1197469 - RNA, 24 nt, Human
uuccuggaggagaagauguugcca

SEQ ID NO: 1197470 - RNA, 22 nt, Human
uucucagcaaggcaauguaauu

SEQ ID NO: 1197471 - RNA, 22 nt, Human
uuugccuggcaacauggccacc

SEQ ID NO: 1197472 - RNA, 23 nt, Human
aucaccgcagcuucuugaguaac

SEQ ID NO: 1197473 - RNA, 19 nt, Human
cacaaaaguaaaaaucacc

SEQ ID NO: 1197474 - RNA, 22 nt, Human
uaagcaucuuuucauugguuuc

SEQ ID NO: 1197475 - RNA, 22 nt, Human
ucuugaguaacuuucuugacuu

SEQ ID NO: 1197476 - RNA, 21 nt, Human
ucuuuggcagcauucuuaaca

SEQ ID NO: 1197477 - RNA, 22 nt, Human
ugauaugggaccauguuucuca

SEQ ID NO: 1197478 - RNA, 20 nt, Human
uugcugguucgauccuuuau

SEQ ID NO: 1197479 - RNA, 21 nt, Human
uuggcagcauucuuaacaucu

SEQ ID NO: 1197480 - RNA, 23 nt, Human
cacauuuacccccucuuccugaa

SEQ ID NO: 1197481 - RNA, 23 nt, Human
cauuccauacaauccacauuuac

SEQ ID NO: 1197482 - RNA, 18 nt, Human
cuuuauucuggaaguagg

SEQ ID NO: 1197483 - RNA, 18 nt, Human
ggagccaccugucaccug

SEQ ID NO: 1197484 - RNA, 25 nt, Human
uccauacaauccacauuuacccccu

SEQ ID NO: 1197485 - RNA, 27 nt, Human
uccuugguaaucacuuuauucuggaag

SEQ ID NO: 1197486 - RNA, 25 nt, Human
ucucuuuuuccuuuaguuccugugc

SEQ ID NO: 1197487 - RNA, 21 nt, Human
ugacucgaucucuuuuuccuu

SEQ ID NO: 1197488 - RNA, 22 nt, Human
ugcugaguacugccguccugca

SEQ ID NO: 1197489 - RNA, 24 nt, Human
uuccauacaauccacauuuacccc

SEQ ID NO: 1197490 - RNA, 25 nt, Human
uuccuugguaaucacuuuauucugg

SEQ ID NO: 1197491 - RNA, 18 nt, Human
aaaacccucaaaccagga

SEQ ID NO: 1197492 - RNA, 19 nt, Human
aaacacacaaagccacaca

SEQ ID NO: 1197493 - RNA, 23 nt, Human
aaaggcaaguccaaauugaaaca

SEQ ID NO: 1197494 - RNA, 19 nt, Human
aacugcugggaacacagga

SEQ ID NO: 1197495 - RNA, 19 nt, Human
aacugucccauggauccca

SEQ ID NO: 1197496 - RNA, 18 nt, Human
aagcagcugcucagcugg

SEQ ID NO: 1197497 - RNA, 24 nt, Human
aagcaggaaccaagacaaaggcaa

SEQ ID NO: 1197498 - RNA, 21 nt, Human
acaaacacacaaagccacacc

SEQ ID NO: 1197499 - RNA, 23 nt, Human
acacaaauguggaggccacaacc

SEQ ID NO: 1197500 - RNA, 21 nt, Human
acacacacacagacacauaca

SEQ ID NO: 1197501 - RNA, 19 nt, Human
acacacacagacacauaca

SEQ ID NO: 1197502 - RNA, 19 nt, Human
acacauacacaaacacaca

SEQ ID NO: 1197503 - RNA, 22 nt, Human
acacucccacaguaacacacag

SEQ ID NO: 1197504 - RNA, 19 nt, Human
acagacacauacacaaaca

SEQ ID NO: 1197505 - RNA, 18 nt, Human
accucacugucucccuuc

SEQ ID NO: 1197506 - RNA, 19 nt, Human
acucugugucccagaauga

SEQ ID NO: 1197507 - RNA, 19 nt, Human
acugcugggaacacaggaa

SEQ ID NO: 1197508 - RNA, 19 nt, Human
agaagacaggugacagugc

SEQ ID NO: 1197509 - RNA, 24 nt, Human
agacaaaggcaaguccaaauugaa

SEQ ID NO: 1197510 - RNA, 24 nt, Human
agacacauacacaaacacacaaag

SEQ ID NO: 1197511 - RNA, 25 nt, Human
agacacauacacaaacacacaaagc

SEQ ID NO: 1197512 - RNA, 22 nt, Human
agacugaaaucccaagacaaug

SEQ ID NO: 1197513 - RNA, 24 nt, Human
agaggucuccuucucuaccaagcc

SEQ ID NO: 1197514 - RNA, 22 nt, Human
aggaaaaugguacaggcagagc

SEQ ID NO: 1197515 - RNA, 22 nt, Human
aggaaccaagacaaaggcaagu

SEQ ID NO: 1197516 - RNA, 22 nt, Human
aggcaggaaccacgacaaaggc

SEQ ID NO: 1197517 - RNA, 23 nt, Human
aggccacaacccacccagcauca

SEQ ID NO: 1197518 - RNA, 22 nt, Human
aggggcagacgauggggaaccc

SEQ ID NO: 1197519 - RNA, 24 nt, Human
agggguuuugugaaagaaucaugc

SEQ ID NO: 1197520 - RNA, 24 nt, Human
agggugucagggcugucagccugc

SEQ ID NO: 1197521 - RNA, 21 nt, Human
agguauuaaaacccucaaacc

SEQ ID NO: 1197522 - RNA, 22 nt, Human
aggugcuaucugggaaaagcag

SEQ ID NO: 1197523 - RNA, 19 nt, Human
auaaaacauucuccaggaa

SEQ ID NO: 1197524 - RNA, 18 nt, Human
augauagugucucuccuu

SEQ ID NO: 1197525 - RNA, 22 nt, Human
augcuagcuggagcccauagcu

SEQ ID NO: 1197526 - RNA, 18 nt, Human
auguccacuaaugcuguu

SEQ ID NO: 1197527 - RNA, 18 nt, Human
caaaagauggccuggcac

SEQ ID NO: 1197528 - RNA, 21 nt, Human
caaacacacaaagccacacac

SEQ ID NO: 1197529 - RNA, 20 nt, Human
caaauguggaggccacaacc

SEQ ID NO: 1197530 - RNA, 22 nt, Human
caacacucccacaguaacacac

SEQ ID NO: 1197531 - RNA, 18 nt, Human
caaguccaaauugaaaca

SEQ ID NO: 1197532 - RNA, 19 nt, Human
caccagguuguauacucac

SEQ ID NO: 1197533 - RNA, 20 nt, Human
cacgacaaaggcagguccaa

SEQ ID NO: 1197534 - RNA, 20 nt, Human
cacuccaaauuuuuccugca

SEQ ID NO: 1197535 - RNA, 23 nt, Human
cagccugccuaagcagaggaaaa

SEQ ID NO: 1197536 - RNA, 22 nt, Human
caggaaccaagacaaaggcaag

SEQ ID NO: 1197537 - RNA, 23 nt, Human
caugaaaucucaagaugauggag

SEQ ID NO: 1197538 - RNA, 21 nt, Human
cauucugcagaaagccccacc

SEQ ID NO: 1197539 - RNA, 23 nt, Human
ccaacacucgcaacacucccaca

SEQ ID NO: 1197540 - RNA, 23 nt, Human
ccacccagcaucaaucuauucca

SEQ ID NO: 1197541 - RNA, 23 nt, Human
ccacggaguucuuauccacaaag

SEQ ID NO: 1197542 - RNA, 23 nt, Human
ccagcaucaaucuauuccacuuc

SEQ ID NO: 1197543 - RNA, 22 nt, Human
cccacaguaacacacagcccag

SEQ ID NO: 1197544 - RNA, 18 nt, Human
cccaguagcuucugaggc

SEQ ID NO: 1197545 - RNA, 18 nt, Human
ccccauccacccuucacc

SEQ ID NO: 1197546 - RNA, 21 nt, Human
ccuaggaucauggaacugucc

SEQ ID NO: 1197547 - RNA, 22 nt, Human
ccucacaacgugaagcagcugc

SEQ ID NO: 1197548 - RNA, 23 nt, Human
ccuggcacuugaccucucugcca

SEQ ID NO: 1197549 - RNA, 21 nt, Human
cuccauggucagaucacaugg

SEQ ID NO: 1197550 - RNA, 22 nt, Human
cucgcaacacucccacaguaac

SEQ ID NO: 1197551 - RNA, 31 nt, Human; identical to SEQ ID NO: 1002988

SEQ ID NO: 1197552 - RNA, 22 nt, Human
cuggagcaccagggugucaggg

SEQ ID NO: 1197553 - RNA, 18 nt, Human
cugucccauggaucccac

SEQ ID NO: 1197554 - RNA, 22 nt, Human
cuugaccucacugucucccuuc

SEQ ID NO: 1197555 - RNA, 21 nt, Human
gaaaucccaagacaauggaga

SEQ ID NO: 1197556 - RNA, 21 nt, Human
gaagacguugagccagaccaa

SEQ ID NO: 1197557 - RNA, 19 nt, Human
gaagauguugagccagauc

SEQ ID NO: 1197558 - RNA, 22 nt, Human
gacaauggaagucaguaaaaga

SEQ ID NO: 1197559 - RNA, 19 nt, Human
gacugaaaucccaagacaa

SEQ ID NO: 1197560 - RNA, 20 nt, Human
gagaagacaggugacagugc

SEQ ID NO: 1197561 - RNA, 21 nt, Human
gauguugaaaaauguucacag

SEQ ID NO: 1197562 - RNA, 20 nt, Human
gcagagcuggcuugguauca

SEQ ID NO: 1197563 - RNA, 18 nt, Human
gccacaacccacccagca

SEQ ID NO: 1197564 - RNA, 20 nt, Human
gcucuccucuucuuuguaga

SEQ ID NO: 1197565 - RNA, 26 nt, Human
gcuggcucacaucuacccucuccuag

SEQ ID NO: 1197566 - RNA, 18 nt, Human
ggauaaaggcugccugug

SEQ ID NO: 1197567 - RNA, 20 nt, Human
ggcagguccaaagucaagca

SEQ ID NO: 1197568 - RNA, 19 nt, Human
gggagaugucuguucuugg

SEQ ID NO: 1197569 - RNA, 18 nt, Human
gguacaggcagagcuggc

SEQ ID NO: 1197570 - RNA, 22 nt, Human
guucuuggguguggugcucucc

SEQ ID NO: 1197571 - RNA, 19 nt, Human
uaaaacccucaaaccagga

SEQ ID NO: 1197572 - RNA, 19 nt, Human
uaaaagaggacacaaaugu

SEQ ID NO: 1197573 - RNA, 23 nt, Human
uacagguauuaaaacccucaaac

SEQ ID NO: 1197574 - RNA, 26 nt, Human
uacauacacacacacagacacauaca

SEQ ID NO: 1197575 - RNA, 22 nt, Human
uacccuaaaagucucaaacuua

SEQ ID NO: 1197576 - RNA, 24 nt, Human
uaucccagacugaaaucccaagac

SEQ ID NO: 1197577 - RNA, 21 nt, Human
ucaaaccaggaguuuuccaga

SEQ ID NO: 1197578 - RNA, 22 nt, Human
ucacagaaggugucugcggaaa

SEQ ID NO: 1197579 - RNA, 19 nt, Human
ucagugaaagauggcuggg

SEQ ID NO: 1197580 - RNA, 23 nt, Human
uccauggucagaucacaugggag

SEQ ID NO: 1197581 - RNA, 18 nt, Human
ucccacagagaagacagg

SEQ ID NO: 1197582 - RNA, 19 nt, Human
ucccaugaggaucauuuuc

SEQ ID NO: 1197583 - RNA, 22 nt, Human
ucucacaggugcagaugugguu

SEQ ID NO: 1197584 - RNA, 21 nt, Human
ucugugucccagaaugaaauc

SEQ ID NO: 1197585 - RNA, 23 nt, Human
ucuguucuuggguguggugcucu

SEQ ID NO: 1197586 - RNA, 24 nt, Human
ugaaagaaucaugccccaugagga

SEQ ID NO: 1197587 - RNA, 19 nt, Human
ugaaagauggcugggcucu

SEQ ID NO: 1197588 - RNA, 26 nt, Human
ugacauccaacacucgcaacacuccc

SEQ ID NO: 1197589 - RNA, 24 nt, Human
ugacugauuuugcaauuaugggaa

SEQ ID NO: 1197590 - RNA, 25 nt, Human
ugagaaaggcaggaaccacgacaaa

SEQ ID NO: 1197591 - RNA, 22 nt, Human
ugagauguugagcagucuuugg

SEQ ID NO: 1197592 - RNA, 22 nt, Human
ugagauguugagcagucuuugg

SEQ ID NO: 1197593 - RNA, 21 nt, Human
ugcagauccuuuuggaucugu

SEQ ID NO: 1197594 - RNA, 19 nt, Human
ugccugugauaacgcauug

SEQ ID NO: 1197595 - RNA, 22 nt, Human
uggaagauguugagccagaucc

SEQ ID NO: 1197596 - RNA, 22 nt, Human
uggaagucaguaaaagaggaca

SEQ ID NO: 1197597 - RNA, 21 nt, Human
uggagcaccagggugucaggg

SEQ ID NO: 1197598 - RNA, 19 nt, Human
uggcaggggaucuaugaga

SEQ ID NO: 1197599 - RNA, 20 nt, Human
uggcucacaucuacccucuc

SEQ ID NO: 1197600 - RNA, 22 nt, Human
uggcugggcucuugaccucacu

SEQ ID NO: 1197601 - RNA, 21 nt, Human
uggcuugguaucaggauaaag

SEQ ID NO: 1197602 - RNA, 21 nt, Human
ugggagagagaaacugcuggg

SEQ ID NO: 1197603 - RNA, 23 nt, Human
ugggugucagugaaagauggcug

SEQ ID NO: 1197604 - RNA, 22 nt, Human
ugguacaggcagagcuggcuug

SEQ ID NO: 1197605 - RNA, 18 nt, Human
ugguaucaggauaaaggc

SEQ ID NO: 1197606 - RNA, 24 nt, Human
uggugagauguugagcagucuuug

SEQ ID NO: 1197607 - RNA, 19 nt, Human
ugugaaagaaucaugcccc

SEQ ID NO: 1197608 - RNA, 23 nt, Human
ugugaacagggaagaguuuagug

SEQ ID NO: 1197609 - RNA, 26 nt, Human
ugugaacagggaagaguuuaguguga

SEQ ID NO: 1197610 - RNA, 28 nt, Human
uuacauacacacacacagacacauacac

SEQ ID NO: 1197611 - RNA, 19 nt, Human
uucacccuuuuugcuggug

SEQ ID NO: 1197612 - RNA, 26 nt, Human
uucaggacaauaaaacauucuccagg

SEQ ID NO: 1197613 - RNA, 23 nt, Human
uucuuuguagaagaguaccugac

SEQ ID NO: 1197614 - RNA, 21 nt, Human
uugcaagucugacaaucaugu

SEQ ID NO: 1197615 - RNA, 24 nt, Human
uuggccacaauuugcacuccaaau

SEQ ID NO: 1197616 - RNA, 25 nt, Human
uuuggaucuguagugauuuugugcu

SEQ ID NO: 1197617 - RNA, 18 nt, Human
uuuuaugauggucuucug

SEQ ID NO: 1197618 - RNA, 18 nt, Human
uuuuuuggcaggggcagc

SEQ ID NO: 1197619 - RNA, 20 nt, Human
aaagaagguugggcucuuga

SEQ ID NO: 1197620 - RNA, 19 nt, Human
aaagccgcggccacucuug

SEQ ID NO: 1197621 - RNA, 24 nt, Human
aagcaugaaaaaaaguguuguugg

SEQ ID NO: 1197622 - RNA, 24 nt, Human
accaggugacuuguagcaacggcc

SEQ ID NO: 1197623 - RNA, 24 nt, Human
agaaacaagcccagaucaucugca

SEQ ID NO: 1197624 - RNA, 19 nt, Human
auuuuauucaugucucucu

SEQ ID NO: 1197625 - RNA, 19 nt, Human
caaaccacacuuugguagc

SEQ ID NO: 1197626 - RNA, 26 nt, Human
cacuuuuguaaggucagaauuggagg

SEQ ID NO: 1197627 - RNA, 19 nt, Human
cagugccccuccucaguuc

SEQ ID NO: 1197628 - RNA, 21 nt, Human
cauccugggucucucagaagc

SEQ ID NO: 1197629 - RNA, 20 nt, Human
ccagggcugggaaguaaggc

SEQ ID NO: 1197630 - RNA, 23 nt, Human
cccgaccccaggugucccaaagc

SEQ ID NO: 1197631 - RNA, 21 nt, Human
ccucaugguggacccgacccc

SEQ ID NO: 1197632 - RNA, 20 nt, Human
ccugggucucucagaagcuc

SEQ ID NO: 1197633 - RNA, 24 nt, Human
cgccucuccuuucucuguaccaga

SEQ ID NO: 1197634 - RNA, 23 nt, Human
cgugguuccacucagcgccucuc

SEQ ID NO: 1197635 - RNA, 20 nt, Human
cucaaugccauguacucucc

SEQ ID NO: 1197636 - RNA, 18 nt, Human
cuccccuggccucagccc

SEQ ID NO: 1197637 - RNA, 21 nt, Human
cucugaguccuuagagguggg

SEQ ID NO: 1197638 - RNA, 18 nt, Human
cucuugaccucacugcau

SEQ ID NO: 1197639 - RNA, 22 nt, Human
cucuugggauuguugaggccca

SEQ ID NO: 1197640 - RNA, 24 nt, Human
cugcaucccuucauccugggucuc

SEQ ID NO: 1197641 - RNA, 21 nt, Human
cugguguggugugcuccucuu

SEQ ID NO: 1197642 - RNA, 23 nt, Human
gaagcucucucagacugaccuuu

SEQ ID NO: 1197643 - RNA, 23 nt, Human
gaaguaaggcccagggcagugcc

SEQ ID NO: 1197644 - RNA, 24 nt, Human
gccauguacucuccugggaggguc

SEQ ID NO: 1197645 - RNA, 18 nt, Human
ggccacucuugggcgggu

SEQ ID NO: 1197646 - RNA, 19 nt, Human
gucuuuuccucacuuggcc

SEQ ID NO: 1197647 - RNA, 22 nt, Human
uaccagaaucucugccagaaac

SEQ ID NO: 1197648 - RNA, 18 nt, Human
ucaacuacuuuaguucuc

SEQ ID NO: 1197649 - RNA, 23 nt, Human
ucacugcaucccuucauccuggg

SEQ ID NO: 1197650 - RNA, 21 nt, Human
ucagaagcucucucagacuga

SEQ ID NO: 1197651 - RNA, 19 nt, Human
ucagugaaagaagguuggg

SEQ ID NO: 1197652 - RNA, 22 nt, Human
ucccuucauccugggucucuca

SEQ ID NO: 1197653 - RNA, 21 nt, Human
uccugggucucucagaagcuc

SEQ ID NO: 1197654 - RNA, 23 nt, Human
uccugggucucucagaagcucuc

SEQ ID NO: 1197655 - RNA, 23 nt, Human
ucucaaugccauguacucuccug

SEQ ID NO: 1197656 - RNA, 20 nt, Human
ucucuugggauuguugaggc

SEQ ID NO: 1197657 - RNA, 25 nt, Human
ucuguaccagaaucucugccagaaa

SEQ ID NO: 1197658 - RNA, 19 nt, Human
ucuuuuccucacuuggccg

SEQ ID NO: 1197659 - RNA, 19 nt, Human
ugaaagaagguugggcucu

SEQ ID NO: 1197660 - RNA, 18 nt, Human
ugccagaaacaagcccag

SEQ ID NO: 1197661 - RNA, 24 nt, Human
ugccagaaacaagcccagaucauc

SEQ ID NO: 1197662 - RNA, 21 nt, Human
ugccauguacucuccugggag

SEQ ID NO: 1197663 - RNA, 20 nt, Human
ugcgaugucuccccuggccu

SEQ ID NO: 1197664 - RNA, 21 nt, Human
uggaggccagggcugggaagu

SEQ ID NO: 1197665 - RNA, 18 nt, Human
ugggaaguaaggcccagg

SEQ ID NO: 1197666 - RNA, 24 nt, Human
ugggcucuugaccucacugcaucc

SEQ ID NO: 1197667 - RNA, 18 nt, Human
ugggucucucagaagcuc

SEQ ID NO: 1197668 - RNA, 22 nt, Human
uggugugcuccucuucgcguac

SEQ ID NO: 1197669 - RNA, 24 nt, Human
uguuggagguugcgaugucucccc

SEQ ID NO: 1197670 - RNA, 23 nt, Human
uuguaaggucagaauuggaggcc

SEQ ID NO: 1197671 - RNA, 22 nt, Human
uuguuggagguugcgaugucuc

SEQ ID NO: 1197672 - RNA, 23 nt, Human
accucaaaaaauucauggaggaa

SEQ ID NO: 1197673 - RNA, 21 nt, Human
auagcaucaacaaguaugaag

SEQ ID NO: 1197674 - RNA, 26 nt, Human
caacaaguaugaaauuacuuugaaaa

SEQ ID NO: 1197675 - RNA, 19 nt, Human
cagggccaacugcgggagg

SEQ ID NO: 1197676 - RNA, 20 nt, Human
ccuggcccucaggcguacgu

SEQ ID NO: 1197677 - RNA, 26 nt, Human
cggaacaccacagggccaacugcggg

SEQ ID NO: 1197678 - RNA, 18 nt, Human
cucuccacaaaaccaaca

SEQ ID NO: 1197679 - RNA, 20 nt, Human
uagcaucaacaaguaugaaa

SEQ ID NO: 1197680 - RNA, 21 nt, Human
uaugaaauuacuuugaaaaca

SEQ ID NO: 1197681 - RNA, 21 nt, Human
ucucuccacaaaaccaacaug

SEQ ID NO: 1197682 - RNA, 20 nt, Human
uguaaaauuuuauugugaaa

SEQ ID NO: 1197683 - RNA, 19 nt, Human
uuugauuugcaaacaagga

SEQ ID NO: 1197684 - RNA, 20 nt, Human
uuccucuaaguuuauaguuu

SEQ ID NO: 1197685 - RNA, 26 nt, Human
aagaaagaaaugucuugucuauucag

SEQ ID NO: 1197686 - RNA, 24 nt, Human
aagcaggaagaucacuugagccca

SEQ ID NO: 1197687 - RNA, 19 nt, Human
acacuuuacaguacagaag

SEQ ID NO: 1197688 - RNA, 22 nt, Human
acagugaugguaaaucauuuuc

SEQ ID NO: 1197689 - RNA, 23 nt, Human
agaucacuugagcccaggaguuc

SEQ ID NO: 1197690 - RNA, 27 nt, Human
agcaagugguuagaaaaucauauuuua

SEQ ID NO: 1197691 - RNA, 21 nt, Human
aguucauacugccagaauugc

SEQ ID NO: 1197692 - RNA, 24 nt, Human
aucacuugagcccaggaguucaag

SEQ ID NO: 1197693 - RNA, 18 nt, Human
caaaguccccuaauccuc

SEQ ID NO: 1197694 - RNA, 18 nt, Human
caggaguucaagguuaca

SEQ ID NO: 1197695 - RNA, 24 nt, Human
caggaguucaagguuacagugaga

SEQ ID NO: 1197696 - RNA, 19 nt, Human
caggcaauuuaucaaaguc

SEQ ID NO: 1197697 - RNA, 21 nt, Human
ccccuaauccuccaaaaucgc

SEQ ID NO: 1197698 - RNA, 21 nt, Human
ccuguagucccagcuacucag

SEQ ID NO: 1197699 - RNA, 27 nt, Human
cuagacagugaugguaaaucauuuucu

SEQ ID NO: 1197700 - RNA, 21 nt, Human
gagcaagugguuagaaaauca

SEQ ID NO: 1197701 - RNA, 24 nt, Human
gaucacuugagcccaggaguucaa

SEQ ID NO: 1197702 - RNA, 18 nt, Human
gccuguagucccagcuac

SEQ ID NO: 1197703 - RNA, 23 nt, Human
gccuguagucccagcuacucaga

SEQ ID NO: 1197704 - RNA, 21 nt, Human
gucuccggcaauaaaucacaa

SEQ ID NO: 1197705 - RNA, 22 nt, Human
uacagaagaaaaugucuccggc

SEQ ID NO: 1197706 - RNA, 19 nt, Human
uacucagaaaguugaagca

SEQ ID NO: 1197707 - RNA, 20 nt, Human
ucaaaguccccuaauccucc

SEQ ID NO: 1197708 - RNA, 24 nt, Human
ucaagaugaugacucagggccuuu

SEQ ID NO: 1197709 - RNA, 23 nt, Human
ucuaccaaaagaaagaaaugucu

SEQ ID NO: 1197710 - RNA, 21 nt, Human
ugaaagagagaaauuaauaug

SEQ ID NO: 1197711 - RNA, 20 nt, Human
ugaagcaggaagaucacuug

SEQ ID NO: 1197712 - RNA, 24 nt, Human
ugaagcaggaagaucacuugagcc

SEQ ID NO: 1197713 - RNA, 24 nt, Human
uguagucccagcuacucagaaagu

SEQ ID NO: 1197714 - RNA, 20 nt, Human
uuccucuaaguuuauaguuu

SEQ ID NO: 1197715 - RNA, 21 nt, Human
aacuccuugcuucuuuacuug

SEQ ID NO: 1197716 - RNA, 18 nt, Human
aacugguguagagugagg

SEQ ID NO: 1197717 - RNA, 20 nt, Human
accagaaacuucaccauguc

SEQ ID NO: 1197718 - RNA, 20 nt, Human
agaaagcugcugcaugaagg

SEQ ID NO: 1197719 - RNA, 22 nt, Human
agccacaugaagggcuguagcc

SEQ ID NO: 1197720 - RNA, 20 nt, Human
agcccuuggcagcagccaca

SEQ ID NO: 1197721 - RNA, 19 nt, Human
auguagaaggagaugcugg

SEQ ID NO: 1197722 - RNA, 19 nt, Human
cacaaagugcuucugccag

SEQ ID NO: 1197723 - RNA, 18 nt, Human
cagcagcauggaggggag

SEQ ID NO: 1197724 - RNA, 20 nt, Human
cagugucuguaggcuucuca

SEQ ID NO: 1197725 - RNA, 27 nt, Human
cauucugcuucuucuggagcaucucca

SEQ ID NO: 1197726 - RNA, 23 nt, Human
ccaccagaaacuucaccaugucc

SEQ ID NO: 1197727 - RNA, 21 nt, Human
ccagaaauugaugucugugcc

SEQ ID NO: 1197728 - RNA, 21 nt, Human
ccagggcugcuggcccucccc

SEQ ID NO: 1197729 - RNA, 23 nt, Human
ccccagggcugcuggcccucccc

SEQ ID NO: 1197730 - RNA, 18 nt, Human
ccccggagcgagccugcc

SEQ ID NO: 1197731 - RNA, 21 nt, Human
ccucgacuggcugaauguccu

SEQ ID NO: 1197732 - RNA, 20 nt, Human
ccucucuuggacagacagcu

SEQ ID NO: 1197733 - RNA, 20 nt, Human
ccugaauuaaaagucugagg

SEQ ID NO: 1197734 - RNA, 18 nt, Human
ccuugaguagaccuucgu

SEQ ID NO: 1197735 - RNA, 21 nt, Human
cucagaaucagggacugaaaa

SEQ ID NO: 1197736 - RNA, 23 nt, Human
cucagaaucagggacugaaaauc

SEQ ID NO: 1197737 - RNA, 20 nt, Human
cucaugcuucucagggcucc

SEQ ID NO: 1197738 - RNA, 23 nt, Human
cuccaaaugcuccacgagacccu

SEQ ID NO: 1197739 - RNA, 21 nt, Human
cucuucauccagacuccugcc

SEQ ID NO: 1197740 - RNA, 24 nt, Human
cugaaaaucuauuuguccauagca

SEQ ID NO: 1197741 - RNA, 25 nt, Human
cugcaacaucugcugcucuucuucu

SEQ ID NO: 1197742 - RNA, 27 nt, Human
cugcaacaucugcugcucuucuucuuu

SEQ ID NO: 1197743 - RNA, 25 nt, Human
cuuuacuugcuccagaagaagaucc

SEQ ID NO: 1197744 - RNA, 22 nt, Human
gaaucagggacugaaaaucuau

SEQ ID NO: 1197745 - RNA, 23 nt, Human
gccacagaaagcugcugcaugaa

SEQ ID NO: 1197746 - RNA, 21 nt, Human
gcgugguggguuugucuggcu

SEQ ID NO: 1197747 - RNA, 26 nt, Human
gcucuucuucuuuucuugacugcucc

SEQ ID NO: 1197748 - RNA, 21 nt, Human
gggcauccugcaacaucugcu

SEQ ID NO: 1197749 - RNA, 22 nt, Human
ggugaugacagauaggcucuuc

SEQ ID NO: 1197750 - RNA, 19 nt, Human
guccucuuugucuugcugg

SEQ ID NO: 1197751 - RNA, 23 nt, Human
gucuugauguagaaggagaugcu

SEQ ID NO: 1197752 - RNA, 23 nt, Human
uagaaggagaugcuggcguggug

SEQ ID NO: 1197753 - RNA, 22 nt, Human
uagccagccugaauuaaaaguc

SEQ ID NO: 1197754 - RNA, 25 nt, Human
ucaaugacuuuauuccaugucuccu

SEQ ID NO: 1197755 - RNA, 24 nt, Human
ucauuuuuguccauuuccuuugca

SEQ ID NO: 1197756 - RNA, 25 nt, Human
uccaccagaaacuucaccaugucca

SEQ ID NO: 1197757 - RNA, 22 nt, Human
uccacgagacccucaucagcca

SEQ ID NO: 1197758 - RNA, 19 nt, Human
uccagaagaagauccuuca

SEQ ID NO: 1197759 - RNA, 20 nt, Human
uccuuucugcuucuugaagg

SEQ ID NO: 1197760 - RNA, 25 nt, Human
ugaauguccuuucugcuucuugaag

SEQ ID NO: 1197761 - RNA, 26 nt, Human
ugaauguccuuucugcuucuugaagg

SEQ ID NO: 1197762 - RNA, 18 nt, Human
ugacaauaccuccacugg

SEQ ID NO: 1197763 - RNA, 24 nt, Human
ugaccagaaauugaugucugugcc

SEQ ID NO: 1197764 - RNA, 22 nt, Human
ugcaugaagggguguccagucc

SEQ ID NO: 1197765 - RNA, 21 nt, Human
ugccaggauggagcaagccuc

SEQ ID NO: 1197766 - RNA, 18 nt, Human
ugccccagggcugcuggc

SEQ ID NO: 1197767 - RNA, 21 nt, Human
ugcuccagaucaacuccuugc

SEQ ID NO: 1197768 - RNA, 20 nt, Human
uggaggggaguccagccauc

SEQ ID NO: 1197769 - RNA, 23 nt, Human
uggcagcagccacaugaagggcu

SEQ ID NO: 1197770 - RNA, 19 nt, Human
uggcugaauguccuuucug

SEQ ID NO: 1197771 - RNA, 18 nt, Human
uggcugagcugggcaccu

SEQ ID NO: 1197772 - RNA, 24 nt, Human
ugucacaaagugcuucugccagga

SEQ ID NO: 1197773 - RNA, 20 nt, Human
uuacuugcuccagaagaaga

SEQ ID NO: 1197774 - RNA, 19 nt, Human
uucaccuucaccauugaca

SEQ ID NO: 1197775 - RNA, 22 nt, Human
uucuccaccagaaacuucacca

SEQ ID NO: 1197776 - RNA, 21 nt, Human
uucuucuggagcaucuccaaa

SEQ ID NO: 1197777 - RNA, 20 nt, Human
agacggcgccggcgcccgca

SEQ ID NO: 1197778 - RNA, 22 nt, Human
agccggcacuucaccagcuugg

SEQ ID NO: 1197779 - RNA, 20 nt, Human
caccaaguaacccgcgccaa

SEQ ID NO: 1197780 - RNA, 18 nt, Human
caccagcuuggagcagca

SEQ ID NO: 1197781 - RNA, 20 nt, Human
caccuugcccuucugcagcc

SEQ ID NO: 1197782 - RNA, 26 nt, Human
caccuugcccuucugcagccggcacu

SEQ ID NO: 1197783 - RNA, 21 nt, Human
cacugcguagacggcgccggc

SEQ ID NO: 1197784 - RNA, 18 nt, Human
ccgcacagcugcccuggc

SEQ ID NO: 1197785 - RNA, 19 nt, Human
ccggcgcccgcacucagcu

SEQ ID NO: 1197786 - RNA, 22 nt, Human
cgcacucagcuguugacagucu

SEQ ID NO: 1197787 - RNA, 22 nt, Human
cgggagggauacggacccggug

SEQ ID NO: 1197788 - RNA, 22 nt, Human
cgggguggggcggaaucgggag

SEQ ID NO: 1197789 - RNA, 18 nt, Human
cguagacggcgccggcgc

SEQ ID NO: 1197790 - RNA, 22 nt, Human
cugcagccggcacuucaccagc

SEQ ID NO: 1197791 - RNA, 23 nt, Human
cugcagccggcacuucaccagcu

SEQ ID NO: 1197792 - RNA, 26 nt, Human
ggccaggaccaaaugugucuccuucu

SEQ ID NO: 1197793 - RNA, 21 nt, Human
gggagggauacggacccggug

SEQ ID NO: 1197794 - RNA, 24 nt, Human
gggguggggcggaaucgggaggga

SEQ ID NO: 1197795 - RNA, 23 nt, Human
ggguggggcggaaucgggaggga

SEQ ID NO: 1197796 - RNA, 22 nt, Human
ggugacuccgggguggccagga

SEQ ID NO: 1197797 - RNA, 22 nt, Human
gguggggcggaaucgggaggga

SEQ ID NO: 1197798 - RNA, 19 nt, Human
uacgcugcuccggaguccc

SEQ ID NO: 1197799 - RNA, 18 nt, Human
ucaccuugcccuucugca

SEQ ID NO: 1197800 - RNA, 22 nt, Human
ucagcuguugacagucuuucuu

SEQ ID NO: 1197801 - RNA, 21 nt, Human
ucggcgcgacggugaauuucc

SEQ ID NO: 1197802 - RNA, 25 nt, Human
ugcaauggucaccuugcccuucugc

SEQ ID NO: 1197803 - RNA, 19 nt, Human
ugcaccacaccaaguaacc

SEQ ID NO: 1197804 - RNA, 20 nt, Human
ugcaccacaccaaguaaccc

SEQ ID NO: 1197805 - RNA, 23 nt, Human
ugcccuucugcagccggcacuuc

SEQ ID NO: 1197806 - RNA, 23 nt, Human
ugcuccggagucccaccgcagga

SEQ ID NO: 1197807 - RNA, 23 nt, Human
uggagcagcagauguugacggag

SEQ ID NO: 1197808 - RNA, 24 nt, Human
uggggcggaaucgggagggauacg

SEQ ID NO: 1197809 - RNA, 19 nt, Human
ugguuugggugacuccggg

SEQ ID NO: 1197810 - RNA, 24 nt, Human
uguuguacuccaggaaggagcggc

SEQ ID NO: 1197811 - RNA, 25 nt, Human
uugacagucuuucuuccagcucucc

SEQ ID NO: 1197812 - RNA, 26 nt, Human
uugcaccacaccaaguaacccgcgcc

SEQ ID NO: 1197813 - RNA, 24 nt, Human
uuggagcagcagauguugacggag

SEQ ID NO: 1197814 - RNA, 20 nt, Human
uuuuuguuucccuccggaga

SEQ ID NO: 1197815 - RNA, 23 nt, Human
aaacgacagggaagcaucugcag

SEQ ID NO: 1197816 - RNA, 20 nt, Human
aaaugcacgaagccagcagg

SEQ ID NO: 1197817 - RNA, 20 nt, Human
aacacaauucucuuugcagc

SEQ ID NO: 1197818 - RNA, 22 nt, Human
aacacaauucucuuugcagcca

SEQ ID NO: 1197819 - RNA, 18 nt, Human
aagccuccgacaggagca

SEQ ID NO: 1197820 - RNA, 19 nt, Human
aagggccaccuguaggcac

SEQ ID NO: 1197821 - RNA, 19 nt, Human
aagugucugcucauucagu

SEQ ID NO: 1197822 - RNA, 20 nt, Human
acagacagcacuuccucggg

SEQ ID NO: 1197823 - RNA, 22 nt, Human
acagagccaggaacuggcaggu

SEQ ID NO: 1197824 - RNA, 25 nt, Human
accaucuccaggcuggcggcugcug

SEQ ID NO: 1197825 - RNA, 22 nt, Human
acgaagccagcaggguggaucc

SEQ ID NO: 1197826 - RNA, 18 nt, Human
acugugcugggcauggcu

SEQ ID NO: 1197827 - RNA, 18 nt, Human
agaacuccucacuuccgc

SEQ ID NO: 1197828 - RNA, 19 nt, Human
agaacuccucacuuccgcc

SEQ ID NO: 1197829 - RNA, 19 nt, Human
agacacuaaacgacaggga

SEQ ID NO: 1197830 - RNA, 22 nt, Human
agagccucccagagccaggccu

SEQ ID NO: 1197831 - RNA, 18 nt, Human
agcauccacaggugggga

SEQ ID NO: 1197832 - RNA, 22 nt, Human
agccaaagcugggagcgucgga

SEQ ID NO: 1197833 - RNA, 18 nt, Human
agccacuggccgaacucc

SEQ ID NO: 1197834 - RNA, 18 nt, Human
agccagcaggguggaucc

SEQ ID NO: 1197835 - RNA, 22 nt, Human
agcuggccccggccacggcccc

SEQ ID NO: 1197836 - RNA, 19 nt, Human
agcuugaggcgcgccagcu

SEQ ID NO: 1197837 - RNA, 18 nt, Human
aggcaaucgguuuggucu

SEQ ID NO: 1197838 - RNA, 20 nt, Human
aggcaggugggcgacugggc

SEQ ID NO: 1197839 - RNA, 19 nt, Human
agggccgccagcugugagc

SEQ ID NO: 1197840 - RNA, 19 nt, Human
agguaguugcaggguccag

SEQ ID NO: 1197841 - RNA, 25 nt, Human
agugcccccaaaugcacgaagccag

SEQ ID NO: 1197842 - RNA, 21 nt, Human
aucuccagcagaacuucugcc

SEQ ID NO: 1197843 - RNA, 23 nt, Human
caacaggccaucauccaucucuu

SEQ ID NO: 1197844 - RNA, 24 nt, Human
caacgcgaucucuuuucugcagcu

SEQ ID NO: 1197845 - RNA, 18 nt, Human
caacugugcgaggaggag

SEQ ID NO: 1197846 - RNA, 18 nt, Human
caagagguccccagcuga

SEQ ID NO: 1197847 - RNA, 22 nt, Human
caauuaccaggccgacggaagu

SEQ ID NO: 1197848 - RNA, 21 nt, Human
cacaguagagucacuucuguc

SEQ ID NO: 1197849 - RNA, 18 nt, Human
caccagggccagcaggau

SEQ ID NO: 1197850 - RNA, 24 nt, Human
cacccccaacugcaggacgggaac

SEQ ID NO: 1197851 - RNA, 20 nt, Human
cacccucuuccucuaccucc

SEQ ID NO: 1197852 - RNA, 22 nt, Human
cacccucuuccucuaccuccag

SEQ ID NO: 1197853 - RNA, 19 nt, Human
caccgaggggcccgccucc

SEQ ID NO: 1197854 - RNA, 22 nt, Human
cacugggccucugcacaaggcu

SEQ ID NO: 1197855 - RNA, 23 nt, Human
cacugggccucugcacaaggcuc

SEQ ID NO: 1197856 - RNA, 20 nt, Human
cagcaccuugaggccgcccu

SEQ ID NO: 1197857 - RNA, 18 nt, Human
cagcacuuccucggggca

SEQ ID NO: 1197858 - RNA, 22 nt, Human
cagcagcaccucugacgccuga

SEQ ID NO: 1197859 - RNA, 24 nt, Human
cagcagcaccucugacgccugagc

SEQ ID NO: 1197860 - RNA, 18 nt, Human
cagcaggaugugcacgcg

SEQ ID NO: 1197861 - RNA, 19 nt, Human
cagccacguacuccccauc

SEQ ID NO: 1197862 - RNA, 19 nt, Human
cagccagggagcugggcag

SEQ ID NO: 1197863 - RNA, 20 nt, Human
cagcccacgcucagcggcug

SEQ ID NO: 1197864 - RNA, 22 nt, Human
cagccucgugggcagucaggug

SEQ ID NO: 1197865 - RNA, 23 nt, Human
cagcucggagcacgcgugggcga

SEQ ID NO: 1197866 - RNA, 21 nt, Human
caggagaggcuggaaagccag

SEQ ID NO: 1197867 - RNA, 24 nt, Human
caggagaggcuggaaagccaggua

SEQ ID NO: 1197868 - RNA, 22 nt, Human
caggaggacaauccaagccccg

SEQ ID NO: 1197869 - RNA, 26 nt, Human
cagggccaggcggugccacaugcgcg

SEQ ID NO: 1197870 - RNA, 21 nt, Human
caggggaucggggauaagcac

SEQ ID NO: 1197871 - RNA, 22 nt, Human
cagguggccugaggguaggcag

SEQ ID NO: 1197872 - RNA, 18 nt, Human
cagguucaucuccagcag

SEQ ID NO: 1197873 - RNA, 19 nt, Human
caguagcaacgagcacucu

SEQ ID NO: 1197874 - RNA, 23 nt, Human
cauagggcgcccugugggccauc

SEQ ID NO: 1197875 - RNA, 22 nt, Human
caucugcagccaaagcugggag

SEQ ID NO: 1197876 - RNA, 21 nt, Human
cauggcgcgcggcugcuucuc

SEQ ID NO: 1197877 - RNA, 24 nt, Human
cauuugccacagcacguccagaga

SEQ ID NO: 1197878 - RNA, 22 nt, Human
ccacagccacguacuccccauc

SEQ ID NO: 1197879 - RNA, 19 nt, Human
ccagagccauuuccacgag

SEQ ID NO: 1197880 - RNA, 18 nt, Human
ccaggaggccacugccaa

SEQ ID NO: 1197881 - RNA, 18 nt, Human
ccagucccgacgucagga

SEQ ID NO: 1197882 - RNA, 21 nt, Human
cccaaaugcacgaagccagca

SEQ ID NO: 1197883 - RNA, 18 nt, Human
cccaccgaggggcccgcc

SEQ ID NO: 1197884 - RNA, 24 nt, Human
cccauagcagccucgugggcaguc

SEQ ID NO: 1197885 - RNA, 22 nt, Human
cccauccgggggccugcagcca

SEQ ID NO: 1197886 - RNA, 19 nt, Human
cccccaacugcaggacggg

SEQ ID NO: 1197887 - RNA, 24 nt, Human
cccgagcuuggccuucacgaugac

SEQ ID NO: 1197888 - RNA, 20 nt, Human
cccgcaggcucaggcaccug

SEQ ID NO: 1197889 - RNA, 23 nt, Human
cccgcaggcucaggcaccuggcu

SEQ ID NO: 1197890 - RNA, 19 nt, Human
cccgggagcucccccugcu

SEQ ID NO: 1197891 - RNA, 21 nt, Human
cccuggacgcugugaagccuc

SEQ ID NO: 1197892 - RNA, 21 nt, Human
cccuggaggccggcggguccc

SEQ ID NO: 1197893 - RNA, 23 nt, Human
cccuggaggccggcgggucccug

SEQ ID NO: 1197894 - RNA, 21 nt, Human
cccuggaugcugugaagccuc

SEQ ID NO: 1197895 - RNA, 23 nt, Human
cccugggccaggccauacgcuuc

SEQ ID NO: 1197896 - RNA, 25 nt, Human
cccugggccaggccauauaagcccu

SEQ ID NO: 1197897 - RNA, 20 nt, Human
ccgcccucccagucguccug

SEQ ID NO: 1197898 - RNA, 18 nt, Human
ccgggggccugcagcccc

SEQ ID NO: 1197899 - RNA, 20 nt, Human
ccucccagagccaggccucc

SEQ ID NO: 1197900 - RNA, 22 nt, Human
ccucccggucuccccauucauc

SEQ ID NO: 1197901 - RNA, 22 nt, Human
ccucggggcaggaguaggaagc

SEQ ID NO: 1197902 - RNA, 19 nt, Human
ccucguagcccucggcgcc

SEQ ID NO: 1197903 - RNA, 21 nt, Human
ccugcagccagggagcugggc

SEQ ID NO: 1197904 - RNA, 23 nt, Human
ccugcggccugcuucucugagac

SEQ ID NO: 1197905 - RNA, 21 nt, Human
ccugcuggaacggggguccca

SEQ ID NO: 1197906 - RNA, 21 nt, Human
ccuggcagggggcugcaggcc

SEQ ID NO: 1197907 - RNA, 22 nt, Human
ccuucugccacuccaucucagg

SEQ ID NO: 1197908 - RNA, 24 nt, Human
cgaaaucagcacccccaacugcag

SEQ ID NO: 1197909 - RNA, 22 nt, Human
cgcucccuccaccgggaaucug

SEQ ID NO: 1197910 - RNA, 18 nt, Human
cggcaggcucccacugcu

SEQ ID NO: 1197911 - RNA, 21 nt, Human
cggcauggcuguggaagagca

SEQ ID NO: 1197912 - RNA, 23 nt, Human
cggccugcuucucugagacagag

SEQ ID NO: 1197913 - RNA, 20 nt, Human
cgggaaucugugaccccagc

SEQ ID NO: 1197914 - RNA, 24 nt, Human
cgucaggaggacaauccaagcccc

SEQ ID NO: 1197915 - RNA, 21 nt, Human
cuccacagccacguacucccc

SEQ ID NO: 1197916 - RNA, 23 nt, Human
cuccagggaccccugcucacucu

SEQ ID NO: 1197917 - RNA, 21 nt, Human
cucccagagccaggccucccc

SEQ ID NO: 1197918 - RNA, 21 nt, Human
cuccccagcugugccagugcc

SEQ ID NO: 1197919 - RNA, 18 nt, Human
cuccugcuggaacggggg

SEQ ID NO: 1197920 - RNA, 21 nt, Human
cuccuuauuuuucucuuuuuu

SEQ ID NO: 1197921 - RNA, 18 nt, Human
cugacccgcaccgccagg

SEQ ID NO: 1197922 - RNA, 21 nt, Human
cugcacuguggccuggcgcuc

SEQ ID NO: 1197923 - RNA, 25 nt, Human
cugcaggccuucccaucgccggccu

SEQ ID NO: 1197924 - RNA, 20 nt, Human
cugcagugcuccuccggggc

SEQ ID NO: 1197925 - RNA, 26 nt, Human
cugccagggucagaguggaauuguac

SEQ ID NO: 1197926 - RNA, 19 nt, Human
cugcugguguuggcugugg

SEQ ID NO: 1197927 - RNA, 22 nt, Human
cuggccucuggaccaagccugg

SEQ ID NO: 1197928 - RNA, 23 nt, Human
cuucucugagacagagccaggaa

SEQ ID NO: 1197929 - RNA, 18 nt, Human
cuucugccacuccaucuc

SEQ ID NO: 1197930 - RNA, 21 nt, Human
cuuggcagcaccugcacagcc

SEQ ID NO: 1197931 - RNA, 20 nt, Human
gaacuggcagguaguugcag

SEQ ID NO: 1197932 - RNA, 22 nt, Human
gaacuugaagggcccugcggug

SEQ ID NO: 1197933 - RNA, 27 nt, Human
gacaggaagugucugcucauucagugc

SEQ ID NO: 1197934 - RNA, 21 nt, Human
gagaggaaagugucugugaug

SEQ ID NO: 1197935 - RNA, 19 nt, Human
gagcagccgugcaggcugg

SEQ ID NO: 1197936 - RNA, 22 nt, Human
gagcagguucaggagaggcugg

SEQ ID NO: 1197937 - RNA, 22 nt, Human
gagcauguccagagccauuucc

SEQ ID NO: 1197938 - RNA, 22 nt, Human
gcacaaggcucauccagcuccu

SEQ ID NO: 1197939 - RNA, 21 nt, Human
gcaggcuuucuucuaauaaag

SEQ ID NO: 1197940 - RNA, 25 nt, Human
gcaggcuuucuucuaauaaaggcuc

SEQ ID NO: 1197941 - RNA, 18 nt, Human
gccagaaccauccuccuc

SEQ ID NO: 1197942 - RNA, 23 nt, Human
gccagaugugccugaagaaggcg

SEQ ID NO: 1197943 - RNA, 18 nt, Human
gccagcaggaugugcacg

SEQ ID NO: 1197944 - RNA, 18 nt, Human
gccagggucagaguggaa

SEQ ID NO: 1197945 - RNA, 22 nt, Human
gccccguagacacuaaacgaca

SEQ ID NO: 1197946 - RNA, 25 nt, Human
gcuggccccggccacggcccccggc

SEQ ID NO: 1197947 - RNA, 18 nt, Human
gcugugagcugcuggugu

SEQ ID NO: 1197948 - RNA, 18 nt, Human
ggagcacgcgugggcgag

SEQ ID NO: 1197949 - RNA, 21 nt, Human
ggaguccgaaaucagcacccc

SEQ ID NO: 1197950 - RNA, 26 nt, Human
ggauaagcacacgaaugcauguucuc

SEQ ID NO: 1197951 - RNA, 19 nt, Human
ggcacccucuuccucuacc

SEQ ID NO: 1197952 - RNA, 18 nt, Human
ggcaggaguaggaagccc

SEQ ID NO: 1197953 - RNA, 18 nt, Human
ggccagcaggugcagggc

SEQ ID NO: 1197954 - RNA, 19 nt, Human
ggcccccggcugucccgcc

SEQ ID NO: 1197955 - RNA, 22 nt, Human
ggccugcggccugcuucucuga

SEQ ID NO: 1197956 - RNA, 18 nt, Human
ggccugggcccauagcag

SEQ ID NO: 1197957 - RNA, 20 nt, Human
ggcgaggcgaaggugguaga

SEQ ID NO: 1197958 - RNA, 19 nt, Human
ggcucagagccucccagag

SEQ ID NO: 1197959 - RNA, 20 nt, Human
ggcuucauggccagcaggau

SEQ ID NO: 1197960 - RNA, 21 nt, Human
gggcgaggcgaaggugguaga

SEQ ID NO: 1197961 - RNA, 22 nt, Human
guccucgccucuccugcagugc

SEQ ID NO: 1197962 - RNA, 22 nt, Human
gucuccccauucaucuucaaaa

SEQ ID NO: 1197963 - RNA, 21 nt, Human
uaccuccagcuccagagacuu

SEQ ID NO: 1197964 - RNA, 22 nt, Human
uacgcagcugcuccaaggacac

SEQ ID NO: 1197965 - RNA, 21 nt, Human
uagagcgcagcacggagcgcc

SEQ ID NO: 1197966 - RNA, 21 nt, Human
uagcaggccagcucuccagac

SEQ ID NO: 1197967 - RNA, 23 nt, Human
uagcaggccagcucuccagacac

SEQ ID NO: 1197968 - RNA, 21 nt, Human
uaggcugcaaggcagcagucc

SEQ ID NO: 1197969 - RNA, 23 nt, Human
uaguccgccagcagcuucuccag

SEQ ID NO: 1197970 - RNA, 21 nt, Human
ucauggcgcgcggcugcuucu

SEQ ID NO: 1197971 - RNA, 22 nt, Human
ucauggcgcgcggcugcuucuc

SEQ ID NO: 1197972 - RNA, 24 nt, Human
uccacagguggggaaaggacgucc

SEQ ID NO: 1197973 - RNA, 23 nt, Human
uccaccgggaaucugugacccca

SEQ ID NO: 1197974 - RNA, 21 nt, Human
uccaugagguacuccaccuuc

SEQ ID NO: 1197975 - RNA, 23 nt, Human
ucccagagccaggccuccccauc

SEQ ID NO: 1197976 - RNA, 19 nt, Human
uccccagcugacccgcacc

SEQ ID NO: 1197977 - RNA, 24 nt, Human
uccccaggcuggacaggaaguguc

SEQ ID NO: 1197978 - RNA, 22 nt, Human
uccucagccauggcgcccuggg

SEQ ID NO: 1197979 - RNA, 23 nt, Human
uccucggccucggacacggggcu

SEQ ID NO: 1197980 - RNA, 20 nt, Human
uccugugccaugaacaccag

SEQ ID NO: 1197981 - RNA, 30 nt, Human
ucucaauuuccaacaggccaucauccaucu

SEQ ID NO: 1197982 - RNA, 19 nt, Human
ucuccacacagcccacgcu

SEQ ID NO: 1197983 - RNA, 19 nt, Human
ucuccacagccacguacuc

SEQ ID NO: 1197984 - RNA, 19 nt, Human
ucuccaggcuggcggcugc

SEQ ID NO: 1197985 - RNA, 21 nt, Human
ucuccagggaccccugcucac

SEQ ID NO: 1197986 - RNA, 22 nt, Human
ucucuuuucugcagcuggcccc

SEQ ID NO: 1197987 - RNA, 21 nt, Human
ucugcagccaaagcugggagc

SEQ ID NO: 1197988 - RNA, 21 nt, Human
ucugcagggccuugaccaggg

SEQ ID NO: 1197989 - RNA, 22 nt, Human
ucuucgcacgcucuaguuuuac

SEQ ID NO: 1197990 - RNA, 22 nt, Human
ucuugaagugacaauaggcccu

SEQ ID NO: 1197991 - RNA, 18 nt, Human
ugaaauaugugacacacc

SEQ ID NO: 1197992 - RNA, 18 nt, Human
ugaagugacaauaggccc

SEQ ID NO: 1197993 - RNA, 24 nt, Human
ugacacaccguagcuucccuuccu

SEQ ID NO: 1197994 - RNA, 23 nt, Human
ugaccccagcaauuaccaggccg

SEQ ID NO: 1197995 - RNA, 18 nt, Human
ugagacagagccaggaac

SEQ ID NO: 1197996 - RNA, 19 nt, Human
ugagacagagccaggaacu

SEQ ID NO: 1197997 - RNA, 20 nt, Human
ugaggguaggcaggugggcg

SEQ ID NO: 1197998 - RNA, 22 nt, Human
ugaguguuccauggacaagagc

SEQ ID NO: 1197999 - RNA, 21 nt, Human
ugcacaaggcucauccagcuc

SEQ ID NO: 1198000 - RNA, 20 nt, Human
ugcaggcacaucuucugcag

SEQ ID NO: 1198001 - RNA, 20 nt, Human
ugccacagcacguccagagg

SEQ ID NO: 1198002 - RNA, 19 nt, Human
ugccagugccccgugugcu

SEQ ID NO: 1198003 - RNA, 18 nt, Human
ugcccgggagcucccccu

SEQ ID NO: 1198004 - RNA, 22 nt, Human
ugcccuggaggccggcggguug

SEQ ID NO: 1198005 - RNA, 20 nt, Human
uggaacgggggucccaucag

SEQ ID NO: 1198006 - RNA, 23 nt, Human
uggagccacuggccgaacuccau

SEQ ID NO: 1198007 - RNA, 18 nt, Human
uggcagcaccugcacagc

SEQ ID NO: 1198008 - RNA, 26 nt, Human
uggcagcaccugcacagccucgucca

SEQ ID NO: 1198009 - RNA, 19 nt, Human
uggccucuggaccaagccu

SEQ ID NO: 1198010 - RNA, 22 nt, Human
uggccugcggccugcuucucug

SEQ ID NO: 1198011 - RNA, 22 nt, Human
uggcggcugcugcgacauccag

SEQ ID NO: 1198012 - RNA, 24 nt, Human
uggcucagggacaucgccgggcgg

SEQ ID NO: 1198013 - RNA, 18 nt, Human
uggcucgagaagugacgg

SEQ ID NO: 1198014 - RNA, 19 nt, Human
uggcuguggcugcaagcag

SEQ ID NO: 1198015 - RNA, 24 nt, Human
ugggauggaacccucagugucugg

SEQ ID NO: 1198016 - RNA, 22 nt, Human
ugggcauggcugugaccgccag

SEQ ID NO: 1198017 - RNA, 18 nt, Human
ugggccucugcacaaggc

SEQ ID NO: 1198018 - RNA, 23 nt, Human
ugggcgacugggcucuguggaag

SEQ ID NO: 1198019 - RNA, 21 nt, Human
ugguccaggaaauacaaacug

SEQ ID NO: 1198020 - RNA, 22 nt, Human
uguagcaggccagcucuccaga

SEQ ID NO: 1198021 - RNA, 21 nt, Human
uguagucacugguguucugca

SEQ ID NO: 1198022 - RNA, 20 nt, Human
uguccauaguuuuucuccuu

SEQ ID NO: 1198023 - RNA, 25 nt, Human
ugugagcugcugguguuggcugugg

SEQ ID NO: 1198024 - RNA, 21 nt, Human
uuaccaggccgacggaagugu

SEQ ID NO: 1198025 - RNA, 24 nt, Human
uucaggagaggcuggaaagccagg

SEQ ID NO: 1198026 - RNA, 24 nt, Human
uucagguccucgccucuccugcag

SEQ ID NO: 1198027 - RNA, 19 nt, Human
uucagugaccgcugagugc

SEQ ID NO: 1198028 - RNA, 19 nt, Human
uuccaacaggccaucaucc

SEQ ID NO: 1198029 - RNA, 22 nt, Human
uuccucagccauggcgcccugg

SEQ ID NO: 1198030 - RNA, 20 nt, Human
uuccucagcuacggcacccu

SEQ ID NO: 1198031 - RNA, 22 nt, Human
uuccucagcuacggcacccugg

SEQ ID NO: 1198032 - RNA, 19 nt, Human
uuccucuaccuccagcucc

SEQ ID NO: 1198033 - RNA, 21 nt, Human
uuccucuaccuccagcuccag

SEQ ID NO: 1198034 - RNA, 21 nt, Human
uuccuggccucuggaccaagc

SEQ ID NO: 1198035 - RNA, 18 nt, Human
uugaagggcccugcggug

SEQ ID NO: 1198036 - RNA, 20 nt, Human
aaauaauuuauugaugauac

SEQ ID NO: 1198037 - RNA, 18 nt, Human
acaaagcgacucgcgccc

SEQ ID NO: 1198038 - RNA, 23 nt, Human
cacccggggccgcccccggauuc

SEQ ID NO: 1198039 - RNA, 23 nt, Human
ccugcaccacgccgggccagaag

SEQ ID NO: 1198040 - RNA, 18 nt, Human
cgcgcgccacagcggccg

SEQ ID NO: 1198041 - RNA, 21 nt, Human
cuucccguccuuguccaggac

SEQ ID NO: 1198042 - RNA, 20 nt, Human
gaagaugggcgggcgccccg

SEQ ID NO: 1198043 - RNA, 22 nt, Human
gccccggcagcucggccagggg

SEQ ID NO: 1198044 - RNA, 24 nt, Human
gggucccuccagggcgcgcccugc

SEQ ID NO: 1198045 - RNA, 23 nt, Human
ggucccuccagggcgcgcccugc

SEQ ID NO: 1198046 - RNA, 19 nt, Human
uccuuguccaggacgccgc

SEQ ID NO: 1198047 - RNA, 24 nt, Human
ucgcgcccacccggggccgccccc

SEQ ID NO: 1198048 - RNA, 19 nt, Human
auguagcaggacccagccu

SEQ ID NO: 1198049 - RNA, 22 nt, Human
cacacacuacaguagcccacuc

SEQ ID NO: 1198050 - RNA, 24 nt, Human
cccccucacccuuagcuaaaagcc

SEQ ID NO: 1198051 - RNA, 20 nt, Human
ccuucaguacuguggagacc

SEQ ID NO: 1198052 - RNA, 20 nt, Human
cgucgaagccaucauuauuc

SEQ ID NO: 1198053 - RNA, 26 nt, Human
cuccucaugaaucccccaguggggau

SEQ ID NO: 1198054 - RNA, 22 nt, Human
cuuugaaucacacacacuacag

SEQ ID NO: 1198055 - RNA, 23 nt, Human
cuuugaaucacacacacuacagu

SEQ ID NO: 1198056 - RNA, 23 nt, Human
gaaguucccccucacccuuagcu

SEQ ID NO: 1198057 - RNA, 22 nt, Human
gacccagccuuugaaucacaca

SEQ ID NO: 1198058 - RNA, 19 nt, Human
ggguggccugcagcuccuu

SEQ ID NO: 1198059 - RNA, 22 nt, Human
uagcccacucccuccucaugaa

SEQ ID NO: 1198060 - RNA, 26 nt, Human
ucacacacacuacaguagcccacucc

SEQ ID NO: 1198061 - RNA, 19 nt, Human
ucccuccucaugaaucccc

SEQ ID NO: 1198062 - RNA, 20 nt, Human
uccgaaguucccccucaccc

SEQ ID NO: 1198063 - RNA, 18 nt, Human
ugccugaggguggccugc

SEQ ID NO: 1198064 - RNA, 20 nt, Human
ugccugaggguggccugcag

SEQ ID NO: 1198065 - RNA, 21 nt, Human
ugccugaggguggccugcagc

SEQ ID NO: 1198066 - RNA, 19 nt, Human
ugggcuccgaaguuccccc

SEQ ID NO: 1198067 - RNA, 21 nt, Human
uggugucugccugaggguggc

SEQ ID NO: 1198068 - RNA, 18 nt, Human
uguagcaggacccagccu

SEQ ID NO: 1198069 - RNA, 19 nt, Human
cagggagggcaaugucagg

SEQ ID NO: 1198070 - RNA, 27 nt, Human
cucgcugacauccucuccagcucccaa

SEQ ID NO: 1198071 - RNA, 20 nt, Human
gcucgcugacauccucucca

SEQ ID NO: 1198072 - RNA, 22 nt, Human
aaaacaaaacagaacaacaaaa

SEQ ID NO: 1198073 - RNA, 23 nt, Human
aaaaccaaaacaaaacagaacaa

SEQ ID NO: 1198074 - RNA, 19 nt, Human
aaacaaaacagaacaacaa

SEQ ID NO: 1198075 - RNA, 26 nt, Human
aaaccaaaacaaaacagaacaacaaa

SEQ ID NO: 1198076 - RNA, 28 nt, Human
aaaccaaaacaaaacagaacaacaaaaa

SEQ ID NO: 1198077 - RNA, 22 nt, Human
acaccaaaaccaaaacaaaaca

SEQ ID NO: 1198078 - RNA, 23 nt, Human
accaaaacaaaacagaacaacaa

SEQ ID NO: 1198079 - RNA, 21 nt, Human
accaaaaccaaaacaaaacag

SEQ ID NO: 1198080 - RNA, 20 nt, Human
acuccugcuuacuuaggaac

SEQ ID NO: 1198081 - RNA, 23 nt, Human
agacaccaaaaccaaaacaaaac

SEQ ID NO: 1198082 - RNA, 24 nt, Human
agacaccaaaaccaaaacaaaaca

SEQ ID NO: 1198083 - RNA, 23 nt, Human
agccguccuguccucccuggccc

SEQ ID NO: 1198084 - RNA, 23 nt, Human
caaaacaaaacagaacaacaaaa

SEQ ID NO: 1198085 - RNA, 22 nt, Human
caaaaccaaaacaaaacagaac

SEQ ID NO: 1198086 - RNA, 28 nt, Human
caaaauaaacagaugaaauaaaagggua

SEQ ID NO: 1198087 - RNA, 20 nt, Human
cacuccugcuuacuuaggaa

SEQ ID NO: 1198088 - RNA, 27 nt, Human
cagacaccaaaaccaaaacaaaacaga

SEQ ID NO: 1198089 - RNA, 20 nt, Human
cagacagagccuucccccuu

SEQ ID NO: 1198090 - RNA, 19 nt, Human
cagcggggaagagagaccg

SEQ ID NO: 1198091 - RNA, 21 nt, Human
ccaaaacaaaacagaacaaca

SEQ ID NO: 1198092 - RNA, 24 nt, Human
ccaaaaccaaaacaaaacagaaca

SEQ ID NO: 1198093 - RNA, 25 nt, Human
cccaaaauuggagcauucucaggac

SEQ ID NO: 1198094 - RNA, 25 nt, Human
cccacacgccuugcaaagacagccg

SEQ ID NO: 1198095 - RNA, 20 nt, Human
ccccaaaauuggagcauucu

SEQ ID NO: 1198096 - RNA, 24 nt, Human
ccccugauccagcgugccuggccc

SEQ ID NO: 1198097 - RNA, 20 nt, Human
cgcgcggcgacagggcccgg

SEQ ID NO: 1198098 - RNA, 18 nt, Human
cguccuguccucccuggc

SEQ ID NO: 1198099 - RNA, 23 nt, Human
cguccuguccucccuggcccaga

SEQ ID NO: 1198100 - RNA, 18 nt, Human
cuccacacuccugcuuac

SEQ ID NO: 1198101 - RNA, 22 nt, Human
cucccuggcccagacagagccu

SEQ ID NO: 1198102 - RNA, 24 nt, Human
cucgggcucccccugauccagcgu

SEQ ID NO: 1198103 - RNA, 19 nt, Human
cuugcaaagacagccgucc

SEQ ID NO: 1198104 - RNA, 23 nt, Human
gagcugccggaaccggggcucgc

SEQ ID NO: 1198105 - RNA, 22 nt, Human
ggaacggacggccgcccgcagg

SEQ ID NO: 1198106 - RNA, 18 nt, Human
gggguggcgggaccgggc

SEQ ID NO: 1198107 - RNA, 18 nt, Human
gguacagacaccaaaacc

SEQ ID NO: 1198108 - RNA, 20 nt, Human
guccuguccucccuggccca

SEQ ID NO: 1198109 - RNA, 24 nt, Human
guggcgggaccgggcagcggggaa

SEQ ID NO: 1198110 - RNA, 20 nt, Human
uaaacagaugaaauaaaagg

SEQ ID NO: 1198111 - RNA, 23 nt, Human
uacagacaccaaaaccaaaacaa

SEQ ID NO: 1198112 - RNA, 24 nt, Human
uacagacaccaaaaccaaaacaaa

SEQ ID NO: 1198113 - RNA, 22 nt, Human
uauucagaaguacuuucuuaac

SEQ ID NO: 1198114 - RNA, 20 nt, Human
ucccuggcccagacagagcc

SEQ ID NO: 1198115 - RNA, 20 nt, Human
ugcuccaaaacaggcaauau

SEQ ID NO: 1198116 - RNA, 19 nt, Human
ugcuccacacuccugcuua

SEQ ID NO: 1198117 - RNA, 23 nt, Human
ugguacagacaccaaaaccaaaa

SEQ ID NO: 1198118 - RNA, 28 nt, Human
ccacauucugagcucuccauuccaauuu

SEQ ID NO: 1198119 - RNA, 21 nt, Human
ggguccccuuucccucugccc

SEQ ID NO: 1198120 - RNA, 20 nt, Human
guccccuuucccucugcccu

SEQ ID NO: 1198121 - RNA, 21 nt, Human
ugagcucuccauuccaauuuu

SEQ ID NO: 1198122 - RNA, 21 nt, Human
uucucuggggccacauucuga

SEQ ID NO: 1198123 - RNA, 22 nt, Human
ggacgcgaaucucagcgagaga

SEQ ID NO: 1198124 - RNA, 23 nt, Human
aaagcagcgggcauggaggaaug

SEQ ID NO: 1198125 - RNA, 23 nt, Human
aagcagcgggcauggaggaaugu

SEQ ID NO: 1198126 - RNA, 24 nt, Human
aagccacuuccuccugggaacuga

SEQ ID NO: 1198127 - RNA, 30 nt, Human
agaagccacuuccuccugggaacugaaccc

SEQ ID NO: 1198128 - RNA, 23 nt, Human
cagaagccacuuccuccugggaa

SEQ ID NO: 1198129 - RNA, 19 nt, Human
cagcugcagguacuaagag

SEQ ID NO: 1198130 - RNA, 18 nt, Human
ccccuucccucuucuccc

SEQ ID NO: 1198131 - RNA, 20 nt, Human
ccccuucccucuucucccau

SEQ ID NO: 1198132 - RNA, 18 nt, Human
ccucggagguuccaccuu

SEQ ID NO: 1198133 - RNA, 20 nt, Human
cuucagaagccacuuccucc

SEQ ID NO: 1198134 - RNA, 22 nt, Human
ggccccuucccucuucucccau

SEQ ID NO: 1198135 - RNA, 19 nt, Human
gggcagggguguggagaag

SEQ ID NO: 1198136 - RNA, 19 nt, Human
uaaacaaagcagcgggcau

SEQ ID NO: 1198137 - RNA, 24 nt, Human
uaagaggggauaaacaaagcagcg

SEQ ID NO: 1198138 - RNA, 18 nt, Human
ugccagggggugggcagg

SEQ ID NO: 1198139 - RNA, 19 nt, Human
ugccaggugcuggggugug

SEQ ID NO: 1198140 - RNA, 18 nt, Human
uggagaagcagcugcagg

SEQ ID NO: 1198141 - RNA, 19 nt, Human
ugggcagggguguggagaa

SEQ ID NO: 1198142 - RNA, 18 nt, Human
uggggugugugucugggu

SEQ ID NO: 1198143 - RNA, 20 nt, Human
ugucugggugagcgagugag

SEQ ID NO: 1198144 - RNA, 19 nt, Human
ugugguaagugccaggugc

SEQ ID NO: 1198145 - RNA, 26 nt, Human
acaaauaaagagcccacugagaaaag

SEQ ID NO: 1198146 - RNA, 21 nt, Human
acagacuagcuauucuuaacu

SEQ ID NO: 1198147 - RNA, 19 nt, Human
caaccaaugaagaaaaugc

SEQ ID NO: 1198148 - RNA, 22 nt, Human
ccacugagaaaaggaaggcaga

SEQ ID NO: 1198149 - RNA, 19 nt, Human
gagaaaaggaaggcagaca

SEQ ID NO: 1198150 - RNA, 22 nt, Human
uaaauacaaccaaugaagaaaa

SEQ ID NO: 1198151 - RNA, 24 nt, Human
uaacaaauaaagagcccacugaga

SEQ ID NO: 1198152 - RNA, 20 nt, Human
uacagcauggacgucuugca

SEQ ID NO: 1198153 - RNA, 23 nt, Human
ugguacuuuaggcaauuuauuaa

SEQ ID NO: 1198154 - RNA, 20 nt, Human
ugugugcguaugcuguaugu

SEQ ID NO: 1198155 - RNA, 21 nt, Human
ugugugcguaugcuguaugug

SEQ ID NO: 1198156 - RNA, 18 nt, Human
ugagccucuguguccuug

SEQ ID NO: 1198157 - RNA, 18 nt, Human
accucuuuucuuucccca

SEQ ID NO: 1198158 - RNA, 18 nt, Human
ccucuuuucuuuccccau

SEQ ID NO: 1198159 - RNA, 19 nt, Human
uuaaccucuuuucuuuccc

SEQ ID NO: 1198160 - RNA, 20 nt, Human
aagcagccuccacccaccag

SEQ ID NO: 1198161 - RNA, 26 nt, Human
aggauucggaaaggaacagggagguu

SEQ ID NO: 1198162 - RNA, 23 nt, Human
aggggguucuccaagcagccucc

SEQ ID NO: 1198163 - RNA, 19 nt, Human
aguucugagcccuuuaccu

SEQ ID NO: 1198164 - RNA, 25 nt, Human
caagcagccuccacccaccagccuc

SEQ ID NO: 1198165 - RNA, 20 nt, Human
ccccgcagccgguguugccc

SEQ ID NO: 1198166 - RNA, 18 nt, Human
cccgugcagccagagggu

SEQ ID NO: 1198167 - RNA, 26 nt, Human
ccucuccgggcagagaugauggggaa

SEQ ID NO: 1198168 - RNA, 19 nt, Human
cggcacggagaagccaagg

SEQ ID NO: 1198169 - RNA, 21 nt, Human
cggccccaagcgaguccccgg

SEQ ID NO: 1198170 - RNA, 21 nt, Human
cuccaagcagccuccacccac

SEQ ID NO: 1198171 - RNA, 19 nt, Human
cuuuaccucaucccucgag

SEQ ID NO: 1198172 - RNA, 21 nt, Human
gagaugauggggaacccgugc

SEQ ID NO: 1198173 - RNA, 21 nt, Human
gccuccacccaccagccucgc

SEQ ID NO: 1198174 - RNA, 22 nt, Human
gcgcuccggcacggagaagcca

SEQ ID NO: 1198175 - RNA, 21 nt, Human
gcggccguaacggccccgggc

SEQ ID NO: 1198176 - RNA, 20 nt, Human
ggcacggagaagccaagggg

SEQ ID NO: 1198177 - RNA, 20 nt, Human
ggcggccguaacggccccgg

SEQ ID NO: 1198178 - RNA, 21 nt, Human
gggaacccgugcagccagagg

SEQ ID NO: 1198179 - RNA, 21 nt, Human
gggcggccguaacggccccgg

SEQ ID NO: 1198180 - RNA, 20 nt, Human
uccaagcagccuccacccac

SEQ ID NO: 1198181 - RNA, 28 nt, Human
ucuccaagcagccuccacccaccagccu

SEQ ID NO: 1198182 - RNA, 22 nt, Human
ucuccgggcagagaugaugggg

SEQ ID NO: 1198183 - RNA, 24 nt, Human
uggggaacccgugcagccagaggg

SEQ ID NO: 1198184 - RNA, 23 nt, Human
agacgccgaggcggggaugaacu

SEQ ID NO: 1198185 - RNA, 19 nt, Human
agggaacagcaggugcaga

SEQ ID NO: 1198186 - RNA, 21 nt, Human
agguccaggguucgaggcuuc

SEQ ID NO: 1198187 - RNA, 19 nt, Human
caccucuucacaguugaag

SEQ ID NO: 1198188 - RNA, 19 nt, Human
caccugguguggcuggggc

SEQ ID NO: 1198189 - RNA, 23 nt, Human
cagcagcaccagcuuccaaggaa

SEQ ID NO: 1198190 - RNA, 22 nt, Human
cagcagcagcaccagcuuccaa

SEQ ID NO: 1198191 - RNA, 21 nt, Human
caucgugugaccaagcgggac

SEQ ID NO: 1198192 - RNA, 21 nt, Human
cccaccgacgucacuuccaaa

SEQ ID NO: 1198193 - RNA, 21 nt, Human
ccgagguggacgucaaggcca

SEQ ID NO: 1198194 - RNA, 21 nt, Human
cuccaagcucucuuucacauc

SEQ ID NO: 1198195 - RNA, 18 nt, Human
cugggcuggguccggggc

SEQ ID NO: 1198196 - RNA, 22 nt, Human
cuggggucuccaagcucucuuu

SEQ ID NO: 1198197 - RNA, 18 nt, Human
cuuccaaagcugaagguu

SEQ ID NO: 1198198 - RNA, 23 nt, Human
gcaccagcuuccaaggaacaaaa

SEQ ID NO: 1198199 - RNA, 21 nt, Human
gcagagacgccgaggcgggga

SEQ ID NO: 1198200 - RNA, 18 nt, Human
ggcuggguccggggcagg

SEQ ID NO: 1198201 - RNA, 26 nt, Human
ggguccggggcagggguccgaggugg

SEQ ID NO: 1198202 - RNA, 18 nt, Human
ucacuuccaaagcugaag

SEQ ID NO: 1198203 - RNA, 18 nt, Human
uccucugggugggguggg

SEQ ID NO: 1198204 - RNA, 23 nt, Human
ucuucacaguugaaggcgcugcu

SEQ ID NO: 1198205 - RNA, 21 nt, Human
ugaccaagcgggacaggucca

SEQ ID NO: 1198206 - RNA, 21 nt, Human
ugcaccugguguggcuggggc

SEQ ID NO: 1198207 - RNA, 18 nt, Human
uggcuggggcuggggcac

SEQ ID NO: 1198208 - RNA, 22 nt, Human
uggcuggggcuggggcacaggg

SEQ ID NO: 1198209 - RNA, 18 nt, Human
uggggugggaggaugacg

SEQ ID NO: 1198210 - RNA, 26 nt, Human
uggggugggaggaugacgguugagcu

SEQ ID NO: 1198211 - RNA, 23 nt, Human
uggguggggugggaggaugacgg

SEQ ID NO: 1198212 - RNA, 19 nt, Human
ugguguggcuggggcuggg

SEQ ID NO: 1198213 - RNA, 22 nt, Human
uucacauccaggccgguagacc

SEQ ID NO: 1198214 - RNA, 23 nt, Human
acccuggcagcccccagcgcccu

SEQ ID NO: 1198215 - RNA, 18 nt, Human
aggacacccuggcagccc

SEQ ID NO: 1198216 - RNA, 24 nt, Human
aggagggcaggggucuugugucca

SEQ ID NO: 1198217 - RNA, 23 nt, Human
cacccggaacagggggacagcag

SEQ ID NO: 1198218 - RNA, 21 nt, Human
cacuccuguuacaauguaagg

SEQ ID NO: 1198219 - RNA, 18 nt, Human
caggcacaucuguccagc

SEQ ID NO: 1198220 - RNA, 23 nt, Human
ccacuauauucccggcacccgga

SEQ ID NO: 1198221 - RNA, 23 nt, Human
ccacuauauucccggcacccgga

SEQ ID NO: 1198222 - RNA, 22 nt, Human
cccccagcgcccuguggccagu

SEQ ID NO: 1198223 - RNA, 19 nt, Human
ccggaacaggagggcaggg

SEQ ID NO: 1198224 - RNA, 21 nt, Human
cucagcauuugaauguccaaa

SEQ ID NO: 1198225 - RNA, 18 nt, Human
guccagcacuccuguuac

SEQ ID NO: 1198226 - RNA, 18 nt, Human
ugcgacagacaggcacau

SEQ ID NO: 1198227 - RNA, 18 nt, Human
uggccuggcugucagagc

SEQ ID NO: 1198228 - RNA, 19 nt, Human
aacaacagcaccuuccuca

SEQ ID NO: 1198229 - RNA, 18 nt, Human
aagaagaaucugguggug

SEQ ID NO: 1198230 - RNA, 18 nt, Human
agaucucaaaaguugacu

SEQ ID NO: 1198231 - RNA, 21 nt, Human
aggaagaagauguuuccaaaa

SEQ ID NO: 1198232 - RNA, 22 nt, Human
aggaagaagauguuuccaaaag

SEQ ID NO: 1198233 - RNA, 19 nt, Human
caacagcaccuuccucagg

SEQ ID NO: 1198234 - RNA, 25 nt, Human
cagagaguuucuuucaacgaggucu

SEQ ID NO: 1198235 - RNA, 21 nt, Human
cccugaagaaaaugauuacca

SEQ ID NO: 1198236 - RNA, 27 nt, Human
cgacauacuucugcuuaauuuuggaau

SEQ ID NO: 1198237 - RNA, 25 nt, Human
cucaaaaguugacuucaaagaagaa

SEQ ID NO: 1198238 - RNA, 20 nt, Human
cugguggugguauuggcacc

SEQ ID NO: 1198239 - RNA, 24 nt, Human
cugucugcuccucuccuaaagcag

SEQ ID NO: 1198240 - RNA, 21 nt, Human
gaagaaaaugauuaccagagg

SEQ ID NO: 1198241 - RNA, 19 nt, Human
gaagaagauguuuccaaaa

SEQ ID NO: 1198242 - RNA, 22 nt, Human
uauugcuggagauuugcccuua

SEQ ID NO: 1198243 - RNA, 21 nt, Human
uauuggcaccaagagaugaga

SEQ ID NO: 1198244 - RNA, 19 nt, Human
ucagacaccaacguguacu

SEQ ID NO: 1198245 - RNA, 22 nt, Human
uccuaaagguugguaaugaaaa

SEQ ID NO: 1198246 - RNA, 19 nt, Human
ucucaggaagaagauguuu

SEQ ID NO: 1198247 - RNA, 22 nt, Human
ugaagaaaaugauuaccagagg

SEQ ID NO: 1198248 - RNA, 24 nt, Human
ugacagauaagccgacauacuucu

SEQ ID NO: 1198249 - RNA, 21 nt, Human
uggaaaguaugacaccagaga

SEQ ID NO: 1198250 - RNA, 22 nt, Human
uuaaacaacagcaccuuccuca

SEQ ID NO: 1198251 - RNA, 24 nt, Human
uugcugagaggagagacugugauu

SEQ ID NO: 1198252 - RNA, 20 nt, Human
uuuccaaaagcaaaguucag

SEQ ID NO: 1198253 - RNA, 22 nt, Human
aaaccugaaaagucugugcucu

SEQ ID NO: 1198254 - RNA, 21 nt, Human
agugguuuuggcacgaugaga

SEQ ID NO: 1198255 - RNA, 22 nt, Human
cagcuuuucugugaaaaguaac

SEQ ID NO: 1198256 - RNA, 26 nt, Human
cuaaaaccugaaaagucugugcucuc

SEQ ID NO: 1198257 - RNA, 19 nt, Human
cucucaguggaaagaacac

SEQ ID NO: 1198258 - RNA, 30 nt, Human
gaaagaacacaacaugagauuucugcagag

SEQ ID NO: 1198259 - RNA, 22 nt, Human
ggcuuccaacagacagcagcuu

SEQ ID NO: 1198260 - RNA, 26 nt, Human
uaacagcuccuuuuccuuagcuaaaa

SEQ ID NO: 1198261 - RNA, 19 nt, Human
uagcuaaaaccugaaaagu

SEQ ID NO: 1198262 - RNA, 25 nt, Human
ucugugaaaaguaacagcuccuuuu

SEQ ID NO: 1198263 - RNA, 19 nt, Human
uggaaagaacacaacauga

SEQ ID NO: 1198264 - RNA, 21 nt, Human
uggaaagaacacaacaugaga

SEQ ID NO: 1198265 - RNA, 22 nt, Human
uggaaagaacacaacaugagau

SEQ ID NO: 1198266 - RNA, 19 nt, Human
uggcuuccaacagacagca

SEQ ID NO: 1198267 - RNA, 21 nt, Human
ugugaaaaguaacagcuccuu

SEQ ID NO: 1198268 - RNA, 19 nt, Human
uuuggcacgaugagauugc

SEQ ID NO: 1198269 - RNA, 20 nt, Human
uuuuggcacgaugagauugc

SEQ ID NO: 1198270 - RNA, 24 nt, Human
accaaaugcagagacucugaaggc

SEQ ID NO: 1198271 - RNA, 21 nt, Human
acgagauccuggccacggaug

SEQ ID NO: 1198272 - RNA, 21 nt, Human
cagagacucugaaggccacgc

SEQ ID NO: 1198273 - RNA, 19 nt, Human
ccacgccgcugcgggcugc

SEQ ID NO: 1198274 - RNA, 22 nt, Human
ccccaugccugaucucaucuuc

SEQ ID NO: 1198275 - RNA, 19 nt, Human
cgguggccgcgccucugcu

SEQ ID NO: 1198276 - RNA, 23 nt, Human
cugcucgcacguucccccggccu

SEQ ID NO: 1198277 - RNA, 20 nt, Human
gacgacugcauuuccgauuu

SEQ ID NO: 1198278 - RNA, 19 nt, Human
uggccacggaugcgguggc

SEQ ID NO: 1198279 - RNA, 18 nt, Human
uggccgcgccucugcucg

SEQ ID NO: 1198280 - RNA, 19 nt, Human
ugugcaaauggauauggaa

SEQ ID NO: 1198281 - RNA, 19 nt, Human
uuccccaugccugaucuca

SEQ ID NO: 1198282 - RNA, 20 nt, Human
uucugagcauccacaauucu

SEQ ID NO: 1198283 - RNA, 26 nt, Human
uuuccgauuuuaaccaaaacuucacu

SEQ ID NO: 1198284 - RNA, 25 nt, Human
aaaaagaaauaaacuucggguaaag

SEQ ID NO: 1198285 - RNA, 20 nt, Human
aaauaaaaaaguuuaaaagc

SEQ ID NO: 1198286 - RNA, 26 nt, Human
aagaaauaaacuucggguaaagagaa

SEQ ID NO: 1198287 - RNA, 25 nt, Human
aaggaaacagaacagaauuucuugg

SEQ ID NO: 1198288 - RNA, 19 nt, Human
auagcacuucccuuucucu

SEQ ID NO: 1198289 - RNA, 19 nt, Human
auuaaucagcuuuguaaau

SEQ ID NO: 1198290 - RNA, 21 nt, Human
caaaaccaguacaacugagcu

SEQ ID NO: 1198291 - RNA, 21 nt, Human
caagaaacugcuacaucuggu

SEQ ID NO: 1198292 - RNA, 20 nt, Human
caccgcucagccccugguuc

SEQ ID NO: 1198293 - RNA, 20 nt, Human
cagccccugguuccuguggu

SEQ ID NO: 1198294 - RNA, 22 nt, Human
cagcuuuguaaauauuuugcca

SEQ ID NO: 1198295 - RNA, 23 nt, Human
cauguuaaugcagaaaugugaac

SEQ ID NO: 1198296 - RNA, 21 nt, Human
ccagcugggaggagcuggauu

SEQ ID NO: 1198297 - RNA, 20 nt, Human
ccgcucagccccugguuccu

SEQ ID NO: 1198298 - RNA, 21 nt, Human
cgaacggacaguguugccucc

SEQ ID NO: 1198299 - RNA, 24 nt, Human
cuccguucacccuagcgucuucca

SEQ ID NO: 1198300 - RNA, 21 nt, Human
cuuggcggggguggggggggg

SEQ ID NO: 1198301 - RNA, 19 nt, Human
gauuccaaaauauuccuua

SEQ ID NO: 1198302 - RNA, 22 nt, Human
gcuuuuuuuuuccaaaaaauua

SEQ ID NO: 1198303 - RNA, 19 nt, Human
ggaaaaaaaucucuuuugg

SEQ ID NO: 1198304 - RNA, 19 nt, Human
ggacaguguugccucccuu

SEQ ID NO: 1198305 - RNA, 21 nt, Human
uaaaaacaauaaagcuauagc

SEQ ID NO: 1198306 - RNA, 20 nt, Human
uaaaacacugccagucaggc

SEQ ID NO: 1198307 - RNA, 20 nt, Human
uaacucuacagcaggacaau

SEQ ID NO: 1198308 - RNA, 19 nt, Human
uacaaaggaaaauguagca

SEQ ID NO: 1198309 - RNA, 19 nt, Human
uacaaaggaaaauguagca

SEQ ID NO: 1198310 - RNA, 24 nt, Human
uacaaaggaaaauguagcaacagu

SEQ ID NO: 1198311 - RNA, 21 nt, Human
uacaacugagcugccuuugag

SEQ ID NO: 1198312 - RNA, 23 nt, Human
uacaacugagcugccuuugaguc

SEQ ID NO: 1198313 - RNA, 22 nt, Human
uaucuuguuuguguccaugaag

SEQ ID NO: 1198314 - RNA, 21 nt, Human
ucagccccugguuccuguggu

SEQ ID NO: 1198315 - RNA, 18 nt, Human
ucagggagaagagaauag

SEQ ID NO: 1198316 - RNA, 22 nt, Human
ucuuccagcugggaggagcugg

SEQ ID NO: 1198317 - RNA, 26 nt, Human
ugaaacagacagacauuauaaaggug

SEQ ID NO: 1198318 - RNA, 19 nt, Human
ugauuacaaaggaaaaugu

SEQ ID NO: 1198319 - RNA, 22 nt, Human
ugauucaaguggggaaaaaaaa

SEQ ID NO: 1198320 - RNA, 24 nt, Human
uggcaugaaaaagaaauaaacuuc

SEQ ID NO: 1198321 - RNA, 23 nt, Human
uggcgggggugggggggggaagc

SEQ ID NO: 1198322 - RNA, 19 nt, Human
uggguccuuaaaacacugc

SEQ ID NO: 1198323 - RNA, 21 nt, Human
uggguccuuaaaacacugcca

SEQ ID NO: 1198324 - RNA, 21 nt, Human
uuaaaacacugccagucaggc

SEQ ID NO: 1198325 - RNA, 24 nt, Human
uuggcacauauauuuuagguuugu

SEQ ID NO: 1198326 - RNA, 22 nt, Human
uuugaaguggcaugaaaaagaa

SEQ ID NO: 1198327 - RNA, 18 nt, Human
cccaaagaagcggccacc

SEQ ID NO: 1198328 - RNA, 20 nt, Human
cccaaagaagcggccaccuc

SEQ ID NO: 1198329 - RNA, 19 nt, Human
cugguagacuugcacuauc

SEQ ID NO: 1198330 - RNA, 20 nt, Human
cuuugcuucagaagccuggu

SEQ ID NO: 1198331 - RNA, 19 nt, Human
ucccaaagaagcggccacc

SEQ ID NO: 1198332 - RNA, 24 nt, Human
ucugaagaauuccucuuugggaac

SEQ ID NO: 1198333 - RNA, 21 nt, Human
aacugccuuucuucuccccau

SEQ ID NO: 1198334 - RNA, 19 nt, Human
acugccuuucuucucccca

SEQ ID NO: 1198335 - RNA, 27 nt, Human
ucauaacugccuuucuucuccccaucu

SEQ ID NO: 1198336 - RNA, 20 nt, Human
ugaagucggguaccugcugu

SEQ ID NO: 1198337 - RNA, 18 nt, Human
ugucauaacugccuuucu

SEQ ID NO: 1198338 - RNA, 24 nt, Human
uggcccgggcgccgcuggacuccu

SEQ ID NO: 1198339 - RNA, 19 nt, Human
uugaaauuccaaucgcugc

SEQ ID NO: 1198340 - RNA, 20 nt, Human
acuagcucucugccaugugc

SEQ ID NO: 1198341 - RNA, 19 nt, Human
aggaugggaaugaggagga

SEQ ID NO: 1198342 - RNA, 20 nt, Human
aggccaggccaggccuggaa

SEQ ID NO: 1198343 - RNA, 24 nt, Human
caagucccaaggcaauaguuucug

SEQ ID NO: 1198344 - RNA, 20 nt, Human
caagugacaggaugggaaug

SEQ ID NO: 1198345 - RNA, 18 nt, Human
cacaggcauguucuccca

SEQ ID NO: 1198346 - RNA, 18 nt, Human
cacauugauccuccugcu

SEQ ID NO: 1198347 - RNA, 20 nt, Human
cagcugggcugaucucccuu

SEQ ID NO: 1198348 - RNA, 19 nt, Human
ccacauugauccuccugcu

SEQ ID NO: 1198349 - RNA, 22 nt, Human
ccagcagaggcuagggcugccc

SEQ ID NO: 1198350 - RNA, 20 nt, Human
cccacuguagcagcaaaggc

SEQ ID NO: 1198351 - RNA, 23 nt, Human
cgcagggcccacuguagcagcaa

SEQ ID NO: 1198352 - RNA, 22 nt, Human
cucacaacucucugaggcaguu

SEQ ID NO: 1198353 - RNA, 22 nt, Human
cugaucucccuuuucucacagu

SEQ ID NO: 1198354 - RNA, 22 nt, Human
cuguagcagcaaaggcuggagg

SEQ ID NO: 1198355 - RNA, 21 nt, Human
cuugaucuucccucaggaaga

SEQ ID NO: 1198356 - RNA, 18 nt, Human
gaaugaggaggaaguuuu

SEQ ID NO: 1198357 - RNA, 18 nt, Human
gacaggaugggaaugagg

SEQ ID NO: 1198358 - RNA, 23 nt, Human
gagaacacaggcauguucuccca

SEQ ID NO: 1198359 - RNA, 22 nt, Human
gagcuugcugguaacugagcuc

SEQ ID NO: 1198360 - RNA, 19 nt, Human
gaguccuugcauaccccuc

SEQ ID NO: 1198361 - RNA, 21 nt, Human
gcaguucuguucggcugccuc

SEQ ID NO: 1198362 - RNA, 20 nt, Human
gccccgggggagaacacagg

SEQ ID NO: 1198363 - RNA, 18 nt, Human
ggagaggaggcucuauug

SEQ ID NO: 1198364 - RNA, 20 nt, Human
ggccuggaagguccgagcuu

SEQ ID NO: 1198365 - RNA, 19 nt, Human
gggcugaucucccuuuucu

SEQ ID NO: 1198366 - RNA, 22 nt, Human
uagcagcaaaggcuggaggcau

SEQ ID NO: 1198367 - RNA, 26 nt, Human
uagcagcaaaggcuggaggcauccag

SEQ ID NO: 1198368 - RNA, 19 nt, Human
uagccagaacuuuggaaau

SEQ ID NO: 1198369 - RNA, 20 nt, Human
uagccagaacuuuggaaauc

SEQ ID NO: 1198370 - RNA, 24 nt, Human
uagccagaacuuuggaaauccaca

SEQ ID NO: 1198371 - RNA, 22 nt, Human
uagcucucugccaugugccaag

SEQ ID NO: 1198372 - RNA, 24 nt, Human
uccaggaagaacuagcucucugcc

SEQ ID NO: 1198373 - RNA, 20 nt, Human
ucccaaggcaauaguuucug

SEQ ID NO: 1198374 - RNA, 20 nt, Human
ucugcaguucuguucggcug

SEQ ID NO: 1198375 - RNA, 25 nt, Human
ucugcaguucuguucggcugccucc

SEQ ID NO: 1198376 - RNA, 20 nt, Human
ucugcaguucuguucggcuu

SEQ ID NO: 1198377 - RNA, 23 nt, Human
ugaagaaaccaagccuuggaaaa

SEQ ID NO: 1198378 - RNA, 24 nt, Human
ugaagaaaccaagccuuguguaga

SEQ ID NO: 1198379 - RNA, 24 nt, Human
ugaaugguccucccgcagggccca

SEQ ID NO: 1198380 - RNA, 24 nt, Human
ugagcucaaauuguagccagaacu

SEQ ID NO: 1198381 - RNA, 27 nt, Human
ugaguccuugcauaccccucacaacuc

SEQ ID NO: 1198382 - RNA, 18 nt, Human
uggaaauccacaguuacc

SEQ ID NO: 1198383 - RNA, 20 nt, Human
uggcaagucccaaggcaaua

SEQ ID NO: 1198384 - RNA, 25 nt, Human
ugagcaggaaggaucuacagggcuu

SEQ ID NO: 1198385 - RNA, 24 nt, Human
aagacccagccccaucuggccacc

SEQ ID NO: 1198386 - RNA, 19 nt, Human
agacagaacaaggcacccg

SEQ ID NO: 1198387 - RNA, 19 nt, Human
aggcacccgacggguagaa

SEQ ID NO: 1198388 - RNA, 20 nt, Human
caagacagaacaaggcaccc

SEQ ID NO: 1198389 - RNA, 25 nt, Human
caagacccagccccaucuggccacc

SEQ ID NO: 1198390 - RNA, 23 nt, Human
caaggccggugacagcaaggcca

SEQ ID NO: 1198391 - RNA, 21 nt, Human
cagcaaggcaguccaagacag

SEQ ID NO: 1198392 - RNA, 18 nt, Human
cagcaaggccacguuauc

SEQ ID NO: 1198393 - RNA, 18 nt, Human
caguguggcucccaaguc

SEQ ID NO: 1198394 - RNA, 23 nt, Human
cuggccaccaaggacaaggcagc

SEQ ID NO: 1198395 - RNA, 21 nt, Human
gccccaagacccagccccauc

SEQ ID NO: 1198396 - RNA, 30 nt, Human
gccccaagacccagccccaucuggccaccc

SEQ ID NO: 1198397 - RNA, 25 nt, Human
uguggcucccaagucucguuuccac

SEQ ID NO: 1198398 - RNA, 22 nt, Human
uuuccacucagccccaagaccc

SEQ ID NO: 1198399 - RNA, 21 nt, Human
agggauugggcagggcagugg

SEQ ID NO: 1198400 - RNA, 19 nt, Human
gggcaguggcugcugcagg

SEQ ID NO: 1198401 - RNA, 18 nt, Human
ggguaugggagggauugg

SEQ ID NO: 1198402 - RNA, 22 nt, Human
aaaagaaagagugcagaguggc

SEQ ID NO: 1198403 - RNA, 20 nt, Human
agagugcagaguggccggua

SEQ ID NO: 1198404 - RNA, 24 nt, Human
augguucaggcgaaaagaaagagu

SEQ ID NO: 1198405 - RNA, 21 nt, Human
auuguagaaaaugugcgucca

SEQ ID NO: 1198406 - RNA, 20 nt, Human
caacaggacauugacaagaa

SEQ ID NO: 1198407 - RNA, 21 nt, Human
cagaguggccgguaggacuug

SEQ ID NO: 1198408 - RNA, 22 nt, Human
ccaauggcaugguucaggcgaa

SEQ ID NO: 1198409 - RNA, 24 nt, Human
ggaggaucuuggagaagcuuguga

SEQ ID NO: 1198410 - RNA, 23 nt, Human
gugcagaguggccgguaggacuu

SEQ ID NO: 1198411 - RNA, 21 nt, Human
guggccgguaggacuuguggc

SEQ ID NO: 1198412 - RNA, 22 nt, Human
uagaagagucccccaaaaauca

SEQ ID NO: 1198413 - RNA, 20 nt, Human
ucaccaaggaggaucuugga

SEQ ID NO: 1198414 - RNA, 24 nt, Human
ucccccaaaaaucauuguagaaaa

SEQ ID NO: 1198415 - RNA, 24 nt, Human
ugugaagagaccagugacugcugc

SEQ ID NO: 1198416 - RNA, 18 nt, Human
uucaacccuccaauggca

SEQ ID NO: 1198417 - RNA, 25 nt, Human
uugacaagaugguagcuccagggau

SEQ ID NO: 1198418 - RNA, 19 nt, Human
acaagcuucuccaagaucc

SEQ ID NO: 1198419 - RNA, 21 nt, Human
aggcaguggcaggaaucgugg

SEQ ID NO: 1198420 - RNA, 21 nt, Human
caguggcaggaaucgugggac

SEQ ID NO: 1198421 - RNA, 24 nt, Human
ccgaugucggggccagucucuucu

SEQ ID NO: 1198422 - RNA, 18 nt, Human
cggggccagucucuucuu

SEQ ID NO: 1198423 - RNA, 26 nt, Human
ucacuggucucuucacaagcuucucc

SEQ ID NO: 1198424 - RNA, 19 nt, Human
ucucaccccauucacacgg

SEQ ID NO: 1198425 - RNA, 18 nt, Human
ucuuucuccucuccuugc

SEQ ID NO: 1198426 - RNA, 22 nt, Human
ugcuucucaccccauucacacg

SEQ ID NO: 1198427 - RNA, 18 nt, Human
uugcuucucaccccauuc

SEQ ID NO: 1198428 - RNA, 24 nt, Human
aaccaggugcuccucugccaucag

SEQ ID NO: 1198429 - RNA, 20 nt, Human
acccugaggagggcugaaaa

SEQ ID NO: 1198430 - RNA, 18 nt, Human
agagaagaaccaggugcu

SEQ ID NO: 1198431 - RNA, 23 nt, Human
aggugcuccucugccaugccaag

SEQ ID NO: 1198432 - RNA, 19 nt, Human
cagugaacaaccggugcag

SEQ ID NO: 1198433 - RNA, 18 nt, Human
ccagagaagaaccaggug

SEQ ID NO: 1198434 - RNA, 24 nt, Human
gagagccacccugaggagggccag

SEQ ID NO: 1198435 - RNA, 23 nt, Human
gggcagugaacaaccggugcagg

SEQ ID NO: 1198436 - RNA, 20 nt, Human
guauagccagagaagaaccg

SEQ ID NO: 1198437 - RNA, 22 nt, Human
ucugugacucgcacacuggggc

SEQ ID NO: 1198438 - RNA, 18 nt, Human
aggugcaaaagcuggacc

SEQ ID NO: 1198439 - RNA, 23 nt, Human
cacacaggugcaaaagcuggacc

SEQ ID NO: 1198440 - RNA, 19 nt, Human
ccucucgucucucuucuuc

SEQ ID NO: 1198441 - RNA, 19 nt, Human
cuuuccccucugucuguuu

SEQ ID NO: 1198442 - RNA, 26 nt, Human
ucacuucuuuccccucugucuguuuu

SEQ ID NO: 1198443 - RNA, 28 nt, Human
ucucucuucuuccccuuuguucucuccc

SEQ ID NO: 1198444 - RNA, 18 nt, Human
caagggccagcccucugg

SEQ ID NO: 1198445 - RNA, 22 nt, Human
cauucuucccaucugccaggag

SEQ ID NO: 1198446 - RNA, 23 nt, Human
cuggcacagguggcauucuuccc

SEQ ID NO: 1198447 - RNA, 21 nt, Human
uucacuagacgcguuauucuc

SEQ ID NO: 1198448 - RNA, 24 nt, Human
uugaauuaaaggcuuuaaauccau

SEQ ID NO: 1198449 - RNA, 19 nt, Human
cuuacaauuuugcuacaaa

SEQ ID NO: 1198450 - RNA, 18 nt, Human
aacacuucgggaggcuga

SEQ ID NO: 1198451 - RNA, 22 nt, Human
aacccggggucccuuccuggag

SEQ ID NO: 1198452 - RNA, 22 nt, Human
aacccggggucccuuccuggag

SEQ ID NO: 1198453 - RNA, 22 nt, Human
aacccggggucccuuccuggag

SEQ ID NO: 1198454 - RNA, 22 nt, Human
aacccgguguccccuccuggag

SEQ ID NO: 1198455 - RNA, 23 nt, Human
aagcaacccacaugaccaucaac

SEQ ID NO: 1198456 - RNA, 22 nt, Human
aagcaacccacaugaccaucag

SEQ ID NO: 1198457 - RNA, 22 nt, Human
acccgggucccuuccuggagac

SEQ ID NO: 1198458 - RNA, 22 nt, Human
agcagaagcaacccacaugacc

SEQ ID NO: 1198459 - RNA, 27 nt, Human
agcgaauagcagaagcaaccgguaccc

SEQ ID NO: 1198460 - RNA, 20 nt, Human
aggcugaggcagguggaucg

SEQ ID NO: 1198461 - RNA, 24 nt, Human
aggcugaggcagguggaucgucug

SEQ ID NO: 1198462 - RNA, 23 nt, Human
aguggcucgugccuguaauccca

SEQ ID NO: 1198463 - RNA, 24 nt, Human
aguggcucgugccuguaaucccaa

SEQ ID NO: 1198464 - RNA, 24 nt, Human
caacacuucgggaggcugaggcag

SEQ ID NO: 1198465 - RNA, 20 nt, Human
cagcaguaaaaaggaaugau

SEQ ID NO: 1198466 - RNA, 19 nt, Human
ccgggguccccuccuggag

SEQ ID NO: 1198467 - RNA, 19 nt, Human
ccggggucccuuccuggag

SEQ ID NO: 1198468 - RNA, 19 nt, Human
ccggggucccuuccuggag

SEQ ID NO: 1198469 - RNA, 18 nt, Human
ccgggucccuuccuggag

SEQ ID NO: 1198470 - RNA, 20 nt, Human
ccuaggcguaugcccaagag

SEQ ID NO: 1198471 - RNA, 22 nt, Human
ccuccuggagaggacgugggca

SEQ ID NO: 1198472 - RNA, 22 nt, Human
ccuccuggagaggacgugggca

SEQ ID NO: 1198473 - RNA, 19 nt, Human
ccuggagaggacgugggca

SEQ ID NO: 1198474 - RNA, 19 nt, Human
ccuggagaggacgugggca

SEQ ID NO: 1198475 - RNA, 20 nt, Human
ccuguaaucccaacacuucg

SEQ ID NO: 1198476 - RNA, 23 nt, Human
cgggaggcugaggcagguggauc

SEQ ID NO: 1198477 - RNA, 22 nt, Human
cgugaacccggggucccuuccu

SEQ ID NO: 1198478 - RNA, 22 nt, Human
cgugaacccggggucccuuccu

SEQ ID NO: 1198479 - RNA, 22 nt, Human
cgugaacccggggucccuuccu

SEQ ID NO: 1198480 - RNA, 19 nt, Human
cgugccuguaaucccaaca

SEQ ID NO: 1198481 - RNA, 22 nt, Human
cguggacccggggucccuuccu

SEQ ID NO: 1198482 - RNA, 18 nt, Human
cguggacccgggucccuu

SEQ ID NO: 1198483 - RNA, 18 nt, Human
cguggacccgggucccuu

SEQ ID NO: 1198484 - RNA, 18 nt, Human
cguggacccgggucccuu

SEQ ID NO: 1198485 - RNA, 21 nt, Human
cucgugaacccggggucccuu

SEQ ID NO: 1198486 - RNA, 21 nt, Human
cucgugaacccggggucccuu

SEQ ID NO: 1198487 - RNA, 21 nt, Human
cucgugaacccggggucccuu

SEQ ID NO: 1198488 - RNA, 22 nt, Human
cucgugaacccgguguccccuc

SEQ ID NO: 1198489 - RNA, 24 nt, Human
cucgugccuguaaucccaacacuu

SEQ ID NO: 1198490 - RNA, 21 nt, Human
cucguggacccggggucccuu

SEQ ID NO: 1198491 - RNA, 20 nt, Human
cucguggacccgggucccuu

SEQ ID NO: 1198492 - RNA, 20 nt, Human
cucguggacccgggucccuu

SEQ ID NO: 1198493 - RNA, 22 nt, Human
cuuccuggagacgacgugggca

SEQ ID NO: 1198494 - RNA, 22 nt, Human
cuuccuggagaggacgugggca

SEQ ID NO: 1198495 - RNA, 22 nt, Human
cuuccuggagaggacgugggca

SEQ ID NO: 1198496 - RNA, 22 nt, Human
cuuccuggagaggacgugggca

SEQ ID NO: 1198497 - RNA, 22 nt, Human
cuuccuggagaggacgugggca

SEQ ID NO: 1198498 - RNA, 22 nt, Human
cuuccuggagagggcgugggca

SEQ ID NO: 1198499 - RNA, 21 nt, Human
gacccgggucccuuccuggag

SEQ ID NO: 1198500 - RNA, 21 nt, Human
gacccgggucccuuccuggag

SEQ ID NO: 1198501 - RNA, 20 nt, Human
gcgguggauucacacagcag

SEQ ID NO: 1198502 - RNA, 23 nt, Human
ggcacaguggcucgugccuguaa

SEQ ID NO: 1198503 - RNA, 22 nt, Human
ggcagcucgugaacccgguguc

SEQ ID NO: 1198504 - RNA, 19 nt, Human
gugccuguaaucccaacac

SEQ ID NO: 1198505 - RNA, 19 nt, Human
uaaaaaggaaugauggccg

SEQ ID NO: 1198506 - RNA, 22 nt, Human
uaagcgaauagcagaagcaacc

SEQ ID NO: 1198507 - RNA, 24 nt, Human
ucgggaggcugaggcagguggauc

SEQ ID NO: 1198508 - RNA, 19 nt, Human
ucgugaacccggugucccc

SEQ ID NO: 1198509 - RNA, 20 nt, Human
ugaggcagguggaucgucug

SEQ ID NO: 1198510 - RNA, 19 nt, Human
ugcccaagagugcacagga

SEQ ID NO: 1198511 - RNA, 23 nt, Human
ugccuguaaucccaacacuucgg

SEQ ID NO: 1198512 - RNA, 18 nt, Human
uggagacgacgugggcag

SEQ ID NO: 1198513 - RNA, 24 nt, Human
uggccgggcacaguggcucgugcc

SEQ ID NO: 1198514 - RNA, 21 nt, Human
uggcucgugccuguaauccca

SEQ ID NO: 1198515 - RNA, 24 nt, Human
uggcucgugccuguaaucccaaca

SEQ ID NO: 1198516 - RNA, 20 nt, Human
uucguggacccgggucccuu

SEQ ID NO: 1198517 - RNA, 21 nt, Human
ucuccauguaagugcugagaa

SEQ ID NO: 1198518 - RNA, 19 nt, Human
aagcaggagggaaguuucc

SEQ ID NO: 1198519 - RNA, 23 nt, Human
aaguuucuuugacuccuguggaa

SEQ ID NO: 1198520 - RNA, 21 nt, Human
agucugcacgaaggagucugu

SEQ ID NO: 1198521 - RNA, 22 nt, Human
cagucugcacgaaggagucugu

SEQ ID NO: 1198522 - RNA, 19 nt, Human
ggagucuguuugcacucca

SEQ ID NO: 1198523 - RNA, 20 nt, Human
uccaggagcagugguuuugu

SEQ ID NO: 1198524 - RNA, 27 nt, Human
ugcucagaauucucagucugcacgaag

SEQ ID NO: 1198525 - RNA, 23 nt, Human
ugcugugguaggagguccaggag

SEQ ID NO: 1198526 - RNA, 24 nt, Human
ugcugugguaggagguccaggagc

SEQ ID NO: 1198527 - RNA, 23 nt, Human
agacgaggccaccacuggugagc

SEQ ID NO: 1198528 - RNA, 21 nt, Human
agcugauuccaggaaggauaa

SEQ ID NO: 1198529 - RNA, 23 nt, Human
augaccaccaccaaaguuuccag

SEQ ID NO: 1198530 - RNA, 25 nt, Human
caagugugauuuugaggaauccauc

SEQ ID NO: 1198531 - RNA, 24 nt, Human
caccaaaacugccuccaugaccac

SEQ ID NO: 1198532 - RNA, 19 nt, Human
caccucuugcuuugacagg

SEQ ID NO: 1198533 - RNA, 22 nt, Human
cacggcuaagugggcacuuggu

SEQ ID NO: 1198534 - RNA, 21 nt, Human
cagagcacccuggcgguuggu

SEQ ID NO: 1198535 - RNA, 23 nt, Human
caggagcuccuccuggugguagc

SEQ ID NO: 1198536 - RNA, 31 nt, Human
caucuagaccgugauccaaaucuuggagacc

SEQ ID NO: 1198537 - RNA, 20 nt, Human
caucuaguccuuuugagcaa

SEQ ID NO: 1198538 - RNA, 21 nt, Human
cauucuuucauguuccucuga

SEQ ID NO: 1198539 - RNA, 18 nt, Human
cauugcauuggggauguc

SEQ ID NO: 1198540 - RNA, 18 nt, Human
cauuggggaugucaacug

SEQ ID NO: 1198541 - RNA, 25 nt, Human
ccacuggugagcgggguccccaugg

SEQ ID NO: 1198542 - RNA, 21 nt, Human
ccuccuggugguagcccccau

SEQ ID NO: 1198543 - RNA, 19 nt, Human
ccugaaccuuccagcagca

SEQ ID NO: 1198544 - RNA, 20 nt, Human
ccugaaccuuccagcagcau

SEQ ID NO: 1198545 - RNA, 24 nt, Human
cucugaggaagacugugacugaug

SEQ ID NO: 1198546 - RNA, 23 nt, Human
cuuuggugauguucuucaguguc

SEQ ID NO: 1198547 - RNA, 23 nt, Human
cuuuuucuugccacugccuuggu

SEQ ID NO: 1198548 - RNA, 19 nt, Human
gacagggcuuuccuaacuu

SEQ ID NO: 1198549 - RNA, 20 nt, Human
gacagggcuuuccuaacuuc

SEQ ID NO: 1198550 - RNA, 18 nt, Human
gagacugugguguggcag

SEQ ID NO: 1198551 - RNA, 20 nt, Human
gagcacccuggcgguuggug

SEQ ID NO: 1198552 - RNA, 24 nt, Human
gcaaaguauuggccuccaccacca

SEQ ID NO: 1198553 - RNA, 20 nt, Human
gcaguuuugaggagaaaggg

SEQ ID NO: 1198554 - RNA, 21 nt, Human
gcaguuuugaggagaaagggu

SEQ ID NO: 1198555 - RNA, 19 nt, Human
gcucucaggagcuccuccu

SEQ ID NO: 1198556 - RNA, 23 nt, Human
ggagcuccuccuggugguagccc

SEQ ID NO: 1198557 - RNA, 18 nt, Human
uaaaagacgaggccacca

SEQ ID NO: 1198558 - RNA, 24 nt, Human
uaaguaauugugggacaccaaaac

SEQ ID NO: 1198559 - RNA, 22 nt, Human
uagcucuuugguuguacaacuc

SEQ ID NO: 1198560 - RNA, 21 nt, Human
ucaaucacuucaauuuuccca

SEQ ID NO: 1198561 - RNA, 23 nt, Human
ucuauaaaagacgaggccaccac

SEQ ID NO: 1198562 - RNA, 19 nt, Human
ucugaauggaagcugacuu

SEQ ID NO: 1198563 - RNA, 19 nt, Human
ucugaggaagacugugacu

SEQ ID NO: 1198564 - RNA, 25 nt, Human
ugaaacagcaucagcuuguguggca

SEQ ID NO: 1198565 - RNA, 23 nt, Human
ugacaaaagcaaagcgcuuuuuc

SEQ ID NO: 1198566 - RNA, 21 nt, Human
ugaucaaaugcacugaaacag

SEQ ID NO: 1198567 - RNA, 20 nt, Human
ugccuggaugaagcacuagc

SEQ ID NO: 1198568 - RNA, 25 nt, Human
uggaaaagguuuugaagagccugcu

SEQ ID NO: 1198569 - RNA, 19 nt, Human
ugggaaaggcacugaacag

SEQ ID NO: 1198570 - RNA, 28 nt, Human
ugucuaucccaccaaaacugccuccaug

SEQ ID NO: 1198571 - RNA, 24 nt, Human
ugugcauucuuucauguuccucug

SEQ ID NO: 1198572 - RNA, 18 nt, Human
ugugggacaccaaaacua

SEQ ID NO: 1198573 - RNA, 21 nt, Human
ugugguguggcaguuuugagg

SEQ ID NO: 1198574 - RNA, 21 nt, Human
uuucacggcuaagugggcacu

SEQ ID NO: 1198575 - RNA, 22 nt, Human
uuugaggagaaagggugggagc

SEQ ID NO: 1198576 - RNA, 21 nt, Human
aaaacacugucaaggcaauug

SEQ ID NO: 1198577 - RNA, 21 nt, Human
accacagucauggucuaccuu

SEQ ID NO: 1198578 - RNA, 19 nt, Human
accucguucaggccaccag

SEQ ID NO: 1198579 - RNA, 20 nt, Human
auaguaauggcaaaguauac

SEQ ID NO: 1198580 - RNA, 18 nt, Human
ccacggagaaacugucca

SEQ ID NO: 1198581 - RNA, 18 nt, Human
ccgcugcuccucccgccu

SEQ ID NO: 1198582 - RNA, 19 nt, Human
ccucaggaagagcagccca

SEQ ID NO: 1198583 - RNA, 18 nt, Human
ccugagccgcugcuccuc

SEQ ID NO: 1198584 - RNA, 21 nt, Human
cuuccccgccgccccgguacc

SEQ ID NO: 1198585 - RNA, 22 nt, Human
gagccgcugcuccucccgccuc

SEQ ID NO: 1198586 - RNA, 20 nt, Human
uaguacauaguaauggcaaa

SEQ ID NO: 1198587 - RNA, 20 nt, Human
ucaaggcaauuggaguccau

SEQ ID NO: 1198588 - RNA, 25 nt, Human
ucuuuacauaauguugcaacagcca

SEQ ID NO: 1198589 - RNA, 18 nt, Human
ugacgccacugaaaccac

SEQ ID NO: 1198590 - RNA, 24 nt, Human
uugcaacagccacuaaaaacacug

SEQ ID NO: 1198591 - RNA, 18 nt, Human
cagcaggauuuuucuucc

SEQ ID NO: 1198592 - RNA, 22 nt, Human
gcaaaagggacagcaagagcuc

SEQ ID NO: 1198593 - RNA, 22 nt, Human
aaacagaaaauccacagggcug

SEQ ID NO: 1198594 - RNA, 20 nt, Human
agaaaauccacagggcaagg

SEQ ID NO: 1198595 - RNA, 24 nt, Human
agcccgaagauaaacuccagcccc

SEQ ID NO: 1198596 - RNA, 21 nt, Human
aguggagaagaaguugggaaa

SEQ ID NO: 1198597 - RNA, 18 nt, Human
auaguuguccaucaggaa

SEQ ID NO: 1198598 - RNA, 26 nt, Human
caaacuuccagucccaacgccucaca

SEQ ID NO: 1198599 - RNA, 20 nt, Human
cacacagcaguucuucuugu

SEQ ID NO: 1198600 - RNA, 18 nt, Human
cagccccaacaccggcgg

SEQ ID NO: 1198601 - RNA, 19 nt, Human
cagguugaacaggaaaauc

SEQ ID NO: 1198602 - RNA, 24 nt, Human
caucaggaagggcaggcagaugau

SEQ ID NO: 1198603 - RNA, 20 nt, Human
caucucggaacacacagcag

SEQ ID NO: 1198604 - RNA, 25 nt, Human
ccacccggaaauaccugucuaccgc

SEQ ID NO: 1198605 - RNA, 18 nt, Human
ccaucaggaagggcaggc

SEQ ID NO: 1198606 - RNA, 19 nt, Human
cccaaacuuccagucccaa

SEQ ID NO: 1198607 - RNA, 22 nt, Human
cccaaacuuccagucccaacgc

SEQ ID NO: 1198608 - RNA, 26 nt, Human
cccaacaccggcggcaacaccuugac

SEQ ID NO: 1198609 - RNA, 25 nt, Human
ccccaacaccggcggcaacaccuug

SEQ ID NO: 1198610 - RNA, 18 nt, Human
ccgaagauaaacuccagc

SEQ ID NO: 1198611 - RNA, 23 nt, Human
cgccucugguuuuguuggggucc

SEQ ID NO: 1198612 - RNA, 20 nt, Human
cucaccugucaucuuccucu

SEQ ID NO: 1198613 - RNA, 24 nt, Human
cucuggagcgccucugguuuuguu

SEQ ID NO: 1198614 - RNA, 21 nt, Human
gaacaggaaaauccggcugga

SEQ ID NO: 1198615 - RNA, 24 nt, Human
ggagaucuuguucagggcguggug

SEQ ID NO: 1198616 - RNA, 19 nt, Human
ggcaacaccuugacaauga

SEQ ID NO: 1198617 - RNA, 21 nt, Human
gguuuuguugggguccccugu

SEQ ID NO: 1198618 - RNA, 21 nt, Human
guccaggcggugggguuuggg

SEQ ID NO: 1198619 - RNA, 19 nt, Human
guccccaaacuuccagucc

SEQ ID NO: 1198620 - RNA, 23 nt, Human
guuguccaucaggaagggcaggc

SEQ ID NO: 1198621 - RNA, 23 nt, Human
ucaaaguggagaagaaguuggga

SEQ ID NO: 1198622 - RNA, 22 nt, Human
ucaggaagggcaggcagaugau

SEQ ID NO: 1198623 - RNA, 25 nt, Human
ucccaacgccucacauaguugucca

SEQ ID NO: 1198624 - RNA, 24 nt, Human
ucggaacacacagcaguucuucuu

SEQ ID NO: 1198625 - RNA, 22 nt, Human
ugaucaaaguggagaagaaguu

SEQ ID NO: 1198626 - RNA, 20 nt, Human
ugcccagaagcccgaagaua

SEQ ID NO: 1198627 - RNA, 19 nt, Human
uugacaaugaagucaucuc

SEQ ID NO: 1198628 - RNA, 24 nt, Human
uugagguggaaacagaaaauccac

SEQ ID NO: 1198629 - RNA, 23 nt, Human
uugcgcgcgucuuucucguuccu

SEQ ID NO: 1198630 - RNA, 20 nt, Human
uugggguccccugugagcuc

SEQ ID NO: 1198631 - RNA, 23 nt, Human
uuucucguuccugucgucuucgu

SEQ ID NO: 1198632 - RNA, 21 nt, Human
uuugcugaauuucucucucca

SEQ ID NO: 1198633 - RNA, 19 nt, Human
acgcaccggccucgcacgu

SEQ ID NO: 1198634 - RNA, 18 nt, Human
aggaaaaaugaaaaagcc

SEQ ID NO: 1198635 - RNA, 22 nt, Human
aggaaaaaugaaaaagccagac

SEQ ID NO: 1198636 - RNA, 22 nt, Human
caaggaaaaaugaaaaagccag

SEQ ID NO: 1198637 - RNA, 18 nt, Human
uccucuauuuuauuugau

SEQ ID NO: 1198638 - RNA, 24 nt, Human
aaaaugcugagauuacagguguga

SEQ ID NO: 1198639 - RNA, 23 nt, Human
aaacucuuccaaaacucccacuu

SEQ ID NO: 1198640 - RNA, 18 nt, Human
aaagcaggacggagcccg

SEQ ID NO: 1198641 - RNA, 20 nt, Human
aaaugaccugugacauauga

SEQ ID NO: 1198642 - RNA, 24 nt, Human
aaaugcccuauaccccacaucccu

SEQ ID NO: 1198643 - RNA, 26 nt, Human
aaaugcugagauuacaggugugagcc

SEQ ID NO: 1198644 - RNA, 20 nt, Human
aacauggugaagccccaucu

SEQ ID NO: 1198645 - RNA, 21 nt, Human
aacauggugaagccccaucuc

SEQ ID NO: 1198646 - RNA, 19 nt, Human
aacucuuccaaaacuccca

SEQ ID NO: 1198647 - RNA, 18 nt, Human
aaucgcuugaaccuggga

SEQ ID NO: 1198648 - RNA, 24 nt, Human
aaucgcuugaaccugggaggcgga

SEQ ID NO: 1198649 - RNA, 23 nt, Human
acaagaagggaaccauuugcagu

SEQ ID NO: 1198650 - RNA, 20 nt, Human
acagaccgagacuccgucuc

SEQ ID NO: 1198651 - RNA, 24 nt, Human
acagaccgagacuccgucucaaaa

SEQ ID NO: 1198652 - RNA, 23 nt, Human
acagggacacgugcccucccuca

SEQ ID NO: 1198653 - RNA, 19 nt, Human
accacugcacuccagccug

SEQ ID NO: 1198654 - RNA, 18 nt, Human
accccacaucccuaaucc

SEQ ID NO: 1198655 - RNA, 18 nt, Human
acugcacuccagccuggg

SEQ ID NO: 1198656 - RNA, 24 nt, Human
acugcacuccagccugggugacag

SEQ ID NO: 1198657 - RNA, 19 nt, Human
agaaacccuuccccagccc

SEQ ID NO: 1198658 - RNA, 21 nt, Human
agaaacccuuccccagccccu

SEQ ID NO: 1198659 - RNA, 20 nt, Human
agaggcagguggaucaccug

SEQ ID NO: 1198660 - RNA, 20 nt, Human
agaguggggggcaccugggc

SEQ ID NO: 1198661 - RNA, 18 nt, Human
agauuacaggugugagcc

SEQ ID NO: 1198662 - RNA, 19 nt, Human
agcaacaggggguggccag

SEQ ID NO: 1198663 - RNA, 24 nt, Human
agcacuuugggaggcagaggcagg

SEQ ID NO: 1198664 - RNA, 23 nt, Human
agcccaggcucccugucgaggac

SEQ ID NO: 1198665 - RNA, 24 nt, Human
agccuggccaacauggugaagccc

SEQ ID NO: 1198666 - RNA, 24 nt, Human
agccugggugacagaccgagacuc

SEQ ID NO: 1198667 - RNA, 21 nt, Human
aggaagcagucagggcugaag

SEQ ID NO: 1198668 - RNA, 24 nt, Human
aggacggagcccaggcucccuguc

SEQ ID NO: 1198669 - RNA, 18 nt, Human
aggcagguggaucaccug

SEQ ID NO: 1198670 - RNA, 23 nt, Human
aggcagguggaucaccugaaggu

SEQ ID NO: 1198671 - RNA, 27 nt, Human
aggcagguggaucaccugaaggucagg

SEQ ID NO: 1198672 - RNA, 22 nt, Human
aggcgggagaaucgcuugaacc

SEQ ID NO: 1198673 - RNA, 24 nt, Human
aggcgggagaaucgcuugaaccug

SEQ ID NO: 1198674 - RNA, 24 nt, Human
aguggugggcaccuguaaucccag

SEQ ID NO: 1198675 - RNA, 22 nt, Human
auguggcugauuuaguggacug

SEQ ID NO: 1198676 - RNA, 20 nt, Human
auucauucaaccugauccca

SEQ ID NO: 1198677 - RNA, 24 nt, Human
caaaaugcugagauuacaggugug

SEQ ID NO: 1198678 - RNA, 24 nt, Human
caacauggugaagccccaucucua

SEQ ID NO: 1198679 - RNA, 24 nt, Human
cacacccagccuugagggauguuu

SEQ ID NO: 1198680 - RNA, 21 nt, Human
cacagccccucagcuucuagg

SEQ ID NO: 1198681 - RNA, 20 nt, Human
caccacugcacuccagccug

SEQ ID NO: 1198682 - RNA, 26 nt, Human
caccacugcacuccagccugggugac

SEQ ID NO: 1198683 - RNA, 22 nt, Human
caccuguaaucccagcuacuga

SEQ ID NO: 1198684 - RNA, 24 nt, Human
caccuguaaucccagcuacugagg

SEQ ID NO: 1198685 - RNA, 24 nt, Human
cacgccuguaaucccagcacuuug

SEQ ID NO: 1198686 - RNA, 21 nt, Human
cacggggaggugaccacuugg

SEQ ID NO: 1198687 - RNA, 18 nt, Human
cacuccagccugggugac

SEQ ID NO: 1198688 - RNA, 24 nt, Human
cacuccagccugggugacagaccg

SEQ ID NO: 1198689 - RNA, 19 nt, Human
cacugcacuccagccuggg

SEQ ID NO: 1198690 - RNA, 19 nt, Human
cacugcacuccagccuggg

SEQ ID NO: 1198691 - RNA, 22 nt, Human
cacugcacuccagccuggguga

SEQ ID NO: 1198692 - RNA, 23 nt, Human
cacugcacuccagccugggugac

SEQ ID NO: 1198693 - RNA, 24 nt, Human
cacugcacuccagccugggugaca

SEQ ID NO: 1198694 - RNA, 25 nt, Human
cacugcacuccagccugggugacag

SEQ ID NO: 1198695 - RNA, 28 nt, Human
cagaggcagguggaucaccugaagguca

SEQ ID NO: 1198696 - RNA, 19 nt, Human
cagcacaugcugggauugg

SEQ ID NO: 1198697 - RNA, 24 nt, Human
cagcacuuugggaggcagaggcag

SEQ ID NO: 1198698 - RNA, 26 nt, Human
cagcacuuugggaggcagaggcaggu

SEQ ID NO: 1198699 - RNA, 21 nt, Human
cagcagcaguagcgggaugag

SEQ ID NO: 1198700 - RNA, 23 nt, Human
cagcaguagcgggaugagaaacu

SEQ ID NO: 1198701 - RNA, 19 nt, Human
cagcauuucugccugcugu

SEQ ID NO: 1198702 - RNA, 22 nt, Human
caggcagaaugacacuaaaaua

SEQ ID NO: 1198703 - RNA, 25 nt, Human
cagguggaucaccugaaggucagga

SEQ ID NO: 1198704 - RNA, 20 nt, Human
caguagcgggaugagaaacu

SEQ ID NO: 1198705 - RNA, 20 nt, Human
cauccaaacucuuccaaaac

SEQ ID NO: 1198706 - RNA, 23 nt, Human
cauccaaacucuuccaaaacucc

SEQ ID NO: 1198707 - RNA, 21 nt, Human
ccaaaaugcugagauuacagg

SEQ ID NO: 1198708 - RNA, 24 nt, Human
ccaaaaugcugagauuacaggugu

SEQ ID NO: 1198709 - RNA, 22 nt, Human
ccaacuagaaacagggggccac

SEQ ID NO: 1198710 - RNA, 18 nt, Human
ccacaucccuaauccugg

SEQ ID NO: 1198711 - RNA, 20 nt, Human
ccacugcacuccagccuggg

SEQ ID NO: 1198712 - RNA, 20 nt, Human
ccacugcacuccagccuggg

SEQ ID NO: 1198713 - RNA, 20 nt, Human
ccacugcacuccagccuggg

SEQ ID NO: 1198714 - RNA, 20 nt, Human
ccacugcacuccagccuggg

SEQ ID NO: 1198715 - RNA, 21 nt, Human
ccacugcacuccagccugggu

SEQ ID NO: 1198716 - RNA, 21 nt, Human
ccacugcacuccagccugggu

SEQ ID NO: 1198717 - RNA, 23 nt, Human
ccacugcacuccagccuggguga

SEQ ID NO: 1198718 - RNA, 24 nt, Human
ccacugcacuccagccugggugac

SEQ ID NO: 1198719 - RNA, 25 nt, Human
ccacugcacuccagccugggugaca

SEQ ID NO: 1198720 - RNA, 24 nt, Human
ccagaccagccuggccaacauggu

SEQ ID NO: 1198721 - RNA, 24 nt, Human
cccagcagcaguagcgggaugaga

SEQ ID NO: 1198722 - RNA, 22 nt, Human
ccccacaucccuaauccuggac

SEQ ID NO: 1198723 - RNA, 23 nt, Human
ccccaucucuacuaaaaauacaa

SEQ ID NO: 1198724 - RNA, 19 nt, Human
cccccugcuccaggcuggg

SEQ ID NO: 1198725 - RNA, 24 nt, Human
ccccugcuccaggcugggcgucag

SEQ ID NO: 1198726 - RNA, 24 nt, Human
cccgccgaauggagcgagaguggg

SEQ ID NO: 1198727 - RNA, 18 nt, Human
cccggggcugcucugggc

SEQ ID NO: 1198728 - RNA, 18 nt, Human
cccuauaccccacauccc

SEQ ID NO: 1198729 - RNA, 22 nt, Human
cccuauaccccacaucccuaau

SEQ ID NO: 1198730 - RNA, 19 nt, Human
ccgcacuuggccucccaaa

SEQ ID NO: 1198731 - RNA, 20 nt, Human
ccugcccgcccucccuccuc

SEQ ID NO: 1198732 - RNA, 23 nt, Human
ccuggccaacauggugaagcccc

SEQ ID NO: 1198733 - RNA, 24 nt, Human
ccuggccaacauggugaagcccca

SEQ ID NO: 1198734 - RNA, 22 nt, Human
ccugggugacagaccgagacuc

SEQ ID NO: 1198735 - RNA, 20 nt, Human
ccuggucucaagugaugucc

SEQ ID NO: 1198736 - RNA, 20 nt, Human
ccuggucucaagugaugucc

SEQ ID NO: 1198737 - RNA, 25 nt, Human
ccuguaaucccagcuacugaggcgg

SEQ ID NO: 1198738 - RNA, 23 nt, Human
cgcaguggugggcaccuguaauc

SEQ ID NO: 1198739 - RNA, 23 nt, Human
cgccuguaaucccagcacuuugg

SEQ ID NO: 1198740 - RNA, 24 nt, Human
cgccuguaaucccagcacuuuggg

SEQ ID NO: 1198741 - RNA, 20 nt, Human
cucacaauguugccagggcu

SEQ ID NO: 1198742 - RNA, 22 nt, Human
cucacgccuguaaucccagcac

SEQ ID NO: 1198743 - RNA, 24 nt, Human
cucacgccuguaaucccagcacuu

SEQ ID NO: 1198744 - RNA, 18 nt, Human
cucauccaaacucuucca

SEQ ID NO: 1198745 - RNA, 21 nt, Human
cucccaaaaugcugagauuac

SEQ ID NO: 1198746 - RNA, 19 nt, Human
cuccgucucaaaaaaaaaa

SEQ ID NO: 1198747 - RNA, 22 nt, Human
cuccgucucaaaaaaaaaaauc

SEQ ID NO: 1198748 - RNA, 23 nt, Human
cucucauccaaacucuuccaaaa

SEQ ID NO: 1198749 - RNA, 22 nt, Human
cucuuccaaaacucccacuuau

SEQ ID NO: 1198750 - RNA, 19 nt, Human
cugaucccagcagcaguaa

SEQ ID NO: 1198751 - RNA, 19 nt, Human
cuugaaccugggaggcgga

SEQ ID NO: 1198752 - RNA, 21 nt, Human
cuuugcucccuugauggaaaa

SEQ ID NO: 1198753 - RNA, 19 nt, Human
gaagccccaucucuacuaa

SEQ ID NO: 1198754 - RNA, 24 nt, Human
gacagaccgagacuccgucucaaa

SEQ ID NO: 1198755 - RNA, 21 nt, Human
gaccaguuccuuggcguacag

SEQ ID NO: 1198756 - RNA, 20 nt, Human
gaucaccugaaggucaggaa

SEQ ID NO: 1198757 - RNA, 18 nt, Human
gauuacaggugugagccc

SEQ ID NO: 1198758 - RNA, 18 nt, Human
gcagguggaucaccugaa

SEQ ID NO: 1198759 - RNA, 24 nt, Human
gccaacauggugaagccccaucuc

SEQ ID NO: 1198760 - RNA, 18 nt, Human
gccaccuucaggaaaauu

SEQ ID NO: 1198761 - RNA, 21 nt, Human
gccccucagcuucuaggcugc

SEQ ID NO: 1198762 - RNA, 24 nt, Human
gccuccacacccagccuugaggga

SEQ ID NO: 1198763 - RNA, 25 nt, Human
gcgucagaaacccuuccccagcccc

SEQ ID NO: 1198764 - RNA, 24 nt, Human
gcgucucucauccaaacucuucca

SEQ ID NO: 1198765 - RNA, 23 nt, Human
gcugguuuggaacuccuggucuc

SEQ ID NO: 1198766 - RNA, 18 nt, Human
ggacacgugcccucccuc

SEQ ID NO: 1198767 - RNA, 21 nt, Human
ggagagcugugcagagguugg

SEQ ID NO: 1198768 - RNA, 18 nt, Human
ggaggugaccacuugggg

SEQ ID NO: 1198769 - RNA, 23 nt, Human
ggaguuccagaccagccuggccg

SEQ ID NO: 1198770 - RNA, 23 nt, Human
ggcaccuguaaucccagcuacug

SEQ ID NO: 1198771 - RNA, 23 nt, Human
ggcacgguggcucacgccuguaa

SEQ ID NO: 1198772 - RNA, 21 nt, Human
ggcucacgccuguaaucccag

SEQ ID NO: 1198773 - RNA, 24 nt, Human
ggcugguuuggaacuccuggucuc

SEQ ID NO: 1198774 - RNA, 24 nt, Human
gggcgcaguggugggcaccuguaa

SEQ ID NO: 1198775 - RNA, 23 nt, Human
ggggagccccagauggagggaug

SEQ ID NO: 1198776 - RNA, 21 nt, Human
gggggcccgacagucccguag

SEQ ID NO: 1198777 - RNA, 23 nt, Human
gguggcucacgccuguaauccca

SEQ ID NO: 1198778 - RNA, 20 nt, Human
guaggauguagcccuuuggg

SEQ ID NO: 1198779 - RNA, 23 nt, Human
guggcucacgccuguaaucccag

SEQ ID NO: 1198780 - RNA, 23 nt, Human
gugugagcaacaggggguggcca

SEQ ID NO: 1198781 - RNA, 23 nt, Human
uaaagguuuauugugcuggugca

SEQ ID NO: 1198782 - RNA, 24 nt, Human
uacaggugugagccuccacaccca

SEQ ID NO: 1198783 - RNA, 18 nt, Human
uagcugggcgcaguggug

SEQ ID NO: 1198784 - RNA, 19 nt, Human
uaucucagcaccuggagag

SEQ ID NO: 1198785 - RNA, 24 nt, Human
ucacuuugucaggggagcugugcu

SEQ ID NO: 1198786 - RNA, 21 nt, Human
uccacacccagccuugaggga

SEQ ID NO: 1198787 - RNA, 24 nt, Human
uccagccugggugacagaccgaga

SEQ ID NO: 1198788 - RNA, 23 nt, Human
ucccaaaaugcugagauuacagg

SEQ ID NO: 1198789 - RNA, 20 nt, Human
ucccacuuauucuuugcucc

SEQ ID NO: 1198790 - RNA, 22 nt, Human
ucccgccgaauggagcgagagu

SEQ ID NO: 1198791 - RNA, 18 nt, Human
uccgugcuggugcccggg

SEQ ID NO: 1198792 - RNA, 19 nt, Human
uccgugcuggugcccgggg

SEQ ID NO: 1198793 - RNA, 18 nt, Human
ucgcuugaaccugggagg

SEQ ID NO: 1198794 - RNA, 24 nt, Human
ucucaaaaaaaaaaaucuuguuuc

SEQ ID NO: 1198795 - RNA, 22 nt, Human
ucucuacuaaaaauacaaaauu

SEQ ID NO: 1198796 - RNA, 23 nt, Human
ucucucauccaaacucuuccaaa

SEQ ID NO: 1198797 - RNA, 20 nt, Human
ucugcugcuggagcucugag

SEQ ID NO: 1198798 - RNA, 18 nt, Human
ucuuguuuccguagagug

SEQ ID NO: 1198799 - RNA, 18 nt, Human
ugaaaggacacaagaagg

SEQ ID NO: 1198800 - RNA, 21 nt, Human
ugaaaggacacaagaagggaa

SEQ ID NO: 1198801 - RNA, 22 nt, Human
ugaaccugggaggcggauugca

SEQ ID NO: 1198802 - RNA, 19 nt, Human
ugaagccccaucucuacua

SEQ ID NO: 1198803 - RNA, 22 nt, Human
ugaccugugacauaugauuccc

SEQ ID NO: 1198804 - RNA, 18 nt, Human
ugagauuacaggugugag

SEQ ID NO: 1198805 - RNA, 18 nt, Human
ugagauuacaggugugag

SEQ ID NO: 1198806 - RNA, 19 nt, Human
ugagauuacaggugugagc

SEQ ID NO: 1198807 - RNA, 19 nt, Human
ugagauuacaggugugagc

SEQ ID NO: 1198808 - RNA, 24 nt, Human
ugagauuacaggugugagccucca

SEQ ID NO: 1198809 - RNA, 18 nt, Human
ugagccuccacacccagc

SEQ ID NO: 1198810 - RNA, 24 nt, Human
ugaggcgggagaaucgcuugaacc

SEQ ID NO: 1198811 - RNA, 21 nt, Human
ugagggauguuuuauccuggc

SEQ ID NO: 1198812 - RNA, 22 nt, Human
ugaggugaaggaugauggcacu

SEQ ID NO: 1198813 - RNA, 27 nt, Human
ugcaccaagauugcaccacugcacucc

SEQ ID NO: 1198814 - RNA, 21 nt, Human
ugcaccacugcacuccagccu

SEQ ID NO: 1198815 - RNA, 24 nt, Human
ugcuccaggcugggcgucagaaac

SEQ ID NO: 1198816 - RNA, 20 nt, Human
ugcugagauuacagguguga

SEQ ID NO: 1198817 - RNA, 25 nt, Human
uggaucaccugaaggucaggaguuc

SEQ ID NO: 1198818 - RNA, 24 nt, Human
uggccaacauggugaagccccauc

SEQ ID NO: 1198819 - RNA, 22 nt, Human
uggcucacgccuguaaucccag

SEQ ID NO: 1198820 - RNA, 24 nt, Human
uggcucacgccuguaaucccagca

SEQ ID NO: 1198821 - RNA, 19 nt, Human
ugggaggcagaggcaggug

SEQ ID NO: 1198822 - RNA, 24 nt, Human
ugggaggcagaggcagguggauca

SEQ ID NO: 1198823 - RNA, 24 nt, Human
ugggcgucagaaacccuuccccag

SEQ ID NO: 1198824 - RNA, 24 nt, Human
uggucucaagugauguccgcacuu

SEQ ID NO: 1198825 - RNA, 21 nt, Human
uggugggcaccuguaauccca

SEQ ID NO: 1198826 - RNA, 22 nt, Human
uggugggcaccuguaaucccag

SEQ ID NO: 1198827 - RNA, 18 nt, Human
uguaaucccagcuacuga

SEQ ID NO: 1198828 - RNA, 23 nt, Human
uguagaaucagcacaugcuggga

SEQ ID NO: 1198829 - RNA, 22 nt, Human
uguccgcacuuggccucccaaa

SEQ ID NO: 1198830 - RNA, 20 nt, Human
ugugagccuccacacccagc

SEQ ID NO: 1198831 - RNA, 23 nt, Human
uuaaaugcccuauaccccacauc

SEQ ID NO: 1198832 - RNA, 24 nt, Human
uuagcugggcgcaguggugggcac

SEQ ID NO: 1198833 - RNA, 21 nt, Human
uucaaccugaucccagcagca

SEQ ID NO: 1198834 - RNA, 18 nt, Human
uuccuuggcguacaggac

SEQ ID NO: 1198835 - RNA, 22 nt, Human
uugcacugagccaagauugcac

SEQ ID NO: 1198836 - RNA, 18 nt, Human
uuggccucccaaaaugcu

SEQ ID NO: 1198837 - RNA, 23 nt, Human
uuggcgucucucauccaaacucu

SEQ ID NO: 1198838 - RNA, 24 nt, Human
uugggccgggcacgguggcucacg

SEQ ID NO: 1198839 - RNA, 21 nt, Human
uugggggagccccagauggag

SEQ ID NO: 1198840 - RNA, 19 nt, Human
uuuucauacacggggaggu

SEQ ID NO: 1198841 - RNA, 18 nt, Human
ugaaugacaggaguguca

SEQ ID NO: 1198842 - RNA, 21 nt, Human
ugcuuuagcaacauagcugaa

SEQ ID NO: 1198843 - RNA, 24 nt, Human
cugaaaccuugaauagagauguga

SEQ ID NO: 1198844 - RNA, 18 nt, Human
agcucugugggcucuggc

SEQ ID NO: 1198845 - RNA, 27 nt, Human
cacccccagcucugugggcucuggcuc

SEQ ID NO: 1198846 - RNA, 24 nt, Human
ccaaugccaccacccccagcucug

SEQ ID NO: 1198847 - RNA, 18 nt, Human
cccaaugccaccaccccc

SEQ ID NO: 1198848 - RNA, 23 nt, Human
ccccaaugccaccacccccagcu

SEQ ID NO: 1198849 - RNA, 18 nt, Human
cucugugggcucuggcuc

SEQ ID NO: 1198850 - RNA, 26 nt, Human
agggacugggguuuauuggagggggc

SEQ ID NO: 1198851 - RNA, 21 nt, Human
ggacugggguuuauuggaggg

SEQ ID NO: 1198852 - RNA, 18 nt, Human
uggaugauugacacuuga

SEQ ID NO: 1198853 - RNA, 19 nt, Human
uugaagggcuggaugauug

SEQ ID NO: 1198854 - RNA, 19 nt, Human
uugacacuugaauggcauc

SEQ ID NO: 1198855 - RNA, 19 nt, Human
aaauccucaggggccucuc

SEQ ID NO: 1198856 - RNA, 20 nt, Human
aaauccucaggggccucucu

SEQ ID NO: 1198857 - RNA, 20 nt, Human
aguuuuucuuuuuucuuuuc

SEQ ID NO: 1198858 - RNA, 23 nt, Human
cacacgugguuaauccagauuca

SEQ ID NO: 1198859 - RNA, 20 nt, Human
ccucuuaaagcaagaacugc

SEQ ID NO: 1198860 - RNA, 19 nt, Human
guugggcuuaguuuuucuu

SEQ ID NO: 1198861 - RNA, 20 nt, Human
ucacacgugguuaauccaga

SEQ ID NO: 1198862 - RNA, 20 nt, Human
ucacggggagggggaaaugg

SEQ ID NO: 1198863 - RNA, 18 nt, Human
uccagauucacggggagg

SEQ ID NO: 1198864 - RNA, 22 nt, Human
ucucccauucuguuguucagac

SEQ ID NO: 1198865 - RNA, 21 nt, Human
ucuuuuuugcuaguaaaauga

SEQ ID NO: 1198866 - RNA, 24 nt, Human
uuuuucuuuuuucuuuucuuuuuu

SEQ ID NO: 1198867 - RNA, 22 nt, Human
acaccuccuccuccuccucuga

SEQ ID NO: 1198868 - RNA, 19 nt, Human
acagaaucuccucaggaag

SEQ ID NO: 1198869 - RNA, 19 nt, Human
accuccuccuccuccucug

SEQ ID NO: 1198870 - RNA, 22 nt, Human
agaaucccucugcuguccacau

SEQ ID NO: 1198871 - RNA, 20 nt, Human
augucuuccccaccgcggaa

SEQ ID NO: 1198872 - RNA, 20 nt, Human
caaacaccuccuccuccucc

SEQ ID NO: 1198873 - RNA, 20 nt, Human
caaagccaccauccaggagc

SEQ ID NO: 1198874 - RNA, 23 nt, Human
caaagccaccauccaggagcugg

SEQ ID NO: 1198875 - RNA, 19 nt, Human
caccuccuccuccuccucu

SEQ ID NO: 1198876 - RNA, 26 nt, Human
caccuccuccuccuccucugacuggc

SEQ ID NO: 1198877 - RNA, 19 nt, Human
cccucggggggaugugggg

SEQ ID NO: 1198878 - RNA, 21 nt, Human
ccucacagaaucuccucagga

SEQ ID NO: 1198879 - RNA, 19 nt, Human
ccuggcuccccgguuccug

SEQ ID NO: 1198880 - RNA, 22 nt, Human
cuccuccuccucugacuggcua

SEQ ID NO: 1198881 - RNA, 21 nt, Human
cuccuugggaugccaaacacc

SEQ ID NO: 1198882 - RNA, 23 nt, Human
cuccuugggaugccaaacaccuc

SEQ ID NO: 1198883 - RNA, 19 nt, Human
gagcuggggcagggggucu

SEQ ID NO: 1198884 - RNA, 21 nt, Human
gagcuggggcagggggucuuc

SEQ ID NO: 1198885 - RNA, 22 nt, Human
gagcuggggcagggggucuucu

SEQ ID NO: 1198886 - RNA, 20 nt, Human
gcccuggcuccccgguuccu

SEQ ID NO: 1198887 - RNA, 21 nt, Human
gcccuggcuccccgguuccug

SEQ ID NO: 1198888 - RNA, 23 nt, Human
ggaauugcccacgaacacaaucu

SEQ ID NO: 1198889 - RNA, 20 nt, Human
ggccggggguacggaccccc

SEQ ID NO: 1198890 - RNA, 21 nt, Human
gggaugugggggugaguuuca

SEQ ID NO: 1198891 - RNA, 18 nt, Human
gggcagagggagagcuuc

SEQ ID NO: 1198892 - RNA, 18 nt, Human
uaucacagagccagaucu

SEQ ID NO: 1198893 - RNA, 20 nt, Human
uaucacagagccagaucucu

SEQ ID NO: 1198894 - RNA, 19 nt, Human
ucaaagccaccauccagga

SEQ ID NO: 1198895 - RNA, 21 nt, Human
ucagagaccucuuccucuucu

SEQ ID NO: 1198896 - RNA, 21 nt, Human
uccaggagcuggggcaggggg

SEQ ID NO: 1198897 - RNA, 23 nt, Human
uccccgguuccuggcuccucuuc

SEQ ID NO: 1198898 - RNA, 23 nt, Human
uggcuccccgguuccuggcuccu

SEQ ID NO: 1198899 - RNA, 22 nt, Human
ugggaugccaaacaccuccucc

SEQ ID NO: 1198900 - RNA, 20 nt, Human
uggggcagggggucuucuuc

SEQ ID NO: 1198901 - RNA, 25 nt, Human
ugugggggugaguuucaaggguggg

SEQ ID NO: 1198902 - RNA, 21 nt, Human
uuccuggcuccucuucuguua

SEQ ID NO: 1198903 - RNA, 22 nt, Human
gagcagccgcaguuggucagug

SEQ ID NO: 1198904 - RNA, 18 nt, Human
aaagagcauccaugaggg

SEQ ID NO: 1198905 - RNA, 19 nt, Human
agacagcuggucaacccag

SEQ ID NO: 1198906 - RNA, 20 nt, Human
agaugacccuacuguaaagg

SEQ ID NO: 1198907 - RNA, 20 nt, Human
aggaacacaggcaggauaca

SEQ ID NO: 1198908 - RNA, 26 nt, Human
aggaacacaggcaggauacaggaaca

SEQ ID NO: 1198909 - RNA, 20 nt, Human
augacccuacuguaaagggu

SEQ ID NO: 1198910 - RNA, 19 nt, Human
caggauacaggaacaugau

SEQ ID NO: 1198911 - RNA, 23 nt, Human
cauaaagagcauccaugagggua

SEQ ID NO: 1198912 - RNA, 22 nt, Human
gcaaacacuccuccacugagac

SEQ ID NO: 1198913 - RNA, 20 nt, Human
uaaagggucauccauaaaga

SEQ ID NO: 1198914 - RNA, 23 nt, Human
uaaagggucauccauaaagagca

SEQ ID NO: 1198915 - RNA, 23 nt, Human
uccagaugacccuacuguaaagg

SEQ ID NO: 1198916 - RNA, 20 nt, Human
ucuccagaugacccuacugu

SEQ ID NO: 1198917 - RNA, 23 nt, Human
acugcaauuugugucuucuaauu

SEQ ID NO: 1198918 - RNA, 25 nt, Human
augaagggcaucugacagaucuaca

SEQ ID NO: 1198919 - RNA, 26 nt, Human
caaccaccugaccaacaccuuucagu

SEQ ID NO: 1198920 - RNA, 21 nt, Human
caucccucugcugaacuccag

SEQ ID NO: 1198921 - RNA, 18 nt, Human
ccaugaagggcaucugac

SEQ ID NO: 1198922 - RNA, 22 nt, Human
cuccagagccacaggucacaga

SEQ ID NO: 1198923 - RNA, 24 nt, Human
cucugcugaacuccagagccacag

SEQ ID NO: 1198924 - RNA, 29 nt, Human
cuuucagucugcaguauacauccccuuua

SEQ ID NO: 1198925 - RNA, 19 nt, Human
gucacagagcacucauucc

SEQ ID NO: 1198926 - RNA, 20 nt, Human
uacaggcuuugugaguugga

SEQ ID NO: 1198927 - RNA, 23 nt, Human
uacuuucuaccuuuaccacaaga

SEQ ID NO: 1198928 - RNA, 19 nt, Human
ucuaccuuuaccacaagaa

SEQ ID NO: 1198929 - RNA, 19 nt, Human
ucugcaguauacaucccuc

SEQ ID NO: 1198930 - RNA, 20 nt, Human
ucugcugaacuccagagcca

SEQ ID NO: 1198931 - RNA, 25 nt, Human
ugcaaaacacuucacgguacuuucu

SEQ ID NO: 1198932 - RNA, 19 nt, Human
uggucaaugcaaaacacuu

SEQ ID NO: 1198933 - RNA, 19 nt, Human
uuggagguuucuguacuug

SEQ ID NO: 1198934 - RNA, 24 nt, Human
uugguaauaguaaucagaggcuuu

SEQ ID NO: 1198935 - RNA, 20 nt, Human
aaaaacacauaaaaaagcau

SEQ ID NO: 1198936 - RNA, 22 nt, Human
aaaaacacauaaaaaagcauua

SEQ ID NO: 1198937 - RNA, 21 nt, Human
aaaagaaaaacaaaaacaaag

SEQ ID NO: 1198938 - RNA, 26 nt, Human
aaaaggaaaaggccugaacagcuuga

SEQ ID NO: 1198939 - RNA, 24 nt, Human
aaaagucuucaucuuuuucuuuuu

SEQ ID NO: 1198940 - RNA, 22 nt, Human
aaaauccuuuguccuuacaacc

SEQ ID NO: 1198941 - RNA, 23 nt, Human
aaacacagcuaauacauguuccu

SEQ ID NO: 1198942 - RNA, 26 nt, Human
aaagaaaaacaaaaacaaagccauag

SEQ ID NO: 1198943 - RNA, 22 nt, Human
aacacggauuauaacaaaucca

SEQ ID NO: 1198944 - RNA, 20 nt, Human
aacagcuugacaaacagcaa

SEQ ID NO: 1198945 - RNA, 22 nt, Human
aaccaauucacuuuuccucuca

SEQ ID NO: 1198946 - RNA, 21 nt, Human
aaccugcuugucccuucaccu

SEQ ID NO: 1198947 - RNA, 18 nt, Human
aagcauuaucugacaaag

SEQ ID NO: 1198948 - RNA, 22 nt, Human
aauucuuuaaucaggcacuuga

SEQ ID NO: 1198949 - RNA, 24 nt, Human
acaaacacauauucugcccugaaa

SEQ ID NO: 1198950 - RNA, 19 nt, Human
acagcuaauacauguuccu

SEQ ID NO: 1198951 - RNA, 18 nt, Human
accuuuucccuucuuucu

SEQ ID NO: 1198952 - RNA, 23 nt, Human
agacgaucauguauaccuaaaac

SEQ ID NO: 1198953 - RNA, 27 nt, Human
agccagaaguaaaaaggaaaaggccug

SEQ ID NO: 1198954 - RNA, 26 nt, Human
agguaaaguggaaaaacuaaauaguu

SEQ ID NO: 1198955 - RNA, 20 nt, Human
aguaaauagauaaaaaauaa

SEQ ID NO: 1198956 - RNA, 23 nt, Human
aguaauaaugaagguaaaaugcc

SEQ ID NO: 1198957 - RNA, 21 nt, Human
auaagccagaaguaaaaagga

SEQ ID NO: 1198958 - RNA, 20 nt, Human
auacagcgaguauugacaac

SEQ ID NO: 1198959 - RNA, 21 nt, Human
auggcaacuacuuagaaucca

SEQ ID NO: 1198960 - RNA, 18 nt, Human
auuaaguauccuugggca

SEQ ID NO: 1198961 - RNA, 18 nt, Human
caaaaauggcagaaaaaa

SEQ ID NO: 1198962 - RNA, 26 nt, Human
caaaagaaaaacaaaaacaaagccau

SEQ ID NO: 1198963 - RNA, 22 nt, Human
caaagaacuaauagagagauga

SEQ ID NO: 1198964 - RNA, 24 nt, Human
caauucacuuuuccucucaacaaa

SEQ ID NO: 1198965 - RNA, 28 nt, Human
cacaaacacauauucugcccugaaaaug

SEQ ID NO: 1198966 - RNA, 22 nt, Human
cacacacaaaaguauggcuuua

SEQ ID NO: 1198967 - RNA, 20 nt, Human
cacacacacaaaaguauggc

SEQ ID NO: 1198968 - RNA, 21 nt, Human
cacauaaaccugcuugucccu

SEQ ID NO: 1198969 - RNA, 22 nt, Human
cacauaaaccugcuugucccuu

SEQ ID NO: 1198970 - RNA, 25 nt, Human
cagaaaaagagcgaauacuguguca

SEQ ID NO: 1198971 - RNA, 21 nt, Human
cagcaacagaauaauuuccaa

SEQ ID NO: 1198972 - RNA, 26 nt, Human
cauaaaaaagcauuaucugacaaaga

SEQ ID NO: 1198973 - RNA, 25 nt, Human
caucacacacacacacaaaaguaug

SEQ ID NO: 1198974 - RNA, 18 nt, Human
ccacccacaaauaaacaa

SEQ ID NO: 1198975 - RNA, 19 nt, Human
cccacaaauaaacaaaagc

SEQ ID NO: 1198976 - RNA, 22 nt, Human
cccacaaauaaacaaaagcuua

SEQ ID NO: 1198977 - RNA, 18 nt, Human
cucaacaaaaaucaagua

SEQ ID NO: 1198978 - RNA, 21 nt, Human
cucggcucccagccgccggcc

SEQ ID NO: 1198979 - RNA, 26 nt, Human
gaacuagagccaaaaauggcagaaaa

SEQ ID NO: 1198980 - RNA, 21 nt, Human
gauuacuuuuuauaagacuau

SEQ ID NO: 1198981 - RNA, 18 nt, Human
gcagugaugaaucucuau

SEQ ID NO: 1198982 - RNA, 24 nt, Human
gcuaaaaccugaacuagagccaaa

SEQ ID NO: 1198983 - RNA, 21 nt, Human
uaaaaccugaacuagagccaa

SEQ ID NO: 1198984 - RNA, 22 nt, Human
uaaaagaaaagguuaugaccac

SEQ ID NO: 1198985 - RNA, 21 nt, Human
uaaaaugcaucacaguaggca

SEQ ID NO: 1198986 - RNA, 24 nt, Human
uaaaaugcaucacaguaggcaccc

SEQ ID NO: 1198987 - RNA, 27 nt, Human
uaacaaaauaaauuaucagcauuucca

SEQ ID NO: 1198988 - RNA, 21 nt, Human
uaacuggacuaguuuagauau

SEQ ID NO: 1198989 - RNA, 20 nt, Human
uaauuucuuuuuugcaucuc

SEQ ID NO: 1198990 - RNA, 22 nt, Human
uacaaaagaaaaacaaaaacaa

SEQ ID NO: 1198991 - RNA, 27 nt, Human
uacuggggcaucacacacacacacagu

SEQ ID NO: 1198992 - RNA, 21 nt, Human
uagaguuuguaguauacacuu

SEQ ID NO: 1198993 - RNA, 20 nt, Human
uauucauagaaaauuuaauc

SEQ ID NO: 1198994 - RNA, 20 nt, Human
ucaaguuuucauacuaaaug

SEQ ID NO: 1198995 - RNA, 25 nt, Human
ucacaaacacauauucugcccugaa

SEQ ID NO: 1198996 - RNA, 19 nt, Human
ucacacacacacacaaaag

SEQ ID NO: 1198997 - RNA, 25 nt, Human
uccagugaguguuuuguuuuucaau

SEQ ID NO: 1198998 - RNA, 19 nt, Human
ucucacuaaaacacagcua

SEQ ID NO: 1198999 - RNA, 18 nt, Human
ucuuuuuugcaucucagc

SEQ ID NO: 1199000 - RNA, 23 nt, Human
ugaaauacauuuuccuuaaagca

SEQ ID NO: 1199001 - RNA, 21 nt, Human
ugacaaagaaaaguagaaaag

SEQ ID NO: 1199002 - RNA, 22 nt, Human
ugacaaagaaaaguagaaaaga

SEQ ID NO: 1199003 - RNA, 19 nt, Human
ugcacuacauuauuuuaac

SEQ ID NO: 1199004 - RNA, 21 nt, Human
ugcuaaucaagcuaaaaccug

SEQ ID NO: 1199005 - RNA, 21 nt, Human
uggagaauaacuccacccaca

SEQ ID NO: 1199006 - RNA, 24 nt, Human
ugucaaaaaccuuugcuaaucaag

SEQ ID NO: 1199007 - RNA, 20 nt, Human
uguuguuuaaguauauuuca

SEQ ID NO: 1199008 - RNA, 20 nt, Human
uuaacuuucuguaaucugca

SEQ ID NO: 1199009 - RNA, 24 nt, Human
uuaauguucaaaucaacagcaaaa

SEQ ID NO: 1199010 - RNA, 22 nt, Human
uuaugauggauagcaauucauu

SEQ ID NO: 1199011 - RNA, 20 nt, Human
uucaaaaaauguaaaaacac

SEQ ID NO: 1199012 - RNA, 21 nt, Human
uucaaguuuucauacuaaaug

SEQ ID NO: 1199013 - RNA, 18 nt, Human
uuccacauagaaaucgcu

SEQ ID NO: 1199014 - RNA, 21 nt, Human
uugaacuugguaacuuuguca

SEQ ID NO: 1199015 - RNA, 23 nt, Human
uuggagaauaacuccacccacaa

SEQ ID NO: 1199016 - RNA, 22 nt, Human
uuuaacugauuacuuuuuauaa

SEQ ID NO: 1199017 - RNA, 20 nt, Human
uuuccacauagaaaucgcuu

SEQ ID NO: 1199018 - RNA, 20 nt, Human
aauccaacugaguuuuccuc

SEQ ID NO: 1199019 - RNA, 21 nt, Human
cagagccugcauguacuuucc

SEQ ID NO: 1199020 - RNA, 19 nt, Human
cagcgaaucaccaauccaa

SEQ ID NO: 1199021 - RNA, 23 nt, Human
ccuguccacaacacugcuaggga

SEQ ID NO: 1199022 - RNA, 21 nt, Human
cuaugauauuggccagauuua

SEQ ID NO: 1199023 - RNA, 18 nt, Human
cuccagccuccuguuucc

SEQ ID NO: 1199024 - RNA, 20 nt, Human
ucuguaacauaggucacuau

SEQ ID NO: 1199025 - RNA, 19 nt, Human
uuaaagcaacagagccugc

SEQ ID NO: 1199026 - RNA, 18 nt, Human
uuagugcaauuucuguaa

SEQ ID NO: 1199027 - RNA, 23 nt, Human
uuuaaagcaacagagccugcaug

SEQ ID NO: 1199028 - RNA, 21 nt, Human
ccgcgccgacgcggcgcccgc

SEQ ID NO: 1199029 - RNA, 20 nt, Human
ccgcugcccgcugcacugga

SEQ ID NO: 1199030 - RNA, 18 nt, Human
gcucgggccgcugcccgc

SEQ ID NO: 1199031 - RNA, 22 nt, Human
ggccgcugcccgcugcacugga

SEQ ID NO: 1199032 - RNA, 23 nt, Human
aagcuggcugcauccuggggaca

SEQ ID NO: 1199033 - RNA, 18 nt, Human
gagucucagccuuuccug

SEQ ID NO: 1199034 - RNA, 20 nt, Human
gcuuauuuugccccuggauu

SEQ ID NO: 1199035 - RNA, 18 nt, Human
ggcugcauccuggggaca

SEQ ID NO: 1199036 - RNA, 19 nt, Human
ucagccuuuccugaaagcu

SEQ ID NO: 1199037 - RNA, 25 nt, Human
ucccggaggauaaugcuuauuuugc

SEQ ID NO: 1199038 - RNA, 26 nt, Human
ucccggaggauaaugcuuauuuugcc

SEQ ID NO: 1199039 - RNA, 18 nt, Human
uccuggggacacugacuc

SEQ ID NO: 1199040 - RNA, 18 nt, Human
ugccccuggauuuuccuu

SEQ ID NO: 1199041 - RNA, 21 nt, Human
uggcugcauccuggggacacu

SEQ ID NO: 1199042 - RNA, 19 nt, Human
uuccuucggauucuucucg

SEQ ID NO: 1199043 - RNA, 18 nt, Human
uugccccuggauuuuccu

SEQ ID NO: 1199044 - RNA, 23 nt, Human
aagcgcugaggccgcuguccacc

SEQ ID NO: 1199045 - RNA, 24 nt, Human
acuggaagaauaaaguuccucuuu

SEQ ID NO: 1199046 - RNA, 20 nt, Human
agcggaagcgcugaggccgc

SEQ ID NO: 1199047 - RNA, 19 nt, Human
aucgguguucgcgugccuu

SEQ ID NO: 1199048 - RNA, 19 nt, Human
cagcagcgccaggcgggcc

SEQ ID NO: 1199049 - RNA, 22 nt, Human
cagcggaagcgcugaggccgcu

SEQ ID NO: 1199050 - RNA, 23 nt, Human
cccggcagcagcagcgccaggcg

SEQ ID NO: 1199051 - RNA, 19 nt, Human
cccuucccgggcuccccgg

SEQ ID NO: 1199052 - RNA, 20 nt, Human
ccggcucccagcucucagcc

SEQ ID NO: 1199053 - RNA, 26 nt, Human
ccugaccuugcccuggguacgccagc

SEQ ID NO: 1199054 - RNA, 18 nt, Human
ccugugcgcgccgguggc

SEQ ID NO: 1199055 - RNA, 23 nt, Human
ccugugcgcgccgguggcggcug

SEQ ID NO: 1199056 - RNA, 20 nt, Human
cgccgguggcggcuggaggc

SEQ ID NO: 1199057 - RNA, 23 nt, Human
cggcucccagcucucagccuccc

SEQ ID NO: 1199058 - RNA, 21 nt, Human
cucccuucccgggcuccccgg

SEQ ID NO: 1199059 - RNA, 22 nt, Human
cuggaggcucgcggcucccuuc

SEQ ID NO: 1199060 - RNA, 22 nt, Human
cuuccggguccuccgcccggca

SEQ ID NO: 1199061 - RNA, 22 nt, Human
gcagcagcagcgccaggcgggc

SEQ ID NO: 1199062 - RNA, 22 nt, Human
gccgucguggcuacuuccgauc

SEQ ID NO: 1199063 - RNA, 20 nt, Human
ggaaagaccugugcgcgccg

SEQ ID NO: 1199064 - RNA, 19 nt, Human
gggcuccccggcucccagc

SEQ ID NO: 1199065 - RNA, 23 nt, Human
ucacaccuccaccgccggcacgg

SEQ ID NO: 1199066 - RNA, 18 nt, Human
ucccgggcuccccggcuc

SEQ ID NO: 1199067 - RNA, 27 nt, Human
uccgcccggcagcagcagcgccaggcg

SEQ ID NO: 1199068 - RNA, 18 nt, Human
ugcccuggguacgccagc

SEQ ID NO: 1199069 - RNA, 22 nt, Human
uggaagaauaaaguuccucuuu

SEQ ID NO: 1199070 - RNA, 18 nt, Human
aaacaugaaauccccagg

SEQ ID NO: 1199071 - RNA, 23 nt, Human
aagaacaggcagcaacucagaug

SEQ ID NO: 1199072 - RNA, 23 nt, Human
acaggucucauuuuugcucuuuu

SEQ ID NO: 1199073 - RNA, 18 nt, Human
accuguggcuccugggac

SEQ ID NO: 1199074 - RNA, 18 nt, Human
acucccugcaggacacac

SEQ ID NO: 1199075 - RNA, 18 nt, Human
agagcuuuuuccugccaa

SEQ ID NO: 1199076 - RNA, 27 nt, Human
agcuuuuuccugccaaugcucuuccau

SEQ ID NO: 1199077 - RNA, 21 nt, Human
auggugcuggaagguggagag

SEQ ID NO: 1199078 - RNA, 23 nt, Human
caaccaaugcaaccuuuccaagc

SEQ ID NO: 1199079 - RNA, 22 nt, Human
cagagugaaaacaugaaauccc

SEQ ID NO: 1199080 - RNA, 18 nt, Human
cagcaagagaccuggacu

SEQ ID NO: 1199081 - RNA, 23 nt, Human
caggacacacagcaagaggggag

SEQ ID NO: 1199082 - RNA, 20 nt, Human
cucuguauagccucuagagc

SEQ ID NO: 1199083 - RNA, 23 nt, Human
cuuuuguucuuaacaucaaaauc

SEQ ID NO: 1199084 - RNA, 27 nt, Human
cuuuuuuucuucucuguauagccucuu

SEQ ID NO: 1199085 - RNA, 24 nt, Human
gaaauccccagggugaugcuccuc

SEQ ID NO: 1199086 - RNA, 18 nt, Human
gcagcaacucagaugugc

SEQ ID NO: 1199087 - RNA, 19 nt, Human
gccuggaaguuuccauacu

SEQ ID NO: 1199088 - RNA, 22 nt, Human
gggagaggggagaggagaaagu

SEQ ID NO: 1199089 - RNA, 21 nt, Human
uagccucuagagcuuuuuccu

SEQ ID NO: 1199090 - RNA, 27 nt, Human
uaucuggagugcuuuuuaaaacaauuu

SEQ ID NO: 1199091 - RNA, 31 nt, Human
ucccuuguaagcaaauaaauugacaggagcu

SEQ ID NO: 1199092 - RNA, 24 nt, Human
ucuccauaggaauagacaccacuc

SEQ ID NO: 1199093 - RNA, 21 nt, Human
ucuggagugcuuuuuaaaaca

SEQ ID NO: 1199094 - RNA, 20 nt, Human
ucuguauagccucuagagcu

SEQ ID NO: 1199095 - RNA, 19 nt, Human
ucuucucuguauagccucu

SEQ ID NO: 1199096 - RNA, 18 nt, Human
ugaagaacaggcagcaac

SEQ ID NO: 1199097 - RNA, 21 nt, Human
ugaagaacaggcagcaacuca

SEQ ID NO: 1199098 - RNA, 26 nt, Human
ugcuggaagguggagaguuggccacc

SEQ ID NO: 1199099 - RNA, 18 nt, Human
uggaagguggagaguugg

SEQ ID NO: 1199100 - RNA, 21 nt, Human
ugggagaggggagaggagaaa

SEQ ID NO: 1199101 - RNA, 23 nt, Human
ugggagaggggagaggagaaagu

SEQ ID NO: 1199102 - RNA, 26 nt, Human
ugugaagaacaggcagcaacucagau

SEQ ID NO: 1199103 - RNA, 21 nt, Human
uuacuguuacaugaacagugu

SEQ ID NO: 1199104 - RNA, 24 nt, Human
uuauuuggcaggugggggagggga

SEQ ID NO: 1199105 - RNA, 21 nt, Human
uucacaaacauucucgauuac

SEQ ID NO: 1199106 - RNA, 21 nt, Human
uuccauacuucuuuuguucuu

SEQ ID NO: 1199107 - RNA, 21 nt, Human
uuccugccaaugcucuuccau

SEQ ID NO: 1199108 - RNA, 18 nt, Human
uuggcaggugggggaggg

SEQ ID NO: 1199109 - RNA, 23 nt, Human
uuuuucuucucuguauagccucu

SEQ ID NO: 1199110 - RNA, 24 nt, Human
uuuuuuuuuuuuuuuaacuuuuga

SEQ ID NO: 1199111 - RNA, 21 nt, Human
uaugugcaauagccccauaaa

SEQ ID NO: 1199112 - RNA, 25 nt, Human
ucuuacagauucacuaugugcaaua

SEQ ID NO: 1199113 - RNA, 20 nt, Human
ccugcgauggcaggggcugu

SEQ ID NO: 1199114 - RNA, 21 nt, Human
ccugcgauggcaggggcuguc

SEQ ID NO: 1199115 - RNA, 23 nt, Human
ccuuccugcgauggcaggggcug

SEQ ID NO: 1199116 - RNA, 29 nt, Human
ucagcugcauguccauggcuggauccagg

SEQ ID NO: 1199117 - RNA, 24 nt, Human
aaaugccugagauugccuaacacc

SEQ ID NO: 1199118 - RNA, 19 nt, Human
caugucuccgauaagcauc

SEQ ID NO: 1199119 - RNA, 27 nt, Human
cuuucugauuauuuucaugucuccgau

SEQ ID NO: 1199120 - RNA, 22 nt, Human
aaaaacugcgaaagccuaucaa

SEQ ID NO: 1199121 - RNA, 25 nt, Human
caacuugaaagaugaguagggauac

SEQ ID NO: 1199122 - RNA, 24 nt, Human
caggaucagaagccccaguuccaa

SEQ ID NO: 1199123 - RNA, 22 nt, Human
cgaauggggugggaaaggcuag

SEQ ID NO: 1199124 - RNA, 19 nt, Human
cuggccaccaaggccguuc

SEQ ID NO: 1199125 - RNA, 19 nt, Human
cuugaaagaugaguaggga

SEQ ID NO: 1199126 - RNA, 20 nt, Human
gaaagccuaucaacuugaaa

SEQ ID NO: 1199127 - RNA, 18 nt, Human
gccaggaucagaagcccc

SEQ ID NO: 1199128 - RNA, 21 nt, Human
uagccaggaucagaagcccca

SEQ ID NO: 1199129 - RNA, 26 nt, Human
uucacggacgaaaaacugcgaaagcc

SEQ ID NO: 1199130 - RNA, 21 nt, Human
acuccaaggagcuaggagggg

SEQ ID NO: 1199131 - RNA, 22 nt, Human
agacagccaccuguccuuucug

SEQ ID NO: 1199132 - RNA, 20 nt, Human
aggcaauggccaaagccaca

SEQ ID NO: 1199133 - RNA, 21 nt, Human
aggccaugaggagacagccac

SEQ ID NO: 1199134 - RNA, 18 nt, Human
aguagcagcagcaguauc

SEQ ID NO: 1199135 - RNA, 25 nt, Human
auuaguagcagcagcaguaucuugg

SEQ ID NO: 1199136 - RNA, 19 nt, Human
caggcaauggccaaagcca

SEQ ID NO: 1199137 - RNA, 21 nt, Human
gcaguaucuuggcaaaaggag

SEQ ID NO: 1199138 - RNA, 23 nt, Human
gggcuucugugggcuaguucugc

SEQ ID NO: 1199139 - RNA, 26 nt, Human
guagcagcagcaguaucuuggcaaaa

SEQ ID NO: 1199140 - RNA, 19 nt, Human
uaggaggggauuaguagca

SEQ ID NO: 1199141 - RNA, 20 nt, Human
uccaaggagcuaggagggga

SEQ ID NO: 1199142 - RNA, 23 nt, Human
ucucugcaggccaugaggagaca

SEQ ID NO: 1199143 - RNA, 19 nt, Human
ucugcaggccaugaggaga

SEQ ID NO: 1199144 - RNA, 21 nt, Human
uuaguagcagcagcaguaucu

SEQ ID NO: 1199145 - RNA, 22 nt, Human
uuaguagcagcagcaguaucuu

SEQ ID NO: 1199146 - RNA, 25 nt, Human
uuaguagcagcagcaguaucuuggc

SEQ ID NO: 1199147 - RNA, 21 nt, Human
aagcaggguuccagauaccuc

SEQ ID NO: 1199148 - RNA, 22 nt, Human
agauaccuccaggugcagcuuc

SEQ ID NO: 1199149 - RNA, 24 nt, Human
uuccagauaccuccaggugcagcu

SEQ ID NO: 1199150 - RNA, 19 nt, Human
ccucugcuaacaacugcuc

SEQ ID NO: 1199151 - RNA, 20 nt, Human
cugccucugcuaacaacugc

SEQ ID NO: 1199152 - RNA, 23 nt, Human
cugccucugcuaacaacugcucc

SEQ ID NO: 1199153 - RNA, 23 nt, Human
cugcuggugcuguggcuucuccu

SEQ ID NO: 1199154 - RNA, 22 nt, Human
gugcuguggcuucuccugucug

SEQ ID NO: 1199155 - RNA, 18 nt, Human
ucccugacaugcugccuc

SEQ ID NO: 1199156 - RNA, 19 nt, Human
ucugcuaacaacugcucca

SEQ ID NO: 1199157 - RNA, 18 nt, Human
ugcuguggcuucuccuga

SEQ ID NO: 1199158 - RNA, 18 nt, Human
acccgcagcgccuccuuc

SEQ ID NO: 1199159 - RNA, 23 nt, Human
agacuuucacuuuccccccuugg

SEQ ID NO: 1199160 - RNA, 18 nt, Human
agagggggaggggagggc

SEQ ID NO: 1199161 - RNA, 23 nt, Human
caacucgggagcgagcgggcuag

SEQ ID NO: 1199162 - RNA, 22 nt, Human
cacccgcagcgccuccuucacu

SEQ ID NO: 1199163 - RNA, 19 nt, Human
cacuuuccccccuuggucg

SEQ ID NO: 1199164 - RNA, 22 nt, Human
cacuuuguagccauucuggggc

SEQ ID NO: 1199165 - RNA, 24 nt, Human
cccgcagcgccuccuucacuccga

SEQ ID NO: 1199166 - RNA, 23 nt, Human
cccggggagagggggaggggagg

SEQ ID NO: 1199167 - RNA, 23 nt, Human
cuccgaagacuuucacuuucccc

SEQ ID NO: 1199168 - RNA, 20 nt, Human
cugauggugcuccuggccgg

SEQ ID NO: 1199169 - RNA, 20 nt, Human
cugauggugcuccuggccgg

SEQ ID NO: 1199170 - RNA, 19 nt, Human
cugcacacugucaucugcc

SEQ ID NO: 1199171 - RNA, 22 nt, Human
cuucaucaucuucaucaaugca

SEQ ID NO: 1199172 - RNA, 20 nt, Human
cuugcggagcccgcgccccc

SEQ ID NO: 1199173 - RNA, 19 nt, Human
gaggggagggccuccggga

SEQ ID NO: 1199174 - RNA, 19 nt, Human
gcacaguguucccuucugg

SEQ ID NO: 1199175 - RNA, 21 nt, Human
gcagcgccuccuucacuccga

SEQ ID NO: 1199176 - RNA, 19 nt, Human
gcgccugauggugcuccug

SEQ ID NO: 1199177 - RNA, 19 nt, Human
ggagagggggaggggaggg

SEQ ID NO: 1199178 - RNA, 21 nt, Human
ggggagagggggaggggaggg

SEQ ID NO: 1199179 - RNA, 20 nt, Human
ggggaggggagggccuccgg

SEQ ID NO: 1199180 - RNA, 19 nt, Human
ugcggagcccgcgcccccg

SEQ ID NO: 1199181 - RNA, 24 nt, Human
uggaaaagccgaggaaauucgagg

SEQ ID NO: 1199182 - RNA, 23 nt, Human
uucccuucugggguccugcggcc

SEQ ID NO: 1199183 - RNA, 19 nt, Human
acccgcagacugcuccucc

SEQ ID NO: 1199184 - RNA, 23 nt, Human
ccacaguuggaacucguccacac

SEQ ID NO: 1199185 - RNA, 21 nt, Human
ccagagacuccucgccccugg

SEQ ID NO: 1199186 - RNA, 23 nt, Human
ccaguucuccggugaucuucucu

SEQ ID NO: 1199187 - RNA, 21 nt, Human
ccccaggcagccauucaccuu

SEQ ID NO: 1199188 - RNA, 26 nt, Human
ccuccagcgucuccagagacuccucg

SEQ ID NO: 1199189 - RNA, 25 nt, Human
ccuucagccacaguuggaacucguc

SEQ ID NO: 1199190 - RNA, 18 nt, Human
cgaaugacacccgcagac

SEQ ID NO: 1199191 - RNA, 22 nt, Human
cgccccaggcagccauucaccc

SEQ ID NO: 1199192 - RNA, 21 nt, Human
cuccagagacuccucgccccu

SEQ ID NO: 1199193 - RNA, 21 nt, Human
gccauucaccuucuccaccac

SEQ ID NO: 1199194 - RNA, 23 nt, Human
gcuugcaguuccgccccaggcag

SEQ ID NO: 1199195 - RNA, 19 nt, Human
ggaaaaucuuuggcaaugu

SEQ ID NO: 1199196 - RNA, 20 nt, Human
uccacaccugccugguacuc

SEQ ID NO: 1199197 - RNA, 24 nt, Human
uccacaccugccugguacuccuca

SEQ ID NO: 1199198 - RNA, 20 nt, Human
uccgaaugacacccgcagac

SEQ ID NO: 1199199 - RNA, 19 nt, Human
uccugcaguguggagaggc

SEQ ID NO: 1199200 - RNA, 25 nt, Human
ucuccaccaccgccuucagccacag

SEQ ID NO: 1199201 - RNA, 19 nt, Human
ucuccagagacuccucgcc

SEQ ID NO: 1199202 - RNA, 23 nt, Human
ucuccagagacuccucgccccug

SEQ ID NO: 1199203 - RNA, 22 nt, Human
ugccugguacuccucaugcucc

SEQ ID NO: 1199204 - RNA, 20 nt, Human
ugcuccagcagaucuacacg

SEQ ID NO: 1199205 - RNA, 20 nt, Human
uggagaggcgcugcgugaug

SEQ ID NO: 1199206 - RNA, 21 nt, Human
uuccgaaugacacccgcagac

SEQ ID NO: 1199207 - RNA, 19 nt, Human
uucuccaccaccgccuuca

SEQ ID NO: 1199208 - RNA, 20 nt, Human
aaaacaccuaaaauugacuc

SEQ ID NO: 1199209 - RNA, 20 nt, Human
aaagggagagauggcauuga

SEQ ID NO: 1199210 - RNA, 20 nt, Human
caagagcacccaguaccugc

SEQ ID NO: 1199211 - RNA, 24 nt, Human
cagcagcugaggccacauggucac

SEQ ID NO: 1199212 - RNA, 19 nt, Human
ccagagcggggucuucggc

SEQ ID NO: 1199213 - RNA, 23 nt, Human
ccgccagagcugcggacaggccc

SEQ ID NO: 1199214 - RNA, 24 nt, Human
cgccagagcugcggacaggccccc

SEQ ID NO: 1199215 - RNA, 21 nt, Human
cgcccaggggauccgcagcag

SEQ ID NO: 1199216 - RNA, 18 nt, Human
cuuaguggcccaaaacac

SEQ ID NO: 1199217 - RNA, 24 nt, Human
cuugccgcggauacuuaguggccc

SEQ ID NO: 1199218 - RNA, 18 nt, Human
gggccugcggggagccgc

SEQ ID NO: 1199219 - RNA, 20 nt, Human
gguggaaagggagagauggc

SEQ ID NO: 1199220 - RNA, 19 nt, Human
gucacagccaaguucagca

SEQ ID NO: 1199221 - RNA, 20 nt, Human
ucagcagguggaaagggaga

SEQ ID NO: 1199222 - RNA, 22 nt, Human
ucccagagcggggucuucggcu

SEQ ID NO: 1199223 - RNA, 19 nt, Human
ugaaccuaugugagaacug

SEQ ID NO: 1199224 - RNA, 21 nt, Human
ugagaacugggaagaugugug

SEQ ID NO: 1199225 - RNA, 24 nt, Human
ugcuaccccuggcacgcccagggg

SEQ ID NO: 1199226 - RNA, 19 nt, Human
uggaaagggagagauggca

SEQ ID NO: 1199227 - RNA, 22 nt, Human
uggggccugcggggagccgcca

SEQ ID NO: 1199228 - RNA, 25 nt, Human
ugugagaacugggaagauguguggg

SEQ ID NO: 1199229 - RNA, 18 nt, Human
cuugcugaauucucuaag

SEQ ID NO: 1199230 - RNA, 21 nt, Human
ucucuugcugaauucucuaag

SEQ ID NO: 1199231 - RNA, 19 nt, Human
ucugugugugugaaaguga

SEQ ID NO: 1199232 - RNA, 21 nt, Human
aggcacacccggggcuguggc

SEQ ID NO: 1199233 - RNA, 21 nt, Human
caccgggugccuucccauucu

SEQ ID NO: 1199234 - RNA, 21 nt, Human
ccgcccagguuggaggguguc

SEQ ID NO: 1199235 - RNA, 21 nt, Human
cgggugccuucccauucuccu

SEQ ID NO: 1199236 - RNA, 22 nt, Human
cuucccauucuccuggcugcca

SEQ ID NO: 1199237 - RNA, 21 nt, Human
gcugacggggagaucuuggac

SEQ ID NO: 1199238 - RNA, 18 nt, Human
ggccgcccagguuggagg

SEQ ID NO: 1199239 - RNA, 20 nt, Human
ggggaugcugacggggagau

SEQ ID NO: 1199240 - RNA, 20 nt, Human
ggggaugcugacggggagau

SEQ ID NO: 1199241 - RNA, 20 nt, Human
ggggaugcugacggggagau

SEQ ID NO: 1199242 - RNA, 21 nt, Human
uauccuggggaugcugacggg

SEQ ID NO: 1199243 - RNA, 21 nt, Human
uauccuggggaugcugacggg

SEQ ID NO: 1199244 - RNA, 22 nt, Human
ugaaaggcagcagccgccuucc

SEQ ID NO: 1199245 - RNA, 22 nt, Human
ugcagcugcuccugcacugggg

SEQ ID NO: 1199246 - RNA, 19 nt, Human
uggcuccucaggcacaccc

SEQ ID NO: 1199247 - RNA, 18 nt, Human
uggcugccagccacuccc

SEQ ID NO: 1199248 - RNA, 18 nt, Human
uggcuggcuccucaggca

SEQ ID NO: 1199249 - RNA, 19 nt, Human
uggggaugcugacggggag

SEQ ID NO: 1199250 - RNA, 19 nt, Human
uggggaugcugacggggag

SEQ ID NO: 1199251 - RNA, 19 nt, Human
uggggaugcugacggggag

SEQ ID NO: 1199252 - RNA, 23 nt, Human
uggggaugcugacggggagaucu

SEQ ID NO: 1199253 - RNA, 23 nt, Human
uggggaugcugacggggagaucu

SEQ ID NO: 1199254 - RNA, 23 nt, Human
uggggaugcugacggggagaucu

SEQ ID NO: 1199255 - RNA, 23 nt, Human
aaaguacagcaaggcagaggcca

SEQ ID NO: 1199256 - RNA, 18 nt, Human
aagcggcccaaagaugac

SEQ ID NO: 1199257 - RNA, 22 nt, Human
aagcggcccaaagaugaccacu

SEQ ID NO: 1199258 - RNA, 24 nt, Human
acacaaagcccccuaagaaagugc

SEQ ID NO: 1199259 - RNA, 21 nt, Human
accaccagcaacacaaagccc

SEQ ID NO: 1199260 - RNA, 23 nt, Human
acgcgccguguagccaggaacac

SEQ ID NO: 1199261 - RNA, 21 nt, Human
agaaagugcauguccagcccc

SEQ ID NO: 1199262 - RNA, 19 nt, Human
agcaaggcagaggccaccc

SEQ ID NO: 1199263 - RNA, 20 nt, Human
agcagcagacccuggggcag

SEQ ID NO: 1199264 - RNA, 19 nt, Human
agccaggcaugguagaggc

SEQ ID NO: 1199265 - RNA, 22 nt, Human
agccaggcaugguagaggcgcc

SEQ ID NO: 1199266 - RNA, 19 nt, Human
aggaaggugugggaggaga

SEQ ID NO: 1199267 - RNA, 18 nt, Human
aggcagaggccacccaga

SEQ ID NO: 1199268 - RNA, 18 nt, Human
aggccacccagagcagca

SEQ ID NO: 1199269 - RNA, 20 nt, Human
aggugugggaggagacggug

SEQ ID NO: 1199270 - RNA, 19 nt, Human
auggaacugcagaagcggc

SEQ ID NO: 1199271 - RNA, 25 nt, Human
auggaacugcagaagcggcccaaag

SEQ ID NO: 1199272 - RNA, 22 nt, Human
caaggcagaggccacccagagc

SEQ ID NO: 1199273 - RNA, 20 nt, Human
caccaccagcaacacaaagc

SEQ ID NO: 1199274 - RNA, 22 nt, Human
cacugguggccggcugccaggc

SEQ ID NO: 1199275 - RNA, 22 nt, Human
cagaggccacccagagcagcac

SEQ ID NO: 1199276 - RNA, 27 nt, Human
cagcaaggcagaggccacccagagcag

SEQ ID NO: 1199277 - RNA, 21 nt, Human
cagcucguggagcagcagacc

SEQ ID NO: 1199278 - RNA, 18 nt, Human
caggagccagucaggucc

SEQ ID NO: 1199279 - RNA, 19 nt, Human
caggggcugcccagaaggc

SEQ ID NO: 1199280 - RNA, 22 nt, Human
ccaccagcaacacaaagccccc

SEQ ID NO: 1199281 - RNA, 21 nt, Human
ccucgaugagcaggaaggccc

SEQ ID NO: 1199282 - RNA, 23 nt, Human
cgaagcaggagccagucaggucc

SEQ ID NO: 1199283 - RNA, 21 nt, Human
cgccacugguggccggcugcc

SEQ ID NO: 1199284 - RNA, 18 nt, Human
gacccuggggcaguggcu

SEQ ID NO: 1199285 - RNA, 21 nt, Human
gagcagcagacccuggggcag

SEQ ID NO: 1199286 - RNA, 24 nt, Human
gagcaggcagcaaaaggugagcaa

SEQ ID NO: 1199287 - RNA, 18 nt, Human
gagcaggcagcccagcag

SEQ ID NO: 1199288 - RNA, 22 nt, Human
gcaaggcagaggccacccagag

SEQ ID NO: 1199289 - RNA, 19 nt, Human
gcagcucguggagcagcag

SEQ ID NO: 1199290 - RNA, 24 nt, Human
gcagcucguggagcagcagacccu

SEQ ID NO: 1199291 - RNA, 19 nt, Human
gccaggaacaccaccagca

SEQ ID NO: 1199292 - RNA, 21 nt, Human
gcggccuguucgcuuccaaag

SEQ ID NO: 1199293 - RNA, 21 nt, Human
gcugccaggcagcugcggcgg

SEQ ID NO: 1199294 - RNA, 19 nt, Human
ggcagaggccacccagagc

SEQ ID NO: 1199295 - RNA, 18 nt, Human
ggcccggccggcuccccg

SEQ ID NO: 1199296 - RNA, 24 nt, Human
gggcggccuguucgcuuccaaagu

SEQ ID NO: 1199297 - RNA, 20 nt, Human
gugggaggagacgguguagc

SEQ ID NO: 1199298 - RNA, 20 nt, Human
uaccagucggcucagguguc

SEQ ID NO: 1199299 - RNA, 18 nt, Human
uauguugaagaaguugcc

SEQ ID NO: 1199300 - RNA, 19 nt, Human
uccagccccaggcugaauu

SEQ ID NO: 1199301 - RNA, 22 nt, Human
ugagcaggcagcccagcagugc

SEQ ID NO: 1199302 - RNA, 19 nt, Human
ugcagaagcggcccaaaga

SEQ ID NO: 1199303 - RNA, 26 nt, Human
ugccagccaggcaugguagaggcgcc

SEQ ID NO: 1199304 - RNA, 20 nt, Human
uggcucgaagcaggagccag

SEQ ID NO: 1199305 - RNA, 19 nt, Human
uguagccaggaacaccacc

SEQ ID NO: 1199306 - RNA, 21 nt, Human
acacaugggaaaggugacugc

SEQ ID NO: 1199307 - RNA, 23 nt, Human
gacacagggugaugccaaagacg

SEQ ID NO: 1199308 - RNA, 24 nt, Human
ugccaaagacgcagaaacacaugg

SEQ ID NO: 1199309 - RNA, 21 nt, Human
ugccauuucugggcucuaaaa

SEQ ID NO: 1199310 - RNA, 19 nt, Human
acugaacgcaggggauucc

SEQ ID NO: 1199311 - RNA, 20 nt, Human
agcuggaucuucuggcacag

SEQ ID NO: 1199312 - RNA, 21 nt, Human
cacacgcucagaagauagcca

SEQ ID NO: 1199313 - RNA, 28 nt, Human
cagccccugagcguccaccuucggcccu

SEQ ID NO: 1199314 - RNA, 24 nt, Human
ccccugagcguccaccuucggccc

SEQ ID NO: 1199315 - RNA, 19 nt, Human
cuggcacacgcucagaaga

SEQ ID NO: 1199316 - RNA, 25 nt, Human
uacuuucauuucugcuaucccugau

SEQ ID NO: 1199317 - RNA, 22 nt, Human
uccgcugagccuccagccccug

SEQ ID NO: 1199318 - RNA, 20 nt, Human
ugaacgcaggggauuccgcu

SEQ ID NO: 1199319 - RNA, 19 nt, Human
ugagggcacuggaaccgcu

SEQ ID NO: 1199320 - RNA, 19 nt, Human
uggaucuucuggcacacgc

SEQ ID NO: 1199321 - RNA, 21 nt, Human
aggaagcggacagaugccaag

SEQ ID NO: 1199322 - RNA, 19 nt, Human
aggcacccaaggggucucc

SEQ ID NO: 1199323 - RNA, 23 nt, Human
aggccuggggcuagcagggggcu

SEQ ID NO: 1199324 - RNA, 22 nt, Human
cagaugccaaggcacccaaggg

SEQ ID NO: 1199325 - RNA, 22 nt, Human
cugagcacccagcggcugagga

SEQ ID NO: 1199326 - RNA, 22 nt, Human
ucugaaaggccuggggcuagca

SEQ ID NO: 1199327 - RNA, 21 nt, Human
ugaggaagcggacagaugcca

SEQ ID NO: 1199328 - RNA, 18 nt, Human
uggggcuagcagggggcu

SEQ ID NO: 1199329 - RNA, 19 nt, Human
accuccuggccacgucucc

SEQ ID NO: 1199330 - RNA, 22 nt, Human
agcaagaccuccuggccacguc

SEQ ID NO: 1199331 - RNA, 18 nt, Human
cacgucuccagcuauacc

SEQ ID NO: 1199332 - RNA, 20 nt, Human
ccuccuggccacgucuccag

SEQ ID NO: 1199333 - RNA, 24 nt, Human
ccuccuggccacgucuccagcuau

SEQ ID NO: 1199334 - RNA, 27 nt, Human
cucaacuccuuuaucagauccuugcag

SEQ ID NO: 1199335 - RNA, 19 nt, Human
cuccuggccacgucuccag

SEQ ID NO: 1199336 - RNA, 21 nt, Human
cuggccacgucuccagcuaua

SEQ ID NO: 1199337 - RNA, 19 nt, Human
cuggguaaagaaugguuca

SEQ ID NO: 1199338 - RNA, 22 nt, Human
guuacuacuggaucauccaaau

SEQ ID NO: 1199339 - RNA, 20 nt, Human
uccuggccacgucuccagcu

SEQ ID NO: 1199340 - RNA, 28 nt, Human
ucuuuaguuuuaagaucuuuguuucacc

SEQ ID NO: 1199341 - RNA, 23 nt, Human
uguuucacccuggguaaagaaug

SEQ ID NO: 1199342 - RNA, 20 nt, Human
uuucacccuggguaaagaau

SEQ ID NO: 1199343 - RNA, 22 nt, Human
aagcaaacuauucauuugaaac

SEQ ID NO: 1199344 - RNA, 22 nt, Human
acagccaaagguaaaagggccu

SEQ ID NO: 1199345 - RNA, 20 nt, Human
acagugagguuuuuguuggc

SEQ ID NO: 1199346 - RNA, 21 nt, Human
accuucuuuggagccacuagu

SEQ ID NO: 1199347 - RNA, 22 nt, Human
agaguucaaccagaugacgcug

SEQ ID NO: 1199348 - RNA, 18 nt, Human
agcucuuuuuuuuuucuu

SEQ ID NO: 1199349 - RNA, 21 nt, Human
auagcucuuuuuuuuuucuuu

SEQ ID NO: 1199350 - RNA, 22 nt, Human
auagcucuuuuuuuuuucuuuu

SEQ ID NO: 1199351 - RNA, 23 nt, Human
auagcucuuuuuuuuuucuuuuu

SEQ ID NO: 1199352 - RNA, 24 nt, Human
auccccagugcuuaaaaaaauuug

SEQ ID NO: 1199353 - RNA, 21 nt, Human
augaaauucucucaaaugagg

SEQ ID NO: 1199354 - RNA, 20 nt, Human
auucauuugaaacaaaacca

SEQ ID NO: 1199355 - RNA, 18 nt, Human
caaagguaaaagggccua

SEQ ID NO: 1199356 - RNA, 21 nt, Human
caucuucaaauccacaaugaa

SEQ ID NO: 1199357 - RNA, 18 nt, Human
caugccagugccugguga

SEQ ID NO: 1199358 - RNA, 21 nt, Human
ccagugcuuaaaaaaauuugu

SEQ ID NO: 1199359 - RNA, 22 nt, Human
ccugaaggucucuucucuacuc

SEQ ID NO: 1199360 - RNA, 21 nt, Human
cguaaggaaaauaaaugccag

SEQ ID NO: 1199361 - RNA, 19 nt, Human
gaaaaccuucucguaagga

SEQ ID NO: 1199362 - RNA, 21 nt, Human
gaaaauaaaugccagcucuuc

SEQ ID NO: 1199363 - RNA, 18 nt, Human
gaaggucucuucucuacu

SEQ ID NO: 1199364 - RNA, 30 nt, Human
gugggauggggauaagguggggagaaaaaa

SEQ ID NO: 1199365 - RNA, 19 nt, Human
uaagcuucugguuuaauua

SEQ ID NO: 1199366 - RNA, 23 nt, Human
uacaaagacucuuucuucaugcc

SEQ ID NO: 1199367 - RNA, 21 nt, Human
uacgaaaaccuucucguaagg

SEQ ID NO: 1199368 - RNA, 18 nt, Human
ucaaauccacaaugaaau

SEQ ID NO: 1199369 - RNA, 21 nt, Human
uccacaaugaaauucucucaa

SEQ ID NO: 1199370 - RNA, 18 nt, Human
uccagaguucaaccagau

SEQ ID NO: 1199371 - RNA, 20 nt, Human
ucuacgaaaaccuucucgua

SEQ ID NO: 1199372 - RNA, 18 nt, Human
ucuucaugccagugccug

SEQ ID NO: 1199373 - RNA, 20 nt, Human
ugaacaaacaaauauuacca

SEQ ID NO: 1199374 - RNA, 19 nt, Human
ugggauggggauaaggugg

SEQ ID NO: 1199375 - RNA, 18 nt, Human
uggggauaagguggggag

SEQ ID NO: 1199376 - RNA, 27 nt, Human
uguccauuuacaaagacucuuucuuca

SEQ ID NO: 1199377 - RNA, 23 nt, Human
uucaauguccauuuacaaagacu

SEQ ID NO: 1199378 - RNA, 22 nt, Human
uucaccaaauuuggugagagga

SEQ ID NO: 1199379 - RNA, 20 nt, Human
uucuuuggagccacuacggu

SEQ ID NO: 1199380 - RNA, 18 nt, Human
uuucaaggaaggguaaca

SEQ ID NO: 1199381 - RNA, 20 nt, Human
uuucuuguugcuguacuuug

SEQ ID NO: 1199382 - RNA, 25 nt, Human
uuuuuuuuuucuuuuuuucauuuuu

SEQ ID NO: 1199383 - RNA, 19 nt, Human
uuuuuuuuuuuuuuuccag

SEQ ID NO: 1199384 - RNA, 24 nt, Human
caacaggaagcugcagacucccag

SEQ ID NO: 1199385 - RNA, 19 nt, Human
caggaagcugcagacuccc

SEQ ID NO: 1199386 - RNA, 19 nt, Human
acucugugguccacuggag

SEQ ID NO: 1199387 - RNA, 24 nt, Human
aaaucccucagcagaggugucucu

SEQ ID NO: 1199388 - RNA, 18 nt, Human
aggagcugaaguucugca

SEQ ID NO: 1199389 - RNA, 19 nt, Human
aggaggagcugaaguucug

SEQ ID NO: 1199390 - RNA, 18 nt, Human
uccgcccgcggacagucc

SEQ ID NO: 1199391 - RNA, 21 nt, Human
uccgcggggacuuucucugga

SEQ ID NO: 1199392 - RNA, 20 nt, Human
ggauuuggaagguugucugu

SEQ ID NO: 1199393 - RNA, 19 nt, Human
uagaugaugccaguggaac

SEQ ID NO: 1199394 - RNA, 20 nt, Human
uggaacuuccaaagaagcau

SEQ ID NO: 1199395 - RNA, 23 nt, Human
aaacacucacagaguaguucccg

SEQ ID NO: 1199396 - RNA, 23 nt, Human
aagcacuugguuccaaucccugg

SEQ ID NO: 1199397 - RNA, 22 nt, Human
auccuccuccuccuccucacca

SEQ ID NO: 1199398 - RNA, 18 nt, Human
augguaaagauaaagcac

SEQ ID NO: 1199399 - RNA, 21 nt, Human
cagaguaguucccgugauuuu

SEQ ID NO: 1199400 - RNA, 21 nt, Human
cagcaugccucaaaauaucaa

SEQ ID NO: 1199401 - RNA, 22 nt, Human
cauccuccuccuccuccucacc

SEQ ID NO: 1199402 - RNA, 22 nt, Human
ccucaaaauaucaacauccucc

SEQ ID NO: 1199403 - RNA, 22 nt, Human
cuccuccucaccaucaucaguc

SEQ ID NO: 1199404 - RNA, 19 nt, Human
cugaagguacuucuacaac

SEQ ID NO: 1199405 - RNA, 24 nt, Human
uaaaacacucacagaguaguuccc

SEQ ID NO: 1199406 - RNA, 23 nt, Human
uccuccucaccaucaucagucgc

SEQ ID NO: 1199407 - RNA, 18 nt, Human
ucgguuucucagugucuu

SEQ ID NO: 1199408 - RNA, 25 nt, Human
uuccaaucccuggagauucuaauuc

SEQ ID NO: 1199409 - RNA, 23 nt, Human
aaggccacauuucgagccacaug

SEQ ID NO: 1199410 - RNA, 20 nt, Human
accccauuuugcccuccccc

SEQ ID NO: 1199411 - RNA, 18 nt, Human
auuuugcccucccccauc

SEQ ID NO: 1199412 - RNA, 23 nt, Human
caacacccagucccagauccaaa

SEQ ID NO: 1199413 - RNA, 22 nt, Human
cacccagucccagauccaaagc

SEQ ID NO: 1199414 - RNA, 19 nt, Human
cacccugcugcuguuccca

SEQ ID NO: 1199415 - RNA, 22 nt, Human
caccgcacccugcugcuguucc

SEQ ID NO: 1199416 - RNA, 23 nt, Human
ccauuuugcccucccccaucaac

SEQ ID NO: 1199417 - RNA, 22 nt, Human
cccaucaacacccagucccaga

SEQ ID NO: 1199418 - RNA, 20 nt, Human
cccugcugcuguucccaagc

SEQ ID NO: 1199419 - RNA, 23 nt, Human
ccgcacccugcugcuguuccccc

SEQ ID NO: 1199420 - RNA, 29 nt, Human
cugcuguucccaagccucucggugaccac

SEQ ID NO: 1199421 - RNA, 23 nt, Human
gcaaaagcuuccuuaacugcgga

SEQ ID NO: 1199422 - RNA, 18 nt, Human
uauggaguucaaugcccg

SEQ ID NO: 1199423 - RNA, 18 nt, Human
ucccagauccaaagccuc

SEQ ID NO: 1199424 - RNA, 22 nt, Human
uccuuaacugcggacggaccuu

SEQ ID NO: 1199425 - RNA, 20 nt, Human
ugcaaaagcuuccuuaacug

SEQ ID NO: 1199426 - RNA, 21 nt, Human
uggccaccgcacccugcugcu

SEQ ID NO: 1199427 - RNA, 26 nt, Human
uuggccaccgcacccugcugcuguuc

SEQ ID NO: 1199428 - RNA, 21 nt, Human
agcaaccccaugcaacacuga

SEQ ID NO: 1199429 - RNA, 25 nt, Human
agcaaccccaugcaacacugaggac

SEQ ID NO: 1199430 - RNA, 25 nt, Human
augcaacacugaggacauccccuca

SEQ ID NO: 1199431 - RNA, 19 nt, Human
cagcaaccccaugcaacac

SEQ ID NO: 1199432 - RNA, 26 nt, Human
caggaagagcaggaugucacugaggc

SEQ ID NO: 1199433 - RNA, 23 nt, Human
caggaagcccaggauguaaacca

SEQ ID NO: 1199434 - RNA, 18 nt, Human
caggccgaugcuuucugc

SEQ ID NO: 1199435 - RNA, 23 nt, Human
cauugcagauggggccuccuggg

SEQ ID NO: 1199436 - RNA, 21 nt, Human
ccacagcaaccccaugcaaca

SEQ ID NO: 1199437 - RNA, 22 nt, Human
ccccuuccccucauucuccaaa

SEQ ID NO: 1199438 - RNA, 22 nt, Human
ccugcucuggggcucugccuuu

SEQ ID NO: 1199439 - RNA, 21 nt, Human
ccugggugcuggaaccagugu

SEQ ID NO: 1199440 - RNA, 24 nt, Human
ccuuccccucauucuccaaaaugg

SEQ ID NO: 1199441 - RNA, 22 nt, Human
cucggccuucaccuucauuggc

SEQ ID NO: 1199442 - RNA, 20 nt, Human
cuggaaccagugucgcagag

SEQ ID NO: 1199443 - RNA, 22 nt, Human
gaugauguaaugcucggccuuc

SEQ ID NO: 1199444 - RNA, 22 nt, Human
gauggggccuccugggugcugg

SEQ ID NO: 1199445 - RNA, 24 nt, Human
gcauugcagauggggccuccuggg

SEQ ID NO: 1199446 - RNA, 23 nt, Human
gcugccgguccugccacuccaga

SEQ ID NO: 1199447 - RNA, 22 nt, Human
ggacauccccucaccucucagg

SEQ ID NO: 1199448 - RNA, 21 nt, Human
uccugggugcuggaaccagug

SEQ ID NO: 1199449 - RNA, 20 nt, Human
uggcauugcagauggggccu

SEQ ID NO: 1199450 - RNA, 20 nt, Human
ugucgcagaggguauggcuu

SEQ ID NO: 1199451 - RNA, 21 nt, Human
uguuucuggcauugcagaugg

SEQ ID NO: 1199452 - RNA, 19 nt, Human
uuccuguuucugagucucc

SEQ ID NO: 1199453 - RNA, 20 nt, Human
uugccgccggcgcccgggcc

SEQ ID NO: 1199454 - RNA, 23 nt, Human
uuucugcuuuuggccccuucccc

SEQ ID NO: 1199455 - RNA, 23 nt, Human
uccucacacuccccaugcacaaa

SEQ ID NO: 1199456 - RNA, 20 nt, Human
agccagacgccugucuuugg

SEQ ID NO: 1199457 - RNA, 21 nt, Human
ggcucuggacuccugcagcca

SEQ ID NO: 1199458 - RNA, 21 nt, Human
aacugcuuucuuaauuaaaug

SEQ ID NO: 1199459 - RNA, 23 nt, Human
acccacccucucuugccaacacc

SEQ ID NO: 1199460 - RNA, 19 nt, Human
agccaaguggugaauccag

SEQ ID NO: 1199461 - RNA, 19 nt, Human
agggaggacucgcuugguc

SEQ ID NO: 1199462 - RNA, 18 nt, Human
auucuuauccuuucuguu

SEQ ID NO: 1199463 - RNA, 24 nt, Human
caacaccacagguaagugcuucca

SEQ ID NO: 1199464 - RNA, 19 nt, Human
caccacacggccacccacc

SEQ ID NO: 1199465 - RNA, 22 nt, Human
caccacacggccacccacccuc

SEQ ID NO: 1199466 - RNA, 21 nt, Human
caccacagguaagugcuucca

SEQ ID NO: 1199467 - RNA, 21 nt, Human
cacccucucuugccaacacca

SEQ ID NO: 1199468 - RNA, 21 nt, Human
cccacccucucuugccaacac

SEQ ID NO: 1199469 - RNA, 19 nt, Human
ccugacaccacacggccac

SEQ ID NO: 1199470 - RNA, 23 nt, Human
ccugacaccacacggccacccac

SEQ ID NO: 1199471 - RNA, 22 nt, Human
ccuuuaaaauagagaggacggg

SEQ ID NO: 1199472 - RNA, 22 nt, Human
cggccacccacccucucuugcc

SEQ ID NO: 1199473 - RNA, 23 nt, Human
gagaucuucagggagaucaggag

SEQ ID NO: 1199474 - RNA, 26 nt, Human
gagcaagucccuuagacuuaagauuu

SEQ ID NO: 1199475 - RNA, 19 nt, Human
ggagggaggacucgcuugg

SEQ ID NO: 1199476 - RNA, 23 nt, Human
ggcagaggcuguagaugauucau

SEQ ID NO: 1199477 - RNA, 19 nt, Human
uaaaauagagaggacgggu

SEQ ID NO: 1199478 - RNA, 21 nt, Human
uccaauugggagggaggacuc

SEQ ID NO: 1199479 - RNA, 21 nt, Human
ugaacagcaacugcuuucuua

SEQ ID NO: 1199480 - RNA, 19 nt, Human
ugacaccacacggccaccc

SEQ ID NO: 1199481 - RNA, 20 nt, Human
ugacuucuggccacuuggcu

SEQ ID NO: 1199482 - RNA, 24 nt, Human
gcaaggaagggccacagucaggga

SEQ ID NO: 1199483 - RNA, 22 nt, Human
ggaaggcaaggaagggccacag

SEQ ID NO: 1199484 - RNA, 18 nt, Human
ggaccuggaaggcaagga

SEQ ID NO: 1199485 - RNA, 21 nt, Human
uggaaggcaaggaagggccac

SEQ ID NO: 1199486 - RNA, 22 nt, Human
accagagggacagcgcacccuc

SEQ ID NO: 1199487 - RNA, 24 nt, Human
cacgaacuccaguacuggucugcg

SEQ ID NO: 1199488 - RNA, 23 nt, Human
cacucugcuaacuuccuggcacu

SEQ ID NO: 1199489 - RNA, 20 nt, Human
cagagggacagcgcacccuc

SEQ ID NO: 1199490 - RNA, 18 nt, Human
cagcaccacgaacuccag

SEQ ID NO: 1199491 - RNA, 21 nt, Human
ccacucugcuaacuuccuggc

SEQ ID NO: 1199492 - RNA, 18 nt, Human
ccagcaccacgaacucca

SEQ ID NO: 1199493 - RNA, 20 nt, Human
cccuccggucgaagcggggu

SEQ ID NO: 1199494 - RNA, 19 nt, Human
ccuacccggggcccagagu

SEQ ID NO: 1199495 - RNA, 19 nt, Human
ccuccggucgaagcggggu

SEQ ID NO: 1199496 - RNA, 21 nt, Human
ccuggcacuuacguuuccuac

SEQ ID NO: 1199497 - RNA, 27 nt, Human
cucauaaugcugcuuuuuguggcaguc

SEQ ID NO: 1199498 - RNA, 19 nt, Human
cuuccagcaccacgaacuc

SEQ ID NO: 1199499 - RNA, 21 nt, Human
gggcccagagucgggcggcgg

SEQ ID NO: 1199500 - RNA, 22 nt, Human
uaacuuccuggcacuuacguuu

SEQ ID NO: 1199501 - RNA, 19 nt, Human
uacuggucugcguuguagg

SEQ ID NO: 1199502 - RNA, 20 nt, Human
uccagcaccacgaacuccag

SEQ ID NO: 1199503 - RNA, 23 nt, Human
ucuuccagcaccacgaacuccag

SEQ ID NO: 1199504 - RNA, 18 nt, Human
aucuacucccucacucca

SEQ ID NO: 1199505 - RNA, 24 nt, Human
ccccuggccuucauccugcccauc

SEQ ID NO: 1199506 - RNA, 23 nt, Human
ccuagugaugcuuaauccuuuuc

SEQ ID NO: 1199507 - RNA, 25 nt, Human
ccucugaucagaacucacuuggagc

SEQ ID NO: 1199508 - RNA, 19 nt, Human
uaucuacucccucacucca

SEQ ID NO: 1199509 - RNA, 18 nt, Human
uguuuuaucuacucccuc

SEQ ID NO: 1199510 - RNA, 24 nt, Human
uguuuuaucuacucccucacucca

SEQ ID NO: 1199511 - RNA, 23 nt, Human
aacaucucuagagcacagcagcg

SEQ ID NO: 1199512 - RNA, 21 nt, Human
acaaaacaucucuagagcaca

SEQ ID NO: 1199513 - RNA, 22 nt, Human
agggccacugcuaguucuuggu

SEQ ID NO: 1199514 - RNA, 21 nt, Human
aggggaaaagguaaaauugga

SEQ ID NO: 1199515 - RNA, 18 nt, Human
agguggcuuuuauuugca

SEQ ID NO: 1199516 - RNA, 20 nt, Human
aguagaggaugcacggcccu

SEQ ID NO: 1199517 - RNA, 21 nt, Human
aguuugaacaagcuccuccca

SEQ ID NO: 1199518 - RNA, 22 nt, Human
caaaaaaaaaacaacaaaccga

SEQ ID NO: 1199519 - RNA, 21 nt, Human
caaaacaucucuagagcacag

SEQ ID NO: 1199520 - RNA, 28 nt, Human
caacaugaacaaauuagaaccuuaaaua

SEQ ID NO: 1199521 - RNA, 18 nt, Human
caccagaaguggcugugu

SEQ ID NO: 1199522 - RNA, 18 nt, Human
cacguagccucuccuccu

SEQ ID NO: 1199523 - RNA, 20 nt, Human
cacguagccucuccuccugu

SEQ ID NO: 1199524 - RNA, 20 nt, Human
cacguugccucuccuccugu

SEQ ID NO: 1199525 - RNA, 23 nt, Human
cacucuggcuuugccuuugacuc

SEQ ID NO: 1199526 - RNA, 22 nt, Human
cacugcuucagcccuacaggaa

SEQ ID NO: 1199527 - RNA, 22 nt, Human
cagcccuacaggaagaacaaaa

SEQ ID NO: 1199528 - RNA, 24 nt, Human
caggaagaacaaaacaucucuaga

SEQ ID NO: 1199529 - RNA, 26 nt, Human
caggaagaacaaaacaucucuagagc

SEQ ID NO: 1199530 - RNA, 21 nt, Human
ccagaaguggcugugucaggg

SEQ ID NO: 1199531 - RNA, 20 nt, Human
ccccaggugagugguaacca

SEQ ID NO: 1199532 - RNA, 18 nt, Human
cccguagauaccuguugc

SEQ ID NO: 1199533 - RNA, 21 nt, Human
cccguagauaccuguugcuga

SEQ ID NO: 1199534 - RNA, 22 nt, Human
cccguagauaccuguugcugaa

SEQ ID NO: 1199535 - RNA, 23 nt, Human
ccuguucacguugccucuccucc

SEQ ID NO: 1199536 - RNA, 23 nt, Human
cguagccucuccuccugucuccu

SEQ ID NO: 1199537 - RNA, 21 nt, Human
cuaagugcccaacaugaacaa

SEQ ID NO: 1199538 - RNA, 21 nt, Human
cuagagcacagcagcguuccu

SEQ ID NO: 1199539 - RNA, 18 nt, Human
cucacaaaaaaaaaacaa

SEQ ID NO: 1199540 - RNA, 24 nt, Human
cucacaaaaaaaaaacaacaaacc

SEQ ID NO: 1199541 - RNA, 21 nt, Human
cuccugucuccuguucaggag

SEQ ID NO: 1199542 - RNA, 21 nt, Human
cucuccagauccuccagggua

SEQ ID NO: 1199543 - RNA, 21 nt, Human
cuggagucaaggggaaaaggu

SEQ ID NO: 1199544 - RNA, 22 nt, Human
cuguuagcuccugcuggaaugc

SEQ ID NO: 1199545 - RNA, 23 nt, Human
cuguucacguagccucuccuccu

SEQ ID NO: 1199546 - RNA, 23 nt, Human
cuguucacguugccucuccuccu

SEQ ID NO: 1199547 - RNA, 22 nt, Human
gccuggagcugucuucccacac

SEQ ID NO: 1199548 - RNA, 26 nt, Human
gcugcacucuggcuuugccuuugacu

SEQ ID NO: 1199549 - RNA, 26 nt, Human
gcuggaaugccagggcucuuccucug

SEQ ID NO: 1199550 - RNA, 21 nt, Human
ggaaugccagggcucuuccuc

SEQ ID NO: 1199551 - RNA, 22 nt, Human
ggccagggguucagccgucugg

SEQ ID NO: 1199552 - RNA, 19 nt, Human
ggcucuggggccagggguu

SEQ ID NO: 1199553 - RNA, 23 nt, Human
gggcucuggggccagggguucag

SEQ ID NO: 1199554 - RNA, 21 nt, Human
ggucucaucuuguagcugcuc

SEQ ID NO: 1199555 - RNA, 20 nt, Human
guagcagaccaguguuaaaa

SEQ ID NO: 1199556 - RNA, 22 nt, Human
ucacaaaaaaaaaacaacaaac

SEQ ID NO: 1199557 - RNA, 21 nt, Human
ucacguagccucuccuccugu

SEQ ID NO: 1199558 - RNA, 20 nt, Human
uccaagcugcacucuggcuu

SEQ ID NO: 1199559 - RNA, 19 nt, Human
ucucaucuuguagcugcuc

SEQ ID NO: 1199560 - RNA, 28 nt, Human
ucucuagcuccuuccuuagggggccgcc

SEQ ID NO: 1199561 - RNA, 22 nt, Human
ucuggagucaaggggaaaaggu

SEQ ID NO: 1199562 - RNA, 20 nt, Human
ucuguaccagauguaucuca

SEQ ID NO: 1199563 - RNA, 23 nt, Human
ucuguaccagauguaucucaugc

SEQ ID NO: 1199564 - RNA, 22 nt, Human
ugaacaagcuccucccaagcuu

SEQ ID NO: 1199565 - RNA, 23 nt, Human
ugagaaggccuaacaaaauggca

SEQ ID NO: 1199566 - RNA, 21 nt, Human
ugagugguaaccaccagaagu

SEQ ID NO: 1199567 - RNA, 22 nt, Human
ugaguugacugauuauugcgga

SEQ ID NO: 1199568 - RNA, 21 nt, Human
ugccuuugacucagguggcuu

SEQ ID NO: 1199569 - RNA, 25 nt, Human
ugcuccaagcugcacucuggcuuug

SEQ ID NO: 1199570 - RNA, 22 nt, Human
ugcuucagcccuacaggaagaa

SEQ ID NO: 1199571 - RNA, 24 nt, Human
uggaaugccagggcucuuccucug

SEQ ID NO: 1199572 - RNA, 26 nt, Human
uggaaugccagggcucuuccucugac

SEQ ID NO: 1199573 - RNA, 25 nt, Human
uguaccagauguaucucaugcuucu

SEQ ID NO: 1199574 - RNA, 22 nt, Human
uguuaaaaagucuggagucaag

SEQ ID NO: 1199575 - RNA, 24 nt, Human
uguucaggagacucaacaucugau

SEQ ID NO: 1199576 - RNA, 23 nt, Human
uuaacaguagcagaccaguguua

SEQ ID NO: 1199577 - RNA, 23 nt, Human
uucagcccuacaggaagaacaaa

SEQ ID NO: 1199578 - RNA, 19 nt, Human
uuccaccucagccuggagc

SEQ ID NO: 1199579 - RNA, 24 nt, Human
uuccucugccaauaugcuuuuaac

SEQ ID NO: 1199580 - RNA, 25 nt, Human
uucuuugcuccaagcugcacucugg

SEQ ID NO: 1199581 - RNA, 18 nt, Human
uugcuccaagcugcacuc

SEQ ID NO: 1199582 - RNA, 18 nt, Human
aacuccuagcccaguccc

SEQ ID NO: 1199583 - RNA, 19 nt, Human
acccugauguccccacuuc

SEQ ID NO: 1199584 - RNA, 19 nt, Human
aggagcagaggcgagucug

SEQ ID NO: 1199585 - RNA, 24 nt, Human
auuucucuuccuuucuucucgcug

SEQ ID NO: 1199586 - RNA, 19 nt, Human
caacuccuagcccaguccc

SEQ ID NO: 1199587 - RNA, 19 nt, Human
cacacccaagcuccugggc

SEQ ID NO: 1199588 - RNA, 21 nt, Human
cacacccugcucgucagcaca

SEQ ID NO: 1199589 - RNA, 22 nt, Human
cacagacucacccccacucucu

SEQ ID NO: 1199590 - RNA, 20 nt, Human
cacucucuggggcuggggcc

SEQ ID NO: 1199591 - RNA, 22 nt, Human
cagcacacccaagcuccugggc

SEQ ID NO: 1199592 - RNA, 23 nt, Human
cauccuccauuccguccaacucc

SEQ ID NO: 1199593 - RNA, 23 nt, Human
ccaaacacagacucacccccacu

SEQ ID NO: 1199594 - RNA, 20 nt, Human
ccaacuccuagcccaguccc

SEQ ID NO: 1199595 - RNA, 24 nt, Human
ccacuggaccacaggagcagaggc

SEQ ID NO: 1199596 - RNA, 19 nt, Human
ccacuuccaaguccugacu

SEQ ID NO: 1199597 - RNA, 22 nt, Human
ccacuuccaaguccugacuccu

SEQ ID NO: 1199598 - RNA, 20 nt, Human
ccagcucccagccugggagu

SEQ ID NO: 1199599 - RNA, 19 nt, Human
ccucuggcuucuucuggga

SEQ ID NO: 1199600 - RNA, 21 nt, Human
ccugggcuacuggggcuccua

SEQ ID NO: 1199601 - RNA, 21 nt, Human
ccuuucuucucgcuguccucc

SEQ ID NO: 1199602 - RNA, 21 nt, Human
cgcugcagcuucuccauggcc

SEQ ID NO: 1199603 - RNA, 22 nt, Human
cgcugcagcuucuccauggccc

SEQ ID NO: 1199604 - RNA, 23 nt, Human
cuccccaaacacagacucacccc

SEQ ID NO: 1199605 - RNA, 22 nt, Human
cuccuagcccagucccgggggc

SEQ ID NO: 1199606 - RNA, 24 nt, Human
cucuuccuuucuucucgcuguccu

SEQ ID NO: 1199607 - RNA, 22 nt, Human
cugcagcuucuccauggccccc

SEQ ID NO: 1199608 - RNA, 24 nt, Human
cuggggcuggggccgcuaccucug

SEQ ID NO: 1199609 - RNA, 21 nt, Human
cuuccuuucuucucgcugucc

SEQ ID NO: 1199610 - RNA, 25 nt, Human
gcccacacuuugcauuucucuuccu

SEQ ID NO: 1199611 - RNA, 25 nt, Human
gcugcagcuucuccauggcccccug

SEQ ID NO: 1199612 - RNA, 18 nt, Human
gcugcccacacuuugcau

SEQ ID NO: 1199613 - RNA, 20 nt, Human
ggcccggugggucuccccaa

SEQ ID NO: 1199614 - RNA, 23 nt, Human
gggcuacuggggcuccuagaguc

SEQ ID NO: 1199615 - RNA, 21 nt, Human
ggggcuccuagagugggcuca

SEQ ID NO: 1199616 - RNA, 20 nt, Human
ggggcuggggccgcuaccuc

SEQ ID NO: 1199617 - RNA, 24 nt, Human
gugggucuccccaaacacagacuc

SEQ ID NO: 1199618 - RNA, 22 nt, Human
uccccaaacacagacucacccc

SEQ ID NO: 1199619 - RNA, 19 nt, Human
uccggccacuggaccacag

SEQ ID NO: 1199620 - RNA, 21 nt, Human
uccggccacuggaccacagga

SEQ ID NO: 1199621 - RNA, 21 nt, Human
ucgcugcagcuucuccauggc

SEQ ID NO: 1199622 - RNA, 23 nt, Human
ucuccccaaacacagacucaccc

SEQ ID NO: 1199623 - RNA, 20 nt, Human
ugacuccuuugagccauccc

SEQ ID NO: 1199624 - RNA, 22 nt, Human
ugccagggcagguauccagcuc

SEQ ID NO: 1199625 - RNA, 26 nt, Human
uggauuuccuucagcuacccugaugu

SEQ ID NO: 1199626 - RNA, 24 nt, Human
uggggcuggggccgcuaccucugg

SEQ ID NO: 1199627 - RNA, 24 nt, Human
uguccggccacuggaccacaggag

SEQ ID NO: 1199628 - RNA, 18 nt, Human
uguggauuuccuucagcu

SEQ ID NO: 1199629 - RNA, 20 nt, Human
uuccguccaacuccuagccc

SEQ ID NO: 1199630 - RNA, 18 nt, Human
uuggcggcugcccacacu

SEQ ID NO: 1199631 - RNA, 20 nt, Human
uuggcggcugcccacacuuu

SEQ ID NO: 1199632 - RNA, 22 nt, Human
agcugccuucuucaccugaagc

SEQ ID NO: 1199633 - RNA, 21 nt, Human
gaaguuuuuggaccagccuuc

SEQ ID NO: 1199634 - RNA, 26 nt, Human
gagcugccuucuucaccugaagccga

SEQ ID NO: 1199635 - RNA, 22 nt, Human
uaagggaaucagaacuuccccu

SEQ ID NO: 1199636 - RNA, 21 nt, Human
ucacugguuuccucugaucgu

SEQ ID NO: 1199637 - RNA, 25 nt, Human
uuggaccagccuucuguuuuugagu

SEQ ID NO: 1199638 - RNA, 27 nt, Human
uuuuuggaccagccuucuguuuuugag

SEQ ID NO: 1199639 - RNA, 19 nt, Human
aagcgcaacucugagaaca

SEQ ID NO: 1199640 - RNA, 23 nt, Human
acucugagaacacacugagagaa

SEQ ID NO: 1199641 - RNA, 25 nt, Human
acucugagaacacacugagagaaaa

SEQ ID NO: 1199642 - RNA, 20 nt, Human
agguagcacaggaaugaucc

SEQ ID NO: 1199643 - RNA, 22 nt, Human
caaaagcgcaacucugagaaca

SEQ ID NO: 1199644 - RNA, 21 nt, Human
gagcugugcgguucuaaaggg

SEQ ID NO: 1199645 - RNA, 22 nt, Human
gaucuugaucggaacuugggug

SEQ ID NO: 1199646 - RNA, 20 nt, Human
gggcuggaaggaaagguggg

SEQ ID NO: 1199647 - RNA, 21 nt, Human
uagcacaggaaugauccucuu

SEQ ID NO: 1199648 - RNA, 23 nt, Human
ucggaacuuggguggagauucca

SEQ ID NO: 1199649 - RNA, 25 nt, Human
ucugagaacacacugagagaaaaca

SEQ ID NO: 1199650 - RNA, 26 nt, Human
ugaagcagguagcacaggaaugaucc

SEQ ID NO: 1199651 - RNA, 21 nt, Human
ugggaaccacuccucaaaagc

SEQ ID NO: 1199652 - RNA, 23 nt, Human
ugugaagcagguagcacaggaau

SEQ ID NO: 1199653 - RNA, 23 nt, Human
uugguaguaguacggucaccauu

SEQ ID NO: 1199654 - RNA, 19 nt, Human
caacuuggggcauugaugu

SEQ ID NO: 1199655 - RNA, 19 nt, Human
cagaggucucucuucauuu

SEQ ID NO: 1199656 - RNA, 20 nt, Human
gccuugguuccuuuagucug

SEQ ID NO: 1199657 - RNA, 25 nt, Human
uaaguuggggauccagaggucucuc

SEQ ID NO: 1199658 - RNA, 18 nt, Human
ugccuugguuccuuuagu

SEQ ID NO: 1199659 - RNA, 19 nt, Human
ugccuugguuccuuuaguc

SEQ ID NO: 1199660 - RNA, 24 nt, Human
aaaaaagaaagccaaaguggucca

SEQ ID NO: 1199661 - RNA, 24 nt, Human
aaaaaguacugauuuuaaaaacua

SEQ ID NO: 1199662 - RNA, 26 nt, Human
aaacaguuaugagaccauucuuccac

SEQ ID NO: 1199663 - RNA, 24 nt, Human
aaaugggucucaaaauucugugac

SEQ ID NO: 1199664 - RNA, 21 nt, Human
aacuuuuuaaaugggucucaa

SEQ ID NO: 1199665 - RNA, 23 nt, Human
aaugggucucaaaauucugugac

SEQ ID NO: 1199666 - RNA, 24 nt, Human
aaugggucucaaaauucugugaca

SEQ ID NO: 1199667 - RNA, 23 nt, Human
agaaagccaaagugguccacaaa

SEQ ID NO: 1199668 - RNA, 26 nt, Human
agaaagccaaagugguccacaaaaca

SEQ ID NO: 1199669 - RNA, 23 nt, Human
agauccuugacagacacauucuu

SEQ ID NO: 1199670 - RNA, 18 nt, Human
caaaacauucuccuuucc

SEQ ID NO: 1199671 - RNA, 19 nt, Human
caaagauccuugacagaca

SEQ ID NO: 1199672 - RNA, 21 nt, Human
caaaguugccacgacaaagau

SEQ ID NO: 1199673 - RNA, 22 nt, Human
caaauuuuuggccaaguuguuu

SEQ ID NO: 1199674 - RNA, 24 nt, Human
cacgacaaagauccuugacagaca

SEQ ID NO: 1199675 - RNA, 25 nt, Human
cacgacaaagauccuugacagacac

SEQ ID NO: 1199676 - RNA, 22 nt, Human
cagcaaaguugccacgacaaag

SEQ ID NO: 1199677 - RNA, 22 nt, Human
cagccuccuucucaaauuuuca

SEQ ID NO: 1199678 - RNA, 19 nt, Human
cauggugccuuuugacaga

SEQ ID NO: 1199679 - RNA, 24 nt, Human
ccagcagugguggacuugcccgaa

SEQ ID NO: 1199680 - RNA, 21 nt, Human
cccacauuguccccaggaaga

SEQ ID NO: 1199681 - RNA, 18 nt, Human
ccccaggaagagcuucac

SEQ ID NO: 1199682 - RNA, 22 nt, Human
cucccauuuuggcuuuuagggg

SEQ ID NO: 1199683 - RNA, 19 nt, Human
cuucugagcuuucuaggca

SEQ ID NO: 1199684 - RNA, 23 nt, Human
gacaaagauccuugacagacaca

SEQ ID NO: 1199685 - RNA, 23 nt, Human
gcaaaaaagaaagccaaaguggu

SEQ ID NO: 1199686 - RNA, 24 nt, Human
gccaaguuguuuccauuaaaaagu

SEQ ID NO: 1199687 - RNA, 22 nt, Human
ggauaauauucauuuagccuuc

SEQ ID NO: 1199688 - RNA, 22 nt, Human
ggcuaccuugccagcuccagca

SEQ ID NO: 1199689 - RNA, 23 nt, Human
gucaccagcaaaguugccacgac

SEQ ID NO: 1199690 - RNA, 18 nt, Human
uaccuugccagcuccagc

SEQ ID NO: 1199691 - RNA, 21 nt, Human
uaccuugccagcuccagcagc

SEQ ID NO: 1199692 - RNA, 18 nt, Human
uagccuucugagcuuucu

SEQ ID NO: 1199693 - RNA, 24 nt, Human
uauuagggauaauauucauuuagc

SEQ ID NO: 1199694 - RNA, 25 nt, Human
uauuagggauaauauucauuuagcc

SEQ ID NO: 1199695 - RNA, 25 nt, Human
uauuagggauaauauucauuuagcc

SEQ ID NO: 1199696 - RNA, 26 nt, Human
uauuagggauaauauucauuuagccu

SEQ ID NO: 1199697 - RNA, 21 nt, Human
ucaccagcaaaguugccacga

SEQ ID NO: 1199698 - RNA, 19 nt, Human
ucacucaaaucuucauggu

SEQ ID NO: 1199699 - RNA, 26 nt, Human
ucucccauuuuggcuuuuaggggaag

SEQ ID NO: 1199700 - RNA, 23 nt, Human
ucuuuugucaaugccacugcauu

SEQ ID NO: 1199701 - RNA, 22 nt, Human
ugaaacaaacaguuaugagacc

SEQ ID NO: 1199702 - RNA, 18 nt, Human
ugagaccauucuuccacc

SEQ ID NO: 1199703 - RNA, 23 nt, Human
ugcaucguugucauuaaccaguc

SEQ ID NO: 1199704 - RNA, 24 nt, Human
ugcaucguugucauuaaccagucu

SEQ ID NO: 1199705 - RNA, 21 nt, Human
ugcauuuguagaucagauggc

SEQ ID NO: 1199706 - RNA, 28 nt, Human
ugccacgacaaagauccuugacagacac

SEQ ID NO: 1199707 - RNA, 24 nt, Human
uggcagguauuagggauaauauuc

SEQ ID NO: 1199708 - RNA, 22 nt, Human
ugguccacaaaacauucuccuu

SEQ ID NO: 1199709 - RNA, 24 nt, Human
uuaaacuuuuuaaaugggucucaa

SEQ ID NO: 1199710 - RNA, 24 nt, Human
uuaagugcccaauugaaacaaaca

SEQ ID NO: 1199711 - RNA, 19 nt, Human
uucauggugccuuuugaca

SEQ ID NO: 1199712 - RNA, 18 nt, Human
uuccaccacugauuaaga

SEQ ID NO: 1199713 - RNA, 23 nt, Human
uucuccuuuccuucugaauguuu

SEQ ID NO: 1199714 - RNA, 23 nt, Human
uugaagcccacauuguccccagg

SEQ ID NO: 1199715 - RNA, 20 nt, Human
uuucuaggcagacuuggcua

SEQ ID NO: 1199716 - RNA, 19 nt, Human
aaggggcgcagugagcugg

SEQ ID NO: 1199717 - RNA, 18 nt, Human
acaccagaucuuccaaag

SEQ ID NO: 1199718 - RNA, 22 nt, Human
acaccagaucuuccaaagcagu

SEQ ID NO: 1199719 - RNA, 18 nt, Human
acagaugucuccgaagga

SEQ ID NO: 1199720 - RNA, 23 nt, Human
accucaccuuucccuccccucaa

SEQ ID NO: 1199721 - RNA, 18 nt, Human
agaucuuccaaagcaguu

SEQ ID NO: 1199722 - RNA, 18 nt, Human
agauggaggcugggccaa

SEQ ID NO: 1199723 - RNA, 22 nt, Human
aggcugggccaccuguucuggg

SEQ ID NO: 1199724 - RNA, 26 nt, Human
aggguccugguuuaauggcucugugu

SEQ ID NO: 1199725 - RNA, 24 nt, Human
augccuggcccugagauucuggcu

SEQ ID NO: 1199726 - RNA, 25 nt, Human
caccacugccgucggcuccggccca

SEQ ID NO: 1199727 - RNA, 20 nt, Human
caccguuggugaugcugauc

SEQ ID NO: 1199728 - RNA, 23 nt, Human
caggguccugguuuaauggcucu

SEQ ID NO: 1199729 - RNA, 20 nt, Human
ccagacagaugucuccgaag

SEQ ID NO: 1199730 - RNA, 19 nt, Human
ccccucaaaaauggaugua

SEQ ID NO: 1199731 - RNA, 21 nt, Human
ccgcugccaccacugccgucg

SEQ ID NO: 1199732 - RNA, 28 nt, Human
ccgcugccaccacugccgucggcuccgg

SEQ ID NO: 1199733 - RNA, 24 nt, Human
ccguaugugggggaugccaacccc

SEQ ID NO: 1199734 - RNA, 22 nt, Human
ccguggaaggcggcaggaagcg

SEQ ID NO: 1199735 - RNA, 23 nt, Human
ccucaccuuucccuccccucaaa

SEQ ID NO: 1199736 - RNA, 24 nt, Human
ccuuccgacaaugaauucugcugc

SEQ ID NO: 1199737 - RNA, 20 nt, Human
cggcaggaagcggaacacgg

SEQ ID NO: 1199738 - RNA, 21 nt, Human
cucaauauacuucugacccca

SEQ ID NO: 1199739 - RNA, 19 nt, Human
cucgggaccccuaaccuca

SEQ ID NO: 1199740 - RNA, 19 nt, Human
cuucugaccccaucauccc

SEQ ID NO: 1199741 - RNA, 18 nt, Human
cuuguaaagccugcucuu

SEQ ID NO: 1199742 - RNA, 19 nt, Human
gaacacggaggccuuuccc

SEQ ID NO: 1199743 - RNA, 20 nt, Human
gacaagcuuguauguagauu

SEQ ID NO: 1199744 - RNA, 18 nt, Human
gagcuacaccagaucuuc

SEQ ID NO: 1199745 - RNA, 21 nt, Human
gagcuacaccagaucuuccaa

SEQ ID NO: 1199746 - RNA, 21 nt, Human
gaugccuggcccugagauucu

SEQ ID NO: 1199747 - RNA, 19 nt, Human
gccgcugccucgcuuucgc

SEQ ID NO: 1199748 - RNA, 26 nt, Human
gccuggcccugagauucuggcuucac

SEQ ID NO: 1199749 - RNA, 21 nt, Human
ggauggauagacaagcuugua

SEQ ID NO: 1199750 - RNA, 21 nt, Human
ggcugggccaccuguucuggg

SEQ ID NO: 1199751 - RNA, 18 nt, Human
guccagggcccagaugcc

SEQ ID NO: 1199752 - RNA, 19 nt, Human
uacaccagaucuuccaaag

SEQ ID NO: 1199753 - RNA, 25 nt, Human
uaccguggaaggcggcaggaagcgg

SEQ ID NO: 1199754 - RNA, 21 nt, Human
uagucuucuuccugaccacac

SEQ ID NO: 1199755 - RNA, 24 nt, Human
uauagucuucuuccugaccacacc

SEQ ID NO: 1199756 - RNA, 19 nt, Human
uauuuccuuccgacaauga

SEQ ID NO: 1199757 - RNA, 25 nt, Human
ucagcuaauauaaguacaguuuuca

SEQ ID NO: 1199758 - RNA, 21 nt, Human
uccaaagcaguuuauauuucc

SEQ ID NO: 1199759 - RNA, 25 nt, Human
ucccucuaagucucucgggaccccc

SEQ ID NO: 1199760 - RNA, 18 nt, Human
uccgggcuggaaaagggg

SEQ ID NO: 1199761 - RNA, 24 nt, Human
ucggucaggauucuuuguuuguuu

SEQ ID NO: 1199762 - RNA, 20 nt, Human
ucuaagucucucgggacccu

SEQ ID NO: 1199763 - RNA, 20 nt, Human
ucucuaaauacccuguuggg

SEQ ID NO: 1199764 - RNA, 21 nt, Human
ucucuaaauacccuguugggg

SEQ ID NO: 1199765 - RNA, 18 nt, Human
ucuuguacagcaacuggg

SEQ ID NO: 1199766 - RNA, 18 nt, Human
ugaagcaucuuguaaagc

SEQ ID NO: 1199767 - RNA, 19 nt, Human
ugacccaauccaggaguaa

SEQ ID NO: 1199768 - RNA, 19 nt, Human
ugagagacgaagauggagg

SEQ ID NO: 1199769 - RNA, 21 nt, Human
ugcacagaagggccagcuuua

SEQ ID NO: 1199770 - RNA, 22 nt, Human
ugccaccacugccgucggcucc

SEQ ID NO: 1199771 - RNA, 22 nt, Human
ugccugcugugcugcuuucugc

SEQ ID NO: 1199772 - RNA, 21 nt, Human
uggugaugcugaucgccagac

SEQ ID NO: 1199773 - RNA, 20 nt, Human
ugguugccugccaggccgca

SEQ ID NO: 1199774 - RNA, 21 nt, Human
ugugaaccuucuugaacagaa

SEQ ID NO: 1199775 - RNA, 22 nt, Human
ugugaagggcuucuagcgguua

SEQ ID NO: 1199776 - RNA, 22 nt, Human
uguuacugugaacccuuuggca

SEQ ID NO: 1199777 - RNA, 22 nt, Human
uucaccguuggugaugcugauc

SEQ ID NO: 1199778 - RNA, 18 nt, Human
uucuggcuucacuaccac

SEQ ID NO: 1199779 - RNA, 19 nt, Human
uugguugguugccugccag

SEQ ID NO: 1199780 - RNA, 21 nt, Human
uugugcucuaugcaggaugga

SEQ ID NO: 1199781 - RNA, 24 nt, Human
ucaaugccauauuccuggggaaac

SEQ ID NO: 1199782 - RNA, 21 nt, Human
ucaaugccauauuccugguua

SEQ ID NO: 1199783 - RNA, 21 nt, Human
accccaagugcagacccgcac

SEQ ID NO: 1199784 - RNA, 19 nt, Human
ccaagugcagacccgcacu

SEQ ID NO: 1199785 - RNA, 23 nt, Human
ccgcacuucguguaacuccuacc

SEQ ID NO: 1199786 - RNA, 23 nt, Human
cgugcugaccaccccaagugcag

SEQ ID NO: 1199787 - RNA, 20 nt, Human
uccacauccaaaguucuguu

SEQ ID NO: 1199788 - RNA, 20 nt, Human
ugaccaccccaagugcagac

SEQ ID NO: 1199789 - RNA, 24 nt, Human
ugcacguuccacauccaaaguucu

SEQ ID NO: 1199790 - RNA, 18 nt, Human
aaauauccaccccaaaag

SEQ ID NO: 1199791 - RNA, 22 nt, Human
agucacugagcaaauauccacc

SEQ ID NO: 1199792 - RNA, 22 nt, Human
caaaagggacauggaggccaau

SEQ ID NO: 1199793 - RNA, 23 nt, Human
ccaauggaccacucagaacacga

SEQ ID NO: 1199794 - RNA, 22 nt, Human
ccacucagaacacgaugaccaa

SEQ ID NO: 1199795 - RNA, 21 nt, Human
cccaaaagggacauggaggcc

SEQ ID NO: 1199796 - RNA, 21 nt, Human
cucagaacacgaugaccaagc

SEQ ID NO: 1199797 - RNA, 19 nt, Human
uccaccccaaaagggacau

SEQ ID NO: 1199798 - RNA, 22 nt, Human
ugagcaaauauccaccccaaaa

SEQ ID NO: 1199799 - RNA, 22 nt, Human
auuaggaacguuugaccaaaca

SEQ ID NO: 1199800 - RNA, 18 nt, Human
caccgacacaauggaaaa

SEQ ID NO: 1199801 - RNA, 20 nt, Human
ccacgugauggaaauggagc

SEQ ID NO: 1199802 - RNA, 19 nt, Human
cccgcgccgcgccgcgccg

SEQ ID NO: 1199803 - RNA, 18 nt, Human
ccgcccgcgccgcgccgc

SEQ ID NO: 1199804 - RNA, 22 nt, Human
cgacacaauggaaaagaaaucc

SEQ ID NO: 1199805 - RNA, 22 nt, Human
cgccgcccgcgccgcgccgcgc

SEQ ID NO: 1199806 - RNA, 23 nt, Human
gaaaagaaauccucgaagguaga

SEQ ID NO: 1199807 - RNA, 19 nt, Human
gaggaggcgccggccuucc

SEQ ID NO: 1199808 - RNA, 18 nt, Human
gcauguaaaaaagacacc

SEQ ID NO: 1199809 - RNA, 22 nt, Human
gcauguaaaaaagacaccgaca

SEQ ID NO: 1199810 - RNA, 22 nt, Human
uaaaaaagacaccgacacaaug

SEQ ID NO: 1199811 - RNA, 24 nt, Human
ucugcaggaaagaagagaaagggc

SEQ ID NO: 1199812 - RNA, 23 nt, Human
uggaaauggagcugcaagugaca

SEQ ID NO: 1199813 - RNA, 23 nt, Human
aaaaaccuuugauggcucacuaa

SEQ ID NO: 1199814 - RNA, 20 nt, Human
aaacagcaaaaagucuaagg

SEQ ID NO: 1199815 - RNA, 23 nt, Human
aaaucacaaaaagcuucuggaac

SEQ ID NO: 1199816 - RNA, 26 nt, Human
aaaucacaaaaagcuucuggaacuua

SEQ ID NO: 1199817 - RNA, 18 nt, Human
aacagacaggacccucag

SEQ ID NO: 1199818 - RNA, 23 nt, Human
aaccaucucuccaagaaaacaga

SEQ ID NO: 1199819 - RNA, 18 nt, Human
aagaaaacagaacauuug

SEQ ID NO: 1199820 - RNA, 21 nt, Human
aagacugaccucuguugagac

SEQ ID NO: 1199821 - RNA, 21 nt, Human
aaucugucuacuguccccccu

SEQ ID NO: 1199822 - RNA, 18 nt, Human
aauuuuaacuaaugucag

SEQ ID NO: 1199823 - RNA, 23 nt, Human
acaaaaagcuucuggaacuuaga

SEQ ID NO: 1199824 - RNA, 24 nt, Human
agaaagguaucuuuugacacccuc

SEQ ID NO: 1199825 - RNA, 18 nt, Human
agacaguuguuaaacucu

SEQ ID NO: 1199826 - RNA, 18 nt, Human
agcaaaaagucuaagguu

SEQ ID NO: 1199827 - RNA, 23 nt, Human
agcaaaaagucuaagguuuuagc

SEQ ID NO: 1199828 - RNA, 19 nt, Human
aggaggagagugcucugcu

SEQ ID NO: 1199829 - RNA, 24 nt, Human
aggcaggcaggcccccuugagcuu

SEQ ID NO: 1199830 - RNA, 20 nt, Human
aggcugcucgggggucaggg

SEQ ID NO: 1199831 - RNA, 21 nt, Human
auaaacagcaaaaagucuaag

SEQ ID NO: 1199832 - RNA, 20 nt, Human
augcugggagcuguagaccg

SEQ ID NO: 1199833 - RNA, 18 nt, Human
auggagcaauaaaaacca

SEQ ID NO: 1199834 - RNA, 22 nt, Human
auuucauucauuucaucuucca

SEQ ID NO: 1199835 - RNA, 23 nt, Human
caaagcaguguuaauaacccuua

SEQ ID NO: 1199836 - RNA, 21 nt, Human
caaaucacaaaaagcuucugg

SEQ ID NO: 1199837 - RNA, 21 nt, Human
cacccacuguccugcacccac

SEQ ID NO: 1199838 - RNA, 20 nt, Human
cagcagcgguggcugcagaa

SEQ ID NO: 1199839 - RNA, 22 nt, Human
cagcauccuccucacaauaucu

SEQ ID NO: 1199840 - RNA, 19 nt, Human
cagcugcaggucuguugga

SEQ ID NO: 1199841 - RNA, 19 nt, Human
caggcccccuugagcugug

SEQ ID NO: 1199842 - RNA, 22 nt, Human
caggcgccccucccccagccuc

SEQ ID NO: 1199843 - RNA, 24 nt, Human
cagggacauuuaagucugcagagg

SEQ ID NO: 1199844 - RNA, 24 nt, Human
ccagagguggagccuacagaggca

SEQ ID NO: 1199845 - RNA, 25 nt, Human
ccaucagccucugccuauauaccuc

SEQ ID NO: 1199846 - RNA, 24 nt, Human
ccaucucuccaagaaaacagaaca

SEQ ID NO: 1199847 - RNA, 22 nt, Human
ccccagagguggagccuacaga

SEQ ID NO: 1199848 - RNA, 19 nt, Human
cccccucccacuaucuuag

SEQ ID NO: 1199849 - RNA, 18 nt, Human
cccuacucccaaaucaca

SEQ ID NO: 1199850 - RNA, 20 nt, Human
cccuacugggggaugccucc

SEQ ID NO: 1199851 - RNA, 25 nt, Human
ccucugaaguaauuuagcucaaccc

SEQ ID NO: 1199852 - RNA, 18 nt, Human
ccugggugucagcagcgg

SEQ ID NO: 1199853 - RNA, 19 nt, Human
cggcaggcgccccuccccc

SEQ ID NO: 1199854 - RNA, 20 nt, Human
cucacaaaauaucaaauaau

SEQ ID NO: 1199855 - RNA, 19 nt, Human
cucgcgcacggugugcugc

SEQ ID NO: 1199856 - RNA, 18 nt, Human
cucuguuuuuuccccauc

SEQ ID NO: 1199857 - RNA, 21 nt, Human
cugccccuacugggggaugcc

SEQ ID NO: 1199858 - RNA, 21 nt, Human
cugccccuacugggggaugcc

SEQ ID NO: 1199859 - RNA, 24 nt, Human
cugcugccugaucguuccucugga

SEQ ID NO: 1199860 - RNA, 20 nt, Human
cuuuguuccguugcugguga

SEQ ID NO: 1199861 - RNA, 21 nt, Human
gaagacgagugaagaugauca

SEQ ID NO: 1199862 - RNA, 20 nt, Human
gaagccuucuucucucaacu

SEQ ID NO: 1199863 - RNA, 23 nt, Human
gaagucacugagcauucaaggaa

SEQ ID NO: 1199864 - RNA, 18 nt, Human
gacacuggcuaacucucc

SEQ ID NO: 1199865 - RNA, 19 nt, Human
gagaaauccuuauucugcc

SEQ ID NO: 1199866 - RNA, 19 nt, Human
gagaugccaucaaacaugg

SEQ ID NO: 1199867 - RNA, 24 nt, Human
gagcaauaaaaaccaucucuccaa

SEQ ID NO: 1199868 - RNA, 22 nt, Human
gcacccacugucuggcacuccc

SEQ ID NO: 1199869 - RNA, 19 nt, Human
gccacugguuuccaaacag

SEQ ID NO: 1199870 - RNA, 22 nt, Human
gcuuaaaaaccuuugauggcuc

SEQ ID NO: 1199871 - RNA, 21 nt, Human
ggaaaaggacaaagaagaaag

SEQ ID NO: 1199872 - RNA, 26 nt, Human
ggagacagguaagaagucacugagca

SEQ ID NO: 1199873 - RNA, 18 nt, Human
ggcaggcgccccuccccc

SEQ ID NO: 1199874 - RNA, 19 nt, Human
ggcuaguacagaaaaaggc

SEQ ID NO: 1199875 - RNA, 21 nt, Human
gggcucaugggugcagguguu

SEQ ID NO: 1199876 - RNA, 20 nt, Human
ggugcugcauugcaguuuga

SEQ ID NO: 1199877 - RNA, 21 nt, Human
gugaggcacuguguuccuuug

SEQ ID NO: 1199878 - RNA, 20 nt, Human
guuccuuuggaggaggagag

SEQ ID NO: 1199879 - RNA, 19 nt, Human
uaacagacaggacccucag

SEQ ID NO: 1199880 - RNA, 21 nt, Human
uaacagacaggacccucagcu

SEQ ID NO: 1199881 - RNA, 23 nt, Human
uaacauaaacagcaaaaagucua

SEQ ID NO: 1199882 - RNA, 18 nt, Human
uaagguuuuagccugaaa

SEQ ID NO: 1199883 - RNA, 21 nt, Human
uaccaaauaauccacauacac

SEQ ID NO: 1199884 - RNA, 23 nt, Human
uagaagauauuauaauuucugau

SEQ ID NO: 1199885 - RNA, 18 nt, Human
ucagauggaaaugcagaa

SEQ ID NO: 1199886 - RNA, 20 nt, Human
uccaaguacacuagcuagug

SEQ ID NO: 1199887 - RNA, 20 nt, Human
ucccaaaucacaaaaagcuu

SEQ ID NO: 1199888 - RNA, 18 nt, Human
ucccccagccucggugcu

SEQ ID NO: 1199889 - RNA, 19 nt, Human
uccccccaggugagucccu

SEQ ID NO: 1199890 - RNA, 24 nt, Human
uccucacaauaucucugagagaug

SEQ ID NO: 1199891 - RNA, 24 nt, Human
ucucagaucuccagcugcgugcug

SEQ ID NO: 1199892 - RNA, 21 nt, Human
ucucuggaucuuugcugggga

SEQ ID NO: 1199893 - RNA, 21 nt, Human
ucucuguggugaagacugacc

SEQ ID NO: 1199894 - RNA, 20 nt, Human
ucugcauucuucacauaguu

SEQ ID NO: 1199895 - RNA, 19 nt, Human
ucugcguugcucaugcugg

SEQ ID NO: 1199896 - RNA, 21 nt, Human
ucugugcccugcccccagagg

SEQ ID NO: 1199897 - RNA, 21 nt, Human
ucuuugacuaggaaagggaac

SEQ ID NO: 1199898 - RNA, 24 nt, Human
ugacaaaggaaaaggacaaagaag

SEQ ID NO: 1199899 - RNA, 19 nt, Human
ugacccgguuuuccaggug

SEQ ID NO: 1199900 - RNA, 20 nt, Human
ugacccgguuuuccaggugu

SEQ ID NO: 1199901 - RNA, 22 nt, Human
ugaccugcaaaugcugcugccu

SEQ ID NO: 1199902 - RNA, 26 nt, Human
ugagaaaugagguaaaaaaacuucaa

SEQ ID NO: 1199903 - RNA, 21 nt, Human
ugaguggcucucuggaucuuu

SEQ ID NO: 1199904 - RNA, 18 nt, Human
ugcagugcagcauccucc

SEQ ID NO: 1199905 - RNA, 23 nt, Human
ugcagugcagcauccuccucaca

SEQ ID NO: 1199906 - RNA, 18 nt, Human
ugcccugcccccagaggu

SEQ ID NO: 1199907 - RNA, 23 nt, Human
ugcccugcccccagagguggagc

SEQ ID NO: 1199908 - RNA, 21 nt, Human
ugccuauauaccuccaauaac

SEQ ID NO: 1199909 - RNA, 20 nt, Human
ugccucaggcuuugcuuuuc

SEQ ID NO: 1199910 - RNA, 19 nt, Human
ugccucgcccugcuucagc

SEQ ID NO: 1199911 - RNA, 20 nt, Human
ugccugggugucagcagcgg

SEQ ID NO: 1199912 - RNA, 19 nt, Human
ugcuagagguccacucuag

SEQ ID NO: 1199913 - RNA, 18 nt, Human
ugcugcauugcaguuuga

SEQ ID NO: 1199914 - RNA, 24 nt, Human
ugcugcugccugaucguuccucug

SEQ ID NO: 1199915 - RNA, 20 nt, Human
ugcuugugcucugcauguag

SEQ ID NO: 1199916 - RNA, 18 nt, Human
ugcuuuguuuaccuaauc

SEQ ID NO: 1199917 - RNA, 24 nt, Human
ugcuuuguuuaccuaaucaagccu

SEQ ID NO: 1199918 - RNA, 20 nt, Human
uggaagaagagcacugagaa

SEQ ID NO: 1199919 - RNA, 22 nt, Human
uggaagaagagcacugagaaau

SEQ ID NO: 1199920 - RNA, 24 nt, Human
uggaagaagagcacugagaaaucc

SEQ ID NO: 1199921 - RNA, 19 nt, Human
uggaauauucuuucucccc

SEQ ID NO: 1199922 - RNA, 21 nt, Human
uggaauauucuuucuccccuu

SEQ ID NO: 1199923 - RNA, 24 nt, Human
uggcucccgaaauaaaauaauuuu

SEQ ID NO: 1199924 - RNA, 23 nt, Human
uggcugcagaacagcgguggcug

SEQ ID NO: 1199925 - RNA, 19 nt, Human
uggcuggaacuauagcuuc

SEQ ID NO: 1199926 - RNA, 23 nt, Human
ugggagaaccacuacucuccuca

SEQ ID NO: 1199927 - RNA, 23 nt, Human
ugggugcagguguuuaauacaug

SEQ ID NO: 1199928 - RNA, 20 nt, Human
ugguguggauguccuuucug

SEQ ID NO: 1199929 - RNA, 24 nt, Human
ugguuuuccuucuaacagacagga

SEQ ID NO: 1199930 - RNA, 18 nt, Human
ugucuacuguccccccuc

SEQ ID NO: 1199931 - RNA, 19 nt, Human
uguggugggcuccacccag

SEQ ID NO: 1199932 - RNA, 18 nt, Human
uguuuguugguuuuccuu

SEQ ID NO: 1199933 - RNA, 18 nt, Human
uuaaaaaacaaaucuaau

SEQ ID NO: 1199934 - RNA, 18 nt, Human
uucaccucuuucccccca

SEQ ID NO: 1199935 - RNA, 18 nt, Human
uucauggagcaauaaaaa

SEQ ID NO: 1199936 - RNA, 20 nt, Human
uucucgagucuuagcuuuca

SEQ ID NO: 1199937 - RNA, 19 nt, Human
uugauccaagccagaaauc

SEQ ID NO: 1199938 - RNA, 22 nt, Human
uugcagaaucuuuggacgaggu

SEQ ID NO: 1199939 - RNA, 19 nt, Human
uugcagugcagcauccucc

SEQ ID NO: 1199940 - RNA, 19 nt, Human
uugcagugcagcauccucc

SEQ ID NO: 1199941 - RNA, 21 nt, Human
uugcagugcagcauccuccuc

SEQ ID NO: 1199942 - RNA, 19 nt, Human
uuggaggaggagagugcuc

SEQ ID NO: 1199943 - RNA, 24 nt, Human
uugguguggauguccuuucuguuu

SEQ ID NO: 1199944 - RNA, 21 nt, Human
uuguguuauuccucugcuuaa

SEQ ID NO: 1199945 - RNA, 18 nt, Human
uuuaauaagaaugucuag

SEQ ID NO: 1199946 - RNA, 23 nt, Human
uuuauauuacacugaaauaauua

SEQ ID NO: 1199947 - RNA, 21 nt, Human
uuuccaguuuuucugcucugu

SEQ ID NO: 1199948 - RNA, 24 nt, Human
uuugaucgucugaagccuucuucu

SEQ ID NO: 1199949 - RNA, 22 nt, Human
uuuggcuaguacagaaaaaggc

SEQ ID NO: 1199950 - RNA, 21 nt, Human
uuugugguuuuaucuacuuuu

SEQ ID NO: 1199951 - RNA, 22 nt, Human
uuuugcucauauuguugucucu

SEQ ID NO: 1199952 - RNA, 22 nt, Human
aaaaaaaggcacacuucucaac

SEQ ID NO: 1199953 - RNA, 20 nt, Human
aaaaaacaacuaaaaaacuu

SEQ ID NO: 1199954 - RNA, 23 nt, Human
aaaaaacaacuaaaaaacuucac

SEQ ID NO: 1199955 - RNA, 20 nt, Human
aaaaaacaacuaauaaauga

SEQ ID NO: 1199956 - RNA, 25 nt, Human
aaaaaagcuaacacaagccggaccc

SEQ ID NO: 1199957 - RNA, 23 nt, Human
aaaaaagcuaacacaagcuuaag

SEQ ID NO: 1199958 - RNA, 18 nt, Human
aaaaaggcacacuucuca

SEQ ID NO: 1199959 - RNA, 21 nt, Human
aaaagaaaaaagcuaacacaa

SEQ ID NO: 1199960 - RNA, 22 nt, Human
aaaauacaguacagaaccagga

SEQ ID NO: 1199961 - RNA, 23 nt, Human
aaacaacaacaacaacaacaaaa

SEQ ID NO: 1199962 - RNA, 23 nt, Human
aaacaacuaaaaaacuucacuuu

SEQ ID NO: 1199963 - RNA, 25 nt, Human
aaacaguaaaaauaagacuuaaaac

SEQ ID NO: 1199964 - RNA, 19 nt, Human
aacaacaacaacaacaaaa

SEQ ID NO: 1199965 - RNA, 27 nt, Human
aacacuuaagaaaacaacaacaacaac

SEQ ID NO: 1199966 - RNA, 19 nt, Human
aagaaaacaacaacaacaa

SEQ ID NO: 1199967 - RNA, 23 nt, Human
aagaaauaaauuuauauguacaa

SEQ ID NO: 1199968 - RNA, 25 nt, Human
aagacuuaaaacugcugccuacagu

SEQ ID NO: 1199969 - RNA, 23 nt, Human
aaggaggaaacucugaaagaaaa

SEQ ID NO: 1199970 - RNA, 21 nt, Human
acaaaaaugccaaaaauuaau

SEQ ID NO: 1199971 - RNA, 20 nt, Human
acaacaaaacaaaaacagac

SEQ ID NO: 1199972 - RNA, 26 nt, Human
acaacaacaacaaaacaaaaacagac

SEQ ID NO: 1199973 - RNA, 23 nt, Human
acaacaacaacaacaaaacaaaa

SEQ ID NO: 1199974 - RNA, 19 nt, Human
acaacaacaacaacaacaa

SEQ ID NO: 1199975 - RNA, 22 nt, Human
acaacaacaacaacaacaaaac

SEQ ID NO: 1199976 - RNA, 24 nt, Human
acaacaacaacaacaacaaaacaa

SEQ ID NO: 1199977 - RNA, 27 nt, Human
acaaggaaaaacaguauuuccauuuca

SEQ ID NO: 1199978 - RNA, 23 nt, Human
acacaguucauuuccacagcauu

SEQ ID NO: 1199979 - RNA, 21 nt, Human
acagucuauucuaggaaacca

SEQ ID NO: 1199980 - RNA, 22 nt, Human
accugaauuauaaacuuagcac

SEQ ID NO: 1199981 - RNA, 28 nt, Human
agaaaacaacuugcugguugaauaccac

SEQ ID NO: 1199982 - RNA, 21 nt, Human
aggaaacucugaaagaaaaca

SEQ ID NO: 1199983 - RNA, 24 nt, Human
auaaauauacaaaaaugccaaaaa

SEQ ID NO: 1199984 - RNA, 20 nt, Human
auauauauauaucuacuuca

SEQ ID NO: 1199985 - RNA, 18 nt, Human
auccaguaauauaaugcu

SEQ ID NO: 1199986 - RNA, 22 nt, Human
auuagacaauuacaucugugcu

SEQ ID NO: 1199987 - RNA, 24 nt, Human
caaaacaaaaacagacaauuugac

SEQ ID NO: 1199988 - RNA, 20 nt, Human
caaaagaaaaaagcuaacac

SEQ ID NO: 1199989 - RNA, 21 nt, Human
caaaagaaaaaagcuaacaca

SEQ ID NO: 1199990 - RNA, 21 nt, Human
caaauccaaguuagcuaauuc

SEQ ID NO: 1199991 - RNA, 21 nt, Human
caacaaaacaaaaacagacaa

SEQ ID NO: 1199992 - RNA, 19 nt, Human
caacaacaaaacaaaaaca

SEQ ID NO: 1199993 - RNA, 19 nt, Human
caacaacaacaaaacaaaa

SEQ ID NO: 1199994 - RNA, 21 nt, Human
caaccuguaacaaaacaugcc

SEQ ID NO: 1199995 - RNA, 20 nt, Human
caaguuuagcugaaaacuuc

SEQ ID NO: 1199996 - RNA, 18 nt, Human
cacugaggauuaagcuga

SEQ ID NO: 1199997 - RNA, 20 nt, Human
cagaaugauacgugaagauc

SEQ ID NO: 1199998 - RNA, 20 nt, Human
cagcacagccauucucuucc

SEQ ID NO: 1199999 - RNA, 24 nt, Human
caguaaaaauaagacuuaaaacug

SEQ ID NO: 1200000 - RNA, 21 nt, Human
cauucgcauggaauaaaaaca

SEQ ID NO: 1200001 - RNA, 26 nt, Human
cauucucuuccugaugagggacuuug

SEQ ID NO: 1200002 - RNA, 23 nt, Human
ccaguaauauaaugcucugcaaa

SEQ ID NO: 1200003 - RNA, 21 nt, Human
ccuucugcaaauacucuacaa

SEQ ID NO: 1200004 - RNA, 21 nt, Human
cgugaagaucucaacaugaag

SEQ ID NO: 1200005 - RNA, 24 nt, Human
cucaauauaaauuguagccaaaga

SEQ ID NO: 1200006 - RNA, 19 nt, Human
cucugaaagaaaacaacuu

SEQ ID NO: 1200007 - RNA, 25 nt, Human
cuugccaaaagcuuccacaaaucca

SEQ ID NO: 1200008 - RNA, 18 nt, Human
gaaaacaacaacaacaac

SEQ ID NO: 1200009 - RNA, 21 nt, Human
gaauaccacaaaaaacaacua

SEQ ID NO: 1200010 - RNA, 24 nt, Human
gcaaaagaaaaaagcuaacacaag

SEQ ID NO: 1200011 - RNA, 25 nt, Human
ggacggcaaaaucuuagcagcaaag

SEQ ID NO: 1200012 - RNA, 22 nt, Human
guagauauauauauauauauau

SEQ ID NO: 1200013 - RNA, 18 nt, Human
gugaagaucucaacauga

SEQ ID NO: 1200014 - RNA, 25 nt, Human
uaaaaaaaguauuuuacagacagau

SEQ ID NO: 1200015 - RNA, 23 nt, Human
uaaaacugcuuucaaaaaacaac

SEQ ID NO: 1200016 - RNA, 21 nt, Human
uaaaugacguuuaaaaaccug

SEQ ID NO: 1200017 - RNA, 24 nt, Human
uaaaugacguuuaaaaaccugcau

SEQ ID NO: 1200018 - RNA, 23 nt, Human
uaaaugcaauauaacuuuuugaa

SEQ ID NO: 1200019 - RNA, 21 nt, Human
uaacauaaaauaauuuugcuu

SEQ ID NO: 1200020 - RNA, 22 nt, Human
uaagaaaacaacaacaacaaca

SEQ ID NO: 1200021 - RNA, 19 nt, Human
uaagcugaaaaauuaguaa

SEQ ID NO: 1200022 - RNA, 21 nt, Human
uacccucuucuucauaacauc

SEQ ID NO: 1200023 - RNA, 25 nt, Human
uagcacuuacaaauaugaaaauuca

SEQ ID NO: 1200024 - RNA, 23 nt, Human
ucaacuguccccuagugcacuuu

SEQ ID NO: 1200025 - RNA, 26 nt, Human
uccacagcauuuuccuauauagccag

SEQ ID NO: 1200026 - RNA, 23 nt, Human
uccacggauaaaaaagucagcac

SEQ ID NO: 1200027 - RNA, 25 nt, Human
uccacggauaaaaaagucagcacag

SEQ ID NO: 1200028 - RNA, 18 nt, Human
ucugcaaaagaaauaaau

SEQ ID NO: 1200029 - RNA, 19 nt, Human
ucuucaguuauucacaccu

SEQ ID NO: 1200030 - RNA, 21 nt, Human
ugaaacgccaagaacugauga

SEQ ID NO: 1200031 - RNA, 25 nt, Human
ugaaagaaaacaacuugcugguuga

SEQ ID NO: 1200032 - RNA, 22 nt, Human
ugaagaaacuuguuuaaaauug

SEQ ID NO: 1200033 - RNA, 22 nt, Human
ugcacaaacauuaaaauauuaa

SEQ ID NO: 1200034 - RNA, 21 nt, Human
ugccaaaagcuuccacaaauc

SEQ ID NO: 1200035 - RNA, 22 nt, Human
ugccaaaagcuuccacaaaucc

SEQ ID NO: 1200036 - RNA, 22 nt, Human
ugccaugcacucaagggaaaag

SEQ ID NO: 1200037 - RNA, 19 nt, Human
uggcgugaaacgccaagaa

SEQ ID NO: 1200038 - RNA, 19 nt, Human
uggggcaaaagaaaaaagc

SEQ ID NO: 1200039 - RNA, 21 nt, Human
uguaaaggaaaaaaugggaau

SEQ ID NO: 1200040 - RNA, 25 nt, Human
ugugacaguagauauauauauauau

SEQ ID NO: 1200041 - RNA, 26 nt, Human
uguucuuaaagaacccuuuccuuggu

SEQ ID NO: 1200042 - RNA, 21 nt, Human
uuaguacaaaacuagaaauac

SEQ ID NO: 1200043 - RNA, 22 nt, Human
uuguaaaggaaaaaaugggaau

SEQ ID NO: 1200044 - RNA, 23 nt, Human
aauuugguguagaaaaauaauuu

SEQ ID NO: 1200045 - RNA, 23 nt, Human
gaaaauguaucucuaaugucuuc

SEQ ID NO: 1200046 - RNA, 19 nt, Human
ugcucaauuugguguagaa

SEQ ID NO: 1200047 - RNA, 18 nt, Human
uguaucucuaaugucuuc

SEQ ID NO: 1200048 - RNA, 24 nt, Human
ugugccggacacucagcagguacc

SEQ ID NO: 1200049 - RNA, 19 nt, Human
uucuggggaugaggggcag

SEQ ID NO: 1200050 - RNA, 21 nt, Human
aggcgaguggcagccccccga

SEQ ID NO: 1200051 - RNA, 22 nt, Human
ccaacaccagcaauguuccacu

SEQ ID NO: 1200052 - RNA, 20 nt, Human
ccuucuuuuccucuuucagc

SEQ ID NO: 1200053 - RNA, 22 nt, Human
cuagcugccuccuuagggcuug

SEQ ID NO: 1200054 - RNA, 26 nt, Human
cugacgauagucugugaacuuucucu

SEQ ID NO: 1200055 - RNA, 25 nt, Human
cugauguugguggcuugccuucuuu

SEQ ID NO: 1200056 - RNA, 21 nt, Human
cugugaacuuucucuuggccc

SEQ ID NO: 1200057 - RNA, 22 nt, Human
gccuucuuuuccucuuucagcu

SEQ ID NO: 1200058 - RNA, 20 nt, Human
guucuguuguuuauccucag

SEQ ID NO: 1200059 - RNA, 21 nt, Human
uaccaacaccagcaauguucc

SEQ ID NO: 1200060 - RNA, 21 nt, Human
uccugggccucuagcugccuc

SEQ ID NO: 1200061 - RNA, 19 nt, Human
ugccuucuuuuccucuuuc

SEQ ID NO: 1200062 - RNA, 19 nt, Human
uggcagccccccgaagugg

SEQ ID NO: 1200063 - RNA, 22 nt, Human
uggcuugccuucuuuuggaagc

SEQ ID NO: 1200064 - RNA, 19 nt, Human
ugguaugauccugggccuc

SEQ ID NO: 1200065 - RNA, 26 nt, Human
ugguaugauccugggccucuagcugc

SEQ ID NO: 1200066 - RNA, 18 nt, Human
ugucucaggguuagugcc

SEQ ID NO: 1200067 - RNA, 20 nt, Human
agccaccaggcugcauccug

SEQ ID NO: 1200068 - RNA, 21 nt, Human
caccaggcugcauccugauuc

SEQ ID NO: 1200069 - RNA, 20 nt, Human
cugagucacaaaagccacca

SEQ ID NO: 1200070 - RNA, 20 nt, Human
gccaccaggcugcauccuga

SEQ ID NO: 1200071 - RNA, 23 nt, Human
aaacaaaaaaaugcaugcucuaa

SEQ ID NO: 1200072 - RNA, 24 nt, Human
aaacaaaaaaaugcaugcucuaau

SEQ ID NO: 1200073 - RNA, 21 nt, Human
aagaaagaaaauaauggcaga

SEQ ID NO: 1200074 - RNA, 22 nt, Human
aagaaagcaaacaaaaaaaugc

SEQ ID NO: 1200075 - RNA, 19 nt, Human
accaucagaucuugugaua

SEQ ID NO: 1200076 - RNA, 21 nt, Human
agaaagcaaacaaaaaaaugc

SEQ ID NO: 1200077 - RNA, 23 nt, Human
agaaagcaaacaaaaaaaugcau

SEQ ID NO: 1200078 - RNA, 20 nt, Human
augguggcaggaaggagaag

SEQ ID NO: 1200079 - RNA, 18 nt, Human
ccaucagaucuugugaua

SEQ ID NO: 1200080 - RNA, 25 nt, Human
ggaaggagaagaaugagagucaagc

SEQ ID NO: 1200081 - RNA, 24 nt, Human
gucaagcaaagggagaagccccuu

SEQ ID NO: 1200082 - RNA, 20 nt, Human
uaaagaaagaaaauaauggc

SEQ ID NO: 1200083 - RNA, 24 nt, Human
uacaaaaccaucagaucuugugau

SEQ ID NO: 1200084 - RNA, 23 nt, Human
ugaaaagaaagcaaacaaaaaaa

SEQ ID NO: 1200085 - RNA, 23 nt, Human
uggcaggaaggagaagaaugaga

SEQ ID NO: 1200086 - RNA, 24 nt, Human
aaagugcugggauuacaggcauga

SEQ ID NO: 1200087 - RNA, 20 nt, Human
aacagucaagucccacccag

SEQ ID NO: 1200088 - RNA, 24 nt, Human
aagcaaucugcccacuuuggcuuc

SEQ ID NO: 1200089 - RNA, 19 nt, Human
aagugcugggauuacaggc

SEQ ID NO: 1200090 - RNA, 21 nt, Human
aagugcugggauuacaggcau

SEQ ID NO: 1200091 - RNA, 26 nt, Human
aagugcugggauuacaggcaugagcc

SEQ ID NO: 1200092 - RNA, 18 nt, Human
acagcucacugcagccuc

SEQ ID NO: 1200093 - RNA, 24 nt, Human
acagcucacugcagccucaaacau

SEQ ID NO: 1200094 - RNA, 23 nt, Human
acccaguaagcaccugagagcuu

SEQ ID NO: 1200095 - RNA, 21 nt, Human
acuacagguguguaccaccgu

SEQ ID NO: 1200096 - RNA, 27 nt, Human
acucuguugcccaggcuggagugcugu

SEQ ID NO: 1200097 - RNA, 18 nt, Human
agacaggguuucuccaug

SEQ ID NO: 1200098 - RNA, 23 nt, Human
agacaggguuucuccauguugcc

SEQ ID NO: 1200099 - RNA, 21 nt, Human
agggaaggacugcugagucac

SEQ ID NO: 1200100 - RNA, 18 nt, Human
aggugcuggugauagagc

SEQ ID NO: 1200101 - RNA, 18 nt, Human
agugcugggauuacaggc

SEQ ID NO: 1200102 - RNA, 25 nt, Human
auaaagcuguuuagaaggcuuaaag

SEQ ID NO: 1200103 - RNA, 25 nt, Human
auagagcccaaggaacuugguugcu

SEQ ID NO: 1200104 - RNA, 24 nt, Human
caaagugcugggauuacaggcaug

SEQ ID NO: 1200105 - RNA, 22 nt, Human
caagucccacccaguaagcacc

SEQ ID NO: 1200106 - RNA, 23 nt, Human
caccgugccugacuaauuuccgg

SEQ ID NO: 1200107 - RNA, 24 nt, Human
caccuuagccucccugguggcugg

SEQ ID NO: 1200108 - RNA, 24 nt, Human
cacucuguugcccaggcuggagug

SEQ ID NO: 1200109 - RNA, 24 nt, Human
caggguuucacucuguugcccagg

SEQ ID NO: 1200110 - RNA, 24 nt, Human
caggguuucuccauguugccuagg

SEQ ID NO: 1200111 - RNA, 21 nt, Human
caguaaccuaauuuccccacu

SEQ ID NO: 1200112 - RNA, 23 nt, Human
cauguugccuaggcugcuacuga

SEQ ID NO: 1200113 - RNA, 24 nt, Human
cauguugccuaggcugcuacugaa

SEQ ID NO: 1200114 - RNA, 23 nt, Human
ccaaagugcugggauuacaggca

SEQ ID NO: 1200115 - RNA, 24 nt, Human
ccaaagugcugggauuacaggcau

SEQ ID NO: 1200116 - RNA, 24 nt, Human
cccaaagugcugggauuacaggca

SEQ ID NO: 1200117 - RNA, 21 nt, Human
ccuaggaucaagcaaucugcc

SEQ ID NO: 1200118 - RNA, 25 nt, Human
ccucccaccuuagccucccuggugg

SEQ ID NO: 1200119 - RNA, 18 nt, Human
ccucccugguggcuggga

SEQ ID NO: 1200120 - RNA, 23 nt, Human
ccugguggcugggacuacaggug

SEQ ID NO: 1200121 - RNA, 24 nt, Human
cuccauguugccuaggcugcuacu

SEQ ID NO: 1200122 - RNA, 24 nt, Human
cuuagccucccugguggcugggac

SEQ ID NO: 1200123 - RNA, 24 nt, Human
gacuacagguguguaccaccgugc

SEQ ID NO: 1200124 - RNA, 20 nt, Human
gagacaggguuucuccaugu

SEQ ID NO: 1200125 - RNA, 21 nt, Human
gagacaggguuucuccauguu

SEQ ID NO: 1200126 - RNA, 18 nt, Human
gauuacaggcaugagcca

SEQ ID NO: 1200127 - RNA, 18 nt, Human
gauuacaggcaugagcca

SEQ ID NO: 1200128 - RNA, 22 nt, Human
gauuacaggcaugagccaucac

SEQ ID NO: 1200129 - RNA, 21 nt, Human
ggacuacagguguguaccacc

SEQ ID NO: 1200130 - RNA, 24 nt, Human
ggacuacagguguguaccaccgug

SEQ ID NO: 1200131 - RNA, 23 nt, Human
ggauuacaggcaugagccaucac

SEQ ID NO: 1200132 - RNA, 18 nt, Human
ggugauagagcccaagga

SEQ ID NO: 1200133 - RNA, 21 nt, Human
guagagacaggguuucuccau

SEQ ID NO: 1200134 - RNA, 23 nt, Human
guggacuguuuuacuaaguggga

SEQ ID NO: 1200135 - RNA, 22 nt, Human
guggcugggacuacaggugugu

SEQ ID NO: 1200136 - RNA, 24 nt, Human
guuucacucuguugcccaggcugg

SEQ ID NO: 1200137 - RNA, 22 nt, Human
uaaccuaauuuccccacuuucc

SEQ ID NO: 1200138 - RNA, 23 nt, Human
uacaggcaugagccaucacaucc

SEQ ID NO: 1200139 - RNA, 22 nt, Human
uagagacaggguuucuccaugu

SEQ ID NO: 1200140 - RNA, 22 nt, Human
uagcaacaacagucaaguccca

SEQ ID NO: 1200141 - RNA, 20 nt, Human
uagcaucacagcucacugca

SEQ ID NO: 1200142 - RNA, 18 nt, Human
uaggaucaagcaaucugc

SEQ ID NO: 1200143 - RNA, 20 nt, Human
uaggaucaagcaaucugccc

SEQ ID NO: 1200144 - RNA, 19 nt, Human
uagggaaggacugcugagu

SEQ ID NO: 1200145 - RNA, 21 nt, Human
uauacuaguaauuccaaaaca

SEQ ID NO: 1200146 - RNA, 20 nt, Human
ucacucuguugcccaggcug

SEQ ID NO: 1200147 - RNA, 21 nt, Human
ucacucuguugcccaggcugg

SEQ ID NO: 1200148 - RNA, 22 nt, Human
ucacucuguugcccaggcugga

SEQ ID NO: 1200149 - RNA, 24 nt, Human
ucacucuguugcccaggcuggagu

SEQ ID NO: 1200150 - RNA, 26 nt, Human
ucacugcagccucaaacaucccuggg

SEQ ID NO: 1200151 - RNA, 18 nt, Human
ucaggucuccucccaccu

SEQ ID NO: 1200152 - RNA, 24 nt, Human
ucccaaagugcugggauuacaggc

SEQ ID NO: 1200153 - RNA, 23 nt, Human
ucccugggaucaggucuccuccc

SEQ ID NO: 1200154 - RNA, 24 nt, Human
ucccugggaucaggucuccuccca

SEQ ID NO: 1200155 - RNA, 22 nt, Human
ucccugguggcugggacuacag

SEQ ID NO: 1200156 - RNA, 24 nt, Human
ucccugguggcugggacuacaggu

SEQ ID NO: 1200157 - RNA, 18 nt, Human
uccuaggaucaagcaauc

SEQ ID NO: 1200158 - RNA, 20 nt, Human
uccuaggaucaagcaaucug

SEQ ID NO: 1200159 - RNA, 21 nt, Human
uccuaggaucaagcaaucugc

SEQ ID NO: 1200160 - RNA, 26 nt, Human
ucuuggagaauacuuuucuuuuucuu

SEQ ID NO: 1200161 - RNA, 18 nt, Human
ucuuuuucuugaaacagg

SEQ ID NO: 1200162 - RNA, 24 nt, Human
ugaacuccuaggaucaagcaaucu

SEQ ID NO: 1200163 - RNA, 19 nt, Human
ugcccaggcuggagugcug

SEQ ID NO: 1200164 - RNA, 24 nt, Human
ugccuaggcugcuacugaacuccu

SEQ ID NO: 1200165 - RNA, 21 nt, Human
ugggacuacagguguguacca

SEQ ID NO: 1200166 - RNA, 23 nt, Human
ugggacuacagguguguaccacc

SEQ ID NO: 1200167 - RNA, 24 nt, Human
ugggacuacagguguguaccaccg

SEQ ID NO: 1200168 - RNA, 18 nt, Human
ugggauuacaggcaugag

SEQ ID NO: 1200169 - RNA, 19 nt, Human
ugggauuacaggcaugagc

SEQ ID NO: 1200170 - RNA, 21 nt, Human
ugggauuacaggcaugagcca

SEQ ID NO: 1200171 - RNA, 21 nt, Human
ugggauuacaggcaugagcca

SEQ ID NO: 1200172 - RNA, 22 nt, Human
ugggauuacaggcaugagccau

SEQ ID NO: 1200173 - RNA, 23 nt, Human
ugggauuacaggcaugagccauc

SEQ ID NO: 1200174 - RNA, 24 nt, Human
ugggauuacaggcaugagccauca

SEQ ID NO: 1200175 - RNA, 27 nt, Human
ugggauuacaggcaugagccaucacau

SEQ ID NO: 1200176 - RNA, 31 nt, Human
ugggauuacaggcaugagccaucacauccgg

SEQ ID NO: 1200177 - RNA, 24 nt, Human
uguagagacaggguuucuccaugu

SEQ ID NO: 1200178 - RNA, 24 nt, Human
uucacucuguugcccaggcuggag

SEQ ID NO: 1200179 - RNA, 20 nt, Human
uugcccaggcuggagugcug

SEQ ID NO: 1200180 - RNA, 24 nt, Human
uuguagagacaggguuucuccaug

SEQ ID NO: 1200181 - RNA, 18 nt, Human
uuuacugaguaccugcca

SEQ ID NO: 1200182 - RNA, 22 nt, Human
uuucacucuguugcccaggcug

SEQ ID NO: 1200183 - RNA, 24 nt, Human
uuucacucuguugcccaggcugga

SEQ ID NO: 1200184 - RNA, 18 nt, Human
uuuguagagacaggguuu

SEQ ID NO: 1200185 - RNA, 22 nt, Human
uuuuguuuuuuuguuuuuguag

SEQ ID NO: 1200186 - RNA, 25 nt, Human
uuuuuuuguuuuuguagagacaggg

SEQ ID NO: 1200187 - RNA, 23 nt, Human
aaaaaacaacuucacuccuggga

SEQ ID NO: 1200188 - RNA, 21 nt, Human
aaaaacaaauaaaacaaaaau

SEQ ID NO: 1200189 - RNA, 19 nt, Human
aaaaagaaacccagggucc

SEQ ID NO: 1200190 - RNA, 21 nt, Human
aaaacaaauaaauaaaaagga

SEQ ID NO: 1200191 - RNA, 24 nt, Human
aaaccuggagaaagguccgcgacg

SEQ ID NO: 1200192 - RNA, 24 nt, Human
aaaggcagguggaccacaagguca

SEQ ID NO: 1200193 - RNA, 19 nt, Human
aacauggugaaaccccauc

SEQ ID NO: 1200194 - RNA, 20 nt, Human
aacauggugaaaccccaucu

SEQ ID NO: 1200195 - RNA, 20 nt, Human
aacauggugaaaccccaucu

SEQ ID NO: 1200196 - RNA, 21 nt, Human
aacauggugaaaccccaucuc

SEQ ID NO: 1200197 - RNA, 21 nt, Human
aagaagaggggcugcaaugaa

SEQ ID NO: 1200198 - RNA, 22 nt, Human
aagacaccacagaccaauguga

SEQ ID NO: 1200199 - RNA, 21 nt, Human
aagaugcuuuugcucucacug

SEQ ID NO: 1200200 - RNA, 22 nt, Human
aagaugcuuuugcucucacuga

SEQ ID NO: 1200201 - RNA, 25 nt, Human
aagcauccaaacacauaagcuagga

SEQ ID NO: 1200202 - RNA, 19 nt, Human
aauccaaaagucaagaagc

SEQ ID NO: 1200203 - RNA, 24 nt, Human
aauugcuugaacccgggaggcgga

SEQ ID NO: 1200204 - RNA, 18 nt, Human
acaccacuacacuccagc

SEQ ID NO: 1200205 - RNA, 18 nt, Human
acagagugagacuccauc

SEQ ID NO: 1200206 - RNA, 24 nt, Human
accacuacacuccagccuggguga

SEQ ID NO: 1200207 - RNA, 24 nt, Human
accccaucucuacuaaaaauacaa

SEQ ID NO: 1200208 - RNA, 18 nt, Human
acuacacuccagccuggg

SEQ ID NO: 1200209 - RNA, 24 nt, Human
acuacacuccagccugggugacag

SEQ ID NO: 1200210 - RNA, 24 nt, Human
acuccagccugggugacagaguga

SEQ ID NO: 1200211 - RNA, 22 nt, Human
agaauugcuugaacccgggagg

SEQ ID NO: 1200212 - RNA, 21 nt, Human
agacaccacagaccaauguga

SEQ ID NO: 1200213 - RNA, 19 nt, Human
agacuccaucaaaaaacaa

SEQ ID NO: 1200214 - RNA, 26 nt, Human
agcccugauggcaaaggaaauaagcc

SEQ ID NO: 1200215 - RNA, 22 nt, Human
agccuggccaacauggugaaac

SEQ ID NO: 1200216 - RNA, 24 nt, Human
agccuggccaacauggugaaaccc

SEQ ID NO: 1200217 - RNA, 24 nt, Human
agccugggugacagagugagacuc

SEQ ID NO: 1200218 - RNA, 31 nt, Human
agccuuguuccacuucaucuaguaguuccaa

SEQ ID NO: 1200219 - RNA, 22 nt, Human
aggaaaaaagugguuacucugg

SEQ ID NO: 1200220 - RNA, 22 nt, Human
aggcaaauagaauggagucagg

SEQ ID NO: 1200221 - RNA, 24 nt, Human
aggcaggagaauugcuugaacccg

SEQ ID NO: 1200222 - RNA, 25 nt, Human
aggcagguggaccacaaggucaguc

SEQ ID NO: 1200223 - RNA, 20 nt, Human
aggcgacgcccgcccggccc

SEQ ID NO: 1200224 - RNA, 19 nt, Human
aggcggagguugcagugag

SEQ ID NO: 1200225 - RNA, 20 nt, Human
aggcggagguugcagugagc

SEQ ID NO: 1200226 - RNA, 24 nt, Human
aggcggagguugcagugagcagag

SEQ ID NO: 1200227 - RNA, 21 nt, Human
aggcugaggcaggagaauugc

SEQ ID NO: 1200228 - RNA, 24 nt, Human
aggcugaggcaggagaauugcuug

SEQ ID NO: 1200229 - RNA, 28 nt, Human
agguggaccacaaggucagucaggaguu

SEQ ID NO: 1200230 - RNA, 22 nt, Human
auggcaaaggaaauaagccauc

SEQ ID NO: 1200231 - RNA, 19 nt, Human
augguguagcccugcucca

SEQ ID NO: 1200232 - RNA, 24 nt, Human
auuacaccacuacacuccagccug

SEQ ID NO: 1200233 - RNA, 18 nt, Human
caaaaaacaacuucacuc

SEQ ID NO: 1200234 - RNA, 21 nt, Human
caaaacagguuuauugguuau

SEQ ID NO: 1200235 - RNA, 21 nt, Human
caaaaccagcuaaaaauaaag

SEQ ID NO: 1200236 - RNA, 21 nt, Human
caaaagccgucuucaaauaau

SEQ ID NO: 1200237 - RNA, 22 nt, Human
caaaggaauccaaaagucaaga

SEQ ID NO: 1200238 - RNA, 19 nt, Human
caacaugagaaaccugggc

SEQ ID NO: 1200239 - RNA, 24 nt, Human
caacauggugaaaccccaucucua

SEQ ID NO: 1200240 - RNA, 19 nt, Human
cacaaaagaauguuagcaa

SEQ ID NO: 1200241 - RNA, 18 nt, Human
cacacccucgaagacacc

SEQ ID NO: 1200242 - RNA, 19 nt, Human
cacacccucgaagacacca

SEQ ID NO: 1200243 - RNA, 24 nt, Human
cacaccuguaaucccagcacuuug

SEQ ID NO: 1200244 - RNA, 23 nt, Human
cacacgccgcagaggcgacgccc

SEQ ID NO: 1200245 - RNA, 18 nt, Human
cacaggcugaaaaccugg

SEQ ID NO: 1200246 - RNA, 18 nt, Human
caccuguaaucccagcac

SEQ ID NO: 1200247 - RNA, 19 nt, Human
caccuguaaucccagcacu

SEQ ID NO: 1200248 - RNA, 24 nt, Human
caccuguaaucccagcuacucagg

SEQ ID NO: 1200249 - RNA, 22 nt, Human
cacuccagccugggugacagag

SEQ ID NO: 1200250 - RNA, 22 nt, Human
cacuccagccugggugacagag

SEQ ID NO: 1200251 - RNA, 24 nt, Human
cacuccagccugggugacagagug

SEQ ID NO: 1200252 - RNA, 20 nt, Human
cagaaauuauacuucuucca

SEQ ID NO: 1200253 - RNA, 24 nt, Human
cagcacuuuggaagccaaaggcag

SEQ ID NO: 1200254 - RNA, 24 nt, Human
cagcuacucaggaggcugaggcag

SEQ ID NO: 1200255 - RNA, 23 nt, Human
cagguggaccacaaggucaguca

SEQ ID NO: 1200256 - RNA, 20 nt, Human
caucaaaaaacaaauaaaac

SEQ ID NO: 1200257 - RNA, 26 nt, Human
caucaaaaaacaaauaaaacaaaaag

SEQ ID NO: 1200258 - RNA, 28 nt, Human
ccacaaggucagucaggaguucgagacc

SEQ ID NO: 1200259 - RNA, 21 nt, Human
ccacauucuucacuuucuuca

SEQ ID NO: 1200260 - RNA, 20 nt, Human
ccacuacacuccagccuggg

SEQ ID NO: 1200261 - RNA, 20 nt, Human
ccacuacacuccagccuggg

SEQ ID NO: 1200262 - RNA, 21 nt, Human
ccacuacacuccagccugggu

SEQ ID NO: 1200263 - RNA, 23 nt, Human
ccacuacacuccagccuggguga

SEQ ID NO: 1200264 - RNA, 24 nt, Human
ccacuacacuccagccugggugac

SEQ ID NO: 1200265 - RNA, 25 nt, Human
ccacuacacuccagccugggugaca

SEQ ID NO: 1200266 - RNA, 25 nt, Human
ccagcuaaaaauaaaggaaauaaaa

SEQ ID NO: 1200267 - RNA, 18 nt, Human
cccaaaaaacaacuucac

SEQ ID NO: 1200268 - RNA, 24 nt, Human
cccaaauuaugaaaaauaaugcac

SEQ ID NO: 1200269 - RNA, 20 nt, Human
ccgugccucacaccuguaau

SEQ ID NO: 1200270 - RNA, 20 nt, Human
ccuaauuucagccaaguggu

SEQ ID NO: 1200271 - RNA, 22 nt, Human
ccucgaagacaccacagaccaa

SEQ ID NO: 1200272 - RNA, 25 nt, Human
ccugauacuaagcccaagauucuuc

SEQ ID NO: 1200273 - RNA, 23 nt, Human
ccuggccaacauggugaaacccc

SEQ ID NO: 1200274 - RNA, 24 nt, Human
ccuggccaacauggugaaacccca

SEQ ID NO: 1200275 - RNA, 21 nt, Human
ccugggcacuguggaaagccc

SEQ ID NO: 1200276 - RNA, 22 nt, Human
ccugggugacagagugagacuc

SEQ ID NO: 1200277 - RNA, 21 nt, Human
ccuguaaucccagcuacucag

SEQ ID NO: 1200278 - RNA, 27 nt, Human
ccugugacugaagcauuaccggggucc

SEQ ID NO: 1200279 - RNA, 20 nt, Human
cgaagacaccacagaccaau

SEQ ID NO: 1200280 - RNA, 24 nt, Human
cgagaccagccuggccaacauggu

SEQ ID NO: 1200281 - RNA, 19 nt, Human
cgcaccuguaaucccagcu

SEQ ID NO: 1200282 - RNA, 24 nt, Human
cgggaggcggagguugcagugagc

SEQ ID NO: 1200283 - RNA, 24 nt, Human
cgugccucacaccuguaaucccag

SEQ ID NO: 1200284 - RNA, 22 nt, Human
cucacaccuguaaucccagcac

SEQ ID NO: 1200285 - RNA, 24 nt, Human
cucacaccuguaaucccagcacuu

SEQ ID NO: 1200286 - RNA, 19 nt, Human
cucacugagccuuguucca

SEQ ID NO: 1200287 - RNA, 18 nt, Human
cuccgaaggaaguuuggg

SEQ ID NO: 1200288 - RNA, 19 nt, Human
cugauacuaagcccaagau

SEQ ID NO: 1200289 - RNA, 23 nt, Human
cuggccaacauggugaaacccca

SEQ ID NO: 1200290 - RNA, 21 nt, Human
cuguaaucccagcuacucagg

SEQ ID NO: 1200291 - RNA, 20 nt, Human
cuuucuucaaauccucuaaa

SEQ ID NO: 1200292 - RNA, 22 nt, Human
gacagagugagacuccaucaaa

SEQ ID NO: 1200293 - RNA, 23 nt, Human
gagacagacaaaacauucaacau

SEQ ID NO: 1200294 - RNA, 24 nt, Human
gccaacauggugaaaccccaucuc

SEQ ID NO: 1200295 - RNA, 22 nt, Human
ggagguugcagugagcagagau

SEQ ID NO: 1200296 - RNA, 22 nt, Human
ggagguugcagugagcagagau

SEQ ID NO: 1200297 - RNA, 23 nt, Human
ggagguugcagugagcagagauu

SEQ ID NO: 1200298 - RNA, 20 nt, Human
ggagguugcagugagcaggc

SEQ ID NO: 1200299 - RNA, 23 nt, Human
ggcgugguggcacgcaccuguaa

SEQ ID NO: 1200300 - RNA, 24 nt, Human
gguggcacgcaccuguaaucccag

SEQ ID NO: 1200301 - RNA, 27 nt, Human
guggaccacaaggucagucaggaguuc

SEQ ID NO: 1200302 - RNA, 22 nt, Human
uaaaaagaaacccagggucccu

SEQ ID NO: 1200303 - RNA, 25 nt, Human
uaaaaagaaacccagggucccugcu

SEQ ID NO: 1200304 - RNA, 22 nt, Human
uaaaacaaauaaauaaaaagga

SEQ ID NO: 1200305 - RNA, 22 nt, Human
uaacagacagacuaaaaagaaa

SEQ ID NO: 1200306 - RNA, 21 nt, Human
uaagagacagacaaaacauuc

SEQ ID NO: 1200307 - RNA, 23 nt, Human
uaagagacagacaaaacauucaa

SEQ ID NO: 1200308 - RNA, 19 nt, Human
uacacagugacauaaucag

SEQ ID NO: 1200309 - RNA, 22 nt, Human
uaccaggucucuucaaaggaau

SEQ ID NO: 1200310 - RNA, 20 nt, Human
uagccgggcgugguggcacg

SEQ ID NO: 1200311 - RNA, 21 nt, Human
uauuuuacacaaaagaauguu

SEQ ID NO: 1200312 - RNA, 22 nt, Human
ucagucuagaacuaaaagaaga

SEQ ID NO: 1200313 - RNA, 26 nt, Human
ucagucuagaacuaaaagaagagggg

SEQ ID NO: 1200314 - RNA, 27 nt, Human
ucauucucauucuccgcauaccaggaa

SEQ ID NO: 1200315 - RNA, 21 nt, Human
uccaaaagucaagaagcaaaa

SEQ ID NO: 1200316 - RNA, 22 nt, Human
uccacaaggagcgguaaaaaaa

SEQ ID NO: 1200317 - RNA, 25 nt, Human
uccacauucacaaucucaugcccaa

SEQ ID NO: 1200318 - RNA, 23 nt, Human
uccagccugggugacagagugag

SEQ ID NO: 1200319 - RNA, 24 nt, Human
uccagccugggugacagagugaga

SEQ ID NO: 1200320 - RNA, 23 nt, Human
uccaugcuaauugauuccaaaag

SEQ ID NO: 1200321 - RNA, 21 nt, Human
ucucuacuaaaaauacaaaaa

SEQ ID NO: 1200322 - RNA, 21 nt, Human
ugaaaaugauggagucuuccu

SEQ ID NO: 1200323 - RNA, 22 nt, Human
ugaaaaugauggagucuuccug

SEQ ID NO: 1200324 - RNA, 19 nt, Human
ugaaaccccaucucuacua

SEQ ID NO: 1200325 - RNA, 23 nt, Human
ugacugaagcauuacuacauuua

SEQ ID NO: 1200326 - RNA, 19 nt, Human
ugaggaaaugguagucacu

SEQ ID NO: 1200327 - RNA, 24 nt, Human
ugaggcaggagaauugcuugaacc

SEQ ID NO: 1200328 - RNA, 25 nt, Human
ugaggcaggagaauugcuugaaccc

SEQ ID NO: 1200329 - RNA, 19 nt, Human
ugcaaugaaggaagaaguc

SEQ ID NO: 1200330 - RNA, 20 nt, Human
ugcccaaaaaacaacuucac

SEQ ID NO: 1200331 - RNA, 21 nt, Human
ugccucacaccuguaauccca

SEQ ID NO: 1200332 - RNA, 24 nt, Human
ugccucacaccuguaaucccagca

SEQ ID NO: 1200333 - RNA, 24 nt, Human
ugcugaagcacacccucgaagaca

SEQ ID NO: 1200334 - RNA, 19 nt, Human
uggacaaaaccagcuaaaa

SEQ ID NO: 1200335 - RNA, 22 nt, Human
uggcacgcaccuguaaucccag

SEQ ID NO: 1200336 - RNA, 24 nt, Human
uggccaacauggugaaaccccauc

SEQ ID NO: 1200337 - RNA, 18 nt, Human
uggcugggcaccgugccu

SEQ ID NO: 1200338 - RNA, 24 nt, Human
ugguggcacgcaccuguaauccca

SEQ ID NO: 1200339 - RNA, 18 nt, Human
uuagccgggcgugguggc

SEQ ID NO: 1200340 - RNA, 20 nt, Human
uuagccgggcgugguggcac

SEQ ID NO: 1200341 - RNA, 20 nt, Human
uucacuguccuccaucguua

SEQ ID NO: 1200342 - RNA, 20 nt, Human
uucacuguccuccaucguua

SEQ ID NO: 1200343 - RNA, 24 nt, Human
uugaacccgggaggcggagguugc

SEQ ID NO: 1200344 - RNA, 19 nt, Human
uugcagugagcagagauua

SEQ ID NO: 1200345 - RNA, 20 nt, Human
uugcagugagcagagauuac

SEQ ID NO: 1200346 - RNA, 24 nt, Human
uugcuugaacccgggaggcggagg

SEQ ID NO: 1200347 - RNA, 21 nt, Human
uuuaaaaaggaaaaaaguggu

SEQ ID NO: 1200348 - RNA, 21 nt, Human
ugccuguggacccuugcauug

SEQ ID NO: 1200349 - RNA, 23 nt, Human
uggacccuugcauuggguaaccu

SEQ ID NO: 1200350 - RNA, 19 nt, Human
uggagcuguggcagaaacu

SEQ ID NO: 1200351 - RNA, 22 nt, Human
aaggccccagacacaaguucag

SEQ ID NO: 1200352 - RNA, 19 nt, Human
acagaggacacuuuuccca

SEQ ID NO: 1200353 - RNA, 19 nt, Human
cacagaggacacuuuuccc

SEQ ID NO: 1200354 - RNA, 25 nt, Human
caccuaaggccccagacacaaguuc

SEQ ID NO: 1200355 - RNA, 18 nt, Human
cccagacacaaguucagc

SEQ ID NO: 1200356 - RNA, 23 nt, Human
ucacagaggacacuuuucccacc

SEQ ID NO: 1200357 - RNA, 19 nt, Human
uguaaugggcaaagucaga

SEQ ID NO: 1200358 - RNA, 19 nt, Human
aaagcaaugccgccuccuc

SEQ ID NO: 1200359 - RNA, 19 nt, Human
aagcaacccccagauaaga

SEQ ID NO: 1200360 - RNA, 23 nt, Human
acuguccccuuuggagaugggag

SEQ ID NO: 1200361 - RNA, 19 nt, Human
agauccaaggaguguuucg

SEQ ID NO: 1200362 - RNA, 18 nt, Human
agcaaagcaacccccaga

SEQ ID NO: 1200363 - RNA, 23 nt, Human
aggcagguagagcucugaaccca

SEQ ID NO: 1200364 - RNA, 21 nt, Human
aggcgccaccguucggugaaa

SEQ ID NO: 1200365 - RNA, 22 nt, Human
agguagagcucugaacccaaac

SEQ ID NO: 1200366 - RNA, 22 nt, Human
auaagcaaagcaacccccagau

SEQ ID NO: 1200367 - RNA, 22 nt, Human
caaagcaacccccagauaagac

SEQ ID NO: 1200368 - RNA, 21 nt, Human
cacaucaacacacuuagacca

SEQ ID NO: 1200369 - RNA, 23 nt, Human
cacugccggcugcauagacagca

SEQ ID NO: 1200370 - RNA, 24 nt, Human
cagccuccaggcagguagagcucu

SEQ ID NO: 1200371 - RNA, 23 nt, Human
ccaaaagcaaugccgccuccucc

SEQ ID NO: 1200372 - RNA, 20 nt, Human
ccacaucaacacacuuagac

SEQ ID NO: 1200373 - RNA, 19 nt, Human
ccagucuucagggccaaaa

SEQ ID NO: 1200374 - RNA, 23 nt, Human
cccgaucuggggcucguaucgug

SEQ ID NO: 1200375 - RNA, 21 nt, Human
ccgcagucuuucugcaccacg

SEQ ID NO: 1200376 - RNA, 22 nt, Human
ccuccaggcagccugcucugaa

SEQ ID NO: 1200377 - RNA, 26 nt, Human
ccuccaggcagccugcucugaagucu

SEQ ID NO: 1200378 - RNA, 23 nt, Human
ccuucugcacuguccccuuugga

SEQ ID NO: 1200379 - RNA, 19 nt, Human
cgccuccuccaggcagccu

SEQ ID NO: 1200380 - RNA, 23 nt, Human
cucugaacccaaacgcccgaucu

SEQ ID NO: 1200381 - RNA, 19 nt, Human
cuuagaccaauagcacugc

SEQ ID NO: 1200382 - RNA, 18 nt, Human
gaguuggagccagucuuc

SEQ ID NO: 1200383 - RNA, 21 nt, Human
gcaaagcaacccccagauaag

SEQ ID NO: 1200384 - RNA, 22 nt, Human
gccccgugugggccgcagucuu

SEQ ID NO: 1200385 - RNA, 18 nt, Human
ggagaugggagcuuugag

SEQ ID NO: 1200386 - RNA, 18 nt, Human
guauaagcaaagcaaccc

SEQ ID NO: 1200387 - RNA, 20 nt, Human
uagauccaaggaguguuucg

SEQ ID NO: 1200388 - RNA, 22 nt, Human
uagcccacaaagucacagcuga

SEQ ID NO: 1200389 - RNA, 22 nt, Human
ucacagcugaggccacaucaac

SEQ ID NO: 1200390 - RNA, 21 nt, Human
uccaaggaguguuucgaaaag

SEQ ID NO: 1200391 - RNA, 21 nt, Human
uccaggcagccugcucugaag

SEQ ID NO: 1200392 - RNA, 19 nt, Human
uccccuuuggagaugggag

SEQ ID NO: 1200393 - RNA, 25 nt, Human
ucucggccagcgcuggccugcccug

SEQ ID NO: 1200394 - RNA, 23 nt, Human
ucugaagucucccccucuggcuu

SEQ ID NO: 1200395 - RNA, 21 nt, Human
ucugcaccacguccugcucuc

SEQ ID NO: 1200396 - RNA, 24 nt, Human
ucugcacuguccccuuuggagaug

SEQ ID NO: 1200397 - RNA, 19 nt, Human
ugagcgguaggcgccaccg

SEQ ID NO: 1200398 - RNA, 20 nt, Human
uggcuuuagcccacaaaguc

SEQ ID NO: 1200399 - RNA, 21 nt, Human
ggggaauugcuugcacaagcc

SEQ ID NO: 1200400 - RNA, 22 nt, Human
acaacccauguucuccccacaa

SEQ ID NO: 1200401 - RNA, 19 nt, Human
acgaagaucugaggcgcua

SEQ ID NO: 1200402 - RNA, 18 nt, Human
agcccaaacgugcagcag

SEQ ID NO: 1200403 - RNA, 18 nt, Human
caagcccaaacgugcagc

SEQ ID NO: 1200404 - RNA, 22 nt, Human
caagcccaaacgugcagcagcc

SEQ ID NO: 1200405 - RNA, 21 nt, Human
caccccgcacaacccauguuc

SEQ ID NO: 1200406 - RNA, 18 nt, Human
cagcaggcuccuccuucc

SEQ ID NO: 1200407 - RNA, 27 nt, Human
cagcaggcuccuccuucccuccagccc

SEQ ID NO: 1200408 - RNA, 19 nt, Human
cagccccaguuucaccccg

SEQ ID NO: 1200409 - RNA, 19 nt, Human
caggcuccuccuucccucc

SEQ ID NO: 1200410 - RNA, 24 nt, Human
caguuucaccccgcacaacccaug

SEQ ID NO: 1200411 - RNA, 18 nt, Human
ccaacgaagaucugaggc

SEQ ID NO: 1200412 - RNA, 19 nt, Human
ccacagcaggcuccuccuu

SEQ ID NO: 1200413 - RNA, 22 nt, Human
cccgcacaacccauguucuccc

SEQ ID NO: 1200414 - RNA, 20 nt, Human
ccuccuucccuccagcccca

SEQ ID NO: 1200415 - RNA, 19 nt, Human
cuccuccuucccuccagcc

SEQ ID NO: 1200416 - RNA, 23 nt, Human
cuccuccuucccuccagccccag

SEQ ID NO: 1200417 - RNA, 22 nt, Human
gcuccuccuucccuccagcccc

SEQ ID NO: 1200418 - RNA, 23 nt, Human
ccucugaaugugaggagaauagg

SEQ ID NO: 1200419 - RNA, 20 nt, Human
cuuugugcaguugcugccug

SEQ ID NO: 1200420 - RNA, 21 nt, Human
gcugccuguacagucuuugug

SEQ ID NO: 1200421 - RNA, 19 nt, Human
uacagucuuuguguccucu

SEQ ID NO: 1200422 - RNA, 19 nt, Human
uggguucuuugugcaguug

SEQ ID NO: 1200423 - RNA, 18 nt, Human
uguccucugaaugugagg

SEQ ID NO: 1200424 - RNA, 20 nt, Human
aggcacggcggucuccccgc

SEQ ID NO: 1200425 - RNA, 19 nt, Human
caccgcgcgcacgucgggc

SEQ ID NO: 1200426 - RNA, 20 nt, Human
cagcagcgccugugcccgcu

SEQ ID NO: 1200427 - RNA, 18 nt, Human
cagcgcaggcgcaaggcc

SEQ ID NO: 1200428 - RNA, 22 nt, Human
cagcgcccgcagggccucgggc

SEQ ID NO: 1200429 - RNA, 18 nt, Human
cagcgccugugcccgcuc

SEQ ID NO: 1200430 - RNA, 18 nt, Human
cagcguguccacgucggc

SEQ ID NO: 1200431 - RNA, 24 nt, Human
caggcuggcgccgggccccgcggg

SEQ ID NO: 1200432 - RNA, 21 nt, Human
cagggcugggcugcccagcac

SEQ ID NO: 1200433 - RNA, 33 nt, Human
ccaccaccaccgcgcgcacgucgggcuccaggg

SEQ ID NO: 1200434 - RNA, 21 nt, Human
ccacgcccacgcuggcgacgc

SEQ ID NO: 1200435 - RNA, 24 nt, Human
ccagggcugggcugcccagcacgu

SEQ ID NO: 1200436 - RNA, 23 nt, Human
cccaccaccaccgcgcgcacguc

SEQ ID NO: 1200437 - RNA, 23 nt, Human
cccacgcccacgcuggcgacgcc

SEQ ID NO: 1200438 - RNA, 24 nt, Human
cccgcagggccucgggcgcgccag

SEQ ID NO: 1200439 - RNA, 20 nt, Human
cccgcgagccagcccggggc

SEQ ID NO: 1200440 - RNA, 25 nt, Human
cccgcgccacagcacgccgucgcag

SEQ ID NO: 1200441 - RNA, 23 nt, Human
cccgcggggccgccgaagcccag

SEQ ID NO: 1200442 - RNA, 21 nt, Human
ccgcgcgcacgucgggcucca

SEQ ID NO: 1200443 - RNA, 19 nt, Human
ccucccgcgggcugcggga

SEQ ID NO: 1200444 - RNA, 21 nt, Human
ccucccgcgggcugcgggagc

SEQ ID NO: 1200445 - RNA, 23 nt, Human
cgaagaccuccaggcuggcgccg

SEQ ID NO: 1200446 - RNA, 22 nt, Human
cgccaauccgcccccgccuccc

SEQ ID NO: 1200447 - RNA, 23 nt, Human
cgccgaagcccaggcgccgcagc

SEQ ID NO: 1200448 - RNA, 25 nt, Human
cgccgggacccucgcccugcagugg

SEQ ID NO: 1200449 - RNA, 21 nt, Human
cgcggccagggcugggcugcc

SEQ ID NO: 1200450 - RNA, 18 nt, Human
cgggggcgccggccaggc

SEQ ID NO: 1200451 - RNA, 18 nt, Human
cgugcagccagucgccgg

SEQ ID NO: 1200452 - RNA, 20 nt, Human
cucgcagcgcccgcagggcc

SEQ ID NO: 1200453 - RNA, 22 nt, Human
gaagaccuccaggcuggcgccg

SEQ ID NO: 1200454 - RNA, 20 nt, Human
gaagcgaguggucagccggc

SEQ ID NO: 1200455 - RNA, 21 nt, Human
gcagcgcaggcgcaaggccgc

SEQ ID NO: 1200456 - RNA, 18 nt, Human
gccgggacccucgcccug

SEQ ID NO: 1200457 - RNA, 20 nt, Human
gcggccagggcugggcugcc

SEQ ID NO: 1200458 - RNA, 21 nt, Human
ggaagcgaguggucagccggc

SEQ ID NO: 1200459 - RNA, 19 nt, Human
gggcgccggccaggcgcug

SEQ ID NO: 1200460 - RNA, 19 nt, Human
ggggccgccgaagcccagg

SEQ ID NO: 1200461 - RNA, 24 nt, Human
guagcugaagugcgggucaaagcc

SEQ ID NO: 1200462 - RNA, 19 nt, Human
ucaaagcccaccaccaccg

SEQ ID NO: 1200463 - RNA, 22 nt, Human
ucaaagcccaccaccaccgcgc

SEQ ID NO: 1200464 - RNA, 22 nt, Human
ucauuggcuaccggccuuggga

SEQ ID NO: 1200465 - RNA, 20 nt, Human
uccagcggcgcgugcagcca

SEQ ID NO: 1200466 - RNA, 18 nt, Human
uccgcggccagggcuggg

SEQ ID NO: 1200467 - RNA, 22 nt, Human
ucgggccccacgcccacgcugg

SEQ ID NO: 1200468 - RNA, 22 nt, Human
ucuugcugcuguuguuggugau

SEQ ID NO: 1200469 - RNA, 23 nt, Human
ugcaguaggccgugccgaagacc

SEQ ID NO: 1200470 - RNA, 23 nt, Human
uggcagggcggcauucggaguga

SEQ ID NO: 1200471 - RNA, 21 nt, Human
uggcgccgggccccgcggggc

SEQ ID NO: 1200472 - RNA, 23 nt, Human
uuggaagcgaguggucagccggc

SEQ ID NO: 1200473 - RNA, 18 nt, Human
uuggugaugaagcccagg

SEQ ID NO: 1200474 - RNA, 20 nt, Human
agagagcagggccaucccac

SEQ ID NO: 1200475 - RNA, 18 nt, Human
agcaggccaaggugggga

SEQ ID NO: 1200476 - RNA, 18 nt, Human
agcaggguggcccgaggc

SEQ ID NO: 1200477 - RNA, 25 nt, Human
agcaggguggcccgaggcuuguggc

SEQ ID NO: 1200478 - RNA, 24 nt, Human
aggccccgggagggagaacugggg

SEQ ID NO: 1200479 - RNA, 18 nt, Human
agggccaucccacugcuc

SEQ ID NO: 1200480 - RNA, 20 nt, Human
caaaaccaagagcuuccagc

SEQ ID NO: 1200481 - RNA, 23 nt, Human
caagguggggagcaggguggccc

SEQ ID NO: 1200482 - RNA, 22 nt, Human
cagcagugcugucugcuguggc

SEQ ID NO: 1200483 - RNA, 24 nt, Human
ccacuggagagcccagcaggcccc

SEQ ID NO: 1200484 - RNA, 21 nt, Human
cccacguucugggccuggggc

SEQ ID NO: 1200485 - RNA, 18 nt, Human
cccccagcaaggcucucu

SEQ ID NO: 1200486 - RNA, 21 nt, Human
ccccgggagggagaacugggg

SEQ ID NO: 1200487 - RNA, 21 nt, Human
ccggcccccagcaaggcucuc

SEQ ID NO: 1200488 - RNA, 23 nt, Human
cguucggccacuggagagcccag

SEQ ID NO: 1200489 - RNA, 21 nt, Human
cucucugggcccacguucugg

SEQ ID NO: 1200490 - RNA, 24 nt, Human
cugggcccacguucugggccuggg

SEQ ID NO: 1200491 - RNA, 18 nt, Human
gccccgggagggagaacu

SEQ ID NO: 1200492 - RNA, 22 nt, Human
gccccgggagggagaacugggg

SEQ ID NO: 1200493 - RNA, 19 nt, Human
gcugucugcuguggccugg

SEQ ID NO: 1200494 - RNA, 20 nt, Human
ggaguccagcaggccaaggu

SEQ ID NO: 1200495 - RNA, 22 nt, Human
ggcacuggcgccucugucugcc

SEQ ID NO: 1200496 - RNA, 24 nt, Human
ggccuggggcgccaggaaaagcug

SEQ ID NO: 1200497 - RNA, 19 nt, Human
ggcgccaggaaaagcuggu

SEQ ID NO: 1200498 - RNA, 24 nt, Human
gggcugggggucaagggcgucuuc

SEQ ID NO: 1200499 - RNA, 20 nt, Human
ggggagcagcuccccgcugc

SEQ ID NO: 1200500 - RNA, 18 nt, Human
gucaagggcgucuucacc

SEQ ID NO: 1200501 - RNA, 19 nt, Human
uagacaaaaccaagagcuu

SEQ ID NO: 1200502 - RNA, 19 nt, Human
uccgcgcggccgcugccuc

SEQ ID NO: 1200503 - RNA, 25 nt, Human
uccgcgcggccgcugccucucagca

SEQ ID NO: 1200504 - RNA, 26 nt, Human
uccgcgcggccgcugccucucagcag

SEQ ID NO: 1200505 - RNA, 20 nt, Human
uccucugcuccuguccccgu

SEQ ID NO: 1200506 - RNA, 21 nt, Human
ucguggcugccggcccccagc

SEQ ID NO: 1200507 - RNA, 21 nt, Human
ucuucaccccagagugagggc

SEQ ID NO: 1200508 - RNA, 23 nt, Human
ugaccguccucugcuccuguccc

SEQ ID NO: 1200509 - RNA, 19 nt, Human
ugcuccuguccccguuccc

SEQ ID NO: 1200510 - RNA, 19 nt, Human
uggaugaccguccucugcu

SEQ ID NO: 1200511 - RNA, 19 nt, Human
ugggcugggggucaagggc

SEQ ID NO: 1200512 - RNA, 21 nt, Human
uggggagcaggguggcccgag

SEQ ID NO: 1200513 - RNA, 24 nt, Human
uggggaguccagcaggccaaggug

SEQ ID NO: 1200514 - RNA, 19 nt, Human
uguccccguucccucuccc

SEQ ID NO: 1200515 - RNA, 19 nt, Human
ugucugccccucguggcug

SEQ ID NO: 1200516 - RNA, 18 nt, Human
uucugggccuggggcgcc

SEQ ID NO: 1200517 - RNA, 23 nt, Human
cgagcagagcugaaccucaaauc

SEQ ID NO: 1200518 - RNA, 22 nt, Human
ucgugggcccagggcauaaacu

SEQ ID NO: 1200519 - RNA, 27 nt, Human
ugaaccucaaauccucgugggcccagg

SEQ ID NO: 1200520 - RNA, 18 nt, Human
uggugaccgagcagagcu

SEQ ID NO: 1200521 - RNA, 25 nt, Human
aaaggaaaaaaaaaaaaaaaaggac

SEQ ID NO: 1200522 - RNA, 25 nt, Human
aacaccuuuccuacuuguuuuggga

SEQ ID NO: 1200523 - RNA, 23 nt, Human
acaaaaugcuccagagcuucccc

SEQ ID NO: 1200524 - RNA, 22 nt, Human
acagucagugugugcuuuugaa

SEQ ID NO: 1200525 - RNA, 20 nt, Human
agaacaucugucgccacuga

SEQ ID NO: 1200526 - RNA, 21 nt, Human
agagcugggagggucuaugga

SEQ ID NO: 1200527 - RNA, 19 nt, Human
agaggugacuccguauaua

SEQ ID NO: 1200528 - RNA, 30 nt, Human
agccggacgcucugacggcugcuggccugg

SEQ ID NO: 1200529 - RNA, 21 nt, Human
aggcuggcauggcugcccucc

SEQ ID NO: 1200530 - RNA, 20 nt, Human
agggggcccugggaggccuc

SEQ ID NO: 1200531 - RNA, 21 nt, Human
caaaaugcuccagagcuuccc

SEQ ID NO: 1200532 - RNA, 22 nt, Human
caaaaugcuccagagcuucccc

SEQ ID NO: 1200533 - RNA, 18 nt, Human
cacugcugcccaagcuga

SEQ ID NO: 1200534 - RNA, 22 nt, Human
cagcacucaaaggaaaaaaaaa

SEQ ID NO: 1200535 - RNA, 19 nt, Human
cagcccgcugcucaccuug

SEQ ID NO: 1200536 - RNA, 23 nt, Human
cagcuggcugguuugguuccccc

SEQ ID NO: 1200537 - RNA, 25 nt, Human
caggauggcuccuggccuccuuucu

SEQ ID NO: 1200538 - RNA, 19 nt, Human
caggggacuggagcucuaa

SEQ ID NO: 1200539 - RNA, 19 nt, Human
cauagauccuuccugcuac

SEQ ID NO: 1200540 - RNA, 19 nt, Human
ccccaucgcagcuguuccc

SEQ ID NO: 1200541 - RNA, 22 nt, Human
cccccguggugaccugcucacu

SEQ ID NO: 1200542 - RNA, 18 nt, Human
cccguggugaccugcuca

SEQ ID NO: 1200543 - RNA, 19 nt, Human
cccucagcuuuccuucugg

SEQ ID NO: 1200544 - RNA, 18 nt, Human
cccucgagaaaaaugggg

SEQ ID NO: 1200545 - RNA, 21 nt, Human
ccgguggcugcccaccaagcu

SEQ ID NO: 1200546 - RNA, 25 nt, Human
ccuccaguaagagacgggcagagac

SEQ ID NO: 1200547 - RNA, 22 nt, Human
ccucucuagacaccuuuuauug

SEQ ID NO: 1200548 - RNA, 20 nt, Human
ccugcucauucuggacagag

SEQ ID NO: 1200549 - RNA, 22 nt, Human
ccuuuccuacuuguuuugggaa

SEQ ID NO: 1200550 - RNA, 18 nt, Human
cgucuuguccuccugcac

SEQ ID NO: 1200551 - RNA, 21 nt, Human
cucaaaggaaaaaaaaaaaaa

SEQ ID NO: 1200552 - RNA, 23 nt, Human
cucaaaggaaaaaaaaaaaaaaa

SEQ ID NO: 1200553 - RNA, 18 nt, Human
cuccaguaagagacgggg

SEQ ID NO: 1200554 - RNA, 19 nt, Human
cucuaagcugggugacugu

SEQ ID NO: 1200555 - RNA, 19 nt, Human
cugcugccgcugccgcugc

SEQ ID NO: 1200556 - RNA, 20 nt, Human
cugcuggccuggguggaggg

SEQ ID NO: 1200557 - RNA, 18 nt, Human
cuggcauggcugcccucc

SEQ ID NO: 1200558 - RNA, 19 nt, Human
cugguguugguugcagaug

SEQ ID NO: 1200559 - RNA, 18 nt, Human
cuucgcuguuuugacaca

SEQ ID NO: 1200560 - RNA, 18 nt, Human
cuuggcucuccuuccugg

SEQ ID NO: 1200561 - RNA, 24 nt, Human
cuuuccuacuuguuuugggaauau

SEQ ID NO: 1200562 - RNA, 21 nt, Human
gaagauucugggcugaagaug

SEQ ID NO: 1200563 - RNA, 18 nt, Human
gacacagucagugugugc

SEQ ID NO: 1200564 - RNA, 19 nt, Human
gacagucuccucacugacu

SEQ ID NO: 1200565 - RNA, 27 nt, Human
gagaaaaauggggggcagccgguaccc

SEQ ID NO: 1200566 - RNA, 21 nt, Human
gagagggggcccugggaggcc

SEQ ID NO: 1200567 - RNA, 23 nt, Human
gagcuuccccaucgcagcuguuc

SEQ ID NO: 1200568 - RNA, 21 nt, Human
gaggauuccccuuuuucuccc

SEQ ID NO: 1200569 - RNA, 19 nt, Human
gagggggcccugggaggcc

SEQ ID NO: 1200570 - RNA, 21 nt, Human
gaugguuucaucauggaaggu

SEQ ID NO: 1200571 - RNA, 18 nt, Human
gaugguuuugccauugau

SEQ ID NO: 1200572 - RNA, 20 nt, Human
gcacugcugcccaagcugau

SEQ ID NO: 1200573 - RNA, 19 nt, Human
gcauuguccugccaucgua

SEQ ID NO: 1200574 - RNA, 30 nt, Human
gcccaccaagcugaugucgcugcccuccuu

SEQ ID NO: 1200575 - RNA, 18 nt, Human
gcccgcugcucaccuugu

SEQ ID NO: 1200576 - RNA, 19 nt, Human
gccgcccgucuuguccucc

SEQ ID NO: 1200577 - RNA, 18 nt, Human
gcucucugggauggugcc

SEQ ID NO: 1200578 - RNA, 22 nt, Human
gcugaagugguuuauccaggga

SEQ ID NO: 1200579 - RNA, 20 nt, Human
gcuggcauggcugcccuccu

SEQ ID NO: 1200580 - RNA, 20 nt, Human
ggaaacaugacucucgcugc

SEQ ID NO: 1200581 - RNA, 22 nt, Human
ggacuggagcucuaagcugggu

SEQ ID NO: 1200582 - RNA, 23 nt, Human
ggacuggagcucuaagcugggug

SEQ ID NO: 1200583 - RNA, 18 nt, Human
ggagaggauucucacaaa

SEQ ID NO: 1200584 - RNA, 22 nt, Human
ggagcccagcuggcugguuugg

SEQ ID NO: 1200585 - RNA, 23 nt, Human
ggagcucuaagcugggugacugu

SEQ ID NO: 1200586 - RNA, 20 nt, Human
ggagggaaggcuggcugugg

SEQ ID NO: 1200587 - RNA, 21 nt, Human
ggagggucuauggagcccagc

SEQ ID NO: 1200588 - RNA, 20 nt, Human
ggauggugccucccaaguag

SEQ ID NO: 1200589 - RNA, 28 nt, Human
ggcugcuggccuggguggagggaaggcu

SEQ ID NO: 1200590 - RNA, 21 nt, Human
ggcuggcauggcugcccuccu

SEQ ID NO: 1200591 - RNA, 19 nt, Human
ggcuuggcucuccuuccug

SEQ ID NO: 1200592 - RNA, 18 nt, Human
gggaauauccacucuggg

SEQ ID NO: 1200593 - RNA, 22 nt, Human
gggacuggagcucuaagcuggg

SEQ ID NO: 1200594 - RNA, 24 nt, Human
gggaggggguuuagugccuccagu

SEQ ID NO: 1200595 - RNA, 20 nt, Human
gggucccaccaggaugcugc

SEQ ID NO: 1200596 - RNA, 20 nt, Human
ggucuauggagcccagcugg

SEQ ID NO: 1200597 - RNA, 21 nt, Human
gguucucaguauagacagucu

SEQ ID NO: 1200598 - RNA, 21 nt, Human
gugagggcacugcugcccaag

SEQ ID NO: 1200599 - RNA, 22 nt, Human
guucacagucgaugucauuacu

SEQ ID NO: 1200600 - RNA, 24 nt, Human
uaggcggugcucagcauagauccu

SEQ ID NO: 1200601 - RNA, 24 nt, Human
uaguggaugucuucacgacagucu

SEQ ID NO: 1200602 - RNA, 18 nt, Human
ucacugagguagcugcug

SEQ ID NO: 1200603 - RNA, 23 nt, Human
uccagggagagggggcccuggga

SEQ ID NO: 1200604 - RNA, 21 nt, Human
ucccucgagaaaaaugggggg

SEQ ID NO: 1200605 - RNA, 22 nt, Human
uccuucugguaccuaguggaug

SEQ ID NO: 1200606 - RNA, 21 nt, Human
ucgaugucauuacucuucgcu

SEQ ID NO: 1200607 - RNA, 24 nt, Human
ucgcuguuuugacacagguggacu

SEQ ID NO: 1200608 - RNA, 23 nt, Human
ucugggcugaagauguccagaga

SEQ ID NO: 1200609 - RNA, 26 nt, Human
ucuuucccuccagucugcuuggugcu

SEQ ID NO: 1200610 - RNA, 18 nt, Human
ugaaaacaccuuuccuac

SEQ ID NO: 1200611 - RNA, 19 nt, Human
ugaccucucuggggagagg

SEQ ID NO: 1200612 - RNA, 22 nt, Human
ugaggucaacccagggaggggg

SEQ ID NO: 1200613 - RNA, 25 nt, Human
ugcccaagcugaugaagcuggggcc

SEQ ID NO: 1200614 - RNA, 21 nt, Human
uggaagguucuaacucgugac

SEQ ID NO: 1200615 - RNA, 22 nt, Human
uggaugucuucacgacagucuc

SEQ ID NO: 1200616 - RNA, 22 nt, Human
uggccugcccacugaugcuugu

SEQ ID NO: 1200617 - RNA, 24 nt, Human
ugggaauauccacucugggugcag

SEQ ID NO: 1200618 - RNA, 19 nt, Human
uggggggcagcugaagugg

SEQ ID NO: 1200619 - RNA, 21 nt, Human
ugggugucacugagguagcug

SEQ ID NO: 1200620 - RNA, 19 nt, Human
ugugugcuuuugaaaacac

SEQ ID NO: 1200621 - RNA, 25 nt, Human
uucacgacagucucuggccucuuuu

SEQ ID NO: 1200622 - RNA, 26 nt, Human
uuccccaucgcagcuguucccggcug

SEQ ID NO: 1200623 - RNA, 18 nt, Human
uucccggcuggguugggc

SEQ ID NO: 1200624 - RNA, 21 nt, Human
uugcugcccccucagcuuucc

SEQ ID NO: 1200625 - RNA, 23 nt, Human
uugcugggccuguguguuguuuu

SEQ ID NO: 1200626 - RNA, 20 nt, Human
uugggcacugccauccagcc

SEQ ID NO: 1200627 - RNA, 19 nt, Human
uugguacagggggucccac

SEQ ID NO: 1200628 - RNA, 20 nt, Human
uuucaggggcuccugagccc

SEQ ID NO: 1200629 - RNA, 21 nt, Human
uuugggcacugccauccagcc

SEQ ID NO: 1200630 - RNA, 18 nt, Human
uuuucugggagacucugg

SEQ ID NO: 1200631 - RNA, 21 nt, Human
aaaccagcgaguuucagugga

SEQ ID NO: 1200632 - RNA, 19 nt, Human
accaucuccuuguucuccu

SEQ ID NO: 1200633 - RNA, 20 nt, Human
acugcugugagagcugaggc

SEQ ID NO: 1200634 - RNA, 25 nt, Human
agaguucucaagaacagucagacuc

SEQ ID NO: 1200635 - RNA, 23 nt, Human
agcggcucuucugcuccaggaag

SEQ ID NO: 1200636 - RNA, 18 nt, Human
agcuaguuuagaccaucu

SEQ ID NO: 1200637 - RNA, 18 nt, Human
aggcagaagaggacuuga

SEQ ID NO: 1200638 - RNA, 18 nt, Human
agggauggugcagcagcc

SEQ ID NO: 1200639 - RNA, 20 nt, Human
augggaagcuccugcgggug

SEQ ID NO: 1200640 - RNA, 23 nt, Human
caaaaccagcgaguuucagugga

SEQ ID NO: 1200641 - RNA, 23 nt, Human
caacaggagacauuggcuguggc

SEQ ID NO: 1200642 - RNA, 24 nt, Human
cacugcugugagagcugaggcaga

SEQ ID NO: 1200643 - RNA, 19 nt, Human
cagcagccaaaacuuccug

SEQ ID NO: 1200644 - RNA, 25 nt, Human
cagcaggggcgggguucagcggcuc

SEQ ID NO: 1200645 - RNA, 19 nt, Human
cagcggcucuucugcucuu

SEQ ID NO: 1200646 - RNA, 23 nt, Human
cagcugcugcucuccaccugcug

SEQ ID NO: 1200647 - RNA, 21 nt, Human
cauuuggacuacuaaaccacu

SEQ ID NO: 1200648 - RNA, 21 nt, Human
ccaccgcggcagcccgccuuu

SEQ ID NO: 1200649 - RNA, 24 nt, Human
ccaccgggagcagcagcuccuccu

SEQ ID NO: 1200650 - RNA, 20 nt, Human
ccagcaccaggacagguucu

SEQ ID NO: 1200651 - RNA, 23 nt, Human
ccagcugcugcucuccaccugcu

SEQ ID NO: 1200652 - RNA, 19 nt, Human
ccaggacagguucuaugcc

SEQ ID NO: 1200653 - RNA, 21 nt, Human
cccaggucggggacuuggggc

SEQ ID NO: 1200654 - RNA, 19 nt, Human
cccuuaguggugaaggccc

SEQ ID NO: 1200655 - RNA, 22 nt, Human
cccuuaguggugaaggcccuac

SEQ ID NO: 1200656 - RNA, 24 nt, Human
ccggccagcugcugcucuccaccu

SEQ ID NO: 1200657 - RNA, 18 nt, Human
ccucagagaccacucucu

SEQ ID NO: 1200658 - RNA, 21 nt, Human
ccugagcgcuauucucugggc

SEQ ID NO: 1200659 - RNA, 18 nt, Human
ccugcgggugagcugcag

SEQ ID NO: 1200660 - RNA, 27 nt, Human
cgccuugccuuucuagcgggcuccuca

SEQ ID NO: 1200661 - RNA, 22 nt, Human
cgggguucagcggcucuucugc

SEQ ID NO: 1200662 - RNA, 22 nt, Human
cuccggccagcugcugcucucc

SEQ ID NO: 1200663 - RNA, 21 nt, Human
cucucuuggcuuggucucugg

SEQ ID NO: 1200664 - RNA, 18 nt, Human
cucuggguccugagcgcu

SEQ ID NO: 1200665 - RNA, 21 nt, Human
cugguuccaaauauugggguc

SEQ ID NO: 1200666 - RNA, 25 nt, Human
gaguccccaccgggagcagcagcuc

SEQ ID NO: 1200667 - RNA, 24 nt, Human
gcccuugcagcgcuucgcgggggc

SEQ ID NO: 1200668 - RNA, 22 nt, Human
gccgcugaacggcuucucccca

SEQ ID NO: 1200669 - RNA, 26 nt, Human
gcggagguggcgggggcggugguuga

SEQ ID NO: 1200670 - RNA, 19 nt, Human
gggaguccccaccgggagc

SEQ ID NO: 1200671 - RNA, 22 nt, Human
gggcgggcuggcuguccagccu

SEQ ID NO: 1200672 - RNA, 23 nt, Human
gguucuggaguccucggcgggug

SEQ ID NO: 1200673 - RNA, 22 nt, Human
gugcagcagccaaaacuucccc

SEQ ID NO: 1200674 - RNA, 19 nt, Human
uacacagcauuuggacuac

SEQ ID NO: 1200675 - RNA, 19 nt, Human
uacaggcuuggcauccuuc

SEQ ID NO: 1200676 - RNA, 23 nt, Human
uacuggguuuuaguagaaaagaa

SEQ ID NO: 1200677 - RNA, 22 nt, Human
uauucagaaguagauaaacuuc

SEQ ID NO: 1200678 - RNA, 23 nt, Human
uauuuugcgcucuuugcacccca

SEQ ID NO: 1200679 - RNA, 20 nt, Human
uccacaugugagugccaagu

SEQ ID NO: 1200680 - RNA, 18 nt, Human
uccaggaaguccagcugc

SEQ ID NO: 1200681 - RNA, 19 nt, Human
ucccguguguugagcuagu

SEQ ID NO: 1200682 - RNA, 18 nt, Human
ucccucuagggauuacug

SEQ ID NO: 1200683 - RNA, 23 nt, Human
ucccucuagggauuacuggguuu

SEQ ID NO: 1200684 - RNA, 25 nt, Human
ucuagggauuacuggguuuuaguag

SEQ ID NO: 1200685 - RNA, 22 nt, Human
ugaaggcccuaccgcagauggc

SEQ ID NO: 1200686 - RNA, 19 nt, Human
ugagcugcagcuuccuggu

SEQ ID NO: 1200687 - RNA, 23 nt, Human
ugaggaacugcaggcugaaaggg

SEQ ID NO: 1200688 - RNA, 18 nt, Human
ugaggcagaagaggacuu

SEQ ID NO: 1200689 - RNA, 19 nt, Human
ugaggugcguuguccagac

SEQ ID NO: 1200690 - RNA, 21 nt, Human
ugagugccaaguguaccugga

SEQ ID NO: 1200691 - RNA, 21 nt, Human
ugcagaguucucaagaacagu

SEQ ID NO: 1200692 - RNA, 19 nt, Human
ugcagcagccaaaacuucc

SEQ ID NO: 1200693 - RNA, 19 nt, Human
ugcagugagaucagcaggg

SEQ ID NO: 1200694 - RNA, 21 nt, Human
ugcgcucuuugcaccccaggg

SEQ ID NO: 1200695 - RNA, 19 nt, Human
uggaguccucggcgggugg

SEQ ID NO: 1200696 - RNA, 18 nt, Human
uggcgaauggacgcugcc

SEQ ID NO: 1200697 - RNA, 19 nt, Human
uggcgggggcgguggucag

SEQ ID NO: 1200698 - RNA, 18 nt, Human
ugggagggcuauuuugcg

SEQ ID NO: 1200699 - RNA, 21 nt, Human
ugggaucugggaaaagccucu

SEQ ID NO: 1200700 - RNA, 22 nt, Human
ugggcuccuccagguugcccag

SEQ ID NO: 1200701 - RNA, 21 nt, Human
ugucauaauacacagcauuug

SEQ ID NO: 1200702 - RNA, 24 nt, Human
uguccagacugacaaugggagggc

SEQ ID NO: 1200703 - RNA, 23 nt, Human
uguccagccucuggguccugagc

SEQ ID NO: 1200704 - RNA, 24 nt, Human
uguccagccucuggguccugagcg

SEQ ID NO: 1200705 - RNA, 22 nt, Human
ugucuguugcccacauaaucuu

SEQ ID NO: 1200706 - RNA, 23 nt, Human
ugugcagugagaucagcaggggc

SEQ ID NO: 1200707 - RNA, 27 nt, Human
ugugugcagugagaucagcaggggcgg

SEQ ID NO: 1200708 - RNA, 20 nt, Human
uucagcggcucuucugcucc

SEQ ID NO: 1200709 - RNA, 21 nt, Human
uucuuuaugggaagcuccugc

SEQ ID NO: 1200710 - RNA, 23 nt, Human
uucuuuaugggaagcuccugcgg

SEQ ID NO: 1200711 - RNA, 19 nt, Human
uugcaccccaggguaccca

SEQ ID NO: 1200712 - RNA, 24 nt, Human
uugccugggcucuuucuguuccug

SEQ ID NO: 1200713 - RNA, 18 nt, Human
uuggcuuggucucugggc

SEQ ID NO: 1200714 - RNA, 22 nt, Human
ccagguugguggaggcggggcg

SEQ ID NO: 1200715 - RNA, 21 nt, Human
cugcuggcggccgcggggcgg

SEQ ID NO: 1200716 - RNA, 22 nt, Human
cugcuggcggccgcggggcggc

SEQ ID NO: 1200717 - RNA, 19 nt, Human
acucaggggcaccugacuc

SEQ ID NO: 1200718 - RNA, 21 nt, Human
aguuguucuguggauccaaaa

SEQ ID NO: 1200719 - RNA, 21 nt, Human
cauucauguaagguggacuca

SEQ ID NO: 1200720 - RNA, 22 nt, Human
ccugacuugauacuugcuaccu

SEQ ID NO: 1200721 - RNA, 21 nt, Human
cucaggggcaccugacuugau

SEQ ID NO: 1200722 - RNA, 20 nt, Human
gagcaggaggagggguugcu

SEQ ID NO: 1200723 - RNA, 18 nt, Human
ggaaucugcaaggugcuc

SEQ ID NO: 1200724 - RNA, 18 nt, Human
ucaggggcaccugacuug

SEQ ID NO: 1200725 - RNA, 22 nt, Human
ucguauugaucuuucucccgua

SEQ ID NO: 1200726 - RNA, 22 nt, Human
ucuguggauccaaaagagcauu

SEQ ID NO: 1200727 - RNA, 18 nt, Human
ugggagcaggaggagggg

SEQ ID NO: 1200728 - RNA, 19 nt, Human
ugggagcaggaggaggggu

SEQ ID NO: 1200729 - RNA, 18 nt, Human
ugguguuagguguuucuu

SEQ ID NO: 1200730 - RNA, 23 nt, Human
uucuguggauccaaaagagcauu

SEQ ID NO: 1200731 - RNA, 26 nt, Human
cacauuuucccucccucucuuuucuc

SEQ ID NO: 1200732 - RNA, 18 nt, Human
cccucccucucuuuucuc

SEQ ID NO: 1200733 - RNA, 22 nt, Human
uccuaaucuuacacaaaccaag

SEQ ID NO: 1200734 - RNA, 23 nt, Human
ugauuucugggucacauuuuccc

SEQ ID NO: 1200735 - RNA, 21 nt, Human
aaaaaauacaauauacauuag

SEQ ID NO: 1200736 - RNA, 24 nt, Human
aagaacaauguucauaccaacuga

SEQ ID NO: 1200737 - RNA, 21 nt, Human
aagaauuugaaaucaagucua

SEQ ID NO: 1200738 - RNA, 21 nt, Human
aagaugacaacuuagacaaaa

SEQ ID NO: 1200739 - RNA, 25 nt, Human
aagcaaugaaacaguugacaguuau

SEQ ID NO: 1200740 - RNA, 21 nt, Human
aaggaaauaccauucagccau

SEQ ID NO: 1200741 - RNA, 23 nt, Human
aagggaaacaaggaaagacaaaa

SEQ ID NO: 1200742 - RNA, 21 nt, Human
acauacacucucucucucccc

SEQ ID NO: 1200743 - RNA, 21 nt, Human
accacaauuuauucauccauu

SEQ ID NO: 1200744 - RNA, 24 nt, Human
accagaagcagggaaaacuucaac

SEQ ID NO: 1200745 - RNA, 22 nt, Human
agaacuggaggggcgcagccuc

SEQ ID NO: 1200746 - RNA, 21 nt, Human
agaguauauuaauguuaaaac

SEQ ID NO: 1200747 - RNA, 22 nt, Human
agcagcuaugaaaauaacguuu

SEQ ID NO: 1200748 - RNA, 21 nt, Human
aguguaaaaauuuacuucuaa

SEQ ID NO: 1200749 - RNA, 22 nt, Human
auaaaaccacuaaauucauagg

SEQ ID NO: 1200750 - RNA, 21 nt, Human
caaaccagaagcagggaaaac

SEQ ID NO: 1200751 - RNA, 22 nt, Human
caacugauauaugccagcaagc

SEQ ID NO: 1200752 - RNA, 24 nt, Human
caagaacaauguucauaccaacug

SEQ ID NO: 1200753 - RNA, 24 nt, Human
caaggaaguagaaaugccuccuuu

SEQ ID NO: 1200754 - RNA, 23 nt, Human
caauuuauucauccauucccuua

SEQ ID NO: 1200755 - RNA, 18 nt, Human
caggagauuccuagguug

SEQ ID NO: 1200756 - RNA, 18 nt, Human
caugucugccuccuucac

SEQ ID NO: 1200757 - RNA, 26 nt, Human
ccaaaaaauacaauauacauuaguaa

SEQ ID NO: 1200758 - RNA, 23 nt, Human
ccacaguaagaccuggcuggagu

SEQ ID NO: 1200759 - RNA, 24 nt, Human
ccagaagcagggaaaacuucaaca

SEQ ID NO: 1200760 - RNA, 21 nt, Human
ccagugccacagcgggucacg

SEQ ID NO: 1200761 - RNA, 18 nt, Human
cgggucacggcgcagggc

SEQ ID NO: 1200762 - RNA, 25 nt, Human
cuagaaaaucuucagcaaaccagaa

SEQ ID NO: 1200763 - RNA, 20 nt, Human
cucaaggaaguagaaaugcc

SEQ ID NO: 1200764 - RNA, 19 nt, Human
cugaaaaacacaugugaug

SEQ ID NO: 1200765 - RNA, 20 nt, Human
cuguuuccuaagaggcagcu

SEQ ID NO: 1200766 - RNA, 22 nt, Human
cuguuuguauauuucuuaugcu

SEQ ID NO: 1200767 - RNA, 22 nt, Human
cuucuagaaaaucuucagcaaa

SEQ ID NO: 1200768 - RNA, 23 nt, Human
cuuugaguuacacaacaauucuu

SEQ ID NO: 1200769 - RNA, 24 nt, Human
cuuuucaaggaaauaccauucagc

SEQ ID NO: 1200770 - RNA, 19 nt, Human
gaaagacaaaaacaggugg

SEQ ID NO: 1200771 - RNA, 20 nt, Human
gaaauaccauucagccaugg

SEQ ID NO: 1200772 - RNA, 19 nt, Human
gaaaucaagucuauaaaag

SEQ ID NO: 1200773 - RNA, 19 nt, Human
gcggcgaagacgcgcggag

SEQ ID NO: 1200774 - RNA, 18 nt, Human
ggcuauggauguucugga

SEQ ID NO: 1200775 - RNA, 22 nt, Human
uaaagucucugaaauguaacau

SEQ ID NO: 1200776 - RNA, 25 nt, Human
uaacguuuuccccuccuuugugagu

SEQ ID NO: 1200777 - RNA, 19 nt, Human
uaagaggcagcucaagaac

SEQ ID NO: 1200778 - RNA, 24 nt, Human
uaagaggcagcucaagaacaaugu

SEQ ID NO: 1200779 - RNA, 20 nt, Human
ucacagaggacaagaauuuc

SEQ ID NO: 1200780 - RNA, 24 nt, Human
ugaaaaaucugauuuuuauaaaag

SEQ ID NO: 1200781 - RNA, 19 nt, Human
ugaaaauaacguuuucccc

SEQ ID NO: 1200782 - RNA, 21 nt, Human
ugaaaauaacguuuuccccuc

SEQ ID NO: 1200783 - RNA, 21 nt, Human
ugaaaucaagucuauaaaagc

SEQ ID NO: 1200784 - RNA, 23 nt, Human
ugacagcacaucaaugauauccc

SEQ ID NO: 1200785 - RNA, 19 nt, Human
ugaguaguacagcucaugu

SEQ ID NO: 1200786 - RNA, 25 nt, Human
ugccagcaagcaguagggaaagacg

SEQ ID NO: 1200787 - RNA, 21 nt, Human
ugcuacacacacacauacacu

SEQ ID NO: 1200788 - RNA, 23 nt, Human
uggcaacagcaaaacucaaggaa

SEQ ID NO: 1200789 - RNA, 19 nt, Human
uggcccagugccacagcgg

SEQ ID NO: 1200790 - RNA, 20 nt, Human
uggcccagugccacagcggg

SEQ ID NO: 1200791 - RNA, 18 nt, Human
ugguggugggggaagggc

SEQ ID NO: 1200792 - RNA, 21 nt, Human
uuaguauggaaaaucuuguua

SEQ ID NO: 1200793 - RNA, 21 nt, Human
uucaugaaauauuaagggaaa

SEQ ID NO: 1200794 - RNA, 19 nt, Human
uugcuuuccucauuugacc

SEQ ID NO: 1200795 - RNA, 24 nt, Human
uuuuccucuaaagucucugaaaug

SEQ ID NO: 1200796 - RNA, 20 nt, Human
aacagucuccagcgucccug

SEQ ID NO: 1200797 - RNA, 19 nt, Human
aaccagaggcugccauccu

SEQ ID NO: 1200798 - RNA, 18 nt, Human
aaccaggguucaaaaaca

SEQ ID NO: 1200799 - RNA, 24 nt, Human
aaccguguggggaacagagaccug

SEQ ID NO: 1200800 - RNA, 19 nt, Human
aaccuaaaugaugccuuuc

SEQ ID NO: 1200801 - RNA, 19 nt, Human
aacuuggcucugucacuga

SEQ ID NO: 1200802 - RNA, 20 nt, Human
aacuuuuuauuucuuccuuc

SEQ ID NO: 1200803 - RNA, 21 nt, Human
aagaaugggaacgaaaagaga

SEQ ID NO: 1200804 - RNA, 23 nt, Human
aagagaaagaggacacagggaca

SEQ ID NO: 1200805 - RNA, 22 nt, Human
aagaggacacagggacaaaacc

SEQ ID NO: 1200806 - RNA, 21 nt, Human
aaggcuccaggaggggguugc

SEQ ID NO: 1200807 - RNA, 23 nt, Human
aaguagucaagagaauuuugaga

SEQ ID NO: 1200808 - RNA, 21 nt, Human
aagugacuucauugaugugaa

SEQ ID NO: 1200809 - RNA, 18 nt, Human
aaguucucuggaaaauga

SEQ ID NO: 1200810 - RNA, 19 nt, Human
aauccucucucuuuccacc

SEQ ID NO: 1200811 - RNA, 23 nt, Human
aauuuuuauuuuuggccugaggg

SEQ ID NO: 1200812 - RNA, 22 nt, Human
acaagucuacuggaauaucauc

SEQ ID NO: 1200813 - RNA, 23 nt, Human
acaccagcuucccccaaagacag

SEQ ID NO: 1200814 - RNA, 18 nt, Human
acagaacuagaggacacg

SEQ ID NO: 1200815 - RNA, 19 nt, Human
acagacauucuucagacug

SEQ ID NO: 1200816 - RNA, 20 nt, Human
acaggaggagcugcuuugug

SEQ ID NO: 1200817 - RNA, 21 nt, Human
acaguccauccagucucacac

SEQ ID NO: 1200818 - RNA, 21 nt, Human
accugccccuccggccagccc

SEQ ID NO: 1200819 - RNA, 18 nt, Human
acugcaucuuggugagug

SEQ ID NO: 1200820 - RNA, 18 nt, Human
agaaagaggacacaggga

SEQ ID NO: 1200821 - RNA, 22 nt, Human
agaaagaggacacagggacaaa

SEQ ID NO: 1200822 - RNA, 23 nt, Human
agaaagaggacacagggacaaaa

SEQ ID NO: 1200823 - RNA, 18 nt, Human
agaaauacaaucacucca

SEQ ID NO: 1200824 - RNA, 21 nt, Human
agacacaugcaaauggccuuc

SEQ ID NO: 1200825 - RNA, 31 nt, Human
agacagcaucuuggucaucuccacguccccu

SEQ ID NO: 1200826 - RNA, 25 nt, Human
agauacugaacaucgcugaagaacu

SEQ ID NO: 1200827 - RNA, 22 nt, Human
agauauuggucugccagaaaua

SEQ ID NO: 1200828 - RNA, 19 nt, Human
agauucccuaucaggcagc

SEQ ID NO: 1200829 - RNA, 19 nt, Human
agccuggaggaugccagug

SEQ ID NO: 1200830 - RNA, 20 nt, Human
agcucuggggccuuucucgu

SEQ ID NO: 1200831 - RNA, 20 nt, Human
agcugaccggagagguacag

SEQ ID NO: 1200832 - RNA, 18 nt, Human
agcugcuuugugaggaga

SEQ ID NO: 1200833 - RNA, 20 nt, Human
agcuggugguuuguagaggc

SEQ ID NO: 1200834 - RNA, 19 nt, Human
aggaacugggguaggcaca

SEQ ID NO: 1200835 - RNA, 22 nt, Human
aggaagaaugggaacgaaaaga

SEQ ID NO: 1200836 - RNA, 18 nt, Human
aggacuauuuuuuccuug

SEQ ID NO: 1200837 - RNA, 22 nt, Human
aggaggagcugcuuugugagga

SEQ ID NO: 1200838 - RNA, 23 nt, Human
aggcccagccacccacauggcca

SEQ ID NO: 1200839 - RNA, 21 nt, Human
aggcucccaaagaagugggaa

SEQ ID NO: 1200840 - RNA, 23 nt, Human
agucaugguacuuuuauguuucu

SEQ ID NO: 1200841 - RNA, 19 nt, Human
auaguggagcccccugagg

SEQ ID NO: 1200842 - RNA, 19 nt, Human
aucauccccacgguggauc

SEQ ID NO: 1200843 - RNA, 22 nt, Human
aucccugaccagggguggaagu

SEQ ID NO: 1200844 - RNA, 22 nt, Human
aucuggagaggguucgcugggg

SEQ ID NO: 1200845 - RNA, 24 nt, Human
aucuuggucaucuccacgucccca

SEQ ID NO: 1200846 - RNA, 20 nt, Human
auggccacagugccuggaac

SEQ ID NO: 1200847 - RNA, 21 nt, Human
auggccacagugccuggaacc

SEQ ID NO: 1200848 - RNA, 18 nt, Human
auggucccucugugcugg

SEQ ID NO: 1200849 - RNA, 24 nt, Human
augugcuauuggggaugggggugg

SEQ ID NO: 1200850 - RNA, 21 nt, Human
auguggauaggaacuggggua

SEQ ID NO: 1200851 - RNA, 22 nt, Human
caacagacaagaccugcucccc

SEQ ID NO: 1200852 - RNA, 26 nt, Human
caacaguugcuucagucuuuaucuga

SEQ ID NO: 1200853 - RNA, 22 nt, Human
caacaugauuccuaaucccuga

SEQ ID NO: 1200854 - RNA, 21 nt, Human
caacucuuguuccaucaggaa

SEQ ID NO: 1200855 - RNA, 23 nt, Human
caagugacuucauugaugugaac

SEQ ID NO: 1200856 - RNA, 23 nt, Human
caagugcaaaauugcccuuuaaa

SEQ ID NO: 1200857 - RNA, 24 nt, Human
caaucauguuaaagucacccaggu

SEQ ID NO: 1200858 - RNA, 27 nt, Human
cacaagucucccuccuccucggagucc

SEQ ID NO: 1200859 - RNA, 21 nt, Human
caccaacccacagacauucuu

SEQ ID NO: 1200860 - RNA, 22 nt, Human
caccuguuccagccaacagucu

SEQ ID NO: 1200861 - RNA, 19 nt, Human
cacguccccacauagccug

SEQ ID NO: 1200862 - RNA, 24 nt, Human
cacugggccaggccuggggcacug

SEQ ID NO: 1200863 - RNA, 22 nt, Human
cacuguaugccaggcgcuaggc

SEQ ID NO: 1200864 - RNA, 23 nt, Human
cagaacauaugguaaguaccaga

SEQ ID NO: 1200865 - RNA, 21 nt, Human
cagaacgcagugaugaagcug

SEQ ID NO: 1200866 - RNA, 24 nt, Human
cagacaagaccugcuccccuggga

SEQ ID NO: 1200867 - RNA, 25 nt, Human
cagacaagaccugcuccccugggaa

SEQ ID NO: 1200868 - RNA, 20 nt, Human
cagcacacugggccaggccu

SEQ ID NO: 1200869 - RNA, 22 nt, Human
cagcaccagguacaagccugaa

SEQ ID NO: 1200870 - RNA, 21 nt, Human
cagccggaguggggcaggaga

SEQ ID NO: 1200871 - RNA, 18 nt, Human
caggagguuccugggcca

SEQ ID NO: 1200872 - RNA, 18 nt, Human
caggcucuuugcugggug

SEQ ID NO: 1200873 - RNA, 22 nt, Human
caggguuaacccgccccgcucc

SEQ ID NO: 1200874 - RNA, 21 nt, Human
cagugcuauaaguuccauaca

SEQ ID NO: 1200875 - RNA, 23 nt, Human
caugaccagaacauaugguaagu

SEQ ID NO: 1200876 - RNA, 22 nt, Human
cauggccacagugccuggaacc

SEQ ID NO: 1200877 - RNA, 26 nt, Human
cauucuugauggagaggagcuggaag

SEQ ID NO: 1200878 - RNA, 18 nt, Human
ccaaagaagugggaacac

SEQ ID NO: 1200879 - RNA, 18 nt, Human
ccaaagacagcaucuugg

SEQ ID NO: 1200880 - RNA, 27 nt, Human
ccaaggcugcgacuggucagcacccca

SEQ ID NO: 1200881 - RNA, 22 nt, Human
ccaccaggcucccaaagaagug

SEQ ID NO: 1200882 - RNA, 21 nt, Human
ccaggaggggguugcuugggg

SEQ ID NO: 1200883 - RNA, 18 nt, Human
ccaggggagaacuggcug

SEQ ID NO: 1200884 - RNA, 22 nt, Human
ccauacauuuucagcauugaca

SEQ ID NO: 1200885 - RNA, 23 nt, Human
ccauccugcucccauuaucauuu

SEQ ID NO: 1200886 - RNA, 23 nt, Human
cccaaagacagcaucuuggucau

SEQ ID NO: 1200887 - RNA, 21 nt, Human
cccauggaugaaaggccucua

SEQ ID NO: 1200888 - RNA, 22 nt, Human
cccccaagccuauccuggcagg

SEQ ID NO: 1200889 - RNA, 26 nt, Human
cccccaccccccuagugcgucccccu

SEQ ID NO: 1200890 - RNA, 19 nt, Human
ccccgcucuggccaccugg

SEQ ID NO: 1200891 - RNA, 24 nt, Human
cccgcagcggccugcaugguccuu

SEQ ID NO: 1200892 - RNA, 26 nt, Human
cccguaagaucccggagaauguccug

SEQ ID NO: 1200893 - RNA, 20 nt, Human
ccgcuccucucuuuccuucc

SEQ ID NO: 1200894 - RNA, 18 nt, Human
ccguguggaagcucuggg

SEQ ID NO: 1200895 - RNA, 19 nt, Human
ccuaaucccugaccagggg

SEQ ID NO: 1200896 - RNA, 21 nt, Human
ccuacgccuccuuccgaugua

SEQ ID NO: 1200897 - RNA, 22 nt, Human
ccuacugggccuucuggggccc

SEQ ID NO: 1200898 - RNA, 22 nt, Human
ccuacugggccuucuggggccc

SEQ ID NO: 1200899 - RNA, 18 nt, Human
ccucucucuuuccaccug

SEQ ID NO: 1200900 - RNA, 20 nt, Human
ccucucuuuccuuccgcugu

SEQ ID NO: 1200901 - RNA, 20 nt, Human
ccucugcucauagaggugaa

SEQ ID NO: 1200902 - RNA, 19 nt, Human
ccucuucagugucaucgcu

SEQ ID NO: 1200903 - RNA, 25 nt, Human
ccugacuacagcauacguagucggg

SEQ ID NO: 1200904 - RNA, 22 nt, Human
ccuggggacagccaggccacag

SEQ ID NO: 1200905 - RNA, 24 nt, Human
cgcacaccaacccacagacauucu

SEQ ID NO: 1200906 - RNA, 21 nt, Human
cggcaggggaggguuggugau

SEQ ID NO: 1200907 - RNA, 19 nt, Human
cggcgggggacucgggcac

SEQ ID NO: 1200908 - RNA, 20 nt, Human
cguguggaagcucuggggcc

SEQ ID NO: 1200909 - RNA, 24 nt, Human
cguguggaagcucuggggccuuuc

SEQ ID NO: 1200910 - RNA, 19 nt, Human
cuagaucguaccugccccu

SEQ ID NO: 1200911 - RNA, 22 nt, Human
cucaaucauguuaaagucaccc

SEQ ID NO: 1200912 - RNA, 21 nt, Human
cucacacgugaaugaaccaac

SEQ ID NO: 1200913 - RNA, 21 nt, Human
cuccucucuuuccuuccgcug

SEQ ID NO: 1200914 - RNA, 24 nt, Human
cucugguucagagagcaagucgga

SEQ ID NO: 1200915 - RNA, 20 nt, Human
cucugugcuggguucuccuc

SEQ ID NO: 1200916 - RNA, 20 nt, Human
cugaguucauucuugaugga

SEQ ID NO: 1200917 - RNA, 22 nt, Human
cugcaggaaagaaugugggugc

SEQ ID NO: 1200918 - RNA, 22 nt, Human
cugccagcuuaaugagcugugu

SEQ ID NO: 1200919 - RNA, 19 nt, Human
cugcccugcucccaccaga

SEQ ID NO: 1200920 - RNA, 22 nt, Human
cugcccuguccucccggccgcg

SEQ ID NO: 1200921 - RNA, 20 nt, Human
cugccuggggacagccaggc

SEQ ID NO: 1200922 - RNA, 21 nt, Human
cugccugucccuugcgucaug

SEQ ID NO: 1200923 - RNA, 21 nt, Human
cugcugcccuguccucccggc

SEQ ID NO: 1200924 - RNA, 19 nt, Human
cuggagauaaagccuuucu

SEQ ID NO: 1200925 - RNA, 19 nt, Human
cugggcucacuucuucuug

SEQ ID NO: 1200926 - RNA, 22 nt, Human
cuggguucuccucggccucggc

SEQ ID NO: 1200927 - RNA, 25 nt, Human
cuuacagucaugguacuuuuauguu

SEQ ID NO: 1200928 - RNA, 27 nt, Human
cuugaccuugggccucauaccgguucc

SEQ ID NO: 1200929 - RNA, 21 nt, Human
cuugauuuggccucuucagcu

SEQ ID NO: 1200930 - RNA, 24 nt, Human
cuugcugguacagucaagugacuu

SEQ ID NO: 1200931 - RNA, 24 nt, Human
cuuuuuauuucuuccuucugggaa

SEQ ID NO: 1200932 - RNA, 20 nt, Human
gaacgcagugaugaagcugg

SEQ ID NO: 1200933 - RNA, 23 nt, Human
gaagcucuggggccuuucucguc

SEQ ID NO: 1200934 - RNA, 23 nt, Human
gaaggcuucagguaacuuuuuau

SEQ ID NO: 1200935 - RNA, 20 nt, Human
gacuguggaccaaaccuggg

SEQ ID NO: 1200936 - RNA, 21 nt, Human
gagaaaagacacauuuaucgu

SEQ ID NO: 1200937 - RNA, 20 nt, Human
gagcauccuccucacuagaa

SEQ ID NO: 1200938 - RNA, 19 nt, Human
gagcggcaggggaggguug

SEQ ID NO: 1200939 - RNA, 22 nt, Human
gaggggguugcuuggggaaccc

SEQ ID NO: 1200940 - RNA, 18 nt, Human
gagguuccugggccaccu

SEQ ID NO: 1200941 - RNA, 23 nt, Human
gauaacugaaguugaaggaagaa

SEQ ID NO: 1200942 - RNA, 25 nt, Human
gcaccccaggauggucccucugugc

SEQ ID NO: 1200943 - RNA, 19 nt, Human
gcagaagacagaguagggu

SEQ ID NO: 1200944 - RNA, 21 nt, Human
gccccggggcucccuuccccu

SEQ ID NO: 1200945 - RNA, 26 nt, Human
gccuugcccaucugccaaacccucca

SEQ ID NO: 1200946 - RNA, 20 nt, Human
gcgggucccaguucccggag

SEQ ID NO: 1200947 - RNA, 18 nt, Human
gcggugcuugugaaggag

SEQ ID NO: 1200948 - RNA, 18 nt, Human
gcugcgacuggucagcac

SEQ ID NO: 1200949 - RNA, 21 nt, Human
gcugggugcccauggcucugc

SEQ ID NO: 1200950 - RNA, 20 nt, Human
gcuggguucuccucggccuc

SEQ ID NO: 1200951 - RNA, 20 nt, Human
ggaagccaggccaaggcugc

SEQ ID NO: 1200952 - RNA, 21 nt, Human
ggacacgcccugaucugugcu

SEQ ID NO: 1200953 - RNA, 21 nt, Human
ggagauggggaaguagcacag

SEQ ID NO: 1200954 - RNA, 23 nt, Human
ggagggaacgguaaccagaggga

SEQ ID NO: 1200955 - RNA, 18 nt, Human
ggagguggaagcggugcu

SEQ ID NO: 1200956 - RNA, 23 nt, Human
ggcaaacaugaaacccugaguuu

SEQ ID NO: 1200957 - RNA, 20 nt, Human
ggcacuugaggaacucggga

SEQ ID NO: 1200958 - RNA, 19 nt, Human
ggccuaugggggaggcugg

SEQ ID NO: 1200959 - RNA, 21 nt, Human
ggccugggcaaucagcacugu

SEQ ID NO: 1200960 - RNA, 19 nt, Human
ggccugggccuccagggga

SEQ ID NO: 1200961 - RNA, 23 nt, Human
ggcucuggagcugaccggagagg

SEQ ID NO: 1200962 - RNA, 18 nt, Human
gggaacgaaaagagaaag

SEQ ID NO: 1200963 - RNA, 19 nt, Human
gggaaggagcacucggguc

SEQ ID NO: 1200964 - RNA, 24 nt, Human
gggcagaagacagaguaggguccu

SEQ ID NO: 1200965 - RNA, 20 nt, Human
gggccuuggagggaagagcu

SEQ ID NO: 1200966 - RNA, 22 nt, Human
ggggaccaagggaguguggccu

SEQ ID NO: 1200967 - RNA, 19 nt, Human
ggggaggguuggugauggg

SEQ ID NO: 1200968 - RNA, 21 nt, Human
ggggaggguuggugauggggu

SEQ ID NO: 1200969 - RNA, 22 nt, Human
ggggauggggguggcagagugg

SEQ ID NO: 1200970 - RNA, 21 nt, Human
ggggcacugccagcugcuucu

SEQ ID NO: 1200971 - RNA, 24 nt, Human
gggugugagugguggccccgagaa

SEQ ID NO: 1200972 - RNA, 18 nt, Human
ggugguuuguagaggcuu

SEQ ID NO: 1200973 - RNA, 18 nt, Human
ggugugugcugagcuggg

SEQ ID NO: 1200974 - RNA, 23 nt, Human
ggugugugcugagcugggggcag

SEQ ID NO: 1200975 - RNA, 21 nt, Human
gguguugaccccccacccccc

SEQ ID NO: 1200976 - RNA, 23 nt, Human
guaccagaaccaggguucaaaaa

SEQ ID NO: 1200977 - RNA, 18 nt, Human
guagaaaugauguggaua

SEQ ID NO: 1200978 - RNA, 18 nt, Human
gucccucugugcuggguu

SEQ ID NO: 1200979 - RNA, 18 nt, Human
gugugcugagcugggggc

SEQ ID NO: 1200980 - RNA, 24 nt, Human
guucaaaaacagggcuuuccaucu

SEQ ID NO: 1200981 - RNA, 19 nt, Human
guucacugccuacgccucc

SEQ ID NO: 1200982 - RNA, 20 nt, Human
guuggcaaacaugaaacccu

SEQ ID NO: 1200983 - RNA, 18 nt, Human
uaaaagggcccauggaug

SEQ ID NO: 1200984 - RNA, 22 nt, Human
uaaauagucuuuccaguauccu

SEQ ID NO: 1200985 - RNA, 19 nt, Human
uaaaugaugccuuucuugg

SEQ ID NO: 1200986 - RNA, 28 nt, Human
uaaaugcagauaucuugauagaugaccc

SEQ ID NO: 1200987 - RNA, 18 nt, Human
uaacccgccccgcucugg

SEQ ID NO: 1200988 - RNA, 19 nt, Human
uaagaaaagcaccuuggua

SEQ ID NO: 1200989 - RNA, 20 nt, Human
uaagagaucuguauauagug

SEQ ID NO: 1200990 - RNA, 19 nt, Human
uaagucucugaucaugugg

SEQ ID NO: 1200991 - RNA, 22 nt, Human
uaagucucugaucauguggcaa

SEQ ID NO: 1200992 - RNA, 22 nt, Human
uaagugaauuaauuccuccuuu

SEQ ID NO: 1200993 - RNA, 26 nt, Human
uacauuuucagcauugacaccaaccu

SEQ ID NO: 1200994 - RNA, 23 nt, Human
uaccagaaccaggguucaaaaac

SEQ ID NO: 1200995 - RNA, 24 nt, Human
uacccuggcucuugucuugagaac

SEQ ID NO: 1200996 - RNA, 19 nt, Human
uacugggccuucuggggcc

SEQ ID NO: 1200997 - RNA, 24 nt, Human
uagagaacaagccgcugaagagaa

SEQ ID NO: 1200998 - RNA, 23 nt, Human
uagcagauucccuaucaggcagc

SEQ ID NO: 1200999 - RNA, 18 nt, Human
uaggguccuugcuccagg

SEQ ID NO: 1201000 - RNA, 22 nt, Human
uaguggagcccccugaggcugg

SEQ ID NO: 1201001 - RNA, 19 nt, Human
uauccuggcaggccugggc

SEQ ID NO: 1201002 - RNA, 27 nt, Human
ucacaggucuucacggcaccaagaucu

SEQ ID NO: 1201003 - RNA, 22 nt, Human
ucacuagaacucugggaugugc

SEQ ID NO: 1201004 - RNA, 22 nt, Human
ucagccacaccagcuuccccca

SEQ ID NO: 1201005 - RNA, 28 nt, Human
ucaggcugaauagcuccggcaacccaua

SEQ ID NO: 1201006 - RNA, 24 nt, Human
ucaggggcguucucagucauuggc

SEQ ID NO: 1201007 - RNA, 20 nt, Human
ucagguucacugccuacgcc

SEQ ID NO: 1201008 - RNA, 19 nt, Human
ucagucuucgcugcugguc

SEQ ID NO: 1201009 - RNA, 19 nt, Human
uccaggauucugggucaac

SEQ ID NO: 1201010 - RNA, 20 nt, Human
ucccaggggaggcguccguc

SEQ ID NO: 1201011 - RNA, 21 nt, Human
ucccccaaaccugucccucuu

SEQ ID NO: 1201012 - RNA, 26 nt, Human
ucccccaaagacagcaucuuggucau

SEQ ID NO: 1201013 - RNA, 22 nt, Human
ucccggagaauguccugaggcu

SEQ ID NO: 1201014 - RNA, 20 nt, Human
ucccucugugcuggguucuc

SEQ ID NO: 1201015 - RNA, 21 nt, Human
ucccucugugcuggguucucc

SEQ ID NO: 1201016 - RNA, 18 nt, Human
ucccugaccaggggugga

SEQ ID NO: 1201017 - RNA, 21 nt, Human
uccuccucacuagaacucugg

SEQ ID NO: 1201018 - RNA, 24 nt, Human
uccucggccucggcugugcccacc

SEQ ID NO: 1201019 - RNA, 24 nt, Human
ucgcucccuccugcugcccugucc

SEQ ID NO: 1201020 - RNA, 18 nt, Human
ucgcugggguccacuuuc

SEQ ID NO: 1201021 - RNA, 21 nt, Human
ucgcuucagaaaacacaggag

SEQ ID NO: 1201022 - RNA, 23 nt, Human
ucuccagcgucccugacagaugu

SEQ ID NO: 1201023 - RNA, 20 nt, Human
ucuccaguaacuugauguug

SEQ ID NO: 1201024 - RNA, 23 nt, Human
ucuccaguaacuugauguugccc

SEQ ID NO: 1201025 - RNA, 27 nt, Human
ucucccccaaaccugucccucuuguug

SEQ ID NO: 1201026 - RNA, 21 nt, Human
ucucccuccuccucggagucc

SEQ ID NO: 1201027 - RNA, 24 nt, Human
ucucucagagcagaaugcaugaau

SEQ ID NO: 1201028 - RNA, 21 nt, Human
ucugaaguacaucuggagagg

SEQ ID NO: 1201029 - RNA, 19 nt, Human
ucugacagaugcgacacaa

SEQ ID NO: 1201030 - RNA, 22 nt, Human
ucugagcuagagucaagagggc

SEQ ID NO: 1201031 - RNA, 19 nt, Human
ucugcccugcucccaccag

SEQ ID NO: 1201032 - RNA, 22 nt, Human
ucugcccugcucccaccagaag

SEQ ID NO: 1201033 - RNA, 23 nt, Human
ucuggagaggguucgcugggguc

SEQ ID NO: 1201034 - RNA, 20 nt, Human
ucugggucaacaucaucccc

SEQ ID NO: 1201035 - RNA, 26 nt, Human
ucuguccuucucuguagcagauuccc

SEQ ID NO: 1201036 - RNA, 19 nt, Human
ucuucagugucaucgcuuu

SEQ ID NO: 1201037 - RNA, 21 nt, Human
ucuuccuucccuccuccauug

SEQ ID NO: 1201038 - RNA, 22 nt, Human
ucuugauggagaggagcuggaa

SEQ ID NO: 1201039 - RNA, 23 nt, Human
ucuuggugagugggaaguuuuug

SEQ ID NO: 1201040 - RNA, 22 nt, Human
ugaaaggccucuagcaccaagu

SEQ ID NO: 1201041 - RNA, 26 nt, Human
ugaacaaacugcaggcuucccacaca

SEQ ID NO: 1201042 - RNA, 19 nt, Human
ugaacuacuugaucugcau

SEQ ID NO: 1201043 - RNA, 26 nt, Human
ugaagaacacgaauauuuagagaaca

SEQ ID NO: 1201044 - RNA, 22 nt, Human
ugaaggcacagcacaggggucu

SEQ ID NO: 1201045 - RNA, 22 nt, Human
ugaccucugcaauuuucagcau

SEQ ID NO: 1201046 - RNA, 18 nt, Human
ugacuacagcauacguag

SEQ ID NO: 1201047 - RNA, 19 nt, Human
ugacuacagcauacguagu

SEQ ID NO: 1201048 - RNA, 18 nt, Human
ugagaugccaggaugugg

SEQ ID NO: 1201049 - RNA, 21 nt, Human
ugagcgcacaccaacccacag

SEQ ID NO: 1201050 - RNA, 19 nt, Human
ugaguccuggugaccugga

SEQ ID NO: 1201051 - RNA, 23 nt, Human
ugauagaaggcccgcuccucucu

SEQ ID NO: 1201052 - RNA, 19 nt, Human
ugauagaugaccuugguuc

SEQ ID NO: 1201053 - RNA, 23 nt, Human
ugaugugaacagcacacugggcc

SEQ ID NO: 1201054 - RNA, 18 nt, Human
ugauguugcccacuacua

SEQ ID NO: 1201055 - RNA, 19 nt, Human
ugauuccuaaucccugacc

SEQ ID NO: 1201056 - RNA, 21 nt, Human
ugauuugggaaaugagacacu

SEQ ID NO: 1201057 - RNA, 20 nt, Human
ugcaaagaaaguaaauggug

SEQ ID NO: 1201058 - RNA, 24 nt, Human
ugcagcucacucugggaaggagca

SEQ ID NO: 1201059 - RNA, 19 nt, Human
ugccagugcaccucgaggg

SEQ ID NO: 1201060 - RNA, 21 nt, Human
ugcccugcucccaccagaagu

SEQ ID NO: 1201061 - RNA, 21 nt, Human
ugcccuguccucccggccgcg

SEQ ID NO: 1201062 - RNA, 19 nt, Human
ugccuggaaccgugugggg

SEQ ID NO: 1201063 - RNA, 22 nt, Human
ugccuggaaccguguggggaac

SEQ ID NO: 1201064 - RNA, 19 nt, Human
ugccuggggacagccaggc

SEQ ID NO: 1201065 - RNA, 19 nt, Human
ugccuuuaucuuacugguu

SEQ ID NO: 1201066 - RNA, 21 nt, Human
ugcuauaaguuccauacagag

SEQ ID NO: 1201067 - RNA, 22 nt, Human
ugcuggugcuucugguagaacu

SEQ ID NO: 1201068 - RNA, 18 nt, Human
ugcugguggugucggagc

SEQ ID NO: 1201069 - RNA, 23 nt, Human
ugcuucuguccccagaugcucuc

SEQ ID NO: 1201070 - RNA, 19 nt, Human
uggaagaauccacuaagga

SEQ ID NO: 1201071 - RNA, 21 nt, Human
uggaagcggugcuugugaagg

SEQ ID NO: 1201072 - RNA, 22 nt, Human
uggagaggguucgcuggggucc

SEQ ID NO: 1201073 - RNA, 19 nt, Human
uggagauauuggucugcca

SEQ ID NO: 1201074 - RNA, 22 nt, Human
uggcaggccugggcaaucagca

SEQ ID NO: 1201075 - RNA, 24 nt, Human
uggccgagggcagucuugaaauug

SEQ ID NO: 1201076 - RNA, 21 nt, Human
uggcgggaagccaggccaagg

SEQ ID NO: 1201077 - RNA, 19 nt, Human
uggcuucuagaucguaccu

SEQ ID NO: 1201078 - RNA, 19 nt, Human
ugggaaaugagacacugca

SEQ ID NO: 1201079 - RNA, 23 nt, Human
ugggacaaccuuugcccagcaga

SEQ ID NO: 1201080 - RNA, 26 nt, Human
ugggacggaggagggcacuugaggaa

SEQ ID NO: 1201081 - RNA, 18 nt, Human
uggggauggggguggcag

SEQ ID NO: 1201082 - RNA, 22 nt, Human
ugggggaggcugggugcccaug

SEQ ID NO: 1201083 - RNA, 21 nt, Human
ugggguuucagccacaccagc

SEQ ID NO: 1201084 - RNA, 18 nt, Human
ugggugugagugguggcc

SEQ ID NO: 1201085 - RNA, 25 nt, Human
ugggugugagugguggccccgagaa

SEQ ID NO: 1201086 - RNA, 18 nt, Human
uggguuggugccagcauu

SEQ ID NO: 1201087 - RNA, 19 nt, Human
ugguacagucaagugacuu

SEQ ID NO: 1201088 - RNA, 21 nt, Human
uggucagcaccccaggauggu

SEQ ID NO: 1201089 - RNA, 23 nt, Human
uggugaugggguggauccuccag

SEQ ID NO: 1201090 - RNA, 18 nt, Human
uggugucggagcaacuug

SEQ ID NO: 1201091 - RNA, 24 nt, Human
uguaauaaucagauagagacaaga

SEQ ID NO: 1201092 - RNA, 19 nt, Human
uguaccaggacugcucugc

SEQ ID NO: 1201093 - RNA, 22 nt, Human
ugucacagacuucacuccaagg

SEQ ID NO: 1201094 - RNA, 23 nt, Human
ugucacugaaaccugguguuuuu

SEQ ID NO: 1201095 - RNA, 21 nt, Human
ugucagacgcagggcucugga

SEQ ID NO: 1201096 - RNA, 27 nt, Human
ugugaugggaaggagaacagggugagc

SEQ ID NO: 1201097 - RNA, 25 nt, Human
ugugcccacccgugucuggggugug

SEQ ID NO: 1201098 - RNA, 19 nt, Human
ugugcugagcugggggcag

SEQ ID NO: 1201099 - RNA, 20 nt, Human
ugugcugucagacgcagggc

SEQ ID NO: 1201100 - RNA, 21 nt, Human
ugugugcugagcugggggcag

SEQ ID NO: 1201101 - RNA, 21 nt, Human
uguucccgcagcggccugcau

SEQ ID NO: 1201102 - RNA, 22 nt, Human
uucacugccaccucuguccuuc

SEQ ID NO: 1201103 - RNA, 22 nt, Human
uucacuugcaggguuaacccgc

SEQ ID NO: 1201104 - RNA, 18 nt, Human
uucagcauuuucuucaaa

SEQ ID NO: 1201105 - RNA, 21 nt, Human
uuccaguaaaagggcccaugg

SEQ ID NO: 1201106 - RNA, 22 nt, Human
uuccccguaagaucccggagaa

SEQ ID NO: 1201107 - RNA, 19 nt, Human
uucccugacagcaaauucg

SEQ ID NO: 1201108 - RNA, 19 nt, Human
uuccgcuguuaaacaucuc

SEQ ID NO: 1201109 - RNA, 19 nt, Human
uuccugggccaccuguucc

SEQ ID NO: 1201110 - RNA, 20 nt, Human
uuccuucccuccuccauugg

SEQ ID NO: 1201111 - RNA, 22 nt, Human
uugcaggguuaacccgccccgc

SEQ ID NO: 1201112 - RNA, 23 nt, Human
uuucuaaugggagacagugguug

SEQ ID NO: 1201113 - RNA, 21 nt, Human
uuuucagcauugacaccaacc

SEQ ID NO: 1201114 - RNA, 24 nt, Human
uuuuucaggcacucuugaugaaca

SEQ ID NO: 1201115 - RNA, 21 nt, Human
ccucucacccccuucccaggc

SEQ ID NO: 1201116 - RNA, 23 nt, Human
ccucucacccccuucccaggcca

SEQ ID NO: 1201117 - RNA, 22 nt, Human
cucucacccccuucccaggcca

SEQ ID NO: 1201118 - RNA, 24 nt, Human
cuuuuucuuuccuuccucucaccc

SEQ ID NO: 1201119 - RNA, 20 nt, Human
uccuuuuucuuuccuuccuc

SEQ ID NO: 1201120 - RNA, 22 nt, Human
uuuccuuccucucacccccuuc

SEQ ID NO: 1201121 - RNA, 21 nt, Human
aacagaaaacaugcacacgag

SEQ ID NO: 1201122 - RNA, 21 nt, Human
aaggcacccuccccuccccua

SEQ ID NO: 1201123 - RNA, 30 nt, Human
agacgucguccgcgcccgcguacuccucgg

SEQ ID NO: 1201124 - RNA, 21 nt, Human
agcgccuccucugggcagagc

SEQ ID NO: 1201125 - RNA, 21 nt, Human
agggagccucaaaacauagca

SEQ ID NO: 1201126 - RNA, 20 nt, Human
agguugaaaaucgaaggcca

SEQ ID NO: 1201127 - RNA, 23 nt, Human
cacccuccccuccccuaaucccc

SEQ ID NO: 1201128 - RNA, 23 nt, Human
cagaucacucagccaacaagccc

SEQ ID NO: 1201129 - RNA, 24 nt, Human
cagccaacaagcccccuucagccu

SEQ ID NO: 1201130 - RNA, 19 nt, Human
cccagggcuggccccgcac

SEQ ID NO: 1201131 - RNA, 21 nt, Human
cccagguugaaaaucgaaggc

SEQ ID NO: 1201132 - RNA, 20 nt, Human
ccccagggcuggccccgcac

SEQ ID NO: 1201133 - RNA, 19 nt, Human
ccccgggcuggugccccuc

SEQ ID NO: 1201134 - RNA, 21 nt, Human
ccccucgccgcccgccgccgc

SEQ ID NO: 1201135 - RNA, 24 nt, Human
ccccuucuuuccugugcuuguccc

SEQ ID NO: 1201136 - RNA, 18 nt, Human
cccuccccuccccuaauc

SEQ ID NO: 1201137 - RNA, 22 nt, Human
cccuggaaggcacccuccccuc

SEQ ID NO: 1201138 - RNA, 24 nt, Human
ccucaaaacauagcacagaggcac

SEQ ID NO: 1201139 - RNA, 25 nt, Human
ccuccccuccccuaauccccagguu

SEQ ID NO: 1201140 - RNA, 23 nt, Human
ccuccucugggcagagcuggggc

SEQ ID NO: 1201141 - RNA, 18 nt, Human
ccucugggcagagcuggg

SEQ ID NO: 1201142 - RNA, 22 nt, Human
ccuggaaggcacccuccccucc

SEQ ID NO: 1201143 - RNA, 20 nt, Human
cgggcgggggcuggggcugc

SEQ ID NO: 1201144 - RNA, 22 nt, Human
cguccgcgcccgcguacuccuc

SEQ ID NO: 1201145 - RNA, 22 nt, Human
cuccucggcgacgggcgacugg

SEQ ID NO: 1201146 - RNA, 22 nt, Human
cucgggcgggggcuggggcugc

SEQ ID NO: 1201147 - RNA, 22 nt, Human
cuggccccgcacugguucagga

SEQ ID NO: 1201148 - RNA, 20 nt, Human
cuggggcugcuuucuccucu

SEQ ID NO: 1201149 - RNA, 22 nt, Human
cugguccccuucuuuccugugc

SEQ ID NO: 1201150 - RNA, 18 nt, Human
gagcggcccgaaggaggc

SEQ ID NO: 1201151 - RNA, 19 nt, Human
gagcuggggcugcuuucuc

SEQ ID NO: 1201152 - RNA, 21 nt, Human
gaggcucuggggacucguggg

SEQ ID NO: 1201153 - RNA, 23 nt, Human
gcacccuccccuccccuaauccc

SEQ ID NO: 1201154 - RNA, 22 nt, Human
gccauuugguuguagcuuuaga

SEQ ID NO: 1201155 - RNA, 18 nt, Human
gcgacgggcgacugggag

SEQ ID NO: 1201156 - RNA, 18 nt, Human
gcgccccgggcuggugcc

SEQ ID NO: 1201157 - RNA, 18 nt, Human
gcucuggggacucguggg

SEQ ID NO: 1201158 - RNA, 23 nt, Human
gcuggccccgcacugguucagga

SEQ ID NO: 1201159 - RNA, 18 nt, Human
gcuggcugccugggguca

SEQ ID NO: 1201160 - RNA, 19 nt, Human
gcuggcugccuggggucau

SEQ ID NO: 1201161 - RNA, 18 nt, Human
gcuggggcugcgaccagg

SEQ ID NO: 1201162 - RNA, 22 nt, Human
gcuuucuccucugcagaucacu

SEQ ID NO: 1201163 - RNA, 20 nt, Human
gggcaaaggccagacuggaa

SEQ ID NO: 1201164 - RNA, 18 nt, Human
gggcagagcuggggcugc

SEQ ID NO: 1201165 - RNA, 20 nt, Human
gggcgggggcuggggcugcg

SEQ ID NO: 1201166 - RNA, 23 nt, Human
gggggcuggggcugcgaccaggc

SEQ ID NO: 1201167 - RNA, 26 nt, Human
guccccuucuuuccugugcuuguccc

SEQ ID NO: 1201168 - RNA, 22 nt, Human
guccugaguagagcccuggaag

SEQ ID NO: 1201169 - RNA, 22 nt, Human
uaaaaugaaugguagaauauca

SEQ ID NO: 1201170 - RNA, 23 nt, Human
uagagcccuggaaggcacccucc

SEQ ID NO: 1201171 - RNA, 19 nt, Human
uaguccugaguagagcccu

SEQ ID NO: 1201172 - RNA, 21 nt, Human
ucaaaacauagcacagaggca

SEQ ID NO: 1201173 - RNA, 18 nt, Human
ucacucagccaacaagcc

SEQ ID NO: 1201174 - RNA, 20 nt, Human
ucgaugacggcgaagggcuu

SEQ ID NO: 1201175 - RNA, 19 nt, Human
ucgccgcccgccgccgcgc

SEQ ID NO: 1201176 - RNA, 21 nt, Human
ugaaaaacugcaagacccaaa

SEQ ID NO: 1201177 - RNA, 18 nt, Human
ugcaagaaggccagggca

SEQ ID NO: 1201178 - RNA, 20 nt, Human
ugcaagacccaaaggaauua

SEQ ID NO: 1201179 - RNA, 23 nt, Human
ugcaagacccaaaggaauuaaaa

SEQ ID NO: 1201180 - RNA, 28 nt, Human
ugcgaccaggcggugcugagccggcgcc

SEQ ID NO: 1201181 - RNA, 21 nt, Human
ugcuuucuccucugcagauca

SEQ ID NO: 1201182 - RNA, 21 nt, Human
uggcgcgccuccccagggcug

SEQ ID NO: 1201183 - RNA, 23 nt, Human
uggggucaugcccagcuggcaug

SEQ ID NO: 1201184 - RNA, 24 nt, Human
uggggucaugcccagcuggcaugg

SEQ ID NO: 1201185 - RNA, 19 nt, Human
uguggcuggcugccugggg

SEQ ID NO: 1201186 - RNA, 23 nt, Human
uuaguccugaguagagcccugga

SEQ ID NO: 1201187 - RNA, 22 nt, Human
aaaaaaaccuaaaccacaguga

SEQ ID NO: 1201188 - RNA, 26 nt, Human
aaaaaaaccuaaaccacagugacucc

SEQ ID NO: 1201189 - RNA, 21 nt, Human
aaagaaaaauuagccgggcau

SEQ ID NO: 1201190 - RNA, 21 nt, Human
aaaggggaaccaauaucccug

SEQ ID NO: 1201191 - RNA, 19 nt, Human
aacauggugaaaccccauu

SEQ ID NO: 1201192 - RNA, 20 nt, Human
aacauggugaaaccccauuu

SEQ ID NO: 1201193 - RNA, 21 nt, Human
aacauggugaaaccccauuuc

SEQ ID NO: 1201194 - RNA, 21 nt, Human
aacauggugaaaccccauuuc

SEQ ID NO: 1201195 - RNA, 20 nt, Human
acaccacugcacuccagccu

SEQ ID NO: 1201196 - RNA, 24 nt, Human
acaccacugcacuccagccugggc

SEQ ID NO: 1201197 - RNA, 22 nt, Human
acagagcgaaacugucucaaaa

SEQ ID NO: 1201198 - RNA, 22 nt, Human
accacugcacuccagccugggc

SEQ ID NO: 1201199 - RNA, 18 nt, Human
accccauuucuacuaaaa

SEQ ID NO: 1201200 - RNA, 25 nt, Human
accuuaagugggauggggagaaaaa

SEQ ID NO: 1201201 - RNA, 24 nt, Human
acugcacuccagccugggcaacag

SEQ ID NO: 1201202 - RNA, 24 nt, Human
acugcacuccagccugggcaacag

SEQ ID NO: 1201203 - RNA, 24 nt, Human
acuugaggucaggaguuugagacc

SEQ ID NO: 1201204 - RNA, 21 nt, Human
acuuugggggcucuagagagg

SEQ ID NO: 1201205 - RNA, 22 nt, Human
agccuggccaacauggugaaac

SEQ ID NO: 1201206 - RNA, 24 nt, Human
agccuggccaacauggugaaaccc

SEQ ID NO: 1201207 - RNA, 22 nt, Human
agcucacuugaggucaggaguu

SEQ ID NO: 1201208 - RNA, 22 nt, Human
agcucacuugaggucaggaguu

SEQ ID NO: 1201209 - RNA, 23 nt, Human
agcucacuugaggucaggaguuu

SEQ ID NO: 1201210 - RNA, 21 nt, Human
aggaaggcaggcaugggcucu

SEQ ID NO: 1201211 - RNA, 20 nt, Human
aggaguuugagaccagccug

SEQ ID NO: 1201212 - RNA, 24 nt, Human
aggcagacguugcagaaagccaag

SEQ ID NO: 1201213 - RNA, 18 nt, Human
aggcaggcaugggcucuu

SEQ ID NO: 1201214 - RNA, 18 nt, Human
aggccacccagcauacaa

SEQ ID NO: 1201215 - RNA, 24 nt, Human
aucacaccacugcacuccagccug

SEQ ID NO: 1201216 - RNA, 28 nt, Human
aucacaccacugcacuccagccugggca

SEQ ID NO: 1201217 - RNA, 21 nt, Human
auccagcuggugggaggggag

SEQ ID NO: 1201218 - RNA, 22 nt, Human
aucccacuacuaaggaggcuga

SEQ ID NO: 1201219 - RNA, 22 nt, Human
aucccagcacucugggaggcca

SEQ ID NO: 1201220 - RNA, 19 nt, Human
augggcauccagcuggugg

SEQ ID NO: 1201221 - RNA, 21 nt, Human
caaacagcagcaccuccucaa

SEQ ID NO: 1201222 - RNA, 24 nt, Human
caacauggugaaaccccauuucua

SEQ ID NO: 1201223 - RNA, 24 nt, Human
caaggcagucagcucacuugaggu

SEQ ID NO: 1201224 - RNA, 21 nt, Human
cacaccacugcacuccagccu

SEQ ID NO: 1201225 - RNA, 23 nt, Human
caccuguaaucccacuacuaagg

SEQ ID NO: 1201226 - RNA, 24 nt, Human
cacuacuaaggaggcugaggcagg

SEQ ID NO: 1201227 - RNA, 24 nt, Human
cacuccagccugggcaacagagcg

SEQ ID NO: 1201228 - RNA, 19 nt, Human
cacugcacuccagccuggg

SEQ ID NO: 1201229 - RNA, 21 nt, Human
cacugcacuccagccugggca

SEQ ID NO: 1201230 - RNA, 22 nt, Human
cacugcacuccagccugggcaa

SEQ ID NO: 1201231 - RNA, 23 nt, Human
cacugcacuccagccugggcaac

SEQ ID NO: 1201232 - RNA, 24 nt, Human
cacugcacuccagccugggcaaca

SEQ ID NO: 1201233 - RNA, 25 nt, Human
cacugcacuccagccugggcaacaa

SEQ ID NO: 1201234 - RNA, 23 nt, Human
cacuugaggucaggaguuugaga

SEQ ID NO: 1201235 - RNA, 21 nt, Human
cagcacucugggaggccaagg

SEQ ID NO: 1201236 - RNA, 24 nt, Human
cagcacucugggaggccaaggcag

SEQ ID NO: 1201237 - RNA, 24 nt, Human
cagcucacuugaggucaggaguuu

SEQ ID NO: 1201238 - RNA, 20 nt, Human
caugggcucuuucagugagg

SEQ ID NO: 1201239 - RNA, 20 nt, Human
ccacugcacuccagccuggg

SEQ ID NO: 1201240 - RNA, 20 nt, Human
ccacugcacuccagccuggg

SEQ ID NO: 1201241 - RNA, 21 nt, Human
ccacugcacuccagccugggc

SEQ ID NO: 1201242 - RNA, 23 nt, Human
ccacugcacuccagccugggcaa

SEQ ID NO: 1201243 - RNA, 24 nt, Human
ccacugcacuccagccugggcaac

SEQ ID NO: 1201244 - RNA, 21 nt, Human
ccagcugcugccugacuuugg

SEQ ID NO: 1201245 - RNA, 22 nt, Human
ccagcugcugccugacuuuggg

SEQ ID NO: 1201246 - RNA, 18 nt, Human
cccacuacuaaggaggcu

SEQ ID NO: 1201247 - RNA, 23 nt, Human
cccacuacuaaggaggcugaggc

SEQ ID NO: 1201248 - RNA, 20 nt, Human
cccaucaccuuaagugggau

SEQ ID NO: 1201249 - RNA, 29 nt, Human
ccccugagcacucauaccuaaaagcaaag

SEQ ID NO: 1201250 - RNA, 22 nt, Human
cccuugccccaucaccuuaagu

SEQ ID NO: 1201251 - RNA, 22 nt, Human
ccuaaaccacagugacucccaa

SEQ ID NO: 1201252 - RNA, 25 nt, Human
ccuaaaccacagugacucccaaaag

SEQ ID NO: 1201253 - RNA, 22 nt, Human
ccugacuuugggggcucuagag

SEQ ID NO: 1201254 - RNA, 23 nt, Human
ccuggccaacauggugaaacccc

SEQ ID NO: 1201255 - RNA, 24 nt, Human
ccuggccaacauggugaaacccca

SEQ ID NO: 1201256 - RNA, 24 nt, Human
cgaaacugucucaaaaaaaaagau

SEQ ID NO: 1201257 - RNA, 21 nt, Human
cuaaaaauaccaaaagaaaaa

SEQ ID NO: 1201258 - RNA, 23 nt, Human
cuaaaagcaaacagcagcaccuc

SEQ ID NO: 1201259 - RNA, 24 nt, Human
cucacuugaggucaggaguuugag

SEQ ID NO: 1201260 - RNA, 23 nt, Human
cuggccaacauggugaaacccca

SEQ ID NO: 1201261 - RNA, 21 nt, Human
gaaggcagacguugcagaaag

SEQ ID NO: 1201262 - RNA, 23 nt, Human
gagaccagccuggccaacauggu

SEQ ID NO: 1201263 - RNA, 24 nt, Human
gcacuccagccugggcaacagagc

SEQ ID NO: 1201264 - RNA, 21 nt, Human
gccaacauggugaaaccccau

SEQ ID NO: 1201265 - RNA, 19 nt, Human
gccaagaucacaccacugc

SEQ ID NO: 1201266 - RNA, 24 nt, Human
gccaaggcagucagcucacuugag

SEQ ID NO: 1201267 - RNA, 26 nt, Human
gccacaacauccggggccguggcccg

SEQ ID NO: 1201268 - RNA, 24 nt, Human
gcucacuugaggucaggaguuuga

SEQ ID NO: 1201269 - RNA, 22 nt, Human
ggagaaccucuucaaccuggaa

SEQ ID NO: 1201270 - RNA, 21 nt, Human
ggcauccagcuggugggaggg

SEQ ID NO: 1201271 - RNA, 24 nt, Human
gggcauaguagcgggcaccuguaa

SEQ ID NO: 1201272 - RNA, 19 nt, Human
ggucaggaguuugagacca

SEQ ID NO: 1201273 - RNA, 23 nt, Human
uaacaaaagaugacgacuaauua

SEQ ID NO: 1201274 - RNA, 20 nt, Human
uaccuaaaagcaaacagcag

SEQ ID NO: 1201275 - RNA, 23 nt, Human
uauuuuguucccccaaaguacca

SEQ ID NO: 1201276 - RNA, 23 nt, Human
ucacaccacugcacuccagccug

SEQ ID NO: 1201277 - RNA, 22 nt, Human
ucacuugaggucaggaguuuga

SEQ ID NO: 1201278 - RNA, 19 nt, Human
ucagugagggccccugagc

SEQ ID NO: 1201279 - RNA, 21 nt, Human
ucccugacuauuuuguucccc

SEQ ID NO: 1201280 - RNA, 21 nt, Human
ucccuugccccaucaccuuaa

SEQ ID NO: 1201281 - RNA, 23 nt, Human
ucccuugggggagcacacucuca

SEQ ID NO: 1201282 - RNA, 23 nt, Human
ugagaccagccuggccaacaugg

SEQ ID NO: 1201283 - RNA, 24 nt, Human
ugaggcaggagaaccucuucaacc

SEQ ID NO: 1201284 - RNA, 20 nt, Human
ugagggccccugagcacuca

SEQ ID NO: 1201285 - RNA, 18 nt, Human
ugaggucaggaguuugag

SEQ ID NO: 1201286 - RNA, 24 nt, Human
ugauggagagaagccucccuuggg

SEQ ID NO: 1201287 - RNA, 24 nt, Human
ugccccaucaccuuaagugggauu

SEQ ID NO: 1201288 - RNA, 24 nt, Human
uggccaacauggugaaaccccauu

SEQ ID NO: 1201289 - RNA, 21 nt, Human
ugggaggccaaggcagucagc

SEQ ID NO: 1201290 - RNA, 27 nt, Human
uuucuacuaaaaauaccaaaagaaaaa

SEQ ID NO: 1201291 - RNA, 21 nt, Human
aaaaaacagacagccaauaca

SEQ ID NO: 1201292 - RNA, 21 nt, Human
aaacagaagcagaaaaaguaa

SEQ ID NO: 1201293 - RNA, 30 nt, Human
aagcagaaaaaguaauaaguuaaauccaag

SEQ ID NO: 1201294 - RNA, 23 nt, Human
aagccucucuccgagggcggccc

SEQ ID NO: 1201295 - RNA, 18 nt, Human
aaggcugcagugagcuga

SEQ ID NO: 1201296 - RNA, 19 nt, Human
acacagagacaucaaaaaa

SEQ ID NO: 1201297 - RNA, 20 nt, Human
acccaccuccccacacagcc

SEQ ID NO: 1201298 - RNA, 19 nt, Human
acccucaggacaagagagg

SEQ ID NO: 1201299 - RNA, 24 nt, Human
accuccaauggucagcauuuucuu

SEQ ID NO: 1201300 - RNA, 22 nt, Human
agacagccaauacaucuagaac

SEQ ID NO: 1201301 - RNA, 21 nt, Human
aggaguggaagcuggcucagg

SEQ ID NO: 1201302 - RNA, 24 nt, Human
aggaucacuugagccuaggaguuc

SEQ ID NO: 1201303 - RNA, 19 nt, Human
aggcagcugggguggaaac

SEQ ID NO: 1201304 - RNA, 22 nt, Human
aggcugcagugagcugagauca

SEQ ID NO: 1201305 - RNA, 23 nt, Human
aggcuguuuggcacacagagaca

SEQ ID NO: 1201306 - RNA, 18 nt, Human
agguaggaggaucacuug

SEQ ID NO: 1201307 - RNA, 23 nt, Human
agguaggaggaucacuugagccu

SEQ ID NO: 1201308 - RNA, 24 nt, Human
agguugagguaggaggaucacuug

SEQ ID NO: 1201309 - RNA, 20 nt, Human
aguucaaggcugcagugagc

SEQ ID NO: 1201310 - RNA, 23 nt, Human
aucacuugagccuaggaguucaa

SEQ ID NO: 1201311 - RNA, 24 nt, Human
aucacuugagccuaggaguucaag

SEQ ID NO: 1201312 - RNA, 20 nt, Human
caagagaggcagcuggggug

SEQ ID NO: 1201313 - RNA, 18 nt, Human
cacccaccuccccacaca

SEQ ID NO: 1201314 - RNA, 19 nt, Human
cacccaccuccccacacag

SEQ ID NO: 1201315 - RNA, 18 nt, Human
cacugagcuuuccuguag

SEQ ID NO: 1201316 - RNA, 21 nt, Human
cacugagcuuuccuguagucc

SEQ ID NO: 1201317 - RNA, 21 nt, Human
cagcagucucuagcuugaucc

SEQ ID NO: 1201318 - RNA, 24 nt, Human
cagucucuagcuugauccaggagg

SEQ ID NO: 1201319 - RNA, 18 nt, Human
cagugaggacauguguuu

SEQ ID NO: 1201320 - RNA, 19 nt, Human
cagugaguucucuauucuu

SEQ ID NO: 1201321 - RNA, 19 nt, Human
caucaaaaaacagacagcc

SEQ ID NO: 1201322 - RNA, 20 nt, Human
caucaaaaaacagacagcca

SEQ ID NO: 1201323 - RNA, 22 nt, Human
caucaaaaaacagacagccaau

SEQ ID NO: 1201324 - RNA, 23 nt, Human
caucaaaaaacagacagccaaua

SEQ ID NO: 1201325 - RNA, 22 nt, Human
ccaauacaucuagaacaagccu

SEQ ID NO: 1201326 - RNA, 21 nt, Human
ccacccaccuccccacacagc

SEQ ID NO: 1201327 - RNA, 24 nt, Human
ccacccaccuccccacacagccag

SEQ ID NO: 1201328 - RNA, 19 nt, Human
ccccaucaccgcaccccuc

SEQ ID NO: 1201329 - RNA, 19 nt, Human
ccccaucaccgcaccccuc

SEQ ID NO: 1201330 - RNA, 22 nt, Human
ccccucagcagugccugggcuc

SEQ ID NO: 1201331 - RNA, 26 nt, Human
ccucccagguggcucaucaguggugg

SEQ ID NO: 1201332 - RNA, 21 nt, Human
ccucuccacccaccuccccac

SEQ ID NO: 1201333 - RNA, 23 nt, Human
ccugggcucaccucuccacccac

SEQ ID NO: 1201334 - RNA, 22 nt, Human
ccuguagucccaguuacucugg

SEQ ID NO: 1201335 - RNA, 18 nt, Human
cuagaacaagccucucuc

SEQ ID NO: 1201336 - RNA, 24 nt, Human
cucaccucuccacccaccucccca

SEQ ID NO: 1201337 - RNA, 23 nt, Human
cugauggcaagauuccaggcagg

SEQ ID NO: 1201338 - RNA, 19 nt, Human
cugcagugagcugagauca

SEQ ID NO: 1201339 - RNA, 20 nt, Human
cugcagugagcugagaucac

SEQ ID NO: 1201340 - RNA, 21 nt, Human
gaagugcccugauaaaaucuc

SEQ ID NO: 1201341 - RNA, 19 nt, Human
gaccccaucaccgcacccc

SEQ ID NO: 1201342 - RNA, 24 nt, Human
gccuaggaguucaaggcugcagug

SEQ ID NO: 1201343 - RNA, 23 nt, Human
ggaaacugucacuccagccuaac

SEQ ID NO: 1201344 - RNA, 19 nt, Human
ggaggagguugcugauggc

SEQ ID NO: 1201345 - RNA, 22 nt, Human
ggagguugagguaggaggauca

SEQ ID NO: 1201346 - RNA, 23 nt, Human
ggaucacuugagccuaggaguuc

SEQ ID NO: 1201347 - RNA, 18 nt, Human
gggcucaccucuccaccc

SEQ ID NO: 1201348 - RNA, 21 nt, Human
guuuggcacacagagacauca

SEQ ID NO: 1201349 - RNA, 19 nt, Human
uaacauucagugaggacau

SEQ ID NO: 1201350 - RNA, 19 nt, Human
uaaguuaaauccaagaaug

SEQ ID NO: 1201351 - RNA, 21 nt, Human
uagcuugauccaggaggcacu

SEQ ID NO: 1201352 - RNA, 20 nt, Human
ucaagauuugcauaccucca

SEQ ID NO: 1201353 - RNA, 18 nt, Human
ucacuugagccuaggagu

SEQ ID NO: 1201354 - RNA, 22 nt, Human
uccaggaggcacuggggaggag

SEQ ID NO: 1201355 - RNA, 23 nt, Human
uccaggaggcacuggggaggagg

SEQ ID NO: 1201356 - RNA, 19 nt, Human
ucuagcuugauccaggagg

SEQ ID NO: 1201357 - RNA, 20 nt, Human
ucuccacccaccuccccaca

SEQ ID NO: 1201358 - RNA, 18 nt, Human
ucucuauucagguaggag

SEQ ID NO: 1201359 - RNA, 22 nt, Human
ucucuauucagguaggagugga

SEQ ID NO: 1201360 - RNA, 20 nt, Human
ucuugggcuggggggugggc

SEQ ID NO: 1201361 - RNA, 24 nt, Human
ugagccuaggaguucaaggcugca

SEQ ID NO: 1201362 - RNA, 22 nt, Human
ugaggacauguguuuaucaugu

SEQ ID NO: 1201363 - RNA, 20 nt, Human
ugagguaggaggaucacuug

SEQ ID NO: 1201364 - RNA, 24 nt, Human
ugagguaggaggaucacuugagcc

SEQ ID NO: 1201365 - RNA, 19 nt, Human
ugccagcagucucuagcuu

SEQ ID NO: 1201366 - RNA, 20 nt, Human
uggaaacagaagcagaaaaa

SEQ ID NO: 1201367 - RNA, 19 nt, Human
uggauggacuguccuccca

SEQ ID NO: 1201368 - RNA, 21 nt, Human
ugggcagggacauuccugggg

SEQ ID NO: 1201369 - RNA, 21 nt, Human
uggggaggagguugcugaugg

SEQ ID NO: 1201370 - RNA, 24 nt, Human
uguagucccaguuacucuggaggu

SEQ ID NO: 1201371 - RNA, 18 nt, Human
ugucccacagguauagaa

SEQ ID NO: 1201372 - RNA, 24 nt, Human
uuccuguagucccaguuacucugg

SEQ ID NO: 1201373 - RNA, 21 nt, Human
uugagccuaggaguucaaggc

SEQ ID NO: 1201374 - RNA, 19 nt, Human
cugcaauguuccaccagcc

SEQ ID NO: 1201375 - RNA, 21 nt, Human
accccacuuccugccccucuc

SEQ ID NO: 1201376 - RNA, 18 nt, Human
acucagggcugugagcug

SEQ ID NO: 1201377 - RNA, 26 nt, Human
aucucguucauccuuucucucucugc

SEQ ID NO: 1201378 - RNA, 21 nt, Human
ccccacuuccugccccucuca

SEQ ID NO: 1201379 - RNA, 25 nt, Human
cccucucauuccuccuccuuccucu

SEQ ID NO: 1201380 - RNA, 19 nt, Human
ccuccuuccucucugucac

SEQ ID NO: 1201381 - RNA, 23 nt, Human
cuggaccccacuuccugccccuc

SEQ ID NO: 1201382 - RNA, 24 nt, Human
gaggucuggcagggcugagggcac

SEQ ID NO: 1201383 - RNA, 21 nt, Human
gccccucucauuccuccuccu

SEQ ID NO: 1201384 - RNA, 23 nt, Human
uaguaggcuuccuguauccacau

SEQ ID NO: 1201385 - RNA, 22 nt, Human
ucauccuuucucucucugccau

SEQ ID NO: 1201386 - RNA, 19 nt, Human
ucauuccuccuccuuccuc

SEQ ID NO: 1201387 - RNA, 18 nt, Human
uccuccuccuuccucucu

SEQ ID NO: 1201388 - RNA, 22 nt, Human
uccuccuccuuccucucuguca

SEQ ID NO: 1201389 - RNA, 24 nt, Human
ucucugccauggcugaggccacca

SEQ ID NO: 1201390 - RNA, 20 nt, Human
ugagggcacaaaggggcucc

SEQ ID NO: 1201391 - RNA, 21 nt, Human
ugguuugugcauucacuguuc

SEQ ID NO: 1201392 - RNA, 23 nt, Human
uguauccacauccuugagccaag

SEQ ID NO: 1201393 - RNA, 21 nt, Human
uuccugccccucucauuccuc

SEQ ID NO: 1201394 - RNA, 19 nt, Human
auccuguaaaacuaagaaa

SEQ ID NO: 1201395 - RNA, 22 nt, Human
ccuguaaaacuaagaaaacagg

SEQ ID NO: 1201396 - RNA, 19 nt, Human
uucaccuugucuaugcaaa

SEQ ID NO: 1201397 - RNA, 18 nt, Human
agccccugagcucugucc

SEQ ID NO: 1201398 - RNA, 24 nt, Human
agccccugagcucuguccaagcag

SEQ ID NO: 1201399 - RNA, 19 nt, Human
agcucuguccaagcagcag

SEQ ID NO: 1201400 - RNA, 20 nt, Human
aggaagguuugcaccaggac

SEQ ID NO: 1201401 - RNA, 25 nt, Human
caagcagcagcaguucccaacagag

SEQ ID NO: 1201402 - RNA, 25 nt, Human
cagcaguucccaacagagcucuggu

SEQ ID NO: 1201403 - RNA, 20 nt, Human
ccggacagccagggcugggc

SEQ ID NO: 1201404 - RNA, 18 nt, Human
cucugagccccugagcuc

SEQ ID NO: 1201405 - RNA, 24 nt, Human
cucugcucugagccccugagcucc

SEQ ID NO: 1201406 - RNA, 19 nt, Human
cuguccaagcagcagcagu

SEQ ID NO: 1201407 - RNA, 18 nt, Human
cuguguuuccaacucugc

SEQ ID NO: 1201408 - RNA, 22 nt, Human
gcagcagcaguucccaacagag

SEQ ID NO: 1201409 - RNA, 19 nt, Human
ggucccggaaagccggaca

SEQ ID NO: 1201410 - RNA, 19 nt, Human
guucccaacagagcucugg

SEQ ID NO: 1201411 - RNA, 22 nt, Human
ugagccccugagcucuguccaa

SEQ ID NO: 1201412 - RNA, 18 nt, Human
ugcucugagccccugagc

SEQ ID NO: 1201413 - RNA, 19 nt, Human
uugcacuguguuuccaacu

SEQ ID NO: 1201414 - RNA, 24 nt, Human
uugcacuguguuuccaacucugcu

SEQ ID NO: 1201415 - RNA, 21 nt, Human
aaucuucauuuugauguuuca

SEQ ID NO: 1201416 - RNA, 23 nt, Human
caaggcaaugaaccccuaacccc

SEQ ID NO: 1201417 - RNA, 21 nt, Human
caccgaagucucccggagcag

SEQ ID NO: 1201418 - RNA, 18 nt, Human
caggucacagagcgacgg

SEQ ID NO: 1201419 - RNA, 19 nt, Human
cgacggagugaguggcaga

SEQ ID NO: 1201420 - RNA, 24 nt, Human
cucggcuucagggguguccuggag

SEQ ID NO: 1201421 - RNA, 18 nt, Human
cucuggcugaagugcccc

SEQ ID NO: 1201422 - RNA, 21 nt, Human
gaggacacaaggcaaugaacc

SEQ ID NO: 1201423 - RNA, 20 nt, Human
ggagcagaggacacaaggca

SEQ ID NO: 1201424 - RNA, 20 nt, Human
ggcaaugaaccccuaacccc

SEQ ID NO: 1201425 - RNA, 21 nt, Human
ucaccgaagucucccggagca

SEQ ID NO: 1201426 - RNA, 25 nt, Human
ucucccggagcagaggacacaaggc

SEQ ID NO: 1201427 - RNA, 22 nt, Human
ugaaccccuaaccccgcgcucu

SEQ ID NO: 1201428 - RNA, 24 nt, Human
ugugagcaccaguuuaggguuuua

SEQ ID NO: 1201429 - RNA, 18 nt, Human
uuuuuuuuuuuuuuuuug

SEQ ID NO: 1201430 - RNA, 28 nt, Human
uuuuuuuuuuuuuuuuuuuuuuuggggg

SEQ ID NO: 1201431 - RNA, 20 nt, Human
caccucacagacaccgcuuc

SEQ ID NO: 1201432 - RNA, 21 nt, Human
ccgcuguccucgcugccgccg

SEQ ID NO: 1201433 - RNA, 24 nt, Human
ccgcuguccucgcugccgccgguu

SEQ ID NO: 1201434 - RNA, 23 nt, Human
ccucacagacaccgcuucucuca

SEQ ID NO: 1201435 - RNA, 22 nt, Human
ccucgcugccgccgccacccca

SEQ ID NO: 1201436 - RNA, 20 nt, Human
ucgcugccgccgccacccca

SEQ ID NO: 1201437 - RNA, 26 nt, Human
ucgcugccgccgccaccccagugugu

SEQ ID NO: 1201438 - RNA, 24 nt, Human
ucucucagggaaugcgacaaaggc

SEQ ID NO: 1201439 - RNA, 20 nt, Human
ugcgacaaaggcacccugcc

SEQ ID NO: 1201440 - RNA, 20 nt, Human
gcgguggggagacacagcag

SEQ ID NO: 1201441 - RNA, 18 nt, Human
ggcagacggcggugggga

SEQ ID NO: 1201442 - RNA, 19 nt, Human
ugcacgguuggggcagacg

SEQ ID NO: 1201443 - RNA, 23 nt, Human
uggggcagacggcgguggggaga

SEQ ID NO: 1201444 - RNA, 20 nt, Human
uucccaugcaaaaauuugca

SEQ ID NO: 1201445 - RNA, 20 nt, Human
agaaaaaaaucccuucggga

SEQ ID NO: 1201446 - RNA, 25 nt, Human
agaaaaaaaucccuucgggaaugaa

SEQ ID NO: 1201447 - RNA, 22 nt, Human
cccuucgggaaugaaggaccgg

SEQ ID NO: 1201448 - RNA, 24 nt, Human
uaacagaaaaaaaucccuucggga

SEQ ID NO: 1201449 - RNA, 21 nt, Human
uagaugugcuaucaaaaacug

SEQ ID NO: 1201450 - RNA, 24 nt, Human
uagaugugcuaucaaaaacuguug

SEQ ID NO: 1201451 - RNA, 24 nt, Human
ucacgugcuuucucuucucuccug

SEQ ID NO: 1201452 - RNA, 22 nt, Human
ugaguuaacagaaaaaaauccc

SEQ ID NO: 1201453 - RNA, 20 nt, Human
ggcggagaggagcacaacag

SEQ ID NO: 1201454 - RNA, 22 nt, Human
ucgcgccacgcaaacuguggug

SEQ ID NO: 1201455 - RNA, 20 nt, Human
ucgugugcaaguccagaggg

SEQ ID NO: 1201456 - RNA, 25 nt, Human
ugggagaagucaaaccccaguggcg

SEQ ID NO: 1201457 - RNA, 22 nt, Human
ugggggcggagaggagcacaac

SEQ ID NO: 1201458 - RNA, 22 nt, Human
ugugaugaggguuucaaagcgu

SEQ ID NO: 1201459 - RNA, 20 nt, Human
acugagauguccagagcaga

SEQ ID NO: 1201460 - RNA, 18 nt, Human
uccagagcagaugaagaa

SEQ ID NO: 1201461 - RNA, 19 nt, Human
uccagagcagaugaagaau

SEQ ID NO: 1201462 - RNA, 18 nt, Human
uguccagagcagaugaag

SEQ ID NO: 1201463 - RNA, 19 nt, Human
uguccagagcagaugaaga

SEQ ID NO: 1201464 - RNA, 26 nt, Human
acaggcgacgagauguucacaaugcg

SEQ ID NO: 1201465 - RNA, 23 nt, Human
agcagguucacauugccccccuc

SEQ ID NO: 1201466 - RNA, 21 nt, Human
agccgucucggagcugucucc

SEQ ID NO: 1201467 - RNA, 20 nt, Human
cacgagacccacggcucuuu

SEQ ID NO: 1201468 - RNA, 20 nt, Human
ccccugcagggggaggugag

SEQ ID NO: 1201469 - RNA, 19 nt, Human
cccucgucgccgagcccca

SEQ ID NO: 1201470 - RNA, 19 nt, Human
ccuccucuucuccucucuc

SEQ ID NO: 1201471 - RNA, 18 nt, Human
ccucuucuccucucucuu

SEQ ID NO: 1201472 - RNA, 18 nt, Human
cggcccggcccagcgcgg

SEQ ID NO: 1201473 - RNA, 28 nt, Human
cuccgaggugaagccgucucggagcugu

SEQ ID NO: 1201474 - RNA, 26 nt, Human
cuccuccucuucuccucucucuucuu

SEQ ID NO: 1201475 - RNA, 20 nt, Human
cuccucucucuucuuccuug

SEQ ID NO: 1201476 - RNA, 27 nt, Human
cucucucuucuuccuugguggccgaga

SEQ ID NO: 1201477 - RNA, 19 nt, Human
cucugccuccuccucuucu

SEQ ID NO: 1201478 - RNA, 21 nt, Human
cucuugcucccccguuucucu

SEQ ID NO: 1201479 - RNA, 22 nt, Human
cugccuccuccucuucuccucu

SEQ ID NO: 1201480 - RNA, 23 nt, Human
cugucuccaggugaccgugggcu

SEQ ID NO: 1201481 - RNA, 22 nt, Human
gaagaucuuucuuccucugccu

SEQ ID NO: 1201482 - RNA, 22 nt, Human
gagagcucuucugcccccacga

SEQ ID NO: 1201483 - RNA, 24 nt, Human
gccgagagcucuucugcccccacg

SEQ ID NO: 1201484 - RNA, 20 nt, Human
gccgucucggagcugucucc

SEQ ID NO: 1201485 - RNA, 26 nt, Human
gcgccgaguuaaccccguugugaguc

SEQ ID NO: 1201486 - RNA, 21 nt, Human
gcucccccguuucucucacuc

SEQ ID NO: 1201487 - RNA, 21 nt, Human
ucacauugccccccucauuca

SEQ ID NO: 1201488 - RNA, 20 nt, Human
uccuccucuucuccucucuc

SEQ ID NO: 1201489 - RNA, 20 nt, Human
uccuugguggccgagagcuc

SEQ ID NO: 1201490 - RNA, 18 nt, Human
ucuccaggugaccguggg

SEQ ID NO: 1201491 - RNA, 21 nt, Human
ucuccaggugaccgugggcuc

SEQ ID NO: 1201492 - RNA, 21 nt, Human
ucugaagaucuuucuuccucu

SEQ ID NO: 1201493 - RNA, 18 nt, Human
ucuucuccucucucuucu

SEQ ID NO: 1201494 - RNA, 22 nt, Human
ucuuucuuccucugccuccucc

SEQ ID NO: 1201495 - RNA, 25 nt, Human
ugaagccgucucggagcugucucca

SEQ ID NO: 1201496 - RNA, 22 nt, Human
ugaccgugggcucuggccgccc

SEQ ID NO: 1201497 - RNA, 19 nt, Human
ugauggguucucugaagau

SEQ ID NO: 1201498 - RNA, 22 nt, Human
ugccccccucauucaccgucac

SEQ ID NO: 1201499 - RNA, 23 nt, Human
ugcgggcagggacguggacaaug

SEQ ID NO: 1201500 - RNA, 21 nt, Human
ugcgggcgcuggucacguccg

SEQ ID NO: 1201501 - RNA, 22 nt, Human
uggaaggagcagguguagaggc

SEQ ID NO: 1201502 - RNA, 21 nt, Human
uuuugcguuaucccucacagu

SEQ ID NO: 1201503 - RNA, 21 nt, Human
aaaaacaagaucucaccagaa

SEQ ID NO: 1201504 - RNA, 21 nt, Human
aaaaagcaaaacaaacaaaaa

SEQ ID NO: 1201505 - RNA, 23 nt, Human
aaacaaaaaaacaagaucucacc

SEQ ID NO: 1201506 - RNA, 19 nt, Human
aaagcaaaacaaacaaaaa

SEQ ID NO: 1201507 - RNA, 20 nt, Human
aagcaaaacaaacaaaaaaa

SEQ ID NO: 1201508 - RNA, 22 nt, Human
aagcaaaacaaacaaaaaaaca

SEQ ID NO: 1201509 - RNA, 23 nt, Human
aagcaaaacaaacaaaaaaacaa

SEQ ID NO: 1201510 - RNA, 21 nt, Human
aauaggagcaagagagaggaa

SEQ ID NO: 1201511 - RNA, 20 nt, Human
acaaaaaaacaagaucucac

SEQ ID NO: 1201512 - RNA, 19 nt, Human
acacuuuuuuuuuuuuuuu

SEQ ID NO: 1201513 - RNA, 20 nt, Human
acagagagagacuccgucuc

SEQ ID NO: 1201514 - RNA, 24 nt, Human
acagagagagacuccgucucaaaa

SEQ ID NO: 1201515 - RNA, 19 nt, Human
acaguucugcaggcuuuac

SEQ ID NO: 1201516 - RNA, 20 nt, Human
acaguucugcaggcuuuaca

SEQ ID NO: 1201517 - RNA, 19 nt, Human
acccaggcuggagugcacu

SEQ ID NO: 1201518 - RNA, 20 nt, Human
acccaggcuggagugcacug

SEQ ID NO: 1201519 - RNA, 23 nt, Human
acugcauuccagccuggcgacag

SEQ ID NO: 1201520 - RNA, 25 nt, Human
acugcauuccagccuggcgacagag

SEQ ID NO: 1201521 - RNA, 22 nt, Human
acuuuuuuuuuuuuuuuuuuuu

SEQ ID NO: 1201522 - RNA, 21 nt, Human
agccuggcgacagagagagac

SEQ ID NO: 1201523 - RNA, 24 nt, Human
agugcacuggcacgaucuuggcuc

SEQ ID NO: 1201524 - RNA, 21 nt, Human
aucccaagaagagcaaaaagc

SEQ ID NO: 1201525 - RNA, 22 nt, Human
aucucccaccaggccccaccuc

SEQ ID NO: 1201526 - RNA, 23 nt, Human
caaaaaaacaagaucucaccaga

SEQ ID NO: 1201527 - RNA, 25 nt, Human
caagaagagcaaaaagcggguggug

SEQ ID NO: 1201528 - RNA, 21 nt, Human
cacugcacugcauuccagccu

SEQ ID NO: 1201529 - RNA, 18 nt, Human
cacugcauuccagccugg

SEQ ID NO: 1201530 - RNA, 18 nt, Human
cacugcauuccagccugg

SEQ ID NO: 1201531 - RNA, 22 nt, Human
cacugcauuccagccuggcgac

SEQ ID NO: 1201532 - RNA, 23 nt, Human
cacugcauuccagccuggcgaca

SEQ ID NO: 1201533 - RNA, 24 nt, Human
cacugcauuccagccuggcgacag

SEQ ID NO: 1201534 - RNA, 19 nt, Human
cacuuuuuuuuuuuuuuuu

SEQ ID NO: 1201535 - RNA, 21 nt, Human
cagccuggcgacagagagaga

SEQ ID NO: 1201536 - RNA, 22 nt, Human
cagggucucgcugucacccagg

SEQ ID NO: 1201537 - RNA, 24 nt, Human
caugucacauggcaagaauaggag

SEQ ID NO: 1201538 - RNA, 24 nt, Human
ccauacacuuuuuuuuuuuuuuuu

SEQ ID NO: 1201539 - RNA, 21 nt, Human
cccaccaggccccaccuccaa

SEQ ID NO: 1201540 - RNA, 21 nt, Human
ccugugauccaaucaucuccc

SEQ ID NO: 1201541 - RNA, 25 nt, Human
cgucucaaaaaagcaaaacaaacaa

SEQ ID NO: 1201542 - RNA, 18 nt, Human
cucacaguucugcaggcu

SEQ ID NO: 1201543 - RNA, 19 nt, Human
cucaggaauguuaaaauca

SEQ ID NO: 1201544 - RNA, 21 nt, Human
cucccaccaggccccaccucc

SEQ ID NO: 1201545 - RNA, 19 nt, Human
cuuccgaggaagccucagg

SEQ ID NO: 1201546 - RNA, 24 nt, Human
gacagagagagacuccgucucaaa

SEQ ID NO: 1201547 - RNA, 20 nt, Human
gacagggucucgcugucacc

SEQ ID NO: 1201548 - RNA, 19 nt, Human
gcaagaauaggagcaagag

SEQ ID NO: 1201549 - RNA, 21 nt, Human
gcacugcauuccagccuggcg

SEQ ID NO: 1201550 - RNA, 26 nt, Human
ggcucacugcacugcauuccagccug

SEQ ID NO: 1201551 - RNA, 23 nt, Human
gucucgcugucacccaggcugga

SEQ ID NO: 1201552 - RNA, 20 nt, Human
uacacuuuuuuuuuuuuuua

SEQ ID NO: 1201553 - RNA, 20 nt, Human
uacgucaggccuguuauaug

SEQ ID NO: 1201554 - RNA, 18 nt, Human
ucacccaggcuggagugc

SEQ ID NO: 1201555 - RNA, 20 nt, Human
ucacugcacugcauuccagc

SEQ ID NO: 1201556 - RNA, 19 nt, Human
uccacaugagauuucagac

SEQ ID NO: 1201557 - RNA, 23 nt, Human
ucccaccaggccccaccuccaau

SEQ ID NO: 1201558 - RNA, 23 nt, Human
ucgcugucacccaggcuggagug

SEQ ID NO: 1201559 - RNA, 21 nt, Human
ucucaaaaaagcaaaacaaac

SEQ ID NO: 1201560 - RNA, 28 nt, Human
ucuccaguaugccuucucuucccaaggg

SEQ ID NO: 1201561 - RNA, 20 nt, Human
ucucgcugucacccaggcug

SEQ ID NO: 1201562 - RNA, 21 nt, Human
ucucgcugucacccaggcugg

SEQ ID NO: 1201563 - RNA, 22 nt, Human
ucucgcugucacccaggcugga

SEQ ID NO: 1201564 - RNA, 24 nt, Human
ucucgcugucacccaggcuggagu

SEQ ID NO: 1201565 - RNA, 22 nt, Human
ugauccaaucaucucccaccag

SEQ ID NO: 1201566 - RNA, 21 nt, Human
ugcacugcauuccagccuggc

SEQ ID NO: 1201567 - RNA, 24 nt, Human
ugcacugcauuccagccuggcgac

SEQ ID NO: 1201568 - RNA, 20 nt, Human
uggagacagggucucgcugu

SEQ ID NO: 1201569 - RNA, 20 nt, Human
uggagugcacuggcacgauc

SEQ ID NO: 1201570 - RNA, 24 nt, Human
uggagugcacuggcacgaucuugg

SEQ ID NO: 1201571 - RNA, 23 nt, Human
ugucacauggcaagaauaggagc

SEQ ID NO: 1201572 - RNA, 26 nt, Human
uuuuuuuuuucuggagacagggucuc

SEQ ID NO: 1201573 - RNA, 18 nt, Human
uuuuuuuuuuuuuuucug

SEQ ID NO: 1201574 - RNA, 28 nt, Human
uuuuuuuuuuuuuuuucuggagacaggg

SEQ ID NO: 1201575 - RNA, 19 nt, Human
aggccccaggaccggggug

SEQ ID NO: 1201576 - RNA, 18 nt, Human
agggaccugcucucacug

SEQ ID NO: 1201577 - RNA, 19 nt, Human
caggaccgggguguccugg

SEQ ID NO: 1201578 - RNA, 18 nt, Human
gacccagccucuccacug

SEQ ID NO: 1201579 - RNA, 18 nt, Human
gacuccuggcaugcaggc

SEQ ID NO: 1201580 - RNA, 21 nt, Human
ggaccugcucucacugauucu

SEQ ID NO: 1201581 - RNA, 19 nt, Human
uccacugucucuuggaggg

SEQ ID NO: 1201582 - RNA, 21 nt, Human
ucucuuggaggaagcacaggg

SEQ ID NO: 1201583 - RNA, 25 nt, Human
ucucuuggaggaagcacagggcggu

SEQ ID NO: 1201584 - RNA, 23 nt, Human
uggcaugcaggccagagggaccu

SEQ ID NO: 1201585 - RNA, 23 nt, Human
aaacacucugcuuuaaagagaaa

SEQ ID NO: 1201586 - RNA, 22 nt, Human
aucugauuuuuucccuauuuuc

SEQ ID NO: 1201587 - RNA, 20 nt, Human
cccacaggcugucaaacuua

SEQ ID NO: 1201588 - RNA, 26 nt, Human
cggcauaccuuauguuauuuuucagu

SEQ ID NO: 1201589 - RNA, 23 nt, Human
cuauugauagacuucucaacugg

SEQ ID NO: 1201590 - RNA, 25 nt, Human
uauuacaaauguuuuugacacaagg

SEQ ID NO: 1201591 - RNA, 25 nt, Human
ucacguauuuguuuccggcauaccu

SEQ ID NO: 1201592 - RNA, 20 nt, Human
uccccaguuugaaaucucug

SEQ ID NO: 1201593 - RNA, 20 nt, Human
uccuuauaaauggcuuguca

SEQ ID NO: 1201594 - RNA, 19 nt, Human
ugaugccauggcuuuccuu

SEQ ID NO: 1201595 - RNA, 19 nt, Human
ugugccuguaagcuuaauc

SEQ ID NO: 1201596 - RNA, 20 nt, Human
uuguaauuuuuuacaucaua

SEQ ID NO: 1201597 - RNA, 22 nt, Human
agaggggggccgaucuccuccg

SEQ ID NO: 1201598 - RNA, 22 nt, Human
cagcagaauuggggccgggucg

SEQ ID NO: 1201599 - RNA, 20 nt, Human
cagcccugggccuggggcuu

SEQ ID NO: 1201600 - RNA, 22 nt, Human
cccugggccuggggcuuggucc

SEQ ID NO: 1201601 - RNA, 24 nt, Human
ccucgccuccuuggcuccuuucuu

SEQ ID NO: 1201602 - RNA, 18 nt, Human
ccuuucuuccuuccccac

SEQ ID NO: 1201603 - RNA, 20 nt, Human
cgccuccuuggcuccuuucu

SEQ ID NO: 1201604 - RNA, 24 nt, Human
cuccgggccaagccugcagcuccc

SEQ ID NO: 1201605 - RNA, 19 nt, Human
cuccuuucuuccuucccca

SEQ ID NO: 1201606 - RNA, 18 nt, Human
cuuucuuccuuccccacg

SEQ ID NO: 1201607 - RNA, 18 nt, Human
ggccaagccugcagcucc

SEQ ID NO: 1201608 - RNA, 20 nt, Human
ggccuggggcuugguccugg

SEQ ID NO: 1201609 - RNA, 18 nt, Human
gggaggcugguggggguc

SEQ ID NO: 1201610 - RNA, 18 nt, Human
gggagggaggcugguggg

SEQ ID NO: 1201611 - RNA, 19 nt, Human
ggucccagguccuagaggg

SEQ ID NO: 1201612 - RNA, 18 nt, Human
gguggcggggagggaggg

SEQ ID NO: 1201613 - RNA, 21 nt, Human
gguucuuaccucgccuccuug

SEQ ID NO: 1201614 - RNA, 23 nt, Human
gguucuuaccucgccuccuuggc

SEQ ID NO: 1201615 - RNA, 23 nt, Human
uccuggucgcuggggcuggguuc

SEQ ID NO: 1201616 - RNA, 21 nt, Human
uccuuccccacggccggccaa

SEQ ID NO: 1201617 - RNA, 19 nt, Human
uccuuggcuccuuucuucc

SEQ ID NO: 1201618 - RNA, 24 nt, Human
ucgccuccuuggcuccuuucuucc

SEQ ID NO: 1201619 - RNA, 18 nt, Human
ucgcuggggcuggguucu

SEQ ID NO: 1201620 - RNA, 21 nt, Human
ucucagcccugggccuggggc

SEQ ID NO: 1201621 - RNA, 23 nt, Human
uggguucuuaccucgccuccuug

SEQ ID NO: 1201622 - RNA, 21 nt, Human
uuccuuccccacggccggcca

SEQ ID NO: 1201623 - RNA, 19 nt, Human
uugguccuggucgcugggg

SEQ ID NO: 1201624 - RNA, 24 nt, Human
aggaaagguggggagccgaugggg

SEQ ID NO: 1201625 - RNA, 20 nt, Human
gacccggaaagaggaaaggu

SEQ ID NO: 1201626 - RNA, 19 nt, Human
ucuccgaguucuggaccca

SEQ ID NO: 1201627 - RNA, 24 nt, Human
ugcccagaaguucacuuucugguc

SEQ ID NO: 1201628 - RNA, 26 nt, Human
ugccccggaggcugugacuuggcuga

SEQ ID NO: 1201629 - RNA, 20 nt, Human
ugccugaaggugccccggag

SEQ ID NO: 1201630 - RNA, 22 nt, Human
ugccugaaggugccccggaggc

SEQ ID NO: 1201631 - RNA, 24 nt, Human
ugccugaaggugccccggaggcug

SEQ ID NO: 1201632 - RNA, 21 nt, Human
uggucuccgaguucuggaccc

SEQ ID NO: 1201633 - RNA, 22 nt, Human
accaacgugacggccaguccug

SEQ ID NO: 1201634 - RNA, 20 nt, Human
aggaggcaggugaggcagag

SEQ ID NO: 1201635 - RNA, 21 nt, Human
ucaaggaggcaggugaggcag

SEQ ID NO: 1201636 - RNA, 29 nt, Human
auuacauucauaugguuucucuccugugu

SEQ ID NO: 1201637 - RNA, 18 nt, Human
auuucuccccuguaugug

SEQ ID NO: 1201638 - RNA, 27 nt, Human
caaaggguuucucuccugugugaguuc

SEQ ID NO: 1201639 - RNA, 21 nt, Human
cuaaaggcuuucccacacuga

SEQ ID NO: 1201640 - RNA, 30 nt, Human
cugaugaucaaugagauaugauuuccuucu

SEQ ID NO: 1201641 - RNA, 20 nt, Human
cuggccgguauguauuuucu

SEQ ID NO: 1201642 - RNA, 24 nt, Human
cuuuccacauucacuacauuuaua

SEQ ID NO: 1201643 - RNA, 18 nt, Human
gaugaucagugagggcug

SEQ ID NO: 1201644 - RNA, 25 nt, Human
gauuuccuucuaaaugcauuuccac

SEQ ID NO: 1201645 - RNA, 21 nt, Human
gauuucuccccuguguguguu

SEQ ID NO: 1201646 - RNA, 24 nt, Human
gguugcuuucuggcgaaaggacuu

SEQ ID NO: 1201647 - RNA, 20 nt, Human
uaccacauucauugcaaaca

SEQ ID NO: 1201648 - RNA, 18 nt, Human
uacugauuuccugcagaa

SEQ ID NO: 1201649 - RNA, 18 nt, Human
uaggguuuuucuucugag

SEQ ID NO: 1201650 - RNA, 21 nt, Human
ucaaugagauaugauuuccuu

SEQ ID NO: 1201651 - RNA, 22 nt, Human
ucuaaaugcauuuccacauuga

SEQ ID NO: 1201652 - RNA, 21 nt, Human
ucucugaugaucagugagggc

SEQ ID NO: 1201653 - RNA, 18 nt, Human
ucugauguacagugaggg

SEQ ID NO: 1201654 - RNA, 23 nt, Human
ucuggccgguauguauuuucuga

SEQ ID NO: 1201655 - RNA, 21 nt, Human
ugaauucucugauguagauug

SEQ ID NO: 1201656 - RNA, 21 nt, Human
ugcaaacaaaggguuucucuc

SEQ ID NO: 1201657 - RNA, 23 nt, Human
uuaccacauucauugcaaacaaa

SEQ ID NO: 1201658 - RNA, 19 nt, Human
uucccacauucauuacaaa

SEQ ID NO: 1201659 - RNA, 27 nt, Human
aaacaaugaaugaaagaauuauagaac

SEQ ID NO: 1201660 - RNA, 22 nt, Human
aacaaaacaaugaaugaaagaa

SEQ ID NO: 1201661 - RNA, 22 nt, Human
accaagaaaguagaacaaaaca

SEQ ID NO: 1201662 - RNA, 23 nt, Human
auaagucccucugaacagggucc

SEQ ID NO: 1201663 - RNA, 22 nt, Human
caagaaaguagaacaaaacaau

SEQ ID NO: 1201664 - RNA, 21 nt, Human
ccaagaaaguagaacaaaaca

SEQ ID NO: 1201665 - RNA, 20 nt, Human
cuggcaucgguauaugacug

SEQ ID NO: 1201666 - RNA, 18 nt, Human
uagaacaaaacaaugaau

SEQ ID NO: 1201667 - RNA, 21 nt, Human
uaugaggaaggugacaggggc

SEQ ID NO: 1201668 - RNA, 22 nt, Human
ucccucugaacaggguccaggc

SEQ ID NO: 1201669 - RNA, 18 nt, Human
ucugaacaggguccaggc

SEQ ID NO: 1201670 - RNA, 20 nt, Human
ugacaggggcuuuaauuuuu

SEQ ID NO: 1201671 - RNA, 23 nt, Human
ugaggaaggugacaggggcuuua

SEQ ID NO: 1201672 - RNA, 22 nt, Human
uggaaugaaauacauuuggaua

SEQ ID NO: 1201673 - RNA, 24 nt, Human
ugucaccaagaaaguagaacaaaa

SEQ ID NO: 1201674 - RNA, 21 nt, Human
agcugagcagccggacggcac

SEQ ID NO: 1201675 - RNA, 19 nt, Human
ccagcagcugagcagccgg

SEQ ID NO: 1201676 - RNA, 19 nt, Human
ugcuccacuucccugcuug

SEQ ID NO: 1201677 - RNA, 25 nt, Human
uugcuccacuucccugcuugcuggc

SEQ ID NO: 1201678 - RNA, 19 nt, Human
uugcuggcucucauugucc

SEQ ID NO: 1201679 - RNA, 22 nt, Human
ccaggcacgaugccaucaugcu

SEQ ID NO: 1201680 - RNA, 21 nt, Human
cuucgugugugcuggccccac

SEQ ID NO: 1201681 - RNA, 18 nt, Human
gaugccaucaugcuguga

SEQ ID NO: 1201682 - RNA, 19 nt, Human
ugccaucaugcugugagug

SEQ ID NO: 1201683 - RNA, 19 nt, Human
ugggaaggcaggcuccagg

SEQ ID NO: 1201684 - RNA, 19 nt, Human
ugggaaggcaggcuccagg

SEQ ID NO: 1201685 - RNA, 23 nt, Human
ugggaaggcaggcuccaggcacg

SEQ ID NO: 1201686 - RNA, 24 nt, Human
ugugugcuggccccacugguuuug

SEQ ID NO: 1201687 - RNA, 20 nt, Human
aauggaauuaggagaaacca

SEQ ID NO: 1201688 - RNA, 21 nt, Human
acaaagaaaagcuuuuuuaca

SEQ ID NO: 1201689 - RNA, 25 nt, Human
acaugacaucucuguacaagucucu

SEQ ID NO: 1201690 - RNA, 19 nt, Human
accuggaccgagugccugg

SEQ ID NO: 1201691 - RNA, 22 nt, Human
agaaaucuauagccacaucccu

SEQ ID NO: 1201692 - RNA, 19 nt, Human
agaugggcucucugcuuaa

SEQ ID NO: 1201693 - RNA, 24 nt, Human
agcaugaccaccuggauaccaccc

SEQ ID NO: 1201694 - RNA, 20 nt, Human
agcccugggaggcucagggc

SEQ ID NO: 1201695 - RNA, 28 nt, Human
aucuauagccacaucccugaaugucacc

SEQ ID NO: 1201696 - RNA, 20 nt, Human
auguuggguaaggugggcac

SEQ ID NO: 1201697 - RNA, 20 nt, Human
caaauucuguuaugaaaaag

SEQ ID NO: 1201698 - RNA, 18 nt, Human
caacaugacaucucugua

SEQ ID NO: 1201699 - RNA, 20 nt, Human
caccuggaccgagugccugg

SEQ ID NO: 1201700 - RNA, 18 nt, Human
cagccgccucccgacugg

SEQ ID NO: 1201701 - RNA, 18 nt, Human
cagggcugcccgaggggc

SEQ ID NO: 1201702 - RNA, 19 nt, Human
caguaugaauauuuugaug

SEQ ID NO: 1201703 - RNA, 22 nt, Human
cagugaaauuucucugauguuc

SEQ ID NO: 1201704 - RNA, 20 nt, Human
cagugugaauucucuggugu

SEQ ID NO: 1201705 - RNA, 21 nt, Human
cauccagcguuauuuccagaa

SEQ ID NO: 1201706 - RNA, 19 nt, Human
caugaccaccuggauacca

SEQ ID NO: 1201707 - RNA, 24 nt, Human
cauggauucuuccuguacaaauuc

SEQ ID NO: 1201708 - RNA, 22 nt, Human
ccagagccagugcugucagggg

SEQ ID NO: 1201709 - RNA, 19 nt, Human
ccagugugaauucucuggu

SEQ ID NO: 1201710 - RNA, 19 nt, Human
ccauccaggguucuuuccc

SEQ ID NO: 1201711 - RNA, 19 nt, Human
ccaugcuucccugcuccuc

SEQ ID NO: 1201712 - RNA, 23 nt, Human
ccggugacacaaaguugcuguag

SEQ ID NO: 1201713 - RNA, 23 nt, Human
ccucuggaaaaacacagacugga

SEQ ID NO: 1201714 - RNA, 23 nt, Human
ccuggccgcuggcggaguagugu

SEQ ID NO: 1201715 - RNA, 20 nt, Human
ccuguucuccagguccucug

SEQ ID NO: 1201716 - RNA, 18 nt, Human
cgcgcaggaacgcagccg

SEQ ID NO: 1201717 - RNA, 21 nt, Human
cuaaaggccuuccuacauucc

SEQ ID NO: 1201718 - RNA, 23 nt, Human
cuaaaggccuuccuacauuccag

SEQ ID NO: 1201719 - RNA, 24 nt, Human
cuaaagggcuuuccacauaucuga

SEQ ID NO: 1201720 - RNA, 18 nt, Human
cuacauuuuuuacacuga

SEQ ID NO: 1201721 - RNA, 19 nt, Human
cuccagguccucugccucc

SEQ ID NO: 1201722 - RNA, 24 nt, Human
cuccccgcaaccgguuccgccgcg

SEQ ID NO: 1201723 - RNA, 26 nt, Human
cugagcagggcccaggcauucccacu

SEQ ID NO: 1201724 - RNA, 22 nt, Human
cugccucgagugcgcaagcgcg

SEQ ID NO: 1201725 - RNA, 22 nt, Human
cuggaaaaacacagacuggaga

SEQ ID NO: 1201726 - RNA, 24 nt, Human
cuucugguucugguuuuccaugga

SEQ ID NO: 1201727 - RNA, 20 nt, Human
gaaaaacacagacuggagaa

SEQ ID NO: 1201728 - RNA, 23 nt, Human
gaaauuucucugauguuccauau

SEQ ID NO: 1201729 - RNA, 23 nt, Human
gaauaacaaagaaaaggggaggc

SEQ ID NO: 1201730 - RNA, 25 nt, Human
gaauggaauuaggagaaaccaguuu

SEQ ID NO: 1201731 - RNA, 20 nt, Human
gaaugucaccaauccuaaaa

SEQ ID NO: 1201732 - RNA, 23 nt, Human
gaguguugggauuuugauuaucu

SEQ ID NO: 1201733 - RNA, 18 nt, Human
gaugggcucucugcuuaa

SEQ ID NO: 1201734 - RNA, 18 nt, Human
gcuuagaaauggcaaguc

SEQ ID NO: 1201735 - RNA, 18 nt, Human
ggcacgcuuucuaaaggg

SEQ ID NO: 1201736 - RNA, 24 nt, Human
ggggcccuucagggagcaagggag

SEQ ID NO: 1201737 - RNA, 21 nt, Human
guagcccggaauacauuuccc

SEQ ID NO: 1201738 - RNA, 21 nt, Human
uagagaaaucuauagccacau

SEQ ID NO: 1201739 - RNA, 20 nt, Human
uagcaugaccaccuggauac

SEQ ID NO: 1201740 - RNA, 21 nt, Human
uaguucuccaacaugacaucu

SEQ ID NO: 1201741 - RNA, 27 nt, Human
uauagauuucuuauauuucugaaguuu

SEQ ID NO: 1201742 - RNA, 20 nt, Human
uaugaccaaagucucugccc

SEQ ID NO: 1201743 - RNA, 25 nt, Human
ucaccagugugaauugucugauguu

SEQ ID NO: 1201744 - RNA, 18 nt, Human
uccaggguucuuucccuu

SEQ ID NO: 1201745 - RNA, 19 nt, Human
ucggaucugugacuguggc

SEQ ID NO: 1201746 - RNA, 22 nt, Human
ucucucugagcagggcccaggc

SEQ ID NO: 1201747 - RNA, 20 nt, Human
ucucugagcagggcccaggc

SEQ ID NO: 1201748 - RNA, 25 nt, Human
ugaacaacagauaaacacuuuccca

SEQ ID NO: 1201749 - RNA, 23 nt, Human
ugcccgaggggcuuagucccaga

SEQ ID NO: 1201750 - RNA, 19 nt, Human
ugccuggccgcuggcggag

SEQ ID NO: 1201751 - RNA, 21 nt, Human
ugcucagcccugggaggcuca

SEQ ID NO: 1201752 - RNA, 19 nt, Human
uggaugaacucuuggauaa

SEQ ID NO: 1201753 - RNA, 18 nt, Human
ugggaggcucagggcugc

SEQ ID NO: 1201754 - RNA, 21 nt, Human
uggggccgcaccuggaccgag

SEQ ID NO: 1201755 - RNA, 24 nt, Human
ugucaccaauccuaaaaauucuau

SEQ ID NO: 1201756 - RNA, 18 nt, Human
ugugacuguggcucugcc

SEQ ID NO: 1201757 - RNA, 23 nt, Human
ugugacuguggcucugccucauc

SEQ ID NO: 1201758 - RNA, 18 nt, Human
uguggggccgcaccugga

SEQ ID NO: 1201759 - RNA, 25 nt, Human
uucagggagcaagggagaagugugg

SEQ ID NO: 1201760 - RNA, 21 nt, Human
uucccagaggccuucgcggcc

SEQ ID NO: 1201761 - RNA, 23 nt, Human
uucgauuauguuggguaaggugg

SEQ ID NO: 1201762 - RNA, 22 nt, Human
uucucauuaguaugaguucuau

SEQ ID NO: 1201763 - RNA, 21 nt, Human
uucuccagguccucugccucc

SEQ ID NO: 1201764 - RNA, 20 nt, Human
uucucugcauuucuuuccag

SEQ ID NO: 1201765 - RNA, 22 nt, Human
uucugguucugguuuuccaugg

SEQ ID NO: 1201766 - RNA, 23 nt, Human
uuuccgugcacggggcugcugcg

SEQ ID NO: 1201767 - RNA, 24 nt, Human
uuugugggucccuaugaaacugag

SEQ ID NO: 1201768 - RNA, 25 nt, Human
uuuguuuuuuccccuuuguuccugg

SEQ ID NO: 1201769 - RNA, 19 nt, Human
uuuuccccuuuguuccugg

SEQ ID NO: 1201770 - RNA, 27 nt, Human
aaaucaaucuuaaacuagaaacuucua

SEQ ID NO: 1201771 - RNA, 23 nt, Human
aagcuucccccucccccuuuuuu

SEQ ID NO: 1201772 - RNA, 18 nt, Human
accuucccuggccgccgg

SEQ ID NO: 1201773 - RNA, 21 nt, Human
acugcugucugcgggcagcuu

SEQ ID NO: 1201774 - RNA, 22 nt, Human
acuggaaugcagagguucucuu

SEQ ID NO: 1201775 - RNA, 23 nt, Human
agcacuauuugauaauuucuuuc

SEQ ID NO: 1201776 - RNA, 27 nt, Human
auaagcuucccccucccccuuuuuuuc

SEQ ID NO: 1201777 - RNA, 20 nt, Human
augccuaagaaaacacaaaa

SEQ ID NO: 1201778 - RNA, 22 nt, Human
caucuuauucuguucagcacua

SEQ ID NO: 1201779 - RNA, 22 nt, Human
ccaccggggcuccccuggcugc

SEQ ID NO: 1201780 - RNA, 22 nt, Human
ccauccgaccuucccuggccgc

SEQ ID NO: 1201781 - RNA, 21 nt, Human
ccauccuuuacuuuguaauaa

SEQ ID NO: 1201782 - RNA, 20 nt, Human
ccaucgcgccuuccccggcc

SEQ ID NO: 1201783 - RNA, 20 nt, Human
cccagugcgcgugcgugggc

SEQ ID NO: 1201784 - RNA, 18 nt, Human
ccccuggcugccgccgcc

SEQ ID NO: 1201785 - RNA, 24 nt, Human
cccuggccgccggcaccgggccuc

SEQ ID NO: 1201786 - RNA, 25 nt, Human
cccuuuuuuuccccuccaccugugc

SEQ ID NO: 1201787 - RNA, 24 nt, Human
ccgccgccaucgcgccuuccccgg

SEQ ID NO: 1201788 - RNA, 23 nt, Human
ccgccgccgccgggcuuucccug

SEQ ID NO: 1201789 - RNA, 20 nt, Human
ccgccgccggggcugcccug

SEQ ID NO: 1201790 - RNA, 22 nt, Human
ccgccggcaccgggccuccccu

SEQ ID NO: 1201791 - RNA, 22 nt, Human
ccgccggggcugcccuggccgc

SEQ ID NO: 1201792 - RNA, 19 nt, Human
ccugcgggacgucucuguc

SEQ ID NO: 1201793 - RNA, 22 nt, Human
cgccgccauccgaccuucccug

SEQ ID NO: 1201794 - RNA, 22 nt, Human
cgccgccaucgcgccuuccccg

SEQ ID NO: 1201795 - RNA, 20 nt, Human
cggggcugcccuggccgccg

SEQ ID NO: 1201796 - RNA, 18 nt, Human
cucagaccguggggucaa

SEQ ID NO: 1201797 - RNA, 20 nt, Human
cucccgcggccuaccuccgc

SEQ ID NO: 1201798 - RNA, 19 nt, Human
cuccucaggcugugccggg

SEQ ID NO: 1201799 - RNA, 20 nt, Human
cugccaccggggcuccccug

SEQ ID NO: 1201800 - RNA, 18 nt, Human
cugcgggacacugcuguc

SEQ ID NO: 1201801 - RNA, 18 nt, Human
gagaaacuggaauaacug

SEQ ID NO: 1201802 - RNA, 23 nt, Human
gcaggauugguaugacuggaaug

SEQ ID NO: 1201803 - RNA, 20 nt, Human
gccgccgccggggcugcccu

SEQ ID NO: 1201804 - RNA, 21 nt, Human
gcggcugcccuggccaacgcc

SEQ ID NO: 1201805 - RNA, 22 nt, Human
gcgugcgugggcgcuaugcgcg

SEQ ID NO: 1201806 - RNA, 19 nt, Human
uaaagcaaugcugagagac

SEQ ID NO: 1201807 - RNA, 22 nt, Human
uaagaaaacacaaaaucaaucu

SEQ ID NO: 1201808 - RNA, 21 nt, Human
uaauaaagcaaugcugagaga

SEQ ID NO: 1201809 - RNA, 19 nt, Human
uaugacaugaagagagcac

SEQ ID NO: 1201810 - RNA, 19 nt, Human
ucacaaacucaaagaacgu

SEQ ID NO: 1201811 - RNA, 23 nt, Human
uccauaaugcagggggaaaaaug

SEQ ID NO: 1201812 - RNA, 21 nt, Human
ucccccucccccuuuuuuucc

SEQ ID NO: 1201813 - RNA, 21 nt, Human
uccccuggccgccgccaucgc

SEQ ID NO: 1201814 - RNA, 24 nt, Human
uccccuggcugccgccgccggggc

SEQ ID NO: 1201815 - RNA, 18 nt, Human
ucccuggccgccgccgcc

SEQ ID NO: 1201816 - RNA, 18 nt, Human
ucccuggccgccgccgcc

SEQ ID NO: 1201817 - RNA, 22 nt, Human
ucccuggccgccgccgccgccg

SEQ ID NO: 1201818 - RNA, 22 nt, Human
ucuuucauccucaugggcucua

SEQ ID NO: 1201819 - RNA, 19 nt, Human
ugaagagagcacauauucc

SEQ ID NO: 1201820 - RNA, 20 nt, Human
ugccaccggggcuccccugg

SEQ ID NO: 1201821 - RNA, 19 nt, Human
uggaaugcagagguucucu

SEQ ID NO: 1201822 - RNA, 20 nt, Human
uggccgccgccgccgccggg

SEQ ID NO: 1201823 - RNA, 20 nt, Human
uggggucaacucggcugcuc

SEQ ID NO: 1201824 - RNA, 22 nt, Human
uucccugcccgccgcggcugcc

SEQ ID NO: 1201825 - RNA, 24 nt, Human
uuggacaucucagaccgugggguu

SEQ ID NO: 1201826 - RNA, 20 nt, Human
uuugauaauuucuuucaucc

SEQ ID NO: 1201827 - RNA, 24 nt, Human
uuuucaagauaagcuucccccucc

SEQ ID NO: 1201828 - RNA, 18 nt, Human
uuuuccccuccaccugug

SEQ ID NO: 1201829 - RNA, 19 nt, Human
caaaggguuucucgccagu

SEQ ID NO: 1201830 - RNA, 22 nt, Human
caaaggguuucucgccaguaug

SEQ ID NO: 1201831 - RNA, 23 nt, Human
cauuggaaugaauuuuuugaugc

SEQ ID NO: 1201832 - RNA, 23 nt, Human
ggcucuuucucuugcucuaguaa

SEQ ID NO: 1201833 - RNA, 19 nt, Human
guaaugauaucgaaaggcc

SEQ ID NO: 1201834 - RNA, 18 nt, Human
uaacauguuuggguaaau

SEQ ID NO: 1201835 - RNA, 18 nt, Human
ugaaccacgauuaaaggc

SEQ ID NO: 1201836 - RNA, 19 nt, Human
uggaaugaauuuuuugaug

SEQ ID NO: 1201837 - RNA, 24 nt, Human
uugguaaugauaucgaaaggccuu

SEQ ID NO: 1201838 - RNA, 18 nt, Human
uuuucuggagauauuuuc

SEQ ID NO: 1201839 - RNA, 21 nt, Human
aggagcgcuuccccccgcccc

SEQ ID NO: 1201840 - RNA, 20 nt, Human
cccccgccccgggcgcccgc

SEQ ID NO: 1201841 - RNA, 20 nt, Human
ccugggccgcggcccccaca

SEQ ID NO: 1201842 - RNA, 18 nt, Human
gaaggaggggccgaggcc

SEQ ID NO: 1201843 - RNA, 20 nt, Human
gagcgcuuccccccgccccg

SEQ ID NO: 1201844 - RNA, 22 nt, Human
gcaguccaacccauccugggcc

SEQ ID NO: 1201845 - RNA, 19 nt, Human
uccccccgccccgggcgcc

SEQ ID NO: 1201846 - RNA, 23 nt, Human
cgccaggacagcaaagaugucgg

SEQ ID NO: 1201847 - RNA, 21 nt, Human
gcccggagcgccaggacagca

SEQ ID NO: 1201848 - RNA, 18 nt, Human
ggcgaggucugcuggcag

SEQ ID NO: 1201849 - RNA, 20 nt, Human
gggcagccuugcaaggcuug

SEQ ID NO: 1201850 - RNA, 19 nt, Human
ugguggggucccgugaggc

SEQ ID NO: 1201851 - RNA, 21 nt, Human
uugcaaggcuugagcauggug

SEQ ID NO: 1201852 - RNA, 19 nt, Human
aagggugucccagagcucc

SEQ ID NO: 1201853 - RNA, 22 nt, Human
agaccucuucccuagacaaggg

SEQ ID NO: 1201854 - RNA, 19 nt, Human
caguaagaccucuucccua

SEQ ID NO: 1201855 - RNA, 20 nt, Human
ccucuucccuagacaagggu

SEQ ID NO: 1201856 - RNA, 19 nt, Human
gacaagggugucccagagc

SEQ ID NO: 1201857 - RNA, 20 nt, Human
ggacacaaagucaggugagg

SEQ ID NO: 1201858 - RNA, 23 nt, Human
ucccagagcuccuccgcuggagu

SEQ ID NO: 1201859 - RNA, 19 nt, Human
ucccuagacaagggugucc

SEQ ID NO: 1201860 - RNA, 19 nt, Human
ucccuagacaagggugucc

SEQ ID NO: 1201861 - RNA, 24 nt, Human
ugucccagagcuccuccgcuggag

SEQ ID NO: 1201862 - RNA, 24 nt, Human
cacacaggcuaggccccuaggagc

SEQ ID NO: 1201863 - RNA, 18 nt, Human
ccacacaggcuaggcccc

SEQ ID NO: 1201864 - RNA, 19 nt, Human
cuaggcuucuagggggucc

SEQ ID NO: 1201865 - RNA, 24 nt, Human
gagggccacacaggcuaggccccu

SEQ ID NO: 1201866 - RNA, 23 nt, Human
uaggagcagaagacacagagaag

SEQ ID NO: 1201867 - RNA, 19 nt, Human
uaggccccuaggagcagaa

SEQ ID NO: 1201868 - RNA, 23 nt, Human
aaauaacauuucagaauggaaca

SEQ ID NO: 1201869 - RNA, 21 nt, Human
aaugguuggcugacagggaaa

SEQ ID NO: 1201870 - RNA, 18 nt, Human
acagggaaaacguucaca

SEQ ID NO: 1201871 - RNA, 18 nt, Human
acagugauaaauaagugg

SEQ ID NO: 1201872 - RNA, 18 nt, Human
acguucccacagugauga

SEQ ID NO: 1201873 - RNA, 22 nt, Human
acucuggugaauaagugggugg

SEQ ID NO: 1201874 - RNA, 24 nt, Human
agugaaaacguucccacagugaug

SEQ ID NO: 1201875 - RNA, 24 nt, Human
agugaagagguucccacugugaug

SEQ ID NO: 1201876 - RNA, 20 nt, Human
agugggugugaaugaacagg

SEQ ID NO: 1201877 - RNA, 19 nt, Human
auguaaaugggcaccuucc

SEQ ID NO: 1201878 - RNA, 26 nt, Human
caagagguucccacugugaugauuga

SEQ ID NO: 1201879 - RNA, 24 nt, Human
caaguccacagaaauaagcugaaa

SEQ ID NO: 1201880 - RNA, 21 nt, Human
cacuguugagaaugagugucu

SEQ ID NO: 1201881 - RNA, 21 nt, Human
cauguucccacugugaugaau

SEQ ID NO: 1201882 - RNA, 19 nt, Human
ccacacuguguugagugag

SEQ ID NO: 1201883 - RNA, 20 nt, Human
ccagggaaaagggucucguu

SEQ ID NO: 1201884 - RNA, 22 nt, Human
cccacuguggugaaugaauggg

SEQ ID NO: 1201885 - RNA, 26 nt, Human
cccauaaacaguggcucggguaacug

SEQ ID NO: 1201886 - RNA, 20 nt, Human
ccccccucuccuucccuuuc

SEQ ID NO: 1201887 - RNA, 22 nt, Human
ccccucuccuucccuuucccca

SEQ ID NO: 1201888 - RNA, 23 nt, Human
ccugacacugaacagguucccau

SEQ ID NO: 1201889 - RNA, 19 nt, Human
ccuguggugaaugacuggc

SEQ ID NO: 1201890 - RNA, 23 nt, Human
cugauuuccccccucuccuuccc

SEQ ID NO: 1201891 - RNA, 22 nt, Human
cugguucccauuguacugagug

SEQ ID NO: 1201892 - RNA, 27 nt, Human
cuguaaugaaugaguggaugacaguug

SEQ ID NO: 1201893 - RNA, 20 nt, Human
cugugaugaaugaauggguu

SEQ ID NO: 1201894 - RNA, 27 nt, Human
cugugaugaaugaguggcugacaguug

SEQ ID NO: 1201895 - RNA, 22 nt, Human
cuuaacccuuggcaugccuggc

SEQ ID NO: 1201896 - RNA, 20 nt, Human
gaacagcuucccacucuggg

SEQ ID NO: 1201897 - RNA, 20 nt, Human
gaacagguucccaagguggu

SEQ ID NO: 1201898 - RNA, 18 nt, Human
gaacugguucucaugugg

SEQ ID NO: 1201899 - RNA, 18 nt, Human
gacaguauuucagcgccc

SEQ ID NO: 1201900 - RNA, 19 nt, Human
gagcugauuuucaucgugg

SEQ ID NO: 1201901 - RNA, 21 nt, Human
gagguuuguacuguggugaau

SEQ ID NO: 1201902 - RNA, 20 nt, Human
gagugagugggggagaguua

SEQ ID NO: 1201903 - RNA, 18 nt, Human
gaugagugugugauagug

SEQ ID NO: 1201904 - RNA, 19 nt, Human
gcaugccuggcugucuggc

SEQ ID NO: 1201905 - RNA, 18 nt, Human
gggaaugguuggcugaca

SEQ ID NO: 1201906 - RNA, 22 nt, Human
ggucuuacugugauguaugugu

SEQ ID NO: 1201907 - RNA, 20 nt, Human
ggugacaaggaauaaguucc

SEQ ID NO: 1201908 - RNA, 20 nt, Human
guaccuccuacugugauuaa

SEQ ID NO: 1201909 - RNA, 21 nt, Human
gugaacagguucccacaguag

SEQ ID NO: 1201910 - RNA, 19 nt, Human
gugacagugagcagguucc

SEQ ID NO: 1201911 - RNA, 24 nt, Human
uaaaugagcacaugacagugacca

SEQ ID NO: 1201912 - RNA, 19 nt, Human
uaacggguuuccacuguga

SEQ ID NO: 1201913 - RNA, 19 nt, Human
uaacggguuuccacuguga

SEQ ID NO: 1201914 - RNA, 22 nt, Human
uaagugggugacaaagaacagg

SEQ ID NO: 1201915 - RNA, 21 nt, Human
uagagcugggcuggggaaagg

SEQ ID NO: 1201916 - RNA, 18 nt, Human
uaggugacagugcacagg

SEQ ID NO: 1201917 - RNA, 26 nt, Human
uagguggaugacagugaacugguuuu

SEQ ID NO: 1201918 - RNA, 20 nt, Human
ucagugugaugaaagaguga

SEQ ID NO: 1201919 - RNA, 18 nt, Human
uccaggacaguauuucag

SEQ ID NO: 1201920 - RNA, 24 nt, Human
uccccccucuccuucccuuucccc

SEQ ID NO: 1201921 - RNA, 19 nt, Human
ucuccuucccuuuccccau

SEQ ID NO: 1201922 - RNA, 24 nt, Human
ucugacagugaacaggaucccaca

SEQ ID NO: 1201923 - RNA, 23 nt, Human
ucuguggucuuucuuuugccucu

SEQ ID NO: 1201924 - RNA, 22 nt, Human
ucuucccacaaugaaugauugg

SEQ ID NO: 1201925 - RNA, 24 nt, Human
ucuuuuuccucucuguggucuuuc

SEQ ID NO: 1201926 - RNA, 22 nt, Human
ugaaaacguucccacagugaug

SEQ ID NO: 1201927 - RNA, 20 nt, Human
ugaacagguggcucacagua

SEQ ID NO: 1201928 - RNA, 25 nt, Human
ugaacagguggcucacaguagcagg

SEQ ID NO: 1201929 - RNA, 21 nt, Human
ugaacagguucccaugugaug

SEQ ID NO: 1201930 - RNA, 18 nt, Human
ugaacagguucugacagu

SEQ ID NO: 1201931 - RNA, 20 nt, Human
ugaacagguuuucacuguga

SEQ ID NO: 1201932 - RNA, 18 nt, Human
ugaaggagagggugacag

SEQ ID NO: 1201933 - RNA, 18 nt, Human
ugaaugaaugggugacag

SEQ ID NO: 1201934 - RNA, 22 nt, Human
ugaaugaauugaugagagugaa

SEQ ID NO: 1201935 - RNA, 18 nt, Human
ugaaugaguggcugacag

SEQ ID NO: 1201936 - RNA, 18 nt, Human
ugaaugaguggcugacag

SEQ ID NO: 1201937 - RNA, 22 nt, Human
ugaaugagugggagagagugaa

SEQ ID NO: 1201938 - RNA, 24 nt, Human
ugaaugagugggugacaguaaugg

SEQ ID NO: 1201939 - RNA, 22 nt, Human
ugaaugagugggugagagugaa

SEQ ID NO: 1201940 - RNA, 18 nt, Human
ugaaugagugguugacag

SEQ ID NO: 1201941 - RNA, 22 nt, Human
ugaaugagugguugagagugaa

SEQ ID NO: 1201942 - RNA, 21 nt, Human
ugaaugagugugugaaaguca

SEQ ID NO: 1201943 - RNA, 22 nt, Human
ugaaugggcuggugagagugaa

SEQ ID NO: 1201944 - RNA, 23 nt, Human
ugacagugaacagguucuuccca

SEQ ID NO: 1201945 - RNA, 21 nt, Human
ugacagugaacagguuuccau

SEQ ID NO: 1201946 - RNA, 19 nt, Human
ugagcacaugacagugacc

SEQ ID NO: 1201947 - RNA, 19 nt, Human
ugaguagcugacaauggac

SEQ ID NO: 1201948 - RNA, 18 nt, Human
ugaguaggugacagugca

SEQ ID NO: 1201949 - RNA, 23 nt, Human
ugagucauugaacugccucagug

SEQ ID NO: 1201950 - RNA, 21 nt, Human
ugagugagugggugacaguga

SEQ ID NO: 1201951 - RNA, 21 nt, Human
ugagugagugggugacaguga

SEQ ID NO: 1201952 - RNA, 21 nt, Human
ugagugagugggugacaguga

SEQ ID NO: 1201953 - RNA, 18 nt, Human
ugagugccugacacugaa

SEQ ID NO: 1201954 - RNA, 21 nt, Human
ugaguggaugacagugaacau

SEQ ID NO: 1201955 - RNA, 24 nt, Human
ugagugggugagagugaacaggau

SEQ ID NO: 1201956 - RNA, 25 nt, Human
ugagugggugagagugaacaggauu

SEQ ID NO: 1201957 - RNA, 23 nt, Human
ugagugguugagagugaacaggu

SEQ ID NO: 1201958 - RNA, 22 nt, Human
ugagugguugagagugaacagu

SEQ ID NO: 1201959 - RNA, 23 nt, Human
ugagugucugacgguaaacaggu

SEQ ID NO: 1201960 - RNA, 21 nt, Human
ugaugagugagugggugacac

SEQ ID NO: 1201961 - RNA, 22 nt, Human
ugauuuccccccucuccuuccc

SEQ ID NO: 1201962 - RNA, 20 nt, Human
ugccucagugaccccaguaa

SEQ ID NO: 1201963 - RNA, 18 nt, Human
uggcauugaaaugcuucc

SEQ ID NO: 1201964 - RNA, 21 nt, Human
ugggugaaagugaagagguuc

SEQ ID NO: 1201965 - RNA, 23 nt, Human
ugggugacaaugaaccgguuucc

SEQ ID NO: 1201966 - RNA, 18 nt, Human
ugggugacaguaaugggg

SEQ ID NO: 1201967 - RNA, 18 nt, Human
ugggugacagugaacagg

SEQ ID NO: 1201968 - RNA, 18 nt, Human
ugggugacagugaacagg

SEQ ID NO: 1201969 - RNA, 18 nt, Human
ugggugacagugaacagg

SEQ ID NO: 1201970 - RNA, 18 nt, Human
ugggugacagugaacagg

SEQ ID NO: 1201971 - RNA, 18 nt, Human
ugggugacagugaacagg

SEQ ID NO: 1201972 - RNA, 18 nt, Human
ugggugacagugaacagg

SEQ ID NO: 1201973 - RNA, 18 nt, Human
ugggugacagugaacagg

SEQ ID NO: 1201974 - RNA, 23 nt, Human
ugggugacagugaacagguuucc

SEQ ID NO: 1201975 - RNA, 18 nt, Human
ugggugacagugaagagg

SEQ ID NO: 1201976 - RNA, 22 nt, Human
ugguacauguuccguucacaug

SEQ ID NO: 1201977 - RNA, 22 nt, Human
uggugaaugaguggucaacagg

SEQ ID NO: 1201978 - RNA, 21 nt, Human
uggugagugagugggugacau

SEQ ID NO: 1201979 - RNA, 29 nt, Human
ugguuagugagugcuugacagccaagagg

SEQ ID NO: 1201980 - RNA, 19 nt, Human
ugguugagagugaacaggu

SEQ ID NO: 1201981 - RNA, 19 nt, Human
ugguugagagugaacaggu

SEQ ID NO: 1201982 - RNA, 18 nt, Human
uguaaugaauaaguuggu

SEQ ID NO: 1201983 - RNA, 24 nt, Human
ugugaugagugagugggggagagu

SEQ ID NO: 1201984 - RNA, 20 nt, Human
ugugaugauugagugggugu

SEQ ID NO: 1201985 - RNA, 20 nt, Human
ugugcugaaugagugguuga

SEQ ID NO: 1201986 - RNA, 28 nt, Human
ugugggaaaugaguggcugaccgugagg

SEQ ID NO: 1201987 - RNA, 22 nt, Human
uguggugaauaagugggugaca

SEQ ID NO: 1201988 - RNA, 22 nt, Human
uguggugaaugaaugggugcca

SEQ ID NO: 1201989 - RNA, 22 nt, Human
uguggugaaugagugggugaca

SEQ ID NO: 1201990 - RNA, 19 nt, Human
uguggugaauguguggcug

SEQ ID NO: 1201991 - RNA, 18 nt, Human
uguguugagugaauagcu

SEQ ID NO: 1201992 - RNA, 18 nt, Human
uguguugagugaguagcu

SEQ ID NO: 1201993 - RNA, 20 nt, Human
uguuggugaccauaaacagg

SEQ ID NO: 1201994 - RNA, 19 nt, Human
uucaagggcaaguccacag

SEQ ID NO: 1201995 - RNA, 21 nt, Human
uucacacucugaugaugagug

SEQ ID NO: 1201996 - RNA, 19 nt, Human
uucacugugaugaaugggc

SEQ ID NO: 1201997 - RNA, 19 nt, Human
uucccacuguaauaaauga

SEQ ID NO: 1201998 - RNA, 20 nt, Human
uugacagugaacagguuuuc

SEQ ID NO: 1201999 - RNA, 19 nt, Human
uuguacugagugugugggu

SEQ ID NO: 1202000 - RNA, 19 nt, Human
uuucagcgcccugcauuug

SEQ ID NO: 1202001 - RNA, 19 nt, Human
agagaauucuauagccaca

SEQ ID NO: 1202002 - RNA, 23 nt, Human
uccagagagaauucuauagccac

SEQ ID NO: 1202003 - RNA, 22 nt, Human
ucccuauauaaauugugcugug

SEQ ID NO: 1202004 - RNA, 19 nt, Human
uccuccagagagaauucua

SEQ ID NO: 1202005 - RNA, 18 nt, Human
auugugcggcugcgggac

SEQ ID NO: 1202006 - RNA, 18 nt, Human
cauugugcggcugcggga

SEQ ID NO: 1202007 - RNA, 23 nt, Human
ccagccuucggggucccccaucc

SEQ ID NO: 1202008 - RNA, 20 nt, Human
ccgcccgcauugugcggcug

SEQ ID NO: 1202009 - RNA, 22 nt, Human
ccuccacuucccccagccuucg

SEQ ID NO: 1202010 - RNA, 19 nt, Human
cgagaggggcggggcggca

SEQ ID NO: 1202011 - RNA, 21 nt, Human
cgccgggacgcgaucacucgg

SEQ ID NO: 1202012 - RNA, 25 nt, Human
cggcugcgggacacuugugucuuug

SEQ ID NO: 1202013 - RNA, 18 nt, Human
cugugcgcgcguccgucc

SEQ ID NO: 1202014 - RNA, 21 nt, Human
cugugcgcgcguccguccccu

SEQ ID NO: 1202015 - RNA, 23 nt, Human
gagaggggcggggcggcaggggu

SEQ ID NO: 1202016 - RNA, 22 nt, Human
ggcacgcagacgucgcucgcca

SEQ ID NO: 1202017 - RNA, 18 nt, Human
guccccuccacuuccccc

SEQ ID NO: 1202018 - RNA, 24 nt, Human
guccccuccacuucccccagccuu

SEQ ID NO: 1202019 - RNA, 19 nt, Human
ucccccagccuucgggguc

SEQ ID NO: 1202020 - RNA, 22 nt, Human
ucggggucccccauccgcuugg

SEQ ID NO: 1202021 - RNA, 24 nt, Human
ugccccgagaggggcggggcggca

SEQ ID NO: 1202022 - RNA, 21 nt, Human
uucccccagccuucggggucc

SEQ ID NO: 1202023 - RNA, 24 nt, Human
uucggggucccccauccgcuuggc

SEQ ID NO: 1202024 - RNA, 24 nt, Human
aaagcuuucccacacuccuuacau

SEQ ID NO: 1202025 - RNA, 22 nt, Human
aaaguagaaaauaaguugaaaa

SEQ ID NO: 1202026 - RNA, 19 nt, Human
acaaaccagcuggccguga

SEQ ID NO: 1202027 - RNA, 23 nt, Human
acgaagcauaaaggcuuucccgc

SEQ ID NO: 1202028 - RNA, 18 nt, Human
acuaaaagcuuucccaca

SEQ ID NO: 1202029 - RNA, 19 nt, Human
agaauaucccagugagacc

SEQ ID NO: 1202030 - RNA, 19 nt, Human
aggguuuuacaccaguaug

SEQ ID NO: 1202031 - RNA, 22 nt, Human
aguaagguaaaaacuaagucua

SEQ ID NO: 1202032 - RNA, 24 nt, Human
auagaucuuucuuuaagucccugu

SEQ ID NO: 1202033 - RNA, 29 nt, Human
augaauucuuugauguauucuaaggucuu

SEQ ID NO: 1202034 - RNA, 19 nt, Human
caaaagguuuuauaccagu

SEQ ID NO: 1202035 - RNA, 21 nt, Human
cacauucuuuacauuuauagg

SEQ ID NO: 1202036 - RNA, 23 nt, Human
cacuaaaagcuuucccacacucc

SEQ ID NO: 1202037 - RNA, 21 nt, Human
caguaaggacugaacgaagca

SEQ ID NO: 1202038 - RNA, 19 nt, Human
caguaugaauucuuugaug

SEQ ID NO: 1202039 - RNA, 19 nt, Human
caguaugaauuuucugaug

SEQ ID NO: 1202040 - RNA, 21 nt, Human
cagugaacugcccacgccgac

SEQ ID NO: 1202041 - RNA, 24 nt, Human
cagugugaauucucugauguucag

SEQ ID NO: 1202042 - RNA, 24 nt, Human
cagugugaauucucugguguucag

SEQ ID NO: 1202043 - RNA, 18 nt, Human
caugaguucuucuguguu

SEQ ID NO: 1202044 - RNA, 21 nt, Human
caugaguucuucuguguucag

SEQ ID NO: 1202045 - RNA, 20 nt, Human
ccaagugugagucacagcuu

SEQ ID NO: 1202046 - RNA, 21 nt, Human
ccacucauuucuaaaaaugga

SEQ ID NO: 1202047 - RNA, 19 nt, Human
ccagugugaauucucugau

SEQ ID NO: 1202048 - RNA, 19 nt, Human
ccagugugaauucucuggu

SEQ ID NO: 1202049 - RNA, 19 nt, Human
cccacgccgacuaaaggac

SEQ ID NO: 1202050 - RNA, 20 nt, Human
cccacgccgacuaaaggacu

SEQ ID NO: 1202051 - RNA, 24 nt, Human
cccucuacgaauaaaggccuuucc

SEQ ID NO: 1202052 - RNA, 20 nt, Human
ccuguugacccucaaacuca

SEQ ID NO: 1202053 - RNA, 23 nt, Human
cuaaaggucuucccacaucguac

SEQ ID NO: 1202054 - RNA, 22 nt, Human
cuaaaggucuuuccacauuccu

SEQ ID NO: 1202055 - RNA, 22 nt, Human
cucaacucaccggggcacuguc

SEQ ID NO: 1202056 - RNA, 20 nt, Human
cucuccaguaugaauucuag

SEQ ID NO: 1202057 - RNA, 22 nt, Human
cuuuaagucccuguugacccuc

SEQ ID NO: 1202058 - RNA, 23 nt, Human
cuuuacagucauaggguuuuaaa

SEQ ID NO: 1202059 - RNA, 19 nt, Human
gacuaaaggacuucccaca

SEQ ID NO: 1202060 - RNA, 24 nt, Human
guaugaauuuucugauguucagug

SEQ ID NO: 1202061 - RNA, 28 nt, Human
gucuauagccacaucccugaacgucacc

SEQ ID NO: 1202062 - RNA, 18 nt, Human
uaagguagaaaccaaauc

SEQ ID NO: 1202063 - RNA, 21 nt, Human
uacacuaaaagcuuucccaca

SEQ ID NO: 1202064 - RNA, 21 nt, Human
uaccuguaugaauucucucau

SEQ ID NO: 1202065 - RNA, 19 nt, Human
uaugccgauuaagcugucc

SEQ ID NO: 1202066 - RNA, 18 nt, Human
ucacaucccucgccacca

SEQ ID NO: 1202067 - RNA, 25 nt, Human
ucaccagugugaauucucugauguu

SEQ ID NO: 1202068 - RNA, 25 nt, Human
ucaccagugugaauucucugguguu

SEQ ID NO: 1202069 - RNA, 18 nt, Human
ucccucuacgaauaaagg

SEQ ID NO: 1202070 - RNA, 23 nt, Human
uccuuacauucguagggcuucac

SEQ ID NO: 1202071 - RNA, 23 nt, Human
uccuuacauucguaggguuuuac

SEQ ID NO: 1202072 - RNA, 22 nt, Human
ucuaaaggucuuuccacauucc

SEQ ID NO: 1202073 - RNA, 19 nt, Human
ucuacacuacgacuaaagg

SEQ ID NO: 1202074 - RNA, 21 nt, Human
ucucugauguucaguaaggac

SEQ ID NO: 1202075 - RNA, 18 nt, Human
ucuuggucuuaugccugg

SEQ ID NO: 1202076 - RNA, 19 nt, Human
ugaauguccuuuucugaag

SEQ ID NO: 1202077 - RNA, 19 nt, Human
ugaauguccuuuucugaag

SEQ ID NO: 1202078 - RNA, 23 nt, Human
ugagaacgaacucgaaaggucuu

SEQ ID NO: 1202079 - RNA, 22 nt, Human
ugagagaagucuauagccacau

SEQ ID NO: 1202080 - RNA, 20 nt, Human
ugguuuuacacccguaugaa

SEQ ID NO: 1202081 - RNA, 19 nt, Human
uucuccaacaucacaucuc

SEQ ID NO: 1202082 - RNA, 26 nt, Human
uuucucacuauugugaauucucugau

SEQ ID NO: 1202083 - RNA, 19 nt, Human
aaaguugaagguggugagc

SEQ ID NO: 1202084 - RNA, 19 nt, Human
aagauccucuugggcugcc

SEQ ID NO: 1202085 - RNA, 22 nt, Human
acgcagcaggucuuucagagca

SEQ ID NO: 1202086 - RNA, 23 nt, Human
acucaguuuggagggugcucaga

SEQ ID NO: 1202087 - RNA, 22 nt, Human
acuccaaggggcucaagauggg

SEQ ID NO: 1202088 - RNA, 20 nt, Human
agacagacacuccauguccc

SEQ ID NO: 1202089 - RNA, 23 nt, Human
aggaggacccugaguuggggguc

SEQ ID NO: 1202090 - RNA, 23 nt, Human
aggcaggaggacccugaguuggg

SEQ ID NO: 1202091 - RNA, 23 nt, Human
agggguucuugagguaccugagc

SEQ ID NO: 1202092 - RNA, 25 nt, Human
aggucuuucagagcauucauggagg

SEQ ID NO: 1202093 - RNA, 21 nt, Human
agguggugagcugggaacagu

SEQ ID NO: 1202094 - RNA, 19 nt, Human
aguggcucagggcaggcag

SEQ ID NO: 1202095 - RNA, 25 nt, Human
caacuccaggccuaacuugcucagc

SEQ ID NO: 1202096 - RNA, 20 nt, Human
caucuggggguaguacaggc

SEQ ID NO: 1202097 - RNA, 21 nt, Human
cauuuccaugaaaguugaagg

SEQ ID NO: 1202098 - RNA, 20 nt, Human
ccucuugggcugccugacuu

SEQ ID NO: 1202099 - RNA, 22 nt, Human
cucaguuuggagggugcucaga

SEQ ID NO: 1202100 - RNA, 24 nt, Human
cuccaggccuaacuugcucagccc

SEQ ID NO: 1202101 - RNA, 26 nt, Human
cuccaggccuaacuugcucagcccac

SEQ ID NO: 1202102 - RNA, 21 nt, Human
cuuucuccagcagaacuccaa

SEQ ID NO: 1202103 - RNA, 22 nt, Human
gagggucuugagaguagcagca

SEQ ID NO: 1202104 - RNA, 23 nt, Human
gcagaacuccaaggggcucaaga

SEQ ID NO: 1202105 - RNA, 24 nt, Human
gggcaggcaggaggacccugaguu

SEQ ID NO: 1202106 - RNA, 21 nt, Human
ggguccuggauccgacagucc

SEQ ID NO: 1202107 - RNA, 23 nt, Human
ggugagcugggaacaguggcuca

SEQ ID NO: 1202108 - RNA, 25 nt, Human
guagcagcaacuuucuccagcagaa

SEQ ID NO: 1202109 - RNA, 27 nt, Human
gucuugagaguagcagcaacuuucucc

SEQ ID NO: 1202110 - RNA, 23 nt, Human
gugacgcagcaggucuuucagag

SEQ ID NO: 1202111 - RNA, 20 nt, Human
uaagacgagggucuugagag

SEQ ID NO: 1202112 - RNA, 20 nt, Human
uagcagcaacuuucuccagc

SEQ ID NO: 1202113 - RNA, 28 nt, Human
ucccugaguguacgcaucagcucagccc

SEQ ID NO: 1202114 - RNA, 21 nt, Human
ugagcugggaacaguggcuca

SEQ ID NO: 1202115 - RNA, 21 nt, Human
ugagcugggaacaguggcuca

SEQ ID NO: 1202116 - RNA, 22 nt, Human
ugcuccaggugcucuuugauau

SEQ ID NO: 1202117 - RNA, 23 nt, Human
uggaggucucauuuccaugaaag

SEQ ID NO: 1202118 - RNA, 19 nt, Human
uggcucagggcaggcagga

SEQ ID NO: 1202119 - RNA, 18 nt, Human
ugggaacaguggcucagg

SEQ ID NO: 1202120 - RNA, 22 nt, Human
uggggugaggaucucccaauug

SEQ ID NO: 1202121 - RNA, 21 nt, Human
uugaagguggugagcugggaa

SEQ ID NO: 1202122 - RNA, 21 nt, Human
uugauauuacugaucuuuuuu

SEQ ID NO: 1202123 - RNA, 24 nt, Human
gagccaaguccugguuggaaccgg

SEQ ID NO: 1202124 - RNA, 20 nt, Human
guccugguuggaaccggagc

SEQ ID NO: 1202125 - RNA, 27 nt, Human
uggaaccggagcucugaacaccaccaa

SEQ ID NO: 1202126 - RNA, 24 nt, Human
cugccuccaaaucaagagcaugga

SEQ ID NO: 1202127 - RNA, 23 nt, Human
cuuuccugccuccaaaucaagag

SEQ ID NO: 1202128 - RNA, 22 nt, Human
uucacaguccuuuccugccucc

SEQ ID NO: 1202129 - RNA, 24 nt, Human
aaaaaacagauguaaaacaacuaa

SEQ ID NO: 1202130 - RNA, 18 nt, Human
aaacagauguaaaacaac

SEQ ID NO: 1202131 - RNA, 19 nt, Human
aaacagauguaaaacaacu

SEQ ID NO: 1202132 - RNA, 22 nt, Human
aaacagauguaaaacaacuaau

SEQ ID NO: 1202133 - RNA, 21 nt, Human
acaggcagcaccaucucccuc

SEQ ID NO: 1202134 - RNA, 21 nt, Human
acgcuccgcucugguccgaau

SEQ ID NO: 1202135 - RNA, 20 nt, Human
agcaaaaaacagauguaaaa

SEQ ID NO: 1202136 - RNA, 20 nt, Human
aggcagcaccaucucccucu

SEQ ID NO: 1202137 - RNA, 21 nt, Human
aggcagcaccaucucccucuc

SEQ ID NO: 1202138 - RNA, 22 nt, Human
cacucugcccucauggggcuua

SEQ ID NO: 1202139 - RNA, 21 nt, Human
cagaauccacaggcagcacca

SEQ ID NO: 1202140 - RNA, 27 nt, Human
cagaauccacaggcagcaccaucuccc

SEQ ID NO: 1202141 - RNA, 20 nt, Human
caguguggaaaggcuagccu

SEQ ID NO: 1202142 - RNA, 18 nt, Human
ccaaauuccugcucuggu

SEQ ID NO: 1202143 - RNA, 20 nt, Human
ccugaagcacccuuggcugg

SEQ ID NO: 1202144 - RNA, 21 nt, Human
ccugaagcacccuuggcugga

SEQ ID NO: 1202145 - RNA, 19 nt, Human
ccugcucugguuuuaacuc

SEQ ID NO: 1202146 - RNA, 24 nt, Human
cgaaugaagagccauuugcacuca

SEQ ID NO: 1202147 - RNA, 20 nt, Human
cuuagcaaaaaacagaugua

SEQ ID NO: 1202148 - RNA, 18 nt, Human
cuuguuccugaagcaccc

SEQ ID NO: 1202149 - RNA, 24 nt, Human
gcccucauggggcuuacgguccuu

SEQ ID NO: 1202150 - RNA, 21 nt, Human
uaacucagugagcuucaacac

SEQ ID NO: 1202151 - RNA, 22 nt, Human
uaacucagugagcuucaacacc

SEQ ID NO: 1202152 - RNA, 23 nt, Human
uacgguccuuagcaaaaaacaga

SEQ ID NO: 1202153 - RNA, 23 nt, Human
uagcaaaaaacagauguaaaaca

SEQ ID NO: 1202154 - RNA, 27 nt, Human
uagcaaaaaacagauguaaaacaacua

SEQ ID NO: 1202155 - RNA, 29 nt, Human
uagcaaaaaacagauguaaaagggacccc

SEQ ID NO: 1202156 - RNA, 22 nt, Human
ucccucuccauagccuuugcug

SEQ ID NO: 1202157 - RNA, 19 nt, Human
ugaagcacccuuggcugga

SEQ ID NO: 1202158 - RNA, 24 nt, Human
ugcugauccuuguuccugaagcac

SEQ ID NO: 1202159 - RNA, 20 nt, Human
aaaaagacaauccugcccuc

SEQ ID NO: 1202160 - RNA, 24 nt, Human
aaguccacuucaaauuaaauaugg

SEQ ID NO: 1202161 - RNA, 20 nt, Human
acacagaaaaaaaaagacaa

SEQ ID NO: 1202162 - RNA, 28 nt, Human
aggaagaggcggaggcagguccgggcuu

SEQ ID NO: 1202163 - RNA, 24 nt, Human
aggagcucacagucuaguggggga

SEQ ID NO: 1202164 - RNA, 25 nt, Human
aggcggaggcagguccgggcuucga

SEQ ID NO: 1202165 - RNA, 19 nt, Human
agugggggaaacagauagg

SEQ ID NO: 1202166 - RNA, 19 nt, Human
caaaauaaaaacccccaga

SEQ ID NO: 1202167 - RNA, 19 nt, Human
ccaaaauagaagguuuuca

SEQ ID NO: 1202168 - RNA, 19 nt, Human
ccgccgaggcagccaccgg

SEQ ID NO: 1202169 - RNA, 18 nt, Human
cgggcggucgacgcggug

SEQ ID NO: 1202170 - RNA, 22 nt, Human
cggugggcccccuccccggucc

SEQ ID NO: 1202171 - RNA, 19 nt, Human
cuggaggaagaggcggagg

SEQ ID NO: 1202172 - RNA, 23 nt, Human
cuggggacacagaaaaaaaaaga

SEQ ID NO: 1202173 - RNA, 20 nt, Human
gaauaacaaaauaaaaaccc

SEQ ID NO: 1202174 - RNA, 21 nt, Human
gaauaacaaaauaaaaacccc

SEQ ID NO: 1202175 - RNA, 22 nt, Human
gacgcggugggcccccuccccg

SEQ ID NO: 1202176 - RNA, 20 nt, Human
gcggcggcggaggcggcggg

SEQ ID NO: 1202177 - RNA, 18 nt, Human
ggaggacgaggcacggga

SEQ ID NO: 1202178 - RNA, 24 nt, Human
ggcgcggcggcggaggcggcggga

SEQ ID NO: 1202179 - RNA, 24 nt, Human
ggggcgcggcggcggaggcggcgg

SEQ ID NO: 1202180 - RNA, 28 nt, Human
uaaaaagggaugauguccaaugcagugg

SEQ ID NO: 1202181 - RNA, 18 nt, Human
uaagugcuggggacacag

SEQ ID NO: 1202182 - RNA, 23 nt, Human
uagauauaugaagauuaaaaaaa

SEQ ID NO: 1202183 - RNA, 23 nt, Human
uaguaugaauaguauuuuaagug

SEQ ID NO: 1202184 - RNA, 19 nt, Human
uccugcccucgaggagcuc

SEQ ID NO: 1202185 - RNA, 21 nt, Human
ugaauggaugguaaaaaggga

SEQ ID NO: 1202186 - RNA, 26 nt, Human
ugaauggaugguaaaaagggaugaug

SEQ ID NO: 1202187 - RNA, 18 nt, Human
uuuauaaacuucacuugc

SEQ ID NO: 1202188 - RNA, 22 nt, Human
aagaccacuaccacguuccgcc

SEQ ID NO: 1202189 - RNA, 20 nt, Human
accaccuucuuuuucuugcc

SEQ ID NO: 1202190 - RNA, 24 nt, Human
accagagaagggggcccccucaga

SEQ ID NO: 1202191 - RNA, 18 nt, Human
acccguggccgcagccgu

SEQ ID NO: 1202192 - RNA, 25 nt, Human
agacggcgaccugggacgucaagca

SEQ ID NO: 1202193 - RNA, 21 nt, Human
agagaagggggcccccucaga

SEQ ID NO: 1202194 - RNA, 21 nt, Human
agaggaucagcaagagguugc

SEQ ID NO: 1202195 - RNA, 21 nt, Human
agcagcagguucuuaggaggg

SEQ ID NO: 1202196 - RNA, 25 nt, Human
agccaccgggcgagacugugcuggc

SEQ ID NO: 1202197 - RNA, 20 nt, Human
agcgucuaccuccccccggc

SEQ ID NO: 1202198 - RNA, 20 nt, Human
aggaagugggagaugcucug

SEQ ID NO: 1202199 - RNA, 18 nt, Human
aggaggcggugguggugg

SEQ ID NO: 1202200 - RNA, 21 nt, Human
aggcccggcagccccagagga

SEQ ID NO: 1202201 - RNA, 26 nt, Human
aggcggugguggugggggucgagggc

SEQ ID NO: 1202202 - RNA, 22 nt, Human
aggcgguggugguggggguucg

SEQ ID NO: 1202203 - RNA, 25 nt, Human
aggggcccccgguaggcgguggggc

SEQ ID NO: 1202204 - RNA, 23 nt, Human
aggggcgugggggcugaaccaga

SEQ ID NO: 1202205 - RNA, 21 nt, Human
agguagguguuggcaggcggg

SEQ ID NO: 1202206 - RNA, 24 nt, Human
caagagguugcagggguggcagcu

SEQ ID NO: 1202207 - RNA, 23 nt, Human
caaggcguacuuggggugacccu

SEQ ID NO: 1202208 - RNA, 21 nt, Human
caccacaguccagguguacac

SEQ ID NO: 1202209 - RNA, 18 nt, Human
caccaugcgccgcacgcc

SEQ ID NO: 1202210 - RNA, 18 nt, Human
cagcgccuggaaaggacc

SEQ ID NO: 1202211 - RNA, 22 nt, Human
cagcugcaccacuggucgcagg

SEQ ID NO: 1202212 - RNA, 21 nt, Human
cagcugggggugcuguggagc

SEQ ID NO: 1202213 - RNA, 20 nt, Human
caggagcugaggcuccggcc

SEQ ID NO: 1202214 - RNA, 20 nt, Human
cagggcagccaccagccccg

SEQ ID NO: 1202215 - RNA, 19 nt, Human
cagucggagcccaccacag

SEQ ID NO: 1202216 - RNA, 23 nt, Human
cauagccgccguacuggggcagg

SEQ ID NO: 1202217 - RNA, 24 nt, Human
cauggcccccaccccggccaccaa

SEQ ID NO: 1202218 - RNA, 18 nt, Human
caugguggccgcugccac

SEQ ID NO: 1202219 - RNA, 20 nt, Human
ccauggcugagggcgggggc

SEQ ID NO: 1202220 - RNA, 20 nt, Human
cccagcggcugccacggcca

SEQ ID NO: 1202221 - RNA, 22 nt, Human
cccauagccgccguacuggggc

SEQ ID NO: 1202222 - RNA, 24 nt, Human
ccccaacucaguaaggcccgggcc

SEQ ID NO: 1202223 - RNA, 18 nt, Human
ccccaccccggccaccaa

SEQ ID NO: 1202224 - RNA, 20 nt, Human
ccccaccccggccaccaaaa

SEQ ID NO: 1202225 - RNA, 23 nt, Human
ccccaccccggccaccaaaaccg

SEQ ID NO: 1202226 - RNA, 19 nt, Human
ccccagcggcugccacggc

SEQ ID NO: 1202227 - RNA, 20 nt, Human
ccccagcggcugccacggcc

SEQ ID NO: 1202228 - RNA, 22 nt, Human
ccccaggggcugcuggggcucc

SEQ ID NO: 1202229 - RNA, 26 nt, Human
ccccaggggcugcugggggggaccgc

SEQ ID NO: 1202230 - RNA, 21 nt, Human
ccccggccaccaaaaccgccu

SEQ ID NO: 1202231 - RNA, 18 nt, Human
ccccgugccugggggcuc

SEQ ID NO: 1202232 - RNA, 23 nt, Human
cccguggccgcagccguggcucc

SEQ ID NO: 1202233 - RNA, 18 nt, Human
cccucaggcccggggggg

SEQ ID NO: 1202234 - RNA, 19 nt, Human
cccucggcucugccgccug

SEQ ID NO: 1202235 - RNA, 19 nt, Human
ccgcagccguggcuccggg

SEQ ID NO: 1202236 - RNA, 21 nt, Human
ccggccccauagccgccguac

SEQ ID NO: 1202237 - RNA, 19 nt, Human
ccggcgcugugggcgcugc

SEQ ID NO: 1202238 - RNA, 21 nt, Human
ccucuagcagcugggccucug

SEQ ID NO: 1202239 - RNA, 21 nt, Human
ccuggcagggcagggggugga

SEQ ID NO: 1202240 - RNA, 23 nt, Human
ccuucuuuuucuugccgaugccc

SEQ ID NO: 1202241 - RNA, 23 nt, Human
cgacacaggaucuuuggccuauc

SEQ ID NO: 1202242 - RNA, 20 nt, Human
cgccugggcugucacacugg

SEQ ID NO: 1202243 - RNA, 24 nt, Human
cgggggcaccagcuuggggaaggu

SEQ ID NO: 1202244 - RNA, 24 nt, Human
cggguccaggaagcggggcugggg

SEQ ID NO: 1202245 - RNA, 18 nt, Human
cggugcaggcgggcggcu

SEQ ID NO: 1202246 - RNA, 22 nt, Human
cgguucaggaaggccagcuugg

SEQ ID NO: 1202247 - RNA, 18 nt, Human
cguagaggggauggcugg

SEQ ID NO: 1202248 - RNA, 24 nt, Human
cgucaagcagcuugggcagggggu

SEQ ID NO: 1202249 - RNA, 24 nt, Human
cuacugcgcgccagguacugggcu

SEQ ID NO: 1202250 - RNA, 18 nt, Human
cucaggcccgggggggcc

SEQ ID NO: 1202251 - RNA, 22 nt, Human
cuccacgcucaggcugcugcuc

SEQ ID NO: 1202252 - RNA, 21 nt, Human
cuccuugcccuccacgcucag

SEQ ID NO: 1202253 - RNA, 19 nt, Human
cugaagaaggaggccuugc

SEQ ID NO: 1202254 - RNA, 22 nt, Human
cugggccuggcagggcaggggg

SEQ ID NO: 1202255 - RNA, 24 nt, Human
cuguuagcgcaguccuggccugua

SEQ ID NO: 1202256 - RNA, 20 nt, Human
cuucaucuucagcagcgggg

SEQ ID NO: 1202257 - RNA, 20 nt, Human
cuugccgggacccagcagca

SEQ ID NO: 1202258 - RNA, 19 nt, Human
cuuggccaggcuggggacu

SEQ ID NO: 1202259 - RNA, 22 nt, Human
cuugggcuugccgggacccagc

SEQ ID NO: 1202260 - RNA, 21 nt, Human
cuuuguauguggucuuguucc

SEQ ID NO: 1202261 - RNA, 19 nt, Human
gaccaucgcagcucagguu

SEQ ID NO: 1202262 - RNA, 19 nt, Human
gagaagaagcuguacugua

SEQ ID NO: 1202263 - RNA, 19 nt, Human
gagacugugcuggcccggc

SEQ ID NO: 1202264 - RNA, 26 nt, Human
gagccaggcccggcagccccagagga

SEQ ID NO: 1202265 - RNA, 26 nt, Human
gagcggcucuagugccugcgggucca

SEQ ID NO: 1202266 - RNA, 22 nt, Human
gagggcccccgugccugggggc

SEQ ID NO: 1202267 - RNA, 27 nt, Human
gagucaggcaggguguccagggccuuc

SEQ ID NO: 1202268 - RNA, 24 nt, Human
gcagccccagaggaucagcaagag

SEQ ID NO: 1202269 - RNA, 18 nt, Human
gcaggcaggggcccccgg

SEQ ID NO: 1202270 - RNA, 20 nt, Human
gcagggguggcagcuccaga

SEQ ID NO: 1202271 - RNA, 24 nt, Human
gccaaacugggugaggagaagaag

SEQ ID NO: 1202272 - RNA, 22 nt, Human
gccccauagccgccguacuggg

SEQ ID NO: 1202273 - RNA, 21 nt, Human
gcccgggcccccgaccccagc

SEQ ID NO: 1202274 - RNA, 18 nt, Human
gcccguugucccagcagc

SEQ ID NO: 1202275 - RNA, 18 nt, Human
gccgggacccagcagcag

SEQ ID NO: 1202276 - RNA, 21 nt, Human
gccucggccgccaccacagcu

SEQ ID NO: 1202277 - RNA, 18 nt, Human
gccucggggcguggacag

SEQ ID NO: 1202278 - RNA, 19 nt, Human
gccugcggguccaggaagc

SEQ ID NO: 1202279 - RNA, 21 nt, Human
gcucggccagugggcagugcc

SEQ ID NO: 1202280 - RNA, 23 nt, Human
gcucugggggcagacccguggcc

SEQ ID NO: 1202281 - RNA, 18 nt, Human
gcugcugccgucuccgac

SEQ ID NO: 1202282 - RNA, 19 nt, Human
gcugucagcugggggugcu

SEQ ID NO: 1202283 - RNA, 20 nt, Human
gcugucagcugggggugcug

SEQ ID NO: 1202284 - RNA, 22 nt, Human
gcuguugccacugccauaggcg

SEQ ID NO: 1202285 - RNA, 18 nt, Human
ggagcugcugccgucucc

SEQ ID NO: 1202286 - RNA, 23 nt, Human
ggcaggggguggaggaggcggug

SEQ ID NO: 1202287 - RNA, 18 nt, Human
ggcagguagguguuggca

SEQ ID NO: 1202288 - RNA, 21 nt, Human
ggcagguagguguuggcaggc

SEQ ID NO: 1202289 - RNA, 20 nt, Human
ggcauggccaugguggccgc

SEQ ID NO: 1202290 - RNA, 19 nt, Human
ggcccgggggggccgugcg

SEQ ID NO: 1202291 - RNA, 20 nt, Human
ggccgcauggcccccacccc

SEQ ID NO: 1202292 - RNA, 20 nt, Human
ggcucugccgccugggcugu

SEQ ID NO: 1202293 - RNA, 22 nt, Human
gggacugagaccgggccugggc

SEQ ID NO: 1202294 - RNA, 20 nt, Human
gggagcugcugccgucuccg

SEQ ID NO: 1202295 - RNA, 18 nt, Human
gggcaccagcuuggggaa

SEQ ID NO: 1202296 - RNA, 23 nt, Human
gggcagguagguguuggcaggcg

SEQ ID NO: 1202297 - RNA, 21 nt, Human
gggcaguaggcggcccucggg

SEQ ID NO: 1202298 - RNA, 20 nt, Human
gggccauggcugagggcggg

SEQ ID NO: 1202299 - RNA, 18 nt, Human
gggcugaaccagagaagg

SEQ ID NO: 1202300 - RNA, 19 nt, Human
ggggcaccagcuuggggaa

SEQ ID NO: 1202301 - RNA, 24 nt, Human
ggggcucugccagucgcuggcugu

SEQ ID NO: 1202302 - RNA, 19 nt, Human
gggggcugaaccagagaag

SEQ ID NO: 1202303 - RNA, 19 nt, Human
gggguggaggaggcggugg

SEQ ID NO: 1202304 - RNA, 18 nt, Human
ggguccaggagcugaggc

SEQ ID NO: 1202305 - RNA, 22 nt, Human
gggugcuguggagcaacuucgg

SEQ ID NO: 1202306 - RNA, 24 nt, Human
ggugacccucaggcccgggggggc

SEQ ID NO: 1202307 - RNA, 23 nt, Human
ggugcuguggagcaacuucggcc

SEQ ID NO: 1202308 - RNA, 19 nt, Human
gguguccagcagcggggcg

SEQ ID NO: 1202309 - RNA, 22 nt, Human
uaaggcccgggcccccgacccc

SEQ ID NO: 1202310 - RNA, 21 nt, Human
uacgcuuuguccggccccaua

SEQ ID NO: 1202311 - RNA, 24 nt, Human
uacggaugcuguuggccaaacugg

SEQ ID NO: 1202312 - RNA, 18 nt, Human
uagcagcugggccucugg

SEQ ID NO: 1202313 - RNA, 19 nt, Human
uagcgcaguccuggccugu

SEQ ID NO: 1202314 - RNA, 18 nt, Human
ucaccgggugggaagacc

SEQ ID NO: 1202315 - RNA, 21 nt, Human
ucacuggguguccagcagcgg

SEQ ID NO: 1202316 - RNA, 21 nt, Human
ucaggcaggguguccagggcc

SEQ ID NO: 1202317 - RNA, 21 nt, Human
ucaggcccgggggggccgugc

SEQ ID NO: 1202318 - RNA, 22 nt, Human
ucaggcucguagaggggauggc

SEQ ID NO: 1202319 - RNA, 21 nt, Human
uccccgagcggcucuagugcc

SEQ ID NO: 1202320 - RNA, 21 nt, Human
ucgcagguucacccgcccguu

SEQ ID NO: 1202321 - RNA, 18 nt, Human
ucgccggguggcggugca

SEQ ID NO: 1202322 - RNA, 18 nt, Human
ucucuggaagagagaggg

SEQ ID NO: 1202323 - RNA, 21 nt, Human
ucucuggaagagagagggccc

SEQ ID NO: 1202324 - RNA, 20 nt, Human
ucugccuugcguccccgucc

SEQ ID NO: 1202325 - RNA, 21 nt, Human
ugagcacaaguccaggcgcaa

SEQ ID NO: 1202326 - RNA, 22 nt, Human
ugccugggggcucugccagucg

SEQ ID NO: 1202327 - RNA, 19 nt, Human
ugccugggggucaagcagc

SEQ ID NO: 1202328 - RNA, 21 nt, Human
ugccugggggucaagcagcug

SEQ ID NO: 1202329 - RNA, 21 nt, Human
ugccuuugcggguagagacca

SEQ ID NO: 1202330 - RNA, 18 nt, Human
ugcgccgcacgccccggg

SEQ ID NO: 1202331 - RNA, 20 nt, Human
ugcugcagguccugggagag

SEQ ID NO: 1202332 - RNA, 19 nt, Human
uggaagagagagggccccc

SEQ ID NO: 1202333 - RNA, 23 nt, Human
uggaggaggcggugguggugggg

SEQ ID NO: 1202334 - RNA, 21 nt, Human
uggcucaggcucugggggcag

SEQ ID NO: 1202335 - RNA, 20 nt, Human
uggcuccuugggcuugccuc

SEQ ID NO: 1202336 - RNA, 20 nt, Human
ugggaagaccacuaccacgg

SEQ ID NO: 1202337 - RNA, 24 nt, Human
ugggggcugaaccagagaaggggg

SEQ ID NO: 1202338 - RNA, 24 nt, Human
ugggugguaggugagcgggccaug

SEQ ID NO: 1202339 - RNA, 20 nt, Human
ugucguuggcgucugcugca

SEQ ID NO: 1202340 - RNA, 23 nt, Human
ugucuggcucaggcucugggggc

SEQ ID NO: 1202341 - RNA, 24 nt, Human
uguggucuuguuccgccgccccag

SEQ ID NO: 1202342 - RNA, 20 nt, Human
uuagcgcaguccuggccugu

SEQ ID NO: 1202343 - RNA, 19 nt, Human
uucaucuucagcagcgggg

SEQ ID NO: 1202344 - RNA, 22 nt, Human
uugcagggguggcagcuccaga

SEQ ID NO: 1202345 - RNA, 21 nt, Human
uuggccaggcuggggacuguc

SEQ ID NO: 1202346 - RNA, 19 nt, Human
uuggcgugugggguggccc

SEQ ID NO: 1202347 - RNA, 22 nt, Human
uugguggcaggcaggggccccc

SEQ ID NO: 1202348 - RNA, 19 nt, Human
uuguauguggucuuguucc

SEQ ID NO: 1202349 - RNA, 23 nt, Human
agucagacacaaaagcaaacuuc

SEQ ID NO: 1202350 - RNA, 18 nt, Human
ugaggaagucagacacaa

SEQ ID NO: 1202351 - RNA, 21 nt, Human
ugggguuggaaugaggaaguc

SEQ ID NO: 1202352 - RNA, 20 nt, Human
uucgaaguuccuucucuggg

SEQ ID NO: 1202353 - RNA, 23 nt, Human
uucgaaguuccuucucugggguu

SEQ ID NO: 1202354 - RNA, 18 nt, Human
ggacaggcaugaguuuua

SEQ ID NO: 1202355 - RNA, 22 nt, Human
guauaggucgauuucucaucuc

SEQ ID NO: 1202356 - RNA, 19 nt, Human
guuccuguuuucucaccga

SEQ ID NO: 1202357 - RNA, 21 nt, Human
uacuuccaguguuccuguuuu

SEQ ID NO: 1202358 - RNA, 18 nt, Human
ucuaaauuucuguaaccu

SEQ ID NO: 1202359 - RNA, 24 nt, Human
uuguauaggucgauuucucaucuc

SEQ ID NO: 1202360 - RNA, 20 nt, Human
uuucucaucucuguaauugg

SEQ ID NO: 1202361 - RNA, 27 nt, Human
cacugucuuugccugcuuuggagguga

SEQ ID NO: 1202362 - RNA, 20 nt, Human
cagcagcgcugauggaucuc

SEQ ID NO: 1202363 - RNA, 18 nt, Human
caggagcuguaaccaggg

SEQ ID NO: 1202364 - RNA, 21 nt, Human
caggagcuguaaccaggggca

SEQ ID NO: 1202365 - RNA, 22 nt, Human
ccagcagcgcugauggaucuga

SEQ ID NO: 1202366 - RNA, 19 nt, Human
cugauggugauuucauacc

SEQ ID NO: 1202367 - RNA, 21 nt, Human
cuggcuucucccagcagcgcu

SEQ ID NO: 1202368 - RNA, 20 nt, Human
gccuggcuucucccagcagc

SEQ ID NO: 1202369 - RNA, 19 nt, Human
gggaauuggccaccguggu

SEQ ID NO: 1202370 - RNA, 19 nt, Human
gucacagugccuggggaau

SEQ ID NO: 1202371 - RNA, 18 nt, Human
gugcagccaacacugucu

SEQ ID NO: 1202372 - RNA, 19 nt, Human
ugaucaauaguggguauuu

SEQ ID NO: 1202373 - RNA, 19 nt, Human
ugccuggggaauuggccac

SEQ ID NO: 1202374 - RNA, 22 nt, Human
uggugcagccaacacugucuuu

SEQ ID NO: 1202375 - RNA, 24 nt, Human
uguguccccgucuucagccgugag

SEQ ID NO: 1202376 - RNA, 28 nt, Human
aaauaucuucugcaaacccucuacaucc

SEQ ID NO: 1202377 - RNA, 21 nt, Human
aucuucugcaaacccucuaca

SEQ ID NO: 1202378 - RNA, 27 nt, Human
cucaaauaucuucugcaaacccucuac

SEQ ID NO: 1202379 - RNA, 20 nt, Human
cucaggauccucaaauaucu

SEQ ID NO: 1202380 - RNA, 22 nt, Human
ucaggauccucaaauaucuucu

SEQ ID NO: 1202381 - RNA, 19 nt, Human
aacgcgguuaccggaagga

SEQ ID NO: 1202382 - RNA, 23 nt, Human
agggaggaaguccccccaaguuu

SEQ ID NO: 1202383 - RNA, 23 nt, Human
agggggaggggagggaggaaguc

SEQ ID NO: 1202384 - RNA, 18 nt, Human
caaguuugcaacccggca

SEQ ID NO: 1202385 - RNA, 18 nt, Human
cagaacccggucccaggg

SEQ ID NO: 1202386 - RNA, 19 nt, Human
cagaacccggucccagggc

SEQ ID NO: 1202387 - RNA, 23 nt, Human
ccagggggaggggagggaggaag

SEQ ID NO: 1202388 - RNA, 20 nt, Human
cccagggggaggggagggag

SEQ ID NO: 1202389 - RNA, 27 nt, Human
cccccaaguuugcaacccggcagcgug

SEQ ID NO: 1202390 - RNA, 21 nt, Human
ccggucccagggcaguugcac

SEQ ID NO: 1202391 - RNA, 22 nt, Human
cggucccagggcaguugcacgg

SEQ ID NO: 1202392 - RNA, 21 nt, Human
gaaguccccccaaguuugcaa

SEQ ID NO: 1202393 - RNA, 20 nt, Human
gaggggagggaggaaguccc

SEQ ID NO: 1202394 - RNA, 19 nt, Human
ggaaggaacgcgaggagcg

SEQ ID NO: 1202395 - RNA, 22 nt, Human
uugcacggcgcccagggggagg

SEQ ID NO: 1202396 - RNA, 24 nt, Human
aaucgcuugaagccaggaguucga

SEQ ID NO: 1202397 - RNA, 21 nt, Human
aaugaacaaaagcaucagaga

SEQ ID NO: 1202398 - RNA, 20 nt, Human
acucaagaaaaaaaaaaaau

SEQ ID NO: 1202399 - RNA, 25 nt, Human
agaaaaaaaaaaaaucacucuguag

SEQ ID NO: 1202400 - RNA, 21 nt, Human
agaaccccaacauauaaaaca

SEQ ID NO: 1202401 - RNA, 24 nt, Human
agaaucgcuugaagccaggaguuc

SEQ ID NO: 1202402 - RNA, 19 nt, Human
agacaaguauaaaauucca

SEQ ID NO: 1202403 - RNA, 24 nt, Human
agcacuuugggaggcugagguggg

SEQ ID NO: 1202404 - RNA, 20 nt, Human
agccaauuggaauuucuuca

SEQ ID NO: 1202405 - RNA, 23 nt, Human
aggaguucgagaccaaccugggc

SEQ ID NO: 1202406 - RNA, 22 nt, Human
aggccaggcgugguggcucacg

SEQ ID NO: 1202407 - RNA, 24 nt, Human
aggccaggcgugguggcucacgcc

SEQ ID NO: 1202408 - RNA, 24 nt, Human
aggcgugguggcucacgccuguaa

SEQ ID NO: 1202409 - RNA, 24 nt, Human
aggcugaggugggagaaucgcuug

SEQ ID NO: 1202410 - RNA, 18 nt, Human
aggugggagaaucgcuug

SEQ ID NO: 1202411 - RNA, 23 nt, Human
auaaauuuuuaaaauaaaacaaa

SEQ ID NO: 1202412 - RNA, 18 nt, Human
aucauacuacucaaaacu

SEQ ID NO: 1202413 - RNA, 21 nt, Human
aucgcuugaagccaggaguuc

SEQ ID NO: 1202414 - RNA, 24 nt, Human
aucgcuugaagccaggaguucgag

SEQ ID NO: 1202415 - RNA, 21 nt, Human
augaaauaaaagcacagugcc

SEQ ID NO: 1202416 - RNA, 22 nt, Human
auuuccucaagcuauuuuauca

SEQ ID NO: 1202417 - RNA, 19 nt, Human
auuuuaucaaccuccuucc

SEQ ID NO: 1202418 - RNA, 21 nt, Human
caagaaaagcugaaguaaaga

SEQ ID NO: 1202419 - RNA, 22 nt, Human
caaguccaaacauuaucgaaaa

SEQ ID NO: 1202420 - RNA, 20 nt, Human
cacccagcggccgccgcugc

SEQ ID NO: 1202421 - RNA, 24 nt, Human
cacgccuguaaucccagcacuuug

SEQ ID NO: 1202422 - RNA, 18 nt, Human
cagaaaugaacaaaagca

SEQ ID NO: 1202423 - RNA, 24 nt, Human
cagcacuuugggaggcugaggugg

SEQ ID NO: 1202424 - RNA, 21 nt, Human
cagcugaaugaaauaaaagca

SEQ ID NO: 1202425 - RNA, 19 nt, Human
caggagagcccuucgagua

SEQ ID NO: 1202426 - RNA, 22 nt, Human
cauaaauaauguaucuauacaa

SEQ ID NO: 1202427 - RNA, 25 nt, Human
ccaggaguucgagaccaaccugggc

SEQ ID NO: 1202428 - RNA, 22 nt, Human
cccauggacccaggaaauaagg

SEQ ID NO: 1202429 - RNA, 20 nt, Human
ccgcucggcugcacccagcg

SEQ ID NO: 1202430 - RNA, 23 nt, Human
cgccuguaaucccagcacuuugg

SEQ ID NO: 1202431 - RNA, 24 nt, Human
cgccuguaaucccagcacuuuggg

SEQ ID NO: 1202432 - RNA, 20 nt, Human
cucaagaaaaaaaaaaaauc

SEQ ID NO: 1202433 - RNA, 22 nt, Human
cucacgccuguaaucccagcac

SEQ ID NO: 1202434 - RNA, 24 nt, Human
cucacgccuguaaucccagcacuu

SEQ ID NO: 1202435 - RNA, 18 nt, Human
cucaugcuucccauggac

SEQ ID NO: 1202436 - RNA, 22 nt, Human
cuccacaccgcucggcugcacc

SEQ ID NO: 1202437 - RNA, 18 nt, Human
cuuagauuagaaagauuu

SEQ ID NO: 1202438 - RNA, 19 nt, Human
cuugucccaagucccaaca

SEQ ID NO: 1202439 - RNA, 22 nt, Human
gacucaugcuucccauggaccc

SEQ ID NO: 1202440 - RNA, 24 nt, Human
gguggcucacgccuguaaucccag

SEQ ID NO: 1202441 - RNA, 21 nt, Human
gucccaagucccaacagacuc

SEQ ID NO: 1202442 - RNA, 22 nt, Human
gugaaacucuuuguuccaauga

SEQ ID NO: 1202443 - RNA, 23 nt, Human
gugaggccaggcgugguggcuca

SEQ ID NO: 1202444 - RNA, 23 nt, Human
guggcucacgccuguaaucccag

SEQ ID NO: 1202445 - RNA, 19 nt, Human
guucauguauagaucuuua

SEQ ID NO: 1202446 - RNA, 25 nt, Human
guuuguguucuaucucuucagaguu

SEQ ID NO: 1202447 - RNA, 21 nt, Human
uaaaacaaauaaauugguuau

SEQ ID NO: 1202448 - RNA, 23 nt, Human
uaaaugcuagcuuauacauucug

SEQ ID NO: 1202449 - RNA, 22 nt, Human
uaaauuguucaagaaaagcuga

SEQ ID NO: 1202450 - RNA, 24 nt, Human
uaacagaaaugaacaaaagcauca

SEQ ID NO: 1202451 - RNA, 26 nt, Human
uaacagaaaugaacaaaagcaucaga

SEQ ID NO: 1202452 - RNA, 18 nt, Human
uaauugcuuuaguccaag

SEQ ID NO: 1202453 - RNA, 22 nt, Human
uacaaggaauaaaaaauaaaaa

SEQ ID NO: 1202454 - RNA, 20 nt, Human
uauaaaauuuacuauuaaau

SEQ ID NO: 1202455 - RNA, 26 nt, Human
uaucauacuacucaaaacugcaaaau

SEQ ID NO: 1202456 - RNA, 20 nt, Human
uaucucuucagaguugggag

SEQ ID NO: 1202457 - RNA, 20 nt, Human
ucaacaugugauagaaaaau

SEQ ID NO: 1202458 - RNA, 21 nt, Human
ucauguauagaucuuuauccu

SEQ ID NO: 1202459 - RNA, 18 nt, Human
uccaaagaaaaaaaguca

SEQ ID NO: 1202460 - RNA, 19 nt, Human
uccaaagaaaaaaagucag

SEQ ID NO: 1202461 - RNA, 21 nt, Human
uccgcuccacaccgcucggcu

SEQ ID NO: 1202462 - RNA, 21 nt, Human
ucuacaaacucuuacccuaga

SEQ ID NO: 1202463 - RNA, 23 nt, Human
ucucacucaagaaaaaaaaaaaa

SEQ ID NO: 1202464 - RNA, 21 nt, Human
ugaaauaaaagcacagugccc

SEQ ID NO: 1202465 - RNA, 26 nt, Human
ugaggugggagaaucgcuugaagcca

SEQ ID NO: 1202466 - RNA, 23 nt, Human
ugaguacagcugcuuauaccuca

SEQ ID NO: 1202467 - RNA, 20 nt, Human
ugauuauaaacaauuucccc

SEQ ID NO: 1202468 - RNA, 20 nt, Human
ugcagaggggacagaaauga

SEQ ID NO: 1202469 - RNA, 18 nt, Human
ugccaguagacacaguuu

SEQ ID NO: 1202470 - RNA, 22 nt, Human
uggcucacgccuguaaucccag

SEQ ID NO: 1202471 - RNA, 24 nt, Human
uggcucacgccuguaaucccagca

SEQ ID NO: 1202472 - RNA, 22 nt, Human
ugggaggauacuuuuuuuagua

SEQ ID NO: 1202473 - RNA, 19 nt, Human
ugggaggcugaggugggag

SEQ ID NO: 1202474 - RNA, 23 nt, Human
ugggaggcugaggugggagaauc

SEQ ID NO: 1202475 - RNA, 24 nt, Human
ugggaggcugaggugggagaaucg

SEQ ID NO: 1202476 - RNA, 24 nt, Human
ugggcaauacagugagacccuguc

SEQ ID NO: 1202477 - RNA, 24 nt, Human
ugguggcucacgccuguaauccca

SEQ ID NO: 1202478 - RNA, 23 nt, Human
ugucuuguuuucuucuuguccca

SEQ ID NO: 1202479 - RNA, 18 nt, Human
uuaguacuugguuuuccu

SEQ ID NO: 1202480 - RNA, 22 nt, Human
uugaagccaggaguucgagacc

SEQ ID NO: 1202481 - RNA, 19 nt, Human
uugcuuuaguccaagucca

SEQ ID NO: 1202482 - RNA, 24 nt, Human
uugggaggcugaggugggagaauc

SEQ ID NO: 1202483 - RNA, 21 nt, Human
uugguuuuccuugugaagaug

SEQ ID NO: 1202484 - RNA, 18 nt, Human
uuuuuuuuuuuuuuuuug

SEQ ID NO: 1202485 - RNA, 20 nt, Human
uuuuuuuuuuuuuuuuugcc

SEQ ID NO: 1202486 - RNA, 22 nt, Human
uuuuuuuuuuuuuuuuugccaa

SEQ ID NO: 1202487 - RNA, 19 nt, Human
agagaauucuaugaccaca

SEQ ID NO: 1202488 - RNA, 26 nt, Human
cugggcaggguccaggcaugcccacu

SEQ ID NO: 1202489 - RNA, 18 nt, Human
gggcaggguccaggcaug

SEQ ID NO: 1202490 - RNA, 20 nt, Human
ucuaugaccacaucacugaa

SEQ ID NO: 1202491 - RNA, 26 nt, Human
ugcccacuccucuggagagaauucua

SEQ ID NO: 1202492 - RNA, 25 nt, Human
uucuaugaccacaucacugaaugcc

SEQ ID NO: 1202493 - RNA, 18 nt, Human
aaccagccucuccaccug

SEQ ID NO: 1202494 - RNA, 22 nt, Human
cagccggcacccuugcuugcca

SEQ ID NO: 1202495 - RNA, 22 nt, Human
gagccuucccuucuugcagcca

SEQ ID NO: 1202496 - RNA, 22 nt, Human
gcagccaacugaggcagccggc

SEQ ID NO: 1202497 - RNA, 21 nt, Human
uaagcgagccuucccuucuuu

SEQ ID NO: 1202498 - RNA, 21 nt, Human
ucuccaccuggacagugggcc

SEQ ID NO: 1202499 - RNA, 20 nt, Human
ucuugcagccaacugaggca

SEQ ID NO: 1202500 - RNA, 26 nt, Human
ugcagccaacugaggcagccggcacc

SEQ ID NO: 1202501 - RNA, 25 nt, Human
uggacagugggccuuaagcgagccu

SEQ ID NO: 1202502 - RNA, 18 nt, Human
uugcagccaacugaggca

SEQ ID NO: 1202503 - RNA, 23 nt, Human
agcgccuucugcuugugcugccc

SEQ ID NO: 1202504 - RNA, 19 nt, Human
ccguguccaugaguggaac

SEQ ID NO: 1202505 - RNA, 20 nt, Human
cugcugccguucagcaccca

SEQ ID NO: 1202506 - RNA, 24 nt, Human
cugcugccguucagcacccagcag

SEQ ID NO: 1202507 - RNA, 23 nt, Human
uggaggcugcugcugccguucag

SEQ ID NO: 1202508 - RNA, 20 nt, Human
gccucacaggucccgggggc

SEQ ID NO: 1202509 - RNA, 19 nt, Human
uggaggcagggcugaagug

SEQ ID NO: 1202510 - RNA, 18 nt, Human
aaacagaagcagccggcg

SEQ ID NO: 1202511 - RNA, 18 nt, Human
aaacagaagcagccggcg

SEQ ID NO: 1202512 - RNA, 30 nt, Human
aaaggugugcacacucgacccuggccuccc

SEQ ID NO: 1202513 - RNA, 20 nt, Human
aagcagccggcgagcccucc

SEQ ID NO: 1202514 - RNA, 21 nt, Human
aagcagccggcgagcccucca

SEQ ID NO: 1202515 - RNA, 23 nt, Human
aaggagaaggcccuguuuuuugg

SEQ ID NO: 1202516 - RNA, 23 nt, Human
aaggcgcccccucccucuggccc

SEQ ID NO: 1202517 - RNA, 20 nt, Human
aaggcucugcauggcugcug

SEQ ID NO: 1202518 - RNA, 21 nt, Human
aagggacacagcgugaggggc

SEQ ID NO: 1202519 - RNA, 20 nt, Human
aaggggccuugauucacugc

SEQ ID NO: 1202520 - RNA, 23 nt, Human
acaaagcuucccaggugcagguc

SEQ ID NO: 1202521 - RNA, 19 nt, Human
acagaaccuuccccagccg

SEQ ID NO: 1202522 - RNA, 21 nt, Human
acccuggagagacuggggccu

SEQ ID NO: 1202523 - RNA, 24 nt, Human
accgcagguauugaaacagaagca

SEQ ID NO: 1202524 - RNA, 18 nt, Human
accucccccucagagcca

SEQ ID NO: 1202525 - RNA, 25 nt, Human
accuccugcaaaggugugcacacca

SEQ ID NO: 1202526 - RNA, 22 nt, Human
acugguugccucuggcacacgu

SEQ ID NO: 1202527 - RNA, 24 nt, Human
agaagacucggggcucggggcuug

SEQ ID NO: 1202528 - RNA, 20 nt, Human
agaagaggcuggaacaggcc

SEQ ID NO: 1202529 - RNA, 21 nt, Human
agacagggucuuagggcugcc

SEQ ID NO: 1202530 - RNA, 22 nt, Human
agaggcuggaacaggccugggc

SEQ ID NO: 1202531 - RNA, 18 nt, Human
agccccagaaccgagcuc

SEQ ID NO: 1202532 - RNA, 23 nt, Human
agccggcuuggacucgcuggccc

SEQ ID NO: 1202533 - RNA, 22 nt, Human
agcugggcagugggcugcagug

SEQ ID NO: 1202534 - RNA, 21 nt, Human
agcugggcgggcuccacuccc

SEQ ID NO: 1202535 - RNA, 18 nt, Human
aggacugugggcagccag

SEQ ID NO: 1202536 - RNA, 21 nt, Human
aggagagcauguggaagaugg

SEQ ID NO: 1202537 - RNA, 21 nt, Human
aggagcugggcagugggcugc

SEQ ID NO: 1202538 - RNA, 20 nt, Human
aggaggcucuuucagcaggc

SEQ ID NO: 1202539 - RNA, 21 nt, Human
aggaggcugagcagagacuuc

SEQ ID NO: 1202540 - RNA, 21 nt, Human
aggagggcagggugggcccag

SEQ ID NO: 1202541 - RNA, 24 nt, Human
aggauggagauuucuuucacaguu

SEQ ID NO: 1202542 - RNA, 19 nt, Human
aggcaucgcgcguccggcu

SEQ ID NO: 1202543 - RNA, 23 nt, Human
aggcccugggagccgcacuccac

SEQ ID NO: 1202544 - RNA, 23 nt, Human
aggcccuugcucaggaagggguu

SEQ ID NO: 1202545 - RNA, 20 nt, Human
aggcuccaggccccaccagc

SEQ ID NO: 1202546 - RNA, 19 nt, Human
aggggccgcugacccggag

SEQ ID NO: 1202547 - RNA, 22 nt, Human
aggugcugggggcagccgaacc

SEQ ID NO: 1202548 - RNA, 22 nt, Human
agucuggaugguccugccuggg

SEQ ID NO: 1202549 - RNA, 22 nt, Human
agugggcaguccaggagcucug

SEQ ID NO: 1202550 - RNA, 18 nt, Human
agugucauugccuggacg

SEQ ID NO: 1202551 - RNA, 22 nt, Human
auuucccccacgcacagguucc

SEQ ID NO: 1202552 - RNA, 22 nt, Human
caaguaccucccccucagagcc

SEQ ID NO: 1202553 - RNA, 21 nt, Human
cacaaaccaggagaacggguu

SEQ ID NO: 1202554 - RNA, 19 nt, Human
cacaccuugagguggcagc

SEQ ID NO: 1202555 - RNA, 27 nt, Human
cacagcuggaccugcccugagcugggg

SEQ ID NO: 1202556 - RNA, 24 nt, Human
cacccaggaaacucgacgagcugc

SEQ ID NO: 1202557 - RNA, 24 nt, Human
caccccucccucugucaccacugg

SEQ ID NO: 1202558 - RNA, 19 nt, Human
caccccucccucugucucc

SEQ ID NO: 1202559 - RNA, 20 nt, Human
caccccucccucugucucca

SEQ ID NO: 1202560 - RNA, 18 nt, Human
caccggaacaggggacug

SEQ ID NO: 1202561 - RNA, 25 nt, Human
caccugggugagggcuacaggaggc

SEQ ID NO: 1202562 - RNA, 20 nt, Human
cacugagcuccacaacugcc

SEQ ID NO: 1202563 - RNA, 22 nt, Human
cacugagcuccacaacugccaa

SEQ ID NO: 1202564 - RNA, 19 nt, Human
cagagcuggcugugggugg

SEQ ID NO: 1202565 - RNA, 20 nt, Human
cagcaccauggacaggggca

SEQ ID NO: 1202566 - RNA, 22 nt, Human
cagcagugcagucuccccgggc

SEQ ID NO: 1202567 - RNA, 26 nt, Human
cagcccccugcccugugauuucagga

SEQ ID NO: 1202568 - RNA, 19 nt, Human
cagccgaacccgccccagc

SEQ ID NO: 1202569 - RNA, 21 nt, Human
cagccggguggagcuccuggg

SEQ ID NO: 1202570 - RNA, 20 nt, Human
cagcggcugagcuugcuggg

SEQ ID NO: 1202571 - RNA, 20 nt, Human
cagcggcugagcuugcuggg

SEQ ID NO: 1202572 - RNA, 18 nt, Human
cagcgggcagcccccacu

SEQ ID NO: 1202573 - RNA, 19 nt, Human
cagcucagcaccgggaccc

SEQ ID NO: 1202574 - RNA, 20 nt, Human
cagcugcugcuuucucuggg

SEQ ID NO: 1202575 - RNA, 20 nt, Human
caggaaaccgccccgaccau

SEQ ID NO: 1202576 - RNA, 20 nt, Human
caggaccccgaggagggcag

SEQ ID NO: 1202577 - RNA, 19 nt, Human
caggacgucuuggccgggg

SEQ ID NO: 1202578 - RNA, 21 nt, Human
cagggcaggugaaggagaagg

SEQ ID NO: 1202579 - RNA, 18 nt, Human
cagggcagugagagaaga

SEQ ID NO: 1202580 - RNA, 24 nt, Human
cagggcagugagagaagaggcugg

SEQ ID NO: 1202581 - RNA, 19 nt, Human
cagggugggcccaggagcu

SEQ ID NO: 1202582 - RNA, 22 nt, Human
cagguaccugggcucucccagg

SEQ ID NO: 1202583 - RNA, 20 nt, Human
caggucgggguccaagcugg

SEQ ID NO: 1202584 - RNA, 18 nt, Human
cagugccagccacaaacc

SEQ ID NO: 1202585 - RNA, 25 nt, Human
cagugccagccacaaaccaggagaa

SEQ ID NO: 1202586 - RNA, 22 nt, Human
caucaacaucgcaggagguucc

SEQ ID NO: 1202587 - RNA, 20 nt, Human
caucugaggccacugagcuc

SEQ ID NO: 1202588 - RNA, 20 nt, Human
ccaaaagggcuugagacccu

SEQ ID NO: 1202589 - RNA, 20 nt, Human
ccaacccugugaagugaggu

SEQ ID NO: 1202590 - RNA, 19 nt, Human
ccaagucuaggucugugcc

SEQ ID NO: 1202591 - RNA, 26 nt, Human
ccaaugcccucucccugccaucuucu

SEQ ID NO: 1202592 - RNA, 19 nt, Human
ccacauccuccugcccggg

SEQ ID NO: 1202593 - RNA, 23 nt, Human
ccaggaccuggagguaccugcag

SEQ ID NO: 1202594 - RNA, 18 nt, Human
ccaggacgaaggagagca

SEQ ID NO: 1202595 - RNA, 19 nt, Human
ccaggagaacggguucguc

SEQ ID NO: 1202596 - RNA, 18 nt, Human
ccaggcuugggugaggag

SEQ ID NO: 1202597 - RNA, 22 nt, Human
ccagggccagggagaccaaagg

SEQ ID NO: 1202598 - RNA, 24 nt, Human
ccaggggccccugcucugcucccu

SEQ ID NO: 1202599 - RNA, 21 nt, Human
ccagugguccuccuuccuggu

SEQ ID NO: 1202600 - RNA, 24 nt, Human
ccagugguccuccuuccugguggu

SEQ ID NO: 1202601 - RNA, 19 nt, Human
ccaugccuguggcuccucc

SEQ ID NO: 1202602 - RNA, 24 nt, Human
cccaaccccaccccagccccugau

SEQ ID NO: 1202603 - RNA, 18 nt, Human
cccacauccuccugcccg

SEQ ID NO: 1202604 - RNA, 19 nt, Human
cccacgcaggucgccugcg

SEQ ID NO: 1202605 - RNA, 20 nt, Human
cccacgcaggucgccugcgg

SEQ ID NO: 1202606 - RNA, 22 nt, Human
ccccaagggcagcacuuggccc

SEQ ID NO: 1202607 - RNA, 26 nt, Human
ccccaccccagccccugaucgagguu

SEQ ID NO: 1202608 - RNA, 20 nt, Human
ccccagccgcuggccacagc

SEQ ID NO: 1202609 - RNA, 21 nt, Human
ccccaggaaaccgccccgacc

SEQ ID NO: 1202610 - RNA, 19 nt, Human
ccccgaggagggcagggug

SEQ ID NO: 1202611 - RNA, 24 nt, Human
ccccucagcccugccacucagcuc

SEQ ID NO: 1202612 - RNA, 18 nt, Human
ccccucccucugucucca

SEQ ID NO: 1202613 - RNA, 22 nt, Human
ccccuucucucccgggcaccca

SEQ ID NO: 1202614 - RNA, 19 nt, Human
cccgggaucuuugucaucc

SEQ ID NO: 1202615 - RNA, 18 nt, Human
cccuccagcucugcccca

SEQ ID NO: 1202616 - RNA, 19 nt, Human
cccuccaucugcacagcua

SEQ ID NO: 1202617 - RNA, 20 nt, Human
cccugagcugggggugggaa

SEQ ID NO: 1202618 - RNA, 22 nt, Human
cccugagcugggggugggaagg

SEQ ID NO: 1202619 - RNA, 23 nt, Human
cccugcuggugguuucuccccgg

SEQ ID NO: 1202620 - RNA, 22 nt, Human
cccuguuuuuuggccccaaggg

SEQ ID NO: 1202621 - RNA, 18 nt, Human
ccgaagggcagcagugca

SEQ ID NO: 1202622 - RNA, 19 nt, Human
ccgcagcuugggggcagcg

SEQ ID NO: 1202623 - RNA, 20 nt, Human
ccgccccagcucagccgccc

SEQ ID NO: 1202624 - RNA, 22 nt, Human
ccgggauaggguccugcccucu

SEQ ID NO: 1202625 - RNA, 25 nt, Human
ccgggcacccaggaaacucgacgag

SEQ ID NO: 1202626 - RNA, 21 nt, Human
ccgggggugaggaccuuuccu

SEQ ID NO: 1202627 - RNA, 25 nt, Human
ccgggggugggagcccuccaggggu

SEQ ID NO: 1202628 - RNA, 23 nt, Human
ccggggugggugguggccccggg

SEQ ID NO: 1202629 - RNA, 19 nt, Human
ccggugcagcaggugcugc

SEQ ID NO: 1202630 - RNA, 21 nt, Human
ccggugguccuccuuccuggu

SEQ ID NO: 1202631 - RNA, 21 nt, Human
ccggugguccuccuuccuggu

SEQ ID NO: 1202632 - RNA, 25 nt, Human
ccucacagaggggccuugggcuggg

SEQ ID NO: 1202633 - RNA, 21 nt, Human
ccucagagccaucgacucccu

SEQ ID NO: 1202634 - RNA, 22 nt, Human
ccuccaggaaccccugucaccu

SEQ ID NO: 1202635 - RNA, 20 nt, Human
ccuccccucagcccugccac

SEQ ID NO: 1202636 - RNA, 23 nt, Human
ccugcauccgcuaaguccagggg

SEQ ID NO: 1202637 - RNA, 20 nt, Human
ccugccacucagcucagcac

SEQ ID NO: 1202638 - RNA, 22 nt, Human
ccuggagagacuggggccucca

SEQ ID NO: 1202639 - RNA, 22 nt, Human
ccuggagagucucauuggggcu

SEQ ID NO: 1202640 - RNA, 19 nt, Human
ccuggagcccggcuuugag

SEQ ID NO: 1202641 - RNA, 21 nt, Human
ccuggcaccuucuccuggaga

SEQ ID NO: 1202642 - RNA, 22 nt, Human
ccuggcccaaccccaccccagc

SEQ ID NO: 1202643 - RNA, 20 nt, Human
ccuggugguccuccuuccug

SEQ ID NO: 1202644 - RNA, 20 nt, Human
ccuggugguccuccuuccug

SEQ ID NO: 1202645 - RNA, 18 nt, Human
ccugugauuucaggacaa

SEQ ID NO: 1202646 - RNA, 23 nt, Human
ccuugucaaacaccccucccucu

SEQ ID NO: 1202647 - RNA, 21 nt, Human
cgaaggagagcauguggaaga

SEQ ID NO: 1202648 - RNA, 20 nt, Human
cgaggacggagcagaugggc

SEQ ID NO: 1202649 - RNA, 20 nt, Human
cgaggagggcagggugggcc

SEQ ID NO: 1202650 - RNA, 20 nt, Human
cgcaggcauggcuccaugcu

SEQ ID NO: 1202651 - RNA, 19 nt, Human
cgcccccucccucuggccc

SEQ ID NO: 1202652 - RNA, 19 nt, Human
cgccuggggcagcauuggc

SEQ ID NO: 1202653 - RNA, 23 nt, Human
cggcucagagagcccagaggcgg

SEQ ID NO: 1202654 - RNA, 20 nt, Human
cggcugagcuugcuggggcc

SEQ ID NO: 1202655 - RNA, 19 nt, Human
cggcuuugagugucugccu

SEQ ID NO: 1202656 - RNA, 27 nt, Human
cgggacccacugagaccuggggccccg

SEQ ID NO: 1202657 - RNA, 26 nt, Human
cguucagccggguggagcuccugggg

SEQ ID NO: 1202658 - RNA, 21 nt, Human
cucaggaagggguugauggug

SEQ ID NO: 1202659 - RNA, 23 nt, Human
cucaggaccccgaggagggcagg

SEQ ID NO: 1202660 - RNA, 21 nt, Human
cuccagaagugggagcccucc

SEQ ID NO: 1202661 - RNA, 21 nt, Human
cuccagaagugggagcccucc

SEQ ID NO: 1202662 - RNA, 23 nt, Human
cuccaggaaccccugucaccucc

SEQ ID NO: 1202663 - RNA, 23 nt, Human
cucccgggcacccacagggccuc

SEQ ID NO: 1202664 - RNA, 25 nt, Human
cucccgggcacccacagggccucug

SEQ ID NO: 1202665 - RNA, 18 nt, Human
cuccgggggugggagccc

SEQ ID NO: 1202666 - RNA, 21 nt, Human
cuccgggggugggagcccucc

SEQ ID NO: 1202667 - RNA, 21 nt, Human
cucucccugccaucuucuggg

SEQ ID NO: 1202668 - RNA, 18 nt, Human
cucuccuggcccaacccc

SEQ ID NO: 1202669 - RNA, 25 nt, Human
cucugggcucugggcaucgcugggg

SEQ ID NO: 1202670 - RNA, 23 nt, Human
cucugggucucucgugggggccc

SEQ ID NO: 1202671 - RNA, 18 nt, Human
cugaauggcugcagggca

SEQ ID NO: 1202672 - RNA, 20 nt, Human
cugacccuggagagacuggg

SEQ ID NO: 1202673 - RNA, 21 nt, Human
cugagcccugacacgugggga

SEQ ID NO: 1202674 - RNA, 20 nt, Human
cugaggcaguaggggaucuu

SEQ ID NO: 1202675 - RNA, 22 nt, Human
cugccagaggugccgggccagc

SEQ ID NO: 1202676 - RNA, 19 nt, Human
cugcccagaggcccggcag

SEQ ID NO: 1202677 - RNA, 22 nt, Human
cugccgugggccugucggagga

SEQ ID NO: 1202678 - RNA, 25 nt, Human
cugccuggcuggaggcccugggagc

SEQ ID NO: 1202679 - RNA, 23 nt, Human
cugcggccugugccucuggggcc

SEQ ID NO: 1202680 - RNA, 19 nt, Human
cugcgugccugccugcccu

SEQ ID NO: 1202681 - RNA, 21 nt, Human
cugcgugccugccugcccucc

SEQ ID NO: 1202682 - RNA, 20 nt, Human
cugcucugcucccugcacgu

SEQ ID NO: 1202683 - RNA, 20 nt, Human
cuggcauggggccuggucug

SEQ ID NO: 1202684 - RNA, 24 nt, Human
cuggcccaaccccaccccagcccc

SEQ ID NO: 1202685 - RNA, 21 nt, Human
cuggccccucgcggucuuccc

SEQ ID NO: 1202686 - RNA, 22 nt, Human
cuggccucaggagugacacugg

SEQ ID NO: 1202687 - RNA, 20 nt, Human
cugggagccgcacuccaccc

SEQ ID NO: 1202688 - RNA, 18 nt, Human
cugggccacugguugccu

SEQ ID NO: 1202689 - RNA, 20 nt, Human
cuggggcgggaacuggaggc

SEQ ID NO: 1202690 - RNA, 21 nt, Human
cugucaccuccugcaaaggug

SEQ ID NO: 1202691 - RNA, 18 nt, Human
cugugcccccucuggugg

SEQ ID NO: 1202692 - RNA, 20 nt, Human
cuguggguuauuuugggcuu

SEQ ID NO: 1202693 - RNA, 18 nt, Human
cuucagaaaugccaaccc

SEQ ID NO: 1202694 - RNA, 19 nt, Human
cuugagccucuggcucagg

SEQ ID NO: 1202695 - RNA, 25 nt, Human
cuugggcccuggaacgcaucccagg

SEQ ID NO: 1202696 - RNA, 19 nt, Human
cuuggucugguggccuugg

SEQ ID NO: 1202697 - RNA, 18 nt, Human
cuugugcugugagggcug

SEQ ID NO: 1202698 - RNA, 23 nt, Human
cuuugugcucaguuucucccuuc

SEQ ID NO: 1202699 - RNA, 23 nt, Human
gaagaccccgagagggggccuug

SEQ ID NO: 1202700 - RNA, 18 nt, Human
gacaggggcagcugcugc

SEQ ID NO: 1202701 - RNA, 19 nt, Human
gaccccgaggagggcaggg

SEQ ID NO: 1202702 - RNA, 23 nt, Human
gacgucuuggccgggggucucca

SEQ ID NO: 1202703 - RNA, 20 nt, Human
gacugagcugcugacccugg

SEQ ID NO: 1202704 - RNA, 19 nt, Human
gagcccugacacgugggga

SEQ ID NO: 1202705 - RNA, 21 nt, Human
gagcugggggugggaagggcu

SEQ ID NO: 1202706 - RNA, 19 nt, Human
gaggaccuuuccuccagga

SEQ ID NO: 1202707 - RNA, 24 nt, Human
gaggcccagcuugucccuugggcc

SEQ ID NO: 1202708 - RNA, 25 nt, Human
gaggcccagcuugucccuugggccu

SEQ ID NO: 1202709 - RNA, 21 nt, Human
gagggcuggcaaguaccuccc

SEQ ID NO: 1202710 - RNA, 22 nt, Human
gaggucugcucugccgugggcc

SEQ ID NO: 1202711 - RNA, 24 nt, Human
gagugccggcgagcugggcgggcu

SEQ ID NO: 1202712 - RNA, 20 nt, Human
gagugucugccucaugcucc

SEQ ID NO: 1202713 - RNA, 23 nt, Human
gauucuugagccucuggcucagg

SEQ ID NO: 1202714 - RNA, 18 nt, Human
gcacgggaaggcgccccc

SEQ ID NO: 1202715 - RNA, 19 nt, Human
gcacuguggguuauuuugg

SEQ ID NO: 1202716 - RNA, 21 nt, Human
gcagagcccagguguggggga

SEQ ID NO: 1202717 - RNA, 18 nt, Human
gcagcaggugcugccccc

SEQ ID NO: 1202718 - RNA, 22 nt, Human
gcagcggcucagagagcccaga

SEQ ID NO: 1202719 - RNA, 24 nt, Human
gcagcggcugagcuugcuggggcc

SEQ ID NO: 1202720 - RNA, 18 nt, Human
gcaguaggggaucuuugu

SEQ ID NO: 1202721 - RNA, 24 nt, Human
gcccagaggcccggcaggucccug

SEQ ID NO: 1202722 - RNA, 24 nt, Human
gcccagaggcggccccacauccuc

SEQ ID NO: 1202723 - RNA, 18 nt, Human
gccccuugcagccuugcc

SEQ ID NO: 1202724 - RNA, 21 nt, Human
gcccucucugggccucaaucu

SEQ ID NO: 1202725 - RNA, 21 nt, Human
gccgaguggccggggaacggg

SEQ ID NO: 1202726 - RNA, 19 nt, Human
gccggcgagcugggcgggc

SEQ ID NO: 1202727 - RNA, 18 nt, Human
gccugcagcuccagggag

SEQ ID NO: 1202728 - RNA, 19 nt, Human
gccugccugcccuccagcu

SEQ ID NO: 1202729 - RNA, 20 nt, Human
gccuggcuggaggcccuggg

SEQ ID NO: 1202730 - RNA, 23 nt, Human
gccuggcuggaggcccugggagc

SEQ ID NO: 1202731 - RNA, 18 nt, Human
gccuguggcuucuccggg

SEQ ID NO: 1202732 - RNA, 19 nt, Human
gcucggggcuuggucuggu

SEQ ID NO: 1202733 - RNA, 23 nt, Human
gcucggguggggggcaggucugg

SEQ ID NO: 1202734 - RNA, 18 nt, Human
gcugcagagaagugggca

SEQ ID NO: 1202735 - RNA, 18 nt, Human
gcugcagucagcaccaug

SEQ ID NO: 1202736 - RNA, 23 nt, Human
gcugcagucagcaccauggacag

SEQ ID NO: 1202737 - RNA, 18 nt, Human
gcugccaggggccccugc

SEQ ID NO: 1202738 - RNA, 23 nt, Human
gcugggacgccuguugcuccugg

SEQ ID NO: 1202739 - RNA, 19 nt, Human
gcugggagaguggggagga

SEQ ID NO: 1202740 - RNA, 23 nt, Human
gcuuggacucgcuggcccugagc

SEQ ID NO: 1202741 - RNA, 24 nt, Human
gcuugggggcagcggcugagcuug

SEQ ID NO: 1202742 - RNA, 21 nt, Human
ggacccacguucagccgggug

SEQ ID NO: 1202743 - RNA, 22 nt, Human
ggagaaaggagaaagggcugcc

SEQ ID NO: 1202744 - RNA, 19 nt, Human
ggagacgcugcaggcccau

SEQ ID NO: 1202745 - RNA, 22 nt, Human
ggagcucgcgauccaagggaca

SEQ ID NO: 1202746 - RNA, 20 nt, Human
ggagggggugggugaggcug

SEQ ID NO: 1202747 - RNA, 24 nt, Human
ggaguccugggggccccggggugg

SEQ ID NO: 1202748 - RNA, 21 nt, Human
ggcaggaggcggcaccacgug

SEQ ID NO: 1202749 - RNA, 22 nt, Human
ggcaguggucggggaacuggug

SEQ ID NO: 1202750 - RNA, 22 nt, Human
ggccaguguccuggguccagcc

SEQ ID NO: 1202751 - RNA, 19 nt, Human
ggcggccccacauccuccu

SEQ ID NO: 1202752 - RNA, 18 nt, Human
ggcgggcuccacucccuc

SEQ ID NO: 1202753 - RNA, 18 nt, Human
ggcgucccaguuccuggc

SEQ ID NO: 1202754 - RNA, 18 nt, Human
ggcguugaggagcugggc

SEQ ID NO: 1202755 - RNA, 19 nt, Human
ggcuccaggccccaccagc

SEQ ID NO: 1202756 - RNA, 19 nt, Human
ggcucggggcuuggucugg

SEQ ID NO: 1202757 - RNA, 23 nt, Human
ggcucugggcaucgcuggggugg

SEQ ID NO: 1202758 - RNA, 22 nt, Human
ggcugcaguggggcgccccucu

SEQ ID NO: 1202759 - RNA, 24 nt, Human
ggcugcccgccaugccuguggcuc

SEQ ID NO: 1202760 - RNA, 22 nt, Human
ggcuggaggcccugggagccgc

SEQ ID NO: 1202761 - RNA, 18 nt, Human
ggcuggcccugcccgggc

SEQ ID NO: 1202762 - RNA, 18 nt, Human
ggcuggggcgggaacugg

SEQ ID NO: 1202763 - RNA, 23 nt, Human
ggcuguggguggggaacagcagg

SEQ ID NO: 1202764 - RNA, 24 nt, Human
ggcuuggacucgcuggcccugagc

SEQ ID NO: 1202765 - RNA, 26 nt, Human
gggaggcccagcuugucccuugggcc

SEQ ID NO: 1202766 - RNA, 19 nt, Human
gggauccccaggcagcccc

SEQ ID NO: 1202767 - RNA, 27 nt, Human
gggcagcacuuggcccuggcccggcgg

SEQ ID NO: 1202768 - RNA, 22 nt, Human
gggcagcauuggcugugggugg

SEQ ID NO: 1202769 - RNA, 23 nt, Human
gggcagccaguggccccuggcag

SEQ ID NO: 1202770 - RNA, 18 nt, Human
gggcagcgggcagccccc

SEQ ID NO: 1202771 - RNA, 21 nt, Human
gggcagggugggcccaggagc

SEQ ID NO: 1202772 - RNA, 24 nt, Human
gggcaggucugggggugccagggg

SEQ ID NO: 1202773 - RNA, 20 nt, Human
gggcaguccaggagcucugc

SEQ ID NO: 1202774 - RNA, 22 nt, Human
gggccagggagaccaaaggggc

SEQ ID NO: 1202775 - RNA, 23 nt, Human
gggccagggccagggagaccaaa

SEQ ID NO: 1202776 - RNA, 21 nt, Human
gggccagggcugccagaggug

SEQ ID NO: 1202777 - RNA, 20 nt, Human
gggccuuguggcugacgguu

SEQ ID NO: 1202778 - RNA, 18 nt, Human
gggcucggggcuuggucu

SEQ ID NO: 1202779 - RNA, 21 nt, Human
gggcugacacugagccagcgc

SEQ ID NO: 1202780 - RNA, 25 nt, Human
gggcugaggcaguaggggaucuuug

SEQ ID NO: 1202781 - RNA, 21 nt, Human
gggcugcaguggggcgccccu

SEQ ID NO: 1202782 - RNA, 19 nt, Human
gggcugggagaguggggag

SEQ ID NO: 1202783 - RNA, 19 nt, Human
gggggcguugaggagcugg

SEQ ID NO: 1202784 - RNA, 22 nt, Human
gggggugggaagggcuggggcg

SEQ ID NO: 1202785 - RNA, 22 nt, Human
ggggugaggaccuuuccuccag

SEQ ID NO: 1202786 - RNA, 20 nt, Human
ggggugggaagggcuggggc

SEQ ID NO: 1202787 - RNA, 19 nt, Human
ggggugggagcccuccagg

SEQ ID NO: 1202788 - RNA, 23 nt, Human
gggucucucgugggggcccgggg

SEQ ID NO: 1202789 - RNA, 21 nt, Human
gggugggagccggcuuggacu

SEQ ID NO: 1202790 - RNA, 24 nt, Human
ggugaagaccccgagagggggccu

SEQ ID NO: 1202791 - RNA, 25 nt, Human
ggugcugcccccugugcccccucug

SEQ ID NO: 1202792 - RNA, 18 nt, Human
ggugcugggggcagccga

SEQ ID NO: 1202793 - RNA, 18 nt, Human
ggugguccuccuuccugg

SEQ ID NO: 1202794 - RNA, 18 nt, Human
ggugguccuccuuccugg

SEQ ID NO: 1202795 - RNA, 18 nt, Human
ggugguccuccuuccugg

SEQ ID NO: 1202796 - RNA, 18 nt, Human
ggugguccuccuuccugg

SEQ ID NO: 1202797 - RNA, 18 nt, Human
ggugguccuccuuccugg

SEQ ID NO: 1202798 - RNA, 18 nt, Human
ggugguccuccuuccugg

SEQ ID NO: 1202799 - RNA, 18 nt, Human
ggugguccuccuuccugg

SEQ ID NO: 1202800 - RNA, 18 nt, Human
ggugguucuccuuccugg

SEQ ID NO: 1202801 - RNA, 18 nt, Human
ggugguucuccuuccugg

SEQ ID NO: 1202802 - RNA, 18 nt, Human
ggugguucuccuuccugg

SEQ ID NO: 1202803 - RNA, 21 nt, Human
guagaagacucggggcucggg

SEQ ID NO: 1202804 - RNA, 19 nt, Human
guaggggcagcgggcagcc

SEQ ID NO: 1202805 - RNA, 24 nt, Human
gucuaggucugugccgauuggagg

SEQ ID NO: 1202806 - RNA, 23 nt, Human
gugaagaccccgagagggggccu

SEQ ID NO: 1202807 - RNA, 18 nt, Human
gugaggaccuuuccucca

SEQ ID NO: 1202808 - RNA, 21 nt, Human
gugcguggugaccaaaagggc

SEQ ID NO: 1202809 - RNA, 19 nt, Human
guggagacgcugcaggccc

SEQ ID NO: 1202810 - RNA, 20 nt, Human
gugggugaggcuggagggcc

SEQ ID NO: 1202811 - RNA, 19 nt, Human
guggucugucuuccuuggg

SEQ ID NO: 1202812 - RNA, 21 nt, Human
guggugaccaaaagggcuuga

SEQ ID NO: 1202813 - RNA, 21 nt, Human
guuccuggcaccuucuccugg

SEQ ID NO: 1202814 - RNA, 18 nt, Human
uaaggaaacagcgucgcc

SEQ ID NO: 1202815 - RNA, 21 nt, Human
ucacagaggggccuugggcug

SEQ ID NO: 1202816 - RNA, 20 nt, Human
ucagcaccauggacaggggc

SEQ ID NO: 1202817 - RNA, 22 nt, Human
ucauuggggcuucgaaggccuc

SEQ ID NO: 1202818 - RNA, 21 nt, Human
uccaggccccaccagcugcuc

SEQ ID NO: 1202819 - RNA, 24 nt, Human
ucccaggggacaugcagagcccag

SEQ ID NO: 1202820 - RNA, 27 nt, Human
uccccaggcagccccgagacagggucu

SEQ ID NO: 1202821 - RNA, 18 nt, Human
uccccgggcacccaggaa

SEQ ID NO: 1202822 - RNA, 22 nt, Human
uccccgggcacccaggaaacuc

SEQ ID NO: 1202823 - RNA, 22 nt, Human
ucccgggcacccacagggccuc

SEQ ID NO: 1202824 - RNA, 21 nt, Human
ucccucuggcccgaggcuccc

SEQ ID NO: 1202825 - RNA, 21 nt, Human
ucccugcacguccacgggccg

SEQ ID NO: 1202826 - RNA, 19 nt, Human
ucccugggucccuggugcu

SEQ ID NO: 1202827 - RNA, 23 nt, Human
ucccuguuccccggccuggcuuc

SEQ ID NO: 1202828 - RNA, 21 nt, Human
ucccuucacagccguuuacaa

SEQ ID NO: 1202829 - RNA, 21 nt, Human
uccgcccagcagcagcaggug

SEQ ID NO: 1202830 - RNA, 25 nt, Human
uccgcuaaguccaggggugggagca

SEQ ID NO: 1202831 - RNA, 18 nt, Human
uccucagccaggcgaugu

SEQ ID NO: 1202832 - RNA, 20 nt, Human
uccugagaguggacucucuu

SEQ ID NO: 1202833 - RNA, 18 nt, Human
uccugcccccaggaaacc

SEQ ID NO: 1202834 - RNA, 18 nt, Human
uccuucgagaggugggug

SEQ ID NO: 1202835 - RNA, 19 nt, Human
ucgacucccuccacggaug

SEQ ID NO: 1202836 - RNA, 18 nt, Human
ucgagagguggguguggg

SEQ ID NO: 1202837 - RNA, 22 nt, Human
ucgagguuggcaaagguggccc

SEQ ID NO: 1202838 - RNA, 24 nt, Human
ucuaggcugggugcugcccagagg

SEQ ID NO: 1202839 - RNA, 24 nt, Human
ucucauugcuguuggugucaucuc

SEQ ID NO: 1202840 - RNA, 18 nt, Human
ucucucugccucuguccc

SEQ ID NO: 1202841 - RNA, 20 nt, Human
ucucugguaggagcucggca

SEQ ID NO: 1202842 - RNA, 22 nt, Human
ucugaggaggcucagauggguc

SEQ ID NO: 1202843 - RNA, 19 nt, Human
ucugcacagcuaaugagcu

SEQ ID NO: 1202844 - RNA, 18 nt, Human
ucugcauggcugcugcau

SEQ ID NO: 1202845 - RNA, 19 nt, Human
ucugcauggcugcugcaug

SEQ ID NO: 1202846 - RNA, 23 nt, Human
ucugcggccugugccucuggggc

SEQ ID NO: 1202847 - RNA, 22 nt, Human
ucugcugggagcucgcgaucca

SEQ ID NO: 1202848 - RNA, 19 nt, Human
ucugggcaucgcuggggug

SEQ ID NO: 1202849 - RNA, 23 nt, Human
ucugggccucaaucucucccucc

SEQ ID NO: 1202850 - RNA, 21 nt, Human
ucugucccugggucccuggug

SEQ ID NO: 1202851 - RNA, 18 nt, Human
ucuguggcagacccagga

SEQ ID NO: 1202852 - RNA, 22 nt, Human
ucuuccuuuccggugguccucc

SEQ ID NO: 1202853 - RNA, 22 nt, Human
ucuuccuuuccggugguccucc

SEQ ID NO: 1202854 - RNA, 22 nt, Human
ucuuccuuuccggugguccucc

SEQ ID NO: 1202855 - RNA, 22 nt, Human
ucuuccuuuccgguggucuucc

SEQ ID NO: 1202856 - RNA, 22 nt, Human
ucuuccuuuccgguggucuucc

SEQ ID NO: 1202857 - RNA, 24 nt, Human
ugaaagcuuccaccuccuucgaga

SEQ ID NO: 1202858 - RNA, 21 nt, Human
ugaagugaggucugcucugcc

SEQ ID NO: 1202859 - RNA, 18 nt, Human
ugacccggagcuccacug

SEQ ID NO: 1202860 - RNA, 19 nt, Human
ugacccuggagagacuggg

SEQ ID NO: 1202861 - RNA, 23 nt, Human
ugacccuggagagacuggggccu

SEQ ID NO: 1202862 - RNA, 19 nt, Human
ugacugugacugagcugcu

SEQ ID NO: 1202863 - RNA, 20 nt, Human
ugacugugacugagcugcug

SEQ ID NO: 1202864 - RNA, 21 nt, Human
ugagaccacagggcuggagaa

SEQ ID NO: 1202865 - RNA, 21 nt, Human
ugagcugggggugggaagggc

SEQ ID NO: 1202866 - RNA, 18 nt, Human
ugaggaggcucagauggg

SEQ ID NO: 1202867 - RNA, 23 nt, Human
ugauguggugugguccccuccgg

SEQ ID NO: 1202868 - RNA, 20 nt, Human
ugcagagcccaggugugggg

SEQ ID NO: 1202869 - RNA, 20 nt, Human
ugcagggcagugagagaaga

SEQ ID NO: 1202870 - RNA, 19 nt, Human
ugcaugggcugcgugcgug

SEQ ID NO: 1202871 - RNA, 19 nt, Human
ugccagaggugccgggcca

SEQ ID NO: 1202872 - RNA, 22 nt, Human
ugccaggggcugguaggcucug

SEQ ID NO: 1202873 - RNA, 20 nt, Human
ugcccagaggcccggcaggu

SEQ ID NO: 1202874 - RNA, 21 nt, Human
ugcccugagcuggggguggga

SEQ ID NO: 1202875 - RNA, 19 nt, Human
ugcccugugauuucaggac

SEQ ID NO: 1202876 - RNA, 20 nt, Human
ugccucugucccuggguccc

SEQ ID NO: 1202877 - RNA, 20 nt, Human
ugccugccugcccuccagcu

SEQ ID NO: 1202878 - RNA, 21 nt, Human
ugccuggacagcccccauugu

SEQ ID NO: 1202879 - RNA, 24 nt, Human
ugccugggcugcagagaagugggc

SEQ ID NO: 1202880 - RNA, 26 nt, Human
ugccugggcugcagagaagugggcag

SEQ ID NO: 1202881 - RNA, 18 nt, Human
ugccuguggcuccuccuc

SEQ ID NO: 1202882 - RNA, 21 nt, Human
ugccuguggucugucuuccuu

SEQ ID NO: 1202883 - RNA, 22 nt, Human
ugcgaccagggauucuugagcc

SEQ ID NO: 1202884 - RNA, 21 nt, Human
ugcggagcccagaggggaggc

SEQ ID NO: 1202885 - RNA, 18 nt, Human
ugcucggguggggggcag

SEQ ID NO: 1202886 - RNA, 24 nt, Human
ugcugcccccugugcccccucugg

SEQ ID NO: 1202887 - RNA, 22 nt, Human
ugcugggggcagccgaacccgc

SEQ ID NO: 1202888 - RNA, 23 nt, Human
ugcugggggcagccgaacccgcc

SEQ ID NO: 1202889 - RNA, 21 nt, Human
ugcugguaggggcagcgggca

SEQ ID NO: 1202890 - RNA, 23 nt, Human
ugcuuggccacguccccccggga

SEQ ID NO: 1202891 - RNA, 23 nt, Human
uggaacccccuccagcucugccc

SEQ ID NO: 1202892 - RNA, 19 nt, Human
uggaggcccacgcaggucg

SEQ ID NO: 1202893 - RNA, 20 nt, Human
uggaggcccacgcaggucgc

SEQ ID NO: 1202894 - RNA, 21 nt, Human
uggcaaguaccucccccucag

SEQ ID NO: 1202895 - RNA, 25 nt, Human
uggcaaguaccucccccucagagcc

SEQ ID NO: 1202896 - RNA, 26 nt, Human
uggcaauauugcaauuauuagauucc

SEQ ID NO: 1202897 - RNA, 20 nt, Human
uggcagagcuggcugugggu

SEQ ID NO: 1202898 - RNA, 22 nt, Human
uggcagagcuggcugugggugg

SEQ ID NO: 1202899 - RNA, 22 nt, Human
uggcagaggcccagccauaggc

SEQ ID NO: 1202900 - RNA, 21 nt, Human
uggcauggggccuggucugcc

SEQ ID NO: 1202901 - RNA, 19 nt, Human
uggcccaaccccaccccag

SEQ ID NO: 1202902 - RNA, 19 nt, Human
uggccccagcuccuugugc

SEQ ID NO: 1202903 - RNA, 22 nt, Human
ugggacgagucaggugcugggg

SEQ ID NO: 1202904 - RNA, 22 nt, Human
ugggacuguggaacccccucca

SEQ ID NO: 1202905 - RNA, 19 nt, Human
ugggagaguggggaggacu

SEQ ID NO: 1202906 - RNA, 24 nt, Human
ugggagaguggggaggacuguggg

SEQ ID NO: 1202907 - RNA, 22 nt, Human
ugggagugucugcuggacagug

SEQ ID NO: 1202908 - RNA, 21 nt, Human
ugggcagugggcugcaguggg

SEQ ID NO: 1202909 - RNA, 22 nt, Human
ugggcccaggagcuggacgcag

SEQ ID NO: 1202910 - RNA, 20 nt, Human
ugggccccgagcuuuggcag

SEQ ID NO: 1202911 - RNA, 19 nt, Human
ugggcuuggcaauauugca

SEQ ID NO: 1202912 - RNA, 20 nt, Human
uggggcccagugaugcuagg

SEQ ID NO: 1202913 - RNA, 19 nt, Human
ugggggaugcugggacgcc

SEQ ID NO: 1202914 - RNA, 24 nt, Human
ugggggccccuugugcugugaggg

SEQ ID NO: 1202915 - RNA, 22 nt, Human
ugggggcugaggcaguagggga

SEQ ID NO: 1202916 - RNA, 19 nt, Human
ugggggucccgggugaugu

SEQ ID NO: 1202917 - RNA, 18 nt, Human
ugggggugggaagggcug

SEQ ID NO: 1202918 - RNA, 18 nt, Human
ugggggugggaagggcug

SEQ ID NO: 1202919 - RNA, 20 nt, Human
ugggggugggaagggcuggg

SEQ ID NO: 1202920 - RNA, 18 nt, Human
ugggucccuggugcuugg

SEQ ID NO: 1202921 - RNA, 24 nt, Human
ugggugcugcccagaggcccggca

SEQ ID NO: 1202922 - RNA, 23 nt, Human
uggguggcgguguugaugggggu

SEQ ID NO: 1202923 - RNA, 19 nt, Human
uggucgagagcgagcuggg

SEQ ID NO: 1202924 - RNA, 18 nt, Human
uggucugucuuccuccuc

SEQ ID NO: 1202925 - RNA, 21 nt, Human
uggugguccuccuuccuggug

SEQ ID NO: 1202926 - RNA, 21 nt, Human
uggugguccuccuuccuggug

SEQ ID NO: 1202927 - RNA, 21 nt, Human
uggugguccuccuuccuggug

SEQ ID NO: 1202928 - RNA, 21 nt, Human
uggugguccuccuuccuggug

SEQ ID NO: 1202929 - RNA, 21 nt, Human
uggugguccuccuuccuggug

SEQ ID NO: 1202930 - RNA, 21 nt, Human
uggugguccuccuuccuggug

SEQ ID NO: 1202931 - RNA, 21 nt, Human
uggugguccuccuuccuggug

SEQ ID NO: 1202932 - RNA, 20 nt, Human
uggugguccuccuugccggu

SEQ ID NO: 1202933 - RNA, 21 nt, Human
uggugguucuccuuccuggug

SEQ ID NO: 1202934 - RNA, 21 nt, Human
uggugguucuccuuccuggug

SEQ ID NO: 1202935 - RNA, 21 nt, Human
uggugguucuccuuccuggug

SEQ ID NO: 1202936 - RNA, 19 nt, Human
ugucauugccuggacagcc

SEQ ID NO: 1202937 - RNA, 24 nt, Human
ugucggaggaggcugagcagagac

SEQ ID NO: 1202938 - RNA, 18 nt, Human
ugugaccuuagagcccca

SEQ ID NO: 1202939 - RNA, 23 nt, Human
ugugacugagcugcugacccugg

SEQ ID NO: 1202940 - RNA, 20 nt, Human
ugugagggcuggcaaguacc

SEQ ID NO: 1202941 - RNA, 20 nt, Human
ugugcccgggugguccugcc

SEQ ID NO: 1202942 - RNA, 23 nt, Human
ugugcucaguuucucccuucuga

SEQ ID NO: 1202943 - RNA, 23 nt, Human
uguggaagauggucccgggggug

SEQ ID NO: 1202944 - RNA, 27 nt, Human
uguggggcccagugaugcuagggcugg

SEQ ID NO: 1202945 - RNA, 22 nt, Human
ugugggggaugcugggacgccu

SEQ ID NO: 1202946 - RNA, 22 nt, Human
uguggguuauuuugggcuuggc

SEQ ID NO: 1202947 - RNA, 20 nt, Human
ugugguauggcaggaggcgg

SEQ ID NO: 1202948 - RNA, 21 nt, Human
ugugguauggcaggaggcggc

SEQ ID NO: 1202949 - RNA, 18 nt, Human
uguguagaagacucgggg

SEQ ID NO: 1202950 - RNA, 25 nt, Human
uguguuguccgacauccuuccucug

SEQ ID NO: 1202951 - RNA, 21 nt, Human
uguuggugucaucucucugcc

SEQ ID NO: 1202952 - RNA, 21 nt, Human
uucaggacaaagcuucccagg

SEQ ID NO: 1202953 - RNA, 22 nt, Human
uucccuucccuugucaaacacc

SEQ ID NO: 1202954 - RNA, 22 nt, Human
uuccuggcaccuucuccuggag

SEQ ID NO: 1202955 - RNA, 24 nt, Human
uuccuggugguccuccuuccuggu

SEQ ID NO: 1202956 - RNA, 24 nt, Human
uuccuggugguccuccuuccuggu

SEQ ID NO: 1202957 - RNA, 24 nt, Human
uuccuggugguccuccuuccuggu

SEQ ID NO: 1202958 - RNA, 24 nt, Human
uuccuggugguccuccuuccuggu

SEQ ID NO: 1202959 - RNA, 24 nt, Human
uuccuggugguccuccuuccuggu

SEQ ID NO: 1202960 - RNA, 23 nt, Human
uuccuuggaggcugcgggucucc

SEQ ID NO: 1202961 - RNA, 24 nt, Human
uugcagccuugccgguggucuucc

SEQ ID NO: 1202962 - RNA, 19 nt, Human
uugcuggggccuguggcuu

SEQ ID NO: 1202963 - RNA, 24 nt, Human
uugcuggggccuguggcuucuccg

SEQ ID NO: 1202964 - RNA, 26 nt, Human
uugcuggggccuguggcuucuccggg

SEQ ID NO: 1202965 - RNA, 18 nt, Human
uuggggcugcuggcccuu

SEQ ID NO: 1202966 - RNA, 20 nt, Human
uuguacguggcuccuuugcu

SEQ ID NO: 1202967 - RNA, 19 nt, Human
cagcagccuucccgggcag

SEQ ID NO: 1202968 - RNA, 18 nt, Human
caggaggggcugaggguc

SEQ ID NO: 1202969 - RNA, 24 nt, Human
caggucgaaugaacaaaugcauga

SEQ ID NO: 1202970 - RNA, 23 nt, Human
ccuucccgggcaggccucccccg

SEQ ID NO: 1202971 - RNA, 23 nt, Human
cucaacauuggccccgugccagc

SEQ ID NO: 1202972 - RNA, 24 nt, Human
cucucaggacaggucgaaugaaca

SEQ ID NO: 1202973 - RNA, 22 nt, Human
gaaugaacaaaugcaugaggca

SEQ ID NO: 1202974 - RNA, 27 nt, Human
gcagcagccuucccgggcaggccuccc

SEQ ID NO: 1202975 - RNA, 25 nt, Human
gccacccucccauccugguggacuc

SEQ ID NO: 1202976 - RNA, 20 nt, Human
gcucagagccuggccacccu

SEQ ID NO: 1202977 - RNA, 22 nt, Human
gcucagagccuggccacccucc

SEQ ID NO: 1202978 - RNA, 24 nt, Human
ggcaggccucccccggcugcggca

SEQ ID NO: 1202979 - RNA, 20 nt, Human
gggagugggggccagggggc

SEQ ID NO: 1202980 - RNA, 20 nt, Human
ggggagugggggccaggggg

SEQ ID NO: 1202981 - RNA, 23 nt, Human
ggggagugggggccagggggcag

SEQ ID NO: 1202982 - RNA, 21 nt, Human
ggggcaggggcagcagccuuc

SEQ ID NO: 1202983 - RNA, 19 nt, Human
gggggagugggggccaggg

SEQ ID NO: 1202984 - RNA, 23 nt, Human
ggugcucaguggcucaaccggag

SEQ ID NO: 1202985 - RNA, 22 nt, Human
gugcucaguggcucagagccug

SEQ ID NO: 1202986 - RNA, 24 nt, Human
ucaguggcucagagccuggccacc

SEQ ID NO: 1202987 - RNA, 22 nt, Human
ucccgggcaggccucccccggc

SEQ ID NO: 1202988 - RNA, 21 nt, Human
ugcucaguggcucagagccug

SEQ ID NO: 1202989 - RNA, 18 nt, Human
ugggggccagggggcagg

SEQ ID NO: 1202990 - RNA, 23 nt, Human
agacacacagucagagccuggau

SEQ ID NO: 1202991 - RNA, 21 nt, Human
ucuggaagcuccugggagggc

SEQ ID NO: 1202992 - RNA, 26 nt, Human
uggauuucuggcaggucuggaagcuc

SEQ ID NO: 1202993 - RNA, 21 nt, Human
ugggagggcccgacaagggca

SEQ ID NO: 1202994 - RNA, 21 nt, Human
uguuaugaguguccugacugc

SEQ ID NO: 1202995 - RNA, 19 nt, Human
ccccuccuggucuuuaauc

SEQ ID NO: 1202996 - RNA, 25 nt, Human
cuguuguggggaaagaaagcggcuu

SEQ ID NO: 1202997 - RNA, 20 nt, Human
agcccgucagcucgcucuca

SEQ ID NO: 1202998 - RNA, 28 nt, Human
cagccagucccccuguccaacaaggccc

SEQ ID NO: 1202999 - RNA, 22 nt, Human
ccaguaggcagccagucccccu

SEQ ID NO: 1203000 - RNA, 19 nt, Human
guugcagaugguggagcag

SEQ ID NO: 1203001 - RNA, 20 nt, Human
uccgcgcgcucgcuggagcc

SEQ ID NO: 1203002 - RNA, 18 nt, Human
ucggccugcuccagaccc

SEQ ID NO: 1203003 - RNA, 18 nt, Human
uguccggagucgaggcuc

SEQ ID NO: 1203004 - RNA, 22 nt, Human
aagcugcagcuggugugugucu

SEQ ID NO: 1203005 - RNA, 18 nt, Human
agcugcagcuggugugug

SEQ ID NO: 1203006 - RNA, 20 nt, Human
aggccugccuugccccgcug

SEQ ID NO: 1203007 - RNA, 21 nt, Human
agggagggggagcugagggcc

SEQ ID NO: 1203008 - RNA, 23 nt, Human
agggggagcugagggcccagaca

SEQ ID NO: 1203009 - RNA, 18 nt, Human
agguggagggagggggag

SEQ ID NO: 1203010 - RNA, 19 nt, Human
agguguguaggagcuggca

SEQ ID NO: 1203011 - RNA, 20 nt, Human
cacugccugcaggguggccc

SEQ ID NO: 1203012 - RNA, 22 nt, Human
ccccaggccugccuugccccgc

SEQ ID NO: 1203013 - RNA, 23 nt, Human
ccccgcuggcaguugcccaggaa

SEQ ID NO: 1203014 - RNA, 18 nt, Human
gagcugagggcccagaca

SEQ ID NO: 1203015 - RNA, 18 nt, Human
ggguagguggagggaggg

SEQ ID NO: 1203016 - RNA, 22 nt, Human
gguagguggagggagggggagc

SEQ ID NO: 1203017 - RNA, 21 nt, Human
gguaucccguggggucguagu

SEQ ID NO: 1203018 - RNA, 20 nt, Human
guuuccuccgucugggcugg

SEQ ID NO: 1203019 - RNA, 22 nt, Human
uccugaccaauccuugcucugc

SEQ ID NO: 1203020 - RNA, 18 nt, Human
ucguucagagccuuucuc

SEQ ID NO: 1203021 - RNA, 26 nt, Human
ugagggcccagacacugccugcaggg

SEQ ID NO: 1203022 - RNA, 25 nt, Human
ugccuugccccgcuggcaguugccc

SEQ ID NO: 1203023 - RNA, 23 nt, Human
uggcaggcgucaguacgaagcug

SEQ ID NO: 1203024 - RNA, 20 nt, Human
uggugggugugaggggguag

SEQ ID NO: 1203025 - RNA, 19 nt, Human
ugggcaggggggcuaggcu

SEQ ID NO: 1203026 - RNA, 19 nt, Human
uggguggcaggagaagagg

SEQ ID NO: 1203027 - RNA, 18 nt, Human
aaagcugugcggccagcc

SEQ ID NO: 1203028 - RNA, 21 nt, Human
aacuggucuccucccucccug

SEQ ID NO: 1203029 - RNA, 21 nt, Human
agcagccgcaccagguccacg

SEQ ID NO: 1203030 - RNA, 18 nt, Human
agcuuccagacaacagcc

SEQ ID NO: 1203031 - RNA, 21 nt, Human
aggaggccaccacggcggggc

SEQ ID NO: 1203032 - RNA, 20 nt, Human
augcugcugagcuuggaggc

SEQ ID NO: 1203033 - RNA, 20 nt, Human
caaguugacaagcaguuuca

SEQ ID NO: 1203034 - RNA, 22 nt, Human
cacgcuguagugaagggccgug

SEQ ID NO: 1203035 - RNA, 18 nt, Human
cagacgccugucuccagc

SEQ ID NO: 1203036 - RNA, 19 nt, Human
caggagcagccgcaccagg

SEQ ID NO: 1203037 - RNA, 18 nt, Human
caguuucaggaagugugg

SEQ ID NO: 1203038 - RNA, 21 nt, Human
caguuucaggaagugugggga

SEQ ID NO: 1203039 - RNA, 26 nt, Human
cauggugacaggccaccaugagggcc

SEQ ID NO: 1203040 - RNA, 25 nt, Human
cauuuccuucucuuaagagcuucca

SEQ ID NO: 1203041 - RNA, 24 nt, Human
ccacugcuccugcaggagcuccug

SEQ ID NO: 1203042 - RNA, 21 nt, Human
ccugaguucaguggagaggaa

SEQ ID NO: 1203043 - RNA, 20 nt, Human
cggggaggaggaggaggccg

SEQ ID NO: 1203044 - RNA, 24 nt, Human
cggggaggaggaggaggccggugg

SEQ ID NO: 1203045 - RNA, 18 nt, Human
cucccugucguggcugac

SEQ ID NO: 1203046 - RNA, 24 nt, Human
cugcaggagcuccuggaucuucuu

SEQ ID NO: 1203047 - RNA, 25 nt, Human
cuuccuguucagugccugcuucuuc

SEQ ID NO: 1203048 - RNA, 19 nt, Human
cuuucugucgcugccccac

SEQ ID NO: 1203049 - RNA, 21 nt, Human
gaaagccuccugcuccccugg

SEQ ID NO: 1203050 - RNA, 23 nt, Human
gacucccagcaucagcgcagucu

SEQ ID NO: 1203051 - RNA, 22 nt, Human
gagcuuggaggcuggcugcuug

SEQ ID NO: 1203052 - RNA, 18 nt, Human
gaggaggaggccgguggc

SEQ ID NO: 1203053 - RNA, 23 nt, Human
gcggggaggaggaggaggccggu

SEQ ID NO: 1203054 - RNA, 20 nt, Human
ggagaucuccacuggcgggg

SEQ ID NO: 1203055 - RNA, 22 nt, Human
ggagcucagcagcuggcucugg

SEQ ID NO: 1203056 - RNA, 21 nt, Human
ggcggggaggaggaggaggcc

SEQ ID NO: 1203057 - RNA, 20 nt, Human
gggagugaggcuggaccucg

SEQ ID NO: 1203058 - RNA, 27 nt, Human
gggccgaggauccaucguugccacugg

SEQ ID NO: 1203059 - RNA, 20 nt, Human
ggggaggaggaggaggccgg

SEQ ID NO: 1203060 - RNA, 19 nt, Human
gugagccugggccgaguag

SEQ ID NO: 1203061 - RNA, 20 nt, Human
guguggggagugaggcugga

SEQ ID NO: 1203062 - RNA, 23 nt, Human
uacccaugcuccaggcaguucca

SEQ ID NO: 1203063 - RNA, 18 nt, Human
uccccugguuccucccug

SEQ ID NO: 1203064 - RNA, 25 nt, Human
ucccugcugggggagucuuucuguc

SEQ ID NO: 1203065 - RNA, 24 nt, Human
ucccugggagauuggaacuggucu

SEQ ID NO: 1203066 - RNA, 19 nt, Human
uccggcuggagacgcggaa

SEQ ID NO: 1203067 - RNA, 20 nt, Human
uccuugggugggugagccug

SEQ ID NO: 1203068 - RNA, 23 nt, Human
ucugugguggucccaguuucugg

SEQ ID NO: 1203069 - RNA, 20 nt, Human
ugacaagcaguuucaggaag

SEQ ID NO: 1203070 - RNA, 21 nt, Human
ugacaagcaguuucaggaagu

SEQ ID NO: 1203071 - RNA, 22 nt, Human
ugaugguccacauugcagacgc

SEQ ID NO: 1203072 - RNA, 19 nt, Human
uggaacuggucuccucccu

SEQ ID NO: 1203073 - RNA, 23 nt, Human
uggcugacucccagcaucagcgc

SEQ ID NO: 1203074 - RNA, 20 nt, Human
ugugcggccagccuugucag

SEQ ID NO: 1203075 - RNA, 21 nt, Human
ugugcggccagccuugucagu

SEQ ID NO: 1203076 - RNA, 24 nt, Human
uucacauuuccuucucuuaagagc

SEQ ID NO: 1203077 - RNA, 25 nt, Human
uucacauuuccuucucuuaagagcu

SEQ ID NO: 1203078 - RNA, 19 nt, Human
uucacgauggagaaguugg

SEQ ID NO: 1203079 - RNA, 20 nt, Human
uucaggaaguguggggagug

SEQ ID NO: 1203080 - RNA, 21 nt, Human
uugauggcgcuggccagcucc

SEQ ID NO: 1203081 - RNA, 22 nt, Human
uuggaggcuggcugcuugaugg

SEQ ID NO: 1203082 - RNA, 24 nt, Human
uugguggccuucccgggugcuccu

SEQ ID NO: 1203083 - RNA, 20 nt, Human
caccggaaaacaacccucag

SEQ ID NO: 1203084 - RNA, 22 nt, Human
caugucccaagaucaccggaaa

SEQ ID NO: 1203085 - RNA, 24 nt, Human
ccaacacuuuucacaauuccagca

SEQ ID NO: 1203086 - RNA, 19 nt, Human
ccaagaucaccggaaaaca

SEQ ID NO: 1203087 - RNA, 24 nt, Human
ccacaguggcaacaaucucaauuu

SEQ ID NO: 1203088 - RNA, 23 nt, Human
cccucaggaccagcucugcucag

SEQ ID NO: 1203089 - RNA, 21 nt, Human
ccgccuucagcuuaguaacuc

SEQ ID NO: 1203090 - RNA, 22 nt, Human
ccggaaaacaacccucaggacc

SEQ ID NO: 1203091 - RNA, 22 nt, Human
cggaaaacaacccucaggacca

SEQ ID NO: 1203092 - RNA, 21 nt, Human
ggaaaacaacccucaggacca

SEQ ID NO: 1203093 - RNA, 18 nt, Human
aaaaggcugugaccagga

SEQ ID NO: 1203094 - RNA, 22 nt, Human
aaggacagugaagugcugcugc

SEQ ID NO: 1203095 - RNA, 20 nt, Human
aggaugucugaugggcucug

SEQ ID NO: 1203096 - RNA, 25 nt, Human
ccagggguggguggugguuccgggg

SEQ ID NO: 1203097 - RNA, 26 nt, Human
ccagggguggguggugguuccgggug

SEQ ID NO: 1203098 - RNA, 22 nt, Human
gggcgucgucccuaaacucugc

SEQ ID NO: 1203099 - RNA, 21 nt, Human
uaaacucugccagcucagaag

SEQ ID NO: 1203100 - RNA, 19 nt, Human
uccacacagagccugaagu

SEQ ID NO: 1203101 - RNA, 20 nt, Human
ucccuaaacucugccagcuc

SEQ ID NO: 1203102 - RNA, 22 nt, Human
ugaagugcugcugcccaggggu

SEQ ID NO: 1203103 - RNA, 20 nt, Human
ugaguuuucaggagcagucc

SEQ ID NO: 1203104 - RNA, 24 nt, Human
ugaguuuucaggagcagucccaca

SEQ ID NO: 1203105 - RNA, 19 nt, Human
ugcugcccaggggugggug

SEQ ID NO: 1203106 - RNA, 24 nt, Human
uggcuuguuucuucccuuuugagu

SEQ ID NO: 1203107 - RNA, 18 nt, Human
uggggaaaaggcugugac

SEQ ID NO: 1203108 - RNA, 18 nt, Human
uggguggugguuggggaa

SEQ ID NO: 1203109 - RNA, 23 nt, Human
cacaccucgagacuucaacucaa

SEQ ID NO: 1203110 - RNA, 23 nt, Human
uucacaccucgagacuucaacuc

SEQ ID NO: 1203111 - RNA, 21 nt, Human
aaagaaaauuuaaggcccaga

SEQ ID NO: 1203112 - RNA, 19 nt, Human
accgacuacccgaaccuca

SEQ ID NO: 1203113 - RNA, 22 nt, Human
aggaaaaaggggauaguuagaa

SEQ ID NO: 1203114 - RNA, 19 nt, Human
uacacuauagaaaaccaga

SEQ ID NO: 1203115 - RNA, 18 nt, Human
uaggaaucagcucugaug

SEQ ID NO: 1203116 - RNA, 22 nt, Human
uauagaaaaccagacaaagaaa

SEQ ID NO: 1203117 - RNA, 23 nt, Human
uuagaauuggguuacuaaaaagu

SEQ ID NO: 1203118 - RNA, 21 nt, Human
gaaggcaggcacuacuuugac

SEQ ID NO: 1203119 - RNA, 23 nt, Human
gggcugggggauccgaaggcagg

SEQ ID NO: 1203120 - RNA, 22 nt, Human
ucccacacuguuuccaugacaa

SEQ ID NO: 1203121 - RNA, 23 nt, Human
uguuccguucccacacuguuucc

SEQ ID NO: 1203122 - RNA, 24 nt, Human
uguugcuuaaacaggaaagggucc

SEQ ID NO: 1203123 - RNA, 22 nt, Human
uuucugcaucuggaggccacag

SEQ ID NO: 1203124 - RNA, 22 nt, Human
aaaacacuaaauacacaguaau

SEQ ID NO: 1203125 - RNA, 23 nt, Human
aaaacuguugccugagacucagg

SEQ ID NO: 1203126 - RNA, 18 nt, Human
aaaauaagcaucaccaaa

SEQ ID NO: 1203127 - RNA, 18 nt, Human
aaaaucagccuuaaguau

SEQ ID NO: 1203128 - RNA, 19 nt, Human
aaccauuuaaaguuacauu

SEQ ID NO: 1203129 - RNA, 18 nt, Human
aacuagaaaguaaguucu

SEQ ID NO: 1203130 - RNA, 22 nt, Human
aagcaucaccaaauuucuguaa

SEQ ID NO: 1203131 - RNA, 23 nt, Human
aagcguuugccaaacugagucca

SEQ ID NO: 1203132 - RNA, 21 nt, Human
aaguguaaaaacacgcggaac

SEQ ID NO: 1203133 - RNA, 18 nt, Human
aaugaccccgcaauagga

SEQ ID NO: 1203134 - RNA, 22 nt, Human
acagaauuccugaaagaaaaac

SEQ ID NO: 1203135 - RNA, 29 nt, Human
acaugcgcacgcacacacacgcaaacaca

SEQ ID NO: 1203136 - RNA, 22 nt, Human
acccuguuuaauucugcucagu

SEQ ID NO: 1203137 - RNA, 21 nt, Human
accucagauaaggaaaggcca

SEQ ID NO: 1203138 - RNA, 23 nt, Human
acgcacacacacgcaaacacaca

SEQ ID NO: 1203139 - RNA, 18 nt, Human
acuacaccucagauaagg

SEQ ID NO: 1203140 - RNA, 24 nt, Human
acuggaaucaccaaaugcaugcgc

SEQ ID NO: 1203141 - RNA, 19 nt, Human
agacccaagaggugaacag

SEQ ID NO: 1203142 - RNA, 18 nt, Human
agaggaaguggcucuggu

SEQ ID NO: 1203143 - RNA, 19 nt, Human
agaguuccuccggcuugcc

SEQ ID NO: 1203144 - RNA, 25 nt, Human
agcacaugcgcacgcacacacacgg

SEQ ID NO: 1203145 - RNA, 20 nt, Human
agcauccuuuggugaaccau

SEQ ID NO: 1203146 - RNA, 24 nt, Human
aggaaguggcucugguugccuaug

SEQ ID NO: 1203147 - RNA, 22 nt, Human
aguaaguucucccuuuuucuuu

SEQ ID NO: 1203148 - RNA, 20 nt, Human
auaaauaagcagaaacacaa

SEQ ID NO: 1203149 - RNA, 21 nt, Human
caaaugcaugcgcaguaacac

SEQ ID NO: 1203150 - RNA, 24 nt, Human
caacaagaaugcacauucaagcau

SEQ ID NO: 1203151 - RNA, 22 nt, Human
caacuucuaugacccaacaagu

SEQ ID NO: 1203152 - RNA, 20 nt, Human
caagaaugcacauucaagca

SEQ ID NO: 1203153 - RNA, 20 nt, Human
caagcaucugaaugcaugau

SEQ ID NO: 1203154 - RNA, 22 nt, Human
caaguuaacuaaagaaugacac

SEQ ID NO: 1203155 - RNA, 19 nt, Human
cacacaaacuuauugcgug

SEQ ID NO: 1203156 - RNA, 26 nt, Human
cacgcacacacacgcaaacacacaau

SEQ ID NO: 1203157 - RNA, 19 nt, Human
cagaaucucagaacauaau

SEQ ID NO: 1203158 - RNA, 19 nt, Human
caucugaaugcaugaucug

SEQ ID NO: 1203159 - RNA, 20 nt, Human
caugaucuguuaauacugaa

SEQ ID NO: 1203160 - RNA, 19 nt, Human
ccaggagauguuggguuca

SEQ ID NO: 1203161 - RNA, 18 nt, Human
ccauccacaaugcuuaga

SEQ ID NO: 1203162 - RNA, 22 nt, Human
cccaagaggugaacaggaggga

SEQ ID NO: 1203163 - RNA, 22 nt, Human
cccuuuuucuuucaaaugaucc

SEQ ID NO: 1203164 - RNA, 23 nt, Human
ccgggucuguuuccagccccacu

SEQ ID NO: 1203165 - RNA, 19 nt, Human
ccucucgccuuuccgcccc

SEQ ID NO: 1203166 - RNA, 25 nt, Human
cuaaagaaugacacugaaaccauaa

SEQ ID NO: 1203167 - RNA, 22 nt, Human
cugaaaccauaagguaacuccc

SEQ ID NO: 1203168 - RNA, 24 nt, Human
gaacaaguguaaaaacacgcggaa

SEQ ID NO: 1203169 - RNA, 25 nt, Human
gaacaaguguaaaaacacgcggaac

SEQ ID NO: 1203170 - RNA, 22 nt, Human
gaaguggcucugguugccuaug

SEQ ID NO: 1203171 - RNA, 22 nt, Human
gagcuugcucgggucuccccug

SEQ ID NO: 1203172 - RNA, 21 nt, Human
gcaaacacacaaucacuucau

SEQ ID NO: 1203173 - RNA, 24 nt, Human
gcagaaacacaaagggagguacug

SEQ ID NO: 1203174 - RNA, 24 nt, Human
gcggaaagcaacuucuaugaccca

SEQ ID NO: 1203175 - RNA, 22 nt, Human
ggaaagcaacuucuaugaccca

SEQ ID NO: 1203176 - RNA, 19 nt, Human
ggaaguggcucugguugcc

SEQ ID NO: 1203177 - RNA, 18 nt, Human
guuaagccuucuccaaag

SEQ ID NO: 1203178 - RNA, 22 nt, Human
guugccugagacucaggggagc

SEQ ID NO: 1203179 - RNA, 18 nt, Human
uaaaagaagaaagaucau

SEQ ID NO: 1203180 - RNA, 25 nt, Human
uaaaauaaucuucuaauaaaaucag

SEQ ID NO: 1203181 - RNA, 22 nt, Human
uaaauuacacagcucccaaguu

SEQ ID NO: 1203182 - RNA, 18 nt, Human
uaagcagaaacacaaagg

SEQ ID NO: 1203183 - RNA, 19 nt, Human
uaaguggagaacagaagug

SEQ ID NO: 1203184 - RNA, 22 nt, Human
uaaguuugcauucugguucuca

SEQ ID NO: 1203185 - RNA, 22 nt, Human
uacacaguaauuaaauaucuag

SEQ ID NO: 1203186 - RNA, 23 nt, Human
uagagcauccuuuggugaaccau

SEQ ID NO: 1203187 - RNA, 26 nt, Human
uagcacuggaaucaccaaaugcaugc

SEQ ID NO: 1203188 - RNA, 18 nt, Human
uagguguaagcguuugcc

SEQ ID NO: 1203189 - RNA, 20 nt, Human
uauuuugacauaaaauuggc

SEQ ID NO: 1203190 - RNA, 18 nt, Human
ucaaaacacuaaauacac

SEQ ID NO: 1203191 - RNA, 23 nt, Human
ucaagcccacaacaagaaugcac

SEQ ID NO: 1203192 - RNA, 25 nt, Human
uccacaguuaagccuucuccaaaga

SEQ ID NO: 1203193 - RNA, 21 nt, Human
uccgugacaaaacuguugccu

SEQ ID NO: 1203194 - RNA, 26 nt, Human
uccgugacaaaacuguugccugagac

SEQ ID NO: 1203195 - RNA, 20 nt, Human
uccuuccauccacaaugcuu

SEQ ID NO: 1203196 - RNA, 24 nt, Human
ucggcgacauggcggccgacgugc

SEQ ID NO: 1203197 - RNA, 23 nt, Human
ucuucuaauaaaaucagccuuaa

SEQ ID NO: 1203198 - RNA, 24 nt, Human
ucuugcugcgaagguccccaggag

SEQ ID NO: 1203199 - RNA, 24 nt, Human
ugaaauaauacgcaaagccuaaau

SEQ ID NO: 1203200 - RNA, 20 nt, Human
ugaauagcuuuuauagaacc

SEQ ID NO: 1203201 - RNA, 24 nt, Human
ugacccaacaaguguaaaccaaaa

SEQ ID NO: 1203202 - RNA, 18 nt, Human
ugaggaggagauggauau

SEQ ID NO: 1203203 - RNA, 18 nt, Human
ugcacaucaucaucaagu

SEQ ID NO: 1203204 - RNA, 18 nt, Human
ugccugagacucagggga

SEQ ID NO: 1203205 - RNA, 20 nt, Human
ugcucaguguaccucaugac

SEQ ID NO: 1203206 - RNA, 20 nt, Human
uggaaucaccaaaugcaugc

SEQ ID NO: 1203207 - RNA, 23 nt, Human
uggcaaaaauaagcaucaccaaa

SEQ ID NO: 1203208 - RNA, 22 nt, Human
uggcuccgguggaggagacacc

SEQ ID NO: 1203209 - RNA, 24 nt, Human
ugggcaaauacuacaccaaccccg

SEQ ID NO: 1203210 - RNA, 22 nt, Human
ugggcaaauacuacaccagagg

SEQ ID NO: 1203211 - RNA, 21 nt, Human
ugucacaguuucucauugcag

SEQ ID NO: 1203212 - RNA, 20 nt, Human
ugucacggagcuugcucggg

SEQ ID NO: 1203213 - RNA, 24 nt, Human
ugucucagugcuuuccucuugcug

SEQ ID NO: 1203214 - RNA, 23 nt, Human
ugugauguuggguauuugcuuau

SEQ ID NO: 1203215 - RNA, 24 nt, Human
uguugccugagacucaggggagcu

SEQ ID NO: 1203216 - RNA, 21 nt, Human
uuaaagaccuuccaugucugg

SEQ ID NO: 1203217 - RNA, 22 nt, Human
uuacacacaaacuuauugcgug

SEQ ID NO: 1203218 - RNA, 24 nt, Human
uuggcaaaaauaagcaucaccaaa

SEQ ID NO: 1203219 - RNA, 21 nt, Human
uuugugauguuggguauuugc

SEQ ID NO: 1203220 - RNA, 22 nt, Human
uuuucuuuggucucuaggccug

SEQ ID NO: 1203221 - RNA, 21 nt, Human
accagcccuugcugcuguugc

SEQ ID NO: 1203222 - RNA, 20 nt, Human
agcacccugaccccuuucgc

SEQ ID NO: 1203223 - RNA, 25 nt, Human
ccugaccccuuucgcuucggcuuuc

SEQ ID NO: 1203224 - RNA, 24 nt, Human
cucccuggcauccgauguuccuga

SEQ ID NO: 1203225 - RNA, 20 nt, Human
cuccucccucccuggcaucc

SEQ ID NO: 1203226 - RNA, 22 nt, Human
cugccgggcuauggcuuuucuu

SEQ ID NO: 1203227 - RNA, 25 nt, Human
gcccuugcugcuguugccucagcac

SEQ ID NO: 1203228 - RNA, 18 nt, Human
ugccucagcacccugacc

SEQ ID NO: 1203229 - RNA, 24 nt, Human
aagccugcaggcaaguggggcugg

SEQ ID NO: 1203230 - RNA, 21 nt, Human
aggagaagcgaggaggacccg

SEQ ID NO: 1203231 - RNA, 23 nt, Human
aggaggaggagaggagaagcgag

SEQ ID NO: 1203232 - RNA, 21 nt, Human
aggggccuuugagugacaggu

SEQ ID NO: 1203233 - RNA, 20 nt, Human
aggucaggaggaggagagga

SEQ ID NO: 1203234 - RNA, 22 nt, Human
augaguucucugcaggacaaag

SEQ ID NO: 1203235 - RNA, 22 nt, Human
caggacaaagcaaagcuggagg

SEQ ID NO: 1203236 - RNA, 19 nt, Human
ccacugcccagcuccuggg

SEQ ID NO: 1203237 - RNA, 24 nt, Human
ccuccugcugcuccuuggcuugcu

SEQ ID NO: 1203238 - RNA, 21 nt, Human
cgaaggugagcagaaccugcu

SEQ ID NO: 1203239 - RNA, 19 nt, Human
cgaggaggacccgaaggug

SEQ ID NO: 1203240 - RNA, 22 nt, Human
cgaggaggacccgaaggugagc

SEQ ID NO: 1203241 - RNA, 21 nt, Human
gaggaggagaggagaagcgag

SEQ ID NO: 1203242 - RNA, 19 nt, Human
gcugcuccuuggcuugcuc

SEQ ID NO: 1203243 - RNA, 18 nt, Human
ggacccgaaggugagcag

SEQ ID NO: 1203244 - RNA, 18 nt, Human
ggagaagcgaggaggacc

SEQ ID NO: 1203245 - RNA, 22 nt, Human
ggagaagcgaggaggacccgaa

SEQ ID NO: 1203246 - RNA, 21 nt, Human
ggagaggagaagcgaggagga

SEQ ID NO: 1203247 - RNA, 23 nt, Human
ucaggaggaggagaggagaagcg

SEQ ID NO: 1203248 - RNA, 20 nt, Human
uccugcugcuccuuggcuug

SEQ ID NO: 1203249 - RNA, 21 nt, Human
uccugcugcuccuuggcuugc

SEQ ID NO: 1203250 - RNA, 21 nt, Human
ucugcaggacaaagcaaagcu

SEQ ID NO: 1203251 - RNA, 19 nt, Human
ugcuggagggagacggugg

SEQ ID NO: 1203252 - RNA, 21 nt, Human
acaaaaaacaagcucugugga

SEQ ID NO: 1203253 - RNA, 19 nt, Human
accugauucaguccgugcu

SEQ ID NO: 1203254 - RNA, 22 nt, Human
agagggugugggggucugaagc

SEQ ID NO: 1203255 - RNA, 24 nt, Human
aggagagggugugggggucugaag

SEQ ID NO: 1203256 - RNA, 22 nt, Human
cagcagcaggagaggguguggg

SEQ ID NO: 1203257 - RNA, 19 nt, Human
ccagugaguggcggcuuuu

SEQ ID NO: 1203258 - RNA, 22 nt, Human
ccccggcaggugcguguaccug

SEQ ID NO: 1203259 - RNA, 18 nt, Human
cucuguggagugcugggc

SEQ ID NO: 1203260 - RNA, 18 nt, Human
gagugcugggcagguaac

SEQ ID NO: 1203261 - RNA, 20 nt, Human
gcaccucggucagugcgucc

SEQ ID NO: 1203262 - RNA, 22 nt, Human
gggggucugaagcuguccuggu

SEQ ID NO: 1203263 - RNA, 22 nt, Human
ucagcaucaguuggagacacag

SEQ ID NO: 1203264 - RNA, 21 nt, Human
ucgccgccgcagccuugaggc

SEQ ID NO: 1203265 - RNA, 20 nt, Human
agcagcuauaggccugaggc

SEQ ID NO: 1203266 - RNA, 22 nt, Human
cccacucuuauucuggagccua

SEQ ID NO: 1203267 - RNA, 23 nt, Human
cuauaggccugaggcugaacaca

SEQ ID NO: 1203268 - RNA, 19 nt, Human
gcggaagguguggccacag

SEQ ID NO: 1203269 - RNA, 20 nt, Human
ggcggaagguguggccacag

SEQ ID NO: 1203270 - RNA, 20 nt, Human
ggugucagagcauggggcac

SEQ ID NO: 1203271 - RNA, 20 nt, Human
ucugagcugucccacucuua

SEQ ID NO: 1203272 - RNA, 20 nt, Human
ugaggugggugucagagcau

SEQ ID NO: 1203273 - RNA, 18 nt, Human
uggcaagaguggggcaga

SEQ ID NO: 1203274 - RNA, 20 nt, Human
uggcaagugggugcucuugg

SEQ ID NO: 1203275 - RNA, 23 nt, Human
uggcaagugggugcucuugguuc

SEQ ID NO: 1203276 - RNA, 19 nt, Human
uggggaaauggcaagagug

SEQ ID NO: 1203277 - RNA, 25 nt, Human
uguggccacagcagcuauaggccug

SEQ ID NO: 1203278 - RNA, 22 nt, Human
uccaugagugguagacuuacug

SEQ ID NO: 1203279 - RNA, 18 nt, Human
ugggagcagaagaucuag

SEQ ID NO: 1203280 - RNA, 26 nt, Human
accccgagagccuguccauggagaau

SEQ ID NO: 1203281 - RNA, 20 nt, Human
agaaggacaggucugcccag

SEQ ID NO: 1203282 - RNA, 22 nt, Human
agcuagcuaccccgagagccug

SEQ ID NO: 1203283 - RNA, 18 nt, Human
cgagagccuguccaugga

SEQ ID NO: 1203284 - RNA, 18 nt, Human
cgugggugcugcccugca

SEQ ID NO: 1203285 - RNA, 18 nt, Human
gcuagcuaccccgagagc

SEQ ID NO: 1203286 - RNA, 19 nt, Human
guccauggagaaugauggu

SEQ ID NO: 1203287 - RNA, 18 nt, Human
gugaggaggguuucuggg

SEQ ID NO: 1203288 - RNA, 18 nt, Human
ugcucccuuccacguggg

SEQ ID NO: 1203289 - RNA, 18 nt, Human
ugugaggcacagaaggac

SEQ ID NO: 1203290 - RNA, 19 nt, Human
ugugaggcacagaaggaca

SEQ ID NO: 1203291 - RNA, 21 nt, Human
uuucugggugcucccuuccac

SEQ ID NO: 1203292 - RNA, 21 nt, Human
cagugacaaccucgggggcag

SEQ ID NO: 1203293 - RNA, 21 nt, Human
aaacgcacuggaggacggcac

SEQ ID NO: 1203294 - RNA, 21 nt, Human
aaccauucccaccaacaccaa

SEQ ID NO: 1203295 - RNA, 21 nt, Human
acaccaauauccccuggaccg

SEQ ID NO: 1203296 - RNA, 22 nt, Human
accaacaccaauauccccugga

SEQ ID NO: 1203297 - RNA, 19 nt, Human
acuuccaggaacauaagaa

SEQ ID NO: 1203298 - RNA, 20 nt, Human
agaggaagcagcacacagaa

SEQ ID NO: 1203299 - RNA, 21 nt, Human
caccaacaccaauauccccug

SEQ ID NO: 1203300 - RNA, 19 nt, Human
cagcagauccugggcauga

SEQ ID NO: 1203301 - RNA, 20 nt, Human
cccaccaacaccaauauccc

SEQ ID NO: 1203302 - RNA, 21 nt, Human
gaaaacgcacuggaggacggc

SEQ ID NO: 1203303 - RNA, 21 nt, Human
gagcgcagcagauccugggca

SEQ ID NO: 1203304 - RNA, 23 nt, Human
ggaaugggagcaagaaugcguga

SEQ ID NO: 1203305 - RNA, 21 nt, Human
ucaggaaugggagcaagaaug

SEQ ID NO: 1203306 - RNA, 22 nt, Human
ucccaccaacaccaauaucccc

SEQ ID NO: 1203307 - RNA, 23 nt, Human
ucuguagcuucaggaaugggagc

SEQ ID NO: 1203308 - RNA, 20 nt, Human
ugaacagaaaucuguggacu

SEQ ID NO: 1203309 - RNA, 18 nt, Human
ugccgaaaagaggugcca

SEQ ID NO: 1203310 - RNA, 21 nt, Human
uucuauaguguaagcaucacu

SEQ ID NO: 1203311 - RNA, 18 nt, Human
caccaagugacacgaagg

SEQ ID NO: 1203312 - RNA, 25 nt, Human
cacgaagggaaucagcaguuuccca

SEQ ID NO: 1203313 - RNA, 18 nt, Human
uaauuugaccaccaucca

SEQ ID NO: 1203314 - RNA, 25 nt, Human
ucagcaguuucccauaagcaucuag

SEQ ID NO: 1203315 - RNA, 24 nt, Human
caacaagguggcccuaacguacug

SEQ ID NO: 1203316 - RNA, 22 nt, Human
cacaggcucggugcuaaggcac

SEQ ID NO: 1203317 - RNA, 19 nt, Human
gacccgaagauggcaacaa

SEQ ID NO: 1203318 - RNA, 21 nt, Human
ccacugaucuuuucacugucu

SEQ ID NO: 1203319 - RNA, 19 nt, Human
ggcgucugcaaagauaacc

SEQ ID NO: 1203320 - RNA, 21 nt, Human
gguggugaaaauaaaacacaa

SEQ ID NO: 1203321 - RNA, 20 nt, Human
ugaaaauaaaacacaaguca

SEQ ID NO: 1203322 - RNA, 26 nt, Human
ugugguggaggggugcucuccugagc

SEQ ID NO: 1203323 - RNA, 22 nt, Human
caagcaaaucucugcaacucuc

SEQ ID NO: 1203324 - RNA, 22 nt, Human
cacaagcaaaucucugcaacuc

SEQ ID NO: 1203325 - RNA, 27 nt, Human
cacaagcaaaucucugcaacucuccuc

SEQ ID NO: 1203326 - RNA, 27 nt, Human
cagcacaagcaaaucucugcaacucuc

SEQ ID NO: 1203327 - RNA, 25 nt, Human
gacagcacaagcaaaucucugcaac

SEQ ID NO: 1203328 - RNA, 23 nt, Human
ugcaaaugacagcacaagcaaau

SEQ ID NO: 1203329 - RNA, 20 nt, Human
ugcaacucuccuccugaaag

SEQ ID NO: 1203330 - RNA, 20 nt, Human
uaccucaaauaugaucucac

SEQ ID NO: 1203331 - RNA, 22 nt, Human
aagcggaggcaggcgggugggg

SEQ ID NO: 1203332 - RNA, 23 nt, Human
agcacuguggccugcucuccugg

SEQ ID NO: 1203333 - RNA, 21 nt, Human
aggcaggcggguggggguggg

SEQ ID NO: 1203334 - RNA, 22 nt, Human
aggcaggcggguggggguggga

SEQ ID NO: 1203335 - RNA, 24 nt, Human
aggcaggcgggugggggugggagu

SEQ ID NO: 1203336 - RNA, 29 nt, Human
aggcaggcggguggggguggggggacccc

SEQ ID NO: 1203337 - RNA, 21 nt, Human
aggcgggugggggugggagug

SEQ ID NO: 1203338 - RNA, 25 nt, Human
cacccagcacaggggcagggccugc

SEQ ID NO: 1203339 - RNA, 18 nt, Human
cacuguggccugcucucc

SEQ ID NO: 1203340 - RNA, 22 nt, Human
cacuguggccugcucuccuggc

SEQ ID NO: 1203341 - RNA, 18 nt, Human
cgggaacagcuggagcug

SEQ ID NO: 1203342 - RNA, 20 nt, Human
gaagcggaggcaggcgggug

SEQ ID NO: 1203343 - RNA, 18 nt, Human
gagugccauauuugcagu

SEQ ID NO: 1203344 - RNA, 18 nt, Human
ggaggcaggcgggugggg

SEQ ID NO: 1203345 - RNA, 18 nt, Human
ggaguagcccaggccuag

SEQ ID NO: 1203346 - RNA, 23 nt, Human
ggcagggccugcaggaaggccuc

SEQ ID NO: 1203347 - RNA, 22 nt, Human
uggccugcucuccuggcaccca

SEQ ID NO: 1203348 - RNA, 18 nt, Human
aaguaggaggcugggucu

SEQ ID NO: 1203349 - RNA, 19 nt, Human
accuggggcugaucacauc

SEQ ID NO: 1203350 - RNA, 22 nt, Human
acggcgcaggcccaguagcugc

SEQ ID NO: 1203351 - RNA, 22 nt, Human
agcagcaggggcagcccuggaa

SEQ ID NO: 1203352 - RNA, 22 nt, Human
agcagccggucagcagccagca

SEQ ID NO: 1203353 - RNA, 20 nt, Human
agccacgucgcccaggaccc

SEQ ID NO: 1203354 - RNA, 22 nt, Human
agccagcagcaggggcagcccu

SEQ ID NO: 1203355 - RNA, 24 nt, Human
agccagccgcucucggcuugcgcc

SEQ ID NO: 1203356 - RNA, 19 nt, Human
agcccgacgcccaccuuga

SEQ ID NO: 1203357 - RNA, 23 nt, Human
cagcagcaggggcagcccuggaa

SEQ ID NO: 1203358 - RNA, 20 nt, Human
cagcccgacgcccaccuuga

SEQ ID NO: 1203359 - RNA, 25 nt, Human
ccacgucgcccaggaccacauccag

SEQ ID NO: 1203360 - RNA, 25 nt, Human
ccccagcggcuaucgaggaagaagu

SEQ ID NO: 1203361 - RNA, 21 nt, Human
ccgacgcccaccuugaccaag

SEQ ID NO: 1203362 - RNA, 21 nt, Human
ccgcugucgugcccgcugucc

SEQ ID NO: 1203363 - RNA, 20 nt, Human
cggucagcagccagcagcag

SEQ ID NO: 1203364 - RNA, 18 nt, Human
cucggcuugcgccccagc

SEQ ID NO: 1203365 - RNA, 19 nt, Human
gaccaaguaggaggcuggg

SEQ ID NO: 1203366 - RNA, 19 nt, Human
gaccacauccacacucagg

SEQ ID NO: 1203367 - RNA, 20 nt, Human
gcaggggcagcccuggaaca

SEQ ID NO: 1203368 - RNA, 20 nt, Human
gcccaggaccacauccacac

SEQ ID NO: 1203369 - RNA, 23 nt, Human
gcccgcuguccgggucguaccug

SEQ ID NO: 1203370 - RNA, 24 nt, Human
gcccuggaacacuccguacugcuc

SEQ ID NO: 1203371 - RNA, 22 nt, Human
uaccuggggcugaucacaucgg

SEQ ID NO: 1203372 - RNA, 26 nt, Human
uaccuggggcugaucacaucgggggc

SEQ ID NO: 1203373 - RNA, 20 nt, Human
uaggaaagcgaaggguggcg

SEQ ID NO: 1203374 - RNA, 19 nt, Human
ucagcagccagcagcaggg

SEQ ID NO: 1203375 - RNA, 20 nt, Human
uccacuguggcauccucggc

SEQ ID NO: 1203376 - RNA, 18 nt, Human
uccgggucguaccugggg

SEQ ID NO: 1203377 - RNA, 22 nt, Human
uggggcugaucacaucgggggc

SEQ ID NO: 1203378 - RNA, 18 nt, Human
aaggaaucacauugccac

SEQ ID NO: 1203379 - RNA, 23 nt, Human
acauugccacaucuccuucuggc

SEQ ID NO: 1203380 - RNA, 22 nt, Human
aucuccuucuggcugcgcacug

SEQ ID NO: 1203381 - RNA, 20 nt, Human
cacuguaagccaggcguccu

SEQ ID NO: 1203382 - RNA, 20 nt, Human
cacuguaagccaggcguccu

SEQ ID NO: 1203383 - RNA, 21 nt, Human
uaagccaggcguccuugguuc

SEQ ID NO: 1203384 - RNA, 21 nt, Human
uacaaaaggaaucacauugcc

SEQ ID NO: 1203385 - RNA, 22 nt, Human
uacaugcuuuuuuaaaaucaau

SEQ ID NO: 1203386 - RNA, 25 nt, Human
ucccucugggcacgcgcagcgucug

SEQ ID NO: 1203387 - RNA, 24 nt, Human
ugccacaucuccuucuggcugcgc

SEQ ID NO: 1203388 - RNA, 19 nt, Human
uggcugcgcacuguaagcc

SEQ ID NO: 1203389 - RNA, 24 nt, Human
cgacuagguuaauuccuaaggugc

SEQ ID NO: 1203390 - RNA, 21 nt, Human
gaugcugccuuccccgcuuac

SEQ ID NO: 1203391 - RNA, 24 nt, Human
uccuaaggugcagucaugugaggu

SEQ ID NO: 1203392 - RNA, 21 nt, Human
cugacaccgaggggccuugag

SEQ ID NO: 1203393 - RNA, 20 nt, Human
agcuauuuauuaaagaacca

SEQ ID NO: 1203394 - RNA, 19 nt, Human
aaaacguucauaucgcgcc

SEQ ID NO: 1203395 - RNA, 20 nt, Human
aaaaugaacauguaaaugcc

SEQ ID NO: 1203396 - RNA, 21 nt, Human
aacaaaacguucauaucgcgc

SEQ ID NO: 1203397 - RNA, 21 nt, Human
aacaccuuccauaacaucuuu

SEQ ID NO: 1203398 - RNA, 21 nt, Human
aauucgccgcuuuucuuccuc

SEQ ID NO: 1203399 - RNA, 18 nt, Human
agucaagacacucucucu

SEQ ID NO: 1203400 - RNA, 20 nt, Human
cacuccgcgcgaccgagagc

SEQ ID NO: 1203401 - RNA, 23 nt, Human
cacugcaagcgcugcaaugaacu

SEQ ID NO: 1203402 - RNA, 18 nt, Human
caguaacaccuuccauaa

SEQ ID NO: 1203403 - RNA, 26 nt, Human
ccacugggcuuauuaaauggcugcau

SEQ ID NO: 1203404 - RNA, 18 nt, Human
ccguauuucucacuguuu

SEQ ID NO: 1203405 - RNA, 20 nt, Human
ccuuggcggcgcuaggcuga

SEQ ID NO: 1203406 - RNA, 20 nt, Human
cuccuucuauuugcugaucc

SEQ ID NO: 1203407 - RNA, 27 nt, Human
cuguauaugaucuaauguuuccuuccu

SEQ ID NO: 1203408 - RNA, 18 nt, Human
cuuaucuucuccauaggu

SEQ ID NO: 1203409 - RNA, 25 nt, Human
gcugcaaugaacugucucuaccuuc

SEQ ID NO: 1203410 - RNA, 21 nt, Human
uaguuuguuucuguauaugau

SEQ ID NO: 1203411 - RNA, 21 nt, Human
uauaaacacugcaagcgcugc

SEQ ID NO: 1203412 - RNA, 22 nt, Human
uauaaacacugcaagcgcugca

SEQ ID NO: 1203413 - RNA, 21 nt, Human
uauuccucuugcagcagcaac

SEQ ID NO: 1203414 - RNA, 23 nt, Human
uauuucucacuguuuuuuucucu

SEQ ID NO: 1203415 - RNA, 20 nt, Human
ucaaucuucucuucauccuc

SEQ ID NO: 1203416 - RNA, 22 nt, Human
ucaaucuucucuucauccuccu

SEQ ID NO: 1203417 - RNA, 24 nt, Human
ucaaucuucucuucauccuccuca

SEQ ID NO: 1203418 - RNA, 21 nt, Human
ucacuguuuuuuucucuucug

SEQ ID NO: 1203419 - RNA, 25 nt, Human
uccacacgaucacuccgcgcgaccg

SEQ ID NO: 1203420 - RNA, 19 nt, Human
ucuguuugauuauuugucu

SEQ ID NO: 1203421 - RNA, 19 nt, Human
ugaucaucuacaguaacac

SEQ ID NO: 1203422 - RNA, 19 nt, Human
ugcaagcgcugcaaugaac

SEQ ID NO: 1203423 - RNA, 21 nt, Human
ugcaaugaacugucucuaccu

SEQ ID NO: 1203424 - RNA, 21 nt, Human
ugcugaggcuuaucuucucca

SEQ ID NO: 1203425 - RNA, 22 nt, Human
uguaaagcagggauauaaacac

SEQ ID NO: 1203426 - RNA, 21 nt, Human
ugugaagaacuuuccagaugc

SEQ ID NO: 1203427 - RNA, 21 nt, Human
ugugaucaucuacaguaacac

SEQ ID NO: 1203428 - RNA, 18 nt, Human
uucaaaaggauucucacc

SEQ ID NO: 1203429 - RNA, 23 nt, Human
uucaucaugugaucaucuacagu

SEQ ID NO: 1203430 - RNA, 26 nt, Human
uucuccauagguuuugcuaguuuggg

SEQ ID NO: 1203431 - RNA, 19 nt, Human
uugcuaguuuggguuucuu

SEQ ID NO: 1203432 - RNA, 18 nt, Human
uguuagaggagccacugc

SEQ ID NO: 1203433 - RNA, 23 nt, Human
acgcugcagagaucgagugugug

SEQ ID NO: 1203434 - RNA, 20 nt, Human
cgagugugugcaccacgacc

SEQ ID NO: 1203435 - RNA, 20 nt, Human
uccagagacugcgccugucc

SEQ ID NO: 1203436 - RNA, 23 nt, Human
ucgagugugugcaccacgaccug

SEQ ID NO: 1203437 - RNA, 18 nt, Human
ucgccggcagccuggguu

SEQ ID NO: 1203438 - RNA, 19 nt, Human
ucgccggcagccuggguuc

SEQ ID NO: 1203439 - RNA, 24 nt, Human
ucgccggcagccuggguucuucuu

SEQ ID NO: 1203440 - RNA, 26 nt, Human
ugauaacaaccucauuuuguacuuca

SEQ ID NO: 1203441 - RNA, 20 nt, Human
uagguuucagcaccuccaac

SEQ ID NO: 1203442 - RNA, 22 nt, Human
uccuagaggcaaggaagaagag

SEQ ID NO: 1203443 - RNA, 18 nt, Human
uucagcaccuccaacucc

SEQ ID NO: 1203444 - RNA, 23 nt, Human
aguguucacucccugacuugggg

SEQ ID NO: 1203445 - RNA, 21 nt, Human
guguucacucccugacuuggg

SEQ ID NO: 1203446 - RNA, 21 nt, Human
gagccucaguuuaucuuccug

SEQ ID NO: 1203447 - RNA, 23 nt, Human
gagccucaguuuaucuuccuggu

SEQ ID NO: 1203448 - RNA, 22 nt, Human
uuccugaaucagucuauggggg

SEQ ID NO: 1203449 - RNA, 22 nt, Human
gauucggaauccagcucugcca

SEQ ID NO: 1203450 - RNA, 21 nt, Human
cccgugggcacucaguaaaca

SEQ ID NO: 1203451 - RNA, 18 nt, Human
ccgcgacgucccgccagg

SEQ ID NO: 1203452 - RNA, 18 nt, Human
ugggcacucaguaaacau

SEQ ID NO: 1203453 - RNA, 21 nt, Human
acagaggacagcccgugguca

SEQ ID NO: 1203454 - RNA, 25 nt, Human
caccacagccacagaggacagcccg

SEQ ID NO: 1203455 - RNA, 23 nt, Human
cagaggacagcccguggucacuc

SEQ ID NO: 1203456 - RNA, 20 nt, Human
ccacagaggacagcccgugg

SEQ ID NO: 1203457 - RNA, 24 nt, Human
aacagcacugacaacaaucacagg

SEQ ID NO: 1203458 - RNA, 19 nt, Human
aagcccuccacccugcucc

SEQ ID NO: 1203459 - RNA, 20 nt, Human
aaguacccagggggacaguc

SEQ ID NO: 1203460 - RNA, 23 nt, Human
aauacaaggaauaacagcacuga

SEQ ID NO: 1203461 - RNA, 26 nt, Human
acaaggaauaacagcacugacaacaa

SEQ ID NO: 1203462 - RNA, 19 nt, Human
acccaguucacacuccccc

SEQ ID NO: 1203463 - RNA, 19 nt, Human
accggaugcagaaguccug

SEQ ID NO: 1203464 - RNA, 19 nt, Human
agagagcagcccaugauca

SEQ ID NO: 1203465 - RNA, 23 nt, Human
agagagcagcccaugaucaccau

SEQ ID NO: 1203466 - RNA, 18 nt, Human
agagggugggaggugagg

SEQ ID NO: 1203467 - RNA, 22 nt, Human
agagggugggaggugaggaggc

SEQ ID NO: 1203468 - RNA, 21 nt, Human
agcagcccaugaucaccauca

SEQ ID NO: 1203469 - RNA, 18 nt, Human
aggagagaaccgcaacac

SEQ ID NO: 1203470 - RNA, 18 nt, Human
aggcagagggugggaggu

SEQ ID NO: 1203471 - RNA, 23 nt, Human
aggcagagggugggaggugagga

SEQ ID NO: 1203472 - RNA, 23 nt, Human
cacagcagcaucaggguagugac

SEQ ID NO: 1203473 - RNA, 19 nt, Human
cacaucaagcccuccaccc

SEQ ID NO: 1203474 - RNA, 24 nt, Human
cacaucaagcccuccacccugcuc

SEQ ID NO: 1203475 - RNA, 25 nt, Human
cacccugcuccaguccugcuaggag

SEQ ID NO: 1203476 - RNA, 21 nt, Human
caccgggaauuguggaggcca

SEQ ID NO: 1203477 - RNA, 20 nt, Human
cacuguugguaauacaagga

SEQ ID NO: 1203478 - RNA, 21 nt, Human
cagagagcagcccaugaucac

SEQ ID NO: 1203479 - RNA, 20 nt, Human
cagcaugacauaucucccuu

SEQ ID NO: 1203480 - RNA, 24 nt, Human
cagcccaugaucaccaucacauca

SEQ ID NO: 1203481 - RNA, 23 nt, Human
cagcucucacaaguggccccaca

SEQ ID NO: 1203482 - RNA, 21 nt, Human
caggaagagccucugcuggca

SEQ ID NO: 1203483 - RNA, 25 nt, Human
caggccagugcccacuacugacgcc

SEQ ID NO: 1203484 - RNA, 22 nt, Human
cagguggaacagccguucuccu

SEQ ID NO: 1203485 - RNA, 19 nt, Human
ccagaguuuucuaacaccg

SEQ ID NO: 1203486 - RNA, 22 nt, Human
ccccaggccagugcccacuacu

SEQ ID NO: 1203487 - RNA, 18 nt, Human
ccccauuccuucuucugc

SEQ ID NO: 1203488 - RNA, 25 nt, Human
ccccauuccuucuucugcuccccaa

SEQ ID NO: 1203489 - RNA, 18 nt, Human
ccccccaggccagugccc

SEQ ID NO: 1203490 - RNA, 20 nt, Human
cccguguguucuggugggcc

SEQ ID NO: 1203491 - RNA, 19 nt, Human
ccugugcaguugcccccca

SEQ ID NO: 1203492 - RNA, 18 nt, Human
ccuucaguccucccgccu

SEQ ID NO: 1203493 - RNA, 25 nt, Human
cggcgggcaggugggcagacacuuc

SEQ ID NO: 1203494 - RNA, 24 nt, Human
cgggcaggugggcagacacuuccc

SEQ ID NO: 1203495 - RNA, 26 nt, Human
cgguucagggcgagcauguccacggg

SEQ ID NO: 1203496 - RNA, 22 nt, Human
cucccgccuugacugccagaga

SEQ ID NO: 1203497 - RNA, 23 nt, Human
gaugccuucccggcggaugaaca

SEQ ID NO: 1203498 - RNA, 20 nt, Human
gccccagaguuuucuaacac

SEQ ID NO: 1203499 - RNA, 22 nt, Human
gccccagggacccaguucacac

SEQ ID NO: 1203500 - RNA, 21 nt, Human
ggagaaaucaacccagaggga

SEQ ID NO: 1203501 - RNA, 19 nt, Human
ggcaccagcaaaggcagag

SEQ ID NO: 1203502 - RNA, 19 nt, Human
ggcagccacacuguggugu

SEQ ID NO: 1203503 - RNA, 21 nt, Human
ggccaaagugcccggcgggca

SEQ ID NO: 1203504 - RNA, 23 nt, Human
ggccagugcccacuacugacgcc

SEQ ID NO: 1203505 - RNA, 19 nt, Human
gugcugugcugaggccuuc

SEQ ID NO: 1203506 - RNA, 19 nt, Human
gugggcaccagcaaaggca

SEQ ID NO: 1203507 - RNA, 25 nt, Human
guuggaaccagauuguccuucaguc

SEQ ID NO: 1203508 - RNA, 23 nt, Human
uacagccugugcaguugcccccc

SEQ ID NO: 1203509 - RNA, 21 nt, Human
ucacugaggauguugucacug

SEQ ID NO: 1203510 - RNA, 19 nt, Human
ucagggcgagcauguccac

SEQ ID NO: 1203511 - RNA, 21 nt, Human
uccccauuccuucuucugcuc

SEQ ID NO: 1203512 - RNA, 18 nt, Human
ucccggcggaugaacagg

SEQ ID NO: 1203513 - RNA, 22 nt, Human
uccuggcugaagcagcucucac

SEQ ID NO: 1203514 - RNA, 22 nt, Human
ucuaacaccgggaauuguggag

SEQ ID NO: 1203515 - RNA, 20 nt, Human
ucuccucugagcagaugauu

SEQ ID NO: 1203516 - RNA, 27 nt, Human
ucuucgguguccgcuugaccucacuuu

SEQ ID NO: 1203517 - RNA, 28 nt, Human
ugacaagccuggcugcgaccuguuccug

SEQ ID NO: 1203518 - RNA, 24 nt, Human
ugacgccuugcuaaguucccagug

SEQ ID NO: 1203519 - RNA, 24 nt, Human
ugcaccuguugaccuccuggccgc

SEQ ID NO: 1203520 - RNA, 25 nt, Human
ugcuaggagagaaccgcaacacgac

SEQ ID NO: 1203521 - RNA, 21 nt, Human
ugcugaggccuucuucggugu

SEQ ID NO: 1203522 - RNA, 19 nt, Human
ugcuucuuccuucgguuca

SEQ ID NO: 1203523 - RNA, 20 nt, Human
uggcugaagcagcucucaca

SEQ ID NO: 1203524 - RNA, 21 nt, Human
ugggaggugaggaggccugaa

SEQ ID NO: 1203525 - RNA, 23 nt, Human
ugugugugcaggggcuccagccg

SEQ ID NO: 1203526 - RNA, 18 nt, Human
agaaggaagggagggcag

SEQ ID NO: 1203527 - RNA, 23 nt, Human
agcggauggggucguuuuugacc

SEQ ID NO: 1203528 - RNA, 26 nt, Human
agcugccucucucccacaacccccau

SEQ ID NO: 1203529 - RNA, 25 nt, Human
aggaagggagggcagcaguuccuug

SEQ ID NO: 1203530 - RNA, 23 nt, Human
auucuagggaccacugauuugga

SEQ ID NO: 1203531 - RNA, 22 nt, Human
cagcugccucucucccacaacc

SEQ ID NO: 1203532 - RNA, 22 nt, Human
ccaucagguuucugggaacaga

SEQ ID NO: 1203533 - RNA, 20 nt, Human
ccucucucccacaaccccca

SEQ ID NO: 1203534 - RNA, 19 nt, Human
ccucugaaguucucagcuu

SEQ ID NO: 1203535 - RNA, 19 nt, Human
cugccucucucccacaacc

SEQ ID NO: 1203536 - RNA, 22 nt, Human
gagagggacugagauacuccag

SEQ ID NO: 1203537 - RNA, 18 nt, Human
ggaagugguccuuuugga

SEQ ID NO: 1203538 - RNA, 19 nt, Human
ucccagcugccucucuccc

SEQ ID NO: 1203539 - RNA, 23 nt, Human
ucucccacaacccccauccacug

SEQ ID NO: 1203540 - RNA, 27 nt, Human
ucucccacaacccccauccacugagag

SEQ ID NO: 1203541 - RNA, 18 nt, Human
ucucccagcugccucucu

SEQ ID NO: 1203542 - RNA, 19 nt, Human
ucucccagcugccucucuc

SEQ ID NO: 1203543 - RNA, 23 nt, Human
ucucucccacaacccccauccac

SEQ ID NO: 1203544 - RNA, 24 nt, Human
ucucuggaugcaccucugaaguuc

SEQ ID NO: 1203545 - RNA, 21 nt, Human
ugauuuggacagcaacucagc

SEQ ID NO: 1203546 - RNA, 22 nt, Human
ugcucaaggcauucuggcuuca

SEQ ID NO: 1203547 - RNA, 24 nt, Human
uggcauugaccaucagguuucugg

SEQ ID NO: 1203548 - RNA, 24 nt, Human
ugucucccagcugccucucuccca

SEQ ID NO: 1203549 - RNA, 18 nt, Human
uuaaguagaaggaaggga

SEQ ID NO: 1203550 - RNA, 28 nt, Human
uucuagggaccacugauuuuccuggugg

SEQ ID NO: 1203551 - RNA, 20 nt, Human
uucucuggaugcaccucuga

SEQ ID NO: 1203552 - RNA, 21 nt, Human
uuugaccgucugugucuuccu

SEQ ID NO: 1203553 - RNA, 18 nt, Human
uuuggacagcaacucagc

SEQ ID NO: 1203554 - RNA, 19 nt, Human
uaguagguuucucacccug

SEQ ID NO: 1203555 - RNA, 22 nt, Human
uaguagguuucucacccugccu

SEQ ID NO: 1203556 - RNA, 29 nt, Human
uccaaguuauuccuccuuuuccaugagaa

SEQ ID NO: 1203557 - RNA, 24 nt, Human
uggccugugcuugcagcuuaguag

SEQ ID NO: 1203558 - RNA, 21 nt, Human
gaaaauacagcuucuguagca

SEQ ID NO: 1203559 - RNA, 20 nt, Human
ucuguagcaucguuagccuu

SEQ ID NO: 1203560 - RNA, 22 nt, Human
accgaggugggaaaacggggcg

SEQ ID NO: 1203561 - RNA, 18 nt, Human
agagucggcagcggggag

SEQ ID NO: 1203562 - RNA, 24 nt, Human
aggugggaaaacggggcggggccg

SEQ ID NO: 1203563 - RNA, 20 nt, Human
augcugggaaccuggggcag

SEQ ID NO: 1203564 - RNA, 19 nt, Human
gaaccuggggcagagucgg

SEQ ID NO: 1203565 - RNA, 19 nt, Human
ggagggggcgaccgaggug

SEQ ID NO: 1203566 - RNA, 20 nt, Human
ggccggagacgacuccaggg

SEQ ID NO: 1203567 - RNA, 19 nt, Human
gggcagagucggcagcggg

SEQ ID NO: 1203568 - RNA, 21 nt, Human
gugggaaaacggggcggggcc

SEQ ID NO: 1203569 - RNA, 25 nt, Human
uccagggcugggugaggcgcugacc

SEQ ID NO: 1203570 - RNA, 19 nt, Human
ugcugggaaccuggggcag

SEQ ID NO: 1203571 - RNA, 20 nt, Human
ugggaaaacggggcggggcc

SEQ ID NO: 1203572 - RNA, 19 nt, Human
uguggucagaaugcuggga

SEQ ID NO: 1203573 - RNA, 21 nt, Human
uuguggucagaaugcugggaa

SEQ ID NO: 1203574 - RNA, 23 nt, Human
aaaagacucaaacaucuucucug

SEQ ID NO: 1203575 - RNA, 27 nt, Human
aaacaucuucucugacguggguccccu

SEQ ID NO: 1203576 - RNA, 25 nt, Human
aagaaaaaaacauuguacuugggga

SEQ ID NO: 1203577 - RNA, 18 nt, Human
aaguucuccauguucuuc

SEQ ID NO: 1203578 - RNA, 20 nt, Human
acagaaagaggcucaacaaa

SEQ ID NO: 1203579 - RNA, 18 nt, Human
acccauuuaucuccuucu

SEQ ID NO: 1203580 - RNA, 20 nt, Human
agacacagaaagaggcucaa

SEQ ID NO: 1203581 - RNA, 19 nt, Human
agagacacagaaagaggcu

SEQ ID NO: 1203582 - RNA, 21 nt, Human
agccgcgaaaagacucaaaca

SEQ ID NO: 1203583 - RNA, 18 nt, Human
aggcaaacugaggccagc

SEQ ID NO: 1203584 - RNA, 19 nt, Human
aggcaagaaaaaaacauug

SEQ ID NO: 1203585 - RNA, 26 nt, Human
aggcaagaaaaaaacauuguacuugg

SEQ ID NO: 1203586 - RNA, 24 nt, Human
aggggugggguuccuaaagggugg

SEQ ID NO: 1203587 - RNA, 19 nt, Human
aguggacccauuuaucucc

SEQ ID NO: 1203588 - RNA, 24 nt, Human
aucuucucugacguggguccgcug

SEQ ID NO: 1203589 - RNA, 19 nt, Human
augcacauccucagauagc

SEQ ID NO: 1203590 - RNA, 24 nt, Human
augcagcucccaacagcuguaccc

SEQ ID NO: 1203591 - RNA, 25 nt, Human
caaacccaaaguggaaccgccguga

SEQ ID NO: 1203592 - RNA, 18 nt, Human
cacaaacccaaaguggaa

SEQ ID NO: 1203593 - RNA, 22 nt, Human
caccuccccuugccaaaaagcc

SEQ ID NO: 1203594 - RNA, 21 nt, Human
cagcaaccaccaacagcuguc

SEQ ID NO: 1203595 - RNA, 26 nt, Human
cagccccucuugaaggcaguccuuga

SEQ ID NO: 1203596 - RNA, 23 nt, Human
cagcucccaacagcuguaccccu

SEQ ID NO: 1203597 - RNA, 18 nt, Human
caggggacccaggcagag

SEQ ID NO: 1203598 - RNA, 21 nt, Human
caguggacccauuuaucuccu

SEQ ID NO: 1203599 - RNA, 21 nt, Human
cauuguacuuggggaguugcc

SEQ ID NO: 1203600 - RNA, 22 nt, Human
ccaaaaagccacauuucuugcc

SEQ ID NO: 1203601 - RNA, 23 nt, Human
ccaaaguggaaccgccgugaaaa

SEQ ID NO: 1203602 - RNA, 19 nt, Human
ccagguucaaaaucaccuc

SEQ ID NO: 1203603 - RNA, 22 nt, Human
ccaguggacccauuuaucuccu

SEQ ID NO: 1203604 - RNA, 23 nt, Human
cccacagucauuagggagcagcc

SEQ ID NO: 1203605 - RNA, 24 nt, Human
cccagcacugaaacaauucucuuc

SEQ ID NO: 1203606 - RNA, 27 nt, Human
ccccagcacugaaacaauucccccugg

SEQ ID NO: 1203607 - RNA, 18 nt, Human
cccucuucuucccucugg

SEQ ID NO: 1203608 - RNA, 20 nt, Human
ccgguggccugucucugugg

SEQ ID NO: 1203609 - RNA, 19 nt, Human
ccgugcagggguacaacca

SEQ ID NO: 1203610 - RNA, 20 nt, Human
ccucuggaaccacagacagg

SEQ ID NO: 1203611 - RNA, 18 nt, Human
cggccaggggacccaggc

SEQ ID NO: 1203612 - RNA, 20 nt, Human
cgugcagggguacaaccauc

SEQ ID NO: 1203613 - RNA, 20 nt, Human
cguggguccgcugaucuccc

SEQ ID NO: 1203614 - RNA, 20 nt, Human
cucacaggauggcaagcugu

SEQ ID NO: 1203615 - RNA, 24 nt, Human
cucaggcaagaaaaaaacauugua

SEQ ID NO: 1203616 - RNA, 21 nt, Human
cugacuguguuccucccuggg

SEQ ID NO: 1203617 - RNA, 23 nt, Human
cuguaccccuguugcacagucuu

SEQ ID NO: 1203618 - RNA, 21 nt, Human
cuguagguggaagugggggca

SEQ ID NO: 1203619 - RNA, 26 nt, Human
cuuccccaacacuguguccagcaccc

SEQ ID NO: 1203620 - RNA, 18 nt, Human
cuuggcuucuguaacagg

SEQ ID NO: 1203621 - RNA, 24 nt, Human
cuuucauuucuuuccaacaugaaa

SEQ ID NO: 1203622 - RNA, 23 nt, Human
gaagagccgcgaaaagacucaaa

SEQ ID NO: 1203623 - RNA, 18 nt, Human
gaaguucuccauguucuu

SEQ ID NO: 1203624 - RNA, 23 nt, Human
gacuguagugugcaagauugugu

SEQ ID NO: 1203625 - RNA, 18 nt, Human
gccagguucaaaaucacc

SEQ ID NO: 1203626 - RNA, 25 nt, Human
ggagaugcacauccucagauagccc

SEQ ID NO: 1203627 - RNA, 19 nt, Human
ggggaguugccuuugauca

SEQ ID NO: 1203628 - RNA, 18 nt, Human
gugaggcagaggggagcc

SEQ ID NO: 1203629 - RNA, 24 nt, Human
uaaggggugggguuccuaaagggu

SEQ ID NO: 1203630 - RNA, 23 nt, Human
uacuuggggaguugccuuugauc

SEQ ID NO: 1203631 - RNA, 18 nt, Human
uagguggaagugggggca

SEQ ID NO: 1203632 - RNA, 23 nt, Human
ucacaaacccaaaguggaaccgc

SEQ ID NO: 1203633 - RNA, 19 nt, Human
ucagauagcccacagucau

SEQ ID NO: 1203634 - RNA, 23 nt, Human
ucaggcaagaaaaaaacauugua

SEQ ID NO: 1203635 - RNA, 19 nt, Human
uccccugguacuccacacc

SEQ ID NO: 1203636 - RNA, 20 nt, Human
uccgguggccugucucugug

SEQ ID NO: 1203637 - RNA, 19 nt, Human
uccucccugggaaauaauu

SEQ ID NO: 1203638 - RNA, 24 nt, Human
uccucucaugaucgaggacuucac

SEQ ID NO: 1203639 - RNA, 21 nt, Human
uccuuggugacuguagugugc

SEQ ID NO: 1203640 - RNA, 18 nt, Human
ucugcccucccccagcac

SEQ ID NO: 1203641 - RNA, 18 nt, Human
ucugcccucccccagcac

SEQ ID NO: 1203642 - RNA, 22 nt, Human
ucuguaacaggcaaacugaggc

SEQ ID NO: 1203643 - RNA, 18 nt, Human
ugcccucccccagcacug

SEQ ID NO: 1203644 - RNA, 18 nt, Human
ugcuuaucugcaagucug

SEQ ID NO: 1203645 - RNA, 23 nt, Human
uggaaccacagacagggagacug

SEQ ID NO: 1203646 - RNA, 19 nt, Human
uggaaggaaaagcgcuugg

SEQ ID NO: 1203647 - RNA, 22 nt, Human
uggaagugggggcauugucaca

SEQ ID NO: 1203648 - RNA, 20 nt, Human
uggaggugggucugcuccuc

SEQ ID NO: 1203649 - RNA, 21 nt, Human
uggcugacaacugccagguuc

SEQ ID NO: 1203650 - RNA, 22 nt, Human
uguaacaggcaaacugaggcca

SEQ ID NO: 1203651 - RNA, 19 nt, Human
ugugaccguugcucuccag

SEQ ID NO: 1203652 - RNA, 26 nt, Human
ugugugcgguuugguuucuaaucuuu

SEQ ID NO: 1203653 - RNA, 23 nt, Human
uguuagcccuuggcuucuguaac

SEQ ID NO: 1203654 - RNA, 22 nt, Human
uguugcacagucuuccccaaca

SEQ ID NO: 1203655 - RNA, 27 nt, Human
uguuuugcuuucucaaauaauucccca

SEQ ID NO: 1203656 - RNA, 22 nt, Human
uguuuuguuuugcuuucucaaa

SEQ ID NO: 1203657 - RNA, 22 nt, Human
uuagcccuuggcuucuguaaca

SEQ ID NO: 1203658 - RNA, 22 nt, Human
uucacaaacccaaaguggaacc

SEQ ID NO: 1203659 - RNA, 21 nt, Human
uuccccaacacuguguccagc

SEQ ID NO: 1203660 - RNA, 21 nt, Human
uuccucccugggaaauaauuc

SEQ ID NO: 1203661 - RNA, 24 nt, Human
uuccuggcuuccucuugcugacug

SEQ ID NO: 1203662 - RNA, 27 nt, Human
uugccuuugaucaaagaaagggguaau

SEQ ID NO: 1203663 - RNA, 23 nt, Human
uuggaggugggucugcuccucuc

SEQ ID NO: 1203664 - RNA, 24 nt, Human
uuuuccccucuucuucccucugga

SEQ ID NO: 1203665 - RNA, 21 nt, Human
aacacagccaagucugaaucc

SEQ ID NO: 1203666 - RNA, 18 nt, Human
cacagccaagucugaauc

SEQ ID NO: 1203667 - RNA, 21 nt, Human
cagcucagucaacacagccaa

SEQ ID NO: 1203668 - RNA, 21 nt, Human
cagcuggucucucugcagccu

SEQ ID NO: 1203669 - RNA, 21 nt, Human
caguagaaaaauagaugaugc

SEQ ID NO: 1203670 - RNA, 22 nt, Human
ccagcucagucaacacagccaa

SEQ ID NO: 1203671 - RNA, 25 nt, Human
ccugcggagguagggacgccugggg

SEQ ID NO: 1203672 - RNA, 20 nt, Human
ccuggggagguggggguacc

SEQ ID NO: 1203673 - RNA, 20 nt, Human
gagguagggacgccugggga

SEQ ID NO: 1203674 - RNA, 24 nt, Human
gccugcggagguagggacgccugg

SEQ ID NO: 1203675 - RNA, 19 nt, Human
ggaggcggguauuccuggg

SEQ ID NO: 1203676 - RNA, 22 nt, Human
ggguauuccuggggaggagggg

SEQ ID NO: 1203677 - RNA, 22 nt, Human
uagaaaaauagaugaugcuuaa

SEQ ID NO: 1203678 - RNA, 18 nt, Human
uagcagauucuuccuacu

SEQ ID NO: 1203679 - RNA, 22 nt, Human
uggggaggcggggguaccuggg

SEQ ID NO: 1203680 - RNA, 22 nt, Human
uggggagguggggguacccggg

SEQ ID NO: 1203681 - RNA, 22 nt, Human
uggggagguggggguacccggg

SEQ ID NO: 1203682 - RNA, 23 nt, Human
uggggagguggggguacccgggg

SEQ ID NO: 1203683 - RNA, 25 nt, Human
uggggagguggggguacccggggag

SEQ ID NO: 1203684 - RNA, 19 nt, Human
aagcggccuguggacagga

SEQ ID NO: 1203685 - RNA, 19 nt, Human
agaguggugugcuccucuu

SEQ ID NO: 1203686 - RNA, 21 nt, Human
caaugagcaccugugaggccu

SEQ ID NO: 1203687 - RNA, 21 nt, Human
caaugagcuccuguggggcuu

SEQ ID NO: 1203688 - RNA, 19 nt, Human
ccgccuucuugaaggucug

SEQ ID NO: 1203689 - RNA, 21 nt, Human
cgggaaaagauacaaccucau

SEQ ID NO: 1203690 - RNA, 23 nt, Human
cuagagucacacccuggguugac

SEQ ID NO: 1203691 - RNA, 22 nt, Human
cugagaguggugugcuccucuu

SEQ ID NO: 1203692 - RNA, 19 nt, Human
cugugggcacccuccuggg

SEQ ID NO: 1203693 - RNA, 23 nt, Human
cuuccuggauuucugaaugaggg

SEQ ID NO: 1203694 - RNA, 19 nt, Human
gcccugacaggugucuucu

SEQ ID NO: 1203695 - RNA, 23 nt, Human
gcccugacaggugucuucuucug

SEQ ID NO: 1203696 - RNA, 19 nt, Human
gucacacccuggguugacc

SEQ ID NO: 1203697 - RNA, 22 nt, Human
ucagaagacccgggaaaagaua

SEQ ID NO: 1203698 - RNA, 24 nt, Human
uccuucuccgucgcugugucgaac

SEQ ID NO: 1203699 - RNA, 20 nt, Human
ucgcugugucgaacucuucc

SEQ ID NO: 1203700 - RNA, 22 nt, Human
ucgcugugucgaacucuuccug

SEQ ID NO: 1203701 - RNA, 21 nt, Human
ucuccugcaaaacaaugagcu

SEQ ID NO: 1203702 - RNA, 26 nt, Human
ucugugggcacccuccugggggugga

SEQ ID NO: 1203703 - RNA, 23 nt, Human
ucuuccuggauuucugaaugagg

SEQ ID NO: 1203704 - RNA, 18 nt, Human
ugacguggguccacuccu

SEQ ID NO: 1203705 - RNA, 19 nt, Human
uggcuggguuguggucauc

SEQ ID NO: 1203706 - RNA, 20 nt, Human
ugugggcacccuccuggggg

SEQ ID NO: 1203707 - RNA, 30 nt, Human
uucuccgucgcugugucgaacucuuccugg

SEQ ID NO: 1203708 - RNA, 23 nt, Human
uugaaggucugugggcacccucc

SEQ ID NO: 1203709 - RNA, 22 nt, Human
aaccaagaagggaguggaaugg

SEQ ID NO: 1203710 - RNA, 23 nt, Human
aaggaggagaauuuuucugaacc

SEQ ID NO: 1203711 - RNA, 19 nt, Human
agagcagggugaggggcag

SEQ ID NO: 1203712 - RNA, 19 nt, Human
aggcagagccggaaggggg

SEQ ID NO: 1203713 - RNA, 21 nt, Human
aggcagagccggaagggggac

SEQ ID NO: 1203714 - RNA, 25 nt, Human
aguugggugcuuucccccggggccc

SEQ ID NO: 1203715 - RNA, 19 nt, Human
aucccguuccaagcagacu

SEQ ID NO: 1203716 - RNA, 18 nt, Human
auggcaccaucccuccca

SEQ ID NO: 1203717 - RNA, 21 nt, Human
caaguaggugcuuuauaauau

SEQ ID NO: 1203718 - RNA, 24 nt, Human
cacagguguaagcuccaggagagc

SEQ ID NO: 1203719 - RNA, 22 nt, Human
cccacuuaucccguuccaagca

SEQ ID NO: 1203720 - RNA, 19 nt, Human
ccccauccgcccgcgccug

SEQ ID NO: 1203721 - RNA, 23 nt, Human
cccccggggcccgcagggacguc

SEQ ID NO: 1203722 - RNA, 20 nt, Human
ccggaucgaugcucucugcu

SEQ ID NO: 1203723 - RNA, 27 nt, Human
cucucugcucucgcucuuuucccuuug

SEQ ID NO: 1203724 - RNA, 19 nt, Human
gcccgcgccugccggugcc

SEQ ID NO: 1203725 - RNA, 18 nt, Human
ggaauggacaugccgggc

SEQ ID NO: 1203726 - RNA, 21 nt, Human
ggcagccaguauucagggcag

SEQ ID NO: 1203727 - RNA, 21 nt, Human
ggggacgggaguuugugggcc

SEQ ID NO: 1203728 - RNA, 18 nt, Human
ggggcccgcagggacguc

SEQ ID NO: 1203729 - RNA, 18 nt, Human
gugcuuucccccggggcc

SEQ ID NO: 1203730 - RNA, 22 nt, Human
guucugguaguuuguaaauccu

SEQ ID NO: 1203731 - RNA, 26 nt, Human
uccagccccgucacguuucugcuaga

SEQ ID NO: 1203732 - RNA, 19 nt, Human
ucccccggggcccgcaggg

SEQ ID NO: 1203733 - RNA, 19 nt, Human
ucccuggauggcaccaucc

SEQ ID NO: 1203734 - RNA, 20 nt, Human
ucccuggauggcaccauccc

SEQ ID NO: 1203735 - RNA, 23 nt, Human
ucccuggauggcaccaucccucc

SEQ ID NO: 1203736 - RNA, 22 nt, Human
uccuuugaguuuucucuggaua

SEQ ID NO: 1203737 - RNA, 23 nt, Human
ugccagggugggguaaggccccc

SEQ ID NO: 1203738 - RNA, 19 nt, Human
uggaauggacaugccgggc

SEQ ID NO: 1203739 - RNA, 20 nt, Human
uggauacaaugaugucaucu

SEQ ID NO: 1203740 - RNA, 20 nt, Human
uggcaguugugccugguccc

SEQ ID NO: 1203741 - RNA, 23 nt, Human
uguaagcuccaggagagcagggu

SEQ ID NO: 1203742 - RNA, 25 nt, Human
uuucugcuagaagccgaggcgggag

SEQ ID NO: 1203743 - RNA, 27 nt, Human
aaaaacaccaccuucaccaccucacag

SEQ ID NO: 1203744 - RNA, 23 nt, Human
aaagcuuuugccaagcuugcacu

SEQ ID NO: 1203745 - RNA, 20 nt, Human
aacagcaccaugggggugcc

SEQ ID NO: 1203746 - RNA, 23 nt, Human
aacagcaccaugggggugcccaa

SEQ ID NO: 1203747 - RNA, 20 nt, Human
aaccaacauauucuucugcc

SEQ ID NO: 1203748 - RNA, 21 nt, Human
aacugcaggaucccgucuuug

SEQ ID NO: 1203749 - RNA, 19 nt, Human
aagagcacuggcuuggucu

SEQ ID NO: 1203750 - RNA, 21 nt, Human
aaggaacugguuccgguacuu

SEQ ID NO: 1203751 - RNA, 18 nt, Human
aaguacccuuuuaggauc

SEQ ID NO: 1203752 - RNA, 19 nt, Human
aagucagcuuuagccccaa

SEQ ID NO: 1203753 - RNA, 21 nt, Human
aagugcaggcgguacuggcuc

SEQ ID NO: 1203754 - RNA, 21 nt, Human
aaucauagucaacuuaacucc

SEQ ID NO: 1203755 - RNA, 20 nt, Human
acaaagaacacagccaacag

SEQ ID NO: 1203756 - RNA, 23 nt, Human
acaaagccuucacaguccgaguc

SEQ ID NO: 1203757 - RNA, 22 nt, Human
acaaaggcuccuguccacccuc

SEQ ID NO: 1203758 - RNA, 20 nt, Human
acacagccaacaggaaggcc

SEQ ID NO: 1203759 - RNA, 18 nt, Human
acagccaacaggaaggcc

SEQ ID NO: 1203760 - RNA, 23 nt, Human
acaucuccaccauccacgggccc

SEQ ID NO: 1203761 - RNA, 21 nt, Human
accaacauauucuucugccau

SEQ ID NO: 1203762 - RNA, 18 nt, Human
accagagcacagcugucc

SEQ ID NO: 1203763 - RNA, 19 nt, Human
accuggguuucuuagaggc

SEQ ID NO: 1203764 - RNA, 18 nt, Human
acuggauuggaauggcug

SEQ ID NO: 1203765 - RNA, 21 nt, Human
acuggauuggaauggcuguuu

SEQ ID NO: 1203766 - RNA, 22 nt, Human
agaaagguggaaaagaagucaa

SEQ ID NO: 1203767 - RNA, 23 nt, Human
agaaagguggaaaagaagucaag

SEQ ID NO: 1203768 - RNA, 23 nt, Human
agaauccuguuaaaggacaaagg

SEQ ID NO: 1203769 - RNA, 18 nt, Human
agacucggggcugagacu

SEQ ID NO: 1203770 - RNA, 22 nt, Human
agagacaaccuuggccccacug

SEQ ID NO: 1203771 - RNA, 21 nt, Human
agagaggaguugucaaaucca

SEQ ID NO: 1203772 - RNA, 19 nt, Human
agaucaacaaaggugaagg

SEQ ID NO: 1203773 - RNA, 20 nt, Human
agcaaaaagcuuuugccaag

SEQ ID NO: 1203774 - RNA, 23 nt, Human
agcgagaaggacucagaccagaa

SEQ ID NO: 1203775 - RNA, 28 nt, Human
agcggcucccagaugcuuuuggagacca

SEQ ID NO: 1203776 - RNA, 21 nt, Human
agcugcugggucugguuaagc

SEQ ID NO: 1203777 - RNA, 22 nt, Human
aggcagcgaaccauugggucca

SEQ ID NO: 1203778 - RNA, 22 nt, Human
aggccacgauccauggccccag

SEQ ID NO: 1203779 - RNA, 22 nt, Human
aggcuggaggucaggcaccugg

SEQ ID NO: 1203780 - RNA, 20 nt, Human
agggaauguagugugggaag

SEQ ID NO: 1203781 - RNA, 26 nt, Human
auagaacacuuuguucauauggauaa

SEQ ID NO: 1203782 - RNA, 19 nt, Human
auccacgggcccuccucca

SEQ ID NO: 1203783 - RNA, 18 nt, Human
augguguuggggagcuag

SEQ ID NO: 1203784 - RNA, 25 nt, Human
caaagaacacagccaacaggaaggc

SEQ ID NO: 1203785 - RNA, 19 nt, Human
caaagccuccugcaccuuc

SEQ ID NO: 1203786 - RNA, 21 nt, Human
caacagcaccaugggggugcc

SEQ ID NO: 1203787 - RNA, 21 nt, Human
caacaggcauuugccaauguu

SEQ ID NO: 1203788 - RNA, 24 nt, Human
cacaagggugcacaucuccaccau

SEQ ID NO: 1203789 - RNA, 24 nt, Human
cacaucuccaccauccacgggccc

SEQ ID NO: 1203790 - RNA, 26 nt, Human
cacccacgacaacauccccauugucu

SEQ ID NO: 1203791 - RNA, 18 nt, Human
cacccugguggacaggaa

SEQ ID NO: 1203792 - RNA, 19 nt, Human
cacccugguggacaggaac

SEQ ID NO: 1203793 - RNA, 19 nt, Human
cagaaccuucuucauggcc

SEQ ID NO: 1203794 - RNA, 22 nt, Human
cagagacaaccuuggccccacu

SEQ ID NO: 1203795 - RNA, 20 nt, Human
cagagcaaaaaacuucccac

SEQ ID NO: 1203796 - RNA, 18 nt, Human
cagaggccacgauccaug

SEQ ID NO: 1203797 - RNA, 23 nt, Human
cagcagcagcuccacaagggugc

SEQ ID NO: 1203798 - RNA, 19 nt, Human
cagccgugugcggcaggcg

SEQ ID NO: 1203799 - RNA, 19 nt, Human
cagcgagaaggacucagac

SEQ ID NO: 1203800 - RNA, 20 nt, Human
caggaagauuaucuucucca

SEQ ID NO: 1203801 - RNA, 19 nt, Human
caggacaaagaacacagcc

SEQ ID NO: 1203802 - RNA, 21 nt, Human
caggacaaagaacacagccaa

SEQ ID NO: 1203803 - RNA, 22 nt, Human
caggacagcggcucccagaugc

SEQ ID NO: 1203804 - RNA, 21 nt, Human
caggaggcagcgaaccauugg

SEQ ID NO: 1203805 - RNA, 19 nt, Human
caggcaggacagcggcucc

SEQ ID NO: 1203806 - RNA, 21 nt, Human
caguggccauggcacccacga

SEQ ID NO: 1203807 - RNA, 19 nt, Human
caucagggccaucuucugc

SEQ ID NO: 1203808 - RNA, 20 nt, Human
caucguagccaccagucacc

SEQ ID NO: 1203809 - RNA, 18 nt, Human
caugaccagagcacagcu

SEQ ID NO: 1203810 - RNA, 20 nt, Human
ccacaaccucuuuauccucc

SEQ ID NO: 1203811 - RNA, 22 nt, Human
ccacaaccucuuuauccuccaa

SEQ ID NO: 1203812 - RNA, 23 nt, Human
ccacacagcagcagcuccacaag

SEQ ID NO: 1203813 - RNA, 21 nt, Human
ccacagggaacuuccccagca

SEQ ID NO: 1203814 - RNA, 21 nt, Human
ccacauagggucugcugggcc

SEQ ID NO: 1203815 - RNA, 19 nt, Human
ccacgauccauggccccag

SEQ ID NO: 1203816 - RNA, 18 nt, Human
ccacuaaucuccagcugu

SEQ ID NO: 1203817 - RNA, 23 nt, Human
ccacuaaucuccagcuguuccgg

SEQ ID NO: 1203818 - RNA, 19 nt, Human
ccagccgaagucuagaagc

SEQ ID NO: 1203819 - RNA, 22 nt, Human
ccagcuguccucaaugucuucc

SEQ ID NO: 1203820 - RNA, 20 nt, Human
cccacacacucacugugccg

SEQ ID NO: 1203821 - RNA, 22 nt, Human
cccacacacucacugugccgcg

SEQ ID NO: 1203822 - RNA, 19 nt, Human
ccccaaggucacugcuggc

SEQ ID NO: 1203823 - RNA, 21 nt, Human
ccccagccgaagucuagaagc

SEQ ID NO: 1203824 - RNA, 21 nt, Human
cccugggccucuaaguacccu

SEQ ID NO: 1203825 - RNA, 19 nt, Human
cccuggggaggauacgggg

SEQ ID NO: 1203826 - RNA, 20 nt, Human
cccuggggaggauacggggg

SEQ ID NO: 1203827 - RNA, 22 nt, Human
ccgcaaaccugugagcaggcac

SEQ ID NO: 1203828 - RNA, 20 nt, Human
ccuccaacagcaccaugggg

SEQ ID NO: 1203829 - RNA, 22 nt, Human
ccuccaacagcaccaugggggu

SEQ ID NO: 1203830 - RNA, 22 nt, Human
ccucggagccguggcugggcca

SEQ ID NO: 1203831 - RNA, 20 nt, Human
ccucuaaguacccuuuuagg

SEQ ID NO: 1203832 - RNA, 20 nt, Human
ccucuugggcugcaagggcu

SEQ ID NO: 1203833 - RNA, 20 nt, Human
ccugcaccuucuuccagcuu

SEQ ID NO: 1203834 - RNA, 18 nt, Human
ccuggggaggauacgggg

SEQ ID NO: 1203835 - RNA, 27 nt, Human
ccuggguuucuuagaggcuuuggcugg

SEQ ID NO: 1203836 - RNA, 18 nt, Human
ccuucaaaaacagcuccu

SEQ ID NO: 1203837 - RNA, 23 nt, Human
cgacaccaggcuccgccucaggu

SEQ ID NO: 1203838 - RNA, 18 nt, Human
cgagaaggacucagacca

SEQ ID NO: 1203839 - RNA, 18 nt, Human
cggggcugagacuggaga

SEQ ID NO: 1203840 - RNA, 22 nt, Human
cgugugguaggucugccagugg

SEQ ID NO: 1203841 - RNA, 20 nt, Human
cguuucauccucuuuguaaa

SEQ ID NO: 1203842 - RNA, 23 nt, Human
cucacugugccgcgcaggcagcc

SEQ ID NO: 1203843 - RNA, 19 nt, Human
cuccaucgucuuccugccc

SEQ ID NO: 1203844 - RNA, 18 nt, Human
cucccgcuccacauaggg

SEQ ID NO: 1203845 - RNA, 22 nt, Human
cuccugaugagugaggaguugg

SEQ ID NO: 1203846 - RNA, 19 nt, Human
cugaugcuucauccagcca

SEQ ID NO: 1203847 - RNA, 23 nt, Human
cugcaacgagguucauauugugc

SEQ ID NO: 1203848 - RNA, 22 nt, Human
cugcucagcagggcagccgugu

SEQ ID NO: 1203849 - RNA, 29 nt, Human
cuggaacucacgcaucauguaauccacau

SEQ ID NO: 1203850 - RNA, 21 nt, Human
cuguccucagcccugagcucu

SEQ ID NO: 1203851 - RNA, 20 nt, Human
cuuaucugccuucccaugca

SEQ ID NO: 1203852 - RNA, 22 nt, Human
cuucagagacaaccuuggcccc

SEQ ID NO: 1203853 - RNA, 23 nt, Human
cuuuguucauauggauaauccca

SEQ ID NO: 1203854 - RNA, 21 nt, Human
gaaccgguggauuaaaaacac

SEQ ID NO: 1203855 - RNA, 19 nt, Human
gacaccaggcuccgccuca

SEQ ID NO: 1203856 - RNA, 20 nt, Human
gacagcuuuuggaguugagg

SEQ ID NO: 1203857 - RNA, 19 nt, Human
gaccacguggaaggcugac

SEQ ID NO: 1203858 - RNA, 18 nt, Human
gacuguuugcuguggauc

SEQ ID NO: 1203859 - RNA, 23 nt, Human
gagacaaccuuggccccacugga

SEQ ID NO: 1203860 - RNA, 22 nt, Human
gagcagcaggaggcagcgaacc

SEQ ID NO: 1203861 - RNA, 19 nt, Human
gagcaggcaccgcucugac

SEQ ID NO: 1203862 - RNA, 18 nt, Human
gaggucccaaggaacugg

SEQ ID NO: 1203863 - RNA, 21 nt, Human
gauucucuuacuccauccugu

SEQ ID NO: 1203864 - RNA, 22 nt, Human
gcaaagaaucccuuuccuuaaa

SEQ ID NO: 1203865 - RNA, 24 nt, Human
gcacugugggguaccuguggcugu

SEQ ID NO: 1203866 - RNA, 18 nt, Human
gccaccaggcaggacagc

SEQ ID NO: 1203867 - RNA, 20 nt, Human
gccuguggcucucagccagg

SEQ ID NO: 1203868 - RNA, 18 nt, Human
gcgaggccuggucugcag

SEQ ID NO: 1203869 - RNA, 23 nt, Human
gcgcaguaauccuugauguccca

SEQ ID NO: 1203870 - RNA, 24 nt, Human
gcgcugauaaccagcuggaaguug

SEQ ID NO: 1203871 - RNA, 19 nt, Human
ggaacuuccccagcaggcc

SEQ ID NO: 1203872 - RNA, 22 nt, Human
ggacaucagggccaucuucugc

SEQ ID NO: 1203873 - RNA, 20 nt, Human
ggcagccgugugcggcaggc

SEQ ID NO: 1203874 - RNA, 21 nt, Human
ggcuccuagaggcauugaagu

SEQ ID NO: 1203875 - RNA, 24 nt, Human
gggaagguagaagugcaggcggua

SEQ ID NO: 1203876 - RNA, 22 nt, Human
ggguuccacaggcggaugaagg

SEQ ID NO: 1203877 - RNA, 19 nt, Human
gguauggccagccacaacc

SEQ ID NO: 1203878 - RNA, 22 nt, Human
ggucacagaaagguggaaaaga

SEQ ID NO: 1203879 - RNA, 22 nt, Human
ggugauggggcaguuucccaga

SEQ ID NO: 1203880 - RNA, 23 nt, Human
guccacacagcagcagcuccacc

SEQ ID NO: 1203881 - RNA, 21 nt, Human
guccacagggaacuuccccag

SEQ ID NO: 1203882 - RNA, 20 nt, Human
gugauucucuuacuccaucc

SEQ ID NO: 1203883 - RNA, 24 nt, Human
guggagcucagaggccacgaucca

SEQ ID NO: 1203884 - RNA, 21 nt, Human
guugaagaugggcuugagugu

SEQ ID NO: 1203885 - RNA, 22 nt, Human
guuggugguugggcugugauug

SEQ ID NO: 1203886 - RNA, 18 nt, Human
guuugcuguggaucuugc

SEQ ID NO: 1203887 - RNA, 23 nt, Human
uaaaaacaccaccuucaccaccu

SEQ ID NO: 1203888 - RNA, 23 nt, Human
uaaggaccacguggaaggcugac

SEQ ID NO: 1203889 - RNA, 21 nt, Human
uacccucaaagccuccugcac

SEQ ID NO: 1203890 - RNA, 20 nt, Human
uagaggcuuuggcuggcaau

SEQ ID NO: 1203891 - RNA, 18 nt, Human
uagauguagccguccaug

SEQ ID NO: 1203892 - RNA, 21 nt, Human
uagcaucucguccgacacacu

SEQ ID NO: 1203893 - RNA, 18 nt, Human
uagccaggucacagaaag

SEQ ID NO: 1203894 - RNA, 24 nt, Human
uagcuucuaugcaaagcagacuuc

SEQ ID NO: 1203895 - RNA, 21 nt, Human
uaucuucuccaccgaggcacu

SEQ ID NO: 1203896 - RNA, 18 nt, Human
uauugucagcaccagaga

SEQ ID NO: 1203897 - RNA, 21 nt, Human
ucaaaaacagcuccuuuagca

SEQ ID NO: 1203898 - RNA, 24 nt, Human
ucaaugucuuccagggggcgcucu

SEQ ID NO: 1203899 - RNA, 26 nt, Human
ucaaugucuuccagggggcgcucucc

SEQ ID NO: 1203900 - RNA, 23 nt, Human
ucaggcaccuggcuaagggugau

SEQ ID NO: 1203901 - RNA, 18 nt, Human
uccacaaggaugugcguc

SEQ ID NO: 1203902 - RNA, 24 nt, Human
uccacauacaggaugucugccaca

SEQ ID NO: 1203903 - RNA, 21 nt, Human
uccacauagggucugcugggc

SEQ ID NO: 1203904 - RNA, 27 nt, Human
uccaugaccagagcacagccggggucc

SEQ ID NO: 1203905 - RNA, 18 nt, Human
uccaugcagcugcucagc

SEQ ID NO: 1203906 - RNA, 19 nt, Human
uccaugcagcugcucagca

SEQ ID NO: 1203907 - RNA, 20 nt, Human
ucccacuuggaggcccuggg

SEQ ID NO: 1203908 - RNA, 24 nt, Human
ucccacuuggaggcccuggggagg

SEQ ID NO: 1203909 - RNA, 19 nt, Human
ucccagagcaaaaaacuuc

SEQ ID NO: 1203910 - RNA, 18 nt, Human
uccccauugucuaggucc

SEQ ID NO: 1203911 - RNA, 19 nt, Human
uccccauugucuaggucca

SEQ ID NO: 1203912 - RNA, 18 nt, Human
ucccuggacucccacuug

SEQ ID NO: 1203913 - RNA, 24 nt, Human
ucggagccguggcugggccacugu

SEQ ID NO: 1203914 - RNA, 23 nt, Human
ucguagccaccagucaccaggaa

SEQ ID NO: 1203915 - RNA, 21 nt, Human
ucuccauagcagaacacaccu

SEQ ID NO: 1203916 - RNA, 22 nt, Human
ucugccuccuuaucugccuucc

SEQ ID NO: 1203917 - RNA, 22 nt, Human
ucuucauggccuugaugaaggc

SEQ ID NO: 1203918 - RNA, 27 nt, Human
ucuuuguaaauggacuguuugcugugg

SEQ ID NO: 1203919 - RNA, 23 nt, Human
ugaacaggagacuaccacauuca

SEQ ID NO: 1203920 - RNA, 21 nt, Human
ugaaccgguggauuaaaaaca

SEQ ID NO: 1203921 - RNA, 20 nt, Human
ugaaggcguccaugcccagg

SEQ ID NO: 1203922 - RNA, 25 nt, Human
ugagacuggagagcuuccuggaggu

SEQ ID NO: 1203923 - RNA, 25 nt, Human
ugaggaauuaacaaccggaacuugu

SEQ ID NO: 1203924 - RNA, 24 nt, Human
ugaggaugcuguuguuccugcuau

SEQ ID NO: 1203925 - RNA, 19 nt, Human
ugagggaucucugcuaagu

SEQ ID NO: 1203926 - RNA, 20 nt, Human
ugagugauucucuuacucca

SEQ ID NO: 1203927 - RNA, 20 nt, Human
ugauaagccccugggccucu

SEQ ID NO: 1203928 - RNA, 20 nt, Human
ugaucaggacaaagaacaca

SEQ ID NO: 1203929 - RNA, 22 nt, Human
ugcaggaagauuaucuucucca

SEQ ID NO: 1203930 - RNA, 18 nt, Human
ugcccauggacacuccca

SEQ ID NO: 1203931 - RNA, 19 nt, Human
ugccuggaugugccagaag

SEQ ID NO: 1203932 - RNA, 24 nt, Human
ugcucagaaccuucuucauggccu

SEQ ID NO: 1203933 - RNA, 19 nt, Human
uggaagccaugugggaugg

SEQ ID NO: 1203934 - RNA, 21 nt, Human
uggacagcuuuuggaguugag

SEQ ID NO: 1203935 - RNA, 19 nt, Human
uggauuggaauggcuguuu

SEQ ID NO: 1203936 - RNA, 22 nt, Human
uggccauggcacccacgacaac

SEQ ID NO: 1203937 - RNA, 26 nt, Human
uggcccccagacacagcaaacuccuu

SEQ ID NO: 1203938 - RNA, 19 nt, Human
ugggaaaggucaacaggca

SEQ ID NO: 1203939 - RNA, 23 nt, Human
ugggaaaggucaacaggcauuug

SEQ ID NO: 1203940 - RNA, 23 nt, Human
ugggauggagagccuucagccgg

SEQ ID NO: 1203941 - RNA, 20 nt, Human
ugggguaccuguggcugucc

SEQ ID NO: 1203942 - RNA, 22 nt, Human
uggguccacacagcagcagcuc

SEQ ID NO: 1203943 - RNA, 24 nt, Human
uguccacuucucccgcuccacaua

SEQ ID NO: 1203944 - RNA, 25 nt, Human
uguccagaucaacaaaggugaaggc

SEQ ID NO: 1203945 - RNA, 21 nt, Human
ugucccuggacucccacuugu

SEQ ID NO: 1203946 - RNA, 18 nt, Human
uguggagcucagaggcca

SEQ ID NO: 1203947 - RNA, 22 nt, Human
uguuggggagcuagcagccucc

SEQ ID NO: 1203948 - RNA, 23 nt, Human
uuaacaaccggaacuuguugugu

SEQ ID NO: 1203949 - RNA, 18 nt, Human
uuaagaguuucugcaagg

SEQ ID NO: 1203950 - RNA, 21 nt, Human
uucaaauggccuuuccagguc

SEQ ID NO: 1203951 - RNA, 19 nt, Human
uucacaagaugucccccca

SEQ ID NO: 1203952 - RNA, 21 nt, Human
uuccccagcaggccuccauuc

SEQ ID NO: 1203953 - RNA, 22 nt, Human
uuccuugggcuuauacgccgcu

SEQ ID NO: 1203954 - RNA, 21 nt, Human
uugagacaaagggguuccaca

SEQ ID NO: 1203955 - RNA, 22 nt, Human
uuguauguccacuucucccgcu

SEQ ID NO: 1203956 - RNA, 23 nt, Human
uuuaagaguuucugcaaggaaac

SEQ ID NO: 1203957 - RNA, 26 nt, Human
uuuacaaucccccgugaugaggaucc

SEQ ID NO: 1203958 - RNA, 23 nt, Human
ucugcaguggccucgcuccuuuu

SEQ ID NO: 1203959 - RNA, 21 nt, Human
ccacggcaucgugauaccaaa

SEQ ID NO: 1203960 - RNA, 22 nt, Human
acagauccccccacccaaccac

SEQ ID NO: 1203961 - RNA, 24 nt, Human
cacccaaccacugccaaccugcac

SEQ ID NO: 1203962 - RNA, 22 nt, Human
ccaaccacugccaaccugcacc

SEQ ID NO: 1203963 - RNA, 23 nt, Human
cgucuugcaaacagaucccccca

SEQ ID NO: 1203964 - RNA, 21 nt, Human
cugcacccucuuggcuccaug

SEQ ID NO: 1203965 - RNA, 20 nt, Human
cuugcaaacagaucccccca

SEQ ID NO: 1203966 - RNA, 18 nt, Human
cuuuguuccuucaaugcc

SEQ ID NO: 1203967 - RNA, 18 nt, Human
ugacaccgucuugcaaac

SEQ ID NO: 1203968 - RNA, 22 nt, Human
ugccaaccugcacccucuuggc

SEQ ID NO: 1203969 - RNA, 22 nt, Human
ugccacagaaaggcuccaugac

SEQ ID NO: 1203970 - RNA, 23 nt, Human
uugacacugagauaccguguagc

SEQ ID NO: 1203971 - RNA, 22 nt, Human
acauuccugaaugagccggaag

SEQ ID NO: 1203972 - RNA, 22 nt, Human
ggagcacgucuccccguuccag

SEQ ID NO: 1203973 - RNA, 21 nt, Human
ucugcaguugccacacauucc

SEQ ID NO: 1203974 - RNA, 22 nt, Human
ugagccggaagcgggucgagca

SEQ ID NO: 1203975 - RNA, 22 nt, Human
ugcaagucugcaguugccacac

SEQ ID NO: 1203976 - RNA, 19 nt, Human
uuuccgccgcagacgggcu

SEQ ID NO: 1203977 - RNA, 18 nt, Human
acgcuucuuccucugggc

SEQ ID NO: 1203978 - RNA, 21 nt, Human
aggggcggucggggucagggg

SEQ ID NO: 1203979 - RNA, 24 nt, Human
aggugcugaggacgguggcccggc

SEQ ID NO: 1203980 - RNA, 19 nt, Human
cacagggcuucuggcuucu

SEQ ID NO: 1203981 - RNA, 24 nt, Human
cagcacgaggggccgcgugacccc

SEQ ID NO: 1203982 - RNA, 21 nt, Human
cagcacgaggggccgcguggu

SEQ ID NO: 1203983 - RNA, 20 nt, Human
ccccacuccgaagcagcucc

SEQ ID NO: 1203984 - RNA, 20 nt, Human
cccggcucagccucucccca

SEQ ID NO: 1203985 - RNA, 20 nt, Human
ccgcagccccacgccuuccu

SEQ ID NO: 1203986 - RNA, 24 nt, Human
ccgcucagcugccacagggcuucu

SEQ ID NO: 1203987 - RNA, 28 nt, Human
ccugggagaguggcccaggccccccuuc

SEQ ID NO: 1203988 - RNA, 19 nt, Human
cugggagaguggcccaggc

SEQ ID NO: 1203989 - RNA, 19 nt, Human
gcagcuccugcaggaaacc

SEQ ID NO: 1203990 - RNA, 21 nt, Human
gccgcagccccacgccuuccu

SEQ ID NO: 1203991 - RNA, 23 nt, Human
gcgggggugggggcccgaggggc

SEQ ID NO: 1203992 - RNA, 18 nt, Human
gcgggucucccccgggcu

SEQ ID NO: 1203993 - RNA, 24 nt, Human
ggagaguggcccaggccccccuuc

SEQ ID NO: 1203994 - RNA, 22 nt, Human
ggcccgaggggcggucgggguc

SEQ ID NO: 1203995 - RNA, 19 nt, Human
ggcggugaccgggugggga

SEQ ID NO: 1203996 - RNA, 22 nt, Human
gggaugcggaagccaggagcuc

SEQ ID NO: 1203997 - RNA, 20 nt, Human
gggcuucuggcuucuggcuu

SEQ ID NO: 1203998 - RNA, 21 nt, Human
gggggugggggcccgaggggc

SEQ ID NO: 1203999 - RNA, 21 nt, Human
gguggccccgggccacguccu

SEQ ID NO: 1204000 - RNA, 21 nt, Human
ucacagacaaggugcugagga

SEQ ID NO: 1204001 - RNA, 18 nt, Human
uccugcaggaaaccuggg

SEQ ID NO: 1204002 - RNA, 19 nt, Human
uccuggauccggcuugcuc

SEQ ID NO: 1204003 - RNA, 19 nt, Human
ucuccgcucagcugccaca

SEQ ID NO: 1204004 - RNA, 22 nt, Human
ugaccggguggggagaggccgg

SEQ ID NO: 1204005 - RNA, 19 nt, Human
ugccacagggcuucuggcu

SEQ ID NO: 1204006 - RNA, 19 nt, Human
ugccuugggggaugcggaa

SEQ ID NO: 1204007 - RNA, 19 nt, Human
ugcggaagccaggagcucc

SEQ ID NO: 1204008 - RNA, 24 nt, Human
uggcaccccaggaugcugacgccg

SEQ ID NO: 1204009 - RNA, 19 nt, Human
uggcccaggccccccuucc

SEQ ID NO: 1204010 - RNA, 18 nt, Human
uggccccgggccacgucc

SEQ ID NO: 1204011 - RNA, 19 nt, Human
uggccccgggccacguccu

SEQ ID NO: 1204012 - RNA, 20 nt, Human
ugggauggggacugguggcc

SEQ ID NO: 1204013 - RNA, 23 nt, Human
uguggcuggggaacucccaggac

SEQ ID NO: 1204014 - RNA, 21 nt, Human
uuccugagugugacugcgcug

SEQ ID NO: 1204015 - RNA, 22 nt, Human
ccacugacacgggugcugagga

SEQ ID NO: 1204016 - RNA, 19 nt, Human
cguggugucucauuuccac

SEQ ID NO: 1204017 - RNA, 21 nt, Human
uccacugacacgggugcugag

SEQ ID NO: 1204018 - RNA, 19 nt, Human
uccuggugucugggcccca

SEQ ID NO: 1204019 - RNA, 19 nt, Human
ugaggaaggccugugucuu

SEQ ID NO: 1204020 - RNA, 19 nt, Human
gagcucugcgacgccuuuc

SEQ ID NO: 1204021 - RNA, 24 nt, Human
uccgcuuggucacucugagcucug

SEQ ID NO: 1204022 - RNA, 19 nt, Human
ucuuuguccuucuuuuucu

SEQ ID NO: 1204023 - RNA, 23 nt, Human
aggcgggaccgaggacccggaga

SEQ ID NO: 1204024 - RNA, 18 nt, Human
cagcuggggucacgaagg

SEQ ID NO: 1204025 - RNA, 22 nt, Human
cccccgcgggcgcaguccccgc

SEQ ID NO: 1204026 - RNA, 20 nt, Human
ccccgcgggcgcaguccccg

SEQ ID NO: 1204027 - RNA, 23 nt, Human
ccuuugugaccugcccgccccuc

SEQ ID NO: 1204028 - RNA, 24 nt, Human
cggcagcuggggucacgaaggcug

SEQ ID NO: 1204029 - RNA, 25 nt, Human
cggggaggggccuuugugaccugcc

SEQ ID NO: 1204030 - RNA, 22 nt, Human
cuccccggcacugugaugccgg

SEQ ID NO: 1204031 - RNA, 18 nt, Human
gagcgcccccggcugcug

SEQ ID NO: 1204032 - RNA, 22 nt, Human
gagcgcccccggcugcugaggc

SEQ ID NO: 1204033 - RNA, 21 nt, Human
ggcgguguuggaacguggaca

SEQ ID NO: 1204034 - RNA, 20 nt, Human
ugaccugcccgccccucccc

SEQ ID NO: 1204035 - RNA, 23 nt, Human
ugagccgcgggugggcggggagg

SEQ ID NO: 1204036 - RNA, 24 nt, Human
uuugguaauagggcagccuccccc

SEQ ID NO: 1204037 - RNA, 24 nt, Human
ugagcuccaagcucaaaaggcaau

SEQ ID NO: 1204038 - RNA, 21 nt, Human
agccuaguggccacuguaacc

SEQ ID NO: 1204039 - RNA, 21 nt, Human
agccugucugccuccagccuc

SEQ ID NO: 1204040 - RNA, 22 nt, Human
aggccccaggcacagggagccu

SEQ ID NO: 1204041 - RNA, 18 nt, Human
aggcuuugaggagggggc

SEQ ID NO: 1204042 - RNA, 21 nt, Human
aggugguggccagcacucagg

SEQ ID NO: 1204043 - RNA, 24 nt, Human
augcuggccaccuccaggugaggc

SEQ ID NO: 1204044 - RNA, 22 nt, Human
caggccccaggcacagggagcc

SEQ ID NO: 1204045 - RNA, 23 nt, Human
caggugguggccagcacucaggc

SEQ ID NO: 1204046 - RNA, 18 nt, Human
ccagaccaggcugauuca

SEQ ID NO: 1204047 - RNA, 26 nt, Human
ccagagccugggacagggguugaggg

SEQ ID NO: 1204048 - RNA, 21 nt, Human
ccagccucuggccgggucaca

SEQ ID NO: 1204049 - RNA, 26 nt, Human
ccccacagcugcccauaccuccagac

SEQ ID NO: 1204050 - RNA, 18 nt, Human
ccccaggcacagggagcc

SEQ ID NO: 1204051 - RNA, 20 nt, Human
cccccacagcugcccauacc

SEQ ID NO: 1204052 - RNA, 21 nt, Human
cccccacagcugcccauaccu

SEQ ID NO: 1204053 - RNA, 19 nt, Human
ccuccagaccaggcugauu

SEQ ID NO: 1204054 - RNA, 18 nt, Human
ccuccagccucuggccgg

SEQ ID NO: 1204055 - RNA, 22 nt, Human
cgccagacagcaggugguggcc

SEQ ID NO: 1204056 - RNA, 24 nt, Human
cgccagacagcaggugguggccag

SEQ ID NO: 1204057 - RNA, 19 nt, Human
cuccagccucuggccgggu

SEQ ID NO: 1204058 - RNA, 20 nt, Human
cugggcuucuucuguggaga

SEQ ID NO: 1204059 - RNA, 21 nt, Human
cugggggacaucucaugggcu

SEQ ID NO: 1204060 - RNA, 18 nt, Human
gagugcugucucccucug

SEQ ID NO: 1204061 - RNA, 22 nt, Human
gcacagggagccuccacccaca

SEQ ID NO: 1204062 - RNA, 20 nt, Human
gcaccagaucugggggccug

SEQ ID NO: 1204063 - RNA, 22 nt, Human
gcaccagaucugggggccuggu

SEQ ID NO: 1204064 - RNA, 20 nt, Human
gccccaggcacagggagccu

SEQ ID NO: 1204065 - RNA, 23 nt, Human
gccccaggcacagggagccucca

SEQ ID NO: 1204066 - RNA, 20 nt, Human
gccuggggugcugggggaca

SEQ ID NO: 1204067 - RNA, 22 nt, Human
gcugcugagcccugcacccugc

SEQ ID NO: 1204068 - RNA, 22 nt, Human
ggcaccagaucugggggccugg

SEQ ID NO: 1204069 - RNA, 23 nt, Human
ggcaccagaucugggggccuggu

SEQ ID NO: 1204070 - RNA, 21 nt, Human
ggccaguguggauuggagagg

SEQ ID NO: 1204071 - RNA, 19 nt, Human
ggcccagggccuggggugc

SEQ ID NO: 1204072 - RNA, 19 nt, Human
ggccuggggugcuggggga

SEQ ID NO: 1204073 - RNA, 21 nt, Human
ggcuucuucuguggagaggug

SEQ ID NO: 1204074 - RNA, 21 nt, Human
ggcuuugaggagggggccugg

SEQ ID NO: 1204075 - RNA, 24 nt, Human
gggcaccagaucugggggccuggu

SEQ ID NO: 1204076 - RNA, 18 nt, Human
gggccugguccuggcugu

SEQ ID NO: 1204077 - RNA, 26 nt, Human
ggucugggcuucuucuguggagaggg

SEQ ID NO: 1204078 - RNA, 19 nt, Human
ucaugggcuuccacaggcu

SEQ ID NO: 1204079 - RNA, 22 nt, Human
uccacaggcuuugaggaggggg

SEQ ID NO: 1204080 - RNA, 22 nt, Human
uccaccggcccccacagcugcc

SEQ ID NO: 1204081 - RNA, 22 nt, Human
uccgguccugaugcuggccacc

SEQ ID NO: 1204082 - RNA, 18 nt, Human
uccuuggggcugucaggg

SEQ ID NO: 1204083 - RNA, 19 nt, Human
uccuuggggcugucagggu

SEQ ID NO: 1204084 - RNA, 21 nt, Human
uccuuggggcugucagggugg

SEQ ID NO: 1204085 - RNA, 24 nt, Human
ucuggccgggucacaggccugaca

SEQ ID NO: 1204086 - RNA, 20 nt, Human
ugaugcuggccaccuccagg

SEQ ID NO: 1204087 - RNA, 20 nt, Human
ugccguggcuggugacgaug

SEQ ID NO: 1204088 - RNA, 20 nt, Human
uggcacucgccccagggcau

SEQ ID NO: 1204089 - RNA, 22 nt, Human
uggccagcacucaggccccagg

SEQ ID NO: 1204090 - RNA, 21 nt, Human
ugggggccugguccuggcugu

SEQ ID NO: 1204091 - RNA, 23 nt, Human
uguccaccggcccccacagcugc

SEQ ID NO: 1204092 - RNA, 25 nt, Human
uguucccccugggucaggcucaggg

SEQ ID NO: 1204093 - RNA, 24 nt, Human
uuccacaggcuuugaggagggggc

SEQ ID NO: 1204094 - RNA, 23 nt, Human
uugacgggagugcugucucccuc

SEQ ID NO: 1204095 - RNA, 21 nt, Human
acgacacccuggacggcgucc

SEQ ID NO: 1204096 - RNA, 20 nt, Human
agcgaccucguucgcgaugc

SEQ ID NO: 1204097 - RNA, 18 nt, Human
agcgaugccaugggcggc

SEQ ID NO: 1204098 - RNA, 18 nt, Human
agcgaugccgugggcggc

SEQ ID NO: 1204099 - RNA, 22 nt, Human
augcccugggcagcgaccucgu

SEQ ID NO: 1204100 - RNA, 22 nt, Human
augcccugggcagcgaccucgu

SEQ ID NO: 1204101 - RNA, 18 nt, Human
auuccagaauacuuacua

SEQ ID NO: 1204102 - RNA, 19 nt, Human
cccuggacggcguccuccu

SEQ ID NO: 1204103 - RNA, 19 nt, Human
cccuggacggcguccuccu

SEQ ID NO: 1204104 - RNA, 20 nt, Human
ccucgguagcgaugcccugg

SEQ ID NO: 1204105 - RNA, 20 nt, Human
ccucgguagcgaugcccugg

SEQ ID NO: 1204106 - RNA, 20 nt, Human
ccucguuugcgauguccugg

SEQ ID NO: 1204107 - RNA, 20 nt, Human
ccucguuugcgauguccugg

SEQ ID NO: 1204108 - RNA, 20 nt, Human
ccucguuugcgauguccugg

SEQ ID NO: 1204109 - RNA, 20 nt, Human
ccucguuugcgauguccugg

SEQ ID NO: 1204110 - RNA, 18 nt, Human
ccucucuccaucuccucu

SEQ ID NO: 1204111 - RNA, 23 nt, Human
ccuuagagaugccgugggcggcg

SEQ ID NO: 1204112 - RNA, 24 nt, Human
ccuugugaacuagagacuccucag

SEQ ID NO: 1204113 - RNA, 21 nt, Human
cgacgcccugggcggcguccu

SEQ ID NO: 1204114 - RNA, 21 nt, Human
cggcgaccucguuagcgacgc

SEQ ID NO: 1204115 - RNA, 21 nt, Human
cggcgaccucguuagcgacgc

SEQ ID NO: 1204116 - RNA, 21 nt, Human
cggcgaccucguuagcgaugc

SEQ ID NO: 1204117 - RNA, 21 nt, Human
cggcgaccucguuagugaugc

SEQ ID NO: 1204118 - RNA, 21 nt, Human
cggcgaccucuuuagcgacgc

SEQ ID NO: 1204119 - RNA, 21 nt, Human
cggugaccucguuagcgaugc

SEQ ID NO: 1204120 - RNA, 24 nt, Human
cggugaccucuuuagcgacgcccu

SEQ ID NO: 1204121 - RNA, 24 nt, Human
cucacguugacuggccucucucca

SEQ ID NO: 1204122 - RNA, 19 nt, Human
cuccuuagcgaugcccugg

SEQ ID NO: 1204123 - RNA, 19 nt, Human
cuccuuagcgaugcccugg

SEQ ID NO: 1204124 - RNA, 19 nt, Human
cuccuuagcgaugcccugg

SEQ ID NO: 1204125 - RNA, 19 nt, Human
cucuccaucuccucugucc

SEQ ID NO: 1204126 - RNA, 19 nt, Human
cucuuuagcgacgcccugg

SEQ ID NO: 1204127 - RNA, 19 nt, Human
cucuuuagcgaugcccugg

SEQ ID NO: 1204128 - RNA, 24 nt, Human
gacgguguccuccuuagagaugcc

SEQ ID NO: 1204129 - RNA, 19 nt, Human
gcccugcgcggugaccucg

SEQ ID NO: 1204130 - RNA, 18 nt, Human
gcccugggcagcguccuc

SEQ ID NO: 1204131 - RNA, 20 nt, Human
ggcaaccucguuagcgaugc

SEQ ID NO: 1204132 - RNA, 21 nt, Human
ggccuccuuguuagugaugcc

SEQ ID NO: 1204133 - RNA, 20 nt, Human
ggcgaccucguuagcgacgc

SEQ ID NO: 1204134 - RNA, 20 nt, Human
ggcgaccucguuagcgacgc

SEQ ID NO: 1204135 - RNA, 20 nt, Human
ggcgaccucguuagcgacgc

SEQ ID NO: 1204136 - RNA, 20 nt, Human
ggcgaccucguuagcgaugc

SEQ ID NO: 1204137 - RNA, 20 nt, Human
ggcgaccucguuagcgaugc

SEQ ID NO: 1204138 - RNA, 20 nt, Human
ggugaccucuuuagcgacgc

SEQ ID NO: 1204139 - RNA, 24 nt, Human
guccucauagggagcuuucuuggc

SEQ ID NO: 1204140 - RNA, 21 nt, Human
gugggcggcgaccucguuagc

SEQ ID NO: 1204141 - RNA, 21 nt, Human
gugggcggcguccucauuagc

SEQ ID NO: 1204142 - RNA, 21 nt, Human
gugggcggcguccucguuagc

SEQ ID NO: 1204143 - RNA, 21 nt, Human
gugggcggcguccucguuagc

SEQ ID NO: 1204144 - RNA, 24 nt, Human
uaccgaugccuuguaugguguccu

SEQ ID NO: 1204145 - RNA, 22 nt, Human
uaccucuucuucuuuacccggg

SEQ ID NO: 1204146 - RNA, 21 nt, Human
uagcgauauugugggcggcgu

SEQ ID NO: 1204147 - RNA, 23 nt, Human
uccagaauacuuacuagauucau

SEQ ID NO: 1204148 - RNA, 23 nt, Human
ucguuagcgacgacgccguggag

SEQ ID NO: 1204149 - RNA, 18 nt, Human
ucuccaucuccucugucc

SEQ ID NO: 1204150 - RNA, 23 nt, Human
ucucuccaucuccucuguccuug

SEQ ID NO: 1204151 - RNA, 26 nt, Human
ugcguccucguuugcgaugccguggg

SEQ ID NO: 1204152 - RNA, 19 nt, Human
uggccugggcggccuccuu

SEQ ID NO: 1204153 - RNA, 21 nt, Human
ugggcggcguccucuuuaagg

SEQ ID NO: 1204154 - RNA, 27 nt, Human
uuagcgaugcccugggcggcguccucc

SEQ ID NO: 1204155 - RNA, 24 nt, Human
uugugggcggcguccucauuaacg

SEQ ID NO: 1204156 - RNA, 21 nt, Human
uuucuuggcaagugauuccag

SEQ ID NO: 1204157 - RNA, 24 nt, Human
acaggccaggguggggacagggug

SEQ ID NO: 1204158 - RNA, 21 nt, Human
accauccucagagccaccagu

SEQ ID NO: 1204159 - RNA, 19 nt, Human
agagccaccacccggcccu

SEQ ID NO: 1204160 - RNA, 22 nt, Human
aggcggcggugguguggggcgg

SEQ ID NO: 1204161 - RNA, 21 nt, Human
agggagaggucugcaggcggc

SEQ ID NO: 1204162 - RNA, 20 nt, Human
agggagccggccaagggaga

SEQ ID NO: 1204163 - RNA, 21 nt, Human
aggguggggacaggguggggc

SEQ ID NO: 1204164 - RNA, 24 nt, Human
aggguggggacaggguggggcugg

SEQ ID NO: 1204165 - RNA, 22 nt, Human
aggugaggaccgugggugggug

SEQ ID NO: 1204166 - RNA, 22 nt, Human
caccacccggcccuccacagcc

SEQ ID NO: 1204167 - RNA, 20 nt, Human
cagcagcgacuggguccugg

SEQ ID NO: 1204168 - RNA, 22 nt, Human
caggcccugaaguacacgcaga

SEQ ID NO: 1204169 - RNA, 22 nt, Human
caggugaggaccgugggugggu

SEQ ID NO: 1204170 - RNA, 26 nt, Human
ccacagccaggccacagcuccaggug

SEQ ID NO: 1204171 - RNA, 23 nt, Human
ccaggugaggaccgugggugggu

SEQ ID NO: 1204172 - RNA, 22 nt, Human
ccucagagccaccacccggccc

SEQ ID NO: 1204173 - RNA, 25 nt, Human
ccucagagccaccacccggcccucc

SEQ ID NO: 1204174 - RNA, 20 nt, Human
ccuccacagccaggccacag

SEQ ID NO: 1204175 - RNA, 26 nt, Human
ccuccacagccaggccacagcuccag

SEQ ID NO: 1204176 - RNA, 21 nt, Human
cuccgcgcccgcccgcccgcc

SEQ ID NO: 1204177 - RNA, 24 nt, Human
cuccuuacaggccaggguggggac

SEQ ID NO: 1204178 - RNA, 24 nt, Human
cugcccaagggaccacagcagcga

SEQ ID NO: 1204179 - RNA, 18 nt, Human
gacaggguggggcugggg

SEQ ID NO: 1204180 - RNA, 19 nt, Human
gaggcuccgcgcccgcccg

SEQ ID NO: 1204181 - RNA, 20 nt, Human
gcuccuuacaggccagggug

SEQ ID NO: 1204182 - RNA, 24 nt, Human
ggcggcggugguguggggcgggcc

SEQ ID NO: 1204183 - RNA, 22 nt, Human
ggcuggggaccauccucagagc

SEQ ID NO: 1204184 - RNA, 22 nt, Human
gggaccauccucagagccacca

SEQ ID NO: 1204185 - RNA, 21 nt, Human
gggguuccugugcaaaucccu

SEQ ID NO: 1204186 - RNA, 23 nt, Human
ggguggggacaggguggggcugg

SEQ ID NO: 1204187 - RNA, 19 nt, Human
ggguuccugugcaaauccc

SEQ ID NO: 1204188 - RNA, 19 nt, Human
guggggagggcucgcugga

SEQ ID NO: 1204189 - RNA, 24 nt, Human
uccucagagccaccacccggcccu

SEQ ID NO: 1204190 - RNA, 22 nt, Human
uccugugcaaaucccuccuuaa

SEQ ID NO: 1204191 - RNA, 19 nt, Human
ugagugcuccuuacaggcc

SEQ ID NO: 1204192 - RNA, 22 nt, Human
ugcaggcggcgguggugugggg

SEQ ID NO: 1204193 - RNA, 23 nt, Human
uggaugguaggaagagugagugc

SEQ ID NO: 1204194 - RNA, 20 nt, Human
uggggacaggguggggcugg

SEQ ID NO: 1204195 - RNA, 21 nt, Human
uggggacaggguggggcuggg

SEQ ID NO: 1204196 - RNA, 24 nt, Human
uggggaccauccucagagccacca

SEQ ID NO: 1204197 - RNA, 19 nt, Human
cagccaccggcucaccuug

SEQ ID NO: 1204198 - RNA, 23 nt, Human
cggcucaccuugcagggcaacgc

SEQ ID NO: 1204199 - RNA, 22 nt, Human
ggcucaccuugcagggcaacgc

SEQ ID NO: 1204200 - RNA, 20 nt, Human
gggcagaggcugccaaccug

SEQ ID NO: 1204201 - RNA, 21 nt, Human
aagcugcaaacuucuuaaguc

SEQ ID NO: 1204202 - RNA, 19 nt, Human
agaaagcaauauggaaaaa

SEQ ID NO: 1204203 - RNA, 22 nt, Human
agaaagcaauauggaaaaagga

SEQ ID NO: 1204204 - RNA, 20 nt, Human
agcaauauggaaaaaggagg

SEQ ID NO: 1204205 - RNA, 22 nt, Human
agcaauauggaaaaaggaggaa

SEQ ID NO: 1204206 - RNA, 21 nt, Human
auggaaaaaggaggaaaggaa

SEQ ID NO: 1204207 - RNA, 19 nt, Human
cacuguggagcuuagugcu

SEQ ID NO: 1204208 - RNA, 18 nt, Human
ccccugcuugucugaggc

SEQ ID NO: 1204209 - RNA, 23 nt, Human
cuugaguugcuucuugauaauga

SEQ ID NO: 1204210 - RNA, 20 nt, Human
gaaaaaggaggaaaggaagg

SEQ ID NO: 1204211 - RNA, 20 nt, Human
ggaaaaaggaggaaaggaag

SEQ ID NO: 1204212 - RNA, 25 nt, Human
ggaaaggaaggucuucuguacuugg

SEQ ID NO: 1204213 - RNA, 21 nt, Human
gucaucuugaguugcuucuug

SEQ ID NO: 1204214 - RNA, 19 nt, Human
uagaacagaaagcaauaug

SEQ ID NO: 1204215 - RNA, 24 nt, Human
uagaacagaaagcaauauggaaaa

SEQ ID NO: 1204216 - RNA, 24 nt, Human
uagugcuugcuuacaggaccagca

SEQ ID NO: 1204217 - RNA, 22 nt, Human
ucuuaagucauucucuaaaaca

SEQ ID NO: 1204218 - RNA, 24 nt, Human
ucuugaguugcuucuugauaauga

SEQ ID NO: 1204219 - RNA, 24 nt, Human
uggaaaaaggaggaaaggaagguc

SEQ ID NO: 1204220 - RNA, 23 nt, Human
ugggauacggguccaagcugcaa

SEQ ID NO: 1204221 - RNA, 22 nt, Human
uggggccagguuggggcaagga

SEQ ID NO: 1204222 - RNA, 21 nt, Human
uuccuuagcagacuugccccu

SEQ ID NO: 1204223 - RNA, 19 nt, Human
aggcagagaccuggaugug

SEQ ID NO: 1204224 - RNA, 20 nt, Human
aggcagagaccuggauguga

SEQ ID NO: 1204225 - RNA, 19 nt, Human
caaauagccaggcagagac

SEQ ID NO: 1204226 - RNA, 23 nt, Human
cacacaacagguccuugggacag

SEQ ID NO: 1204227 - RNA, 27 nt, Human
cagaggccuccucccaaaugcaggcuu

SEQ ID NO: 1204228 - RNA, 22 nt, Human
ccagaggccuccucccaaaugc

SEQ ID NO: 1204229 - RNA, 18 nt, Human
cuccucccaaaugcaggc

SEQ ID NO: 1204230 - RNA, 20 nt, Human
gacaggaagcacugagucca

SEQ ID NO: 1204231 - RNA, 23 nt, Human
ggagcaaauagccaggcagagac

SEQ ID NO: 1204232 - RNA, 24 nt, Human
uagccaggcagagaccuggauguu

SEQ ID NO: 1204233 - RNA, 20 nt, Human
uugggacaggaagcacugag

SEQ ID NO: 1204234 - RNA, 21 nt, Human
accguaauuuauaacacucuu

SEQ ID NO: 1204235 - RNA, 18 nt, Human
accugagucguccuccuu

SEQ ID NO: 1204236 - RNA, 21 nt, Human
acuggggaauuagccccacaa

SEQ ID NO: 1204237 - RNA, 21 nt, Human
agaagccugugaucacauacc

SEQ ID NO: 1204238 - RNA, 22 nt, Human
cagaaguaaaguuucaccuucc

SEQ ID NO: 1204239 - RNA, 23 nt, Human
cucaaacaacuaaguguucaaca

SEQ ID NO: 1204240 - RNA, 24 nt, Human
cuucuaaaaucuaggcacagaagu

SEQ ID NO: 1204241 - RNA, 22 nt, Human
gacauauagguuauuucuaauu

SEQ ID NO: 1204242 - RNA, 19 nt, Human
gaggaugggaagacaggaa

SEQ ID NO: 1204243 - RNA, 24 nt, Human
ggaaaaaguuauguuuaaaaaugc

SEQ ID NO: 1204244 - RNA, 18 nt, Human
gggaauuagccccacaau

SEQ ID NO: 1204245 - RNA, 19 nt, Human
guauaauacuccauuuugu

SEQ ID NO: 1204246 - RNA, 20 nt, Human
guccuccuuauccugacuuc

SEQ ID NO: 1204247 - RNA, 21 nt, Human
uaaguguucaacaugacguuu

SEQ ID NO: 1204248 - RNA, 22 nt, Human
uagccuauucauauauuuccua

SEQ ID NO: 1204249 - RNA, 24 nt, Human
uauaaaauggggcauucagucuga

SEQ ID NO: 1204250 - RNA, 18 nt, Human
uauauauguugaaaauca

SEQ ID NO: 1204251 - RNA, 23 nt, Human
ucacauaccugagucguccuccu

SEQ ID NO: 1204252 - RNA, 22 nt, Human
uccaaaggguggaacaacuacc

SEQ ID NO: 1204253 - RNA, 19 nt, Human
ucccuacaacuugcuuuuc

SEQ ID NO: 1204254 - RNA, 18 nt, Human
ugaaagugccauaucaag

SEQ ID NO: 1204255 - RNA, 23 nt, Human
ugaagugaaggagacauuacaaa

SEQ ID NO: 1204256 - RNA, 22 nt, Human
ugaauauaaugaaaucuuccca

SEQ ID NO: 1204257 - RNA, 21 nt, Human
ugacguuuuuagcacgcaucu

SEQ ID NO: 1204258 - RNA, 20 nt, Human
uggaaaggggcgggaccugc

SEQ ID NO: 1204259 - RNA, 21 nt, Human
uggaacaacuaccugcgagaa

SEQ ID NO: 1204260 - RNA, 21 nt, Human
ugugaucacauaccugagucg

SEQ ID NO: 1204261 - RNA, 22 nt, Human
ugugaucacauaccugagucgu

SEQ ID NO: 1204262 - RNA, 23 nt, Human
uuacuggggaauuagccccacag

SEQ ID NO: 1204263 - RNA, 21 nt, Human
uuagaaacaaugaauauaaug

SEQ ID NO: 1204264 - RNA, 24 nt, Human
uuauucggcaauucauauuucugu

SEQ ID NO: 1204265 - RNA, 21 nt, Human
uugaaugcgaguguggaaaaa

SEQ ID NO: 1204266 - RNA, 20 nt, Human
uuucaaacguuuucuggcca

SEQ ID NO: 1204267 - RNA, 21 nt, Human
uuuucuggccaugcuauugcc

SEQ ID NO: 1204268 - RNA, 18 nt, Human
uuuuguggauccaccgua

SEQ ID NO: 1204269 - RNA, 18 nt, Human
cagccaggggcagcaggc

SEQ ID NO: 1204270 - RNA, 21 nt, Human
ccaggaagacagccaggggca

SEQ ID NO: 1204271 - RNA, 22 nt, Human
uggguugggaaaugucgggcca

SEQ ID NO: 1204272 - RNA, 21 nt, Human
aaccuucccuggagaucugcc

SEQ ID NO: 1204273 - RNA, 23 nt, Human
aggugcaggagagaggaguaagu

SEQ ID NO: 1204274 - RNA, 22 nt, Human
caguaaccuucccuggagaucu

SEQ ID NO: 1204275 - RNA, 22 nt, Human
cccugcacaguaaccuucccug

SEQ ID NO: 1204276 - RNA, 23 nt, Human
cucaggauggacaccugacaguc

SEQ ID NO: 1204277 - RNA, 24 nt, Human
cugaggaccacgagguccaggcac

SEQ ID NO: 1204278 - RNA, 19 nt, Human
gagcaggugcaggagagag

SEQ ID NO: 1204279 - RNA, 26 nt, Human
ggacaccugacagucgcugaggacca

SEQ ID NO: 1204280 - RNA, 18 nt, Human
ucgcugaggaccacgagg

SEQ ID NO: 1204281 - RNA, 18 nt, Human
ucgcugaggaccacgagg

SEQ ID NO: 1204282 - RNA, 21 nt, Human
ugcccagacgcuaagcugggg

SEQ ID NO: 1204283 - RNA, 18 nt, Human
aaaggcaccugaacgagg

SEQ ID NO: 1204284 - RNA, 24 nt, Human
aaaugacaucauaaccuucuggau

SEQ ID NO: 1204285 - RNA, 21 nt, Human
aagcaggggcggcugccaggu

SEQ ID NO: 1204286 - RNA, 22 nt, Human
aaggggcagaucuggauccgca

SEQ ID NO: 1204287 - RNA, 23 nt, Human
aagggugccagcaaggccagggg

SEQ ID NO: 1204288 - RNA, 24 nt, Human
aagguugcugcagcccaggccucu

SEQ ID NO: 1204289 - RNA, 20 nt, Human
acacgggcuugcugggacac

SEQ ID NO: 1204290 - RNA, 20 nt, Human
acagcugggccgugaccggc

SEQ ID NO: 1204291 - RNA, 19 nt, Human
acauguaucaucauugacc

SEQ ID NO: 1204292 - RNA, 19 nt, Human
accugguggggaccccaug

SEQ ID NO: 1204293 - RNA, 22 nt, Human
agaaaaggccaacacgggcuug

SEQ ID NO: 1204294 - RNA, 21 nt, Human
agaaguguacaucgguccucc

SEQ ID NO: 1204295 - RNA, 18 nt, Human
agacaaugcuacucccca

SEQ ID NO: 1204296 - RNA, 18 nt, Human
agacgggcagcaccugcc

SEQ ID NO: 1204297 - RNA, 24 nt, Human
agcaggggcggcugccaggucacc

SEQ ID NO: 1204298 - RNA, 20 nt, Human
agccagggccugaagucccu

SEQ ID NO: 1204299 - RNA, 23 nt, Human
aggaagaagccaagucuugggaa

SEQ ID NO: 1204300 - RNA, 21 nt, Human
aggagaagccgcugucggggg

SEQ ID NO: 1204301 - RNA, 19 nt, Human
aggccccugagcuuugccu

SEQ ID NO: 1204302 - RNA, 18 nt, Human
aggcccuggccacccaca

SEQ ID NO: 1204303 - RNA, 20 nt, Human
aggccgggagcuccaccuuc

SEQ ID NO: 1204304 - RNA, 22 nt, Human
aggggcggcugccaggucaccc

SEQ ID NO: 1204305 - RNA, 18 nt, Human
aggguggucugcagcugc

SEQ ID NO: 1204306 - RNA, 18 nt, Human
agguggcccuuugugggc

SEQ ID NO: 1204307 - RNA, 18 nt, Human
aucugccacaguguaggg

SEQ ID NO: 1204308 - RNA, 21 nt, Human
augaugucccucuugaugguc

SEQ ID NO: 1204309 - RNA, 23 nt, Human
augucacagcugcgguccacggc

SEQ ID NO: 1204310 - RNA, 19 nt, Human
caagucuugggaaauuccu

SEQ ID NO: 1204311 - RNA, 19 nt, Human
cacacagcugggccgugac

SEQ ID NO: 1204312 - RNA, 20 nt, Human
cacagcagcugccccagggc

SEQ ID NO: 1204313 - RNA, 21 nt, Human
cacauguaucaucauugaccc

SEQ ID NO: 1204314 - RNA, 22 nt, Human
cacccuggaagugggcggggcu

SEQ ID NO: 1204315 - RNA, 21 nt, Human
caccgcucucggcugcccccc

SEQ ID NO: 1204316 - RNA, 21 nt, Human
cacugcauggcaguggaggac

SEQ ID NO: 1204317 - RNA, 22 nt, Human
cagaaaaggccaacacgggcuu

SEQ ID NO: 1204318 - RNA, 18 nt, Human
cagcacaggcuccagcgg

SEQ ID NO: 1204319 - RNA, 18 nt, Human
cagcaccugccuccuggc

SEQ ID NO: 1204320 - RNA, 23 nt, Human
cagcaucuugccugcugcucagg

SEQ ID NO: 1204321 - RNA, 21 nt, Human
cagcccaggccucugccuccc

SEQ ID NO: 1204322 - RNA, 18 nt, Human
cagcugccagcuccagga

SEQ ID NO: 1204323 - RNA, 19 nt, Human
cagcugccccagggcccgc

SEQ ID NO: 1204324 - RNA, 21 nt, Human
caggagaggccacauucugua

SEQ ID NO: 1204325 - RNA, 18 nt, Human
caggcucuggaaagugcc

SEQ ID NO: 1204326 - RNA, 22 nt, Human
cagggccuccaggacugaccug

SEQ ID NO: 1204327 - RNA, 21 nt, Human
caggggcaggccgggagcucc

SEQ ID NO: 1204328 - RNA, 21 nt, Human
cagguccucccacucggccuc

SEQ ID NO: 1204329 - RNA, 24 nt, Human
ccacaagcugccccgggaggcccc

SEQ ID NO: 1204330 - RNA, 22 nt, Human
ccacccaguagcugagcuuccc

SEQ ID NO: 1204331 - RNA, 23 nt, Human
ccaccgcucucggcugccccccu

SEQ ID NO: 1204332 - RNA, 20 nt, Human
ccaccuucccagcagcuuug

SEQ ID NO: 1204333 - RNA, 23 nt, Human
ccacggcaucugcugacgugucg

SEQ ID NO: 1204334 - RNA, 28 nt, Human
ccaggcacaggcacggcagcuccuggcu

SEQ ID NO: 1204335 - RNA, 20 nt, Human
ccaguccgugacgaggaacc

SEQ ID NO: 1204336 - RNA, 23 nt, Human
cccacacgcucugacacugcguc

SEQ ID NO: 1204337 - RNA, 26 nt, Human
cccaugacguccugacaagguggcuu

SEQ ID NO: 1204338 - RNA, 20 nt, Human
ccccacguccuccucuccgc

SEQ ID NO: 1204339 - RNA, 19 nt, Human
cccccccugcugccggugg

SEQ ID NO: 1204340 - RNA, 20 nt, Human
ccccccuuaagggugccagc

SEQ ID NO: 1204341 - RNA, 21 nt, Human
ccccgggacuuggccgcgggc

SEQ ID NO: 1204342 - RNA, 25 nt, Human
ccccgggaggccccugagcuuugcc

SEQ ID NO: 1204343 - RNA, 23 nt, Human
ccccgggucacgcgcugcggccc

SEQ ID NO: 1204344 - RNA, 28 nt, Human
ccccgugccuucagcggcugcgcgucca

SEQ ID NO: 1204345 - RNA, 22 nt, Human
ccccuucucuuccuucaguccc

SEQ ID NO: 1204346 - RNA, 18 nt, Human
cccgagugucuggggcug

SEQ ID NO: 1204347 - RNA, 23 nt, Human
cccguggcccgagugucuggggc

SEQ ID NO: 1204348 - RNA, 22 nt, Human
cccucaguccagggcuggcccc

SEQ ID NO: 1204349 - RNA, 21 nt, Human
cccucaucucaacaguuuccc

SEQ ID NO: 1204350 - RNA, 19 nt, Human
cccugguagccuggggugg

SEQ ID NO: 1204351 - RNA, 21 nt, Human
ccgccccugccccacggcacu

SEQ ID NO: 1204352 - RNA, 19 nt, Human
ccgccgggggagggcccga

SEQ ID NO: 1204353 - RNA, 21 nt, Human
ccgccgggggagggcccgagu

SEQ ID NO: 1204354 - RNA, 19 nt, Human
ccgguccacccaguagcug

SEQ ID NO: 1204355 - RNA, 18 nt, Human
ccguagagcucaaagcug

SEQ ID NO: 1204356 - RNA, 21 nt, Human
ccucacacugacgcccgccac

SEQ ID NO: 1204357 - RNA, 19 nt, Human
ccuccgggcggcggacgca

SEQ ID NO: 1204358 - RNA, 23 nt, Human
ccuccucccucuggucccugggc

SEQ ID NO: 1204359 - RNA, 18 nt, Human
ccuccuggcucuccucac

SEQ ID NO: 1204360 - RNA, 20 nt, Human
ccugccccacggcacgggga

SEQ ID NO: 1204361 - RNA, 26 nt, Human
ccugggagccugggccucaguggugg

SEQ ID NO: 1204362 - RNA, 20 nt, Human
ccugggguggggaguccagg

SEQ ID NO: 1204363 - RNA, 19 nt, Human
cgccaugguguccgccggg

SEQ ID NO: 1204364 - RNA, 24 nt, Human
cgccccugccccacggcacgggga

SEQ ID NO: 1204365 - RNA, 22 nt, Human
cgccuccgguccacccaguagc

SEQ ID NO: 1204366 - RNA, 23 nt, Human
cgcgcagccgucagaggggacac

SEQ ID NO: 1204367 - RNA, 19 nt, Human
cgcgcugcggccccgcgcc

SEQ ID NO: 1204368 - RNA, 25 nt, Human
cgcguacacgcaggagcaucgcgca

SEQ ID NO: 1204369 - RNA, 18 nt, Human
cggaacgucgcgcgguuc

SEQ ID NO: 1204370 - RNA, 19 nt, Human
cgggcagcaccugccuccu

SEQ ID NO: 1204371 - RNA, 21 nt, Human
cgucagggccuccaggacuga

SEQ ID NO: 1204372 - RNA, 24 nt, Human
cuccaccgcucucggcugcccccc

SEQ ID NO: 1204373 - RNA, 18 nt, Human
cuccuggguguccaggcu

SEQ ID NO: 1204374 - RNA, 21 nt, Human
cuccuggguguccaggcucau

SEQ ID NO: 1204375 - RNA, 21 nt, Human
cugcucaaagacgaacagcag

SEQ ID NO: 1204376 - RNA, 18 nt, Human
cugcuccugcugcagcuc

SEQ ID NO: 1204377 - RNA, 19 nt, Human
cugcugcccccccugcugc

SEQ ID NO: 1204378 - RNA, 24 nt, Human
cugcugcccccccugcugccggug

SEQ ID NO: 1204379 - RNA, 26 nt, Human
cuggaccacccacuuguugucccugg

SEQ ID NO: 1204380 - RNA, 21 nt, Human
cuggcgcugcagguacuccug

SEQ ID NO: 1204381 - RNA, 20 nt, Human
cugggccaccuucauggcgu

SEQ ID NO: 1204382 - RNA, 19 nt, Human
cugucucgggcuguggggg

SEQ ID NO: 1204383 - RNA, 19 nt, Human
gaagaagccaagucuuggg

SEQ ID NO: 1204384 - RNA, 18 nt, Human
gacccucagucuggugug

SEQ ID NO: 1204385 - RNA, 18 nt, Human
gacgggugcauggugggg

SEQ ID NO: 1204386 - RNA, 22 nt, Human
gagaggccacauucuguaaucc

SEQ ID NO: 1204387 - RNA, 18 nt, Human
gagcuggggcuggguguc

SEQ ID NO: 1204388 - RNA, 20 nt, Human
gaggaagaagccaagucuug

SEQ ID NO: 1204389 - RNA, 20 nt, Human
gaggaagaagccaagucuug

SEQ ID NO: 1204390 - RNA, 19 nt, Human
gcacagcagcugccccagg

SEQ ID NO: 1204391 - RNA, 21 nt, Human
gcagagccuggcacagcagcu

SEQ ID NO: 1204392 - RNA, 18 nt, Human
gcagagccuggcacagcg

SEQ ID NO: 1204393 - RNA, 19 nt, Human
gcagucugcugcccccccu

SEQ ID NO: 1204394 - RNA, 21 nt, Human
gccccgugccuucagcggcug

SEQ ID NO: 1204395 - RNA, 28 nt, Human
gcgcagccgucagaggggagggaacgcc

SEQ ID NO: 1204396 - RNA, 18 nt, Human
gcgggcugggcuacgggg

SEQ ID NO: 1204397 - RNA, 22 nt, Human
gcgucaggggucgcagaccagc

SEQ ID NO: 1204398 - RNA, 18 nt, Human
gcuccaaggacgccagcc

SEQ ID NO: 1204399 - RNA, 25 nt, Human
gcuccugcaggcaaagccccaggau

SEQ ID NO: 1204400 - RNA, 18 nt, Human
gcucucggcugccccccu

SEQ ID NO: 1204401 - RNA, 18 nt, Human
gcugccccagggcccgcu

SEQ ID NO: 1204402 - RNA, 21 nt, Human
gcugccccagguaggccuggc

SEQ ID NO: 1204403 - RNA, 22 nt, Human
gcugccugucucgggcuguggg

SEQ ID NO: 1204404 - RNA, 18 nt, Human
gcuucugcugcuccugcu

SEQ ID NO: 1204405 - RNA, 22 nt, Human
gcuugcuucugcugcuccugcu

SEQ ID NO: 1204406 - RNA, 22 nt, Human
ggaaggucuaggaaggcaaaag

SEQ ID NO: 1204407 - RNA, 23 nt, Human
ggaagucuuccaggaacuccugc

SEQ ID NO: 1204408 - RNA, 18 nt, Human
ggacgagaagaaggugac

SEQ ID NO: 1204409 - RNA, 22 nt, Human
ggagaaguguacaucgguccuc

SEQ ID NO: 1204410 - RNA, 18 nt, Human
ggagagcuggugaugggg

SEQ ID NO: 1204411 - RNA, 19 nt, Human
ggagagcuggugauggggg

SEQ ID NO: 1204412 - RNA, 23 nt, Human
ggaggaagaagccaagucuuggg

SEQ ID NO: 1204413 - RNA, 19 nt, Human
ggauccccucaucucaaca

SEQ ID NO: 1204414 - RNA, 20 nt, Human
ggcagcaccugccuccuggc

SEQ ID NO: 1204415 - RNA, 21 nt, Human
ggcaguggaggacgucagggc

SEQ ID NO: 1204416 - RNA, 21 nt, Human
ggccgggagcuccaccuuccc

SEQ ID NO: 1204417 - RNA, 27 nt, Human
ggcgacaggggcaggccgggagcucca

SEQ ID NO: 1204418 - RNA, 18 nt, Human
ggcucuggaaagugcccc

SEQ ID NO: 1204419 - RNA, 21 nt, Human
ggcucuggaaagugccccagg

SEQ ID NO: 1204420 - RNA, 22 nt, Human
gggaagaaggagucgggguugg

SEQ ID NO: 1204421 - RNA, 23 nt, Human
gggaaggucuaggaaggcaaaag

SEQ ID NO: 1204422 - RNA, 18 nt, Human
gggagccccuucucuucc

SEQ ID NO: 1204423 - RNA, 23 nt, Human
gggcacaggccuccucccuggga

SEQ ID NO: 1204424 - RNA, 22 nt, Human
gggcagggucuggcauggccga

SEQ ID NO: 1204425 - RNA, 25 nt, Human
ggggauggccaggcucuggaaagug

SEQ ID NO: 1204426 - RNA, 20 nt, Human
ggggcuggacgagaagaagg

SEQ ID NO: 1204427 - RNA, 22 nt, Human
gguccuccagcccuggaugcag

SEQ ID NO: 1204428 - RNA, 21 nt, Human
gucacagcugcgguccacggc

SEQ ID NO: 1204429 - RNA, 18 nt, Human
guccagggcuggccccgu

SEQ ID NO: 1204430 - RNA, 24 nt, Human
gucuaggaaggcaaaagcaggggc

SEQ ID NO: 1204431 - RNA, 20 nt, Human
gugagugggucccagccccg

SEQ ID NO: 1204432 - RNA, 19 nt, Human
uaagggugccagcaaggcc

SEQ ID NO: 1204433 - RNA, 19 nt, Human
uacccuggguccugggagc

SEQ ID NO: 1204434 - RNA, 20 nt, Human
uagaaccagauggucagggg

SEQ ID NO: 1204435 - RNA, 28 nt, Human
ucagagcugugaagaccuggugggggag

SEQ ID NO: 1204436 - RNA, 23 nt, Human
ucagcggcugcgcguccaacagc

SEQ ID NO: 1204437 - RNA, 20 nt, Human
uccacauguugugugcgggc

SEQ ID NO: 1204438 - RNA, 20 nt, Human
uccagauguuccggagcccg

SEQ ID NO: 1204439 - RNA, 22 nt, Human
uccaggccccgcaggcgcaugc

SEQ ID NO: 1204440 - RNA, 23 nt, Human
uccaggcccugagcaucccccgg

SEQ ID NO: 1204441 - RNA, 18 nt, Human
uccaugcacacuaugucu

SEQ ID NO: 1204442 - RNA, 20 nt, Human
uccaugcacacuaugucucg

SEQ ID NO: 1204443 - RNA, 21 nt, Human
uccaugcacacuaugucucgg

SEQ ID NO: 1204444 - RNA, 20 nt, Human
ucccaaggacgaagucagcc

SEQ ID NO: 1204445 - RNA, 18 nt, Human
ucccagcagcuuuggugc

SEQ ID NO: 1204446 - RNA, 21 nt, Human
uccccacguccuccucuccgc

SEQ ID NO: 1204447 - RNA, 18 nt, Human
ucccucuggucccugggc

SEQ ID NO: 1204448 - RNA, 20 nt, Human
ucccucuggucccugggcuu

SEQ ID NO: 1204449 - RNA, 23 nt, Human
ucccucuggucccugggcuugcu

SEQ ID NO: 1204450 - RNA, 18 nt, Human
ucccuggaaagagggugg

SEQ ID NO: 1204451 - RNA, 21 nt, Human
ucccuggaaagaggguggucu

SEQ ID NO: 1204452 - RNA, 23 nt, Human
ucccugggcagggucuggcaugg

SEQ ID NO: 1204453 - RNA, 21 nt, Human
ucccuucaggcagagcugggg

SEQ ID NO: 1204454 - RNA, 18 nt, Human
uccgccgggggagggccc

SEQ ID NO: 1204455 - RNA, 21 nt, Human
uccgugagugggucccagccc

SEQ ID NO: 1204456 - RNA, 22 nt, Human
uccgugagugggucccagcccu

SEQ ID NO: 1204457 - RNA, 18 nt, Human
uccucccacucggccuca

SEQ ID NO: 1204458 - RNA, 21 nt, Human
uccuccccacguccuccucuc

SEQ ID NO: 1204459 - RNA, 24 nt, Human
uccugauguacccuggguccuggg

SEQ ID NO: 1204460 - RNA, 18 nt, Human
uccuggguguccaggcuc

SEQ ID NO: 1204461 - RNA, 19 nt, Human
uccuugauugcuuuuucug

SEQ ID NO: 1204462 - RNA, 21 nt, Human
ucgauguccucaugcuccagc

SEQ ID NO: 1204463 - RNA, 19 nt, Human
ucuccuccacacgguccau

SEQ ID NO: 1204464 - RNA, 22 nt, Human
ucuccuggguguccaggcucau

SEQ ID NO: 1204465 - RNA, 21 nt, Human
ugaagaccugguggggacccc

SEQ ID NO: 1204466 - RNA, 22 nt, Human
ugaccuggacauggacacgggg

SEQ ID NO: 1204467 - RNA, 19 nt, Human
ugagaacaggagaggccac

SEQ ID NO: 1204468 - RNA, 21 nt, Human
ugaggagaaaccagggccuua

SEQ ID NO: 1204469 - RNA, 25 nt, Human
ugaggcagagccgcagguaguaguc

SEQ ID NO: 1204470 - RNA, 21 nt, Human
ugcaaaaccuggggagccaca

SEQ ID NO: 1204471 - RNA, 26 nt, Human
ugcacacagcugggccgugaccggcg

SEQ ID NO: 1204472 - RNA, 22 nt, Human
ugcacagguggauggcgcuguc

SEQ ID NO: 1204473 - RNA, 25 nt, Human
ugcaccagaaucgccuugcgccucc

SEQ ID NO: 1204474 - RNA, 23 nt, Human
ugcagaggcuguagcagcguggg

SEQ ID NO: 1204475 - RNA, 18 nt, Human
ugcaucugcaaaaccugg

SEQ ID NO: 1204476 - RNA, 26 nt, Human
ugcaucugcaaaaccuggggagccac

SEQ ID NO: 1204477 - RNA, 18 nt, Human
ugccagcaaggccagggg

SEQ ID NO: 1204478 - RNA, 19 nt, Human
ugccagcaaggccaggggg

SEQ ID NO: 1204479 - RNA, 18 nt, Human
ugccucagcauuuucagc

SEQ ID NO: 1204480 - RNA, 19 nt, Human
ugccucagcauuuucagca

SEQ ID NO: 1204481 - RNA, 18 nt, Human
ugcuauuuuguaucuguc

SEQ ID NO: 1204482 - RNA, 18 nt, Human
ugcucccggccuccuccc

SEQ ID NO: 1204483 - RNA, 25 nt, Human
ugcugggucagguccucccacucgg

SEQ ID NO: 1204484 - RNA, 26 nt, Human
ugcugucuucaggccccgcagcacca

SEQ ID NO: 1204485 - RNA, 19 nt, Human
uggaaagaggguggucugc

SEQ ID NO: 1204486 - RNA, 21 nt, Human
uggaaagaggguggucugcag

SEQ ID NO: 1204487 - RNA, 21 nt, Human
uggaagugggcggggcuggac

SEQ ID NO: 1204488 - RNA, 22 nt, Human
uggaagugggcggggcuggacg

SEQ ID NO: 1204489 - RNA, 22 nt, Human
uggaaucggcggcagucaguga

SEQ ID NO: 1204490 - RNA, 18 nt, Human
uggagagcuggugauggg

SEQ ID NO: 1204491 - RNA, 24 nt, Human
uggaggaagaagccaagucuuggg

SEQ ID NO: 1204492 - RNA, 18 nt, Human
uggaugcagaugccuggg

SEQ ID NO: 1204493 - RNA, 23 nt, Human
uggcaagcucugucgacucugcc

SEQ ID NO: 1204494 - RNA, 25 nt, Human
uggcaagcucugucgacucugcuca

SEQ ID NO: 1204495 - RNA, 20 nt, Human
uggcacaccuugcacgcgau

SEQ ID NO: 1204496 - RNA, 21 nt, Human
uggcauggccgaggggccccg

SEQ ID NO: 1204497 - RNA, 22 nt, Human
uggccaggcucuggaaagugcc

SEQ ID NO: 1204498 - RNA, 23 nt, Human
uggcgacaggggcaggccgggag

SEQ ID NO: 1204499 - RNA, 20 nt, Human
ugggaaggucuaggaaggca

SEQ ID NO: 1204500 - RNA, 18 nt, Human
ugggagacgcuguuggcg

SEQ ID NO: 1204501 - RNA, 21 nt, Human
ugggagccugggccucagugg

SEQ ID NO: 1204502 - RNA, 18 nt, Human
ugggaggcgaccccaagg

SEQ ID NO: 1204503 - RNA, 22 nt, Human
ugggcagacucagagcugugaa

SEQ ID NO: 1204504 - RNA, 23 nt, Human
uggggcuccaaggacgccagccg

SEQ ID NO: 1204505 - RNA, 20 nt, Human
uggguggcggcagucaguga

SEQ ID NO: 1204506 - RNA, 19 nt, Human
uggugaugggggucccugg

SEQ ID NO: 1204507 - RNA, 19 nt, Human
ugguggggcuggaauugau

SEQ ID NO: 1204508 - RNA, 22 nt, Human
uggugucacagaugagcagcgg

SEQ ID NO: 1204509 - RNA, 21 nt, Human
ugugcacacagcugggccgug

SEQ ID NO: 1204510 - RNA, 18 nt, Human
uguggaaucggcggcagu

SEQ ID NO: 1204511 - RNA, 21 nt, Human
uucauccucgacauccggaau

SEQ ID NO: 1204512 - RNA, 23 nt, Human
uugcgaggcuccacgugguccug

SEQ ID NO: 1204513 - RNA, 19 nt, Human
uugguggugaaggaggcug

SEQ ID NO: 1204514 - RNA, 19 nt, Human
uugguggugaaggaggcug

SEQ ID NO: 1204515 - RNA, 24 nt, Human
uugguggugaaggaggcugucuuu

SEQ ID NO: 1204516 - RNA, 21 nt, Human
uuucuuugacuuuggcacaug

SEQ ID NO: 1204517 - RNA, 24 nt, Human
ccuuagccaggagaguccuggggc

SEQ ID NO: 1204518 - RNA, 23 nt, Human
gaaauccccugauuucuccaccu

SEQ ID NO: 1204519 - RNA, 21 nt, Human
cccacagccgggguccucucu

SEQ ID NO: 1204520 - RNA, 18 nt, Human
ccccgcucccuccucuuc

SEQ ID NO: 1204521 - RNA, 20 nt, Human
ccccgcucccuccucuucuc

SEQ ID NO: 1204522 - RNA, 20 nt, Human
ccuccucuucucccacagcc

SEQ ID NO: 1204523 - RNA, 24 nt, Human
cgccccgcucccuccucuucuccc

SEQ ID NO: 1204524 - RNA, 18 nt, Human
cucccuccucuucuccca

SEQ ID NO: 1204525 - RNA, 24 nt, Human
gccccgcucccuccucuucuccca

SEQ ID NO: 1204526 - RNA, 18 nt, Human
gcgcgccgucuccuggcu

SEQ ID NO: 1204527 - RNA, 23 nt, Human
ggggcgcgccgucuccuggcuuc

SEQ ID NO: 1204528 - RNA, 18 nt, Human
caagaaaggaagauggcg

SEQ ID NO: 1204529 - RNA, 20 nt, Human
gaagauggcgggaggaccca

SEQ ID NO: 1204530 - RNA, 21 nt, Human
gggaggacccaggagcagagc

SEQ ID NO: 1204531 - RNA, 22 nt, Human
aaccucauccacaagcacuuga

SEQ ID NO: 1204532 - RNA, 22 nt, Human
aagcacaagggcugccagaaac

SEQ ID NO: 1204533 - RNA, 28 nt, Human
aagugaauccuucuuucucgugaaaccc

SEQ ID NO: 1204534 - RNA, 20 nt, Human
acaagggcugccagaaaccu

SEQ ID NO: 1204535 - RNA, 19 nt, Human
acagacaacuucacagcaa

SEQ ID NO: 1204536 - RNA, 27 nt, Human
acagacaacuucacagcaacacgcaaa

SEQ ID NO: 1204537 - RNA, 21 nt, Human
acaggacauuaaacacaguuc

SEQ ID NO: 1204538 - RNA, 24 nt, Human
accucacacaaggucagaucccac

SEQ ID NO: 1204539 - RNA, 18 nt, Human
accuugacagagagaaaa

SEQ ID NO: 1204540 - RNA, 19 nt, Human
acuaugggcuccauucaga

SEQ ID NO: 1204541 - RNA, 22 nt, Human
acuucuuggguaaggacuaguu

SEQ ID NO: 1204542 - RNA, 24 nt, Human
aggcuaaccucacacaaggucaga

SEQ ID NO: 1204543 - RNA, 21 nt, Human
agugaacugcauuccccaagc

SEQ ID NO: 1204544 - RNA, 21 nt, Human
augaagcacaaugaauggacg

SEQ ID NO: 1204545 - RNA, 23 nt, Human
caacaccugggacuacaacagga

SEQ ID NO: 1204546 - RNA, 25 nt, Human
caacuucacagcaacacgcaaagcc

SEQ ID NO: 1204547 - RNA, 21 nt, Human
caauguuuggcaagcguccca

SEQ ID NO: 1204548 - RNA, 18 nt, Human
cacacacaaagaugggga

SEQ ID NO: 1204549 - RNA, 19 nt, Human
cacgcaaagccuaagcgua

SEQ ID NO: 1204550 - RNA, 21 nt, Human
cagacuucaggcuaaccucac

SEQ ID NO: 1204551 - RNA, 22 nt, Human
cagacuucaggcuaaccucaca

SEQ ID NO: 1204552 - RNA, 25 nt, Human
ccacauguaaaccaucugcaggguu

SEQ ID NO: 1204553 - RNA, 21 nt, Human
ccagaggcuacuacuucuugg

SEQ ID NO: 1204554 - RNA, 20 nt, Human
cccaaaccacauguaaacca

SEQ ID NO: 1204555 - RNA, 23 nt, Human
cccaaaccacauguaaaccaucu

SEQ ID NO: 1204556 - RNA, 19 nt, Human
ccugggacuacaacaggac

SEQ ID NO: 1204557 - RNA, 23 nt, Human
cuacacacuaaagcacgccuuua

SEQ ID NO: 1204558 - RNA, 24 nt, Human
ggacuacaacaggacauuaaacaa

SEQ ID NO: 1204559 - RNA, 21 nt, Human
ggacucaauguuuggcaagcg

SEQ ID NO: 1204560 - RNA, 22 nt, Human
ggcugccagaaaccuugacaga

SEQ ID NO: 1204561 - RNA, 25 nt, Human
uaaaagcacaagggcugccagaaac

SEQ ID NO: 1204562 - RNA, 24 nt, Human
uaagagauuuucuuagguuguuuu

SEQ ID NO: 1204563 - RNA, 24 nt, Human
uacaacaccugggacuacaacagg

SEQ ID NO: 1204564 - RNA, 19 nt, Human
uauaaaagcacaagggcug

SEQ ID NO: 1204565 - RNA, 24 nt, Human
uauauauccucaagugaaugauac

SEQ ID NO: 1204566 - RNA, 20 nt, Human
uccccaagcaccugcuucua

SEQ ID NO: 1204567 - RNA, 22 nt, Human
uccccaagcaccugcuucuaag

SEQ ID NO: 1204568 - RNA, 22 nt, Human
ugaauggacggcuauucgucca

SEQ ID NO: 1204569 - RNA, 28 nt, Human
ugcuucuaagagauuuucuuagguuguu

SEQ ID NO: 1204570 - RNA, 20 nt, Human
ugggaagugaauccuucuuu

SEQ ID NO: 1204571 - RNA, 18 nt, Human
uguguaaauauauauaua

SEQ ID NO: 1204572 - RNA, 18 nt, Human
uguguaaauauauauaua

SEQ ID NO: 1204573 - RNA, 22 nt, Human
uguguaaauauauauauauaua

SEQ ID NO: 1204574 - RNA, 24 nt, Human
uguguguaaauauauauauauaac

SEQ ID NO: 1204575 - RNA, 21 nt, Human
uucacagcaacacgcaaagcc

SEQ ID NO: 1204576 - RNA, 31 nt, Human
uuuauuguguguaaauauauauauauauauu

SEQ ID NO: 1204577 - RNA, 19 nt, Human
uuucucgugaaacccaaac

SEQ ID NO: 1204578 - RNA, 20 nt, Human
uuucuuauguuuugacauuc

SEQ ID NO: 1204579 - RNA, 22 nt, Human
uuuuccaacuaugggcuccauu

SEQ ID NO: 1204580 - RNA, 26 nt, Human
aggaaggccugguggaacagaggacu

SEQ ID NO: 1204581 - RNA, 20 nt, Human
ccccugaggaaggccuggug

SEQ ID NO: 1204582 - RNA, 21 nt, Human
ccccugaggaaggccuggugg

SEQ ID NO: 1204583 - RNA, 19 nt, Human
cuccagugaggaacugagg

SEQ ID NO: 1204584 - RNA, 22 nt, Human
gccaaauauauguccuugccac

SEQ ID NO: 1204585 - RNA, 24 nt, Human
ggacuccagugaggaacugacugu

SEQ ID NO: 1204586 - RNA, 23 nt, Human
ugaaaacacacuucgauaagucc

SEQ ID NO: 1204587 - RNA, 21 nt, Human
ugugaaaacacacuucgauaa

SEQ ID NO: 1204588 - RNA, 21 nt, Human
aaagggcagaggagagcagga

SEQ ID NO: 1204589 - RNA, 21 nt, Human
aaccaaugcgaugaggacgca

SEQ ID NO: 1204590 - RNA, 23 nt, Human
acagaggcaggaggcaggaggga

SEQ ID NO: 1204591 - RNA, 21 nt, Human
acgcacagcacuccagggcug

SEQ ID NO: 1204592 - RNA, 25 nt, Human
acgcacagcacuccagggcugcagc

SEQ ID NO: 1204593 - RNA, 19 nt, Human
aggagcagggccuggucag

SEQ ID NO: 1204594 - RNA, 21 nt, Human
aggaggcaggagggaaggagu

SEQ ID NO: 1204595 - RNA, 21 nt, Human
agggcagaggagagcaggaaa

SEQ ID NO: 1204596 - RNA, 19 nt, Human
aggggguucagaucaccug

SEQ ID NO: 1204597 - RNA, 20 nt, Human
cagaggcaggaggcaggagg

SEQ ID NO: 1204598 - RNA, 18 nt, Human
cagcacuccagggcugca

SEQ ID NO: 1204599 - RNA, 18 nt, Human
caggaggcaggagggaag

SEQ ID NO: 1204600 - RNA, 19 nt, Human
caggagggaaggagugcag

SEQ ID NO: 1204601 - RNA, 21 nt, Human
caggagggaaggagugcagca

SEQ ID NO: 1204602 - RNA, 22 nt, Human
ccgaccccagcagaggagcagg

SEQ ID NO: 1204603 - RNA, 24 nt, Human
cgaugaggacgcacagcacuccag

SEQ ID NO: 1204604 - RNA, 25 nt, Human
cgcacagcacuccagggcugcagcu

SEQ ID NO: 1204605 - RNA, 19 nt, Human
cggggccgaccccagcagg

SEQ ID NO: 1204606 - RNA, 21 nt, Human
gcucggggggccuuuggccgg

SEQ ID NO: 1204607 - RNA, 18 nt, Human
ggagcagggccuggucag

SEQ ID NO: 1204608 - RNA, 21 nt, Human
ggaggcaggagggaaggagug

SEQ ID NO: 1204609 - RNA, 20 nt, Human
gggcagggcccuggagcacg

SEQ ID NO: 1204610 - RNA, 19 nt, Human
gggccgaccccagcagagg

SEQ ID NO: 1204611 - RNA, 19 nt, Human
gguccuuuucagaaagggc

SEQ ID NO: 1204612 - RNA, 18 nt, Human
guccuuuucagaaagggc

SEQ ID NO: 1204613 - RNA, 18 nt, Human
ugauucuguuuggcaagu

SEQ ID NO: 1204614 - RNA, 18 nt, Human
ugcagcacauaugugcgu

SEQ ID NO: 1204615 - RNA, 24 nt, Human
ugcucggggggccuuuggccgggu

SEQ ID NO: 1204616 - RNA, 18 nt, Human
uggagcacgaaccaaugc

SEQ ID NO: 1204617 - RNA, 18 nt, Human
uggcaagucauaagcugu

SEQ ID NO: 1204618 - RNA, 19 nt, Human
uggccggguugcccaggaa

SEQ ID NO: 1204619 - RNA, 18 nt, Human
uuuggcaagucauaagcu

SEQ ID NO: 1204620 - RNA, 19 nt, Human
aaagcagaacaaaauaaga

SEQ ID NO: 1204621 - RNA, 18 nt, Human
aacaggaguuucaaaagc

SEQ ID NO: 1204622 - RNA, 24 nt, Human
agccagcaucuauuuuuaacaggg

SEQ ID NO: 1204623 - RNA, 20 nt, Human
agcccagacuacugagcccc

SEQ ID NO: 1204624 - RNA, 21 nt, Human
agcuacaauuaaauauugauc

SEQ ID NO: 1204625 - RNA, 21 nt, Human
agggagaaucaucuuugucuu

SEQ ID NO: 1204626 - RNA, 22 nt, Human
auaaagacaaacauaaagcaga

SEQ ID NO: 1204627 - RNA, 25 nt, Human
auaaagacaaacauaaagcagaaca

SEQ ID NO: 1204628 - RNA, 26 nt, Human
auccuggaccuuuccucuuuccuccu

SEQ ID NO: 1204629 - RNA, 21 nt, Human
auucugguuuugacaguuugg

SEQ ID NO: 1204630 - RNA, 22 nt, Human
cacagcccagacuacugagccc

SEQ ID NO: 1204631 - RNA, 24 nt, Human
cagaacaaaauaagauauucuuuc

SEQ ID NO: 1204632 - RNA, 18 nt, Human
cagguccuggacgccacc

SEQ ID NO: 1204633 - RNA, 20 nt, Human
cagguccuggacgccacccu

SEQ ID NO: 1204634 - RNA, 22 nt, Human
cauaaagcagaacaaaauaaga

SEQ ID NO: 1204635 - RNA, 19 nt, Human
cauaccggaugaugauuua

SEQ ID NO: 1204636 - RNA, 18 nt, Human
cccaaaagaucugccacc

SEQ ID NO: 1204637 - RNA, 21 nt, Human
cccaaaagaucugccaccugc

SEQ ID NO: 1204638 - RNA, 22 nt, Human
cccagagggucuggaggguucu

SEQ ID NO: 1204639 - RNA, 18 nt, Human
ccccucuccucccucuaa

SEQ ID NO: 1204640 - RNA, 20 nt, Human
ccucuaaaaaggggagaaaa

SEQ ID NO: 1204641 - RNA, 23 nt, Human
ccuguuccauugaugcccaaaag

SEQ ID NO: 1204642 - RNA, 20 nt, Human
cucuaaaaaggggagaaaaa

SEQ ID NO: 1204643 - RNA, 21 nt, Human
cucuaaaaaggggagaaaaac

SEQ ID NO: 1204644 - RNA, 19 nt, Human
cucuccucccucuaaaaag

SEQ ID NO: 1204645 - RNA, 21 nt, Human
cuuuccucuuuccuccuuacu

SEQ ID NO: 1204646 - RNA, 25 nt, Human
cuuuccuuucuucauuuugguuuuu

SEQ ID NO: 1204647 - RNA, 28 nt, Human
gucuugugguagucgcucuucccucugg

SEQ ID NO: 1204648 - RNA, 18 nt, Human
gugguagucgcucuuccc

SEQ ID NO: 1204649 - RNA, 20 nt, Human
uaaaaugcugugcauacaac

SEQ ID NO: 1204650 - RNA, 19 nt, Human
uaaagacaaacauaaagca

SEQ ID NO: 1204651 - RNA, 21 nt, Human
uaaagacaaacauaaagcaga

SEQ ID NO: 1204652 - RNA, 18 nt, Human
uaaguucuuggauuuggc

SEQ ID NO: 1204653 - RNA, 25 nt, Human
uacaaguuuguaugaaauacugguu

SEQ ID NO: 1204654 - RNA, 22 nt, Human
uagcccagagggucuggagggu

SEQ ID NO: 1204655 - RNA, 21 nt, Human
uaguguucuaaagaaguacau

SEQ ID NO: 1204656 - RNA, 21 nt, Human
ucaguggacaccuucaggucu

SEQ ID NO: 1204657 - RNA, 23 nt, Human
ucauuguuagggccugauucgga

SEQ ID NO: 1204658 - RNA, 20 nt, Human
ucuaaaaaggggagaaaaac

SEQ ID NO: 1204659 - RNA, 19 nt, Human
ugcccaaaagaucugccac

SEQ ID NO: 1204660 - RNA, 21 nt, Human
uggaacaauauugauccagga

SEQ ID NO: 1204661 - RNA, 20 nt, Human
uggaauucaaauacucuuaa

SEQ ID NO: 1204662 - RNA, 20 nt, Human
uguuucaacuaacuuauuuc

SEQ ID NO: 1204663 - RNA, 19 nt, Human
uuacuauuauuuuaguccg

SEQ ID NO: 1204664 - RNA, 20 nt, Human
uuccauugaugcccaaaaga

SEQ ID NO: 1204665 - RNA, 20 nt, Human
uucugguuuugacaguuugg

SEQ ID NO: 1204666 - RNA, 21 nt, Human
uuguaugaaauacugguuuca

SEQ ID NO: 1204667 - RNA, 21 nt, Human
uugucuuuuuacauuuccccu

SEQ ID NO: 1204668 - RNA, 24 nt, Human
uuucauggcugcacuuaaaaugcu

SEQ ID NO: 1204669 - RNA, 22 nt, Human
gcugaacacacuguagggcccu

SEQ ID NO: 1204670 - RNA, 20 nt, Human
ggcccuagaaauugcaggug

SEQ ID NO: 1204671 - RNA, 19 nt, Human
aaaaaggugaauacaggcu

SEQ ID NO: 1204672 - RNA, 23 nt, Human
aaaaauacaaaagaaagccaucc

SEQ ID NO: 1204673 - RNA, 23 nt, Human
aacacuuuauauuaguuaacuag

SEQ ID NO: 1204674 - RNA, 19 nt, Human
aagcagguucuacaugaug

SEQ ID NO: 1204675 - RNA, 22 nt, Human
aaugauauuacaguugaaugua

SEQ ID NO: 1204676 - RNA, 21 nt, Human
acacaauuacaaugauauuac

SEQ ID NO: 1204677 - RNA, 18 nt, Human
acugaaaaaggugaauac

SEQ ID NO: 1204678 - RNA, 18 nt, Human
agaaaucaaaaggauuua

SEQ ID NO: 1204679 - RNA, 19 nt, Human
auaaaaccaugucaauauc

SEQ ID NO: 1204680 - RNA, 22 nt, Human
aucaaugucaaagcagguucua

SEQ ID NO: 1204681 - RNA, 25 nt, Human
cacaaaauauacuuacaauuucaaa

SEQ ID NO: 1204682 - RNA, 22 nt, Human
caccaaaggauaauauauuagc

SEQ ID NO: 1204683 - RNA, 23 nt, Human
ccauacauucaugcacuguuggc

SEQ ID NO: 1204684 - RNA, 21 nt, Human
gcccaauaacugagaaggcac

SEQ ID NO: 1204685 - RNA, 24 nt, Human
ggacaaaugugaucuaaaaucaga

SEQ ID NO: 1204686 - RNA, 25 nt, Human
gugguguaauaauuugccuaaguua

SEQ ID NO: 1204687 - RNA, 21 nt, Human
uaacugagaaggcacacaauu

SEQ ID NO: 1204688 - RNA, 19 nt, Human
uacaaacauucauugugcu

SEQ ID NO: 1204689 - RNA, 23 nt, Human
uacaaacauucauugugcucuuu

SEQ ID NO: 1204690 - RNA, 21 nt, Human
uacacugaaaaaggugaauac

SEQ ID NO: 1204691 - RNA, 24 nt, Human
uacuuugugacuggggacuggaau

SEQ ID NO: 1204692 - RNA, 24 nt, Human
uaugacagaaauacacugaaaaag

SEQ ID NO: 1204693 - RNA, 21 nt, Human
ugaauacaggcuucacaaaau

SEQ ID NO: 1204694 - RNA, 20 nt, Human
ugagaaggcacacaauuaca

SEQ ID NO: 1204695 - RNA, 23 nt, Human
ugagaaggcacacaauuacaaug

SEQ ID NO: 1204696 - RNA, 25 nt, Human
ugaggacaaaugugaucuaaaauca

SEQ ID NO: 1204697 - RNA, 23 nt, Human
ugucauauguccaaaacuaaaau

SEQ ID NO: 1204698 - RNA, 22 nt, Human
uguccaaaacuaaaauaaaacc

SEQ ID NO: 1204699 - RNA, 19 nt, Human
cugggugacaugcuguucu

SEQ ID NO: 1204700 - RNA, 18 nt, Human
gccagaauucauucuggg

SEQ ID NO: 1204701 - RNA, 21 nt, Human
ugacaugcuguucuuggcugc

SEQ ID NO: 1204702 - RNA, 23 nt, Human
ugacaugcuguucuuggcugcua

SEQ ID NO: 1204703 - RNA, 21 nt, Human
uggcugcuaaggaagugauau

SEQ ID NO: 1204704 - RNA, 18 nt, Human
acuccauugggugcuuuu

SEQ ID NO: 1204705 - RNA, 22 nt, Human
ucuuuuggcucugucacucuga

SEQ ID NO: 1204706 - RNA, 20 nt, Human
uggcucugucacucugaggu

SEQ ID NO: 1204707 - RNA, 18 nt, Human
aaaacccuuggagggccc

SEQ ID NO: 1204708 - RNA, 20 nt, Human
acacugccccugggcagagc

SEQ ID NO: 1204709 - RNA, 20 nt, Human
accccagccacaggcccuuc

SEQ ID NO: 1204710 - RNA, 22 nt, Human
agagcacucaccuuccugaaga

SEQ ID NO: 1204711 - RNA, 25 nt, Human
agcacucaccuuccugaagacccag

SEQ ID NO: 1204712 - RNA, 22 nt, Human
agcagaccccagccacaggccc

SEQ ID NO: 1204713 - RNA, 22 nt, Human
agggacgcagagcucacacuga

SEQ ID NO: 1204714 - RNA, 22 nt, Human
ccacaggcccuucggauggucc

SEQ ID NO: 1204715 - RNA, 21 nt, Human
cucaccuuccugaagacccag

SEQ ID NO: 1204716 - RNA, 22 nt, Human
gaagacccagguugugcaaggg

SEQ ID NO: 1204717 - RNA, 23 nt, Human
ugaagacccagguugugcaaggg

SEQ ID NO: 1204718 - RNA, 18 nt, Human
ugugcaagggcccuccgc

SEQ ID NO: 1204719 - RNA, 27 nt, Human
uuucuggauucuucauacaggucagug

SEQ ID NO: 1204720 - RNA, 20 nt, Human
cagccacuggcuucaucuug

SEQ ID NO: 1204721 - RNA, 18 nt, Human
ccagccacuggcuucauc

SEQ ID NO: 1204722 - RNA, 21 nt, Human
gcuagaaucaucuucaaucca

SEQ ID NO: 1204723 - RNA, 20 nt, Human
ucaucuucaauccagccacu

SEQ ID NO: 1204724 - RNA, 21 nt, Human
agaccgaagccugaggcggaa

SEQ ID NO: 1204725 - RNA, 24 nt, Human
agcgccgcucccaacuccgcgccc

SEQ ID NO: 1204726 - RNA, 19 nt, Human
caccgagccgcugcucgag

SEQ ID NO: 1204727 - RNA, 23 nt, Human
cagaccgaagccugaggcggaac

SEQ ID NO: 1204728 - RNA, 23 nt, Human
cccgcggcugcgcagaccgaagc

SEQ ID NO: 1204729 - RNA, 23 nt, Human
ccgcucccaacuccgcgcccgcc

SEQ ID NO: 1204730 - RNA, 21 nt, Human
ccgcugcucgagcgccgcucc

SEQ ID NO: 1204731 - RNA, 21 nt, Human
ccucaguguggauggccaggg

SEQ ID NO: 1204732 - RNA, 22 nt, Human
cgccggcagcguagugcuggug

SEQ ID NO: 1204733 - RNA, 19 nt, Human
gccugaggcggaacugccc

SEQ ID NO: 1204734 - RNA, 20 nt, Human
gcuggugccugcagcccugg

SEQ ID NO: 1204735 - RNA, 24 nt, Human
uaaauagcucggggugcuccacga

SEQ ID NO: 1204736 - RNA, 20 nt, Human
uagcucggggugcuccacga

SEQ ID NO: 1204737 - RNA, 18 nt, Human
ugcccagagggaucucgg

SEQ ID NO: 1204738 - RNA, 20 nt, Human
ccacucuccaaacaagccuu

SEQ ID NO: 1204739 - RNA, 21 nt, Human
ccaguaaagucaccagggaca

SEQ ID NO: 1204740 - RNA, 22 nt, Human
ccuuccguggcccaguaaaguc

SEQ ID NO: 1204741 - RNA, 21 nt, Human
cugaaugccuuccguggccca

SEQ ID NO: 1204742 - RNA, 18 nt, Human
guccugaauggucuggau

SEQ ID NO: 1204743 - RNA, 22 nt, Human
uuccguggcccaguaaagucac

SEQ ID NO: 1204744 - RNA, 22 nt, Human
aggaagaggugggguggcaggg

SEQ ID NO: 1204745 - RNA, 22 nt, Human
aggauuggugccaggaaggcag

SEQ ID NO: 1204746 - RNA, 20 nt, Human
aggcagacaccagcgaggaa

SEQ ID NO: 1204747 - RNA, 20 nt, Human
aggcagcagccccaaagcgc

SEQ ID NO: 1204748 - RNA, 20 nt, Human
aggcccaggacaaacuccag

SEQ ID NO: 1204749 - RNA, 22 nt, Human
aggucuuucucugcucccagug

SEQ ID NO: 1204750 - RNA, 18 nt, Human
augcagaagaugaagagg

SEQ ID NO: 1204751 - RNA, 18 nt, Human
caccaggcugaccaggaa

SEQ ID NO: 1204752 - RNA, 22 nt, Human
caccguguuggagguccagggc

SEQ ID NO: 1204753 - RNA, 18 nt, Human
cagcagccccaaagcgcc

SEQ ID NO: 1204754 - RNA, 19 nt, Human
caggcugaccaggaacacc

SEQ ID NO: 1204755 - RNA, 27 nt, Human
ccaccaggcugaccaggaacaccgugu

SEQ ID NO: 1204756 - RNA, 20 nt, Human
cgaggaagaggugggguggc

SEQ ID NO: 1204757 - RNA, 19 nt, Human
gcaggcagcagccccaaag

SEQ ID NO: 1204758 - RNA, 22 nt, Human
gccaaacuguuccccaccaggc

SEQ ID NO: 1204759 - RNA, 19 nt, Human
gccgcguguggaugcagaa

SEQ ID NO: 1204760 - RNA, 18 nt, Human
ggaagaggugggguggca

SEQ ID NO: 1204761 - RNA, 23 nt, Human
ggugacgaggagguucggaaccc

SEQ ID NO: 1204762 - RNA, 20 nt, Human
ggugacgaggagguugaagg

SEQ ID NO: 1204763 - RNA, 22 nt, Human
guccagggccgcguguggaugc

SEQ ID NO: 1204764 - RNA, 22 nt, Human
ucagcaaaggcaggucuuucuc

SEQ ID NO: 1204765 - RNA, 21 nt, Human
uccagggccaggauuggugcc

SEQ ID NO: 1204766 - RNA, 21 nt, Human
ugacuuugcaggcagcagccc

SEQ ID NO: 1204767 - RNA, 21 nt, Human
ugcagaagaugaagagggcca

SEQ ID NO: 1204768 - RNA, 22 nt, Human
uggaugcagaagaugaagaggg

SEQ ID NO: 1204769 - RNA, 18 nt, Human
uggcagggcccauuugug

SEQ ID NO: 1204770 - RNA, 21 nt, Human
uggugccaggaaggcagacac

SEQ ID NO: 1204771 - RNA, 18 nt, Human
uguuggagguccagggcc

SEQ ID NO: 1204772 - RNA, 19 nt, Human
uugaaggagccugauggug

SEQ ID NO: 1204773 - RNA, 19 nt, Human
gcgggcagcuccgagaucu

SEQ ID NO: 1204774 - RNA, 18 nt, Human
uccacuguagacuuggga

SEQ ID NO: 1204775 - RNA, 22 nt, Human
uucugcucccccaggugcauca

SEQ ID NO: 1204776 - RNA, 18 nt, Human
uuucugagccucuugcuc

SEQ ID NO: 1204777 - RNA, 23 nt, Human
aaaaauaccagucuucacuuaca

SEQ ID NO: 1204778 - RNA, 19 nt, Human
aaaagaagaaaaauaccag

SEQ ID NO: 1204779 - RNA, 21 nt, Human
acucugagagcaaaagaagaa

SEQ ID NO: 1204780 - RNA, 24 nt, Human
acucugagagcaaaagaagaaaaa

SEQ ID NO: 1204781 - RNA, 21 nt, Human
caaaagaagaaaaauaccagu

SEQ ID NO: 1204782 - RNA, 21 nt, Human
ccucuaacaagguaacucuga

SEQ ID NO: 1204783 - RNA, 19 nt, Human
gcaaaagaagaaaaauacc

SEQ ID NO: 1204784 - RNA, 18 nt, Human
uaccagucuucacuuaca

SEQ ID NO: 1204785 - RNA, 21 nt, Human
ucugagagcaaaagaagaaaa

SEQ ID NO: 1204786 - RNA, 21 nt, Human
aaaauauaccauguacaucug

SEQ ID NO: 1204787 - RNA, 20 nt, Human
aaguaaccaggagaauaguc

SEQ ID NO: 1204788 - RNA, 20 nt, Human
auaguccaucaaaaaaauaa

SEQ ID NO: 1204789 - RNA, 18 nt, Human
gggaaaguaaccaggaga

SEQ ID NO: 1204790 - RNA, 18 nt, Human
ucaaaauauaccauguac

SEQ ID NO: 1204791 - RNA, 20 nt, Human
aaacacaggccuggccucgg

SEQ ID NO: 1204792 - RNA, 23 nt, Human
aaacacuagaguugcaauuugcc

SEQ ID NO: 1204793 - RNA, 19 nt, Human
aaggguggaaucggggguc

SEQ ID NO: 1204794 - RNA, 18 nt, Human
agagccagaucuccucag

SEQ ID NO: 1204795 - RNA, 19 nt, Human
aggaaaacacaggccuggc

SEQ ID NO: 1204796 - RNA, 25 nt, Human
aggaagggccuucgcaagcacgugg

SEQ ID NO: 1204797 - RNA, 23 nt, Human
cacaggccuggccucggggcacc

SEQ ID NO: 1204798 - RNA, 22 nt, Human
cacguaacaaauagcuugugug

SEQ ID NO: 1204799 - RNA, 18 nt, Human
cacugagaaccucccaaa

SEQ ID NO: 1204800 - RNA, 22 nt, Human
cagaaaacacuagaguugcaau

SEQ ID NO: 1204801 - RNA, 21 nt, Human
cagaccccagaggaugugaga

SEQ ID NO: 1204802 - RNA, 18 nt, Human
cagcagcccagggcuuau

SEQ ID NO: 1204803 - RNA, 18 nt, Human
cagcgcaggcgugggcag

SEQ ID NO: 1204804 - RNA, 24 nt, Human
cagcgcaggcgugggcagacccca

SEQ ID NO: 1204805 - RNA, 21 nt, Human
ccacagcagcccagggcuuau

SEQ ID NO: 1204806 - RNA, 28 nt, Human
ccacugagaaccucccaaagggcccucc

SEQ ID NO: 1204807 - RNA, 21 nt, Human
ccccugaggcuggaacagucu

SEQ ID NO: 1204808 - RNA, 19 nt, Human
ccugcaccuuugggcagcc

SEQ ID NO: 1204809 - RNA, 21 nt, Human
ccuucgcaagcacgugggagc

SEQ ID NO: 1204810 - RNA, 18 nt, Human
cugagaaccucccaaaga

SEQ ID NO: 1204811 - RNA, 23 nt, Human
cugccguuuuugccacccuugac

SEQ ID NO: 1204812 - RNA, 21 nt, Human
cuggaacagucucugaagagg

SEQ ID NO: 1204813 - RNA, 20 nt, Human
cuggaaguguggaugggcau

SEQ ID NO: 1204814 - RNA, 21 nt, Human
cuggccucggggcaccugcug

SEQ ID NO: 1204815 - RNA, 19 nt, Human
cuguggcacaccugggaga

SEQ ID NO: 1204816 - RNA, 25 nt, Human
gaaccugggccaggauauuuaggaa

SEQ ID NO: 1204817 - RNA, 24 nt, Human
gcgaacuguggaagcaggaagggc

SEQ ID NO: 1204818 - RNA, 21 nt, Human
ggaaggcuccuguauuaagag

SEQ ID NO: 1204819 - RNA, 27 nt, Human
gggaacuguggaggaaaaccgguaccc

SEQ ID NO: 1204820 - RNA, 24 nt, Human
guaacaaauagcuuguguggcuca

SEQ ID NO: 1204821 - RNA, 21 nt, Human
guggcucagcuuucugggaug

SEQ ID NO: 1204822 - RNA, 20 nt, Human
uagcucguggcgucaccccu

SEQ ID NO: 1204823 - RNA, 21 nt, Human
ucacaguaugggagguagggu

SEQ ID NO: 1204824 - RNA, 21 nt, Human
ucagaaaacacuagaguugca

SEQ ID NO: 1204825 - RNA, 23 nt, Human
ucaucagaaaacacuagaguugc

SEQ ID NO: 1204826 - RNA, 19 nt, Human
uccacggggaacuguggag

SEQ ID NO: 1204827 - RNA, 23 nt, Human
uccacggggaacuguggaggaaa

SEQ ID NO: 1204828 - RNA, 19 nt, Human
uccucaguaaggaaggcuc

SEQ ID NO: 1204829 - RNA, 21 nt, Human
uccucaguaaggaaggcuccu

SEQ ID NO: 1204830 - RNA, 23 nt, Human
ucugucccaacacguaacaaaua

SEQ ID NO: 1204831 - RNA, 21 nt, Human
ucuguguucaucagaaaacac

SEQ ID NO: 1204832 - RNA, 19 nt, Human
ugagaauagcgaacugugg

SEQ ID NO: 1204833 - RNA, 24 nt, Human
ugaggugcuuguggcuguggcaca

SEQ ID NO: 1204834 - RNA, 20 nt, Human
ugggagagccagaucuccuc

SEQ ID NO: 1204835 - RNA, 21 nt, Human
ugggagagccagaucuccuca

SEQ ID NO: 1204836 - RNA, 31 nt, Human
uguggaagcaggaagggccuucgcaagcacc

SEQ ID NO: 1204837 - RNA, 19 nt, Human
uuccacggggaacugugga

SEQ ID NO: 1204838 - RNA, 23 nt, Human
agaaacaggaaccuguggccagu

SEQ ID NO: 1204839 - RNA, 18 nt, Human
cagccccaagaaacagga

SEQ ID NO: 1204840 - RNA, 18 nt, Human
ccccaagaaacaggaacc

SEQ ID NO: 1204841 - RNA, 18 nt, Human
gccccaagaaacaggaac

SEQ ID NO: 1204842 - RNA, 22 nt, Human
gccccaagaaacaggaaccugu

SEQ ID NO: 1204843 - RNA, 20 nt, Human
uagcagccccaagaaacagg

SEQ ID NO: 1204844 - RNA, 18 nt, Human
ugaggugaagccccuggc

SEQ ID NO: 1204845 - RNA, 24 nt, Human
aaggacccaaggaguuuguacuug

SEQ ID NO: 1204846 - RNA, 23 nt, Human
aagguguuugagcuguagaguga

SEQ ID NO: 1204847 - RNA, 21 nt, Human
acuugguucugugggcagugg

SEQ ID NO: 1204848 - RNA, 18 nt, Human
agaaaggugaggcugaag

SEQ ID NO: 1204849 - RNA, 22 nt, Human
agccacugaagguguuugagcu

SEQ ID NO: 1204850 - RNA, 22 nt, Human
agcugcccauuuuucugacccc

SEQ ID NO: 1204851 - RNA, 23 nt, Human
agcuggaggccuccggggccagg

SEQ ID NO: 1204852 - RNA, 26 nt, Human
aggacccugguccucaggucuucugc

SEQ ID NO: 1204853 - RNA, 25 nt, Human
aggcagcagcugugucuggccuggc

SEQ ID NO: 1204854 - RNA, 24 nt, Human
aggccgggaacacaggugggcugc

SEQ ID NO: 1204855 - RNA, 18 nt, Human
agugggagccacugaagg

SEQ ID NO: 1204856 - RNA, 25 nt, Human
caaggcauggccaguugcaccugcc

SEQ ID NO: 1204857 - RNA, 24 nt, Human
caccugccuccuucagaggucugu

SEQ ID NO: 1204858 - RNA, 19 nt, Human
cagaggggccgcuguggaa

SEQ ID NO: 1204859 - RNA, 19 nt, Human
cagcucugcuccgccaggg

SEQ ID NO: 1204860 - RNA, 18 nt, Human
cagcugcugugccagcuc

SEQ ID NO: 1204861 - RNA, 25 nt, Human
caguagguagcacagccuuugggaa

SEQ ID NO: 1204862 - RNA, 21 nt, Human
cagugcccacgcgagccgcuc

SEQ ID NO: 1204863 - RNA, 22 nt, Human
cauccucucaucagcagcccca

SEQ ID NO: 1204864 - RNA, 18 nt, Human
ccacugggggucuuggcg

SEQ ID NO: 1204865 - RNA, 22 nt, Human
ccagcagcugaggaaccugugu

SEQ ID NO: 1204866 - RNA, 21 nt, Human
cccacgcgagccgcuccugug

SEQ ID NO: 1204867 - RNA, 20 nt, Human
cccuggggauccacagaggg

SEQ ID NO: 1204868 - RNA, 20 nt, Human
ccgcuccuguggcugugcuc

SEQ ID NO: 1204869 - RNA, 22 nt, Human
ccuagaccaggggcugugggac

SEQ ID NO: 1204870 - RNA, 22 nt, Human
ccuccagggaggacccuggucc

SEQ ID NO: 1204871 - RNA, 24 nt, Human
ccuccagggaggacccugguccuc

SEQ ID NO: 1204872 - RNA, 21 nt, Human
ccucugguggagccauccucu

SEQ ID NO: 1204873 - RNA, 18 nt, Human
ccugugcagcucuguggc

SEQ ID NO: 1204874 - RNA, 20 nt, Human
cgggcuugucaggcagcgcu

SEQ ID NO: 1204875 - RNA, 24 nt, Human
cgugcauugccuccucacacugau

SEQ ID NO: 1204876 - RNA, 22 nt, Human
cuacugggaaggcugcuggcug

SEQ ID NO: 1204877 - RNA, 22 nt, Human
cucaucagcagccccagccacu

SEQ ID NO: 1204878 - RNA, 18 nt, Human
cuccauggcucuugcugc

SEQ ID NO: 1204879 - RNA, 20 nt, Human
cuccauggcucuugcugccu

SEQ ID NO: 1204880 - RNA, 18 nt, Human
cuggaggccuccggggcc

SEQ ID NO: 1204881 - RNA, 19 nt, Human
cuuggcggggacagaaggg

SEQ ID NO: 1204882 - RNA, 19 nt, Human
gaaggggacaaggccaggu

SEQ ID NO: 1204883 - RNA, 22 nt, Human
gagcgggcuugucaggcagcgc

SEQ ID NO: 1204884 - RNA, 24 nt, Human
gcagcugaggaaccuguguuugga

SEQ ID NO: 1204885 - RNA, 19 nt, Human
gccauccucucaucagcag

SEQ ID NO: 1204886 - RNA, 20 nt, Human
gccgggaaagcagacuguca

SEQ ID NO: 1204887 - RNA, 18 nt, Human
gcuccuguggcugugcuc

SEQ ID NO: 1204888 - RNA, 20 nt, Human
gcucuguggcucugcagcug

SEQ ID NO: 1204889 - RNA, 18 nt, Human
ggaacacaggccgggaac

SEQ ID NO: 1204890 - RNA, 20 nt, Human
ggaaggggacaaggccaggu

SEQ ID NO: 1204891 - RNA, 19 nt, Human
ggccaggggccggcuccgg

SEQ ID NO: 1204892 - RNA, 21 nt, Human
ggccuccggggccaggggccg

SEQ ID NO: 1204893 - RNA, 18 nt, Human
ggcgcgggggagcgggcu

SEQ ID NO: 1204894 - RNA, 23 nt, Human
gggaaggggacaaggccaggugc

SEQ ID NO: 1204895 - RNA, 22 nt, Human
gggaggccaccucgggcagggg

SEQ ID NO: 1204896 - RNA, 24 nt, Human
gggaggccaccucgggcaggggca

SEQ ID NO: 1204897 - RNA, 21 nt, Human
gggcagugggagccacugaag

SEQ ID NO: 1204898 - RNA, 25 nt, Human
gggcagugggagccacugaaggugu

SEQ ID NO: 1204899 - RNA, 18 nt, Human
gggcugggaggccaccuc

SEQ ID NO: 1204900 - RNA, 21 nt, Human
ggggagcgggcuugucaggca

SEQ ID NO: 1204901 - RNA, 20 nt, Human
ggggguggguaggggccuag

SEQ ID NO: 1204902 - RNA, 18 nt, Human
ggguaggggccuagacca

SEQ ID NO: 1204903 - RNA, 25 nt, Human
ggguggguaggggccuagaccaggg

SEQ ID NO: 1204904 - RNA, 20 nt, Human
gguucugugggcagugggag

SEQ ID NO: 1204905 - RNA, 19 nt, Human
gguucugugggcagugggg

SEQ ID NO: 1204906 - RNA, 18 nt, Human
gucugguggaugguggau

SEQ ID NO: 1204907 - RNA, 21 nt, Human
gugcagcucuguggcccaggc

SEQ ID NO: 1204908 - RNA, 23 nt, Human
guggaugguggaugccccagccu

SEQ ID NO: 1204909 - RNA, 22 nt, Human
guggcucugcagcugcugugcc

SEQ ID NO: 1204910 - RNA, 21 nt, Human
uagagccccgcaguuggcucc

SEQ ID NO: 1204911 - RNA, 21 nt, Human
ucacaaggauuggcacgaguu

SEQ ID NO: 1204912 - RNA, 21 nt, Human
uccucucaucagcagccccag

SEQ ID NO: 1204913 - RNA, 19 nt, Human
uccugugcagcucuguggc

SEQ ID NO: 1204914 - RNA, 21 nt, Human
ucucaggcccuggggauccac

SEQ ID NO: 1204915 - RNA, 22 nt, Human
ucuggccuggcaccucuggugg

SEQ ID NO: 1204916 - RNA, 18 nt, Human
ugaaguaccagcucugcu

SEQ ID NO: 1204917 - RNA, 20 nt, Human
ugaggcugaagguggcaguu

SEQ ID NO: 1204918 - RNA, 19 nt, Human
ugccccagccugacucagu

SEQ ID NO: 1204919 - RNA, 21 nt, Human
ugccgggaaagcagacuguca

SEQ ID NO: 1204920 - RNA, 21 nt, Human
ugccugagcuacugggaaggc

SEQ ID NO: 1204921 - RNA, 25 nt, Human
ugccuugagagugcaauccagcagc

SEQ ID NO: 1204922 - RNA, 23 nt, Human
uggaggccuccggggccaggggc

SEQ ID NO: 1204923 - RNA, 20 nt, Human
uggcagcuggaggccuccgg

SEQ ID NO: 1204924 - RNA, 21 nt, Human
uggcagcuggaggccuccggg

SEQ ID NO: 1204925 - RNA, 24 nt, Human
uggcuugauuugggcugggaggcc

SEQ ID NO: 1204926 - RNA, 24 nt, Human
uggggauccacagaggggccgcug

SEQ ID NO: 1204927 - RNA, 21 nt, Human
uggggguggguaggggccuag

SEQ ID NO: 1204928 - RNA, 23 nt, Human
uggguaggggccuagaccagggg

SEQ ID NO: 1204929 - RNA, 24 nt, Human
uggguaggggccuagaccaggggc

SEQ ID NO: 1204930 - RNA, 23 nt, Human
ugguucugugggcagugggagcc

SEQ ID NO: 1204931 - RNA, 23 nt, Human
uguggcucugcagcugcugugcc

SEQ ID NO: 1204932 - RNA, 18 nt, Human
uucugugggcagugggag

SEQ ID NO: 1204933 - RNA, 20 nt, Human
uugagcugcucucaggcccu

SEQ ID NO: 1204934 - RNA, 19 nt, Human
uuugagaaaggugaggcug

SEQ ID NO: 1204935 - RNA, 18 nt, Human
uuuucugaccccacccgg

SEQ ID NO: 1204936 - RNA, 20 nt, Human
cccggccgagcuccacggug

SEQ ID NO: 1204937 - RNA, 19 nt, Human
ccgccgcgggccugcgguc

SEQ ID NO: 1204938 - RNA, 23 nt, Human
ccuccgauugggagggagggggc

SEQ ID NO: 1204939 - RNA, 19 nt, Human
cugcugcacugggccuggc

SEQ ID NO: 1204940 - RNA, 22 nt, Human
ggccuggcacgcaccuccucug

SEQ ID NO: 1204941 - RNA, 20 nt, Human
gggccugcggucccggccga

SEQ ID NO: 1204942 - RNA, 19 nt, Human
guguccagggcugcuggcu

SEQ ID NO: 1204943 - RNA, 22 nt, Human
uccacgguggcagggcuggccc

SEQ ID NO: 1204944 - RNA, 19 nt, Human
ugagcaggacacugcugca

SEQ ID NO: 1204945 - RNA, 22 nt, Human
ugcaggccgccgcgggccugcg

SEQ ID NO: 1204946 - RNA, 26 nt, Human
ugggagggagggggcgcucggcuucc

SEQ ID NO: 1204947 - RNA, 20 nt, Human
agacccccgggcggcauccc

SEQ ID NO: 1204948 - RNA, 18 nt, Human
agcgaagcgagugguggc

SEQ ID NO: 1204949 - RNA, 22 nt, Human
agcgggugccgguaacugaacg

SEQ ID NO: 1204950 - RNA, 23 nt, Human
aggcgguggccgggcuagugcgg

SEQ ID NO: 1204951 - RNA, 24 nt, Human
caccccgcgcgcgcgagcagaggc

SEQ ID NO: 1204952 - RNA, 22 nt, Human
ccccaccuugugcacccgcacc

SEQ ID NO: 1204953 - RNA, 18 nt, Human
ccccgcgcgcgcgagcag

SEQ ID NO: 1204954 - RNA, 18 nt, Human
cccgcacccgcccucaau

SEQ ID NO: 1204955 - RNA, 19 nt, Human
cccgcgcucgccgcggcuu

SEQ ID NO: 1204956 - RNA, 26 nt, Human
ccuagcccuggccugaaucccacaac

SEQ ID NO: 1204957 - RNA, 22 nt, Human
cgagcagaggcgguggccgggc

SEQ ID NO: 1204958 - RNA, 22 nt, Human
cgagugguggcggcagguggag

SEQ ID NO: 1204959 - RNA, 26 nt, Human
cgagugguggcggcagguggaguccc

SEQ ID NO: 1204960 - RNA, 21 nt, Human
cgccccaagacccccgggcgg

SEQ ID NO: 1204961 - RNA, 23 nt, Human
cgccccaagacccccgggcggca

SEQ ID NO: 1204962 - RNA, 20 nt, Human
cucaauaccggcgggcagcu

SEQ ID NO: 1204963 - RNA, 24 nt, Human
cucaauaccggcgggcagcuccuc

SEQ ID NO: 1204964 - RNA, 23 nt, Human
cugaaucccacaacuggcgcccc

SEQ ID NO: 1204965 - RNA, 24 nt, Human
cugguggagcaacggacguuucuc

SEQ ID NO: 1204966 - RNA, 18 nt, Human
gagcgcccgcggugaggc

SEQ ID NO: 1204967 - RNA, 19 nt, Human
gaguuugcgagcgagggag

SEQ ID NO: 1204968 - RNA, 18 nt, Human
gcacccgcccucaauacc

SEQ ID NO: 1204969 - RNA, 22 nt, Human
gccugaaucccacaacuggcgc

SEQ ID NO: 1204970 - RNA, 23 nt, Human
gcggugaggcuccagcaccccgc

SEQ ID NO: 1204971 - RNA, 20 nt, Human
ggagcaacggacguuucuca

SEQ ID NO: 1204972 - RNA, 18 nt, Human
ggcggcagcggcgcucuu

SEQ ID NO: 1204973 - RNA, 18 nt, Human
gugcacccgcacccgccc

SEQ ID NO: 1204974 - RNA, 21 nt, Human
gugcacccgcacccgcccuca

SEQ ID NO: 1204975 - RNA, 19 nt, Human
ucccgggaacccgcccggg

SEQ ID NO: 1204976 - RNA, 24 nt, Human
ucucaggcugccugcgaaguggcu

SEQ ID NO: 1204977 - RNA, 22 nt, Human
ucugccgggauccucgccuccc

SEQ ID NO: 1204978 - RNA, 20 nt, Human
ugcgagcgagggagcgggug

SEQ ID NO: 1204979 - RNA, 24 nt, Human
uuucucaggcugccugcgaagugg

SEQ ID NO: 1204980 - RNA, 21 nt, Human
aaacauaauuuaaugcaucgc

SEQ ID NO: 1204981 - RNA, 19 nt, Human
agacgcacugaggccagga

SEQ ID NO: 1204982 - RNA, 18 nt, Human
agcccugagcgugguggg

SEQ ID NO: 1204983 - RNA, 22 nt, Human
aggaggcugucugaggagggca

SEQ ID NO: 1204984 - RNA, 24 nt, Human
aggaggcugucugaggagggcaac

SEQ ID NO: 1204985 - RNA, 24 nt, Human
aggccaggagcggggcagggagga

SEQ ID NO: 1204986 - RNA, 21 nt, Human
aggcgccgggaccucugagcc

SEQ ID NO: 1204987 - RNA, 21 nt, Human
agggauuugucuuuuccaaag

SEQ ID NO: 1204988 - RNA, 21 nt, Human
agggcccggagcccuccgcuu

SEQ ID NO: 1204989 - RNA, 20 nt, Human
agucaggagggaaugcggug

SEQ ID NO: 1204990 - RNA, 19 nt, Human
cagacgcacugaggccagg

SEQ ID NO: 1204991 - RNA, 19 nt, Human
cagcagcagcggcacgccg

SEQ ID NO: 1204992 - RNA, 24 nt, Human
cagggagugcuugcgcuggccggg

SEQ ID NO: 1204993 - RNA, 18 nt, Human
ccaccccgccucgcaccc

SEQ ID NO: 1204994 - RNA, 21 nt, Human
ccccagccccggcuacccaac

SEQ ID NO: 1204995 - RNA, 19 nt, Human
cccccagccccggcuaccc

SEQ ID NO: 1204996 - RNA, 23 nt, Human
cccccagccccggcuacccaacu

SEQ ID NO: 1204997 - RNA, 19 nt, Human
cccccgacguggcgacccc

SEQ ID NO: 1204998 - RNA, 19 nt, Human
cccccgacguggcgacccc

SEQ ID NO: 1204999 - RNA, 19 nt, Human
ccgccaccagcuccuccuu

SEQ ID NO: 1205000 - RNA, 21 nt, Human
ccgccgccgcugccacagccg

SEQ ID NO: 1205001 - RNA, 21 nt, Human
ccucccgccaggcuccgcucc

SEQ ID NO: 1205002 - RNA, 22 nt, Human
ccucccuugccgggauggggau

SEQ ID NO: 1205003 - RNA, 23 nt, Human
ccuccgcuucuaggcacugggag

SEQ ID NO: 1205004 - RNA, 20 nt, Human
ccucugagccugggcccacc

SEQ ID NO: 1205005 - RNA, 21 nt, Human
ccuugccgggauggggaugga

SEQ ID NO: 1205006 - RNA, 22 nt, Human
cgacccccagccccggcuaccc

SEQ ID NO: 1205007 - RNA, 20 nt, Human
cgcccccgacguggcgaccc

SEQ ID NO: 1205008 - RNA, 23 nt, Human
cgccgccgccgcugccacagccg

SEQ ID NO: 1205009 - RNA, 25 nt, Human
cgccucggggcgccgccugcagcag

SEQ ID NO: 1205010 - RNA, 24 nt, Human
cggcgcugccucccgccaggcucc

SEQ ID NO: 1205011 - RNA, 25 nt, Human
cggcgcuggcuccgcggcgcugccc

SEQ ID NO: 1205012 - RNA, 22 nt, Human
cguggcgacccccagccccggc

SEQ ID NO: 1205013 - RNA, 21 nt, Human
cuccgcggguccuggccgcgc

SEQ ID NO: 1205014 - RNA, 21 nt, Human
gacccccagccccggcuaccc

SEQ ID NO: 1205015 - RNA, 23 nt, Human
gacccccagccccggcuacccaa

SEQ ID NO: 1205016 - RNA, 23 nt, Human
gaccggcuccgcggguccuggcc

SEQ ID NO: 1205017 - RNA, 19 nt, Human
gaccgggcggccugcagcc

SEQ ID NO: 1205018 - RNA, 22 nt, Human
gaggagggcaggcucccggccc

SEQ ID NO: 1205019 - RNA, 19 nt, Human
gaggcugucugaggagggc

SEQ ID NO: 1205020 - RNA, 24 nt, Human
gauggggauggagaccaggagcac

SEQ ID NO: 1205021 - RNA, 20 nt, Human
gcacugggaggaggcugucu

SEQ ID NO: 1205022 - RNA, 18 nt, Human
gcccgggcggagaccggg

SEQ ID NO: 1205023 - RNA, 19 nt, Human
gcccugagcgugguggguc

SEQ ID NO: 1205024 - RNA, 21 nt, Human
gccugcagccaccccgccucg

SEQ ID NO: 1205025 - RNA, 18 nt, Human
gcgcugccucccgccagg

SEQ ID NO: 1205026 - RNA, 18 nt, Human
gcggccccgcuccccgcg

SEQ ID NO: 1205027 - RNA, 23 nt, Human
gcgggcggccccgcuccccgcgc

SEQ ID NO: 1205028 - RNA, 20 nt, Human
ggaccucugagccugggccc

SEQ ID NO: 1205029 - RNA, 20 nt, Human
ggagaccaggagcacagccc

SEQ ID NO: 1205030 - RNA, 19 nt, Human
ggcccggagcccuccgcuu

SEQ ID NO: 1205031 - RNA, 20 nt, Human
ggcggcgcgggcggccccgc

SEQ ID NO: 1205032 - RNA, 24 nt, Human
ggcugauggacagggaaaucugca

SEQ ID NO: 1205033 - RNA, 19 nt, Human
gggauggggauggagacca

SEQ ID NO: 1205034 - RNA, 18 nt, Human
gggcagggaggacgcagg

SEQ ID NO: 1205035 - RNA, 23 nt, Human
gggcggagaccgggcggccugca

SEQ ID NO: 1205036 - RNA, 18 nt, Human
ggggagguaauggugggg

SEQ ID NO: 1205037 - RNA, 24 nt, Human
ggggcagggaggacgcagggauuu

SEQ ID NO: 1205038 - RNA, 18 nt, Human
ucacaaagaaggacgccc

SEQ ID NO: 1205039 - RNA, 21 nt, Human
ucccuggccagggcccggagc

SEQ ID NO: 1205040 - RNA, 26 nt, Human
ucccuugccgggauggggauggagac

SEQ ID NO: 1205041 - RNA, 22 nt, Human
uccgcggcgcugccucccgcca

SEQ ID NO: 1205042 - RNA, 18 nt, Human
ucuaggcacugggaggag

SEQ ID NO: 1205043 - RNA, 21 nt, Human
ucugugccgccgccucaaggg

SEQ ID NO: 1205044 - RNA, 19 nt, Human
uggaauucugcugugggug

SEQ ID NO: 1205045 - RNA, 18 nt, Human
uggggcuggucgggagag

SEQ ID NO: 1205046 - RNA, 20 nt, Human
uuaaugcaucgcggugaguc

SEQ ID NO: 1205047 - RNA, 21 nt, Human
ugguagcagagggugguccca

SEQ ID NO: 1205048 - RNA, 19 nt, Human
aauccuguuuccuuagcac

SEQ ID NO: 1205049 - RNA, 19 nt, Human
accuugagaagcacugaaa

SEQ ID NO: 1205050 - RNA, 22 nt, Human
acucugugcauccuggaggcua

SEQ ID NO: 1205051 - RNA, 20 nt, Human
aggcggggcugcagauuagg

SEQ ID NO: 1205052 - RNA, 21 nt, Human
caaaaacacauccgaccugua

SEQ ID NO: 1205053 - RNA, 20 nt, Human
cacucugugcauccuggagg

SEQ ID NO: 1205054 - RNA, 20 nt, Human
cagccgccggcgagcugggg

SEQ ID NO: 1205055 - RNA, 25 nt, Human
caucuccagcuucaggaaugagucc

SEQ ID NO: 1205056 - RNA, 20 nt, Human
ccaaaaacacauccgaccug

SEQ ID NO: 1205057 - RNA, 24 nt, Human
cccaaaaacacauccgaccuguac

SEQ ID NO: 1205058 - RNA, 26 nt, Human
cccaaaaacacauccgaccuguacua

SEQ ID NO: 1205059 - RNA, 19 nt, Human
cugauggcaacgccucccc

SEQ ID NO: 1205060 - RNA, 20 nt, Human
cuuuuguuuucgguugagga

SEQ ID NO: 1205061 - RNA, 18 nt, Human
gaauaguuccacggagcc

SEQ ID NO: 1205062 - RNA, 19 nt, Human
gagaacacgaguagggggg

SEQ ID NO: 1205063 - RNA, 18 nt, Human
gccgguacugagaacacg

SEQ ID NO: 1205064 - RNA, 19 nt, Human
ggcagcagggaguaggcaa

SEQ ID NO: 1205065 - RNA, 19 nt, Human
gugugagggagcgggaaaa

SEQ ID NO: 1205066 - RNA, 21 nt, Human
uaaccuccuguugaagacgac

SEQ ID NO: 1205067 - RNA, 26 nt, Human
uaggcaaaggcggggcugcagauuag

SEQ ID NO: 1205068 - RNA, 22 nt, Human
uagggcuggaauuuuguuccug

SEQ ID NO: 1205069 - RNA, 21 nt, Human
ucagugcaugaccucccuggc

SEQ ID NO: 1205070 - RNA, 19 nt, Human
uccuuagcaccuugauugg

SEQ ID NO: 1205071 - RNA, 22 nt, Human
ucgggagugguccaaucuccuu

SEQ ID NO: 1205072 - RNA, 21 nt, Human
ucucacucugugcauccugga

SEQ ID NO: 1205073 - RNA, 20 nt, Human
ucuccagcuucaggaaugag

SEQ ID NO: 1205074 - RNA, 27 nt, Human
ugaaagcauuccuaacuguuaaccucc

SEQ ID NO: 1205075 - RNA, 19 nt, Human
ugaagacgacagguuuuuc

SEQ ID NO: 1205076 - RNA, 20 nt, Human
ugagggagcgggaaaagcuc

SEQ ID NO: 1205077 - RNA, 20 nt, Human
ugggggcagcagggaguagg

SEQ ID NO: 1205078 - RNA, 25 nt, Human
uguuacagcaucuccagcuucagga

SEQ ID NO: 1205079 - RNA, 18 nt, Human
agggccccgguggcgccc

SEQ ID NO: 1205080 - RNA, 22 nt, Human
caaauugccgugucucagcuga

SEQ ID NO: 1205081 - RNA, 20 nt, Human
cagugcccggcagacaugcc

SEQ ID NO: 1205082 - RNA, 19 nt, Human
ccgcggaaacucggcgguc

SEQ ID NO: 1205083 - RNA, 20 nt, Human
gcccggagggcguggguagg

SEQ ID NO: 1205084 - RNA, 24 nt, Human
gccugcgggcccuugaggguccgc

SEQ ID NO: 1205085 - RNA, 22 nt, Human
gcguugcaccagugcccggcag

SEQ ID NO: 1205086 - RNA, 21 nt, Human
ggcguugcaccagugcccggc

SEQ ID NO: 1205087 - RNA, 19 nt, Human
gucucagcugagcgcgggg

SEQ ID NO: 1205088 - RNA, 22 nt, Human
ucuguggucaaauugccguguc

SEQ ID NO: 1205089 - RNA, 20 nt, Human
ugucucagcugagcgcgggg

SEQ ID NO: 1205090 - RNA, 20 nt, Human
uucuacagucauauuguucu

SEQ ID NO: 1205091 - RNA, 24 nt, Human
ccgccgcccgccagaaggcacuua

SEQ ID NO: 1205092 - RNA, 21 nt, Human
cggcagcgguaggccacgaag

SEQ ID NO: 1205093 - RNA, 20 nt, Human
cgucguagccgccgccgccc

SEQ ID NO: 1205094 - RNA, 22 nt, Human
cucgucguagccgccgccgccc

SEQ ID NO: 1205095 - RNA, 21 nt, Human
uagccgccgccgcccgccaga

SEQ ID NO: 1205096 - RNA, 18 nt, Human
ucgucguagccgccgccg

SEQ ID NO: 1205097 - RNA, 21 nt, Human
uguccagaccaggccgcagag

SEQ ID NO: 1205098 - RNA, 18 nt, Human
cagaacccacacuggggg

SEQ ID NO: 1205099 - RNA, 24 nt, Human
cugugggcuuuagcaauuccuucu

SEQ ID NO: 1205100 - RNA, 19 nt, Human
uagcaauuccuucucuggu

SEQ ID NO: 1205101 - RNA, 26 nt, Human
ugggggcugugggcuuuuuccccggg

SEQ ID NO: 1205102 - RNA, 24 nt, Human
aagcgccaggaacaugaacgagcu

SEQ ID NO: 1205103 - RNA, 19 nt, Human
caggaacaugaacgagcuc

SEQ ID NO: 1205104 - RNA, 21 nt, Human
ccacaucugagccugggggcc

SEQ ID NO: 1205105 - RNA, 18 nt, Human
gagcugcgaggccggugc

SEQ ID NO: 1205106 - RNA, 22 nt, Human
gccaggaacaugaacgagcucc

SEQ ID NO: 1205107 - RNA, 24 nt, Human
gccggugcuggcgcccccggcacg

SEQ ID NO: 1205108 - RNA, 20 nt, Human
ggaacaugaacgagcucccc

SEQ ID NO: 1205109 - RNA, 23 nt, Human
ccccggagacuaagcuuggugcu

SEQ ID NO: 1205110 - RNA, 25 nt, Human
cucugucugggccugggugcacucc

SEQ ID NO: 1205111 - RNA, 24 nt, Human
cugucugggccugggugcacucug

SEQ ID NO: 1205112 - RNA, 19 nt, Human
gcuccccuggcuccucugu

SEQ ID NO: 1205113 - RNA, 20 nt, Human
ggccugggugcacucugggg

SEQ ID NO: 1205114 - RNA, 21 nt, Human
ggccugggugcacucuggggg

SEQ ID NO: 1205115 - RNA, 22 nt, Human
gggccugggugcacucuggggg

SEQ ID NO: 1205116 - RNA, 18 nt, Human
ggugcaagauugagaagg

SEQ ID NO: 1205117 - RNA, 19 nt, Human
gugcaagauugagaaggau

SEQ ID NO: 1205118 - RNA, 20 nt, Human
gugcaagauugagaaggauu

SEQ ID NO: 1205119 - RNA, 25 nt, Human
ucugggccugggugcacucuggggg

SEQ ID NO: 1205120 - RNA, 22 nt, Human
ucugggggugcaagauugagaa

SEQ ID NO: 1205121 - RNA, 22 nt, Human
aaaugcagaggcuggcgcggcu

SEQ ID NO: 1205122 - RNA, 22 nt, Human
acccaaggaguugcuuccaacc

SEQ ID NO: 1205123 - RNA, 19 nt, Human
aggccgagggugggugucc

SEQ ID NO: 1205124 - RNA, 23 nt, Human
caagagccacuacagcaggaagg

SEQ ID NO: 1205125 - RNA, 22 nt, Human
cacacccaaggaguugcuucca

SEQ ID NO: 1205126 - RNA, 20 nt, Human
cacccaaggaguugcuucca

SEQ ID NO: 1205127 - RNA, 21 nt, Human
caccgcugaagccaccuugca

SEQ ID NO: 1205128 - RNA, 21 nt, Human
cagaccaaggcccacggggaa

SEQ ID NO: 1205129 - RNA, 23 nt, Human
caggcugcaaaggagagaccuga

SEQ ID NO: 1205130 - RNA, 21 nt, Human
ccaggcggauaugaaaucacg

SEQ ID NO: 1205131 - RNA, 19 nt, Human
ccauggccuuggcauugcu

SEQ ID NO: 1205132 - RNA, 23 nt, Human
ccgccauggccuuggcauugcuc

SEQ ID NO: 1205133 - RNA, 21 nt, Human
ccugagcuggaaaagugagac

SEQ ID NO: 1205134 - RNA, 19 nt, Human
ccugcaguuugcuccgugg

SEQ ID NO: 1205135 - RNA, 23 nt, Human
ccugcaguuugcuccgugguucc

SEQ ID NO: 1205136 - RNA, 18 nt, Human
ccuugugccucucucccu

SEQ ID NO: 1205137 - RNA, 21 nt, Human
cugcaggggccccuccguggg

SEQ ID NO: 1205138 - RNA, 18 nt, Human
gagaagguggagauagug

SEQ ID NO: 1205139 - RNA, 20 nt, Human
gagggauguccacagggaaa

SEQ ID NO: 1205140 - RNA, 23 nt, Human
gcaaaggagagaccugagcugga

SEQ ID NO: 1205141 - RNA, 25 nt, Human
gccgcggggacccuaggguccgcuu

SEQ ID NO: 1205142 - RNA, 27 nt, Human
gcugggcgggggcgggcuguugacggc

SEQ ID NO: 1205143 - RNA, 22 nt, Human
ggggacccuaggguccgcuccu

SEQ ID NO: 1205144 - RNA, 20 nt, Human
ggugccugcaggggccccuc

SEQ ID NO: 1205145 - RNA, 20 nt, Human
gguggcugggcgggggcggg

SEQ ID NO: 1205146 - RNA, 18 nt, Human
guccgcuccuucgcugcc

SEQ ID NO: 1205147 - RNA, 19 nt, Human
gugccugcaggggccccuc

SEQ ID NO: 1205148 - RNA, 29 nt, Human
uaucuuucuucuuuuucggcugcugagaa

SEQ ID NO: 1205149 - RNA, 18 nt, Human
ucacaugcacacccaagg

SEQ ID NO: 1205150 - RNA, 22 nt, Human
uccacagccaggccgcggggac

SEQ ID NO: 1205151 - RNA, 24 nt, Human
uccacagggaaaugcuugcugcuc

SEQ ID NO: 1205152 - RNA, 22 nt, Human
uccccguguccacagccaggcc

SEQ ID NO: 1205153 - RNA, 20 nt, Human
ucccuggccccgggcuucug

SEQ ID NO: 1205154 - RNA, 23 nt, Human
ucgcagucugaggaagaggcaac

SEQ ID NO: 1205155 - RNA, 19 nt, Human
ucucccagcgagcagaggc

SEQ ID NO: 1205156 - RNA, 24 nt, Human
ucucccagcgagcagaggcgcugc

SEQ ID NO: 1205157 - RNA, 21 nt, Human
ucucuuguugaaugcaagggu

SEQ ID NO: 1205158 - RNA, 20 nt, Human
ucugcucccuugugccucuu

SEQ ID NO: 1205159 - RNA, 19 nt, Human
ucuuucuucuuuuucggcu

SEQ ID NO: 1205160 - RNA, 18 nt, Human
ugaagggaauuaauuguc

SEQ ID NO: 1205161 - RNA, 19 nt, Human
ugagaagguggagauagug

SEQ ID NO: 1205162 - RNA, 25 nt, Human
ugagauuucagggcacaagagccac

SEQ ID NO: 1205163 - RNA, 19 nt, Human
ugcaaaggagagaccugag

SEQ ID NO: 1205164 - RNA, 20 nt, Human
ugcucucccuucucugucuc

SEQ ID NO: 1205165 - RNA, 23 nt, Human
ugcucugcccugugugguccuca

SEQ ID NO: 1205166 - RNA, 22 nt, Human
ugcuugcugcucugcccugugu

SEQ ID NO: 1205167 - RNA, 19 nt, Human
uggccccgggcuucugccu

SEQ ID NO: 1205168 - RNA, 24 nt, Human
uggcgcggcuggcugagcaggcag

SEQ ID NO: 1205169 - RNA, 20 nt, Human
uggcugagcaggcagcggag

SEQ ID NO: 1205170 - RNA, 20 nt, Human
uggcugagcaggcagcggag

SEQ ID NO: 1205171 - RNA, 18 nt, Human
uggcugggcgggggcggg

SEQ ID NO: 1205172 - RNA, 25 nt, Human
ugggcuucugagacugucgcagucu

SEQ ID NO: 1205173 - RNA, 23 nt, Human
ugugagugggaacagccaggcug

SEQ ID NO: 1205174 - RNA, 19 nt, Human
ugugaucaaagagaagacu

SEQ ID NO: 1205175 - RNA, 21 nt, Human
uuacugaggcauacauugugu

SEQ ID NO: 1205176 - RNA, 21 nt, Human
uuccuaacucuugggcuucug

SEQ ID NO: 1205177 - RNA, 21 nt, Human
uucgcugcccgagcacggugc

SEQ ID NO: 1205178 - RNA, 20 nt, Human
uucuagauucucccaggcgg

SEQ ID NO: 1205179 - RNA, 23 nt, Human
uucucugucucgggccugcaguu

SEQ ID NO: 1205180 - RNA, 21 nt, Human
uugcugcucugcccugugugg

SEQ ID NO: 1205181 - RNA, 23 nt, Human
uuggccagucguuucucucccag

SEQ ID NO: 1205182 - RNA, 23 nt, Human
uuucccaguguuuucagcuggau

SEQ ID NO: 1205183 - RNA, 18 nt, Human
uuugcuaggagcugucca

SEQ ID NO: 1205184 - RNA, 18 nt, Human
uuugcuaggagcugucca

SEQ ID NO: 1205185 - RNA, 20 nt, Human
ccuuuauuccuucugguuca

SEQ ID NO: 1205186 - RNA, 23 nt, Human
cugugcuggaggggcugaacugc

SEQ ID NO: 1205187 - RNA, 18 nt, Human
gauuuguucuccggcccc

SEQ ID NO: 1205188 - RNA, 19 nt, Human
ggauuuguucuccggcccc

SEQ ID NO: 1205189 - RNA, 20 nt, Human
gggcacuggcugugcuggag

SEQ ID NO: 1205190 - RNA, 19 nt, Human
uugggcacuggcugugcug

SEQ ID NO: 1205191 - RNA, 21 nt, Human
acccugcucagcagcgugggg

SEQ ID NO: 1205192 - RNA, 19 nt, Human
agcaagggaugcagggccc

SEQ ID NO: 1205193 - RNA, 23 nt, Human
agcgugggguucagagaagcuuc

SEQ ID NO: 1205194 - RNA, 22 nt, Human
caagggaugcagggcccggggc

SEQ ID NO: 1205195 - RNA, 24 nt, Human
cagcagcgugggguucagagaagc

SEQ ID NO: 1205196 - RNA, 23 nt, Human
cagcgugggguucagagaagcuu

SEQ ID NO: 1205197 - RNA, 21 nt, Human
ccugcucagcagcgugggguu

SEQ ID NO: 1205198 - RNA, 18 nt, Human
agggcuccacugaccuga

SEQ ID NO: 1205199 - RNA, 21 nt, Human
ccacugaccugaccucuccua

SEQ ID NO: 1205200 - RNA, 22 nt, Human
cccagggcuccacugaccugac

SEQ ID NO: 1205201 - RNA, 18 nt, Human
gaccugaccucuccuacc

SEQ ID NO: 1205202 - RNA, 21 nt, Human
uacggcuucccuaagauccug

SEQ ID NO: 1205203 - RNA, 21 nt, Human
ugaccugaccucuccuacccc

SEQ ID NO: 1205204 - RNA, 21 nt, Human
aacccuuuuggagaagccaag

SEQ ID NO: 1205205 - RNA, 21 nt, Human
aacuccuauuucuccuuccuc

SEQ ID NO: 1205206 - RNA, 22 nt, Human
aagcccagagcccugagacagg

SEQ ID NO: 1205207 - RNA, 19 nt, Human
acagauguuaccuagccuc

SEQ ID NO: 1205208 - RNA, 18 nt, Human
accuagccuccugagugg

SEQ ID NO: 1205209 - RNA, 24 nt, Human
agcuggaguggaggacaaucaacu

SEQ ID NO: 1205210 - RNA, 25 nt, Human
agcuggaguggaggacaaucaacuu

SEQ ID NO: 1205211 - RNA, 23 nt, Human
aggaaggauuugggaaacagcug

SEQ ID NO: 1205212 - RNA, 19 nt, Human
aggcauucccuucuuucuu

SEQ ID NO: 1205213 - RNA, 23 nt, Human
agggggcaguagguggcuuggaa

SEQ ID NO: 1205214 - RNA, 21 nt, Human
auaacccccugggcugcguac

SEQ ID NO: 1205215 - RNA, 19 nt, Human
auggcagcuauguuuaggu

SEQ ID NO: 1205216 - RNA, 25 nt, Human
cagagcccugagacagcucugcaga

SEQ ID NO: 1205217 - RNA, 26 nt, Human
cagcugcccugaaguucugaagccac

SEQ ID NO: 1205218 - RNA, 25 nt, Human
cagggaaugaagcccagagcccuga

SEQ ID NO: 1205219 - RNA, 18 nt, Human
cagggagagugauggcag

SEQ ID NO: 1205220 - RNA, 21 nt, Human
ccacgcacuccgcgagggggc

SEQ ID NO: 1205221 - RNA, 24 nt, Human
ccacgcacuccgcgagggggcagu

SEQ ID NO: 1205222 - RNA, 24 nt, Human
ccccacgcacuccgcgagggggca

SEQ ID NO: 1205223 - RNA, 23 nt, Human
cccgccagacugguccagcugcc

SEQ ID NO: 1205224 - RNA, 22 nt, Human
cccuucuuucuuuuuuggagcc

SEQ ID NO: 1205225 - RNA, 24 nt, Human
cccuucuuucuuuuuuggagccuu

SEQ ID NO: 1205226 - RNA, 22 nt, Human
ccgcagcuaccacgccuuuugc

SEQ ID NO: 1205227 - RNA, 21 nt, Human
ccgccagacugguccagcugc

SEQ ID NO: 1205228 - RNA, 22 nt, Human
ccuauggccaggauucuggagc

SEQ ID NO: 1205229 - RNA, 25 nt, Human
ccucucgguucggguugcucagcuc

SEQ ID NO: 1205230 - RNA, 21 nt, Human
ccugugcccacuguucgaaaa

SEQ ID NO: 1205231 - RNA, 22 nt, Human
ccuucuuucuuuuuuggagccu

SEQ ID NO: 1205232 - RNA, 24 nt, Human
cgaggcuuuuauaacccccugggc

SEQ ID NO: 1205233 - RNA, 22 nt, Human
cgccgcagcuaccacgccuuuu

SEQ ID NO: 1205234 - RNA, 25 nt, Human
cucauuccaccgccgcagcuaccac

SEQ ID NO: 1205235 - RNA, 23 nt, Human
cuccuauuucuccuuccuccgca

SEQ ID NO: 1205236 - RNA, 20 nt, Human
cuccuugaguguagcacaga

SEQ ID NO: 1205237 - RNA, 19 nt, Human
cugagugguacccuccucc

SEQ ID NO: 1205238 - RNA, 20 nt, Human
cugccgcugccgccgccugc

SEQ ID NO: 1205239 - RNA, 19 nt, Human
cugcugccugcaacuccua

SEQ ID NO: 1205240 - RNA, 22 nt, Human
cuucauggucacaucuaaaugg

SEQ ID NO: 1205241 - RNA, 21 nt, Human
cuuccagggaaugaagcccag

SEQ ID NO: 1205242 - RNA, 22 nt, Human
gaccuguaaaaguucugagccu

SEQ ID NO: 1205243 - RNA, 24 nt, Human
gacucgccaguccguauaaacccu

SEQ ID NO: 1205244 - RNA, 21 nt, Human
gaggaaggaaggauuugggaa

SEQ ID NO: 1205245 - RNA, 19 nt, Human
gagucugcgagccgggagc

SEQ ID NO: 1205246 - RNA, 18 nt, Human
gccaguccguauaaaccc

SEQ ID NO: 1205247 - RNA, 18 nt, Human
gcgagccgggagccccac

SEQ ID NO: 1205248 - RNA, 18 nt, Human
gcugccgcugccgccgcc

SEQ ID NO: 1205249 - RNA, 23 nt, Human
ggaaggauuugggaaacagcugg

SEQ ID NO: 1205250 - RNA, 18 nt, Human
ggacuuaggagcgaagug

SEQ ID NO: 1205251 - RNA, 19 nt, Human
ggcuuggaaguaacugaca

SEQ ID NO: 1205252 - RNA, 19 nt, Human
gggaaugaagcccagagcc

SEQ ID NO: 1205253 - RNA, 21 nt, Human
ggugcugggaggaaggaagga

SEQ ID NO: 1205254 - RNA, 24 nt, Human
gucugcgagccgggagccccacgg

SEQ ID NO: 1205255 - RNA, 18 nt, Human
uaacccccugggcugcgu

SEQ ID NO: 1205256 - RNA, 19 nt, Human
uaccuagccuccugagugg

SEQ ID NO: 1205257 - RNA, 24 nt, Human
uagccuccugagugguacccuccu

SEQ ID NO: 1205258 - RNA, 18 nt, Human
uccagcugcccugaaguu

SEQ ID NO: 1205259 - RNA, 22 nt, Human
uccccauuuuucuucaugguca

SEQ ID NO: 1205260 - RNA, 24 nt, Human
ucccuucuuucuuuuuuggagccu

SEQ ID NO: 1205261 - RNA, 19 nt, Human
uccgcgagggggcaguagg

SEQ ID NO: 1205262 - RNA, 20 nt, Human
ucgaaaaagccagagcccca

SEQ ID NO: 1205263 - RNA, 22 nt, Human
ugaaggacaacauuggcaggga

SEQ ID NO: 1205264 - RNA, 23 nt, Human
ugagugguacccuccuccugcca

SEQ ID NO: 1205265 - RNA, 23 nt, Human
ugaugaaggacaacauuggcagg

SEQ ID NO: 1205266 - RNA, 22 nt, Human
ugcccugaaguucugaagccac

SEQ ID NO: 1205267 - RNA, 22 nt, Human
ugccugagcugauggugggaac

SEQ ID NO: 1205268 - RNA, 22 nt, Human
uggccaggauucuggagcuucg

SEQ ID NO: 1205269 - RNA, 19 nt, Human
uggcugaugaaggacaaca

SEQ ID NO: 1205270 - RNA, 18 nt, Human
ugggaaacagcuggagug

SEQ ID NO: 1205271 - RNA, 21 nt, Human
ugggagucugcgagccgggag

SEQ ID NO: 1205272 - RNA, 19 nt, Human
ugggaugagcuccgcagca

SEQ ID NO: 1205273 - RNA, 19 nt, Human
uguggcaaugggaaacggu

SEQ ID NO: 1205274 - RNA, 21 nt, Human
uguugacaacugucucauucc

SEQ ID NO: 1205275 - RNA, 25 nt, Human
uuggagaagccaagaugggggacgc

SEQ ID NO: 1205276 - RNA, 20 nt, Human
uuuugcugcuugcuacuugc

SEQ ID NO: 1205277 - RNA, 22 nt, Human
aacagccaccaaagacaccacc

SEQ ID NO: 1205278 - RNA, 18 nt, Human
aagacaccaccugucacu

SEQ ID NO: 1205279 - RNA, 24 nt, Human
aagacaccaccugucacuccaucc

SEQ ID NO: 1205280 - RNA, 23 nt, Human
acagccaccaaagacaccaccug

SEQ ID NO: 1205281 - RNA, 25 nt, Human
agugcccaccgauuccacacuuggc

SEQ ID NO: 1205282 - RNA, 21 nt, Human
caaagacaccaccugucacuc

SEQ ID NO: 1205283 - RNA, 23 nt, Human
ccaccaaagacaccaccugucac

SEQ ID NO: 1205284 - RNA, 22 nt, Human
ccaccgauuccacacuuggcuu

SEQ ID NO: 1205285 - RNA, 21 nt, Human
ccaccugucacuccauccagg

SEQ ID NO: 1205286 - RNA, 23 nt, Human
ccagggucucccucuuagccucu

SEQ ID NO: 1205287 - RNA, 22 nt, Human
ccucugagcccaacacaauaag

SEQ ID NO: 1205288 - RNA, 24 nt, Human
cuuccagugcccaccgauuccaca

SEQ ID NO: 1205289 - RNA, 22 nt, Human
gaaggcuuuuggcaaaguugcu

SEQ ID NO: 1205290 - RNA, 19 nt, Human
uagccucugagcccaacac

SEQ ID NO: 1205291 - RNA, 24 nt, Human
ugagcccaacacaauaaggcucaa

SEQ ID NO: 1205292 - RNA, 23 nt, Human
uggcaaaguugcuucccaagcau

SEQ ID NO: 1205293 - RNA, 18 nt, Human
uucccaagcauguuuacu

SEQ ID NO: 1205294 - RNA, 25 nt, Human
agacaccagugucccuucaguucuu

SEQ ID NO: 1205295 - RNA, 22 nt, Human
ccacuccuaagucccauagccu

SEQ ID NO: 1205296 - RNA, 23 nt, Human
ccagugucccuucaguucuuucu

SEQ ID NO: 1205297 - RNA, 23 nt, Human
cccauagccucugacagcuguau

SEQ ID NO: 1205298 - RNA, 22 nt, Human
cugcguaccacuccuaaguccc

SEQ ID NO: 1205299 - RNA, 21 nt, Human
ucacucuugagcugucuucuc

SEQ ID NO: 1205300 - RNA, 22 nt, Human
ucagcucuauuucgggagcuau

SEQ ID NO: 1205301 - RNA, 23 nt, Human
ucaguucuuucugaaguuuuccu

SEQ ID NO: 1205302 - RNA, 20 nt, Human
ucccauagccucugacagcu

SEQ ID NO: 1205303 - RNA, 19 nt, Human
uccuaagucccauagccuc

SEQ ID NO: 1205304 - RNA, 21 nt, Human
ugacaucugcguaccacuccu

SEQ ID NO: 1205305 - RNA, 19 nt, Human
ugagcugucuucucagcuc

SEQ ID NO: 1205306 - RNA, 18 nt, Human
ugcguaccacuccuaagu

SEQ ID NO: 1205307 - RNA, 21 nt, Human
caaagcgcuguacugaauugc

SEQ ID NO: 1205308 - RNA, 18 nt, Human
uguacugaauugccuuug

SEQ ID NO: 1205309 - RNA, 24 nt, Human
aaaacccugcccucaggaagccgu

SEQ ID NO: 1205310 - RNA, 22 nt, Human
ccuccaccccaauggccgggaa

SEQ ID NO: 1205311 - RNA, 18 nt, Human
gcaaaacgccuccacccc

SEQ ID NO: 1205312 - RNA, 22 nt, Human
gcaaaacgccuccaccccaaug

SEQ ID NO: 1205313 - RNA, 24 nt, Human
gccagcaggaauccuggggggcaa

SEQ ID NO: 1205314 - RNA, 22 nt, Human
ucaaagucuucuuuauggaaaa

SEQ ID NO: 1205315 - RNA, 22 nt, Human
uuuaagagauaaaaauugacau

SEQ ID NO: 1205316 - RNA, 19 nt, Human
aaaaauacugugaagagaa

SEQ ID NO: 1205317 - RNA, 23 nt, Human
aaacaaaugacauuaauguucuu

SEQ ID NO: 1205318 - RNA, 24 nt, Human
aaacaauccaaaaguggacaagga

SEQ ID NO: 1205319 - RNA, 21 nt, Human
aagcagucauuuacuccauca

SEQ ID NO: 1205320 - RNA, 19 nt, Human
aaggagcugguauugcagg

SEQ ID NO: 1205321 - RNA, 23 nt, Human
aagggaacuuuuuucuuggauug

SEQ ID NO: 1205322 - RNA, 22 nt, Human
aauaaaaauacugugaagagaa

SEQ ID NO: 1205323 - RNA, 22 nt, Human
acacugaaagaaauucccugga

SEQ ID NO: 1205324 - RNA, 21 nt, Human
agaaacucaauguuggugaug

SEQ ID NO: 1205325 - RNA, 18 nt, Human
agcaccauuuuccuuucu

SEQ ID NO: 1205326 - RNA, 18 nt, Human
aggaaugaccaacaauca

SEQ ID NO: 1205327 - RNA, 21 nt, Human
aggcagauguuguauaaacca

SEQ ID NO: 1205328 - RNA, 20 nt, Human
aggggcugccugggugccgg

SEQ ID NO: 1205329 - RNA, 25 nt, Human
agguggaaacacagagcguuugauc

SEQ ID NO: 1205330 - RNA, 25 nt, Human
auacagccacagaaguguccaggcu

SEQ ID NO: 1205331 - RNA, 18 nt, Human
aucaaagcagucauuuac

SEQ ID NO: 1205332 - RNA, 20 nt, Human
augacaaaaacaauccaaaa

SEQ ID NO: 1205333 - RNA, 24 nt, Human
auuuuggaggauaguagcucgggu

SEQ ID NO: 1205334 - RNA, 21 nt, Human
caaugagcucuaccuccgcuu

SEQ ID NO: 1205335 - RNA, 22 nt, Human
cacagaguccauguccacagcc

SEQ ID NO: 1205336 - RNA, 23 nt, Human
caggaggggcaacugugaguggc

SEQ ID NO: 1205337 - RNA, 21 nt, Human
caguuacccagcacuucuccc

SEQ ID NO: 1205338 - RNA, 18 nt, Human
caucacaacgcugggccu

SEQ ID NO: 1205339 - RNA, 22 nt, Human
caucugcaacaacagacugcuc

SEQ ID NO: 1205340 - RNA, 21 nt, Human
cauuuuccaucacuuuuucuu

SEQ ID NO: 1205341 - RNA, 19 nt, Human
cauuuuccuuucuuuucuu

SEQ ID NO: 1205342 - RNA, 18 nt, Human
ccacauccauguccccag

SEQ ID NO: 1205343 - RNA, 21 nt, Human
ccccagccaguuacccagcac

SEQ ID NO: 1205344 - RNA, 20 nt, Human
cccccagccaguuacccagc

SEQ ID NO: 1205345 - RNA, 22 nt, Human
cccgcgccugcagaugcagacc

SEQ ID NO: 1205346 - RNA, 21 nt, Human
ccgcgccugcagaugcagacc

SEQ ID NO: 1205347 - RNA, 18 nt, Human
ccucaaaauaugcccgga

SEQ ID NO: 1205348 - RNA, 21 nt, Human
ccuguccacuagucuuuccuc

SEQ ID NO: 1205349 - RNA, 20 nt, Human
ccuugaacugcacuggagcu

SEQ ID NO: 1205350 - RNA, 23 nt, Human
cgacaagauaaagguccacccga

SEQ ID NO: 1205351 - RNA, 22 nt, Human
cgccugcagaugcagaccaucu

SEQ ID NO: 1205352 - RNA, 19 nt, Human
cucaaaauaugcccggauu

SEQ ID NO: 1205353 - RNA, 24 nt, Human
cuccagagccgaaggcuguuuuuc

SEQ ID NO: 1205354 - RNA, 21 nt, Human
cugccugaaggagcugguauu

SEQ ID NO: 1205355 - RNA, 21 nt, Human
cuuugcuuucuguuuuacuga

SEQ ID NO: 1205356 - RNA, 20 nt, Human
gaaacaaaugacauuaaugu

SEQ ID NO: 1205357 - RNA, 18 nt, Human
gaccggagcggacaggag

SEQ ID NO: 1205358 - RNA, 21 nt, Human
gaccggagcggacaggagggg

SEQ ID NO: 1205359 - RNA, 21 nt, Human
gagagcagccuuugucugugg

SEQ ID NO: 1205360 - RNA, 24 nt, Human
gcuugcugcagaacgagggagccu

SEQ ID NO: 1205361 - RNA, 20 nt, Human
ggaaaguuuggucguccaca

SEQ ID NO: 1205362 - RNA, 18 nt, Human
ggagcggacaggaggggc

SEQ ID NO: 1205363 - RNA, 21 nt, Human
ggauugcuucuuggguuuggc

SEQ ID NO: 1205364 - RNA, 22 nt, Human
ggggcaacugugaguggcggcc

SEQ ID NO: 1205365 - RNA, 19 nt, Human
ggguaauaugggcuugaaa

SEQ ID NO: 1205366 - RNA, 21 nt, Human
uaacugccauauucugccaaa

SEQ ID NO: 1205367 - RNA, 21 nt, Human
uagagcaccugaggccgugcc

SEQ ID NO: 1205368 - RNA, 21 nt, Human
uagcccacuauggccaccagu

SEQ ID NO: 1205369 - RNA, 25 nt, Human
uagucuuuccucuucaaccaggcuu

SEQ ID NO: 1205370 - RNA, 21 nt, Human
uauacagccacagaagugucc

SEQ ID NO: 1205371 - RNA, 23 nt, Human
uaugccaagaguugauagagaag

SEQ ID NO: 1205372 - RNA, 22 nt, Human
ucacagccuuucauacucuucu

SEQ ID NO: 1205373 - RNA, 23 nt, Human
ucagguagcccacuauggccacc

SEQ ID NO: 1205374 - RNA, 18 nt, Human
uccacauccaugucccca

SEQ ID NO: 1205375 - RNA, 24 nt, Human
uccacuagucuuuccucuucaacc

SEQ ID NO: 1205376 - RNA, 20 nt, Human
uccagguacacuugcauuuu

SEQ ID NO: 1205377 - RNA, 21 nt, Human
uccagguacacuugcauuuug

SEQ ID NO: 1205378 - RNA, 20 nt, Human
ucccguagguggaaacacag

SEQ ID NO: 1205379 - RNA, 24 nt, Human
ucccugaggcugcagaaaucucca

SEQ ID NO: 1205380 - RNA, 23 nt, Human
ucccugauucaagauucauuccc

SEQ ID NO: 1205381 - RNA, 20 nt, Human
ucccugcaagcuccccacag

SEQ ID NO: 1205382 - RNA, 28 nt, Human
uccgugacacugaaagaaauucccugga

SEQ ID NO: 1205383 - RNA, 21 nt, Human
uccugaguucguagguaaaca

SEQ ID NO: 1205384 - RNA, 18 nt, Human
ucgcuguuuucuuugucc

SEQ ID NO: 1205385 - RNA, 23 nt, Human
ucgucucacuggcagcuucuuuu

SEQ ID NO: 1205386 - RNA, 18 nt, Human
ucucaggccaggcaauac

SEQ ID NO: 1205387 - RNA, 20 nt, Human
ucugcaacaacagacugcuc

SEQ ID NO: 1205388 - RNA, 22 nt, Human
ucugcaacaacagacugcucau

SEQ ID NO: 1205389 - RNA, 23 nt, Human
ucuguacaagaugcugcuccgga

SEQ ID NO: 1205390 - RNA, 20 nt, Human
ucuuguggguucacaaauuc

SEQ ID NO: 1205391 - RNA, 21 nt, Human
ucuuguggguucacaaauucu

SEQ ID NO: 1205392 - RNA, 23 nt, Human
ucuuugugguggucgucuuccug

SEQ ID NO: 1205393 - RNA, 18 nt, Human
ucuuuuuuuuuaggaaug

SEQ ID NO: 1205394 - RNA, 24 nt, Human
ugaaauuuccagguacacuugcau

SEQ ID NO: 1205395 - RNA, 24 nt, Human
ugacaaaaacaauccaaaagugga

SEQ ID NO: 1205396 - RNA, 24 nt, Human
ugacacaguugucggcuucgauuu

SEQ ID NO: 1205397 - RNA, 19 nt, Human
ugaccaacaaucaccauuu

SEQ ID NO: 1205398 - RNA, 26 nt, Human
ugauauacagccacagaaguguccag

SEQ ID NO: 1205399 - RNA, 24 nt, Human
ugaugcuugucuggauggaguccu

SEQ ID NO: 1205400 - RNA, 18 nt, Human
ugcccggauuccugagag

SEQ ID NO: 1205401 - RNA, 20 nt, Human
ugcugcacaguccgugacag

SEQ ID NO: 1205402 - RNA, 21 nt, Human
ugcuucuuggguuuggcuuug

SEQ ID NO: 1205403 - RNA, 19 nt, Human
uggaggauaguagcucggg

SEQ ID NO: 1205404 - RNA, 23 nt, Human
uggccaccagcuugaagugacac

SEQ ID NO: 1205405 - RNA, 25 nt, Human
uggcggcaacacagucuucacagaa

SEQ ID NO: 1205406 - RNA, 18 nt, Human
ugguggucgucuuccugg

SEQ ID NO: 1205407 - RNA, 22 nt, Human
ugugguggucgucuuccuggca

SEQ ID NO: 1205408 - RNA, 23 nt, Human
uuauuaucugcuucgugucuucg

SEQ ID NO: 1205409 - RNA, 21 nt, Human
uuccaaaagggaacuuuuuuc

SEQ ID NO: 1205410 - RNA, 23 nt, Human
uugcaggcagguugagggcucac

SEQ ID NO: 1205411 - RNA, 26 nt, Human
uuggauugcuucuuggguuuggcuuu

SEQ ID NO: 1205412 - RNA, 22 nt, Human
aagauucugcccaggaguucac

SEQ ID NO: 1205413 - RNA, 23 nt, Human
agaggaguggggggaggggaggg

SEQ ID NO: 1205414 - RNA, 20 nt, Human
aguaccaauucucagggacu

SEQ ID NO: 1205415 - RNA, 23 nt, Human
aguggggggaggggagggacacu

SEQ ID NO: 1205416 - RNA, 18 nt, Human
ccacugagaggagugggg

SEQ ID NO: 1205417 - RNA, 23 nt, Human
ccacugagaggaguggggggagg

SEQ ID NO: 1205418 - RNA, 18 nt, Human
ccccaugcacgguggugg

SEQ ID NO: 1205419 - RNA, 20 nt, Human
gaaggcagggccggguggcc

SEQ ID NO: 1205420 - RNA, 19 nt, Human
gaaguggccgguggucugg

SEQ ID NO: 1205421 - RNA, 18 nt, Human
gccuggcuggacuccgca

SEQ ID NO: 1205422 - RNA, 22 nt, Human
gcgcaggggcccagcuggucag

SEQ ID NO: 1205423 - RNA, 21 nt, Human
ggaguggggggaggggaggga

SEQ ID NO: 1205424 - RNA, 22 nt, Human
gggggaggggagggacacugcc

SEQ ID NO: 1205425 - RNA, 19 nt, Human
ggugagaggagagggaacg

SEQ ID NO: 1205426 - RNA, 24 nt, Human
guggucuggggcccuucagcaggg

SEQ ID NO: 1205427 - RNA, 22 nt, Human
ucagcaggggccuggcuggacu

SEQ ID NO: 1205428 - RNA, 21 nt, Human
ugagaggagagggaacgugga

SEQ ID NO: 1205429 - RNA, 24 nt, Human
ugagaggaguggggggaggggagg

SEQ ID NO: 1205430 - RNA, 18 nt, Human
uggacgggggagaagugg

SEQ ID NO: 1205431 - RNA, 18 nt, Human
uggcuggacuccgcaagc

SEQ ID NO: 1205432 - RNA, 19 nt, Human
uggggggaggggagggaca

SEQ ID NO: 1205433 - RNA, 21 nt, Human
ugguggugggaaggcagggcc

SEQ ID NO: 1205434 - RNA, 21 nt, Human
ugguggugggaaggcagggcc

SEQ ID NO: 1205435 - RNA, 23 nt, Human
ugguggugggaaggcagggccgg

SEQ ID NO: 1205436 - RNA, 23 nt, Human
uggugguggugggaaggcagggc

SEQ ID NO: 1205437 - RNA, 23 nt, Human
aagcuggagccagggcucagaga

SEQ ID NO: 1205438 - RNA, 21 nt, Human
aagggucccggggagcccggc

SEQ ID NO: 1205439 - RNA, 20 nt, Human
acacugcaaaacgaacacag

SEQ ID NO: 1205440 - RNA, 19 nt, Human
accuucucucugcccccau

SEQ ID NO: 1205441 - RNA, 22 nt, Human
acgaacacagccucagaaaagc

SEQ ID NO: 1205442 - RNA, 25 nt, Human
agaaaagcuggagccagggcucaga

SEQ ID NO: 1205443 - RNA, 19 nt, Human
agaccuucucucugccccc

SEQ ID NO: 1205444 - RNA, 24 nt, Human
agccucagaaaagcuggagccagg

SEQ ID NO: 1205445 - RNA, 20 nt, Human
cacacugcaaaacgaacacc

SEQ ID NO: 1205446 - RNA, 20 nt, Human
cagaccuucucucugccccc

SEQ ID NO: 1205447 - RNA, 22 nt, Human
cagagagugacucacuggacac

SEQ ID NO: 1205448 - RNA, 19 nt, Human
cagcagaggguuugguagg

SEQ ID NO: 1205449 - RNA, 25 nt, Human
cagccucagaaaagcuggagccagg

SEQ ID NO: 1205450 - RNA, 19 nt, Human
ccccucugcuagcuuccuu

SEQ ID NO: 1205451 - RNA, 18 nt, Human
ccuccgcaacgcaggcuc

SEQ ID NO: 1205452 - RNA, 23 nt, Human
ccucugagccccucugcuagcuu

SEQ ID NO: 1205453 - RNA, 20 nt, Human
ccuuuuccggguuuuugucc

SEQ ID NO: 1205454 - RNA, 24 nt, Human
cggcguggagagaauggggcuugc

SEQ ID NO: 1205455 - RNA, 20 nt, Human
cucugcuagcuuccuuuucc

SEQ ID NO: 1205456 - RNA, 20 nt, Human
cugcccccaucuuugugccc

SEQ ID NO: 1205457 - RNA, 20 nt, Human
cugcccccaucuuugugccc

SEQ ID NO: 1205458 - RNA, 20 nt, Human
gaagggucccggggagcccg

SEQ ID NO: 1205459 - RNA, 18 nt, Human
gaguaaggaaccguaugg

SEQ ID NO: 1205460 - RNA, 18 nt, Human
gcaaaacgaacacagccu

SEQ ID NO: 1205461 - RNA, 21 nt, Human
gccugcccucugagccccucu

SEQ ID NO: 1205462 - RNA, 22 nt, Human
gcguuggggcgcgggugcgggg

SEQ ID NO: 1205463 - RNA, 18 nt, Human
gggcgcgggugcggggag

SEQ ID NO: 1205464 - RNA, 20 nt, Human
guggaaggccuaucugcccc

SEQ ID NO: 1205465 - RNA, 18 nt, Human
guggagaagucacgaaug

SEQ ID NO: 1205466 - RNA, 20 nt, Human
guuggggcgcgggugcgggg

SEQ ID NO: 1205467 - RNA, 23 nt, Human
uagcuuccuuuuccggguuuuug

SEQ ID NO: 1205468 - RNA, 19 nt, Human
ucccggggagcccggcugc

SEQ ID NO: 1205469 - RNA, 23 nt, Human
ugacucacuggacacccuccuac

SEQ ID NO: 1205470 - RNA, 23 nt, Human
ugagucagcaaccugcuggugcc

SEQ ID NO: 1205471 - RNA, 26 nt, Human
ugaugagcggcguggagagaaugggg

SEQ ID NO: 1205472 - RNA, 21 nt, Human
ugcaaaacgaacacagccuca

SEQ ID NO: 1205473 - RNA, 19 nt, Human
ugcccugagauguuccagc

SEQ ID NO: 1205474 - RNA, 21 nt, Human
ugccugcccucugagccccuc

SEQ ID NO: 1205475 - RNA, 23 nt, Human
ugcggggaguguccuugggugga

SEQ ID NO: 1205476 - RNA, 25 nt, Human
ugcuagcuuccuuuuccggguuuuu

SEQ ID NO: 1205477 - RNA, 19 nt, Human
ugcuggugccuggugucag

SEQ ID NO: 1205478 - RNA, 26 nt, Human
ugucagcaguuuccggucagagagug

SEQ ID NO: 1205479 - RNA, 22 nt, Human
ugugaaggcguuggggcgcggg

SEQ ID NO: 1205480 - RNA, 24 nt, Human
uucuggucugguaaacacuguugg

SEQ ID NO: 1205481 - RNA, 20 nt, Human
uuuuccgcaaguacucccag

SEQ ID NO: 1205482 - RNA, 22 nt, Human
caagaggggaggggcuccgguu

SEQ ID NO: 1205483 - RNA, 21 nt, Human
ccugcgggcggagcgacuguc

SEQ ID NO: 1205484 - RNA, 18 nt, Human
gcggagcgacuguccucc

SEQ ID NO: 1205485 - RNA, 18 nt, Human
gcguccgaacagcccugc

SEQ ID NO: 1205486 - RNA, 19 nt, Human
gggaggggcuccgguggug

SEQ ID NO: 1205487 - RNA, 20 nt, Human
ggggaggggcuccgguggug

SEQ ID NO: 1205488 - RNA, 18 nt, Human
guaaggagcaagagggga

SEQ ID NO: 1205489 - RNA, 19 nt, Human
guccgaacagcccugcggg

SEQ ID NO: 1205490 - RNA, 24 nt, Human
uguaaggagcaagaggggaggggc

SEQ ID NO: 1205491 - RNA, 19 nt, Human
uguccucccuucuggugua

SEQ ID NO: 1205492 - RNA, 18 nt, Human
cagcccagcgaggaccgg

SEQ ID NO: 1205493 - RNA, 20 nt, Human
caguucuggauccucuuccu

SEQ ID NO: 1205494 - RNA, 19 nt, Human
ccagcgaggaccggcugca

SEQ ID NO: 1205495 - RNA, 25 nt, Human
ccggcugcaguucuggauccucuuc

SEQ ID NO: 1205496 - RNA, 22 nt, Human
ccuacugugugcaggacacugu

SEQ ID NO: 1205497 - RNA, 19 nt, Human
cugcuccacuucagauaug

SEQ ID NO: 1205498 - RNA, 24 nt, Human
gcaguucuggauccucuuccugcu

SEQ ID NO: 1205499 - RNA, 20 nt, Human
uacugugugcaggacacugu

SEQ ID NO: 1205500 - RNA, 20 nt, Human
aaacagagaccaacgcugug

SEQ ID NO: 1205501 - RNA, 27 nt, Human
aaagaaauaaaaacucuggguagaggg

SEQ ID NO: 1205502 - RNA, 23 nt, Human
aagaacugcgaaagggaaauggc

SEQ ID NO: 1205503 - RNA, 23 nt, Human
acagagaaaggcagugcauuugg

SEQ ID NO: 1205504 - RNA, 24 nt, Human
acucuucccuucuucuuucugucg

SEQ ID NO: 1205505 - RNA, 19 nt, Human
agguguggugggaggcggu

SEQ ID NO: 1205506 - RNA, 20 nt, Human
agucauggggacagagaaag

SEQ ID NO: 1205507 - RNA, 18 nt, Human
auggggacagagaaaggc

SEQ ID NO: 1205508 - RNA, 18 nt, Human
caccagaugaccagcuga

SEQ ID NO: 1205509 - RNA, 20 nt, Human
caccagaugaccagcugaau

SEQ ID NO: 1205510 - RNA, 23 nt, Human
cauccuccacaagcagcugggag

SEQ ID NO: 1205511 - RNA, 19 nt, Human
caugugugugucuguauau

SEQ ID NO: 1205512 - RNA, 19 nt, Human
ccagaccuuucuuuuucca

SEQ ID NO: 1205513 - RNA, 20 nt, Human
cccacaguaauccucugaag

SEQ ID NO: 1205514 - RNA, 18 nt, Human
cccauccuacccccacgc

SEQ ID NO: 1205515 - RNA, 23 nt, Human
cccccauccuacccccacgccug

SEQ ID NO: 1205516 - RNA, 18 nt, Human
cccuuugggggugccuca

SEQ ID NO: 1205517 - RNA, 21 nt, Human
ccucuuccagaccuuucuuuu

SEQ ID NO: 1205518 - RNA, 18 nt, Human
ccuggggcaguggaggcc

SEQ ID NO: 1205519 - RNA, 19 nt, Human
cgaaagggaaauggcccac

SEQ ID NO: 1205520 - RNA, 26 nt, Human
gaacacucagacuaauuaaagaaaua

SEQ ID NO: 1205521 - RNA, 19 nt, Human
gaacugcgaaagggaaaug

SEQ ID NO: 1205522 - RNA, 23 nt, Human
gaccguaugcuucccauuugggg

SEQ ID NO: 1205523 - RNA, 21 nt, Human
gaccuuucuuuuuccauuugg

SEQ ID NO: 1205524 - RNA, 25 nt, Human
gaccuuucuuuuuccauuuggaguu

SEQ ID NO: 1205525 - RNA, 20 nt, Human
gcacaucgcccuuugggggu

SEQ ID NO: 1205526 - RNA, 18 nt, Human
gcccccauccuaccccca

SEQ ID NO: 1205527 - RNA, 21 nt, Human
gcgaaagggaaauggcccaca

SEQ ID NO: 1205528 - RNA, 19 nt, Human
ggagauggugaugaagggg

SEQ ID NO: 1205529 - RNA, 23 nt, Human
ggaggccaggaacagguggcagg

SEQ ID NO: 1205530 - RNA, 23 nt, Human
ggcagugcauuuggcuucuaggg

SEQ ID NO: 1205531 - RNA, 23 nt, Human
gguagagggacacucuggggggc

SEQ ID NO: 1205532 - RNA, 20 nt, Human
guggugggaggcggugggcc

SEQ ID NO: 1205533 - RNA, 20 nt, Human
uauuacauccuccacaagca

SEQ ID NO: 1205534 - RNA, 21 nt, Human
ucaguccuggggcaguggagg

SEQ ID NO: 1205535 - RNA, 25 nt, Human
uccacaagcagcugggagcccccau

SEQ ID NO: 1205536 - RNA, 19 nt, Human
uccaguuggcucuguuccu

SEQ ID NO: 1205537 - RNA, 22 nt, Human
uccuccacaagcagcugggagc

SEQ ID NO: 1205538 - RNA, 24 nt, Human
ucucgaacaaccaccggauggucu

SEQ ID NO: 1205539 - RNA, 21 nt, Human
ugaaggggcuggcggccaggu

SEQ ID NO: 1205540 - RNA, 23 nt, Human
ugaaggggcuggcggccaggucc

SEQ ID NO: 1205541 - RNA, 18 nt, Human
ugaccuuugggccaccag

SEQ ID NO: 1205542 - RNA, 19 nt, Human
ugccucaggcugggggucu

SEQ ID NO: 1205543 - RNA, 26 nt, Human
ugggccucuuccagaccuuucuuuuu

SEQ ID NO: 1205544 - RNA, 18 nt, Human
ugggggacagucaugggg

SEQ ID NO: 1205545 - RNA, 22 nt, Human
ugggggucucccugacucuucc

SEQ ID NO: 1205546 - RNA, 21 nt, Human
uguggugggaggcggugggcc

SEQ ID NO: 1205547 - RNA, 21 nt, Human
ugugugaaaaacaugugugug

SEQ ID NO: 1205548 - RNA, 22 nt, Human
uuggcucuguuccucuccaggg

SEQ ID NO: 1205549 - RNA, 21 nt, Human
uuugggggugccucaggcugg

SEQ ID NO: 1205550 - RNA, 20 nt, Human
cacacagcucuugccaccaa

SEQ ID NO: 1205551 - RNA, 23 nt, Human
cacacagcucuugccaccaagaa

SEQ ID NO: 1205552 - RNA, 20 nt, Human
cagcucuugccaccaagaac

SEQ ID NO: 1205553 - RNA, 22 nt, Human
ccuuccuuccccucaggcuucc

SEQ ID NO: 1205554 - RNA, 18 nt, Human
cgcccguacuuccuuccu

SEQ ID NO: 1205555 - RNA, 19 nt, Human
cugagauucuuucuccuuu

SEQ ID NO: 1205556 - RNA, 18 nt, Human
cuuugcucuccauuucgg

SEQ ID NO: 1205557 - RNA, 22 nt, Human
gcuucagauucccaaaucuggg

SEQ ID NO: 1205558 - RNA, 18 nt, Human
gggaagccaaucugauga

SEQ ID NO: 1205559 - RNA, 23 nt, Human
uccuuccuuccccucaggcuucc

SEQ ID NO: 1205560 - RNA, 19 nt, Human
ucuuuucggauguauuucu

SEQ ID NO: 1205561 - RNA, 21 nt, Human
ugaacugauucuuuucggaug

SEQ ID NO: 1205562 - RNA, 24 nt, Human
ugccaccaagaacgacagcaaaag

SEQ ID NO: 1205563 - RNA, 19 nt, Human
ugucuggauugacauagaa

SEQ ID NO: 1205564 - RNA, 18 nt, Human
ugugggcccgcuucagau

SEQ ID NO: 1205565 - RNA, 24 nt, Human
uucaaaagacuuugcucuccauuu

SEQ ID NO: 1205566 - RNA, 19 nt, Human
auaccuuucucuucuuucu

SEQ ID NO: 1205567 - RNA, 22 nt, Human
cugaugacaggaaagggcucuu

SEQ ID NO: 1205568 - RNA, 24 nt, Human
uaccuuucucuucuuucuucuuca

SEQ ID NO: 1205569 - RNA, 23 nt, Human
ucucugaugacaggaaagggcuc

SEQ ID NO: 1205570 - RNA, 19 nt, Human
uuucucuucuuucuucuuc

SEQ ID NO: 1205571 - RNA, 26 nt, Human
aacuguggggcuguuagggaagcuuu

SEQ ID NO: 1205572 - RNA, 26 nt, Human
aagcagcccaggccggcuuggccuuc

SEQ ID NO: 1205573 - RNA, 20 nt, Human
acccacagcgaguggaucca

SEQ ID NO: 1205574 - RNA, 24 nt, Human
acggaauccgggaucaggaaaacc

SEQ ID NO: 1205575 - RNA, 19 nt, Human
agccugggaggaggguggg

SEQ ID NO: 1205576 - RNA, 24 nt, Human
aucaggaaaaccuguccaagcuuc

SEQ ID NO: 1205577 - RNA, 22 nt, Human
caaaaaacccauugacgcuuuc

SEQ ID NO: 1205578 - RNA, 23 nt, Human
cauuuggagaucuaagccgccaa

SEQ ID NO: 1205579 - RNA, 24 nt, Human
cccaaaagcuuagcgcgaguuucc

SEQ ID NO: 1205580 - RNA, 18 nt, Human
ccccggaaucccaaaagc

SEQ ID NO: 1205581 - RNA, 23 nt, Human
ccccuuaauuugcagaugccgcc

SEQ ID NO: 1205582 - RNA, 25 nt, Human
cccgcagggacccacagcgagugga

SEQ ID NO: 1205583 - RNA, 18 nt, Human
ccgcagagcagaggcgca

SEQ ID NO: 1205584 - RNA, 21 nt, Human
ccucucuacaaaccuuuccca

SEQ ID NO: 1205585 - RNA, 21 nt, Human
ccuucggggccuccuccggac

SEQ ID NO: 1205586 - RNA, 21 nt, Human
ccuucuccuggagcgagaacc

SEQ ID NO: 1205587 - RNA, 23 nt, Human
cgcgaguuuccucucuacaaacc

SEQ ID NO: 1205588 - RNA, 19 nt, Human
cgggaucaggaaaaccugu

SEQ ID NO: 1205589 - RNA, 21 nt, Human
cgggaucaggaaaaccugucc

SEQ ID NO: 1205590 - RNA, 21 nt, Human
cugaggcccgcagggacccac

SEQ ID NO: 1205591 - RNA, 22 nt, Human
cugcgguagaucuugcucugca

SEQ ID NO: 1205592 - RNA, 19 nt, Human
gaagggacggaauccggga

SEQ ID NO: 1205593 - RNA, 19 nt, Human
gagcuuagguccuccagga

SEQ ID NO: 1205594 - RNA, 21 nt, Human
ggaauccuaacuguggggcug

SEQ ID NO: 1205595 - RNA, 18 nt, Human
ggcgagugauuaagcagc

SEQ ID NO: 1205596 - RNA, 21 nt, Human
ucccagaguccaggcgaagcg

SEQ ID NO: 1205597 - RNA, 23 nt, Human
ucccagaguccaggcgaagcgcu

SEQ ID NO: 1205598 - RNA, 27 nt, Human
uccggacuucccucgacagccgcucuc

SEQ ID NO: 1205599 - RNA, 21 nt, Human
uccuccggacuucccucgaca

SEQ ID NO: 1205600 - RNA, 19 nt, Human
ucuaagccgccaaaggcga

SEQ ID NO: 1205601 - RNA, 20 nt, Human
ucucugcgguagaucuugcu

SEQ ID NO: 1205602 - RNA, 18 nt, Human
ucuugcucugcacuugcu

SEQ ID NO: 1205603 - RNA, 20 nt, Human
ucuugcucugcacuugcucu

SEQ ID NO: 1205604 - RNA, 21 nt, Human
ugagagcuuagguccuccagg

SEQ ID NO: 1205605 - RNA, 18 nt, Human
ugagccugggaggagggu

SEQ ID NO: 1205606 - RNA, 23 nt, Human
ugagccugggaggaggguggggg

SEQ ID NO: 1205607 - RNA, 28 nt, Human
uggagcgagaacccacaaaaaacccauu

SEQ ID NO: 1205608 - RNA, 18 nt, Human
uggccuucggggccuccu

SEQ ID NO: 1205609 - RNA, 21 nt, Human
uuagggaagcuuuguuucuug

SEQ ID NO: 1205610 - RNA, 23 nt, Human
uugcucuguccccuuaauuugca

SEQ ID NO: 1205611 - RNA, 21 nt, Human
auggaggacugcccuugacca

SEQ ID NO: 1205612 - RNA, 21 nt, Human
ccauggaggacugcccuugac

SEQ ID NO: 1205613 - RNA, 21 nt, Human
gcccuugaccaccuggaacug

SEQ ID NO: 1205614 - RNA, 18 nt, Human
ucuccauggaggacugcc

SEQ ID NO: 1205615 - RNA, 22 nt, Human
acaacguguguccgucuuccag

SEQ ID NO: 1205616 - RNA, 24 nt, Human
aggcacccaaagcaccccgagccc

SEQ ID NO: 1205617 - RNA, 18 nt, Human
augcagccgcugcugcuu

SEQ ID NO: 1205618 - RNA, 27 nt, Human
caaagcaccccgagcccaugguucccc

SEQ ID NO: 1205619 - RNA, 20 nt, Human
cacccaaagcaccccgagcc

SEQ ID NO: 1205620 - RNA, 21 nt, Human
cccaaagcaccccgagcccau

SEQ ID NO: 1205621 - RNA, 18 nt, Human
ccgcaggguuuggggacc

SEQ ID NO: 1205622 - RNA, 25 nt, Human
cucaaccguuggcuuuucccuacaa

SEQ ID NO: 1205623 - RNA, 22 nt, Human
gcgaagcgccgguuugggcggg

SEQ ID NO: 1205624 - RNA, 25 nt, Human
ucagccugaacagugggugggccgg

SEQ ID NO: 1205625 - RNA, 21 nt, Human
uccccaugcaguacuccggcu

SEQ ID NO: 1205626 - RNA, 18 nt, Human
ugaacagugggugggccg

SEQ ID NO: 1205627 - RNA, 21 nt, Human
ugcuuggagcagagaugaaga

SEQ ID NO: 1205628 - RNA, 22 nt, Human
ugcuuggagcagagaugaagaa

SEQ ID NO: 1205629 - RNA, 21 nt, Human
ugggugggccggcaaugacaa

SEQ ID NO: 1205630 - RNA, 19 nt, Human
uuggagcagagaugaagaa

SEQ ID NO: 1205631 - RNA, 23 nt, Human
aaguggcucuuccagggagaagg

SEQ ID NO: 1205632 - RNA, 20 nt, Human
acucgcuccuccaccgagcc

SEQ ID NO: 1205633 - RNA, 20 nt, Human
agaaggaagggaccugaaaa

SEQ ID NO: 1205634 - RNA, 23 nt, Human
agacagacgagaccauugccagg

SEQ ID NO: 1205635 - RNA, 21 nt, Human
aggaagggaccugaaaauccg

SEQ ID NO: 1205636 - RNA, 20 nt, Human
caccugccuucgggaauggg

SEQ ID NO: 1205637 - RNA, 20 nt, Human
caggaggagacucugggugg

SEQ ID NO: 1205638 - RNA, 22 nt, Human
caggaggagacucuggguggug

SEQ ID NO: 1205639 - RNA, 20 nt, Human
cagugguggugggccccuug

SEQ ID NO: 1205640 - RNA, 21 nt, Human
ccaacccagacagacgagacc

SEQ ID NO: 1205641 - RNA, 24 nt, Human
ccaacccagacagacgagaccauu

SEQ ID NO: 1205642 - RNA, 30 nt, Human
ccaacccagacagacgagaccauugccagg

SEQ ID NO: 1205643 - RNA, 20 nt, Human
ccacuccgcagccucuggug

SEQ ID NO: 1205644 - RNA, 19 nt, Human
ccccagcggucaaaagcuc

SEQ ID NO: 1205645 - RNA, 25 nt, Human
ccccagcggucaaaagcucuuugcu

SEQ ID NO: 1205646 - RNA, 18 nt, Human
cccugcucugggccuuuc

SEQ ID NO: 1205647 - RNA, 19 nt, Human
ccgcagccucugguggugc

SEQ ID NO: 1205648 - RNA, 24 nt, Human
ccuccgcggcuaugcagacggcuu

SEQ ID NO: 1205649 - RNA, 19 nt, Human
cgcagaagccccaaccucc

SEQ ID NO: 1205650 - RNA, 22 nt, Human
cuccgcggcuaugcagacggcu

SEQ ID NO: 1205651 - RNA, 25 nt, Human
cucugggugguggggcagugguggu

SEQ ID NO: 1205652 - RNA, 20 nt, Human
gaccugaaaauccgugaaga

SEQ ID NO: 1205653 - RNA, 20 nt, Human
gagccacagguucugaucag

SEQ ID NO: 1205654 - RNA, 24 nt, Human
gaggacgcagaagccccaaccucc

SEQ ID NO: 1205655 - RNA, 25 nt, Human
gaggggaccuugaggcucagaaggg

SEQ ID NO: 1205656 - RNA, 20 nt, Human
gcagugguggugggccccuu

SEQ ID NO: 1205657 - RNA, 20 nt, Human
gcagugguggugggccccuu

SEQ ID NO: 1205658 - RNA, 19 nt, Human
gccagucuuucugagcugg

SEQ ID NO: 1205659 - RNA, 19 nt, Human
gccugcuauacuuccugcu

SEQ ID NO: 1205660 - RNA, 20 nt, Human
gccuuucgaagccugugggc

SEQ ID NO: 1205661 - RNA, 19 nt, Human
ggagucacagaagguucug

SEQ ID NO: 1205662 - RNA, 22 nt, Human
gggcagugguggugggccccuu

SEQ ID NO: 1205663 - RNA, 19 nt, Human
gggccccuuggccacucgc

SEQ ID NO: 1205664 - RNA, 21 nt, Human
gggccggggcgcgccagcgcc

SEQ ID NO: 1205665 - RNA, 22 nt, Human
gggccuuucgaagccugugggc

SEQ ID NO: 1205666 - RNA, 22 nt, Human
gugguggugggccccuuggcca

SEQ ID NO: 1205667 - RNA, 22 nt, Human
uaguucaugaagaaggaaggga

SEQ ID NO: 1205668 - RNA, 20 nt, Human
uccgcagccucugguggugc

SEQ ID NO: 1205669 - RNA, 25 nt, Human
ucuggccacuccgcagccucuggug

SEQ ID NO: 1205670 - RNA, 22 nt, Human
ucugggacuggagcggugagga

SEQ ID NO: 1205671 - RNA, 28 nt, Human
ucuuccagggagaagguucuggagcugg

SEQ ID NO: 1205672 - RNA, 23 nt, Human
ucuuucugagcugggcucugcgg

SEQ ID NO: 1205673 - RNA, 21 nt, Human
ugaggacgcagaagccccaac

SEQ ID NO: 1205674 - RNA, 22 nt, Human
ugaggacgcagaagccccaacc

SEQ ID NO: 1205675 - RNA, 18 nt, Human
ugcuuuguggacagcucc

SEQ ID NO: 1205676 - RNA, 21 nt, Human
uggaaaguggcccugcauaga

SEQ ID NO: 1205677 - RNA, 21 nt, Human
ugggaacugagaguugccugc

SEQ ID NO: 1205678 - RNA, 23 nt, Human
ugggccccagcggucaagacccu

SEQ ID NO: 1205679 - RNA, 28 nt, Human
ugggccccuuggccacucgggagguccc

SEQ ID NO: 1205680 - RNA, 19 nt, Human
uggugggccccuuggccac

SEQ ID NO: 1205681 - RNA, 19 nt, Human
ugguggggcagugguggug

SEQ ID NO: 1205682 - RNA, 20 nt, Human
ugguggugggccccuuggcc

SEQ ID NO: 1205683 - RNA, 22 nt, Human
ugucccugcucugggccuuucg

SEQ ID NO: 1205684 - RNA, 24 nt, Human
uguggagccuuauguggaaguacu

SEQ ID NO: 1205685 - RNA, 18 nt, Human
uuccguucugagcuuugc

SEQ ID NO: 1205686 - RNA, 21 nt, Human
uuucugagcugggcucugcgg

SEQ ID NO: 1205687 - RNA, 20 nt, Human
aaaaugccggcucggccucc

SEQ ID NO: 1205688 - RNA, 20 nt, Human
aaagugcugggauuccuggc

SEQ ID NO: 1205689 - RNA, 24 nt, Human
aaagugcugggauuccuggcguga

SEQ ID NO: 1205690 - RNA, 20 nt, Human
aagccgcuagccagcagccc

SEQ ID NO: 1205691 - RNA, 20 nt, Human
acaaagaggacaaucuagac

SEQ ID NO: 1205692 - RNA, 18 nt, Human
acaagcgaggcucaucac

SEQ ID NO: 1205693 - RNA, 24 nt, Human
agaaguggacaccccaccaggccc

SEQ ID NO: 1205694 - RNA, 18 nt, Human
agagcgcagccgccagcu

SEQ ID NO: 1205695 - RNA, 22 nt, Human
agccagcagccccagcgcgccc

SEQ ID NO: 1205696 - RNA, 24 nt, Human
caaagugcugggauuccuggcgug

SEQ ID NO: 1205697 - RNA, 22 nt, Human
cacccuguauuccgcauaagac

SEQ ID NO: 1205698 - RNA, 19 nt, Human
caccugcucccuguucuuc

SEQ ID NO: 1205699 - RNA, 22 nt, Human
cagcagccccagcgcgcccgcc

SEQ ID NO: 1205700 - RNA, 20 nt, Human
cagccagagcgcagccgcca

SEQ ID NO: 1205701 - RNA, 24 nt, Human
caggaugcccauuuuuuaaaggcu

SEQ ID NO: 1205702 - RNA, 18 nt, Human
caucgggcaggguccugg

SEQ ID NO: 1205703 - RNA, 23 nt, Human
caucgggcaggguccuggcccug

SEQ ID NO: 1205704 - RNA, 22 nt, Human
ccaaagugcugggauuccuggc

SEQ ID NO: 1205705 - RNA, 24 nt, Human
ccaaagugcugggauuccuggcgu

SEQ ID NO: 1205706 - RNA, 20 nt, Human
ccagaaguggacaccccacc

SEQ ID NO: 1205707 - RNA, 19 nt, Human
ccaggcccacgagaagcgg

SEQ ID NO: 1205708 - RNA, 25 nt, Human
ccaggcccacgagaagcggcccacg

SEQ ID NO: 1205709 - RNA, 18 nt, Human
cccagcgcgcccgccaca

SEQ ID NO: 1205710 - RNA, 20 nt, Human
ccccaccaggcccacgagaa

SEQ ID NO: 1205711 - RNA, 18 nt, Human
ccgcggccaacgccaggg

SEQ ID NO: 1205712 - RNA, 19 nt, Human
ccggcucggccucccaaag

SEQ ID NO: 1205713 - RNA, 20 nt, Human
cgcggcagccaccgcggcca

SEQ ID NO: 1205714 - RNA, 22 nt, Human
cggcccacgcggccugggcccg

SEQ ID NO: 1205715 - RNA, 24 nt, Human
cgugcuccgugggcggccuggguc

SEQ ID NO: 1205716 - RNA, 20 nt, Human
cucccaaagugcugggauuc

SEQ ID NO: 1205717 - RNA, 19 nt, Human
cucccuguucuucaugccc

SEQ ID NO: 1205718 - RNA, 18 nt, Human
gauuccuggcgugagcca

SEQ ID NO: 1205719 - RNA, 21 nt, Human
gauuccuggcgugagccaccg

SEQ ID NO: 1205720 - RNA, 21 nt, Human
gcacaaagaggacaaucuaga

SEQ ID NO: 1205721 - RNA, 24 nt, Human
gggcgagcgcccaugucagcucca

SEQ ID NO: 1205722 - RNA, 22 nt, Human
ggguacagccagagcgcagccg

SEQ ID NO: 1205723 - RNA, 20 nt, Human
uagcccagcaagcgugcucc

SEQ ID NO: 1205724 - RNA, 19 nt, Human
uccaugcacacccacccug

SEQ ID NO: 1205725 - RNA, 24 nt, Human
ucccaaagugcugggauuccuggc

SEQ ID NO: 1205726 - RNA, 18 nt, Human
ucggccucccaaagugcu

SEQ ID NO: 1205727 - RNA, 19 nt, Human
ugcccgaauccaugcacac

SEQ ID NO: 1205728 - RNA, 21 nt, Human
ugcucccuguucuucaugccc

SEQ ID NO: 1205729 - RNA, 18 nt, Human
ugcuccgugggcggccug

SEQ ID NO: 1205730 - RNA, 19 nt, Human
uggccaggaugcccauuuu

SEQ ID NO: 1205731 - RNA, 23 nt, Human
ugggauuccuggcgugagccacc

SEQ ID NO: 1205732 - RNA, 24 nt, Human
ugggauuccuggcgugagccaccg

SEQ ID NO: 1205733 - RNA, 18 nt, Human
ugugggcaucgggcaggg

SEQ ID NO: 1205734 - RNA, 19 nt, Human
uccacagauggcaaagggc

SEQ ID NO: 1205735 - RNA, 22 nt, Human
uggcaaagggccuggugcuccc

SEQ ID NO: 1205736 - RNA, 23 nt, Human
uggcaaagggccuggugcuccca

SEQ ID NO: 1205737 - RNA, 23 nt, Human
ugugcaugcccgccgaacagagg

SEQ ID NO: 1205738 - RNA, 21 nt, Human
aaacaagugaugccgcuuccu

SEQ ID NO: 1205739 - RNA, 22 nt, Human
augcgcaggacaugaaaaacaa

SEQ ID NO: 1205740 - RNA, 21 nt, Human
cuuccuuauaccgcuguugca

SEQ ID NO: 1205741 - RNA, 20 nt, Human
ggacaugaaaaacaagugau

SEQ ID NO: 1205742 - RNA, 19 nt, Human
ugaaaaacaagugaugccg

SEQ ID NO: 1205743 - RNA, 25 nt, Human
uuccuuauaccgcuguugcaaguac

SEQ ID NO: 1205744 - RNA, 21 nt, Human
aagcugcucaaggcucuccca

SEQ ID NO: 1205745 - RNA, 24 nt, Human
acaaagccacaagguucuccaugg

SEQ ID NO: 1205746 - RNA, 21 nt, Human
acaagcuccaggaccucaaga

SEQ ID NO: 1205747 - RNA, 19 nt, Human
accugcagccauacccccc

SEQ ID NO: 1205748 - RNA, 19 nt, Human
agaagagaagcuugggggu

SEQ ID NO: 1205749 - RNA, 19 nt, Human
agaguagggggcagcacag

SEQ ID NO: 1205750 - RNA, 19 nt, Human
agcccccagccuggcccag

SEQ ID NO: 1205751 - RNA, 19 nt, Human
aggcagggcguucaagccc

SEQ ID NO: 1205752 - RNA, 20 nt, Human
aggcuggcucagaggccggc

SEQ ID NO: 1205753 - RNA, 19 nt, Human
agggggccccccagcaaac

SEQ ID NO: 1205754 - RNA, 21 nt, Human
augguccugggcagcccagga

SEQ ID NO: 1205755 - RNA, 18 nt, Human
auucugcugccucguggc

SEQ ID NO: 1205756 - RNA, 20 nt, Human
caacucugagggaugcagaa

SEQ ID NO: 1205757 - RNA, 20 nt, Human
cacagcccccagccuggccc

SEQ ID NO: 1205758 - RNA, 21 nt, Human
cacagcccccagccuggccca

SEQ ID NO: 1205759 - RNA, 18 nt, Human
caccagcccagacaaagc

SEQ ID NO: 1205760 - RNA, 18 nt, Human
cacuggggcuucaucuuc

SEQ ID NO: 1205761 - RNA, 24 nt, Human
cagaguagggggcagcacaguucu

SEQ ID NO: 1205762 - RNA, 19 nt, Human
cagcacaguucugagguuc

SEQ ID NO: 1205763 - RNA, 20 nt, Human
cagccauaccccccguccug

SEQ ID NO: 1205764 - RNA, 20 nt, Human
cagcccagacaaagccacaa

SEQ ID NO: 1205765 - RNA, 18 nt, Human
cagcccaggaggcagcag

SEQ ID NO: 1205766 - RNA, 20 nt, Human
cagcccaggaggcagcagcc

SEQ ID NO: 1205767 - RNA, 24 nt, Human
cagcggagccgcagccgaccccug

SEQ ID NO: 1205768 - RNA, 18 nt, Human
caggaacugugggcuggg

SEQ ID NO: 1205769 - RNA, 22 nt, Human
caguaccugugaucaggagucc

SEQ ID NO: 1205770 - RNA, 20 nt, Human
cauggcaugguccugggcag

SEQ ID NO: 1205771 - RNA, 18 nt, Human
ccaccagcccagacaaag

SEQ ID NO: 1205772 - RNA, 21 nt, Human
ccaccagcccagacaaagcca

SEQ ID NO: 1205773 - RNA, 19 nt, Human
ccacugggagaacacagaa

SEQ ID NO: 1205774 - RNA, 24 nt, Human
ccaggacagggaugucugcuucau

SEQ ID NO: 1205775 - RNA, 19 nt, Human
cccagcggagccgcagccg

SEQ ID NO: 1205776 - RNA, 21 nt, Human
cccagcggagccgcagccgca

SEQ ID NO: 1205777 - RNA, 20 nt, Human
ccccacuccccucacaucug

SEQ ID NO: 1205778 - RNA, 21 nt, Human
ccccaggggcuuccaguaccu

SEQ ID NO: 1205779 - RNA, 19 nt, Human
ccccccagcaaacuuggcu

SEQ ID NO: 1205780 - RNA, 23 nt, Human
ccccugggcgaaccucccagccc

SEQ ID NO: 1205781 - RNA, 24 nt, Human
ccccugggcgaaccucccagcccc

SEQ ID NO: 1205782 - RNA, 18 nt, Human
cccgggcuggggcccggg

SEQ ID NO: 1205783 - RNA, 23 nt, Human
ccuaugaacaugaagcugagggu

SEQ ID NO: 1205784 - RNA, 21 nt, Human
ccugcagccauaccccccguc

SEQ ID NO: 1205785 - RNA, 21 nt, Human
ccugccgcuguguccucccca

SEQ ID NO: 1205786 - RNA, 18 nt, Human
ccuuucagcuccccuccc

SEQ ID NO: 1205787 - RNA, 22 nt, Human
cgaaccucccagccccaacucu

SEQ ID NO: 1205788 - RNA, 24 nt, Human
cgcgcccgaagccugcggaaccgg

SEQ ID NO: 1205789 - RNA, 21 nt, Human
cggagccgcagccgcauucug

SEQ ID NO: 1205790 - RNA, 20 nt, Human
cggcugaggcgcagcggcga

SEQ ID NO: 1205791 - RNA, 18 nt, Human
cucccagccccaacucug

SEQ ID NO: 1205792 - RNA, 19 nt, Human
cugcagucuggccuguacc

SEQ ID NO: 1205793 - RNA, 23 nt, Human
cugcuucauuggcggggguaggg

SEQ ID NO: 1205794 - RNA, 20 nt, Human
cuggcacagcccccagccug

SEQ ID NO: 1205795 - RNA, 24 nt, Human
cugggcgaaccucccagccccaac

SEQ ID NO: 1205796 - RNA, 21 nt, Human
cuggggcuucaucuucuugac

SEQ ID NO: 1205797 - RNA, 19 nt, Human
cuguccugcugccagcugg

SEQ ID NO: 1205798 - RNA, 23 nt, Human
cuucccuucuaacaccugcagcc

SEQ ID NO: 1205799 - RNA, 23 nt, Human
cuuuccccacuccccucacaucu

SEQ ID NO: 1205800 - RNA, 18 nt, Human
gaaccgguuaagccgcgg

SEQ ID NO: 1205801 - RNA, 22 nt, Human
gacuaugaaguccacccugaag

SEQ ID NO: 1205802 - RNA, 19 nt, Human
gagagccagaguggggcug

SEQ ID NO: 1205803 - RNA, 19 nt, Human
gccauggccccggggggcc

SEQ ID NO: 1205804 - RNA, 23 nt, Human
gcccgggcuggggcccgggcccu

SEQ ID NO: 1205805 - RNA, 26 nt, Human
gccgaggccauguucucaacagaaga

SEQ ID NO: 1205806 - RNA, 18 nt, Human
gcucacuggggcuucauc

SEQ ID NO: 1205807 - RNA, 23 nt, Human
gcuguguccuccccacaucugga

SEQ ID NO: 1205808 - RNA, 24 nt, Human
ggcaaggaaaggggcucacagagg

SEQ ID NO: 1205809 - RNA, 22 nt, Human
ggcagcacaguucugagguucc

SEQ ID NO: 1205810 - RNA, 18 nt, Human
ggccccugggcgaaccuc

SEQ ID NO: 1205811 - RNA, 18 nt, Human
ggcucagaggccggcacc

SEQ ID NO: 1205812 - RNA, 18 nt, Human
gggaugucugcuucauug

SEQ ID NO: 1205813 - RNA, 23 nt, Human
gggcagggccauggccccggggg

SEQ ID NO: 1205814 - RNA, 21 nt, Human
gggccccugggcgaaccuccc

SEQ ID NO: 1205815 - RNA, 24 nt, Human
gggcccucggcugcugacgcgccc

SEQ ID NO: 1205816 - RNA, 20 nt, Human
ggggcagcacaguucugagg

SEQ ID NO: 1205817 - RNA, 22 nt, Human
gggucagagccagagugggaga

SEQ ID NO: 1205818 - RNA, 21 nt, Human
ggguguuggggucagagccag

SEQ ID NO: 1205819 - RNA, 23 nt, Human
ggucuggguccccagggcaggau

SEQ ID NO: 1205820 - RNA, 24 nt, Human
gucccauucggcaaggaaaggggc

SEQ ID NO: 1205821 - RNA, 18 nt, Human
uaggcuccaccagcccag

SEQ ID NO: 1205822 - RNA, 20 nt, Human
uaucuucuuuccccacuccc

SEQ ID NO: 1205823 - RNA, 18 nt, Human
ucagcccuguaggcucca

SEQ ID NO: 1205824 - RNA, 19 nt, Human
uccaccagcccagacaaag

SEQ ID NO: 1205825 - RNA, 19 nt, Human
uccaccagcccagacaaag

SEQ ID NO: 1205826 - RNA, 20 nt, Human
uccagcccuggagugagcug

SEQ ID NO: 1205827 - RNA, 21 nt, Human
uccaguaccugugaucaggag

SEQ ID NO: 1205828 - RNA, 26 nt, Human
uccccucccuugcgggcagaggcugg

SEQ ID NO: 1205829 - RNA, 25 nt, Human
ucccuugcgggcagaggcagggcgu

SEQ ID NO: 1205830 - RNA, 22 nt, Human
uccugcuucagggagugguagg

SEQ ID NO: 1205831 - RNA, 22 nt, Human
uccuuccacgcagaccuuucag

SEQ ID NO: 1205832 - RNA, 23 nt, Human
ucuaacaccugcagccauacccc

SEQ ID NO: 1205833 - RNA, 22 nt, Human
ucucccagguguggcucagucu

SEQ ID NO: 1205834 - RNA, 21 nt, Human
ugaagcugaggguuccugcag

SEQ ID NO: 1205835 - RNA, 21 nt, Human
ugcaggggaugcaccccacau

SEQ ID NO: 1205836 - RNA, 20 nt, Human
ugcagucuggccuguaccgg

SEQ ID NO: 1205837 - RNA, 20 nt, Human
ugcccuacagcuccuggugc

SEQ ID NO: 1205838 - RNA, 21 nt, Human
ugccgcuguguccuccccaca

SEQ ID NO: 1205839 - RNA, 23 nt, Human
ugccucguggccaggacagggau

SEQ ID NO: 1205840 - RNA, 19 nt, Human
ugccugggaagauguggag

SEQ ID NO: 1205841 - RNA, 19 nt, Human
uggcaugguccugggcagc

SEQ ID NO: 1205842 - RNA, 19 nt, Human
uggcccagcggagccgcag

SEQ ID NO: 1205843 - RNA, 22 nt, Human
uggcuccuuucagcuccccucc

SEQ ID NO: 1205844 - RNA, 18 nt, Human
ugggaagauguggaggcc

SEQ ID NO: 1205845 - RNA, 19 nt, Human
ugggagagccagagugggg

SEQ ID NO: 1205846 - RNA, 19 nt, Human
ugggcagcccaggaggcag

SEQ ID NO: 1205847 - RNA, 19 nt, Human
uggggcugcaggggaugca

SEQ ID NO: 1205848 - RNA, 20 nt, Human
uggggugugaauagggggag

SEQ ID NO: 1205849 - RNA, 21 nt, Human
uucaucuucuugcccuacagc

SEQ ID NO: 1205850 - RNA, 22 nt, Human
uuggggaggcuggcucagaggc

SEQ ID NO: 1205851 - RNA, 21 nt, Human
uuucagggccccugucucccu

SEQ ID NO: 1205852 - RNA, 20 nt, Human
uuuccuaugaacaugaagcu

SEQ ID NO: 1205853 - RNA, 25 nt, Human
uuucuguccugcugccagcuggaga

SEQ ID NO: 1205854 - RNA, 23 nt, Human
aagaggagagguugacaacagaa

SEQ ID NO: 1205855 - RNA, 22 nt, Human
gauccuuuccccuuggaagccu

SEQ ID NO: 1205856 - RNA, 27 nt, Human
uaguugauccuuuccccuuggaagccu

SEQ ID NO: 1205857 - RNA, 21 nt, Human
ucuuggagcuguggcagauuc

SEQ ID NO: 1205858 - RNA, 18 nt, Human
uggcaagaggagagguug

SEQ ID NO: 1205859 - RNA, 20 nt, Human
uuccccuuggaagccuuuac

SEQ ID NO: 1205860 - RNA, 24 nt, Human
uuggaagccuuuacucuuaacugg

SEQ ID NO: 1205861 - RNA, 21 nt, Human
acccccuucagagccccagca

SEQ ID NO: 1205862 - RNA, 19 nt, Human
acgcugaaucuccacugau

SEQ ID NO: 1205863 - RNA, 20 nt, Human
agcccaaacgcaccagaaau

SEQ ID NO: 1205864 - RNA, 24 nt, Human
caaaacugacucugcaaauauucu

SEQ ID NO: 1205865 - RNA, 21 nt, Human
caagcccaaacgcaccagaaa

SEQ ID NO: 1205866 - RNA, 23 nt, Human
cacaccaagcccaaacgcaccag

SEQ ID NO: 1205867 - RNA, 20 nt, Human
caccaagcccaaacgcaccg

SEQ ID NO: 1205868 - RNA, 21 nt, Human
ccaagcccaaacgcaccagaa

SEQ ID NO: 1205869 - RNA, 19 nt, Human
ccccuucagagccccagca

SEQ ID NO: 1205870 - RNA, 20 nt, Human
cuggcugcugcacaccaagc

SEQ ID NO: 1205871 - RNA, 22 nt, Human
gagccccagcaagauggaaaua

SEQ ID NO: 1205872 - RNA, 21 nt, Human
uucuuuacuuaacgcugaauc

SEQ ID NO: 1205873 - RNA, 19 nt, Human
acagcuuucuucuugccug

SEQ ID NO: 1205874 - RNA, 19 nt, Human
ugcccugguacucccuugu

SEQ ID NO: 1205875 - RNA, 22 nt, Human
ugcccugguacucccuuguuga

SEQ ID NO: 1205876 - RNA, 24 nt, Human
aacuggucccaaacccccauccuc

SEQ ID NO: 1205877 - RNA, 22 nt, Human
aagucugauucucacucagaac

SEQ ID NO: 1205878 - RNA, 23 nt, Human
cugaagacauucugcagggggaa

SEQ ID NO: 1205879 - RNA, 26 nt, Human
gagccaagacuaaacucccacaagga

SEQ ID NO: 1205880 - RNA, 20 nt, Human
gccaagacuaaacucccaca

SEQ ID NO: 1205881 - RNA, 21 nt, Human
ucacucagaacuggucccaaa

SEQ ID NO: 1205882 - RNA, 24 nt, Human
ucaugucgagccaagacuaaacuc

SEQ ID NO: 1205883 - RNA, 23 nt, Human
ugaagacauucugcagggggagc

SEQ ID NO: 1205884 - RNA, 18 nt, Human
auuacuaacacccagucc

SEQ ID NO: 1205885 - RNA, 20 nt, Human
cacccaguccugaacaacga

SEQ ID NO: 1205886 - RNA, 18 nt, Human
cgagguagcagcaaaauc

SEQ ID NO: 1205887 - RNA, 21 nt, Human
cugaacaacgagguagcagca

SEQ ID NO: 1205888 - RNA, 22 nt, Human
cugaacaacgagguagcagcaa

SEQ ID NO: 1205889 - RNA, 21 nt, Human
uaauaaauuucucaugaagua

SEQ ID NO: 1205890 - RNA, 21 nt, Human
ugagcaagaacgugaaguuug

SEQ ID NO: 1205891 - RNA, 18 nt, Human
uggauuacuaacacccag

SEQ ID NO: 1205892 - RNA, 22 nt, Human
uguugagcaagaacgugaaguu

SEQ ID NO: 1205893 - RNA, 24 nt, Human
uuaauaaauuucucaugaaguauu

SEQ ID NO: 1205894 - RNA, 24 nt, Human
cccugggggcuccuggcugggcug

SEQ ID NO: 1205895 - RNA, 23 nt, Human
aaccuuccugaaucuuuuuaaaa

SEQ ID NO: 1205896 - RNA, 18 nt, Human
ccccaaaccuuccugaau

SEQ ID NO: 1205897 - RNA, 19 nt, Human
ccugaaucuuuuuaaaacu

SEQ ID NO: 1205898 - RNA, 21 nt, Human
cugaaucuuuuuaaaacuucc

SEQ ID NO: 1205899 - RNA, 25 nt, Human
aaaaaaaaaauaauaacacauagga

SEQ ID NO: 1205900 - RNA, 22 nt, Human
aaccugucuucuucuaauucca

SEQ ID NO: 1205901 - RNA, 20 nt, Human
acacaacaaaagaaugaaaa

SEQ ID NO: 1205902 - RNA, 27 nt, Human
agaaaaaaaaaauaauaacacauagga

SEQ ID NO: 1205903 - RNA, 27 nt, Human
agaaaaaaaaaauaauaacacauagga

SEQ ID NO: 1205904 - RNA, 20 nt, Human
agaaauuuccuugagacuag

SEQ ID NO: 1205905 - RNA, 22 nt, Human
aggaacaacugaaaaugcugac

SEQ ID NO: 1205906 - RNA, 22 nt, Human
agugaacaauuaacgaucuaaa

SEQ ID NO: 1205907 - RNA, 25 nt, Human
caaaccuccacacaacaaaagaaug

SEQ ID NO: 1205908 - RNA, 20 nt, Human
ccacacaacaaaagaaugaa

SEQ ID NO: 1205909 - RNA, 23 nt, Human
cuccacacaacaaaagaaugaaa

SEQ ID NO: 1205910 - RNA, 18 nt, Human
gagcauaucauaaauaug

SEQ ID NO: 1205911 - RNA, 18 nt, Human
gaucuaaaaacauuccau

SEQ ID NO: 1205912 - RNA, 19 nt, Human
uaagaguaucagaugauua

SEQ ID NO: 1205913 - RNA, 21 nt, Human
uaccaaagaagugaacaauua

SEQ ID NO: 1205914 - RNA, 21 nt, Human
uagaaagacggcaauucaagc

SEQ ID NO: 1205915 - RNA, 20 nt, Human
uagaguuauuccucuucagu

SEQ ID NO: 1205916 - RNA, 18 nt, Human
uaggaacaacugaaaaug

SEQ ID NO: 1205917 - RNA, 18 nt, Human
uccacacaacaaaagaau

SEQ ID NO: 1205918 - RNA, 23 nt, Human
uccacacaacaaaagaaugaaau

SEQ ID NO: 1205919 - RNA, 27 nt, Human
uuuuuuuuuuuuuuuuuuuuuuugggg

SEQ ID NO: 1205920 - RNA, 27 nt, Human
ucacugggcaguguuuuucgggucacu

SEQ ID NO: 1205921 - RNA, 21 nt, Human
uucacugucacugggcagugu

SEQ ID NO: 1205922 - RNA, 26 nt, Human
uuuuucgguauuaucaucuuuugaau

SEQ ID NO: 1205923 - RNA, 18 nt, Human
aagagaaaacagcgggaa

SEQ ID NO: 1205924 - RNA, 18 nt, Human
caggaagagaaaacagcg

SEQ ID NO: 1205925 - RNA, 21 nt, Human
uccaggaagagaaaacagcgg

SEQ ID NO: 1205926 - RNA, 20 nt, Human
uuccaggaagagaaaacagc

SEQ ID NO: 1205927 - RNA, 19 nt, Human
aagaagacauaucucaaac

SEQ ID NO: 1205928 - RNA, 25 nt, Human
aagaagacauaucucaaaccacuga

SEQ ID NO: 1205929 - RNA, 19 nt, Human
agagcucuccgagcugaau

SEQ ID NO: 1205930 - RNA, 21 nt, Human
agucuaggucugcccuggagu

SEQ ID NO: 1205931 - RNA, 19 nt, Human
caccacggccaagcaaggc

SEQ ID NO: 1205932 - RNA, 20 nt, Human
cacgaagaagacauaucuca

SEQ ID NO: 1205933 - RNA, 22 nt, Human
cagagcucuccgagcugaaucc

SEQ ID NO: 1205934 - RNA, 19 nt, Human
caggaccacaccacggcca

SEQ ID NO: 1205935 - RNA, 21 nt, Human
cagguuacagacgggagguuc

SEQ ID NO: 1205936 - RNA, 22 nt, Human
caucacgaagaagacauaucuc

SEQ ID NO: 1205937 - RNA, 25 nt, Human
cccaugagucuaggucugcccugga

SEQ ID NO: 1205938 - RNA, 18 nt, Human
gaguccuccuuuacucuc

SEQ ID NO: 1205939 - RNA, 23 nt, Human
uaucucaaaccacugaguggccc

SEQ ID NO: 1205940 - RNA, 24 nt, Human
uaucucaaaccacugaguggcccg

SEQ ID NO: 1205941 - RNA, 20 nt, Human
uccuuggacccuugguaguu

SEQ ID NO: 1205942 - RNA, 21 nt, Human
ucucaaaccacugaguggccc

SEQ ID NO: 1205943 - RNA, 22 nt, Human
ugaacugcaggugcagguuaca

SEQ ID NO: 1205944 - RNA, 24 nt, Human
ugcccuggaguugcaggaccacac

SEQ ID NO: 1205945 - RNA, 21 nt, Human
uggaguugcaggaccacacca

SEQ ID NO: 1205946 - RNA, 21 nt, Human
uguuuguuuggaguccuccuu

SEQ ID NO: 1205947 - RNA, 21 nt, Human
uugguaguuuccugaacugug

SEQ ID NO: 1205948 - RNA, 23 nt, Human
aagccuccaaagucaggguuccg

SEQ ID NO: 1205949 - RNA, 19 nt, Human
uaucauacgcuauugaagc

SEQ ID NO: 1205950 - RNA, 18 nt, Human
ucugaagccuccaaaguc

SEQ ID NO: 1205951 - RNA, 24 nt, Human
ugucugaagccuccaaagucaggg

SEQ ID NO: 1205952 - RNA, 20 nt, Human
uccaguagccagcgcuggcu

SEQ ID NO: 1205953 - RNA, 19 nt, Human
aaaagacagguaaaaauug

SEQ ID NO: 1205954 - RNA, 20 nt, Human
aaaauccaagaaaacuaugg

SEQ ID NO: 1205955 - RNA, 18 nt, Human
aacagucuuuuuucuggc

SEQ ID NO: 1205956 - RNA, 20 nt, Human
aacuguauuucaagcagggu

SEQ ID NO: 1205957 - RNA, 23 nt, Human
aauaugugaguauuuuaaccuac

SEQ ID NO: 1205958 - RNA, 23 nt, Human
acagguaaaaauugaccuuuuca

SEQ ID NO: 1205959 - RNA, 21 nt, Human
acugaagcacaaaagauucua

SEQ ID NO: 1205960 - RNA, 19 nt, Human
acuuuauuuacuucugaag

SEQ ID NO: 1205961 - RNA, 20 nt, Human
aggacuuuuccucccaccuc

SEQ ID NO: 1205962 - RNA, 22 nt, Human
aggguaaucaaaugaaaagcaa

SEQ ID NO: 1205963 - RNA, 19 nt, Human
caaaguaaaugcaacuggc

SEQ ID NO: 1205964 - RNA, 19 nt, Human
caaaguaaaugcaacuggc

SEQ ID NO: 1205965 - RNA, 22 nt, Human
caaguuacugaagcacaaaaga

SEQ ID NO: 1205966 - RNA, 19 nt, Human
caccaaaguaaaugcaacu

SEQ ID NO: 1205967 - RNA, 24 nt, Human
caggguaaucaaaugaaaagcaag

SEQ ID NO: 1205968 - RNA, 18 nt, Human
ccaggacuuuuccuccca

SEQ ID NO: 1205969 - RNA, 23 nt, Human
ccucccaccucagcagcagcugg

SEQ ID NO: 1205970 - RNA, 19 nt, Human
ggaagaaaauccaagaaaa

SEQ ID NO: 1205971 - RNA, 22 nt, Human
uaaaaauugaccuuuucauaag

SEQ ID NO: 1205972 - RNA, 21 nt, Human
uaaaagacagguaaaaauuga

SEQ ID NO: 1205973 - RNA, 18 nt, Human
uacugaagcacaaaagau

SEQ ID NO: 1205974 - RNA, 21 nt, Human
ucaaaauuauaauaacauaua

SEQ ID NO: 1205975 - RNA, 25 nt, Human
ucccagccaggacuuuuccucccac

SEQ ID NO: 1205976 - RNA, 23 nt, Human
uccucccaccucagcagcagcug

SEQ ID NO: 1205977 - RNA, 22 nt, Human
ucucccagccaggacuuuuccu

SEQ ID NO: 1205978 - RNA, 19 nt, Human
ucuuacauuacaaaacaau

SEQ ID NO: 1205979 - RNA, 19 nt, Human
ugaaaagcaagaaaaaaca

SEQ ID NO: 1205980 - RNA, 20 nt, Human
uggaagaaaauccaagaaaa

SEQ ID NO: 1205981 - RNA, 22 nt, Human
uggaagaaaauccaagaaaacu

SEQ ID NO: 1205982 - RNA, 23 nt, Human
uggauuuugcaacuaaucaguuu

SEQ ID NO: 1205983 - RNA, 25 nt, Human
uggcacaaaaguugcuacauaaaua

SEQ ID NO: 1205984 - RNA, 19 nt, Human
uuccucccaccucagcagc

SEQ ID NO: 1205985 - RNA, 23 nt, Human
uuuugcaacuaaucaguuucacg

SEQ ID NO: 1205986 - RNA, 23 nt, Human
uguaaaauuauuauacaggauga

SEQ ID NO: 1205987 - RNA, 22 nt, Human
uuguaacuggagaaaacacugg

SEQ ID NO: 1205988 - RNA, 20 nt, Human
aaaaacaucauucuucuggc

SEQ ID NO: 1205989 - RNA, 23 nt, Human
aagacuuuccacacucaucacag

SEQ ID NO: 1205990 - RNA, 22 nt, Human
aagcaaaaggcugcucaacaac

SEQ ID NO: 1205991 - RNA, 19 nt, Human
aagccuucgcuucugugac

SEQ ID NO: 1205992 - RNA, 20 nt, Human
aagugucugggacuggucuu

SEQ ID NO: 1205993 - RNA, 22 nt, Human
aaugcaauuaaaauucucacaa

SEQ ID NO: 1205994 - RNA, 26 nt, Human
acgaugcacacgcgcuucccccccac

SEQ ID NO: 1205995 - RNA, 19 nt, Human
aggcugcugagacagcauc

SEQ ID NO: 1205996 - RNA, 21 nt, Human
aggugcugaaagcaaaaggcu

SEQ ID NO: 1205997 - RNA, 22 nt, Human
agguuguuggcauguggcgucu

SEQ ID NO: 1205998 - RNA, 20 nt, Human
aguggcaucuggggucaggg

SEQ ID NO: 1205999 - RNA, 21 nt, Human
aguggcaucuggggucagggu

SEQ ID NO: 1206000 - RNA, 21 nt, Human
caaguggcaucuggggucagg

SEQ ID NO: 1206001 - RNA, 21 nt, Human
cacccccagcucaagaugcuu

SEQ ID NO: 1206002 - RNA, 18 nt, Human
cacugugcuguguccagc

SEQ ID NO: 1206003 - RNA, 19 nt, Human
cagcgcucccucccgcggc

SEQ ID NO: 1206004 - RNA, 22 nt, Human
caguaguugacacgaugcacac

SEQ ID NO: 1206005 - RNA, 19 nt, Human
ccagaggcugcaaaccucu

SEQ ID NO: 1206006 - RNA, 19 nt, Human
ccaggaaguuggaagguaa

SEQ ID NO: 1206007 - RNA, 19 nt, Human
ccaggaucugcccuaugcc

SEQ ID NO: 1206008 - RNA, 23 nt, Human
cccacagcugaggcugcugagac

SEQ ID NO: 1206009 - RNA, 18 nt, Human
ccccacagcugaggcugc

SEQ ID NO: 1206010 - RNA, 22 nt, Human
cccccucacacccccagcucaa

SEQ ID NO: 1206011 - RNA, 22 nt, Human
ccucuccgucuaacuaaugcaa

SEQ ID NO: 1206012 - RNA, 22 nt, Human
cuacagccuuaacaccagccug

SEQ ID NO: 1206013 - RNA, 20 nt, Human
cugaaguaucaggagcuugu

SEQ ID NO: 1206014 - RNA, 19 nt, Human
cugacugggaccagcugcg

SEQ ID NO: 1206015 - RNA, 22 nt, Human
cugcaaguuaccugccugagag

SEQ ID NO: 1206016 - RNA, 19 nt, Human
cugucauggggaaacuggg

SEQ ID NO: 1206017 - RNA, 20 nt, Human
cuugcucugcguauuucugu

SEQ ID NO: 1206018 - RNA, 24 nt, Human
gaagugucugggacuggucuucca

SEQ ID NO: 1206019 - RNA, 18 nt, Human
gaaguuggaagguaagug

SEQ ID NO: 1206020 - RNA, 19 nt, Human
gaugcacacgcgcuucccc

SEQ ID NO: 1206021 - RNA, 22 nt, Human
gcaaaaauacuuguaauacuau

SEQ ID NO: 1206022 - RNA, 18 nt, Human
gcagccgggucuucaggc

SEQ ID NO: 1206023 - RNA, 18 nt, Human
gcauaauucacacgcgua

SEQ ID NO: 1206024 - RNA, 23 nt, Human
gccaggaaguuggaagguaagug

SEQ ID NO: 1206025 - RNA, 19 nt, Human
gcucccucccgcggcugcc

SEQ ID NO: 1206026 - RNA, 26 nt, Human
gcugcuagcuuucucuaacccuccgg

SEQ ID NO: 1206027 - RNA, 20 nt, Human
gcuguacuacaguggcugau

SEQ ID NO: 1206028 - RNA, 22 nt, Human
gcuguacuacaguggcugauuu

SEQ ID NO: 1206029 - RNA, 21 nt, Human
ggcagagucauucacaggcug

SEQ ID NO: 1206030 - RNA, 22 nt, Human
gggaccagcugcguguuuaugg

SEQ ID NO: 1206031 - RNA, 25 nt, Human
uaaacccucgaccacagaugucaca

SEQ ID NO: 1206032 - RNA, 19 nt, Human
uaacacaaguggcaucugg

SEQ ID NO: 1206033 - RNA, 21 nt, Human
uacugcuuacuguaaaaguuu

SEQ ID NO: 1206034 - RNA, 18 nt, Human
uagagacaauguacuauu

SEQ ID NO: 1206035 - RNA, 25 nt, Human
ucacacgcguauugucucugggacu

SEQ ID NO: 1206036 - RNA, 19 nt, Human
ucagaacauuuugaacuug

SEQ ID NO: 1206037 - RNA, 22 nt, Human
ucagaacauuuugaacuugcaa

SEQ ID NO: 1206038 - RNA, 20 nt, Human
ucagcacuuuggcugcuagc

SEQ ID NO: 1206039 - RNA, 20 nt, Human
uccacacucaucacagguga

SEQ ID NO: 1206040 - RNA, 18 nt, Human
ucuaccguggagaagcgc

SEQ ID NO: 1206041 - RNA, 21 nt, Human
ucugaaguaucaggagcuugu

SEQ ID NO: 1206042 - RNA, 25 nt, Human
ucugacuuggguucagauacuugcu

SEQ ID NO: 1206043 - RNA, 23 nt, Human
ucugggacugaagugucugggac

SEQ ID NO: 1206044 - RNA, 22 nt, Human
ucugggacuggucuuccagggc

SEQ ID NO: 1206045 - RNA, 18 nt, Human
ucuucacuuucuuuuucu

SEQ ID NO: 1206046 - RNA, 23 nt, Human
ucuucuggcuugaagaauucuga

SEQ ID NO: 1206047 - RNA, 25 nt, Human
ugaaaaacaucauucuucuggcuug

SEQ ID NO: 1206048 - RNA, 26 nt, Human
ugaaaaacaucauucuucuggcuuga

SEQ ID NO: 1206049 - RNA, 22 nt, Human
ugaaagcaaaaggcugcucaac

SEQ ID NO: 1206050 - RNA, 18 nt, Human
ugaaaggcaguucugugg

SEQ ID NO: 1206051 - RNA, 22 nt, Human
ugaaguaucaggagcuuguuuu

SEQ ID NO: 1206052 - RNA, 19 nt, Human
ugagaacacgccucuaccg

SEQ ID NO: 1206053 - RNA, 19 nt, Human
ugaguuuguaauaguaauu

SEQ ID NO: 1206054 - RNA, 19 nt, Human
ugauggugaagcaugcgga

SEQ ID NO: 1206055 - RNA, 23 nt, Human
ugcacacgcgcuucccccccaca

SEQ ID NO: 1206056 - RNA, 20 nt, Human
uggaagguaagugcucggga

SEQ ID NO: 1206057 - RNA, 21 nt, Human
uggcauguggcgucugacuca

SEQ ID NO: 1206058 - RNA, 27 nt, Human
uggcauguggcgucugacucagggugu

SEQ ID NO: 1206059 - RNA, 20 nt, Human
uggcuaguuagaaggcacug

SEQ ID NO: 1206060 - RNA, 25 nt, Human
uggcuguuugaaaggcaguucugug

SEQ ID NO: 1206061 - RNA, 20 nt, Human
ugggacuggucuuccagggc

SEQ ID NO: 1206062 - RNA, 21 nt, Human
ugggccaggaaguuggaaggu

SEQ ID NO: 1206063 - RNA, 23 nt, Human
uguaaauaauacaaaaugcuaca

SEQ ID NO: 1206064 - RNA, 22 nt, Human
uugaagaauucugaaagaggcu

SEQ ID NO: 1206065 - RNA, 22 nt, Human
uugcuuggguguuuaaaagguu

SEQ ID NO: 1206066 - RNA, 19 nt, Human
uuuccacacucaucacagg

SEQ ID NO: 1206067 - RNA, 18 nt, Human
uuucuucagcacuuuggc

SEQ ID NO: 1206068 - RNA, 18 nt, Human
uuugagccucaucugcuu

SEQ ID NO: 1206069 - RNA, 21 nt, Human
uuugagccucaucugcuugac

SEQ ID NO: 1206070 - RNA, 20 nt, Human
aguucuuuaagccuuucuua

SEQ ID NO: 1206071 - RNA, 21 nt, Human
aaugagcuuuuuuugacauuc

SEQ ID NO: 1206072 - RNA, 23 nt, Human
aaugcaaguacagaacuuaugca

SEQ ID NO: 1206073 - RNA, 19 nt, Human
acccuaauuaaccucauca

SEQ ID NO: 1206074 - RNA, 23 nt, Human
caaguacagaacuuaugcauuca

SEQ ID NO: 1206075 - RNA, 24 nt, Human
uacagaacuuaugcauucaucaaa

SEQ ID NO: 1206076 - RNA, 18 nt, Human
ugauuauguuucaguucu

SEQ ID NO: 1206077 - RNA, 23 nt, Human
ugcaaguacagaacuuaugcauu

SEQ ID NO: 1206078 - RNA, 19 nt, Human
uggcauaugcaguauucaa

SEQ ID NO: 1206079 - RNA, 20 nt, Human
aagaaaccuagaaugaccug

SEQ ID NO: 1206080 - RNA, 24 nt, Human
aggagccagggcaagauuagggug

SEQ ID NO: 1206081 - RNA, 22 nt, Human
ccagggcaagauuagggugcag

SEQ ID NO: 1206082 - RNA, 19 nt, Human
ccuuggagagcgaccagau

SEQ ID NO: 1206083 - RNA, 18 nt, Human
cgaccagauuccucaccc

SEQ ID NO: 1206084 - RNA, 21 nt, Human
gauucagccaucuuucuccaa

SEQ ID NO: 1206085 - RNA, 22 nt, Human
uccccugaaggacuccggucgc

SEQ ID NO: 1206086 - RNA, 20 nt, Human
ugacugcacaguguccccug

SEQ ID NO: 1206087 - RNA, 20 nt, Human
ugagaucaaaaucucgauuc

SEQ ID NO: 1206088 - RNA, 21 nt, Human
ugagaucaaaaucucgauuca

SEQ ID NO: 1206089 - RNA, 23 nt, Human
ugcagagaaaucgguuuccucca

SEQ ID NO: 1206090 - RNA, 20 nt, Human
uuagggugcagagaaaucgg

SEQ ID NO: 1206091 - RNA, 24 nt, Human
accacagccuccaucacugaccug

SEQ ID NO: 1206092 - RNA, 24 nt, Human
accacagccuccaucacugaccug

SEQ ID NO: 1206093 - RNA, 24 nt, Human
accacagccuccaucacugaccug

SEQ ID NO: 1206094 - RNA, 24 nt, Human
accacagccuccaucacugaccug

SEQ ID NO: 1206095 - RNA, 21 nt, Human
acugaccuguuucugaccaca

SEQ ID NO: 1206096 - RNA, 21 nt, Human
acugaccuguuucugaccaca

SEQ ID NO: 1206097 - RNA, 21 nt, Human
acugaccuguuucugaccaca

SEQ ID NO: 1206098 - RNA, 24 nt, Human
augugugccccuccaauucaaccu

SEQ ID NO: 1206099 - RNA, 26 nt, Human
caacugaaauucagacaaaucauuuu

SEQ ID NO: 1206100 - RNA, 19 nt, Human
cacagccuccaucacugac

SEQ ID NO: 1206101 - RNA, 19 nt, Human
cacagccuccaucauugac

SEQ ID NO: 1206102 - RNA, 23 nt, Human
cacugaccuguuucugaccacag

SEQ ID NO: 1206103 - RNA, 23 nt, Human
cacugaccuguuucugaccacag

SEQ ID NO: 1206104 - RNA, 21 nt, Human
cacugaccuguuucuguccac

SEQ ID NO: 1206105 - RNA, 22 nt, Human
caugaccaaaugugugccccuc

SEQ ID NO: 1206106 - RNA, 20 nt, Human
ccacagccuccaucacugac

SEQ ID NO: 1206107 - RNA, 20 nt, Human
ccacagccuccaucacugac

SEQ ID NO: 1206108 - RNA, 20 nt, Human
ccacagccuccaucacugac

SEQ ID NO: 1206109 - RNA, 20 nt, Human
ccacagccuccaucacugac

SEQ ID NO: 1206110 - RNA, 20 nt, Human
ccacagccuccaucauugac

SEQ ID NO: 1206111 - RNA, 24 nt, Human
ccuuacuuucugaaucuuuuucuu

SEQ ID NO: 1206112 - RNA, 20 nt, Human
cugcagcagcuguugcuucc

SEQ ID NO: 1206113 - RNA, 26 nt, Human
gaccacagccuccaucacugaccugg

SEQ ID NO: 1206114 - RNA, 26 nt, Human
gaccacagccuccaucacugaccugg

SEQ ID NO: 1206115 - RNA, 26 nt, Human
gaccacagccuccaucacugaccugg

SEQ ID NO: 1206116 - RNA, 26 nt, Human
gaccacagccuccaucacugaccugg

SEQ ID NO: 1206117 - RNA, 26 nt, Human
gaccacagccuccaucauugaccugg

SEQ ID NO: 1206118 - RNA, 26 nt, Human
gaccacagccuccaucauugaccugg

SEQ ID NO: 1206119 - RNA, 26 nt, Human
gaccacggccuccaucacugaccugg

SEQ ID NO: 1206120 - RNA, 26 nt, Human
gccuccaucacugaccuguuucugac

SEQ ID NO: 1206121 - RNA, 26 nt, Human
gccuccaucacugaccuguuucugac

SEQ ID NO: 1206122 - RNA, 26 nt, Human
gccuccaucacugaccuguuucugac

SEQ ID NO: 1206123 - RNA, 26 nt, Human
gccuccaucacugaccuguuucugac

SEQ ID NO: 1206124 - RNA, 26 nt, Human
gccuccaucacugaccuguuucugac

SEQ ID NO: 1206125 - RNA, 26 nt, Human
gccuccaucauugaccuguuucugac

SEQ ID NO: 1206126 - RNA, 26 nt, Human
gccuccaucauugaccuguuucugac

SEQ ID NO: 1206127 - RNA, 22 nt, Human
gcugcagcagcuguugcuuccu

SEQ ID NO: 1206128 - RNA, 22 nt, Human
uccaauucaaccuguuucugac

SEQ ID NO: 1206129 - RNA, 25 nt, Human
ucccucagcugcagcagcuguugcu

SEQ ID NO: 1206130 - RNA, 19 nt, Human
uguuucuguccacagccuc

SEQ ID NO: 1206131 - RNA, 22 nt, Human
acugcaggccuugcagcaagcu

SEQ ID NO: 1206132 - RNA, 19 nt, Human
agcaagcuucacguugcug

SEQ ID NO: 1206133 - RNA, 22 nt, Human
caagcaaucuauuuuacacacu

SEQ ID NO: 1206134 - RNA, 25 nt, Human
caccuucuccggcagcucuuucaaa

SEQ ID NO: 1206135 - RNA, 19 nt, Human
cagcugaggacacagcagg

SEQ ID NO: 1206136 - RNA, 22 nt, Human
cagggcuuucuuccucaccuuc

SEQ ID NO: 1206137 - RNA, 24 nt, Human
cccagcugaggacacagcaggucc

SEQ ID NO: 1206138 - RNA, 23 nt, Human
cccggcuggcugcgcucuucccg

SEQ ID NO: 1206139 - RNA, 18 nt, Human
ccuggggacggccugggc

SEQ ID NO: 1206140 - RNA, 27 nt, Human
ccugugccgcggcgcgcucagagcccg

SEQ ID NO: 1206141 - RNA, 20 nt, Human
cgccucuucuccacccagcu

SEQ ID NO: 1206142 - RNA, 24 nt, Human
cgcggcggcggcagcaacaggcac

SEQ ID NO: 1206143 - RNA, 21 nt, Human
cggcggcagcaacaggcaccg

SEQ ID NO: 1206144 - RNA, 22 nt, Human
cggggagggggcuccccucggc

SEQ ID NO: 1206145 - RNA, 19 nt, Human
cuccccucggcucggcgcc

SEQ ID NO: 1206146 - RNA, 19 nt, Human
cuucuccacccagcugagg

SEQ ID NO: 1206147 - RNA, 22 nt, Human
gaagggucugggaacucagcaa

SEQ ID NO: 1206148 - RNA, 19 nt, Human
ggccugggcgggcggggag

SEQ ID NO: 1206149 - RNA, 23 nt, Human
ggugguucacuguugcuuuccag

SEQ ID NO: 1206150 - RNA, 21 nt, Human
gugcuugggggcauccugggg

SEQ ID NO: 1206151 - RNA, 27 nt, Human
uauuuuacacacuucauaugcagaaac

SEQ ID NO: 1206152 - RNA, 19 nt, Human
ucacguugcugacacuggu

SEQ ID NO: 1206153 - RNA, 18 nt, Human
ucggcucggcgcccgccu

SEQ ID NO: 1206154 - RNA, 19 nt, Human
ugaggacacagcagguccc

SEQ ID NO: 1206155 - RNA, 22 nt, Human
ugcuugggggcauccuggggac

SEQ ID NO: 1206156 - RNA, 24 nt, Human
ugggaagggucugggaacucagca

SEQ ID NO: 1206157 - RNA, 19 nt, Human
uugggaagggucugggaac

SEQ ID NO: 1206158 - RNA, 21 nt, Human
agguuggggaggcgagggcgg

SEQ ID NO: 1206159 - RNA, 20 nt, Human
caggagccgaggcgcggcag

SEQ ID NO: 1206160 - RNA, 22 nt, Human
cagggcaccagcggcgggaggc

SEQ ID NO: 1206161 - RNA, 26 nt, Human
ccccgcugcguccgcgccuucucuuu

SEQ ID NO: 1206162 - RNA, 18 nt, Human
ccgccaggggacaggagc

SEQ ID NO: 1206163 - RNA, 21 nt, Human
ccgcgugcgggggcgggaggg

SEQ ID NO: 1206164 - RNA, 19 nt, Human
ccucuccgccggccggggc

SEQ ID NO: 1206165 - RNA, 18 nt, Human
ccuucucuuuuccggucc

SEQ ID NO: 1206166 - RNA, 22 nt, Human
cugagcuccagauuuccccacc

SEQ ID NO: 1206167 - RNA, 18 nt, Human
gcaccagcggcgggaggc

SEQ ID NO: 1206168 - RNA, 22 nt, Human
gccggccggggcucggcugagc

SEQ ID NO: 1206169 - RNA, 18 nt, Human
ggaggcaagguuggggag

SEQ ID NO: 1206170 - RNA, 21 nt, Human
ggaggcgagggcgguccgcgu

SEQ ID NO: 1206171 - RNA, 18 nt, Human
ggccggggcucggcugag

SEQ ID NO: 1206172 - RNA, 19 nt, Human
ggccggggcucggcugagc

SEQ ID NO: 1206173 - RNA, 23 nt, Human
gggcgguccgcgugcgggggccg

SEQ ID NO: 1206174 - RNA, 24 nt, Human
ucaggcccaaccgcuccccgcugc

SEQ ID NO: 1206175 - RNA, 20 nt, Human
uuugucccuggggcucaggc

SEQ ID NO: 1206176 - RNA, 22 nt, Human
aaaacaaaacuauaccuuuggu

SEQ ID NO: 1206177 - RNA, 23 nt, Human
aacacauucuucugaccuugggc

SEQ ID NO: 1206178 - RNA, 19 nt, Human
aagaaaaccagucaaaggg

SEQ ID NO: 1206179 - RNA, 19 nt, Human
aagaagaaaaccagucaaa

SEQ ID NO: 1206180 - RNA, 22 nt, Human
aagaagaaaaccagucaaaggg

SEQ ID NO: 1206181 - RNA, 19 nt, Human
aagaauaaagaaaggagga

SEQ ID NO: 1206182 - RNA, 24 nt, Human
aauaaaaaacaaaacuauaccuuu

SEQ ID NO: 1206183 - RNA, 21 nt, Human
agaauguaucuuucucaggau

SEQ ID NO: 1206184 - RNA, 22 nt, Human
agaucaaaaaggagauggucaa

SEQ ID NO: 1206185 - RNA, 20 nt, Human
aggaugaagaagaaaaccag

SEQ ID NO: 1206186 - RNA, 24 nt, Human
aguucuccuaaaauaaaaaacaaa

SEQ ID NO: 1206187 - RNA, 22 nt, Human
caaaaagauguuacuaucccac

SEQ ID NO: 1206188 - RNA, 21 nt, Human
caauggacuuuguuuccuaau

SEQ ID NO: 1206189 - RNA, 21 nt, Human
cccacagcaucuugccaaauc

SEQ ID NO: 1206190 - RNA, 21 nt, Human
cuccuaaaauaaaaaacaaaa

SEQ ID NO: 1206191 - RNA, 19 nt, Human
cugaaaaauauccugaaaa

SEQ ID NO: 1206192 - RNA, 19 nt, Human
cuugccaaaucaucaucca

SEQ ID NO: 1206193 - RNA, 21 nt, Human
gaagaagaaaaccagucaaag

SEQ ID NO: 1206194 - RNA, 21 nt, Human
gaagaagaaaaccagucaaag

SEQ ID NO: 1206195 - RNA, 23 nt, Human
gaagccaauucuucccucaaaaa

SEQ ID NO: 1206196 - RNA, 27 nt, Human
ggaugaagaagaaaaccagucaaaggg

SEQ ID NO: 1206197 - RNA, 18 nt, Human
uaacaagcucauuaguaa

SEQ ID NO: 1206198 - RNA, 23 nt, Human
uaucccacagcaucuugccaaau

SEQ ID NO: 1206199 - RNA, 24 nt, Human
ucaucauccaaauucccuucaacu

SEQ ID NO: 1206200 - RNA, 25 nt, Human
ucugaaguagaggguuuugguggag

SEQ ID NO: 1206201 - RNA, 20 nt, Human
ugaaaaaauucugaaguaga

SEQ ID NO: 1206202 - RNA, 22 nt, Human
ugaaaaaauucugaaguagagg

SEQ ID NO: 1206203 - RNA, 21 nt, Human
ugaaguagaggguuuuggugg

SEQ ID NO: 1206204 - RNA, 24 nt, Human
uggacuuuguuuccuaauacaaaa

SEQ ID NO: 1206205 - RNA, 26 nt, Human
uguucaucuuucuaaucguuuacaca

SEQ ID NO: 1206206 - RNA, 19 nt, Human
uuaacacauucuucugacc

SEQ ID NO: 1206207 - RNA, 22 nt, Human
uucacaguggauguacagaugg

SEQ ID NO: 1206208 - RNA, 21 nt, Human
uuccaagaucaacauggacuc

SEQ ID NO: 1206209 - RNA, 23 nt, Human
uuccaagaucaacauggacucuu

SEQ ID NO: 1206210 - RNA, 21 nt, Human
uuccauaugugcuccuagucu

SEQ ID NO: 1206211 - RNA, 23 nt, Human
uugguuacagcguuaacucuuuu

SEQ ID NO: 1206212 - RNA, 25 nt, Human
uuucucaggaugaagaagaaaacca

SEQ ID NO: 1206213 - RNA, 19 nt, Human
agaagggaguggggaagag

SEQ ID NO: 1206214 - RNA, 21 nt, Human
agaagggaguggggaagaggu

SEQ ID NO: 1206215 - RNA, 22 nt, Human
agagaagcagagcuuaaagcug

SEQ ID NO: 1206216 - RNA, 19 nt, Human
aggaagagagaagcagagc

SEQ ID NO: 1206217 - RNA, 21 nt, Human
augaggaagagagaagcagag

SEQ ID NO: 1206218 - RNA, 23 nt, Human
caccacagaguucaaucuuaguu

SEQ ID NO: 1206219 - RNA, 24 nt, Human
ccagggugaugguuauaucuuuuu

SEQ ID NO: 1206220 - RNA, 22 nt, Human
ccagugaaagacuaugcaaacc

SEQ ID NO: 1206221 - RNA, 25 nt, Human
cccucaaguuuacuggugcugcaca

SEQ ID NO: 1206222 - RNA, 24 nt, Human
cugcacacgcaguuccgggauccu

SEQ ID NO: 1206223 - RNA, 23 nt, Human
gguauugggagaugaggaagaga

SEQ ID NO: 1206224 - RNA, 23 nt, Human
uaguucccaacucugcugaucau

SEQ ID NO: 1206225 - RNA, 24 nt, Human
uauggauugaaaaaugaaaauacu

SEQ ID NO: 1206226 - RNA, 22 nt, Human
ugaaaaaugaaaauacucuuga

SEQ ID NO: 1206227 - RNA, 22 nt, Human
ugcaaaccugauagcuccccuc

SEQ ID NO: 1206228 - RNA, 18 nt, Human
ugcugcacacgcaguucc

SEQ ID NO: 1206229 - RNA, 24 nt, Human
ugucauagugagaaagguucaaac

SEQ ID NO: 1206230 - RNA, 25 nt, Human
uuaguucccaacucugcugaucaua

SEQ ID NO: 1206231 - RNA, 21 nt, Human
aagcagccugccauccgguga

SEQ ID NO: 1206232 - RNA, 23 nt, Human
accaccucccuccagguccccca

SEQ ID NO: 1206233 - RNA, 21 nt, Human
accucccuccaggucccccac

SEQ ID NO: 1206234 - RNA, 24 nt, Human
cauccggugaccacuucagagcac

SEQ ID NO: 1206235 - RNA, 25 nt, Human
cccuggagucccguccccucgggag

SEQ ID NO: 1206236 - RNA, 20 nt, Human
gcccugugcacuggcaccug

SEQ ID NO: 1206237 - RNA, 20 nt, Human
uauuucaccaccucccucca

SEQ ID NO: 1206238 - RNA, 20 nt, Human
uauuucaccaccucccucca

SEQ ID NO: 1206239 - RNA, 19 nt, Human
ucacugcagccgcuggaaa

SEQ ID NO: 1206240 - RNA, 20 nt, Human
ucccaggucuaagucagucu

SEQ ID NO: 1206241 - RNA, 22 nt, Human
ucccaggucuaagucagucuug

SEQ ID NO: 1206242 - RNA, 19 nt, Human
ucucugcucgacugccucu

SEQ ID NO: 1206243 - RNA, 19 nt, Human
uuuucuucccaggucuaag

SEQ ID NO: 1206244 - RNA, 21 nt, Human
acauguggaagcugggcuggg

SEQ ID NO: 1206245 - RNA, 19 nt, Human
agagagaggcggugcagau

SEQ ID NO: 1206246 - RNA, 18 nt, Human
cacauguggaagcugggc

SEQ ID NO: 1206247 - RNA, 25 nt, Human
caccuccccuugggccagacagacc

SEQ ID NO: 1206248 - RNA, 21 nt, Human
cacucguuccuccagacccca

SEQ ID NO: 1206249 - RNA, 18 nt, Human
cacuggcccugcagaacc

SEQ ID NO: 1206250 - RNA, 21 nt, Human
cacugggcuuccuggaggucu

SEQ ID NO: 1206251 - RNA, 20 nt, Human
cagaccccauaucucuucca

SEQ ID NO: 1206252 - RNA, 18 nt, Human
cagagcuggcuugguguc

SEQ ID NO: 1206253 - RNA, 25 nt, Human
cagcccccugccugccucuuccagg

SEQ ID NO: 1206254 - RNA, 21 nt, Human
cagcccggcguguccucuccu

SEQ ID NO: 1206255 - RNA, 23 nt, Human
cauccucuuggcucagucccaua

SEQ ID NO: 1206256 - RNA, 18 nt, Human
cccauguaccaagguccu

SEQ ID NO: 1206257 - RNA, 21 nt, Human
ccccugccagggcauccucuu

SEQ ID NO: 1206258 - RNA, 22 nt, Human
ccggcguguccucuccugggcc

SEQ ID NO: 1206259 - RNA, 25 nt, Human
ccucuuccaggggcccugcagggac

SEQ ID NO: 1206260 - RNA, 21 nt, Human
ccugccugccucuuccagggg

SEQ ID NO: 1206261 - RNA, 18 nt, Human
cucguggugcccgaugug

SEQ ID NO: 1206262 - RNA, 19 nt, Human
cucugccugccagccccuc

SEQ ID NO: 1206263 - RNA, 23 nt, Human
cugcagaaccugugucacucguu

SEQ ID NO: 1206264 - RNA, 22 nt, Human
cugccagggcauccucuuggcu

SEQ ID NO: 1206265 - RNA, 20 nt, Human
cugccucugggccucugccu

SEQ ID NO: 1206266 - RNA, 18 nt, Human
cuggggcagguggccccu

SEQ ID NO: 1206267 - RNA, 19 nt, Human
gaccccauaucucuuccac

SEQ ID NO: 1206268 - RNA, 22 nt, Human
gaugcugccugggagccugcag

SEQ ID NO: 1206269 - RNA, 21 nt, Human
gcagagcuggcuugguguccg

SEQ ID NO: 1206270 - RNA, 20 nt, Human
gcagguccugccucugggcc

SEQ ID NO: 1206271 - RNA, 24 nt, Human
gcccauguaccaagguccugggca

SEQ ID NO: 1206272 - RNA, 18 nt, Human
gccccggccuuggugucu

SEQ ID NO: 1206273 - RNA, 18 nt, Human
gccccuuucgugcuuugg

SEQ ID NO: 1206274 - RNA, 23 nt, Human
gccuuggugucuuuguggcccug

SEQ ID NO: 1206275 - RNA, 19 nt, Human
gcuggggcagguggccccu

SEQ ID NO: 1206276 - RNA, 18 nt, Human
ggacagugaaggccgccg

SEQ ID NO: 1206277 - RNA, 18 nt, Human
ggcagguggccccuuugc

SEQ ID NO: 1206278 - RNA, 18 nt, Human
ggccccuuugcaccugca

SEQ ID NO: 1206279 - RNA, 23 nt, Human
ggcuccuccccgccccagcaagc

SEQ ID NO: 1206280 - RNA, 20 nt, Human
gggcuggggcagguggcccc

SEQ ID NO: 1206281 - RNA, 25 nt, Human
ggucugggguucgcaguugagcucc

SEQ ID NO: 1206282 - RNA, 22 nt, Human
ggugucuuuguggcccugcugc

SEQ ID NO: 1206283 - RNA, 22 nt, Human
guggccccuuugcaccugcagc

SEQ ID NO: 1206284 - RNA, 20 nt, Human
uaaaaucaagugccccggcc

SEQ ID NO: 1206285 - RNA, 23 nt, Human
uaccaagguccugggcacuccac

SEQ ID NO: 1206286 - RNA, 21 nt, Human
uccagaagcccccugccaggg

SEQ ID NO: 1206287 - RNA, 20 nt, Human
uccaggggcccugcagggac

SEQ ID NO: 1206288 - RNA, 21 nt, Human
ucccauaaaaucaagugcccc

SEQ ID NO: 1206289 - RNA, 19 nt, Human
uccccgauggccugcucca

SEQ ID NO: 1206290 - RNA, 19 nt, Human
uccccgauggccugcucca

SEQ ID NO: 1206291 - RNA, 24 nt, Human
uccccgauggccugcuccagggcu

SEQ ID NO: 1206292 - RNA, 19 nt, Human
uccugggcccgucuguggg

SEQ ID NO: 1206293 - RNA, 21 nt, Human
uccugggcccgucuguggggc

SEQ ID NO: 1206294 - RNA, 22 nt, Human
uccugggcccgucuguggggca

SEQ ID NO: 1206295 - RNA, 24 nt, Human
ugaaggccaccagguuccagaagc

SEQ ID NO: 1206296 - RNA, 22 nt, Human
ugacccacuggcccugcagaac

SEQ ID NO: 1206297 - RNA, 21 nt, Human
ugcccauguaccaagguccug

SEQ ID NO: 1206298 - RNA, 18 nt, Human
ugccccggccuugguguc

SEQ ID NO: 1206299 - RNA, 19 nt, Human
uggacaccuggcugucggg

SEQ ID NO: 1206300 - RNA, 21 nt, Human
ugggagccugcagagagaggc

SEQ ID NO: 1206301 - RNA, 21 nt, Human
ugggccucugccugccagccc

SEQ ID NO: 1206302 - RNA, 21 nt, Human
ugggcuuccuggaggucuggg

SEQ ID NO: 1206303 - RNA, 24 nt, Human
ugucacaaaggccaccagaugagg

SEQ ID NO: 1206304 - RNA, 23 nt, Human
ugucacucguuccuccagacccc

SEQ ID NO: 1206305 - RNA, 24 nt, Human
uguccggcgcugacccacuggccc

SEQ ID NO: 1206306 - RNA, 18 nt, Human
uuccagaagcccccugcc

SEQ ID NO: 1206307 - RNA, 24 nt, Human
uucguggacaccuggcugucgggg

SEQ ID NO: 1206308 - RNA, 23 nt, Human
uugucacgguggccacggcuccu

SEQ ID NO: 1206309 - RNA, 18 nt, Human
aaaaaaggcagaaugaug

SEQ ID NO: 1206310 - RNA, 18 nt, Human
aaacucgaaaaaaggcag

SEQ ID NO: 1206311 - RNA, 23 nt, Human
aagagcaucacaguaagcuaaag

SEQ ID NO: 1206312 - RNA, 19 nt, Human
aagcuaaaguggucuggaa

SEQ ID NO: 1206313 - RNA, 24 nt, Human
agaaacucgaaaaaaggcagaaug

SEQ ID NO: 1206314 - RNA, 22 nt, Human
agggcagcuggcguggccaccu

SEQ ID NO: 1206315 - RNA, 18 nt, Human
cacuucacucagcagggu

SEQ ID NO: 1206316 - RNA, 22 nt, Human
cagaaugaugucucuucuuccc

SEQ ID NO: 1206317 - RNA, 19 nt, Human
cagcaugaaauuggaaaua

SEQ ID NO: 1206318 - RNA, 25 nt, Human
cagcaugaaauuggaaauacucauu

SEQ ID NO: 1206319 - RNA, 19 nt, Human
cagggcagcuggcguggcc

SEQ ID NO: 1206320 - RNA, 20 nt, Human
cccgcaggcuccggcuuccg

SEQ ID NO: 1206321 - RNA, 22 nt, Human
cccgcaggcuccggcuuccguc

SEQ ID NO: 1206322 - RNA, 21 nt, Human
ccgcccgccgcuccgccgccc

SEQ ID NO: 1206323 - RNA, 19 nt, Human
ccgccgcccgcaggcuccg

SEQ ID NO: 1206324 - RNA, 21 nt, Human
cuccuucuuuaucuuccucag

SEQ ID NO: 1206325 - RNA, 18 nt, Human
cucugcuucucucagggc

SEQ ID NO: 1206326 - RNA, 20 nt, Human
gagaacacuucacucagcag

SEQ ID NO: 1206327 - RNA, 20 nt, Human
ggacagagcccguggucgcg

SEQ ID NO: 1206328 - RNA, 24 nt, Human
ggcugcuuuccgcccgccgcuccg

SEQ ID NO: 1206329 - RNA, 19 nt, Human
guguuguugccgcugcugc

SEQ ID NO: 1206330 - RNA, 21 nt, Human
ucagcagggugugguguugac

SEQ ID NO: 1206331 - RNA, 23 nt, Human
ucagggcagcuggcguggccacc

SEQ ID NO: 1206332 - RNA, 20 nt, Human
ucccugauguagagggaggu

SEQ ID NO: 1206333 - RNA, 18 nt, Human
uccgcccgccgcuccgcc

SEQ ID NO: 1206334 - RNA, 24 nt, Human
ugccuugugccucuguucucuuca

SEQ ID NO: 1206335 - RNA, 19 nt, Human
ugcuuuccgcccgccgcuc

SEQ ID NO: 1206336 - RNA, 23 nt, Human
ugcuuuccgcccgccgcuccgcc

SEQ ID NO: 1206337 - RNA, 20 nt, Human
uggcuucuccuucuuuaucu

SEQ ID NO: 1206338 - RNA, 26 nt, Human
accuuguuccuuugugggcucuucua

SEQ ID NO: 1206339 - RNA, 18 nt, Human
acuuuguagcugucuugg

SEQ ID NO: 1206340 - RNA, 25 nt, Human
agaaagcugaccacaggcugacuca

SEQ ID NO: 1206341 - RNA, 19 nt, Human
agaggccucugggucagcc

SEQ ID NO: 1206342 - RNA, 20 nt, Human
agcuggguggggccaggggc

SEQ ID NO: 1206343 - RNA, 19 nt, Human
aggagggggaagcugcagg

SEQ ID NO: 1206344 - RNA, 21 nt, Human
aggagggggaagcugcaggac

SEQ ID NO: 1206345 - RNA, 19 nt, Human
cacccuuugccggucaccu

SEQ ID NO: 1206346 - RNA, 26 nt, Human
caccuuguuccuuugugggcucuucu

SEQ ID NO: 1206347 - RNA, 23 nt, Human
cagaaagcugaccacaggcugac

SEQ ID NO: 1206348 - RNA, 18 nt, Human
cagagcugggcuaaggac

SEQ ID NO: 1206349 - RNA, 21 nt, Human
cagagcugggcuaaggacugu

SEQ ID NO: 1206350 - RNA, 18 nt, Human
cagggaggggccagguau

SEQ ID NO: 1206351 - RNA, 22 nt, Human
ccccaagauaagcucugccugc

SEQ ID NO: 1206352 - RNA, 23 nt, Human
cccuccagcugugaagguuccau

SEQ ID NO: 1206353 - RNA, 24 nt, Human
cccucgaauccucccccaagauaa

SEQ ID NO: 1206354 - RNA, 22 nt, Human
cccucugcuuccauuucucauc

SEQ ID NO: 1206355 - RNA, 22 nt, Human
ccugcagagcuccacugggaga

SEQ ID NO: 1206356 - RNA, 18 nt, Human
ccugcucugugacccucg

SEQ ID NO: 1206357 - RNA, 19 nt, Human
ccuucaggguuccuccacc

SEQ ID NO: 1206358 - RNA, 22 nt, Human
cuacagguagggggcauagucu

SEQ ID NO: 1206359 - RNA, 24 nt, Human
cucuguuuucucauagcuuuggag

SEQ ID NO: 1206360 - RNA, 19 nt, Human
cugcaggguggggcacagg

SEQ ID NO: 1206361 - RNA, 21 nt, Human
cuuccugcacguccuggggag

SEQ ID NO: 1206362 - RNA, 20 nt, Human
gaagugcccgcuggaugaaa

SEQ ID NO: 1206363 - RNA, 18 nt, Human
gcacagggaagggccugg

SEQ ID NO: 1206364 - RNA, 18 nt, Human
gcagcugagcuggguggg

SEQ ID NO: 1206365 - RNA, 22 nt, Human
ggaaggagggggaagcugcagg

SEQ ID NO: 1206366 - RNA, 19 nt, Human
ggccagggaggggccaggu

SEQ ID NO: 1206367 - RNA, 19 nt, Human
uaagcugcagauaacaguc

SEQ ID NO: 1206368 - RNA, 24 nt, Human
uaagcugcagauaacagucccuga

SEQ ID NO: 1206369 - RNA, 19 nt, Human
ucaggacagguggggaaac

SEQ ID NO: 1206370 - RNA, 22 nt, Human
ucaggacagguggggaaacuga

SEQ ID NO: 1206371 - RNA, 18 nt, Human
ucaggacgguuuccccag

SEQ ID NO: 1206372 - RNA, 26 nt, Human
ucccgaagugcccgcugaccauuggg

SEQ ID NO: 1206373 - RNA, 18 nt, Human
ucccuccagcugugaagg

SEQ ID NO: 1206374 - RNA, 21 nt, Human
ucucauagcuuuggagcugcc

SEQ ID NO: 1206375 - RNA, 20 nt, Human
ucucaucugugaaauggggu

SEQ ID NO: 1206376 - RNA, 18 nt, Human
ugaaagggccagggaggg

SEQ ID NO: 1206377 - RNA, 23 nt, Human
ugaaagggccagggaggggccag

SEQ ID NO: 1206378 - RNA, 20 nt, Human
ugacagggaaggagggggaa

SEQ ID NO: 1206379 - RNA, 23 nt, Human
ugacagggaaggagggggaagcu

SEQ ID NO: 1206380 - RNA, 22 nt, Human
ugacccucgaauccucccccaa

SEQ ID NO: 1206381 - RNA, 18 nt, Human
ugagcuggguggggccag

SEQ ID NO: 1206382 - RNA, 21 nt, Human
ugagcuggguggggccagggg

SEQ ID NO: 1206383 - RNA, 22 nt, Human
ugagcuggguggggccaggggc

SEQ ID NO: 1206384 - RNA, 25 nt, Human
ugccggucaccuuucuuccuucucu

SEQ ID NO: 1206385 - RNA, 22 nt, Human
ugcuuccugugugaaagcaggu

SEQ ID NO: 1206386 - RNA, 22 nt, Human
uggccugcagagcuccucgucg

SEQ ID NO: 1206387 - RNA, 19 nt, Human
ugucccucgaagcauggaa

SEQ ID NO: 1206388 - RNA, 24 nt, Human
uguuccuuugugggcucuucuaag

SEQ ID NO: 1206389 - RNA, 25 nt, Human
uucaggguuccuccacccucuguuu

SEQ ID NO: 1206390 - RNA, 22 nt, Human
uuccuccacccucuguuuucuc

SEQ ID NO: 1206391 - RNA, 22 nt, Human
uugugggcucuucuaaggcagc

SEQ ID NO: 1206392 - RNA, 20 nt, Human
uuucucaucugugaaaugga

SEQ ID NO: 1206393 - RNA, 20 nt, Human
uuucucaucugugaaauggg

SEQ ID NO: 1206394 - RNA, 24 nt, Human
uuuguagcugucuuggcauuuggg

SEQ ID NO: 1206395 - RNA, 24 nt, Human
aagcagaggucgagcaaaaucaaa

SEQ ID NO: 1206396 - RNA, 21 nt, Human
aagccuccaacauaaacagug

SEQ ID NO: 1206397 - RNA, 22 nt, Human
cagaggucgagcaaaaucaaag

SEQ ID NO: 1206398 - RNA, 21 nt, Human
ccacaacucugcuuucaguag

SEQ ID NO: 1206399 - RNA, 24 nt, Human
gcagaggucgagcaaaaucaaagg

SEQ ID NO: 1206400 - RNA, 26 nt, Human
ugggaagcagaggucgagcaaaauca

SEQ ID NO: 1206401 - RNA, 22 nt, Human
uuaaugaaccacaacucugcuu

SEQ ID NO: 1206402 - RNA, 24 nt, Human
aagggugaaacaaaauggcgaaga

SEQ ID NO: 1206403 - RNA, 20 nt, Human
aaguggcucuuggggcaagc

SEQ ID NO: 1206404 - RNA, 18 nt, Human
acaggggacauccucuuc

SEQ ID NO: 1206405 - RNA, 18 nt, Human
acuagcuuucccaccuuu

SEQ ID NO: 1206406 - RNA, 22 nt, Human
augaaggacagauuaaagacca

SEQ ID NO: 1206407 - RNA, 24 nt, Human
augaaggacagauuaaagaccaca

SEQ ID NO: 1206408 - RNA, 19 nt, Human
caccaaauguuccuggccc

SEQ ID NO: 1206409 - RNA, 27 nt, Human
caccuuuucccccuccccagcuggaag

SEQ ID NO: 1206410 - RNA, 23 nt, Human
cauauauuccacaggggacaucc

SEQ ID NO: 1206411 - RNA, 19 nt, Human
caugcaaagcagucugugu

SEQ ID NO: 1206412 - RNA, 21 nt, Human
cccaccuuuucccccucccca

SEQ ID NO: 1206413 - RNA, 22 nt, Human
ccgcaaguuggcuugggacaac

SEQ ID NO: 1206414 - RNA, 22 nt, Human
cuuaaucaccguuagccagaga

SEQ ID NO: 1206415 - RNA, 26 nt, Human
cuuucccaccuuuucccccuccccag

SEQ ID NO: 1206416 - RNA, 21 nt, Human
gaagggaaguggcucuugggg

SEQ ID NO: 1206417 - RNA, 19 nt, Human
gaggaaccaugaagauuuc

SEQ ID NO: 1206418 - RNA, 20 nt, Human
gauuuacugguuucuucccc

SEQ ID NO: 1206419 - RNA, 23 nt, Human
gucaaagauguucagcugcacaa

SEQ ID NO: 1206420 - RNA, 23 nt, Human
guugaacagcugugcuucugauu

SEQ ID NO: 1206421 - RNA, 20 nt, Human
uacaccaaauguuccuggcc

SEQ ID NO: 1206422 - RNA, 22 nt, Human
ucauccauaauuuucuggcugc

SEQ ID NO: 1206423 - RNA, 19 nt, Human
ucaugucgagcaaacuugu

SEQ ID NO: 1206424 - RNA, 18 nt, Human
uccaagcacaguugguga

SEQ ID NO: 1206425 - RNA, 21 nt, Human
ucgucaaagauguucagcugc

SEQ ID NO: 1206426 - RNA, 23 nt, Human
ucuccaaauauauuuacuagcuu

SEQ ID NO: 1206427 - RNA, 19 nt, Human
ucuguguguuuggugccga

SEQ ID NO: 1206428 - RNA, 23 nt, Human
ugaaggacagauuaaagaccaca

SEQ ID NO: 1206429 - RNA, 19 nt, Human
ugaccacucaugguucgac

SEQ ID NO: 1206430 - RNA, 22 nt, Human
ugcugucauuccugagccucug

SEQ ID NO: 1206431 - RNA, 24 nt, Human
uggaacaacaacgugucuuggaua

SEQ ID NO: 1206432 - RNA, 18 nt, Human
uggcccacuuucaagcag

SEQ ID NO: 1206433 - RNA, 22 nt, Human
uguugaacagcugugcuucuga

SEQ ID NO: 1206434 - RNA, 18 nt, Human
uuccagggaguuggaacg

SEQ ID NO: 1206435 - RNA, 20 nt, Human
uuccugagccucugcuuucc

SEQ ID NO: 1206436 - RNA, 24 nt, Human
uuggcuuccucuuuggaaggacgc

SEQ ID NO: 1206437 - RNA, 23 nt, Human
uuguacuuuuccuugccauugug

SEQ ID NO: 1206438 - RNA, 24 nt, Human
uuucccaccuuuucccccucccca

SEQ ID NO: 1206439 - RNA, 24 nt, Human
uuucuggcugcugucauuccugag

SEQ ID NO: 1206440 - RNA, 26 nt, Human
uuuggcuuccucuuuggaaggacggc

SEQ ID NO: 1206441 - RNA, 24 nt, Human
aaacaagaacuaugaaaaaagcaa

SEQ ID NO: 1206442 - RNA, 20 nt, Human
aagcggaagagcaaaaaguc

SEQ ID NO: 1206443 - RNA, 22 nt, Human
accccccucacggcugccaguu

SEQ ID NO: 1206444 - RNA, 20 nt, Human
acccggaagaccgacgugac

SEQ ID NO: 1206445 - RNA, 20 nt, Human
agaaaacccugucaaagaca

SEQ ID NO: 1206446 - RNA, 18 nt, Human
agaaguucuaaggcccga

SEQ ID NO: 1206447 - RNA, 24 nt, Human
agagcaaaaagucgccgaaaaagc

SEQ ID NO: 1206448 - RNA, 23 nt, Human
agcaacacaagaaaagguagggg

SEQ ID NO: 1206449 - RNA, 20 nt, Human
agcuuucucccgaaccaaag

SEQ ID NO: 1206450 - RNA, 21 nt, Human
augaaaaaagcaacuaugaug

SEQ ID NO: 1206451 - RNA, 18 nt, Human
auggagguaaacauaaug

SEQ ID NO: 1206452 - RNA, 22 nt, Human
caccacccuuugaaacaccaug

SEQ ID NO: 1206453 - RNA, 22 nt, Human
cacccuuugaaacaccaugcaa

SEQ ID NO: 1206454 - RNA, 24 nt, Human
cagcuccggcuccggcugagaucu

SEQ ID NO: 1206455 - RNA, 21 nt, Human
cccgcacugcccguucagaag

SEQ ID NO: 1206456 - RNA, 21 nt, Human
ccugucaaagacacccggaag

SEQ ID NO: 1206457 - RNA, 25 nt, Human
cggaagagcaaaaagucgccgaaaa

SEQ ID NO: 1206458 - RNA, 25 nt, Human
cguagaaaacccugucaaagacacc

SEQ ID NO: 1206459 - RNA, 19 nt, Human
cuuuuggucccgcacugcc

SEQ ID NO: 1206460 - RNA, 21 nt, Human
gaagugaacauguauucuucu

SEQ ID NO: 1206461 - RNA, 21 nt, Human
gagaucuaaccccccucacgg

SEQ ID NO: 1206462 - RNA, 25 nt, Human
gcggaagagcaaaaagucgccgaaa

SEQ ID NO: 1206463 - RNA, 25 nt, Human
ggaagagcaaaaagucgccgaaaaa

SEQ ID NO: 1206464 - RNA, 21 nt, Human
gguaaacauaauguauuauga

SEQ ID NO: 1206465 - RNA, 21 nt, Human
uaggaaaugucauaauaaaau

SEQ ID NO: 1206466 - RNA, 21 nt, Human
uaggcccagcuccggcuccgg

SEQ ID NO: 1206467 - RNA, 22 nt, Human
uauuguucuuuauuucuuggaa

SEQ ID NO: 1206468 - RNA, 20 nt, Human
ucacggcugccaggggagga

SEQ ID NO: 1206469 - RNA, 24 nt, Human
ugaaaaaagcaacuaugauggagg

SEQ ID NO: 1206470 - RNA, 26 nt, Human
ugaaaaaagcaacuaugauggaggua

SEQ ID NO: 1206471 - RNA, 25 nt, Human
uggagguaaacauaauguauuauga

SEQ ID NO: 1206472 - RNA, 22 nt, Human
uggcaaaaagcggaagagcaaa

SEQ ID NO: 1206473 - RNA, 24 nt, Human
uuucucccgaaccaaaggagguag

SEQ ID NO: 1206474 - RNA, 26 nt, Human
uuucuuggaagaauuuauuaagaaau

SEQ ID NO: 1206475 - RNA, 19 nt, Human
aaacauucugagcuagauu

SEQ ID NO: 1206476 - RNA, 21 nt, Human
acauauccugcaccuaaaaca

SEQ ID NO: 1206477 - RNA, 24 nt, Human
ccuaaaacauucugagcuagauuc

SEQ ID NO: 1206478 - RNA, 26 nt, Human
ccuaaaacauucugagcuagauucuu

SEQ ID NO: 1206479 - RNA, 23 nt, Human
ccugcaccuaaaacauucugagc

SEQ ID NO: 1206480 - RNA, 19 nt, Human
uacggaagaauccaguaag

SEQ ID NO: 1206481 - RNA, 21 nt, Human
agaccucccacaggcagauga

SEQ ID NO: 1206482 - RNA, 25 nt, Human
caggcagaugaccugcuucuuaugu

SEQ ID NO: 1206483 - RNA, 18 nt, Human
ccucccacaggcagauga

SEQ ID NO: 1206484 - RNA, 22 nt, Human
ccucccacaggcagaugaccug

SEQ ID NO: 1206485 - RNA, 21 nt, Human
uccacagaccucccacaggca

SEQ ID NO: 1206486 - RNA, 24 nt, Human
uccacagaccucccacaggcagau

SEQ ID NO: 1206487 - RNA, 20 nt, Human
uuccacagaccucccacagg

SEQ ID NO: 1206488 - RNA, 19 nt, Human
ugugguggaggaaaccaca

SEQ ID NO: 1206489 - RNA, 25 nt, Human
ugugguggaggaaaccacagaauac

SEQ ID NO: 1206490 - RNA, 21 nt, Human
aguacuagagaugcuggagcc

SEQ ID NO: 1206491 - RNA, 26 nt, Human
ccaaucagacauuucccagaaucuaa

SEQ ID NO: 1206492 - RNA, 21 nt, Human
ccugggcugaauuucugcagc

SEQ ID NO: 1206493 - RNA, 20 nt, Human
ccuguacagaguguccucau

SEQ ID NO: 1206494 - RNA, 27 nt, Human
cuaauucuggcugcuguucauuugggg

SEQ ID NO: 1206495 - RNA, 22 nt, Human
cuggagccucugaggaccucug

SEQ ID NO: 1206496 - RNA, 19 nt, Human
cuugcaguccugggcugaa

SEQ ID NO: 1206497 - RNA, 19 nt, Human
gagccuccuguacagagug

SEQ ID NO: 1206498 - RNA, 18 nt, Human
gagcuaauuagcucgaaa

SEQ ID NO: 1206499 - RNA, 23 nt, Human
uacucuguaaauggaaugugugg

SEQ ID NO: 1206500 - RNA, 21 nt, Human
uaggagagccuucagguagua

SEQ ID NO: 1206501 - RNA, 22 nt, Human
uauauuggacuauucuugaaac

SEQ ID NO: 1206502 - RNA, 18 nt, Human
uaucaugcuacuucaccu

SEQ ID NO: 1206503 - RNA, 21 nt, Human
ucauugaugcacuggauuacc

SEQ ID NO: 1206504 - RNA, 18 nt, Human
ucccagaaucuaaagacc

SEQ ID NO: 1206505 - RNA, 19 nt, Human
ucccagaaucuaaagaccu

SEQ ID NO: 1206506 - RNA, 21 nt, Human
uccugggcugaauuucugcag

SEQ ID NO: 1206507 - RNA, 22 nt, Human
uccugggcugaauuucugcagc

SEQ ID NO: 1206508 - RNA, 21 nt, Human
uccuguacagaguguccucau

SEQ ID NO: 1206509 - RNA, 24 nt, Human
ucuaaagaccccucagggggcccu

SEQ ID NO: 1206510 - RNA, 21 nt, Human
ucugcagcucauugaugcacu

SEQ ID NO: 1206511 - RNA, 19 nt, Human
ucuggccucugccaucacu

SEQ ID NO: 1206512 - RNA, 20 nt, Human
ucuggccucugccaucacuu

SEQ ID NO: 1206513 - RNA, 22 nt, Human
ucuugcaguccugggcugaauu

SEQ ID NO: 1206514 - RNA, 26 nt, Human
ugaaacaauauauauaaaaucaagca

SEQ ID NO: 1206515 - RNA, 19 nt, Human
ugucuauccuuucauccug

SEQ ID NO: 1206516 - RNA, 23 nt, Human
uucccaggcucacuuaucuuugu

SEQ ID NO: 1206517 - RNA, 20 nt, Human
agggcaucuguccuuucuuc

SEQ ID NO: 1206518 - RNA, 18 nt, Human
ucuguccuuucuuccucc

SEQ ID NO: 1206519 - RNA, 20 nt, Human
aggcuggggcggccuggaga

SEQ ID NO: 1206520 - RNA, 21 nt, Human
aaaaagaagcuaauuuaucca

SEQ ID NO: 1206521 - RNA, 21 nt, Human
aaagugcugggauuacgggug

SEQ ID NO: 1206522 - RNA, 24 nt, Human
aaagugcugggauuacggguguga

SEQ ID NO: 1206523 - RNA, 18 nt, Human
aagugcugggauuacggg

SEQ ID NO: 1206524 - RNA, 26 nt, Human
aagugcugggauuacgggugugagcc

SEQ ID NO: 1206525 - RNA, 19 nt, Human
agcuaacacuuacugagca

SEQ ID NO: 1206526 - RNA, 19 nt, Human
auacacacucacauacaca

SEQ ID NO: 1206527 - RNA, 24 nt, Human
caaagugcugggauuacgggugug

SEQ ID NO: 1206528 - RNA, 25 nt, Human
caccuggcugauuucugaaauuaug

SEQ ID NO: 1206529 - RNA, 19 nt, Human
cagcaccgucuucugcugu

SEQ ID NO: 1206530 - RNA, 21 nt, Human
ccaaagugcugggauuacggg

SEQ ID NO: 1206531 - RNA, 24 nt, Human
ccaaagugcugggauuacgggugu

SEQ ID NO: 1206532 - RNA, 20 nt, Human
cuucugcuguaaucuggcua

SEQ ID NO: 1206533 - RNA, 18 nt, Human
gaauauauaaugaaaaag

SEQ ID NO: 1206534 - RNA, 18 nt, Human
gauuacgggugugagcca

SEQ ID NO: 1206535 - RNA, 23 nt, Human
ggauuacgggugugagccaucac

SEQ ID NO: 1206536 - RNA, 21 nt, Human
uaaaaagaagcuaauuuaucc

SEQ ID NO: 1206537 - RNA, 24 nt, Human
uaaaaagaagcuaauuuauccacu

SEQ ID NO: 1206538 - RNA, 19 nt, Human
uaaugaaaaagacagcuaa

SEQ ID NO: 1206539 - RNA, 19 nt, Human
uacacacucacauacacau

SEQ ID NO: 1206540 - RNA, 23 nt, Human
uacgggugugagccaucacaccu

SEQ ID NO: 1206541 - RNA, 21 nt, Human
ucaucaguuuucauuccuuuu

SEQ ID NO: 1206542 - RNA, 23 nt, Human
ucccaaagugcugggauuacggg

SEQ ID NO: 1206543 - RNA, 18 nt, Human
ugaaaaagacagcuaaca

SEQ ID NO: 1206544 - RNA, 19 nt, Human
ugaauauauaaugaaaaag

SEQ ID NO: 1206545 - RNA, 23 nt, Human
ugaucucagcaccgucuucugcu

SEQ ID NO: 1206546 - RNA, 24 nt, Human
ugaugaaauuuaaaaagaagcuaa

SEQ ID NO: 1206547 - RNA, 24 nt, Human
ugcccuuucuaucucugucucuca

SEQ ID NO: 1206548 - RNA, 21 nt, Human
uggcugauuucugaaauuaug

SEQ ID NO: 1206549 - RNA, 18 nt, Human
ugggauuacgggugugag

SEQ ID NO: 1206550 - RNA, 19 nt, Human
ugggauuacgggugugagc

SEQ ID NO: 1206551 - RNA, 22 nt, Human
ugggauuacgggugugagccau

SEQ ID NO: 1206552 - RNA, 23 nt, Human
ugggauuacgggugugagccauc

SEQ ID NO: 1206553 - RNA, 24 nt, Human
ugggauuacgggugugagccauca

SEQ ID NO: 1206554 - RNA, 24 nt, Human
uuaaaaagaagcuaauuuauccac

SEQ ID NO: 1206555 - RNA, 18 nt, Human
uucaugcccuuucuaucu

SEQ ID NO: 1206556 - RNA, 24 nt, Human
uucucucacacacacugucuuuaa

SEQ ID NO: 1206557 - RNA, 18 nt, Human
uucugucuaccuuucucu

SEQ ID NO: 1206558 - RNA, 22 nt, Human
uucugucuaccuuucucucaca

SEQ ID NO: 1206559 - RNA, 22 nt, Human
uuucaugcccuuucuaucucug

SEQ ID NO: 1206560 - RNA, 21 nt, Human
ugaagaagugcgucucuuuuu

SEQ ID NO: 1206561 - RNA, 24 nt, Human
ugaagaagugcgucucuuuuuugc

SEQ ID NO: 1206562 - RNA, 20 nt, Human
ugcgucucuuuuuugcucuu

SEQ ID NO: 1206563 - RNA, 18 nt, Human
cagcgagucacuuccaag

SEQ ID NO: 1206564 - RNA, 22 nt, Human
gugugccaauauuacggcugga

SEQ ID NO: 1206565 - RNA, 18 nt, Human
uacagcgagucacuucca

SEQ ID NO: 1206566 - RNA, 18 nt, Human
ucuccauaggagacuugc

SEQ ID NO: 1206567 - RNA, 25 nt, Human
cagaccucuugaaguccaacggcuu

SEQ ID NO: 1206568 - RNA, 21 nt, Human
aagcugccucuucagcuuugc

SEQ ID NO: 1206569 - RNA, 23 nt, Human
acuaguguuauuuaauauuuccc

SEQ ID NO: 1206570 - RNA, 19 nt, Human
agcuuugcugcuacugcau

SEQ ID NO: 1206571 - RNA, 27 nt, Human
uguguuuauuccuccuccuuuuuuccu

SEQ ID NO: 1206572 - RNA, 20 nt, Human
uuuccugcuuauguuucucu

SEQ ID NO: 1206573 - RNA, 19 nt, Human
cccaaaacccggagaucag

SEQ ID NO: 1206574 - RNA, 23 nt, Human
cccccaaaacccggagaucagau

SEQ ID NO: 1206575 - RNA, 21 nt, Human
uaccuucuggaaggugccccc

SEQ ID NO: 1206576 - RNA, 19 nt, Human
uaggacuccagggcacugu

SEQ ID NO: 1206577 - RNA, 24 nt, Human
uggaaggugcccccaaaacccgga

SEQ ID NO: 1206578 - RNA, 20 nt, Human
cuccccgcaaaccuccacag

SEQ ID NO: 1206579 - RNA, 21 nt, Human
ucuccccgcaaaccuccacag

SEQ ID NO: 1206580 - RNA, 19 nt, Human
ucugaccucucuccccgca

SEQ ID NO: 1206581 - RNA, 23 nt, Human
ugaccucucuccccgcaaaccuc

SEQ ID NO: 1206582 - RNA, 23 nt, Human
aagaauauuccccagauaaugaa

SEQ ID NO: 1206583 - RNA, 19 nt, Human
ccagauaaugaagucaaaa

SEQ ID NO: 1206584 - RNA, 21 nt, Human
ugaguuggauagcuucauuua

SEQ ID NO: 1206585 - RNA, 22 nt, Human
cuggcggucgcaugcacuccuu

SEQ ID NO: 1206586 - RNA, 22 nt, Human
gacacaagacuuucagaagcuu

SEQ ID NO: 1206587 - RNA, 19 nt, Human
gaucugugaauuguucccu

SEQ ID NO: 1206588 - RNA, 21 nt, Human
gcuugcaguucuggccauacu

SEQ ID NO: 1206589 - RNA, 21 nt, Human
ggagggagcaguccgugaaaa

SEQ ID NO: 1206590 - RNA, 27 nt, Human
ucugcagacacaagacuuucagaagcu

SEQ ID NO: 1206591 - RNA, 22 nt, Human
uguuacagguccucugcuggca

SEQ ID NO: 1206592 - RNA, 21 nt, Human
uuacagguccucugcuggcag

SEQ ID NO: 1206593 - RNA, 21 nt, Human
auaaagcaagauacaccaucc

SEQ ID NO: 1206594 - RNA, 19 nt, Human
caagauacaccauccaauc

SEQ ID NO: 1206595 - RNA, 21 nt, Human
caggaagagcugaaagggaug

SEQ ID NO: 1206596 - RNA, 23 nt, Human
cgaugaugugcaguuugugcucc

SEQ ID NO: 1206597 - RNA, 24 nt, Human
cuucucuccaggaagagcugaaag

SEQ ID NO: 1206598 - RNA, 19 nt, Human
gagcugaaagggaugacca

SEQ ID NO: 1206599 - RNA, 24 nt, Human
uacacccccgaugaugugcaguuu

SEQ ID NO: 1206600 - RNA, 19 nt, Human
ugcuuggcaggguauggcu

SEQ ID NO: 1206601 - RNA, 22 nt, Human
uggcaggguauggcuucucucc

SEQ ID NO: 1206602 - RNA, 22 nt, Human
uuggcaggguauggcuucucuc

SEQ ID NO: 1206603 - RNA, 21 nt, Human
ccgcacagagccaugcauaca

SEQ ID NO: 1206604 - RNA, 20 nt, Human
cuugugggcugaguccuggg

SEQ ID NO: 1206605 - RNA, 19 nt, Human
gugggcugaguccugggcu

SEQ ID NO: 1206606 - RNA, 19 nt, Human
uaauacaccucugcgaaau

SEQ ID NO: 1206607 - RNA, 20 nt, Human
uagugaccuuucccuuggua

SEQ ID NO: 1206608 - RNA, 23 nt, Human
uccuugggguagugaccuuuccc

SEQ ID NO: 1206609 - RNA, 19 nt, Human
ugggguagugaccuuuccc

SEQ ID NO: 1206610 - RNA, 18 nt, Human
ugugggcugaguccuggg

SEQ ID NO: 1206611 - RNA, 18 nt, Human
uguguuuguagcuguuac

SEQ ID NO: 1206612 - RNA, 23 nt, Human
uuagugagccuuuuccaggugug

SEQ ID NO: 1206613 - RNA, 23 nt, Human
uuuccagguguguuuguagcugu

SEQ ID NO: 1206614 - RNA, 23 nt, Human
aagcagcccaauaggacacaacc

SEQ ID NO: 1206615 - RNA, 19 nt, Human
aggacacaaccuacaaucu

SEQ ID NO: 1206616 - RNA, 23 nt, Human
aggacuucagugucaagcagccc

SEQ ID NO: 1206617 - RNA, 19 nt, Human
caggacaccacuccugaag

SEQ ID NO: 1206618 - RNA, 20 nt, Human
cugaaggcagcgccuucuuc

SEQ ID NO: 1206619 - RNA, 23 nt, Human
ggacacaaccuacaaucuccccg

SEQ ID NO: 1206620 - RNA, 19 nt, Human
uccugaaggcagcgccuuc

SEQ ID NO: 1206621 - RNA, 18 nt, Human
aggauggugcaccaccgu

SEQ ID NO: 1206622 - RNA, 18 nt, Human
augaauuuucuguuugac

SEQ ID NO: 1206623 - RNA, 23 nt, Human
auguucuaccuccaguaacuuca

SEQ ID NO: 1206624 - RNA, 18 nt, Human
cacagcgguggcugcgac

SEQ ID NO: 1206625 - RNA, 21 nt, Human
cagcgguggcugcgacagcgu

SEQ ID NO: 1206626 - RNA, 20 nt, Human
ccacagcgguggcugcgaca

SEQ ID NO: 1206627 - RNA, 18 nt, Human
ccccagugcugcgguccc

SEQ ID NO: 1206628 - RNA, 22 nt, Human
cgcacugcuuccuugcaagcaa

SEQ ID NO: 1206629 - RNA, 24 nt, Human
cgguggcugcgacagcguggagcg

SEQ ID NO: 1206630 - RNA, 19 nt, Human
cuccccagugcugcggucc

SEQ ID NO: 1206631 - RNA, 24 nt, Human
cucuucccacuuuaucuguguuaa

SEQ ID NO: 1206632 - RNA, 21 nt, Human
cugcaauaauaaccacggagg

SEQ ID NO: 1206633 - RNA, 23 nt, Human
cuggcgaccacagcgguggcuuu

SEQ ID NO: 1206634 - RNA, 23 nt, Human
gcucacaccgcgggcaaccagua

SEQ ID NO: 1206635 - RNA, 25 nt, Human
uaagaucagcucaucaucacaaauu

SEQ ID NO: 1206636 - RNA, 19 nt, Human
uagccacuaauaacugacg

SEQ ID NO: 1206637 - RNA, 24 nt, Human
uaguuccaucuccaacuucuuugu

SEQ ID NO: 1206638 - RNA, 19 nt, Human
uaucgcagccccucggcug

SEQ ID NO: 1206639 - RNA, 19 nt, Human
ucacggcagcgguacacgu

SEQ ID NO: 1206640 - RNA, 22 nt, Human
uccauagccacuaauaacugac

SEQ ID NO: 1206641 - RNA, 21 nt, Human
uccccagugcugcggucccca

SEQ ID NO: 1206642 - RNA, 24 nt, Human
uccccagugcugcgguccccaaac

SEQ ID NO: 1206643 - RNA, 19 nt, Human
uggcugcgacagcguggag

SEQ ID NO: 1206644 - RNA, 21 nt, Human
uucaggauggugcaccaccgu

SEQ ID NO: 1206645 - RNA, 21 nt, Human
uucauuuuuuaggaguucugc

SEQ ID NO: 1206646 - RNA, 23 nt, Human
uucuuugucuugcagaucagcca

SEQ ID NO: 1206647 - RNA, 30 nt, Human
uuggcagcauuaaucaggcaaucucuuccu

SEQ ID NO: 1206648 - RNA, 23 nt, Human
uuucauugauauaacgcacugcu

SEQ ID NO: 1206649 - RNA, 20 nt, Human
ggaauagaaguggugaagga

SEQ ID NO: 1206650 - RNA, 20 nt, Human
ugaccuuaggaauagaagug

SEQ ID NO: 1206651 - RNA, 18 nt, Human
ugacuagaagaugaugcu

SEQ ID NO: 1206652 - RNA, 21 nt, Human
ugauugggaagaggugagaag

SEQ ID NO: 1206653 - RNA, 21 nt, Human
ugccauggauggaagagugac

SEQ ID NO: 1206654 - RNA, 20 nt, Human
ugggaagaggugagaaggca

SEQ ID NO: 1206655 - RNA, 21 nt, Human
aagaaagagaaauuccagugc

SEQ ID NO: 1206656 - RNA, 21 nt, Human
agagcacaguuuucacgcaag

SEQ ID NO: 1206657 - RNA, 20 nt, Human
gaucauaaguaccuucuuuc

SEQ ID NO: 1206658 - RNA, 22 nt, Human
guuucugcuucauuuaauucuu

SEQ ID NO: 1206659 - RNA, 21 nt, Human
ucagugugauguuauuuguga

SEQ ID NO: 1206660 - RNA, 23 nt, Human
ugaagaaagagaaauuccagugc

SEQ ID NO: 1206661 - RNA, 24 nt, Human
ugauucccacucuuucacuuucuc

SEQ ID NO: 1206662 - RNA, 26 nt, Human
uucaggugaagaaauuuaguugaaga

SEQ ID NO: 1206663 - RNA, 24 nt, Human
uucauauuugcuuuucuugguuuc

SEQ ID NO: 1206664 - RNA, 19 nt, Human
uucuugguuucugcuucau

SEQ ID NO: 1206665 - RNA, 18 nt, Human
uuucacgcaaguccugca

SEQ ID NO: 1206666 - RNA, 21 nt, Human
uuucuguacaagcucccucag

SEQ ID NO: 1206667 - RNA, 20 nt, Human
uuugcuuuucuugguuucug

SEQ ID NO: 1206668 - RNA, 19 nt, Human
acagcacaguuggcgcgug

SEQ ID NO: 1206669 - RNA, 21 nt, Human
ccgggggcugcacagcacagu

SEQ ID NO: 1206670 - RNA, 21 nt, Human
ggacaaaucacugauguucuu

SEQ ID NO: 1206671 - RNA, 19 nt, Human
uaugcaaagguaaaagcac

SEQ ID NO: 1206672 - RNA, 23 nt, Human
ucucucagcucuaggaucuugga

SEQ ID NO: 1206673 - RNA, 24 nt, Human
ugcacagcacaguuggcgcgugua

SEQ ID NO: 1206674 - RNA, 22 nt, Human
uuggggcccaacgauucucucu

SEQ ID NO: 1206675 - RNA, 18 nt, Human
aagcagagucacagcuga

SEQ ID NO: 1206676 - RNA, 18 nt, Human
acagaggcuccuggcuuu

SEQ ID NO: 1206677 - RNA, 23 nt, Human
acaugagguuuugguauuugcuc

SEQ ID NO: 1206678 - RNA, 21 nt, Human
agcagagucacagcugaauga

SEQ ID NO: 1206679 - RNA, 19 nt, Human
agcaggcuuuaugguggcu

SEQ ID NO: 1206680 - RNA, 18 nt, Human
augaauuuuccaagcaga

SEQ ID NO: 1206681 - RNA, 20 nt, Human
caagcagagucacagcugaa

SEQ ID NO: 1206682 - RNA, 20 nt, Human
caugagguuuugguauuugc

SEQ ID NO: 1206683 - RNA, 21 nt, Human
ccagaucccaaaugucaagga

SEQ ID NO: 1206684 - RNA, 24 nt, Human
cugguaucuggcacuucucuuucg

SEQ ID NO: 1206685 - RNA, 19 nt, Human
cuuuauuaaugaaagugau

SEQ ID NO: 1206686 - RNA, 21 nt, Human
gguccauuuuucaauuucccu

SEQ ID NO: 1206687 - RNA, 21 nt, Human
guaccuaacauagacuuugcu

SEQ ID NO: 1206688 - RNA, 23 nt, Human
uaugguggcuggguuccaagcag

SEQ ID NO: 1206689 - RNA, 27 nt, Human
uaugguggcuggguuccaagcagauac

SEQ ID NO: 1206690 - RNA, 23 nt, Human
uccaagcagauaccugguugugc

SEQ ID NO: 1206691 - RNA, 25 nt, Human
uccagaucccaaaugucaaggaccc

SEQ ID NO: 1206692 - RNA, 21 nt, Human
ucccaaaugucaaggacccau

SEQ ID NO: 1206693 - RNA, 23 nt, Human
uccugguaucuggcacuucucuu

SEQ ID NO: 1206694 - RNA, 23 nt, Human
ucugugccgaaugaacugagaga

SEQ ID NO: 1206695 - RNA, 24 nt, Human
ucuucugccagcugcucacaugau

SEQ ID NO: 1206696 - RNA, 24 nt, Human
ugccagcugcucacaugauuaugg

SEQ ID NO: 1206697 - RNA, 20 nt, Human
ugcuggguugcggggccacc

SEQ ID NO: 1206698 - RNA, 18 nt, Human
uguuccaaacuuacacuc

SEQ ID NO: 1206699 - RNA, 25 nt, Human
uuaaugaaagugauuuguuuuccuu

SEQ ID NO: 1206700 - RNA, 18 nt, Human
uugcauuggcugcuuugu

SEQ ID NO: 1206701 - RNA, 19 nt, Human
uugcggggccacacaguag

SEQ ID NO: 1206702 - RNA, 21 nt, Human
aagaaauucuuaaagauggcu

SEQ ID NO: 1206703 - RNA, 23 nt, Human
agagaaaaaaaucuucaggauac

SEQ ID NO: 1206704 - RNA, 23 nt, Human
cacauacagguuuaauacacuuc

SEQ ID NO: 1206705 - RNA, 19 nt, Human
cuacuguuaacucuagaua

SEQ ID NO: 1206706 - RNA, 22 nt, Human
uaagaaauucuuaaagauggcu

SEQ ID NO: 1206707 - RNA, 18 nt, Human
uacaaacaagauccacug

SEQ ID NO: 1206708 - RNA, 25 nt, Human
uacaaacaagauccacugucuucca

SEQ ID NO: 1206709 - RNA, 19 nt, Human
ugaaaaauaaauccccuac

SEQ ID NO: 1206710 - RNA, 26 nt, Human
aaacagucaagugaagaugguaaagc

SEQ ID NO: 1206711 - RNA, 22 nt, Human
aaaccuccaucagauccucaau

SEQ ID NO: 1206712 - RNA, 22 nt, Human
aaagagcagcgcggcgagcagu

SEQ ID NO: 1206713 - RNA, 23 nt, Human
aaccaaacaaugggcaaccuccc

SEQ ID NO: 1206714 - RNA, 25 nt, Human
aaccaaacaaugggcaaccucccag

SEQ ID NO: 1206715 - RNA, 19 nt, Human
aaugacuugcaacaucuuc

SEQ ID NO: 1206716 - RNA, 19 nt, Human
acaaacaauagcaugagcc

SEQ ID NO: 1206717 - RNA, 26 nt, Human
acaaacaauagcaugagccaucugug

SEQ ID NO: 1206718 - RNA, 18 nt, Human
acaccuggcccacccagc

SEQ ID NO: 1206719 - RNA, 24 nt, Human
acagaaaauaaauacauuaaaaaa

SEQ ID NO: 1206720 - RNA, 26 nt, Human
acaugcaccacagaccagccagcucc

SEQ ID NO: 1206721 - RNA, 19 nt, Human
acccugcgaggucaaagag

SEQ ID NO: 1206722 - RNA, 19 nt, Human
acccugcgaggucaaagag

SEQ ID NO: 1206723 - RNA, 24 nt, Human
agaaaaaggaaugacuugcaacau

SEQ ID NO: 1206724 - RNA, 22 nt, Human
agaagcagcuaucugucagggg

SEQ ID NO: 1206725 - RNA, 20 nt, Human
agacuaaauuuacaacagca

SEQ ID NO: 1206726 - RNA, 22 nt, Human
agccauaaacuggccccaaaac

SEQ ID NO: 1206727 - RNA, 26 nt, Human
agucaagugaagaugguaaagccaaa

SEQ ID NO: 1206728 - RNA, 19 nt, Human
aguuaacuagcccaaccua

SEQ ID NO: 1206729 - RNA, 18 nt, Human
auaaacuggccccaaaac

SEQ ID NO: 1206730 - RNA, 22 nt, Human
auaaacuggccccaaaacuggc

SEQ ID NO: 1206731 - RNA, 18 nt, Human
augcaccacagaccagcc

SEQ ID NO: 1206732 - RNA, 23 nt, Human
caaccucccaguucuucaguccc

SEQ ID NO: 1206733 - RNA, 21 nt, Human
caagccccccaaaauccagcc

SEQ ID NO: 1206734 - RNA, 24 nt, Human
caagccccccaaaauccagccaua

SEQ ID NO: 1206735 - RNA, 19 nt, Human
caagcugaacagaaaauaa

SEQ ID NO: 1206736 - RNA, 20 nt, Human
cacaugcaccacagaccagg

SEQ ID NO: 1206737 - RNA, 24 nt, Human
caccuggcccacccagcccagagu

SEQ ID NO: 1206738 - RNA, 19 nt, Human
caccugguauuacaacaug

SEQ ID NO: 1206739 - RNA, 19 nt, Human
cagccauaaacuggcccca

SEQ ID NO: 1206740 - RNA, 20 nt, Human
cagcucccugaguaccagag

SEQ ID NO: 1206741 - RNA, 24 nt, Human
cauuuuugucauucagcuugagag

SEQ ID NO: 1206742 - RNA, 18 nt, Human
cccaaccuaugccuuuaa

SEQ ID NO: 1206743 - RNA, 22 nt, Human
cccacccagcccagaguggaaa

SEQ ID NO: 1206744 - RNA, 19 nt, Human
cccagcucgaccgccccuu

SEQ ID NO: 1206745 - RNA, 18 nt, Human
cccguggacauuuucccc

SEQ ID NO: 1206746 - RNA, 18 nt, Human
cccugaguaccagagggc

SEQ ID NO: 1206747 - RNA, 20 nt, Human
ccgccccuugcuuuuccgcu

SEQ ID NO: 1206748 - RNA, 23 nt, Human
ccgccccuugcuuuuccgcuucc

SEQ ID NO: 1206749 - RNA, 19 nt, Human
ccuucguuucccauaaggg

SEQ ID NO: 1206750 - RNA, 23 nt, Human
ccuugcuuuuccgcuuccuggag

SEQ ID NO: 1206751 - RNA, 25 nt, Human
cuaaagcuaccacuaauauucucuu

SEQ ID NO: 1206752 - RNA, 23 nt, Human
cuaaaggacagaaaaaggaauga

SEQ ID NO: 1206753 - RNA, 27 nt, Human
cugaaaccccguggacauuuuccccau

SEQ ID NO: 1206754 - RNA, 20 nt, Human
cugaagucaguuucuccucc

SEQ ID NO: 1206755 - RNA, 22 nt, Human
cugagacuaaauuuacaacagc

SEQ ID NO: 1206756 - RNA, 19 nt, Human
cugcagcacuguaacaugu

SEQ ID NO: 1206757 - RNA, 23 nt, Human
cugugugugugucuuuaauuccu

SEQ ID NO: 1206758 - RNA, 21 nt, Human
cuuaagccacaaacaauagca

SEQ ID NO: 1206759 - RNA, 24 nt, Human
cuucaguucuggucacagguuuuu

SEQ ID NO: 1206760 - RNA, 27 nt, Human
cuucuaaagcuaccacuaauauucucu

SEQ ID NO: 1206761 - RNA, 21 nt, Human
gagaccccugauuucccacuu

SEQ ID NO: 1206762 - RNA, 23 nt, Human
gcaaaaccauuuuaguccuugaa

SEQ ID NO: 1206763 - RNA, 19 nt, Human
gcaaccucccaguucuuca

SEQ ID NO: 1206764 - RNA, 28 nt, Human
gcaaggaacaccuggcccacccagccca

SEQ ID NO: 1206765 - RNA, 18 nt, Human
gcaugagccaucugugcc

SEQ ID NO: 1206766 - RNA, 19 nt, Human
gccauaaacuggccccaaa

SEQ ID NO: 1206767 - RNA, 24 nt, Human
gccgcaguuaacuagcccaaccua

SEQ ID NO: 1206768 - RNA, 18 nt, Human
gggcaaggaacaccuggc

SEQ ID NO: 1206769 - RNA, 24 nt, Human
ggucaaagagcagcgcggcgagca

SEQ ID NO: 1206770 - RNA, 25 nt, Human
uaaaaucucugcagcacuguaacau

SEQ ID NO: 1206771 - RNA, 20 nt, Human
uaacauguucauaauggccc

SEQ ID NO: 1206772 - RNA, 22 nt, Human
uaagccacaaacaauagcauga

SEQ ID NO: 1206773 - RNA, 22 nt, Human
uacaaacagucaagugaagaug

SEQ ID NO: 1206774 - RNA, 26 nt, Human
uacaguauuacaaacagucaagugaa

SEQ ID NO: 1206775 - RNA, 24 nt, Human
uacuacaguauuacaaacagucaa

SEQ ID NO: 1206776 - RNA, 18 nt, Human
uagaagacaagcagcuug

SEQ ID NO: 1206777 - RNA, 23 nt, Human
uagcuucuuagguggaaagcaac

SEQ ID NO: 1206778 - RNA, 25 nt, Human
uagguggaaagcaacuaagucuuuu

SEQ ID NO: 1206779 - RNA, 22 nt, Human
ucagucccuaaaggacagaaaa

SEQ ID NO: 1206780 - RNA, 23 nt, Human
ucaguucuggucacagguuuuua

SEQ ID NO: 1206781 - RNA, 19 nt, Human
ucccugaguaccagagggc

SEQ ID NO: 1206782 - RNA, 20 nt, Human
ucccugaguaccagagggcu

SEQ ID NO: 1206783 - RNA, 21 nt, Human
ucccugaguaccagagggcuu

SEQ ID NO: 1206784 - RNA, 20 nt, Human
uccuucaguucuggucacag

SEQ ID NO: 1206785 - RNA, 22 nt, Human
uccuucaguucuggucacaggu

SEQ ID NO: 1206786 - RNA, 22 nt, Human
ucuuugagucauucuuuuuggg

SEQ ID NO: 1206787 - RNA, 21 nt, Human
ugaaaccccguggacauuuuc

SEQ ID NO: 1206788 - RNA, 23 nt, Human
ugaacagaaaauaaauacauuaa

SEQ ID NO: 1206789 - RNA, 20 nt, Human
ugacuugcaacaucuuccag

SEQ ID NO: 1206790 - RNA, 21 nt, Human
ugauuucccacuuuacaccuc

SEQ ID NO: 1206791 - RNA, 23 nt, Human
ugcaguuuucaguuccuagaguc

SEQ ID NO: 1206792 - RNA, 22 nt, Human
uggagagaagcagcuaucuguc

SEQ ID NO: 1206793 - RNA, 24 nt, Human
uggccccaaaacuggccauaaaua

SEQ ID NO: 1206794 - RNA, 22 nt, Human
uguucggggcucucagcucuga

SEQ ID NO: 1206795 - RNA, 21 nt, Human
uuaacuagcccaaccuaugcc

SEQ ID NO: 1206796 - RNA, 18 nt, Human
uuccgcuuccuggaggcc

SEQ ID NO: 1206797 - RNA, 21 nt, Human
uuguuuuguuuucaaauugug

SEQ ID NO: 1206798 - RNA, 24 nt, Human
uuuucaguuccuagagucuuccuu

SEQ ID NO: 1206799 - RNA, 19 nt, Human
uuuuccgcuuccuggaggc

SEQ ID NO: 1206800 - RNA, 20 nt, Human
acucacuuccgccuccuccg

SEQ ID NO: 1206801 - RNA, 22 nt, Human
acucacuuccgccuccuccggu

SEQ ID NO: 1206802 - RNA, 22 nt, Human
agaccggggccggcgacggaug

SEQ ID NO: 1206803 - RNA, 20 nt, Human
cacugaggaugcgccacagg

SEQ ID NO: 1206804 - RNA, 30 nt, Human
ccggcgacggaugcagggcggcccuccucu

SEQ ID NO: 1206805 - RNA, 21 nt, Human
gaggccccuggagaccggggc

SEQ ID NO: 1206806 - RNA, 24 nt, Human
gccuccuccgguuuaagcaccgcc

SEQ ID NO: 1206807 - RNA, 20 nt, Human
gggccggcgacggaugcagg

SEQ ID NO: 1206808 - RNA, 21 nt, Human
ucacugaggaugcgccacagg

SEQ ID NO: 1206809 - RNA, 23 nt, Human
ucgagccccugcgccugcgcuag

SEQ ID NO: 1206810 - RNA, 24 nt, Human
ugaggccccuggagaccggggccg

SEQ ID NO: 1206811 - RNA, 25 nt, Human
agguaccaggggcuuagcauaagcu

SEQ ID NO: 1206812 - RNA, 19 nt, Human
cagaaagucucuucucucu

SEQ ID NO: 1206813 - RNA, 20 nt, Human
cagcacggaacaaacgauaa

SEQ ID NO: 1206814 - RNA, 22 nt, Human
cagcacggaacaaacgauaagc

SEQ ID NO: 1206815 - RNA, 22 nt, Human
cuggcacagcggugacuccugc

SEQ ID NO: 1206816 - RNA, 26 nt, Human
gaacaaacgauaagccgcucuggcac

SEQ ID NO: 1206817 - RNA, 20 nt, Human
gcucucagguugaaagcaga

SEQ ID NO: 1206818 - RNA, 18 nt, Human
ggaacaaacgauaagccg

SEQ ID NO: 1206819 - RNA, 24 nt, Human
ugaaagcagaaagucucuucucuc

SEQ ID NO: 1206820 - RNA, 21 nt, Human
uggcacagcggugacuccugc

SEQ ID NO: 1206821 - RNA, 22 nt, Human
uugaaagcagaaagucucuucu

SEQ ID NO: 1206822 - RNA, 22 nt, Human
aaaagcugccagagaggcuguu

SEQ ID NO: 1206823 - RNA, 24 nt, Human
acccuucugccuccuggauuuccu

SEQ ID NO: 1206824 - RNA, 20 nt, Human
accgcuguuuaccgaggguc

SEQ ID NO: 1206825 - RNA, 24 nt, Human
cugcuucaccgagggcccugugau

SEQ ID NO: 1206826 - RNA, 19 nt, Human
uggaaacccuucugccucc

SEQ ID NO: 1206827 - RNA, 24 nt, Human
uugccgacagcagcgauuucuugu

SEQ ID NO: 1206828 - RNA, 22 nt, Human
uuucuuguguggaaacccuucu

SEQ ID NO: 1206829 - RNA, 24 nt, Human
auguguguauauauauauauauaa

SEQ ID NO: 1206830 - RNA, 22 nt, Human
caaaauacaauucauccauuaa

SEQ ID NO: 1206831 - RNA, 24 nt, Human
gcacguacaagaccuucucuugaa

SEQ ID NO: 1206832 - RNA, 20 nt, Human
guguguauauauauauauau

SEQ ID NO: 1206833 - RNA, 27 nt, Human
guguguauauauauauauauauuuaaa

SEQ ID NO: 1206834 - RNA, 19 nt, Human
uaaagcuaaggggaaggag

SEQ ID NO: 1206835 - RNA, 19 nt, Human
uacaagaccuucucuugaa

SEQ ID NO: 1206836 - RNA, 31 nt, Human
uauauauauauauuuaaaaaucacauuauaa

SEQ ID NO: 1206837 - RNA, 18 nt, Human
uguauauauauauauaua

SEQ ID NO: 1206838 - RNA, 18 nt, Human
uguguauauauauauaua

SEQ ID NO: 1206839 - RNA, 20 nt, Human
uguguauauauauauauaua

SEQ ID NO: 1206840 - RNA, 21 nt, Human
uguguauauauauauauauau

SEQ ID NO: 1206841 - RNA, 24 nt, Human
uguguguauauauauauauauaac

SEQ ID NO: 1206842 - RNA, 20 nt, Human
uucacaauguguguauauau

SEQ ID NO: 1206843 - RNA, 26 nt, Human
uucacaauguguguauauauauauau

SEQ ID NO: 1206844 - RNA, 22 nt, Human
uucauuauuucacaaugugugu

SEQ ID NO: 1206845 - RNA, 22 nt, Human
uugaacaaguugaauuuucagg

SEQ ID NO: 1206846 - RNA, 23 nt, Human
uuucacaauguguguauauauau

SEQ ID NO: 1206847 - RNA, 21 nt, Human
aagcggcgcagcagccccagg

SEQ ID NO: 1206848 - RNA, 21 nt, Human
acucccagaggcgcugguaag

SEQ ID NO: 1206849 - RNA, 22 nt, Human
cagaagcugcucuugguccagc

SEQ ID NO: 1206850 - RNA, 20 nt, Human
ccugcagggucgcgugggag

SEQ ID NO: 1206851 - RNA, 19 nt, Human
cgaagcggcgcagcagccc

SEQ ID NO: 1206852 - RNA, 19 nt, Human
cugcucuugguccagcagc

SEQ ID NO: 1206853 - RNA, 19 nt, Human
gaaagccagcccaggcuug

SEQ ID NO: 1206854 - RNA, 22 nt, Human
gcgcagcagccccagguagugc

SEQ ID NO: 1206855 - RNA, 23 nt, Human
gggaaagccagcccaggcuuggg

SEQ ID NO: 1206856 - RNA, 25 nt, Human
gguccagcagcuccugcaggguccc

SEQ ID NO: 1206857 - RNA, 18 nt, Human
ucccagaggcgcugguaa

SEQ ID NO: 1206858 - RNA, 21 nt, Human
ucgaagcggcgcagcagcccc

SEQ ID NO: 1206859 - RNA, 19 nt, Human
uugguccagcagcuccugc

SEQ ID NO: 1206860 - RNA, 22 nt, Human
accugggugggagccuuccaag

SEQ ID NO: 1206861 - RNA, 19 nt, Human
agaaccaauuaacagcagc

SEQ ID NO: 1206862 - RNA, 22 nt, Human
caagaaaggguccucgugagaa

SEQ ID NO: 1206863 - RNA, 21 nt, Human
cagcucagcgguucccagcaa

SEQ ID NO: 1206864 - RNA, 22 nt, Human
ccaggacagaaggggaagugga

SEQ ID NO: 1206865 - RNA, 18 nt, Human
ccaggcggucucauggca

SEQ ID NO: 1206866 - RNA, 24 nt, Human
cccccaauucauuuagcagcccca

SEQ ID NO: 1206867 - RNA, 18 nt, Human
cccugguugaggccgcgc

SEQ ID NO: 1206868 - RNA, 26 nt, Human
cgccuugcucaccccaggcggucuca

SEQ ID NO: 1206869 - RNA, 21 nt, Human
cgggcagcagcccaggucgcc

SEQ ID NO: 1206870 - RNA, 18 nt, Human
cuguccuaggagguccga

SEQ ID NO: 1206871 - RNA, 22 nt, Human
gacgcagacacugcgggaagga

SEQ ID NO: 1206872 - RNA, 26 nt, Human
gccuugcucaccccaggcggucucaa

SEQ ID NO: 1206873 - RNA, 21 nt, Human
gcggcggccaaaccuucgggc

SEQ ID NO: 1206874 - RNA, 21 nt, Human
gggaaggaaacaggugucccg

SEQ ID NO: 1206875 - RNA, 25 nt, Human
guggagggggguggucugugugugg

SEQ ID NO: 1206876 - RNA, 20 nt, Human
gugggagccuuccaagaacu

SEQ ID NO: 1206877 - RNA, 19 nt, Human
uaaugaaacuuuaaguaca

SEQ ID NO: 1206878 - RNA, 24 nt, Human
ugagucucuguccuaggagguccg

SEQ ID NO: 1206879 - RNA, 20 nt, Human
uggcuaaggagagucaggug

SEQ ID NO: 1206880 - RNA, 21 nt, Human
uuagcagccccagaacuuucc

SEQ ID NO: 1206881 - RNA, 20 nt, Human
aagagccuugucaccgagga

SEQ ID NO: 1206882 - RNA, 24 nt, Human
caccacggucuucagugcgcugcc

SEQ ID NO: 1206883 - RNA, 21 nt, Human
ccuccccugcugcgcccugga

SEQ ID NO: 1206884 - RNA, 18 nt, Human
ccuggaggcccgagagca

SEQ ID NO: 1206885 - RNA, 23 nt, Human
cgcccuggaggcccgagagcagg

SEQ ID NO: 1206886 - RNA, 22 nt, Human
cuugucaccgaggacccgcucc

SEQ ID NO: 1206887 - RNA, 24 nt, Human
gaaaaugcggggccuucccauagc

SEQ ID NO: 1206888 - RNA, 19 nt, Human
gaccugcagagcuuuggcc

SEQ ID NO: 1206889 - RNA, 23 nt, Human
gagcagggagggcuugggaaaca

SEQ ID NO: 1206890 - RNA, 19 nt, Human
gcccgagagcagggagggc

SEQ ID NO: 1206891 - RNA, 22 nt, Human
ggccacggggacaaaacccucc

SEQ ID NO: 1206892 - RNA, 20 nt, Human
gugcgcugccgucgccucgc

SEQ ID NO: 1206893 - RNA, 22 nt, Human
gugcgcugccgucgccucgcag

SEQ ID NO: 1206894 - RNA, 21 nt, Human
ucgccucgcagagcggccagg

SEQ ID NO: 1206895 - RNA, 21 nt, Human
ugaaaaugcggggccuuccca

SEQ ID NO: 1206896 - RNA, 22 nt, Human
uggaggcccgagagcagggagg

SEQ ID NO: 1206897 - RNA, 21 nt, Human
acagcagcaggcuuucuguac

SEQ ID NO: 1206898 - RNA, 22 nt, Human
agagaggcggcagcaggagagc

SEQ ID NO: 1206899 - RNA, 20 nt, Human
aggcgagugggcgccuggcg

SEQ ID NO: 1206900 - RNA, 18 nt, Human
cacuggacgacugucccu

SEQ ID NO: 1206901 - RNA, 22 nt, Human
cacuggacgacugucccugaca

SEQ ID NO: 1206902 - RNA, 22 nt, Human
cagggcugcgggggcucccagg

SEQ ID NO: 1206903 - RNA, 24 nt, Human
ccccuuccuucuugggauggaggu

SEQ ID NO: 1206904 - RNA, 21 nt, Human
ccucuggcugcugcaggccuc

SEQ ID NO: 1206905 - RNA, 19 nt, Human
cgacugucccugacagagu

SEQ ID NO: 1206906 - RNA, 22 nt, Human
cggcagcaggagagccacagag

SEQ ID NO: 1206907 - RNA, 21 nt, Human
cucccaagaccgcuucacacu

SEQ ID NO: 1206908 - RNA, 20 nt, Human
cucggccgcuaguggggugc

SEQ ID NO: 1206909 - RNA, 21 nt, Human
cugcaggccucccaagaccgc

SEQ ID NO: 1206910 - RNA, 19 nt, Human
cugcgggggcucccagguc

SEQ ID NO: 1206911 - RNA, 21 nt, Human
cugcugggucagccccugugu

SEQ ID NO: 1206912 - RNA, 19 nt, Human
gaccugcugccccuuccuu

SEQ ID NO: 1206913 - RNA, 18 nt, Human
gaggauggaaaauuccgu

SEQ ID NO: 1206914 - RNA, 20 nt, Human
gccacagagagcacgggagc

SEQ ID NO: 1206915 - RNA, 24 nt, Human
gccagcguugccucuugcagacca

SEQ ID NO: 1206916 - RNA, 18 nt, Human
gcugcugcaggccuccca

SEQ ID NO: 1206917 - RNA, 23 nt, Human
ggcgagugggcgccuggcgaggg

SEQ ID NO: 1206918 - RNA, 21 nt, Human
ggcuuucuguacccagagagg

SEQ ID NO: 1206919 - RNA, 19 nt, Human
gggaagugauuccuuccca

SEQ ID NO: 1206920 - RNA, 20 nt, Human
gggaagugauuccuucccaa

SEQ ID NO: 1206921 - RNA, 22 nt, Human
guggggcuuuuucacacuggac

SEQ ID NO: 1206922 - RNA, 18 nt, Human
uacccagagaggcggcag

SEQ ID NO: 1206923 - RNA, 21 nt, Human
uccccuccagacugaagggcu

SEQ ID NO: 1206924 - RNA, 21 nt, Human
ucccugacagaguccaucccc

SEQ ID NO: 1206925 - RNA, 27 nt, Human
uccuccugcugggucagccccuguguc

SEQ ID NO: 1206926 - RNA, 18 nt, Human
ucuccaccucgccuggcc

SEQ ID NO: 1206927 - RNA, 20 nt, Human
ucuugcagaccacucggccg

SEQ ID NO: 1206928 - RNA, 18 nt, Human
ugagagguacaggcgagu

SEQ ID NO: 1206929 - RNA, 18 nt, Human
ugcagcugguggugcggg

SEQ ID NO: 1206930 - RNA, 18 nt, Human
ugcggcagccucuggcuc

SEQ ID NO: 1206931 - RNA, 22 nt, Human
ugcugcaggccucccaagaccg

SEQ ID NO: 1206932 - RNA, 19 nt, Human
uggccgugcagaugugaga

SEQ ID NO: 1206933 - RNA, 18 nt, Human
ugggauggaggugggccu

SEQ ID NO: 1206934 - RNA, 21 nt, Human
uggggugcgcacagcagcagg

SEQ ID NO: 1206935 - RNA, 22 nt, Human
ugguggugcgggcaguggggcu

SEQ ID NO: 1206936 - RNA, 24 nt, Human
ugguggugcgggcaguggggcucc

SEQ ID NO: 1206937 - RNA, 19 nt, Human
uucagaggaggauggaaaa

SEQ ID NO: 1206938 - RNA, 18 nt, Human
aaaaaaaacacaaaggcc

SEQ ID NO: 1206939 - RNA, 24 nt, Human
aaaacaucccaugugaaugaaaca

SEQ ID NO: 1206940 - RNA, 24 nt, Human
aacugaagacgaaagucaagacaa

SEQ ID NO: 1206941 - RNA, 20 nt, Human
aaggauggcaagaaaucacu

SEQ ID NO: 1206942 - RNA, 19 nt, Human
aaugugcccuucuccagag

SEQ ID NO: 1206943 - RNA, 18 nt, Human
acuacaaugcagaacauu

SEQ ID NO: 1206944 - RNA, 19 nt, Human
acugcaguccuucauuggc

SEQ ID NO: 1206945 - RNA, 21 nt, Human
agaaaugagaaaaauguacag

SEQ ID NO: 1206946 - RNA, 20 nt, Human
agacgaaagucaagacaauc

SEQ ID NO: 1206947 - RNA, 21 nt, Human
agccauugcucagcuguagcc

SEQ ID NO: 1206948 - RNA, 19 nt, Human
aggaaccaccaggcaacgu

SEQ ID NO: 1206949 - RNA, 19 nt, Human
auaaaggcuuuuccacugu

SEQ ID NO: 1206950 - RNA, 21 nt, Human
auauaucuauauauauauaca

SEQ ID NO: 1206951 - RNA, 23 nt, Human
auauaucuauauauauauacaca

SEQ ID NO: 1206952 - RNA, 23 nt, Human
aucccaugugaaugaaacaggac

SEQ ID NO: 1206953 - RNA, 23 nt, Human
auuacucugagauucagagaaau

SEQ ID NO: 1206954 - RNA, 25 nt, Human
auuucccuuaugcugcccucuuuca

SEQ ID NO: 1206955 - RNA, 18 nt, Human
auuucuuggcaaccagcc

SEQ ID NO: 1206956 - RNA, 21 nt, Human
caaacacaggaaugaaaaaaa

SEQ ID NO: 1206957 - RNA, 25 nt, Human
caacacagcgcaccccagacucugu

SEQ ID NO: 1206958 - RNA, 22 nt, Human
caacugaagacgaaagucaaga

SEQ ID NO: 1206959 - RNA, 25 nt, Human
caauucaacugaagacgaaagucaa

SEQ ID NO: 1206960 - RNA, 23 nt, Human
cacaaaccacacuuagaucccaa

SEQ ID NO: 1206961 - RNA, 24 nt, Human
cacaggaaugaaaaaaaacacaaa

SEQ ID NO: 1206962 - RNA, 19 nt, Human
caccccagacucugugaca

SEQ ID NO: 1206963 - RNA, 25 nt, Human
cacccuuuaauuucaacacaugacc

SEQ ID NO: 1206964 - RNA, 31 nt, Human
caccuaagucaaagucuucuuuccaagggcc

SEQ ID NO: 1206965 - RNA, 22 nt, Human
cacuggcguagaacacaaggcu

SEQ ID NO: 1206966 - RNA, 24 nt, Human
cagaaucgggcacacaaauacugc

SEQ ID NO: 1206967 - RNA, 21 nt, Human
cagcugauuuccucacccucu

SEQ ID NO: 1206968 - RNA, 26 nt, Human
cagucaaaaaaaaaaaaaaaaauucc

SEQ ID NO: 1206969 - RNA, 22 nt, Human
ccaaagcaccuaagucaaaguc

SEQ ID NO: 1206970 - RNA, 19 nt, Human
ccaacagugaacugaaaag

SEQ ID NO: 1206971 - RNA, 23 nt, Human
ccaaguaauuuucuguccucucu

SEQ ID NO: 1206972 - RNA, 20 nt, Human
ccaccaggcaacgucaacug

SEQ ID NO: 1206973 - RNA, 24 nt, Human
ccaccaggcaacgucaacugauuu

SEQ ID NO: 1206974 - RNA, 24 nt, Human
ccacuccauuacaaauccugacuc

SEQ ID NO: 1206975 - RNA, 22 nt, Human
cccaagaugaugaaaccggcuc

SEQ ID NO: 1206976 - RNA, 22 nt, Human
ccccagccagucacuauuacgc

SEQ ID NO: 1206977 - RNA, 22 nt, Human
ccucccauuacugcccaaaguc

SEQ ID NO: 1206978 - RNA, 18 nt, Human
ccugcugucuuucccagg

SEQ ID NO: 1206979 - RNA, 18 nt, Human
ccuggcacuggcguagaa

SEQ ID NO: 1206980 - RNA, 22 nt, Human
cgcaccccagacucugugacaa

SEQ ID NO: 1206981 - RNA, 21 nt, Human
cuaaaauuaauacaggcaggc

SEQ ID NO: 1206982 - RNA, 20 nt, Human
cucauugaagcacuugguaa

SEQ ID NO: 1206983 - RNA, 18 nt, Human
cucccuucuccaucauuu

SEQ ID NO: 1206984 - RNA, 19 nt, Human
cucccuucuccaucauuuc

SEQ ID NO: 1206985 - RNA, 19 nt, Human
cucugugacaacgcccucc

SEQ ID NO: 1206986 - RNA, 22 nt, Human
cucugugacaacgcccuccugg

SEQ ID NO: 1206987 - RNA, 19 nt, Human
cugugacaacgcccuccug

SEQ ID NO: 1206988 - RNA, 22 nt, Human
cuguguguguguguuuacagaa

SEQ ID NO: 1206989 - RNA, 20 nt, Human
cuuuggaaaccugaaaugcc

SEQ ID NO: 1206990 - RNA, 22 nt, Human
gauuuaaagcuaaucuuaagga

SEQ ID NO: 1206991 - RNA, 23 nt, Human
gcucaauaaaauuaacauggcau

SEQ ID NO: 1206992 - RNA, 22 nt, Human
gcucuuagaaaacuuccuuaaa

SEQ ID NO: 1206993 - RNA, 25 nt, Human
gguuuuguuuuuguugauguuuuca

SEQ ID NO: 1206994 - RNA, 18 nt, Human
guagaacacaaggcucag

SEQ ID NO: 1206995 - RNA, 18 nt, Human
guagccuguggccuaaaa

SEQ ID NO: 1206996 - RNA, 22 nt, Human
uaaagcuaaucuuaaggaaucu

SEQ ID NO: 1206997 - RNA, 24 nt, Human
uaaauaaccauccacaauucuccc

SEQ ID NO: 1206998 - RNA, 20 nt, Human
uacagaaucgggcacacaaa

SEQ ID NO: 1206999 - RNA, 20 nt, Human
uacucugagauucagagaaa

SEQ ID NO: 1207000 - RNA, 19 nt, Human
uacucuguguguguguguu

SEQ ID NO: 1207001 - RNA, 18 nt, Human
uagaacacaaggcucagc

SEQ ID NO: 1207002 - RNA, 23 nt, Human
uauacacauauauacucugugug

SEQ ID NO: 1207003 - RNA, 28 nt, Human
uauacacauauauacucugugugugugg

SEQ ID NO: 1207004 - RNA, 21 nt, Human
uauacaugaaauagccacaaa

SEQ ID NO: 1207005 - RNA, 25 nt, Human
uauauacacauauauacucugugug

SEQ ID NO: 1207006 - RNA, 19 nt, Human
uauauauacacauauauac

SEQ ID NO: 1207007 - RNA, 21 nt, Human
uauauauauacacauauauac

SEQ ID NO: 1207008 - RNA, 21 nt, Human
uauauauauacacauauauac

SEQ ID NO: 1207009 - RNA, 21 nt, Human
uauauauauauacacauaugc

SEQ ID NO: 1207010 - RNA, 19 nt, Human
ucaacccugcucacuauac

SEQ ID NO: 1207011 - RNA, 20 nt, Human
ucaguaaaugagggcaagua

SEQ ID NO: 1207012 - RNA, 28 nt, Human
ucaguaaaugagggcaaguauagagaag

SEQ ID NO: 1207013 - RNA, 31 nt, Human
ucagugccucccauuacugcccaaagucucu

SEQ ID NO: 1207014 - RNA, 22 nt, Human
uccagucaaaaaaaaaaaaaaa

SEQ ID NO: 1207015 - RNA, 28 nt, Human
uccagucaaaaaaaaaaaaaaaaauucc

SEQ ID NO: 1207016 - RNA, 24 nt, Human
ucccacuccauuacaaauccugac

SEQ ID NO: 1207017 - RNA, 22 nt, Human
ucccaugugaaugaaacaggac

SEQ ID NO: 1207018 - RNA, 22 nt, Human
ucccuuucuucuucaauuagaa

SEQ ID NO: 1207019 - RNA, 20 nt, Human
uccucacccucucccaucag

SEQ ID NO: 1207020 - RNA, 23 nt, Human
ucuaacagccuaucacucgcuuu

SEQ ID NO: 1207021 - RNA, 24 nt, Human
ucuccagagaaacacauuucccac

SEQ ID NO: 1207022 - RNA, 27 nt, Human
ucucugcccucccuuucuucuucaauu

SEQ ID NO: 1207023 - RNA, 28 nt, Human
ucuguccucucugcccucccuuucuucu

SEQ ID NO: 1207024 - RNA, 21 nt, Human
ugaaaagggauuuaaagcuaa

SEQ ID NO: 1207025 - RNA, 20 nt, Human
ugaaacaaugaccugacuac

SEQ ID NO: 1207026 - RNA, 21 nt, Human
ugaaauagccacaaaauguag

SEQ ID NO: 1207027 - RNA, 21 nt, Human
ugaagacgaaagucaagacaa

SEQ ID NO: 1207028 - RNA, 18 nt, Human
ugaagcacuugguaaauc

SEQ ID NO: 1207029 - RNA, 19 nt, Human
ugaauuaguaaacccaagu

SEQ ID NO: 1207030 - RNA, 26 nt, Human
ugacucaaaacuaaaauuaauacagg

SEQ ID NO: 1207031 - RNA, 18 nt, Human
ugagaaaaauguacagag

SEQ ID NO: 1207032 - RNA, 19 nt, Human
ugaggacuacgcaaggaug

SEQ ID NO: 1207033 - RNA, 24 nt, Human
ugcccuagugacaaauauauauuu

SEQ ID NO: 1207034 - RNA, 21 nt, Human
uggggauagucacaaaccaca

SEQ ID NO: 1207035 - RNA, 23 nt, Human
ugucaaagucaccagauuucaga

SEQ ID NO: 1207036 - RNA, 21 nt, Human
uguguuuacagaaucgggcac

SEQ ID NO: 1207037 - RNA, 23 nt, Human
uuacugcccaaagucuccuagcc

SEQ ID NO: 1207038 - RNA, 25 nt, Human
uuccagucaaaaaaaaaaaaaaaaa

SEQ ID NO: 1207039 - RNA, 19 nt, Human
uucuucaauuagaaaugag

SEQ ID NO: 1207040 - RNA, 23 nt, Human
uucuuuggaaaccugaaaugccc

SEQ ID NO: 1207041 - RNA, 20 nt, Human
uugaaacaaugaccugacuu

SEQ ID NO: 1207042 - RNA, 20 nt, Human
uuucaccaauucaacugaag

SEQ ID NO: 1207043 - RNA, 18 nt, Human
uuugcaaacccucagugc

SEQ ID NO: 1207044 - RNA, 22 nt, Human
agagaguaaguguggagaacag

SEQ ID NO: 1207045 - RNA, 18 nt, Human
cuugcugucuucugcugg

SEQ ID NO: 1207046 - RNA, 23 nt, Human
cuugcugucuucugcuggcuccu

SEQ ID NO: 1207047 - RNA, 24 nt, Human
gcuugcugucuucugcuggcuccu

SEQ ID NO: 1207048 - RNA, 22 nt, Human
uaccagcucggagauaagggag

SEQ ID NO: 1207049 - RNA, 24 nt, Human
caacaccacaggauucagaaacau

SEQ ID NO: 1207050 - RNA, 23 nt, Human
cugagcaaccaccacagcaacac

SEQ ID NO: 1207051 - RNA, 19 nt, Human
cugcgugucugagcaacca

SEQ ID NO: 1207052 - RNA, 24 nt, Human
uaaggacugcgacuuucuuccuuc

SEQ ID NO: 1207053 - RNA, 18 nt, Human
uucuucagauuuguuuca

SEQ ID NO: 1207054 - RNA, 24 nt, Human
uugauaaggacugcgacuuucuuc

SEQ ID NO: 1207055 - RNA, 18 nt, Human
augaagcuguggaaacuc

SEQ ID NO: 1207056 - RNA, 21 nt, Human
uggaaacucugagauaugaac

SEQ ID NO: 1207057 - RNA, 23 nt, Human
agaguccagcuuugagguucacc

SEQ ID NO: 1207058 - RNA, 19 nt, Human
aggcugugaggaugggccu

SEQ ID NO: 1207059 - RNA, 22 nt, Human
agggggccaguuuuuggugaga

SEQ ID NO: 1207060 - RNA, 23 nt, Human
agguacuuuccaaaacgucuggc

SEQ ID NO: 1207061 - RNA, 19 nt, Human
aguuggaggcgagggggcc

SEQ ID NO: 1207062 - RNA, 20 nt, Human
cagcacaaaucggaguugga

SEQ ID NO: 1207063 - RNA, 18 nt, Human
cagcacccagcacaaauc

SEQ ID NO: 1207064 - RNA, 21 nt, Human
ccgcuggagucgauucuuucc

SEQ ID NO: 1207065 - RNA, 24 nt, Human
ccgcuggagucgauucuuuccugc

SEQ ID NO: 1207066 - RNA, 22 nt, Human
cuggcuguaacucgccuccuuc

SEQ ID NO: 1207067 - RNA, 20 nt, Human
gccugacggcgccgcuggag

SEQ ID NO: 1207068 - RNA, 21 nt, Human
ucgccgcaggagucauuccuu

SEQ ID NO: 1207069 - RNA, 23 nt, Human
ugacaucuaagcugcagcuuccu

SEQ ID NO: 1207070 - RNA, 19 nt, Human
ugagaacccagaguccagc

SEQ ID NO: 1207071 - RNA, 20 nt, Human
uggaggcgagggggccaguu

SEQ ID NO: 1207072 - RNA, 23 nt, Human
uucguaaggacacagaugguugg

SEQ ID NO: 1207073 - RNA, 18 nt, Human
aagcuuugcuggagagag

SEQ ID NO: 1207074 - RNA, 25 nt, Human
caacaucacugaacuuagaggcaau

SEQ ID NO: 1207075 - RNA, 20 nt, Human
ggaagcuuugcuggagagag

SEQ ID NO: 1207076 - RNA, 19 nt, Human
ggaaugggcuucuggcucu

SEQ ID NO: 1207077 - RNA, 21 nt, Human
ggcaacaucacugaacuuaga

SEQ ID NO: 1207078 - RNA, 20 nt, Human
ggcgggaaugggcuucuggc

SEQ ID NO: 1207079 - RNA, 24 nt, Human
gggcgggaaugggcuucuggcucu

SEQ ID NO: 1207080 - RNA, 18 nt, Human
uacagccuccuaagguga

SEQ ID NO: 1207081 - RNA, 26 nt, Human
ucaauggugcagcucugaccuuccuu

SEQ ID NO: 1207082 - RNA, 18 nt, Human
ucccauaagggcaccgug

SEQ ID NO: 1207083 - RNA, 24 nt, Human
ugaugggcacugugauugucugcu

SEQ ID NO: 1207084 - RNA, 18 nt, Human
ugcuggagagaguguaug

SEQ ID NO: 1207085 - RNA, 22 nt, Human
uggaaagacuauacugugaggg

SEQ ID NO: 1207086 - RNA, 19 nt, Human
uggcaacaucacugaacuu

SEQ ID NO: 1207087 - RNA, 22 nt, Human
ugugaggguguuugaugggcac

SEQ ID NO: 1207088 - RNA, 20 nt, Human
uucaauggcaacaucacuga

SEQ ID NO: 1207089 - RNA, 21 nt, Human
uuccugguugggucccauaag

SEQ ID NO: 1207090 - RNA, 20 nt, Human
uugcuggagagaguguaugu

SEQ ID NO: 1207091 - RNA, 22 nt, Human
aaaaagcagaauuucagggaaa

SEQ ID NO: 1207092 - RNA, 21 nt, Human
aaaagaagcagaagcaaagaa

SEQ ID NO: 1207093 - RNA, 23 nt, Human
aaacaacagaaauacccuggggc

SEQ ID NO: 1207094 - RNA, 23 nt, Human
aaacaacauuuaacauguacuga

SEQ ID NO: 1207095 - RNA, 21 nt, Human
aaagcagugcucacaucaugc

SEQ ID NO: 1207096 - RNA, 24 nt, Human
aaagccccugaguagcaucuguuu

SEQ ID NO: 1207097 - RNA, 24 nt, Human
aaaggguaaugggagagucagaac

SEQ ID NO: 1207098 - RNA, 19 nt, Human
aaaugccuuuaucccagca

SEQ ID NO: 1207099 - RNA, 21 nt, Human
aagaugaccucuaagcagcug

SEQ ID NO: 1207100 - RNA, 22 nt, Human
aaucacauuacagcuuggugag

SEQ ID NO: 1207101 - RNA, 18 nt, Human
acaacagaaauacccugg

SEQ ID NO: 1207102 - RNA, 22 nt, Human
acacacauuaacauuuuaaaau

SEQ ID NO: 1207103 - RNA, 22 nt, Human
acauaagugugccuugugccua

SEQ ID NO: 1207104 - RNA, 24 nt, Human
accagaacacagaagcacuugcug

SEQ ID NO: 1207105 - RNA, 22 nt, Human
accucaaugacgugaaacauca

SEQ ID NO: 1207106 - RNA, 21 nt, Human
acuaauucuuucuuuuucucu

SEQ ID NO: 1207107 - RNA, 18 nt, Human
acugaucuuuauucaccg

SEQ ID NO: 1207108 - RNA, 19 nt, Human
acuuuuaaaaaugcagaag

SEQ ID NO: 1207109 - RNA, 20 nt, Human
agaaugacagacguuaagug

SEQ ID NO: 1207110 - RNA, 18 nt, Human
agaauguccuucucuucu

SEQ ID NO: 1207111 - RNA, 24 nt, Human
agagauggcacagaugugaccucc

SEQ ID NO: 1207112 - RNA, 25 nt, Human
agagcuaagauucaaacucagacaa

SEQ ID NO: 1207113 - RNA, 24 nt, Human
agcaacauucuccaggaaucuaua

SEQ ID NO: 1207114 - RNA, 23 nt, Human
agcagcauguuugaagguggccu

SEQ ID NO: 1207115 - RNA, 24 nt, Human
agcuaccauucgcuacacuaaacu

SEQ ID NO: 1207116 - RNA, 18 nt, Human
agcuuggugagagaacca

SEQ ID NO: 1207117 - RNA, 23 nt, Human
aggagacguugggaaccugagca

SEQ ID NO: 1207118 - RNA, 20 nt, Human
aggauuuccagaauguuggc

SEQ ID NO: 1207119 - RNA, 27 nt, Human
aggcuccagaaauuaaaauaaugagcu

SEQ ID NO: 1207120 - RNA, 20 nt, Human
agugaauuucugacuuaaaa

SEQ ID NO: 1207121 - RNA, 18 nt, Human
auaaaauguauaugccug

SEQ ID NO: 1207122 - RNA, 19 nt, Human
auaaaaugugcauugcacc

SEQ ID NO: 1207123 - RNA, 18 nt, Human
aucaccacagagcccuag

SEQ ID NO: 1207124 - RNA, 26 nt, Human
auggagcuggagagcaacauucucca

SEQ ID NO: 1207125 - RNA, 22 nt, Human
auuccacuaacuuccagugacc

SEQ ID NO: 1207126 - RNA, 20 nt, Human
auuucauuggguggggaugg

SEQ ID NO: 1207127 - RNA, 20 nt, Human
caaaauccuuaaaaucuccc

SEQ ID NO: 1207128 - RNA, 18 nt, Human
caaauuugggaaacugac

SEQ ID NO: 1207129 - RNA, 33 nt, Human
caacauaaaaaucaucuaagaccuaucuccuuu

SEQ ID NO: 1207130 - RNA, 23 nt, Human
caacuaaaagcuaacagacaaac

SEQ ID NO: 1207131 - RNA, 20 nt, Human
caacuugguggggucaacuc

SEQ ID NO: 1207132 - RNA, 22 nt, Human
caagaacuugauauuucacagg

SEQ ID NO: 1207133 - RNA, 21 nt, Human
cacauuugaauagggagguuu

SEQ ID NO: 1207134 - RNA, 24 nt, Human
caccucaaugacgugaaacaucac

SEQ ID NO: 1207135 - RNA, 23 nt, Human
cacugcaauuauuuauacacuuu

SEQ ID NO: 1207136 - RNA, 21 nt, Human
cagaaugacagacguuaagug

SEQ ID NO: 1207137 - RNA, 23 nt, Human
cagacauaaaagaauguagauga

SEQ ID NO: 1207138 - RNA, 23 nt, Human
cagcuguuuaauucucaccaaua

SEQ ID NO: 1207139 - RNA, 25 nt, Human
cauuacaugaaguguguaugucuuu

SEQ ID NO: 1207140 - RNA, 23 nt, Human
cauuggguggggauggagcugga

SEQ ID NO: 1207141 - RNA, 21 nt, Human
cauuuaacauguacugaacac

SEQ ID NO: 1207142 - RNA, 24 nt, Human
ccagaauguuggccugcacaucuu

SEQ ID NO: 1207143 - RNA, 19 nt, Human
ccagugaccuggaguucug

SEQ ID NO: 1207144 - RNA, 23 nt, Human
ccauucuuuccauuuugagaacc

SEQ ID NO: 1207145 - RNA, 21 nt, Human
ccugagcagcucuaauccugg

SEQ ID NO: 1207146 - RNA, 21 nt, Human
ccugcaauugaacacagcuac

SEQ ID NO: 1207147 - RNA, 18 nt, Human
cuaaagaaaaaauuaaaa

SEQ ID NO: 1207148 - RNA, 20 nt, Human
cuaaauaaauagauaaaaug

SEQ ID NO: 1207149 - RNA, 22 nt, Human
cuaaauuaucuguggcaacaac

SEQ ID NO: 1207150 - RNA, 20 nt, Human
cuaauucuuucuuuuucucu

SEQ ID NO: 1207151 - RNA, 22 nt, Human
cuaccauucgcuacacuaaacu

SEQ ID NO: 1207152 - RNA, 18 nt, Human
cucacugcccaguuuugg

SEQ ID NO: 1207153 - RNA, 19 nt, Human
cugaacacuacaugcuaug

SEQ ID NO: 1207154 - RNA, 23 nt, Human
cugacuaaaaaagcagaauuuca

SEQ ID NO: 1207155 - RNA, 23 nt, Human
cugaugcuuaauguguaaacauc

SEQ ID NO: 1207156 - RNA, 19 nt, Human
cuugaaguaaagaauucaa

SEQ ID NO: 1207157 - RNA, 28 nt, Human
cuuuuucucucccuccuccuuuuuuuuc

SEQ ID NO: 1207158 - RNA, 20 nt, Human
gaaauacccuggggccaugg

SEQ ID NO: 1207159 - RNA, 18 nt, Human
gaaaugcacccggucaga

SEQ ID NO: 1207160 - RNA, 20 nt, Human
gaagcacuugcugcgucugg

SEQ ID NO: 1207161 - RNA, 24 nt, Human
gacaauucugcucuucaaagauaa

SEQ ID NO: 1207162 - RNA, 19 nt, Human
gagaacccgauguggcagg

SEQ ID NO: 1207163 - RNA, 18 nt, Human
gagcaacauucuccagga

SEQ ID NO: 1207164 - RNA, 23 nt, Human
gagcugcaaauagcuaccauucg

SEQ ID NO: 1207165 - RNA, 20 nt, Human
gaguagaaaaaaaaaucaca

SEQ ID NO: 1207166 - RNA, 20 nt, Human
gauggcacagaugugaccuc

SEQ ID NO: 1207167 - RNA, 18 nt, Human
gcagagauggcacagaug

SEQ ID NO: 1207168 - RNA, 21 nt, Human
gcucuccuuauuuuuuguuuc

SEQ ID NO: 1207169 - RNA, 20 nt, Human
ggcaggagacguugggaacc

SEQ ID NO: 1207170 - RNA, 21 nt, Human
ggcccagauauagccucagag

SEQ ID NO: 1207171 - RNA, 22 nt, Human
ggcuggugguaaaguugaccug

SEQ ID NO: 1207172 - RNA, 19 nt, Human
gucaccuuuuuauuuuuuu

SEQ ID NO: 1207173 - RNA, 24 nt, Human
gucccuuccacugauuucuaguaa

SEQ ID NO: 1207174 - RNA, 18 nt, Human
guggggauggagcuggag

SEQ ID NO: 1207175 - RNA, 18 nt, Human
guugcuaccagaacacag

SEQ ID NO: 1207176 - RNA, 20 nt, Human
guuguugaacucacugccca

SEQ ID NO: 1207177 - RNA, 25 nt, Human
uaaaaaagcagaauuucagggaaac

SEQ ID NO: 1207178 - RNA, 23 nt, Human
uaaaaugugcauugcaccaugac

SEQ ID NO: 1207179 - RNA, 23 nt, Human
uaaaguauaacaauaacaaaaaa

SEQ ID NO: 1207180 - RNA, 18 nt, Human
uaacagaaugacagacgu

SEQ ID NO: 1207181 - RNA, 20 nt, Human
uaaucuauauacacauuccu

SEQ ID NO: 1207182 - RNA, 20 nt, Human
uaaugagcuuccuacaucag

SEQ ID NO: 1207183 - RNA, 21 nt, Human
uacaauacucauaaccauaaa

SEQ ID NO: 1207184 - RNA, 19 nt, Human
uacugagcagggaaagcuc

SEQ ID NO: 1207185 - RNA, 21 nt, Human
uagaagcaucucuggguaacu

SEQ ID NO: 1207186 - RNA, 18 nt, Human
uagggagacuugcaggua

SEQ ID NO: 1207187 - RNA, 19 nt, Human
uaucugauucaauugugcu

SEQ ID NO: 1207188 - RNA, 18 nt, Human
uauggaaaaacaaaacca

SEQ ID NO: 1207189 - RNA, 21 nt, Human
uauuucacaggaaugggguaa

SEQ ID NO: 1207190 - RNA, 21 nt, Human
ucaaacucagacaaucuagcu

SEQ ID NO: 1207191 - RNA, 24 nt, Human
ucaaugcuaagcccaaugucuagc

SEQ ID NO: 1207192 - RNA, 23 nt, Human
ucagaguuuucaaucuagcugac

SEQ ID NO: 1207193 - RNA, 23 nt, Human
ucagucaaagucaauguuuucuu

SEQ ID NO: 1207194 - RNA, 19 nt, Human
ucaguguuguugguagguc

SEQ ID NO: 1207195 - RNA, 21 nt, Human
uccagguuccaaaccaaaccc

SEQ ID NO: 1207196 - RNA, 18 nt, Human
uccucuggucucucucug

SEQ ID NO: 1207197 - RNA, 20 nt, Human
ucgucuuccuggagagccuc

SEQ ID NO: 1207198 - RNA, 19 nt, Human
ucucccuccuccuuuuucu

SEQ ID NO: 1207199 - RNA, 25 nt, Human
ucucuacaaccacauucuuuggcug

SEQ ID NO: 1207200 - RNA, 21 nt, Human
ucugaccacaccagggaaagg

SEQ ID NO: 1207201 - RNA, 19 nt, Human
ugaaagacagacauaaaag

SEQ ID NO: 1207202 - RNA, 21 nt, Human
ugaaagacagacauaaaagaa

SEQ ID NO: 1207203 - RNA, 18 nt, Human
ugaauggaacuaaauaaa

SEQ ID NO: 1207204 - RNA, 21 nt, Human
ugaauugguugcaucugcuuu

SEQ ID NO: 1207205 - RNA, 20 nt, Human
ugacaaguaaauaaaaauua

SEQ ID NO: 1207206 - RNA, 18 nt, Human
ugacagacguuaagugug

SEQ ID NO: 1207207 - RNA, 23 nt, Human
ugacagagaaaagccaagaacuu

SEQ ID NO: 1207208 - RNA, 22 nt, Human
ugaccuggaguucugaccacac

SEQ ID NO: 1207209 - RNA, 21 nt, Human
ugacuccagcuccucuggucu

SEQ ID NO: 1207210 - RNA, 18 nt, Human
ugacuuggcucuccuuau

SEQ ID NO: 1207211 - RNA, 19 nt, Human
ugagaaaaucauuuccugg

SEQ ID NO: 1207212 - RNA, 27 nt, Human
ugagaaaaucauuuccuggaggcacuu

SEQ ID NO: 1207213 - RNA, 20 nt, Human
ugagaacccgauguggcagg

SEQ ID NO: 1207214 - RNA, 20 nt, Human
ugagcagggaaagcucagca

SEQ ID NO: 1207215 - RNA, 23 nt, Human
ugauugauuugcagagauggcac

SEQ ID NO: 1207216 - RNA, 21 nt, Human
ugauuuggcauaaaccauucu

SEQ ID NO: 1207217 - RNA, 19 nt, Human
ugcagaaguccagguucca

SEQ ID NO: 1207218 - RNA, 22 nt, Human
ugccacugucuugugggaacgg

SEQ ID NO: 1207219 - RNA, 21 nt, Human
ugccugggagguguuuuucuu

SEQ ID NO: 1207220 - RNA, 23 nt, Human
uggaagggagaugaauuugguau

SEQ ID NO: 1207221 - RNA, 19 nt, Human
uggccaugcccauccggca

SEQ ID NO: 1207222 - RNA, 19 nt, Human
ugugaaagcauacaucuug

SEQ ID NO: 1207223 - RNA, 22 nt, Human
uguguaugucuuucauaugaua

SEQ ID NO: 1207224 - RNA, 26 nt, Human
uguuccgcacauguaccccagaacuu

SEQ ID NO: 1207225 - RNA, 22 nt, Human
uguuuugguaaaauuuugugac

SEQ ID NO: 1207226 - RNA, 19 nt, Human
uuauggguccuaacaucac

SEQ ID NO: 1207227 - RNA, 23 nt, Human
uucaaauuuaccuauguguucuc

SEQ ID NO: 1207228 - RNA, 21 nt, Human
uucauaaagccccugaguagc

SEQ ID NO: 1207229 - RNA, 21 nt, Human
uuccagugaccuggaguucug

SEQ ID NO: 1207230 - RNA, 23 nt, Human
uucgucuuccuggagagccucca

SEQ ID NO: 1207231 - RNA, 24 nt, Human
uucugaccacaccagggaaagggu

SEQ ID NO: 1207232 - RNA, 18 nt, Human
uucuuucuuuuucucucc

SEQ ID NO: 1207233 - RNA, 18 nt, Human
uugaaguaaagaauucaa

SEQ ID NO: 1207234 - RNA, 20 nt, Human
uugacaccacagugcuaaaa

SEQ ID NO: 1207235 - RNA, 23 nt, Human
uugcaucugcuuuauuccuucuu

SEQ ID NO: 1207236 - RNA, 22 nt, Human
uugcuuccucugagaaacagcu

SEQ ID NO: 1207237 - RNA, 21 nt, Human
uugcuuggugccuuuaaugau

SEQ ID NO: 1207238 - RNA, 20 nt, Human
uuggcccucaaauuucagaa

SEQ ID NO: 1207239 - RNA, 20 nt, Human
uugugccuagucuucuuuuu

SEQ ID NO: 1207240 - RNA, 22 nt, Human
uuuaaacaggugcccaguaaca

SEQ ID NO: 1207241 - RNA, 21 nt, Human
uuuagagcuaauuguggaaaa

SEQ ID NO: 1207242 - RNA, 22 nt, Human
uuucagggaaacaacagaaaua

SEQ ID NO: 1207243 - RNA, 23 nt, Human
uuucuuuuucucucccuccuccu

SEQ ID NO: 1207244 - RNA, 21 nt, Human
uuugacaccacagugcuaaaa

SEQ ID NO: 1207245 - RNA, 18 nt, Human
uuugcagagauggcacag

SEQ ID NO: 1207246 - RNA, 22 nt, Human
uuuguugggucacaaaauuuaa

SEQ ID NO: 1207247 - RNA, 19 nt, Human
uuuuuuguuucuaauguuu

SEQ ID NO: 1207248 - RNA, 20 nt, Human
caauuuguucuuccacgaag

SEQ ID NO: 1207249 - RNA, 24 nt, Human
caugguaaccccuuuuuaaggcaa

SEQ ID NO: 1207250 - RNA, 21 nt, Human
ugcaugguaaccccuuuuuaa

SEQ ID NO: 1207251 - RNA, 21 nt, Human
acuucaucauccaagcaaaca

SEQ ID NO: 1207252 - RNA, 24 nt, Human
uucaucauccaagcaaacaguuga

SEQ ID NO: 1207253 - RNA, 22 nt, Human
aaaaaaaugggaagaggucaaa

SEQ ID NO: 1207254 - RNA, 21 nt, Human
agaaugaguuuuauaugaguu

SEQ ID NO: 1207255 - RNA, 18 nt, Human
agacauuaaaaacaaacu

SEQ ID NO: 1207256 - RNA, 22 nt, Human
agagaacagggcagcguuucac

SEQ ID NO: 1207257 - RNA, 21 nt, Human
aggaaagagaucaguauuuca

SEQ ID NO: 1207258 - RNA, 24 nt, Human
auagaucagagaacccagguuucu

SEQ ID NO: 1207259 - RNA, 23 nt, Human
caaaaaaaugggaagaggucaaa

SEQ ID NO: 1207260 - RNA, 19 nt, Human
cagagccuuauugcuuucc

SEQ ID NO: 1207261 - RNA, 19 nt, Human
cauauuuuuaaagcuaaga

SEQ ID NO: 1207262 - RNA, 20 nt, Human
ccacuugucauuuaugagac

SEQ ID NO: 1207263 - RNA, 22 nt, Human
ccuucaguacucuaaggacaga

SEQ ID NO: 1207264 - RNA, 18 nt, Human
ccuugcucuaguucugug

SEQ ID NO: 1207265 - RNA, 22 nt, Human
ggucuuaauucuauacauaauu

SEQ ID NO: 1207266 - RNA, 20 nt, Human
gucaaauuuccuccacugau

SEQ ID NO: 1207267 - RNA, 20 nt, Human
uaccaugagagaaaugaagc

SEQ ID NO: 1207268 - RNA, 18 nt, Human
uacuuuuucuaauuacac

SEQ ID NO: 1207269 - RNA, 22 nt, Human
uagcccaccugaauccccaagu

SEQ ID NO: 1207270 - RNA, 22 nt, Human
uauaacaauggucaagcagaga

SEQ ID NO: 1207271 - RNA, 19 nt, Human
uauguaaauucaaaacaca

SEQ ID NO: 1207272 - RNA, 22 nt, Human
ucaaaacacauaaaagacuuca

SEQ ID NO: 1207273 - RNA, 22 nt, Human
ucagagcccuauucuccuccgu

SEQ ID NO: 1207274 - RNA, 20 nt, Human
ugaagagucacaucuuuaga

SEQ ID NO: 1207275 - RNA, 21 nt, Human
ugagagaaaugaagcuagaua

SEQ ID NO: 1207276 - RNA, 22 nt, Human
ugggaagaggucaaauuuccuc

SEQ ID NO: 1207277 - RNA, 20 nt, Human
ugguauaauaccuugaugaa

SEQ ID NO: 1207278 - RNA, 24 nt, Human
ugugaggaaagagaucaguauuuc

SEQ ID NO: 1207279 - RNA, 20 nt, Human
uuagaacauuagaauauugu

SEQ ID NO: 1207280 - RNA, 21 nt, Human
uucagugauuccauuucucag

SEQ ID NO: 1207281 - RNA, 22 nt, Human
uuuaaagcuaagagaauuauaa

SEQ ID NO: 1207282 - RNA, 22 nt, Human
uuuuucagugauuccauuucuc

SEQ ID NO: 1207283 - RNA, 20 nt, Human
aaguaggggagaggucuggu

SEQ ID NO: 1207284 - RNA, 22 nt, Human
acuccagagggugagaaaaggg

SEQ ID NO: 1207285 - RNA, 21 nt, Human
auggagaggagggaaugcgau

SEQ ID NO: 1207286 - RNA, 20 nt, Human
cacuggaggagagcugccuu

SEQ ID NO: 1207287 - RNA, 19 nt, Human
cagcagggaggguggcugc

SEQ ID NO: 1207288 - RNA, 23 nt, Human
cagcagggaggguggcugccgug

SEQ ID NO: 1207289 - RNA, 21 nt, Human
ccugguggcagccguaggauc

SEQ ID NO: 1207290 - RNA, 22 nt, Human
cuagagaaugucagggaaaggg

SEQ ID NO: 1207291 - RNA, 21 nt, Human
cucggcaucaagauggagagg

SEQ ID NO: 1207292 - RNA, 20 nt, Human
cugguaugggguccucuugg

SEQ ID NO: 1207293 - RNA, 25 nt, Human
cugguggcagccguaggaucuccuu

SEQ ID NO: 1207294 - RNA, 21 nt, Human
gacacagcagggaggguggcu

SEQ ID NO: 1207295 - RNA, 18 nt, Human
uaggaucuccuuccaagg

SEQ ID NO: 1207296 - RNA, 21 nt, Human
uccuagagaaugucagggaaa

SEQ ID NO: 1207297 - RNA, 21 nt, Human
uggagaggagggaaugcgaug

SEQ ID NO: 1207298 - RNA, 18 nt, Human
ugggaacuccagagggug

SEQ ID NO: 1207299 - RNA, 22 nt, Human
ugguaugggguccucuuggggc

SEQ ID NO: 1207300 - RNA, 23 nt, Human
ugucagggaaagggauguggggu

SEQ ID NO: 1207301 - RNA, 19 nt, Human
uuccuguggacacauuuaa

SEQ ID NO: 1207302 - RNA, 20 nt, Human
uucuugguccgggaagacuc

SEQ ID NO: 1207303 - RNA, 27 nt, Human
aagccugacgcugggcccaggucagaa

SEQ ID NO: 1207304 - RNA, 23 nt, Human
agaaacagaggugcgacagucac

SEQ ID NO: 1207305 - RNA, 23 nt, Human
agccacaagcagccuacaagccu

SEQ ID NO: 1207306 - RNA, 21 nt, Human
aggcacuggggcugggcagcu

SEQ ID NO: 1207307 - RNA, 22 nt, Human
cacgaccagcagugaggagucc

SEQ ID NO: 1207308 - RNA, 22 nt, Human
cagaaugaaugcugagugcuug

SEQ ID NO: 1207309 - RNA, 21 nt, Human
cagcagugaggaguccacaga

SEQ ID NO: 1207310 - RNA, 22 nt, Human
cagccacaagcagccuacaagc

SEQ ID NO: 1207311 - RNA, 23 nt, Human
caggccggggcgaagcaccacga

SEQ ID NO: 1207312 - RNA, 23 nt, Human
caggucagaaacagaggugcgac

SEQ ID NO: 1207313 - RNA, 22 nt, Human
ccagcagugaggaguccacaga

SEQ ID NO: 1207314 - RNA, 23 nt, Human
ccaggccggggcgaagcaccacg

SEQ ID NO: 1207315 - RNA, 18 nt, Human
ccuacaagccugacgcug

SEQ ID NO: 1207316 - RNA, 23 nt, Human
cugaccucuggaccaggcacugg

SEQ ID NO: 1207317 - RNA, 18 nt, Human
cugcccagcaucccugga

SEQ ID NO: 1207318 - RNA, 19 nt, Human
gaacaggagcacaaacaau

SEQ ID NO: 1207319 - RNA, 19 nt, Human
gagaagagcagccacaagc

SEQ ID NO: 1207320 - RNA, 22 nt, Human
gcacuggggcugggcagcugag

SEQ ID NO: 1207321 - RNA, 19 nt, Human
ggggcgaagcaccacgacc

SEQ ID NO: 1207322 - RNA, 23 nt, Human
gugugaaggcaaagggguccaca

SEQ ID NO: 1207323 - RNA, 18 nt, Human
uccacagaugacgaggac

SEQ ID NO: 1207324 - RNA, 21 nt, Human
ucccagugcauagcccuccuc

SEQ ID NO: 1207325 - RNA, 26 nt, Human
uccuccacagcugcugguggacugac

SEQ ID NO: 1207326 - RNA, 22 nt, Human
ucuggaccaggcacuggggcug

SEQ ID NO: 1207327 - RNA, 20 nt, Human
ugaccucuggaccaggcacu

SEQ ID NO: 1207328 - RNA, 19 nt, Human
ugagaagagcagccacaag

SEQ ID NO: 1207329 - RNA, 20 nt, Human
ugagaagagcagccacaagc

SEQ ID NO: 1207330 - RNA, 18 nt, Human
ugagcguuuggcaccugc

SEQ ID NO: 1207331 - RNA, 19 nt, Human
ugaggaguccacagauggg

SEQ ID NO: 1207332 - RNA, 21 nt, Human
ugaggaguccacagaugggug

SEQ ID NO: 1207333 - RNA, 18 nt, Human
ugcauagcccuccuccac

SEQ ID NO: 1207334 - RNA, 22 nt, Human
ugcccagcaucccuggaguuac

SEQ ID NO: 1207335 - RNA, 19 nt, Human
acaacguugaaaacagucc

SEQ ID NO: 1207336 - RNA, 18 nt, Human
agccaaacccuucuucug

SEQ ID NO: 1207337 - RNA, 20 nt, Human
cguugaaaacaguccaggaa

SEQ ID NO: 1207338 - RNA, 22 nt, Human
gagaauaaagacaacguugaaa

SEQ ID NO: 1207339 - RNA, 19 nt, Human
gagccaaacccuucuucug

SEQ ID NO: 1207340 - RNA, 18 nt, Human
gcuucugagccaaacccu

SEQ ID NO: 1207341 - RNA, 23 nt, Human
ucuucuguuucgcagaugagaau

SEQ ID NO: 1207342 - RNA, 18 nt, Human
ugaacucuugacagguag

SEQ ID NO: 1207343 - RNA, 19 nt, Human
ugacagggagcucagagau

SEQ ID NO: 1207344 - RNA, 18 nt, Human
auagagaugcuacugggg

SEQ ID NO: 1207345 - RNA, 19 nt, Human
caagccuuuacuucccacc

SEQ ID NO: 1207346 - RNA, 20 nt, Human
ccaccaaugcuuccagaagu

SEQ ID NO: 1207347 - RNA, 23 nt, Human
gccaagccuuuacuucccaccac

SEQ ID NO: 1207348 - RNA, 19 nt, Human
ucccagagccaagccuuua

SEQ ID NO: 1207349 - RNA, 21 nt, Human
ugauagagaugcuacuggggg

SEQ ID NO: 1207350 - RNA, 19 nt, Human
uuccagaaguuggugauag

SEQ ID NO: 1207351 - RNA, 20 nt, Human
aaaugcugguauugacuaag

SEQ ID NO: 1207352 - RNA, 23 nt, Human
aagacuccuccacauuccuuuga

SEQ ID NO: 1207353 - RNA, 26 nt, Human
aagugguaaauauaaauaaaggcuuu

SEQ ID NO: 1207354 - RNA, 25 nt, Human
aaucuuauuacuucuuacauaauuc

SEQ ID NO: 1207355 - RNA, 20 nt, Human
accaugugaauucugaucua

SEQ ID NO: 1207356 - RNA, 24 nt, Human
agaauuuucgugaugugauuucuc

SEQ ID NO: 1207357 - RNA, 19 nt, Human
agaguuuucaucccugucu

SEQ ID NO: 1207358 - RNA, 19 nt, Human
auucaugucauugagaguu

SEQ ID NO: 1207359 - RNA, 23 nt, Human
cacaccauccaagcacuaagaag

SEQ ID NO: 1207360 - RNA, 19 nt, Human
cagcaaaggcauuuucaca

SEQ ID NO: 1207361 - RNA, 21 nt, Human
cauugagaguucuacaccaug

SEQ ID NO: 1207362 - RNA, 21 nt, Human
cauuucaacccacauauuuua

SEQ ID NO: 1207363 - RNA, 21 nt, Human
cccccagcuauacaucucauc

SEQ ID NO: 1207364 - RNA, 24 nt, Human
ccuagagucugaaguuugugccau

SEQ ID NO: 1207365 - RNA, 22 nt, Human
ccuccauucaugucauugagag

SEQ ID NO: 1207366 - RNA, 21 nt, Human
ccugucaagauaguuuucuca

SEQ ID NO: 1207367 - RNA, 18 nt, Human
cuguaguauguuuguccu

SEQ ID NO: 1207368 - RNA, 21 nt, Human
gaagacuccuccacauuccuu

SEQ ID NO: 1207369 - RNA, 19 nt, Human
ggugcuuagcugaaugaga

SEQ ID NO: 1207370 - RNA, 22 nt, Human
uacccuccauucaugucauuga

SEQ ID NO: 1207371 - RNA, 25 nt, Human
uaccuuauaaugaauuuucuugcac

SEQ ID NO: 1207372 - RNA, 19 nt, Human
uagcucagccaccaaaugu

SEQ ID NO: 1207373 - RNA, 22 nt, Human
uagcugaaugagagugcacaga

SEQ ID NO: 1207374 - RNA, 21 nt, Human
uaguauguuuguccuuggugu

SEQ ID NO: 1207375 - RNA, 24 nt, Human
uaugguugcuugccuguggauuuu

SEQ ID NO: 1207376 - RNA, 21 nt, Human
ucuauaguuucauucucucac

SEQ ID NO: 1207377 - RNA, 23 nt, Human
ucucacguuguauauggucagcc

SEQ ID NO: 1207378 - RNA, 20 nt, Human
ucucucuaccuugaauucau

SEQ ID NO: 1207379 - RNA, 22 nt, Human
ugaauaacuucuccacuaugaa

SEQ ID NO: 1207380 - RNA, 21 nt, Human
ugacauaaaagcugccugaag

SEQ ID NO: 1207381 - RNA, 19 nt, Human
ugagcaaagugguaaauau

SEQ ID NO: 1207382 - RNA, 22 nt, Human
ugauuacagacauaauauuccu

SEQ ID NO: 1207383 - RNA, 22 nt, Human
ugcugcuguauuaagaaaagga

SEQ ID NO: 1207384 - RNA, 18 nt, Human
uggaaaaaugcugguauu

SEQ ID NO: 1207385 - RNA, 23 nt, Human
uggaauuguucaagaggccucau

SEQ ID NO: 1207386 - RNA, 24 nt, Human
uggaauuguucaagaggccucauc

SEQ ID NO: 1207387 - RNA, 19 nt, Human
ugucuggaauuguucaaga

SEQ ID NO: 1207388 - RNA, 21 nt, Human
uuaucaguuaccuuauaauga

SEQ ID NO: 1207389 - RNA, 22 nt, Human
uucccagguuauuucagaauug

SEQ ID NO: 1207390 - RNA, 20 nt, Human
uugguguauuuaguguuaac

SEQ ID NO: 1207391 - RNA, 21 nt, Human
uuuacugaggacuacccucca

SEQ ID NO: 1207392 - RNA, 22 nt, Human
uuuaucaguuaccuuauaauga

SEQ ID NO: 1207393 - RNA, 22 nt, Human
uuuuuugacauaaaagcugccu

SEQ ID NO: 1207394 - RNA, 22 nt, Human
agcuggucccugccgugacaca

SEQ ID NO: 1207395 - RNA, 22 nt, Human
agcuguaucuccuugcagugcc

SEQ ID NO: 1207396 - RNA, 22 nt, Human
agugcuccaaugucuccaacug

SEQ ID NO: 1207397 - RNA, 19 nt, Human
ccaggaaggggaggaucca

SEQ ID NO: 1207398 - RNA, 21 nt, Human
cccugcaucuggcaagucacu

SEQ ID NO: 1207399 - RNA, 21 nt, Human
gccaaccugaaaucgagcccc

SEQ ID NO: 1207400 - RNA, 22 nt, Human
uacagaauaauauaaaucugug

SEQ ID NO: 1207401 - RNA, 22 nt, Human
ucuggcaagucacuggugauua

SEQ ID NO: 1207402 - RNA, 22 nt, Human
ugagcuggucccugcaucuggc

SEQ ID NO: 1207403 - RNA, 19 nt, Human
ugccaggaaggggaggauc

SEQ ID NO: 1207404 - RNA, 21 nt, Human
ugccaggaaggggaggaucca

SEQ ID NO: 1207405 - RNA, 23 nt, Human
uggugauuauaaaaacuuuccag

SEQ ID NO: 1207406 - RNA, 22 nt, Human
accgcuaugcuuuguucacaaa

SEQ ID NO: 1207407 - RNA, 18 nt, Human
agucauguggaacauucu

SEQ ID NO: 1207408 - RNA, 23 nt, Human
ccuucagccagagcuguugaagc

SEQ ID NO: 1207409 - RNA, 24 nt, Human
uggaacauucugcagacagaauug

SEQ ID NO: 1207410 - RNA, 23 nt, Human
uuugaugaaguugagcccagccu

SEQ ID NO: 1207411 - RNA, 21 nt, Human
cagcucccugugcagcgccuc

SEQ ID NO: 1207412 - RNA, 25 nt, Human
ccugcagcucccugugcagcgccuc

SEQ ID NO: 1207413 - RNA, 18 nt, Human
cugcagcucccugugcac

SEQ ID NO: 1207414 - RNA, 19 nt, Human
ucccugugcagcgccucuu

SEQ ID NO: 1207415 - RNA, 19 nt, Human
uggcagucaaugggcuaug

SEQ ID NO: 1207416 - RNA, 18 nt, Human
uguaaaauuccugguugu

SEQ ID NO: 1207417 - RNA, 19 nt, Human
uuguauuuugucuuguugg

SEQ ID NO: 1207418 - RNA, 22 nt, Human
uaguucauucuugcaaguucuu

SEQ ID NO: 1207419 - RNA, 21 nt, Human
accagcugaugagaugagaug

SEQ ID NO: 1207420 - RNA, 21 nt, Human
accuucuuuaaugcgcuguug

SEQ ID NO: 1207421 - RNA, 21 nt, Human
acgaugccaccaucugcagac

SEQ ID NO: 1207422 - RNA, 21 nt, Human
agaaaagaaauccuacaaaaa

SEQ ID NO: 1207423 - RNA, 21 nt, Human
agaaugggacgaguaccuucc

SEQ ID NO: 1207424 - RNA, 23 nt, Human
caaaaaccaccagcaugaaauga

SEQ ID NO: 1207425 - RNA, 24 nt, Human
caaaugauuuaaauauauauucca

SEQ ID NO: 1207426 - RNA, 22 nt, Human
caagagcagaccucugcucuuu

SEQ ID NO: 1207427 - RNA, 23 nt, Human
cacaaaccagcugaugagaugag

SEQ ID NO: 1207428 - RNA, 20 nt, Human
cacucagauuucccagaaaa

SEQ ID NO: 1207429 - RNA, 24 nt, Human
caggagaggcuguucuuugcagug

SEQ ID NO: 1207430 - RNA, 21 nt, Human
ccacacucagauuucccagaa

SEQ ID NO: 1207431 - RNA, 24 nt, Human
cccagaaaagaaauccuacaaaaa

SEQ ID NO: 1207432 - RNA, 22 nt, Human
cuccaagaacugaccaccuucu

SEQ ID NO: 1207433 - RNA, 24 nt, Human
cugcucuuucaagaaaccaacacu

SEQ ID NO: 1207434 - RNA, 24 nt, Human
gaccucugcucuuucaagaaacca

SEQ ID NO: 1207435 - RNA, 22 nt, Human
gcguggcacuuuggaagacucu

SEQ ID NO: 1207436 - RNA, 19 nt, Human
gcuguucuuugcagugaug

SEQ ID NO: 1207437 - RNA, 18 nt, Human
ggauauccugauguccuc

SEQ ID NO: 1207438 - RNA, 21 nt, Human
gucucucucuugucuccuccu

SEQ ID NO: 1207439 - RNA, 21 nt, Human
uacaaaaaccaccagcaugaa

SEQ ID NO: 1207440 - RNA, 22 nt, Human
uagaauagcccaucacgaugcc

SEQ ID NO: 1207441 - RNA, 21 nt, Human
ucagcccauuggugacgccac

SEQ ID NO: 1207442 - RNA, 23 nt, Human
uccacacucagauuucccagaaa

SEQ ID NO: 1207443 - RNA, 20 nt, Human
uccccagaaagcaaucuccg

SEQ ID NO: 1207444 - RNA, 24 nt, Human
uccccagaaagcaaucuccggggu

SEQ ID NO: 1207445 - RNA, 18 nt, Human
ucccccugggugcucucu

SEQ ID NO: 1207446 - RNA, 24 nt, Human
ucuccaagaacugaccaccuucuu

SEQ ID NO: 1207447 - RNA, 21 nt, Human
ucucccaagagcagaccucug

SEQ ID NO: 1207448 - RNA, 18 nt, Human
ucugccugagugucucca

SEQ ID NO: 1207449 - RNA, 22 nt, Human
ugaaaugaaugagaaugggacg

SEQ ID NO: 1207450 - RNA, 18 nt, Human
ugagauggcguggcacuu

SEQ ID NO: 1207451 - RNA, 23 nt, Human
ugccugcagaguggcaggucacu

SEQ ID NO: 1207452 - RNA, 25 nt, Human
uggcguggcacuuuggaagacucuu

SEQ ID NO: 1207453 - RNA, 18 nt, Human
ugucaggagaggcuguuc

SEQ ID NO: 1207454 - RNA, 23 nt, Human
uuaacagcgcggugagaucuuuc

SEQ ID NO: 1207455 - RNA, 26 nt, Human
uucaagaaaccaacacugccugcaga

SEQ ID NO: 1207456 - RNA, 19 nt, Human
uugcugucaggagaggcug

SEQ ID NO: 1207457 - RNA, 18 nt, Human
uuggugacgccacuagaa

SEQ ID NO: 1207458 - RNA, 22 nt, Human
uuugacccggccugggcguccc

SEQ ID NO: 1207459 - RNA, 20 nt, Human
aaaaggcaggccuuggccca

SEQ ID NO: 1207460 - RNA, 18 nt, Human
aaggagaaguugagggcu

SEQ ID NO: 1207461 - RNA, 19 nt, Human
acaccagcuccggcaggau

SEQ ID NO: 1207462 - RNA, 23 nt, Human
accaccaccuccaccagcuccgg

SEQ ID NO: 1207463 - RNA, 21 nt, Human
acccuuugggauggggcccaa

SEQ ID NO: 1207464 - RNA, 23 nt, Human
accuugaaggccgccagcucuga

SEQ ID NO: 1207465 - RNA, 23 nt, Human
acuuucuuuucccuccaugagag

SEQ ID NO: 1207466 - RNA, 21 nt, Human
agagacgcacgaggacuugaa

SEQ ID NO: 1207467 - RNA, 22 nt, Human
agcagggacagcagccagaaga

SEQ ID NO: 1207468 - RNA, 25 nt, Human
agcccagcagggacagcagccagaa

SEQ ID NO: 1207469 - RNA, 24 nt, Human
agcgcagcccucuucagaggacac

SEQ ID NO: 1207470 - RNA, 27 nt, Human
aggcaaaaggcaggccuuggcccagga

SEQ ID NO: 1207471 - RNA, 24 nt, Human
aggcagagguacagagaagagauc

SEQ ID NO: 1207472 - RNA, 26 nt, Human
aggccauggacaggagcuucagggca

SEQ ID NO: 1207473 - RNA, 19 nt, Human
agggaccagaugucugauu

SEQ ID NO: 1207474 - RNA, 22 nt, Human
agggaccagaugucugauuucu

SEQ ID NO: 1207475 - RNA, 19 nt, Human
agggagcaggcacacagcu

SEQ ID NO: 1207476 - RNA, 19 nt, Human
aggggcauaaauaaugaac

SEQ ID NO: 1207477 - RNA, 31 nt, Human
auccaugcauuccacccccacaucuaccccc

SEQ ID NO: 1207478 - RNA, 22 nt, Human
augcagcccagggaccagaugu

SEQ ID NO: 1207479 - RNA, 21 nt, Human
caaaaggcaggccuuggccca

SEQ ID NO: 1207480 - RNA, 24 nt, Human
caacccauccucccugagggugac

SEQ ID NO: 1207481 - RNA, 23 nt, Human
caagggcagaagauuccugaagg

SEQ ID NO: 1207482 - RNA, 31 nt, Human
cacagccggaugcuuugcaggagcagcgccc

SEQ ID NO: 1207483 - RNA, 21 nt, Human
caccuccaccagcuccggggg

SEQ ID NO: 1207484 - RNA, 22 nt, Human
cacggagcaggcaaaaggcagg

SEQ ID NO: 1207485 - RNA, 22 nt, Human
cagcagcagggagcaggcacac

SEQ ID NO: 1207486 - RNA, 24 nt, Human
cagcagcagggagcaggcacacag

SEQ ID NO: 1207487 - RNA, 20 nt, Human
cagcccagcagggacagcag

SEQ ID NO: 1207488 - RNA, 24 nt, Human
cagcccagcagggacagcagccag

SEQ ID NO: 1207489 - RNA, 18 nt, Human
cagggagccuuggcuucc

SEQ ID NO: 1207490 - RNA, 20 nt, Human
cagggccuucauacuacugg

SEQ ID NO: 1207491 - RNA, 23 nt, Human
caggguagguggccaacaccugg

SEQ ID NO: 1207492 - RNA, 26 nt, Human
caucaggaagcuucuccaacauggga

SEQ ID NO: 1207493 - RNA, 20 nt, Human
cauccaugcauuccaccccc

SEQ ID NO: 1207494 - RNA, 19 nt, Human
caugcauuccacccccaca

SEQ ID NO: 1207495 - RNA, 22 nt, Human
ccacccccacaucuaccccaac

SEQ ID NO: 1207496 - RNA, 21 nt, Human
ccacguucuccaccaccuccg

SEQ ID NO: 1207497 - RNA, 21 nt, Human
ccacugccgcccuccuccugc

SEQ ID NO: 1207498 - RNA, 27 nt, Human
ccagcagggcucuguccuggcacagcc

SEQ ID NO: 1207499 - RNA, 19 nt, Human
ccaugcauuccacccccac

SEQ ID NO: 1207500 - RNA, 21 nt, Human
ccccaaggccccaggauucag

SEQ ID NO: 1207501 - RNA, 20 nt, Human
cccccaaggccccaggauuc

SEQ ID NO: 1207502 - RNA, 18 nt, Human
cccuccuccugcaccacc

SEQ ID NO: 1207503 - RNA, 19 nt, Human
ccgcagaugcauggcuucu

SEQ ID NO: 1207504 - RNA, 19 nt, Human
ccgcagcuucagcaguggc

SEQ ID NO: 1207505 - RNA, 22 nt, Human
ccgcagcuucagcaguggcauc

SEQ ID NO: 1207506 - RNA, 22 nt, Human
ccuccaccaccagguucacccc

SEQ ID NO: 1207507 - RNA, 20 nt, Human
ccuuccuucugacacuuucu

SEQ ID NO: 1207508 - RNA, 21 nt, Human
cgugaccaccaccuccaccag

SEQ ID NO: 1207509 - RNA, 22 nt, Human
cuccauggucgugaccaccacc

SEQ ID NO: 1207510 - RNA, 20 nt, Human
cuccauugucuucaggacgg

SEQ ID NO: 1207511 - RNA, 23 nt, Human
cugaaggagaaguugagggcuuc

SEQ ID NO: 1207512 - RNA, 18 nt, Human
cugaagguuuccacaucc

SEQ ID NO: 1207513 - RNA, 24 nt, Human
cugaugagguccgggaccuucucc

SEQ ID NO: 1207514 - RNA, 18 nt, Human
cugccgcccuccuccugc

SEQ ID NO: 1207515 - RNA, 20 nt, Human
gaccucguguccagcuccuc

SEQ ID NO: 1207516 - RNA, 23 nt, Human
gacuuacgaaaggggucucccuc

SEQ ID NO: 1207517 - RNA, 19 nt, Human
gagaucuccccauuccacg

SEQ ID NO: 1207518 - RNA, 19 nt, Human
gagccucucaagaagguga

SEQ ID NO: 1207519 - RNA, 19 nt, Human
gaggacccugucauguagc

SEQ ID NO: 1207520 - RNA, 22 nt, Human
gcaaaaggcaggccuuggccca

SEQ ID NO: 1207521 - RNA, 23 nt, Human
gcaucaggaagcuucuccaacaa

SEQ ID NO: 1207522 - RNA, 18 nt, Human
gcccuccuccugcaccac

SEQ ID NO: 1207523 - RNA, 19 nt, Human
gcugagccacuggucgugc

SEQ ID NO: 1207524 - RNA, 23 nt, Human
gcuggcuucugccauuuccccau

SEQ ID NO: 1207525 - RNA, 19 nt, Human
gcuucugccauuuccccau

SEQ ID NO: 1207526 - RNA, 19 nt, Human
ggagggacuuccgcagaug

SEQ ID NO: 1207527 - RNA, 21 nt, Human
gggcgugccgcagcuucagca

SEQ ID NO: 1207528 - RNA, 22 nt, Human
ggguggugcaccagcgcagccc

SEQ ID NO: 1207529 - RNA, 20 nt, Human
gggugucuguggggcccugc

SEQ ID NO: 1207530 - RNA, 22 nt, Human
gguggcucugaagagcacuccc

SEQ ID NO: 1207531 - RNA, 24 nt, Human
gguugcagggagccuuggcuuccg

SEQ ID NO: 1207532 - RNA, 20 nt, Human
gguuuccauuuccuccacca

SEQ ID NO: 1207533 - RNA, 18 nt, Human
gucgugaccaccaccucc

SEQ ID NO: 1207534 - RNA, 22 nt, Human
gugaugaacagcuccugguaca

SEQ ID NO: 1207535 - RNA, 24 nt, Human
gugcagguauuccagcgcguccag

SEQ ID NO: 1207536 - RNA, 21 nt, Human
uaaugaacccucuggaacuaa

SEQ ID NO: 1207537 - RNA, 23 nt, Human
uaaugaacccucuggaacuaaac

SEQ ID NO: 1207538 - RNA, 19 nt, Human
uagcacauuggaacucagg

SEQ ID NO: 1207539 - RNA, 22 nt, Human
ucaaugauuuucuuugccuucc

SEQ ID NO: 1207540 - RNA, 20 nt, Human
ucauauccuuccuucugaca

SEQ ID NO: 1207541 - RNA, 24 nt, Human
ucauugaacuccaucaccaggcag

SEQ ID NO: 1207542 - RNA, 21 nt, Human
uccacccccacaucuacccca

SEQ ID NO: 1207543 - RNA, 23 nt, Human
uccacccccacaucuaccccaac

SEQ ID NO: 1207544 - RNA, 21 nt, Human
uccagcaccuggcccagcaca

SEQ ID NO: 1207545 - RNA, 20 nt, Human
uccaucaccaggcagagguu

SEQ ID NO: 1207546 - RNA, 26 nt, Human
ucccagggacucuguccuggucacag

SEQ ID NO: 1207547 - RNA, 30 nt, Human
uccccagcaucaccuaaaaugcuggccacu

SEQ ID NO: 1207548 - RNA, 18 nt, Human
uccggcaggaucuccuca

SEQ ID NO: 1207549 - RNA, 21 nt, Human
uccucgcuucauagcugggaa

SEQ ID NO: 1207550 - RNA, 22 nt, Human
ucuccuggagcagggccuucau

SEQ ID NO: 1207551 - RNA, 19 nt, Human
ugaaggagcagcuggucau

SEQ ID NO: 1207552 - RNA, 22 nt, Human
ugaaggagcagcugguccuccc

SEQ ID NO: 1207553 - RNA, 19 nt, Human
ugagaggcaacauuuucug

SEQ ID NO: 1207554 - RNA, 23 nt, Human
ugagaggcaacauuuucuggggu

SEQ ID NO: 1207555 - RNA, 20 nt, Human
ugauuuucuuugccuuccuc

SEQ ID NO: 1207556 - RNA, 21 nt, Human
ugcauguggagcaaggccagg

SEQ ID NO: 1207557 - RNA, 22 nt, Human
ugccaaggccauggacaggagc

SEQ ID NO: 1207558 - RNA, 19 nt, Human
uggaacuaaacaauaggau

SEQ ID NO: 1207559 - RNA, 23 nt, Human
uggacaggagcuucagggcacgg

SEQ ID NO: 1207560 - RNA, 18 nt, Human
uggcaggaucaucaggaa

SEQ ID NO: 1207561 - RNA, 23 nt, Human
uggcccaggaggugcagcagcag

SEQ ID NO: 1207562 - RNA, 21 nt, Human
ugggaagagcugcuuuaucac

SEQ ID NO: 1207563 - RNA, 20 nt, Human
ugggauggggcccaacagcu

SEQ ID NO: 1207564 - RNA, 24 nt, Human
uucacccccaaggccccaggauuc

SEQ ID NO: 1207565 - RNA, 21 nt, Human
uuccacccccacaucuacccc

SEQ ID NO: 1207566 - RNA, 22 nt, Human
uuccccauccgcaggguaggug

SEQ ID NO: 1207567 - RNA, 19 nt, Human
uuccggguggugcaccagc

SEQ ID NO: 1207568 - RNA, 21 nt, Human
uuccuccaccaccagguucac

SEQ ID NO: 1207569 - RNA, 25 nt, Human
uugaacuccaucaccaggcagaggu

SEQ ID NO: 1207570 - RNA, 23 nt, Human
uugggauggggcccaacagcuuc

SEQ ID NO: 1207571 - RNA, 21 nt, Human
uuuucugggguaccacaaaca

SEQ ID NO: 1207572 - RNA, 19 nt, Human
aaacagugugagaauggga

SEQ ID NO: 1207573 - RNA, 22 nt, Human
aagauaagagacagcaaaaaaa

SEQ ID NO: 1207574 - RNA, 25 nt, Human
aagauaagagacagcaaaaaaaugu

SEQ ID NO: 1207575 - RNA, 22 nt, Human
agcaaacagugugagaauggga

SEQ ID NO: 1207576 - RNA, 18 nt, Human
agcaccggaagccgcucc

SEQ ID NO: 1207577 - RNA, 23 nt, Human
aggcugcggaccgggagcagcgg

SEQ ID NO: 1207578 - RNA, 26 nt, Human
augacgcaggcagcaccggaagccgc

SEQ ID NO: 1207579 - RNA, 19 nt, Human
caccggaagccgcuccccu

SEQ ID NO: 1207580 - RNA, 18 nt, Human
cacuggucacauugcccc

SEQ ID NO: 1207581 - RNA, 19 nt, Human
cagcaccggaagccgcucc

SEQ ID NO: 1207582 - RNA, 18 nt, Human
cagccgcuuccgccggga

SEQ ID NO: 1207583 - RNA, 21 nt, Human
ccagagcaaacagugugagaa

SEQ ID NO: 1207584 - RNA, 19 nt, Human
ccugggcuacugaagauaa

SEQ ID NO: 1207585 - RNA, 23 nt, Human
gaagauaagagacagcaaaaaaa

SEQ ID NO: 1207586 - RNA, 21 nt, Human
gaagugcagccgcuuccgccg

SEQ ID NO: 1207587 - RNA, 19 nt, Human
gagcugagggacgcgcgga

SEQ ID NO: 1207588 - RNA, 21 nt, Human
gcaaaaaaauguucuucccuu

SEQ ID NO: 1207589 - RNA, 19 nt, Human
gcagcaccggaagccgcuc

SEQ ID NO: 1207590 - RNA, 19 nt, Human
uaauauuuggagagauuac

SEQ ID NO: 1207591 - RNA, 25 nt, Human
uccugggcuacugaagauaagagac

SEQ ID NO: 1207592 - RNA, 21 nt, Human
ucuccgggcggggaccggaag

SEQ ID NO: 1207593 - RNA, 20 nt, Human
ugacgcaggcagcaccggaa

SEQ ID NO: 1207594 - RNA, 23 nt, Human
ugacgcaggcagcaccggaagcc

SEQ ID NO: 1207595 - RNA, 21 nt, Human
ugagaaugggaugcccuugga

SEQ ID NO: 1207596 - RNA, 18 nt, Human
ugccuuauucuuaauuuc

SEQ ID NO: 1207597 - RNA, 21 nt, Human
ugggaugcccuuggacacugg

SEQ ID NO: 1207598 - RNA, 22 nt, Human
ugggaugcccuuggacacuggu

SEQ ID NO: 1207599 - RNA, 26 nt, Human
ugugagaaugggaugcccuuggacac

SEQ ID NO: 1207600 - RNA, 19 nt, Human
uuuccugggcuacugaaga

SEQ ID NO: 1207601 - RNA, 19 nt, Human
aaacucccccucugcuucc

SEQ ID NO: 1207602 - RNA, 22 nt, Human
uacagaauuuccucugaucauu

SEQ ID NO: 1207603 - RNA, 21 nt, Human
uaguucuguuuggaccacuga

SEQ ID NO: 1207604 - RNA, 19 nt, Human
uaugcuuaguucuguuugg

SEQ ID NO: 1207605 - RNA, 21 nt, Human
ucauuugauuugguuauagau

SEQ ID NO: 1207606 - RNA, 20 nt, Human
ugacuuuuaaaacucccccu

SEQ ID NO: 1207607 - RNA, 20 nt, Human
ugcaaauacaggcaugagca

SEQ ID NO: 1207608 - RNA, 18 nt, Human
uggcacaaugauuuaugc

SEQ ID NO: 1207609 - RNA, 19 nt, Human
guuugcucguuucccucca

SEQ ID NO: 1207610 - RNA, 18 nt, Human
uaaugcuccagaaauagg

SEQ ID NO: 1207611 - RNA, 24 nt, Human
ucccuccauuauguaaugcuccag

SEQ ID NO: 1207612 - RNA, 21 nt, Human
ucuugggagugugcucaguuc

SEQ ID NO: 1207613 - RNA, 18 nt, Human
ugugcucaguucucucca

SEQ ID NO: 1207614 - RNA, 24 nt, Human
uugggagugugcucaguucucucc

SEQ ID NO: 1207615 - RNA, 18 nt, Human
ggagcuggaggggcuggg

SEQ ID NO: 1207616 - RNA, 19 nt, Human
uggagcuggaggggcuggg

SEQ ID NO: 1207617 - RNA, 26 nt, Human
cacacacugaacugggugcugguaac

SEQ ID NO: 1207618 - RNA, 19 nt, Human
cuccccacacacugaacug

SEQ ID NO: 1207619 - RNA, 19 nt, Human
ggggccugugcccuccacu

SEQ ID NO: 1207620 - RNA, 23 nt, Human
agaaauuuguuuuuuucgcugga

SEQ ID NO: 1207621 - RNA, 18 nt, Human
cagggcuuucauucaagg

SEQ ID NO: 1207622 - RNA, 21 nt, Human
cagggcuuucauucaaggugu

SEQ ID NO: 1207623 - RNA, 20 nt, Human
gacuuguuuccuucucuguu

SEQ ID NO: 1207624 - RNA, 20 nt, Human
uuggauuauuuucagggcuu

SEQ ID NO: 1207625 - RNA, 22 nt, Human
uuucagggcuuucauucaaggu

SEQ ID NO: 1207626 - RNA, 18 nt, Human
acuuuccucugaucuugu

SEQ ID NO: 1207627 - RNA, 21 nt, Human
ggcaggcgucuccucaggugg

SEQ ID NO: 1207628 - RNA, 22 nt, Human
gggcaggcgucuccucaggugg

SEQ ID NO: 1207629 - RNA, 21 nt, Human
gguacuuuccucugaucuugu

SEQ ID NO: 1207630 - RNA, 18 nt, Human
guugaugucuguuucagg

SEQ ID NO: 1207631 - RNA, 21 nt, Human
uagaugccucgucaucucuuc

SEQ ID NO: 1207632 - RNA, 18 nt, Human
uagcgguacagguaaugu

SEQ ID NO: 1207633 - RNA, 22 nt, Human
ucaggugggaucagcuucucuu

SEQ ID NO: 1207634 - RNA, 20 nt, Human
uucaggggcaggcgucuccu

SEQ ID NO: 1207635 - RNA, 24 nt, Human
uugagugcuugcucggcaaaugau

SEQ ID NO: 1207636 - RNA, 21 nt, Human
uuguucuaagugacugcgauu

SEQ ID NO: 1207637 - RNA, 18 nt, Human
accccgaaaauggacggu

SEQ ID NO: 1207638 - RNA, 26 nt, Human
caccaccccgaaaauggacgguccca

SEQ ID NO: 1207639 - RNA, 20 nt, Human
caccacgauggccaccaggu

SEQ ID NO: 1207640 - RNA, 21 nt, Human
caccagguugcccaccacccc

SEQ ID NO: 1207641 - RNA, 25 nt, Human
caccccgaaaauggacggucccagg

SEQ ID NO: 1207642 - RNA, 19 nt, Human
ccaccaccccgaaaaugga

SEQ ID NO: 1207643 - RNA, 21 nt, Human
cccaccaccccgaaaauggac

SEQ ID NO: 1207644 - RNA, 22 nt, Human
ccuucugcuccuugcgcgacuu

SEQ ID NO: 1207645 - RNA, 23 nt, Human
cuguguagaagguggucuccuuc

SEQ ID NO: 1207646 - RNA, 18 nt, Human
guugcccaccaccccgaa

SEQ ID NO: 1207647 - RNA, 24 nt, Human
uggccaccagguugcccaccaccc

SEQ ID NO: 1207648 - RNA, 21 nt, Human
aaaaaaaagaaaagaaaagaa

SEQ ID NO: 1207649 - RNA, 21 nt, Human
aaaaaagaaaaaacugaccau

SEQ ID NO: 1207650 - RNA, 23 nt, Human
aaaaccuuucccuuccucaccaa

SEQ ID NO: 1207651 - RNA, 19 nt, Human
aaaagaaaaaagaaaaaac

SEQ ID NO: 1207652 - RNA, 21 nt, Human
aaaagcaacaaagcccaagac

SEQ ID NO: 1207653 - RNA, 21 nt, Human
aaacaaaacagcaccugacaa

SEQ ID NO: 1207654 - RNA, 19 nt, Human
aaacaaacaaacaaacaaa

SEQ ID NO: 1207655 - RNA, 26 nt, Human
aaacaaacaaacaaacaaacaaccuc

SEQ ID NO: 1207656 - RNA, 22 nt, Human
aaacaaacaaacaaacaaccuc

SEQ ID NO: 1207657 - RNA, 23 nt, Human
aaacaaacaaacaaacaaccuca

SEQ ID NO: 1207658 - RNA, 23 nt, Human
aaacaaccucaaaagcuguuggg

SEQ ID NO: 1207659 - RNA, 24 nt, Human
aaagccccucccgcacugcugccc

SEQ ID NO: 1207660 - RNA, 21 nt, Human
aacaaaagcgaaacucugucu

SEQ ID NO: 1207661 - RNA, 22 nt, Human
aacaaaagcgaaacucugucuc

SEQ ID NO: 1207662 - RNA, 18 nt, Human
aacacuuugggaggcuga

SEQ ID NO: 1207663 - RNA, 24 nt, Human
aacacuuugggaggcugaggcggg

SEQ ID NO: 1207664 - RNA, 20 nt, Human
aacauggugaaauccugucu

SEQ ID NO: 1207665 - RNA, 21 nt, Human
aacauggugaaauccugucuc

SEQ ID NO: 1207666 - RNA, 21 nt, Human
aacguggugaaaccccugucu

SEQ ID NO: 1207667 - RNA, 22 nt, Human
aacguggugaaaccccugucuc

SEQ ID NO: 1207668 - RNA, 21 nt, Human
aagaaaaaacugaccauaccc

SEQ ID NO: 1207669 - RNA, 28 nt, Human
aagcaacaaagcccaagacagguaaaca

SEQ ID NO: 1207670 - RNA, 26 nt, Human
aagcagaaagcuagaaugaagggacc

SEQ ID NO: 1207671 - RNA, 18 nt, Human
aaguggaagcaaguauua

SEQ ID NO: 1207672 - RNA, 25 nt, Human
aaucacuugaacccgggaggcggag

SEQ ID NO: 1207673 - RNA, 25 nt, Human
acaagaaaaaccuuucccuuccuca

SEQ ID NO: 1207674 - RNA, 25 nt, Human
acaagaaaaaccuuucccuuccuca

SEQ ID NO: 1207675 - RNA, 22 nt, Human
acagguaaacaaacaaacaaac

SEQ ID NO: 1207676 - RNA, 22 nt, Human
acagucugggaggcugaggcag

SEQ ID NO: 1207677 - RNA, 23 nt, Human
acagucugggaggcugaggcagg

SEQ ID NO: 1207678 - RNA, 19 nt, Human
acccacugggugcugagga

SEQ ID NO: 1207679 - RNA, 20 nt, Human
acccagggccaagggagaug

SEQ ID NO: 1207680 - RNA, 24 nt, Human
accuaaggucaggaguucgagacc

SEQ ID NO: 1207681 - RNA, 24 nt, Human
accugaggucaggaguuugagacu

SEQ ID NO: 1207682 - RNA, 22 nt, Human
accugguucuccacuuaacugc

SEQ ID NO: 1207683 - RNA, 22 nt, Human
accuugacucuacugccuguug

SEQ ID NO: 1207684 - RNA, 23 nt, Human
acucagcacaauuggaaaaaaaa

SEQ ID NO: 1207685 - RNA, 19 nt, Human
acucccagccagggcucuc

SEQ ID NO: 1207686 - RNA, 19 nt, Human
agaaaagaaaagaaaaaag

SEQ ID NO: 1207687 - RNA, 22 nt, Human
agaaucacuugaacccgggagg

SEQ ID NO: 1207688 - RNA, 20 nt, Human
agaaugaagcgagucuagua

SEQ ID NO: 1207689 - RNA, 20 nt, Human
agacagguaaacaaacaaac

SEQ ID NO: 1207690 - RNA, 20 nt, Human
agacagguaaacaaacaaag

SEQ ID NO: 1207691 - RNA, 23 nt, Human
agcaagaagaccuggucccccuc

SEQ ID NO: 1207692 - RNA, 20 nt, Human
agcccgggcaacaaaagcga

SEQ ID NO: 1207693 - RNA, 21 nt, Human
agcccgggcaacaaaagcgaa

SEQ ID NO: 1207694 - RNA, 18 nt, Human
agcccugggcuggccccc

SEQ ID NO: 1207695 - RNA, 22 nt, Human
agccuggccaacguggugaaac

SEQ ID NO: 1207696 - RNA, 24 nt, Human
agccuggccaacguggugaaaccc

SEQ ID NO: 1207697 - RNA, 22 nt, Human
agcucaauccuggugaccaccu

SEQ ID NO: 1207698 - RNA, 22 nt, Human
agcugccacuggagugacaggc

SEQ ID NO: 1207699 - RNA, 20 nt, Human
agcugggugugguggugggu

SEQ ID NO: 1207700 - RNA, 22 nt, Human
agcugggugugguggugggugc

SEQ ID NO: 1207701 - RNA, 18 nt, Human
aggcaggagaaucacuug

SEQ ID NO: 1207702 - RNA, 24 nt, Human
aggcaggagaaucacuugaacccg

SEQ ID NO: 1207703 - RNA, 18 nt, Human
aggcagguggaucaccug

SEQ ID NO: 1207704 - RNA, 22 nt, Human
aggcagguggaucaccugaggu

SEQ ID NO: 1207705 - RNA, 26 nt, Human
aggcagguggaucaccugaggucagg

SEQ ID NO: 1207706 - RNA, 24 nt, Human
aggcgcaguggcucaugccuguaa

SEQ ID NO: 1207707 - RNA, 20 nt, Human
aggcggagauugcagugagc

SEQ ID NO: 1207708 - RNA, 22 nt, Human
aggcggagauugcagugagcug

SEQ ID NO: 1207709 - RNA, 22 nt, Human
aggcgggcggaucaccuaaggu

SEQ ID NO: 1207710 - RNA, 26 nt, Human
aggcgggcggaucaccuaaggucagg

SEQ ID NO: 1207711 - RNA, 24 nt, Human
aggcgugguggcucaugccuguaa

SEQ ID NO: 1207712 - RNA, 24 nt, Human
aggcuaaggcaggagaaucacuug

SEQ ID NO: 1207713 - RNA, 21 nt, Human
aggcugaggcagguggaucac

SEQ ID NO: 1207714 - RNA, 24 nt, Human
aggcugaggcagguggaucaccug

SEQ ID NO: 1207715 - RNA, 19 nt, Human
aggcugaggcgggcggauc

SEQ ID NO: 1207716 - RNA, 21 nt, Human
aggcugaggcgggcggaucac

SEQ ID NO: 1207717 - RNA, 22 nt, Human
agguggaucaccugaggucagg

SEQ ID NO: 1207718 - RNA, 20 nt, Human
agguguuaggcaagggacgg

SEQ ID NO: 1207719 - RNA, 23 nt, Human
aguggcucaugccuguaauccca

SEQ ID NO: 1207720 - RNA, 20 nt, Human
aucaccugaggucaggaguu

SEQ ID NO: 1207721 - RNA, 24 nt, Human
aucgcgccauugcauuccagcccg

SEQ ID NO: 1207722 - RNA, 19 nt, Human
augcaaugcugcuugcccc

SEQ ID NO: 1207723 - RNA, 19 nt, Human
augccuguaaucccaacac

SEQ ID NO: 1207724 - RNA, 23 nt, Human
auugcagugagcugaaucgcgcc

SEQ ID NO: 1207725 - RNA, 18 nt, Human
auugcauuccagcccggg

SEQ ID NO: 1207726 - RNA, 18 nt, Human
caaaacagauaucucagc

SEQ ID NO: 1207727 - RNA, 19 nt, Human
caaaacagcaccugacaau

SEQ ID NO: 1207728 - RNA, 25 nt, Human
caaaacagcaccugacaaugccuga

SEQ ID NO: 1207729 - RNA, 21 nt, Human
caaaagcaacaaagcccaaga

SEQ ID NO: 1207730 - RNA, 23 nt, Human
caaaagcaacaaagcccaagaca

SEQ ID NO: 1207731 - RNA, 26 nt, Human
caaaagcaacaaagcccaagacaggu

SEQ ID NO: 1207732 - RNA, 18 nt, Human
caaacaaacaaacaaccu

SEQ ID NO: 1207733 - RNA, 23 nt, Human
caaacaaacaaacaaccucaaaa

SEQ ID NO: 1207734 - RNA, 22 nt, Human
caaaucauucccaggaaaaucc

SEQ ID NO: 1207735 - RNA, 23 nt, Human
caacaaaagcgaaacucugucuc

SEQ ID NO: 1207736 - RNA, 24 nt, Human
caacacuuugggaggcugaggcgg

SEQ ID NO: 1207737 - RNA, 24 nt, Human
caacauggugaaauccugucucua

SEQ ID NO: 1207738 - RNA, 25 nt, Human
caacguggugaaaccccugucucua

SEQ ID NO: 1207739 - RNA, 24 nt, Human
caagaaaaaccuuucccuuccuca

SEQ ID NO: 1207740 - RNA, 23 nt, Human
caaguggaagcaaguauuaccca

SEQ ID NO: 1207741 - RNA, 19 nt, Human
caccacauaacccacuuac

SEQ ID NO: 1207742 - RNA, 24 nt, Human
caccacauaacccacuuacaaggg

SEQ ID NO: 1207743 - RNA, 26 nt, Human
caccacauaacccacuuacaaggguu

SEQ ID NO: 1207744 - RNA, 23 nt, Human
caccuaaggucaggaguucgaga

SEQ ID NO: 1207745 - RNA, 23 nt, Human
caccugaggucaggaguuugaga

SEQ ID NO: 1207746 - RNA, 23 nt, Human
cagcaagaagaccuggucccccu

SEQ ID NO: 1207747 - RNA, 24 nt, Human
cagcaagaagaccuggucccccuc

SEQ ID NO: 1207748 - RNA, 19 nt, Human
cagcaccugacaaugccug

SEQ ID NO: 1207749 - RNA, 19 nt, Human
cagccagggcucucugcca

SEQ ID NO: 1207750 - RNA, 22 nt, Human
cagccugccugaucacaacuga

SEQ ID NO: 1207751 - RNA, 24 nt, Human
caggaggcuaaggcaggagaauca

SEQ ID NO: 1207752 - RNA, 19 nt, Human
caggauacagaccucccac

SEQ ID NO: 1207753 - RNA, 24 nt, Human
cagguggaucaccugaggucagga

SEQ ID NO: 1207754 - RNA, 24 nt, Human
caugacagcucacaagugugcagu

SEQ ID NO: 1207755 - RNA, 24 nt, Human
caugccuguaaucccaacacuuug

SEQ ID NO: 1207756 - RNA, 19 nt, Human
cauugcauuccagcccggg

SEQ ID NO: 1207757 - RNA, 21 nt, Human
cauugcauuccagcccgggca

SEQ ID NO: 1207758 - RNA, 22 nt, Human
cauugcauuccagcccgggcaa

SEQ ID NO: 1207759 - RNA, 23 nt, Human
cauugcauuccagcccgggcaac

SEQ ID NO: 1207760 - RNA, 24 nt, Human
cauugcauuccagcccgggcaaca

SEQ ID NO: 1207761 - RNA, 20 nt, Human
ccaaaacaaggaagaaaaca

SEQ ID NO: 1207762 - RNA, 21 nt, Human
ccaagacagguaaacaaacaa

SEQ ID NO: 1207763 - RNA, 24 nt, Human
ccacacccagggccaagggagaug

SEQ ID NO: 1207764 - RNA, 24 nt, Human
ccacauaacccacuuacaagggua

SEQ ID NO: 1207765 - RNA, 18 nt, Human
ccacuccuuggcuuggca

SEQ ID NO: 1207766 - RNA, 19 nt, Human
ccagucccagcccugggcu

SEQ ID NO: 1207767 - RNA, 21 nt, Human
ccauacccaccacauaaccca

SEQ ID NO: 1207768 - RNA, 20 nt, Human
ccauugcauuccagcccggg

SEQ ID NO: 1207769 - RNA, 21 nt, Human
ccauugcauuccagcccgggc

SEQ ID NO: 1207770 - RNA, 24 nt, Human
ccauugcauuccagcccgggcaac

SEQ ID NO: 1207771 - RNA, 23 nt, Human
cccaagacagguaaacaaacaaa

SEQ ID NO: 1207772 - RNA, 19 nt, Human
cccacacccagggccaagg

SEQ ID NO: 1207773 - RNA, 25 nt, Human
cccagaguuaaagacgcuuuggaac

SEQ ID NO: 1207774 - RNA, 26 nt, Human
cccagggccaagggagaugccggggc

SEQ ID NO: 1207775 - RNA, 23 nt, Human
cccagucccagcccugggcuggc

SEQ ID NO: 1207776 - RNA, 19 nt, Human
cccccagcuccaccuuuag

SEQ ID NO: 1207777 - RNA, 24 nt, Human
ccccugucucuacuaaaaauacaa

SEQ ID NO: 1207778 - RNA, 21 nt, Human
ccuaaaauggggcuguccuga

SEQ ID NO: 1207779 - RNA, 22 nt, Human
ccuaaggucaggaguucgagac

SEQ ID NO: 1207780 - RNA, 19 nt, Human
ccuccuucuuggggcuucu

SEQ ID NO: 1207781 - RNA, 25 nt, Human
ccuccuucuuggggcuucucugugg

SEQ ID NO: 1207782 - RNA, 27 nt, Human
ccuccuucuuggggcuucucuguggga

SEQ ID NO: 1207783 - RNA, 22 nt, Human
ccugaggucaggaguuugagac

SEQ ID NO: 1207784 - RNA, 22 nt, Human
ccuggccaacauggugaaaucc

SEQ ID NO: 1207785 - RNA, 24 nt, Human
ccuggccaacauggugaaauccug

SEQ ID NO: 1207786 - RNA, 23 nt, Human
ccuggccaacguggugaaacccc

SEQ ID NO: 1207787 - RNA, 25 nt, Human
ccuggccaacguggugaaaccccug

SEQ ID NO: 1207788 - RNA, 19 nt, Human
ccuggggggggauuagggg

SEQ ID NO: 1207789 - RNA, 22 nt, Human
ccugucucuacuaaaaauacaa

SEQ ID NO: 1207790 - RNA, 23 nt, Human
cgaaacucugucucaaaaaaaag

SEQ ID NO: 1207791 - RNA, 24 nt, Human
cgagaccagccuggccaacguggu

SEQ ID NO: 1207792 - RNA, 24 nt, Human
cgccauugcauuccagcccgggca

SEQ ID NO: 1207793 - RNA, 24 nt, Human
cggaucaccuaaggucaggaguuc

SEQ ID NO: 1207794 - RNA, 27 nt, Human
cggaucaccuaaggucaggaguucgag

SEQ ID NO: 1207795 - RNA, 24 nt, Human
cgggcggaucaccuaaggucagga

SEQ ID NO: 1207796 - RNA, 24 nt, Human
cucaugccuguaaucccaacacuu

SEQ ID NO: 1207797 - RNA, 23 nt, Human
cucaugccuguaaucccaacagu

SEQ ID NO: 1207798 - RNA, 20 nt, Human
cucccgcacugcugccccuc

SEQ ID NO: 1207799 - RNA, 25 nt, Human
cucucugccagccauccagugccau

SEQ ID NO: 1207800 - RNA, 21 nt, Human
cugagccugucuccucgucug

SEQ ID NO: 1207801 - RNA, 21 nt, Human
cugagcugcugugugagccug

SEQ ID NO: 1207802 - RNA, 22 nt, Human
cugcugugugagccuggguaag

SEQ ID NO: 1207803 - RNA, 24 nt, Human
cuggccaacauggugaaauccugu

SEQ ID NO: 1207804 - RNA, 23 nt, Human
cuggccccaaccuccuucuuggg

SEQ ID NO: 1207805 - RNA, 25 nt, Human
cugggaggcugaggcagguggauca

SEQ ID NO: 1207806 - RNA, 18 nt, Human
cugguacaaaaacagacc

SEQ ID NO: 1207807 - RNA, 18 nt, Human
cugguugucaucauuccc

SEQ ID NO: 1207808 - RNA, 19 nt, Human
cuuagcuguaagagggagu

SEQ ID NO: 1207809 - RNA, 21 nt, Human
gaaaaucccccagcuccaccu

SEQ ID NO: 1207810 - RNA, 21 nt, Human
gaagucuccucaucccuaaaa

SEQ ID NO: 1207811 - RNA, 19 nt, Human
gauaaaagcaacagccucc

SEQ ID NO: 1207812 - RNA, 18 nt, Human
gaucaccuaaggucagga

SEQ ID NO: 1207813 - RNA, 24 nt, Human
gaucaccuaaggucaggaguucga

SEQ ID NO: 1207814 - RNA, 21 nt, Human
gaucaccugaggucaggaguu

SEQ ID NO: 1207815 - RNA, 24 nt, Human
gaucaccugaggucaggaguuuga

SEQ ID NO: 1207816 - RNA, 23 nt, Human
gcaggagaaucacuugaacccgg

SEQ ID NO: 1207817 - RNA, 20 nt, Human
gccaacauggugaaauccug

SEQ ID NO: 1207818 - RNA, 24 nt, Human
gccaacauggugaaauccugucuc

SEQ ID NO: 1207819 - RNA, 25 nt, Human
gccaacguggugaaaccccugucuc

SEQ ID NO: 1207820 - RNA, 24 nt, Human
gccccaaccuccuucuuggggcuu

SEQ ID NO: 1207821 - RNA, 23 nt, Human
gccuggccaacauggugaaaucc

SEQ ID NO: 1207822 - RNA, 20 nt, Human
gccuuccuuugccuuuguag

SEQ ID NO: 1207823 - RNA, 18 nt, Human
gcgaaacucugucucaaa

SEQ ID NO: 1207824 - RNA, 23 nt, Human
gcugcugugugagccuggguaag

SEQ ID NO: 1207825 - RNA, 24 nt, Human
gcuggccaggcgcaguggcucaug

SEQ ID NO: 1207826 - RNA, 22 nt, Human
gcuguagucccagcuacuaggg

SEQ ID NO: 1207827 - RNA, 18 nt, Human
gcuuggcauucaggcuuu

SEQ ID NO: 1207828 - RNA, 25 nt, Human
ggacugggucaguugcaggagcugc

SEQ ID NO: 1207829 - RNA, 18 nt, Human
ggagauugcagugagcug

SEQ ID NO: 1207830 - RNA, 23 nt, Human
ggagauugcagugagcugaaucg

SEQ ID NO: 1207831 - RNA, 18 nt, Human
ggagcuccauucucuacc

SEQ ID NO: 1207832 - RNA, 22 nt, Human
ggaucaccuaaggucaggaguu

SEQ ID NO: 1207833 - RNA, 23 nt, Human
ggaucaccuaaggucaggaguuc

SEQ ID NO: 1207834 - RNA, 18 nt, Human
ggcaagggacggugccuc

SEQ ID NO: 1207835 - RNA, 21 nt, Human
ggccaggcgugguggcucaug

SEQ ID NO: 1207836 - RNA, 20 nt, Human
ggccuggacaucucuagggg

SEQ ID NO: 1207837 - RNA, 21 nt, Human
ggccuggacaucucuaggggg

SEQ ID NO: 1207838 - RNA, 21 nt, Human
ggcggaucaccuaaggucagg

SEQ ID NO: 1207839 - RNA, 20 nt, Human
ggcucaugccuguaauccca

SEQ ID NO: 1207840 - RNA, 24 nt, Human
gguggcagggcccuguaaucccag

SEQ ID NO: 1207841 - RNA, 23 nt, Human
gguggcucaugccuguaauccca

SEQ ID NO: 1207842 - RNA, 21 nt, Human
gucacguuguucagaaacacc

SEQ ID NO: 1207843 - RNA, 23 nt, Human
gugaagucuccucaucccuaaaa

SEQ ID NO: 1207844 - RNA, 22 nt, Human
gugguggugggugcuguagucc

SEQ ID NO: 1207845 - RNA, 20 nt, Human
uaaaagagguggggcuggau

SEQ ID NO: 1207846 - RNA, 24 nt, Human
uaaaagcagaaagcuagaaugaag

SEQ ID NO: 1207847 - RNA, 21 nt, Human
uaacucccagccagggcucuc

SEQ ID NO: 1207848 - RNA, 20 nt, Human
uaaggcaggagaaucacuug

SEQ ID NO: 1207849 - RNA, 24 nt, Human
uaaggcaggagaaucacuugaacc

SEQ ID NO: 1207850 - RNA, 19 nt, Human
uacaauuagcugggcuugg

SEQ ID NO: 1207851 - RNA, 22 nt, Human
uaccccaccgcagagaaagccg

SEQ ID NO: 1207852 - RNA, 21 nt, Human
uacuaaaaauacaauuagcug

SEQ ID NO: 1207853 - RNA, 18 nt, Human
uagaagggucuuguccuc

SEQ ID NO: 1207854 - RNA, 20 nt, Human
ucaaaucauucccaggaaaa

SEQ ID NO: 1207855 - RNA, 20 nt, Human
ucaccuaaggucaggaguuc

SEQ ID NO: 1207856 - RNA, 19 nt, Human
ucaccugaggucaggaguu

SEQ ID NO: 1207857 - RNA, 20 nt, Human
ucaggauacagaccucccac

SEQ ID NO: 1207858 - RNA, 23 nt, Human
ucagguuuccaugacagcucaca

SEQ ID NO: 1207859 - RNA, 22 nt, Human
ucaugccuguaaucccaacagu

SEQ ID NO: 1207860 - RNA, 19 nt, Human
ucccagaguuaaagacgcu

SEQ ID NO: 1207861 - RNA, 20 nt, Human
ucccuaacucccagccaggg

SEQ ID NO: 1207862 - RNA, 21 nt, Human
ucucuacuaaaaauacaaaaa

SEQ ID NO: 1207863 - RNA, 24 nt, Human
ucucuacuaaaaauacaauuagcu

SEQ ID NO: 1207864 - RNA, 24 nt, Human
ucucuguaaauuuauacuugacuu

SEQ ID NO: 1207865 - RNA, 23 nt, Human
ugaccaugaugagucaggccugg

SEQ ID NO: 1207866 - RNA, 19 nt, Human
ugacgagcgaccuaacugu

SEQ ID NO: 1207867 - RNA, 23 nt, Human
ugagacuggccuggccaacaugg

SEQ ID NO: 1207868 - RNA, 24 nt, Human
ugagacuggccuggccaacauggu

SEQ ID NO: 1207869 - RNA, 21 nt, Human
ugagcugaaucgcgccauugc

SEQ ID NO: 1207870 - RNA, 18 nt, Human
ugagcuggccccaaccuc

SEQ ID NO: 1207871 - RNA, 20 nt, Human
ugaggcagguggaucaccug

SEQ ID NO: 1207872 - RNA, 24 nt, Human
ugaggcagguggaucaccugaggu

SEQ ID NO: 1207873 - RNA, 26 nt, Human
ugaggcagguggaucaccugagguca

SEQ ID NO: 1207874 - RNA, 19 nt, Human
ugaggcgggcggaucaccu

SEQ ID NO: 1207875 - RNA, 24 nt, Human
ugaggcgggcggaucaccuaaggu

SEQ ID NO: 1207876 - RNA, 26 nt, Human
ugaggcgggcggaucaccuaagguca

SEQ ID NO: 1207877 - RNA, 18 nt, Human
ugaggucaggaguuugag

SEQ ID NO: 1207878 - RNA, 21 nt, Human
ugaugagucaggccuggcugg

SEQ ID NO: 1207879 - RNA, 22 nt, Human
ugcaaaacagauaucucagcaa

SEQ ID NO: 1207880 - RNA, 24 nt, Human
ugcaaaacagauaucucagcaacu

SEQ ID NO: 1207881 - RNA, 20 nt, Human
ugccauguccugucaugaca

SEQ ID NO: 1207882 - RNA, 21 nt, Human
ugcccagucccagcccugggc

SEQ ID NO: 1207883 - RNA, 24 nt, Human
ugcccagucccagcccugggcugg

SEQ ID NO: 1207884 - RNA, 21 nt, Human
ugccggggccucgaggccccc

SEQ ID NO: 1207885 - RNA, 21 nt, Human
ugccugaucacaacugaggug

SEQ ID NO: 1207886 - RNA, 25 nt, Human
ugccugaucacaacugagguguuuu

SEQ ID NO: 1207887 - RNA, 23 nt, Human
ugccuguaaucccaacacuuugg

SEQ ID NO: 1207888 - RNA, 24 nt, Human
ugccuguaaucccaacacuuuggg

SEQ ID NO: 1207889 - RNA, 24 nt, Human
ugccuguaaucccaacagucuggg

SEQ ID NO: 1207890 - RNA, 23 nt, Human
ugcuguagucccagcuacuaggg

SEQ ID NO: 1207891 - RNA, 24 nt, Human
uggaacacaugggcuuucaagagc

SEQ ID NO: 1207892 - RNA, 18 nt, Human
uggaagcaaguauuaccc

SEQ ID NO: 1207893 - RNA, 23 nt, Human
uggaucaccugaggucaggaguu

SEQ ID NO: 1207894 - RNA, 24 nt, Human
uggaucaccugaggucaggaguuu

SEQ ID NO: 1207895 - RNA, 27 nt, Human
uggaucaccugaggucaggaguuugag

SEQ ID NO: 1207896 - RNA, 18 nt, Human
uggcaggcuuagcacagc

SEQ ID NO: 1207897 - RNA, 19 nt, Human
uggcaggcuuagcacagcu

SEQ ID NO: 1207898 - RNA, 22 nt, Human
uggcagggcccuguaaucccag

SEQ ID NO: 1207899 - RNA, 24 nt, Human
uggccaacauggugaaauccuguc

SEQ ID NO: 1207900 - RNA, 25 nt, Human
uggccaacguggugaaaccccuguc

SEQ ID NO: 1207901 - RNA, 24 nt, Human
uggccaggcgcaguggcucaugcc

SEQ ID NO: 1207902 - RNA, 24 nt, Human
uggccaggcgugguggcucaugcc

SEQ ID NO: 1207903 - RNA, 24 nt, Human
uggccuggccaacauggugaaauc

SEQ ID NO: 1207904 - RNA, 24 nt, Human
uggcucaugccuguaaucccaaca

SEQ ID NO: 1207905 - RNA, 24 nt, Human
uggcucaugccuguaaucccaaca

SEQ ID NO: 1207906 - RNA, 24 nt, Human
ugggaggcugaggcagguggauca

SEQ ID NO: 1207907 - RNA, 19 nt, Human
ugggaggcugaggcgggcg

SEQ ID NO: 1207908 - RNA, 20 nt, Human
ugggaggcugaggcgggcgg

SEQ ID NO: 1207909 - RNA, 24 nt, Human
ugggaggcugaggcgggcggauca

SEQ ID NO: 1207910 - RNA, 22 nt, Human
uggggaggaauaaugccggccu

SEQ ID NO: 1207911 - RNA, 24 nt, Human
ugguggcagggcccuguaauccca

SEQ ID NO: 1207912 - RNA, 24 nt, Human
ugguggcucaugccuguaauccca

SEQ ID NO: 1207913 - RNA, 23 nt, Human
uggugggugcuguagucccagcu

SEQ ID NO: 1207914 - RNA, 23 nt, Human
ugguggugggugcuguaguccca

SEQ ID NO: 1207915 - RNA, 19 nt, Human
ugucaugaaagacacaguc

SEQ ID NO: 1207916 - RNA, 18 nt, Human
ugugugggaagugcuugg

SEQ ID NO: 1207917 - RNA, 22 nt, Human
uguuggagacgugacccugagc

SEQ ID NO: 1207918 - RNA, 18 nt, Human
uuagcugggcuugguggc

SEQ ID NO: 1207919 - RNA, 21 nt, Human
uuagcuggguguggugguggg

SEQ ID NO: 1207920 - RNA, 24 nt, Human
uuagcugggugugguggugggugc

SEQ ID NO: 1207921 - RNA, 24 nt, Human
uuccaacccagggcucccuaacuc

SEQ ID NO: 1207922 - RNA, 19 nt, Human
uucccaggaaaauccccca

SEQ ID NO: 1207923 - RNA, 19 nt, Human
uucuggagcugccacugga

SEQ ID NO: 1207924 - RNA, 18 nt, Human
uugcagugagcugaaucg

SEQ ID NO: 1207925 - RNA, 21 nt, Human
uugcagugagcugaaucgcgc

SEQ ID NO: 1207926 - RNA, 25 nt, Human
uugggaggcugaggcgggcggauca

SEQ ID NO: 1207927 - RNA, 23 nt, Human
uuucuggagcugccacuggagug

SEQ ID NO: 1207928 - RNA, 25 nt, Human
uuugaaguaccuuuugccaaaagca

SEQ ID NO: 1207929 - RNA, 22 nt, Human
uuuuucagauuaaugaagaaag

SEQ ID NO: 1207930 - RNA, 24 nt, Human
aaggcucuuggguuucccgcuuug

SEQ ID NO: 1207931 - RNA, 21 nt, Human
ccaaacccaagucuuacacuc

SEQ ID NO: 1207932 - RNA, 19 nt, Human
cuuggguuucccgcuuugg

SEQ ID NO: 1207933 - RNA, 19 nt, Human
uagugacccccuccuuucc

SEQ ID NO: 1207934 - RNA, 21 nt, Human
cagcagucccucucugggcga

SEQ ID NO: 1207935 - RNA, 20 nt, Human
gaacccagaugcaggcagca

SEQ ID NO: 1207936 - RNA, 22 nt, Human
gaugcaggcagcagucccucuc

SEQ ID NO: 1207937 - RNA, 24 nt, Human
acuugcagagaggagucgaaacug

SEQ ID NO: 1207938 - RNA, 19 nt, Human
ccgccgcgcucugcucucc

SEQ ID NO: 1207939 - RNA, 26 nt, Human
cguuucauacuucccaaauaguuuua

SEQ ID NO: 1207940 - RNA, 21 nt, Human
gagucucuuacaccuuucugg

SEQ ID NO: 1207941 - RNA, 24 nt, Human
gagucucuuacaccuuucugggcc

SEQ ID NO: 1207942 - RNA, 20 nt, Human
uacaccagaucacgagacau

SEQ ID NO: 1207943 - RNA, 21 nt, Human
ugcagagaggagucgaaacug

SEQ ID NO: 1207944 - RNA, 24 nt, Human
aaacaagcuaacaaaacaaaaggc

SEQ ID NO: 1207945 - RNA, 21 nt, Human
aaauacauaucaugaaaauaa

SEQ ID NO: 1207946 - RNA, 19 nt, Human
aagcagagcucucagagug

SEQ ID NO: 1207947 - RNA, 18 nt, Human
acccagcacccugacccu

SEQ ID NO: 1207948 - RNA, 22 nt, Human
agaaagaaucucuguaagcaga

SEQ ID NO: 1207949 - RNA, 19 nt, Human
agcacccugacccugcugc

SEQ ID NO: 1207950 - RNA, 19 nt, Human
agcaucuauuccucccugg

SEQ ID NO: 1207951 - RNA, 20 nt, Human
aggaacccagcacccugacc

SEQ ID NO: 1207952 - RNA, 22 nt, Human
aggaacccagcacccugacccu

SEQ ID NO: 1207953 - RNA, 22 nt, Human
auuagugugaaugcucugaaau

SEQ ID NO: 1207954 - RNA, 21 nt, Human
cagagcucucagagugacacc

SEQ ID NO: 1207955 - RNA, 19 nt, Human
cagcacccugacccugcug

SEQ ID NO: 1207956 - RNA, 20 nt, Human
cauagaaaaaauacauauca

SEQ ID NO: 1207957 - RNA, 20 nt, Human
cccugacccugcugcuccuc

SEQ ID NO: 1207958 - RNA, 21 nt, Human
cccuggcuggaguugagguga

SEQ ID NO: 1207959 - RNA, 19 nt, Human
ccugacccugcugcuccuc

SEQ ID NO: 1207960 - RNA, 21 nt, Human
gccccuggccugcccugcccu

SEQ ID NO: 1207961 - RNA, 18 nt, Human
gcugucauccccucccca

SEQ ID NO: 1207962 - RNA, 18 nt, Human
gucauccccuccccaagc

SEQ ID NO: 1207963 - RNA, 19 nt, Human
guggggucccugguguggc

SEQ ID NO: 1207964 - RNA, 23 nt, Human
guguuugaaccaucuugaaggca

SEQ ID NO: 1207965 - RNA, 21 nt, Human
uaacaaaacaaaaggcugaac

SEQ ID NO: 1207966 - RNA, 22 nt, Human
uaacuaggaaacaagcuaacaa

SEQ ID NO: 1207967 - RNA, 24 nt, Human
uaggaaacaagcuaacaaaacaaa

SEQ ID NO: 1207968 - RNA, 19 nt, Human
uaucucccaggaugugaag

SEQ ID NO: 1207969 - RNA, 20 nt, Human
ucaguagcugcuccccacag

SEQ ID NO: 1207970 - RNA, 21 nt, Human
uccagggccccuggccugccc

SEQ ID NO: 1207971 - RNA, 24 nt, Human
uccccaagcucucuuguggggucc

SEQ ID NO: 1207972 - RNA, 25 nt, Human
ucucuguaagcagagcucucagagu

SEQ ID NO: 1207973 - RNA, 21 nt, Human
ugaaguacugccucacucugg

SEQ ID NO: 1207974 - RNA, 19 nt, Human
ugacagcagaaagaaucuc

SEQ ID NO: 1207975 - RNA, 23 nt, Human
ugaggugaugggagggaaauuga

SEQ ID NO: 1207976 - RNA, 20 nt, Human
uggagguaacuaggaaacaa

SEQ ID NO: 1207977 - RNA, 21 nt, Human
uggggacccaaggccagccgg

SEQ ID NO: 1207978 - RNA, 23 nt, Human
aagaugcuccgccuccuccugcc

SEQ ID NO: 1207979 - RNA, 18 nt, Human
agcagacgccagggcugc

SEQ ID NO: 1207980 - RNA, 24 nt, Human
agccacaaacgcuagcgggaaccu

SEQ ID NO: 1207981 - RNA, 20 nt, Human
agggaggcaagugugggagc

SEQ ID NO: 1207982 - RNA, 25 nt, Human
cacccccagcuccgcgcccccugcu

SEQ ID NO: 1207983 - RNA, 20 nt, Human
cagcucccacccccagcucc

SEQ ID NO: 1207984 - RNA, 20 nt, Human
ccagaagggcaaguccagca

SEQ ID NO: 1207985 - RNA, 22 nt, Human
ccagcagacgccagggcugcag

SEQ ID NO: 1207986 - RNA, 18 nt, Human
ccagggaggcaagugugg

SEQ ID NO: 1207987 - RNA, 21 nt, Human
ccccugcucguccccuuucac

SEQ ID NO: 1207988 - RNA, 18 nt, Human
cccugcucguccccuuuc

SEQ ID NO: 1207989 - RNA, 19 nt, Human
cccugcucguccccuuuca

SEQ ID NO: 1207990 - RNA, 18 nt, Human
cgccuucggcuuggggug

SEQ ID NO: 1207991 - RNA, 20 nt, Human
cguccccuuucacuuccagg

SEQ ID NO: 1207992 - RNA, 22 nt, Human
cuccugccacuuagagccacaa

SEQ ID NO: 1207993 - RNA, 21 nt, Human
cuucggcuuggggugcccaga

SEQ ID NO: 1207994 - RNA, 27 nt, Human
gcgcccccugcucguccccuuucacuu

SEQ ID NO: 1207995 - RNA, 18 nt, Human
gcucccacccccagcucc

SEQ ID NO: 1207996 - RNA, 19 nt, Human
ggacgccccagccagggag

SEQ ID NO: 1207997 - RNA, 24 nt, Human
guacaggggcugguauggaccugu

SEQ ID NO: 1207998 - RNA, 21 nt, Human
ucacuuccaggcgccuucggc

SEQ ID NO: 1207999 - RNA, 21 nt, Human
uccuccugccacuuagagcca

SEQ ID NO: 1208000 - RNA, 20 nt, Human
ucggaacccggugccuggcg

SEQ ID NO: 1208001 - RNA, 19 nt, Human
ucggcuuggggugcccaga

SEQ ID NO: 1208002 - RNA, 23 nt, Human
ucggcuuggggugcccagaaggg

SEQ ID NO: 1208003 - RNA, 19 nt, Human
ugcuccgccuccuccugcc

SEQ ID NO: 1208004 - RNA, 24 nt, Human
ugcuccgccuccuccugccacuua

SEQ ID NO: 1208005 - RNA, 24 nt, Human
uuccaggcgccuucggcuuggggu

SEQ ID NO: 1208006 - RNA, 21 nt, Human
gagggcgauaggaagcuuugu

SEQ ID NO: 1208007 - RNA, 18 nt, Human
gcuuuguucugugggucc

SEQ ID NO: 1208008 - RNA, 20 nt, Human
ucccccaggagggcgauagg

SEQ ID NO: 1208009 - RNA, 23 nt, Human
ugaacguaggccuccuuuucaag

SEQ ID NO: 1208010 - RNA, 24 nt, Human
uuaggaugaacguaggccuccuuu

SEQ ID NO: 1208011 - RNA, 23 nt, Human
aacagaugccuucacaacaugga

SEQ ID NO: 1208012 - RNA, 24 nt, Human
acuguggggugaaaggugggggag

SEQ ID NO: 1208013 - RNA, 20 nt, Human
aucaauaucaucaucaagcu

SEQ ID NO: 1208014 - RNA, 20 nt, Human
auggaauaaauacuaauuga

SEQ ID NO: 1208015 - RNA, 21 nt, Human
auguuucugugguuguuuucc

SEQ ID NO: 1208016 - RNA, 20 nt, Human
cacuguggggugaaaggugg

SEQ ID NO: 1208017 - RNA, 20 nt, Human
ccguugggcaaaaugagauc

SEQ ID NO: 1208018 - RNA, 21 nt, Human
cugaacagaugccuucacaaa

SEQ ID NO: 1208019 - RNA, 25 nt, Human
cuggcacugcagggacauuccggua

SEQ ID NO: 1208020 - RNA, 24 nt, Human
cuugaaguaccugcuggaguacca

SEQ ID NO: 1208021 - RNA, 21 nt, Human
gaacagaugccuucacaacau

SEQ ID NO: 1208022 - RNA, 19 nt, Human
ggugaaaggugggggaggg

SEQ ID NO: 1208023 - RNA, 22 nt, Human
guuguuuucccagcacugcguc

SEQ ID NO: 1208024 - RNA, 21 nt, Human
uauagggugccaggcccugug

SEQ ID NO: 1208025 - RNA, 20 nt, Human
uaucaucaucaagcugaagu

SEQ ID NO: 1208026 - RNA, 21 nt, Human
ucccuugguuucaaauuuucg

SEQ ID NO: 1208027 - RNA, 26 nt, Human
ucucuagucucaccaucaauaucauc

SEQ ID NO: 1208028 - RNA, 20 nt, Human
ugaaaggugggggagggaaa

SEQ ID NO: 1208029 - RNA, 22 nt, Human
ugaacagaugccuucacaacau

SEQ ID NO: 1208030 - RNA, 22 nt, Human
ugagaagggaagaugaagaagc

SEQ ID NO: 1208031 - RNA, 23 nt, Human
uggaguaccaccguugggcaaaa

SEQ ID NO: 1208032 - RNA, 23 nt, Human
uggcacugcagggacauuccggu

SEQ ID NO: 1208033 - RNA, 18 nt, Human
ugggaucaucaacuauaa

SEQ ID NO: 1208034 - RNA, 19 nt, Human
uggggugaaagguggggga

SEQ ID NO: 1208035 - RNA, 21 nt, Human
uugucuugucccuugguuuca

SEQ ID NO: 1208036 - RNA, 22 nt, Human
uuucccagcacugcgucucugg

SEQ ID NO: 1208037 - RNA, 23 nt, Human
auggcaauacucucugaaguuca

SEQ ID NO: 1208038 - RNA, 20 nt, Human
ggcaauacucucugaaguuc

SEQ ID NO: 1208039 - RNA, 19 nt, Human
agggcaauggcagcaaaaa

SEQ ID NO: 1208040 - RNA, 18 nt, Human
gugggaagggcaauggca

SEQ ID NO: 1208041 - RNA, 18 nt, Human
ugggaagggcaauggcag

SEQ ID NO: 1208042 - RNA, 20 nt, Human
ugugggaagggcaauggcag

SEQ ID NO: 1208043 - RNA, 21 nt, Human
agggcuugcgccuuuucccug

SEQ ID NO: 1208044 - RNA, 21 nt, Human
cagccaggucuucuagggcuu

SEQ ID NO: 1208045 - RNA, 18 nt, Human
cugcugccacuuacacuu

SEQ ID NO: 1208046 - RNA, 23 nt, Human
gccuuuucccugggugcucuugg

SEQ ID NO: 1208047 - RNA, 21 nt, Human
ucccugggugcucuuggccau

SEQ ID NO: 1208048 - RNA, 23 nt, Human
ugaagccagccaggucuucuagg

SEQ ID NO: 1208049 - RNA, 25 nt, Human
ugccuuuaucuucaccuacuggucc

SEQ ID NO: 1208050 - RNA, 21 nt, Human
ugcugcuggagccagugucug

SEQ ID NO: 1208051 - RNA, 21 nt, Human
uucccugggugcucuuggcca

SEQ ID NO: 1208052 - RNA, 19 nt, Human
acuggagacguuggaagac

SEQ ID NO: 1208053 - RNA, 19 nt, Human
caguugauggaagacuggg

SEQ ID NO: 1208054 - RNA, 24 nt, Human
cugaaugucagaagaucagcacaa

SEQ ID NO: 1208055 - RNA, 23 nt, Human
ucagaagaucagcacacuggaga

SEQ ID NO: 1208056 - RNA, 20 nt, Human
aaguagcuuuuccuccagga

SEQ ID NO: 1208057 - RNA, 21 nt, Human
caccaccaaggggaggaaaua

SEQ ID NO: 1208058 - RNA, 23 nt, Human
uaaguagcuuuuccuccaggaga

SEQ ID NO: 1208059 - RNA, 18 nt, Human
uaauaaguagcuuuuccu

SEQ ID NO: 1208060 - RNA, 24 nt, Human
uaauaaguagcuuuuccuccagga

SEQ ID NO: 1208061 - RNA, 27 nt, Human
uacaaagagcugaacacuccaaggugg

SEQ ID NO: 1208062 - RNA, 23 nt, Human
uguaauaauaaguagcuuuuccu

SEQ ID NO: 1208063 - RNA, 18 nt, Human
aaaaugccguauuuggug

SEQ ID NO: 1208064 - RNA, 22 nt, Human
aaccucugccuguuuuuuuccu

SEQ ID NO: 1208065 - RNA, 19 nt, Human
aagccucaggguucuguga

SEQ ID NO: 1208066 - RNA, 21 nt, Human
accaaccagaaaaacgugucu

SEQ ID NO: 1208067 - RNA, 30 nt, Human
agaaaaaaagaacuaaauguaacaaaggag

SEQ ID NO: 1208068 - RNA, 19 nt, Human
aggggcaaaaaacccugua

SEQ ID NO: 1208069 - RNA, 19 nt, Human
caaaaaacccuguaucuga

SEQ ID NO: 1208070 - RNA, 23 nt, Human
cauaaccaaguggaaauacugaa

SEQ ID NO: 1208071 - RNA, 20 nt, Human
caucucagaaauauugguua

SEQ ID NO: 1208072 - RNA, 18 nt, Human
cuauggcuauaaaccucu

SEQ ID NO: 1208073 - RNA, 24 nt, Human
cugaauaaaguaauacaccaacca

SEQ ID NO: 1208074 - RNA, 21 nt, Human
cuuugguaaaggcaaaaugaa

SEQ ID NO: 1208075 - RNA, 20 nt, Human
gaaguuuuccaauggccuga

SEQ ID NO: 1208076 - RNA, 25 nt, Human
gacuuugcugaauuuaacagucuua

SEQ ID NO: 1208077 - RNA, 21 nt, Human
gucaagaaagugguaagucca

SEQ ID NO: 1208078 - RNA, 24 nt, Human
guccauaguguuuuaaagccucag

SEQ ID NO: 1208079 - RNA, 23 nt, Human
gugguauaaaacaucucagaaau

SEQ ID NO: 1208080 - RNA, 18 nt, Human
guugcacagcuguauggu

SEQ ID NO: 1208081 - RNA, 23 nt, Human
uaaaaacagaucuugaauuuuac

SEQ ID NO: 1208082 - RNA, 24 nt, Human
uaaaggcaaaaugaaaaaccugcu

SEQ ID NO: 1208083 - RNA, 26 nt, Human
uaaaguaauacaccaaccagaaaaac

SEQ ID NO: 1208084 - RNA, 24 nt, Human
uaacaaaggaacugacugaauaua

SEQ ID NO: 1208085 - RNA, 21 nt, Human
uaaccaaguggaaauacugaa

SEQ ID NO: 1208086 - RNA, 26 nt, Human
uacaaaaauaaaaacagaucuugaau

SEQ ID NO: 1208087 - RNA, 25 nt, Human
uagaaaaaaagaacuaaauguaaca

SEQ ID NO: 1208088 - RNA, 21 nt, Human
uagcaguauacucgauguagu

SEQ ID NO: 1208089 - RNA, 19 nt, Human
uauaaaacaucucagaaau

SEQ ID NO: 1208090 - RNA, 23 nt, Human
uauaaaacaucucagaaauauug

SEQ ID NO: 1208091 - RNA, 19 nt, Human
ucaauaaaaacugaaaugg

SEQ ID NO: 1208092 - RNA, 19 nt, Human
ucacaaaaaaucauaacca

SEQ ID NO: 1208093 - RNA, 25 nt, Human
ucagugaagauaguaauuuucauau

SEQ ID NO: 1208094 - RNA, 22 nt, Human
ucuaauauauuugucacaguaa

SEQ ID NO: 1208095 - RNA, 21 nt, Human
ucucuuuguaguagaugauga

SEQ ID NO: 1208096 - RNA, 19 nt, Human
ucugugauauauaauucuu

SEQ ID NO: 1208097 - RNA, 19 nt, Human
ugaaaaacauuuaaagugg

SEQ ID NO: 1208098 - RNA, 19 nt, Human
ugaaaaguccaggguuuua

SEQ ID NO: 1208099 - RNA, 22 nt, Human
ugaaauggaaacucacaaaaaa

SEQ ID NO: 1208100 - RNA, 25 nt, Human
ugaauaaauuauaguguuacgcaaa

SEQ ID NO: 1208101 - RNA, 22 nt, Human
ugaauuuaacagucuuacucug

SEQ ID NO: 1208102 - RNA, 22 nt, Human
uguacaaaaauaaaaacagauc

SEQ ID NO: 1208103 - RNA, 21 nt, Human
ugugaagucaguagaucaauu

SEQ ID NO: 1208104 - RNA, 20 nt, Human
ugugauagaaaacgugauga

SEQ ID NO: 1208105 - RNA, 23 nt, Human
uuaaagccucaggguucugugau

SEQ ID NO: 1208106 - RNA, 21 nt, Human
uuaaagugguugguuuauaga

SEQ ID NO: 1208107 - RNA, 21 nt, Human
uucuaugguugcauguguauu

SEQ ID NO: 1208108 - RNA, 19 nt, Human
uucugcaucaccugaucuc

SEQ ID NO: 1208109 - RNA, 24 nt, Human
uugaaaaugccguauuugguguac

SEQ ID NO: 1208110 - RNA, 20 nt, Human
uugaaauuaggcauuucugu

SEQ ID NO: 1208111 - RNA, 24 nt, Human
uugaucaaaaauaguugguaacua

SEQ ID NO: 1208112 - RNA, 18 nt, Human
uugcugaauuuaacaguc

SEQ ID NO: 1208113 - RNA, 20 nt, Human
uugcugaauuuaacagucuu

SEQ ID NO: 1208114 - RNA, 24 nt, Human
cuggaaagucuccaucuuccacag

SEQ ID NO: 1208115 - RNA, 19 nt, Human
uccacagcguaagugggga

SEQ ID NO: 1208116 - RNA, 23 nt, Human
ucuuccacagcguaaguggggac

SEQ ID NO: 1208117 - RNA, 23 nt, Human
agcguuuccccauuccccucgcc

SEQ ID NO: 1208118 - RNA, 24 nt, Human
caagugcacaaaucggacaccucg

SEQ ID NO: 1208119 - RNA, 18 nt, Human
cagauuccccaccguccc

SEQ ID NO: 1208120 - RNA, 24 nt, Human
caguaaccuuccuccccagcucag

SEQ ID NO: 1208121 - RNA, 22 nt, Human
ccugcaguaaccuuccucccca

SEQ ID NO: 1208122 - RNA, 19 nt, Human
cucgccguugccuccgcag

SEQ ID NO: 1208123 - RNA, 18 nt, Human
cugcaguaaccuuccucc

SEQ ID NO: 1208124 - RNA, 20 nt, Human
cuuccaacacuacccggcca

SEQ ID NO: 1208125 - RNA, 18 nt, Human
uccccauuccccucgccc

SEQ ID NO: 1208126 - RNA, 21 nt, Human
ucggugaaauacgaagcguuu

SEQ ID NO: 1208127 - RNA, 24 nt, Human
ugagugccugcaguaaccuuccuc

SEQ ID NO: 1208128 - RNA, 23 nt, Human
uggcugagugccugcaguaaccu

SEQ ID NO: 1208129 - RNA, 30 nt, Human
uuccccauuccccucgcccugcuuccaacu

SEQ ID NO: 1208130 - RNA, 20 nt, Human
uuccccucgcccugcuucca

SEQ ID NO: 1208131 - RNA, 18 nt, Human
aagaagaacucuaaaacc

SEQ ID NO: 1208132 - RNA, 24 nt, Human
aaugcaaugaaauguggacagaga

SEQ ID NO: 1208133 - RNA, 23 nt, Human
cagaucagcagauucagcaaaau

SEQ ID NO: 1208134 - RNA, 20 nt, Human
cauucugcucaucugugcua

SEQ ID NO: 1208135 - RNA, 23 nt, Human
ccaauuuuccuuccaauuucugc

SEQ ID NO: 1208136 - RNA, 19 nt, Human
cccaagaaucugaaagaau

SEQ ID NO: 1208137 - RNA, 24 nt, Human
cugcuggacaugauccuccuguau

SEQ ID NO: 1208138 - RNA, 19 nt, Human
cuggagauaaaauguagca

SEQ ID NO: 1208139 - RNA, 23 nt, Human
ggacagagaguuuccccaauuuu

SEQ ID NO: 1208140 - RNA, 26 nt, Human
uaugcucauucugcucaucugugcua

SEQ ID NO: 1208141 - RNA, 23 nt, Human
ucagcaaaaucccaagaaucuga

SEQ ID NO: 1208142 - RNA, 23 nt, Human
ucagcagauucagcaaaauccca

SEQ ID NO: 1208143 - RNA, 21 nt, Human
ucccaagaaucugaaagaaug

SEQ ID NO: 1208144 - RNA, 18 nt, Human
ucgcugcuggacaugauc

SEQ ID NO: 1208145 - RNA, 20 nt, Human
ucucagacucuggagauaaa

SEQ ID NO: 1208146 - RNA, 18 nt, Human
ugcaagccugagcauuga

SEQ ID NO: 1208147 - RNA, 20 nt, Human
ugcuauaguuauuaacaucu

SEQ ID NO: 1208148 - RNA, 21 nt, Human
uguaugcucauucugcucauc

SEQ ID NO: 1208149 - RNA, 23 nt, Human
aaacaaaaaccauguucaaggaa

SEQ ID NO: 1208150 - RNA, 20 nt, Human
aaggcccucuggacuguacc

SEQ ID NO: 1208151 - RNA, 21 nt, Human
aaucacuucauguuucuccac

SEQ ID NO: 1208152 - RNA, 21 nt, Human
aauggugggagagucaaauac

SEQ ID NO: 1208153 - RNA, 18 nt, Human
acccaacaaauucauagc

SEQ ID NO: 1208154 - RNA, 19 nt, Human
agaagaaaaaccauacuga

SEQ ID NO: 1208155 - RNA, 22 nt, Human
agcccucaaaacaaaaaccaug

SEQ ID NO: 1208156 - RNA, 21 nt, Human
aggcuaaaaacuccuccacag

SEQ ID NO: 1208157 - RNA, 21 nt, Human
aguucugucacuugccaucac

SEQ ID NO: 1208158 - RNA, 27 nt, Human
caaaacaaaaaccauguucaaggaaaa

SEQ ID NO: 1208159 - RNA, 23 nt, Human
caacaaauucauagcccucaaaa

SEQ ID NO: 1208160 - RNA, 23 nt, Human
caacagugccuuuagcuggacaa

SEQ ID NO: 1208161 - RNA, 25 nt, Human
caacugccaccacuaggaugugucc

SEQ ID NO: 1208162 - RNA, 26 nt, Human
caacugccaccacuaggaugugucca

SEQ ID NO: 1208163 - RNA, 20 nt, Human
cacuugccaucacuaaaagu

SEQ ID NO: 1208164 - RNA, 23 nt, Human
cauagcccucaaaacaaaaacca

SEQ ID NO: 1208165 - RNA, 26 nt, Human
cucaaaacaaaaaccauguucaagga

SEQ ID NO: 1208166 - RNA, 19 nt, Human
cuucaacagugccuuuagc

SEQ ID NO: 1208167 - RNA, 20 nt, Human
gaaacugagcacaacaauuc

SEQ ID NO: 1208168 - RNA, 20 nt, Human
gaagaagccucguggucuca

SEQ ID NO: 1208169 - RNA, 18 nt, Human
gacuguaccagaaaaagg

SEQ ID NO: 1208170 - RNA, 23 nt, Human
gccaaguuacuucacauuccagu

SEQ ID NO: 1208171 - RNA, 24 nt, Human
guguccacuggguacauuguucac

SEQ ID NO: 1208172 - RNA, 19 nt, Human
uacaaucuaacuguccccc

SEQ ID NO: 1208173 - RNA, 18 nt, Human
uacauuguucacuguaaa

SEQ ID NO: 1208174 - RNA, 21 nt, Human
uacccaacaaauucauagccc

SEQ ID NO: 1208175 - RNA, 22 nt, Human
uacccaacaaauucauagcccu

SEQ ID NO: 1208176 - RNA, 23 nt, Human
uagaaaaugcuaucccucuuccu

SEQ ID NO: 1208177 - RNA, 23 nt, Human
uagaaaguuuuuaaaaaauaaaa

SEQ ID NO: 1208178 - RNA, 22 nt, Human
uauacauauacauaugcauguu

SEQ ID NO: 1208179 - RNA, 18 nt, Human
uauacauaugcauguuau

SEQ ID NO: 1208180 - RNA, 22 nt, Human
uauagaggcucuaacaaaaaaa

SEQ ID NO: 1208181 - RNA, 24 nt, Human
uaugcuucaacagugccuuuagcu

SEQ ID NO: 1208182 - RNA, 25 nt, Human
ucacuugccaucacuaaaaguagau

SEQ ID NO: 1208183 - RNA, 21 nt, Human
uccacauauacauauacauau

SEQ ID NO: 1208184 - RNA, 20 nt, Human
ucucugaaaauacuuuuugu

SEQ ID NO: 1208185 - RNA, 21 nt, Human
ugccaaguuacuucacauucc

SEQ ID NO: 1208186 - RNA, 18 nt, Human
ugccauugaaacugagca

SEQ ID NO: 1208187 - RNA, 18 nt, Human
ugcuuggugauugaguca

SEQ ID NO: 1208188 - RNA, 18 nt, Human
ugcuuggugauugaguca

SEQ ID NO: 1208189 - RNA, 19 nt, Human
ugcuuggugauugagucau

SEQ ID NO: 1208190 - RNA, 20 nt, Human
ugcuuggugauugagucaug

SEQ ID NO: 1208191 - RNA, 21 nt, Human
uggagaacugaagcccugcug

SEQ ID NO: 1208192 - RNA, 20 nt, Human
ugggaaauuugguacacaug

SEQ ID NO: 1208193 - RNA, 20 nt, Human
uggguacauuguucacugua

SEQ ID NO: 1208194 - RNA, 21 nt, Human
uguauacccaacaaauucaua

SEQ ID NO: 1208195 - RNA, 19 nt, Human
uucaauggcucccaugaug

SEQ ID NO: 1208196 - RNA, 24 nt, Human
uugaaacugagcacaacaauucug

SEQ ID NO: 1208197 - RNA, 24 nt, Human
uugaggcuaaaaacuccuccacag

SEQ ID NO: 1208198 - RNA, 22 nt, Human
uuucaugaagaagccucguggu

SEQ ID NO: 1208199 - RNA, 26 nt, Human
caaauucgaaaucugucagaugcugg

SEQ ID NO: 1208200 - RNA, 23 nt, Human
aaaaacaaaaacaaaaaacaacu

SEQ ID NO: 1208201 - RNA, 24 nt, Human
aaaaacaaaaacaaaaacaaaaac

SEQ ID NO: 1208202 - RNA, 23 nt, Human
aaaacaaaaacaaaaaacaacua

SEQ ID NO: 1208203 - RNA, 22 nt, Human
aaaacaaaaacaaaaacaaaaa

SEQ ID NO: 1208204 - RNA, 26 nt, Human
aaaacaaaaacaaaaacaaaaaacaa

SEQ ID NO: 1208205 - RNA, 20 nt, Human
aaaagcagcccugggaagac

SEQ ID NO: 1208206 - RNA, 25 nt, Human
aaacaaaaacaaaaaacaacuacga

SEQ ID NO: 1208207 - RNA, 26 nt, Human
aaacaaaaacaaaaaacaacuacgaa

SEQ ID NO: 1208208 - RNA, 20 nt, Human
aaacaacuacgaaacuccuu

SEQ ID NO: 1208209 - RNA, 21 nt, Human
aaacuacacacauacacacaa

SEQ ID NO: 1208210 - RNA, 23 nt, Human
aaagaaugaagaucuagucaccc

SEQ ID NO: 1208211 - RNA, 19 nt, Human
aacauggugaaaccccauc

SEQ ID NO: 1208212 - RNA, 20 nt, Human
aacauggugaaaccccaucu

SEQ ID NO: 1208213 - RNA, 21 nt, Human
aacauggugaaaccccaucuc

SEQ ID NO: 1208214 - RNA, 21 nt, Human
aacauggugaaaccccaucuc

SEQ ID NO: 1208215 - RNA, 21 nt, Human
aacccccaaagcaaaacauaa

SEQ ID NO: 1208216 - RNA, 22 nt, Human
aagaaugaagaucuagucaccc

SEQ ID NO: 1208217 - RNA, 23 nt, Human
aagcaagagggcuccaaacaaaa

SEQ ID NO: 1208218 - RNA, 22 nt, Human
aagcaggagaauggcaugaacc

SEQ ID NO: 1208219 - RNA, 24 nt, Human
aagcaggagaauggcaugaaccug

SEQ ID NO: 1208220 - RNA, 20 nt, Human
aauaacuugaggaaugaaaa

SEQ ID NO: 1208221 - RNA, 25 nt, Human
acaaaaacaaaaacaaaaacaaaaa

SEQ ID NO: 1208222 - RNA, 20 nt, Human
acaaacccccaaagcaaaac

SEQ ID NO: 1208223 - RNA, 22 nt, Human
acagccuguaaucccagcacuu

SEQ ID NO: 1208224 - RNA, 24 nt, Human
acagccuguaaucccagcacuuug

SEQ ID NO: 1208225 - RNA, 19 nt, Human
acaguuaggccuucagagc

SEQ ID NO: 1208226 - RNA, 24 nt, Human
accccaucucuacuaaaaauacaa

SEQ ID NO: 1208227 - RNA, 20 nt, Human
acccccaaagcaaaacauaa

SEQ ID NO: 1208228 - RNA, 23 nt, Human
accuguaguccuagcuacuuggg

SEQ ID NO: 1208229 - RNA, 20 nt, Human
acuacauucaaaggcuaaag

SEQ ID NO: 1208230 - RNA, 18 nt, Human
acugcaucuuaaaauaac

SEQ ID NO: 1208231 - RNA, 19 nt, Human
agaaaagagaggggaaaag

SEQ ID NO: 1208232 - RNA, 21 nt, Human
agaaaagagaggggaaaagaa

SEQ ID NO: 1208233 - RNA, 20 nt, Human
agaaauguugaugccugggu

SEQ ID NO: 1208234 - RNA, 21 nt, Human
agacuccugacaucagaaacu

SEQ ID NO: 1208235 - RNA, 19 nt, Human
agagaguaguguguauaag

SEQ ID NO: 1208236 - RNA, 24 nt, Human
agcacuuugggaggccgaggcagg

SEQ ID NO: 1208237 - RNA, 19 nt, Human
agccagucucagugaguca

SEQ ID NO: 1208238 - RNA, 23 nt, Human
agccuguaaucccagcacuuugg

SEQ ID NO: 1208239 - RNA, 24 nt, Human
agccuguaaucccagcacuuuggg

SEQ ID NO: 1208240 - RNA, 22 nt, Human
aggagaaaagaacuggugagaa

SEQ ID NO: 1208241 - RNA, 24 nt, Human
aggcagaucacgaggucaggagau

SEQ ID NO: 1208242 - RNA, 24 nt, Human
aggcaggcagaucacgaggucagg

SEQ ID NO: 1208243 - RNA, 26 nt, Human
aggcaggcagaucacgaggucaggag

SEQ ID NO: 1208244 - RNA, 23 nt, Human
aggccgaggcaggcagaucacga

SEQ ID NO: 1208245 - RNA, 24 nt, Human
aggcggaguuugcagugagccaag

SEQ ID NO: 1208246 - RNA, 22 nt, Human
agguacuaaauggccacaaggc

SEQ ID NO: 1208247 - RNA, 20 nt, Human
augaccuugcaaguuaagga

SEQ ID NO: 1208248 - RNA, 23 nt, Human
caaaaacaaaaacaaaaaacaac

SEQ ID NO: 1208249 - RNA, 21 nt, Human
caaaaacaaaaacaaaaaacc

SEQ ID NO: 1208250 - RNA, 20 nt, Human
caaagcaaaacauaaacacc

SEQ ID NO: 1208251 - RNA, 18 nt, Human
caaauaaaagguaucacu

SEQ ID NO: 1208252 - RNA, 21 nt, Human
cacaaacccccaaagcaaaac

SEQ ID NO: 1208253 - RNA, 23 nt, Human
cacaaacccccaaagcaaaacau

SEQ ID NO: 1208254 - RNA, 19 nt, Human
cacaauauaaauagucauc

SEQ ID NO: 1208255 - RNA, 18 nt, Human
cacacaaacccccaaagc

SEQ ID NO: 1208256 - RNA, 22 nt, Human
cacacaaacccccaaagcaaaa

SEQ ID NO: 1208257 - RNA, 23 nt, Human
cacacaaacccccagcucccgga

SEQ ID NO: 1208258 - RNA, 24 nt, Human
cacacauacacacaaacccccaaa

SEQ ID NO: 1208259 - RNA, 23 nt, Human
caccuguaguccuagcuacuugg

SEQ ID NO: 1208260 - RNA, 24 nt, Human
caccuguaguccuagcuacuuggg

SEQ ID NO: 1208261 - RNA, 23 nt, Human
cacucccucuccccaaacuguaa

SEQ ID NO: 1208262 - RNA, 24 nt, Human
cagcacuuugggaggccgaggcag

SEQ ID NO: 1208263 - RNA, 25 nt, Human
cagcacuuugggaggccgaggcagg

SEQ ID NO: 1208264 - RNA, 20 nt, Human
caggagggagaaaaucuggg

SEQ ID NO: 1208265 - RNA, 22 nt, Human
caggcagaucacgaggucagga

SEQ ID NO: 1208266 - RNA, 19 nt, Human
cagugagucaggagggaga

SEQ ID NO: 1208267 - RNA, 19 nt, Human
cauccacucccucucccca

SEQ ID NO: 1208268 - RNA, 18 nt, Human
caugaaccuggaaggcgg

SEQ ID NO: 1208269 - RNA, 19 nt, Human
caugucaccacaccucugu

SEQ ID NO: 1208270 - RNA, 24 nt, Human
cauucuugucuuagagcuguaaaa

SEQ ID NO: 1208271 - RNA, 21 nt, Human
ccaaagcaaaacauaaacacc

SEQ ID NO: 1208272 - RNA, 18 nt, Human
ccacugcugagagccaca

SEQ ID NO: 1208273 - RNA, 23 nt, Human
ccacugcugagagccacaggccu

SEQ ID NO: 1208274 - RNA, 21 nt, Human
cccaaagcaaaacauaaacac

SEQ ID NO: 1208275 - RNA, 21 nt, Human
ccccaaagcaaaacauaaaca

SEQ ID NO: 1208276 - RNA, 20 nt, Human
cccccaaagcaaaacauaaa

SEQ ID NO: 1208277 - RNA, 23 nt, Human
cccccgaaaaaccuguucacagg

SEQ ID NO: 1208278 - RNA, 22 nt, Human
ccuggcuaacauggugaaaccc

SEQ ID NO: 1208279 - RNA, 23 nt, Human
ccuggcuaacauggugaaacccc

SEQ ID NO: 1208280 - RNA, 24 nt, Human
ccuggcuaacauggugaaacccca

SEQ ID NO: 1208281 - RNA, 18 nt, Human
ccugggaagacacggaga

SEQ ID NO: 1208282 - RNA, 24 nt, Human
cgagaccauccuggcuaacauggu

SEQ ID NO: 1208283 - RNA, 24 nt, Human
cgaggcaggcagaucacgagguca

SEQ ID NO: 1208284 - RNA, 21 nt, Human
cgggcaccuguaguccuagcu

SEQ ID NO: 1208285 - RNA, 18 nt, Human
cuagaguuuacauacccc

SEQ ID NO: 1208286 - RNA, 18 nt, Human
cuauaaaugagaaaagag

SEQ ID NO: 1208287 - RNA, 18 nt, Human
cucauagguuccaacuga

SEQ ID NO: 1208288 - RNA, 23 nt, Human
cuggcuaacauggugaaacccca

SEQ ID NO: 1208289 - RNA, 19 nt, Human
cuugaggaaugaaaaaaga

SEQ ID NO: 1208290 - RNA, 25 nt, Human
cuuucuuuccuccuuuuucuguuuu

SEQ ID NO: 1208291 - RNA, 19 nt, Human
gaccuguuuccucauucgu

SEQ ID NO: 1208292 - RNA, 22 nt, Human
gagaaaagagaggggaaaagaa

SEQ ID NO: 1208293 - RNA, 23 nt, Human
gaguuugcagugagccaagaucg

SEQ ID NO: 1208294 - RNA, 24 nt, Human
gcuaacauggugaaaccccaucuc

SEQ ID NO: 1208295 - RNA, 22 nt, Human
ggaaaaaaaaucagccauaauc

SEQ ID NO: 1208296 - RNA, 25 nt, Human
ggaaaaaacaaaaacaaaaacaaaa

SEQ ID NO: 1208297 - RNA, 24 nt, Human
ggaguuugcagugagccaagaucg

SEQ ID NO: 1208298 - RNA, 22 nt, Human
ggauccugucaaaaugcagauu

SEQ ID NO: 1208299 - RNA, 24 nt, Human
ggcaccuguaguccuagcuacuug

SEQ ID NO: 1208300 - RNA, 21 nt, Human
ggccuauugcuaaaguagcac

SEQ ID NO: 1208301 - RNA, 20 nt, Human
ggcgggcaccuguaguccua

SEQ ID NO: 1208302 - RNA, 26 nt, Human
gggaaaaaacaaaaacaaaaacaaaa

SEQ ID NO: 1208303 - RNA, 31 nt, Human
gggaaaaaacaaaaacaaaaacaaaaacaaa

SEQ ID NO: 1208304 - RNA, 19 nt, Human
gggcuuccucugacagacu

SEQ ID NO: 1208305 - RNA, 24 nt, Human
gggugugguggcgggcaccuguag

SEQ ID NO: 1208306 - RNA, 18 nt, Human
ggugugaggccugggaau

SEQ ID NO: 1208307 - RNA, 27 nt, Human
guaaaguguacacacaguuaggccccc

SEQ ID NO: 1208308 - RNA, 24 nt, Human
guuccaacugaauuguucuagggu

SEQ ID NO: 1208309 - RNA, 18 nt, Human
guuuaugcugggcuguuc

SEQ ID NO: 1208310 - RNA, 28 nt, Human
uaaaaacuacacacauacaaccuucagg

SEQ ID NO: 1208311 - RNA, 19 nt, Human
uaaauaaaaacuacacaca

SEQ ID NO: 1208312 - RNA, 22 nt, Human
uaacauggugaaaccccaucuc

SEQ ID NO: 1208313 - RNA, 24 nt, Human
uaacauggugaaaccccaucucua

SEQ ID NO: 1208314 - RNA, 20 nt, Human
uaagcaagagggcuccaaac

SEQ ID NO: 1208315 - RNA, 19 nt, Human
uaaggaaaaaaaaucagcc

SEQ ID NO: 1208316 - RNA, 22 nt, Human
uaggagaaaagaacuggugaga

SEQ ID NO: 1208317 - RNA, 20 nt, Human
uagggauggugguggcagcu

SEQ ID NO: 1208318 - RNA, 23 nt, Human
uagggauggugguggcagcuuca

SEQ ID NO: 1208319 - RNA, 20 nt, Human
uaggguggggucucagcacc

SEQ ID NO: 1208320 - RNA, 22 nt, Human
uagucacccaauguuggaguuu

SEQ ID NO: 1208321 - RNA, 22 nt, Human
uauaaauagucauccacucccu

SEQ ID NO: 1208322 - RNA, 23 nt, Human
ucaacucugacugcaucuuaaaa

SEQ ID NO: 1208323 - RNA, 18 nt, Human
ucaaguuuuagaugaccu

SEQ ID NO: 1208324 - RNA, 18 nt, Human
ucacgaggucaggagauc

SEQ ID NO: 1208325 - RNA, 24 nt, Human
ucacgaggucaggagaucgagacc

SEQ ID NO: 1208326 - RNA, 21 nt, Human
ucagagcuccaacaaaggaag

SEQ ID NO: 1208327 - RNA, 21 nt, Human
ucaggagggagaaaaucuggg

SEQ ID NO: 1208328 - RNA, 24 nt, Human
uccuccuuuuucuguuuuagagag

SEQ ID NO: 1208329 - RNA, 18 nt, Human
uccuugagaacaugaaga

SEQ ID NO: 1208330 - RNA, 23 nt, Human
ucucacccacacucugucuacag

SEQ ID NO: 1208331 - RNA, 22 nt, Human
ucucuacuaaaaauacaaaaaa

SEQ ID NO: 1208332 - RNA, 19 nt, Human
ucugaguaguucucaacuc

SEQ ID NO: 1208333 - RNA, 19 nt, Human
ugaaaccccaucucuacua

SEQ ID NO: 1208334 - RNA, 23 nt, Human
ugaagcaggagaauggcaugaac

SEQ ID NO: 1208335 - RNA, 24 nt, Human
ugaagcaggagaauggcaugaacc

SEQ ID NO: 1208336 - RNA, 22 nt, Human
ugacugcaucuuaaaauaacug

SEQ ID NO: 1208337 - RNA, 21 nt, Human
ugacuuuugugguugaagggg

SEQ ID NO: 1208338 - RNA, 20 nt, Human
ugagaaagugaaaugguagg

SEQ ID NO: 1208339 - RNA, 22 nt, Human
ugagaacaugaagacuccugac

SEQ ID NO: 1208340 - RNA, 21 nt, Human
ugagagccacaggccuauugc

SEQ ID NO: 1208341 - RNA, 19 nt, Human
ugagccaagaucgugccac

SEQ ID NO: 1208342 - RNA, 19 nt, Human
ugcagccacugcugagagc

SEQ ID NO: 1208343 - RNA, 23 nt, Human
ugcauguuuuggagaauucuguc

SEQ ID NO: 1208344 - RNA, 23 nt, Human
ugcugagagccacaggccuauug

SEQ ID NO: 1208345 - RNA, 21 nt, Human
uggaagauuaccuggggaucc

SEQ ID NO: 1208346 - RNA, 29 nt, Human
uggaaggcggaguuugcagugacaacggu

SEQ ID NO: 1208347 - RNA, 24 nt, Human
uggccacaaggcacaauauaaaua

SEQ ID NO: 1208348 - RNA, 19 nt, Human
uggcgggcaccuguagucc

SEQ ID NO: 1208349 - RNA, 20 nt, Human
ugggaggccgaggcaggcag

SEQ ID NO: 1208350 - RNA, 24 nt, Human
ugggaggccgaggcaggcagauca

SEQ ID NO: 1208351 - RNA, 23 nt, Human
ugggaggcugaagcaggagaaug

SEQ ID NO: 1208352 - RNA, 22 nt, Human
ugguggcgggcaccuguagucc

SEQ ID NO: 1208353 - RNA, 18 nt, Human
uguacacacaguuaggcc

SEQ ID NO: 1208354 - RNA, 22 nt, Human
uguagucaaacaauuauauaaa

SEQ ID NO: 1208355 - RNA, 19 nt, Human
uguccuugagaacaugaag

SEQ ID NO: 1208356 - RNA, 18 nt, Human
ugugaggccugggaaugc

SEQ ID NO: 1208357 - RNA, 23 nt, Human
ugugguggcgggcaccuguaguc

SEQ ID NO: 1208358 - RNA, 21 nt, Human
uguuuuggagaauucugucag

SEQ ID NO: 1208359 - RNA, 18 nt, Human
uuagccgggugugguggc

SEQ ID NO: 1208360 - RNA, 24 nt, Human
uuagccgggugugguggcgggcac

SEQ ID NO: 1208361 - RNA, 22 nt, Human
uugcagugagccaagaucgugc

SEQ ID NO: 1208362 - RNA, 25 nt, Human
uugggaggccgaggcaggcagauca

SEQ ID NO: 1208363 - RNA, 22 nt, Human
uuuagagaguaguguguauaag

SEQ ID NO: 1208364 - RNA, 18 nt, Human
uuugcaaaggccucaaag

SEQ ID NO: 1208365 - RNA, 22 nt, Human
uuugcaaaggccucaaagaggu

SEQ ID NO: 1208366 - RNA, 24 nt, Human
uuugcagugagccaagaucgugcc

SEQ ID NO: 1208367 - RNA, 23 nt, Human
uuuguagagaccgccaaaguaaa

SEQ ID NO: 1208368 - RNA, 28 nt, Human
acacucaucucuccugucagcuccucca

SEQ ID NO: 1208369 - RNA, 21 nt, Human
agcucucacacucaucucucc

SEQ ID NO: 1208370 - RNA, 20 nt, Human
agugcugagauugagccccu

SEQ ID NO: 1208371 - RNA, 21 nt, Human
agugcugagauugagccccuu

SEQ ID NO: 1208372 - RNA, 18 nt, Human
caacuggaagacuagaug

SEQ ID NO: 1208373 - RNA, 21 nt, Human
cuagggucccaacuggaagac

SEQ ID NO: 1208374 - RNA, 21 nt, Human
cuggacacuuccuguggcuga

SEQ ID NO: 1208375 - RNA, 19 nt, Human
gucagcuccuccaaccccc

SEQ ID NO: 1208376 - RNA, 20 nt, Human
ucccagcucucacacucauc

SEQ ID NO: 1208377 - RNA, 21 nt, Human
uccugcccaucccagcucuca

SEQ ID NO: 1208378 - RNA, 22 nt, Human
uccugucagcuccuccaacccc

SEQ ID NO: 1208379 - RNA, 18 nt, Human
ucuccugucuggacacuu

SEQ ID NO: 1208380 - RNA, 21 nt, Human
uguggcugacugccuuggcag

SEQ ID NO: 1208381 - RNA, 19 nt, Human
uuccuguggcugacugccu

SEQ ID NO: 1208382 - RNA, 22 nt, Human
uuccuguggcugacugccuugg

SEQ ID NO: 1208383 - RNA, 21 nt, Human
aagcccagcagauguccggga

SEQ ID NO: 1208384 - RNA, 22 nt, Human
aagcugaagcccucuggaucug

SEQ ID NO: 1208385 - RNA, 21 nt, Human
accuccucacuggaaucggaa

SEQ ID NO: 1208386 - RNA, 24 nt, Human
acucccuggucuuccucccugcug

SEQ ID NO: 1208387 - RNA, 18 nt, Human
agcagcugggccugaccu

SEQ ID NO: 1208388 - RNA, 19 nt, Human
agcccagccaagcccagca

SEQ ID NO: 1208389 - RNA, 23 nt, Human
agcugagcccagccaagcccagc

SEQ ID NO: 1208390 - RNA, 23 nt, Human
aggcacucagcucgccagaccuc

SEQ ID NO: 1208391 - RNA, 24 nt, Human
aggcaggaaagccucuccccaggg

SEQ ID NO: 1208392 - RNA, 21 nt, Human
aggcagguaacucuccuugca

SEQ ID NO: 1208393 - RNA, 21 nt, Human
aggccguggcugugggccccu

SEQ ID NO: 1208394 - RNA, 18 nt, Human
aggcgaggcaguccuggc

SEQ ID NO: 1208395 - RNA, 22 nt, Human
agguccucaauuucccucugca

SEQ ID NO: 1208396 - RNA, 20 nt, Human
auggcgccaguccgggcagc

SEQ ID NO: 1208397 - RNA, 24 nt, Human
augggagcuggcagaaccuacaca

SEQ ID NO: 1208398 - RNA, 25 nt, Human
caaaucgaggccguggcugugggcc

SEQ ID NO: 1208399 - RNA, 24 nt, Human
caaccagcacgcccuuuguggggc

SEQ ID NO: 1208400 - RNA, 20 nt, Human
cacaggcagguaacucuccu

SEQ ID NO: 1208401 - RNA, 19 nt, Human
caccgaggacagcccuggg

SEQ ID NO: 1208402 - RNA, 21 nt, Human
cacuggaaucggaaucuguca

SEQ ID NO: 1208403 - RNA, 23 nt, Human
cagcuccugagcagcugggccug

SEQ ID NO: 1208404 - RNA, 21 nt, Human
caggucgaaaccggccccaca

SEQ ID NO: 1208405 - RNA, 21 nt, Human
caucaagggcaggcacucagc

SEQ ID NO: 1208406 - RNA, 24 nt, Human
ccagcucucccacagccggccucu

SEQ ID NO: 1208407 - RNA, 22 nt, Human
cccagggccaguugagaggcac

SEQ ID NO: 1208408 - RNA, 20 nt, Human
ccccagagcaccacccuucc

SEQ ID NO: 1208409 - RNA, 21 nt, Human
ccccuagggacuucuuccccc

SEQ ID NO: 1208410 - RNA, 21 nt, Human
ccccugcagcggcagcuccug

SEQ ID NO: 1208411 - RNA, 18 nt, Human
ccccuggggcuccggggc

SEQ ID NO: 1208412 - RNA, 20 nt, Human
ccccuggggcuccggggcug

SEQ ID NO: 1208413 - RNA, 19 nt, Human
cccggccccagagcaccac

SEQ ID NO: 1208414 - RNA, 22 nt, Human
cccugcucugcauuuucuucug

SEQ ID NO: 1208415 - RNA, 21 nt, Human
cccuuuguggggcgaggugcc

SEQ ID NO: 1208416 - RNA, 20 nt, Human
ccggccccagagcaccaccc

SEQ ID NO: 1208417 - RNA, 23 nt, Human
ccgggacagcgaguggcuuccuc

SEQ ID NO: 1208418 - RNA, 20 nt, Human
ccguggcugugggccccugg

SEQ ID NO: 1208419 - RNA, 23 nt, Human
ccguggcugugggccccuggggc

SEQ ID NO: 1208420 - RNA, 22 nt, Human
ccuacacacaccuccucacugg

SEQ ID NO: 1208421 - RNA, 20 nt, Human
ccugagcagcugggccugac

SEQ ID NO: 1208422 - RNA, 21 nt, Human
ccugugggugggaaguugggc

SEQ ID NO: 1208423 - RNA, 23 nt, Human
ccuugacgccggcgccgagccuu

SEQ ID NO: 1208424 - RNA, 18 nt, Human
cgaggccguggcuguggg

SEQ ID NO: 1208425 - RNA, 19 nt, Human
cgcacagacaggcgaggca

SEQ ID NO: 1208426 - RNA, 26 nt, Human
cggguguaggugggauucugcucagg

SEQ ID NO: 1208427 - RNA, 19 nt, Human
cucagacucgaagcugaag

SEQ ID NO: 1208428 - RNA, 24 nt, Human
cucauggcgccaguccgggcagcc

SEQ ID NO: 1208429 - RNA, 23 nt, Human
cucccgggcuguaggccgagggc

SEQ ID NO: 1208430 - RNA, 26 nt, Human
cugcucagggcucugccacuguggcu

SEQ ID NO: 1208431 - RNA, 22 nt, Human
cuggaaucggaaucugugccca

SEQ ID NO: 1208432 - RNA, 23 nt, Human
gccaucuuccuccucgaaaggcc

SEQ ID NO: 1208433 - RNA, 19 nt, Human
gcccaaaucugggaccugc

SEQ ID NO: 1208434 - RNA, 20 nt, Human
gcccuggggcagggccccug

SEQ ID NO: 1208435 - RNA, 24 nt, Human
gcccuugacgccggcgccgagccu

SEQ ID NO: 1208436 - RNA, 20 nt, Human
gcgaggcaguccuggccugu

SEQ ID NO: 1208437 - RNA, 23 nt, Human
gcucagggcucugccacuguggc

SEQ ID NO: 1208438 - RNA, 18 nt, Human
gcucugccacuguggcug

SEQ ID NO: 1208439 - RNA, 18 nt, Human
ggaaucggaaucugugcc

SEQ ID NO: 1208440 - RNA, 20 nt, Human
ggacagcgaguggcuuccuc

SEQ ID NO: 1208441 - RNA, 18 nt, Human
ggcagcccuggcgccggg

SEQ ID NO: 1208442 - RNA, 20 nt, Human
ggccccuggggcuccggggc

SEQ ID NO: 1208443 - RNA, 23 nt, Human
ggccguggcugugggccccuggg

SEQ ID NO: 1208444 - RNA, 20 nt, Human
ggcgaugggagcuggcagaa

SEQ ID NO: 1208445 - RNA, 19 nt, Human
ggcugcaucaagggcaggc

SEQ ID NO: 1208446 - RNA, 20 nt, Human
ggggcugcugcugccuuucc

SEQ ID NO: 1208447 - RNA, 21 nt, Human
gggggcugcugcugccuuucc

SEQ ID NO: 1208448 - RNA, 24 nt, Human
guccucaauuucccucugcagcca

SEQ ID NO: 1208449 - RNA, 23 nt, Human
gugcauggcgucugggcacgagg

SEQ ID NO: 1208450 - RNA, 18 nt, Human
gugcuuaggcuuuugggg

SEQ ID NO: 1208451 - RNA, 24 nt, Human
uagggacuucuuccccccggccau

SEQ ID NO: 1208452 - RNA, 18 nt, Human
uccccaggcccugcucug

SEQ ID NO: 1208453 - RNA, 18 nt, Human
uccccccggccaucuucc

SEQ ID NO: 1208454 - RNA, 21 nt, Human
uccccccggccaucuuccucc

SEQ ID NO: 1208455 - RNA, 20 nt, Human
ucccggccccagagcaccac

SEQ ID NO: 1208456 - RNA, 24 nt, Human
ucccggccccagagcaccacccuu

SEQ ID NO: 1208457 - RNA, 19 nt, Human
ucccgggggcugcugcugc

SEQ ID NO: 1208458 - RNA, 22 nt, Human
ucccugcugguuucuucccagg

SEQ ID NO: 1208459 - RNA, 18 nt, Human
ucccuggucuuccucccc

SEQ ID NO: 1208460 - RNA, 23 nt, Human
uccugagcagcugggccugaccu

SEQ ID NO: 1208461 - RNA, 24 nt, Human
uccugagcagcugggccugaccuc

SEQ ID NO: 1208462 - RNA, 21 nt, Human
ucucuccgcaggcaggaaagc

SEQ ID NO: 1208463 - RNA, 21 nt, Human
ucucucggcgaugggagcugg

SEQ ID NO: 1208464 - RNA, 21 nt, Human
ucucuggccgcagccugggac

SEQ ID NO: 1208465 - RNA, 21 nt, Human
ucucuggccgcagccugggac

SEQ ID NO: 1208466 - RNA, 24 nt, Human
ucugcagccagaugcaccgaggac

SEQ ID NO: 1208467 - RNA, 22 nt, Human
ucuggggagaguccuccagcuc

SEQ ID NO: 1208468 - RNA, 19 nt, Human
ucugugcccaaaucuggga

SEQ ID NO: 1208469 - RNA, 24 nt, Human
ucuugccaucgccgcugcccggca

SEQ ID NO: 1208470 - RNA, 19 nt, Human
ugcagcggcagcuccugag

SEQ ID NO: 1208471 - RNA, 21 nt, Human
ugcaguggaagcuugccuguc

SEQ ID NO: 1208472 - RNA, 22 nt, Human
ugcauggcgucugggcacgagg

SEQ ID NO: 1208473 - RNA, 20 nt, Human
ugcggcaaaugccuaccuuc

SEQ ID NO: 1208474 - RNA, 19 nt, Human
ugcugaauucuccacgacg

SEQ ID NO: 1208475 - RNA, 22 nt, Human
uggcagaaccuacacacaccuc

SEQ ID NO: 1208476 - RNA, 20 nt, Human
uggcagcccuggcgccgggu

SEQ ID NO: 1208477 - RNA, 19 nt, Human
uggcgccaguccgggcagc

SEQ ID NO: 1208478 - RNA, 19 nt, Human
uggcugcaucaagggcagg

SEQ ID NO: 1208479 - RNA, 21 nt, Human
ugggcacgaggccucccgggc

SEQ ID NO: 1208480 - RNA, 20 nt, Human
ugggccccuggggcuccggg

SEQ ID NO: 1208481 - RNA, 20 nt, Human
ugggguuucuuggacauccc

SEQ ID NO: 1208482 - RNA, 24 nt, Human
uguaggccgagggcucugaaguuc

SEQ ID NO: 1208483 - RNA, 18 nt, Human
uguccgggacagcgagug

SEQ ID NO: 1208484 - RNA, 20 nt, Human
uguccgggacagcgaguggc

SEQ ID NO: 1208485 - RNA, 24 nt, Human
uguggcugcaucaagggcaggcac

SEQ ID NO: 1208486 - RNA, 24 nt, Human
ugugggccccuggggcuccggggc

SEQ ID NO: 1208487 - RNA, 25 nt, Human
ugugggccccuggggcuccggggcu

SEQ ID NO: 1208488 - RNA, 18 nt, Human
uucccagggcugcugugc

SEQ ID NO: 1208489 - RNA, 22 nt, Human
uucccggccccagagcaccacc

SEQ ID NO: 1208490 - RNA, 20 nt, Human
uuccggucuugggggaugga

SEQ ID NO: 1208491 - RNA, 25 nt, Human
uuccuccucgaaaggcccuggggca

SEQ ID NO: 1208492 - RNA, 19 nt, Human
aaauauccuuucuaagguc

SEQ ID NO: 1208493 - RNA, 19 nt, Human
aagcugaacgccugccacc

SEQ ID NO: 1208494 - RNA, 18 nt, Human
aaggagagcacagccaag

SEQ ID NO: 1208495 - RNA, 22 nt, Human
aaggucccuacaaagggaguga

SEQ ID NO: 1208496 - RNA, 24 nt, Human
aauugggauccaaaauauccuuuc

SEQ ID NO: 1208497 - RNA, 21 nt, Human
acgccugccaccuugacugug

SEQ ID NO: 1208498 - RNA, 19 nt, Human
acuguggguguuccaauca

SEQ ID NO: 1208499 - RNA, 23 nt, Human
agacagggccagacaguuuucua

SEQ ID NO: 1208500 - RNA, 25 nt, Human
agcaaugccaguggccucaguggca

SEQ ID NO: 1208501 - RNA, 22 nt, Human
aggcuaaggagagcacagccaa

SEQ ID NO: 1208502 - RNA, 20 nt, Human
aggucuccgcuccccuccac

SEQ ID NO: 1208503 - RNA, 20 nt, Human
aggugaugcaggaaccagag

SEQ ID NO: 1208504 - RNA, 22 nt, Human
caaaauauccuuucuaaggucc

SEQ ID NO: 1208505 - RNA, 21 nt, Human
cacagccaagggccagaaccg

SEQ ID NO: 1208506 - RNA, 18 nt, Human
cagggucuggugcagagc

SEQ ID NO: 1208507 - RNA, 23 nt, Human
caugggggugauuggcaaugaug

SEQ ID NO: 1208508 - RNA, 21 nt, Human
ccaagggccagaacuuaagau

SEQ ID NO: 1208509 - RNA, 18 nt, Human
cuaccucugucucccuaa

SEQ ID NO: 1208510 - RNA, 24 nt, Human
gaaccagaggcagacagggccaga

SEQ ID NO: 1208511 - RNA, 18 nt, Human
gaauggaggagaucugga

SEQ ID NO: 1208512 - RNA, 19 nt, Human
gagagcacagccaagggcc

SEQ ID NO: 1208513 - RNA, 21 nt, Human
gcaaugauguaguuguguuug

SEQ ID NO: 1208514 - RNA, 20 nt, Human
gcuccccuccacuuucagau

SEQ ID NO: 1208515 - RNA, 18 nt, Human
ggaaaauccgagcaaugc

SEQ ID NO: 1208516 - RNA, 20 nt, Human
uacccaagcugaacgccugc

SEQ ID NO: 1208517 - RNA, 21 nt, Human
ucagaugggugaauggaggag

SEQ ID NO: 1208518 - RNA, 20 nt, Human
uccaaaauauccuuucuaag

SEQ ID NO: 1208519 - RNA, 19 nt, Human
ucuaaggucccuacaaagg

SEQ ID NO: 1208520 - RNA, 21 nt, Human
ucugucucccuaacaucuggg

SEQ ID NO: 1208521 - RNA, 20 nt, Human
ugaagacaccaaaagagaga

SEQ ID NO: 1208522 - RNA, 24 nt, Human
ugaugcaggaaccagaggcagaca

SEQ ID NO: 1208523 - RNA, 20 nt, Human
ugccaccuugacugugggug

SEQ ID NO: 1208524 - RNA, 21 nt, Human
uggaaagggcucaaggugaug

SEQ ID NO: 1208525 - RNA, 19 nt, Human
ugggaaaauccgagcaaug

SEQ ID NO: 1208526 - RNA, 22 nt, Human
uguuugggagaaagaucaugag

SEQ ID NO: 1208527 - RNA, 23 nt, Human
uuacugggaaguaauuucggaaa

SEQ ID NO: 1208528 - RNA, 23 nt, Human
uuggcaaugauguaguuguguuu

SEQ ID NO: 1208529 - RNA, 20 nt, Human
acccguuucaccacccuccc

SEQ ID NO: 1208530 - RNA, 21 nt, Human
agcccccagccccaaucccag

SEQ ID NO: 1208531 - RNA, 20 nt, Human
cagcccccagccccaauccc

SEQ ID NO: 1208532 - RNA, 20 nt, Human
cccagccccaaucccaguac

SEQ ID NO: 1208533 - RNA, 23 nt, Human
ccccagccccaaucccaguaccc

SEQ ID NO: 1208534 - RNA, 23 nt, Human
cccccagccccaaucccaguacc

SEQ ID NO: 1208535 - RNA, 22 nt, Human
ccucuuagacagcccccagccc

SEQ ID NO: 1208536 - RNA, 21 nt, Human
ucuuagacagcccccagcccc

SEQ ID NO: 1208537 - RNA, 23 nt, Human
uuccaguugucagcuuuuuuguu

SEQ ID NO: 1208538 - RNA, 19 nt, Human
agggaugggcuucguuugu

SEQ ID NO: 1208539 - RNA, 19 nt, Human
auccaaccaguuguucugg

SEQ ID NO: 1208540 - RNA, 24 nt, Human
caagauucugacucgguuggucca

SEQ ID NO: 1208541 - RNA, 18 nt, Human
caaggggccgcagccaau

SEQ ID NO: 1208542 - RNA, 23 nt, Human
caccagagaacgccacaagcucc

SEQ ID NO: 1208543 - RNA, 18 nt, Human
cagccaauagggcaggca

SEQ ID NO: 1208544 - RNA, 23 nt, Human
caggcaggcugguucccucccaa

SEQ ID NO: 1208545 - RNA, 26 nt, Human
ccaaugccuggugggucuagaccaag

SEQ ID NO: 1208546 - RNA, 20 nt, Human
ccgcagccaauagggcaggc

SEQ ID NO: 1208547 - RNA, 24 nt, Human
cucccaagaguaauccaaccaguu

SEQ ID NO: 1208548 - RNA, 21 nt, Human
cucccaggcacugcugcugca

SEQ ID NO: 1208549 - RNA, 18 nt, Human
gaccaagauucugacucg

SEQ ID NO: 1208550 - RNA, 20 nt, Human
gggggcccaagcaggggugu

SEQ ID NO: 1208551 - RNA, 23 nt, Human
gucuagaccaagauucugacucg

SEQ ID NO: 1208552 - RNA, 20 nt, Human
gugggucuagaccaagauuc

SEQ ID NO: 1208553 - RNA, 19 nt, Human
gugggucuagaccaaugcc

SEQ ID NO: 1208554 - RNA, 19 nt, Human
ucccaagaguaauccaacc

SEQ ID NO: 1208555 - RNA, 22 nt, Human
ugguccagggggcccaagcagg

SEQ ID NO: 1208556 - RNA, 19 nt, Human
agggaugggcuucguuugu

SEQ ID NO: 1208557 - RNA, 19 nt, Human
auccaaccaguuguucugg

SEQ ID NO: 1208558 - RNA, 24 nt, Human
caagauucugacucgguuggucca

SEQ ID NO: 1208559 - RNA, 18 nt, Human
caaggggccgcagccaau

SEQ ID NO: 1208560 - RNA, 23 nt, Human
caccagagaacgccacaagcucc

SEQ ID NO: 1208561 - RNA, 18 nt, Human
cagccaauagggcaggca

SEQ ID NO: 1208562 - RNA, 23 nt, Human
caggcaggcugguucccucccaa

SEQ ID NO: 1208563 - RNA, 26 nt, Human
ccaaugccuggugggucuagaccaag

SEQ ID NO: 1208564 - RNA, 20 nt, Human
ccgcagccaauagggcaggc

SEQ ID NO: 1208565 - RNA, 24 nt, Human
cucccaagaguaauccaaccaguu

SEQ ID NO: 1208566 - RNA, 21 nt, Human
cucccaggcacugcugcugca

SEQ ID NO: 1208567 - RNA, 18 nt, Human
gaccaagauucugacucg

SEQ ID NO: 1208568 - RNA, 20 nt, Human
gggggcccaagcaggggugu

SEQ ID NO: 1208569 - RNA, 23 nt, Human
gucuagaccaagauucugacucg

SEQ ID NO: 1208570 - RNA, 19 nt, Human
gugggucuagaccaaugcc

SEQ ID NO: 1208571 - RNA, 19 nt, Human
ucccaagaguaauccaacc

SEQ ID NO: 1208572 - RNA, 22 nt, Human
ugguccagggggcccaagcagg

SEQ ID NO: 1208573 - RNA, 22 nt, Human
uggugggucuagaccaagauuc

SEQ ID NO: 1208574 - RNA, 19 nt, Human
aagccccuggguccugccu

SEQ ID NO: 1208575 - RNA, 23 nt, Human
aagcuccaaaggcaucccaagcc

SEQ ID NO: 1208576 - RNA, 21 nt, Human
acacaaaggcccagagaggcc

SEQ ID NO: 1208577 - RNA, 24 nt, Human
accacuuucaagaagagagugcca

SEQ ID NO: 1208578 - RNA, 18 nt, Human
acggggcugggaaccugc

SEQ ID NO: 1208579 - RNA, 22 nt, Human
acugccaggaccauguucucca

SEQ ID NO: 1208580 - RNA, 19 nt, Human
agaaaagcuccaaaggcaa

SEQ ID NO: 1208581 - RNA, 22 nt, Human
agacagggcaccgcuggaccug

SEQ ID NO: 1208582 - RNA, 20 nt, Human
agccucuaaaagccaccagc

SEQ ID NO: 1208583 - RNA, 24 nt, Human
agcgccaagaccggccaagaagga

SEQ ID NO: 1208584 - RNA, 26 nt, Human
agcgccaagaccggccaagaaggaca

SEQ ID NO: 1208585 - RNA, 20 nt, Human
aggcaugggcaggggaugcc

SEQ ID NO: 1208586 - RNA, 20 nt, Human
aggcccuuggccccagacag

SEQ ID NO: 1208587 - RNA, 22 nt, Human
auggcauagagguaaaggggcc

SEQ ID NO: 1208588 - RNA, 22 nt, Human
auuugccuugacccucagcugg

SEQ ID NO: 1208589 - RNA, 23 nt, Human
caccaggcccuuggccccagaca

SEQ ID NO: 1208590 - RNA, 20 nt, Human
cacuccugacuccccagccg

SEQ ID NO: 1208591 - RNA, 21 nt, Human
cacucuacugcucccccuggg

SEQ ID NO: 1208592 - RNA, 23 nt, Human
cacucuggaagccucuaaaagcc

SEQ ID NO: 1208593 - RNA, 18 nt, Human
cagcucaggaaagggcuc

SEQ ID NO: 1208594 - RNA, 20 nt, Human
cagcuccuggaacugcugcu

SEQ ID NO: 1208595 - RNA, 20 nt, Human
cagcugcccaagguccaagc

SEQ ID NO: 1208596 - RNA, 18 nt, Human
cagcugggaacccucccg

SEQ ID NO: 1208597 - RNA, 21 nt, Human
ccaaaggcaucccaagcccaa

SEQ ID NO: 1208598 - RNA, 22 nt, Human
ccaagcccaaugcaaagacuga

SEQ ID NO: 1208599 - RNA, 19 nt, Human
ccaggaccauguucuccag

SEQ ID NO: 1208600 - RNA, 24 nt, Human
cccaauggcauagagguaaagggg

SEQ ID NO: 1208601 - RNA, 20 nt, Human
cccacgcccaacucggcaca

SEQ ID NO: 1208602 - RNA, 23 nt, Human
cccagagaggcccccagacaugc

SEQ ID NO: 1208603 - RNA, 20 nt, Human
cccccgccgccacccacgcc

SEQ ID NO: 1208604 - RNA, 22 nt, Human
cccccgccgccacccacgccca

SEQ ID NO: 1208605 - RNA, 22 nt, Human
ccccuagggugcucuggggcag

SEQ ID NO: 1208606 - RNA, 19 nt, Human
ccccuggguccugccuggg

SEQ ID NO: 1208607 - RNA, 22 nt, Human
ccccuggguccugccugggcuu

SEQ ID NO: 1208608 - RNA, 22 nt, Human
cccgcagggcuccagccaugcu

SEQ ID NO: 1208609 - RNA, 22 nt, Human
cccgccgccacccacgcccaac

SEQ ID NO: 1208610 - RNA, 22 nt, Human
cccggaagccccuggguccugc

SEQ ID NO: 1208611 - RNA, 23 nt, Human
cccuggguccugccugggcugcu

SEQ ID NO: 1208612 - RNA, 18 nt, Human
cccuuggccccagacagg

SEQ ID NO: 1208613 - RNA, 19 nt, Human
ccgcagggcuccagccaug

SEQ ID NO: 1208614 - RNA, 20 nt, Human
ccgccgccacccacgcccaa

SEQ ID NO: 1208615 - RNA, 23 nt, Human
ccgccgccacccacgcccaacuc

SEQ ID NO: 1208616 - RNA, 21 nt, Human
ccucccggugcgggaagguug

SEQ ID NO: 1208617 - RNA, 19 nt, Human
ccucuaaaagccaccagcu

SEQ ID NO: 1208618 - RNA, 25 nt, Human
cgggaagguuggcggguaaggcccc

SEQ ID NO: 1208619 - RNA, 19 nt, Human
cgggacagggucuggcugc

SEQ ID NO: 1208620 - RNA, 23 nt, Human
cucuacugcucccccugggccca

SEQ ID NO: 1208621 - RNA, 19 nt, Human
cucugugcccggaagcccc

SEQ ID NO: 1208622 - RNA, 23 nt, Human
cugaacggggcugggaaccugcu

SEQ ID NO: 1208623 - RNA, 19 nt, Human
cugcccaagguccaagcga

SEQ ID NO: 1208624 - RNA, 22 nt, Human
cuggaaaaagcugaaguccacc

SEQ ID NO: 1208625 - RNA, 24 nt, Human
cuggaagccucuaaaagccaccag

SEQ ID NO: 1208626 - RNA, 24 nt, Human
cuggggccccccgcagggcuccag

SEQ ID NO: 1208627 - RNA, 23 nt, Human
cugugcccggaagccccuggguc

SEQ ID NO: 1208628 - RNA, 23 nt, Human
cugugcccggaagccccuggguc

SEQ ID NO: 1208629 - RNA, 21 nt, Human
gaaagacccccgccgccaccc

SEQ ID NO: 1208630 - RNA, 18 nt, Human
gaaauucaggcaaagcug

SEQ ID NO: 1208631 - RNA, 19 nt, Human
gaccuggggccgaggagga

SEQ ID NO: 1208632 - RNA, 18 nt, Human
gagcucugagagaccacu

SEQ ID NO: 1208633 - RNA, 20 nt, Human
gccacucuacugcucccccu

SEQ ID NO: 1208634 - RNA, 21 nt, Human
gcccggaagccccuggguccu

SEQ ID NO: 1208635 - RNA, 19 nt, Human
gcccugcagcaggcgagac

SEQ ID NO: 1208636 - RNA, 22 nt, Human
gcgagaccuggaugguccaugg

SEQ ID NO: 1208637 - RNA, 23 nt, Human
gcgccaagaccggccaagaagga

SEQ ID NO: 1208638 - RNA, 21 nt, Human
gcugcugguagcugcugcggg

SEQ ID NO: 1208639 - RNA, 21 nt, Human
gcugggaaccugcugcagaag

SEQ ID NO: 1208640 - RNA, 21 nt, Human
ggaccgggccagcucaggaaa

SEQ ID NO: 1208641 - RNA, 20 nt, Human
ggcacuguccaagaagauac

SEQ ID NO: 1208642 - RNA, 18 nt, Human
ggcagcuccuuugggacc

SEQ ID NO: 1208643 - RNA, 18 nt, Human
ggcauggggauggaaaga

SEQ ID NO: 1208644 - RNA, 23 nt, Human
ggcccuuggccccagacaggucc

SEQ ID NO: 1208645 - RNA, 20 nt, Human
gggacccucaauggagccag

SEQ ID NO: 1208646 - RNA, 20 nt, Human
gggcagcagcugcccaaggu

SEQ ID NO: 1208647 - RNA, 23 nt, Human
gggccaagcacacucuggaagcc

SEQ ID NO: 1208648 - RNA, 19 nt, Human
gggccgggacagggucugg

SEQ ID NO: 1208649 - RNA, 19 nt, Human
gggcuccagccaugcucag

SEQ ID NO: 1208650 - RNA, 22 nt, Human
ggggcugggaaccugcugcaga

SEQ ID NO: 1208651 - RNA, 21 nt, Human
gggugguaggcaugggcaggg

SEQ ID NO: 1208652 - RNA, 23 nt, Human
ggguguuuuaacuggaaaaagcu

SEQ ID NO: 1208653 - RNA, 19 nt, Human
guccaauggcauggggaug

SEQ ID NO: 1208654 - RNA, 23 nt, Human
ucaauggucccauuaaugagccu

SEQ ID NO: 1208655 - RNA, 20 nt, Human
uccaagcgagaggccacucu

SEQ ID NO: 1208656 - RNA, 18 nt, Human
uccauggcgggugguagg

SEQ ID NO: 1208657 - RNA, 24 nt, Human
ucccauuaaugagccuguacaugg

SEQ ID NO: 1208658 - RNA, 20 nt, Human
uccccggaaacacugggcug

SEQ ID NO: 1208659 - RNA, 21 nt, Human
uccccggaaacacugggcugg

SEQ ID NO: 1208660 - RNA, 21 nt, Human
ucccggugcgggaagguuggc

SEQ ID NO: 1208661 - RNA, 19 nt, Human
uccuggaacugcugcuugu

SEQ ID NO: 1208662 - RNA, 19 nt, Human
ucugagagaccacuguggc

SEQ ID NO: 1208663 - RNA, 22 nt, Human
ucuggaagccucuaaaagccac

SEQ ID NO: 1208664 - RNA, 18 nt, Human
ugacuauggaaagacccc

SEQ ID NO: 1208665 - RNA, 19 nt, Human
ugacuccccagccgcagcc

SEQ ID NO: 1208666 - RNA, 24 nt, Human
ugacuccccagccgcagccacucu

SEQ ID NO: 1208667 - RNA, 18 nt, Human
ugcacgcuaccagcaguc

SEQ ID NO: 1208668 - RNA, 19 nt, Human
ugcaugcacgcuaccagca

SEQ ID NO: 1208669 - RNA, 21 nt, Human
ugcaugggccgggacaggguc

SEQ ID NO: 1208670 - RNA, 19 nt, Human
ugcccggaagccccugggu

SEQ ID NO: 1208671 - RNA, 18 nt, Human
uggaaaaagcugaagucc

SEQ ID NO: 1208672 - RNA, 24 nt, Human
uggaaaaagcugaaguccaccucg

SEQ ID NO: 1208673 - RNA, 21 nt, Human
uggcauggggauggaaagaaa

SEQ ID NO: 1208674 - RNA, 24 nt, Human
uggcugugcccaucugccgaacaa

SEQ ID NO: 1208675 - RNA, 24 nt, Human
uggggccccccgcaggggggacac

SEQ ID NO: 1208676 - RNA, 23 nt, Human
uggggggcagaacaaacagguug

SEQ ID NO: 1208677 - RNA, 24 nt, Human
uggggggcagaacaaacagguuga

SEQ ID NO: 1208678 - RNA, 20 nt, Human
ugucguggcugugcccaucu

SEQ ID NO: 1208679 - RNA, 18 nt, Human
uucucagcuccuggaacu

SEQ ID NO: 1208680 - RNA, 21 nt, Human
uuggccccagacagguccaaa

SEQ ID NO: 1208681 - RNA, 20 nt, Human
acugaguguuugagccuauc

SEQ ID NO: 1208682 - RNA, 21 nt, Human
uugagccuaucagagacucau

SEQ ID NO: 1208683 - RNA, 21 nt, Human
aagagcccacgccagcccgcc

SEQ ID NO: 1208684 - RNA, 22 nt, Human
accgcuggggguuuggccucaa

SEQ ID NO: 1208685 - RNA, 18 nt, Human
agcaccggcaaggggcug

SEQ ID NO: 1208686 - RNA, 23 nt, Human
aggcgcacgugggcaagaagucc

SEQ ID NO: 1208687 - RNA, 22 nt, Human
ccggcacccgggcccuucucac

SEQ ID NO: 1208688 - RNA, 20 nt, Human
cggaauagcgggaccggcac

SEQ ID NO: 1208689 - RNA, 19 nt, Human
cucccgccgccucucagcc

SEQ ID NO: 1208690 - RNA, 19 nt, Human
cucucagccuaucugcacc

SEQ ID NO: 1208691 - RNA, 19 nt, Human
cuuggaggcgggccguucc

SEQ ID NO: 1208692 - RNA, 22 nt, Human
uccccgagguugucuuggaggc

SEQ ID NO: 1208693 - RNA, 21 nt, Human
ugagacuugccacccugucuu

SEQ ID NO: 1208694 - RNA, 19 nt, Human
uggaggcgggccguucccu

SEQ ID NO: 1208695 - RNA, 19 nt, Human
uggcagcaccggcaagggg

SEQ ID NO: 1208696 - RNA, 21 nt, Human
uggggguuuggccucaaacuu

SEQ ID NO: 1208697 - RNA, 23 nt, Human
ugggguaggaugcccccucccca

SEQ ID NO: 1208698 - RNA, 25 nt, Human
ugggguaggaugcccccuccccauu

SEQ ID NO: 1208699 - RNA, 21 nt, Human
uucucacguggcagcaccggc

SEQ ID NO: 1208700 - RNA, 22 nt, Human
aagaacugaagccuccuuggcc

SEQ ID NO: 1208701 - RNA, 19 nt, Human
aagaagaugccuaggcuuu

SEQ ID NO: 1208702 - RNA, 22 nt, Human
aagaauaaagcugucaaggaaa

SEQ ID NO: 1208703 - RNA, 21 nt, Human
aagacccuuucuacuccaccc

SEQ ID NO: 1208704 - RNA, 24 nt, Human
aagacccuuucuacuccaccccaa

SEQ ID NO: 1208705 - RNA, 23 nt, Human
aaggagcaaggacagaggucagg

SEQ ID NO: 1208706 - RNA, 18 nt, Human
aaggagcugcuucgcagg

SEQ ID NO: 1208707 - RNA, 20 nt, Human
accacuuucacaaagaauaa

SEQ ID NO: 1208708 - RNA, 21 nt, Human
accacuuucacaaagaauaaa

SEQ ID NO: 1208709 - RNA, 23 nt, Human
accccaaaagauagccgcuuugu

SEQ ID NO: 1208710 - RNA, 26 nt, Human
accccaaaagauagccgcuuugugga

SEQ ID NO: 1208711 - RNA, 18 nt, Human
acccccacccccacccca

SEQ ID NO: 1208712 - RNA, 28 nt, Human
acccccacccccaccccaguuuucccac

SEQ ID NO: 1208713 - RNA, 19 nt, Human
acgaacucugaaacaagag

SEQ ID NO: 1208714 - RNA, 19 nt, Human
agaaaagcuuaaucugcag

SEQ ID NO: 1208715 - RNA, 21 nt, Human
agaagucccacccccaccccc

SEQ ID NO: 1208716 - RNA, 18 nt, Human
agguggcucugccuuccu

SEQ ID NO: 1208717 - RNA, 25 nt, Human
caaagaacugaagccuccuuggccg

SEQ ID NO: 1208718 - RNA, 24 nt, Human
caaucagcugcacagaauucaagu

SEQ ID NO: 1208719 - RNA, 23 nt, Human
cacagaaaacagacccguaggcu

SEQ ID NO: 1208720 - RNA, 24 nt, Human
cacccccaccccaguuuucccacu

SEQ ID NO: 1208721 - RNA, 24 nt, Human
cagaugcggcuuugauggccugug

SEQ ID NO: 1208722 - RNA, 22 nt, Human
cagccucugcaaccagugcccu

SEQ ID NO: 1208723 - RNA, 20 nt, Human
cagcuguggauuccgccuuc

SEQ ID NO: 1208724 - RNA, 26 nt, Human
ccaagacccuuucuacuccaccccaa

SEQ ID NO: 1208725 - RNA, 25 nt, Human
ccagugcccuccgugagaaagcucc

SEQ ID NO: 1208726 - RNA, 24 nt, Human
cccacccccaccccaguuuuccca

SEQ ID NO: 1208727 - RNA, 25 nt, Human
cccacccccaccccaguuuucccaa

SEQ ID NO: 1208728 - RNA, 18 nt, Human
cccacccccacccccacc

SEQ ID NO: 1208729 - RNA, 21 nt, Human
cccacccccacccccacccca

SEQ ID NO: 1208730 - RNA, 20 nt, Human
ccccaaaagauagccgcuuu

SEQ ID NO: 1208731 - RNA, 23 nt, Human
cccccacccccaccccaguuuuc

SEQ ID NO: 1208732 - RNA, 24 nt, Human
cccccacccccaccccaguuuucc

SEQ ID NO: 1208733 - RNA, 22 nt, Human
cccuuucuacuccaccccaaaa

SEQ ID NO: 1208734 - RNA, 18 nt, Human
ccucugcaaccagugccc

SEQ ID NO: 1208735 - RNA, 23 nt, Human
ccuuccuaucucagcaggggacg

SEQ ID NO: 1208736 - RNA, 19 nt, Human
ccuucuggucuccgccuug

SEQ ID NO: 1208737 - RNA, 21 nt, Human
cgcuaagcgacccggggcugc

SEQ ID NO: 1208738 - RNA, 21 nt, Human
cggcaaagaacugaagccucc

SEQ ID NO: 1208739 - RNA, 22 nt, Human
cggcaaagaacugaagccuccu

SEQ ID NO: 1208740 - RNA, 24 nt, Human
cguaggcugcagggagaaggagca

SEQ ID NO: 1208741 - RNA, 21 nt, Human
cgucgccagcuguggauuccg

SEQ ID NO: 1208742 - RNA, 20 nt, Human
cucugcaaccagugcccucc

SEQ ID NO: 1208743 - RNA, 22 nt, Human
cugaauauagguaaggguucac

SEQ ID NO: 1208744 - RNA, 22 nt, Human
cugguggacagcagaugcuccc

SEQ ID NO: 1208745 - RNA, 24 nt, Human
gaagucccacccccacccccaccc

SEQ ID NO: 1208746 - RNA, 20 nt, Human
gaggucaggcuaucucccuc

SEQ ID NO: 1208747 - RNA, 21 nt, Human
gcaguuagaagucccaccccc

SEQ ID NO: 1208748 - RNA, 23 nt, Human
ggcaaagaacugaagccuccuug

SEQ ID NO: 1208749 - RNA, 20 nt, Human
ggucuccgccuugcaggcgg

SEQ ID NO: 1208750 - RNA, 20 nt, Human
uaaauuauaccacuuucaca

SEQ ID NO: 1208751 - RNA, 18 nt, Human
uaaggcagccgcggcggc

SEQ ID NO: 1208752 - RNA, 18 nt, Human
uacuucacuuuuuguacc

SEQ ID NO: 1208753 - RNA, 19 nt, Human
uagcagagacgaggcagcg

SEQ ID NO: 1208754 - RNA, 19 nt, Human
uagggaaauaucacucauc

SEQ ID NO: 1208755 - RNA, 22 nt, Human
uagguauagggaaauaucacuc

SEQ ID NO: 1208756 - RNA, 24 nt, Human
uauaccacuuucacaaagaauaaa

SEQ ID NO: 1208757 - RNA, 23 nt, Human
uaucacucaucaaaggguugaca

SEQ ID NO: 1208758 - RNA, 25 nt, Human
uaucucagcaggggacgaacucuga

SEQ ID NO: 1208759 - RNA, 21 nt, Human
ucaggcuaucucccuccaaug

SEQ ID NO: 1208760 - RNA, 25 nt, Human
uccaagacccuuucuacuccacccc

SEQ ID NO: 1208761 - RNA, 22 nt, Human
uccgggguacggucaaccucug

SEQ ID NO: 1208762 - RNA, 21 nt, Human
uccuuggccgcuaagcgaccc

SEQ ID NO: 1208763 - RNA, 19 nt, Human
ugacauagaagcucacaac

SEQ ID NO: 1208764 - RNA, 18 nt, Human
ugauggccugugcuccgc

SEQ ID NO: 1208765 - RNA, 23 nt, Human
ugcaggcggcaaagaacugaagc

SEQ ID NO: 1208766 - RNA, 26 nt, Human
ugcccgaaggagcugcuucgcagggg

SEQ ID NO: 1208767 - RNA, 24 nt, Human
ugucaaggaaaugggcacacacag

SEQ ID NO: 1208768 - RNA, 25 nt, Human
uucaugcaguuagaagucccacccc

SEQ ID NO: 1208769 - RNA, 18 nt, Human
uuccuaucucagcagggg

SEQ ID NO: 1208770 - RNA, 31 nt, Human
uuguacuucacuuuuuguaccuuuuuuauuu

SEQ ID NO: 1208771 - RNA, 23 nt, Human
uuuggugaaaaaauacagauaga

SEQ ID NO: 1208772 - RNA, 23 nt, Human
cacagccucagccugcguucccc

SEQ ID NO: 1208773 - RNA, 23 nt, Human
gaaccacagccucagccugcguu

SEQ ID NO: 1208774 - RNA, 23 nt, Human
acccuggaaauauaaccuucugu

SEQ ID NO: 1208775 - RNA, 21 nt, Human
auccugccaguucccuguggu

SEQ ID NO: 1208776 - RNA, 19 nt, Human
auucugccaacccccaacu

SEQ ID NO: 1208777 - RNA, 23 nt, Human
caaauucugccaacccccaacuu

SEQ ID NO: 1208778 - RNA, 21 nt, Human
cacaggaaaagaguggguccc

SEQ ID NO: 1208779 - RNA, 20 nt, Human
gccaacccccaacuugggac

SEQ ID NO: 1208780 - RNA, 18 nt, Human
ggcacuggaagcugucua

SEQ ID NO: 1208781 - RNA, 23 nt, Human
uaagcaaauucugccaaccccca

SEQ ID NO: 1208782 - RNA, 18 nt, Human
uacuuguuucuucaagcg

SEQ ID NO: 1208783 - RNA, 26 nt, Human
ucaagcgggggggccagagcauagcc

SEQ ID NO: 1208784 - RNA, 22 nt, Human
uccagcaccuguagucuucuua

SEQ ID NO: 1208785 - RNA, 23 nt, Human
uccccagaauccugccaguuccc

SEQ ID NO: 1208786 - RNA, 19 nt, Human
ucccuggguagcugcagaa

SEQ ID NO: 1208787 - RNA, 24 nt, Human
ucccuggguagcugcagaaacccu

SEQ ID NO: 1208788 - RNA, 22 nt, Human
uccuuauaacagccagugguug

SEQ ID NO: 1208789 - RNA, 21 nt, Human
ucuccaggccaauccauucuu

SEQ ID NO: 1208790 - RNA, 21 nt, Human
ucugccaacccccaacuuggg

SEQ ID NO: 1208791 - RNA, 18 nt, Human
ucuucaagcgggggggcc

SEQ ID NO: 1208792 - RNA, 18 nt, Human
ugccaguucccugugguu

SEQ ID NO: 1208793 - RNA, 19 nt, Human
uggcaagcacaggaaaaga

SEQ ID NO: 1208794 - RNA, 21 nt, Human
ugggacaauggaaaugagggu

SEQ ID NO: 1208795 - RNA, 22 nt, Human
uggguagcugcagaaacccugg

SEQ ID NO: 1208796 - RNA, 19 nt, Human
agaaccaaggggauggccc

SEQ ID NO: 1208797 - RNA, 19 nt, Human
auccaaacauguguuggag

SEQ ID NO: 1208798 - RNA, 22 nt, Human
caaggggauggcccauccaaac

SEQ ID NO: 1208799 - RNA, 21 nt, Human
cccauccaaacauguguugga

SEQ ID NO: 1208800 - RNA, 18 nt, Human
ggagauauuccuaaagcu

SEQ ID NO: 1208801 - RNA, 20 nt, Human
ucagcuuucacuuuggcuuc

SEQ ID NO: 1208802 - RNA, 23 nt, Human
ucagcuuucacuuuggcuuccga

SEQ ID NO: 1208803 - RNA, 19 nt, Human
uccuguugcuguuuucacc

SEQ ID NO: 1208804 - RNA, 19 nt, Human
uggcccauccaaacaugug

SEQ ID NO: 1208805 - RNA, 26 nt, Human
ugucuuguucaucugcacagucuuca

SEQ ID NO: 1208806 - RNA, 20 nt, Human
uucagcuuucacuuuggcuu

SEQ ID NO: 1208807 - RNA, 22 nt, Human
uuggagauauuccuaaagcuug

SEQ ID NO: 1208808 - RNA, 19 nt, Human
aaaggggaccuccguggag

SEQ ID NO: 1208809 - RNA, 19 nt, Human
aacccucuuucgcuaaugg

SEQ ID NO: 1208810 - RNA, 23 nt, Human
aucuugaaacaccuucuccucca

SEQ ID NO: 1208811 - RNA, 23 nt, Human
auggaguuagaagagcaguuucc

SEQ ID NO: 1208812 - RNA, 22 nt, Human
caagucaccaucuugaaacacc

SEQ ID NO: 1208813 - RNA, 22 nt, Human
ccaagucaccaucuugaaacac

SEQ ID NO: 1208814 - RNA, 19 nt, Human
ccaucuugaaacaccuucu

SEQ ID NO: 1208815 - RNA, 19 nt, Human
ccuccagcgggaccugauc

SEQ ID NO: 1208816 - RNA, 18 nt, Human
cuccagcgggaccugauc

SEQ ID NO: 1208817 - RNA, 24 nt, Human
cucuuucgcuaauggaguuagaag

SEQ ID NO: 1208818 - RNA, 20 nt, Human
cugugaaauccacggauagu

SEQ ID NO: 1208819 - RNA, 18 nt, Human
gaccugauccgauuguga

SEQ ID NO: 1208820 - RNA, 18 nt, Human
gagcaguuuccagaaacc

SEQ ID NO: 1208821 - RNA, 22 nt, Human
gagcgucagcugugucuucucg

SEQ ID NO: 1208822 - RNA, 18 nt, Human
ugugucuucucgucuguc

SEQ ID NO: 1208823 - RNA, 19 nt, Human
uuccagaaaccaagucacc

SEQ ID NO: 1208824 - RNA, 21 nt, Human
uuccagaaaccaagucaccau

SEQ ID NO: 1208825 - RNA, 19 nt, Human
uugaaacaccuucuccucc

SEQ ID NO: 1208826 - RNA, 19 nt, Human
aaaggggaccuccguggag

SEQ ID NO: 1208827 - RNA, 19 nt, Human
aacccucuuucgcuaaugg

SEQ ID NO: 1208828 - RNA, 23 nt, Human
aucuugaaacaccuucuccucca

SEQ ID NO: 1208829 - RNA, 23 nt, Human
auggaguuagaagagcaguuucc

SEQ ID NO: 1208830 - RNA, 22 nt, Human
caagucaccaucuugaaacacc

SEQ ID NO: 1208831 - RNA, 22 nt, Human
ccaagucaccaucuugaaacac

SEQ ID NO: 1208832 - RNA, 19 nt, Human
ccaucuugaaacaccuucu

SEQ ID NO: 1208833 - RNA, 19 nt, Human
ccuccagcgggaccugauc

SEQ ID NO: 1208834 - RNA, 18 nt, Human
cuccagcgggaccugauc

SEQ ID NO: 1208835 - RNA, 24 nt, Human
cucuuucgcuaauggaguuagaag

SEQ ID NO: 1208836 - RNA, 20 nt, Human
cugugaaauccacggauagu

SEQ ID NO: 1208837 - RNA, 18 nt, Human
gaccugauccgauuguga

SEQ ID NO: 1208838 - RNA, 18 nt, Human
gagcaguuuccagaaacc

SEQ ID NO: 1208839 - RNA, 22 nt, Human
gagcgucagcugugucuucucg

SEQ ID NO: 1208840 - RNA, 18 nt, Human
ugaaacaccuucuccucc

SEQ ID NO: 1208841 - RNA, 18 nt, Human
ugugucuucucgucuguc

SEQ ID NO: 1208842 - RNA, 19 nt, Human
uuccagaaaccaagucacc

SEQ ID NO: 1208843 - RNA, 21 nt, Human
uuccagaaaccaagucaccau

SEQ ID NO: 1208844 - RNA, 19 nt, Human
uugaaacaccuucuccucc

SEQ ID NO: 1208845 - RNA, 22 nt, Human
aaaaauagaaaucccucuggcc

SEQ ID NO: 1208846 - RNA, 19 nt, Human
aaacacucaaagcccucuc

SEQ ID NO: 1208847 - RNA, 20 nt, Human
aaacacucaaagcccucucg

SEQ ID NO: 1208848 - RNA, 18 nt, Human
agaaacacucaaagcccu

SEQ ID NO: 1208849 - RNA, 22 nt, Human
auccaccggcaaaaauagaaau

SEQ ID NO: 1208850 - RNA, 20 nt, Human
cacucaaagcccucucguuu

SEQ ID NO: 1208851 - RNA, 24 nt, Human
cauaagacauagaacuagggcaua

SEQ ID NO: 1208852 - RNA, 20 nt, Human
ccaucagaaacacucaaagc

SEQ ID NO: 1208853 - RNA, 22 nt, Human
cggcaaaaauagaaaucccucu

SEQ ID NO: 1208854 - RNA, 24 nt, Human
cugaaggccuccagcuggccccag

SEQ ID NO: 1208855 - RNA, 21 nt, Human
cuguccugugacccacauaua

SEQ ID NO: 1208856 - RNA, 20 nt, Human
gcccuggaggugagggcagg

SEQ ID NO: 1208857 - RNA, 21 nt, Human
gcugugccuagggcaggaagg

SEQ ID NO: 1208858 - RNA, 20 nt, Human
ggaggugagggcaggguugg

SEQ ID NO: 1208859 - RNA, 23 nt, Human
ggcaggaaggggguuccuuccag

SEQ ID NO: 1208860 - RNA, 19 nt, Human
ggcccuggaggugagggca

SEQ ID NO: 1208861 - RNA, 24 nt, Human
ggcuggggaaggagcagucccagg

SEQ ID NO: 1208862 - RNA, 18 nt, Human
ggguuccuuccagucucc

SEQ ID NO: 1208863 - RNA, 25 nt, Human
guacugaaggccuccagcuggcccc

SEQ ID NO: 1208864 - RNA, 20 nt, Human
ucccaggcccuggaggugag

SEQ ID NO: 1208865 - RNA, 22 nt, Human
uccugugacccacauauacuua

SEQ ID NO: 1208866 - RNA, 21 nt, Human
ucggugcuccagcuguucagu

SEQ ID NO: 1208867 - RNA, 24 nt, Human
ucuccuggcccuccuugcucuaca

SEQ ID NO: 1208868 - RNA, 21 nt, Human
ugaaaaaaauagggcuggaga

SEQ ID NO: 1208869 - RNA, 22 nt, Human
ugaaaugagugcccaggguguc

SEQ ID NO: 1208870 - RNA, 21 nt, Human
ugacccugguccucucucccu

SEQ ID NO: 1208871 - RNA, 20 nt, Human
ugagugcccagggugucggu

SEQ ID NO: 1208872 - RNA, 23 nt, Human
ugagugcccagggugucggugcu

SEQ ID NO: 1208873 - RNA, 22 nt, Human
uggcuggggcuguacugaaggc

SEQ ID NO: 1208874 - RNA, 19 nt, Human
ugguccucucucccugccc

SEQ ID NO: 1208875 - RNA, 23 nt, Human
uguaauagugaaaaaaauagggc

SEQ ID NO: 1208876 - RNA, 22 nt, Human
ugucggugcuccagcuguucag

SEQ ID NO: 1208877 - RNA, 24 nt, Human
uuaaucccaauaacauaagacaua

SEQ ID NO: 1208878 - RNA, 19 nt, Human
uuugaaauggacucuggug

SEQ ID NO: 1208879 - RNA, 21 nt, Human
cccgucccacguggccagggg

SEQ ID NO: 1208880 - RNA, 20 nt, Human
ccgaaaacccaugcagcccc

SEQ ID NO: 1208881 - RNA, 26 nt, Human
cucacagcuguccuggcaugagggcu

SEQ ID NO: 1208882 - RNA, 22 nt, Human
cuccuggccaugccaugguugc

SEQ ID NO: 1208883 - RNA, 23 nt, Human
cuccuggccaugccaugguugcc

SEQ ID NO: 1208884 - RNA, 25 nt, Human
cuccuggccaugccaugguugcccg

SEQ ID NO: 1208885 - RNA, 21 nt, Human
gccaggggagggagaggucau

SEQ ID NO: 1208886 - RNA, 23 nt, Human
ucccacguggccaggggagggag

SEQ ID NO: 1208887 - RNA, 20 nt, Human
uccuggcaugagggcuccug

SEQ ID NO: 1208888 - RNA, 24 nt, Human
ucuugccaaguaccaucauguccc

SEQ ID NO: 1208889 - RNA, 21 nt, Human
ugccaaguaccaucauguccc

SEQ ID NO: 1208890 - RNA, 21 nt, Human
uggcaugagggcuccuggcca

SEQ ID NO: 1208891 - RNA, 20 nt, Human
uggggcagagacugccuguc

SEQ ID NO: 1208892 - RNA, 18 nt, Human
ugucccaaggugaugcug

SEQ ID NO: 1208893 - RNA, 24 nt, Human
aaaaagaaagucuggauuuuaaaa

SEQ ID NO: 1208894 - RNA, 27 nt, Human
aaaaagacaaaacacauuucaugcaga

SEQ ID NO: 1208895 - RNA, 19 nt, Human
aaacuugaaaauacucaug

SEQ ID NO: 1208896 - RNA, 21 nt, Human
aaacuugaaaauacucaugaa

SEQ ID NO: 1208897 - RNA, 18 nt, Human
aagaacuaauaaaauccu

SEQ ID NO: 1208898 - RNA, 26 nt, Human
aagaaugcauaccagaaccggggccc

SEQ ID NO: 1208899 - RNA, 21 nt, Human
aagcuuuucaauucuaguugg

SEQ ID NO: 1208900 - RNA, 19 nt, Human
aaguuucagacugcuacug

SEQ ID NO: 1208901 - RNA, 20 nt, Human
aauccaugauucuuuucccu

SEQ ID NO: 1208902 - RNA, 21 nt, Human
aauguucuuuaccugucuuag

SEQ ID NO: 1208903 - RNA, 20 nt, Human
acauguagaaaaagaaaguc

SEQ ID NO: 1208904 - RNA, 23 nt, Human
agaaaaagaaagucuggauuuua

SEQ ID NO: 1208905 - RNA, 24 nt, Human
agacaaaacacauuucaugcagaa

SEQ ID NO: 1208906 - RNA, 27 nt, Human
aggaauauuagaggaagauuucauagc

SEQ ID NO: 1208907 - RNA, 20 nt, Human
aggaaucaaaaucaaaucca

SEQ ID NO: 1208908 - RNA, 18 nt, Human
caaaagcaggauccucca

SEQ ID NO: 1208909 - RNA, 19 nt, Human
cacuaguaauaaaaaaaga

SEQ ID NO: 1208910 - RNA, 24 nt, Human
cacuaguaauaaaaaaagacaaaa

SEQ ID NO: 1208911 - RNA, 26 nt, Human
cacuguguaaauuucaaggcaagguu

SEQ ID NO: 1208912 - RNA, 19 nt, Human
cagaauacaaagauaaaug

SEQ ID NO: 1208913 - RNA, 22 nt, Human
caggauccuccagauacuuuuc

SEQ ID NO: 1208914 - RNA, 22 nt, Human
caguaugaaaaacuugaaaaua

SEQ ID NO: 1208915 - RNA, 25 nt, Human
cauguagaaaaagaaagucuggauu

SEQ ID NO: 1208916 - RNA, 18 nt, Human
cauuuucaguugcugcug

SEQ ID NO: 1208917 - RNA, 24 nt, Human
ccaguuaaaauaaaaacuaucuca

SEQ ID NO: 1208918 - RNA, 23 nt, Human
ccuccagauacuuuucccgaucu

SEQ ID NO: 1208919 - RNA, 21 nt, Human
cuaaguuaucuaaauaugaug

SEQ ID NO: 1208920 - RNA, 24 nt, Human
cuaucuggcuuuaaccaauccauu

SEQ ID NO: 1208921 - RNA, 19 nt, Human
cucacauguagaaaaagaa

SEQ ID NO: 1208922 - RNA, 21 nt, Human
cucacauguagaaaaagaaag

SEQ ID NO: 1208923 - RNA, 28 nt, Human
cuuaaacacuaguaauaaaaaaagacaa

SEQ ID NO: 1208924 - RNA, 25 nt, Human
gaaaaacuugaaaauacucaugaau

SEQ ID NO: 1208925 - RNA, 21 nt, Human
gauacuuuucccgaucuccau

SEQ ID NO: 1208926 - RNA, 23 nt, Human
gcaauaaaggaaucaaaaucaaa

SEQ ID NO: 1208927 - RNA, 24 nt, Human
gcagaauacaaagauaaaugucug

SEQ ID NO: 1208928 - RNA, 19 nt, Human
gcuacacuccagaucgcaa

SEQ ID NO: 1208929 - RNA, 21 nt, Human
uacaguaugaaaaacuugaaa

SEQ ID NO: 1208930 - RNA, 19 nt, Human
uacucaugaaugaauaaug

SEQ ID NO: 1208931 - RNA, 22 nt, Human
uagaaaaaauagcuauuuucau

SEQ ID NO: 1208932 - RNA, 20 nt, Human
uagauaacacauguguacca

SEQ ID NO: 1208933 - RNA, 18 nt, Human
uaguaaugguucacucuc

SEQ ID NO: 1208934 - RNA, 20 nt, Human
uagugcauuucuuuucuccu

SEQ ID NO: 1208935 - RNA, 19 nt, Human
uaugaaaaacuugaaaaua

SEQ ID NO: 1208936 - RNA, 24 nt, Human
uauuaacacuucacuauaaagaau

SEQ ID NO: 1208937 - RNA, 25 nt, Human
uauuuguuuucaugaugaucugggu

SEQ ID NO: 1208938 - RNA, 20 nt, Human
ugagcaaaugacaugccagu

SEQ ID NO: 1208939 - RNA, 22 nt, Human
ugagguagauaacacaugugua

SEQ ID NO: 1208940 - RNA, 24 nt, Human
ugcaauaaaggaaucaaaaucaaa

SEQ ID NO: 1208941 - RNA, 21 nt, Human
ugcugcugguaucauguguuu

SEQ ID NO: 1208942 - RNA, 19 nt, Human
ugggaacuaaguugaauag

SEQ ID NO: 1208943 - RNA, 22 nt, Human
uguaaauuucaaggcaagguuu

SEQ ID NO: 1208944 - RNA, 19 nt, Human
ugugaugcuuccuuuagug

SEQ ID NO: 1208945 - RNA, 20 nt, Human
uuauuaagaauaguuuacua

SEQ ID NO: 1208946 - RNA, 20 nt, Human
uucaggggucaaccuguacu

SEQ ID NO: 1208947 - RNA, 23 nt, Human
uucaugcagaauacaaagauaaa

SEQ ID NO: 1208948 - RNA, 18 nt, Human
uuuccuguuuuucuuggc

SEQ ID NO: 1208949 - RNA, 22 nt, Human
uuugccacauacucuuguuacc

SEQ ID NO: 1208950 - RNA, 20 nt, Human
uuuucaguugcugcugguau

SEQ ID NO: 1208951 - RNA, 25 nt, Human
uuuucuuggcuuacugacuuugaua

SEQ ID NO: 1208952 - RNA, 25 nt, Human
uuuuucuuugcuuguucuuuccaau

SEQ ID NO: 1208953 - RNA, 22 nt, Human
aaacuggaauuccuugaaucca

SEQ ID NO: 1208954 - RNA, 21 nt, Human
aagcaagagaugagaaaaaga

SEQ ID NO: 1208955 - RNA, 29 nt, Human
aagcaagagaugagaaaaagagggacccc

SEQ ID NO: 1208956 - RNA, 25 nt, Human
aauacaacucaccaaauguuuugcu

SEQ ID NO: 1208957 - RNA, 25 nt, Human
agaaaaagagauuauugggaaaugu

SEQ ID NO: 1208958 - RNA, 25 nt, Human
agaacaaaaguuguaagucguaacc

SEQ ID NO: 1208959 - RNA, 21 nt, Human
caguggaugcuccuuaugucc

SEQ ID NO: 1208960 - RNA, 19 nt, Human
ccggaaaaccagaauacaa

SEQ ID NO: 1208961 - RNA, 23 nt, Human
ccggaaaaccagaauacaacuca

SEQ ID NO: 1208962 - RNA, 21 nt, Human
cugaauaaugaggagucuggg

SEQ ID NO: 1208963 - RNA, 21 nt, Human
ggaaaaccagaauacaacuca

SEQ ID NO: 1208964 - RNA, 20 nt, Human
guacagucgaaaggaugaaa

SEQ ID NO: 1208965 - RNA, 23 nt, Human
uaaaaaaauccaacuccggaaaa

SEQ ID NO: 1208966 - RNA, 21 nt, Human
uacuccucaucauucuugucg

SEQ ID NO: 1208967 - RNA, 26 nt, Human
uagaauaagaucuccuuagcuccgcc

SEQ ID NO: 1208968 - RNA, 19 nt, Human
uauaaaaaaauccaacucc

SEQ ID NO: 1208969 - RNA, 24 nt, Human
uauaaaaaaauccaacuccggaaa

SEQ ID NO: 1208970 - RNA, 22 nt, Human
uccuugaggagaggcccuaugu

SEQ ID NO: 1208971 - RNA, 21 nt, Human
ugaaaagacaguguucauuaa

SEQ ID NO: 1208972 - RNA, 18 nt, Human
ugaggagaggcccuaugu

SEQ ID NO: 1208973 - RNA, 18 nt, Human
ugaggagucuggggaaua

SEQ ID NO: 1208974 - RNA, 21 nt, Human
ugggaaauguacugaauaaug

SEQ ID NO: 1208975 - RNA, 22 nt, Human
ugucccaugguagaauaagauc

SEQ ID NO: 1208976 - RNA, 24 nt, Human
uuuaaaaacucuguuggaccagca

SEQ ID NO: 1208977 - RNA, 26 nt, Human
aacccuagaaagaugaaaccccaccc

SEQ ID NO: 1208978 - RNA, 20 nt, Human
accccacccaggccacauug

SEQ ID NO: 1208979 - RNA, 20 nt, Human
agaaagaugaaaccccaccc

SEQ ID NO: 1208980 - RNA, 22 nt, Human
cagcagugcugugaccugugcc

SEQ ID NO: 1208981 - RNA, 18 nt, Human
ccuucuggaccaacugcc

SEQ ID NO: 1208982 - RNA, 19 nt, Human
cuagaaagaugaaacccca

SEQ ID NO: 1208983 - RNA, 23 nt, Human
cuggaaaauccucuuaauacugg

SEQ ID NO: 1208984 - RNA, 23 nt, Human
cuucuggaccaacugccagaaac

SEQ ID NO: 1208985 - RNA, 22 nt, Human
gaacucacagugugaagucuga

SEQ ID NO: 1208986 - RNA, 20 nt, Human
gccacauuguucagcagugc

SEQ ID NO: 1208987 - RNA, 19 nt, Human
ggagaagcuccaaagagca

SEQ ID NO: 1208988 - RNA, 21 nt, Human
gucugaacucacagugugaag

SEQ ID NO: 1208989 - RNA, 22 nt, Human
guuccuuuguccccuucucuuu

SEQ ID NO: 1208990 - RNA, 19 nt, Human
uagaaagaugaaaccccac

SEQ ID NO: 1208991 - RNA, 26 nt, Human
uagaaagaugaaaccccacccaggcc

SEQ ID NO: 1208992 - RNA, 19 nt, Human
uaggguuuguaacuugaaa

SEQ ID NO: 1208993 - RNA, 19 nt, Human
ucuggaccaacugccagaa

SEQ ID NO: 1208994 - RNA, 19 nt, Human
ugaaauuucaagguauaac

SEQ ID NO: 1208995 - RNA, 20 nt, Human
ugagggaaauggggugagug

SEQ ID NO: 1208996 - RNA, 20 nt, Human
ugcugggagucugaacucac

SEQ ID NO: 1208997 - RNA, 22 nt, Human
uggaccaacugccagaaacacu

SEQ ID NO: 1208998 - RNA, 19 nt, Human
aaccaaaagcccgagacaa

SEQ ID NO: 1208999 - RNA, 18 nt, Human
aagugcuggggugaggug

SEQ ID NO: 1209000 - RNA, 25 nt, Human
aagugcuggggugaggugggcagga

SEQ ID NO: 1209001 - RNA, 22 nt, Human
accgucuuguuagcccuggcug

SEQ ID NO: 1209002 - RNA, 19 nt, Human
agagaagccuccugccucc

SEQ ID NO: 1209003 - RNA, 20 nt, Human
aggcaggggcuggggcaagg

SEQ ID NO: 1209004 - RNA, 23 nt, Human
aggcaggggcuggggcaagggug

SEQ ID NO: 1209005 - RNA, 19 nt, Human
aggcucuagaccugcccag

SEQ ID NO: 1209006 - RNA, 24 nt, Human
agggccagcggcagugggcggaga

SEQ ID NO: 1209007 - RNA, 23 nt, Human
cagagaagccuccugccucccuu

SEQ ID NO: 1209008 - RNA, 22 nt, Human
cagcggcagugggcggagaggg

SEQ ID NO: 1209009 - RNA, 20 nt, Human
cagugggcggagaggguccu

SEQ ID NO: 1209010 - RNA, 21 nt, Human
cagugggcggagaggguccuc

SEQ ID NO: 1209011 - RNA, 22 nt, Human
caguguccgguguuucagccug

SEQ ID NO: 1209012 - RNA, 19 nt, Human
cccagagaagccuccugcc

SEQ ID NO: 1209013 - RNA, 23 nt, Human
cccagagaagccuccugccuccc

SEQ ID NO: 1209014 - RNA, 21 nt, Human
cccaggcucaccgccugcccc

SEQ ID NO: 1209015 - RNA, 19 nt, Human
cccccaggcucuagaccug

SEQ ID NO: 1209016 - RNA, 21 nt, Human
ccccuugggucagcccggccu

SEQ ID NO: 1209017 - RNA, 19 nt, Human
cccggccuggccucccagg

SEQ ID NO: 1209018 - RNA, 19 nt, Human
cccuugggucagcccggcc

SEQ ID NO: 1209019 - RNA, 22 nt, Human
ccgucuuguuagcccuggcugu

SEQ ID NO: 1209020 - RNA, 18 nt, Human
ccucccaggcucaccgcc

SEQ ID NO: 1209021 - RNA, 18 nt, Human
ccucccuucccaguccug

SEQ ID NO: 1209022 - RNA, 18 nt, Human
ccuccugccucccuuccc

SEQ ID NO: 1209023 - RNA, 21 nt, Human
ccuccugccucccuucccagu

SEQ ID NO: 1209024 - RNA, 18 nt, Human
ccucuggagacccccagg

SEQ ID NO: 1209025 - RNA, 19 nt, Human
ccucuggagacccccaggc

SEQ ID NO: 1209026 - RNA, 21 nt, Human
cgagacaaaggcgugaguccc

SEQ ID NO: 1209027 - RNA, 22 nt, Human
cgggcaggacuggggcaagggu

SEQ ID NO: 1209028 - RNA, 21 nt, Human
cugggcaagggugggaggggc

SEQ ID NO: 1209029 - RNA, 18 nt, Human
cuguuaacguucuucucg

SEQ ID NO: 1209030 - RNA, 21 nt, Human
cuuauucucucaguguccggu

SEQ ID NO: 1209031 - RNA, 21 nt, Human
cuucccaguccuggcagaucc

SEQ ID NO: 1209032 - RNA, 22 nt, Human
cuuuauacccagagaagccucc

SEQ ID NO: 1209033 - RNA, 21 nt, Human
gagacaaaggcgugaguccca

SEQ ID NO: 1209034 - RNA, 23 nt, Human
gagugggaggggccaagcagggg

SEQ ID NO: 1209035 - RNA, 24 nt, Human
gagugggaggggccaagcaggggc

SEQ ID NO: 1209036 - RNA, 18 nt, Human
gcccagggccagcggcag

SEQ ID NO: 1209037 - RNA, 18 nt, Human
gcccagggccagcggcag

SEQ ID NO: 1209038 - RNA, 25 nt, Human
gccuccugccucccuucccaguccu

SEQ ID NO: 1209039 - RNA, 18 nt, Human
gccucuggagacccccag

SEQ ID NO: 1209040 - RNA, 19 nt, Human
gccuucucccggagauaag

SEQ ID NO: 1209041 - RNA, 19 nt, Human
ggcaagggugggaggggcc

SEQ ID NO: 1209042 - RNA, 19 nt, Human
ggcaagggugggaggggcc

SEQ ID NO: 1209043 - RNA, 22 nt, Human
ggcaggacuggggcaagggugg

SEQ ID NO: 1209044 - RNA, 21 nt, Human
ggcaggacuggggcaaggguu

SEQ ID NO: 1209045 - RNA, 20 nt, Human
gggaggggccaagcaggggc

SEQ ID NO: 1209046 - RNA, 21 nt, Human
gggcaggaccaggcaggggcu

SEQ ID NO: 1209047 - RNA, 18 nt, Human
gggcaggacuggggcaag

SEQ ID NO: 1209048 - RNA, 22 nt, Human
gggcaggacuggggcaaggguu

SEQ ID NO: 1209049 - RNA, 18 nt, Human
gggugggaggggccgggc

SEQ ID NO: 1209050 - RNA, 18 nt, Human
ggugggaggggccaggcc

SEQ ID NO: 1209051 - RNA, 18 nt, Human
ggugggaggggccaggcc

SEQ ID NO: 1209052 - RNA, 18 nt, Human
ggugggaggggccaggcc

SEQ ID NO: 1209053 - RNA, 24 nt, Human
gguggucuucucuuuuccuccuuu

SEQ ID NO: 1209054 - RNA, 20 nt, Human
uccugccucugcccucugcc

SEQ ID NO: 1209055 - RNA, 22 nt, Human
ucucccggagauaagggauugu

SEQ ID NO: 1209056 - RNA, 21 nt, Human
ugaaaaccaaaagcccgagac

SEQ ID NO: 1209057 - RNA, 21 nt, Human
ugaggugggcaggaccaggca

SEQ ID NO: 1209058 - RNA, 23 nt, Human
ugccccuugagggcccagagccg

SEQ ID NO: 1209059 - RNA, 22 nt, Human
uggccucccaggcucaccgccu

SEQ ID NO: 1209060 - RNA, 23 nt, Human
ugggaggggccaagcaggggcug

SEQ ID NO: 1209061 - RNA, 26 nt, Human
ugggaggggccaagcaggggcugggc

SEQ ID NO: 1209062 - RNA, 20 nt, Human
ugggaggggccaggccggac

SEQ ID NO: 1209063 - RNA, 20 nt, Human
ugggaggggccaggccggac

SEQ ID NO: 1209064 - RNA, 20 nt, Human
ugggaggggccaggccggac

SEQ ID NO: 1209065 - RNA, 20 nt, Human
ugggaggggccaggccggac

SEQ ID NO: 1209066 - RNA, 20 nt, Human
ugggaggggccaggccggac

SEQ ID NO: 1209067 - RNA, 21 nt, Human
ugggucagcccggccuggccu

SEQ ID NO: 1209068 - RNA, 24 nt, Human
uguccgguguuucagccuggagcc

SEQ ID NO: 1209069 - RNA, 20 nt, Human
uuagaauuaauacuguuaac

SEQ ID NO: 1209070 - RNA, 21 nt, Human
uugagggcccagagccgccau

SEQ ID NO: 1209071 - RNA, 20 nt, Human
aaacuggguuaagagcuccc

SEQ ID NO: 1209072 - RNA, 22 nt, Human
aaacuggguuaagagcucccug

SEQ ID NO: 1209073 - RNA, 21 nt, Human
aagaacacgcgccggccacca

SEQ ID NO: 1209074 - RNA, 23 nt, Human
aagugacaaaaaagaggaaaagg

SEQ ID NO: 1209075 - RNA, 21 nt, Human
acaccaggccgaccaccgugc

SEQ ID NO: 1209076 - RNA, 26 nt, Human
acaccaggccgaccaccgugcccagu

SEQ ID NO: 1209077 - RNA, 19 nt, Human
acccgaacuuccagaagac

SEQ ID NO: 1209078 - RNA, 20 nt, Human
acccguucagcucccccacc

SEQ ID NO: 1209079 - RNA, 22 nt, Human
agaagacaaguccgccagccca

SEQ ID NO: 1209080 - RNA, 20 nt, Human
agaaggcucacagggucccc

SEQ ID NO: 1209081 - RNA, 18 nt, Human
agacgguggggcuucagg

SEQ ID NO: 1209082 - RNA, 21 nt, Human
agagcaccuggcgcggccgca

SEQ ID NO: 1209083 - RNA, 20 nt, Human
aggagaucuugaugaccggg

SEQ ID NO: 1209084 - RNA, 20 nt, Human
aggagccgcugggcucaggg

SEQ ID NO: 1209085 - RNA, 23 nt, Human
agugacaaaaaagaggaaaagga

SEQ ID NO: 1209086 - RNA, 19 nt, Human
caaaaaagaggaaaaggaa

SEQ ID NO: 1209087 - RNA, 22 nt, Human
caagaacacgcgccggccacca

SEQ ID NO: 1209088 - RNA, 21 nt, Human
cacagagcaccuggcgcggcc

SEQ ID NO: 1209089 - RNA, 19 nt, Human
cacagggcgccggcgagcu

SEQ ID NO: 1209090 - RNA, 18 nt, Human
caccaaggaaaaccaugg

SEQ ID NO: 1209091 - RNA, 21 nt, Human
cacccgaacuuccagaagaca

SEQ ID NO: 1209092 - RNA, 22 nt, Human
cacccgaacuuccagaagacaa

SEQ ID NO: 1209093 - RNA, 20 nt, Human
caccucucccuugcccuggg

SEQ ID NO: 1209094 - RNA, 22 nt, Human
cagccgugggcucgccguucuc

SEQ ID NO: 1209095 - RNA, 21 nt, Human
cagggcgccggcgagcugucc

SEQ ID NO: 1209096 - RNA, 19 nt, Human
cagguacccguucagcucc

SEQ ID NO: 1209097 - RNA, 22 nt, Human
cauccccucccuggacacacug

SEQ ID NO: 1209098 - RNA, 19 nt, Human
cauggaucuuaccccagac

SEQ ID NO: 1209099 - RNA, 18 nt, Human
ccaaaccacgagaccuuc

SEQ ID NO: 1209100 - RNA, 24 nt, Human
ccaagcccucgcgucccuguggac

SEQ ID NO: 1209101 - RNA, 23 nt, Human
ccagcccaccggcagggccgucc

SEQ ID NO: 1209102 - RNA, 20 nt, Human
ccaggugccaggugcccagc

SEQ ID NO: 1209103 - RNA, 19 nt, Human
cccacggccacaguccugc

SEQ ID NO: 1209104 - RNA, 21 nt, Human
cccagacgaugucccccacgg

SEQ ID NO: 1209105 - RNA, 23 nt, Human
cccagccuccugcgggcccuggg

SEQ ID NO: 1209106 - RNA, 23 nt, Human
cccaggggccgcccuuggccucc

SEQ ID NO: 1209107 - RNA, 21 nt, Human
ccccacggccacaguccugcc

SEQ ID NO: 1209108 - RNA, 21 nt, Human
cccucgcgucccuguggaccc

SEQ ID NO: 1209109 - RNA, 18 nt, Human
cccugggcgcggcugggg

SEQ ID NO: 1209110 - RNA, 22 nt, Human
ccgcgccggccggcacaggccg

SEQ ID NO: 1209111 - RNA, 18 nt, Human
ccggccaccaaggaaaac

SEQ ID NO: 1209112 - RNA, 19 nt, Human
ccggucccgggacucucug

SEQ ID NO: 1209113 - RNA, 31 nt, Human
ccucacaccaggccgaccaccgugccccuuc

SEQ ID NO: 1209114 - RNA, 23 nt, Human
ccuccacacagcacuggucacuc

SEQ ID NO: 1209115 - RNA, 22 nt, Human
ccuccuccacacagcacugguc

SEQ ID NO: 1209116 - RNA, 19 nt, Human
ccuccugcgggcccugggc

SEQ ID NO: 1209117 - RNA, 20 nt, Human
ccucucccucuugcuccucc

SEQ ID NO: 1209118 - RNA, 22 nt, Human
ccucucccucuugcuccuccug

SEQ ID NO: 1209119 - RNA, 18 nt, Human
ccugcggggccugcuggg

SEQ ID NO: 1209120 - RNA, 20 nt, Human
ccuggcgcggccgcaggcgg

SEQ ID NO: 1209121 - RNA, 21 nt, Human
ccuggggcgugcuguaggaga

SEQ ID NO: 1209122 - RNA, 18 nt, Human
cgagaaaagccaagcccu

SEQ ID NO: 1209123 - RNA, 18 nt, Human
cgagaggucacccguguc

SEQ ID NO: 1209124 - RNA, 25 nt, Human
cgaugucccccacggccacaguccu

SEQ ID NO: 1209125 - RNA, 18 nt, Human
cgcugcugcacgccgacu

SEQ ID NO: 1209126 - RNA, 23 nt, Human
cggcuugcggagcucccuguccg

SEQ ID NO: 1209127 - RNA, 20 nt, Human
cgggcccugggcgcggcugg

SEQ ID NO: 1209128 - RNA, 18 nt, Human
cgggccgcugcccagccu

SEQ ID NO: 1209129 - RNA, 18 nt, Human
cgguggggcuucaggcgg

SEQ ID NO: 1209130 - RNA, 19 nt, Human
cgugcccagugggcucugc

SEQ ID NO: 1209131 - RNA, 19 nt, Human
cucacaccaggccgaccac

SEQ ID NO: 1209132 - RNA, 22 nt, Human
cucagggcagcugacgagaaaa

SEQ ID NO: 1209133 - RNA, 20 nt, Human
cuccaggacagcaggugcgc

SEQ ID NO: 1209134 - RNA, 23 nt, Human
cuccuccggcuugcggagcuccc

SEQ ID NO: 1209135 - RNA, 18 nt, Human
cucgugcucgcugucccc

SEQ ID NO: 1209136 - RNA, 22 nt, Human
cugcaggccaggugccaggugc

SEQ ID NO: 1209137 - RNA, 18 nt, Human
cugcccagccuccugcgg

SEQ ID NO: 1209138 - RNA, 18 nt, Human
cugcccagccuccugcgg

SEQ ID NO: 1209139 - RNA, 22 nt, Human
cugccggggcccuguccuccuc

SEQ ID NO: 1209140 - RNA, 21 nt, Human
cuuuaaagugacaaaaaagag

SEQ ID NO: 1209141 - RNA, 18 nt, Human
gcagcugacgagaaaagc

SEQ ID NO: 1209142 - RNA, 18 nt, Human
gcgccucucccucuugcu

SEQ ID NO: 1209143 - RNA, 19 nt, Human
gcucuuacaaaacagagca

SEQ ID NO: 1209144 - RNA, 21 nt, Human
ggaggagccgcugggcucagg

SEQ ID NO: 1209145 - RNA, 21 nt, Human
ggaggagccgcugggcucagg

SEQ ID NO: 1209146 - RNA, 22 nt, Human
ggcacaguccgcucuccccuca

SEQ ID NO: 1209147 - RNA, 19 nt, Human
ggcccuguccuccucgcgc

SEQ ID NO: 1209148 - RNA, 22 nt, Human
ggcuugcggagcucccuguccg

SEQ ID NO: 1209149 - RNA, 26 nt, Human
ggggguccggggcuggccuccggggg

SEQ ID NO: 1209150 - RNA, 23 nt, Human
gggguccggggcuggccuccggg

SEQ ID NO: 1209151 - RNA, 23 nt, Human
gucuugcggcauuugcagccucg

SEQ ID NO: 1209152 - RNA, 27 nt, Human
guggacccuggggacagcucuugaagg

SEQ ID NO: 1209153 - RNA, 22 nt, Human
uaccccagacgaugucccccac

SEQ ID NO: 1209154 - RNA, 22 nt, Human
ucagagaaaggggagaguuuug

SEQ ID NO: 1209155 - RNA, 19 nt, Human
ucagcucccccaccagcuc

SEQ ID NO: 1209156 - RNA, 19 nt, Human
ucagcucccccaccagcuc

SEQ ID NO: 1209157 - RNA, 21 nt, Human
ucagcucccccaccagcucgg

SEQ ID NO: 1209158 - RNA, 19 nt, Human
uccaggacagcaggugcgc

SEQ ID NO: 1209159 - RNA, 21 nt, Human
ucccaggggccgcccuuggcc

SEQ ID NO: 1209160 - RNA, 22 nt, Human
ucccaggggccgcccuuggccu

SEQ ID NO: 1209161 - RNA, 24 nt, Human
uccccgaacagagaucggaagcuc

SEQ ID NO: 1209162 - RNA, 22 nt, Human
uccccuucuucuuacgauuaaa

SEQ ID NO: 1209163 - RNA, 19 nt, Human
ucccucuugcuccuccugg

SEQ ID NO: 1209164 - RNA, 19 nt, Human
ucccucuugcuccuccugg

SEQ ID NO: 1209165 - RNA, 22 nt, Human
ucccuggacacacugccggucc

SEQ ID NO: 1209166 - RNA, 25 nt, Human
ucccuggacacacugccgguccccg

SEQ ID NO: 1209167 - RNA, 19 nt, Human
ucccuguggacccugggga

SEQ ID NO: 1209168 - RNA, 20 nt, Human
uccgggccgcugcccagccu

SEQ ID NO: 1209169 - RNA, 21 nt, Human
uccgggccgcugcccagccuc

SEQ ID NO: 1209170 - RNA, 23 nt, Human
ucgugcucgcugucccccagacg

SEQ ID NO: 1209171 - RNA, 18 nt, Human
ucuccguccuccuucugg

SEQ ID NO: 1209172 - RNA, 22 nt, Human
ucuugaugaccgggcuccgcgg

SEQ ID NO: 1209173 - RNA, 21 nt, Human
ugacaaaaaagaggaaaagga

SEQ ID NO: 1209174 - RNA, 18 nt, Human
ugaccuggucagggaacc

SEQ ID NO: 1209175 - RNA, 19 nt, Human
ugacgagaaaagccaagcc

SEQ ID NO: 1209176 - RNA, 21 nt, Human
ugcacuucucacagagcacca

SEQ ID NO: 1209177 - RNA, 22 nt, Human
ugcaggccaggugccaggugcc

SEQ ID NO: 1209178 - RNA, 30 nt, Human
ugccaggugcccagcgggccccacgcucuu

SEQ ID NO: 1209179 - RNA, 24 nt, Human
ugcccagccuccugcgggcccugg

SEQ ID NO: 1209180 - RNA, 20 nt, Human
ugcuggggacggaagggcuc

SEQ ID NO: 1209181 - RNA, 21 nt, Human
ugggaagaaauacacucagcg

SEQ ID NO: 1209182 - RNA, 24 nt, Human
ugggagacgguggguggguccccc

SEQ ID NO: 1209183 - RNA, 19 nt, Human
ugugcagccugaccgucag

SEQ ID NO: 1209184 - RNA, 21 nt, Human
uuaagagcucccugauuuccg

SEQ ID NO: 1209185 - RNA, 19 nt, Human
uuaccccagacgauguccc

SEQ ID NO: 1209186 - RNA, 23 nt, Human
uuccggggccacgugucuugcgg

SEQ ID NO: 1209187 - RNA, 23 nt, Human
uucuuuauucuuuuuggucuuua

SEQ ID NO: 1209188 - RNA, 21 nt, Human
uuggucuuuaaagugacaaaa

SEQ ID NO: 1209189 - RNA, 19 nt, Human
uuuaaagugacaaaaaaga

SEQ ID NO: 1209190 - RNA, 25 nt, Human
aaacacaacaucugaaauuuaaaac

SEQ ID NO: 1209191 - RNA, 24 nt, Human
aaagaagaaaagagauauaaagga

SEQ ID NO: 1209192 - RNA, 21 nt, Human
aaagcugcauucccaauacaa

SEQ ID NO: 1209193 - RNA, 24 nt, Human
aaagugcugggauuacaggcguga

SEQ ID NO: 1209194 - RNA, 20 nt, Human
aacaugaaaaauacacaaga

SEQ ID NO: 1209195 - RNA, 23 nt, Human
aagaaauucaacuuuuucuugaa

SEQ ID NO: 1209196 - RNA, 20 nt, Human
aagaacaucccgaugucccc

SEQ ID NO: 1209197 - RNA, 21 nt, Human
aagaagaaaagagauauaaag

SEQ ID NO: 1209198 - RNA, 26 nt, Human
aagaagaaaagagauauaaaggaaau

SEQ ID NO: 1209199 - RNA, 20 nt, Human
aaggagggaagccgacagug

SEQ ID NO: 1209200 - RNA, 24 nt, Human
aaguagcuggaguuacaggcaugu

SEQ ID NO: 1209201 - RNA, 19 nt, Human
aagugcugggauuacaggc

SEQ ID NO: 1209202 - RNA, 19 nt, Human
aagugcugggauuacaggc

SEQ ID NO: 1209203 - RNA, 26 nt, Human
aagugcugggauuacaggcgugagcc

SEQ ID NO: 1209204 - RNA, 20 nt, Human
aaugcugcauuuuuuuuuuu

SEQ ID NO: 1209205 - RNA, 18 nt, Human
acagcucacugcagccuc

SEQ ID NO: 1209206 - RNA, 20 nt, Human
acggaggugagaggaaacuc

SEQ ID NO: 1209207 - RNA, 20 nt, Human
acggaggugagaggaaacuc

SEQ ID NO: 1209208 - RNA, 21 nt, Human
acggaggugagaggaaacucu

SEQ ID NO: 1209209 - RNA, 21 nt, Human
acggaggugagaggaaacucu

SEQ ID NO: 1209210 - RNA, 18 nt, Human
acgggguuucuccauguu

SEQ ID NO: 1209211 - RNA, 20 nt, Human
acgggguuucuccauguugg

SEQ ID NO: 1209212 - RNA, 24 nt, Human
acgggguuucuccauguuggccag

SEQ ID NO: 1209213 - RNA, 24 nt, Human
acucuguugcccaggcuugagugc

SEQ ID NO: 1209214 - RNA, 18 nt, Human
acugcagccucgaccucc

SEQ ID NO: 1209215 - RNA, 20 nt, Human
acugugaaugguccauguau

SEQ ID NO: 1209216 - RNA, 21 nt, Human
acuguggugggucuucuccca

SEQ ID NO: 1209217 - RNA, 31 nt, Human
agaaaagagauauaaaggaaaugaaaagaag

SEQ ID NO: 1209218 - RNA, 30 nt, Human
agaaaagagauauaaaggaaaugaaaagag

SEQ ID NO: 1209219 - RNA, 23 nt, Human
agaggugagaggaaaugcuggag

SEQ ID NO: 1209220 - RNA, 23 nt, Human
agcagcacacuguggacugcagu

SEQ ID NO: 1209221 - RNA, 21 nt, Human
aggcccgagagccccuggcaa

SEQ ID NO: 1209222 - RNA, 24 nt, Human
aggcgugugccaccauguccaguu

SEQ ID NO: 1209223 - RNA, 23 nt, Human
aggugagaggaaacucuggagag

SEQ ID NO: 1209224 - RNA, 23 nt, Human
aggugagaggaaacucuggagag

SEQ ID NO: 1209225 - RNA, 24 nt, Human
aggugaucugcccaccucggccuc

SEQ ID NO: 1209226 - RNA, 19 nt, Human
aguagcugggacugcaggc

SEQ ID NO: 1209227 - RNA, 23 nt, Human
aguagcugggacugcaggcgugu

SEQ ID NO: 1209228 - RNA, 20 nt, Human
agugcaauggcgugaucucg

SEQ ID NO: 1209229 - RNA, 24 nt, Human
agugcaauggcgugaucucggcuc

SEQ ID NO: 1209230 - RNA, 24 nt, Human
agugcaguggugcaaucacagcuc

SEQ ID NO: 1209231 - RNA, 24 nt, Human
aguuacaggcaugugccaccaugc

SEQ ID NO: 1209232 - RNA, 19 nt, Human
caaaacaccaguguagguc

SEQ ID NO: 1209233 - RNA, 24 nt, Human
caaaacaccaguguagguccaagg

SEQ ID NO: 1209234 - RNA, 24 nt, Human
caaagugcugggauuacaggcgug

SEQ ID NO: 1209235 - RNA, 18 nt, Human
caacacccagaaacaaua

SEQ ID NO: 1209236 - RNA, 18 nt, Human
caacaggagguggcuuug

SEQ ID NO: 1209237 - RNA, 25 nt, Human
caacaugaaaaauacacaagaacau

SEQ ID NO: 1209238 - RNA, 21 nt, Human
caagaacaucccgaugucccc

SEQ ID NO: 1209239 - RNA, 22 nt, Human
caagggauccuccugccucagc

SEQ ID NO: 1209240 - RNA, 22 nt, Human
caagugauucuccugccucagc

SEQ ID NO: 1209241 - RNA, 27 nt, Human
caagugauucuccugccucagccuccc

SEQ ID NO: 1209242 - RNA, 21 nt, Human
caauagcaacaggagguggcu

SEQ ID NO: 1209243 - RNA, 21 nt, Human
caauccuauacccacauaaaa

SEQ ID NO: 1209244 - RNA, 22 nt, Human
cacacagcaauccuauacccac

SEQ ID NO: 1209245 - RNA, 21 nt, Human
cacacuguggacugcaguuaa

SEQ ID NO: 1209246 - RNA, 25 nt, Human
cacacuguggugggucuucucccag

SEQ ID NO: 1209247 - RNA, 19 nt, Human
cacaggaucacagggugaa

SEQ ID NO: 1209248 - RNA, 24 nt, Human
cacccagaaacaauacuuuacauu

SEQ ID NO: 1209249 - RNA, 24 nt, Human
caccucggccucccaaagugcugg

SEQ ID NO: 1209250 - RNA, 19 nt, Human
cacucuguugcccaggcuu

SEQ ID NO: 1209251 - RNA, 24 nt, Human
cacucuguugcccaggcuugagug

SEQ ID NO: 1209252 - RNA, 23 nt, Human
cacugcaaccucugccuuccggg

SEQ ID NO: 1209253 - RNA, 19 nt, Human
cacugcagccucgaccucc

SEQ ID NO: 1209254 - RNA, 20 nt, Human
cagccuccugaguagcuggg

SEQ ID NO: 1209255 - RNA, 21 nt, Human
cagccucgaccuccugggcuc

SEQ ID NO: 1209256 - RNA, 24 nt, Human
cagccucgaccuccugggcucaag

SEQ ID NO: 1209257 - RNA, 26 nt, Human
caggagcucuuuggcaugacuggugg

SEQ ID NO: 1209258 - RNA, 18 nt, Human
caguguagguccaagagu

SEQ ID NO: 1209259 - RNA, 21 nt, Human
cauccagcaugggagagagau

SEQ ID NO: 1209260 - RNA, 24 nt, Human
cauguuggccaggcuggucuugaa

SEQ ID NO: 1209261 - RNA, 23 nt, Human
cauucaugacauaacuuuuucuu

SEQ ID NO: 1209262 - RNA, 22 nt, Human
ccaaagugcugggauuacaggc

SEQ ID NO: 1209263 - RNA, 22 nt, Human
ccaaagugcugggauuacaggc

SEQ ID NO: 1209264 - RNA, 24 nt, Human
ccaaagugcugggauuacaggcgu

SEQ ID NO: 1209265 - RNA, 24 nt, Human
ccaaguagcuggaguuacaggcau

SEQ ID NO: 1209266 - RNA, 18 nt, Human
ccaccuucuucugccugc

SEQ ID NO: 1209267 - RNA, 21 nt, Human
ccacgcacuccccgagaacac

SEQ ID NO: 1209268 - RNA, 21 nt, Human
ccacgcacuccccgagaacac

SEQ ID NO: 1209269 - RNA, 21 nt, Human
ccacgcacuccccgagaacac

SEQ ID NO: 1209270 - RNA, 21 nt, Human
ccacgcacucccugagaacac

SEQ ID NO: 1209271 - RNA, 19 nt, Human
ccaugcuggcagccgacug

SEQ ID NO: 1209272 - RNA, 19 nt, Human
ccauguuggccaggcuggu

SEQ ID NO: 1209273 - RNA, 21 nt, Human
ccauguuggccaggcuggucu

SEQ ID NO: 1209274 - RNA, 21 nt, Human
ccauguuggccaggcuggucu

SEQ ID NO: 1209275 - RNA, 21 nt, Human
ccccgagaacacagaggugag

SEQ ID NO: 1209276 - RNA, 21 nt, Human
ccccgagaacacggaggugag

SEQ ID NO: 1209277 - RNA, 20 nt, Human
ccccuuuuuuucaaguuggg

SEQ ID NO: 1209278 - RNA, 23 nt, Human
cccgagagccccuggcaaaacac

SEQ ID NO: 1209279 - RNA, 20 nt, Human
cccugagaacacggagguga

SEQ ID NO: 1209280 - RNA, 19 nt, Human
ccggguucaagugauucuc

SEQ ID NO: 1209281 - RNA, 22 nt, Human
ccggguucaagugauucuccug

SEQ ID NO: 1209282 - RNA, 24 nt, Human
ccuccugccucagccuccugagua

SEQ ID NO: 1209283 - RNA, 24 nt, Human
ccuccugggcucaagggauccucc

SEQ ID NO: 1209284 - RNA, 19 nt, Human
ccucgaccuccugggcuca

SEQ ID NO: 1209285 - RNA, 20 nt, Human
ccucgaccuccugggcucaa

SEQ ID NO: 1209286 - RNA, 24 nt, Human
ccugaccuuaggugaucugcccac

SEQ ID NO: 1209287 - RNA, 19 nt, Human
ccugagaacacggagguga

SEQ ID NO: 1209288 - RNA, 23 nt, Human
ccugaguagcugggacugcaggc

SEQ ID NO: 1209289 - RNA, 23 nt, Human
ccugaguagcugggacugcaggc

SEQ ID NO: 1209290 - RNA, 23 nt, Human
ccugccucagccucccaaguagc

SEQ ID NO: 1209291 - RNA, 23 nt, Human
ccugccucagccuccugaguagc

SEQ ID NO: 1209292 - RNA, 20 nt, Human
ccugggcucaagggauccuc

SEQ ID NO: 1209293 - RNA, 24 nt, Human
ccuuccggguucaagugauucucc

SEQ ID NO: 1209294 - RNA, 25 nt, Human
cgaccuccugggcucaagggauccu

SEQ ID NO: 1209295 - RNA, 22 nt, Human
cgagaacacagaggugagagga

SEQ ID NO: 1209296 - RNA, 22 nt, Human
cgagaacacggaggugagagga

SEQ ID NO: 1209297 - RNA, 22 nt, Human
cgagaacacggaggugagagga

SEQ ID NO: 1209298 - RNA, 25 nt, Human
cgagaacacggaggugagaggaaac

SEQ ID NO: 1209299 - RNA, 23 nt, Human
cgauguccccuuuuuuucaaguu

SEQ ID NO: 1209300 - RNA, 24 nt, Human
cucacugcaaccucugccuuccgg

SEQ ID NO: 1209301 - RNA, 24 nt, Human
cucacugcagccucgaccuccugg

SEQ ID NO: 1209302 - RNA, 24 nt, Human
cucagccuccugaguagcugggac

SEQ ID NO: 1209303 - RNA, 24 nt, Human
cuccauguuggccaggcuggucuu

SEQ ID NO: 1209304 - RNA, 23 nt, Human
cuccccgagaacacggaggugag

SEQ ID NO: 1209305 - RNA, 23 nt, Human
cucccugagaacacggaggugag

SEQ ID NO: 1209306 - RNA, 20 nt, Human
cucuuguugcccaggcugga

SEQ ID NO: 1209307 - RNA, 18 nt, Human
cugcaaccucugccuucc

SEQ ID NO: 1209308 - RNA, 24 nt, Human
cugcaaccucugccuuccggguuc

SEQ ID NO: 1209309 - RNA, 22 nt, Human
cugcagccucgaccuccugggc

SEQ ID NO: 1209310 - RNA, 23 nt, Human
cugcagccucgaccuccugggcu

SEQ ID NO: 1209311 - RNA, 23 nt, Human
cugccucagccucccaaguagcu

SEQ ID NO: 1209312 - RNA, 23 nt, Human
cugccucagccuccugaguagcu

SEQ ID NO: 1209313 - RNA, 23 nt, Human
cugccugcuuuuuccagccaugc

SEQ ID NO: 1209314 - RNA, 23 nt, Human
cugccuuccggguucaagugauu

SEQ ID NO: 1209315 - RNA, 24 nt, Human
cugucugcaaacugaggggcaagg

SEQ ID NO: 1209316 - RNA, 20 nt, Human
cuuccggguucaagugauuc

SEQ ID NO: 1209317 - RNA, 22 nt, Human
cuucuucugccugcuuuuucca

SEQ ID NO: 1209318 - RNA, 24 nt, Human
cuuguugcccaggcuggagugcaa

SEQ ID NO: 1209319 - RNA, 24 nt, Human
gaccuuaggugaucugcccaccuc

SEQ ID NO: 1209320 - RNA, 24 nt, Human
gacugcaggcgugugccaccaugu

SEQ ID NO: 1209321 - RNA, 21 nt, Human
gagaacacggaggugagagga

SEQ ID NO: 1209322 - RNA, 20 nt, Human
gagaggaaacucuggagagg

SEQ ID NO: 1209323 - RNA, 21 nt, Human
gagccccuggcaaaacaccag

SEQ ID NO: 1209324 - RNA, 20 nt, Human
gaggaaaugcuggagaggag

SEQ ID NO: 1209325 - RNA, 24 nt, Human
gagugcaguggugcaaucacagcu

SEQ ID NO: 1209326 - RNA, 21 nt, Human
gaucacuuuuuaccgugauac

SEQ ID NO: 1209327 - RNA, 18 nt, Human
gauuacaggcgugagcca

SEQ ID NO: 1209328 - RNA, 19 nt, Human
gauuacaggcgugagccac

SEQ ID NO: 1209329 - RNA, 23 nt, Human
gauuacaggcgugagccacugca

SEQ ID NO: 1209330 - RNA, 21 nt, Human
gauucuccugccucagccucc

SEQ ID NO: 1209331 - RNA, 22 nt, Human
gcaaaacaccaguguaggucca

SEQ ID NO: 1209332 - RNA, 25 nt, Human
gcaacacccagaaacaauacuuuac

SEQ ID NO: 1209333 - RNA, 22 nt, Human
gcaaccucugccuuccggguuc

SEQ ID NO: 1209334 - RNA, 24 nt, Human
gcccaggcuggagugcaauggcgu

SEQ ID NO: 1209335 - RNA, 20 nt, Human
gcucuuguugcccaggcugg

SEQ ID NO: 1209336 - RNA, 21 nt, Human
gcucuuguugcccaggcugga

SEQ ID NO: 1209337 - RNA, 24 nt, Human
gcucuuguugcccaggcuggagug

SEQ ID NO: 1209338 - RNA, 19 nt, Human
gcuggagugcaauggcgug

SEQ ID NO: 1209339 - RNA, 24 nt, Human
gcugucugcaaacugaggggcaag

SEQ ID NO: 1209340 - RNA, 24 nt, Human
ggacugcaggcgugugccaccaug

SEQ ID NO: 1209341 - RNA, 22 nt, Human
ggauccuccugccucagccucc

SEQ ID NO: 1209342 - RNA, 22 nt, Human
ggcuggagugcaauggcgugau

SEQ ID NO: 1209343 - RNA, 23 nt, Human
ggcuggucuugaacuccugaccu

SEQ ID NO: 1209344 - RNA, 18 nt, Human
gggacugcaggcgugugc

SEQ ID NO: 1209345 - RNA, 24 nt, Human
gggauccuccugccucagccuccu

SEQ ID NO: 1209346 - RNA, 18 nt, Human
gggcaaggaagccaguag

SEQ ID NO: 1209347 - RNA, 22 nt, Human
gggcucaagggauccuccugcc

SEQ ID NO: 1209348 - RNA, 23 nt, Human
gggguuucuccauguuggccagg

SEQ ID NO: 1209349 - RNA, 22 nt, Human
gggucucacucuguugcccagg

SEQ ID NO: 1209350 - RNA, 22 nt, Human
ggguucaagugauucuccugcc

SEQ ID NO: 1209351 - RNA, 22 nt, Human
ggguuucuccauguuggccagg

SEQ ID NO: 1209352 - RNA, 19 nt, Human
gguccaagaguccaaaagc

SEQ ID NO: 1209353 - RNA, 19 nt, Human
ggucuugaacuccugaccu

SEQ ID NO: 1209354 - RNA, 26 nt, Human
gugagaggaaacucuggagaggagaa

SEQ ID NO: 1209355 - RNA, 20 nt, Human
gugagaggaaaugcuggaga

SEQ ID NO: 1209356 - RNA, 24 nt, Human
gugaucugcccaccucggccuccc

SEQ ID NO: 1209357 - RNA, 24 nt, Human
gugauucuccugccucagccuccc

SEQ ID NO: 1209358 - RNA, 23 nt, Human
guggugcaaucacagcucacugc

SEQ ID NO: 1209359 - RNA, 20 nt, Human
guuaaggcuuuugugccugc

SEQ ID NO: 1209360 - RNA, 21 nt, Human
uaaaggagggaagccgacagu

SEQ ID NO: 1209361 - RNA, 25 nt, Human
uaaucaaguugacauuuaauaugaa

SEQ ID NO: 1209362 - RNA, 22 nt, Human
uacaggcaugugccaccaugcc

SEQ ID NO: 1209363 - RNA, 21 nt, Human
uacaggcgugagccacugcac

SEQ ID NO: 1209364 - RNA, 22 nt, Human
uacaggcgugagccacugcacu

SEQ ID NO: 1209365 - RNA, 19 nt, Human
uacccacauaaaagcugca

SEQ ID NO: 1209366 - RNA, 25 nt, Human
uauagaaaaaagaagaaaagagaua

SEQ ID NO: 1209367 - RNA, 25 nt, Human
uauuauagaaaaaagaagaaaagag

SEQ ID NO: 1209368 - RNA, 24 nt, Human
ucaacagagaaucggcauccacaa

SEQ ID NO: 1209369 - RNA, 19 nt, Human
ucaagugauucuccugccu

SEQ ID NO: 1209370 - RNA, 20 nt, Human
ucacaaauuuccuuauuuuu

SEQ ID NO: 1209371 - RNA, 24 nt, Human
ucacugcaaccucugccuuccggg

SEQ ID NO: 1209372 - RNA, 23 nt, Human
ucacugcagccucgaccuccugg

SEQ ID NO: 1209373 - RNA, 24 nt, Human
ucacugcagccucgaccuccuggg

SEQ ID NO: 1209374 - RNA, 18 nt, Human
ucagccucccaaguagcu

SEQ ID NO: 1209375 - RNA, 20 nt, Human
ucagccucccaaguagcugg

SEQ ID NO: 1209376 - RNA, 22 nt, Human
ucagccucccaaguagcuggag

SEQ ID NO: 1209377 - RNA, 23 nt, Human
ucagccuccugaguagcugggac

SEQ ID NO: 1209378 - RNA, 18 nt, Human
uccaaaagcuaaagaacu

SEQ ID NO: 1209379 - RNA, 23 nt, Human
uccacaaaaaauuaccagacacc

SEQ ID NO: 1209380 - RNA, 24 nt, Human
ucccaaagugcugggauuacaggc

SEQ ID NO: 1209381 - RNA, 24 nt, Human
ucccaaguagcuggaguuacaggc

SEQ ID NO: 1209382 - RNA, 26 nt, Human
uccccaaaccucuaaaggagggaagc

SEQ ID NO: 1209383 - RNA, 19 nt, Human
ucccugagaacacggaggu

SEQ ID NO: 1209384 - RNA, 21 nt, Human
ucccugagaacacggagguga

SEQ ID NO: 1209385 - RNA, 23 nt, Human
uccggguucaagugauucuccuc

SEQ ID NO: 1209386 - RNA, 24 nt, Human
uccugaguagcugggacugcaggc

SEQ ID NO: 1209387 - RNA, 18 nt, Human
uccugggcucaagggauc

SEQ ID NO: 1209388 - RNA, 22 nt, Human
uccugggcucaagggauccucc

SEQ ID NO: 1209389 - RNA, 18 nt, Human
ucggccucccaaagugcu

SEQ ID NO: 1209390 - RNA, 22 nt, Human
ucgugcagagauuagcaccaca

SEQ ID NO: 1209391 - RNA, 19 nt, Human
ucucacucuguugcccagg

SEQ ID NO: 1209392 - RNA, 21 nt, Human
ucucacucuguugcccaggcu

SEQ ID NO: 1209393 - RNA, 24 nt, Human
ucucacucuguugcccaggcuuga

SEQ ID NO: 1209394 - RNA, 25 nt, Human
ucucacucuguugcccaggcuugag

SEQ ID NO: 1209395 - RNA, 24 nt, Human
ucucaggagcucuuuggcaugacu

SEQ ID NO: 1209396 - RNA, 19 nt, Human
ucucccaguccacugacuc

SEQ ID NO: 1209397 - RNA, 26 nt, Human
ucuccugccucagccucccaaguagc

SEQ ID NO: 1209398 - RNA, 24 nt, Human
ucugacaccacgcacuccccgaga

SEQ ID NO: 1209399 - RNA, 24 nt, Human
ucugacaccacgcacuccccgaga

SEQ ID NO: 1209400 - RNA, 25 nt, Human
ucugcaaacugaggggcaaggaagc

SEQ ID NO: 1209401 - RNA, 23 nt, Human
ucuguggccgaaggcccgagagc

SEQ ID NO: 1209402 - RNA, 18 nt, Human
ucuucuggcaacacccag

SEQ ID NO: 1209403 - RNA, 23 nt, Human
ucuugaacuccugaccuuaggug

SEQ ID NO: 1209404 - RNA, 22 nt, Human
ucuuguugcccaggcuggagug

SEQ ID NO: 1209405 - RNA, 23 nt, Human
ucuuuggcaugacugguggcacu

SEQ ID NO: 1209406 - RNA, 25 nt, Human
ugaaaaauacacaagaacaucccga

SEQ ID NO: 1209407 - RNA, 19 nt, Human
ugacauaacuuuuucuuuu

SEQ ID NO: 1209408 - RNA, 20 nt, Human
ugaccuuaggugaucugccc

SEQ ID NO: 1209409 - RNA, 24 nt, Human
ugaccuuaggugaucugcccaccu

SEQ ID NO: 1209410 - RNA, 25 nt, Human
ugagaacacggaggugagaggaaac

SEQ ID NO: 1209411 - RNA, 23 nt, Human
ugagacagaguuuugcucuuguu

SEQ ID NO: 1209412 - RNA, 21 nt, Human
ugagaggaaacucuggagagg

SEQ ID NO: 1209413 - RNA, 22 nt, Human
ugagaggaaacucuggagagga

SEQ ID NO: 1209414 - RNA, 18 nt, Human
ugagaggaaaugcuggag

SEQ ID NO: 1209415 - RNA, 18 nt, Human
ugagaggaaaugcuggag

SEQ ID NO: 1209416 - RNA, 21 nt, Human
ugagaggaaaugcuggagagg

SEQ ID NO: 1209417 - RNA, 21 nt, Human
ugagaggaaaugcuggagaug

SEQ ID NO: 1209418 - RNA, 19 nt, Human
ugagugcaguggugcaauc

SEQ ID NO: 1209419 - RNA, 24 nt, Human
ugaucugcccaccucggccuccca

SEQ ID NO: 1209420 - RNA, 20 nt, Human
ugauucuccugccucagccu

SEQ ID NO: 1209421 - RNA, 20 nt, Human
ugccaccauguccaguuaaa

SEQ ID NO: 1209422 - RNA, 18 nt, Human
ugcccaggcuggagugca

SEQ ID NO: 1209423 - RNA, 21 nt, Human
ugcccaggcuggagugcaaug

SEQ ID NO: 1209424 - RNA, 21 nt, Human
ugcccaggcuggagugcaaug

SEQ ID NO: 1209425 - RNA, 24 nt, Human
ugcccaggcuggagugcaauggcg

SEQ ID NO: 1209426 - RNA, 24 nt, Human
ugcccaggcuugagugcaguggug

SEQ ID NO: 1209427 - RNA, 24 nt, Human
ugccucagccucccaaguagcugg

SEQ ID NO: 1209428 - RNA, 24 nt, Human
ugccucagccuccugaguagcugg

SEQ ID NO: 1209429 - RNA, 24 nt, Human
ugcucuuguugcccaggcuggagu

SEQ ID NO: 1209430 - RNA, 24 nt, Human
ugcugggauuacaggcgugagcca

SEQ ID NO: 1209431 - RNA, 18 nt, Human
uggagaggagcaggaugg

SEQ ID NO: 1209432 - RNA, 24 nt, Human
uggagucugauguucaagggcagg

SEQ ID NO: 1209433 - RNA, 19 nt, Human
uggagugcaauggcgugau

SEQ ID NO: 1209434 - RNA, 23 nt, Human
uggagugcaauggcgugaucucg

SEQ ID NO: 1209435 - RNA, 24 nt, Human
uggagugcaauggcgugaucucgg

SEQ ID NO: 1209436 - RNA, 22 nt, Human
uggaguuacaggcaugugccac

SEQ ID NO: 1209437 - RNA, 24 nt, Human
uggaguuacaggcaugugccacca

SEQ ID NO: 1209438 - RNA, 24 nt, Human
uggccaggcuggucuugaacuccu

SEQ ID NO: 1209439 - RNA, 20 nt, Human
uggcgugaucucggcucacu

SEQ ID NO: 1209440 - RNA, 18 nt, Human
ugggacugcaggcgugug

SEQ ID NO: 1209441 - RNA, 21 nt, Human
ugggacugcaggcgugugcca

SEQ ID NO: 1209442 - RNA, 24 nt, Human
ugggacugcaggcgugugccacca

SEQ ID NO: 1209443 - RNA, 25 nt, Human
ugggacugcaggcgugugccaccau

SEQ ID NO: 1209444 - RNA, 18 nt, Human
ugggauuacaggcgugag

SEQ ID NO: 1209445 - RNA, 19 nt, Human
ugggauuacaggcgugagc

SEQ ID NO: 1209446 - RNA, 21 nt, Human
ugggauuacaggcgugagcca

SEQ ID NO: 1209447 - RNA, 22 nt, Human
ugggauuacaggcgugagccac

SEQ ID NO: 1209448 - RNA, 22 nt, Human
ugggauuacaggcgugagccac

SEQ ID NO: 1209449 - RNA, 24 nt, Human
ugggauuacaggcgugagccacug

SEQ ID NO: 1209450 - RNA, 24 nt, Human
ugggauuacaggcgugagccacug

SEQ ID NO: 1209451 - RNA, 24 nt, Human
ugggcucaagggauccuccugccu

SEQ ID NO: 1209452 - RNA, 24 nt, Human
uggggucucacucuguugcccagg

SEQ ID NO: 1209453 - RNA, 25 nt, Human
ugggucccaaaguguucuucaaggu

SEQ ID NO: 1209454 - RNA, 19 nt, Human
ugguaggcaaccgcagcug

SEQ ID NO: 1209455 - RNA, 24 nt, Human
uggugcaaucacagcucacugcag

SEQ ID NO: 1209456 - RNA, 23 nt, Human
uguauggucuguauauuuuaugc

SEQ ID NO: 1209457 - RNA, 23 nt, Human
uguccccuuuuuuucaaguuggg

SEQ ID NO: 1209458 - RNA, 22 nt, Human
uguggccgaaggcccgagagcc

SEQ ID NO: 1209459 - RNA, 20 nt, Human
uguugcaaauuuccaaaaau

SEQ ID NO: 1209460 - RNA, 20 nt, Human
uguugcccaggcuggagugc

SEQ ID NO: 1209461 - RNA, 21 nt, Human
uguugcccaggcuugagugca

SEQ ID NO: 1209462 - RNA, 19 nt, Human
uuaaaacugaaagaaaaca

SEQ ID NO: 1209463 - RNA, 21 nt, Human
uucaagugauucuccugccuc

SEQ ID NO: 1209464 - RNA, 23 nt, Human
uucaagugauucuccugccucag

SEQ ID NO: 1209465 - RNA, 24 nt, Human
uucaagugauucuccugccucagc

SEQ ID NO: 1209466 - RNA, 20 nt, Human
uuccagcagcacacugugga

SEQ ID NO: 1209467 - RNA, 24 nt, Human
uuccggguucaagugauucuccug

SEQ ID NO: 1209468 - RNA, 18 nt, Human
uugcccaggcuggagugc

SEQ ID NO: 1209469 - RNA, 23 nt, Human
uugcccaggcuugagugcagugg

SEQ ID NO: 1209470 - RNA, 24 nt, Human
uugcccaggcuugagugcaguggu

SEQ ID NO: 1209471 - RNA, 23 nt, Human
uugcucuuguugcccaggcugga

SEQ ID NO: 1209472 - RNA, 21 nt, Human
uuucuccauguuggccaggcu

SEQ ID NO: 1209473 - RNA, 24 nt, Human
uuugcucuuguugcccaggcugga

SEQ ID NO: 1209474 - RNA, 22 nt, Human
uuuuauuuuuaguagucacggg

SEQ ID NO: 1209475 - RNA, 24 nt, Human
uuuugcucuuguugcccaggcugg

SEQ ID NO: 1209476 - RNA, 20 nt, Human
uuuuuuuuuuugagacagag

SEQ ID NO: 1209477 - RNA, 19 nt, Human
aacaguuucugguggugcu

SEQ ID NO: 1209478 - RNA, 24 nt, Human
aaccccaccucccaacacacccac

SEQ ID NO: 1209479 - RNA, 22 nt, Human
acaaaacaugagggguggccuc

SEQ ID NO: 1209480 - RNA, 18 nt, Human
acaccuuaaaccccaccu

SEQ ID NO: 1209481 - RNA, 22 nt, Human
acagcagcugggaaaauggagg

SEQ ID NO: 1209482 - RNA, 18 nt, Human
accccaccucccaacaca

SEQ ID NO: 1209483 - RNA, 26 nt, Human
acucacucccucaagaauuagcccag

SEQ ID NO: 1209484 - RNA, 21 nt, Human
agagcuggggaugagucugag

SEQ ID NO: 1209485 - RNA, 19 nt, Human
agcuggggaugagucugag

SEQ ID NO: 1209486 - RNA, 24 nt, Human
agggggagugggacaaaacaugag

SEQ ID NO: 1209487 - RNA, 21 nt, Human
agggguggccucauguuauaa

SEQ ID NO: 1209488 - RNA, 22 nt, Human
auuuccagcauaugaauuccag

SEQ ID NO: 1209489 - RNA, 22 nt, Human
caacacacccacaccuggacca

SEQ ID NO: 1209490 - RNA, 21 nt, Human
cacacccacaccuggaccaaa

SEQ ID NO: 1209491 - RNA, 23 nt, Human
caccuuaaaccccaccucccaac

SEQ ID NO: 1209492 - RNA, 25 nt, Human
caccuuaaaccccaccucccaacac

SEQ ID NO: 1209493 - RNA, 24 nt, Human
cacuccaaucacagcagcugggaa

SEQ ID NO: 1209494 - RNA, 19 nt, Human
caugacacagaagcgaagu

SEQ ID NO: 1209495 - RNA, 23 nt, Human
ccacaccuuaaaccccaccuccc

SEQ ID NO: 1209496 - RNA, 30 nt, Human
cccaccucccaacacacccacaccuggacu

SEQ ID NO: 1209497 - RNA, 19 nt, Human
cccucaagaauuagcccag

SEQ ID NO: 1209498 - RNA, 21 nt, Human
ccuaaccacaccuuaaacccc

SEQ ID NO: 1209499 - RNA, 19 nt, Human
ccucccaacacacccacac

SEQ ID NO: 1209500 - RNA, 23 nt, Human
ccucugugccaggccggucgccc

SEQ ID NO: 1209501 - RNA, 24 nt, Human
cuaaccacaccuuaaaccccaccu

SEQ ID NO: 1209502 - RNA, 22 nt, Human
cucccaacacacccacaccugg

SEQ ID NO: 1209503 - RNA, 18 nt, Human
cucucuuccuuccccucu

SEQ ID NO: 1209504 - RNA, 25 nt, Human
cucugugccaggccggucgccccuc

SEQ ID NO: 1209505 - RNA, 18 nt, Human
cuuaaaccccaccuccca

SEQ ID NO: 1209506 - RNA, 25 nt, Human
gagcuggggaugagucugagucucc

SEQ ID NO: 1209507 - RNA, 18 nt, Human
gcuggggaugagucugag

SEQ ID NO: 1209508 - RNA, 21 nt, Human
gggagugggacaaaacaugag

SEQ ID NO: 1209509 - RNA, 22 nt, Human
guccggagagagcgggaagcca

SEQ ID NO: 1209510 - RNA, 23 nt, Human
ucccuaaagagcagcauuaaucu

SEQ ID NO: 1209511 - RNA, 18 nt, Human
ugacucaguuuugaaggc

SEQ ID NO: 1209512 - RNA, 20 nt, Human
ugagucugagucucccuggg

SEQ ID NO: 1209513 - RNA, 18 nt, Human
uggaggccaagagcuggg

SEQ ID NO: 1209514 - RNA, 18 nt, Human
ugggacaaaacaugaggg

SEQ ID NO: 1209515 - RNA, 18 nt, Human
uguccggagagagcggga

SEQ ID NO: 1209516 - RNA, 23 nt, Human
uuaaaccccaccucccaacacac

SEQ ID NO: 1209517 - RNA, 23 nt, Human
uugaaggcugggaagcccaagag

SEQ ID NO: 1209518 - RNA, 23 nt, Human
aaacagaagaugagaaccaccga

SEQ ID NO: 1209519 - RNA, 18 nt, Human
aaaggacugagcuguuuc

SEQ ID NO: 1209520 - RNA, 23 nt, Human
aaauaaacacaucaaaacgugca

SEQ ID NO: 1209521 - RNA, 24 nt, Human
aacaggccaagaccagugcaggca

SEQ ID NO: 1209522 - RNA, 24 nt, Human
aacccuuuauguuccuccuucauc

SEQ ID NO: 1209523 - RNA, 22 nt, Human
aagauaccguguaaagccacag

SEQ ID NO: 1209524 - RNA, 19 nt, Human
aagcagugccacagcacuu

SEQ ID NO: 1209525 - RNA, 21 nt, Human
aagcagugccacagcacuugg

SEQ ID NO: 1209526 - RNA, 22 nt, Human
aagcauaacccagauggaacgc

SEQ ID NO: 1209527 - RNA, 21 nt, Human
aaggaauugcauaacagagaa

SEQ ID NO: 1209528 - RNA, 23 nt, Human
acagguguuuucuugaaaugcuu

SEQ ID NO: 1209529 - RNA, 19 nt, Human
acauaacauuuucuucauc

SEQ ID NO: 1209530 - RNA, 23 nt, Human
acgacuuucuccauucagggcac

SEQ ID NO: 1209531 - RNA, 21 nt, Human
acucagagcagcuauaguagc

SEQ ID NO: 1209532 - RNA, 19 nt, Human
agacagacuggugaaagac

SEQ ID NO: 1209533 - RNA, 20 nt, Human
agacaucuugaugaaaaggu

SEQ ID NO: 1209534 - RNA, 21 nt, Human
agaguuuuaaagcaugagauu

SEQ ID NO: 1209535 - RNA, 24 nt, Human
agcacuuugggaggccgagauggg

SEQ ID NO: 1209536 - RNA, 25 nt, Human
agcuguuucugaggacaggggggca

SEQ ID NO: 1209537 - RNA, 19 nt, Human
aggaagaagacacugcaga

SEQ ID NO: 1209538 - RNA, 25 nt, Human
aggccaagaccagugcaggcaucga

SEQ ID NO: 1209539 - RNA, 20 nt, Human
aggccgagaugggaggauca

SEQ ID NO: 1209540 - RNA, 24 nt, Human
aggugcaguggcucacaucuguaa

SEQ ID NO: 1209541 - RNA, 21 nt, Human
agguguuuucuugaaaugcuu

SEQ ID NO: 1209542 - RNA, 24 nt, Human
aguggcucacaucuguaaucccag

SEQ ID NO: 1209543 - RNA, 21 nt, Human
auaaagaacaggccaagacca

SEQ ID NO: 1209544 - RNA, 22 nt, Human
auagacaucuugaugaaaaggu

SEQ ID NO: 1209545 - RNA, 24 nt, Human
aucagucacucuccuguuucucag

SEQ ID NO: 1209546 - RNA, 21 nt, Human
auggaacgcauccucaguccc

SEQ ID NO: 1209547 - RNA, 23 nt, Human
auugcauaacagagaaaugcccu

SEQ ID NO: 1209548 - RNA, 23 nt, Human
caagaaacagaagaugagaacca

SEQ ID NO: 1209549 - RNA, 27 nt, Human
caagaaacagaagaugagaaccaccga

SEQ ID NO: 1209550 - RNA, 18 nt, Human
cacagcacuugguaaccc

SEQ ID NO: 1209551 - RNA, 24 nt, Human
cacaucuguaaucccagcacuuug

SEQ ID NO: 1209552 - RNA, 24 nt, Human
cagcacuuugggaggccgagaugg

SEQ ID NO: 1209553 - RNA, 18 nt, Human
caggaagaagacacugca

SEQ ID NO: 1209554 - RNA, 22 nt, Human
cauaaagaacaggccaagacca

SEQ ID NO: 1209555 - RNA, 23 nt, Human
cauaugcauacaguacaucugua

SEQ ID NO: 1209556 - RNA, 26 nt, Human
cauccucagucccuauuucccgggga

SEQ ID NO: 1209557 - RNA, 23 nt, Human
caucuguaaucccagcacuuugg

SEQ ID NO: 1209558 - RNA, 22 nt, Human
cauucagagccuccgcgcaucc

SEQ ID NO: 1209559 - RNA, 21 nt, Human
cauuucccaacguggcugcau

SEQ ID NO: 1209560 - RNA, 24 nt, Human
ccaaauaaauaaacacaucaaaac

SEQ ID NO: 1209561 - RNA, 20 nt, Human
ccaaccauaaccgaugggug

SEQ ID NO: 1209562 - RNA, 21 nt, Human
ccacagcacuccagcccuuau

SEQ ID NO: 1209563 - RNA, 24 nt, Human
ccacagcacuccagcccuuaugag

SEQ ID NO: 1209564 - RNA, 26 nt, Human
ccacagcacuccagcccuuaugaggc

SEQ ID NO: 1209565 - RNA, 20 nt, Human
ccagcagcucagaacauguu

SEQ ID NO: 1209566 - RNA, 21 nt, Human
cccaaauaaauaaacacauca

SEQ ID NO: 1209567 - RNA, 20 nt, Human
cccaggaagaagacacugca

SEQ ID NO: 1209568 - RNA, 23 nt, Human
cccaggaagaagacacugcagau

SEQ ID NO: 1209569 - RNA, 20 nt, Human
ccuuaaguuuucuugguucc

SEQ ID NO: 1209570 - RNA, 18 nt, Human
ccuuuauguuccuccuuc

SEQ ID NO: 1209571 - RNA, 19 nt, Human
cuaaagcucacccagucua

SEQ ID NO: 1209572 - RNA, 24 nt, Human
cucacaucuguaaucccagcacuu

SEQ ID NO: 1209573 - RNA, 20 nt, Human
cuccaaugcaacagaaggaa

SEQ ID NO: 1209574 - RNA, 18 nt, Human
cuccagggaagagaccca

SEQ ID NO: 1209575 - RNA, 21 nt, Human
cuguaaucccagcacuuuggg

SEQ ID NO: 1209576 - RNA, 22 nt, Human
gaaacuauaagguaucaaagca

SEQ ID NO: 1209577 - RNA, 18 nt, Human
gaaaugcuucuccaacca

SEQ ID NO: 1209578 - RNA, 20 nt, Human
gccacagcacuugguaaccc

SEQ ID NO: 1209579 - RNA, 24 nt, Human
gcccuggaggucaaggcugcagug

SEQ ID NO: 1209580 - RNA, 19 nt, Human
gucagugaggaagugaaac

SEQ ID NO: 1209581 - RNA, 24 nt, Human
gugcagcaccuaaagcucacccag

SEQ ID NO: 1209582 - RNA, 19 nt, Human
guuuguaaacuagaacugg

SEQ ID NO: 1209583 - RNA, 19 nt, Human
uaaagaacaggccaagacc

SEQ ID NO: 1209584 - RNA, 18 nt, Human
uaaagcucacccagucua

SEQ ID NO: 1209585 - RNA, 25 nt, Human
uaaauaaacacaucaaaacgugcaa

SEQ ID NO: 1209586 - RNA, 22 nt, Human
uaacacacacaaaaagcccuaa

SEQ ID NO: 1209587 - RNA, 18 nt, Human
uaagucuggagggcuggu

SEQ ID NO: 1209588 - RNA, 18 nt, Human
uaccguguaaagccacag

SEQ ID NO: 1209589 - RNA, 21 nt, Human
uaccguguaaagccacagggc

SEQ ID NO: 1209590 - RNA, 25 nt, Human
uaccugcaacaaaccuuucggagca

SEQ ID NO: 1209591 - RNA, 18 nt, Human
uaguuuagaguuuuaaag

SEQ ID NO: 1209592 - RNA, 19 nt, Human
uaucaaagcagugccacag

SEQ ID NO: 1209593 - RNA, 18 nt, Human
uaugcuguugaaaauggg

SEQ ID NO: 1209594 - RNA, 23 nt, Human
uauguuuguaaacuagaacugga

SEQ ID NO: 1209595 - RNA, 24 nt, Human
uauguuuguaaacuagaacuggaa

SEQ ID NO: 1209596 - RNA, 24 nt, Human
uauuccacaccugcacacucagaa

SEQ ID NO: 1209597 - RNA, 19 nt, Human
ucacccagucuauucaucu

SEQ ID NO: 1209598 - RNA, 21 nt, Human
ucacucuccuguuucucagca

SEQ ID NO: 1209599 - RNA, 23 nt, Human
ucagagccuccgcgcaucccaaa

SEQ ID NO: 1209600 - RNA, 19 nt, Human
ucuaaagcacaccagcaca

SEQ ID NO: 1209601 - RNA, 27 nt, Human
ucuguaauugcacugaaauccaaucgu

SEQ ID NO: 1209602 - RNA, 24 nt, Human
ucuugccaggugcaguggcucaca

SEQ ID NO: 1209603 - RNA, 19 nt, Human
ugagcguaguacugggacc

SEQ ID NO: 1209604 - RNA, 21 nt, Human
ugaggacaggggggcagacca

SEQ ID NO: 1209605 - RNA, 24 nt, Human
ugaggacaggggggcagaccaggg

SEQ ID NO: 1209606 - RNA, 25 nt, Human
ugaggacaggggggcagaccagggg

SEQ ID NO: 1209607 - RNA, 23 nt, Human
ugauuuacauaacauuuucuuca

SEQ ID NO: 1209608 - RNA, 25 nt, Human
ugcaacagaaggaauugcauaacag

SEQ ID NO: 1209609 - RNA, 23 nt, Human
ugcacacucagaaacuccaggga

SEQ ID NO: 1209610 - RNA, 22 nt, Human
ugcagugaaccaugauggcacc

SEQ ID NO: 1209611 - RNA, 20 nt, Human
uggcaccacagcacuccagc

SEQ ID NO: 1209612 - RNA, 21 nt, Human
uggcucacaucuguaauccca

SEQ ID NO: 1209613 - RNA, 24 nt, Human
uggcucacaucuguaaucccagca

SEQ ID NO: 1209614 - RNA, 19 nt, Human
ugggaggccgagaugggag

SEQ ID NO: 1209615 - RNA, 24 nt, Human
ugggaggccgagaugggaggauca

SEQ ID NO: 1209616 - RNA, 24 nt, Human
ugucaguaauuugcauagggauau

SEQ ID NO: 1209617 - RNA, 18 nt, Human
ugucauaagauaugcuca

SEQ ID NO: 1209618 - RNA, 21 nt, Human
uguguucaagaaacagaagau

SEQ ID NO: 1209619 - RNA, 23 nt, Human
uuaaaaguacaaugcugauguua

SEQ ID NO: 1209620 - RNA, 23 nt, Human
uuaaagcaugagauucuugucau

SEQ ID NO: 1209621 - RNA, 28 nt, Human
uucaagaaacagaagaugagaaccaccc

SEQ ID NO: 1209622 - RNA, 20 nt, Human
uucagagccuccgcgcaucc

SEQ ID NO: 1209623 - RNA, 19 nt, Human
uucuugguuccgaucgccc

SEQ ID NO: 1209624 - RNA, 25 nt, Human
uugggaggccgagaugggaggauca

SEQ ID NO: 1209625 - RNA, 25 nt, Human
uuguuuguaucagucacucuccugu

SEQ ID NO: 1209626 - RNA, 23 nt, Human
uuuaacaaaccuuccggaugauu

SEQ ID NO: 1209627 - RNA, 23 nt, Human
uuucccaacguggcugcauuacu

SEQ ID NO: 1209628 - RNA, 27 nt, Human
uuuuuuaaauacuguuucagguaaaua

SEQ ID NO: 1209629 - RNA, 19 nt, Human
aaaaugcugcauuggguug

SEQ ID NO: 1209630 - RNA, 24 nt, Human
aaacagauugcacugucaucuucc

SEQ ID NO: 1209631 - RNA, 21 nt, Human
aaagaucuagaauuaaauucu

SEQ ID NO: 1209632 - RNA, 21 nt, Human
aacaacagaaauuuaucucuc

SEQ ID NO: 1209633 - RNA, 19 nt, Human
aagaacuacucagacugug

SEQ ID NO: 1209634 - RNA, 20 nt, Human
aagugcccaccuccuaauuc

SEQ ID NO: 1209635 - RNA, 23 nt, Human
accagcuggggcucugcaggggu

SEQ ID NO: 1209636 - RNA, 20 nt, Human
acuacuuucccuucucucca

SEQ ID NO: 1209637 - RNA, 20 nt, Human
acucagacugugguaucugg

SEQ ID NO: 1209638 - RNA, 19 nt, Human
acugaagucaaaaacagca

SEQ ID NO: 1209639 - RNA, 19 nt, Human
acugagcugccuggugcuc

SEQ ID NO: 1209640 - RNA, 20 nt, Human
acugagcugccuggugcucu

SEQ ID NO: 1209641 - RNA, 18 nt, Human
acuucuggccauggugcu

SEQ ID NO: 1209642 - RNA, 18 nt, Human
acuuucccuucucuccac

SEQ ID NO: 1209643 - RNA, 22 nt, Human
agagauuucuuuuuccugggga

SEQ ID NO: 1209644 - RNA, 19 nt, Human
agagcccuucuaaggacac

SEQ ID NO: 1209645 - RNA, 25 nt, Human
agcaaucuggggugaguuagggccc

SEQ ID NO: 1209646 - RNA, 22 nt, Human
agcacuaggacuaggacagcac

SEQ ID NO: 1209647 - RNA, 21 nt, Human
agguaaucacagagcuggagc

SEQ ID NO: 1209648 - RNA, 19 nt, Human
augagggcucuggccuaug

SEQ ID NO: 1209649 - RNA, 18 nt, Human
auggagcagcugcaagcc

SEQ ID NO: 1209650 - RNA, 20 nt, Human
caacucacaucaggcuagaa

SEQ ID NO: 1209651 - RNA, 21 nt, Human
caacuuaugaauuugagggag

SEQ ID NO: 1209652 - RNA, 19 nt, Human
caagacccacagggaccuc

SEQ ID NO: 1209653 - RNA, 22 nt, Human
caaucuggggugaguuagggcc

SEQ ID NO: 1209654 - RNA, 20 nt, Human
caccuuuuccuucagaggcc

SEQ ID NO: 1209655 - RNA, 23 nt, Human
caccuuuuccuucagaggccugc

SEQ ID NO: 1209656 - RNA, 18 nt, Human
cacgcugggagcuguaga

SEQ ID NO: 1209657 - RNA, 20 nt, Human
cagaaggcucagaaguccau

SEQ ID NO: 1209658 - RNA, 19 nt, Human
cagagcuggagcaccucuc

SEQ ID NO: 1209659 - RNA, 18 nt, Human
cagcuggggcucugcagg

SEQ ID NO: 1209660 - RNA, 19 nt, Human
caggggaggauggagcagc

SEQ ID NO: 1209661 - RNA, 19 nt, Human
cagguucuuugucaguaag

SEQ ID NO: 1209662 - RNA, 20 nt, Human
cauaugauggaaaaggugag

SEQ ID NO: 1209663 - RNA, 20 nt, Human
cauuccagcuccccuucagg

SEQ ID NO: 1209664 - RNA, 22 nt, Human
cauuccagcuccccuucaggga

SEQ ID NO: 1209665 - RNA, 22 nt, Human
ccaugccaacaaggugacccag

SEQ ID NO: 1209666 - RNA, 21 nt, Human
cccacagcaaucugaaguacu

SEQ ID NO: 1209667 - RNA, 28 nt, Human
ccccauacauaagccucacagcucuucc

SEQ ID NO: 1209668 - RNA, 21 nt, Human
ccuggggaucuccaacucugc

SEQ ID NO: 1209669 - RNA, 18 nt, Human
cuaaugccaguaacuaua

SEQ ID NO: 1209670 - RNA, 20 nt, Human
cucacagagacaacuggcac

SEQ ID NO: 1209671 - RNA, 19 nt, Human
cugcugauuagcugggugg

SEQ ID NO: 1209672 - RNA, 18 nt, Human
cugucuugccauuuuuaa

SEQ ID NO: 1209673 - RNA, 23 nt, Human
cuuagaauggaggguggcagcuc

SEQ ID NO: 1209674 - RNA, 18 nt, Human
cuucauaucugaugcuga

SEQ ID NO: 1209675 - RNA, 22 nt, Human
gaaaaugugcaccuuuuccuuc

SEQ ID NO: 1209676 - RNA, 18 nt, Human
gaacacagaaugcaaguu

SEQ ID NO: 1209677 - RNA, 19 nt, Human
gacaccaaugggaucauuc

SEQ ID NO: 1209678 - RNA, 18 nt, Human
gaccauagcacuuaccua

SEQ ID NO: 1209679 - RNA, 23 nt, Human
gagcagcugcaagccuggcuggc

SEQ ID NO: 1209680 - RNA, 21 nt, Human
gcacaacuucuggccauggug

SEQ ID NO: 1209681 - RNA, 24 nt, Human
gcucauggucuugugggcagccug

SEQ ID NO: 1209682 - RNA, 19 nt, Human
gcugcauuggguugugacu

SEQ ID NO: 1209683 - RNA, 22 nt, Human
gcuuauaaguccacaugcugcu

SEQ ID NO: 1209684 - RNA, 23 nt, Human
ggaaagcuucucaaucccuuugg

SEQ ID NO: 1209685 - RNA, 18 nt, Human
ggaaugggaaagcuucuc

SEQ ID NO: 1209686 - RNA, 19 nt, Human
ggagcuaaaaagcaggccg

SEQ ID NO: 1209687 - RNA, 20 nt, Human
ggcccaggagcuaaaaagca

SEQ ID NO: 1209688 - RNA, 26 nt, Human
guccauucuuuucuucuucuuuguua

SEQ ID NO: 1209689 - RNA, 18 nt, Human
gugucugguaagggccaa

SEQ ID NO: 1209690 - RNA, 22 nt, Human
uaaagcaacuauccuggugaug

SEQ ID NO: 1209691 - RNA, 23 nt, Human
uaaagugcccaccuccuaauucc

SEQ ID NO: 1209692 - RNA, 23 nt, Human
uaacuacuuucccuucucuccac

SEQ ID NO: 1209693 - RNA, 26 nt, Human
uaaggacaccaaugggauuggagacc

SEQ ID NO: 1209694 - RNA, 18 nt, Human
uagaagggcacugaucuc

SEQ ID NO: 1209695 - RNA, 20 nt, Human
uagaauggaggguggcagcu

SEQ ID NO: 1209696 - RNA, 22 nt, Human
uagcaaguuuaucugcaagacc

SEQ ID NO: 1209697 - RNA, 23 nt, Human
uaggacuaggacagcacuggcug

SEQ ID NO: 1209698 - RNA, 18 nt, Human
ucagauggaaaugcagaa

SEQ ID NO: 1209699 - RNA, 22 nt, Human
ucagggaguugcuuaaauucuc

SEQ ID NO: 1209700 - RNA, 18 nt, Human
uccaaggaaugggaaagc

SEQ ID NO: 1209701 - RNA, 21 nt, Human
uccaaggaaugggaaagcuuc

SEQ ID NO: 1209702 - RNA, 28 nt, Human
uccauggucaggacaucagccggggucc

SEQ ID NO: 1209703 - RNA, 18 nt, Human
uccauucuuuucuucuuc

SEQ ID NO: 1209704 - RNA, 21 nt, Human
uccuggggaucuccaacucug

SEQ ID NO: 1209705 - RNA, 20 nt, Human
ucucacaguucagaaggcuu

SEQ ID NO: 1209706 - RNA, 23 nt, Human
ucucuaagaaccagcuggggcuc

SEQ ID NO: 1209707 - RNA, 20 nt, Human
ucugcaggggugugacaagu

SEQ ID NO: 1209708 - RNA, 18 nt, Human
ucuggcugcugccuccug

SEQ ID NO: 1209709 - RNA, 19 nt, Human
ucuugugggcagccugggc

SEQ ID NO: 1209710 - RNA, 25 nt, Human
ugaguccccauacauaagccucaca

SEQ ID NO: 1209711 - RNA, 30 nt, Human
ugaguccccauacauaagccucacagcucu

SEQ ID NO: 1209712 - RNA, 18 nt, Human
ugaguuagggcccaggag

SEQ ID NO: 1209713 - RNA, 19 nt, Human
ugaguuagggcccaggagc

SEQ ID NO: 1209714 - RNA, 20 nt, Human
ugaguuagggcccaggagcu

SEQ ID NO: 1209715 - RNA, 18 nt, Human
ugauaguccaaaguguug

SEQ ID NO: 1209716 - RNA, 24 nt, Human
ugcauagaauuuucaaguguuaga

SEQ ID NO: 1209717 - RNA, 24 nt, Human
ugccaacaaggugacccaguagau

SEQ ID NO: 1209718 - RNA, 19 nt, Human
ugcccaacugaaccauuug

SEQ ID NO: 1209719 - RNA, 23 nt, Human
uggaggguggcagcuccaaggaa

SEQ ID NO: 1209720 - RNA, 21 nt, Human
uggcagcaaucuggggugagu

SEQ ID NO: 1209721 - RNA, 21 nt, Human
uggcagcuccaaggaaugggg

SEQ ID NO: 1209722 - RNA, 20 nt, Human
uggccccuggugagucccuc

SEQ ID NO: 1209723 - RNA, 19 nt, Human
ugggaaaacaaaagagcug

SEQ ID NO: 1209724 - RNA, 23 nt, Human
ugggaagccagauuagguaauca

SEQ ID NO: 1209725 - RNA, 20 nt, Human
ugggaucauucagcacuagg

SEQ ID NO: 1209726 - RNA, 20 nt, Human
ugggccuugcagcaucuggg

SEQ ID NO: 1209727 - RNA, 18 nt, Human
uggggcucugcaggggug

SEQ ID NO: 1209728 - RNA, 19 nt, Human
uggguggccuucagggagu

SEQ ID NO: 1209729 - RNA, 18 nt, Human
uggucaggacaucagcag

SEQ ID NO: 1209730 - RNA, 20 nt, Human
uggucuugugggcagccugg

SEQ ID NO: 1209731 - RNA, 21 nt, Human
uguaaagacaacucacaucag

SEQ ID NO: 1209732 - RNA, 21 nt, Human
ugugauggaaucaccagauaa

SEQ ID NO: 1209733 - RNA, 18 nt, Human
ugugggcagccugggcug

SEQ ID NO: 1209734 - RNA, 19 nt, Human
uuaacuacuuucccuucuc

SEQ ID NO: 1209735 - RNA, 19 nt, Human
uucaucuuggaagugaagu

SEQ ID NO: 1209736 - RNA, 19 nt, Human
uucaugauaacgagcuucu

SEQ ID NO: 1209737 - RNA, 23 nt, Human
uuccuggggaucuccaacucugc

SEQ ID NO: 1209738 - RNA, 22 nt, Human
uugcacugucaucuuccugaca

SEQ ID NO: 1209739 - RNA, 20 nt, Human
aaaauagagccaguugcgga

SEQ ID NO: 1209740 - RNA, 22 nt, Human
aacaguucucuggguguucuuc

SEQ ID NO: 1209741 - RNA, 22 nt, Human
aagcagcaggaguggcacaaaa

SEQ ID NO: 1209742 - RNA, 23 nt, Human
acaacacagcagcaguggcacaa

SEQ ID NO: 1209743 - RNA, 26 nt, Human
acaccccuccuccugcccuuucacca

SEQ ID NO: 1209744 - RNA, 20 nt, Human
acagcagcaguggcacaagc

SEQ ID NO: 1209745 - RNA, 19 nt, Human
accugccuggcccuucccc

SEQ ID NO: 1209746 - RNA, 20 nt, Human
accuggaggagcaggugagg

SEQ ID NO: 1209747 - RNA, 25 nt, Human
acuugugagguuuagagagcuccaa

SEQ ID NO: 1209748 - RNA, 18 nt, Human
agacacaacacagcagca

SEQ ID NO: 1209749 - RNA, 20 nt, Human
agagaaggacauguggugcu

SEQ ID NO: 1209750 - RNA, 24 nt, Human
agcagcggcagcauccuggaggga

SEQ ID NO: 1209751 - RNA, 21 nt, Human
agccuguuaaucuuggguguu

SEQ ID NO: 1209752 - RNA, 26 nt, Human
aggaaucuugggcggcauccguggga

SEQ ID NO: 1209753 - RNA, 22 nt, Human
aggacauguggugcuggugaug

SEQ ID NO: 1209754 - RNA, 23 nt, Human
aggcggaggcgguggugguggug

SEQ ID NO: 1209755 - RNA, 19 nt, Human
aggcgggaguggagguggu

SEQ ID NO: 1209756 - RNA, 21 nt, Human
aggcgguggugguggugaugg

SEQ ID NO: 1209757 - RNA, 18 nt, Human
aggugguggaggcggagg

SEQ ID NO: 1209758 - RNA, 23 nt, Human
aggugguggaggcggaggcggug

SEQ ID NO: 1209759 - RNA, 24 nt, Human
agguguuuacaggagcugggggcg

SEQ ID NO: 1209760 - RNA, 21 nt, Human
auccauggcaccugguggcag

SEQ ID NO: 1209761 - RNA, 24 nt, Human
auggcccuccaccagguaccuccc

SEQ ID NO: 1209762 - RNA, 22 nt, Human
auugcccucuauccuucucauc

SEQ ID NO: 1209763 - RNA, 27 nt, Human
caagaaaagacucaauguauaugucca

SEQ ID NO: 1209764 - RNA, 20 nt, Human
caaguccuggcucagaacca

SEQ ID NO: 1209765 - RNA, 24 nt, Human
cacaacacagcagcaguggcacaa

SEQ ID NO: 1209766 - RNA, 22 nt, Human
cacaccccuccuccugcccuuu

SEQ ID NO: 1209767 - RNA, 27 nt, Human
cacaccccuccuccugcccuuucacca

SEQ ID NO: 1209768 - RNA, 23 nt, Human
cacaggccccuucuuugccgccu

SEQ ID NO: 1209769 - RNA, 19 nt, Human
caccagugcacacuauggc

SEQ ID NO: 1209770 - RNA, 21 nt, Human
caccccuccuccugcccuuuc

SEQ ID NO: 1209771 - RNA, 23 nt, Human
caccccuccuccugcccuuucac

SEQ ID NO: 1209772 - RNA, 21 nt, Human
caccucacucuugggugccug

SEQ ID NO: 1209773 - RNA, 22 nt, Human
caccugguggcagcuugcguga

SEQ ID NO: 1209774 - RNA, 18 nt, Human
cagacacaacacagcagc

SEQ ID NO: 1209775 - RNA, 21 nt, Human
cagagcucuacuuaagagaag

SEQ ID NO: 1209776 - RNA, 20 nt, Human
cagauugcccucuauccuuc

SEQ ID NO: 1209777 - RNA, 23 nt, Human
cagauugcccucuauccuucuca

SEQ ID NO: 1209778 - RNA, 27 nt, Human
cagcagcaguggcacaagcagcaggag

SEQ ID NO: 1209779 - RNA, 22 nt, Human
cagcagcggcagcauccuggag

SEQ ID NO: 1209780 - RNA, 19 nt, Human
cagcggcagcauccuggag

SEQ ID NO: 1209781 - RNA, 18 nt, Human
caggugguggcuccuuga

SEQ ID NO: 1209782 - RNA, 25 nt, Human
caucccgcccacuccuuggcaucca

SEQ ID NO: 1209783 - RNA, 18 nt, Human
cauccuugggcugcaggg

SEQ ID NO: 1209784 - RNA, 21 nt, Human
ccacaccccuccuccugcccu

SEQ ID NO: 1209785 - RNA, 25 nt, Human
ccacaccccuccuccugcccuuuca

SEQ ID NO: 1209786 - RNA, 18 nt, Human
ccagacacaacacagcag

SEQ ID NO: 1209787 - RNA, 20 nt, Human
ccauggcaccugguggcagc

SEQ ID NO: 1209788 - RNA, 18 nt, Human
cccagagaggcugagcac

SEQ ID NO: 1209789 - RNA, 21 nt, Human
ccccuucuuugccgccucccc

SEQ ID NO: 1209790 - RNA, 23 nt, Human
cccggggccacaccccuccuccu

SEQ ID NO: 1209791 - RNA, 23 nt, Human
ccuccugcccuuucaccagugca

SEQ ID NO: 1209792 - RNA, 23 nt, Human
ccugccuggcccuucccccaccc

SEQ ID NO: 1209793 - RNA, 21 nt, Human
ccuggcccuucccccacccug

SEQ ID NO: 1209794 - RNA, 23 nt, Human
ccugugccagggcccagagaggc

SEQ ID NO: 1209795 - RNA, 25 nt, Human
ccuuaugcccggggccacaccccuc

SEQ ID NO: 1209796 - RNA, 24 nt, Human
ccuuucaccagugcacacuauggg

SEQ ID NO: 1209797 - RNA, 20 nt, Human
cgcccacuccuuggcaucca

SEQ ID NO: 1209798 - RNA, 22 nt, Human
cggcagcauccuggagggaggc

SEQ ID NO: 1209799 - RNA, 18 nt, Human
cgugugccugagcagugg

SEQ ID NO: 1209800 - RNA, 20 nt, Human
cucauguccagagcucuacu

SEQ ID NO: 1209801 - RNA, 20 nt, Human
cucccggcuggguugaaggc

SEQ ID NO: 1209802 - RNA, 18 nt, Human
cuccugcccuuucaccag

SEQ ID NO: 1209803 - RNA, 26 nt, Human
cuccuuggcauccacagcaacaaaua

SEQ ID NO: 1209804 - RNA, 20 nt, Human
cucuggcuccuuuucuggcu

SEQ ID NO: 1209805 - RNA, 19 nt, Human
cuucuuugccgccuccccu

SEQ ID NO: 1209806 - RNA, 18 nt, Human
gagcacaggccccuucuu

SEQ ID NO: 1209807 - RNA, 24 nt, Human
gaggcgguggugguggugauggug

SEQ ID NO: 1209808 - RNA, 18 nt, Human
gauccuugggcagcaggg

SEQ ID NO: 1209809 - RNA, 21 nt, Human
gauugcccucuauccuucuca

SEQ ID NO: 1209810 - RNA, 18 nt, Human
gcaauaaaggaaucuugg

SEQ ID NO: 1209811 - RNA, 19 nt, Human
gcggaggcggugguggugg

SEQ ID NO: 1209812 - RNA, 26 nt, Human
gcucuggcuccuuuucuggcuucuga

SEQ ID NO: 1209813 - RNA, 22 nt, Human
gcuugggaaaaguacuccgggc

SEQ ID NO: 1209814 - RNA, 21 nt, Human
ggaaaaugcccugugcaaagg

SEQ ID NO: 1209815 - RNA, 19 nt, Human
ggaaucuugggcggcaucc

SEQ ID NO: 1209816 - RNA, 23 nt, Human
ggaggcggaggcggugguggugg

SEQ ID NO: 1209817 - RNA, 18 nt, Human
ggcugcagggagccugug

SEQ ID NO: 1209818 - RNA, 20 nt, Human
ggggggaggcggcaccugga

SEQ ID NO: 1209819 - RNA, 19 nt, Human
gguggaggcggaggcggug

SEQ ID NO: 1209820 - RNA, 22 nt, Human
guggaaagcagauccuugggca

SEQ ID NO: 1209821 - RNA, 22 nt, Human
guggggcagguguuuacaggag

SEQ ID NO: 1209822 - RNA, 21 nt, Human
uccacagcaacaaauaaucac

SEQ ID NO: 1209823 - RNA, 20 nt, Human
uccauggcaccugguggcag

SEQ ID NO: 1209824 - RNA, 22 nt, Human
uccauggcaccugguggcagcu

SEQ ID NO: 1209825 - RNA, 26 nt, Human
ucccgcccacuccuuggcauccacag

SEQ ID NO: 1209826 - RNA, 22 nt, Human
ucccugggggcacuugugaggu

SEQ ID NO: 1209827 - RNA, 20 nt, Human
ucccugugaccccaccucac

SEQ ID NO: 1209828 - RNA, 22 nt, Human
ucccugugaccccaccucacuc

SEQ ID NO: 1209829 - RNA, 24 nt, Human
uccuugggcugcagggagccugug

SEQ ID NO: 1209830 - RNA, 22 nt, Human
ucugcacaggugguggcuccuu

SEQ ID NO: 1209831 - RNA, 22 nt, Human
ucuggcuccuuuucuggcuucu

SEQ ID NO: 1209832 - RNA, 23 nt, Human
ucuggcuccuuuucuggcuucug

SEQ ID NO: 1209833 - RNA, 22 nt, Human
ugagguuuagagagcuccaagu

SEQ ID NO: 1209834 - RNA, 20 nt, Human
ugcccucuauccuucucauc

SEQ ID NO: 1209835 - RNA, 22 nt, Human
ugcccucuauccuucucauccc

SEQ ID NO: 1209836 - RNA, 19 nt, Human
ugcccugugcaaagggaau

SEQ ID NO: 1209837 - RNA, 20 nt, Human
ugccugagcaguggggacaa

SEQ ID NO: 1209838 - RNA, 20 nt, Human
ugcggcacagccgccagaca

SEQ ID NO: 1209839 - RNA, 23 nt, Human
ugcucuggcuccuuuucuggcuu

SEQ ID NO: 1209840 - RNA, 23 nt, Human
uggaggagcaggugagggggagg

SEQ ID NO: 1209841 - RNA, 18 nt, Human
uggcauccacagcaacaa

SEQ ID NO: 1209842 - RNA, 20 nt, Human
uggcccagggcaauucaugg

SEQ ID NO: 1209843 - RNA, 19 nt, Human
uggcuccuugacacugcuu

SEQ ID NO: 1209844 - RNA, 18 nt, Human
uggggacagcagcggcag

SEQ ID NO: 1209845 - RNA, 24 nt, Human
uggguguuuggugccuuagaaguu

SEQ ID NO: 1209846 - RNA, 22 nt, Human
ugugucucaggcagauguuugg

SEQ ID NO: 1209847 - RNA, 22 nt, Human
uuccucauguccagagcucuac

SEQ ID NO: 1209848 - RNA, 24 nt, Human
uucucuggguguucuucgcaauaa

SEQ ID NO: 1209849 - RNA, 19 nt, Human
uucugcacaggugguggcu

SEQ ID NO: 1209850 - RNA, 23 nt, Human
uugggugccugugccagggccca

SEQ ID NO: 1209851 - RNA, 23 nt, Human
uuggguugcacagagucugugcu

SEQ ID NO: 1209852 - RNA, 19 nt, Human
uuuccugcucuggcuccuu

SEQ ID NO: 1209853 - RNA, 19 nt, Human
uuuggugccuuagaaguug

SEQ ID NO: 1209854 - RNA, 21 nt, Human
uuuugccuuuguucaagcuga

SEQ ID NO: 1209855 - RNA, 24 nt, Human
acuaacacauccaccucggcaaaa

SEQ ID NO: 1209856 - RNA, 26 nt, Human
caccaaggagacugcagucaaauaaa

SEQ ID NO: 1209857 - RNA, 18 nt, Human
caccaccugugccucugc

SEQ ID NO: 1209858 - RNA, 18 nt, Human
caccaccugugccucugc

SEQ ID NO: 1209859 - RNA, 22 nt, Human
cgaaaaguacugaaaaugcuau

SEQ ID NO: 1209860 - RNA, 26 nt, Human
cgccucuacugucugccaccaccugu

SEQ ID NO: 1209861 - RNA, 19 nt, Human
cuacugucugccaccaccu

SEQ ID NO: 1209862 - RNA, 24 nt, Human
cuagcugaauuugugauuuccuuu

SEQ ID NO: 1209863 - RNA, 24 nt, Human
cucacagcuuuggccacgcacucc

SEQ ID NO: 1209864 - RNA, 20 nt, Human
gacuugggcaauguggccag

SEQ ID NO: 1209865 - RNA, 21 nt, Human
gggcaauguggccaggagggc

SEQ ID NO: 1209866 - RNA, 20 nt, Human
ggucagaaaaaucaacauuu

SEQ ID NO: 1209867 - RNA, 27 nt, Human
uaaauacauaauacagaagccugugug

SEQ ID NO: 1209868 - RNA, 19 nt, Human
uaugucuuauggucagaaa

SEQ ID NO: 1209869 - RNA, 19 nt, Human
uauuuuucccauuuuguuu

SEQ ID NO: 1209870 - RNA, 18 nt, Human
uccuaggccgaggcuaug

SEQ ID NO: 1209871 - RNA, 22 nt, Human
ugaaaaugcuauuacuagcuga

SEQ ID NO: 1209872 - RNA, 22 nt, Human
ugaguuauccuuauuuuuccca

SEQ ID NO: 1209873 - RNA, 24 nt, Human
ugaguuauccuuauuuuucccauu

SEQ ID NO: 1209874 - RNA, 19 nt, Human
ugccaccaccugugccucu

SEQ ID NO: 1209875 - RNA, 18 nt, Human
uguccuaggccgaggcua

SEQ ID NO: 1209876 - RNA, 24 nt, Human
uuauggucagaaaaaucaacauuu

SEQ ID NO: 1209877 - RNA, 21 nt, Human
aaaauacaucauucccaugaa

SEQ ID NO: 1209878 - RNA, 23 nt, Human
aacaaaaagcccaaucauacagu

SEQ ID NO: 1209879 - RNA, 24 nt, Human
acagcaacagaggcaagucugugc

SEQ ID NO: 1209880 - RNA, 25 nt, Human
acagcaacagaggcaagucugugcc

SEQ ID NO: 1209881 - RNA, 20 nt, Human
acaggacaauaaauucauuu

SEQ ID NO: 1209882 - RNA, 26 nt, Human
caaaauacaucauucccaugaauuuc

SEQ ID NO: 1209883 - RNA, 19 nt, Human
cacaaaauacaucauuccc

SEQ ID NO: 1209884 - RNA, 18 nt, Human
caguguaucuacaaaguu

SEQ ID NO: 1209885 - RNA, 21 nt, Human
cccaaucauacaguguaucua

SEQ ID NO: 1209886 - RNA, 20 nt, Human
cuacacacaugguucugcuc

SEQ ID NO: 1209887 - RNA, 24 nt, Human
cuguacucuugcugcaaacagcaa

SEQ ID NO: 1209888 - RNA, 21 nt, Human
gaaauuacaaucugaacaaaa

SEQ ID NO: 1209889 - RNA, 21 nt, Human
gcaaacagcaacagaggcaag

SEQ ID NO: 1209890 - RNA, 19 nt, Human
uaaaaaacuguacucuugc

SEQ ID NO: 1209891 - RNA, 24 nt, Human
uaaaaaacuguacucuugcugcaa

SEQ ID NO: 1209892 - RNA, 25 nt, Human
uaaaaaacuguacucuugcugcaaa

SEQ ID NO: 1209893 - RNA, 22 nt, Human
uagcauaaauauuucaucuauu

SEQ ID NO: 1209894 - RNA, 25 nt, Human
uauuuugcuuuugaaauaagaaaau

SEQ ID NO: 1209895 - RNA, 23 nt, Human
uccaaaguagagcuuacaguagu

SEQ ID NO: 1209896 - RNA, 23 nt, Human
uccacaaaauacaucauucccau

SEQ ID NO: 1209897 - RNA, 20 nt, Human
ugcugcaaacagcaacagag

SEQ ID NO: 1209898 - RNA, 27 nt, Human
uuaucccacuauaauuuuguucuugau

SEQ ID NO: 1209899 - RNA, 21 nt, Human
uucuuuggucaaagaugaaua

SEQ ID NO: 1209900 - RNA, 24 nt, Human
uuugaaauaaacaguauagacaca

SEQ ID NO: 1209901 - RNA, 22 nt, Human
aaaaaaaaaaaaaaaggcacaa

SEQ ID NO: 1209902 - RNA, 28 nt, Human
aaaaaaaaaaaaaaaggcacaaugagag

SEQ ID NO: 1209903 - RNA, 24 nt, Human
aaaaaaaaggcacaaugagagcuu

SEQ ID NO: 1209904 - RNA, 18 nt, Human
aaaaaaagaaaaaaggug

SEQ ID NO: 1209905 - RNA, 22 nt, Human
aaaaugcccuggucuacaagag

SEQ ID NO: 1209906 - RNA, 27 nt, Human
aaagagaaaaauauaccuuuucaaaag

SEQ ID NO: 1209907 - RNA, 18 nt, Human
aaagugccgggauuacaa

SEQ ID NO: 1209908 - RNA, 24 nt, Human
aaagugccgggauuacaagcauga

SEQ ID NO: 1209909 - RNA, 24 nt, Human
aaagugcugagauuacagguguga

SEQ ID NO: 1209910 - RNA, 22 nt, Human
aacacaaaaauacucaaagaca

SEQ ID NO: 1209911 - RNA, 20 nt, Human
aacuacuacauucacccaga

SEQ ID NO: 1209912 - RNA, 18 nt, Human
aacuacugggugaaaacc

SEQ ID NO: 1209913 - RNA, 20 nt, Human
aacuacugggugaaaaccug

SEQ ID NO: 1209914 - RNA, 24 nt, Human
aagcgauccaccugccuuagccuc

SEQ ID NO: 1209915 - RNA, 22 nt, Human
aagggacaaaagaacacauaca

SEQ ID NO: 1209916 - RNA, 25 nt, Human
aaggggguggggaggugaaaugagg

SEQ ID NO: 1209917 - RNA, 26 nt, Human
aagugccgggauuacaagcaugagcc

SEQ ID NO: 1209918 - RNA, 26 nt, Human
aagugcugagauuacaggugugagcc

SEQ ID NO: 1209919 - RNA, 23 nt, Human
accauacgggccaggcuggucuc

SEQ ID NO: 1209920 - RNA, 19 nt, Human
accuaaggacaacaugacu

SEQ ID NO: 1209921 - RNA, 21 nt, Human
acgcuggucucaaacuccugg

SEQ ID NO: 1209922 - RNA, 23 nt, Human
agacauaaauauaaauaccaaaa

SEQ ID NO: 1209923 - RNA, 22 nt, Human
agauuacaggugugagccacug

SEQ ID NO: 1209924 - RNA, 18 nt, Human
aggaaaggugauaucugu

SEQ ID NO: 1209925 - RNA, 18 nt, Human
aggaaaggugauaucugu

SEQ ID NO: 1209926 - RNA, 20 nt, Human
aggcaagaaugauaaaacua

SEQ ID NO: 1209927 - RNA, 19 nt, Human
aggcacaaugagagcuugg

SEQ ID NO: 1209928 - RNA, 21 nt, Human
agggagggaaaaagacguaag

SEQ ID NO: 1209929 - RNA, 19 nt, Human
aggggguggggaggugaaa

SEQ ID NO: 1209930 - RNA, 21 nt, Human
aggggguggggaggugaaaug

SEQ ID NO: 1209931 - RNA, 18 nt, Human
aguuacuaaccaagaaga

SEQ ID NO: 1209932 - RNA, 22 nt, Human
aguugagaaaaugugaguauaa

SEQ ID NO: 1209933 - RNA, 18 nt, Human
auaaucggaaaaaaagaa

SEQ ID NO: 1209934 - RNA, 23 nt, Human
auauccaaugcuccuauggcaau

SEQ ID NO: 1209935 - RNA, 22 nt, Human
aucuaaacaugaagaaacaacu

SEQ ID NO: 1209936 - RNA, 18 nt, Human
aucugguagacuuccccu

SEQ ID NO: 1209937 - RNA, 24 nt, Human
augaagcaggacauacacacaucu

SEQ ID NO: 1209938 - RNA, 19 nt, Human
auuacaagcaugagccaug

SEQ ID NO: 1209939 - RNA, 21 nt, Human
caaaaaaaaaaaaaaaaggca

SEQ ID NO: 1209940 - RNA, 24 nt, Human
caaaaaaaaaaaaaaaaggcacaa

SEQ ID NO: 1209941 - RNA, 25 nt, Human
caaacuccuggguucaagugauccc

SEQ ID NO: 1209942 - RNA, 24 nt, Human
caaagugccgggauuacaagcaug

SEQ ID NO: 1209943 - RNA, 24 nt, Human
caaagugcugagauuacaggugug

SEQ ID NO: 1209944 - RNA, 28 nt, Human
caagugauccccuugccucagacuccca

SEQ ID NO: 1209945 - RNA, 18 nt, Human
caauaaacacaaaaauac

SEQ ID NO: 1209946 - RNA, 22 nt, Human
caaugauuuauuaauaaaaggc

SEQ ID NO: 1209947 - RNA, 28 nt, Human
cacaaaaauacucaaagacaaagacaca

SEQ ID NO: 1209948 - RNA, 23 nt, Human
caccugccuuagccucccaaagu

SEQ ID NO: 1209949 - RNA, 23 nt, Human
cacucuuccaugaaaaaaacaaa

SEQ ID NO: 1209950 - RNA, 21 nt, Human
cagaucugaggcaaaaaaaaa

SEQ ID NO: 1209951 - RNA, 22 nt, Human
cagccaguuaauaaauguuuaa

SEQ ID NO: 1209952 - RNA, 18 nt, Human
caggacauacacacaucu

SEQ ID NO: 1209953 - RNA, 18 nt, Human
caguagagaugggguuuu

SEQ ID NO: 1209954 - RNA, 19 nt, Human
caguagagaugggguuuua

SEQ ID NO: 1209955 - RNA, 23 nt, Human
caguagagaugggguuuuaccau

SEQ ID NO: 1209956 - RNA, 24 nt, Human
caguagagaugggguuuuaccaua

SEQ ID NO: 1209957 - RNA, 19 nt, Human
ccaaagugccgggauuaca

SEQ ID NO: 1209958 - RNA, 24 nt, Human
ccaaagugccgggauuacaagcau

SEQ ID NO: 1209959 - RNA, 21 nt, Human
ccaaagugcugagauuacagg

SEQ ID NO: 1209960 - RNA, 21 nt, Human
ccaaagugcugagauuacagg

SEQ ID NO: 1209961 - RNA, 24 nt, Human
ccaaagugcugagauuacaggugu

SEQ ID NO: 1209962 - RNA, 26 nt, Human
ccaccugccuuagccucccaaagugc

SEQ ID NO: 1209963 - RNA, 20 nt, Human
ccccuugccucagacuccca

SEQ ID NO: 1209964 - RNA, 23 nt, Human
ccugcacucuuccaugaaaaaaa

SEQ ID NO: 1209965 - RNA, 21 nt, Human
ccuggguucaagugauccccu

SEQ ID NO: 1209966 - RNA, 22 nt, Human
ccuggguucaagugauccccuu

SEQ ID NO: 1209967 - RNA, 22 nt, Human
ccuggguucaagugauccccuu

SEQ ID NO: 1209968 - RNA, 21 nt, Human
cgggauuacaagcaugagcca

SEQ ID NO: 1209969 - RNA, 22 nt, Human
cgggauuacaagcaugagccau

SEQ ID NO: 1209970 - RNA, 23 nt, Human
cuaaauaccauuaauacuaaaag

SEQ ID NO: 1209971 - RNA, 24 nt, Human
cuacuuuaaauuacuuucuuuuuc

SEQ ID NO: 1209972 - RNA, 21 nt, Human
cucccaaagugcugagauuac

SEQ ID NO: 1209973 - RNA, 19 nt, Human
cucccaacccauacaucuu

SEQ ID NO: 1209974 - RNA, 20 nt, Human
cucccaacccauacaucuua

SEQ ID NO: 1209975 - RNA, 23 nt, Human
cugccuuagccucccaaagugcu

SEQ ID NO: 1209976 - RNA, 19 nt, Human
cugcuuccagaucugaggc

SEQ ID NO: 1209977 - RNA, 20 nt, Human
cuguuuuuuuuuuuuuugga

SEQ ID NO: 1209978 - RNA, 21 nt, Human
gaaaaaaacaaagaacaggag

SEQ ID NO: 1209979 - RNA, 20 nt, Human
gaacuacuacauucacccag

SEQ ID NO: 1209980 - RNA, 18 nt, Human
gagaugggguuuuaccau

SEQ ID NO: 1209981 - RNA, 24 nt, Human
gagaugggguuuuaccauacgggc

SEQ ID NO: 1209982 - RNA, 24 nt, Human
gagcuuaagcgauccaccugccuu

SEQ ID NO: 1209983 - RNA, 18 nt, Human
gauuacaagcaugagcca

SEQ ID NO: 1209984 - RNA, 18 nt, Human
gauuacaggugugagcca

SEQ ID NO: 1209985 - RNA, 22 nt, Human
gauuacaggugugagccacugc

SEQ ID NO: 1209986 - RNA, 21 nt, Human
gccuuagccucccaaagugcu

SEQ ID NO: 1209987 - RNA, 24 nt, Human
gcgauccaccugccuuagccuccc

SEQ ID NO: 1209988 - RNA, 18 nt, Human
gcuggaagcugaggagcc

SEQ ID NO: 1209989 - RNA, 24 nt, Human
gcuuaagcgauccaccugccuuag

SEQ ID NO: 1209990 - RNA, 18 nt, Human
ggaaauaggaaaggugau

SEQ ID NO: 1209991 - RNA, 21 nt, Human
ggauuacaagcaugagccaug

SEQ ID NO: 1209992 - RNA, 23 nt, Human
gggauuacaagcaugagccauga

SEQ ID NO: 1209993 - RNA, 25 nt, Human
gggauuacaagcaugagccaugaca

SEQ ID NO: 1209994 - RNA, 24 nt, Human
gggccaggcuggucucaaacucuu

SEQ ID NO: 1209995 - RNA, 21 nt, Human
gggguggggaggugaaaugag

SEQ ID NO: 1209996 - RNA, 18 nt, Human
ggugaaugggaaauagga

SEQ ID NO: 1209997 - RNA, 20 nt, Human
guaaagccuaaugaaauuca

SEQ ID NO: 1209998 - RNA, 23 nt, Human
guacccuggagaauggcugcuuc

SEQ ID NO: 1209999 - RNA, 24 nt, Human
guacccuggagaauggcugcuucc

SEQ ID NO: 1210000 - RNA, 21 nt, Human
guagacuuccccuuaaccaaa

SEQ ID NO: 1210001 - RNA, 21 nt, Human
guagagaugggguuuuaccau

SEQ ID NO: 1210002 - RNA, 23 nt, Human
guggggaauaaaaagcucuucuu

SEQ ID NO: 1210003 - RNA, 21 nt, Human
guuuuuuggggggaagggggu

SEQ ID NO: 1210004 - RNA, 20 nt, Human
uaaaacaauaggaaaaaaac

SEQ ID NO: 1210005 - RNA, 18 nt, Human
uaaaagggacaaaagaac

SEQ ID NO: 1210006 - RNA, 21 nt, Human
uaaauaccauuaauacuaaaa

SEQ ID NO: 1210007 - RNA, 25 nt, Human
uaaauuugaaacaauuugugcauca

SEQ ID NO: 1210008 - RNA, 19 nt, Human
uaacuugaaucuaaacaug

SEQ ID NO: 1210009 - RNA, 23 nt, Human
uacaauaaacacaaaaauacuca

SEQ ID NO: 1210010 - RNA, 20 nt, Human
uacaggugugagccacugcu

SEQ ID NO: 1210011 - RNA, 24 nt, Human
uacaggugugagccacugcuccca

SEQ ID NO: 1210012 - RNA, 21 nt, Human
uaccauacgggccaggcuggu

SEQ ID NO: 1210013 - RNA, 23 nt, Human
uaccauacgggccaggcuggucu

SEQ ID NO: 1210014 - RNA, 20 nt, Human
uagagaugggguuuuaccau

SEQ ID NO: 1210015 - RNA, 25 nt, Human
uagauuaaaagggacaaaagaacac

SEQ ID NO: 1210016 - RNA, 20 nt, Human
uagauuauauuacugaaaaa

SEQ ID NO: 1210017 - RNA, 22 nt, Human
uagcauaaccuaaggacaacau

SEQ ID NO: 1210018 - RNA, 23 nt, Human
uaggaaaggugauaucuguuuuu

SEQ ID NO: 1210019 - RNA, 23 nt, Human
uauaauaacggauuaaggcaaga

SEQ ID NO: 1210020 - RNA, 24 nt, Human
uauauugcccacgcuggucucaaa

SEQ ID NO: 1210021 - RNA, 22 nt, Human
uaucuguuuuuuuuuuuuuugg

SEQ ID NO: 1210022 - RNA, 21 nt, Human
uaugguaauaauuaaaaguua

SEQ ID NO: 1210023 - RNA, 22 nt, Human
ucaacauguagcacaaugaagc

SEQ ID NO: 1210024 - RNA, 21 nt, Human
ucaacauuaccaauccuugau

SEQ ID NO: 1210025 - RNA, 19 nt, Human
ucagacucccaaagugccg

SEQ ID NO: 1210026 - RNA, 22 nt, Human
uccacaauaugcacuuagcccu

SEQ ID NO: 1210027 - RNA, 23 nt, Human
uccagaucugaggcaaaaaaaaa

SEQ ID NO: 1210028 - RNA, 24 nt, Human
uccaugaaaaaaacaaagaacagg

SEQ ID NO: 1210029 - RNA, 24 nt, Human
ucccaaagugccgggauuacaagc

SEQ ID NO: 1210030 - RNA, 23 nt, Human
ucccaaagugcugagauuacagg

SEQ ID NO: 1210031 - RNA, 25 nt, Human
uccuauggcaaucaauaaacuacuu

SEQ ID NO: 1210032 - RNA, 18 nt, Human
uccuggguucaagugauc

SEQ ID NO: 1210033 - RNA, 23 nt, Human
uccuggguucaagugauccccuu

SEQ ID NO: 1210034 - RNA, 23 nt, Human
ucucaaacuccuggguucaagug

SEQ ID NO: 1210035 - RNA, 23 nt, Human
ucucaaacucuugagcuuaagcg

SEQ ID NO: 1210036 - RNA, 23 nt, Human
ucugaggcaaaaaaaaaaaaaaa

SEQ ID NO: 1210037 - RNA, 19 nt, Human
ucuuuauauauaaaacagc

SEQ ID NO: 1210038 - RNA, 19 nt, Human
ugagauuacaggugugagc

SEQ ID NO: 1210039 - RNA, 21 nt, Human
ugagauuacaggugugagcca

SEQ ID NO: 1210040 - RNA, 22 nt, Human
ugagauuacaggugugagccac

SEQ ID NO: 1210041 - RNA, 22 nt, Human
ugagauuacaggugugagccac

SEQ ID NO: 1210042 - RNA, 24 nt, Human
ugagauuacaggugugagccacug

SEQ ID NO: 1210043 - RNA, 21 nt, Human
ugagccacugcucccaaccca

SEQ ID NO: 1210044 - RNA, 19 nt, Human
ugagcuuaagcgauccacc

SEQ ID NO: 1210045 - RNA, 23 nt, Human
ugagguaucacuuaugcuauacu

SEQ ID NO: 1210046 - RNA, 30 nt, Human
ugccgggauuacaagcaugagccaugacaa

SEQ ID NO: 1210047 - RNA, 24 nt, Human
ugccucagacucccaaagugccgg

SEQ ID NO: 1210048 - RNA, 24 nt, Human
ugccuuagccucccaaagugcuga

SEQ ID NO: 1210049 - RNA, 24 nt, Human
ugcugagauuacaggugugagcca

SEQ ID NO: 1210050 - RNA, 22 nt, Human
uggcugcuuccagaucugaggc

SEQ ID NO: 1210051 - RNA, 22 nt, Human
uggguucaagugauccccuugc

SEQ ID NO: 1210052 - RNA, 19 nt, Human
uggugguggggaauaaaaa

SEQ ID NO: 1210053 - RNA, 19 nt, Human
ugucauauaugcauuugag

SEQ ID NO: 1210054 - RNA, 19 nt, Human
uuaacuugaaucuaaacau

SEQ ID NO: 1210055 - RNA, 21 nt, Human
uucaagugauccccuugccuc

SEQ ID NO: 1210056 - RNA, 23 nt, Human
uucaagugauccccuugccucag

SEQ ID NO: 1210057 - RNA, 24 nt, Human
uuuaaauuacuuucuuuuucaacu

SEQ ID NO: 1210058 - RNA, 24 nt, Human
uuuauaagccuccugaugucaugc

SEQ ID NO: 1210059 - RNA, 18 nt, Human
uuucauuccuguucggcu

SEQ ID NO: 1210060 - RNA, 22 nt, Human
uuuuuuucuuuuguuuuuuggg

SEQ ID NO: 1210061 - RNA, 21 nt, Human
agacugggugccuucaaacaa

SEQ ID NO: 1210062 - RNA, 24 nt, Human
gcugccaugaugaaggaccacaga

SEQ ID NO: 1210063 - RNA, 22 nt, Human
gggugccuucaaacaagggaaa

SEQ ID NO: 1210064 - RNA, 24 nt, Human
aaaaaaaaaaaaaaaagagcagag

SEQ ID NO: 1210065 - RNA, 24 nt, Human
aaaaaaaaaaaaaagagcagagag

SEQ ID NO: 1210066 - RNA, 23 nt, Human
aaaaaaaaaaagagcagagaggg

SEQ ID NO: 1210067 - RNA, 21 nt, Human
aaaaacaaacagcagccacca

SEQ ID NO: 1210068 - RNA, 24 nt, Human
aaaaacaaacagcagccaccaaag

SEQ ID NO: 1210069 - RNA, 19 nt, Human
aaaaauaaccaagcuaggc

SEQ ID NO: 1210070 - RNA, 22 nt, Human
aaacaaacagcagccaccaaag

SEQ ID NO: 1210071 - RNA, 25 nt, Human
aaacagacaguuuugccucuucagc

SEQ ID NO: 1210072 - RNA, 20 nt, Human
aaacgacaggcccugggcca

SEQ ID NO: 1210073 - RNA, 20 nt, Human
aaagagcagagagggcugcc

SEQ ID NO: 1210074 - RNA, 18 nt, Human
aaaggaggaagagggaaa

SEQ ID NO: 1210075 - RNA, 24 nt, Human
aaaguacugggauuacaggcguga

SEQ ID NO: 1210076 - RNA, 20 nt, Human
aaaugccagcaguugcaucu

SEQ ID NO: 1210077 - RNA, 19 nt, Human
aacagcuuugaaagugaug

SEQ ID NO: 1210078 - RNA, 21 nt, Human
aacccaaugcaaccuaaacag

SEQ ID NO: 1210079 - RNA, 18 nt, Human
aagauggaugaaaucugg

SEQ ID NO: 1210080 - RNA, 23 nt, Human
aagcuaccacauggcccaagaug

SEQ ID NO: 1210081 - RNA, 24 nt, Human
aagguaguuuuuauucuggguggc

SEQ ID NO: 1210082 - RNA, 19 nt, Human
aaguacugggauuacaggc

SEQ ID NO: 1210083 - RNA, 26 nt, Human
aaguacugggauuacaggcgugagcc

SEQ ID NO: 1210084 - RNA, 24 nt, Human
aagugcugggauauauggcugagu

SEQ ID NO: 1210085 - RNA, 24 nt, Human
aaucccccuuucuggaacucccau

SEQ ID NO: 1210086 - RNA, 18 nt, Human
aaucgcuugaaccuggga

SEQ ID NO: 1210087 - RNA, 24 nt, Human
aaucgcuugaaccugggaggcgga

SEQ ID NO: 1210088 - RNA, 22 nt, Human
aaugacaagaaaugccagaaua

SEQ ID NO: 1210089 - RNA, 18 nt, Human
acaaaaacaaacagcagc

SEQ ID NO: 1210090 - RNA, 19 nt, Human
acaaaaacaaacagcagcc

SEQ ID NO: 1210091 - RNA, 21 nt, Human
acaaaaacaaacagcagccac

SEQ ID NO: 1210092 - RNA, 24 nt, Human
acaaaaacaaacagcagccaccaa

SEQ ID NO: 1210093 - RNA, 21 nt, Human
acaaacagcagccaccaaagc

SEQ ID NO: 1210094 - RNA, 23 nt, Human
acacagcauuuucugccacauau

SEQ ID NO: 1210095 - RNA, 21 nt, Human
acagagugagacucugucuca

SEQ ID NO: 1210096 - RNA, 24 nt, Human
acagagugagacucugucucaaaa

SEQ ID NO: 1210097 - RNA, 20 nt, Human
acauggugaaacccuggcuc

SEQ ID NO: 1210098 - RNA, 21 nt, Human
acauggugaaacccuggcucu

SEQ ID NO: 1210099 - RNA, 22 nt, Human
acauggugaaacccuggcucua

SEQ ID NO: 1210100 - RNA, 22 nt, Human
accauguuggccaggcuggucu

SEQ ID NO: 1210101 - RNA, 24 nt, Human
accugaggucaggaguuugagacu

SEQ ID NO: 1210102 - RNA, 22 nt, Human
acgcggcugcaucauuuugaac

SEQ ID NO: 1210103 - RNA, 18 nt, Human
acuacaggugcacgccac

SEQ ID NO: 1210104 - RNA, 22 nt, Human
acucaaaaccaggcaauccccc

SEQ ID NO: 1210105 - RNA, 24 nt, Human
acuccagccugggagacagaguga

SEQ ID NO: 1210106 - RNA, 24 nt, Human
agaaaugccagaauagaaccugga

SEQ ID NO: 1210107 - RNA, 22 nt, Human
agaaucgcuugaaccugggagg

SEQ ID NO: 1210108 - RNA, 23 nt, Human
agacaggaggaggaauguguggg

SEQ ID NO: 1210109 - RNA, 23 nt, Human
agacuccuaucugguuucuccuc

SEQ ID NO: 1210110 - RNA, 21 nt, Human
agacugggugccuucaaacaa

SEQ ID NO: 1210111 - RNA, 26 nt, Human
agcaaaauaaugacaagaaaugccag

SEQ ID NO: 1210112 - RNA, 24 nt, Human
agcacuuugggaggccgaggcagg

SEQ ID NO: 1210113 - RNA, 20 nt, Human
agccaccaaagcccaagaug

SEQ ID NO: 1210114 - RNA, 18 nt, Human
agccagguaugugguggg

SEQ ID NO: 1210115 - RNA, 21 nt, Human
agcccaucucccgcccuggcc

SEQ ID NO: 1210116 - RNA, 24 nt, Human
agccgcgucacuccgaucugugcc

SEQ ID NO: 1210117 - RNA, 25 nt, Human
agccuagaccaccuacccuggaaac

SEQ ID NO: 1210118 - RNA, 22 nt, Human
agccuggccgacauggugaaac

SEQ ID NO: 1210119 - RNA, 24 nt, Human
agccuggccgacauggugaaaccc

SEQ ID NO: 1210120 - RNA, 24 nt, Human
agccugggagacagagugagacuc

SEQ ID NO: 1210121 - RNA, 24 nt, Human
agcgauucucuugccucagccucc

SEQ ID NO: 1210122 - RNA, 18 nt, Human
agcucauaacagaggccc

SEQ ID NO: 1210123 - RNA, 22 nt, Human
agcugaugccagacccugcagc

SEQ ID NO: 1210124 - RNA, 19 nt, Human
aggaagagggaaaugaaga

SEQ ID NO: 1210125 - RNA, 19 nt, Human
aggaagccuucugcacuca

SEQ ID NO: 1210126 - RNA, 21 nt, Human
aggaggaagagggaaaugaag

SEQ ID NO: 1210127 - RNA, 24 nt, Human
aggcagccugggcccaccuggagc

SEQ ID NO: 1210128 - RNA, 22 nt, Human
aggcaggagaaucgcuugaacc

SEQ ID NO: 1210129 - RNA, 24 nt, Human
aggcaggagaaucgcuugaaccug

SEQ ID NO: 1210130 - RNA, 18 nt, Human
aggcagguggaucaccug

SEQ ID NO: 1210131 - RNA, 22 nt, Human
aggcagguggaucaccugaggu

SEQ ID NO: 1210132 - RNA, 26 nt, Human
aggcagguggaucaccugaggucagg

SEQ ID NO: 1210133 - RNA, 21 nt, Human
aggccgaggcagguggaucac

SEQ ID NO: 1210134 - RNA, 24 nt, Human
aggcggagguugcagugagccgag

SEQ ID NO: 1210135 - RNA, 23 nt, Human
aggcgugagccacugugccuggc

SEQ ID NO: 1210136 - RNA, 24 nt, Human
aggggguugcuggcaaucuuggcg

SEQ ID NO: 1210137 - RNA, 23 nt, Human
agguauguggugggggagcuggg

SEQ ID NO: 1210138 - RNA, 24 nt, Human
aggugauccgccugccuuaaccuc

SEQ ID NO: 1210139 - RNA, 20 nt, Human
agguugaggcaggagaaucg

SEQ ID NO: 1210140 - RNA, 24 nt, Human
agguugaggcaggagaaucgcuug

SEQ ID NO: 1210141 - RNA, 21 nt, Human
agucaagagagacacauucuc

SEQ ID NO: 1210142 - RNA, 24 nt, Human
agugcaauggcacgaucuuggcuc

SEQ ID NO: 1210143 - RNA, 22 nt, Human
auaaacaaaguuuggagguaaa

SEQ ID NO: 1210144 - RNA, 24 nt, Human
aucgugcuauugcacuccagccug

SEQ ID NO: 1210145 - RNA, 18 nt, Human
augagguuucaccauguu

SEQ ID NO: 1210146 - RNA, 24 nt, Human
augagguuucaccauguuggccag

SEQ ID NO: 1210147 - RNA, 19 nt, Human
auggaaaagacccagagcu

SEQ ID NO: 1210148 - RNA, 21 nt, Human
auuacaaauuccuaccugucc

SEQ ID NO: 1210149 - RNA, 18 nt, Human
auugcacuccagccuggg

SEQ ID NO: 1210150 - RNA, 21 nt, Human
auugcacuccagccugggaga

SEQ ID NO: 1210151 - RNA, 23 nt, Human
auugcacuccagccugggagaca

SEQ ID NO: 1210152 - RNA, 23 nt, Human
auugcacuccagccugggagaca

SEQ ID NO: 1210153 - RNA, 24 nt, Human
auugcacuccagccugggagacag

SEQ ID NO: 1210154 - RNA, 24 nt, Human
caaaaacaaacagcagccaccaaa

SEQ ID NO: 1210155 - RNA, 21 nt, Human
caaaaggaaugccagaaagca

SEQ ID NO: 1210156 - RNA, 19 nt, Human
caaaauuagcugggcgugg

SEQ ID NO: 1210157 - RNA, 18 nt, Human
caaacagcagccaccaaa

SEQ ID NO: 1210158 - RNA, 23 nt, Human
caaacagcagccaccaaagccca

SEQ ID NO: 1210159 - RNA, 24 nt, Human
caaaguacugggauuacaggcgug

SEQ ID NO: 1210160 - RNA, 23 nt, Human
caaccuccaccucccagguucaa

SEQ ID NO: 1210161 - RNA, 21 nt, Human
caagaaaugccagaauagaac

SEQ ID NO: 1210162 - RNA, 18 nt, Human
caagagagacacauucuc

SEQ ID NO: 1210163 - RNA, 20 nt, Human
caagcgauucucuugccuca

SEQ ID NO: 1210164 - RNA, 22 nt, Human
caagcgauucucuugccucagc

SEQ ID NO: 1210165 - RNA, 21 nt, Human
caccauguuggccaggcuggu

SEQ ID NO: 1210166 - RNA, 23 nt, Human
caccauguuggccaggcuggucu

SEQ ID NO: 1210167 - RNA, 24 nt, Human
caccauguuggccaggcuggucuu

SEQ ID NO: 1210168 - RNA, 27 nt, Human
caccauguuggccaggcuggucuugaa

SEQ ID NO: 1210169 - RNA, 22 nt, Human
cacccucuuccacugugaccuc

SEQ ID NO: 1210170 - RNA, 18 nt, Human
caccugacuaauuuuugu

SEQ ID NO: 1210171 - RNA, 18 nt, Human
caccugagccagccuggg

SEQ ID NO: 1210172 - RNA, 20 nt, Human
caccugagccagccuggggc

SEQ ID NO: 1210173 - RNA, 23 nt, Human
caccugaggucaggaguuugaga

SEQ ID NO: 1210174 - RNA, 23 nt, Human
caccuggagcccaucucccgccc

SEQ ID NO: 1210175 - RNA, 21 nt, Human
caccuguaauuccagcuacuc

SEQ ID NO: 1210176 - RNA, 24 nt, Human
caccuguaauuccagcuacucagg

SEQ ID NO: 1210177 - RNA, 22 nt, Human
cacuccagccugggagacagag

SEQ ID NO: 1210178 - RNA, 22 nt, Human
cacuccagccugggagacagag

SEQ ID NO: 1210179 - RNA, 24 nt, Human
cacuccagccugggagacagagug

SEQ ID NO: 1210180 - RNA, 21 nt, Human
cacugcaaccuccaccuccca

SEQ ID NO: 1210181 - RNA, 23 nt, Human
cagaauagaaccuggacuggaag

SEQ ID NO: 1210182 - RNA, 23 nt, Human
cagaauuuaucccagggcugccc

SEQ ID NO: 1210183 - RNA, 21 nt, Human
cagcaaaauaaugacaagaaa

SEQ ID NO: 1210184 - RNA, 24 nt, Human
cagcacuuugggaggccgaggcag

SEQ ID NO: 1210185 - RNA, 26 nt, Human
cagcacuuugggaggccgaggcaggu

SEQ ID NO: 1210186 - RNA, 18 nt, Human
cagcagccaccaaagccc

SEQ ID NO: 1210187 - RNA, 21 nt, Human
cagcauccugccaccugcaag

SEQ ID NO: 1210188 - RNA, 24 nt, Human
cagcuacucaggagguugaggcag

SEQ ID NO: 1210189 - RNA, 21 nt, Human
caggaagagcugggaaaggua

SEQ ID NO: 1210190 - RNA, 19 nt, Human
caggacacagugagggucc

SEQ ID NO: 1210191 - RNA, 22 nt, Human
cagggaagggccuguauccauu

SEQ ID NO: 1210192 - RNA, 18 nt, Human
cagggauguggccaaauu

SEQ ID NO: 1210193 - RNA, 23 nt, Human
caggggguugcuggcaaucuugg

SEQ ID NO: 1210194 - RNA, 24 nt, Human
cagguggaucaccugaggucagga

SEQ ID NO: 1210195 - RNA, 22 nt, Human
cauggcccaagauggcugcuca

SEQ ID NO: 1210196 - RNA, 18 nt, Human
cauggcucaacaugcggu

SEQ ID NO: 1210197 - RNA, 24 nt, Human
cauguuggccaggcuggucuugaa

SEQ ID NO: 1210198 - RNA, 24 nt, Human
cauuacaaauuccuaccuguccua

SEQ ID NO: 1210199 - RNA, 22 nt, Human
cauugccagggaggcaggcagg

SEQ ID NO: 1210200 - RNA, 22 nt, Human
cauuucagacaggaggaggaau

SEQ ID NO: 1210201 - RNA, 22 nt, Human
ccaaaguacugggauuacaggc

SEQ ID NO: 1210202 - RNA, 24 nt, Human
ccaaaguacugggauuacaggcgu

SEQ ID NO: 1210203 - RNA, 20 nt, Human
ccaccuacccuggaaacgac

SEQ ID NO: 1210204 - RNA, 24 nt, Human
ccaccucccagguucaagcgauuc

SEQ ID NO: 1210205 - RNA, 18 nt, Human
ccaccuggagcccaucuc

SEQ ID NO: 1210206 - RNA, 19 nt, Human
ccacugugaccucaucuua

SEQ ID NO: 1210207 - RNA, 24 nt, Human
ccagacccugcagcucuaaccucc

SEQ ID NO: 1210208 - RNA, 18 nt, Human
ccaggcagugaggcaagc

SEQ ID NO: 1210209 - RNA, 19 nt, Human
ccaugcgaugccucuuccu

SEQ ID NO: 1210210 - RNA, 22 nt, Human
cccagagcugaugccagacccu

SEQ ID NO: 1210211 - RNA, 18 nt, Human
cccaggcuggagugcaau

SEQ ID NO: 1210212 - RNA, 20 nt, Human
cccagguucaagcgauucuc

SEQ ID NO: 1210213 - RNA, 21 nt, Human
cccagguucaagcgauucucu

SEQ ID NO: 1210214 - RNA, 18 nt, Human
ccccaggggguugcuggc

SEQ ID NO: 1210215 - RNA, 24 nt, Human
cccgaguaacugggacuacaggug

SEQ ID NO: 1210216 - RNA, 22 nt, Human
ccgcaucagccaggucucugcc

SEQ ID NO: 1210217 - RNA, 25 nt, Human
ccgccugccuuaaccucccaaagua

SEQ ID NO: 1210218 - RNA, 23 nt, Human
ccuacaaacacacacuguuuucc

SEQ ID NO: 1210219 - RNA, 18 nt, Human
ccuagaccaccuacccug

SEQ ID NO: 1210220 - RNA, 24 nt, Human
ccucccagguucaagcgauucucu

SEQ ID NO: 1210221 - RNA, 22 nt, Human
ccugaggucaggaguuugagac

SEQ ID NO: 1210222 - RNA, 23 nt, Human
ccugcacaaaaacaaacagcagc

SEQ ID NO: 1210223 - RNA, 22 nt, Human
ccuggccgacauggugaaaccc

SEQ ID NO: 1210224 - RNA, 24 nt, Human
ccuggccgacauggugaaacccug

SEQ ID NO: 1210225 - RNA, 19 nt, Human
ccugggaggcggagguugc

SEQ ID NO: 1210226 - RNA, 20 nt, Human
ccugggcccaccuggagccc

SEQ ID NO: 1210227 - RNA, 21 nt, Human
ccuguaauuccagcuacucag

SEQ ID NO: 1210228 - RNA, 18 nt, Human
ccuuccuuccuccuuuuu

SEQ ID NO: 1210229 - RNA, 24 nt, Human
cgaaggcuccuucucaccucuugc

SEQ ID NO: 1210230 - RNA, 24 nt, Human
cgacaggcccugggccaagugcug

SEQ ID NO: 1210231 - RNA, 24 nt, Human
cgacauggugaaacccuggcucua

SEQ ID NO: 1210232 - RNA, 24 nt, Human
cgagaucgugcuauugcacuccag

SEQ ID NO: 1210233 - RNA, 20 nt, Human
cgaggcagguggaucaccug

SEQ ID NO: 1210234 - RNA, 26 nt, Human
cgaggcagguggaucaccugagguca

SEQ ID NO: 1210235 - RNA, 24 nt, Human
cgcucugucacccaggcuggagug

SEQ ID NO: 1210236 - RNA, 18 nt, Human
cuacccuggaaacgacag

SEQ ID NO: 1210237 - RNA, 24 nt, Human
cuauugcacuccagccugggagac

SEQ ID NO: 1210238 - RNA, 18 nt, Human
cucaaaaaaaaaaaaaaa

SEQ ID NO: 1210239 - RNA, 24 nt, Human
cucaaaaaaaaaaaaaaaaagagc

SEQ ID NO: 1210240 - RNA, 21 nt, Human
cucacuagagcuguugcaaca

SEQ ID NO: 1210241 - RNA, 22 nt, Human
cucacuagagcuguugcaacaa

SEQ ID NO: 1210242 - RNA, 24 nt, Human
cucacugcaaccuccaccucccag

SEQ ID NO: 1210243 - RNA, 24 nt, Human
cucaugucuguaaucgcagcacuu

SEQ ID NO: 1210244 - RNA, 23 nt, Human
cuccuucucaccucuugcagccc

SEQ ID NO: 1210245 - RNA, 24 nt, Human
cucgcucugucacccaggcuggag

SEQ ID NO: 1210246 - RNA, 19 nt, Human
cucugucucaaaaaaaaaa

SEQ ID NO: 1210247 - RNA, 20 nt, Human
cugaggcgggucugagcucc

SEQ ID NO: 1210248 - RNA, 23 nt, Human
cugcaaccuccaccucccagguu

SEQ ID NO: 1210249 - RNA, 24 nt, Human
cugcaaccuccaccucccagguuc

SEQ ID NO: 1210250 - RNA, 22 nt, Human
cugcagcucuaaccuccagcaa

SEQ ID NO: 1210251 - RNA, 24 nt, Human
cugcucaaaugccagcaguugcau

SEQ ID NO: 1210252 - RNA, 24 nt, Human
cugguucugcaggcagccugggcc

SEQ ID NO: 1210253 - RNA, 19 nt, Human
cuguaaucgcagcacuuug

SEQ ID NO: 1210254 - RNA, 21 nt, Human
cuguaauuccagcuacucagg

SEQ ID NO: 1210255 - RNA, 19 nt, Human
cugucacccaggcuggagu

SEQ ID NO: 1210256 - RNA, 23 nt, Human
cuuccugcuagcaaaggcucccc

SEQ ID NO: 1210257 - RNA, 19 nt, Human
cuugaaccugggaggcgga

SEQ ID NO: 1210258 - RNA, 24 nt, Human
cuugccucagccucccgaguaacu

SEQ ID NO: 1210259 - RNA, 24 nt, Human
gaauuaguccuagaucauccauaa

SEQ ID NO: 1210260 - RNA, 24 nt, Human
gacagagugagacucugucucaaa

SEQ ID NO: 1210261 - RNA, 21 nt, Human
gacauggugaaacccuggcuc

SEQ ID NO: 1210262 - RNA, 23 nt, Human
gacccugcagcucuaaccuccag

SEQ ID NO: 1210263 - RNA, 21 nt, Human
gacuuuaaaaguggaauggaa

SEQ ID NO: 1210264 - RNA, 18 nt, Human
gagcugaugccagacccu

SEQ ID NO: 1210265 - RNA, 22 nt, Human
gaggaacucaguggcccagggc

SEQ ID NO: 1210266 - RNA, 21 nt, Human
gaggcagggacagcuccagca

SEQ ID NO: 1210267 - RNA, 23 nt, Human
gaggcagguggaucaccugaggu

SEQ ID NO: 1210268 - RNA, 23 nt, Human
gagguugcagugagccgagaucg

SEQ ID NO: 1210269 - RNA, 18 nt, Human
gagguuucaccauguugg

SEQ ID NO: 1210270 - RNA, 22 nt, Human
gagguuucaccauguuggccag

SEQ ID NO: 1210271 - RNA, 26 nt, Human
gaguaacugggacuacaggugcacgc

SEQ ID NO: 1210272 - RNA, 24 nt, Human
gaucaccugaggucaggaguuuga

SEQ ID NO: 1210273 - RNA, 24 nt, Human
gaucucaggugauccgccugccuu

SEQ ID NO: 1210274 - RNA, 18 nt, Human
gauuacaggcgugagcca

SEQ ID NO: 1210275 - RNA, 19 nt, Human
gauuacaggcgugagccac

SEQ ID NO: 1210276 - RNA, 21 nt, Human
gauuacaggcgugagccacug

SEQ ID NO: 1210277 - RNA, 23 nt, Human
gauuucacaccuuggucgggugu

SEQ ID NO: 1210278 - RNA, 22 nt, Human
gcaaccuccaccucccagguuc

SEQ ID NO: 1210279 - RNA, 19 nt, Human
gcacaaaaacaaacagcag

SEQ ID NO: 1210280 - RNA, 24 nt, Human
gcacuccagccugggagacagagu

SEQ ID NO: 1210281 - RNA, 22 nt, Human
gcaggccgggcgugguggcuca

SEQ ID NO: 1210282 - RNA, 24 nt, Human
gcaggccgggcgugguggcucaug

SEQ ID NO: 1210283 - RNA, 18 nt, Human
gccacugugccuggccug

SEQ ID NO: 1210284 - RNA, 18 nt, Human
gccauggaaaagacccag

SEQ ID NO: 1210285 - RNA, 22 nt, Human
gcccuggccuuccggccuucuc

SEQ ID NO: 1210286 - RNA, 23 nt, Human
gcccuggccuuccggccuucuca

SEQ ID NO: 1210287 - RNA, 24 nt, Human
gccgacauggugaaacccuggcuc

SEQ ID NO: 1210288 - RNA, 19 nt, Human
gccugacuaaaucagcguu

SEQ ID NO: 1210289 - RNA, 20 nt, Human
gccugccuuaaccucccaaa

SEQ ID NO: 1210290 - RNA, 23 nt, Human
gccuggggccauggaaaagaccc

SEQ ID NO: 1210291 - RNA, 24 nt, Human
gcgauucucuugccucagccuccc

SEQ ID NO: 1210292 - RNA, 27 nt, Human
gcucugucacccaggcuggagugcaau

SEQ ID NO: 1210293 - RNA, 24 nt, Human
gcugccaugaugaaggaccacaga

SEQ ID NO: 1210294 - RNA, 20 nt, Human
ggagguugcagugagccgag

SEQ ID NO: 1210295 - RNA, 22 nt, Human
ggagguugcagugagccgagau

SEQ ID NO: 1210296 - RNA, 23 nt, Human
ggagguugcagugagccgagauc

SEQ ID NO: 1210297 - RNA, 24 nt, Human
ggagguugcagugagccgagaucg

SEQ ID NO: 1210298 - RNA, 22 nt, Human
ggaucaccugaggucaggaguu

SEQ ID NO: 1210299 - RNA, 19 nt, Human
ggcaccuguaauuccagcu

SEQ ID NO: 1210300 - RNA, 20 nt, Human
ggccauggaaaagacccaga

SEQ ID NO: 1210301 - RNA, 23 nt, Human
ggccauggaaaagacccagagcu

SEQ ID NO: 1210302 - RNA, 24 nt, Human
ggccauggaaaagacccagagcug

SEQ ID NO: 1210303 - RNA, 21 nt, Human
ggccgggcgugguggcucaug

SEQ ID NO: 1210304 - RNA, 23 nt, Human
ggcgugguggcucaugucuguaa

SEQ ID NO: 1210305 - RNA, 19 nt, Human
ggcugcaucauuuugaaca

SEQ ID NO: 1210306 - RNA, 23 nt, Human
ggcuugcagccgcgucacuccga

SEQ ID NO: 1210307 - RNA, 22 nt, Human
gggacuuuaaaaguggaaugga

SEQ ID NO: 1210308 - RNA, 21 nt, Human
gggauuucacaccuuggucgg

SEQ ID NO: 1210309 - RNA, 24 nt, Human
gggcgugguggcaggcaccuguaa

SEQ ID NO: 1210310 - RNA, 22 nt, Human
gggugccuucaaacaagggaaa

SEQ ID NO: 1210311 - RNA, 18 nt, Human
gguccccuacagaaccug

SEQ ID NO: 1210312 - RNA, 24 nt, Human
gguggcucaugucuguaaucgcag

SEQ ID NO: 1210313 - RNA, 21 nt, Human
ggugguagugauaggggcgcu

SEQ ID NO: 1210314 - RNA, 22 nt, Human
guagagaugagguuucaccaug

SEQ ID NO: 1210315 - RNA, 21 nt, Human
gugaaacccuggcucuacuaa

SEQ ID NO: 1210316 - RNA, 24 nt, Human
gugauccgccugccuuaaccuccc

SEQ ID NO: 1210317 - RNA, 24 nt, Human
gugcugggauauauggcugaguca

SEQ ID NO: 1210318 - RNA, 20 nt, Human
guggaauggaauccaggacu

SEQ ID NO: 1210319 - RNA, 23 nt, Human
guggcucaugucuguaaucgcag

SEQ ID NO: 1210320 - RNA, 24 nt, Human
guugcagugagccgagaucgugcu

SEQ ID NO: 1210321 - RNA, 20 nt, Human
uaaaagaggcuguaguagua

SEQ ID NO: 1210322 - RNA, 21 nt, Human
uaaaagaggcuguaguaguau

SEQ ID NO: 1210323 - RNA, 19 nt, Human
uaagaagcuaccacauggc

SEQ ID NO: 1210324 - RNA, 19 nt, Human
uaagaagcuaccacauggc

SEQ ID NO: 1210325 - RNA, 23 nt, Human
uaauuuuuguauuuuucuguaga

SEQ ID NO: 1210326 - RNA, 25 nt, Human
uaauuuuuguauuuuucuguagaga

SEQ ID NO: 1210327 - RNA, 19 nt, Human
uacaaagaggcagggacag

SEQ ID NO: 1210328 - RNA, 22 nt, Human
uacaggcgugagccacugugcc

SEQ ID NO: 1210329 - RNA, 22 nt, Human
uacaggcgugagccacugugcc

SEQ ID NO: 1210330 - RNA, 23 nt, Human
uacaggcgugagccacugugccu

SEQ ID NO: 1210331 - RNA, 19 nt, Human
uacauugucacaagaagcc

SEQ ID NO: 1210332 - RNA, 20 nt, Human
uacucugugucauuuaagac

SEQ ID NO: 1210333 - RNA, 24 nt, Human
uacugggauuacaggcgugagcca

SEQ ID NO: 1210334 - RNA, 22 nt, Human
uagagaugagguuucaccaugu

SEQ ID NO: 1210335 - RNA, 19 nt, Human
uagcaaaggcuccccuugg

SEQ ID NO: 1210336 - RNA, 24 nt, Human
uagccuggccgacauggugaaacc

SEQ ID NO: 1210337 - RNA, 23 nt, Human
uauugcacuccagccugggagac

SEQ ID NO: 1210338 - RNA, 24 nt, Human
uauugcacuccagccugggagaca

SEQ ID NO: 1210339 - RNA, 19 nt, Human
ucaaaaaaaaaaaaaaaaa

SEQ ID NO: 1210340 - RNA, 21 nt, Human
ucaaucagccuagaccaccua

SEQ ID NO: 1210341 - RNA, 18 nt, Human
ucacccaggcuggagugc

SEQ ID NO: 1210342 - RNA, 19 nt, Human
ucaccugaggucaggaguu

SEQ ID NO: 1210343 - RNA, 23 nt, Human
ucacugcaaccuccaccucccag

SEQ ID NO: 1210344 - RNA, 24 nt, Human
ucacugcaaccuccaccucccagg

SEQ ID NO: 1210345 - RNA, 26 nt, Human
ucacugcaaccuccaccucccagguu

SEQ ID NO: 1210346 - RNA, 23 nt, Human
ucagcucacaccugagccagccu

SEQ ID NO: 1210347 - RNA, 23 nt, Human
uccagccugggagacagagugag

SEQ ID NO: 1210348 - RNA, 24 nt, Human
uccagccugggagacagagugaga

SEQ ID NO: 1210349 - RNA, 18 nt, Human
uccauaagaagcuaccac

SEQ ID NO: 1210350 - RNA, 24 nt, Human
ucccaaaguacugggauuacaggc

SEQ ID NO: 1210351 - RNA, 21 nt, Human
ucccagguucaagcgauucuc

SEQ ID NO: 1210352 - RNA, 21 nt, Human
ucccagguucaagcgauucuc

SEQ ID NO: 1210353 - RNA, 24 nt, Human
ucccagguucaagcgauucucuug

SEQ ID NO: 1210354 - RNA, 23 nt, Human
ucccgaguaacugggacuacagg

SEQ ID NO: 1210355 - RNA, 20 nt, Human
ucccuguguacauguguccc

SEQ ID NO: 1210356 - RNA, 24 nt, Human
ucgcuugaaccugggaggcggagg

SEQ ID NO: 1210357 - RNA, 23 nt, Human
ucuaaugcccuucagugcagagc

SEQ ID NO: 1210358 - RNA, 19 nt, Human
ucucgcucugucacccagg

SEQ ID NO: 1210359 - RNA, 22 nt, Human
ucucgcucugucacccaggcug

SEQ ID NO: 1210360 - RNA, 23 nt, Human
ucucgcucugucacccaggcugg

SEQ ID NO: 1210361 - RNA, 24 nt, Human
ucucgcucugucacccaggcugga

SEQ ID NO: 1210362 - RNA, 26 nt, Human
ucucgcucugucacccaggcuggagu

SEQ ID NO: 1210363 - RNA, 27 nt, Human
ucucgcucugucacccaggcuggagug

SEQ ID NO: 1210364 - RNA, 20 nt, Human
ucucugaggcuggacuuaac

SEQ ID NO: 1210365 - RNA, 22 nt, Human
ucucugaggcuggacuuaacuc

SEQ ID NO: 1210366 - RNA, 22 nt, Human
ucugcaggcagccugggcccac

SEQ ID NO: 1210367 - RNA, 25 nt, Human
ucugcaggcagccugggcccaccug

SEQ ID NO: 1210368 - RNA, 27 nt, Human
ucugcaggcagccugggcccaccugga

SEQ ID NO: 1210369 - RNA, 24 nt, Human
ucuguaaucgcagcacuuugggag

SEQ ID NO: 1210370 - RNA, 24 nt, Human
ucugucacccaggcuggagugcaa

SEQ ID NO: 1210371 - RNA, 23 nt, Human
ucugucucaaaaaaaaaaaaaaa

SEQ ID NO: 1210372 - RNA, 19 nt, Human
ucuuuggcuuuuuccucuu

SEQ ID NO: 1210373 - RNA, 20 nt, Human
ugaaaacaagugcagcacag

SEQ ID NO: 1210374 - RNA, 24 nt, Human
ugaaauaggcuucuucacugcaga

SEQ ID NO: 1210375 - RNA, 24 nt, Human
ugaaccugggaggcggagguugca

SEQ ID NO: 1210376 - RNA, 22 nt, Human
ugaagcaccuuacggaauuggu

SEQ ID NO: 1210377 - RNA, 22 nt, Human
ugagauggagucucgcucuguc

SEQ ID NO: 1210378 - RNA, 22 nt, Human
ugagccgagaucgugcuauugc

SEQ ID NO: 1210379 - RNA, 18 nt, Human
ugaggaacucaguggccc

SEQ ID NO: 1210380 - RNA, 24 nt, Human
ugaggcaggagaaucgcuugaacc

SEQ ID NO: 1210381 - RNA, 25 nt, Human
ugaggcaggagaaucgcuugaaccu

SEQ ID NO: 1210382 - RNA, 24 nt, Human
ugagguuucaccauguuggccagg

SEQ ID NO: 1210383 - RNA, 18 nt, Human
ugaucucaggugauccgc

SEQ ID NO: 1210384 - RNA, 24 nt, Human
ugaucucaggugauccgccugccu

SEQ ID NO: 1210385 - RNA, 24 nt, Human
ugaugccagacccugcagcucuaa

SEQ ID NO: 1210386 - RNA, 20 nt, Human
ugauuuuguuuuuguuuuuu

SEQ ID NO: 1210387 - RNA, 23 nt, Human
ugcaaccuaaacagacaguuuug

SEQ ID NO: 1210388 - RNA, 25 nt, Human
ugcacaaaaacaaacagcagccacc

SEQ ID NO: 1210389 - RNA, 18 nt, Human
ugcacuccagccugggag

SEQ ID NO: 1210390 - RNA, 20 nt, Human
ugcacuccagccugggagac

SEQ ID NO: 1210391 - RNA, 22 nt, Human
ugcacuccagccugggagacag

SEQ ID NO: 1210392 - RNA, 21 nt, Human
ugcagagcccuacaaacacac

SEQ ID NO: 1210393 - RNA, 22 nt, Human
ugcauggaucuaaugcccuuca

SEQ ID NO: 1210394 - RNA, 20 nt, Human
ugccagaauagaaccuggac

SEQ ID NO: 1210395 - RNA, 23 nt, Human
ugccagggaggcaggcagggaug

SEQ ID NO: 1210396 - RNA, 24 nt, Human
ugccucagccucccgaguaacugg

SEQ ID NO: 1210397 - RNA, 24 nt, Human
ugccuuaaccucccaaaguacugg

SEQ ID NO: 1210398 - RNA, 18 nt, Human
ugcggagagaggaggcug

SEQ ID NO: 1210399 - RNA, 21 nt, Human
ugcggagagaggaggcugaga

SEQ ID NO: 1210400 - RNA, 22 nt, Human
uggaauggaauccaggacacag

SEQ ID NO: 1210401 - RNA, 23 nt, Human
uggaauggaauccaggacacagu

SEQ ID NO: 1210402 - RNA, 23 nt, Human
uggacucaauuuagcucauaaca

SEQ ID NO: 1210403 - RNA, 21 nt, Human
uggagcaggccgggcguggug

SEQ ID NO: 1210404 - RNA, 23 nt, Human
uggagugcaauggcacgaucuug

SEQ ID NO: 1210405 - RNA, 24 nt, Human
uggagugcaauggcacgaucuugg

SEQ ID NO: 1210406 - RNA, 23 nt, Human
uggaucaccugaggucaggaguu

SEQ ID NO: 1210407 - RNA, 24 nt, Human
uggaucaccugaggucaggaguuu

SEQ ID NO: 1210408 - RNA, 27 nt, Human
uggaucaccugaggucaggaguuugag

SEQ ID NO: 1210409 - RNA, 22 nt, Human
uggcaggcaccuguaauuccag

SEQ ID NO: 1210410 - RNA, 24 nt, Human
uggccaggcuggucuugaacucuu

SEQ ID NO: 1210411 - RNA, 18 nt, Human
uggcccagggccacuugg

SEQ ID NO: 1210412 - RNA, 24 nt, Human
uggccgacauggugaaacccuggc

SEQ ID NO: 1210413 - RNA, 18 nt, Human
uggcucaugucuguaauc

SEQ ID NO: 1210414 - RNA, 24 nt, Human
uggcucaugucuguaaucgcagca

SEQ ID NO: 1210415 - RNA, 19 nt, Human
ugggaaagguaguuuuuau

SEQ ID NO: 1210416 - RNA, 22 nt, Human
ugggacuacaggugcacgccac

SEQ ID NO: 1210417 - RNA, 22 nt, Human
ugggacuacaggugcacgccac

SEQ ID NO: 1210418 - RNA, 24 nt, Human
ugggacuacaggugcacgccacua

SEQ ID NO: 1210419 - RNA, 21 nt, Human
ugggagacagagugagacucu

SEQ ID NO: 1210420 - RNA, 24 nt, Human
ugggaggccgaggcagguggauca

SEQ ID NO: 1210421 - RNA, 29 nt, Human
ugggaggcggagguugcagugacaacggu

SEQ ID NO: 1210422 - RNA, 24 nt, Human
ugggaggcggagguugcagugagc

SEQ ID NO: 1210423 - RNA, 18 nt, Human
ugggauuacaggcgugag

SEQ ID NO: 1210424 - RNA, 21 nt, Human
ugggauuacaggcgugagcca

SEQ ID NO: 1210425 - RNA, 22 nt, Human
ugggauuacaggcgugagccac

SEQ ID NO: 1210426 - RNA, 22 nt, Human
ugggauuacaggcgugagccac

SEQ ID NO: 1210427 - RNA, 22 nt, Human
ugggauuacaggcgugagccac

SEQ ID NO: 1210428 - RNA, 23 nt, Human
ugggauuacaggcgugagccacu

SEQ ID NO: 1210429 - RNA, 24 nt, Human
ugggauuacaggcgugagccacug

SEQ ID NO: 1210430 - RNA, 21 nt, Human
uggggugguagugauaggggc

SEQ ID NO: 1210431 - RNA, 25 nt, Human
ugguagugauaggggcgcuucgauu

SEQ ID NO: 1210432 - RNA, 24 nt, Human
ugguggcaggcaccuguaauucca

SEQ ID NO: 1210433 - RNA, 21 nt, Human
ugguggcucaugucuguaauc

SEQ ID NO: 1210434 - RNA, 24 nt, Human
uggugggggagcugggccagcugg

SEQ ID NO: 1210435 - RNA, 23 nt, Human
uguagagaugagguuucaccaug

SEQ ID NO: 1210436 - RNA, 24 nt, Human
uguagagaugagguuucaccaugu

SEQ ID NO: 1210437 - RNA, 20 nt, Human
ugucacccaggcuggagugc

SEQ ID NO: 1210438 - RNA, 22 nt, Human
ugucacccaggcuggagugcaa

SEQ ID NO: 1210439 - RNA, 21 nt, Human
uguccagaauuuaucccaggg

SEQ ID NO: 1210440 - RNA, 22 nt, Human
uguccagaauuuaucccagggc

SEQ ID NO: 1210441 - RNA, 20 nt, Human
ugucccauggaguucucccu

SEQ ID NO: 1210442 - RNA, 27 nt, Human
ugucucaaccuuuagugcgcucauugu

SEQ ID NO: 1210443 - RNA, 24 nt, Human
ugucuguaaucgcagcacuuuggg

SEQ ID NO: 1210444 - RNA, 19 nt, Human
ugugaagcaccuuacggaa

SEQ ID NO: 1210445 - RNA, 20 nt, Human
uguggugggggagcugggcc

SEQ ID NO: 1210446 - RNA, 24 nt, Human
uguucugcagaggcuauucaggua

SEQ ID NO: 1210447 - RNA, 21 nt, Human
uuaaagaaaccaucaauacuc

SEQ ID NO: 1210448 - RNA, 18 nt, Human
uuagcugggcgugguggc

SEQ ID NO: 1210449 - RNA, 24 nt, Human
uuagcugggcgugguggcaggcac

SEQ ID NO: 1210450 - RNA, 23 nt, Human
uucaagcgauucucuugccucag

SEQ ID NO: 1210451 - RNA, 20 nt, Human
uucagacaggaggaggaaug

SEQ ID NO: 1210452 - RNA, 24 nt, Human
uuccuccuuuuugcugggagggag

SEQ ID NO: 1210453 - RNA, 24 nt, Human
uuccugcuagcaaaggcuccccuu

SEQ ID NO: 1210454 - RNA, 24 nt, Human
uuccuugucuuaugaagacaccag

SEQ ID NO: 1210455 - RNA, 19 nt, Human
uucuguuuaaggucccuuc

SEQ ID NO: 1210456 - RNA, 24 nt, Human
uugaaccugggaggcggagguugc

SEQ ID NO: 1210457 - RNA, 23 nt, Human
uugaugcaggaguagagagcaaa

SEQ ID NO: 1210458 - RNA, 18 nt, Human
uugcagugagccgagauc

SEQ ID NO: 1210459 - RNA, 21 nt, Human
uugcagugagccgagaucgug

SEQ ID NO: 1210460 - RNA, 22 nt, Human
uugcagugagccgagaucgugc

SEQ ID NO: 1210461 - RNA, 25 nt, Human
uugggaggccgaggcagguggauca

SEQ ID NO: 1210462 - RNA, 23 nt, Human
uugggguggacucaauuuagcuc

SEQ ID NO: 1210463 - RNA, 19 nt, Human
uuuauauucugucucucug

SEQ ID NO: 1210464 - RNA, 24 nt, Human
uuucaccauguuggccaggcuggu

SEQ ID NO: 1210465 - RNA, 22 nt, Human
uuugaacaucugaauuuugggg

SEQ ID NO: 1210466 - RNA, 21 nt, Human
uuuuccucuuugugugucugu

SEQ ID NO: 1210467 - RNA, 18 nt, Human
uuuucugagauggagucu

SEQ ID NO: 1210468 - RNA, 21 nt, Human
uuuuuguauuuuucuguagag

SEQ ID NO: 1210469 - RNA, 24 nt, Human
uuuuuguauuuuucuguagagaug

SEQ ID NO: 1210470 - RNA, 18 nt, Human
aagcuccccaaaccccac

SEQ ID NO: 1210471 - RNA, 20 nt, Human
aagcuccccaaaccccaccu

SEQ ID NO: 1210472 - RNA, 22 nt, Human
aagcuccccaaaccccaccuuc

SEQ ID NO: 1210473 - RNA, 21 nt, Human
accaucagugaaacagaagca

SEQ ID NO: 1210474 - RNA, 25 nt, Human
acuuugagaaacaacugaugaaaaa

SEQ ID NO: 1210475 - RNA, 18 nt, Human
aguguccauccucccagg

SEQ ID NO: 1210476 - RNA, 20 nt, Human
auguuuuacaaccaugaaac

SEQ ID NO: 1210477 - RNA, 18 nt, Human
caacugaugaaaaauaca

SEQ ID NO: 1210478 - RNA, 21 nt, Human
caccaucagugaaacagaagc

SEQ ID NO: 1210479 - RNA, 22 nt, Human
caccuucacagccucuuccaca

SEQ ID NO: 1210480 - RNA, 22 nt, Human
ccaaaccccaccuucacagccu

SEQ ID NO: 1210481 - RNA, 20 nt, Human
ccaagcuccccaaaccccac

SEQ ID NO: 1210482 - RNA, 19 nt, Human
ccgcagcucggccggcgcc

SEQ ID NO: 1210483 - RNA, 21 nt, Human
ccgcagcucggccggcgccgg

SEQ ID NO: 1210484 - RNA, 19 nt, Human
cgcagcucggccggcgccg

SEQ ID NO: 1210485 - RNA, 21 nt, Human
cggccggagcagcucccgcgg

SEQ ID NO: 1210486 - RNA, 19 nt, Human
cggcucccgcagcucggcc

SEQ ID NO: 1210487 - RNA, 18 nt, Human
cuauuguguuaugauguc

SEQ ID NO: 1210488 - RNA, 24 nt, Human
cuccccaaaccccaccuucacagc

SEQ ID NO: 1210489 - RNA, 21 nt, Human
gaaacagaagcagaaguacga

SEQ ID NO: 1210490 - RNA, 23 nt, Human
gcucccgcggcgucagcuggugc

SEQ ID NO: 1210491 - RNA, 21 nt, Human
uacagcaaacauuucagauag

SEQ ID NO: 1210492 - RNA, 22 nt, Human
uaggaagguggcuguuacagca

SEQ ID NO: 1210493 - RNA, 21 nt, Human
ucacuugcaaauucaaggauu

SEQ ID NO: 1210494 - RNA, 22 nt, Human
ucagugaaacagaagcagaagu

SEQ ID NO: 1210495 - RNA, 26 nt, Human
ugaaacagaagcagaaguacgaugac

SEQ ID NO: 1210496 - RNA, 22 nt, Human
ugucaggguggcagaugugccc

SEQ ID NO: 1210497 - RNA, 21 nt, Human
uguuuuacaaccaugaaaaca

SEQ ID NO: 1210498 - RNA, 25 nt, Human
uucacagccucuuccacacgucucu

SEQ ID NO: 1210499 - RNA, 21 nt, Human
aaaauuuaaaauuuguaaaaa

SEQ ID NO: 1210500 - RNA, 19 nt, Human
aaacaauucucuguaagga

SEQ ID NO: 1210501 - RNA, 20 nt, Human
aaagacugaugcaaauugga

SEQ ID NO: 1210502 - RNA, 25 nt, Human
aagaaucuucuaccaaguacucuuu

SEQ ID NO: 1210503 - RNA, 22 nt, Human
aagagacuuuauuacuuacuaa

SEQ ID NO: 1210504 - RNA, 21 nt, Human
aagcacgaagacuucucagcu

SEQ ID NO: 1210505 - RNA, 25 nt, Human
aaguaccuucuuguguaucaauucc

SEQ ID NO: 1210506 - RNA, 19 nt, Human
accaccaggucucagaaac

SEQ ID NO: 1210507 - RNA, 18 nt, Human
acuuagguuaaaucuuuc

SEQ ID NO: 1210508 - RNA, 20 nt, Human
agaaagcuaauuauucacaa

SEQ ID NO: 1210509 - RNA, 19 nt, Human
agcagcuccggccuagccc

SEQ ID NO: 1210510 - RNA, 24 nt, Human
agcuggccucuaacucgggccagc

SEQ ID NO: 1210511 - RNA, 19 nt, Human
agguaaacaaaucugaagc

SEQ ID NO: 1210512 - RNA, 22 nt, Human
aggucucagaaacuucugagcu

SEQ ID NO: 1210513 - RNA, 20 nt, Human
auuucaaauagacuuggcug

SEQ ID NO: 1210514 - RNA, 24 nt, Human
caaaauggcccauaucauacugaa

SEQ ID NO: 1210515 - RNA, 18 nt, Human
cacguccgcccaagcaac

SEQ ID NO: 1210516 - RNA, 24 nt, Human
cacguccgcccaagcaacugagga

SEQ ID NO: 1210517 - RNA, 22 nt, Human
caggagaaccugaaugcgccgc

SEQ ID NO: 1210518 - RNA, 21 nt, Human
caugaguaaagauuagagaaa

SEQ ID NO: 1210519 - RNA, 22 nt, Human
cauuugagaaagcuaauuauuc

SEQ ID NO: 1210520 - RNA, 19 nt, Human
cccacacuuaaaccuauac

SEQ ID NO: 1210521 - RNA, 23 nt, Human
cccuuaacucugggaccgggccc

SEQ ID NO: 1210522 - RNA, 19 nt, Human
ccgcgcgucuagguccugc

SEQ ID NO: 1210523 - RNA, 19 nt, Human
ccgcuguuuccagccucag

SEQ ID NO: 1210524 - RNA, 20 nt, Human
ccgcuguuuccagccucagc

SEQ ID NO: 1210525 - RNA, 21 nt, Human
ccuagccccgcccacuuuggc

SEQ ID NO: 1210526 - RNA, 22 nt, Human
ccuauaccaagacauucaggga

SEQ ID NO: 1210527 - RNA, 23 nt, Human
ccuauaccaagacauucagggac

SEQ ID NO: 1210528 - RNA, 22 nt, Human
cgaccaccaggucucagaaacu

SEQ ID NO: 1210529 - RNA, 23 nt, Human
cgaugcgauccucuagugaaugg

SEQ ID NO: 1210530 - RNA, 21 nt, Human
cggacagauuggguccacguc

SEQ ID NO: 1210531 - RNA, 24 nt, Human
cgucugccuuugguuccgcuguuu

SEQ ID NO: 1210532 - RNA, 20 nt, Human
cugccaaaggguccuguugg

SEQ ID NO: 1210533 - RNA, 22 nt, Human
cuguuugcucccgggcuucaua

SEQ ID NO: 1210534 - RNA, 23 nt, Human
gagaaaaaagaaaugcuaaaugc

SEQ ID NO: 1210535 - RNA, 21 nt, Human
ggagcucuucucauagagacu

SEQ ID NO: 1210536 - RNA, 20 nt, Human
ggaggccuggugaucucaag

SEQ ID NO: 1210537 - RNA, 24 nt, Human
ggccuggugaucucaaguggcugg

SEQ ID NO: 1210538 - RNA, 18 nt, Human
ggcugagcgcccucuggg

SEQ ID NO: 1210539 - RNA, 21 nt, Human
ggguuuccaaacgacuuuccc

SEQ ID NO: 1210540 - RNA, 20 nt, Human
gucuucagucccguguagag

SEQ ID NO: 1210541 - RNA, 21 nt, Human
uaaaaagccuacauuugagaa

SEQ ID NO: 1210542 - RNA, 18 nt, Human
uaaaggcauugugagcua

SEQ ID NO: 1210543 - RNA, 24 nt, Human
uaacaugaguaaagauuagagaaa

SEQ ID NO: 1210544 - RNA, 25 nt, Human
uaccaagacauucagggacauaaca

SEQ ID NO: 1210545 - RNA, 23 nt, Human
uauucuguuuggccagacaccua

SEQ ID NO: 1210546 - RNA, 19 nt, Human
ucaagaguccaauaugaug

SEQ ID NO: 1210547 - RNA, 22 nt, Human
ucaauuuucagacugucccaca

SEQ ID NO: 1210548 - RNA, 19 nt, Human
ucccgggcuucauauucuc

SEQ ID NO: 1210549 - RNA, 20 nt, Human
ucccugaguguaacuuucuc

SEQ ID NO: 1210550 - RNA, 19 nt, Human
uccgcuguuuccagccuca

SEQ ID NO: 1210551 - RNA, 18 nt, Human
ucuguuuggccagacacc

SEQ ID NO: 1210552 - RNA, 21 nt, Human
ucuucagucccguguagaguu

SEQ ID NO: 1210553 - RNA, 19 nt, Human
ucuuguggacuaaguaccu

SEQ ID NO: 1210554 - RNA, 24 nt, Human
ucuuuugacgaugcgauccucuag

SEQ ID NO: 1210555 - RNA, 24 nt, Human
ugaaauuuuaucaguauaacacac

SEQ ID NO: 1210556 - RNA, 19 nt, Human
ugaacaaaauggcccauau

SEQ ID NO: 1210557 - RNA, 22 nt, Human
ugaagcacgaagacuucucagc

SEQ ID NO: 1210558 - RNA, 18 nt, Human
ugaucucaaguggcugcc

SEQ ID NO: 1210559 - RNA, 20 nt, Human
ugccaaaggguccuguuggc

SEQ ID NO: 1210560 - RNA, 19 nt, Human
ugcuguaguauguauucug

SEQ ID NO: 1210561 - RNA, 25 nt, Human
uggaaggagagggcaacaagacgac

SEQ ID NO: 1210562 - RNA, 19 nt, Human
uggccugggguuuccaaac

SEQ ID NO: 1210563 - RNA, 19 nt, Human
uggcugccucccaccagca

SEQ ID NO: 1210564 - RNA, 24 nt, Human
uggcugccucccaccagcagcucc

SEQ ID NO: 1210565 - RNA, 20 nt, Human
ugggaccgggcccugcaccc

SEQ ID NO: 1210566 - RNA, 19 nt, Human
uggguccacguccgcccaa

SEQ ID NO: 1210567 - RNA, 22 nt, Human
uguuaaagaaucuucuaccaag

SEQ ID NO: 1210568 - RNA, 22 nt, Human
uuacaacaucuuucucuuuggu

SEQ ID NO: 1210569 - RNA, 22 nt, Human
uucaagaguccaauaugaugca

SEQ ID NO: 1210570 - RNA, 24 nt, Human
ugccagaaggauacccgauucaau

SEQ ID NO: 1210571 - RNA, 24 nt, Human
aaaauccucugaagaaaggugacu

SEQ ID NO: 1210572 - RNA, 18 nt, Human
aagaaugccaaaauccuc

SEQ ID NO: 1210573 - RNA, 19 nt, Human
caaggagcuuuuggccaau

SEQ ID NO: 1210574 - RNA, 22 nt, Human
cauguguggccggauuauaagc

SEQ ID NO: 1210575 - RNA, 19 nt, Human
gaaaggugacucacaagga

SEQ ID NO: 1210576 - RNA, 20 nt, Human
gguucaacucuuaauucaug

SEQ ID NO: 1210577 - RNA, 23 nt, Human
ugaaauaggcagggucuaggucc

SEQ ID NO: 1210578 - RNA, 24 nt, Human
ugacuuuugggauuuagaucugug

SEQ ID NO: 1210579 - RNA, 21 nt, Human
uggccggauuauaagcugcac

SEQ ID NO: 1210580 - RNA, 22 nt, Human
aaaaacgacccccuuucuggga

SEQ ID NO: 1210581 - RNA, 22 nt, Human
aaagcccuuauaaauacccucc

SEQ ID NO: 1210582 - RNA, 20 nt, Human
aagcggcgcuugcucuuggu

SEQ ID NO: 1210583 - RNA, 18 nt, Human
aauuccuaucaccuccuc

SEQ ID NO: 1210584 - RNA, 19 nt, Human
accagaacaaaaggggcca

SEQ ID NO: 1210585 - RNA, 18 nt, Human
accuccaaccuguuccca

SEQ ID NO: 1210586 - RNA, 20 nt, Human
accuccaaccuguucccaga

SEQ ID NO: 1210587 - RNA, 26 nt, Human
acucccucucuccuccaucccucuuu

SEQ ID NO: 1210588 - RNA, 22 nt, Human
acucuuacaagccucugggggc

SEQ ID NO: 1210589 - RNA, 24 nt, Human
agaaaggacccuuuguucuccaga

SEQ ID NO: 1210590 - RNA, 21 nt, Human
agaccuccaaccuguucccag

SEQ ID NO: 1210591 - RNA, 25 nt, Human
agcugggagucagacaguccacagc

SEQ ID NO: 1210592 - RNA, 21 nt, Human
aggcaggaugagggcugggag

SEQ ID NO: 1210593 - RNA, 25 nt, Human
aucaccccuagacaccagaacaaaa

SEQ ID NO: 1210594 - RNA, 20 nt, Human
augucgaacucguccuucuc

SEQ ID NO: 1210595 - RNA, 22 nt, Human
auuggggugggcccuaacagag

SEQ ID NO: 1210596 - RNA, 25 nt, Human
caaaaagcccuuauaaauacccucu

SEQ ID NO: 1210597 - RNA, 19 nt, Human
caauaguaaaaugcgcccu

SEQ ID NO: 1210598 - RNA, 24 nt, Human
caaucaccccuagacaccagaaca

SEQ ID NO: 1210599 - RNA, 24 nt, Human
cacagauaagaccuccaaccuguu

SEQ ID NO: 1210600 - RNA, 22 nt, Human
cacccagacgcuaagcagagac

SEQ ID NO: 1210601 - RNA, 24 nt, Human
cacccagacgcuaagcagagacgg

SEQ ID NO: 1210602 - RNA, 23 nt, Human
caccccuccccagagaaaggacc

SEQ ID NO: 1210603 - RNA, 23 nt, Human
cacgcggaaaaagaagcggcgcu

SEQ ID NO: 1210604 - RNA, 21 nt, Human
cacuuccuuccuccuauccug

SEQ ID NO: 1210605 - RNA, 25 nt, Human
cacuuccuuccuccuauccugucuc

SEQ ID NO: 1210606 - RNA, 21 nt, Human
caucuuggccucagcugggag

SEQ ID NO: 1210607 - RNA, 22 nt, Human
ccaauacacaacugguugaaga

SEQ ID NO: 1210608 - RNA, 24 nt, Human
ccaccaaaaagcccuuauaaauac

SEQ ID NO: 1210609 - RNA, 18 nt, Human
ccacugcaccccucccca

SEQ ID NO: 1210610 - RNA, 24 nt, Human
ccaguggcccccacuggguaccca

SEQ ID NO: 1210611 - RNA, 22 nt, Human
cccacuggguacccaucuccca

SEQ ID NO: 1210612 - RNA, 22 nt, Human
cccagagacccagucccucucc

SEQ ID NO: 1210613 - RNA, 19 nt, Human
ccccaaguccugggaaccc

SEQ ID NO: 1210614 - RNA, 22 nt, Human
cccccaaguccugggaacccag

SEQ ID NO: 1210615 - RNA, 23 nt, Human
cccccaaguccugggaacccagg

SEQ ID NO: 1210616 - RNA, 20 nt, Human
ccccgcccacugcaccccuc

SEQ ID NO: 1210617 - RNA, 18 nt, Human
ccccuagacaccagaaca

SEQ ID NO: 1210618 - RNA, 24 nt, Human
cccuccccauccugucccugucca

SEQ ID NO: 1210619 - RNA, 20 nt, Human
cccucucuccuccaucccuc

SEQ ID NO: 1210620 - RNA, 22 nt, Human
ccucaagcucuuugcucccuca

SEQ ID NO: 1210621 - RNA, 18 nt, Human
ccuccacuuccuuccucc

SEQ ID NO: 1210622 - RNA, 20 nt, Human
ccuccaucccucuuuuuguc

SEQ ID NO: 1210623 - RNA, 24 nt, Human
ccuccuccuccacuuccuuccucc

SEQ ID NO: 1210624 - RNA, 24 nt, Human
ccuccuuccaauuccuaucaccuc

SEQ ID NO: 1210625 - RNA, 18 nt, Human
ccuuccuccuauccuguc

SEQ ID NO: 1210626 - RNA, 18 nt, Human
cgcaccuucuugagcggc

SEQ ID NO: 1210627 - RNA, 22 nt, Human
cgcccacugcaccccuccccag

SEQ ID NO: 1210628 - RNA, 23 nt, Human
cggagacccuccaguggccccca

SEQ ID NO: 1210629 - RNA, 24 nt, Human
cggcuucuaccuccuuccaauucc

SEQ ID NO: 1210630 - RNA, 22 nt, Human
cuagacaccagaacaaaagggg

SEQ ID NO: 1210631 - RNA, 24 nt, Human
cuccagacucccucucuccuccau

SEQ ID NO: 1210632 - RNA, 18 nt, Human
cuccaucccucaucccaa

SEQ ID NO: 1210633 - RNA, 24 nt, Human
cucccaccaaaaagcccuuauaaa

SEQ ID NO: 1210634 - RNA, 22 nt, Human
cuccccagagaaaggacccuuu

SEQ ID NO: 1210635 - RNA, 21 nt, Human
cucccugaguccgaauuucca

SEQ ID NO: 1210636 - RNA, 22 nt, Human
cucccugcgcugcugcuucugc

SEQ ID NO: 1210637 - RNA, 28 nt, Human
cuccuucgucccucuccccucuuccucu

SEQ ID NO: 1210638 - RNA, 20 nt, Human
cucugcacggcuucuaccuc

SEQ ID NO: 1210639 - RNA, 21 nt, Human
cugcugcuccuccgacacgcg

SEQ ID NO: 1210640 - RNA, 23 nt, Human
cuuugcucccucauguccuucug

SEQ ID NO: 1210641 - RNA, 20 nt, Human
gaacagagggguaaggcagg

SEQ ID NO: 1210642 - RNA, 19 nt, Human
gacccccaaguccugggaa

SEQ ID NO: 1210643 - RNA, 21 nt, Human
gcaccccuccccagagaaagg

SEQ ID NO: 1210644 - RNA, 20 nt, Human
gcaggaugagggcugggagu

SEQ ID NO: 1210645 - RNA, 18 nt, Human
gcccacugcaccccuccc

SEQ ID NO: 1210646 - RNA, 20 nt, Human
gcccacugcaccccucccca

SEQ ID NO: 1210647 - RNA, 22 nt, Human
gcccccacuggguacccaucuc

SEQ ID NO: 1210648 - RNA, 23 nt, Human
gcccuuauaaauacccuccccau

SEQ ID NO: 1210649 - RNA, 19 nt, Human
gcgcugcugcuucugcugc

SEQ ID NO: 1210650 - RNA, 20 nt, Human
ggaacagcuggcgccggcug

SEQ ID NO: 1210651 - RNA, 21 nt, Human
ggcaggaugagggcugggagu

SEQ ID NO: 1210652 - RNA, 20 nt, Human
ggcugggaacagagggguaa

SEQ ID NO: 1210653 - RNA, 20 nt, Human
ggcuggggcugggaacagaa

SEQ ID NO: 1210654 - RNA, 24 nt, Human
gggccagagugugcccggagaccc

SEQ ID NO: 1210655 - RNA, 26 nt, Human
gucagccccgcccacugcaccccucc

SEQ ID NO: 1210656 - RNA, 18 nt, Human
guccuucugcccugggau

SEQ ID NO: 1210657 - RNA, 23 nt, Human
uacaagccucugggggcuuggca

SEQ ID NO: 1210658 - RNA, 22 nt, Human
uauccugucucucaccuccuuc

SEQ ID NO: 1210659 - RNA, 29 nt, Human
ucacccagacgcuaagcagagacggggac

SEQ ID NO: 1210660 - RNA, 21 nt, Human
ucaccccuagacaccagaaca

SEQ ID NO: 1210661 - RNA, 22 nt, Human
uccacagauaagaccuccaacc

SEQ ID NO: 1210662 - RNA, 22 nt, Human
ucccaacucuuacaagccucug

SEQ ID NO: 1210663 - RNA, 20 nt, Human
ucccagagacccagucccuc

SEQ ID NO: 1210664 - RNA, 26 nt, Human
ucccggaccagccggaguauggcauu

SEQ ID NO: 1210665 - RNA, 20 nt, Human
uccuaucaccuccuccucca

SEQ ID NO: 1210666 - RNA, 20 nt, Human
uccuccacuuccuuccuccu

SEQ ID NO: 1210667 - RNA, 20 nt, Human
uccugucucucaccuccuuc

SEQ ID NO: 1210668 - RNA, 19 nt, Human
uccuucgucccucuccccu

SEQ ID NO: 1210669 - RNA, 26 nt, Human
ucuaucuucccuucuucccucugaag

SEQ ID NO: 1210670 - RNA, 22 nt, Human
ucuccaucccucaucccaacuc

SEQ ID NO: 1210671 - RNA, 22 nt, Human
ucucccagucauugcccagccc

SEQ ID NO: 1210672 - RNA, 26 nt, Human
ucucccuccucuucuucaucgcuccu

SEQ ID NO: 1210673 - RNA, 18 nt, Human
ucucuccuccaucccucu

SEQ ID NO: 1210674 - RNA, 18 nt, Human
ucugccagcugguuccug

SEQ ID NO: 1210675 - RNA, 19 nt, Human
ugccccaucuuggccucag

SEQ ID NO: 1210676 - RNA, 20 nt, Human
ugccguagaggaacagggag

SEQ ID NO: 1210677 - RNA, 18 nt, Human
ugcuucugcugcuccucc

SEQ ID NO: 1210678 - RNA, 20 nt, Human
ugggaacagagggguaaggc

SEQ ID NO: 1210679 - RNA, 23 nt, Human
ugggaagggccagagugugcccg

SEQ ID NO: 1210680 - RNA, 23 nt, Human
uguccaggauucucuuccccgau

SEQ ID NO: 1210681 - RNA, 19 nt, Human
ugucccggaccagccggag

SEQ ID NO: 1210682 - RNA, 27 nt, Human
uguucuccagacucccucucuccucca

SEQ ID NO: 1210683 - RNA, 23 nt, Human
uucccuucuucuggaucacagcc

SEQ ID NO: 1210684 - RNA, 24 nt, Human
uuccucaagcucuuugcucccuca

SEQ ID NO: 1210685 - RNA, 19 nt, Human
uucgucccucuccccucuu

SEQ ID NO: 1210686 - RNA, 22 nt, Human
aaagacacagacuucgaagcca

SEQ ID NO: 1210687 - RNA, 20 nt, Human
aaaucacauaaaaaugaggu

SEQ ID NO: 1210688 - RNA, 18 nt, Human
aagaagcccugcccugcc

SEQ ID NO: 1210689 - RNA, 25 nt, Human
aagagcuaggggugccuuuacuggc

SEQ ID NO: 1210690 - RNA, 20 nt, Human
aagccgggaggaggacagga

SEQ ID NO: 1210691 - RNA, 22 nt, Human
aagccgggaggaggacaggaaa

SEQ ID NO: 1210692 - RNA, 20 nt, Human
acaaccaggcugcccacagu

SEQ ID NO: 1210693 - RNA, 18 nt, Human
acaggcaaagacacagac

SEQ ID NO: 1210694 - RNA, 19 nt, Human
agagcccaucccugcaucc

SEQ ID NO: 1210695 - RNA, 18 nt, Human
agaggaacaugucucugc

SEQ ID NO: 1210696 - RNA, 21 nt, Human
agcccaucccugcauccugcc

SEQ ID NO: 1210697 - RNA, 25 nt, Human
agccggugccacagugcucagcaca

SEQ ID NO: 1210698 - RNA, 21 nt, Human
agccucgcagcccgccgccuc

SEQ ID NO: 1210699 - RNA, 20 nt, Human
aggaacuagaagccaggacc

SEQ ID NO: 1210700 - RNA, 21 nt, Human
aggcagccaccagcacugcca

SEQ ID NO: 1210701 - RNA, 24 nt, Human
aggcaggguggaggccaggaggcg

SEQ ID NO: 1210702 - RNA, 24 nt, Human
aggcggaggggguggacugagggc

SEQ ID NO: 1210703 - RNA, 18 nt, Human
aggcugugccccaccccc

SEQ ID NO: 1210704 - RNA, 22 nt, Human
agggaaaagcuggcugagggcu

SEQ ID NO: 1210705 - RNA, 22 nt, Human
agggcugaccggcacccccaug

SEQ ID NO: 1210706 - RNA, 19 nt, Human
aggggguggacugagggcc

SEQ ID NO: 1210707 - RNA, 20 nt, Human
aguagucggugaggggguac

SEQ ID NO: 1210708 - RNA, 24 nt, Human
auaacauggaagacaccuggacac

SEQ ID NO: 1210709 - RNA, 22 nt, Human
auccucuuccagcccaggcuug

SEQ ID NO: 1210710 - RNA, 21 nt, Human
augaagacgaggaugaugcag

SEQ ID NO: 1210711 - RNA, 21 nt, Human
caaagacacagacuucgaagc

SEQ ID NO: 1210712 - RNA, 23 nt, Human
caaagccuccagacuucuccagg

SEQ ID NO: 1210713 - RNA, 22 nt, Human
cacaaccaggcugcccacaguc

SEQ ID NO: 1210714 - RNA, 20 nt, Human
caccguggacacccaccgcg

SEQ ID NO: 1210715 - RNA, 23 nt, Human
cacugccaccaaauguuuaagga

SEQ ID NO: 1210716 - RNA, 23 nt, Human
cagagcccuccaggagggacagg

SEQ ID NO: 1210717 - RNA, 23 nt, Human
cagcacaguaccagugcuuuguu

SEQ ID NO: 1210718 - RNA, 18 nt, Human
cagcagccgugccuggcg

SEQ ID NO: 1210719 - RNA, 21 nt, Human
cagcagccucugccauccucu

SEQ ID NO: 1210720 - RNA, 22 nt, Human
cagccaggcgcaggaacauccc

SEQ ID NO: 1210721 - RNA, 25 nt, Human
caggagggacagggguuagccaggc

SEQ ID NO: 1210722 - RNA, 18 nt, Human
caggcaguuccugaggga

SEQ ID NO: 1210723 - RNA, 20 nt, Human
caggguggaggccaggaggc

SEQ ID NO: 1210724 - RNA, 21 nt, Human
caggguggaggccaggaggcg

SEQ ID NO: 1210725 - RNA, 23 nt, Human
caggucccagagcccuccaggag

SEQ ID NO: 1210726 - RNA, 18 nt, Human
caguucacagcucaaggg

SEQ ID NO: 1210727 - RNA, 30 nt, Human
cauccgaagugcccacaaccaggcugcccc

SEQ ID NO: 1210728 - RNA, 20 nt, Human
caucguggaggaggcagggu

SEQ ID NO: 1210729 - RNA, 19 nt, Human
caucuucaccuccccaccu

SEQ ID NO: 1210730 - RNA, 22 nt, Human
ccacagugcucagcacaguacc

SEQ ID NO: 1210731 - RNA, 19 nt, Human
ccaccaaaugcccccccuu

SEQ ID NO: 1210732 - RNA, 20 nt, Human
ccagcccucccccggucccc

SEQ ID NO: 1210733 - RNA, 24 nt, Human
ccaggcuuguccaggaagccucug

SEQ ID NO: 1210734 - RNA, 21 nt, Human
ccagggcagaacuggugaugu

SEQ ID NO: 1210735 - RNA, 22 nt, Human
ccagggcagaacuggugauguu

SEQ ID NO: 1210736 - RNA, 19 nt, Human
cccacaaccaggcugccca

SEQ ID NO: 1210737 - RNA, 24 nt, Human
cccacaaccaggcugcccacaguc

SEQ ID NO: 1210738 - RNA, 22 nt, Human
cccacccccuuccgucccccca

SEQ ID NO: 1210739 - RNA, 23 nt, Human
cccagcagccucugccauccucu

SEQ ID NO: 1210740 - RNA, 19 nt, Human
cccaggcuuguccaggaag

SEQ ID NO: 1210741 - RNA, 18 nt, Human
cccagggaaaagcuggcu

SEQ ID NO: 1210742 - RNA, 22 nt, Human
cccaugacugugccugaguucc

SEQ ID NO: 1210743 - RNA, 22 nt, Human
ccccacccccuuccgucccccc

SEQ ID NO: 1210744 - RNA, 18 nt, Human
ccccaggaacuagaagcc

SEQ ID NO: 1210745 - RNA, 20 nt, Human
ccccaggaggcugccugacc

SEQ ID NO: 1210746 - RNA, 24 nt, Human
ccccaggaggcugccugacccucu

SEQ ID NO: 1210747 - RNA, 22 nt, Human
ccccaggguauggaagccaggg

SEQ ID NO: 1210748 - RNA, 22 nt, Human
cccccaggaggcugccugaccc

SEQ ID NO: 1210749 - RNA, 18 nt, Human
cccccaugacugugccug

SEQ ID NO: 1210750 - RNA, 22 nt, Human
ccccccaggaggcugccugacc

SEQ ID NO: 1210751 - RNA, 24 nt, Human
ccccccaggaggcugccugacccu

SEQ ID NO: 1210752 - RNA, 18 nt, Human
cccccccuucccauucac

SEQ ID NO: 1210753 - RNA, 22 nt, Human
cccggaguuggauacaaacauc

SEQ ID NO: 1210754 - RNA, 21 nt, Human
cccuccaggagggacaggggu

SEQ ID NO: 1210755 - RNA, 23 nt, Human
ccggugccacagugcucagcaca

SEQ ID NO: 1210756 - RNA, 21 nt, Human
ccguggacacccaccgcggga

SEQ ID NO: 1210757 - RNA, 23 nt, Human
ccuccugcccucccaucccacca

SEQ ID NO: 1210758 - RNA, 22 nt, Human
ccuccuggccccugucccaggc

SEQ ID NO: 1210759 - RNA, 19 nt, Human
ccucuaagugacucgaguu

SEQ ID NO: 1210760 - RNA, 19 nt, Human
ccugaagccgggaggagga

SEQ ID NO: 1210761 - RNA, 22 nt, Human
ccugccugcugagggcgagaau

SEQ ID NO: 1210762 - RNA, 22 nt, Human
ccuuuguagccccacauugccc

SEQ ID NO: 1210763 - RNA, 19 nt, Human
cgaagccagagaccagcgc

SEQ ID NO: 1210764 - RNA, 28 nt, Human
cgagagagguaaaggggccuguccaggu

SEQ ID NO: 1210765 - RNA, 24 nt, Human
cgcagcccgccgccuccugcccuc

SEQ ID NO: 1210766 - RNA, 24 nt, Human
cgcuggccucggccuuugaaaggc

SEQ ID NO: 1210767 - RNA, 19 nt, Human
cguggaggaggcagggucg

SEQ ID NO: 1210768 - RNA, 18 nt, Human
cgugugccucgccgaugc

SEQ ID NO: 1210769 - RNA, 18 nt, Human
cuccaucuucaccucccc

SEQ ID NO: 1210770 - RNA, 18 nt, Human
cuccugcccucccauccc

SEQ ID NO: 1210771 - RNA, 25 nt, Human
cugaaaccucucagcccucaacugg

SEQ ID NO: 1210772 - RNA, 22 nt, Human
cugcauccugccucccacauug

SEQ ID NO: 1210773 - RNA, 20 nt, Human
cugccauccucuuccagccc

SEQ ID NO: 1210774 - RNA, 21 nt, Human
cugcccacagucucggcaagg

SEQ ID NO: 1210775 - RNA, 18 nt, Human
cugcccccuugcuguacu

SEQ ID NO: 1210776 - RNA, 23 nt, Human
cuggcacagcugugauggagcag

SEQ ID NO: 1210777 - RNA, 19 nt, Human
cugggcuggagcugcaugg

SEQ ID NO: 1210778 - RNA, 23 nt, Human
cugugccccacccccuuccgucc

SEQ ID NO: 1210779 - RNA, 27 nt, Human
gaacucagaaagcuucagccaggcggu

SEQ ID NO: 1210780 - RNA, 18 nt, Human
gacacagacuucgaagcc

SEQ ID NO: 1210781 - RNA, 18 nt, Human
gacccucucucuuccaag

SEQ ID NO: 1210782 - RNA, 19 nt, Human
gagaccagcgccggagcug

SEQ ID NO: 1210783 - RNA, 25 nt, Human
gcacagagugaguccucccaaccug

SEQ ID NO: 1210784 - RNA, 20 nt, Human
gcagcccgccgccuccugcc

SEQ ID NO: 1210785 - RNA, 19 nt, Human
gccaggcgcaggaacaucc

SEQ ID NO: 1210786 - RNA, 21 nt, Human
gccccacccccuuccgucccc

SEQ ID NO: 1210787 - RNA, 25 nt, Human
gccccacccccuuccguccccccag

SEQ ID NO: 1210788 - RNA, 21 nt, Human
gcccgccgccuccugcccucc

SEQ ID NO: 1210789 - RNA, 20 nt, Human
gcccggaguuggauacaaac

SEQ ID NO: 1210790 - RNA, 18 nt, Human
gcccugcccugccccaac

SEQ ID NO: 1210791 - RNA, 21 nt, Human
gccgaugcccugcacuuuucc

SEQ ID NO: 1210792 - RNA, 20 nt, Human
gccuuagcugccccaggaac

SEQ ID NO: 1210793 - RNA, 20 nt, Human
gcucaaugacagcuccgugc

SEQ ID NO: 1210794 - RNA, 19 nt, Human
gcuggaaggugaccguucc

SEQ ID NO: 1210795 - RNA, 22 nt, Human
gcugggcuggagcugcaugggu

SEQ ID NO: 1210796 - RNA, 23 nt, Human
ggaacaucccagggaaaagcugg

SEQ ID NO: 1210797 - RNA, 24 nt, Human
ggaagccucugggucuaauggugc

SEQ ID NO: 1210798 - RNA, 23 nt, Human
ggacccucucucuuccaaggccc

SEQ ID NO: 1210799 - RNA, 19 nt, Human
ggagcaccagcccuccccc

SEQ ID NO: 1210800 - RNA, 23 nt, Human
ggaggccaggaggcggagggggu

SEQ ID NO: 1210801 - RNA, 19 nt, Human
ggcgcaggaacaucccagg

SEQ ID NO: 1210802 - RNA, 18 nt, Human
ggcuggagcugcaugggu

SEQ ID NO: 1210803 - RNA, 19 nt, Human
gggcuggagcugcaugggu

SEQ ID NO: 1210804 - RNA, 19 nt, Human
ggggccuguccagguccca

SEQ ID NO: 1210805 - RNA, 18 nt, Human
ggggcgucaugucugaaa

SEQ ID NO: 1210806 - RNA, 24 nt, Human
ggguguuuccuccuggccccuguc

SEQ ID NO: 1210807 - RNA, 25 nt, Human
guccaaggggccccaggagccuggg

SEQ ID NO: 1210808 - RNA, 20 nt, Human
gugcagccccgcaucagccu

SEQ ID NO: 1210809 - RNA, 21 nt, Human
uaaaggggccuguccaggucc

SEQ ID NO: 1210810 - RNA, 19 nt, Human
uagaagccaggacccucuc

SEQ ID NO: 1210811 - RNA, 18 nt, Human
ucagcacaguaccagugc

SEQ ID NO: 1210812 - RNA, 21 nt, Human
ucagguccaaggggccccagg

SEQ ID NO: 1210813 - RNA, 23 nt, Human
uccaagaggcucaaugacagcuc

SEQ ID NO: 1210814 - RNA, 18 nt, Human
uccgaagugcccacaacc

SEQ ID NO: 1210815 - RNA, 19 nt, Human
uccguccccccaggaggcu

SEQ ID NO: 1210816 - RNA, 21 nt, Human
uccuccuggccccugucccag

SEQ ID NO: 1210817 - RNA, 18 nt, Human
ucucggcaaggcuuucag

SEQ ID NO: 1210818 - RNA, 18 nt, Human
ucuucaccuccccaccuc

SEQ ID NO: 1210819 - RNA, 18 nt, Human
ugaccguuccauuucccc

SEQ ID NO: 1210820 - RNA, 24 nt, Human
ugagggcuucccuaaugcaggggu

SEQ ID NO: 1210821 - RNA, 19 nt, Human
ugaggugggaggagugcag

SEQ ID NO: 1210822 - RNA, 20 nt, Human
ugaggugggaggagugcagu

SEQ ID NO: 1210823 - RNA, 25 nt, Human
ugaggugggaggagugcaguggaca

SEQ ID NO: 1210824 - RNA, 21 nt, Human
ugccacagugcucagcacagu

SEQ ID NO: 1210825 - RNA, 22 nt, Human
ugcccacaaccaggcugcccac

SEQ ID NO: 1210826 - RNA, 21 nt, Human
ugccccaaccucaugggaucc

SEQ ID NO: 1210827 - RNA, 25 nt, Human
ugccccaaccucaugggauccugcu

SEQ ID NO: 1210828 - RNA, 23 nt, Human
ugccccacccccuuccguccccc

SEQ ID NO: 1210829 - RNA, 24 nt, Human
ugccccacccccuuccgucccccc

SEQ ID NO: 1210830 - RNA, 18 nt, Human
ugccccucuacuuucuuc

SEQ ID NO: 1210831 - RNA, 20 nt, Human
ugcccugccccaaccucaug

SEQ ID NO: 1210832 - RNA, 20 nt, Human
ugcccuggggcacuguacac

SEQ ID NO: 1210833 - RNA, 22 nt, Human
ugccucggcuucuucuccaucu

SEQ ID NO: 1210834 - RNA, 25 nt, Human
ugccucggcuucuucuccaucuuca

SEQ ID NO: 1210835 - RNA, 24 nt, Human
ugccuggcgggccuuaguagucgg

SEQ ID NO: 1210836 - RNA, 22 nt, Human
ugccuggguucaagggucagug

SEQ ID NO: 1210837 - RNA, 19 nt, Human
ugcuugucuccgccagcag

SEQ ID NO: 1210838 - RNA, 19 nt, Human
uggaagacaccuggacacu

SEQ ID NO: 1210839 - RNA, 19 nt, Human
uggaaggugaccguuccau

SEQ ID NO: 1210840 - RNA, 23 nt, Human
uggacagggagcgccagcagguc

SEQ ID NO: 1210841 - RNA, 21 nt, Human
uggagcauccaggagcccagc

SEQ ID NO: 1210842 - RNA, 22 nt, Human
uggauacaaacaucccaagagc

SEQ ID NO: 1210843 - RNA, 19 nt, Human
ugggauccugcguuucagg

SEQ ID NO: 1210844 - RNA, 21 nt, Human
ugucuggcacagcugugaugg

SEQ ID NO: 1210845 - RNA, 21 nt, Human
uguuuaaggaaaauaggcaaa

SEQ ID NO: 1210846 - RNA, 18 nt, Human
uucacagugauuauagaa

SEQ ID NO: 1210847 - RNA, 22 nt, Human
uucagccaggcgcaggaacauc

SEQ ID NO: 1210848 - RNA, 19 nt, Human
uucagggcugaccggcacc

SEQ ID NO: 1210849 - RNA, 19 nt, Human
uuccccaacaugaacucag

SEQ ID NO: 1210850 - RNA, 23 nt, Human
uugaacagccgggccgucuuugc

SEQ ID NO: 1210851 - RNA, 23 nt, Human
uuuaaggaaaauaggcaaagaaa

SEQ ID NO: 1210852 - RNA, 23 nt, Human
uuuccuauuuuacagcuaaggag

SEQ ID NO: 1210853 - RNA, 22 nt, Human
uuuucacagugauuauagaagu

SEQ ID NO: 1210854 - RNA, 24 nt, Human
uuuugcauaagcccuuccugcuag

SEQ ID NO: 1210855 - RNA, 19 nt, Human
aagccugucccagacagcc

SEQ ID NO: 1210856 - RNA, 18 nt, Human
cagaaccuuaagagaaac

SEQ ID NO: 1210857 - RNA, 22 nt, Human
ccagacagccuugcccugcaga

SEQ ID NO: 1210858 - RNA, 22 nt, Human
cugucccagacagccuugcccu

SEQ ID NO: 1210859 - RNA, 21 nt, Human
ucccagacagccuugcccugc

SEQ ID NO: 1210860 - RNA, 19 nt, Human
cccccagcagcagcagcuu

SEQ ID NO: 1210861 - RNA, 20 nt, Human
aaaaaaaaaaaaaaaagcaa

SEQ ID NO: 1210862 - RNA, 25 nt, Human
aaaaaaaaaaaaaaaagcaagacag

SEQ ID NO: 1210863 - RNA, 25 nt, Human
aaaaaaaaaagaaagaaguugagag

SEQ ID NO: 1210864 - RNA, 23 nt, Human
aaaaacaaagaauacauauccca

SEQ ID NO: 1210865 - RNA, 26 nt, Human
aaaaagcaagacagaaaauaacaaag

SEQ ID NO: 1210866 - RNA, 22 nt, Human
aaaaagcuguaacccaaaucuc

SEQ ID NO: 1210867 - RNA, 30 nt, Human
aaaacaaaaacaaaaacaaaaaaaggcaaa

SEQ ID NO: 1210868 - RNA, 21 nt, Human
aaaauaacaaagacuccuuag

SEQ ID NO: 1210869 - RNA, 23 nt, Human
aaacaaaaacaaaaaaaggcaaa

SEQ ID NO: 1210870 - RNA, 25 nt, Human
aaacaagaggugaaacaaagggacc

SEQ ID NO: 1210871 - RNA, 23 nt, Human
aaacauguaauacauuccagagc

SEQ ID NO: 1210872 - RNA, 19 nt, Human
aaaccaaugacuugauccu

SEQ ID NO: 1210873 - RNA, 19 nt, Human
aaagagagagagaauagca

SEQ ID NO: 1210874 - RNA, 20 nt, Human
aaaucacaauguccuucaac

SEQ ID NO: 1210875 - RNA, 21 nt, Human
aacaacccaaauuuuuuaaau

SEQ ID NO: 1210876 - RNA, 24 nt, Human
aagaaaauaaaauaacaggccaag

SEQ ID NO: 1210877 - RNA, 26 nt, Human
aagacagaaaauaacaaaggggaccc

SEQ ID NO: 1210878 - RNA, 20 nt, Human
aagcaaaccaaugacuugau

SEQ ID NO: 1210879 - RNA, 21 nt, Human
aagcaagacagaaaauaacaa

SEQ ID NO: 1210880 - RNA, 23 nt, Human
aagcaagacagaaaauaacaaag

SEQ ID NO: 1210881 - RNA, 24 nt, Human
aagcacaguggcucaugccuguaa

SEQ ID NO: 1210882 - RNA, 22 nt, Human
aaggaauggagcugccucuucu

SEQ ID NO: 1210883 - RNA, 19 nt, Human
aaguugcuuuccucucucu

SEQ ID NO: 1210884 - RNA, 24 nt, Human
aaucgcuugaacccaggaggcaga

SEQ ID NO: 1210885 - RNA, 21 nt, Human
aaucuacaaacauacuacccu

SEQ ID NO: 1210886 - RNA, 21 nt, Human
acaaaacaaaaacaaaaacaa

SEQ ID NO: 1210887 - RNA, 21 nt, Human
acaaagacuccuuagcccaaa

SEQ ID NO: 1210888 - RNA, 18 nt, Human
acaaucucacuuccucau

SEQ ID NO: 1210889 - RNA, 18 nt, Human
acaccacugcacuccagc

SEQ ID NO: 1210890 - RNA, 20 nt, Human
acaccacugcacuccagccu

SEQ ID NO: 1210891 - RNA, 23 nt, Human
acagagugagacucugccucaaa

SEQ ID NO: 1210892 - RNA, 24 nt, Human
acagagugagacucugccucaaaa

SEQ ID NO: 1210893 - RNA, 22 nt, Human
acaucaggaagccacaagcucc

SEQ ID NO: 1210894 - RNA, 20 nt, Human
accaaugacuugauccuacc

SEQ ID NO: 1210895 - RNA, 21 nt, Human
accacaaaaguuaacaagcag

SEQ ID NO: 1210896 - RNA, 23 nt, Human
accacaaacccauauaguaaacu

SEQ ID NO: 1210897 - RNA, 21 nt, Human
accacauguaaaaacuucagc

SEQ ID NO: 1210898 - RNA, 24 nt, Human
acccaggaggcagagguugcagug

SEQ ID NO: 1210899 - RNA, 24 nt, Human
accccgucucuacuaaaaacacaa

SEQ ID NO: 1210900 - RNA, 23 nt, Human
acuccagccuggcgacagaguga

SEQ ID NO: 1210901 - RNA, 23 nt, Human
acuccauaagccccccacuaaaa

SEQ ID NO: 1210902 - RNA, 20 nt, Human
acuccuugugggucuucuua

SEQ ID NO: 1210903 - RNA, 28 nt, Human
acucugccucaaaaaaaaaaaaaaaaaa

SEQ ID NO: 1210904 - RNA, 23 nt, Human
acugcacuccagccuggcgacag

SEQ ID NO: 1210905 - RNA, 25 nt, Human
acugcacuccagccuggcgacagag

SEQ ID NO: 1210906 - RNA, 18 nt, Human
agaaaauaacaaagacuc

SEQ ID NO: 1210907 - RNA, 25 nt, Human
agaaaucaacaaaguuuugaaaaac

SEQ ID NO: 1210908 - RNA, 18 nt, Human
agaauuucuucauucaau

SEQ ID NO: 1210909 - RNA, 23 nt, Human
agaauuucuucauucaauuacag

SEQ ID NO: 1210910 - RNA, 18 nt, Human
agagcucaugagguagca

SEQ ID NO: 1210911 - RNA, 20 nt, Human
agagguugcagugagccaag

SEQ ID NO: 1210912 - RNA, 23 nt, Human
agagguugcagugagccaagauc

SEQ ID NO: 1210913 - RNA, 24 nt, Human
agagguugcagugagccaagauca

SEQ ID NO: 1210914 - RNA, 21 nt, Human
agccuggcgacagagugagac

SEQ ID NO: 1210915 - RNA, 23 nt, Human
agccuggcgacagagugagacuc

SEQ ID NO: 1210916 - RNA, 23 nt, Human
agcugggugugguggcgcaugcc

SEQ ID NO: 1210917 - RNA, 24 nt, Human
aggcagagguugcagugagccaag

SEQ ID NO: 1210918 - RNA, 24 nt, Human
aggcagguggaucacgaggucagg

SEQ ID NO: 1210919 - RNA, 21 nt, Human
aggccgaggcagguggaucac

SEQ ID NO: 1210920 - RNA, 24 nt, Human
aggcugaggcacaagaaucgcuug

SEQ ID NO: 1210921 - RNA, 25 nt, Human
agguggaucacgaggucaggggauu

SEQ ID NO: 1210922 - RNA, 23 nt, Human
aguggcucaugccuguaauccca

SEQ ID NO: 1210923 - RNA, 24 nt, Human
aucacaccacugcacuccagccug

SEQ ID NO: 1210924 - RNA, 21 nt, Human
auccuggccaaaauggugaaa

SEQ ID NO: 1210925 - RNA, 19 nt, Human
augagguagcaaaaagaga

SEQ ID NO: 1210926 - RNA, 22 nt, Human
augauuaaggcuauaaaagaac

SEQ ID NO: 1210927 - RNA, 19 nt, Human
augccuguaaucccaacac

SEQ ID NO: 1210928 - RNA, 20 nt, Human
auuagcugggugugguggcc

SEQ ID NO: 1210929 - RNA, 18 nt, Human
auuuuugucucucauaau

SEQ ID NO: 1210930 - RNA, 24 nt, Human
caaaaacaaaaacaaaaaaaggcc

SEQ ID NO: 1210931 - RNA, 24 nt, Human
caaaaagagagagagaauagcacc

SEQ ID NO: 1210932 - RNA, 24 nt, Human
caaaauggugaaaccccgucucua

SEQ ID NO: 1210933 - RNA, 24 nt, Human
caaagcaaaccaaugacuugaucc

SEQ ID NO: 1210934 - RNA, 25 nt, Human
caaauaaguaaacaaaaaaagacca

SEQ ID NO: 1210935 - RNA, 24 nt, Human
caacacuuugggaggccgaggcag

SEQ ID NO: 1210936 - RNA, 25 nt, Human
caacacuuugggaggccgaggcagg

SEQ ID NO: 1210937 - RNA, 20 nt, Human
caacguacucccuuaccacg

SEQ ID NO: 1210938 - RNA, 25 nt, Human
caaucuacaaacauacuacccugca

SEQ ID NO: 1210939 - RNA, 22 nt, Human
cacaaacccauauaguaaacua

SEQ ID NO: 1210940 - RNA, 21 nt, Human
cacaccacugcacuccagccu

SEQ ID NO: 1210941 - RNA, 25 nt, Human
caccacugcacuccagccuggcgac

SEQ ID NO: 1210942 - RNA, 25 nt, Human
cacgacugaguauucacagagcacc

SEQ ID NO: 1210943 - RNA, 21 nt, Human
cacuccagccuggcgacagag

SEQ ID NO: 1210944 - RNA, 21 nt, Human
cacuccagccuggcgacagag

SEQ ID NO: 1210945 - RNA, 22 nt, Human
cacuccagccuggcgacagagu

SEQ ID NO: 1210946 - RNA, 23 nt, Human
cacuccagccuggcgacagagug

SEQ ID NO: 1210947 - RNA, 18 nt, Human
cacugcacuccagccugg

SEQ ID NO: 1210948 - RNA, 18 nt, Human
cacugcacuccagccugg

SEQ ID NO: 1210949 - RNA, 18 nt, Human
cacugcacuccagccugg

SEQ ID NO: 1210950 - RNA, 23 nt, Human
cacugcacuccagccuggcgaca

SEQ ID NO: 1210951 - RNA, 24 nt, Human
cacugcacuccagccuggcgacag

SEQ ID NO: 1210952 - RNA, 22 nt, Human
cacuggaaauguaaacugccgg

SEQ ID NO: 1210953 - RNA, 20 nt, Human
cacuguacuuaauacuuuaa

SEQ ID NO: 1210954 - RNA, 22 nt, Human
cagccaaaauuaguuccucauu

SEQ ID NO: 1210955 - RNA, 23 nt, Human
caggccaagcacaguggcucaug

SEQ ID NO: 1210956 - RNA, 19 nt, Human
cagucauuuaaaaagcaag

SEQ ID NO: 1210957 - RNA, 21 nt, Human
cagucccaaaguaccgugagg

SEQ ID NO: 1210958 - RNA, 23 nt, Human
cauauggcccaacagugccuacc

SEQ ID NO: 1210959 - RNA, 24 nt, Human
caugccuguaaucccaacacuuug

SEQ ID NO: 1210960 - RNA, 19 nt, Human
ccacugcacuccagccugg

SEQ ID NO: 1210961 - RNA, 19 nt, Human
ccacugcacuccagccugg

SEQ ID NO: 1210962 - RNA, 19 nt, Human
ccacugcacuccagccugg

SEQ ID NO: 1210963 - RNA, 20 nt, Human
ccacugcacuccagccuggc

SEQ ID NO: 1210964 - RNA, 23 nt, Human
ccacugcacuccagccuggcgac

SEQ ID NO: 1210965 - RNA, 22 nt, Human
ccagagcaaagaugaaucaaaa

SEQ ID NO: 1210966 - RNA, 23 nt, Human
cccaacagugccuacccuccuac

SEQ ID NO: 1210967 - RNA, 23 nt, Human
ccccaaguagccugaaguaacag

SEQ ID NO: 1210968 - RNA, 23 nt, Human
cccccacuaaaaaccuguaaaga

SEQ ID NO: 1210969 - RNA, 18 nt, Human
ccucagacaaccacaaaa

SEQ ID NO: 1210970 - RNA, 21 nt, Human
ccucagacaaccacaaaaguu

SEQ ID NO: 1210971 - RNA, 19 nt, Human
ccuccagaagugucguuuu

SEQ ID NO: 1210972 - RNA, 19 nt, Human
ccuccagaagugucguuuu

SEQ ID NO: 1210973 - RNA, 21 nt, Human
ccuccagaagugucguuuugu

SEQ ID NO: 1210974 - RNA, 23 nt, Human
ccuccuacaaaacaaaaacaaaa

SEQ ID NO: 1210975 - RNA, 26 nt, Human
ccuccuacaaaacaaaaacaaaaacc

SEQ ID NO: 1210976 - RNA, 23 nt, Human
ccuggccaaaauggugaaacccc

SEQ ID NO: 1210977 - RNA, 24 nt, Human
ccuggccaaaauggugaaaccccg

SEQ ID NO: 1210978 - RNA, 21 nt, Human
ccuggcgacagagugagacuc

SEQ ID NO: 1210979 - RNA, 22 nt, Human
ccuguaaucccaacacuuuggg

SEQ ID NO: 1210980 - RNA, 20 nt, Human
ccuguaaucccagcuacucg

SEQ ID NO: 1210981 - RNA, 22 nt, Human
ccuguaaucccagcuacucgag

SEQ ID NO: 1210982 - RNA, 27 nt, Human
cgagaggcugaggcacaagaaucgcuu

SEQ ID NO: 1210983 - RNA, 24 nt, Human
cgaggcagguggaucacgagguca

SEQ ID NO: 1210984 - RNA, 21 nt, Human
cuaaagucuuuacugaugauc

SEQ ID NO: 1210985 - RNA, 24 nt, Human
cucaugccuguaaucccaacacuu

SEQ ID NO: 1210986 - RNA, 24 nt, Human
cuccagccuggcgacagagugaga

SEQ ID NO: 1210987 - RNA, 24 nt, Human
cucccuuaccacgaaggacuucau

SEQ ID NO: 1210988 - RNA, 19 nt, Human
cucugccucaaaaaaaaaa

SEQ ID NO: 1210989 - RNA, 22 nt, Human
cucugccucaaaaaaaaaaaaa

SEQ ID NO: 1210990 - RNA, 18 nt, Human
cugucuuuaggugacucu

SEQ ID NO: 1210991 - RNA, 18 nt, Human
cuuacaguuucccuuuag

SEQ ID NO: 1210992 - RNA, 24 nt, Human
gaagccacaagcuccacuucauuu

SEQ ID NO: 1210993 - RNA, 20 nt, Human
gaaugggauguuuccugucu

SEQ ID NO: 1210994 - RNA, 22 nt, Human
gaccugcaaaauagucccccuc

SEQ ID NO: 1210995 - RNA, 24 nt, Human
gagcaaagaugaaucaaaaaguau

SEQ ID NO: 1210996 - RNA, 18 nt, Human
gaggcugguuuccauggc

SEQ ID NO: 1210997 - RNA, 21 nt, Human
gaggggauaauuuuugucucu

SEQ ID NO: 1210998 - RNA, 18 nt, Human
gauacggaucuaacaacc

SEQ ID NO: 1210999 - RNA, 20 nt, Human
gaucucuaucuucaaaucuc

SEQ ID NO: 1211000 - RNA, 21 nt, Human
gauuggccucagacaaccaca

SEQ ID NO: 1211001 - RNA, 23 nt, Human
gcaagacagaaaauaacaaagac

SEQ ID NO: 1211002 - RNA, 22 nt, Human
gcacuccagccuggcgacagag

SEQ ID NO: 1211003 - RNA, 18 nt, Human
gcagcaaaguuucaaguu

SEQ ID NO: 1211004 - RNA, 24 nt, Human
gccaaaauggugaaaccccgucuc

SEQ ID NO: 1211005 - RNA, 20 nt, Human
gccaagaucacaccacugca

SEQ ID NO: 1211006 - RNA, 18 nt, Human
gcuuucaguggguuccug

SEQ ID NO: 1211007 - RNA, 22 nt, Human
ggaggcagagguugcagugagc

SEQ ID NO: 1211008 - RNA, 18 nt, Human
ggccaaaauggugaaacc

SEQ ID NO: 1211009 - RNA, 19 nt, Human
ggcgacagagugagacucu

SEQ ID NO: 1211010 - RNA, 18 nt, Human
ggcugguuuccauggcug

SEQ ID NO: 1211011 - RNA, 24 nt, Human
gguggcgcaugccuguaaucccag

SEQ ID NO: 1211012 - RNA, 24 nt, Human
gguguggcaaacauucaaaauucu

SEQ ID NO: 1211013 - RNA, 23 nt, Human
ggugugguggcgcaugccuguaa

SEQ ID NO: 1211014 - RNA, 20 nt, Human
gguuaacagaagaggcuagg

SEQ ID NO: 1211015 - RNA, 20 nt, Human
guaaguauacgcccuauacu

SEQ ID NO: 1211016 - RNA, 21 nt, Human
guaauauggaaacuuccugaa

SEQ ID NO: 1211017 - RNA, 22 nt, Human
gucacauggaaaacacaaagca

SEQ ID NO: 1211018 - RNA, 23 nt, Human
guggcgcaugccuguaaucccag

SEQ ID NO: 1211019 - RNA, 18 nt, Human
gugugguggcgcaugccu

SEQ ID NO: 1211020 - RNA, 20 nt, Human
uaaaagaacacgacugagua

SEQ ID NO: 1211021 - RNA, 18 nt, Human
uaaaauaacaggccaagc

SEQ ID NO: 1211022 - RNA, 23 nt, Human
uaacaaagacuccuuagcccaaa

SEQ ID NO: 1211023 - RNA, 22 nt, Human
uaacagaagaggcuaggccaaa

SEQ ID NO: 1211024 - RNA, 23 nt, Human
uaaccagauucgcucaucugugg

SEQ ID NO: 1211025 - RNA, 19 nt, Human
uaacucacagcugaaagug

SEQ ID NO: 1211026 - RNA, 24 nt, Human
uaagauguuccccaaguagccuga

SEQ ID NO: 1211027 - RNA, 22 nt, Human
uaagccccccacuaaaaaccug

SEQ ID NO: 1211028 - RNA, 22 nt, Human
uaaguuauccaaacacaacuga

SEQ ID NO: 1211029 - RNA, 23 nt, Human
uaaguucccuuucuaaacgaggc

SEQ ID NO: 1211030 - RNA, 22 nt, Human
uacaaaacaaaaacaaaaacaa

SEQ ID NO: 1211031 - RNA, 19 nt, Human
uacaagaaggcccagccaa

SEQ ID NO: 1211032 - RNA, 21 nt, Human
uaccacgaaggacuucauuca

SEQ ID NO: 1211033 - RNA, 23 nt, Human
uaccagcaagacuaaagaaaaua

SEQ ID NO: 1211034 - RNA, 23 nt, Human
uacccuccuacaaaacaaaaaca

SEQ ID NO: 1211035 - RNA, 25 nt, Human
uacccuccuacaaaacaaaaacaaa

SEQ ID NO: 1211036 - RNA, 18 nt, Human
uacuccauaagcccccca

SEQ ID NO: 1211037 - RNA, 25 nt, Human
uacuccauaagccccccacuaaaaa

SEQ ID NO: 1211038 - RNA, 23 nt, Human
uacucucauugcucaaguugcuu

SEQ ID NO: 1211039 - RNA, 19 nt, Human
uagcaaaaagagagagaga

SEQ ID NO: 1211040 - RNA, 22 nt, Human
uagcagcugaugacugggaugc

SEQ ID NO: 1211041 - RNA, 19 nt, Human
uagcccaaauuguaccagc

SEQ ID NO: 1211042 - RNA, 21 nt, Human
uagcccaaauuguaccagcaa

SEQ ID NO: 1211043 - RNA, 25 nt, Human
uaucuucaaaucucugagagcccaa

SEQ ID NO: 1211044 - RNA, 22 nt, Human
ucaaaaaaaaaaaaaaaaaaaa

SEQ ID NO: 1211045 - RNA, 23 nt, Human
ucaaaaaaaaaaaaaaaaaaaaa

SEQ ID NO: 1211046 - RNA, 19 nt, Human
ucaaaaaaaaaagaaagaa

SEQ ID NO: 1211047 - RNA, 18 nt, Human
ucaaaauucuccuucaaa

SEQ ID NO: 1211048 - RNA, 19 nt, Human
ucaaaggaauggagcugcc

SEQ ID NO: 1211049 - RNA, 23 nt, Human
ucaaguugugcaauuaaauaaua

SEQ ID NO: 1211050 - RNA, 22 nt, Human
ucacaacacaccugcgaggaca

SEQ ID NO: 1211051 - RNA, 23 nt, Human
ucacaccacugcacuccagccug

SEQ ID NO: 1211052 - RNA, 24 nt, Human
ucacgaggucaggggauugagacc

SEQ ID NO: 1211053 - RNA, 24 nt, Human
ucagcgguguggcaaacauucaaa

SEQ ID NO: 1211054 - RNA, 20 nt, Human
uccacauuuuguaauagaau

SEQ ID NO: 1211055 - RNA, 18 nt, Human
uccagagcaaagaugaau

SEQ ID NO: 1211056 - RNA, 22 nt, Human
uccagccuggcgacagagugag

SEQ ID NO: 1211057 - RNA, 23 nt, Human
uccagccuggcgacagagugaga

SEQ ID NO: 1211058 - RNA, 19 nt, Human
uccauggcugugacaagag

SEQ ID NO: 1211059 - RNA, 18 nt, Human
ucccccucacaaugagau

SEQ ID NO: 1211060 - RNA, 23 nt, Human
uccugaaauacuccauaagcccc

SEQ ID NO: 1211061 - RNA, 20 nt, Human
ucuacaaacauacuacccuu

SEQ ID NO: 1211062 - RNA, 21 nt, Human
ucucuacuaaaaacacaaaaa

SEQ ID NO: 1211063 - RNA, 22 nt, Human
ucugacaggcuuuagcugccag

SEQ ID NO: 1211064 - RNA, 24 nt, Human
ucuggaaggcuuuuaaccccuucu

SEQ ID NO: 1211065 - RNA, 23 nt, Human
ucuucacaacacaccugcgagga

SEQ ID NO: 1211066 - RNA, 18 nt, Human
ucuuugcccuucuacuuc

SEQ ID NO: 1211067 - RNA, 20 nt, Human
ucuuuuugcucaggaaaaga

SEQ ID NO: 1211068 - RNA, 18 nt, Human
ugaaauacuccauaagcc

SEQ ID NO: 1211069 - RNA, 21 nt, Human
ugaaauacuccauaagccccu

SEQ ID NO: 1211070 - RNA, 19 nt, Human
ugacacaucaggaagccac

SEQ ID NO: 1211071 - RNA, 20 nt, Human
ugacaggcuuuagcugccag

SEQ ID NO: 1211072 - RNA, 19 nt, Human
ugaccagagucaaaucaca

SEQ ID NO: 1211073 - RNA, 23 nt, Human
ugacuugauccuaccaacucuaa

SEQ ID NO: 1211074 - RNA, 24 nt, Human
ugagaccauccuggccaaaauggu

SEQ ID NO: 1211075 - RNA, 19 nt, Human
ugaggaccugcaaaauagu

SEQ ID NO: 1211076 - RNA, 24 nt, Human
ugaggcacaagaaucgcuugaacc

SEQ ID NO: 1211077 - RNA, 25 nt, Human
ugagguagcaaaaagagagagagaa

SEQ ID NO: 1211078 - RNA, 23 nt, Human
ugaggugcagcaguuaacagccc

SEQ ID NO: 1211079 - RNA, 22 nt, Human
ugaguccacauuuuguaauaga

SEQ ID NO: 1211080 - RNA, 21 nt, Human
ugcaaaauagucccccucaca

SEQ ID NO: 1211081 - RNA, 23 nt, Human
ugccuguaaucccaacacuuugg

SEQ ID NO: 1211082 - RNA, 23 nt, Human
ugccuguaaucccaacacuuugg

SEQ ID NO: 1211083 - RNA, 22 nt, Human
ugccuguaaucccagcuacucg

SEQ ID NO: 1211084 - RNA, 23 nt, Human
ugccuguaaucccagcuacucga

SEQ ID NO: 1211085 - RNA, 19 nt, Human
uggaaggcuuuuaaccccu

SEQ ID NO: 1211086 - RNA, 23 nt, Human
uggaaugggauguuuccugucuu

SEQ ID NO: 1211087 - RNA, 20 nt, Human
uggagucaaaggaauggagc

SEQ ID NO: 1211088 - RNA, 21 nt, Human
uggcgcaugccuguaauccca

SEQ ID NO: 1211089 - RNA, 22 nt, Human
uggcgcaugccuguaaucccag

SEQ ID NO: 1211090 - RNA, 24 nt, Human
uggcucaugccuguaaucccaaca

SEQ ID NO: 1211091 - RNA, 24 nt, Human
ugggaggccgaggcagguggauca

SEQ ID NO: 1211092 - RNA, 18 nt, Human
ugggauguuuccugucuu

SEQ ID NO: 1211093 - RNA, 18 nt, Human
ugggugugguggcgcaug

SEQ ID NO: 1211094 - RNA, 20 nt, Human
uggguuccuguaacaccauc

SEQ ID NO: 1211095 - RNA, 20 nt, Human
ugguccaggccagcuccacu

SEQ ID NO: 1211096 - RNA, 24 nt, Human
ugguggcgcaugccuguaauccca

SEQ ID NO: 1211097 - RNA, 21 nt, Human
uguaaagaguuuuucuugccu

SEQ ID NO: 1211098 - RNA, 25 nt, Human
uguaaagaguuuuucuugccucuga

SEQ ID NO: 1211099 - RNA, 20 nt, Human
uguaaauugaugacacuguu

SEQ ID NO: 1211100 - RNA, 23 nt, Human
ugucuuugcccuucuacuuccuc

SEQ ID NO: 1211101 - RNA, 18 nt, Human
uguggccuccagaagugu

SEQ ID NO: 1211102 - RNA, 18 nt, Human
uuaaagaaggcagguguc

SEQ ID NO: 1211103 - RNA, 20 nt, Human
uuaaagaaggcaggugucug

SEQ ID NO: 1211104 - RNA, 18 nt, Human
uuaacauuugaaacaagu

SEQ ID NO: 1211105 - RNA, 20 nt, Human
uuagcugggugugguggcgc

SEQ ID NO: 1211106 - RNA, 23 nt, Human
uuagcugggugugguggcgcaug

SEQ ID NO: 1211107 - RNA, 24 nt, Human
uuagcugggugugguggcgcaugc

SEQ ID NO: 1211108 - RNA, 25 nt, Human
uuccccaaguagccugaaguaacag

SEQ ID NO: 1211109 - RNA, 24 nt, Human
uucgaagaauaaaaagcuguaacc

SEQ ID NO: 1211110 - RNA, 18 nt, Human
uucuggaaggcuuuuaac

SEQ ID NO: 1211111 - RNA, 20 nt, Human
uugcagugagccaagaucac

SEQ ID NO: 1211112 - RNA, 22 nt, Human
uuggccucagacaaccacaaaa

SEQ ID NO: 1211113 - RNA, 25 nt, Human
uugggaggccgaggcagguggauca

SEQ ID NO: 1211114 - RNA, 24 nt, Human
uuuccugucuuuaggugacucuuc

SEQ ID NO: 1211115 - RNA, 26 nt, Human
auccccuguccaacaccuucucacca

SEQ ID NO: 1211116 - RNA, 20 nt, Human
cagaggaugccucagauucc

SEQ ID NO: 1211117 - RNA, 22 nt, Human
ccaaaagcucccguuuggcugg

SEQ ID NO: 1211118 - RNA, 19 nt, Human
ccaauccccuguccaacac

SEQ ID NO: 1211119 - RNA, 24 nt, Human
gagccugucccacacugucaggcc

SEQ ID NO: 1211120 - RNA, 26 nt, Human
gccugucccacacugucaggcccuga

SEQ ID NO: 1211121 - RNA, 21 nt, Human
ggaaagaagagccugucccac

SEQ ID NO: 1211122 - RNA, 21 nt, Human
guggagucagaggaugccuca

SEQ ID NO: 1211123 - RNA, 18 nt, Human
ucccacacugucaggccc

SEQ ID NO: 1211124 - RNA, 22 nt, Human
uggaggcagacccuguggcucu

SEQ ID NO: 1211125 - RNA, 18 nt, Human
ugggaaagaagagccugu

SEQ ID NO: 1211126 - RNA, 25 nt, Human
ugucaagagcucccuaauuuuggga

SEQ ID NO: 1211127 - RNA, 19 nt, Human
aaaaagcacaugcaccaca

SEQ ID NO: 1211128 - RNA, 19 nt, Human
aagcuggcaugaaugccau

SEQ ID NO: 1211129 - RNA, 24 nt, Human
agacaaaaaagagauaaucucuug

SEQ ID NO: 1211130 - RNA, 20 nt, Human
agcacaugcaccacaaaggu

SEQ ID NO: 1211131 - RNA, 23 nt, Human
auuaaaaagcacaugcaccacaa

SEQ ID NO: 1211132 - RNA, 18 nt, Human
caacuuuauugagaaacu

SEQ ID NO: 1211133 - RNA, 20 nt, Human
cacauauaccauggcaagac

SEQ ID NO: 1211134 - RNA, 20 nt, Human
cacugccaugaaagugcaaa

SEQ ID NO: 1211135 - RNA, 19 nt, Human
caucuccuccagcagcuuc

SEQ ID NO: 1211136 - RNA, 21 nt, Human
ccagcagcuucucaggcuucu

SEQ ID NO: 1211137 - RNA, 22 nt, Human
ccauuugccacccacauauacc

SEQ ID NO: 1211138 - RNA, 22 nt, Human
cugaagcacauuuggaaucuau

SEQ ID NO: 1211139 - RNA, 18 nt, Human
cugccaugaaagugcaaa

SEQ ID NO: 1211140 - RNA, 18 nt, Human
cuuuguagagcugcccuc

SEQ ID NO: 1211141 - RNA, 21 nt, Human
gagcagucacucugaagcugg

SEQ ID NO: 1211142 - RNA, 22 nt, Human
gcugaagcacauuuggaaucua

SEQ ID NO: 1211143 - RNA, 22 nt, Human
gcugggugcagugauccuuggg

SEQ ID NO: 1211144 - RNA, 19 nt, Human
uaaauuauacaacagcuga

SEQ ID NO: 1211145 - RNA, 26 nt, Human
uaccauggcaagaccuugggcugggu

SEQ ID NO: 1211146 - RNA, 19 nt, Human
ucaagacaaaaaagagaua

SEQ ID NO: 1211147 - RNA, 20 nt, Human
uccacagugggcagugagau

SEQ ID NO: 1211148 - RNA, 24 nt, Human
uccuugggcaucuccuccagcagc

SEQ ID NO: 1211149 - RNA, 21 nt, Human
ucucaggcuucuuguccacag

SEQ ID NO: 1211150 - RNA, 19 nt, Human
ucucugcagcuagcuacuu

SEQ ID NO: 1211151 - RNA, 18 nt, Human
ucuguagccauaacuuuu

SEQ ID NO: 1211152 - RNA, 20 nt, Human
ugaauggauuugaaucccau

SEQ ID NO: 1211153 - RNA, 24 nt, Human
ugcagugauccuugggcaucuccu

SEQ ID NO: 1211154 - RNA, 19 nt, Human
ugccauuaaaaagcacaug

SEQ ID NO: 1211155 - RNA, 20 nt, Human
ugcuuuguagagcugcccuc

SEQ ID NO: 1211156 - RNA, 19 nt, Human
uggagaagacacaugcugc

SEQ ID NO: 1211157 - RNA, 22 nt, Human
ugggcaucuccuccagcagcuu

SEQ ID NO: 1211158 - RNA, 23 nt, Human
ugggcaucuccuccagcagcuuc

SEQ ID NO: 1211159 - RNA, 21 nt, Human
uucaagacaaaaaagagauaa

SEQ ID NO: 1211160 - RNA, 22 nt, Human
uuggaaucuauucauaaacacc

SEQ ID NO: 1211161 - RNA, 23 nt, Human
uuugaagacuuucauugccauuu

SEQ ID NO: 1211162 - RNA, 25 nt, Human
uuuguagagcugcccucucccauuc

SEQ ID NO: 1211163 - RNA, 21 nt, Human
uuuuacagccauuuuaaauua

SEQ ID NO: 1211164 - RNA, 20 nt, Human
acuucaaagagucuauugaa

SEQ ID NO: 1211165 - RNA, 21 nt, Human
gaguggagaugaacuugagug

SEQ ID NO: 1211166 - RNA, 18 nt, Human
gggaaaaggaaaucaaug

SEQ ID NO: 1211167 - RNA, 21 nt, Human
ugaacuauuaauagacaaugc

SEQ ID NO: 1211168 - RNA, 24 nt, Human
uucaaagagucuauugaacuauua

SEQ ID NO: 1211169 - RNA, 19 nt, Human
aaguugaacaagauggaau

SEQ ID NO: 1211170 - RNA, 20 nt, Human
acacagaaggguucucugaa

SEQ ID NO: 1211171 - RNA, 22 nt, Human
acagaacuuguguggcaguaga

SEQ ID NO: 1211172 - RNA, 21 nt, Human
aggaaauaacaagucugucca

SEQ ID NO: 1211173 - RNA, 21 nt, Human
cagcuccuguaugcaucuccu

SEQ ID NO: 1211174 - RNA, 22 nt, Human
cuccagcuccuguaugcaucuc

SEQ ID NO: 1211175 - RNA, 18 nt, Human
gacagaggccaagaauca

SEQ ID NO: 1211176 - RNA, 21 nt, Human
gcaguagagagaggucaggcu

SEQ ID NO: 1211177 - RNA, 20 nt, Human
gucuccaauaccucuggccc

SEQ ID NO: 1211178 - RNA, 20 nt, Human
uaacaagucuguccagcauc

SEQ ID NO: 1211179 - RNA, 23 nt, Human
uaccucuggccacugauuugucc

SEQ ID NO: 1211180 - RNA, 22 nt, Human
uaguccucauacaggaaauaac

SEQ ID NO: 1211181 - RNA, 24 nt, Human
uauuugcauagcauuuuauacaca

SEQ ID NO: 1211182 - RNA, 20 nt, Human
uccagcaucuucauaagccu

SEQ ID NO: 1211183 - RNA, 21 nt, Human
ugaacaagauggaaugugaug

SEQ ID NO: 1211184 - RNA, 24 nt, Human
uggcaguagagagaggucaggcuu

SEQ ID NO: 1211185 - RNA, 23 nt, Human
ugggacagaggccaagaaucauc

SEQ ID NO: 1211186 - RNA, 19 nt, Human
uguggcaguagagagaggu

SEQ ID NO: 1211187 - RNA, 21 nt, Human
uguggcaguagagagagguca

SEQ ID NO: 1211188 - RNA, 20 nt, Human
uuaauguagcaugcaaugcu

SEQ ID NO: 1211189 - RNA, 19 nt, Human
uucauaagccuggauugcu

SEQ ID NO: 1211190 - RNA, 21 nt, Human
uugacuccagcuccuguaugc

SEQ ID NO: 1211191 - RNA, 19 nt, Human
uuggauaugggacagaggc

SEQ ID NO: 1211192 - RNA, 21 nt, Human
uuguguggcaguagagagagg

SEQ ID NO: 1211193 - RNA, 25 nt, Human
aagcggccagagcgggcuccgggcg

SEQ ID NO: 1211194 - RNA, 20 nt, Human
acucugaguaggugaaggag

SEQ ID NO: 1211195 - RNA, 21 nt, Human
agcaaaaagcaagcggccaga

SEQ ID NO: 1211196 - RNA, 22 nt, Human
agcaaaaagcaagcggccagag

SEQ ID NO: 1211197 - RNA, 19 nt, Human
agcaggcgggcaggcuggc

SEQ ID NO: 1211198 - RNA, 23 nt, Human
aggaagcuuucucagcaaaaagc

SEQ ID NO: 1211199 - RNA, 22 nt, Human
caaaaagcaagcggccagagcg

SEQ ID NO: 1211200 - RNA, 19 nt, Human
cagcaaaaagcaagcggcc

SEQ ID NO: 1211201 - RNA, 22 nt, Human
cagcaaaaagcaagcggccaga

SEQ ID NO: 1211202 - RNA, 20 nt, Human
ccaaggugucuggaugggga

SEQ ID NO: 1211203 - RNA, 24 nt, Human
cgggucgagguccaggaagucauc

SEQ ID NO: 1211204 - RNA, 24 nt, Human
cucagcaaaaagcaagcggccaga

SEQ ID NO: 1211205 - RNA, 19 nt, Human
gaagggugccaucuuccag

SEQ ID NO: 1211206 - RNA, 21 nt, Human
gcaaaaagcaagcggccagag

SEQ ID NO: 1211207 - RNA, 19 nt, Human
gccggcgagcaggcgggca

SEQ ID NO: 1211208 - RNA, 22 nt, Human
guccaggaagucauccucgauc

SEQ ID NO: 1211209 - RNA, 19 nt, Human
gugugucugcguguguccc

SEQ ID NO: 1211210 - RNA, 23 nt, Human
uccgggcgccggcgagcaggcgg

SEQ ID NO: 1211211 - RNA, 19 nt, Human
uccucgaucuucuccucca

SEQ ID NO: 1211212 - RNA, 25 nt, Human
uccucgaucuucuccuccauccacu

SEQ ID NO: 1211213 - RNA, 19 nt, Human
ucuucuccuccauccacuc

SEQ ID NO: 1211214 - RNA, 21 nt, Human
uggggaagggugccaucuucc

SEQ ID NO: 1211215 - RNA, 23 nt, Human
uuccagggcaggaagcuuucuca

SEQ ID NO: 1211216 - RNA, 23 nt, Human
aaaaaagagagcaucgucgagga

SEQ ID NO: 1211217 - RNA, 23 nt, Human
aacggccgcaaaaaaaccgcgug

SEQ ID NO: 1211218 - RNA, 19 nt, Human
aggguguguagacggugga

SEQ ID NO: 1211219 - RNA, 19 nt, Human
caaaaaaaccgcgugacgc

SEQ ID NO: 1211220 - RNA, 23 nt, Human
caaaaaaaccgcgugacgcggug

SEQ ID NO: 1211221 - RNA, 21 nt, Human
caaguguagugcacgugcgcg

SEQ ID NO: 1211222 - RNA, 24 nt, Human
cacagagagacccugcgugggggg

SEQ ID NO: 1211223 - RNA, 24 nt, Human
cagaacggccgcaaaaaaaccgcg

SEQ ID NO: 1211224 - RNA, 22 nt, Human
cgagagggcgggagacgcuugg

SEQ ID NO: 1211225 - RNA, 24 nt, Human
cgagagggcgggagacgcuugggg

SEQ ID NO: 1211226 - RNA, 23 nt, Human
cgcgguggagcucgccacggggg

SEQ ID NO: 1211227 - RNA, 24 nt, Human
cgggaggguguguagacgguggag

SEQ ID NO: 1211228 - RNA, 22 nt, Human
cugcguggggggggucugcaga

SEQ ID NO: 1211229 - RNA, 20 nt, Human
gccgcaaaaaaaccgcguga

SEQ ID NO: 1211230 - RNA, 19 nt, Human
gcgcgaaaccaguggggcg

SEQ ID NO: 1211231 - RNA, 23 nt, Human
gcgguggagcucgccacgggggg

SEQ ID NO: 1211232 - RNA, 20 nt, Human
ggcgggagacgcuugggggc

SEQ ID NO: 1211233 - RNA, 21 nt, Human
gggcgggagacgcuugggggc

SEQ ID NO: 1211234 - RNA, 21 nt, Human
ugacaccaaguguagugcacg

SEQ ID NO: 1211235 - RNA, 20 nt, Human
ugcguggggggggucugcag

SEQ ID NO: 1211236 - RNA, 21 nt, Human
ugcguggggggggucugcaga

SEQ ID NO: 1211237 - RNA, 23 nt, Human
uggcaucgcggugugucggcgca

SEQ ID NO: 1211238 - RNA, 22 nt, Human
ugucagagaccgugugacacca

SEQ ID NO: 1211239 - RNA, 19 nt, Human
ugucggcgcaaaaaagaga

SEQ ID NO: 1211240 - RNA, 19 nt, Human
aaaagccaugcacuuccac

SEQ ID NO: 1211241 - RNA, 21 nt, Human
aaaagcgucagacaguuacaa

SEQ ID NO: 1211242 - RNA, 19 nt, Human
aaacuccagcaguggauaa

SEQ ID NO: 1211243 - RNA, 23 nt, Human
aagcgucagacaguuacaacacu

SEQ ID NO: 1211244 - RNA, 20 nt, Human
acacaggcaaaagcgucaga

SEQ ID NO: 1211245 - RNA, 21 nt, Human
acuaccucccauugggggcug

SEQ ID NO: 1211246 - RNA, 18 nt, Human
acuguguucuggaacuga

SEQ ID NO: 1211247 - RNA, 23 nt, Human
agaggagggaggguuuagaaucc

SEQ ID NO: 1211248 - RNA, 23 nt, Human
agcaggagacggaggugggagga

SEQ ID NO: 1211249 - RNA, 25 nt, Human
agccacaccuccagcagggcaccca

SEQ ID NO: 1211250 - RNA, 21 nt, Human
aggagggaggguuuagaaucc

SEQ ID NO: 1211251 - RNA, 23 nt, Human
aggcaaaagcgucagacaguuac

SEQ ID NO: 1211252 - RNA, 18 nt, Human
aggcaggguggauggggc

SEQ ID NO: 1211253 - RNA, 21 nt, Human
aggcaggguggauggggcugu

SEQ ID NO: 1211254 - RNA, 21 nt, Human
aggggaccaguguuccaucuu

SEQ ID NO: 1211255 - RNA, 25 nt, Human
agguagcugcgaaacucccccagga

SEQ ID NO: 1211256 - RNA, 24 nt, Human
agguaucaaagaugggccagaacc

SEQ ID NO: 1211257 - RNA, 24 nt, Human
auccuggugaugcccaggcugugg

SEQ ID NO: 1211258 - RNA, 24 nt, Human
caaaagcgucagacaguuacaaca

SEQ ID NO: 1211259 - RNA, 24 nt, Human
cacacaggcaaaagcgucagacag

SEQ ID NO: 1211260 - RNA, 20 nt, Human
cacacucacacacuccacca

SEQ ID NO: 1211261 - RNA, 25 nt, Human
caccagaaguggcuaggugcagguc

SEQ ID NO: 1211262 - RNA, 21 nt, Human
caccugccucuuggagcgcuc

SEQ ID NO: 1211263 - RNA, 24 nt, Human
cagaagcagguccaccacauacaa

SEQ ID NO: 1211264 - RNA, 23 nt, Human
cagcaggagacggaggugggagg

SEQ ID NO: 1211265 - RNA, 18 nt, Human
cagcagggcacccaggcc

SEQ ID NO: 1211266 - RNA, 18 nt, Human
cagcccaagggcacgcag

SEQ ID NO: 1211267 - RNA, 19 nt, Human
cagcuccaggguugugcuc

SEQ ID NO: 1211268 - RNA, 18 nt, Human
caggagacacuggcaguu

SEQ ID NO: 1211269 - RNA, 19 nt, Human
caucucaugcagaacuuua

SEQ ID NO: 1211270 - RNA, 18 nt, Human
ccaaugcugcugccauca

SEQ ID NO: 1211271 - RNA, 20 nt, Human
ccacagauuggcaagggcac

SEQ ID NO: 1211272 - RNA, 23 nt, Human
ccaggccaugcaugauggccacc

SEQ ID NO: 1211273 - RNA, 20 nt, Human
ccaggcugugggcuggcuug

SEQ ID NO: 1211274 - RNA, 22 nt, Human
cccucuucgcagcuccucacca

SEQ ID NO: 1211275 - RNA, 20 nt, Human
ccuccagcaagaagaggagg

SEQ ID NO: 1211276 - RNA, 19 nt, Human
ccuccagcuccaccgaucc

SEQ ID NO: 1211277 - RNA, 18 nt, Human
ccuuccuucccucuucgc

SEQ ID NO: 1211278 - RNA, 23 nt, Human
ccuuccuucccucuucgcagcuc

SEQ ID NO: 1211279 - RNA, 27 nt, Human
cgcaagcaggccuuccagcucugccaa

SEQ ID NO: 1211280 - RNA, 24 nt, Human
cgcugauguuuucggagaugacuc

SEQ ID NO: 1211281 - RNA, 24 nt, Human
cguuaggaguucuauaguuuggag

SEQ ID NO: 1211282 - RNA, 21 nt, Human
cucaagagaugacaguagcuc

SEQ ID NO: 1211283 - RNA, 22 nt, Human
cucaagagaugacaguagcucc

SEQ ID NO: 1211284 - RNA, 23 nt, Human
cucacacacuccaccauacccua

SEQ ID NO: 1211285 - RNA, 20 nt, Human
cuccaggguugugcucaucc

SEQ ID NO: 1211286 - RNA, 28 nt, Human
cuccaggguugugcucauccgugcugcc

SEQ ID NO: 1211287 - RNA, 19 nt, Human
cuccugggccauagcuggg

SEQ ID NO: 1211288 - RNA, 20 nt, Human
cucggcacugggcacagguc

SEQ ID NO: 1211289 - RNA, 18 nt, Human
cuggcaguugaggcucug

SEQ ID NO: 1211290 - RNA, 19 nt, Human
cuggcaguugaggcucugu

SEQ ID NO: 1211291 - RNA, 20 nt, Human
cugggccauagcugggcuga

SEQ ID NO: 1211292 - RNA, 21 nt, Human
cuugcugagcaggaacucuga

SEQ ID NO: 1211293 - RNA, 18 nt, Human
cuuuguccacuaccuccc

SEQ ID NO: 1211294 - RNA, 23 nt, Human
gaacugaaggcaggguggauggg

SEQ ID NO: 1211295 - RNA, 18 nt, Human
gaaggggaccaguguucc

SEQ ID NO: 1211296 - RNA, 19 nt, Human
gaugcccuccagcuccacc

SEQ ID NO: 1211297 - RNA, 20 nt, Human
gccagcccucugucuucucc

SEQ ID NO: 1211298 - RNA, 25 nt, Human
gccaugcaugauggccacccacucc

SEQ ID NO: 1211299 - RNA, 19 nt, Human
gcugacuguguucuggaac

SEQ ID NO: 1211300 - RNA, 25 nt, Human
gcugacuguguucuggaacugacgc

SEQ ID NO: 1211301 - RNA, 23 nt, Human
gcugggcugaacuuggcaaaagc

SEQ ID NO: 1211302 - RNA, 19 nt, Human
ggagacggaggugggagga

SEQ ID NO: 1211303 - RNA, 20 nt, Human
ggaggaacugaaggcagggu

SEQ ID NO: 1211304 - RNA, 23 nt, Human
ggaggaacugaaggcagggugga

SEQ ID NO: 1211305 - RNA, 21 nt, Human
ggaggguuuagaauccuggug

SEQ ID NO: 1211306 - RNA, 22 nt, Human
ggaggugggaggaacugaaggc

SEQ ID NO: 1211307 - RNA, 20 nt, Human
ggccagugaaggggaccagu

SEQ ID NO: 1211308 - RNA, 19 nt, Human
ggcugagggugguggcuca

SEQ ID NO: 1211309 - RNA, 18 nt, Human
gggccauagcugggcuga

SEQ ID NO: 1211310 - RNA, 24 nt, Human
gggcuggcuuguguuucccccugg

SEQ ID NO: 1211311 - RNA, 22 nt, Human
guuuagaauccuggugaugccc

SEQ ID NO: 1211312 - RNA, 28 nt, Human
uaagcagcuggcccagcguuguaaugac

SEQ ID NO: 1211313 - RNA, 18 nt, Human
uagaagggugaaaggugc

SEQ ID NO: 1211314 - RNA, 18 nt, Human
uagaauccuggugaugcc

SEQ ID NO: 1211315 - RNA, 20 nt, Human
uagcugcgaaacucccccag

SEQ ID NO: 1211316 - RNA, 24 nt, Human
uagcugcgaaacucccccaggaug

SEQ ID NO: 1211317 - RNA, 26 nt, Human
uaggguacaugcaggaugaaguugag

SEQ ID NO: 1211318 - RNA, 18 nt, Human
uagugagcaggggcaggu

SEQ ID NO: 1211319 - RNA, 21 nt, Human
uaucacagagugauaauggag

SEQ ID NO: 1211320 - RNA, 22 nt, Human
ucacugaggucgcugacugugu

SEQ ID NO: 1211321 - RNA, 21 nt, Human
ucagauggacacacaggcaaa

SEQ ID NO: 1211322 - RNA, 20 nt, Human
ucagccagcccucugucuuc

SEQ ID NO: 1211323 - RNA, 19 nt, Human
ucaggguaguuggagaggc

SEQ ID NO: 1211324 - RNA, 20 nt, Human
uccaccacauacaagagccg

SEQ ID NO: 1211325 - RNA, 19 nt, Human
uccucucggcacugggcac

SEQ ID NO: 1211326 - RNA, 22 nt, Human
uccuuccuucccucuucgcagc

SEQ ID NO: 1211327 - RNA, 22 nt, Human
ucgauggccaagaucuuggaca

SEQ ID NO: 1211328 - RNA, 20 nt, Human
ucgcuugcugagcaggaacu

SEQ ID NO: 1211329 - RNA, 26 nt, Human
ucuaccagcaccuccacaaaggcuga

SEQ ID NO: 1211330 - RNA, 21 nt, Human
ucuaucacagagugauaaugg

SEQ ID NO: 1211331 - RNA, 23 nt, Human
ucugcucagcaggagacggaggu

SEQ ID NO: 1211332 - RNA, 24 nt, Human
ugaaggcaggguggauggggcugu

SEQ ID NO: 1211333 - RNA, 20 nt, Human
ugaaggggaccaguguucca

SEQ ID NO: 1211334 - RNA, 20 nt, Human
ugaagggucuaucacagagu

SEQ ID NO: 1211335 - RNA, 22 nt, Human
ugaagguaucaaagaugggcca

SEQ ID NO: 1211336 - RNA, 23 nt, Human
ugacacacucacacacuccacca

SEQ ID NO: 1211337 - RNA, 20 nt, Human
ugagaggaugaaggugccac

SEQ ID NO: 1211338 - RNA, 20 nt, Human
ugcagcugcuggccuuggaa

SEQ ID NO: 1211339 - RNA, 20 nt, Human
ugcccaggcugugggcuggc

SEQ ID NO: 1211340 - RNA, 22 nt, Human
ugcugcugccaucagcugcugc

SEQ ID NO: 1211341 - RNA, 22 nt, Human
uggagacugcccagcccaaggg

SEQ ID NO: 1211342 - RNA, 18 nt, Human
uggcaguugaggcucugu

SEQ ID NO: 1211343 - RNA, 18 nt, Human
uggcaguugaggcucugu

SEQ ID NO: 1211344 - RNA, 20 nt, Human
uggcauaggcguggugcagu

SEQ ID NO: 1211345 - RNA, 22 nt, Human
uggccaagaucuuggacaacac

SEQ ID NO: 1211346 - RNA, 23 nt, Human
uggcucaggguaguuggagaggc

SEQ ID NO: 1211347 - RNA, 24 nt, Human
uggcucaggguaguuggagaggcc

SEQ ID NO: 1211348 - RNA, 23 nt, Human
uggcuuguguuuggcccuggauu

SEQ ID NO: 1211349 - RNA, 23 nt, Human
ugggaggaacugaaggcagggug

SEQ ID NO: 1211350 - RNA, 25 nt, Human
ugggaggaacugaaggcagggugga

SEQ ID NO: 1211351 - RNA, 23 nt, Human
uguagaucaaacaccaaggcugg

SEQ ID NO: 1211352 - RNA, 20 nt, Human
ugucauguggguuuuuacuu

SEQ ID NO: 1211353 - RNA, 24 nt, Human
uguuccaucuucagggcuuacaug

SEQ ID NO: 1211354 - RNA, 23 nt, Human
uucccuguugcugccucuccagc

SEQ ID NO: 1211355 - RNA, 21 nt, Human
uuggaaguaagggcuccucuc

SEQ ID NO: 1211356 - RNA, 25 nt, Human
uuggacaacaccugaagacuuuccu

SEQ ID NO: 1211357 - RNA, 21 nt, Human
uuucauucugccagaccuggu

SEQ ID NO: 1211358 - RNA, 18 nt, Human
uuuuuuuuuuaaagaagu

SEQ ID NO: 1211359 - RNA, 25 nt, Human
uuuuuuuuuuuuaaagaaguaagcc

SEQ ID NO: 1211360 - RNA, 22 nt, Human
uuuuuuuuuuuuuaaagaagua

SEQ ID NO: 1211361 - RNA, 24 nt, Human
uuuuuuuuuuuuuuuuuuuuaaag

SEQ ID NO: 1211362 - RNA, 18 nt, Human
agguucucagucugacuc

SEQ ID NO: 1211363 - RNA, 23 nt, Human
cagcggacacggaguuggccuug

SEQ ID NO: 1211364 - RNA, 19 nt, Human
cagcucguccaccuuggcc

SEQ ID NO: 1211365 - RNA, 20 nt, Human
caggaaggagguggcugcug

SEQ ID NO: 1211366 - RNA, 24 nt, Human
cuccagcucguccaccuuggccug

SEQ ID NO: 1211367 - RNA, 23 nt, Human
cuggcuugggcugugggcagcgg

SEQ ID NO: 1211368 - RNA, 19 nt, Human
gagggccagcuccccacgc

SEQ ID NO: 1211369 - RNA, 18 nt, Human
ggccugagcguccuugag

SEQ ID NO: 1211370 - RNA, 19 nt, Human
ggccuugcagagccggcug

SEQ ID NO: 1211371 - RNA, 20 nt, Human
guguucaggaaggagguggc

SEQ ID NO: 1211372 - RNA, 23 nt, Human
ucagcaucagugauggcggccuu

SEQ ID NO: 1211373 - RNA, 20 nt, Human
uccgcugugggcuggcuugg

SEQ ID NO: 1211374 - RNA, 24 nt, Human
ugagcguccuugagggccagcucc

SEQ ID NO: 1211375 - RNA, 22 nt, Human
uggccugagcguccuugagggc

SEQ ID NO: 1211376 - RNA, 21 nt, Human
ugggcuggcuugggcuguggg

SEQ ID NO: 1211377 - RNA, 21 nt, Human
aagcagaggggaagacuagcu

SEQ ID NO: 1211378 - RNA, 22 nt, Human
aagggaaaguggggcggggagg

SEQ ID NO: 1211379 - RNA, 22 nt, Human
aaguguguaaaaaaaaaauuca

SEQ ID NO: 1211380 - RNA, 22 nt, Human
agcuuacugcaaaaaccuuuuu

SEQ ID NO: 1211381 - RNA, 24 nt, Human
aggaaaucuaugcccggcccgugc

SEQ ID NO: 1211382 - RNA, 19 nt, Human
caauggaagccuugcugcg

SEQ ID NO: 1211383 - RNA, 20 nt, Human
caguuucaggaaacccugcc

SEQ ID NO: 1211384 - RNA, 21 nt, Human
cauacaggagcuccuccccag

SEQ ID NO: 1211385 - RNA, 21 nt, Human
cccagccgcgaugucucggga

SEQ ID NO: 1211386 - RNA, 22 nt, Human
cccauagucauacaggagcuuu

SEQ ID NO: 1211387 - RNA, 19 nt, Human
cccggcccgugcuuggggc

SEQ ID NO: 1211388 - RNA, 18 nt, Human
ccuuugaagaagggaaag

SEQ ID NO: 1211389 - RNA, 22 nt, Human
ccuuugaagaagggaaaguggg

SEQ ID NO: 1211390 - RNA, 22 nt, Human
cgggugggcuucaauggaagcc

SEQ ID NO: 1211391 - RNA, 23 nt, Human
gaagaagggaaaguggggcgggg

SEQ ID NO: 1211392 - RNA, 24 nt, Human
gagaaagcagaggggaagacuagc

SEQ ID NO: 1211393 - RNA, 25 nt, Human
gauuugucucucuaguugcauccac

SEQ ID NO: 1211394 - RNA, 20 nt, Human
gcuucagccacgggugggcu

SEQ ID NO: 1211395 - RNA, 22 nt, Human
ggcccgugcuuggggcccgggg

SEQ ID NO: 1211396 - RNA, 20 nt, Human
ggcggggagggcacggggcc

SEQ ID NO: 1211397 - RNA, 21 nt, Human
gggcagguaagcaacccucuu

SEQ ID NO: 1211398 - RNA, 20 nt, Human
gggcggggagggcacggggc

SEQ ID NO: 1211399 - RNA, 21 nt, Human
gggcggggagggcacggggcc

SEQ ID NO: 1211400 - RNA, 22 nt, Human
uaagcaacccucucccugccca

SEQ ID NO: 1211401 - RNA, 24 nt, Human
uaagcaacccucucccugcccaca

SEQ ID NO: 1211402 - RNA, 23 nt, Human
uaaguguguaaaaaaaaaauuca

SEQ ID NO: 1211403 - RNA, 24 nt, Human
uacugcaaaaaccuuuuuaaaaaa

SEQ ID NO: 1211404 - RNA, 18 nt, Human
uagcuuacugcaaaaacc

SEQ ID NO: 1211405 - RNA, 24 nt, Human
ucccuuugagggcacuuuguccuu

SEQ ID NO: 1211406 - RNA, 18 nt, Human
ugaggugagguacgccgu

SEQ ID NO: 1211407 - RNA, 18 nt, Human
uggaagccuugcugcggu

SEQ ID NO: 1211408 - RNA, 24 nt, Human
uguaacagauauuuaaauacuaca

SEQ ID NO: 1211409 - RNA, 20 nt, Human
ugucgugcaguuugguuugg

SEQ ID NO: 1211410 - RNA, 23 nt, Human
uuaaaaacaucugaaguaauccg

SEQ ID NO: 1211411 - RNA, 18 nt, Human
uugcugcgguccccauag

SEQ ID NO: 1211412 - RNA, 24 nt, Human
uugcugcgguccccauagucauac

SEQ ID NO: 1211413 - RNA, 24 nt, Human
uuggcaguucccacauuugcugug

SEQ ID NO: 1211414 - RNA, 22 nt, Human
acucugacaaccccaggcuccg

SEQ ID NO: 1211415 - RNA, 19 nt, Human
aggccccaagaaaugacag

SEQ ID NO: 1211416 - RNA, 21 nt, Human
cagcagacccgaucacucuga

SEQ ID NO: 1211417 - RNA, 22 nt, Human
cagcagacccgaucacucugac

SEQ ID NO: 1211418 - RNA, 20 nt, Human
ccaagaaaugacagcagacc

SEQ ID NO: 1211419 - RNA, 20 nt, Human
cccaagaaaugacagcagac

SEQ ID NO: 1211420 - RNA, 21 nt, Human
cccaagaaaugacagcagacc

SEQ ID NO: 1211421 - RNA, 22 nt, Human
cccaagaaaugacagcagaccc

SEQ ID NO: 1211422 - RNA, 19 nt, Human
ccccuccugccucuugaga

SEQ ID NO: 1211423 - RNA, 19 nt, Human
cucugacaaccccaggcuc

SEQ ID NO: 1211424 - RNA, 18 nt, Human
ucagucccccuccugccu

SEQ ID NO: 1211425 - RNA, 18 nt, Human
ucugacaaccccaggcuc

SEQ ID NO: 1211426 - RNA, 22 nt, Human
ugacagcagacccgaucacucu

SEQ ID NO: 1211427 - RNA, 22 nt, Human
uggcugauuucaaaugaaaaau

SEQ ID NO: 1211428 - RNA, 25 nt, Human
aaagcacaaaccauguauauaccaa

SEQ ID NO: 1211429 - RNA, 20 nt, Human
acuuuaaagauguuuaagag

SEQ ID NO: 1211430 - RNA, 18 nt, Human
agaacccagccagggacc

SEQ ID NO: 1211431 - RNA, 19 nt, Human
caccgcgcgacgcguaggu

SEQ ID NO: 1211432 - RNA, 18 nt, Human
cagaacccagccagggac

SEQ ID NO: 1211433 - RNA, 21 nt, Human
cagaacccagccagggaccgu

SEQ ID NO: 1211434 - RNA, 23 nt, Human
cagaacccagccagggaccgucc

SEQ ID NO: 1211435 - RNA, 20 nt, Human
cagccagggaccguccgcca

SEQ ID NO: 1211436 - RNA, 20 nt, Human
cagcgucugaagccucuucc

SEQ ID NO: 1211437 - RNA, 20 nt, Human
ccagggccuccagaacccag

SEQ ID NO: 1211438 - RNA, 26 nt, Human
ccuccagaacccagccagggaccguc

SEQ ID NO: 1211439 - RNA, 22 nt, Human
cgcugcagcgucugaagccucu

SEQ ID NO: 1211440 - RNA, 22 nt, Human
cggucccagggccuccagaacc

SEQ ID NO: 1211441 - RNA, 21 nt, Human
gcagcgucugaagccucuucc

SEQ ID NO: 1211442 - RNA, 24 nt, Human
uaaagcacaaaccauguauauacc

SEQ ID NO: 1211443 - RNA, 25 nt, Human
uaaagcacaaaccauguauauacca

SEQ ID NO: 1211444 - RNA, 22 nt, Human
uaaguagaaugcaaaucucuau

SEQ ID NO: 1211445 - RNA, 23 nt, Human
ucaaaaauaaugacucauccaac

SEQ ID NO: 1211446 - RNA, 20 nt, Human
ucccagggccuccagaaccc

SEQ ID NO: 1211447 - RNA, 26 nt, Human
ucccagggccuccagaacccagccag

SEQ ID NO: 1211448 - RNA, 22 nt, Human
uccgccaacucccgcccaccgc

SEQ ID NO: 1211449 - RNA, 20 nt, Human
uccgcggucccagggccucc

SEQ ID NO: 1211450 - RNA, 22 nt, Human
ucugaagccucuuccgcggucc

SEQ ID NO: 1211451 - RNA, 22 nt, Human
ugggaaaguaguuuugauaagc

SEQ ID NO: 1211452 - RNA, 19 nt, Human
uuccuagcauugaucaucu

SEQ ID NO: 1211453 - RNA, 25 nt, Human
uuucaaaaauaaugacucauccaac

SEQ ID NO: 1211454 - RNA, 23 nt, Human
agaagucucgccaucuaugagga

SEQ ID NO: 1211455 - RNA, 21 nt, Human
agccaggcagcccaucagcuc

SEQ ID NO: 1211456 - RNA, 19 nt, Human
cccaucagcucccccugcc

SEQ ID NO: 1211457 - RNA, 22 nt, Human
cccccagagccaggcagcccau

SEQ ID NO: 1211458 - RNA, 21 nt, Human
ccccccagagccaggcagccc

SEQ ID NO: 1211459 - RNA, 23 nt, Human
ccgaagccgggccagccgggcug

SEQ ID NO: 1211460 - RNA, 18 nt, Human
ccgggccagccgggcugg

SEQ ID NO: 1211461 - RNA, 20 nt, Human
ccuuccuccuuucuucccca

SEQ ID NO: 1211462 - RNA, 20 nt, Human
cuccaccccccagagccagg

SEQ ID NO: 1211463 - RNA, 24 nt, Human
cuccaccccccagagccaggcagc

SEQ ID NO: 1211464 - RNA, 22 nt, Human
cuccccuccaccccccagagcc

SEQ ID NO: 1211465 - RNA, 23 nt, Human
gaggggccgggggaggacccugu

SEQ ID NO: 1211466 - RNA, 18 nt, Human
gcccauuuggaggggccg

SEQ ID NO: 1211467 - RNA, 19 nt, Human
gccgggggaggacccugug

SEQ ID NO: 1211468 - RNA, 21 nt, Human
gggggaggacccuguggggaa

SEQ ID NO: 1211469 - RNA, 22 nt, Human
ucagaagucucgccaucuauga

SEQ ID NO: 1211470 - RNA, 23 nt, Human
ucagcucccccugccucugagcu

SEQ ID NO: 1211471 - RNA, 19 nt, Human
ucccccugccucugagcuu

SEQ ID NO: 1211472 - RNA, 21 nt, Human
ucugcagaauuccauuaucag

SEQ ID NO: 1211473 - RNA, 25 nt, Human
ucuucagcucuuucucugccucuuu

SEQ ID NO: 1211474 - RNA, 23 nt, Human
ugccucugagcuuucuucagcuc

SEQ ID NO: 1211475 - RNA, 18 nt, Human
ugcuccccuccacccccc

SEQ ID NO: 1211476 - RNA, 23 nt, Human
uggggucucuuugcucaggaagu

SEQ ID NO: 1211477 - RNA, 22 nt, Human
uuccgggcuagguagagcccau

SEQ ID NO: 1211478 - RNA, 25 nt, Human
uuuagcagccccuugagagccuucc

SEQ ID NO: 1211479 - RNA, 19 nt, Human
uuuggaggggccgggggag

SEQ ID NO: 1211480 - RNA, 23 nt, Human
aaaaaauauuugagaacaaaacc

SEQ ID NO: 1211481 - RNA, 27 nt, Human
aaacguugggagacuaguccagaaacu

SEQ ID NO: 1211482 - RNA, 18 nt, Human
aacaaaaccucugccucu

SEQ ID NO: 1211483 - RNA, 21 nt, Human
accaugacuuuugugaccagu

SEQ ID NO: 1211484 - RNA, 18 nt, Human
acuuuugugaccaguucc

SEQ ID NO: 1211485 - RNA, 20 nt, Human
agaaguagagcuuuuucacu

SEQ ID NO: 1211486 - RNA, 22 nt, Human
agagagggacuaguagguggua

SEQ ID NO: 1211487 - RNA, 20 nt, Human
agagauugcccuggcagagg

SEQ ID NO: 1211488 - RNA, 24 nt, Human
aggaaagcgagaggagccgguacc

SEQ ID NO: 1211489 - RNA, 22 nt, Human
auccccagcaucucugauucuc

SEQ ID NO: 1211490 - RNA, 21 nt, Human
augcaggcaccaugacuuuug

SEQ ID NO: 1211491 - RNA, 19 nt, Human
auucugcuaggucccucuc

SEQ ID NO: 1211492 - RNA, 23 nt, Human
cagcagcugcaggagugggacca

SEQ ID NO: 1211493 - RNA, 20 nt, Human
caggguccuaguguuuccuc

SEQ ID NO: 1211494 - RNA, 18 nt, Human
cauucugcuaggucccuc

SEQ ID NO: 1211495 - RNA, 20 nt, Human
cccuggugcccccagcucag

SEQ ID NO: 1211496 - RNA, 22 nt, Human
ccucaggaggaaagcgagagga

SEQ ID NO: 1211497 - RNA, 19 nt, Human
ccucucaguggaagauaga

SEQ ID NO: 1211498 - RNA, 21 nt, Human
cucaggaggaaagcgagagga

SEQ ID NO: 1211499 - RNA, 19 nt, Human
cuggggcacuggcuuuuuc

SEQ ID NO: 1211500 - RNA, 22 nt, Human
gaaguagagcuuuuucacuguc

SEQ ID NO: 1211501 - RNA, 20 nt, Human
gacuaguccagaaacuugca

SEQ ID NO: 1211502 - RNA, 23 nt, Human
gaugcaggcaccaugacuuuugu

SEQ ID NO: 1211503 - RNA, 20 nt, Human
gcuccuugucuccuacuuga

SEQ ID NO: 1211504 - RNA, 18 nt, Human
gcuggcguccccucccgc

SEQ ID NO: 1211505 - RNA, 21 nt, Human
gggagagagggucaggggggc

SEQ ID NO: 1211506 - RNA, 23 nt, Human
gggggcuuggcagggaugcaggc

SEQ ID NO: 1211507 - RNA, 20 nt, Human
ggucagcguagaaguagagc

SEQ ID NO: 1211508 - RNA, 21 nt, Human
ggugcaggggcaggguaagaa

SEQ ID NO: 1211509 - RNA, 24 nt, Human
gugguaguggggagagagggucag

SEQ ID NO: 1211510 - RNA, 22 nt, Human
uaguguuuccucccugggucag

SEQ ID NO: 1211511 - RNA, 21 nt, Human
ucaguggaagauagauaggcu

SEQ ID NO: 1211512 - RNA, 18 nt, Human
uccccagcaucucugauu

SEQ ID NO: 1211513 - RNA, 19 nt, Human
ucccuggugcccccagcuc

SEQ ID NO: 1211514 - RNA, 18 nt, Human
ucugcuaggucccucuca

SEQ ID NO: 1211515 - RNA, 28 nt, Human
ugagaacaaaaccucugccucuuugagu

SEQ ID NO: 1211516 - RNA, 21 nt, Human
ugcaggggcaggguaagaagc

SEQ ID NO: 1211517 - RNA, 18 nt, Human
ugccagcagcccagcaga

SEQ ID NO: 1211518 - RNA, 19 nt, Human
ugcccuggcagagguuggg

SEQ ID NO: 1211519 - RNA, 19 nt, Human
ugcucuggcauccccagca

SEQ ID NO: 1211520 - RNA, 21 nt, Human
uggggagagagggucaggggg

SEQ ID NO: 1211521 - RNA, 20 nt, Human
uugcucuggcauccccagca

SEQ ID NO: 1211522 - RNA, 25 nt, Human
aaaaaaacaagcagccuuguacaga

SEQ ID NO: 1211523 - RNA, 18 nt, Human
aaaaaacaagcagccuug

SEQ ID NO: 1211524 - RNA, 18 nt, Human
aaaaggccucucucccuu

SEQ ID NO: 1211525 - RNA, 18 nt, Human
aaaauuagcugggcgugg

SEQ ID NO: 1211526 - RNA, 23 nt, Human
aaaguguccacagcaacuuaaaa

SEQ ID NO: 1211527 - RNA, 22 nt, Human
aaauacagacaaauuuucaaau

SEQ ID NO: 1211528 - RNA, 19 nt, Human
aacauagugaaaccccauc

SEQ ID NO: 1211529 - RNA, 20 nt, Human
aacauagugaaaccccaucu

SEQ ID NO: 1211530 - RNA, 20 nt, Human
aacauagugaaaccccaucu

SEQ ID NO: 1211531 - RNA, 21 nt, Human
aacauagugaaaccccaucuc

SEQ ID NO: 1211532 - RNA, 28 nt, Human
aagcagccuuguacagaacagugaaaau

SEQ ID NO: 1211533 - RNA, 20 nt, Human
aagucaguaccaaaugacca

SEQ ID NO: 1211534 - RNA, 25 nt, Human
aauaaaaaaacaagcagccuuguac

SEQ ID NO: 1211535 - RNA, 22 nt, Human
aaucacgaggucaggaguucga

SEQ ID NO: 1211536 - RNA, 24 nt, Human
aaucacgaggucaggaguucgaga

SEQ ID NO: 1211537 - RNA, 24 nt, Human
aaucacuugaacccgggaggcgga

SEQ ID NO: 1211538 - RNA, 31 nt, Human
aauccugcauuuuccuggaguaacauccacc

SEQ ID NO: 1211539 - RNA, 21 nt, Human
acaaacccaggcggucgcaca

SEQ ID NO: 1211540 - RNA, 23 nt, Human
acaccacaagucuucuuuccaau

SEQ ID NO: 1211541 - RNA, 24 nt, Human
acagaacagugaaaaugccaagga

SEQ ID NO: 1211542 - RNA, 18 nt, Human
acagugaaaaugccaagg

SEQ ID NO: 1211543 - RNA, 22 nt, Human
acagugcgagacucugucaaaa

SEQ ID NO: 1211544 - RNA, 24 nt, Human
accccaucucuacuaaaaauacaa

SEQ ID NO: 1211545 - RNA, 24 nt, Human
accucuagccucucugaacggccu

SEQ ID NO: 1211546 - RNA, 23 nt, Human
acgauaaaugucuaaaauguauc

SEQ ID NO: 1211547 - RNA, 24 nt, Human
acugcauuccagcccaggcaacag

SEQ ID NO: 1211548 - RNA, 22 nt, Human
agaaucacuugaacccgggagg

SEQ ID NO: 1211549 - RNA, 19 nt, Human
agagagagagagaaaguca

SEQ ID NO: 1211550 - RNA, 24 nt, Human
agcacuuugggaggcugagguggg

SEQ ID NO: 1211551 - RNA, 22 nt, Human
agccagaauaagaaccucuagc

SEQ ID NO: 1211552 - RNA, 22 nt, Human
agccuggccaacauagugaaac

SEQ ID NO: 1211553 - RNA, 24 nt, Human
agccuggccaacauagugaaaccc

SEQ ID NO: 1211554 - RNA, 18 nt, Human
aggcaggagaaucacuug

SEQ ID NO: 1211555 - RNA, 24 nt, Human
aggcaggagaaucacuugaacccg

SEQ ID NO: 1211556 - RNA, 21 nt, Human
aggcggagguugcagugagcc

SEQ ID NO: 1211557 - RNA, 24 nt, Human
aggcggagguugcagugagccgag

SEQ ID NO: 1211558 - RNA, 24 nt, Human
aggcugaggcaggagaaucacuug

SEQ ID NO: 1211559 - RNA, 18 nt, Human
aggcugauuauuucuucu

SEQ ID NO: 1211560 - RNA, 20 nt, Human
aggcugggugcgguggcuca

SEQ ID NO: 1211561 - RNA, 24 nt, Human
aggugggccaaucacgaggucagg

SEQ ID NO: 1211562 - RNA, 22 nt, Human
auacauacacacauguauauau

SEQ ID NO: 1211563 - RNA, 24 nt, Human
auauauauguguauauauauauau

SEQ ID NO: 1211564 - RNA, 19 nt, Human
auauauguguauauauaca

SEQ ID NO: 1211565 - RNA, 19 nt, Human
auauauguguauauauaua

SEQ ID NO: 1211566 - RNA, 19 nt, Human
auauguguauauauauaua

SEQ ID NO: 1211567 - RNA, 23 nt, Human
aucgcaccacugcauuccagccc

SEQ ID NO: 1211568 - RNA, 22 nt, Human
auguauacauauauguguaugu

SEQ ID NO: 1211569 - RNA, 18 nt, Human
auguauauauguauauac

SEQ ID NO: 1211570 - RNA, 18 nt, Human
auguguauauauauauau

SEQ ID NO: 1211571 - RNA, 20 nt, Human
auguguauauauauauauau

SEQ ID NO: 1211572 - RNA, 22 nt, Human
auuauuucuucuaaugucuucu

SEQ ID NO: 1211573 - RNA, 21 nt, Human
caacaaaaaugcuccccacaa

SEQ ID NO: 1211574 - RNA, 22 nt, Human
caacacagcaaauucaaccaca

SEQ ID NO: 1211575 - RNA, 21 nt, Human
caagcagccuuguacagaaca

SEQ ID NO: 1211576 - RNA, 23 nt, Human
caaucacgaggucaggaguucga

SEQ ID NO: 1211577 - RNA, 21 nt, Human
cacaaacccaggcggucgcac

SEQ ID NO: 1211578 - RNA, 26 nt, Human
cacacaaugcaccaucacuucuuuaa

SEQ ID NO: 1211579 - RNA, 22 nt, Human
cacacagacaucuuucagcagc

SEQ ID NO: 1211580 - RNA, 23 nt, Human
cacagcaaauucaaccacagauc

SEQ ID NO: 1211581 - RNA, 24 nt, Human
cacaucuguaauaccagcacuuug

SEQ ID NO: 1211582 - RNA, 24 nt, Human
caccacugcauuccagcccaggca

SEQ ID NO: 1211583 - RNA, 24 nt, Human
caccuacuugggaggcugaggcag

SEQ ID NO: 1211584 - RNA, 19 nt, Human
cacugcauuccagcccagg

SEQ ID NO: 1211585 - RNA, 21 nt, Human
cacugcauuccagcccaggca

SEQ ID NO: 1211586 - RNA, 22 nt, Human
cacugcauuccagcccaggcaa

SEQ ID NO: 1211587 - RNA, 23 nt, Human
cacugcauuccagcccaggcaac

SEQ ID NO: 1211588 - RNA, 24 nt, Human
cacugcauuccagcccaggcaaca

SEQ ID NO: 1211589 - RNA, 22 nt, Human
cacuugacauuaccaaacaugc

SEQ ID NO: 1211590 - RNA, 24 nt, Human
cagcacuuugggaggcugaggugg

SEQ ID NO: 1211591 - RNA, 20 nt, Human
cagcccaggcaacagugcga

SEQ ID NO: 1211592 - RNA, 23 nt, Human
caggccauuaaauacagacaaau

SEQ ID NO: 1211593 - RNA, 22 nt, Human
cauaacgcauaccagauagucu

SEQ ID NO: 1211594 - RNA, 24 nt, Human
cauggcgauaaacaaggguuccau

SEQ ID NO: 1211595 - RNA, 18 nt, Human
cauuuuuuaauuuuacau

SEQ ID NO: 1211596 - RNA, 22 nt, Human
ccaaucacgaggucaggaguuc

SEQ ID NO: 1211597 - RNA, 22 nt, Human
ccacacaaugcaccaucacuuc

SEQ ID NO: 1211598 - RNA, 19 nt, Human
ccacugcauuccagcccag

SEQ ID NO: 1211599 - RNA, 20 nt, Human
ccacugcauuccagcccagg

SEQ ID NO: 1211600 - RNA, 21 nt, Human
ccacugcauuccagcccaggc

SEQ ID NO: 1211601 - RNA, 24 nt, Human
ccacugcauuccagcccaggcaac

SEQ ID NO: 1211602 - RNA, 26 nt, Human
ccagcugaaccaacacaugcaacucg

SEQ ID NO: 1211603 - RNA, 18 nt, Human
ccccggccagggccgccc

SEQ ID NO: 1211604 - RNA, 19 nt, Human
ccgcccgagcgcccgaccg

SEQ ID NO: 1211605 - RNA, 23 nt, Human
ccuggccaacauagugaaacccc

SEQ ID NO: 1211606 - RNA, 24 nt, Human
ccuggccaacauagugaaacccca

SEQ ID NO: 1211607 - RNA, 18 nt, Human
ccuguaaucccaccuacu

SEQ ID NO: 1211608 - RNA, 19 nt, Human
ccuguaaucccaccuacuu

SEQ ID NO: 1211609 - RNA, 22 nt, Human
ccuguaaucccaccuacuuggg

SEQ ID NO: 1211610 - RNA, 24 nt, Human
cgagaccagccuggccaacauagu

SEQ ID NO: 1211611 - RNA, 22 nt, Human
cgcacauacaugguuuuaaggc

SEQ ID NO: 1211612 - RNA, 21 nt, Human
cgcaccacugcauuccagccc

SEQ ID NO: 1211613 - RNA, 22 nt, Human
cgcccgagcgcccgaccgccag

SEQ ID NO: 1211614 - RNA, 27 nt, Human
cgcucccgccgcuaucgccagcugaac

SEQ ID NO: 1211615 - RNA, 24 nt, Human
cgggaggcggagguugcagugagc

SEQ ID NO: 1211616 - RNA, 21 nt, Human
cuagccucucugaacggccuu

SEQ ID NO: 1211617 - RNA, 22 nt, Human
cuaucacaucaaagaagcaagg

SEQ ID NO: 1211618 - RNA, 21 nt, Human
cucaaacaacuccuaccaaca

SEQ ID NO: 1211619 - RNA, 24 nt, Human
cucacaucuguaauaccagcacuu

SEQ ID NO: 1211620 - RNA, 19 nt, Human
cuccccacaaagucuaccg

SEQ ID NO: 1211621 - RNA, 19 nt, Human
cucugucaaaaaaaaaaaa

SEQ ID NO: 1211622 - RNA, 23 nt, Human
cuggccaacauagugaaacccca

SEQ ID NO: 1211623 - RNA, 22 nt, Human
cuguagaauauauauauaugua

SEQ ID NO: 1211624 - RNA, 18 nt, Human
gaaaauaugauucuuuaa

SEQ ID NO: 1211625 - RNA, 23 nt, Human
gagaucgcaccacugcauuccag

SEQ ID NO: 1211626 - RNA, 23 nt, Human
gagguugcagugagccgagaucg

SEQ ID NO: 1211627 - RNA, 20 nt, Human
gcaccacugcauuccagccc

SEQ ID NO: 1211628 - RNA, 23 nt, Human
gcaggagaaucacuugaacccgg

SEQ ID NO: 1211629 - RNA, 24 nt, Human
gccaacauagugaaaccccaucuc

SEQ ID NO: 1211630 - RNA, 20 nt, Human
gccgagaucgcaccacugca

SEQ ID NO: 1211631 - RNA, 20 nt, Human
ggagguugcagugagccgag

SEQ ID NO: 1211632 - RNA, 22 nt, Human
ggagguugcagugagccgagau

SEQ ID NO: 1211633 - RNA, 24 nt, Human
ggagguugcagugagccgagaucg

SEQ ID NO: 1211634 - RNA, 23 nt, Human
ggccaaucacgaggucaggaguu

SEQ ID NO: 1211635 - RNA, 18 nt, Human
ggcgugguggcgggcgcc

SEQ ID NO: 1211636 - RNA, 24 nt, Human
gggcgugguggcgggcgccuguaa

SEQ ID NO: 1211637 - RNA, 24 nt, Human
gggugcgguggcucacaucuguaa

SEQ ID NO: 1211638 - RNA, 19 nt, Human
guguauacauacauauaug

SEQ ID NO: 1211639 - RNA, 19 nt, Human
guguauauauacauauaua

SEQ ID NO: 1211640 - RNA, 19 nt, Human
guugcagugagccgagauc

SEQ ID NO: 1211641 - RNA, 30 nt, Human
uaaaaaaacaagcagccuuguacagaacag

SEQ ID NO: 1211642 - RNA, 18 nt, Human
uaaaaaaucacucagcuu

SEQ ID NO: 1211643 - RNA, 18 nt, Human
uaaaaagagagaaagaga

SEQ ID NO: 1211644 - RNA, 22 nt, Human
uaacugcauuugcuaagaacug

SEQ ID NO: 1211645 - RNA, 19 nt, Human
uacauacauaacgcauacc

SEQ ID NO: 1211646 - RNA, 20 nt, Human
uacauacauaacgcauacca

SEQ ID NO: 1211647 - RNA, 20 nt, Human
uacauacauauauguguaua

SEQ ID NO: 1211648 - RNA, 19 nt, Human
uacauauauguguauauau

SEQ ID NO: 1211649 - RNA, 19 nt, Human
uacauauauguguauauau

SEQ ID NO: 1211650 - RNA, 22 nt, Human
uacauauauguguauauauaca

SEQ ID NO: 1211651 - RNA, 18 nt, Human
uagcucaaacaacuccua

SEQ ID NO: 1211652 - RNA, 19 nt, Human
uauacauacacacauguau

SEQ ID NO: 1211653 - RNA, 27 nt, Human
uauacauauauguguauguauauaugu

SEQ ID NO: 1211654 - RNA, 18 nt, Human
uauauacauauauaugug

SEQ ID NO: 1211655 - RNA, 24 nt, Human
uauauacauauauauguguauaua

SEQ ID NO: 1211656 - RNA, 18 nt, Human
uauauacauguauacaua

SEQ ID NO: 1211657 - RNA, 22 nt, Human
uauauacauuuuuuuuugugua

SEQ ID NO: 1211658 - RNA, 18 nt, Human
uauauauauauguauaca

SEQ ID NO: 1211659 - RNA, 18 nt, Human
uauauauauguauacaua

SEQ ID NO: 1211660 - RNA, 21 nt, Human
uauauauauguauacauauau

SEQ ID NO: 1211661 - RNA, 24 nt, Human
uauauauauguauacauauaugug

SEQ ID NO: 1211662 - RNA, 18 nt, Human
uauauauguauacauaua

SEQ ID NO: 1211663 - RNA, 18 nt, Human
uauauauguauacauaua

SEQ ID NO: 1211664 - RNA, 18 nt, Human
uauauauguauacauaua

SEQ ID NO: 1211665 - RNA, 24 nt, Human
uauauauguauauacauguauaca

SEQ ID NO: 1211666 - RNA, 20 nt, Human
uauauauguguauauauaua

SEQ ID NO: 1211667 - RNA, 20 nt, Human
uauauguauacauauaugug

SEQ ID NO: 1211668 - RNA, 20 nt, Human
uauauguauacauauaugug

SEQ ID NO: 1211669 - RNA, 24 nt, Human
uauauguauacauauauguguaua

SEQ ID NO: 1211670 - RNA, 24 nt, Human
uauauguauacauauauguguaua

SEQ ID NO: 1211671 - RNA, 24 nt, Human
uauauguauacauauauguguaug

SEQ ID NO: 1211672 - RNA, 19 nt, Human
uauauguguauauauacau

SEQ ID NO: 1211673 - RNA, 18 nt, Human
uauauguguauauauaua

SEQ ID NO: 1211674 - RNA, 18 nt, Human
uauauguguauauaugua

SEQ ID NO: 1211675 - RNA, 18 nt, Human
uauauguguauauaugua

SEQ ID NO: 1211676 - RNA, 19 nt, Human
uauauguguauauauguau

SEQ ID NO: 1211677 - RNA, 19 nt, Human
uauauguguauauauguau

SEQ ID NO: 1211678 - RNA, 28 nt, Human
uauguauacauauauguguauauaugua

SEQ ID NO: 1211679 - RNA, 28 nt, Human
uauguauacauauauguguauauaugua

SEQ ID NO: 1211680 - RNA, 18 nt, Human
uauguauauauguauaua

SEQ ID NO: 1211681 - RNA, 20 nt, Human
uauguauauauguauauaca

SEQ ID NO: 1211682 - RNA, 21 nt, Human
uauguauauauguauauacau

SEQ ID NO: 1211683 - RNA, 24 nt, Human
uauguauauauguauauacaugua

SEQ ID NO: 1211684 - RNA, 22 nt, Human
uauguguauauauacauauaua

SEQ ID NO: 1211685 - RNA, 24 nt, Human
uauguguauauauacauauauaug

SEQ ID NO: 1211686 - RNA, 28 nt, Human
uauguguauauauacauauauaugugua

SEQ ID NO: 1211687 - RNA, 18 nt, Human
uauguguauauauauaua

SEQ ID NO: 1211688 - RNA, 21 nt, Human
uauguguauauauauauauau

SEQ ID NO: 1211689 - RNA, 18 nt, Human
uauguguauauauguaua

SEQ ID NO: 1211690 - RNA, 18 nt, Human
uauguguauauauguaua

SEQ ID NO: 1211691 - RNA, 21 nt, Human
uauguguauauauguauacau

SEQ ID NO: 1211692 - RNA, 21 nt, Human
uauguguauauauguauacau

SEQ ID NO: 1211693 - RNA, 25 nt, Human
uauguguauauauguauacauauau

SEQ ID NO: 1211694 - RNA, 25 nt, Human
uauguguauauauguauacauauau

SEQ ID NO: 1211695 - RNA, 28 nt, Human
uauguguauauauguauacauauaugug

SEQ ID NO: 1211696 - RNA, 18 nt, Human
uauguguauguauauaug

SEQ ID NO: 1211697 - RNA, 24 nt, Human
uauguguauguauauauguauaua

SEQ ID NO: 1211698 - RNA, 26 nt, Human
uauguguauguauauauguauauaaa

SEQ ID NO: 1211699 - RNA, 18 nt, Human
uauucuaccacacaaugc

SEQ ID NO: 1211700 - RNA, 25 nt, Human
ucacaucaaagaagcaaggagacau

SEQ ID NO: 1211701 - RNA, 18 nt, Human
ucacgaggucaggaguuc

SEQ ID NO: 1211702 - RNA, 24 nt, Human
ucacgaggucaggaguucgagacc

SEQ ID NO: 1211703 - RNA, 24 nt, Human
ucacuugaacccgggaggcggagg

SEQ ID NO: 1211704 - RNA, 19 nt, Human
ucaggccauuaaauacaga

SEQ ID NO: 1211705 - RNA, 24 nt, Human
ucaggcugggugcgguggcucaca

SEQ ID NO: 1211706 - RNA, 23 nt, Human
ucaguucaggccauuaaauacag

SEQ ID NO: 1211707 - RNA, 28 nt, Human
ucauaacaacacagcaaauucaaccaca

SEQ ID NO: 1211708 - RNA, 24 nt, Human
ucccgccgcuaucgccagcugaac

SEQ ID NO: 1211709 - RNA, 19 nt, Human
ucgcacaggccccgccggc

SEQ ID NO: 1211710 - RNA, 23 nt, Human
ucucuacuaaaaauacaaaaauu

SEQ ID NO: 1211711 - RNA, 21 nt, Human
ucucugaacggccuuccacuc

SEQ ID NO: 1211712 - RNA, 22 nt, Human
ucugucaaaaaaaaaaaagaga

SEQ ID NO: 1211713 - RNA, 19 nt, Human
ugaaaccccaucucuacua

SEQ ID NO: 1211714 - RNA, 24 nt, Human
ugaauacuuucauccauaaguuuu

SEQ ID NO: 1211715 - RNA, 22 nt, Human
ugagccgagaucgcaccacugc

SEQ ID NO: 1211716 - RNA, 20 nt, Human
ugaggcaggagaaucacuug

SEQ ID NO: 1211717 - RNA, 24 nt, Human
ugaggcaggagaaucacuugaacc

SEQ ID NO: 1211718 - RNA, 25 nt, Human
ugaggcaggagaaucacuugaaccc

SEQ ID NO: 1211719 - RNA, 24 nt, Human
ugaggugggccaaucacgagguca

SEQ ID NO: 1211720 - RNA, 18 nt, Human
ugauacaggcacacagac

SEQ ID NO: 1211721 - RNA, 18 nt, Human
ugauacaggcacacagac

SEQ ID NO: 1211722 - RNA, 18 nt, Human
ugccaaggacgaggacag

SEQ ID NO: 1211723 - RNA, 21 nt, Human
uggcaauaaaaaaacaagcag

SEQ ID NO: 1211724 - RNA, 19 nt, Human
uggcgauaaacaaggguuc

SEQ ID NO: 1211725 - RNA, 22 nt, Human
uggcucacaucuguaauaccag

SEQ ID NO: 1211726 - RNA, 24 nt, Human
uggcucacaucuguaauaccagca

SEQ ID NO: 1211727 - RNA, 19 nt, Human
ugggaggcugaggcaggag

SEQ ID NO: 1211728 - RNA, 24 nt, Human
ugggaggcugaggcaggagaauca

SEQ ID NO: 1211729 - RNA, 24 nt, Human
ugggaggcugaggugggccaauca

SEQ ID NO: 1211730 - RNA, 21 nt, Human
ugggccaaucacgaggucagg

SEQ ID NO: 1211731 - RNA, 24 nt, Human
ugguggcgggcgccuguaauccca

SEQ ID NO: 1211732 - RNA, 18 nt, Human
uguaaucccaccuacuug

SEQ ID NO: 1211733 - RNA, 20 nt, Human
uguauacauacacacaugua

SEQ ID NO: 1211734 - RNA, 22 nt, Human
uguauacauacacacauguaua

SEQ ID NO: 1211735 - RNA, 24 nt, Human
uguauacauacacacauguauaua

SEQ ID NO: 1211736 - RNA, 25 nt, Human
uguauacauacacacauguauauag

SEQ ID NO: 1211737 - RNA, 18 nt, Human
uguauacauacauauaug

SEQ ID NO: 1211738 - RNA, 21 nt, Human
uguauacauacauauaugugu

SEQ ID NO: 1211739 - RNA, 24 nt, Human
uguauacauacauauauguguaua

SEQ ID NO: 1211740 - RNA, 26 nt, Human
uguauacauacauauauguguauaua

SEQ ID NO: 1211741 - RNA, 19 nt, Human
uguauacauauauguguau

SEQ ID NO: 1211742 - RNA, 22 nt, Human
uguauacauauauguguauaua

SEQ ID NO: 1211743 - RNA, 22 nt, Human
uguauacauauauguguauaua

SEQ ID NO: 1211744 - RNA, 24 nt, Human
uguauacauauauguguauauaug

SEQ ID NO: 1211745 - RNA, 24 nt, Human
uguauacauauauguguauauaug

SEQ ID NO: 1211746 - RNA, 24 nt, Human
uguauacauauauguguauguaua

SEQ ID NO: 1211747 - RNA, 18 nt, Human
uguauauacauguauaca

SEQ ID NO: 1211748 - RNA, 18 nt, Human
uguauauacauguauaca

SEQ ID NO: 1211749 - RNA, 19 nt, Human
uguauauauacauauauau

SEQ ID NO: 1211750 - RNA, 21 nt, Human
uguauauauacauauauaugu

SEQ ID NO: 1211751 - RNA, 22 nt, Human
uguauauauacauauauaugug

SEQ ID NO: 1211752 - RNA, 24 nt, Human
uguauauauacauauauaugugua

SEQ ID NO: 1211753 - RNA, 21 nt, Human
uguauauauauauauauuuua

SEQ ID NO: 1211754 - RNA, 21 nt, Human
uguauauauguauacauauau

SEQ ID NO: 1211755 - RNA, 21 nt, Human
uguauauauguauacauauau

SEQ ID NO: 1211756 - RNA, 24 nt, Human
uguauauauguauacauauaugug

SEQ ID NO: 1211757 - RNA, 27 nt, Human
uguauauauguauacauauauguguau

SEQ ID NO: 1211758 - RNA, 19 nt, Human
ugucaaaaaaaaaaaagag

SEQ ID NO: 1211759 - RNA, 20 nt, Human
ugucuaaaauguaucugggg

SEQ ID NO: 1211760 - RNA, 23 nt, Human
ugugaacacaaagaaacuuuaca

SEQ ID NO: 1211761 - RNA, 19 nt, Human
uguguauacauacauauau

SEQ ID NO: 1211762 - RNA, 20 nt, Human
uguguauacauacauauaug

SEQ ID NO: 1211763 - RNA, 24 nt, Human
uguguauacauacauauaugugua

SEQ ID NO: 1211764 - RNA, 18 nt, Human
uguguauauauacauaua

SEQ ID NO: 1211765 - RNA, 20 nt, Human
uguguauauauacauauaua

SEQ ID NO: 1211766 - RNA, 20 nt, Human
uguguauauauacauauaua

SEQ ID NO: 1211767 - RNA, 22 nt, Human
uguguauauauacauauauaug

SEQ ID NO: 1211768 - RNA, 18 nt, Human
uguguauauauauauaua

SEQ ID NO: 1211769 - RNA, 19 nt, Human
uguguauauauauauauau

SEQ ID NO: 1211770 - RNA, 18 nt, Human
uguguauauauguauaca

SEQ ID NO: 1211771 - RNA, 18 nt, Human
uguguauauauguauaca

SEQ ID NO: 1211772 - RNA, 22 nt, Human
uguguauauauguauacauaua

SEQ ID NO: 1211773 - RNA, 22 nt, Human
uguguauauauguauacauaua

SEQ ID NO: 1211774 - RNA, 25 nt, Human
uguguauauauguauacauauaugu

SEQ ID NO: 1211775 - RNA, 25 nt, Human
uguguauauauguauacauauaugu

SEQ ID NO: 1211776 - RNA, 18 nt, Human
uguguauguauauaugua

SEQ ID NO: 1211777 - RNA, 19 nt, Human
uguguauguauauauguau

SEQ ID NO: 1211778 - RNA, 22 nt, Human
uguguauguauauauguauaua

SEQ ID NO: 1211779 - RNA, 18 nt, Human
uuagcacaauuuuacuca

SEQ ID NO: 1211780 - RNA, 18 nt, Human
uuagcugggcgugguggc

SEQ ID NO: 1211781 - RNA, 24 nt, Human
uuagcugggcgugguggcgggcgc

SEQ ID NO: 1211782 - RNA, 24 nt, Human
uugaacccgggaggcggagguugc

SEQ ID NO: 1211783 - RNA, 19 nt, Human
uugcagugagccgagaucg

SEQ ID NO: 1211784 - RNA, 20 nt, Human
uugcagugagccgagaucgc

SEQ ID NO: 1211785 - RNA, 22 nt, Human
uugcagugagccgagaucgcac

SEQ ID NO: 1211786 - RNA, 25 nt, Human
uugggaggcugaggcaggagaauca

SEQ ID NO: 1211787 - RNA, 25 nt, Human
uugggaggcugaggugggccaauca

SEQ ID NO: 1211788 - RNA, 26 nt, Human
uuuuuguguauacauacauauaugug

SEQ ID NO: 1211789 - RNA, 30 nt, Human
uuuuuuuuguguauacauacauauaugugu

SEQ ID NO: 1211790 - RNA, 19 nt, Human
aaagacacugcaccuggac

SEQ ID NO: 1211791 - RNA, 22 nt, Human
aaagugcugggauuacagguga

SEQ ID NO: 1211792 - RNA, 23 nt, Human
aaagugcugggauuacaggugaa

SEQ ID NO: 1211793 - RNA, 23 nt, Human
aacuccugggcucaagcgauccu

SEQ ID NO: 1211794 - RNA, 25 nt, Human
aagcgauccucccaccucagccucc

SEQ ID NO: 1211795 - RNA, 18 nt, Human
aagugcugggauuacagg

SEQ ID NO: 1211796 - RNA, 19 nt, Human
aagugcugggauuacaggu

SEQ ID NO: 1211797 - RNA, 27 nt, Human
caaagugcugggauuacaggugaaaga

SEQ ID NO: 1211798 - RNA, 27 nt, Human
caagcgauccucccaccucagccuccc

SEQ ID NO: 1211799 - RNA, 27 nt, Human
caagcgauccucccaccucagccuccc

SEQ ID NO: 1211800 - RNA, 23 nt, Human
cacaccaaaauagugccugucau

SEQ ID NO: 1211801 - RNA, 21 nt, Human
caccaaaauagugccugucau

SEQ ID NO: 1211802 - RNA, 24 nt, Human
caccucagccucccaaagugcugg

SEQ ID NO: 1211803 - RNA, 20 nt, Human
ccaaagugcugggauuacag

SEQ ID NO: 1211804 - RNA, 21 nt, Human
ccaaagugcugggauuacagg

SEQ ID NO: 1211805 - RNA, 21 nt, Human
ccaaagugcugggauuacagg

SEQ ID NO: 1211806 - RNA, 22 nt, Human
ccaaagugcugggauuacaggu

SEQ ID NO: 1211807 - RNA, 24 nt, Human
ccaggcuggucuugaacuccuggg

SEQ ID NO: 1211808 - RNA, 18 nt, Human
ccugggcucaagcgaucc

SEQ ID NO: 1211809 - RNA, 21 nt, Human
ccuuccuaggcaucuuuccca

SEQ ID NO: 1211810 - RNA, 24 nt, Human
cucaagcgauccucccaccucagc

SEQ ID NO: 1211811 - RNA, 23 nt, Human
cuccugggcucaagcgauccucc

SEQ ID NO: 1211812 - RNA, 24 nt, Human
cugcaccuggacuaucuuucuguu

SEQ ID NO: 1211813 - RNA, 19 nt, Human
cuggucuugaacuccuggg

SEQ ID NO: 1211814 - RNA, 23 nt, Human
gauuacaggugaaagacacugca

SEQ ID NO: 1211815 - RNA, 18 nt, Human
ggcuggucuugaacuccu

SEQ ID NO: 1211816 - RNA, 21 nt, Human
guugcccaggcuggucuugaa

SEQ ID NO: 1211817 - RNA, 18 nt, Human
ucagccucccaaagugcu

SEQ ID NO: 1211818 - RNA, 23 nt, Human
ucccaaagugcugggauuacagg

SEQ ID NO: 1211819 - RNA, 27 nt, Human
uccucccaccucagccucccaaagugc

SEQ ID NO: 1211820 - RNA, 21 nt, Human
uccugggcucaagcgauccuc

SEQ ID NO: 1211821 - RNA, 24 nt, Human
uccugggcucaagcgauccuccca

SEQ ID NO: 1211822 - RNA, 23 nt, Human
ucuugaacuccugggcucaagcg

SEQ ID NO: 1211823 - RNA, 23 nt, Human
ucuuucccagcacugcugcuguc

SEQ ID NO: 1211824 - RNA, 21 nt, Human
ucuuucuguuauugcuguggu

SEQ ID NO: 1211825 - RNA, 24 nt, Human
ugcccaggcuggucuugaacuccu

SEQ ID NO: 1211826 - RNA, 28 nt, Human
ugcccaggcuggucuugaacuccugggc

SEQ ID NO: 1211827 - RNA, 20 nt, Human
ugcugggauuacaggugaaa

SEQ ID NO: 1211828 - RNA, 24 nt, Human
ugcugggauuacaggugaaagaca

SEQ ID NO: 1211829 - RNA, 20 nt, Human
ugggauuacaggugaaagac

SEQ ID NO: 1211830 - RNA, 22 nt, Human
ugggauuacaggugaaagacac

SEQ ID NO: 1211831 - RNA, 24 nt, Human
ugggauuacaggugaaagacacug

SEQ ID NO: 1211832 - RNA, 19 nt, Human
uucccagcacugcugcugu

SEQ ID NO: 1211833 - RNA, 21 nt, Human
aaaacccccaagacauuccag

SEQ ID NO: 1211834 - RNA, 18 nt, Human
aaauauuucuugggucaa

SEQ ID NO: 1211835 - RNA, 18 nt, Human
aagaugugucucuuggau

SEQ ID NO: 1211836 - RNA, 18 nt, Human
agaagaacaggcagaggc

SEQ ID NO: 1211837 - RNA, 19 nt, Human
agaagaacaggcagaggca

SEQ ID NO: 1211838 - RNA, 21 nt, Human
agaagaacaggcagaggcagg

SEQ ID NO: 1211839 - RNA, 22 nt, Human
agaagcucucuuaucuuccaaa

SEQ ID NO: 1211840 - RNA, 19 nt, Human
aggcagggcccacaguggc

SEQ ID NO: 1211841 - RNA, 23 nt, Human
caaaacccccaagacauuccaga

SEQ ID NO: 1211842 - RNA, 20 nt, Human
caaagaugugucucuuggau

SEQ ID NO: 1211843 - RNA, 22 nt, Human
caacaaaucaaucucacauaug

SEQ ID NO: 1211844 - RNA, 21 nt, Human
caagcaggcuccucggggucc

SEQ ID NO: 1211845 - RNA, 23 nt, Human
cacagugacaggaucaaaacccc

SEQ ID NO: 1211846 - RNA, 20 nt, Human
cacauaugccuccucagaaa

SEQ ID NO: 1211847 - RNA, 23 nt, Human
cacauaugccuccucagaaacaa

SEQ ID NO: 1211848 - RNA, 22 nt, Human
cacccagacgccuccgggggac

SEQ ID NO: 1211849 - RNA, 21 nt, Human
cacuuggcaugaaccaacaaa

SEQ ID NO: 1211850 - RNA, 22 nt, Human
cagagguccacauucaaaguca

SEQ ID NO: 1211851 - RNA, 24 nt, Human
cagcaagcaggcuccucggggucc

SEQ ID NO: 1211852 - RNA, 23 nt, Human
cagcagccuucugcgcugggugc

SEQ ID NO: 1211853 - RNA, 19 nt, Human
cagggcgcccucccucucc

SEQ ID NO: 1211854 - RNA, 22 nt, Human
caugaaccaacaaaucaaucuc

SEQ ID NO: 1211855 - RNA, 21 nt, Human
ccaagacauuccagaagaaca

SEQ ID NO: 1211856 - RNA, 21 nt, Human
ccagaagaacaggcagaggca

SEQ ID NO: 1211857 - RNA, 22 nt, Human
cccaagacauuccagaagaaca

SEQ ID NO: 1211858 - RNA, 27 nt, Human
cccacaguggcugaaggacuacaaagg

SEQ ID NO: 1211859 - RNA, 21 nt, Human
ccccaagacauuccagaagaa

SEQ ID NO: 1211860 - RNA, 26 nt, Human
cccccaagacauuccagaagaacagg

SEQ ID NO: 1211861 - RNA, 20 nt, Human
ccccuguaucgaaggaugag

SEQ ID NO: 1211862 - RNA, 21 nt, Human
ccugccugucuuucuacggaa

SEQ ID NO: 1211863 - RNA, 19 nt, Human
ccuuuuuuggucuugaaga

SEQ ID NO: 1211864 - RNA, 24 nt, Human
cgggaugcucgccuccucugccgg

SEQ ID NO: 1211865 - RNA, 18 nt, Human
cucagagguccacauuca

SEQ ID NO: 1211866 - RNA, 19 nt, Human
cugcauaguguuccucacu

SEQ ID NO: 1211867 - RNA, 18 nt, Human
gaacacacuuggcaugaa

SEQ ID NO: 1211868 - RNA, 21 nt, Human
gaacacacuuggcaugaacca

SEQ ID NO: 1211869 - RNA, 20 nt, Human
gaaccaacaaaucaaucuca

SEQ ID NO: 1211870 - RNA, 19 nt, Human
gagagccauccugcgugga

SEQ ID NO: 1211871 - RNA, 24 nt, Human
gcagcagccuucugcgcugggugc

SEQ ID NO: 1211872 - RNA, 18 nt, Human
gcagggcgcccucccucu

SEQ ID NO: 1211873 - RNA, 20 nt, Human
gcgcugggugcgcgaggggu

SEQ ID NO: 1211874 - RNA, 20 nt, Human
gcggcagcagccuucugcgc

SEQ ID NO: 1211875 - RNA, 24 nt, Human
ggacaccucacaggugcgccuccg

SEQ ID NO: 1211876 - RNA, 22 nt, Human
gggaauucccuacauggguauc

SEQ ID NO: 1211877 - RNA, 20 nt, Human
uacaggguuuccuuccuagu

SEQ ID NO: 1211878 - RNA, 21 nt, Human
uagaaaaaggacuguacagua

SEQ ID NO: 1211879 - RNA, 26 nt, Human
uaucaugccgucuccuuuuuuggucu

SEQ ID NO: 1211880 - RNA, 23 nt, Human
ucaaucucacauaugccuccuca

SEQ ID NO: 1211881 - RNA, 21 nt, Human
ucacaggugcgccuccgagcc

SEQ ID NO: 1211882 - RNA, 22 nt, Human
ucugcgcugggugcgcgagggg

SEQ ID NO: 1211883 - RNA, 22 nt, Human
ucugugacugggaccugagagc

SEQ ID NO: 1211884 - RNA, 18 nt, Human
ugacugggaccugagagc

SEQ ID NO: 1211885 - RNA, 20 nt, Human
ugacuuccacgugaauucuu

SEQ ID NO: 1211886 - RNA, 20 nt, Human
ugagccccuggaaucuuccu

SEQ ID NO: 1211887 - RNA, 18 nt, Human
ugcgcugggugcgcgagg

SEQ ID NO: 1211888 - RNA, 21 nt, Human
ugcucagagguccacauucaa

SEQ ID NO: 1211889 - RNA, 19 nt, Human
uggcugaaggacuacaaag

SEQ ID NO: 1211890 - RNA, 21 nt, Human
uuccaaagaugugucucuugg

SEQ ID NO: 1211891 - RNA, 20 nt, Human
uucccugccugucuuucuac

SEQ ID NO: 1211892 - RNA, 18 nt, Human
aaaaaaaaaaagaaagaa

SEQ ID NO: 1211893 - RNA, 23 nt, Human
aaaaaaaaaagaaagaaagauuu

SEQ ID NO: 1211894 - RNA, 23 nt, Human
aaauagcauuauuauauaaggau

SEQ ID NO: 1211895 - RNA, 18 nt, Human
aacuguacaugcaaaaac

SEQ ID NO: 1211896 - RNA, 22 nt, Human
aagaaagaaagauuuagagaaa

SEQ ID NO: 1211897 - RNA, 23 nt, Human
aagcagauguaguuucuuaagac

SEQ ID NO: 1211898 - RNA, 24 nt, Human
acaaaauacaaaccaacugcaguc

SEQ ID NO: 1211899 - RNA, 20 nt, Human
acaacuucacaaaacuguaa

SEQ ID NO: 1211900 - RNA, 19 nt, Human
acagagcaccaggcacaaa

SEQ ID NO: 1211901 - RNA, 19 nt, Human
acugcugaaaccaaacuga

SEQ ID NO: 1211902 - RNA, 20 nt, Human
agaaagaaagauuuagagaa

SEQ ID NO: 1211903 - RNA, 21 nt, Human
agacauccauacuuugcuuca

SEQ ID NO: 1211904 - RNA, 20 nt, Human
agagcaccaggcacaaagca

SEQ ID NO: 1211905 - RNA, 20 nt, Human
aggcaggucaguauauagga

SEQ ID NO: 1211906 - RNA, 20 nt, Human
caaagcauuaacucagcacu

SEQ ID NO: 1211907 - RNA, 22 nt, Human
caacaauacauuggaaauuagc

SEQ ID NO: 1211908 - RNA, 19 nt, Human
caaccaggagacacaucug

SEQ ID NO: 1211909 - RNA, 22 nt, Human
caacuugggacaaagaaaacaa

SEQ ID NO: 1211910 - RNA, 23 nt, Human
caacuugggacaaagaaaacaau

SEQ ID NO: 1211911 - RNA, 28 nt, Human
caagaaauuccgaucaagagagccagua

SEQ ID NO: 1211912 - RNA, 23 nt, Human
cacauuaacugcugaaaccaaac

SEQ ID NO: 1211913 - RNA, 18 nt, Human
cagccugugcaccuugug

SEQ ID NO: 1211914 - RNA, 24 nt, Human
cauuacagagcaccaggcacaaag

SEQ ID NO: 1211915 - RNA, 18 nt, Human
cauugauacagagacugc

SEQ ID NO: 1211916 - RNA, 26 nt, Human
ccaggagacacaucugccgggcuuaa

SEQ ID NO: 1211917 - RNA, 20 nt, Human
ccauacuuugcuucaagcau

SEQ ID NO: 1211918 - RNA, 19 nt, Human
cccagcaaacauugcugag

SEQ ID NO: 1211919 - RNA, 18 nt, Human
cccauacccagcaaacau

SEQ ID NO: 1211920 - RNA, 19 nt, Human
ccucccuuaauguagucaa

SEQ ID NO: 1211921 - RNA, 20 nt, Human
cucaugcaacaaccauauuu

SEQ ID NO: 1211922 - RNA, 24 nt, Human
cuuaaacucccauacccagcaaac

SEQ ID NO: 1211923 - RNA, 23 nt, Human
cuuccagccugugcaccuugugu

SEQ ID NO: 1211924 - RNA, 24 nt, Human
gaaaaauagaaaagcauuuuuccc

SEQ ID NO: 1211925 - RNA, 21 nt, Human
gacaaagaaaacaauguacag

SEQ ID NO: 1211926 - RNA, 18 nt, Human
gacugcuuuccuauacac

SEQ ID NO: 1211927 - RNA, 23 nt, Human
gugcuuuuucccaacaauacauu

SEQ ID NO: 1211928 - RNA, 23 nt, Human
guuaaaaaaaaaaagaaagaaag

SEQ ID NO: 1211929 - RNA, 21 nt, Human
uaaaaaaaaaaagaaagaaag

SEQ ID NO: 1211930 - RNA, 24 nt, Human
uaaaauaucuagacaagauauaau

SEQ ID NO: 1211931 - RNA, 20 nt, Human
uaacaagaaauuccgaucaa

SEQ ID NO: 1211932 - RNA, 21 nt, Human
uaacaagaaauuccgaucaag

SEQ ID NO: 1211933 - RNA, 21 nt, Human
uaagacaauccaguuacugaa

SEQ ID NO: 1211934 - RNA, 21 nt, Human
uacaugcaaaaacccuuuaca

SEQ ID NO: 1211935 - RNA, 19 nt, Human
uagaaaagcauuuuucccu

SEQ ID NO: 1211936 - RNA, 21 nt, Human
uagaauauauagguaaggaaa

SEQ ID NO: 1211937 - RNA, 26 nt, Human
uaguugacauuagcauuucagagcac

SEQ ID NO: 1211938 - RNA, 21 nt, Human
uauaaaagucacccuagguca

SEQ ID NO: 1211939 - RNA, 24 nt, Human
ucacauaguuguauauauuuaacu

SEQ ID NO: 1211940 - RNA, 18 nt, Human
uccagacagucauucaaa

SEQ ID NO: 1211941 - RNA, 22 nt, Human
ucuaaauuuagaacccaaacuc

SEQ ID NO: 1211942 - RNA, 22 nt, Human
ucuguuaaaaaaaaaaagaaag

SEQ ID NO: 1211943 - RNA, 24 nt, Human
ucuguuaaaaaaaaaaagaaagaa

SEQ ID NO: 1211944 - RNA, 29 nt, Human
ugacacacacacacacacaaauaaauaca

SEQ ID NO: 1211945 - RNA, 20 nt, Human
ugagaaaacuaucucauugc

SEQ ID NO: 1211946 - RNA, 18 nt, Human
ugauuugcgucccucccu

SEQ ID NO: 1211947 - RNA, 23 nt, Human
ugcacuaagucacauaguuguau

SEQ ID NO: 1211948 - RNA, 28 nt, Human
ugcgucccucccuuaauguagucaagga

SEQ ID NO: 1211949 - RNA, 19 nt, Human
uggcaacguggaaugguga

SEQ ID NO: 1211950 - RNA, 23 nt, Human
uguaaaaucaauagccacuguga

SEQ ID NO: 1211951 - RNA, 21 nt, Human
uguaaacauugauacagagac

SEQ ID NO: 1211952 - RNA, 23 nt, Human
uguaauucuuguaaaaacuguac

SEQ ID NO: 1211953 - RNA, 23 nt, Human
uuaaacucccauacccagcaaac

SEQ ID NO: 1211954 - RNA, 23 nt, Human
uuagaagacaaaggauucaguau

SEQ ID NO: 1211955 - RNA, 22 nt, Human
uuagagaagacauccauacuuu

SEQ ID NO: 1211956 - RNA, 20 nt, Human
uucaaccaggagacacaucu

SEQ ID NO: 1211957 - RNA, 20 nt, Human
uucacaaaagacuuccagcc

SEQ ID NO: 1211958 - RNA, 24 nt, Human
uuccaguaaaauaguuucaugcuu

SEQ ID NO: 1211959 - RNA, 22 nt, Human
uucccuucccuuauuugcaauu

SEQ ID NO: 1211960 - RNA, 19 nt, Human
uuucacaaauguguugugc

SEQ ID NO: 1211961 - RNA, 22 nt, Human
uuucaugcuuauaaaagucacc

SEQ ID NO: 1211962 - RNA, 18 nt, Human
uuuccaggaauuccguga

SEQ ID NO: 1211963 - RNA, 19 nt, Human
uuuguucuaaagaaaugcu

SEQ ID NO: 1211964 - RNA, 18 nt, Human
aauaaaguagacauccaa

SEQ ID NO: 1211965 - RNA, 24 nt, Human
aauaaaguagacauccaaaaaugu

SEQ ID NO: 1211966 - RNA, 19 nt, Human
aaucuucuuuucuucaggc

SEQ ID NO: 1211967 - RNA, 18 nt, Human
caucagaguuugcugggg

SEQ ID NO: 1211968 - RNA, 22 nt, Human
cucacgguuggcaaucucuucc

SEQ ID NO: 1211969 - RNA, 19 nt, Human
uaaaaacaaagcuuuaauc

SEQ ID NO: 1211970 - RNA, 28 nt, Human
uaaaguagacauccaaaaauguggaugu

SEQ ID NO: 1211971 - RNA, 19 nt, Human
ucugcuuuccaaaaguaaa

SEQ ID NO: 1211972 - RNA, 26 nt, Human
uggaugucauuuaaaaacaaagcuuu

SEQ ID NO: 1211973 - RNA, 21 nt, Human
uucuucaggcaaagccuccgg

SEQ ID NO: 1211974 - RNA, 26 nt, Human
aaaauggggcuacagggaggcuccaa

SEQ ID NO: 1211975 - RNA, 22 nt, Human
aagaagaaaaaagaaguugcaa

SEQ ID NO: 1211976 - RNA, 20 nt, Human
aagcuaaagccugaaaaagu

SEQ ID NO: 1211977 - RNA, 22 nt, Human
aagcuaaagccugaaaaagucc

SEQ ID NO: 1211978 - RNA, 26 nt, Human
aaguaaucggugaagaauaucccagc

SEQ ID NO: 1211979 - RNA, 19 nt, Human
acaaagaagaaaaaagaag

SEQ ID NO: 1211980 - RNA, 21 nt, Human
acagcaaucagaguuauaacc

SEQ ID NO: 1211981 - RNA, 23 nt, Human
agaaaaaagaaguugcaagagga

SEQ ID NO: 1211982 - RNA, 24 nt, Human
agaagaaaaaagaaguugcaagag

SEQ ID NO: 1211983 - RNA, 18 nt, Human
aguaaucggugaagaaua

SEQ ID NO: 1211984 - RNA, 19 nt, Human
caugcugucagaaaauggg

SEQ ID NO: 1211985 - RNA, 27 nt, Human
cauuuuauucuccucauuaaugucuca

SEQ ID NO: 1211986 - RNA, 22 nt, Human
cccaaacuugaacaaauuaggc

SEQ ID NO: 1211987 - RNA, 27 nt, Human
cuaaagccugaaaaaguccuucagcaa

SEQ ID NO: 1211988 - RNA, 22 nt, Human
cugcuagauuugcugauugugc

SEQ ID NO: 1211989 - RNA, 21 nt, Human
cuugaacaaauuaggcacagc

SEQ ID NO: 1211990 - RNA, 20 nt, Human
cuuuagccgggccagcuuuc

SEQ ID NO: 1211991 - RNA, 23 nt, Human
gccgcacuggaggcuuugaaugc

SEQ ID NO: 1211992 - RNA, 19 nt, Human
ggaaacauauauuuccaag

SEQ ID NO: 1211993 - RNA, 20 nt, Human
ggaggcuccaaaugugcuga

SEQ ID NO: 1211994 - RNA, 21 nt, Human
gggaggcuccaaaugugcuga

SEQ ID NO: 1211995 - RNA, 19 nt, Human
uacaaagaagaaaaaagaa

SEQ ID NO: 1211996 - RNA, 25 nt, Human
uacaaagaagaaaaaagaaguugca

SEQ ID NO: 1211997 - RNA, 22 nt, Human
uauaaccaaggucuggaaaacc

SEQ ID NO: 1211998 - RNA, 18 nt, Human
ucagaaaauggggcuaca

SEQ ID NO: 1211999 - RNA, 24 nt, Human
ucucaaaacuguuggaagcuaaag

SEQ ID NO: 1212000 - RNA, 19 nt, Human
ucugcuagauuugcugauu

SEQ ID NO: 1212001 - RNA, 23 nt, Human
ugaagaauaucccagcaaaauaa

SEQ ID NO: 1212002 - RNA, 20 nt, Human
ugacauuggugggugugugu

SEQ ID NO: 1212003 - RNA, 26 nt, Human
ugcugucagaaaauggggcuacaggg

SEQ ID NO: 1212004 - RNA, 19 nt, Human
uggaagcuaaagccugaaa

SEQ ID NO: 1212005 - RNA, 19 nt, Human
uguggcuuuccagcccuuu

SEQ ID NO: 1212006 - RNA, 18 nt, Human
uuccugaguauuuuucuu

SEQ ID NO: 1212007 - RNA, 18 nt, Human
uucuuggagaagaugcac

SEQ ID NO: 1212008 - RNA, 25 nt, Human
ccaagugggacaugaaaugucauuu

SEQ ID NO: 1212009 - RNA, 19 nt, Human
ccccucuguuuucugcacc

SEQ ID NO: 1212010 - RNA, 24 nt, Human
cucuucugucuucaaugcugaggg

SEQ ID NO: 1212011 - RNA, 19 nt, Human
cuucuugcggcaggagaug

SEQ ID NO: 1212012 - RNA, 18 nt, Human
gcugcgcaggauaugaag

SEQ ID NO: 1212013 - RNA, 21 nt, Human
ggcagguggggugcuucuugc

SEQ ID NO: 1212014 - RNA, 24 nt, Human
ucauuugccucuucugucuucaau

SEQ ID NO: 1212015 - RNA, 18 nt, Human
ucugguccccucuguuuu

SEQ ID NO: 1212016 - RNA, 21 nt, Human
ucuucugucuucaaugcugag

SEQ ID NO: 1212017 - RNA, 18 nt, Human
ugaaaugucauuugccuc

SEQ ID NO: 1212018 - RNA, 20 nt, Human
ugaaggagucugguccccuc

SEQ ID NO: 1212019 - RNA, 20 nt, Human
ugcggcaggagaugacgcug

SEQ ID NO: 1212020 - RNA, 21 nt, Human
aagacaacgcccagacaaagc

SEQ ID NO: 1212021 - RNA, 22 nt, Human
aagcacgaggaaggggccccag

SEQ ID NO: 1212022 - RNA, 22 nt, Human
aaggagaagcacgaggaagggg

SEQ ID NO: 1212023 - RNA, 22 nt, Human
agaagcaugggggcugacccuc

SEQ ID NO: 1212024 - RNA, 21 nt, Human
agaaguccgguggccuuggga

SEQ ID NO: 1212025 - RNA, 23 nt, Human
agacaacgcccagacaaagcuca

SEQ ID NO: 1212026 - RNA, 19 nt, Human
agccgaagacaacgcccag

SEQ ID NO: 1212027 - RNA, 21 nt, Human
aggaagcugcccagaaaggga

SEQ ID NO: 1212028 - RNA, 18 nt, Human
aggcagaagcaugggggc

SEQ ID NO: 1212029 - RNA, 18 nt, Human
aggccugggguggggugg

SEQ ID NO: 1212030 - RNA, 22 nt, Human
aggugaggggcaggccuggggu

SEQ ID NO: 1212031 - RNA, 19 nt, Human
aucagguucgugacccacu

SEQ ID NO: 1212032 - RNA, 27 nt, Human
caaagcucaccagcuccagggccaccc

SEQ ID NO: 1212033 - RNA, 22 nt, Human
cacccaccucgggggagagagg

SEQ ID NO: 1212034 - RNA, 22 nt, Human
caccucgggggagagagggggu

SEQ ID NO: 1212035 - RNA, 21 nt, Human
cacucuaggaggagaugacuc

SEQ ID NO: 1212036 - RNA, 18 nt, Human
cagcagagcagggacaga

SEQ ID NO: 1212037 - RNA, 19 nt, Human
cagcagagcagggacagaa

SEQ ID NO: 1212038 - RNA, 26 nt, Human
cagcaguaggaaacagacagaaacag

SEQ ID NO: 1212039 - RNA, 23 nt, Human
cagccacagauggccagaaacuu

SEQ ID NO: 1212040 - RNA, 18 nt, Human
caggaccuucccaaaccc

SEQ ID NO: 1212041 - RNA, 19 nt, Human
caggggcgaaagcagcaga

SEQ ID NO: 1212042 - RNA, 22 nt, Human
ccacccgugggaaugcagcugg

SEQ ID NO: 1212043 - RNA, 23 nt, Human
ccagaaacuuugguuuguguuug

SEQ ID NO: 1212044 - RNA, 20 nt, Human
cccagaucagagaacgaagc

SEQ ID NO: 1212045 - RNA, 26 nt, Human
ccucaaggaagcugcccagaaaggga

SEQ ID NO: 1212046 - RNA, 19 nt, Human
ccucaggaaggagaagcac

SEQ ID NO: 1212047 - RNA, 19 nt, Human
ccucgggggagagaggggg

SEQ ID NO: 1212048 - RNA, 19 nt, Human
ccuuccaccccaugggagc

SEQ ID NO: 1212049 - RNA, 23 nt, Human
ccuucccaaacccucaggaagga

SEQ ID NO: 1212050 - RNA, 21 nt, Human
cgcccagacaaagcucaccag

SEQ ID NO: 1212051 - RNA, 23 nt, Human
cucaggaaggagaagcacgagga

SEQ ID NO: 1212052 - RNA, 25 nt, Human
cugaggcagaagcaugggggcugac

SEQ ID NO: 1212053 - RNA, 21 nt, Human
cuggggugggguggggugggg

SEQ ID NO: 1212054 - RNA, 26 nt, Human
cugguuccuccaucagggcgcugugg

SEQ ID NO: 1212055 - RNA, 19 nt, Human
gaaagcagcagagcaggga

SEQ ID NO: 1212056 - RNA, 20 nt, Human
gaaagcagcagagcagggac

SEQ ID NO: 1212057 - RNA, 24 nt, Human
gaaagcagcagagcagggacagaa

SEQ ID NO: 1212058 - RNA, 22 nt, Human
gaagagacgccacggugcccac

SEQ ID NO: 1212059 - RNA, 18 nt, Human
gacaacgcccagacaaag

SEQ ID NO: 1212060 - RNA, 22 nt, Human
gacugcuuccugagggagcaga

SEQ ID NO: 1212061 - RNA, 19 nt, Human
gagaagcacgaggaagggg

SEQ ID NO: 1212062 - RNA, 19 nt, Human
gagagugggagauuuaggg

SEQ ID NO: 1212063 - RNA, 21 nt, Human
gagccccaucagguucgugac

SEQ ID NO: 1212064 - RNA, 20 nt, Human
gccccagaggugggaaugag

SEQ ID NO: 1212065 - RNA, 23 nt, Human
gccccaggaccuucccaaacccu

SEQ ID NO: 1212066 - RNA, 21 nt, Human
ggaacaggcuccuuccacccc

SEQ ID NO: 1212067 - RNA, 23 nt, Human
ggaggagaugacucagaccccag

SEQ ID NO: 1212068 - RNA, 18 nt, Human
ggcaggccuggggugggg

SEQ ID NO: 1212069 - RNA, 18 nt, Human
ggccugaggcagaagcau

SEQ ID NO: 1212070 - RNA, 20 nt, Human
ggccugaggcagaagcaugg

SEQ ID NO: 1212071 - RNA, 23 nt, Human
gggagauuuagggcagggcagaa

SEQ ID NO: 1212072 - RNA, 20 nt, Human
gggcagggcagaagagacgc

SEQ ID NO: 1212073 - RNA, 22 nt, Human
ggggcaggccugggguggggug

SEQ ID NO: 1212074 - RNA, 25 nt, Human
ggggccugaggcagaagcauggggg

SEQ ID NO: 1212075 - RNA, 21 nt, Human
gggguggggccugaggcagaa

SEQ ID NO: 1212076 - RNA, 23 nt, Human
gguucgugacccacucuaggagg

SEQ ID NO: 1212077 - RNA, 23 nt, Human
guaggaaacagacagaaacagag

SEQ ID NO: 1212078 - RNA, 18 nt, Human
uaggaaacagacagaaac

SEQ ID NO: 1212079 - RNA, 26 nt, Human
uauggcccugaggugaggggcaggcc

SEQ ID NO: 1212080 - RNA, 25 nt, Human
uccuuccaccccaugggagccccag

SEQ ID NO: 1212081 - RNA, 23 nt, Human
ucugguuccuccaucagggcgcu

SEQ ID NO: 1212082 - RNA, 20 nt, Human
ugacccacucuaggaggaga

SEQ ID NO: 1212083 - RNA, 22 nt, Human
ugacgagggucagcaggggcga

SEQ ID NO: 1212084 - RNA, 21 nt, Human
ugagagagcagcaguaggaaa

SEQ ID NO: 1212085 - RNA, 20 nt, Human
ugaggggcaggccuggggug

SEQ ID NO: 1212086 - RNA, 21 nt, Human
ugaggugaggggcaggccugg

SEQ ID NO: 1212087 - RNA, 23 nt, Human
ugaggugaggggcaggccugggg

SEQ ID NO: 1212088 - RNA, 20 nt, Human
ugagguugagagagcagcag

SEQ ID NO: 1212089 - RNA, 18 nt, Human
ugccccaggaccuuccca

SEQ ID NO: 1212090 - RNA, 19 nt, Human
ugccccaggaccuucccaa

SEQ ID NO: 1212091 - RNA, 22 nt, Human
ugccccaggaccuucccaaacc

SEQ ID NO: 1212092 - RNA, 26 nt, Human
uggccagaaacuuugguuuguguuug

SEQ ID NO: 1212093 - RNA, 23 nt, Human
ugggagaagggugcuggaacagg

SEQ ID NO: 1212094 - RNA, 24 nt, Human
ugggagaagggugcuggaacaggc

SEQ ID NO: 1212095 - RNA, 18 nt, Human
ugggagccccagagucug

SEQ ID NO: 1212096 - RNA, 25 nt, Human
ugggaggagcaaugccagccgaaga

SEQ ID NO: 1212097 - RNA, 20 nt, Human
ugggggcugacccucugccu

SEQ ID NO: 1212098 - RNA, 18 nt, Human
uggggugggguggggccu

SEQ ID NO: 1212099 - RNA, 21 nt, Human
uggggugggguggggccugag

SEQ ID NO: 1212100 - RNA, 23 nt, Human
uggggugggguggggccugaggc

SEQ ID NO: 1212101 - RNA, 21 nt, Human
ugggguggggugggguggggc

SEQ ID NO: 1212102 - RNA, 23 nt, Human
ugguuuguguuuguuuucaaguu

SEQ ID NO: 1212103 - RNA, 18 nt, Human
aguucccagcagcugcuc

SEQ ID NO: 1212104 - RNA, 21 nt, Human
ccauuugagccugauauucca

SEQ ID NO: 1212105 - RNA, 21 nt, Human
cccuggauccagacugugccc

SEQ ID NO: 1212106 - RNA, 22 nt, Human
cugcaggcuuucuuuuuugucc

SEQ ID NO: 1212107 - RNA, 23 nt, Human
cuucacaacagccuuugcucuuu

SEQ ID NO: 1212108 - RNA, 18 nt, Human
gcaggugggccagcaguc

SEQ ID NO: 1212109 - RNA, 18 nt, Human
ggagggaccuccauuuga

SEQ ID NO: 1212110 - RNA, 18 nt, Human
uaacuggcaaucccacug

SEQ ID NO: 1212111 - RNA, 21 nt, Human
ucaaugccagagacagucagu

SEQ ID NO: 1212112 - RNA, 18 nt, Human
ucacaacagccuuugcuc

SEQ ID NO: 1212113 - RNA, 25 nt, Human
uccacaccuuccuuaacaugcuuua

SEQ ID NO: 1212114 - RNA, 20 nt, Human
ucccacugcucuucuuccca

SEQ ID NO: 1212115 - RNA, 18 nt, Human
ugaacucuugaacguagu

SEQ ID NO: 1212116 - RNA, 20 nt, Human
ugagaacagggagggugggg

SEQ ID NO: 1212117 - RNA, 21 nt, Human
ugcccugcuuagugcauggag

SEQ ID NO: 1212118 - RNA, 21 nt, Human
uggcaggugggccagcagucg

SEQ ID NO: 1212119 - RNA, 21 nt, Human
ugugaacucuugaacguagua

SEQ ID NO: 1212120 - RNA, 19 nt, Human
ugugugaacucuugaacgu

SEQ ID NO: 1212121 - RNA, 27 nt, Human
uuaacuggcaaucccacugcucuucuu

SEQ ID NO: 1212122 - RNA, 22 nt, Human
uuccuuuaaaucaagacaguuc

SEQ ID NO: 1212123 - RNA, 23 nt, Human
uuuaaaucaagacaguucccagc

SEQ ID NO: 1212124 - RNA, 23 nt, Human
caauuacugaugauccauuuggc

SEQ ID NO: 1212125 - RNA, 22 nt, Human
cauagcaguggucaauuacuga

SEQ ID NO: 1212126 - RNA, 23 nt, Human
caugcaauucaaauuuauuccac

SEQ ID NO: 1212127 - RNA, 21 nt, Human
cuauaugguggguacgaccuu

SEQ ID NO: 1212128 - RNA, 23 nt, Human
gguacgaccuuggcauagcagug

SEQ ID NO: 1212129 - RNA, 19 nt, Human
uaaaaagagaaucucucau

SEQ ID NO: 1212130 - RNA, 22 nt, Human
uaaaaagagaaucucucauuuc

SEQ ID NO: 1212131 - RNA, 20 nt, Human
uagauugcaugaaguucuga

SEQ ID NO: 1212132 - RNA, 21 nt, Human
uuggcauagcaguggucaauu

SEQ ID NO: 1212133 - RNA, 20 nt, Human
uuuauuugucuucucaugua

SEQ ID NO: 1212134 - RNA, 23 nt, Human
uuuguaaguaucuccaucuauau

SEQ ID NO: 1212135 - RNA, 22 nt, Human
aaaaaaaaaauccauucuggaa

SEQ ID NO: 1212136 - RNA, 24 nt, Human
aaaaauacagggauugaaaauggc

SEQ ID NO: 1212137 - RNA, 24 nt, Human
aaacuagcucacacagacucacac

SEQ ID NO: 1212138 - RNA, 24 nt, Human
aaccugucucuccacgcagcgcca

SEQ ID NO: 1212139 - RNA, 21 nt, Human
acccucaaaaaugaacucuga

SEQ ID NO: 1212140 - RNA, 22 nt, Human
accugcugcucccucucaaccc

SEQ ID NO: 1212141 - RNA, 22 nt, Human
accugucucuccacgcagcgcc

SEQ ID NO: 1212142 - RNA, 23 nt, Human
agaaugugcuucuuacgcaugua

SEQ ID NO: 1212143 - RNA, 20 nt, Human
agacaaauucaaaaacaaaa

SEQ ID NO: 1212144 - RNA, 20 nt, Human
agauaaccaguuccacagaa

SEQ ID NO: 1212145 - RNA, 26 nt, Human
agcgaugacacaagagccugcaaaug

SEQ ID NO: 1212146 - RNA, 25 nt, Human
aguaaaauuauauuugaaagcuucc

SEQ ID NO: 1212147 - RNA, 20 nt, Human
caccacacccggcucugcug

SEQ ID NO: 1212148 - RNA, 20 nt, Human
cacuguggaacaaggaauau

SEQ ID NO: 1212149 - RNA, 23 nt, Human
cagcaacucuguuuucuagaggg

SEQ ID NO: 1212150 - RNA, 19 nt, Human
cagggagcuccgagagguc

SEQ ID NO: 1212151 - RNA, 22 nt, Human
cagugagacccacucccggguc

SEQ ID NO: 1212152 - RNA, 18 nt, Human
cauagcacuguggaacaa

SEQ ID NO: 1212153 - RNA, 19 nt, Human
cauagcacuguggaacaag

SEQ ID NO: 1212154 - RNA, 20 nt, Human
cauugccagauuuaaaaaaa

SEQ ID NO: 1212155 - RNA, 24 nt, Human
ccacccccaaaagguagauaaucu

SEQ ID NO: 1212156 - RNA, 24 nt, Human
cccaaaagguagauaaucuuuuua

SEQ ID NO: 1212157 - RNA, 26 nt, Human
cccaggugcuucacugucgccguccu

SEQ ID NO: 1212158 - RNA, 22 nt, Human
cccauagucauacacauacgca

SEQ ID NO: 1212159 - RNA, 18 nt, Human
ccgggggaggcagggguu

SEQ ID NO: 1212160 - RNA, 25 nt, Human
ccucaaaucaguuccaucccuuuuc

SEQ ID NO: 1212161 - RNA, 19 nt, Human
ccucagaacuuaggauaaa

SEQ ID NO: 1212162 - RNA, 20 nt, Human
cucuugauuccaagcucauu

SEQ ID NO: 1212163 - RNA, 22 nt, Human
cugcugcucccucucaacccag

SEQ ID NO: 1212164 - RNA, 24 nt, Human
cugggaucacguuuuccucuccaa

SEQ ID NO: 1212165 - RNA, 21 nt, Human
cuuuguuuuacucuucuuuau

SEQ ID NO: 1212166 - RNA, 21 nt, Human
gaaagcuuccccaccacccac

SEQ ID NO: 1212167 - RNA, 19 nt, Human
gagacccacucccgggucc

SEQ ID NO: 1212168 - RNA, 19 nt, Human
gaggcugcucucuuccugg

SEQ ID NO: 1212169 - RNA, 22 nt, Human
gccagauuuaaaaaaacaacag

SEQ ID NO: 1212170 - RNA, 19 nt, Human
gccauggcagauaaccagu

SEQ ID NO: 1212171 - RNA, 21 nt, Human
gcuuguccuucgcaccugggu

SEQ ID NO: 1212172 - RNA, 22 nt, Human
ggacuggggcuggguaaggaug

SEQ ID NO: 1212173 - RNA, 26 nt, Human
ggcuggggccgggggaggcagggguu

SEQ ID NO: 1212174 - RNA, 18 nt, Human
gggaaaacaccaaaugaa

SEQ ID NO: 1212175 - RNA, 20 nt, Human
gggccgggggaggcaggggu

SEQ ID NO: 1212176 - RNA, 18 nt, Human
gggcuggggccgggggag

SEQ ID NO: 1212177 - RNA, 23 nt, Human
gggcuggggccgggggaggcagg

SEQ ID NO: 1212178 - RNA, 21 nt, Human
gggcuggguaaggaugguggg

SEQ ID NO: 1212179 - RNA, 21 nt, Human
ggggaggaagguguuggcagg

SEQ ID NO: 1212180 - RNA, 24 nt, Human
ggggcuggguaaggaugguggggg

SEQ ID NO: 1212181 - RNA, 22 nt, Human
gguguuggcaggcgacacgcag

SEQ ID NO: 1212182 - RNA, 22 nt, Human
gucucgucaaccugucucucca

SEQ ID NO: 1212183 - RNA, 19 nt, Human
gugguucaaagucaaaaga

SEQ ID NO: 1212184 - RNA, 25 nt, Human
uaaaaaaaaaaauccauucuggaaa

SEQ ID NO: 1212185 - RNA, 23 nt, Human
uauguuaagagcacuggugaaca

SEQ ID NO: 1212186 - RNA, 19 nt, Human
ucaaucccuuuucugaugu

SEQ ID NO: 1212187 - RNA, 21 nt, Human
ucagaaacuagcucacacaga

SEQ ID NO: 1212188 - RNA, 22 nt, Human
ucaguaacaaccaacauucagg

SEQ ID NO: 1212189 - RNA, 23 nt, Human
ucaucuagggauauucuggaaau

SEQ ID NO: 1212190 - RNA, 18 nt, Human
uccacagaagcaacuuca

SEQ ID NO: 1212191 - RNA, 21 nt, Human
uccacagaagcaacuucaugu

SEQ ID NO: 1212192 - RNA, 21 nt, Human
ucccggguccccaccacaccc

SEQ ID NO: 1212193 - RNA, 20 nt, Human
ucgcaccuggguugucucgc

SEQ ID NO: 1212194 - RNA, 23 nt, Human
ucgguaguaaucgcuuguccuuc

SEQ ID NO: 1212195 - RNA, 27 nt, Human
ucuccacgcagcgccacgugucuaccc

SEQ ID NO: 1212196 - RNA, 20 nt, Human
ucugcugaggcacgggcugg

SEQ ID NO: 1212197 - RNA, 21 nt, Human
ugacacaagagccugcaaaug

SEQ ID NO: 1212198 - RNA, 20 nt, Human
ugaggaagauccauagcacu

SEQ ID NO: 1212199 - RNA, 19 nt, Human
ugcugggugggacuggggc

SEQ ID NO: 1212200 - RNA, 24 nt, Human
ugcugggugggacuggggcugggu

SEQ ID NO: 1212201 - RNA, 26 nt, Human
ugcuucacugucgccguccuggcagg

SEQ ID NO: 1212202 - RNA, 24 nt, Human
uggauuauggauuguugaggccau

SEQ ID NO: 1212203 - RNA, 19 nt, Human
uggcaggcgacacgcagug

SEQ ID NO: 1212204 - RNA, 27 nt, Human
uggggcuggguaaggauggucgagagc

SEQ ID NO: 1212205 - RNA, 21 nt, Human
ugggugggacuggggcugggu

SEQ ID NO: 1212206 - RNA, 22 nt, Human
uggugggggaggaagguguugg

SEQ ID NO: 1212207 - RNA, 25 nt, Human
ugugcugggugggacuggggcuggg

SEQ ID NO: 1212208 - RNA, 19 nt, Human
uguugaaaaaauacaggga

SEQ ID NO: 1212209 - RNA, 19 nt, Human
uguugaaaaaauacaggga

SEQ ID NO: 1212210 - RNA, 21 nt, Human
uuaauaaauugcuaauccagu

SEQ ID NO: 1212211 - RNA, 22 nt, Human
uuaaucaguuuuuaauaaauug

SEQ ID NO: 1212212 - RNA, 20 nt, Human
uuagacaucagaaacuagcu

SEQ ID NO: 1212213 - RNA, 20 nt, Human
uuagccucaaaucaguucca

SEQ ID NO: 1212214 - RNA, 20 nt, Human
uuugaaagcuuccccaccac

SEQ ID NO: 1212215 - RNA, 26 nt, Human
uuugaaagcuuccccaccacccaccc

SEQ ID NO: 1212216 - RNA, 19 nt, Human
aaaagcccuuaagccacag

SEQ ID NO: 1212217 - RNA, 22 nt, Human
aaaagcccuuaagccacagaca

SEQ ID NO: 1212218 - RNA, 22 nt, Human
aaacaauagaaagugcaaucac

SEQ ID NO: 1212219 - RNA, 27 nt, Human
aaaccaggacuagacaguucucaggaa

SEQ ID NO: 1212220 - RNA, 26 nt, Human
acaacaguaccaugaaugcuaagagc

SEQ ID NO: 1212221 - RNA, 20 nt, Human
acaguaccaugaaugcuaag

SEQ ID NO: 1212222 - RNA, 20 nt, Human
acuccccucucagguccccc

SEQ ID NO: 1212223 - RNA, 20 nt, Human
agucagagucccgugacaug

SEQ ID NO: 1212224 - RNA, 22 nt, Human
aguuuguaauucagaauggcug

SEQ ID NO: 1212225 - RNA, 22 nt, Human
auucagaauggcuguuaaggaa

SEQ ID NO: 1212226 - RNA, 21 nt, Human
cagaguuuuaucugcaaagcc

SEQ ID NO: 1212227 - RNA, 20 nt, Human
cagcauccacaaguuuccaa

SEQ ID NO: 1212228 - RNA, 22 nt, Human
caugaaugcuaagagcuaggag

SEQ ID NO: 1212229 - RNA, 21 nt, Human
ccacagacagccguggcccgu

SEQ ID NO: 1212230 - RNA, 19 nt, Human
ccccaagaaaggugggagg

SEQ ID NO: 1212231 - RNA, 19 nt, Human
cccccaaaguucugcaaac

SEQ ID NO: 1212232 - RNA, 19 nt, Human
cccguggguggcccugaag

SEQ ID NO: 1212233 - RNA, 18 nt, Human
cccucucuccgcccuucc

SEQ ID NO: 1212234 - RNA, 21 nt, Human
cucuccgcccuuccaaaagcc

SEQ ID NO: 1212235 - RNA, 25 nt, Human
cucuccgcccuuccaaaagcccuua

SEQ ID NO: 1212236 - RNA, 20 nt, Human
cucucuccgcccuuccaaaa

SEQ ID NO: 1212237 - RNA, 19 nt, Human
cucugacgacaaaggcaag

SEQ ID NO: 1212238 - RNA, 18 nt, Human
gaacaagcaacaauaaac

SEQ ID NO: 1212239 - RNA, 22 nt, Human
gacuagacaguucucaggaagg

SEQ ID NO: 1212240 - RNA, 18 nt, Human
gagagguugggggagggc

SEQ ID NO: 1212241 - RNA, 20 nt, Human
gaguuuuaucugcaaagccg

SEQ ID NO: 1212242 - RNA, 21 nt, Human
ggaaaaacaaguuggaucaga

SEQ ID NO: 1212243 - RNA, 22 nt, Human
ggaggaaaauaggggcucagga

SEQ ID NO: 1212244 - RNA, 19 nt, Human
gggcucaggacaguugcaa

SEQ ID NO: 1212245 - RNA, 18 nt, Human
gguugggggagggcccgu

SEQ ID NO: 1212246 - RNA, 21 nt, Human
gugaauuacucuuucuccauu

SEQ ID NO: 1212247 - RNA, 22 nt, Human
uaaaaugccaagucuucuugag

SEQ ID NO: 1212248 - RNA, 22 nt, Human
uaaaucccaaaccaggacuaga

SEQ ID NO: 1212249 - RNA, 22 nt, Human
uaagauaaaucccaaaccagga

SEQ ID NO: 1212250 - RNA, 26 nt, Human
uaagauaaaucccaaaccaggacuuu

SEQ ID NO: 1212251 - RNA, 22 nt, Human
uagcaagcauguuauuauauuc

SEQ ID NO: 1212252 - RNA, 24 nt, Human
uaggagcaacauguuacaaaaaca

SEQ ID NO: 1212253 - RNA, 23 nt, Human
uaggggcucaggacaguugcaaa

SEQ ID NO: 1212254 - RNA, 19 nt, Human
ucaggaaggaauguggcag

SEQ ID NO: 1212255 - RNA, 19 nt, Human
uccaaaagcccuuaagcca

SEQ ID NO: 1212256 - RNA, 24 nt, Human
uccaaaugcgaugggaugauucuc

SEQ ID NO: 1212257 - RNA, 20 nt, Human
uccaauggucagaagggccu

SEQ ID NO: 1212258 - RNA, 24 nt, Human
uccccaagaaaggugggaggaaaa

SEQ ID NO: 1212259 - RNA, 21 nt, Human
uccccucucaggucccccaaa

SEQ ID NO: 1212260 - RNA, 22 nt, Human
ucccucucuccgcccuuccaaa

SEQ ID NO: 1212261 - RNA, 19 nt, Human
ucuccgcccuuccaaaagc

SEQ ID NO: 1212262 - RNA, 18 nt, Human
ucugcaaacucugacgac

SEQ ID NO: 1212263 - RNA, 21 nt, Human
ugacaaaacaauagaaagugc

SEQ ID NO: 1212264 - RNA, 23 nt, Human
ugacaaaacaauagaaagugcaa

SEQ ID NO: 1212265 - RNA, 19 nt, Human
ugacaggaguuacuggaga

SEQ ID NO: 1212266 - RNA, 22 nt, Human
ugacgacaaaggcaagucagag

SEQ ID NO: 1212267 - RNA, 20 nt, Human
ugcgaugggaugauucucuu

SEQ ID NO: 1212268 - RNA, 24 nt, Human
uggcaucccuuaaaaacaaguuuc

SEQ ID NO: 1212269 - RNA, 22 nt, Human
uuaaaaacaaguuuccccaaga

SEQ ID NO: 1212270 - RNA, 19 nt, Human
uucagaauggcuguuaagg

SEQ ID NO: 1212271 - RNA, 19 nt, Human
uuccucugauagcaagcau

SEQ ID NO: 1212272 - RNA, 26 nt, Human
uucuccauuguaauccccgucuugau

SEQ ID NO: 1212273 - RNA, 21 nt, Human
uuuguaauucagaauggcugu

SEQ ID NO: 1212274 - RNA, 21 nt, Human
uuuuucuuuucauggccuggu

SEQ ID NO: 1212275 - RNA, 25 nt, Human
aaaauucuucccaugagagugacuu

SEQ ID NO: 1212276 - RNA, 20 nt, Human
aaacccugcagcaagaguuc

SEQ ID NO: 1212277 - RNA, 25 nt, Human
aggccugugguaccgugagagauga

SEQ ID NO: 1212278 - RNA, 20 nt, Human
aggggaaggagcgcagugug

SEQ ID NO: 1212279 - RNA, 18 nt, Human
caggccugugguaccgug

SEQ ID NO: 1212280 - RNA, 23 nt, Human
ccacugccaaguucuaggacagu

SEQ ID NO: 1212281 - RNA, 22 nt, Human
cccaugugaccaggccuguggu

SEQ ID NO: 1212282 - RNA, 18 nt, Human
cccgcagcagcucagaau

SEQ ID NO: 1212283 - RNA, 18 nt, Human
cgaucccgcguucuccuc

SEQ ID NO: 1212284 - RNA, 24 nt, Human
cgccgccaggaagcggcgaucgaa

SEQ ID NO: 1212285 - RNA, 19 nt, Human
cugcagcaagaguucgauc

SEQ ID NO: 1212286 - RNA, 26 nt, Human
gauggcaaggccugugaggccggcac

SEQ ID NO: 1212287 - RNA, 19 nt, Human
gcaaaauaucccgcagcag

SEQ ID NO: 1212288 - RNA, 18 nt, Human
gcgcgccgccaggaagcg

SEQ ID NO: 1212289 - RNA, 19 nt, Human
ggccugugguaccgugaga

SEQ ID NO: 1212290 - RNA, 23 nt, Human
gugagagaugauggcugugcucu

SEQ ID NO: 1212291 - RNA, 19 nt, Human
ugaccgagccucccgaggg

SEQ ID NO: 1212292 - RNA, 20 nt, Human
ugaggccggcaccacugcca

SEQ ID NO: 1212293 - RNA, 18 nt, Human
ugcaaggcagaggguggc

SEQ ID NO: 1212294 - RNA, 21 nt, Human
uggcaaggccugugaggccgg

SEQ ID NO: 1212295 - RNA, 27 nt, Human
aaaaagcaccugcugcaccauaagccc

SEQ ID NO: 1212296 - RNA, 25 nt, Human
aaaauucuucccaugagagugacuu

SEQ ID NO: 1212297 - RNA, 25 nt, Human
aacacacacacccguuuguuaccca

SEQ ID NO: 1212298 - RNA, 25 nt, Human
aauacaccauucuugucaacagaau

SEQ ID NO: 1212299 - RNA, 20 nt, Human
acaaacacaggcugugggcu

SEQ ID NO: 1212300 - RNA, 21 nt, Human
acaggcugugggcuggcuuug

SEQ ID NO: 1212301 - RNA, 19 nt, Human
acagggucccccagucucu

SEQ ID NO: 1212302 - RNA, 19 nt, Human
aggaaccaaguguguccac

SEQ ID NO: 1212303 - RNA, 19 nt, Human
aggcugugggcuggcuuug

SEQ ID NO: 1212304 - RNA, 21 nt, Human
agggaacuucugggaucagcc

SEQ ID NO: 1212305 - RNA, 23 nt, Human
auacaccauucuugucaacagaa

SEQ ID NO: 1212306 - RNA, 24 nt, Human
auacaccauucuugucaacagaau

SEQ ID NO: 1212307 - RNA, 21 nt, Human
aucuuuuaugugcugaaccag

SEQ ID NO: 1212308 - RNA, 20 nt, Human
cacacccccaccugcccucu

SEQ ID NO: 1212309 - RNA, 26 nt, Human
caccauaagcccugggauguggcagc

SEQ ID NO: 1212310 - RNA, 21 nt, Human
caggcugugggcuggcuuugg

SEQ ID NO: 1212311 - RNA, 19 nt, Human
cagggucugguggaaaagc

SEQ ID NO: 1212312 - RNA, 19 nt, Human
caguaaagguccaggucag

SEQ ID NO: 1212313 - RNA, 23 nt, Human
cauggaauuaagaaaaacaugca

SEQ ID NO: 1212314 - RNA, 22 nt, Human
cauugccaucuccaagugcucu

SEQ ID NO: 1212315 - RNA, 21 nt, Human
ccaagugagggaguuagggac

SEQ ID NO: 1212316 - RNA, 23 nt, Human
ccaguccaaugaaaguuuuagcc

SEQ ID NO: 1212317 - RNA, 19 nt, Human
ccaguccccaggggguugc

SEQ ID NO: 1212318 - RNA, 18 nt, Human
ccauggaauuaagaaaaa

SEQ ID NO: 1212319 - RNA, 24 nt, Human
ccccaggccuuuauacccuucaga

SEQ ID NO: 1212320 - RNA, 21 nt, Human
ccucuggauuuauggagcuga

SEQ ID NO: 1212321 - RNA, 18 nt, Human
ccuggggucagccaggug

SEQ ID NO: 1212322 - RNA, 19 nt, Human
ccugugcccgaguucccug

SEQ ID NO: 1212323 - RNA, 19 nt, Human
cggcccagccggccugugc

SEQ ID NO: 1212324 - RNA, 22 nt, Human
cucuuuagcauuuugcagaugc

SEQ ID NO: 1212325 - RNA, 25 nt, Human
cuggagccgggugggccgggcugca

SEQ ID NO: 1212326 - RNA, 18 nt, Human
cuggguugugaagggucu

SEQ ID NO: 1212327 - RNA, 21 nt, Human
cuuucacuuccacuggagucc

SEQ ID NO: 1212328 - RNA, 18 nt, Human
gaagggucucaaguccaa

SEQ ID NO: 1212329 - RNA, 18 nt, Human
gacagggucccccagucu

SEQ ID NO: 1212330 - RNA, 24 nt, Human
gaugggugggacuguguuggccag

SEQ ID NO: 1212331 - RNA, 21 nt, Human
gcaaggcugaaaagaacacac

SEQ ID NO: 1212332 - RNA, 18 nt, Human
gcagcgggcuuggcuuuc

SEQ ID NO: 1212333 - RNA, 18 nt, Human
gcagcugcagcgggcuug

SEQ ID NO: 1212334 - RNA, 20 nt, Human
gccaucuccaagugcucucc

SEQ ID NO: 1212335 - RNA, 23 nt, Human
ggaccuggggucagccagguggu

SEQ ID NO: 1212336 - RNA, 24 nt, Human
ggaccuggggucagccagguggug

SEQ ID NO: 1212337 - RNA, 21 nt, Human
ggaguuagggacuugggaggg

SEQ ID NO: 1212338 - RNA, 18 nt, Human
gggaccuggggucagcca

SEQ ID NO: 1212339 - RNA, 25 nt, Human
gggcaguuugugguuccugauuugg

SEQ ID NO: 1212340 - RNA, 18 nt, Human
gggucucaaguccaagug

SEQ ID NO: 1212341 - RNA, 21 nt, Human
gggugggacuguguuggccag

SEQ ID NO: 1212342 - RNA, 20 nt, Human
ggucucaaguccaagugagg

SEQ ID NO: 1212343 - RNA, 22 nt, Human
gucuucuucuguucuucacgcc

SEQ ID NO: 1212344 - RNA, 20 nt, Human
gugaccucugcaguacuccu

SEQ ID NO: 1212345 - RNA, 22 nt, Human
guucugugacuucccugugacc

SEQ ID NO: 1212346 - RNA, 23 nt, Human
uaagaaaaacaugcaaaaauaau

SEQ ID NO: 1212347 - RNA, 20 nt, Human
uaagaaccagaacuacuggc

SEQ ID NO: 1212348 - RNA, 24 nt, Human
uagcauuuugcagaugcuuuucuc

SEQ ID NO: 1212349 - RNA, 22 nt, Human
uaucuuauuagagggcaguuug

SEQ ID NO: 1212350 - RNA, 19 nt, Human
ucccugcaugguguaggag

SEQ ID NO: 1212351 - RNA, 25 nt, Human
uccugcauuugguauccagguguca

SEQ ID NO: 1212352 - RNA, 23 nt, Human
ucucaaguccaagugagggaguu

SEQ ID NO: 1212353 - RNA, 22 nt, Human
ucuucuucuguucuucacgccc

SEQ ID NO: 1212354 - RNA, 18 nt, Human
ugacuucccugugaccuc

SEQ ID NO: 1212355 - RNA, 22 nt, Human
ugagauggggacaggcaaugag

SEQ ID NO: 1212356 - RNA, 18 nt, Human
ugagggaguuagggacuu

SEQ ID NO: 1212357 - RNA, 19 nt, Human
ugaugcuggagccgggugg

SEQ ID NO: 1212358 - RNA, 22 nt, Human
ugcagaugcuuuucucaaacug

SEQ ID NO: 1212359 - RNA, 23 nt, Human
ugcagaugcuuuucucaaacugu

SEQ ID NO: 1212360 - RNA, 22 nt, Human
ugcaugguguaggaguguggga

SEQ ID NO: 1212361 - RNA, 20 nt, Human
ugcauuugguauccaggugu

SEQ ID NO: 1212362 - RNA, 18 nt, Human
ugcgugggcagagggaac

SEQ ID NO: 1212363 - RNA, 23 nt, Human
ugcucuccguagggaaacaguuu

SEQ ID NO: 1212364 - RNA, 19 nt, Human
ugcuggagccgggugggcc

SEQ ID NO: 1212365 - RNA, 20 nt, Human
uggaauuaagaaaaacaugc

SEQ ID NO: 1212366 - RNA, 21 nt, Human
uggccagaggccgagaggagg

SEQ ID NO: 1212367 - RNA, 18 nt, Human
ugggaugagauggggaca

SEQ ID NO: 1212368 - RNA, 20 nt, Human
ugggaugagauggggacagg

SEQ ID NO: 1212369 - RNA, 23 nt, Human
ugggauguggcagcugcagcggg

SEQ ID NO: 1212370 - RNA, 24 nt, Human
ugggcagagggaacuucugggauc

SEQ ID NO: 1212371 - RNA, 21 nt, Human
uggggucagccagguggugac

SEQ ID NO: 1212372 - RNA, 19 nt, Human
ugugaagggucucaagucc

SEQ ID NO: 1212373 - RNA, 18 nt, Human
ugugagguucagcauugc

SEQ ID NO: 1212374 - RNA, 21 nt, Human
ugugagguucagcauugccau

SEQ ID NO: 1212375 - RNA, 24 nt, Human
uguggcagcugcagcgggcuuggc

SEQ ID NO: 1212376 - RNA, 19 nt, Human
uuacaaacacaggcugugg

SEQ ID NO: 1212377 - RNA, 24 nt, Human
uucccauauaaaaauucuucccau

SEQ ID NO: 1212378 - RNA, 18 nt, Human
uuccuacucugcuguccu

SEQ ID NO: 1212379 - RNA, 20 nt, Human
uucuucuguucuucacgccc

SEQ ID NO: 1212380 - RNA, 27 nt, Human
uugaaaaaagcaccugcugcaccauaa

SEQ ID NO: 1212381 - RNA, 24 nt, Human
uugaugugcaccccccccaggccu

SEQ ID NO: 1212382 - RNA, 22 nt, Human
uugcaaaaaguaauacaccauu

SEQ ID NO: 1212383 - RNA, 22 nt, Human
uugugaagggucucaaguccaa

SEQ ID NO: 1212384 - RNA, 24 nt, Human
aaaaaaaacaugugagcaaaagaa

SEQ ID NO: 1212385 - RNA, 21 nt, Human
aaaaaguagauauucugaaga

SEQ ID NO: 1212386 - RNA, 21 nt, Human
aaaaugcagucuagaaugcaa

SEQ ID NO: 1212387 - RNA, 20 nt, Human
aaagcucaagaagaccuugg

SEQ ID NO: 1212388 - RNA, 21 nt, Human
aaaucagggagauuucuggug

SEQ ID NO: 1212389 - RNA, 27 nt, Human
aacaaaaaaaacaugugagcaaaagaa

SEQ ID NO: 1212390 - RNA, 23 nt, Human
aacaccgacccuaacucgugcag

SEQ ID NO: 1212391 - RNA, 21 nt, Human
aacaugucucgccucccgcca

SEQ ID NO: 1212392 - RNA, 26 nt, Human
aagaaggagaaggucaacaaaaaaaa

SEQ ID NO: 1212393 - RNA, 19 nt, Human
aagcuacaaaugaacaaca

SEQ ID NO: 1212394 - RNA, 21 nt, Human
acucagcacaccaaggaccug

SEQ ID NO: 1212395 - RNA, 23 nt, Human
agaaggagaaggucaacaaaaaa

SEQ ID NO: 1212396 - RNA, 18 nt, Human
agcaagaaaaccucagcc

SEQ ID NO: 1212397 - RNA, 22 nt, Human
aggcacuguaaaaugcagucua

SEQ ID NO: 1212398 - RNA, 19 nt, Human
agggaugggcuggcaggag

SEQ ID NO: 1212399 - RNA, 18 nt, Human
auaucuguggagucucag

SEQ ID NO: 1212400 - RNA, 18 nt, Human
aucacuaaccuuuccuga

SEQ ID NO: 1212401 - RNA, 25 nt, Human
auccacaggagcaagaaaaccucag

SEQ ID NO: 1212402 - RNA, 22 nt, Human
augcugcccuugagccuuugug

SEQ ID NO: 1212403 - RNA, 19 nt, Human
caaaaaaaacaugugagca

SEQ ID NO: 1212404 - RNA, 23 nt, Human
caaaaaaaacaugugagcaaaag

SEQ ID NO: 1212405 - RNA, 22 nt, Human
caaagaccacuccucuuucugu

SEQ ID NO: 1212406 - RNA, 23 nt, Human
caaagcaauuguuuaaaguacag

SEQ ID NO: 1212407 - RNA, 22 nt, Human
caacaaaaaaaacaugugagca

SEQ ID NO: 1212408 - RNA, 20 nt, Human
caauccaaaucguuaugucu

SEQ ID NO: 1212409 - RNA, 21 nt, Human
cagaagguccgguggaucuuc

SEQ ID NO: 1212410 - RNA, 22 nt, Human
cagcacaccaaggaccugcacc

SEQ ID NO: 1212411 - RNA, 24 nt, Human
cagcacaccaaggaccugcaccgg

SEQ ID NO: 1212412 - RNA, 21 nt, Human
caggagcaagaaaaccucagc

SEQ ID NO: 1212413 - RNA, 24 nt, Human
cagggugauaagaaggagaagguc

SEQ ID NO: 1212414 - RNA, 20 nt, Human
cagucaggucuuucucaucc

SEQ ID NO: 1212415 - RNA, 23 nt, Human
cagucuagaaugcaaaauuccca

SEQ ID NO: 1212416 - RNA, 20 nt, Human
cauuacuucagcaaaaagga

SEQ ID NO: 1212417 - RNA, 24 nt, Human
ccaaggaacaccgacccuaacucg

SEQ ID NO: 1212418 - RNA, 19 nt, Human
ccacaggagcaagaaaacc

SEQ ID NO: 1212419 - RNA, 22 nt, Human
ccagaggcacuguaaaaugcag

SEQ ID NO: 1212420 - RNA, 21 nt, Human
ccagggaauuagagccucaca

SEQ ID NO: 1212421 - RNA, 20 nt, Human
cccaaauaucucaguggagu

SEQ ID NO: 1212422 - RNA, 19 nt, Human
cccugcuuucaagggcaga

SEQ ID NO: 1212423 - RNA, 22 nt, Human
ccugucucuucccguccaagga

SEQ ID NO: 1212424 - RNA, 21 nt, Human
ccuuuccgccgcuguugaggg

SEQ ID NO: 1212425 - RNA, 23 nt, Human
cggccacagggggucgucagcag

SEQ ID NO: 1212426 - RNA, 20 nt, Human
cggccucugaguucccucag

SEQ ID NO: 1212427 - RNA, 18 nt, Human
cggcuggggcaaaguggc

SEQ ID NO: 1212428 - RNA, 20 nt, Human
cuacugccaacaugucucgc

SEQ ID NO: 1212429 - RNA, 22 nt, Human
cuagaaaguauccguauccaga

SEQ ID NO: 1212430 - RNA, 19 nt, Human
cuagaaugcaaaauuccca

SEQ ID NO: 1212431 - RNA, 21 nt, Human
cucaugucuucccuuucuaca

SEQ ID NO: 1212432 - RNA, 19 nt, Human
cuccugccugucucuuccc

SEQ ID NO: 1212433 - RNA, 22 nt, Human
cugaaggacaaagcgguauuga

SEQ ID NO: 1212434 - RNA, 19 nt, Human
cugauuauccagaucaccu

SEQ ID NO: 1212435 - RNA, 18 nt, Human
cugcaagaggcuuuccuc

SEQ ID NO: 1212436 - RNA, 19 nt, Human
gaaacaacacuggguccag

SEQ ID NO: 1212437 - RNA, 21 nt, Human
gaacaacaucucagcaaagca

SEQ ID NO: 1212438 - RNA, 22 nt, Human
gaacaccgacccuaacucgugc

SEQ ID NO: 1212439 - RNA, 20 nt, Human
gaauguaguaggagagcagg

SEQ ID NO: 1212440 - RNA, 19 nt, Human
gacacauucugcagaggga

SEQ ID NO: 1212441 - RNA, 22 nt, Human
gacccagggaauuagagccuca

SEQ ID NO: 1212442 - RNA, 20 nt, Human
gacucagaacuuaucuagag

SEQ ID NO: 1212443 - RNA, 23 nt, Human
gagaaggucaacaaaaaaaacau

SEQ ID NO: 1212444 - RNA, 22 nt, Human
gagcagggugauaagaaggaga

SEQ ID NO: 1212445 - RNA, 22 nt, Human
gagcugucccugccuuucugaa

SEQ ID NO: 1212446 - RNA, 19 nt, Human
gaggggaccgcagggcugg

SEQ ID NO: 1212447 - RNA, 20 nt, Human
gcacaccaaggaccugcacc

SEQ ID NO: 1212448 - RNA, 24 nt, Human
gcagaaggagcaggaccacaagga

SEQ ID NO: 1212449 - RNA, 20 nt, Human
gcagcaagagugauuucuga

SEQ ID NO: 1212450 - RNA, 22 nt, Human
gcaggaccacaaggaaccaaag

SEQ ID NO: 1212451 - RNA, 21 nt, Human
gcccuagaucccuuaaaccuu

SEQ ID NO: 1212452 - RNA, 22 nt, Human
gcgagcaggagacaguggccuu

SEQ ID NO: 1212453 - RNA, 21 nt, Human
gcgauuuucugagacacacca

SEQ ID NO: 1212454 - RNA, 21 nt, Human
gcugggacacauucugcagag

SEQ ID NO: 1212455 - RNA, 18 nt, Human
ggagcaggaccacaagga

SEQ ID NO: 1212456 - RNA, 23 nt, Human
ggauguucucaggaaugcacgag

SEQ ID NO: 1212457 - RNA, 18 nt, Human
ggcaaaguggcuggggca

SEQ ID NO: 1212458 - RNA, 21 nt, Human
ggcacugaaggacaaagcggu

SEQ ID NO: 1212459 - RNA, 19 nt, Human
ggcagaggucccugcggcu

SEQ ID NO: 1212460 - RNA, 21 nt, Human
ggcccuagaucccuuaaaccu

SEQ ID NO: 1212461 - RNA, 19 nt, Human
gggaugggcuggcaggagc

SEQ ID NO: 1212462 - RNA, 24 nt, Human
gguauugacuuucuucaucugugu

SEQ ID NO: 1212463 - RNA, 19 nt, Human
gguucagcauuccgacucc

SEQ ID NO: 1212464 - RNA, 22 nt, Human
guagaauucauguauuuauuuu

SEQ ID NO: 1212465 - RNA, 26 nt, Human
gucuagaaugcaaaauucccagccac

SEQ ID NO: 1212466 - RNA, 24 nt, Human
gugcagcugcagaugaccaugggc

SEQ ID NO: 1212467 - RNA, 22 nt, Human
guggcuggggcaaagcuacaaa

SEQ ID NO: 1212468 - RNA, 19 nt, Human
uaagaucaacucucugcuc

SEQ ID NO: 1212469 - RNA, 24 nt, Human
uacccugcuuucaagggcagaggu

SEQ ID NO: 1212470 - RNA, 23 nt, Human
uacuaugccuggacgugcacgua

SEQ ID NO: 1212471 - RNA, 23 nt, Human
uagcaagacgagcugaaaaagga

SEQ ID NO: 1212472 - RNA, 19 nt, Human
uagcguaggggcgguuuca

SEQ ID NO: 1212473 - RNA, 18 nt, Human
uaggagagcagggugaua

SEQ ID NO: 1212474 - RNA, 23 nt, Human
uauacugcuuguaaacauguggu

SEQ ID NO: 1212475 - RNA, 23 nt, Human
uauccagaaucaauaagaucaac

SEQ ID NO: 1212476 - RNA, 21 nt, Human
uauccagaucaccuagaaagu

SEQ ID NO: 1212477 - RNA, 21 nt, Human
uaucucaguggaguaaagaau

SEQ ID NO: 1212478 - RNA, 22 nt, Human
uauuaugauuuucauuacuuca

SEQ ID NO: 1212479 - RNA, 24 nt, Human
uauucugaagauggagguugucca

SEQ ID NO: 1212480 - RNA, 19 nt, Human
ucacaggccggccugggau

SEQ ID NO: 1212481 - RNA, 21 nt, Human
ucacaggccggccugggaugc

SEQ ID NO: 1212482 - RNA, 23 nt, Human
ucacaggccggccugggaugcug

SEQ ID NO: 1212483 - RNA, 24 nt, Human
ucacauggggagaaaccuuggaca

SEQ ID NO: 1212484 - RNA, 23 nt, Human
ucaccgacacgggaguuccacag

SEQ ID NO: 1212485 - RNA, 18 nt, Human
ucaccuagaaaguauccg

SEQ ID NO: 1212486 - RNA, 23 nt, Human
ucacuaaccuuuccugagccccc

SEQ ID NO: 1212487 - RNA, 25 nt, Human
ucagccccacucuaccaacacacac

SEQ ID NO: 1212488 - RNA, 19 nt, Human
ucaggucuuucucauccca

SEQ ID NO: 1212489 - RNA, 24 nt, Human
ucaugaauaauuaaugaagcgcaa

SEQ ID NO: 1212490 - RNA, 21 nt, Human
uccagaaucaauaagaucaac

SEQ ID NO: 1212491 - RNA, 20 nt, Human
ucccguccaaggaacaccga

SEQ ID NO: 1212492 - RNA, 23 nt, Human
ucccuuucuacauagacacagug

SEQ ID NO: 1212493 - RNA, 22 nt, Human
uccugagcccccauggggacuc

SEQ ID NO: 1212494 - RNA, 21 nt, Human
ucggaacugagcgcgauuuuc

SEQ ID NO: 1212495 - RNA, 23 nt, Human
ucggaacugagcgcgauuuucug

SEQ ID NO: 1212496 - RNA, 21 nt, Human
ucggcuuguauuugcaaacuu

SEQ ID NO: 1212497 - RNA, 18 nt, Human
ucgugaaaaaugucagag

SEQ ID NO: 1212498 - RNA, 19 nt, Human
ucucuuucuuuucccuaca

SEQ ID NO: 1212499 - RNA, 18 nt, Human
ucugaagauggagguugu

SEQ ID NO: 1212500 - RNA, 24 nt, Human
ucuuuccaggucaucacuaaccuu

SEQ ID NO: 1212501 - RNA, 23 nt, Human
ugacaaagaccacuccucuuucu

SEQ ID NO: 1212502 - RNA, 19 nt, Human
ugacaggaaagcucagaga

SEQ ID NO: 1212503 - RNA, 20 nt, Human
ugacagucugaucucucuuu

SEQ ID NO: 1212504 - RNA, 22 nt, Human
ugacugaggggaccgcagggcu

SEQ ID NO: 1212505 - RNA, 26 nt, Human
ugacuucgaaauaauuuuguugauuu

SEQ ID NO: 1212506 - RNA, 21 nt, Human
ugagggucguuauccugauua

SEQ ID NO: 1212507 - RNA, 20 nt, Human
ugccuggacgugcacguagg

SEQ ID NO: 1212508 - RNA, 20 nt, Human
uggaaggaaacgaugugaca

SEQ ID NO: 1212509 - RNA, 21 nt, Human
uggcagcaagagugauuucug

SEQ ID NO: 1212510 - RNA, 18 nt, Human
uggcaucuugaaacauug

SEQ ID NO: 1212511 - RNA, 24 nt, Human
uggcugcucccuuuccgccgcugu

SEQ ID NO: 1212512 - RNA, 19 nt, Human
uggcuggggcaaagcuaca

SEQ ID NO: 1212513 - RNA, 20 nt, Human
uggcuggggcaaagcuacaa

SEQ ID NO: 1212514 - RNA, 21 nt, Human
ugggacgcgacugguuccaaa

SEQ ID NO: 1212515 - RNA, 25 nt, Human
uggggacucagaacuuaucuagagu

SEQ ID NO: 1212516 - RNA, 22 nt, Human
ugggucaaagcggcuggggcaa

SEQ ID NO: 1212517 - RNA, 21 nt, Human
uggguccaggggaccggcacu

SEQ ID NO: 1212518 - RNA, 22 nt, Human
ugucaagugggacgcgacuggu

SEQ ID NO: 1212519 - RNA, 20 nt, Human
uguccagaggcacuguaaaa

SEQ ID NO: 1212520 - RNA, 18 nt, Human
ugugagcuccaaguuggg

SEQ ID NO: 1212521 - RNA, 20 nt, Human
ugugcugguucagcauuccg

SEQ ID NO: 1212522 - RNA, 24 nt, Human
ugugcugguucagcauuccgacuc

SEQ ID NO: 1212523 - RNA, 22 nt, Human
uucaccuuuaggguuuuuuggg

SEQ ID NO: 1212524 - RNA, 25 nt, Human
uucagcaaaaaggaauguaguagga

SEQ ID NO: 1212525 - RNA, 24 nt, Human
uuccugagcccccauggggacuca

SEQ ID NO: 1212526 - RNA, 20 nt, Human
uugacuuucuucaucugugu

SEQ ID NO: 1212527 - RNA, 20 nt, Human
uugaugccagcgaagcauac

SEQ ID NO: 1212528 - RNA, 21 nt, Human
uugggauuauguggaaacucu

SEQ ID NO: 1212529 - RNA, 20 nt, Human
uugggucaaagcggcugggg

SEQ ID NO: 1212530 - RNA, 19 nt, Human
uugguccuuggcuuccugc

SEQ ID NO: 1212531 - RNA, 21 nt, Human
uugguccuuggcuuccugcug

SEQ ID NO: 1212532 - RNA, 19 nt, Human
uuuguugugacaaagacca

SEQ ID NO: 1212533 - RNA, 23 nt, Human
uuuucagagggcgcagguguggu

SEQ ID NO: 1212534 - RNA, 21 nt, Human
uuuugugagcuccaaguuggg

SEQ ID NO: 1212535 - RNA, 24 nt, Human
acacaccacagccagcacacccag

SEQ ID NO: 1212536 - RNA, 23 nt, Human
acaccacagccagcacacccagc

SEQ ID NO: 1212537 - RNA, 20 nt, Human
acagccagcacacccagcgg

SEQ ID NO: 1212538 - RNA, 24 nt, Human
accaugaccacaguguugccguag

SEQ ID NO: 1212539 - RNA, 22 nt, Human
acccagcggcucccgcaggcgc

SEQ ID NO: 1212540 - RNA, 25 nt, Human
aggccagggcgggagccagcaggga

SEQ ID NO: 1212541 - RNA, 18 nt, Human
caccacagccagcacacc

SEQ ID NO: 1212542 - RNA, 21 nt, Human
caccacagccagcacacccag

SEQ ID NO: 1212543 - RNA, 18 nt, Human
caccacguuggccaggcc

SEQ ID NO: 1212544 - RNA, 21 nt, Human
caccacguuggccaggccugc

SEQ ID NO: 1212545 - RNA, 21 nt, Human
caccaugaccacaguguugcc

SEQ ID NO: 1212546 - RNA, 20 nt, Human
cacccgggccccccacgccc

SEQ ID NO: 1212547 - RNA, 22 nt, Human
cacccgggccccccacgcccga

SEQ ID NO: 1212548 - RNA, 18 nt, Human
caggcgcagcacagggcc

SEQ ID NO: 1212549 - RNA, 18 nt, Human
caggcgcagcacagggcc

SEQ ID NO: 1212550 - RNA, 18 nt, Human
cagggccucucagcccgg

SEQ ID NO: 1212551 - RNA, 22 nt, Human
cccgcaggcgcagcacagggcc

SEQ ID NO: 1212552 - RNA, 21 nt, Human
cccggucuccugucaccacgu

SEQ ID NO: 1212553 - RNA, 18 nt, Human
ccgcaggcgcagcacagg

SEQ ID NO: 1212554 - RNA, 19 nt, Human
ccucucagcccggcuaccu

SEQ ID NO: 1212555 - RNA, 19 nt, Human
ccugcaggguguggccuug

SEQ ID NO: 1212556 - RNA, 20 nt, Human
ccugcaggguguggccuugg

SEQ ID NO: 1212557 - RNA, 21 nt, Human
ccugcaggguguggccuuggg

SEQ ID NO: 1212558 - RNA, 20 nt, Human
ccuggcagaccuccagggcc

SEQ ID NO: 1212559 - RNA, 23 nt, Human
ccugggcugauccgaaauaccac

SEQ ID NO: 1212560 - RNA, 23 nt, Human
ccuugggccugcacccgggcccc

SEQ ID NO: 1212561 - RNA, 24 nt, Human
gccacucguccggacacaccacag

SEQ ID NO: 1212562 - RNA, 21 nt, Human
gccugcacccgggccccccac

SEQ ID NO: 1212563 - RNA, 22 nt, Human
gccuggacgucuuggugcaagg

SEQ ID NO: 1212564 - RNA, 18 nt, Human
ggacacgaaggcaagcag

SEQ ID NO: 1212565 - RNA, 19 nt, Human
ggccagcagaggacaggcc

SEQ ID NO: 1212566 - RNA, 18 nt, Human
ggccaggccugcugggaa

SEQ ID NO: 1212567 - RNA, 20 nt, Human
ggugcaaggccaggcagcgg

SEQ ID NO: 1212568 - RNA, 19 nt, Human
uccggacacaccacagcca

SEQ ID NO: 1212569 - RNA, 18 nt, Human
ugcacccgggccccccac

SEQ ID NO: 1212570 - RNA, 21 nt, Human
ugcugggaacacgguggccau

SEQ ID NO: 1212571 - RNA, 21 nt, Human
ugcugggaacacgguggccau

SEQ ID NO: 1212572 - RNA, 21 nt, Human
uggugcaaggccaggcagcgg

SEQ ID NO: 1212573 - RNA, 23 nt, Human
aaagggacuguaggagaaaggga

SEQ ID NO: 1212574 - RNA, 20 nt, Human
aaaugguguggaaugggacg

SEQ ID NO: 1212575 - RNA, 21 nt, Human
aagaaagagauaauacaaaaa

SEQ ID NO: 1212576 - RNA, 24 nt, Human
aagaaagagauaauacaaaaauau

SEQ ID NO: 1212577 - RNA, 21 nt, Human
aagaagaaagagauaauacaa

SEQ ID NO: 1212578 - RNA, 24 nt, Human
aagaagaagaaagagauaauacaa

SEQ ID NO: 1212579 - RNA, 19 nt, Human
aaggaaggagggaggaaag

SEQ ID NO: 1212580 - RNA, 22 nt, Human
aagggaaggguagacuuggagg

SEQ ID NO: 1212581 - RNA, 19 nt, Human
aaggguagacuuggaggca

SEQ ID NO: 1212582 - RNA, 18 nt, Human
acagcugccccacccuca

SEQ ID NO: 1212583 - RNA, 19 nt, Human
agaaaacagauuuuagcag

SEQ ID NO: 1212584 - RNA, 22 nt, Human
agaaagagauaauacaaaaaua

SEQ ID NO: 1212585 - RNA, 22 nt, Human
agaagaaagagauaauacaaaa

SEQ ID NO: 1212586 - RNA, 20 nt, Human
agcagugggcugggggugaa

SEQ ID NO: 1212587 - RNA, 18 nt, Human
agccaggagccccugugg

SEQ ID NO: 1212588 - RNA, 23 nt, Human
agcucaccucccacccaccucug

SEQ ID NO: 1212589 - RNA, 19 nt, Human
aggaaacgcugaccacuga

SEQ ID NO: 1212590 - RNA, 18 nt, Human
aggaaggagaguggaagg

SEQ ID NO: 1212591 - RNA, 20 nt, Human
aggaaggagggaggaaagga

SEQ ID NO: 1212592 - RNA, 22 nt, Human
aggaaggagggaggaaaggagg

SEQ ID NO: 1212593 - RNA, 24 nt, Human
aggaaggagggaggaaaggagggg

SEQ ID NO: 1212594 - RNA, 26 nt, Human
aggaaggagggaggaaaggaggggac

SEQ ID NO: 1212595 - RNA, 20 nt, Human
aggagaaagggaagggcaaa

SEQ ID NO: 1212596 - RNA, 22 nt, Human
aggagggaagaaccugaggagg

SEQ ID NO: 1212597 - RNA, 23 nt, Human
aggagggaagaaccugaggaggg

SEQ ID NO: 1212598 - RNA, 26 nt, Human
aggagggaagaaccugaggaggggga

SEQ ID NO: 1212599 - RNA, 22 nt, Human
aggagggaguccgggaagggaa

SEQ ID NO: 1212600 - RNA, 20 nt, Human
aggauggggagacagagaaa

SEQ ID NO: 1212601 - RNA, 22 nt, Human
aggcagagcucccgauggccuu

SEQ ID NO: 1212602 - RNA, 19 nt, Human
agggaaggguagacuugga

SEQ ID NO: 1212603 - RNA, 21 nt, Human
agggcgcuggagcgggugggg

SEQ ID NO: 1212604 - RNA, 22 nt, Human
aggugagugugcaaggcuuuca

SEQ ID NO: 1212605 - RNA, 21 nt, Human
agguggaguuagggaggccca

SEQ ID NO: 1212606 - RNA, 18 nt, Human
agugagaaggagggaaga

SEQ ID NO: 1212607 - RNA, 22 nt, Human
agugcagcaggcgacuccccaa

SEQ ID NO: 1212608 - RNA, 22 nt, Human
augggggcugugccggccccuu

SEQ ID NO: 1212609 - RNA, 23 nt, Human
caagaagaagaaagagauaauac

SEQ ID NO: 1212610 - RNA, 23 nt, Human
cacaccaccacaacaucaggccg

SEQ ID NO: 1212611 - RNA, 18 nt, Human
cacugagugagcugagca

SEQ ID NO: 1212612 - RNA, 21 nt, Human
cagcucaccucccacccaccu

SEQ ID NO: 1212613 - RNA, 24 nt, Human
cagcuccccacagcugccccaccc

SEQ ID NO: 1212614 - RNA, 22 nt, Human
caggagccccuguggccccagc

SEQ ID NO: 1212615 - RNA, 21 nt, Human
cagggcgcuggagcggguggg

SEQ ID NO: 1212616 - RNA, 22 nt, Human
cagugagaaggagggaagaacc

SEQ ID NO: 1212617 - RNA, 21 nt, Human
ccaccacaacaucaggccggg

SEQ ID NO: 1212618 - RNA, 24 nt, Human
ccaggacagacaagacaaaaggga

SEQ ID NO: 1212619 - RNA, 22 nt, Human
cccaaggagcccccagcucacc

SEQ ID NO: 1212620 - RNA, 22 nt, Human
cccacccaccucuggagcagca

SEQ ID NO: 1212621 - RNA, 24 nt, Human
cccccagcucaccucccacccacc

SEQ ID NO: 1212622 - RNA, 23 nt, Human
cccgauggccuugaagugcguca

SEQ ID NO: 1212623 - RNA, 19 nt, Human
ccggccccuuggccuccug

SEQ ID NO: 1212624 - RNA, 20 nt, Human
ccggccccuuggccuccugc

SEQ ID NO: 1212625 - RNA, 20 nt, Human
ccugugaagguggaggugag

SEQ ID NO: 1212626 - RNA, 23 nt, Human
ccuguggccccagcuccccacag

SEQ ID NO: 1212627 - RNA, 24 nt, Human
cggggcuggggggucgcaggagcg

SEQ ID NO: 1212628 - RNA, 18 nt, Human
cugugccggccccuuggc

SEQ ID NO: 1212629 - RNA, 20 nt, Human
cuuggcugcaccccaacauu

SEQ ID NO: 1212630 - RNA, 23 nt, Human
gacaaaagggacuguaggagaaa

SEQ ID NO: 1212631 - RNA, 20 nt, Human
gacagccaggacagacaaga

SEQ ID NO: 1212632 - RNA, 21 nt, Human
gaccaugaccgaugagggccc

SEQ ID NO: 1212633 - RNA, 19 nt, Human
gagaacaugagagucagcc

SEQ ID NO: 1212634 - RNA, 20 nt, Human
gagcagcaugcaggggcugc

SEQ ID NO: 1212635 - RNA, 22 nt, Human
gagggaggaaaggaggggacag

SEQ ID NO: 1212636 - RNA, 20 nt, Human
gaggugagugugcaaggcuu

SEQ ID NO: 1212637 - RNA, 19 nt, Human
gcacacacacagacagcca

SEQ ID NO: 1212638 - RNA, 19 nt, Human
gcccaaagggaggcuggga

SEQ ID NO: 1212639 - RNA, 22 nt, Human
gccgcacaccaccacaacauca

SEQ ID NO: 1212640 - RNA, 18 nt, Human
gccuccugcuuggcugca

SEQ ID NO: 1212641 - RNA, 20 nt, Human
gccugugaagguggagguga

SEQ ID NO: 1212642 - RNA, 19 nt, Human
gcgccuggggcgcggggcg

SEQ ID NO: 1212643 - RNA, 21 nt, Human
gcgggcgccuggggcgcgggg

SEQ ID NO: 1212644 - RNA, 18 nt, Human
gcugcggaaacgaggugg

SEQ ID NO: 1212645 - RNA, 20 nt, Human
ggaaacgaggugggugggug

SEQ ID NO: 1212646 - RNA, 19 nt, Human
ggaaaggaggggacaggag

SEQ ID NO: 1212647 - RNA, 18 nt, Human
ggaaggagagagugcaaa

SEQ ID NO: 1212648 - RNA, 20 nt, Human
ggaagguggaaaaaccagug

SEQ ID NO: 1212649 - RNA, 23 nt, Human
ggagaguggaaggaaggagggag

SEQ ID NO: 1212650 - RNA, 19 nt, Human
ggaggacuggcucaggggg

SEQ ID NO: 1212651 - RNA, 23 nt, Human
ggagggaagaaccugaggagggg

SEQ ID NO: 1212652 - RNA, 23 nt, Human
ggcaggagccaggagccccugug

SEQ ID NO: 1212653 - RNA, 20 nt, Human
ggcagggaagcaaaaggaag

SEQ ID NO: 1212654 - RNA, 21 nt, Human
ggcaugguggggagguuuggc

SEQ ID NO: 1212655 - RNA, 23 nt, Human
ggcgccuggggcgcggggcggcg

SEQ ID NO: 1212656 - RNA, 18 nt, Human
ggcggggugcggggcaug

SEQ ID NO: 1212657 - RNA, 19 nt, Human
ggcggggugcggggcaugg

SEQ ID NO: 1212658 - RNA, 21 nt, Human
ggcucagggggcucugaaguc

SEQ ID NO: 1212659 - RNA, 18 nt, Human
gggaaggguagacuugga

SEQ ID NO: 1212660 - RNA, 28 nt, Human
gggcuggggggucgcaggagcgggcggg

SEQ ID NO: 1212661 - RNA, 22 nt, Human
gggcugggggugaagucugggg

SEQ ID NO: 1212662 - RNA, 24 nt, Human
ggggagacagagaaacaaauggug

SEQ ID NO: 1212663 - RNA, 23 nt, Human
ggggcgcggggcggcggcggugg

SEQ ID NO: 1212664 - RNA, 19 nt, Human
ggggcggcggcggugggag

SEQ ID NO: 1212665 - RNA, 20 nt, Human
ggggggucgcaggagcgggc

SEQ ID NO: 1212666 - RNA, 23 nt, Human
ggguggggggcgggcgccugggg

SEQ ID NO: 1212667 - RNA, 18 nt, Human
gucuggggccucacuacc

SEQ ID NO: 1212668 - RNA, 26 nt, Human
guggaaggaaggagggaggaaaggag

SEQ ID NO: 1212669 - RNA, 22 nt, Human
guggaguuagggaggcccaaag

SEQ ID NO: 1212670 - RNA, 19 nt, Human
uacaucccacaguaauuca

SEQ ID NO: 1212671 - RNA, 28 nt, Human
ucccacccaccucuggagcagcaugcag

SEQ ID NO: 1212672 - RNA, 19 nt, Human
uccccacagcugccccacc

SEQ ID NO: 1212673 - RNA, 18 nt, Human
ucgggacugagcggggcu

SEQ ID NO: 1212674 - RNA, 20 nt, Human
ugacccagauuuucagccuu

SEQ ID NO: 1212675 - RNA, 24 nt, Human
ugagacgagagaacaugagaguca

SEQ ID NO: 1212676 - RNA, 18 nt, Human
ugagcggggcuggggggu

SEQ ID NO: 1212677 - RNA, 21 nt, Human
ugaggagggggaaagggcagg

SEQ ID NO: 1212678 - RNA, 18 nt, Human
ugagggagagagugagca

SEQ ID NO: 1212679 - RNA, 21 nt, Human
ugagggagagagugagcacga

SEQ ID NO: 1212680 - RNA, 20 nt, Human
uggccccagcuccccacagc

SEQ ID NO: 1212681 - RNA, 22 nt, Human
uggcgcggcggcgcgacgacug

SEQ ID NO: 1212682 - RNA, 23 nt, Human
uggcugcaccccaacauuggggg

SEQ ID NO: 1212683 - RNA, 20 nt, Human
ugggaagggaggacuggcuc

SEQ ID NO: 1212684 - RNA, 18 nt, Human
ugggacgagaccaugacc

SEQ ID NO: 1212685 - RNA, 24 nt, Human
ugggcugggggugaagucuggggc

SEQ ID NO: 1212686 - RNA, 20 nt, Human
uggggggcgggcgccugggg

SEQ ID NO: 1212687 - RNA, 22 nt, Human
uggguggguguucaugagggag

SEQ ID NO: 1212688 - RNA, 22 nt, Human
uguaggagaaagggaagggcaa

SEQ ID NO: 1212689 - RNA, 24 nt, Human
uucaagaugaucaccacaagaaga

SEQ ID NO: 1212690 - RNA, 25 nt, Human
aaaaagcuguaaccagacugagucc

SEQ ID NO: 1212691 - RNA, 20 nt, Human
aaagcucuucacaugccucu

SEQ ID NO: 1212692 - RNA, 20 nt, Human
aacccagccuaaccccguuu

SEQ ID NO: 1212693 - RNA, 21 nt, Human
aagaaaaauaaucuuuccuca

SEQ ID NO: 1212694 - RNA, 18 nt, Human
aagcaaaagcaggacagg

SEQ ID NO: 1212695 - RNA, 21 nt, Human
aagcaaaagcaggacagguga

SEQ ID NO: 1212696 - RNA, 19 nt, Human
aaugaccagguagcugugg

SEQ ID NO: 1212697 - RNA, 21 nt, Human
acagaggagagaacaucccag

SEQ ID NO: 1212698 - RNA, 18 nt, Human
acccaaggcaagauuuca

SEQ ID NO: 1212699 - RNA, 19 nt, Human
accucuuagauccuguggu

SEQ ID NO: 1212700 - RNA, 24 nt, Human
acugagagguuaacauuucucuca

SEQ ID NO: 1212701 - RNA, 22 nt, Human
acuggaaaaauucauccccuca

SEQ ID NO: 1212702 - RNA, 19 nt, Human
acuugcuucccuugcuccc

SEQ ID NO: 1212703 - RNA, 19 nt, Human
agauaaccgggaaaaaagg

SEQ ID NO: 1212704 - RNA, 18 nt, Human
agcggucggcucgccucc

SEQ ID NO: 1212705 - RNA, 24 nt, Human
aggaaaaaauaaaaauaaaaaugu

SEQ ID NO: 1212706 - RNA, 20 nt, Human
aggcauggcaucugaauacc

SEQ ID NO: 1212707 - RNA, 21 nt, Human
aggugagaaggaaaggugagg

SEQ ID NO: 1212708 - RNA, 26 nt, Human
auaucguucccucauuuacccaaaau

SEQ ID NO: 1212709 - RNA, 20 nt, Human
caaauauucacaaguaucuc

SEQ ID NO: 1212710 - RNA, 22 nt, Human
caagccuucagcuuuucucaca

SEQ ID NO: 1212711 - RNA, 21 nt, Human
caccaaucgcuuaacacccac

SEQ ID NO: 1212712 - RNA, 26 nt, Human
caccagauaaccgggaaaaaaggguu

SEQ ID NO: 1212713 - RNA, 19 nt, Human
cacccaccuccuuccuccu

SEQ ID NO: 1212714 - RNA, 19 nt, Human
cacccuguaugaaaaaccc

SEQ ID NO: 1212715 - RNA, 22 nt, Human
caccuccuuccuccuuugcucc

SEQ ID NO: 1212716 - RNA, 19 nt, Human
caccuggaugaagaugaga

SEQ ID NO: 1212717 - RNA, 22 nt, Human
cagcauuccccaaaaccuucuc

SEQ ID NO: 1212718 - RNA, 22 nt, Human
cagcggucggcucgccucccuc

SEQ ID NO: 1212719 - RNA, 23 nt, Human
cauugucaaggucaggugcugac

SEQ ID NO: 1212720 - RNA, 25 nt, Human
ccaaacacccuguaugaaaaacccu

SEQ ID NO: 1212721 - RNA, 19 nt, Human
ccacaacagugcccaucuc

SEQ ID NO: 1212722 - RNA, 18 nt, Human
ccacaucacuccgguccu

SEQ ID NO: 1212723 - RNA, 24 nt, Human
ccaccacaacagugcccaucuccu

SEQ ID NO: 1212724 - RNA, 20 nt, Human
ccagacuuaaugcaccugga

SEQ ID NO: 1212725 - RNA, 24 nt, Human
ccagauaaccgggaaaaaaggguu

SEQ ID NO: 1212726 - RNA, 21 nt, Human
ccagcggucggcucgccuccc

SEQ ID NO: 1212727 - RNA, 23 nt, Human
ccagcggucggcucgccucccuc

SEQ ID NO: 1212728 - RNA, 20 nt, Human
ccaguacagaggagagaaca

SEQ ID NO: 1212729 - RNA, 18 nt, Human
cccacaucacuccugcuu

SEQ ID NO: 1212730 - RNA, 19 nt, Human
ccccaguccuacucuuccu

SEQ ID NO: 1212731 - RNA, 22 nt, Human
ccccgucucucccucacaccca

SEQ ID NO: 1212732 - RNA, 23 nt, Human
ccccgucucucccucacacccac

SEQ ID NO: 1212733 - RNA, 21 nt, Human
ccccucuaccccaguccuacu

SEQ ID NO: 1212734 - RNA, 21 nt, Human
ccgccgccgccugcgcccugc

SEQ ID NO: 1212735 - RNA, 22 nt, Human
ccgccugcgcccugccugcgcc

SEQ ID NO: 1212736 - RNA, 24 nt, Human
ccucacacccacuugcuucccuug

SEQ ID NO: 1212737 - RNA, 23 nt, Human
cgccgccugcgcccugccugcgc

SEQ ID NO: 1212738 - RNA, 24 nt, Human
cgccucccucucccaccggcccaa

SEQ ID NO: 1212739 - RNA, 28 nt, Human
cggccaaacacccuguaugaaaaacccu

SEQ ID NO: 1212740 - RNA, 23 nt, Human
cuaaccccguuuaaaugcuguca

SEQ ID NO: 1212741 - RNA, 20 nt, Human
cuccagcauuccccaaaacc

SEQ ID NO: 1212742 - RNA, 18 nt, Human
cucccucucccaccggcc

SEQ ID NO: 1212743 - RNA, 21 nt, Human
cucgaacuucaacccagccua

SEQ ID NO: 1212744 - RNA, 22 nt, Human
cucuaccccaguccuacucuuc

SEQ ID NO: 1212745 - RNA, 23 nt, Human
cucuacuucccccuccccauucc

SEQ ID NO: 1212746 - RNA, 18 nt, Human
cuucccccuccccauucc

SEQ ID NO: 1212747 - RNA, 20 nt, Human
cuucuuggccacacagugcc

SEQ ID NO: 1212748 - RNA, 23 nt, Human
gaagcagacauggccacagccuu

SEQ ID NO: 1212749 - RNA, 24 nt, Human
gacaccaaaagucaugaggagaga

SEQ ID NO: 1212750 - RNA, 19 nt, Human
gagccacuccuagcugugg

SEQ ID NO: 1212751 - RNA, 21 nt, Human
gaguugcagugggagagacag

SEQ ID NO: 1212752 - RNA, 25 nt, Human
gaucaccagauaaccgggaaaaaag

SEQ ID NO: 1212753 - RNA, 22 nt, Human
gcaaauacuuuuacuacccaaa

SEQ ID NO: 1212754 - RNA, 21 nt, Human
gcaucaccauugucaagguca

SEQ ID NO: 1212755 - RNA, 20 nt, Human
gcccugccugcgccugggcu

SEQ ID NO: 1212756 - RNA, 22 nt, Human
gccugggcuggcggcggggagc

SEQ ID NO: 1212757 - RNA, 23 nt, Human
gcuccagcauuccccaaaaccuu

SEQ ID NO: 1212758 - RNA, 21 nt, Human
gcucuacuucccccuccccau

SEQ ID NO: 1212759 - RNA, 18 nt, Human
ggaagcaaaagcaggaca

SEQ ID NO: 1212760 - RNA, 21 nt, Human
ggacccaaggcaagauuucag

SEQ ID NO: 1212761 - RNA, 24 nt, Human
ggccaaacacccuguaugaaaaac

SEQ ID NO: 1212762 - RNA, 18 nt, Human
ggccccagccuuuuuaaa

SEQ ID NO: 1212763 - RNA, 26 nt, Human
ggccuccuggauuccccucuaccccc

SEQ ID NO: 1212764 - RNA, 20 nt, Human
ggcgccuucaggccacauca

SEQ ID NO: 1212765 - RNA, 25 nt, Human
gggcauugagggaaaacugacuuuc

SEQ ID NO: 1212766 - RNA, 24 nt, Human
ggguguccaaucaggucagagaag

SEQ ID NO: 1212767 - RNA, 20 nt, Human
ggguuuugagggaguugggg

SEQ ID NO: 1212768 - RNA, 20 nt, Human
uaaagcucuucacaugccuc

SEQ ID NO: 1212769 - RNA, 18 nt, Human
uaaccagacugaguccuc

SEQ ID NO: 1212770 - RNA, 20 nt, Human
uaaccagacugaguccucaa

SEQ ID NO: 1212771 - RNA, 21 nt, Human
uacagcaaauauucacaagua

SEQ ID NO: 1212772 - RNA, 23 nt, Human
uacccaaaaucuccuuugcacac

SEQ ID NO: 1212773 - RNA, 20 nt, Human
uacuacccaaacuuccuucc

SEQ ID NO: 1212774 - RNA, 19 nt, Human
uagacuccuacgcacccaa

SEQ ID NO: 1212775 - RNA, 21 nt, Human
uagcuguggcucccacuucac

SEQ ID NO: 1212776 - RNA, 27 nt, Human
uagcuguggcugcccucagggaagggg

SEQ ID NO: 1212777 - RNA, 18 nt, Human
uaguucuccaucacuugc

SEQ ID NO: 1212778 - RNA, 22 nt, Human
uccagcucccuugguuucccac

SEQ ID NO: 1212779 - RNA, 27 nt, Human
ucccaccacaacagugcccaucuccuc

SEQ ID NO: 1212780 - RNA, 19 nt, Human
ucccaccggcccagccucc

SEQ ID NO: 1212781 - RNA, 23 nt, Human
ucccaggauuccgagcaggaccc

SEQ ID NO: 1212782 - RNA, 21 nt, Human
uccccaaaaccuucucaagca

SEQ ID NO: 1212783 - RNA, 20 nt, Human
uccccggccuccuggauucc

SEQ ID NO: 1212784 - RNA, 19 nt, Human
uccccgucucucccucaca

SEQ ID NO: 1212785 - RNA, 19 nt, Human
ucccuaaaugagccacucc

SEQ ID NO: 1212786 - RNA, 18 nt, Human
uccuaaaucccaggauuc

SEQ ID NO: 1212787 - RNA, 20 nt, Human
uccuggauuccccucuaccc

SEQ ID NO: 1212788 - RNA, 19 nt, Human
uccuuuagacuccuacgca

SEQ ID NO: 1212789 - RNA, 23 nt, Human
ucuccaugcaaauacuuuuacua

SEQ ID NO: 1212790 - RNA, 18 nt, Human
ucugccaacuguccccca

SEQ ID NO: 1212791 - RNA, 23 nt, Human
ugaagaaagagcuugaaguucua

SEQ ID NO: 1212792 - RNA, 24 nt, Human
ugaagagaugcaaagaaaguggag

SEQ ID NO: 1212793 - RNA, 23 nt, Human
ugaaggcuauggcuaugucuuug

SEQ ID NO: 1212794 - RNA, 21 nt, Human
ugaauaccaacuccaucugcc

SEQ ID NO: 1212795 - RNA, 22 nt, Human
ugaauaccaacuccaucugcca

SEQ ID NO: 1212796 - RNA, 24 nt, Human
ugaaucaaauguuuuaagucugcc

SEQ ID NO: 1212797 - RNA, 22 nt, Human
ugacauguggagcuggacagga

SEQ ID NO: 1212798 - RNA, 22 nt, Human
ugagcuacccugcccuaaccca

SEQ ID NO: 1212799 - RNA, 22 nt, Human
ugagggaaaacugacuuucugc

SEQ ID NO: 1212800 - RNA, 23 nt, Human
ugauuccuaaaucccaggauucc

SEQ ID NO: 1212801 - RNA, 23 nt, Human
ugcaaauacuuuuacuacccaaa

SEQ ID NO: 1212802 - RNA, 19 nt, Human
ugcaucaccauugucaagg

SEQ ID NO: 1212803 - RNA, 22 nt, Human
ugccuccagcucccuugguuuc

SEQ ID NO: 1212804 - RNA, 27 nt, Human
ugcucccaccacaacagugcccauugu

SEQ ID NO: 1212805 - RNA, 21 nt, Human
uggaguugcagugggagagac

SEQ ID NO: 1212806 - RNA, 19 nt, Human
uggcugcccucagggaagg

SEQ ID NO: 1212807 - RNA, 22 nt, Human
uucauggaccuccugagugaag

SEQ ID NO: 1212808 - RNA, 18 nt, Human
uuccccucuaccccaguc

SEQ ID NO: 1212809 - RNA, 19 nt, Human
uuccucugccuccagcucc

SEQ ID NO: 1212810 - RNA, 23 nt, Human
uugaaguucuaggaacugagagg

SEQ ID NO: 1212811 - RNA, 21 nt, Human
uugcagugggagagacaggag

SEQ ID NO: 1212812 - RNA, 21 nt, Human
uugcugagccuugggcauuga

SEQ ID NO: 1212813 - RNA, 21 nt, Human
uugggguagaaaacuguaucu

SEQ ID NO: 1212814 - RNA, 25 nt, Human
uuuacuacccaaacuuccuuccaaa

SEQ ID NO: 1212815 - RNA, 21 nt, Human
uuuauuuuuguucugcuccuu

SEQ ID NO: 1212816 - RNA, 21 nt, Human
uuucaacaacggccaaacacc

SEQ ID NO: 1212817 - RNA, 22 nt, Human
uuuguccccggccuccuggauu

SEQ ID NO: 1212818 - RNA, 18 nt, Human
uuuugcuccagcauuccc

SEQ ID NO: 1212819 - RNA, 23 nt, Human
uuuugcuccagcauuccccaaaa

SEQ ID NO: 1212820 - RNA, 21 nt, Human
aaacauugaaggaaacaacac

SEQ ID NO: 1212821 - RNA, 21 nt, Human
aaaggcagaaacauugaagga

SEQ ID NO: 1212822 - RNA, 25 nt, Human
aaggcagaaacauugaaggaaacaa

SEQ ID NO: 1212823 - RNA, 24 nt, Human
accuugaaaaucaguuuuaaaagg

SEQ ID NO: 1212824 - RNA, 21 nt, Human
augaaagaaccuugugccgga

SEQ ID NO: 1212825 - RNA, 23 nt, Human
uacuucauauuacacauacuuuu

SEQ ID NO: 1212826 - RNA, 19 nt, Human
uagaucgcagaacgagcga

SEQ ID NO: 1212827 - RNA, 24 nt, Human
ucugaaacauuuuacuucauauua

SEQ ID NO: 1212828 - RNA, 20 nt, Human
ugaaggaaacaacacucaac

SEQ ID NO: 1212829 - RNA, 23 nt, Human
ugaaggaaacaacacucaacaug

SEQ ID NO: 1212830 - RNA, 18 nt, Human
uggaagccacucucaaua

SEQ ID NO: 1212831 - RNA, 25 nt, Human
uugaaggaaacaacacucaacauga

SEQ ID NO: 1212832 - RNA, 21 nt, Human
uuggaagccacucucaauaga

SEQ ID NO: 1212833 - RNA, 24 nt, Human
aaaaagaauccauucuacuuuaga

SEQ ID NO: 1212834 - RNA, 20 nt, Human
aaacagaaaaaaaagaaucc

SEQ ID NO: 1212835 - RNA, 24 nt, Human
aaaucauucauggcaggcauuuga

SEQ ID NO: 1212836 - RNA, 21 nt, Human
aaauuccuuaaagugcuucuc

SEQ ID NO: 1212837 - RNA, 20 nt, Human
aacauaauaugaacauaaaa

SEQ ID NO: 1212838 - RNA, 22 nt, Human
aacccuuuuccuuuauuacucu

SEQ ID NO: 1212839 - RNA, 21 nt, Human
aaggcacuccccacccaauga

SEQ ID NO: 1212840 - RNA, 26 nt, Human
aaucacaugaaagcuauuaaauuaaa

SEQ ID NO: 1212841 - RNA, 21 nt, Human
aauuaucugagggauguuuaa

SEQ ID NO: 1212842 - RNA, 18 nt, Human
acaaauaugcuucaaaac

SEQ ID NO: 1212843 - RNA, 21 nt, Human
acaggagugcagcaggaaguc

SEQ ID NO: 1212844 - RNA, 21 nt, Human
acagugaaauggggucccgga

SEQ ID NO: 1212845 - RNA, 20 nt, Human
acuagagaggaagugacacc

SEQ ID NO: 1212846 - RNA, 22 nt, Human
acuccccacccaaugaccacaa

SEQ ID NO: 1212847 - RNA, 24 nt, Human
agaaaugaaaauaaucaaacagaa

SEQ ID NO: 1212848 - RNA, 20 nt, Human
agacagaaaugaaaauaauc

SEQ ID NO: 1212849 - RNA, 18 nt, Human
agacaggagugcagcagg

SEQ ID NO: 1212850 - RNA, 18 nt, Human
agagaagagguacuagag

SEQ ID NO: 1212851 - RNA, 20 nt, Human
agcaggaaguaaucuccaga

SEQ ID NO: 1212852 - RNA, 23 nt, Human
agcaugaccaugaugcaaaucac

SEQ ID NO: 1212853 - RNA, 19 nt, Human
aggaaauggcaauaguuga

SEQ ID NO: 1212854 - RNA, 22 nt, Human
aggcacuccccacccaaugacc

SEQ ID NO: 1212855 - RNA, 18 nt, Human
aggcugagcaaaagugag

SEQ ID NO: 1212856 - RNA, 21 nt, Human
aggggugagagggccuggcuc

SEQ ID NO: 1212857 - RNA, 20 nt, Human
aguauuuuuuugagauggaa

SEQ ID NO: 1212858 - RNA, 21 nt, Human
agucagacuucauggggccug

SEQ ID NO: 1212859 - RNA, 22 nt, Human
aucaaacagaaaaaaaagaauc

SEQ ID NO: 1212860 - RNA, 24 nt, Human
augaaaauaaucaaacagaaaaaa

SEQ ID NO: 1212861 - RNA, 18 nt, Human
augcucauaauuauaaaa

SEQ ID NO: 1212862 - RNA, 23 nt, Human
augguacuguaaggaaaagauga

SEQ ID NO: 1212863 - RNA, 18 nt, Human
auucauuucuccauccca

SEQ ID NO: 1212864 - RNA, 23 nt, Human
caauaguugagacucauauuugc

SEQ ID NO: 1212865 - RNA, 22 nt, Human
cacagguccacugccacaccca

SEQ ID NO: 1212866 - RNA, 25 nt, Human
cacccaaugaccacaaugagggcac

SEQ ID NO: 1212867 - RNA, 21 nt, Human
caccuucuguaucuaaugaau

SEQ ID NO: 1212868 - RNA, 19 nt, Human
cacuacaacuuugcucuuu

SEQ ID NO: 1212869 - RNA, 21 nt, Human
ccacacccaucaauuucccca

SEQ ID NO: 1212870 - RNA, 19 nt, Human
cccugcaucuccacuacaa

SEQ ID NO: 1212871 - RNA, 21 nt, Human
cucuaguacaaucagacaguu

SEQ ID NO: 1212872 - RNA, 23 nt, Human
cugcagacuccuugacaaaaggc

SEQ ID NO: 1212873 - RNA, 22 nt, Human
cugcugccucugaagccacuua

SEQ ID NO: 1212874 - RNA, 23 nt, Human
gagauggaaagacaugcucaaau

SEQ ID NO: 1212875 - RNA, 20 nt, Human
gcacggaaccuccuaggagu

SEQ ID NO: 1212876 - RNA, 22 nt, Human
gcauuaaaaaaggauauaaagc

SEQ ID NO: 1212877 - RNA, 20 nt, Human
gcucaguuucucuagugguu

SEQ ID NO: 1212878 - RNA, 19 nt, Human
gggcacuugcuguuucugc

SEQ ID NO: 1212879 - RNA, 24 nt, Human
gugaaauggggucccggauccacu

SEQ ID NO: 1212880 - RNA, 23 nt, Human
uaaaagaauauuaaaaugcacag

SEQ ID NO: 1212881 - RNA, 23 nt, Human
uaaaagaauauuaaaaugcacag

SEQ ID NO: 1212882 - RNA, 19 nt, Human
uaaaaugcacagaaauuaa

SEQ ID NO: 1212883 - RNA, 19 nt, Human
uaaaaugcacagaaauuaa

SEQ ID NO: 1212884 - RNA, 22 nt, Human
uaaucaaacagaaaaaaaagaa

SEQ ID NO: 1212885 - RNA, 22 nt, Human
uacaauacugcuuugauggauc

SEQ ID NO: 1212886 - RNA, 19 nt, Human
uacuagagaggaagugaca

SEQ ID NO: 1212887 - RNA, 27 nt, Human
uacuagagaggaagugacacccgcuuc

SEQ ID NO: 1212888 - RNA, 24 nt, Human
uagacagaaaugaaaauaaucaaa

SEQ ID NO: 1212889 - RNA, 22 nt, Human
uaggggugagagggccuggcuc

SEQ ID NO: 1212890 - RNA, 23 nt, Human
uaucacugcaagucagccgugga

SEQ ID NO: 1212891 - RNA, 18 nt, Human
uaucagaaaaagguaaca

SEQ ID NO: 1212892 - RNA, 21 nt, Human
uaugccacaaugugugaaaag

SEQ ID NO: 1212893 - RNA, 19 nt, Human
uaugcuucaaaaccuugcu

SEQ ID NO: 1212894 - RNA, 23 nt, Human
ucaaacagaaaaaaaagaaucca

SEQ ID NO: 1212895 - RNA, 21 nt, Human
ucagauauuacauuuggugcc

SEQ ID NO: 1212896 - RNA, 18 nt, Human
ucauggcaggcauuugaa

SEQ ID NO: 1212897 - RNA, 24 nt, Human
ucauuaacacgaucaagagagaca

SEQ ID NO: 1212898 - RNA, 22 nt, Human
ucccagugcagucagacuucau

SEQ ID NO: 1212899 - RNA, 22 nt, Human
ucuauaaugaugguacuguaag

SEQ ID NO: 1212900 - RNA, 21 nt, Human
ucuccagauaaugguaggguu

SEQ ID NO: 1212901 - RNA, 24 nt, Human
ucuccagauaaugguaggguuugu

SEQ ID NO: 1212902 - RNA, 22 nt, Human
ucugauagguuggcuccucugg

SEQ ID NO: 1212903 - RNA, 21 nt, Human
ugaaauucaaggcacacaugc

SEQ ID NO: 1212904 - RNA, 18 nt, Human
ugaagagaggaacagugg

SEQ ID NO: 1212905 - RNA, 21 nt, Human
ugaagagaggaacaguggcac

SEQ ID NO: 1212906 - RNA, 18 nt, Human
ugacaaaaggcacucccc

SEQ ID NO: 1212907 - RNA, 22 nt, Human
ugagaaagaguuuccuucagug

SEQ ID NO: 1212908 - RNA, 25 nt, Human
ugagaaagaguuuccuucaguggga

SEQ ID NO: 1212909 - RNA, 22 nt, Human
ugagcaaaagugagggggcaag

SEQ ID NO: 1212910 - RNA, 18 nt, Human
ugaggggcuuaucuuuuc

SEQ ID NO: 1212911 - RNA, 18 nt, Human
ugaguauuugcucuaaug

SEQ ID NO: 1212912 - RNA, 26 nt, Human
ugauaucacuguuuuccaagaaacua

SEQ ID NO: 1212913 - RNA, 20 nt, Human
ugaugcaaaucaccucccuc

SEQ ID NO: 1212914 - RNA, 22 nt, Human
ugcagucagacuucauggggcc

SEQ ID NO: 1212915 - RNA, 21 nt, Human
ugccaaagugauuuaacuuac

SEQ ID NO: 1212916 - RNA, 20 nt, Human
ugcugggauucugauagguu

SEQ ID NO: 1212917 - RNA, 19 nt, Human
uggaaagacaugcucaaau

SEQ ID NO: 1212918 - RNA, 23 nt, Human
uggaagauaaaaagugucacugu

SEQ ID NO: 1212919 - RNA, 20 nt, Human
uggacucacuaacaaacacu

SEQ ID NO: 1212920 - RNA, 18 nt, Human
uggcaggcauuugaaauc

SEQ ID NO: 1212921 - RNA, 19 nt, Human
uguagaggguuuuuuuucc

SEQ ID NO: 1212922 - RNA, 22 nt, Human
uguugauaaaaauguaauuuua

SEQ ID NO: 1212923 - RNA, 23 nt, Human
uguuucaauaugcuaaaauucac

SEQ ID NO: 1212924 - RNA, 22 nt, Human
uucauuucuccaucccagugca

SEQ ID NO: 1212925 - RNA, 23 nt, Human
uugacaaaaggcacuccccaccc

SEQ ID NO: 1212926 - RNA, 19 nt, Human
uugagauggaaagacaugc

SEQ ID NO: 1212927 - RNA, 21 nt, Human
uugugcacccagcaaugaccu

SEQ ID NO: 1212928 - RNA, 24 nt, Human
uuuagaaaagauuaauuauccaga

SEQ ID NO: 1212929 - RNA, 19 nt, Human
aaaaaacauucccaccucc

SEQ ID NO: 1212930 - RNA, 21 nt, Human
aaaaaacauucccaccuccca

SEQ ID NO: 1212931 - RNA, 23 nt, Human
aaaaaacauucccaccucccacu

SEQ ID NO: 1212932 - RNA, 23 nt, Human
aaaaagagauuuaagauauggga

SEQ ID NO: 1212933 - RNA, 20 nt, Human
aaaaagcagcauuaaacuau

SEQ ID NO: 1212934 - RNA, 22 nt, Human
aaaaucacaaauaauaugccua

SEQ ID NO: 1212935 - RNA, 19 nt, Human
aaagugcugggauuauagg

SEQ ID NO: 1212936 - RNA, 23 nt, Human
aaagugcugggauuauaggugua

SEQ ID NO: 1212937 - RNA, 23 nt, Human
aacagauagcuagagaugaugag

SEQ ID NO: 1212938 - RNA, 22 nt, Human
aacucuuuucaauccugagcag

SEQ ID NO: 1212939 - RNA, 22 nt, Human
aagcagcauuaaacuaugcagg

SEQ ID NO: 1212940 - RNA, 20 nt, Human
aaggacugaagucugguuau

SEQ ID NO: 1212941 - RNA, 19 nt, Human
aaguaauaaagugcucucc

SEQ ID NO: 1212942 - RNA, 18 nt, Human
aagugcugggauuauagg

SEQ ID NO: 1212943 - RNA, 26 nt, Human
aagugcugggauuauagguguaagcc

SEQ ID NO: 1212944 - RNA, 20 nt, Human
acauuuuaucaauuucucua

SEQ ID NO: 1212945 - RNA, 21 nt, Human
acuggaauacaaguucaaggu

SEQ ID NO: 1212946 - RNA, 22 nt, Human
acuuuuguuagguggauccaag

SEQ ID NO: 1212947 - RNA, 19 nt, Human
agacaauacauacuuugca

SEQ ID NO: 1212948 - RNA, 18 nt, Human
agaugggaaagacugaua

SEQ ID NO: 1212949 - RNA, 22 nt, Human
agcaaaaaguuuaaagauggua

SEQ ID NO: 1212950 - RNA, 23 nt, Human
agcaaaaaguuuaaagaugguaa

SEQ ID NO: 1212951 - RNA, 19 nt, Human
agcacuguaauuauuuucu

SEQ ID NO: 1212952 - RNA, 21 nt, Human
aggaagacucaacaagaucug

SEQ ID NO: 1212953 - RNA, 22 nt, Human
aggcuaaccaugcagcaaaaaa

SEQ ID NO: 1212954 - RNA, 20 nt, Human
agugauccuucugccucagc

SEQ ID NO: 1212955 - RNA, 23 nt, Human
auaaagugcucuccagcugaaaa

SEQ ID NO: 1212956 - RNA, 24 nt, Human
auagcucacuacagccuuugacuc

SEQ ID NO: 1212957 - RNA, 24 nt, Human
aucuaauucaucacauuacucuaa

SEQ ID NO: 1212958 - RNA, 21 nt, Human
caaaaaaagguuaaggguggu

SEQ ID NO: 1212959 - RNA, 18 nt, Human
caaaaaguuuaaagaugg

SEQ ID NO: 1212960 - RNA, 19 nt, Human
caaaggauaaccaaucaaa

SEQ ID NO: 1212961 - RNA, 24 nt, Human
caaagugcugggauuauaggugua

SEQ ID NO: 1212962 - RNA, 24 nt, Human
caauagcuaaaccacaaaggauaa

SEQ ID NO: 1212963 - RNA, 18 nt, Human
caaucucauucauaagca

SEQ ID NO: 1212964 - RNA, 18 nt, Human
caccuugauccugcuacu

SEQ ID NO: 1212965 - RNA, 20 nt, Human
cacuauguugccaggcuggu

SEQ ID NO: 1212966 - RNA, 23 nt, Human
cacuauguugccaggcuggucuc

SEQ ID NO: 1212967 - RNA, 19 nt, Human
cacugcauacaaaaagcac

SEQ ID NO: 1212968 - RNA, 24 nt, Human
cacugcauacaaaaagcacuguaa

SEQ ID NO: 1212969 - RNA, 21 nt, Human
cacugcuccuuuaugucccuc

SEQ ID NO: 1212970 - RNA, 22 nt, Human
cacuucagaaggacauaaugga

SEQ ID NO: 1212971 - RNA, 19 nt, Human
cagaaggacauaauggaaa

SEQ ID NO: 1212972 - RNA, 22 nt, Human
cagaugaguaguuuugaaauca

SEQ ID NO: 1212973 - RNA, 24 nt, Human
cagccuuugacucccugggcccaa

SEQ ID NO: 1212974 - RNA, 18 nt, Human
caggaggugagaggauag

SEQ ID NO: 1212975 - RNA, 19 nt, Human
caggcaauagcuaaaccac

SEQ ID NO: 1212976 - RNA, 21 nt, Human
caguuucauuucuuucucaag

SEQ ID NO: 1212977 - RNA, 24 nt, Human
caugucaauuucccaugaccaaaa

SEQ ID NO: 1212978 - RNA, 24 nt, Human
cauuuuaucaauuucucuaacacu

SEQ ID NO: 1212979 - RNA, 21 nt, Human
ccaaagugcugggauuauagg

SEQ ID NO: 1212980 - RNA, 24 nt, Human
ccaaagugcugggauuauaggugu

SEQ ID NO: 1212981 - RNA, 22 nt, Human
ccacaaaggauaaccaaucaaa

SEQ ID NO: 1212982 - RNA, 23 nt, Human
ccagugauccuucugccucagcc

SEQ ID NO: 1212983 - RNA, 18 nt, Human
ccugaugaucaccugaga

SEQ ID NO: 1212984 - RNA, 26 nt, Human
ccuucugccucagccucccaaagugc

SEQ ID NO: 1212985 - RNA, 22 nt, Human
ccuuugacucccugggcccaag

SEQ ID NO: 1212986 - RNA, 23 nt, Human
cgagcauccuccauucaaaaaau

SEQ ID NO: 1212987 - RNA, 24 nt, Human
cgcguccugaugaucaccugagaa

SEQ ID NO: 1212988 - RNA, 21 nt, Human
cguccugaugaucaccugaga

SEQ ID NO: 1212989 - RNA, 19 nt, Human
cuaugcaggcaauagcuaa

SEQ ID NO: 1212990 - RNA, 21 nt, Human
cucacuacagccuuugacucc

SEQ ID NO: 1212991 - RNA, 18 nt, Human
cuccagugauccuucugc

SEQ ID NO: 1212992 - RNA, 24 nt, Human
cugaagucugguuauuagacaugu

SEQ ID NO: 1212993 - RNA, 27 nt, Human
cugccgaacuuaauuuuccuauuauac

SEQ ID NO: 1212994 - RNA, 24 nt, Human
cugccucagccucccaaagugcug

SEQ ID NO: 1212995 - RNA, 21 nt, Human
cugggauuauagguguaagcc

SEQ ID NO: 1212996 - RNA, 21 nt, Human
gagaggauaggaaauggaagg

SEQ ID NO: 1212997 - RNA, 27 nt, Human
gagcauccuccauucaaaaaauauaaa

SEQ ID NO: 1212998 - RNA, 18 nt, Human
gauuauagguguaagcca

SEQ ID NO: 1212999 - RNA, 19 nt, Human
gauuauagguguaagccac

SEQ ID NO: 1213000 - RNA, 24 nt, Human
gauuauagguguaagccacagugc

SEQ ID NO: 1213001 - RNA, 23 nt, Human
gcuggucucaaacuccuggccuc

SEQ ID NO: 1213002 - RNA, 21 nt, Human
gcuguugauucugugguguug

SEQ ID NO: 1213003 - RNA, 23 nt, Human
ggaguaaaaaauugaagaaauuc

SEQ ID NO: 1213004 - RNA, 24 nt, Human
ggauuauagguguaagccacagug

SEQ ID NO: 1213005 - RNA, 24 nt, Human
ggcuggucucaaacuccuggccuc

SEQ ID NO: 1213006 - RNA, 23 nt, Human
gggaacauggagaugggaaagac

SEQ ID NO: 1213007 - RNA, 21 nt, Human
ggggacagcaggaggugagag

SEQ ID NO: 1213008 - RNA, 26 nt, Human
gguauacaugcuuguaagugugugua

SEQ ID NO: 1213009 - RNA, 23 nt, Human
ggucaaaggcuaaccaugcagca

SEQ ID NO: 1213010 - RNA, 18 nt, Human
guagagauggaaucucac

SEQ ID NO: 1213011 - RNA, 22 nt, Human
guagagauggaaucucacuaug

SEQ ID NO: 1213012 - RNA, 24 nt, Human
gugauccuucugccucagccuccc

SEQ ID NO: 1213013 - RNA, 19 nt, Human
guuucauuucuuucucaag

SEQ ID NO: 1213014 - RNA, 24 nt, Human
uaaaaaagaaucucaaacauaaaa

SEQ ID NO: 1213015 - RNA, 27 nt, Human
uaaaaagagauuuaagauaugggaaca

SEQ ID NO: 1213016 - RNA, 22 nt, Human
uaaaauaucaguucucuauacu

SEQ ID NO: 1213017 - RNA, 23 nt, Human
uaagguggauccagugacacauu

SEQ ID NO: 1213018 - RNA, 24 nt, Human
uaaguguguguauacauaugugca

SEQ ID NO: 1213019 - RNA, 18 nt, Human
uacuggaauacaaguuca

SEQ ID NO: 1213020 - RNA, 19 nt, Human
uagagaaagcacuccaaaa

SEQ ID NO: 1213021 - RNA, 22 nt, Human
uagagauggaaucucacuaugu

SEQ ID NO: 1213022 - RNA, 22 nt, Human
uauguugccaggcuggucucaa

SEQ ID NO: 1213023 - RNA, 23 nt, Human
uauguugccaggcuggucucaaa

SEQ ID NO: 1213024 - RNA, 23 nt, Human
ucaaaagaacugugaaggucaaa

SEQ ID NO: 1213025 - RNA, 24 nt, Human
ucaagauuccacugcauacaaaaa

SEQ ID NO: 1213026 - RNA, 24 nt, Human
ucacuacagccuuugacucccugg

SEQ ID NO: 1213027 - RNA, 25 nt, Human
ucacuacagccuuugacucccuggg

SEQ ID NO: 1213028 - RNA, 28 nt, Human
ucacuacagccuuugacuccgguccucc

SEQ ID NO: 1213029 - RNA, 20 nt, Human
uccacugcauacaaaaagca

SEQ ID NO: 1213030 - RNA, 28 nt, Human
uccagugauccuucugccucagccuccc

SEQ ID NO: 1213031 - RNA, 23 nt, Human
ucccaaagugcugggauuauagg

SEQ ID NO: 1213032 - RNA, 23 nt, Human
ucucacuauguugccaggcuggu

SEQ ID NO: 1213033 - RNA, 18 nt, Human
ucucuauacugcacauug

SEQ ID NO: 1213034 - RNA, 24 nt, Human
ucugccucagccucccaaagugcu

SEQ ID NO: 1213035 - RNA, 29 nt, Human
ucugugguguugguuccaacaacaguggu

SEQ ID NO: 1213036 - RNA, 18 nt, Human
ugaaaucaacagggucca

SEQ ID NO: 1213037 - RNA, 22 nt, Human
ugaaaugagcagaagcuaaagg

SEQ ID NO: 1213038 - RNA, 18 nt, Human
ugaagucugguuauuaga

SEQ ID NO: 1213039 - RNA, 22 nt, Human
ugaagucugguuauuagacaug

SEQ ID NO: 1213040 - RNA, 21 nt, Human
ugaauagacuggcagucaaaa

SEQ ID NO: 1213041 - RNA, 20 nt, Human
ugaaugaacgugagaacaga

SEQ ID NO: 1213042 - RNA, 21 nt, Human
ugacacaaaucuauacacuuc

SEQ ID NO: 1213043 - RNA, 23 nt, Human
ugacacauucauagcucacuaca

SEQ ID NO: 1213044 - RNA, 22 nt, Human
ugaccaaaaucacaaauaauau

SEQ ID NO: 1213045 - RNA, 18 nt, Human
ugaccaaagauuccccaa

SEQ ID NO: 1213046 - RNA, 21 nt, Human
ugacucauaaugagccagugg

SEQ ID NO: 1213047 - RNA, 20 nt, Human
ugacucccugggcccaagcu

SEQ ID NO: 1213048 - RNA, 24 nt, Human
ugacucccugggcccaagcuggga

SEQ ID NO: 1213049 - RNA, 21 nt, Human
ugagaacacgagcauccucca

SEQ ID NO: 1213050 - RNA, 22 nt, Human
ugagaaguagguucauuugcug

SEQ ID NO: 1213051 - RNA, 24 nt, Human
ugagaggauaggaaauggaagggu

SEQ ID NO: 1213052 - RNA, 23 nt, Human
ugagcuaaacagaauugagcuaa

SEQ ID NO: 1213053 - RNA, 21 nt, Human
ugagggaagugagcaaaaagu

SEQ ID NO: 1213054 - RNA, 24 nt, Human
ugagggaagugagcaaaaaguuua

SEQ ID NO: 1213055 - RNA, 22 nt, Human
ugcauaaaugcagguauacaug

SEQ ID NO: 1213056 - RNA, 24 nt, Human
ugccucagccucccaaagugcugg

SEQ ID NO: 1213057 - RNA, 23 nt, Human
uggaaucucacuauguugccagg

SEQ ID NO: 1213058 - RNA, 24 nt, Human
uggccuccagugauccuucugccu

SEQ ID NO: 1213059 - RNA, 24 nt, Human
ugggacuacacgcaugcaucacca

SEQ ID NO: 1213060 - RNA, 18 nt, Human
ugggauuauagguguaag

SEQ ID NO: 1213061 - RNA, 19 nt, Human
ugggauuauagguguaagc

SEQ ID NO: 1213062 - RNA, 21 nt, Human
ugggauuauagguguaagcca

SEQ ID NO: 1213063 - RNA, 22 nt, Human
ugggauuauagguguaagccac

SEQ ID NO: 1213064 - RNA, 20 nt, Human
uggguaaaagguuauaaaag

SEQ ID NO: 1213065 - RNA, 24 nt, Human
ugguaaaaaacauucccaccuccc

SEQ ID NO: 1213066 - RNA, 19 nt, Human
ugguaaaauauaaaaaaug

SEQ ID NO: 1213067 - RNA, 20 nt, Human
uguaaguguguguauacaua

SEQ ID NO: 1213068 - RNA, 18 nt, Human
ugugcaugugucuucucc

SEQ ID NO: 1213069 - RNA, 19 nt, Human
uguguauacauaugugcau

SEQ ID NO: 1213070 - RNA, 21 nt, Human
uguguauacauaugugcaugu

SEQ ID NO: 1213071 - RNA, 19 nt, Human
uguguguauacauaugugc

SEQ ID NO: 1213072 - RNA, 24 nt, Human
uguguguauacauaugugcaugug

SEQ ID NO: 1213073 - RNA, 18 nt, Human
uuaaaaaaugaaugaugg

SEQ ID NO: 1213074 - RNA, 19 nt, Human
uuaauauucugaccaaaga

SEQ ID NO: 1213075 - RNA, 23 nt, Human
uuaauugcaaagugagaauuaac

SEQ ID NO: 1213076 - RNA, 20 nt, Human
uuagagcuuuaaagaauaac

SEQ ID NO: 1213077 - RNA, 20 nt, Human
uucagagggauugagggaag

SEQ ID NO: 1213078 - RNA, 20 nt, Human
uugaguauucacugacauuu

SEQ ID NO: 1213079 - RNA, 24 nt, Human
uugccaggcuggucucaaacuccu

SEQ ID NO: 1213080 - RNA, 20 nt, Human
uuguaaguguguguauacau

SEQ ID NO: 1213081 - RNA, 24 nt, Human
uuguagagauggaaucucacuaug

SEQ ID NO: 1213082 - RNA, 26 nt, Human
uuugacucccugggcccaagcuggga

SEQ ID NO: 1213083 - RNA, 24 nt, Human
uuuguagagauggaaucucacuau

SEQ ID NO: 1213084 - RNA, 19 nt, Human
uuuguuagguggauccaag

SEQ ID NO: 1213085 - RNA, 26 nt, Human
aaaaaaaaaaccaacaacaaaccaaa

SEQ ID NO: 1213086 - RNA, 22 nt, Human
aaaaaaaaaccaacaacaaacc

SEQ ID NO: 1213087 - RNA, 22 nt, Human
aaaaaaaccaacaacaaaccaa

SEQ ID NO: 1213088 - RNA, 22 nt, Human
aaaaaaagguuucucuucuccc

SEQ ID NO: 1213089 - RNA, 21 nt, Human
aaaacaaaacaaaaaaaccuu

SEQ ID NO: 1213090 - RNA, 24 nt, Human
aaaacuccgucucaaaacaaaaca

SEQ ID NO: 1213091 - RNA, 22 nt, Human
aaacagaucaacaguuagagac

SEQ ID NO: 1213092 - RNA, 24 nt, Human
aaaccaaaaaaaccgccccccaaa

SEQ ID NO: 1213093 - RNA, 21 nt, Human
aacaaaacaaaaaaaccuuaa

SEQ ID NO: 1213094 - RNA, 28 nt, Human
aacaacaaaccaaaaaaaccgcccccca

SEQ ID NO: 1213095 - RNA, 20 nt, Human
aacacagugagacccugucu

SEQ ID NO: 1213096 - RNA, 21 nt, Human
aacacagugagacccugucuc

SEQ ID NO: 1213097 - RNA, 20 nt, Human
aaccaaaaaaaccgcccccc

SEQ ID NO: 1213098 - RNA, 24 nt, Human
aaccaaaaaaaccgccccccaaaa

SEQ ID NO: 1213099 - RNA, 24 nt, Human
aaccaccucaaauaguuuuaugga

SEQ ID NO: 1213100 - RNA, 20 nt, Human
aacguagugaaacccugucu

SEQ ID NO: 1213101 - RNA, 21 nt, Human
aacguagugaaacccugucuc

SEQ ID NO: 1213102 - RNA, 20 nt, Human
aagagcgaaaacuccgucuc

SEQ ID NO: 1213103 - RNA, 19 nt, Human
aaguaccugggauuacagg

SEQ ID NO: 1213104 - RNA, 21 nt, Human
aaguauuaaggaaaaugaacc

SEQ ID NO: 1213105 - RNA, 24 nt, Human
aaucacuugaacccgggaggugga

SEQ ID NO: 1213106 - RNA, 24 nt, Human
aaucacuugagcccaggaguucaa

SEQ ID NO: 1213107 - RNA, 26 nt, Human
aaucacuugagcccaggaguucaaga

SEQ ID NO: 1213108 - RNA, 24 nt, Human
aaucuuuaucuuaagacuugagaa

SEQ ID NO: 1213109 - RNA, 21 nt, Human
acaggcacccaccaccacgcc

SEQ ID NO: 1213110 - RNA, 24 nt, Human
acccaggcuagaguacaauggcau

SEQ ID NO: 1213111 - RNA, 21 nt, Human
accuaggauaccuaauuauuc

SEQ ID NO: 1213112 - RNA, 24 nt, Human
accuuaaccaccucaaauaguuuu

SEQ ID NO: 1213113 - RNA, 23 nt, Human
acuaaaaguacaaaauuagccgg

SEQ ID NO: 1213114 - RNA, 18 nt, Human
acuggaauaaaagacaua

SEQ ID NO: 1213115 - RNA, 21 nt, Human
acuucuuuuuuuuuuuuuuuu

SEQ ID NO: 1213116 - RNA, 27 nt, Human
acuucuuuuuuuuuuuuuuuuuuuuuu

SEQ ID NO: 1213117 - RNA, 24 nt, Human
agaaucacuugagcccaggaguuc

SEQ ID NO: 1213118 - RNA, 24 nt, Human
agagauucuccugccucagccuuc

SEQ ID NO: 1213119 - RNA, 24 nt, Human
agcaaaacucuuucuucccgccaa

SEQ ID NO: 1213120 - RNA, 24 nt, Human
agcacuuugggaggcugagguggg

SEQ ID NO: 1213121 - RNA, 25 nt, Human
agcauugcacuccagccugggcaac

SEQ ID NO: 1213122 - RNA, 19 nt, Human
agcccaggaguucaagacc

SEQ ID NO: 1213123 - RNA, 22 nt, Human
agccggcguggugacgcaugcc

SEQ ID NO: 1213124 - RNA, 22 nt, Human
agccuggccaacguagugaaac

SEQ ID NO: 1213125 - RNA, 24 nt, Human
agccuggccaacguagugaaaccc

SEQ ID NO: 1213126 - RNA, 20 nt, Human
agcugggcaugguggugggc

SEQ ID NO: 1213127 - RNA, 23 nt, Human
aggaggcugaggcaggugaauca

SEQ ID NO: 1213128 - RNA, 18 nt, Human
aggaguucaagaccggcc

SEQ ID NO: 1213129 - RNA, 24 nt, Human
aggcagaagaaucgcuuaaacccg

SEQ ID NO: 1213130 - RNA, 18 nt, Human
aggcaggugaaucacuug

SEQ ID NO: 1213131 - RNA, 24 nt, Human
aggcaggugaaucacuugaacccg

SEQ ID NO: 1213132 - RNA, 24 nt, Human
aggcugaggcaggugaaucacuug

SEQ ID NO: 1213133 - RNA, 18 nt, Human
aggcugagguggguggau

SEQ ID NO: 1213134 - RNA, 19 nt, Human
aggguuuugccauguuggc

SEQ ID NO: 1213135 - RNA, 22 nt, Human
aggguuuugccauguuggccag

SEQ ID NO: 1213136 - RNA, 20 nt, Human
agguggagguugcagugagc

SEQ ID NO: 1213137 - RNA, 24 nt, Human
agguggagguugcagugagcggag

SEQ ID NO: 1213138 - RNA, 24 nt, Human
agguggagguugugguaagcugag

SEQ ID NO: 1213139 - RNA, 18 nt, Human
aggugggagaaucacuug

SEQ ID NO: 1213140 - RNA, 23 nt, Human
aggugggagaaucacuugagccc

SEQ ID NO: 1213141 - RNA, 22 nt, Human
agguggguggauugccugagau

SEQ ID NO: 1213142 - RNA, 24 nt, Human
aucacagcauugcacuccagccug

SEQ ID NO: 1213143 - RNA, 24 nt, Human
aucacgucauugcacuccagccug

SEQ ID NO: 1213144 - RNA, 21 nt, Human
augaacccaagaaccuuaacc

SEQ ID NO: 1213145 - RNA, 20 nt, Human
auuagcugggcauggugguc

SEQ ID NO: 1213146 - RNA, 24 nt, Human
auugcacuccagccugggcaacaa

SEQ ID NO: 1213147 - RNA, 24 nt, Human
auugcacuccagccugggcaacaa

SEQ ID NO: 1213148 - RNA, 18 nt, Human
auugccugagaucaggag

SEQ ID NO: 1213149 - RNA, 19 nt, Human
caaaaaaaccgccccccaa

SEQ ID NO: 1213150 - RNA, 20 nt, Human
caaaacaaaaaaaccuuaag

SEQ ID NO: 1213151 - RNA, 27 nt, Human
caaaacaaaaaaaccuuaagcugggug

SEQ ID NO: 1213152 - RNA, 20 nt, Human
caacaaaccaaaaaaaccgc

SEQ ID NO: 1213153 - RNA, 21 nt, Human
caacaaaccaaaaaaaccgcc

SEQ ID NO: 1213154 - RNA, 22 nt, Human
caacacagugagacccugucuc

SEQ ID NO: 1213155 - RNA, 24 nt, Human
caagaccagccuggccaacguagu

SEQ ID NO: 1213156 - RNA, 22 nt, Human
caagagauucuccugccucagc

SEQ ID NO: 1213157 - RNA, 21 nt, Human
caaggugggagaaucacuuga

SEQ ID NO: 1213158 - RNA, 21 nt, Human
caaucuacaauauucagcaaa

SEQ ID NO: 1213159 - RNA, 19 nt, Human
cacaccuguaaucccaaca

SEQ ID NO: 1213160 - RNA, 24 nt, Human
cacaccuguaaucccaacaauuua

SEQ ID NO: 1213161 - RNA, 18 nt, Human
cacccaccaccacgccug

SEQ ID NO: 1213162 - RNA, 23 nt, Human
caccuguaaucccagcuacuagg

SEQ ID NO: 1213163 - RNA, 24 nt, Human
caccuguaaucccagcuacuaggg

SEQ ID NO: 1213164 - RNA, 24 nt, Human
cacgccugucaucccagcacuuug

SEQ ID NO: 1213165 - RNA, 24 nt, Human
cacuccagccugggcaacaagagc

SEQ ID NO: 1213166 - RNA, 24 nt, Human
cacuccagccugggcaacaagagc

SEQ ID NO: 1213167 - RNA, 25 nt, Human
cacuccagccugggcaacaagagcg

SEQ ID NO: 1213168 - RNA, 23 nt, Human
cacugcaaccuucgccuucuggg

SEQ ID NO: 1213169 - RNA, 19 nt, Human
cagaagggaaaaaaacaga

SEQ ID NO: 1213170 - RNA, 24 nt, Human
cagcacuuugggaggcugaggugg

SEQ ID NO: 1213171 - RNA, 24 nt, Human
cagcauugcacuccagccugggca

SEQ ID NO: 1213172 - RNA, 24 nt, Human
cagcuacucaggaggcugaggcag

SEQ ID NO: 1213173 - RNA, 21 nt, Human
caggcacccaccaccacgccu

SEQ ID NO: 1213174 - RNA, 19 nt, Human
cauguuggccagacugacc

SEQ ID NO: 1213175 - RNA, 19 nt, Human
cauugcacuccagccuggg

SEQ ID NO: 1213176 - RNA, 19 nt, Human
cauugcacuccagccuggg

SEQ ID NO: 1213177 - RNA, 19 nt, Human
cauugcacuccagccuggg

SEQ ID NO: 1213178 - RNA, 20 nt, Human
cauugcacuccagccugggc

SEQ ID NO: 1213179 - RNA, 20 nt, Human
cauugcacuccagccugggc

SEQ ID NO: 1213180 - RNA, 21 nt, Human
cauugcacuccagccugggca

SEQ ID NO: 1213181 - RNA, 21 nt, Human
cauugcacuccagccugggca

SEQ ID NO: 1213182 - RNA, 22 nt, Human
cauugcacuccagccugggcaa

SEQ ID NO: 1213183 - RNA, 22 nt, Human
cauugcacuccagccugggcaa

SEQ ID NO: 1213184 - RNA, 23 nt, Human
cauugcacuccagccugggcaac

SEQ ID NO: 1213185 - RNA, 24 nt, Human
cauugcacuccagccugggcaaca

SEQ ID NO: 1213186 - RNA, 24 nt, Human
cauugcacuccagccugggcaaca

SEQ ID NO: 1213187 - RNA, 23 nt, Human
ccaaaaaaaaaaaaaaaaccaac

SEQ ID NO: 1213188 - RNA, 24 nt, Human
ccaaaaaaaccgccccccaaaaaa

SEQ ID NO: 1213189 - RNA, 25 nt, Human
ccaaaaaaaccgccccccaaaaaaa

SEQ ID NO: 1213190 - RNA, 18 nt, Human
ccaaguaccugggauuac

SEQ ID NO: 1213191 - RNA, 22 nt, Human
ccaaguaccugggauuacaggc

SEQ ID NO: 1213192 - RNA, 22 nt, Human
cccaaaaaaaagguuucucuuc

SEQ ID NO: 1213193 - RNA, 21 nt, Human
cccccaaaaaaaagguuucuc

SEQ ID NO: 1213194 - RNA, 22 nt, Human
cccgccaaaaaaaaaaaaaaaa

SEQ ID NO: 1213195 - RNA, 25 nt, Human
cccgccaaaaaaaaaaaaaaaacca

SEQ ID NO: 1213196 - RNA, 21 nt, Human
cccgcgagguggagguugcag

SEQ ID NO: 1213197 - RNA, 18 nt, Human
cccgggagguggagguug

SEQ ID NO: 1213198 - RNA, 25 nt, Human
ccgccaaaaaaaaaaaaaaaaccaa

SEQ ID NO: 1213199 - RNA, 21 nt, Human
ccgucucaaaacaaaacaaaa

SEQ ID NO: 1213200 - RNA, 22 nt, Human
ccuggccaacguagugaaaccc

SEQ ID NO: 1213201 - RNA, 24 nt, Human
ccuggccaacguagugaaacccug

SEQ ID NO: 1213202 - RNA, 22 nt, Human
ccuguaaucccagcuacuaggg

SEQ ID NO: 1213203 - RNA, 24 nt, Human
ccuucuggguucaagagauucucc

SEQ ID NO: 1213204 - RNA, 28 nt, Human
cgaaaacuccgucucaaaacaaaacaaa

SEQ ID NO: 1213205 - RNA, 19 nt, Human
cgagguggagguugcagug

SEQ ID NO: 1213206 - RNA, 24 nt, Human
cgccaaaaaaaaaaaaaaaaccaa

SEQ ID NO: 1213207 - RNA, 23 nt, Human
cgccugucaucccagcacuuugg

SEQ ID NO: 1213208 - RNA, 24 nt, Human
cgccugucaucccagcacuuuggg

SEQ ID NO: 1213209 - RNA, 24 nt, Human
cgcgagguggagguugcagugagc

SEQ ID NO: 1213210 - RNA, 23 nt, Human
cggcguggugacgcaugccugua

SEQ ID NO: 1213211 - RNA, 24 nt, Human
cgggagguggagguugugguaagc

SEQ ID NO: 1213212 - RNA, 24 nt, Human
cgucauugcacuccagccugggca

SEQ ID NO: 1213213 - RNA, 21 nt, Human
cucacaccuguaaucccaaca

SEQ ID NO: 1213214 - RNA, 21 nt, Human
cucacaccuguaaucccaaca

SEQ ID NO: 1213215 - RNA, 24 nt, Human
cucacgccugucaucccagcacuu

SEQ ID NO: 1213216 - RNA, 21 nt, Human
cucagaagggaaaaaaacaga

SEQ ID NO: 1213217 - RNA, 25 nt, Human
cucagaagggaaaaaaacagaucaa

SEQ ID NO: 1213218 - RNA, 23 nt, Human
cuccugccucagccuuccaagua

SEQ ID NO: 1213219 - RNA, 22 nt, Human
cucuaaccaaccuaacacucgc

SEQ ID NO: 1213220 - RNA, 21 nt, Human
cugaagcuuuaaauucuuuga

SEQ ID NO: 1213221 - RNA, 22 nt, Human
cugagaucaggaguucaagacc

SEQ ID NO: 1213222 - RNA, 22 nt, Human
cuuaaacccgcgagguggaggu

SEQ ID NO: 1213223 - RNA, 24 nt, Human
cuuccauaguugcaaagaacaaag

SEQ ID NO: 1213224 - RNA, 21 nt, Human
cuugaacccgggagguggagg

SEQ ID NO: 1213225 - RNA, 24 nt, Human
cuugcucuugucacccaggcuaga

SEQ ID NO: 1213226 - RNA, 19 nt, Human
gaaacccugucucaacuaa

SEQ ID NO: 1213227 - RNA, 19 nt, Human
gaacaaagaaaucaucuuc

SEQ ID NO: 1213228 - RNA, 18 nt, Human
gagguggguggauugccu

SEQ ID NO: 1213229 - RNA, 22 nt, Human
gauucuccugccucagccuucc

SEQ ID NO: 1213230 - RNA, 23 nt, Human
gauugccugagaucaggaguuca

SEQ ID NO: 1213231 - RNA, 25 nt, Human
gcaaaacucuuucuucccgccaaaa

SEQ ID NO: 1213232 - RNA, 21 nt, Human
gcauugcacuccagccugggc

SEQ ID NO: 1213233 - RNA, 24 nt, Human
gcauugcacuccagccugggcaac

SEQ ID NO: 1213234 - RNA, 24 nt, Human
gccaacguagugaaacccugucuc

SEQ ID NO: 1213235 - RNA, 22 nt, Human
gcccaggaguucaagaccggcc

SEQ ID NO: 1213236 - RNA, 21 nt, Human
gcucuugucacccaggcuaga

SEQ ID NO: 1213237 - RNA, 24 nt, Human
ggagaucacgucauugcacuccag

SEQ ID NO: 1213238 - RNA, 23 nt, Human
ggagguugcagugagcggagauc

SEQ ID NO: 1213239 - RNA, 24 nt, Human
ggagguugcagugagcggagauca

SEQ ID NO: 1213240 - RNA, 22 nt, Human
ggagguugugguaagcugagau

SEQ ID NO: 1213241 - RNA, 24 nt, Human
ggagguugugguaagcugagauca

SEQ ID NO: 1213242 - RNA, 20 nt, Human
ggagguugugguaagcuggc

SEQ ID NO: 1213243 - RNA, 19 nt, Human
ggcaccuguaaucccagcu

SEQ ID NO: 1213244 - RNA, 23 nt, Human
ggcaugguggugggcaccuguaa

SEQ ID NO: 1213245 - RNA, 23 nt, Human
ggcguggugacgcaugccuguaa

SEQ ID NO: 1213246 - RNA, 21 nt, Human
gggaaacaccaucucuacuaa

SEQ ID NO: 1213247 - RNA, 22 nt, Human
gggaggcugaggcagaagaauc

SEQ ID NO: 1213248 - RNA, 21 nt, Human
gggugcgguugcucacgccug

SEQ ID NO: 1213249 - RNA, 20 nt, Human
ggguucaagagauucuccug

SEQ ID NO: 1213250 - RNA, 21 nt, Human
ggguuuugccauguuggccag

SEQ ID NO: 1213251 - RNA, 24 nt, Human
gguggugggcaccuguaaucccag

SEQ ID NO: 1213252 - RNA, 19 nt, Human
gguucaagagauucuccug

SEQ ID NO: 1213253 - RNA, 24 nt, Human
guaggguuuugccauguuggccag

SEQ ID NO: 1213254 - RNA, 24 nt, Human
gucauugcacuccagccugggcaa

SEQ ID NO: 1213255 - RNA, 19 nt, Human
uaaaaauacaaauuagcug

SEQ ID NO: 1213256 - RNA, 24 nt, Human
uaaaauaguacuuuuacaaaauca

SEQ ID NO: 1213257 - RNA, 22 nt, Human
uaaccaccucaaauaguuuuau

SEQ ID NO: 1213258 - RNA, 19 nt, Human
uaagacuugagaacuggaa

SEQ ID NO: 1213259 - RNA, 26 nt, Human
uacaaauuagcugggcaugguggugg

SEQ ID NO: 1213260 - RNA, 23 nt, Human
uacuacauuuauuaaaauuccua

SEQ ID NO: 1213261 - RNA, 18 nt, Human
uacuagggaggcugaggc

SEQ ID NO: 1213262 - RNA, 19 nt, Human
uacuagggaggcugaggca

SEQ ID NO: 1213263 - RNA, 22 nt, Human
uagaguacaauggcaugaucuc

SEQ ID NO: 1213264 - RNA, 24 nt, Human
uagaguacaauggcaugaucucgg

SEQ ID NO: 1213265 - RNA, 19 nt, Human
uagcauuuuaaauguaaaa

SEQ ID NO: 1213266 - RNA, 23 nt, Human
uaggguuuugccauguuggccag

SEQ ID NO: 1213267 - RNA, 20 nt, Human
uaguaggguuuugccauguu

SEQ ID NO: 1213268 - RNA, 21 nt, Human
ucaaaacaaaacaaaaaaacc

SEQ ID NO: 1213269 - RNA, 20 nt, Human
ucacagcauugcacuccagc

SEQ ID NO: 1213270 - RNA, 22 nt, Human
ucacgccugucaucccagcacu

SEQ ID NO: 1213271 - RNA, 23 nt, Human
ucacgucauugcacuccagccug

SEQ ID NO: 1213272 - RNA, 18 nt, Human
ucacugcaaccuucgccu

SEQ ID NO: 1213273 - RNA, 24 nt, Human
ucacugcaaccuucgccuucuggg

SEQ ID NO: 1213274 - RNA, 24 nt, Human
ucacuugaacccgggagguggagg

SEQ ID NO: 1213275 - RNA, 23 nt, Human
ucacuugagcccaggaguucaag

SEQ ID NO: 1213276 - RNA, 24 nt, Human
ucagaagggaaaaaaacagaucaa

SEQ ID NO: 1213277 - RNA, 24 nt, Human
ucagcucuuaacugccagcucaca

SEQ ID NO: 1213278 - RNA, 18 nt, Human
ucauugcacuccagccug

SEQ ID NO: 1213279 - RNA, 21 nt, Human
ucauugcacuccagccugggc

SEQ ID NO: 1213280 - RNA, 24 nt, Human
ucauugcacuccagccugggcaac

SEQ ID NO: 1213281 - RNA, 24 nt, Human
uccaaguaccugggauuacaggca

SEQ ID NO: 1213282 - RNA, 24 nt, Human
uccauaguugcaaagaaccggggc

SEQ ID NO: 1213283 - RNA, 23 nt, Human
ucccgccaaaaaaaaaaaaaaaa

SEQ ID NO: 1213284 - RNA, 23 nt, Human
ucccgccaaaaaaaaaaaaaaaa

SEQ ID NO: 1213285 - RNA, 25 nt, Human
ucccgccaaaaaaaaaaaaaaaacc

SEQ ID NO: 1213286 - RNA, 23 nt, Human
ucggccaggugcacugucucaca

SEQ ID NO: 1213287 - RNA, 21 nt, Human
ucuacaauauucagcaaagua

SEQ ID NO: 1213288 - RNA, 20 nt, Human
ucucuacuaaaaguacaaaa

SEQ ID NO: 1213289 - RNA, 26 nt, Human
ucuucccgccaaaaaaaaaaaaaaaa

SEQ ID NO: 1213290 - RNA, 20 nt, Human
ucuugcucuugucacccagg

SEQ ID NO: 1213291 - RNA, 25 nt, Human
ucuugcucuugucacccaggcuaga

SEQ ID NO: 1213292 - RNA, 21 nt, Human
ucuuuaguaggguuuugccau

SEQ ID NO: 1213293 - RNA, 23 nt, Human
ucuuugagccauucagcucuuaa

SEQ ID NO: 1213294 - RNA, 18 nt, Human
ugaagcuuuaaauucuuu

SEQ ID NO: 1213295 - RNA, 18 nt, Human
ugaccaacguggggaaac

SEQ ID NO: 1213296 - RNA, 19 nt, Human
ugagaucacagcauugcac

SEQ ID NO: 1213297 - RNA, 24 nt, Human
ugagaucacagcauugcacuccag

SEQ ID NO: 1213298 - RNA, 21 nt, Human
ugagcccaggaguucaagacc

SEQ ID NO: 1213299 - RNA, 23 nt, Human
ugagcccaggaguucaagaccgg

SEQ ID NO: 1213300 - RNA, 24 nt, Human
ugaggcagaagaaucgcuuaaacc

SEQ ID NO: 1213301 - RNA, 21 nt, Human
ugaggcaggugaaucacuuga

SEQ ID NO: 1213302 - RNA, 24 nt, Human
ugaggcaggugaaucacuugaacc

SEQ ID NO: 1213303 - RNA, 25 nt, Human
ugaggcaggugaaucacuugaaccc

SEQ ID NO: 1213304 - RNA, 18 nt, Human
ugagguggguggauugcc

SEQ ID NO: 1213305 - RNA, 24 nt, Human
ugagguggguggauugccugagau

SEQ ID NO: 1213306 - RNA, 26 nt, Human
ugagguggguggauugccugagauca

SEQ ID NO: 1213307 - RNA, 19 nt, Human
ugcacuccagccugggcaa

SEQ ID NO: 1213308 - RNA, 19 nt, Human
ugcacuccagccugggcaa

SEQ ID NO: 1213309 - RNA, 22 nt, Human
ugcacuccagccugggcaacaa

SEQ ID NO: 1213310 - RNA, 22 nt, Human
ugcacuccagccugggcaacaa

SEQ ID NO: 1213311 - RNA, 24 nt, Human
ugcacugucucacaccuguaaucc

SEQ ID NO: 1213312 - RNA, 18 nt, Human
ugccauguuggccagacu

SEQ ID NO: 1213313 - RNA, 24 nt, Human
ugccucagccuuccaaguaccugg

SEQ ID NO: 1213314 - RNA, 24 nt, Human
ugccuguaauaccagcuacucagg

SEQ ID NO: 1213315 - RNA, 26 nt, Human
uggaauaaaagacauaaagcugggca

SEQ ID NO: 1213316 - RNA, 22 nt, Human
uggaauuagauaagaauaaucc

SEQ ID NO: 1213317 - RNA, 24 nt, Human
uggauugccugagaucaggaguuc

SEQ ID NO: 1213318 - RNA, 24 nt, Human
uggccaacguagugaaacccuguc

SEQ ID NO: 1213319 - RNA, 22 nt, Human
uggcuaauuuuuuuuuuuuuuu

SEQ ID NO: 1213320 - RNA, 20 nt, Human
ugggaggcugaggugggugg

SEQ ID NO: 1213321 - RNA, 22 nt, Human
ugggaggcugagguggguggau

SEQ ID NO: 1213322 - RNA, 24 nt, Human
ugggaggcugagguggguggauug

SEQ ID NO: 1213323 - RNA, 19 nt, Human
ugggauuacaggcacccac

SEQ ID NO: 1213324 - RNA, 21 nt, Human
ugggauuacaggcacccacca

SEQ ID NO: 1213325 - RNA, 24 nt, Human
ugggauuacaggcacccaccacca

SEQ ID NO: 1213326 - RNA, 24 nt, Human
uggguggauugccugagaucagga

SEQ ID NO: 1213327 - RNA, 22 nt, Human
uggugggcaccuguaaucccag

SEQ ID NO: 1213328 - RNA, 24 nt, Human
ugguggugggcaccuguaauccca

SEQ ID NO: 1213329 - RNA, 22 nt, Human
ugucacccaggcuagaguacaa

SEQ ID NO: 1213330 - RNA, 22 nt, Human
ugucucacaccuguaaucccaa

SEQ ID NO: 1213331 - RNA, 24 nt, Human
uuaaacccgcgagguggagguugc

SEQ ID NO: 1213332 - RNA, 18 nt, Human
uuagcugggcaugguggu

SEQ ID NO: 1213333 - RNA, 24 nt, Human
uuagcugggcaugguggugggcac

SEQ ID NO: 1213334 - RNA, 18 nt, Human
uucaagagauucuccugc

SEQ ID NO: 1213335 - RNA, 23 nt, Human
uucaagagauucuccugccucag

SEQ ID NO: 1213336 - RNA, 19 nt, Human
uucaagguuuuccuaauuu

SEQ ID NO: 1213337 - RNA, 20 nt, Human
uucacagcuuccauaguugc

SEQ ID NO: 1213338 - RNA, 24 nt, Human
uucccgccaaaaaaaaaaaaaaaa

SEQ ID NO: 1213339 - RNA, 24 nt, Human
uugaacccgggagguggagguugu

SEQ ID NO: 1213340 - RNA, 20 nt, Human
uugcagugagcggagaucac

SEQ ID NO: 1213341 - RNA, 21 nt, Human
uugcagugagcggagaucacg

SEQ ID NO: 1213342 - RNA, 23 nt, Human
uugccugagaucaggaguucaag

SEQ ID NO: 1213343 - RNA, 24 nt, Human
uugcucacgccugucaucccagca

SEQ ID NO: 1213344 - RNA, 22 nt, Human
uugugguaagcugagaucacag

SEQ ID NO: 1213345 - RNA, 24 nt, Human
uuuuuuuuuuuugagacggagucu

SEQ ID NO: 1213346 - RNA, 22 nt, Human
uuuuuuuuuuuuuugagacgga

SEQ ID NO: 1213347 - RNA, 18 nt, Human
uuuuuuuuuuuuuuuuug

SEQ ID NO: 1213348 - RNA, 19 nt, Human
aaagugcuaggauuacagg

SEQ ID NO: 1213349 - RNA, 24 nt, Human
aaagugcuaggauuacaggcguga

SEQ ID NO: 1213350 - RNA, 18 nt, Human
aagauauuuagcccgaag

SEQ ID NO: 1213351 - RNA, 21 nt, Human
aaggagcccaaucuaaagggc

SEQ ID NO: 1213352 - RNA, 22 nt, Human
aaggaguacauggaugcagaaa

SEQ ID NO: 1213353 - RNA, 19 nt, Human
aagggguuucaccauguug

SEQ ID NO: 1213354 - RNA, 24 nt, Human
aagggguuucaccauguuguccag

SEQ ID NO: 1213355 - RNA, 26 nt, Human
aagugcuaggauuacaggcgugagcc

SEQ ID NO: 1213356 - RNA, 22 nt, Human
aauugacagagaaaggaaaaga

SEQ ID NO: 1213357 - RNA, 23 nt, Human
acacacacuucuaaagcccacca

SEQ ID NO: 1213358 - RNA, 20 nt, Human
acacacuucuaaagcccacc

SEQ ID NO: 1213359 - RNA, 21 nt, Human
acacacuucuaaagcccacca

SEQ ID NO: 1213360 - RNA, 21 nt, Human
acaggcaucugccaccacgcc

SEQ ID NO: 1213361 - RNA, 18 nt, Human
accaagaggcugguuucc

SEQ ID NO: 1213362 - RNA, 23 nt, Human
acucgcuccagccaccugggcag

SEQ ID NO: 1213363 - RNA, 18 nt, Human
acucugucacccaggcug

SEQ ID NO: 1213364 - RNA, 25 nt, Human
acucugucacccaggcuggagcgca

SEQ ID NO: 1213365 - RNA, 20 nt, Human
agagaagggguuucaccaug

SEQ ID NO: 1213366 - RNA, 24 nt, Human
agcgcaguggcacgaucucggcuc

SEQ ID NO: 1213367 - RNA, 19 nt, Human
aggaaagcuggaagggaaa

SEQ ID NO: 1213368 - RNA, 19 nt, Human
aggcugaaagugguccagg

SEQ ID NO: 1213369 - RNA, 24 nt, Human
agggguuucaccauguuguccagg

SEQ ID NO: 1213370 - RNA, 24 nt, Human
aggugauccaccugccucggccuc

SEQ ID NO: 1213371 - RNA, 22 nt, Human
agucagccaggacgcccaaagc

SEQ ID NO: 1213372 - RNA, 24 nt, Human
agugauucuccugccucagccucc

SEQ ID NO: 1213373 - RNA, 19 nt, Human
aguugcugggacuacaggc

SEQ ID NO: 1213374 - RNA, 21 nt, Human
aucaucuugggcggcucugcu

SEQ ID NO: 1213375 - RNA, 18 nt, Human
auucuccugccucagccu

SEQ ID NO: 1213376 - RNA, 23 nt, Human
caaaccccuaagauauuuagccc

SEQ ID NO: 1213377 - RNA, 24 nt, Human
caaagugcuaggauuacaggcgug

SEQ ID NO: 1213378 - RNA, 20 nt, Human
caagcagaugacugacaaag

SEQ ID NO: 1213379 - RNA, 22 nt, Human
caagugauucuccugccucagc

SEQ ID NO: 1213380 - RNA, 19 nt, Human
cacagcaaccucagccccc

SEQ ID NO: 1213381 - RNA, 22 nt, Human
caccaccuccaaccaccauucc

SEQ ID NO: 1213382 - RNA, 24 nt, Human
caccacgcccagcuaauuuuugua

SEQ ID NO: 1213383 - RNA, 24 nt, Human
caccauguuguccaggcuggucuc

SEQ ID NO: 1213384 - RNA, 27 nt, Human
caccauguuguccaggcuggucucaaa

SEQ ID NO: 1213385 - RNA, 23 nt, Human
caccugccucggccucccaaagu

SEQ ID NO: 1213386 - RNA, 18 nt, Human
caccugggcagugcuggg

SEQ ID NO: 1213387 - RNA, 24 nt, Human
cacucugucacccaggcuggagcg

SEQ ID NO: 1213388 - RNA, 20 nt, Human
cagccaggacgcccaaagcu

SEQ ID NO: 1213389 - RNA, 20 nt, Human
cagccuccugaguugcuggg

SEQ ID NO: 1213390 - RNA, 24 nt, Human
cagcuccugucuaucaucuugggc

SEQ ID NO: 1213391 - RNA, 21 nt, Human
caggcaucugccaccacgccc

SEQ ID NO: 1213392 - RNA, 24 nt, Human
caggcgugagccaccgugccuggc

SEQ ID NO: 1213393 - RNA, 22 nt, Human
caggugauccaccugccucggc

SEQ ID NO: 1213394 - RNA, 21 nt, Human
caugagcgugcugcaccuccc

SEQ ID NO: 1213395 - RNA, 23 nt, Human
cauguuguccaggcuggucucaa

SEQ ID NO: 1213396 - RNA, 24 nt, Human
cauguuguccaggcuggucucaaa

SEQ ID NO: 1213397 - RNA, 20 nt, Human
ccaaaggcacacaucuuacu

SEQ ID NO: 1213398 - RNA, 22 nt, Human
ccaaagugcuaggauuacaggc

SEQ ID NO: 1213399 - RNA, 24 nt, Human
ccaaagugcuaggauuacaggcgu

SEQ ID NO: 1213400 - RNA, 23 nt, Human
ccaccaccuccaaccaccauucc

SEQ ID NO: 1213401 - RNA, 24 nt, Human
ccaccaccuccaaccaccauuccc

SEQ ID NO: 1213402 - RNA, 20 nt, Human
ccaccacgcccagcuaauuu

SEQ ID NO: 1213403 - RNA, 20 nt, Human
ccagucagccaggacgccca

SEQ ID NO: 1213404 - RNA, 19 nt, Human
ccaugcuccucccgccaag

SEQ ID NO: 1213405 - RNA, 25 nt, Human
ccccaugagcgugcugcaccucccc

SEQ ID NO: 1213406 - RNA, 21 nt, Human
cccccggggcucaagugauuc

SEQ ID NO: 1213407 - RNA, 23 nt, Human
cccccggggcucaagugauucuc

SEQ ID NO: 1213408 - RNA, 24 nt, Human
cccccggggcucaagugauucucc

SEQ ID NO: 1213409 - RNA, 21 nt, Human
cccggggcucaagugauucuc

SEQ ID NO: 1213410 - RNA, 24 nt, Human
cccggggcucaagugauucuccug

SEQ ID NO: 1213411 - RNA, 21 nt, Human
cccucuggaggguggagagca

SEQ ID NO: 1213412 - RNA, 19 nt, Human
cccucuggccuucagcucc

SEQ ID NO: 1213413 - RNA, 21 nt, Human
ccgccaagacuccaggcgugg

SEQ ID NO: 1213414 - RNA, 20 nt, Human
ccggggcucaagugauucuc

SEQ ID NO: 1213415 - RNA, 22 nt, Human
ccuaagauauuuagcccgaagc

SEQ ID NO: 1213416 - RNA, 22 nt, Human
ccucagagauacauuuaucucu

SEQ ID NO: 1213417 - RNA, 24 nt, Human
ccuccaaccaccauucccuauguc

SEQ ID NO: 1213418 - RNA, 19 nt, Human
ccucuggaggguggagagc

SEQ ID NO: 1213419 - RNA, 18 nt, Human
ccucuggaguccucugcu

SEQ ID NO: 1213420 - RNA, 21 nt, Human
ccugaccucaggugauccacc

SEQ ID NO: 1213421 - RNA, 23 nt, Human
ccugaccucaggugauccaccug

SEQ ID NO: 1213422 - RNA, 23 nt, Human
ccugaccucaggugauccaccug

SEQ ID NO: 1213423 - RNA, 23 nt, Human
ccugaguugcugggacuacaggc

SEQ ID NO: 1213424 - RNA, 24 nt, Human
ccugaguugcugggacuacaggca

SEQ ID NO: 1213425 - RNA, 19 nt, Human
ccuguguccaugcuccucc

SEQ ID NO: 1213426 - RNA, 19 nt, Human
cgccaagacuccaggcgug

SEQ ID NO: 1213427 - RNA, 20 nt, Human
cucaagugauucuccugccu

SEQ ID NO: 1213428 - RNA, 23 nt, Human
cucaagugauucuccugccucag

SEQ ID NO: 1213429 - RNA, 24 nt, Human
cucaagugauucuccugccucagc

SEQ ID NO: 1213430 - RNA, 23 nt, Human
cucacagcaaccucagcccccgg

SEQ ID NO: 1213431 - RNA, 24 nt, Human
cucacucugucacccaggcuggag

SEQ ID NO: 1213432 - RNA, 18 nt, Human
cucacuuucccgccuccc

SEQ ID NO: 1213433 - RNA, 21 nt, Human
cuccacuguccccaggcucac

SEQ ID NO: 1213434 - RNA, 18 nt, Human
cuccugaguugcugggac

SEQ ID NO: 1213435 - RNA, 23 nt, Human
cuccugccucagccuccugaguu

SEQ ID NO: 1213436 - RNA, 22 nt, Human
cucggcucacagcaaccucagc

SEQ ID NO: 1213437 - RNA, 23 nt, Human
cucuggggcucccucccuggucc

SEQ ID NO: 1213438 - RNA, 24 nt, Human
cugaguugcugggacuacaggcau

SEQ ID NO: 1213439 - RNA, 18 nt, Human
cugccacacguguuaguc

SEQ ID NO: 1213440 - RNA, 19 nt, Human
cugccucagccuccugagu

SEQ ID NO: 1213441 - RNA, 23 nt, Human
cugccucggccucccaaagugcu

SEQ ID NO: 1213442 - RNA, 29 nt, Human
cugcugcucccugagccucuggugaccac

SEQ ID NO: 1213443 - RNA, 22 nt, Human
cuguguccaugcuccucccgcc

SEQ ID NO: 1213444 - RNA, 20 nt, Human
cuucuaaagcccaccaaacc

SEQ ID NO: 1213445 - RNA, 21 nt, Human
cuuuccgcaguccccucugga

SEQ ID NO: 1213446 - RNA, 22 nt, Human
cuuuccgcaguccccucuggag

SEQ ID NO: 1213447 - RNA, 19 nt, Human
gaagggguuucaccauguu

SEQ ID NO: 1213448 - RNA, 22 nt, Human
gaagggguuucaccauguuguc

SEQ ID NO: 1213449 - RNA, 18 nt, Human
gacagagaaaggaaaaga

SEQ ID NO: 1213450 - RNA, 24 nt, Human
gaccucaggugauccaccugccuc

SEQ ID NO: 1213451 - RNA, 23 nt, Human
gacugacaaaggagcccaaucua

SEQ ID NO: 1213452 - RNA, 22 nt, Human
gagggagccaccuugcccuucc

SEQ ID NO: 1213453 - RNA, 21 nt, Human
gaucucggcucacagcaaccu

SEQ ID NO: 1213454 - RNA, 18 nt, Human
gauuacaggcgugagcca

SEQ ID NO: 1213455 - RNA, 21 nt, Human
gauuacaggcgugagccaccg

SEQ ID NO: 1213456 - RNA, 24 nt, Human
gauuacaggcgugagccaccgugc

SEQ ID NO: 1213457 - RNA, 19 nt, Human
gcagugaugaugagucucc

SEQ ID NO: 1213458 - RNA, 21 nt, Human
gccacacguguuagucaaagu

SEQ ID NO: 1213459 - RNA, 21 nt, Human
gccaccaccuccaaccaccau

SEQ ID NO: 1213460 - RNA, 22 nt, Human
gcccagcuaauuuuuguauuuu

SEQ ID NO: 1213461 - RNA, 23 nt, Human
gcgcaguggcacgaucucggcuc

SEQ ID NO: 1213462 - RNA, 19 nt, Human
gcuccagccaccugggcag

SEQ ID NO: 1213463 - RNA, 20 nt, Human
gcuccugucuaucaucuugg

SEQ ID NO: 1213464 - RNA, 21 nt, Human
gcugcaccuccccugggccug

SEQ ID NO: 1213465 - RNA, 19 nt, Human
gcuggagcgcaguggcacg

SEQ ID NO: 1213466 - RNA, 23 nt, Human
gcuggucucaaacuccugaccuc

SEQ ID NO: 1213467 - RNA, 22 nt, Human
ggaaagaauggggaggccguuc

SEQ ID NO: 1213468 - RNA, 19 nt, Human
ggagagcagugaugaugag

SEQ ID NO: 1213469 - RNA, 22 nt, Human
ggauuacaggcgugagccaccg

SEQ ID NO: 1213470 - RNA, 24 nt, Human
ggcuggucucaaacuccugaccuc

SEQ ID NO: 1213471 - RNA, 23 nt, Human
gggcucaagugauucuccugccu

SEQ ID NO: 1213472 - RNA, 23 nt, Human
ggggcucaagugauucuccugcc

SEQ ID NO: 1213473 - RNA, 22 nt, Human
gggguuucaccauguuguccag

SEQ ID NO: 1213474 - RNA, 23 nt, Human
gggguuucaccauguuguccagg

SEQ ID NO: 1213475 - RNA, 22 nt, Human
ggguuucaccauguuguccagg

SEQ ID NO: 1213476 - RNA, 24 nt, Human
gugauccaccugccucggccuccc

SEQ ID NO: 1213477 - RNA, 24 nt, Human
gugauucuccugccucagccuccu

SEQ ID NO: 1213478 - RNA, 19 nt, Human
gugcugccaggagcuguuc

SEQ ID NO: 1213479 - RNA, 23 nt, Human
guuucaccauguuguccaggcug

SEQ ID NO: 1213480 - RNA, 24 nt, Human
guuucaccauguuguccaggcugg

SEQ ID NO: 1213481 - RNA, 18 nt, Human
uaaagcccaccaaacccc

SEQ ID NO: 1213482 - RNA, 21 nt, Human
uaaagcccaccaaaccccuaa

SEQ ID NO: 1213483 - RNA, 22 nt, Human
uaaagcccaccaaaccccuaag

SEQ ID NO: 1213484 - RNA, 24 nt, Human
uaauuuuuguauuuuuaguagaga

SEQ ID NO: 1213485 - RNA, 24 nt, Human
uacaggcaucugccaccacgccca

SEQ ID NO: 1213486 - RNA, 22 nt, Human
uacaggcgugagccaccgugcc

SEQ ID NO: 1213487 - RNA, 22 nt, Human
uacaggcgugagccaccgugcc

SEQ ID NO: 1213488 - RNA, 23 nt, Human
uacaggcgugagccaccgugccu

SEQ ID NO: 1213489 - RNA, 18 nt, Human
uagaagaccaucauuugc

SEQ ID NO: 1213490 - RNA, 22 nt, Human
uagagaagggguuucaccaugu

SEQ ID NO: 1213491 - RNA, 18 nt, Human
uaggauuacaggcgugag

SEQ ID NO: 1213492 - RNA, 21 nt, Human
uaggauuacaggcgugagcca

SEQ ID NO: 1213493 - RNA, 22 nt, Human
uaggauuacaggcgugagccac

SEQ ID NO: 1213494 - RNA, 23 nt, Human
uaggauuacaggcgugagccacc

SEQ ID NO: 1213495 - RNA, 23 nt, Human
uaggauuacaggcgugagccacc

SEQ ID NO: 1213496 - RNA, 24 nt, Human
uaggauuacaggcgugagccaccg

SEQ ID NO: 1213497 - RNA, 24 nt, Human
uaguagagaagggguuucaccaug

SEQ ID NO: 1213498 - RNA, 25 nt, Human
ucaacaggccgauggcuggcugcgc

SEQ ID NO: 1213499 - RNA, 23 nt, Human
ucacagcaaccucagcccccggg

SEQ ID NO: 1213500 - RNA, 21 nt, Human
ucaccauguuguccaggcugg

SEQ ID NO: 1213501 - RNA, 21 nt, Human
ucaccccaucuccauacccgg

SEQ ID NO: 1213502 - RNA, 22 nt, Human
ucagaggcuccacuguccccag

SEQ ID NO: 1213503 - RNA, 21 nt, Human
ucaggugauccaccugccucg

SEQ ID NO: 1213504 - RNA, 19 nt, Human
ucagugacugccagugccu

SEQ ID NO: 1213505 - RNA, 19 nt, Human
uccauacccggagggagcc

SEQ ID NO: 1213506 - RNA, 22 nt, Human
uccaucuuccucuuucuccuuu

SEQ ID NO: 1213507 - RNA, 24 nt, Human
ucccaaagugcuaggauuacaggc

SEQ ID NO: 1213508 - RNA, 21 nt, Human
uccucugcucagaggcuccac

SEQ ID NO: 1213509 - RNA, 24 nt, Human
uccugaguugcugggacuacaggc

SEQ ID NO: 1213510 - RNA, 21 nt, Human
ucgcuccagccaccugggcag

SEQ ID NO: 1213511 - RNA, 18 nt, Human
ucggccucccaaagugcu

SEQ ID NO: 1213512 - RNA, 20 nt, Human
ucuaaagcccaccaaacccc

SEQ ID NO: 1213513 - RNA, 18 nt, Human
ucuaaagggcugcugaag

SEQ ID NO: 1213514 - RNA, 21 nt, Human
ucuaucaucuugggcggcucu

SEQ ID NO: 1213515 - RNA, 23 nt, Human
ucucacucugucacccaggcugg

SEQ ID NO: 1213516 - RNA, 24 nt, Human
ucucacucugucacccaggcugga

SEQ ID NO: 1213517 - RNA, 26 nt, Human
ucucacucugucacccaggcuggagc

SEQ ID NO: 1213518 - RNA, 27 nt, Human
ucucacucugucacccaggcuggagcg

SEQ ID NO: 1213519 - RNA, 24 nt, Human
ucuccugccucagccuccugaguu

SEQ ID NO: 1213520 - RNA, 18 nt, Human
ucucuggcugccaccacc

SEQ ID NO: 1213521 - RNA, 19 nt, Human
ucucuggcugccaccaccu

SEQ ID NO: 1213522 - RNA, 24 nt, Human
ucucuggcugccaccaccuccaac

SEQ ID NO: 1213523 - RNA, 19 nt, Human
ucuggcugccaccaccucc

SEQ ID NO: 1213524 - RNA, 18 nt, Human
ucugucacccaggcugga

SEQ ID NO: 1213525 - RNA, 24 nt, Human
ucugucacccaggcuggagcgcag

SEQ ID NO: 1213526 - RNA, 24 nt, Human
ucuuccucuuucuccuuuauuccu

SEQ ID NO: 1213527 - RNA, 18 nt, Human
ugaaacagagucucacuc

SEQ ID NO: 1213528 - RNA, 22 nt, Human
ugaaacagagucucacucuguc

SEQ ID NO: 1213529 - RNA, 24 nt, Human
ugaccucaggugauccaccugccu

SEQ ID NO: 1213530 - RNA, 21 nt, Human
ugacucgcuccagccaccugg

SEQ ID NO: 1213531 - RNA, 18 nt, Human
ugagccucuggaguccuc

SEQ ID NO: 1213532 - RNA, 26 nt, Human
ugaguugcugggacuacaggcaucug

SEQ ID NO: 1213533 - RNA, 18 nt, Human
ugcagaaaagugaggccu

SEQ ID NO: 1213534 - RNA, 21 nt, Human
ugccagugccuugucaacagg

SEQ ID NO: 1213535 - RNA, 23 nt, Human
ugccucagagauacauuuaucuc

SEQ ID NO: 1213536 - RNA, 24 nt, Human
ugccucagccuccugaguugcugg

SEQ ID NO: 1213537 - RNA, 21 nt, Human
ugccucggccucccaaagugc

SEQ ID NO: 1213538 - RNA, 22 nt, Human
ugccucggccucccaaagugcu

SEQ ID NO: 1213539 - RNA, 24 nt, Human
ugccucggccucccaaagugcuag

SEQ ID NO: 1213540 - RNA, 24 nt, Human
ugcuaggauuacaggcgugagcca

SEQ ID NO: 1213541 - RNA, 18 nt, Human
ugcugggacuacaggcau

SEQ ID NO: 1213542 - RNA, 24 nt, Human
uggagcgcaguggcacgaucucgg

SEQ ID NO: 1213543 - RNA, 26 nt, Human
uggaggguggagagcagugacaacgg

SEQ ID NO: 1213544 - RNA, 18 nt, Human
ugggacuacaggcaucug

SEQ ID NO: 1213545 - RNA, 19 nt, Human
ugggacuacaggcaucugc

SEQ ID NO: 1213546 - RNA, 21 nt, Human
ugggacuacaggcaucugcca

SEQ ID NO: 1213547 - RNA, 24 nt, Human
ugggacuacaggcaucugccacca

SEQ ID NO: 1213548 - RNA, 18 nt, Human
uggggaggccguuccgug

SEQ ID NO: 1213549 - RNA, 21 nt, Human
uggggcucccucccugguccu

SEQ ID NO: 1213550 - RNA, 24 nt, Human
uguccaggcuggucucaaacuccu

SEQ ID NO: 1213551 - RNA, 19 nt, Human
ugucuuuuccuucagcaua

SEQ ID NO: 1213552 - RNA, 21 nt, Human
uguucuguauucucacuaaga

SEQ ID NO: 1213553 - RNA, 18 nt, Human
uuaguagagaagggguuu

SEQ ID NO: 1213554 - RNA, 22 nt, Human
uuaguagagaagggguuucacc

SEQ ID NO: 1213555 - RNA, 24 nt, Human
uuaguagagaagggguuucaccau

SEQ ID NO: 1213556 - RNA, 18 nt, Human
uugcaggcugugguggug

SEQ ID NO: 1213557 - RNA, 24 nt, Human
uuucaccauguuguccaggcuggu

SEQ ID NO: 1213558 - RNA, 24 nt, Human
uuuuuaguagagaagggguuucac

SEQ ID NO: 1213559 - RNA, 20 nt, Human
uuuuuguauuuuuaguagag

SEQ ID NO: 1213560 - RNA, 19 nt, Human
aagaggccaggacaccggc

SEQ ID NO: 1213561 - RNA, 27 nt, Human
aaguuuguuuucgucccuuuuuuuuuu

SEQ ID NO: 1213562 - RNA, 19 nt, Human
accagcgcgggcuucuugg

SEQ ID NO: 1213563 - RNA, 20 nt, Human
accguagcccacgggcacca

SEQ ID NO: 1213564 - RNA, 23 nt, Human
aggaagaggccaggacaccggcg

SEQ ID NO: 1213565 - RNA, 20 nt, Human
cacacaggccuccagguggg

SEQ ID NO: 1213566 - RNA, 20 nt, Human
cacaggccuccaggugggcc

SEQ ID NO: 1213567 - RNA, 19 nt, Human
cacucugcauacacucuuc

SEQ ID NO: 1213568 - RNA, 23 nt, Human
cagccgcuccucauugguaaugc

SEQ ID NO: 1213569 - RNA, 20 nt, Human
cagcgcgggcuucuuggccu

SEQ ID NO: 1213570 - RNA, 21 nt, Human
caggccuccaggugggccgug

SEQ ID NO: 1213571 - RNA, 26 nt, Human
ccagcgcgggcuucuuggccuucuuc

SEQ ID NO: 1213572 - RNA, 20 nt, Human
cccacagcaucgccccggcg

SEQ ID NO: 1213573 - RNA, 22 nt, Human
cccacagcaucgccccggcgcc

SEQ ID NO: 1213574 - RNA, 19 nt, Human
cccacgggcaccagcuugg

SEQ ID NO: 1213575 - RNA, 19 nt, Human
ccccaccuuguccuccacc

SEQ ID NO: 1213576 - RNA, 23 nt, Human
ccccccgcaccagcccguccggc

SEQ ID NO: 1213577 - RNA, 23 nt, Human
ccggcgccgccgccguaguugcc

SEQ ID NO: 1213578 - RNA, 21 nt, Human
ccuccagcaagucugucccca

SEQ ID NO: 1213579 - RNA, 27 nt, Human
ccuggaaauauggauggucucuucuuc

SEQ ID NO: 1213580 - RNA, 18 nt, Human
ccuuuuuuuuuuuuuuuu

SEQ ID NO: 1213581 - RNA, 18 nt, Human
cgccccggcgccgccgcc

SEQ ID NO: 1213582 - RNA, 22 nt, Human
cgcgggcacacacacacacuca

SEQ ID NO: 1213583 - RNA, 20 nt, Human
cgucccuuuuuuuuuuuuuu

SEQ ID NO: 1213584 - RNA, 21 nt, Human
cucaugcacgcgggcacacac

SEQ ID NO: 1213585 - RNA, 24 nt, Human
cuccaccacacgcugaaucugcag

SEQ ID NO: 1213586 - RNA, 18 nt, Human
cugaggaagaggccagga

SEQ ID NO: 1213587 - RNA, 24 nt, Human
cuggaaauauggauggucucuucu

SEQ ID NO: 1213588 - RNA, 21 nt, Human
gaaaggguguguuuccguccu

SEQ ID NO: 1213589 - RNA, 20 nt, Human
gagacccacagcaucgcccc

SEQ ID NO: 1213590 - RNA, 22 nt, Human
gcacgcgggcacacacacacac

SEQ ID NO: 1213591 - RNA, 19 nt, Human
gccuccaggugggccgugu

SEQ ID NO: 1213592 - RNA, 19 nt, Human
gcgccgccgccguaguugc

SEQ ID NO: 1213593 - RNA, 24 nt, Human
gcuuggaggccccccgcaccagcc

SEQ ID NO: 1213594 - RNA, 18 nt, Human
gggcaccagcuuggaggc

SEQ ID NO: 1213595 - RNA, 20 nt, Human
gggcaccagcuuggaggccc

SEQ ID NO: 1213596 - RNA, 19 nt, Human
ggucucuucuucgggugcc

SEQ ID NO: 1213597 - RNA, 19 nt, Human
gguguguuuccguccugga

SEQ ID NO: 1213598 - RNA, 18 nt, Human
gucccuuuuuuuuuuuuu

SEQ ID NO: 1213599 - RNA, 27 nt, Human
guuuguuuucgucccuuuuuuuuuuuu

SEQ ID NO: 1213600 - RNA, 23 nt, Human
ucagguggcaggcuacuccuucu

SEQ ID NO: 1213601 - RNA, 20 nt, Human
uccgcguacugcugcagccg

SEQ ID NO: 1213602 - RNA, 18 nt, Human
ucugcagcuuccagauac

SEQ ID NO: 1213603 - RNA, 23 nt, Human
ucuucguucuguuaugugucugg

SEQ ID NO: 1213604 - RNA, 23 nt, Human
ugaagcgcacacaggccuccagg

SEQ ID NO: 1213605 - RNA, 20 nt, Human
ugaguaguucagguggcagg

SEQ ID NO: 1213606 - RNA, 27 nt, Human
uuggaggccccccgcaccagcccgucc

SEQ ID NO: 1213607 - RNA, 26 nt, Human
uuugaagucuuccucuaaugucauuu

SEQ ID NO: 1213608 - RNA, 20 nt, Human
uuuucugacgccagccaagg

SEQ ID NO: 1213609 - RNA, 25 nt, Human
uuuuuugccggucucaguuuuuaau

SEQ ID NO: 1213610 - RNA, 19 nt, Human
uuuuuuuuuuuuuugccgg

SEQ ID NO: 1213611 - RNA, 24 nt, Human
uuuuuuuuuuuuuugccggucuca

SEQ ID NO: 1213612 - RNA, 22 nt, Human
uuuuuuuuuuuuuuuucagcuu

SEQ ID NO: 1213613 - RNA, 22 nt, Human
uuuuuuuuuuuuuuuuugccgg

SEQ ID NO: 1213614 - RNA, 23 nt, Human
uuuuuuuuuuuuuuuuugccggu

SEQ ID NO: 1213615 - RNA, 22 nt, Human
aagagaucaacaaugauuacaa

SEQ ID NO: 1213616 - RNA, 19 nt, Human
aucaacaaugauuacaaaa

SEQ ID NO: 1213617 - RNA, 19 nt, Human
cagugcaagagaucaacaa

SEQ ID NO: 1213618 - RNA, 20 nt, Human
cccggccaagaaaccucccc

SEQ ID NO: 1213619 - RNA, 24 nt, Human
cggccaagaaaccucccccgcugg

SEQ ID NO: 1213620 - RNA, 21 nt, Human
ggacagcgagguggcagguua

SEQ ID NO: 1213621 - RNA, 19 nt, Human
ggggacagcgagguggcag

SEQ ID NO: 1213622 - RNA, 21 nt, Human
guuugaggacacucaggggac

SEQ ID NO: 1213623 - RNA, 22 nt, Human
ucaggggacagcgagguggcag

SEQ ID NO: 1213624 - RNA, 26 nt, Human
ugcaagagaucaacaaugauuacaaa

SEQ ID NO: 1213625 - RNA, 20 nt, Human
ugguuugaggacacucaggg

SEQ ID NO: 1213626 - RNA, 22 nt, Human
uucccacccuucgugguuugag

SEQ ID NO: 1213627 - RNA, 21 nt, Human
uugaggacacucaggggacag

SEQ ID NO: 1213628 - RNA, 23 nt, Human
uuucccggccaagaaaccucccc

SEQ ID NO: 1213629 - RNA, 28 nt, Human
acccgcugucgcugcagugggggagccc

SEQ ID NO: 1213630 - RNA, 23 nt, Human
agugugcgcgcggcgcgugcgug

SEQ ID NO: 1213631 - RNA, 20 nt, Human
augcaucuuuaauuuguaaa

SEQ ID NO: 1213632 - RNA, 22 nt, Human
auggaacgcgcggaguggcgcc

SEQ ID NO: 1213633 - RNA, 23 nt, Human
cacggcccgggcauccgccucuu

SEQ ID NO: 1213634 - RNA, 18 nt, Human
cagagcugggcgcuccuc

SEQ ID NO: 1213635 - RNA, 19 nt, Human
caguggcugcccgggaccg

SEQ ID NO: 1213636 - RNA, 23 nt, Human
ccgccgcggcuacgcgccgcugc

SEQ ID NO: 1213637 - RNA, 25 nt, Human
ccgccgcggcuacgcgccgcugcuc

SEQ ID NO: 1213638 - RNA, 26 nt, Human
ccgccgcggcuacgcgccgcugcucu

SEQ ID NO: 1213639 - RNA, 18 nt, Human
ccgcugccgcgccuggcg

SEQ ID NO: 1213640 - RNA, 19 nt, Human
ccgcugccgcgccuggcgc

SEQ ID NO: 1213641 - RNA, 24 nt, Human
ccuucagucgccacucggauuacc

SEQ ID NO: 1213642 - RNA, 22 nt, Human
cgcggcgcgugcguggcguccc

SEQ ID NO: 1213643 - RNA, 20 nt, Human
cggcgcgugcguggcguccc

SEQ ID NO: 1213644 - RNA, 18 nt, Human
cugagccacggcccgggc

SEQ ID NO: 1213645 - RNA, 21 nt, Human
cuucuugcugagccacggccc

SEQ ID NO: 1213646 - RNA, 19 nt, Human
gcaguggcugcccgggacc

SEQ ID NO: 1213647 - RNA, 22 nt, Human
gcgcgucggccgccccgcugcc

SEQ ID NO: 1213648 - RNA, 25 nt, Human
ggcgcuccuccacgaggagucgccc

SEQ ID NO: 1213649 - RNA, 21 nt, Human
uaauuuguaaagaaauaaaau

SEQ ID NO: 1213650 - RNA, 21 nt, Human
uacggcacagacuuccgcgcg

SEQ ID NO: 1213651 - RNA, 26 nt, Human
ucaaucuuaccuccaccuucagucgc

SEQ ID NO: 1213652 - RNA, 24 nt, Human
uccaccuucagucgccacucggau

SEQ ID NO: 1213653 - RNA, 23 nt, Human
ucuucaaucuuaccuccaccuuc

SEQ ID NO: 1213654 - RNA, 19 nt, Human
ugagggacucgcggacgcg

SEQ ID NO: 1213655 - RNA, 18 nt, Human
uggcgcaccagagcuggg

SEQ ID NO: 1213656 - RNA, 18 nt, Human
ugugcgcgcggcgcgugc

SEQ ID NO: 1213657 - RNA, 18 nt, Human
caccaccugugccucugc

SEQ ID NO: 1213658 - RNA, 18 nt, Human
caccaccugugccucugc

SEQ ID NO: 1213659 - RNA, 22 nt, Human
ccucgccugcccaccucacagc

SEQ ID NO: 1213660 - RNA, 19 nt, Human
cuacugucugccaccaccu

SEQ ID NO: 1213661 - RNA, 24 nt, Human
cucacagcuuuggccacgcacucc

SEQ ID NO: 1213662 - RNA, 25 nt, Human
gccucuacugucugccaccaccugu

SEQ ID NO: 1213663 - RNA, 22 nt, Human
ucccgcuccucgccugcccacc

SEQ ID NO: 1213664 - RNA, 18 nt, Human
uccuaggccgaggcuaug

SEQ ID NO: 1213665 - RNA, 19 nt, Human
ugccaccaccugugccucu

SEQ ID NO: 1213666 - RNA, 18 nt, Human
uguccuaggccgaggcua

SEQ ID NO: 1213667 - RNA, 25 nt, Human
aaagcccccaggauccccacuggcc

SEQ ID NO: 1213668 - RNA, 24 nt, Human
aagacagaccugugggugcagaaa

SEQ ID NO: 1213669 - RNA, 23 nt, Human
acacacauccuggaaaacucaca

SEQ ID NO: 1213670 - RNA, 20 nt, Human
accaggaagagaauuccuca

SEQ ID NO: 1213671 - RNA, 25 nt, Human
acucugagacccacucaugagcaag

SEQ ID NO: 1213672 - RNA, 24 nt, Human
agaaaacccuggcccaggugaccc

SEQ ID NO: 1213673 - RNA, 24 nt, Human
agcuagcccaucacagcuagcccc

SEQ ID NO: 1213674 - RNA, 18 nt, Human
agcugcauucugcucucu

SEQ ID NO: 1213675 - RNA, 20 nt, Human
agcugugugaccucaggcac

SEQ ID NO: 1213676 - RNA, 18 nt, Human
aggggccuuucaaagcag

SEQ ID NO: 1213677 - RNA, 22 nt, Human
agggugcagggagaggcagcug

SEQ ID NO: 1213678 - RNA, 20 nt, Human
caaagcaacucaaaacuacc

SEQ ID NO: 1213679 - RNA, 21 nt, Human
caaggcucagggaggccgagg

SEQ ID NO: 1213680 - RNA, 18 nt, Human
cacaaggcucagggaggc

SEQ ID NO: 1213681 - RNA, 18 nt, Human
cacgccagccagcccagg

SEQ ID NO: 1213682 - RNA, 19 nt, Human
cagacaacucacgccagcc

SEQ ID NO: 1213683 - RNA, 22 nt, Human
cagacacagugcccagcaccua

SEQ ID NO: 1213684 - RNA, 19 nt, Human
cagcccagggcaggggcaa

SEQ ID NO: 1213685 - RNA, 22 nt, Human
cagcugaacuucaaagcaacuc

SEQ ID NO: 1213686 - RNA, 18 nt, Human
cagcugagacuugcccgc

SEQ ID NO: 1213687 - RNA, 23 nt, Human
caugagcaagacagaccuguggg

SEQ ID NO: 1213688 - RNA, 22 nt, Human
cauucugcucucuuucugggga

SEQ ID NO: 1213689 - RNA, 18 nt, Human
cauuugaaauggagggga

SEQ ID NO: 1213690 - RNA, 20 nt, Human
ccacucagggcucacccucu

SEQ ID NO: 1213691 - RNA, 19 nt, Human
ccacugugggagaggaggc

SEQ ID NO: 1213692 - RNA, 24 nt, Human
ccagacacagugcccagcaccuau

SEQ ID NO: 1213693 - RNA, 21 nt, Human
cccaaaaaccacuggccuucc

SEQ ID NO: 1213694 - RNA, 22 nt, Human
cccacucaugagcaagacagac

SEQ ID NO: 1213695 - RNA, 24 nt, Human
ccccaaaaaccacuggccuucccu

SEQ ID NO: 1213696 - RNA, 21 nt, Human
ccccacuggcccucaggccug

SEQ ID NO: 1213697 - RNA, 21 nt, Human
ccccagaaagcccccaggacc

SEQ ID NO: 1213698 - RNA, 21 nt, Human
ccccaggauccccacuggccc

SEQ ID NO: 1213699 - RNA, 21 nt, Human
cccccaccuuucucugccgua

SEQ ID NO: 1213700 - RNA, 21 nt, Human
cccccuagaaaucccagucau

SEQ ID NO: 1213701 - RNA, 24 nt, Human
ccccugaagucugccuucagggag

SEQ ID NO: 1213702 - RNA, 24 nt, Human
cccugcaugaacccggccuccucc

SEQ ID NO: 1213703 - RNA, 21 nt, Human
cccugggcaaggccgagcccu

SEQ ID NO: 1213704 - RNA, 24 nt, Human
cccuuguuucccccuagaaauccc

SEQ ID NO: 1213705 - RNA, 21 nt, Human
ccucaggccugccaaggaccc

SEQ ID NO: 1213706 - RNA, 23 nt, Human
ccucaugcugcuggcagcucucc

SEQ ID NO: 1213707 - RNA, 27 nt, Human
ccuggcccaggugaccccaaaaaccac

SEQ ID NO: 1213708 - RNA, 24 nt, Human
ccuggcccccaccuuucucugccg

SEQ ID NO: 1213709 - RNA, 24 nt, Human
cgagcccugggguggagcaauuac

SEQ ID NO: 1213710 - RNA, 23 nt, Human
cgcagcuagcccaucacagcuag

SEQ ID NO: 1213711 - RNA, 19 nt, Human
cuagaccccugauggguug

SEQ ID NO: 1213712 - RNA, 20 nt, Human
cucccaggcucucugcugcg

SEQ ID NO: 1213713 - RNA, 21 nt, Human
cugaggauggaagccuggggc

SEQ ID NO: 1213714 - RNA, 18 nt, Human
cuggcccccaccuuucuc

SEQ ID NO: 1213715 - RNA, 18 nt, Human
cuggcccucaggccugcc

SEQ ID NO: 1213716 - RNA, 30 nt, Human
cuugcccgcuucuagaucugaccaggaccc

SEQ ID NO: 1213717 - RNA, 23 nt, Human
gaaaacagucgaagggggauggc

SEQ ID NO: 1213718 - RNA, 19 nt, Human
gaaagcccccaggaucccc

SEQ ID NO: 1213719 - RNA, 18 nt, Human
gaacuugaaaggggggca

SEQ ID NO: 1213720 - RNA, 22 nt, Human
gaccugugggugcagaaagggc

SEQ ID NO: 1213721 - RNA, 22 nt, Human
gagauggcucucccaggcucuc

SEQ ID NO: 1213722 - RNA, 20 nt, Human
gaggaggccuuucacagucu

SEQ ID NO: 1213723 - RNA, 18 nt, Human
gaggauggaagccugggg

SEQ ID NO: 1213724 - RNA, 18 nt, Human
gagggaacuugaaagggg

SEQ ID NO: 1213725 - RNA, 19 nt, Human
gauggcucaugaccugggg

SEQ ID NO: 1213726 - RNA, 19 nt, Human
gcacuaugguuaaaagcac

SEQ ID NO: 1213727 - RNA, 21 nt, Human
ggcccccaccuuucucugccg

SEQ ID NO: 1213728 - RNA, 22 nt, Human
gggccagggugcagggagaggc

SEQ ID NO: 1213729 - RNA, 22 nt, Human
gggugcagggagaggcagcugg

SEQ ID NO: 1213730 - RNA, 24 nt, Human
gguugagcugcagaaaacccuggc

SEQ ID NO: 1213731 - RNA, 24 nt, Human
gugaccccaaaaaccacuggccuu

SEQ ID NO: 1213732 - RNA, 21 nt, Human
uaccaggaagagaauuccuca

SEQ ID NO: 1213733 - RNA, 19 nt, Human
uagccccugaagucugccu

SEQ ID NO: 1213734 - RNA, 25 nt, Human
uauauuuguaaacucugagacccac

SEQ ID NO: 1213735 - RNA, 19 nt, Human
ucaaagcaugcagagcuga

SEQ ID NO: 1213736 - RNA, 21 nt, Human
ucacaaggcucagggaggccc

SEQ ID NO: 1213737 - RNA, 22 nt, Human
ucucccaggcucucugcugcgg

SEQ ID NO: 1213738 - RNA, 23 nt, Human
ucuggggaucugagcugugugac

SEQ ID NO: 1213739 - RNA, 19 nt, Human
ugaaauggaggggaaggag

SEQ ID NO: 1213740 - RNA, 24 nt, Human
ugaagucaacaacagcugaacuuc

SEQ ID NO: 1213741 - RNA, 19 nt, Human
ugaccugggggagaugggc

SEQ ID NO: 1213742 - RNA, 20 nt, Human
ugacucagggcucaggggac

SEQ ID NO: 1213743 - RNA, 21 nt, Human
ugagacuugcccgcuucuaga

SEQ ID NO: 1213744 - RNA, 18 nt, Human
ugagagagccuuuuggca

SEQ ID NO: 1213745 - RNA, 23 nt, Human
ugagcugcagaaaacccuggccc

SEQ ID NO: 1213746 - RNA, 19 nt, Human
ugauggguugagcugcaga

SEQ ID NO: 1213747 - RNA, 22 nt, Human
ugcagggagaggcagcugggau

SEQ ID NO: 1213748 - RNA, 23 nt, Human
ugcauucugcucucuuucugggg

SEQ ID NO: 1213749 - RNA, 23 nt, Human
ugccaaggacccugcaugaaccc

SEQ ID NO: 1213750 - RNA, 22 nt, Human
uggaagccuggggcuggugcug

SEQ ID NO: 1213751 - RNA, 21 nt, Human
uggcccaggugaccccaaaaa

SEQ ID NO: 1213752 - RNA, 18 nt, Human
ugggcaaggccgagcccu

SEQ ID NO: 1213753 - RNA, 21 nt, Human
ugggccuccgacccugggcaa

SEQ ID NO: 1213754 - RNA, 24 nt, Human
ugugugaccucaggcacgcaugca

SEQ ID NO: 1213755 - RNA, 23 nt, Human
uucacagucucugugucccagac

SEQ ID NO: 1213756 - RNA, 24 nt, Human
uuccccacccugauucccuggccc

SEQ ID NO: 1213757 - RNA, 19 nt, Human
uuccucagggggcguuggg

SEQ ID NO: 1213758 - RNA, 20 nt, Human
uugguagauguaaaucauag

SEQ ID NO: 1213759 - RNA, 20 nt, Human
uuuguaaacucugagaccca

SEQ ID NO: 1213760 - RNA, 20 nt, Human
aagcacuuugugcaaagauc

SEQ ID NO: 1213761 - RNA, 18 nt, Human
aagcaggcaaccaucaaa

SEQ ID NO: 1213762 - RNA, 21 nt, Human
aaguuggagcaguaaagaaau

SEQ ID NO: 1213763 - RNA, 21 nt, Human
accgagcucaggagaccgggg

SEQ ID NO: 1213764 - RNA, 18 nt, Human
agagggcacagcauugca

SEQ ID NO: 1213765 - RNA, 18 nt, Human
agcacugcagacaugcag

SEQ ID NO: 1213766 - RNA, 19 nt, Human
aggaagcugaggugccagg

SEQ ID NO: 1213767 - RNA, 20 nt, Human
aggagguucccuuccaggag

SEQ ID NO: 1213768 - RNA, 21 nt, Human
aggccccugcccggcaccccu

SEQ ID NO: 1213769 - RNA, 22 nt, Human
agggcuucaggaagggauuggg

SEQ ID NO: 1213770 - RNA, 26 nt, Human
agguucccuuccaggaggccccugcc

SEQ ID NO: 1213771 - RNA, 24 nt, Human
agucagcaggaauccugccucucu

SEQ ID NO: 1213772 - RNA, 19 nt, Human
augcagccuggagaagugg

SEQ ID NO: 1213773 - RNA, 21 nt, Human
augcagccuggagaaguggga

SEQ ID NO: 1213774 - RNA, 19 nt, Human
caagcagagucggucagac

SEQ ID NO: 1213775 - RNA, 26 nt, Human
caagcugaagugacauuuacuccccg

SEQ ID NO: 1213776 - RNA, 20 nt, Human
cacagcauugcaagcagggc

SEQ ID NO: 1213777 - RNA, 23 nt, Human
caccuuaccgagcucaggagacc

SEQ ID NO: 1213778 - RNA, 19 nt, Human
cagcauugcaagcagggca

SEQ ID NO: 1213779 - RNA, 20 nt, Human
caggaggcagacgaguggug

SEQ ID NO: 1213780 - RNA, 25 nt, Human
caggagguucccuuccaggaggccc

SEQ ID NO: 1213781 - RNA, 25 nt, Human
caggcaaccaucaaagcacuuugug

SEQ ID NO: 1213782 - RNA, 19 nt, Human
caggggcugccccaaguuc

SEQ ID NO: 1213783 - RNA, 21 nt, Human
ccccccaacucuggguuccug

SEQ ID NO: 1213784 - RNA, 20 nt, Human
cccccccaacucuggguucc

SEQ ID NO: 1213785 - RNA, 19 nt, Human
cccugcccggcaccccucc

SEQ ID NO: 1213786 - RNA, 19 nt, Human
ccugcccggcaccccucca

SEQ ID NO: 1213787 - RNA, 21 nt, Human
gaggugccaggugucccccug

SEQ ID NO: 1213788 - RNA, 21 nt, Human
gauggcuauuucaacagaaga

SEQ ID NO: 1213789 - RNA, 20 nt, Human
gcaaccaucaaagcacuuug

SEQ ID NO: 1213790 - RNA, 18 nt, Human
ggaggcagacgaguggug

SEQ ID NO: 1213791 - RNA, 20 nt, Human
ggcaagcagagucggucaga

SEQ ID NO: 1213792 - RNA, 21 nt, Human
ggcaccccuccaugcagccuu

SEQ ID NO: 1213793 - RNA, 23 nt, Human
ggcugcaggagguucccuuccag

SEQ ID NO: 1213794 - RNA, 25 nt, Human
ggggggaugggggggcuugccagag

SEQ ID NO: 1213795 - RNA, 19 nt, Human
ggggggcuugccagagggc

SEQ ID NO: 1213796 - RNA, 23 nt, Human
ggugcuugaggcugcaggagguu

SEQ ID NO: 1213797 - RNA, 19 nt, Human
uaugauagaagcagcugga

SEQ ID NO: 1213798 - RNA, 18 nt, Human
ucaggaagggauugggag

SEQ ID NO: 1213799 - RNA, 22 nt, Human
ucccccuggagucagcaggaau

SEQ ID NO: 1213800 - RNA, 18 nt, Human
ucuggguuccugguaugg

SEQ ID NO: 1213801 - RNA, 19 nt, Human
ugacccaguucuaagacag

SEQ ID NO: 1213802 - RNA, 18 nt, Human
ugacucaagcaggcaacc

SEQ ID NO: 1213803 - RNA, 24 nt, Human
ugauagaagcagcuggagcaccuu

SEQ ID NO: 1213804 - RNA, 19 nt, Human
ugccccaaguucgccacac

SEQ ID NO: 1213805 - RNA, 22 nt, Human
uggagcaguaaagaaauguuac

SEQ ID NO: 1213806 - RNA, 19 nt, Human
ugggagugacucaagcagg

SEQ ID NO: 1213807 - RNA, 19 nt, Human
ugggggggcuugccagagg

SEQ ID NO: 1213808 - RNA, 25 nt, Human
uggguuccugguaugggguaaguuu

SEQ ID NO: 1213809 - RNA, 24 nt, Human
uggucaaagaacaagacuuccagg

SEQ ID NO: 1213810 - RNA, 23 nt, Human
uuacacagcacugcagacaugca

SEQ ID NO: 1213811 - RNA, 18 nt, Human
uucaggaagggauuggga

SEQ ID NO: 1213812 - RNA, 21 nt, Human
uugcaagcagggcaaugaccc

SEQ ID NO: 1213813 - RNA, 22 nt, Human
uugcaagcagggcaaugaccca

SEQ ID NO: 1213814 - RNA, 22 nt, Human
cagagcccaguguccacaccgu

SEQ ID NO: 1213815 - RNA, 22 nt, Human
cugauauuggagggcucucccu

SEQ ID NO: 1213816 - RNA, 24 nt, Human
gacauguuauaaaugaugugguuu

SEQ ID NO: 1213817 - RNA, 24 nt, Human
gcacagccacuucugaccccuugg

SEQ ID NO: 1213818 - RNA, 21 nt, Human
ggcagcugcuguugugccgac

SEQ ID NO: 1213819 - RNA, 23 nt, Human
guggcacagccacuucugccugc

SEQ ID NO: 1213820 - RNA, 19 nt, Human
uaaaugaugugguuuuuau

SEQ ID NO: 1213821 - RNA, 20 nt, Human
uccacaccguggcacagcca

SEQ ID NO: 1213822 - RNA, 19 nt, Human
ugagaugccuguuccauga

SEQ ID NO: 1213823 - RNA, 21 nt, Human
ugauauuggagggcucucccu

SEQ ID NO: 1213824 - RNA, 21 nt, Human
ugcuguugugccgacuugaga

SEQ ID NO: 1213825 - RNA, 21 nt, Human
uggagggcucucccuaugggu

SEQ ID NO: 1213826 - RNA, 19 nt, Human
uggcacagccacuucugcc

SEQ ID NO: 1213827 - RNA, 22 nt, Human
uggcuggggcagcugcuguugu

SEQ ID NO: 1213828 - RNA, 24 nt, Human
ugugcagccaggugacaauccuga

SEQ ID NO: 1213829 - RNA, 25 nt, Human
uuggagggcucucccuauggguuga

SEQ ID NO: 1213830 - RNA, 20 nt, Human
aaccagaggacccucauuaa

SEQ ID NO: 1213831 - RNA, 18 nt, Human
agggucccagccuacccc

SEQ ID NO: 1213832 - RNA, 24 nt, Human
caacccuggccagacuccaauaac

SEQ ID NO: 1213833 - RNA, 19 nt, Human
cauccccaaauuucaagcc

SEQ ID NO: 1213834 - RNA, 25 nt, Human
ccaaauuucaagccagacugaaauc

SEQ ID NO: 1213835 - RNA, 21 nt, Human
cgguccgggcaguccgagggc

SEQ ID NO: 1213836 - RNA, 22 nt, Human
cucagcucaagucaacccuggc

SEQ ID NO: 1213837 - RNA, 25 nt, Human
cuccaauaacagacacaagguaccc

SEQ ID NO: 1213838 - RNA, 19 nt, Human
cugucagaagaaaugaggg

SEQ ID NO: 1213839 - RNA, 18 nt, Human
gacacggguggaacagag

SEQ ID NO: 1213840 - RNA, 21 nt, Human
guggcccugguuaccaaaaac

SEQ ID NO: 1213841 - RNA, 19 nt, Human
uaacagacacaagaacuga

SEQ ID NO: 1213842 - RNA, 21 nt, Human
uaccaaaaaccagaggacccu

SEQ ID NO: 1213843 - RNA, 23 nt, Human
uaccaaaaaccagaggacccuca

SEQ ID NO: 1213844 - RNA, 21 nt, Human
uccccaaauuucaagccagac

SEQ ID NO: 1213845 - RNA, 20 nt, Human
ucugaguagccgggaggucu

SEQ ID NO: 1213846 - RNA, 21 nt, Human
ucugucagaagaaaugagggu

SEQ ID NO: 1213847 - RNA, 21 nt, Human
uggaacagaguaggcugggcc

SEQ ID NO: 1213848 - RNA, 18 nt, Human
ugucagaagaaaugaggg

SEQ ID NO: 1213849 - RNA, 21 nt, Human
ugucagaagaaaugagggucc

SEQ ID NO: 1213850 - RNA, 22 nt, Human
ugucagaagaaaugaggguccc

SEQ ID NO: 1213851 - RNA, 23 nt, Human
aacccaggcuggcucagaaaccu

SEQ ID NO: 1213852 - RNA, 19 nt, Human
aagaaccugagcaagggca

SEQ ID NO: 1213853 - RNA, 20 nt, Human
agagcgguucugggucuggg

SEQ ID NO: 1213854 - RNA, 18 nt, Human
agccugagcccagugcug

SEQ ID NO: 1213855 - RNA, 20 nt, Human
agggaaggggagagcgguuc

SEQ ID NO: 1213856 - RNA, 23 nt, Human
agggaaggggagagcgguucugg

SEQ ID NO: 1213857 - RNA, 23 nt, Human
caaaacauaauccauauaaaagc

SEQ ID NO: 1213858 - RNA, 22 nt, Human
caagaaccugagcaagggcaag

SEQ ID NO: 1213859 - RNA, 22 nt, Human
caagggcaaggggccguggagg

SEQ ID NO: 1213860 - RNA, 22 nt, Human
caaucucugcagccacccaggu

SEQ ID NO: 1213861 - RNA, 18 nt, Human
cacagagccucugucuug

SEQ ID NO: 1213862 - RNA, 18 nt, Human
caccuccugguccagcuc

SEQ ID NO: 1213863 - RNA, 24 nt, Human
cacgcaaaccuccaagacucuugu

SEQ ID NO: 1213864 - RNA, 19 nt, Human
cagaaacacgcaaaccucc

SEQ ID NO: 1213865 - RNA, 21 nt, Human
cagaaacacgcaaaccuccaa

SEQ ID NO: 1213866 - RNA, 19 nt, Human
cagaaauuggugccaggac

SEQ ID NO: 1213867 - RNA, 21 nt, Human
cagcaaguucaccugcagcuu

SEQ ID NO: 1213868 - RNA, 19 nt, Human
cagcuccccaggguucggg

SEQ ID NO: 1213869 - RNA, 22 nt, Human
caggcuggcucagaaaccugcu

SEQ ID NO: 1213870 - RNA, 24 nt, Human
caguuggccacucagaggucagcu

SEQ ID NO: 1213871 - RNA, 19 nt, Human
caugcauggcugcuggagg

SEQ ID NO: 1213872 - RNA, 25 nt, Human
cauuaaaaaugcagcgauuugucac

SEQ ID NO: 1213873 - RNA, 21 nt, Human
ccaccucccagcccgcccccc

SEQ ID NO: 1213874 - RNA, 19 nt, Human
ccaggacgggagggagcca

SEQ ID NO: 1213875 - RNA, 22 nt, Human
ccaugcggacagucgcgcugaa

SEQ ID NO: 1213876 - RNA, 22 nt, Human
cccaccucccagcccgcccccc

SEQ ID NO: 1213877 - RNA, 19 nt, Human
ccccugagccuccaccucc

SEQ ID NO: 1213878 - RNA, 26 nt, Human
cccguccuggcuccgucugcugggag

SEQ ID NO: 1213879 - RNA, 20 nt, Human
cccugggagcugcaguuggc

SEQ ID NO: 1213880 - RNA, 25 nt, Human
cccugggcccugggggagcaggccc

SEQ ID NO: 1213881 - RNA, 19 nt, Human
cccuggggcaugagauggg

SEQ ID NO: 1213882 - RNA, 22 nt, Human
ccuccaccuccugguccagcuc

SEQ ID NO: 1213883 - RNA, 21 nt, Human
ccugggcccugggggagcagg

SEQ ID NO: 1213884 - RNA, 22 nt, Human
ccuguccccaugggguccccug

SEQ ID NO: 1213885 - RNA, 24 nt, Human
ccuuugcccgggcaugaccaccuc

SEQ ID NO: 1213886 - RNA, 20 nt, Human
cgccacagagccucugucuu

SEQ ID NO: 1213887 - RNA, 24 nt, Human
cgccacagagccucugucuuggag

SEQ ID NO: 1213888 - RNA, 27 nt, Human
cggcucccaccucccagcccgcccccc

SEQ ID NO: 1213889 - RNA, 20 nt, Human
cgggagggagccaugcggac

SEQ ID NO: 1213890 - RNA, 18 nt, Human
cggggucaguccugaccg

SEQ ID NO: 1213891 - RNA, 20 nt, Human
cgugaguguguggcgagcug

SEQ ID NO: 1213892 - RNA, 21 nt, Human
cugagccuccaccuccugguc

SEQ ID NO: 1213893 - RNA, 24 nt, Human
cuggggcaugagaugggugggggc

SEQ ID NO: 1213894 - RNA, 18 nt, Human
gacugcgcgggacuccca

SEQ ID NO: 1213895 - RNA, 21 nt, Human
gccaaggggcuccacaccagc

SEQ ID NO: 1213896 - RNA, 19 nt, Human
gccacagagccucugucuu

SEQ ID NO: 1213897 - RNA, 19 nt, Human
gcgcagacaggcacaaaag

SEQ ID NO: 1213898 - RNA, 21 nt, Human
gcgugaguguguggcgagcug

SEQ ID NO: 1213899 - RNA, 27 nt, Human
gcucccaccucccagcccgccccccac

SEQ ID NO: 1213900 - RNA, 21 nt, Human
gcuguucuaagcuggggggcc

SEQ ID NO: 1213901 - RNA, 21 nt, Human
ggcagggaaggggagagcggu

SEQ ID NO: 1213902 - RNA, 19 nt, Human
ggccacucagaggucagcu

SEQ ID NO: 1213903 - RNA, 21 nt, Human
ggccaggacgccgacuuccuc

SEQ ID NO: 1213904 - RNA, 27 nt, Human
ggcggugggcaguggcggucccugggg

SEQ ID NO: 1213905 - RNA, 19 nt, Human
gggagccaugcggacaguc

SEQ ID NO: 1213906 - RNA, 22 nt, Human
gggaggaggggcacugggcagg

SEQ ID NO: 1213907 - RNA, 23 nt, Human
gggagggagccaugcggacaguc

SEQ ID NO: 1213908 - RNA, 21 nt, Human
gggcaccugggggucugggcu

SEQ ID NO: 1213909 - RNA, 20 nt, Human
gggcagggaaggggagagcg

SEQ ID NO: 1213910 - RNA, 23 nt, Human
ggggaggaggggcacugggcagg

SEQ ID NO: 1213911 - RNA, 20 nt, Human
ggggggugaacccaggcagg

SEQ ID NO: 1213912 - RNA, 21 nt, Human
ggguccccugagccuccaccu

SEQ ID NO: 1213913 - RNA, 23 nt, Human
ggucugggcuggggaggaggggc

SEQ ID NO: 1213914 - RNA, 23 nt, Human
ggucugggcuggggaggaggggc

SEQ ID NO: 1213915 - RNA, 25 nt, Human
guggcgagcuguggaggcagggcug

SEQ ID NO: 1213916 - RNA, 20 nt, Human
uaagcuggggggcccugggc

SEQ ID NO: 1213917 - RNA, 21 nt, Human
uacucugaaguuuguugaguu

SEQ ID NO: 1213918 - RNA, 23 nt, Human
uagaaaugccacuagcuggcugc

SEQ ID NO: 1213919 - RNA, 18 nt, Human
uaugugggaaaacacauc

SEQ ID NO: 1213920 - RNA, 22 nt, Human
uccaagaaccugagcaagggca

SEQ ID NO: 1213921 - RNA, 23 nt, Human
uccacaccagcugccuggggucc

SEQ ID NO: 1213922 - RNA, 21 nt, Human
ucccaccucccagcccgcccc

SEQ ID NO: 1213923 - RNA, 20 nt, Human
ucccagcccgccccccacag

SEQ ID NO: 1213924 - RNA, 19 nt, Human
ucccauggcccuggccaag

SEQ ID NO: 1213925 - RNA, 21 nt, Human
uccccaggguucgggggcgga

SEQ ID NO: 1213926 - RNA, 19 nt, Human
ucccugggagcugcaguug

SEQ ID NO: 1213927 - RNA, 24 nt, Human
ucguugcucagccaacccaggcug

SEQ ID NO: 1213928 - RNA, 21 nt, Human
ucuaagcuggggggcccuggg

SEQ ID NO: 1213929 - RNA, 18 nt, Human
ucucagggacccccgcca

SEQ ID NO: 1213930 - RNA, 23 nt, Human
ucucggagucccugggagcugca

SEQ ID NO: 1213931 - RNA, 19 nt, Human
ucugaaguuuguugaguug

SEQ ID NO: 1213932 - RNA, 21 nt, Human
ucugggcuggggaggaggggc

SEQ ID NO: 1213933 - RNA, 26 nt, Human
ugaacccaggcagggucucggaccgg

SEQ ID NO: 1213934 - RNA, 21 nt, Human
ugaagccugagcccagugcug

SEQ ID NO: 1213935 - RNA, 18 nt, Human
ugaccaccucaccaaggg

SEQ ID NO: 1213936 - RNA, 19 nt, Human
ugagaugggugggggcacu

SEQ ID NO: 1213937 - RNA, 20 nt, Human
ugagaugggugggggcacuc

SEQ ID NO: 1213938 - RNA, 21 nt, Human
ugagaugggugggggcacucu

SEQ ID NO: 1213939 - RNA, 23 nt, Human
ugagaugggugggggcacucuca

SEQ ID NO: 1213940 - RNA, 24 nt, Human
ugagaugggugggggcacucucag

SEQ ID NO: 1213941 - RNA, 19 nt, Human
ugagccuccaccuccuggu

SEQ ID NO: 1213942 - RNA, 18 nt, Human
ugaguguguggcgagcug

SEQ ID NO: 1213943 - RNA, 23 nt, Human
ugccaggacgggagggagccaug

SEQ ID NO: 1213944 - RNA, 25 nt, Human
ugcccggggcucuggucacccagcu

SEQ ID NO: 1213945 - RNA, 27 nt, Human
ugccugggguccaagaaccggggguuc

SEQ ID NO: 1213946 - RNA, 18 nt, Human
ugcgggcgcacaugcaug

SEQ ID NO: 1213947 - RNA, 27 nt, Human
ugcugccccggggucaguuggucaacc

SEQ ID NO: 1213948 - RNA, 19 nt, Human
ugcuggaggcggugggcag

SEQ ID NO: 1213949 - RNA, 21 nt, Human
uggcccuggccaaggggcucc

SEQ ID NO: 1213950 - RNA, 18 nt, Human
uggcgagcuguggaggca

SEQ ID NO: 1213951 - RNA, 20 nt, Human
ugggaagcugucuuucauuu

SEQ ID NO: 1213952 - RNA, 19 nt, Human
ugggcagggaaggggagag

SEQ ID NO: 1213953 - RNA, 20 nt, Human
ugggcuggggaggaggggca

SEQ ID NO: 1213954 - RNA, 22 nt, Human
uggggggcccugggcccugggg

SEQ ID NO: 1213955 - RNA, 19 nt, Human
uggugccaggacgggaggg

SEQ ID NO: 1213956 - RNA, 22 nt, Human
ugucuuggagcugcucugagug

SEQ ID NO: 1213957 - RNA, 18 nt, Human
uguggggggugaacccag

SEQ ID NO: 1213958 - RNA, 26 nt, Human
uucaccugcagcuuggagguguggcu

SEQ ID NO: 1213959 - RNA, 23 nt, Human
uuggcgguggaggcuguugcugu

SEQ ID NO: 1213960 - RNA, 21 nt, Human
uuguugaguuggcgguggagg

SEQ ID NO: 1213961 - RNA, 24 nt, Human
uuuguugaguuggcgguggaggcu

SEQ ID NO: 1213962 - RNA, 18 nt, Human
agacggaggcaggcagaa

SEQ ID NO: 1213963 - RNA, 20 nt, Human
agagacggaggcaggcagaa

SEQ ID NO: 1213964 - RNA, 23 nt, Human
aggcaggcagaacacggccuagg

SEQ ID NO: 1213965 - RNA, 20 nt, Human
ccccggggccgggucccccc

SEQ ID NO: 1213966 - RNA, 21 nt, Human
gaucugagggagaaagagacg

SEQ ID NO: 1213967 - RNA, 20 nt, Human
uggaggccugggccuaacag

SEQ ID NO: 1213968 - RNA, 24 nt, Human
acuaguaagauuuucaacacaagg

SEQ ID NO: 1213969 - RNA, 21 nt, Human
aguaagauuuucaacacaagg

SEQ ID NO: 1213970 - RNA, 23 nt, Human
auuaggaggagacagcaaaaugc

SEQ ID NO: 1213971 - RNA, 20 nt, Human
caaaaugccuaggcagauac

SEQ ID NO: 1213972 - RNA, 23 nt, Human
cagccccacaaguguuuacacca

SEQ ID NO: 1213973 - RNA, 18 nt, Human
ccccggagaaucuccaac

SEQ ID NO: 1213974 - RNA, 19 nt, Human
ugccuaggcagauacggaa

SEQ ID NO: 1213975 - RNA, 20 nt, Human
uucuuacgggcauuugggga

SEQ ID NO: 1213976 - RNA, 18 nt, Human
aaacagcuuccacugugu

SEQ ID NO: 1213977 - RNA, 21 nt, Human
aaacuuggagaugcaggaacu

SEQ ID NO: 1213978 - RNA, 22 nt, Human
aaaggaacuuaauugagcaaug

SEQ ID NO: 1213979 - RNA, 20 nt, Human
aagaaggcaucacagcccug

SEQ ID NO: 1213980 - RNA, 18 nt, Human
aaguagaaggugagcaag

SEQ ID NO: 1213981 - RNA, 24 nt, Human
agcgcacagccccagccacuccuc

SEQ ID NO: 1213982 - RNA, 22 nt, Human
agggaaugcaguggcgcccaga

SEQ ID NO: 1213983 - RNA, 25 nt, Human
caaccucccucuugugcucgucacc

SEQ ID NO: 1213984 - RNA, 22 nt, Human
caacgcugcucaccacacuaua

SEQ ID NO: 1213985 - RNA, 19 nt, Human
caauaaaggcaacgugaug

SEQ ID NO: 1213986 - RNA, 21 nt, Human
cacagccccagccacuccucc

SEQ ID NO: 1213987 - RNA, 19 nt, Human
caccccuuccuggcuccca

SEQ ID NO: 1213988 - RNA, 22 nt, Human
cacuccuccccacugcagccag

SEQ ID NO: 1213989 - RNA, 20 nt, Human
cacugcugccaucacagagc

SEQ ID NO: 1213990 - RNA, 21 nt, Human
cagagccccaaagaaggcauc

SEQ ID NO: 1213991 - RNA, 22 nt, Human
cagagccccaaagaagggggag

SEQ ID NO: 1213992 - RNA, 19 nt, Human
cagcugugccugggagggc

SEQ ID NO: 1213993 - RNA, 21 nt, Human
caggucccgaguucuuguccu

SEQ ID NO: 1213994 - RNA, 19 nt, Human
ccagaaacuuggagaugca

SEQ ID NO: 1213995 - RNA, 19 nt, Human
ccagccacuccuccccacu

SEQ ID NO: 1213996 - RNA, 22 nt, Human
ccccaccucaaccucccucuug

SEQ ID NO: 1213997 - RNA, 22 nt, Human
cccugcuaguuugcaggucccg

SEQ ID NO: 1213998 - RNA, 21 nt, Human
ccggaggcccuagcaguccug

SEQ ID NO: 1213999 - RNA, 19 nt, Human
ccuucucucuucucuucuu

SEQ ID NO: 1214000 - RNA, 19 nt, Human
ccuugcaggugccuuucuu

SEQ ID NO: 1214001 - RNA, 20 nt, Human
cgcccagaaacuuggagaug

SEQ ID NO: 1214002 - RNA, 18 nt, Human
cggaggcccuagcagucc

SEQ ID NO: 1214003 - RNA, 20 nt, Human
cucccaccccuuccuggcuc

SEQ ID NO: 1214004 - RNA, 26 nt, Human
cucccaccccuuccuggcucccacca

SEQ ID NO: 1214005 - RNA, 18 nt, Human
cuccugccugccaauuua

SEQ ID NO: 1214006 - RNA, 23 nt, Human
cucuugucuccuucucucuucuc

SEQ ID NO: 1214007 - RNA, 24 nt, Human
cugcaguggguaacuccuuucugc

SEQ ID NO: 1214008 - RNA, 20 nt, Human
cugcugccaucacagagcag

SEQ ID NO: 1214009 - RNA, 18 nt, Human
cugugccugggagggcag

SEQ ID NO: 1214010 - RNA, 22 nt, Human
cuuagccccaccucaaccuccc

SEQ ID NO: 1214011 - RNA, 20 nt, Human
cuuguccugaguccaggaag

SEQ ID NO: 1214012 - RNA, 19 nt, Human
gacaauaaaggcaacguga

SEQ ID NO: 1214013 - RNA, 23 nt, Human
gagcaguccuugcaggugccuuu

SEQ ID NO: 1214014 - RNA, 22 nt, Human
gagcuccuaggucugggcuccc

SEQ ID NO: 1214015 - RNA, 20 nt, Human
gcacagccccagccacuccu

SEQ ID NO: 1214016 - RNA, 20 nt, Human
gcacaggugccagcucccug

SEQ ID NO: 1214017 - RNA, 26 nt, Human
gcagagccccaaagaagggggaacgc

SEQ ID NO: 1214018 - RNA, 26 nt, Human
gcccuguuuauguuacaccucuuuca

SEQ ID NO: 1214019 - RNA, 23 nt, Human
gcucccugaagggccacagcucu

SEQ ID NO: 1214020 - RNA, 23 nt, Human
gcugcagcuggaccagaccgacu

SEQ ID NO: 1214021 - RNA, 20 nt, Human
gcugcagcugugccugggag

SEQ ID NO: 1214022 - RNA, 24 nt, Human
ggcagggcuccugccugccaauuu

SEQ ID NO: 1214023 - RNA, 19 nt, Human
ggcuggauggcugcagcug

SEQ ID NO: 1214024 - RNA, 20 nt, Human
gggagcuccuaggucugggc

SEQ ID NO: 1214025 - RNA, 21 nt, Human
ggggagcuccuaggucugggc

SEQ ID NO: 1214026 - RNA, 19 nt, Human
ggucugggcucccugaagg

SEQ ID NO: 1214027 - RNA, 19 nt, Human
gucuccuucucucuucucu

SEQ ID NO: 1214028 - RNA, 20 nt, Human
ucccugaagggccacagcuc

SEQ ID NO: 1214029 - RNA, 18 nt, Human
uccugaguccaggaagaa

SEQ ID NO: 1214030 - RNA, 18 nt, Human
uccuggcucccaccagcu

SEQ ID NO: 1214031 - RNA, 20 nt, Human
uccuggcucccaccagcuuc

SEQ ID NO: 1214032 - RNA, 18 nt, Human
uccuugcaggugccuuuc

SEQ ID NO: 1214033 - RNA, 22 nt, Human
uccuugcaggugccuuucuugu

SEQ ID NO: 1214034 - RNA, 18 nt, Human
ucuccguagcaacugcuc

SEQ ID NO: 1214035 - RNA, 18 nt, Human
ucuccuucucucuucucu

SEQ ID NO: 1214036 - RNA, 19 nt, Human
ucucucuucucuucuucuc

SEQ ID NO: 1214037 - RNA, 22 nt, Human
ucucucuucucuucuucuugcc

SEQ ID NO: 1214038 - RNA, 25 nt, Human
ucuuucagcccugcuaguuugcagg

SEQ ID NO: 1214039 - RNA, 19 nt, Human
ugaagugaggagugagguc

SEQ ID NO: 1214040 - RNA, 21 nt, Human
ugagcaaggugaagaggugcu

SEQ ID NO: 1214041 - RNA, 21 nt, Human
ugaguccaggaagaaugaggu

SEQ ID NO: 1214042 - RNA, 24 nt, Human
ugauucacgaaucaggcagccccc

SEQ ID NO: 1214043 - RNA, 26 nt, Human
ugcaggucccgaguucuuguccugag

SEQ ID NO: 1214044 - RNA, 19 nt, Human
ugccuuucuuguaccucag

SEQ ID NO: 1214045 - RNA, 20 nt, Human
uggagggggccgagguggca

SEQ ID NO: 1214046 - RNA, 25 nt, Human
uggagggggccgagguggcaggggg

SEQ ID NO: 1214047 - RNA, 18 nt, Human
uggcugcagcugugccug

SEQ ID NO: 1214048 - RNA, 24 nt, Human
uggcugcagcugugccugggaggg

SEQ ID NO: 1214049 - RNA, 21 nt, Human
uggcuuggggagcuccuaggu

SEQ ID NO: 1214050 - RNA, 22 nt, Human
ugugccugggagggcagggcuc

SEQ ID NO: 1214051 - RNA, 22 nt, Human
uuagaagcccuagcaacgcugc

SEQ ID NO: 1214052 - RNA, 24 nt, Human
uuauguuacaccucuuucagcccu

SEQ ID NO: 1214053 - RNA, 21 nt, Human
uucuggagggggccgaggugg

SEQ ID NO: 1214054 - RNA, 22 nt, Human
aaacaaaagcaaaacagagcuc

SEQ ID NO: 1214055 - RNA, 23 nt, Human
aaacaaaagcaaaacagagcucc

SEQ ID NO: 1214056 - RNA, 25 nt, Human
aaacgacuaaaacaaaagcaaaaca

SEQ ID NO: 1214057 - RNA, 19 nt, Human
aaacuugaaaaugugggcg

SEQ ID NO: 1214058 - RNA, 19 nt, Human
aaaguacugggauuacagg

SEQ ID NO: 1214059 - RNA, 24 nt, Human
aaaguacugggauuacaggcuuga

SEQ ID NO: 1214060 - RNA, 24 nt, Human
aaauuuuuguauuuuuaguagaga

SEQ ID NO: 1214061 - RNA, 22 nt, Human
aacagagcuccacugcccaaaa

SEQ ID NO: 1214062 - RNA, 20 nt, Human
aaccccgccuccucaacccg

SEQ ID NO: 1214063 - RNA, 22 nt, Human
aagcagacacauuugaaaagau

SEQ ID NO: 1214064 - RNA, 22 nt, Human
aagcagcggugcugcuggcugc

SEQ ID NO: 1214065 - RNA, 24 nt, Human
aagcagguagucuaagggucaacg

SEQ ID NO: 1214066 - RNA, 19 nt, Human
aagggacaaaaaggccuuc

SEQ ID NO: 1214067 - RNA, 19 nt, Human
aaguacugggauuacaggc

SEQ ID NO: 1214068 - RNA, 26 nt, Human
aaguacugggauuacaggcuugagcc

SEQ ID NO: 1214069 - RNA, 24 nt, Human
aagugauccacccgccgcggccuc

SEQ ID NO: 1214070 - RNA, 27 nt, Human
aagugauucuccugccuuagcuuccca

SEQ ID NO: 1214071 - RNA, 22 nt, Human
aauccucaacuggccccgcccc

SEQ ID NO: 1214072 - RNA, 27 nt, Human
aaugaaaaaaccaucuagaaaaaaucu

SEQ ID NO: 1214073 - RNA, 23 nt, Human
aauuuuuguauuuuuaguagaga

SEQ ID NO: 1214074 - RNA, 27 nt, Human
acaaagcaaugaaaaaaccaucuagaa

SEQ ID NO: 1214075 - RNA, 20 nt, Human
acaaagcaaugaaaaaaccc

SEQ ID NO: 1214076 - RNA, 21 nt, Human
acagagcuccacugcccaaaa

SEQ ID NO: 1214077 - RNA, 25 nt, Human
accaggcacccaaacucaucaaugc

SEQ ID NO: 1214078 - RNA, 22 nt, Human
acccaaacucaucaaugcucac

SEQ ID NO: 1214079 - RNA, 21 nt, Human
acguuggccaggcuggucucg

SEQ ID NO: 1214080 - RNA, 19 nt, Human
acugcgaggcgaaggugac

SEQ ID NO: 1214081 - RNA, 25 nt, Human
agagauccacacuccucacaagguc

SEQ ID NO: 1214082 - RNA, 19 nt, Human
agagcuccacugcccaaaa

SEQ ID NO: 1214083 - RNA, 26 nt, Human
agcaaugaaaaaaccaucuagaaaaa

SEQ ID NO: 1214084 - RNA, 27 nt, Human
agcggugcugcuggcugcgucagggcc

SEQ ID NO: 1214085 - RNA, 21 nt, Human
aggcaccaaucacgccuggca

SEQ ID NO: 1214086 - RNA, 20 nt, Human
aggccguacagccgcugcgc

SEQ ID NO: 1214087 - RNA, 25 nt, Human
aggcuggagugcaguugcgggaucu

SEQ ID NO: 1214088 - RNA, 23 nt, Human
aggugcugagucauccuugcggc

SEQ ID NO: 1214089 - RNA, 19 nt, Human
agguguuguggguugacag

SEQ ID NO: 1214090 - RNA, 24 nt, Human
aguacugggauuacaggcuugagc

SEQ ID NO: 1214091 - RNA, 21 nt, Human
auagcaacgacaucugagucu

SEQ ID NO: 1214092 - RNA, 24 nt, Human
auuuuuguauuuuuaguagagaca

SEQ ID NO: 1214093 - RNA, 21 nt, Human
caaaacagagcuccacugccc

SEQ ID NO: 1214094 - RNA, 24 nt, Human
caaaguacugggauuacaggcuug

SEQ ID NO: 1214095 - RNA, 24 nt, Human
caaauuuuuguauuuuuaguagag

SEQ ID NO: 1214096 - RNA, 26 nt, Human
caagcagguagucuaagggucaacgc

SEQ ID NO: 1214097 - RNA, 22 nt, Human
caagugauucuccugccuuagc

SEQ ID NO: 1214098 - RNA, 23 nt, Human
caccaaucacgccuggcaaauuu

SEQ ID NO: 1214099 - RNA, 23 nt, Human
cacccgccgcggccucccaaagu

SEQ ID NO: 1214100 - RNA, 24 nt, Human
cacguuggccaggcuggucucgaa

SEQ ID NO: 1214101 - RNA, 21 nt, Human
cacuccucacaaggucacuuc

SEQ ID NO: 1214102 - RNA, 20 nt, Human
cagagcuccacugcccaaaa

SEQ ID NO: 1214103 - RNA, 24 nt, Human
caggguuuccccacguuggccagg

SEQ ID NO: 1214104 - RNA, 21 nt, Human
caugagaccccagaaaccgga

SEQ ID NO: 1214105 - RNA, 20 nt, Human
ccaaacucaucaaugcucac

SEQ ID NO: 1214106 - RNA, 20 nt, Human
ccaaaguacugggauuacag

SEQ ID NO: 1214107 - RNA, 22 nt, Human
ccaaaguacugggauuacaggc

SEQ ID NO: 1214108 - RNA, 18 nt, Human
ccaauuuggaaccccgcc

SEQ ID NO: 1214109 - RNA, 19 nt, Human
ccacguuggccaggcuggu

SEQ ID NO: 1214110 - RNA, 22 nt, Human
ccacguuggccaggcuggucuc

SEQ ID NO: 1214111 - RNA, 24 nt, Human
cccaaaguacugggauuacaggcu

SEQ ID NO: 1214112 - RNA, 24 nt, Human
cccaaguagcuuagauuacaggca

SEQ ID NO: 1214113 - RNA, 20 nt, Human
cccacacgcaaaauggacgc

SEQ ID NO: 1214114 - RNA, 24 nt, Human
ccccgccccaccaauuuggaaccc

SEQ ID NO: 1214115 - RNA, 20 nt, Human
cccgccccaccaauuuggaa

SEQ ID NO: 1214116 - RNA, 24 nt, Human
cccucuaucgcccaggcuggagug

SEQ ID NO: 1214117 - RNA, 24 nt, Human
ccgccuccuggguucaagugauuc

SEQ ID NO: 1214118 - RNA, 23 nt, Human
ccuaaccucaagugauccacccg

SEQ ID NO: 1214119 - RNA, 22 nt, Human
ccucacaaggucacuucuaacc

SEQ ID NO: 1214120 - RNA, 22 nt, Human
ccuccgccuccuggguucaagu

SEQ ID NO: 1214121 - RNA, 24 nt, Human
ccuccuggguucaagugauucucc

SEQ ID NO: 1214122 - RNA, 25 nt, Human
ccucuaucgcccaggcuggagugca

SEQ ID NO: 1214123 - RNA, 23 nt, Human
ccuggguucaagugauucuccuc

SEQ ID NO: 1214124 - RNA, 23 nt, Human
ccuggguucaagugauucuccug

SEQ ID NO: 1214125 - RNA, 23 nt, Human
ccugugggugaccugguggagag

SEQ ID NO: 1214126 - RNA, 22 nt, Human
cgcccgggauccccgguggucc

SEQ ID NO: 1214127 - RNA, 24 nt, Human
cgccuggcaaauuuuuguauuuuu

SEQ ID NO: 1214128 - RNA, 24 nt, Human
cgcugacuaugacguucccugcaa

SEQ ID NO: 1214129 - RNA, 19 nt, Human
cucaacccggaaccccgcc

SEQ ID NO: 1214130 - RNA, 21 nt, Human
cucaagugauccacccgccgc

SEQ ID NO: 1214131 - RNA, 22 nt, Human
cucacuggaaccuccgccuccu

SEQ ID NO: 1214132 - RNA, 24 nt, Human
cucacuggaaccuccgccuccugg

SEQ ID NO: 1214133 - RNA, 20 nt, Human
cuccuggguucaagugauuc

SEQ ID NO: 1214134 - RNA, 21 nt, Human
cuccuggguucaagugauucu

SEQ ID NO: 1214135 - RNA, 18 nt, Human
cucgcguauuccacaacu

SEQ ID NO: 1214136 - RNA, 23 nt, Human
cugccuuagcuucccaaguagcu

SEQ ID NO: 1214137 - RNA, 19 nt, Human
cuggccccgccccaccaau

SEQ ID NO: 1214138 - RNA, 20 nt, Human
cugugcuucuguccucgggc

SEQ ID NO: 1214139 - RNA, 21 nt, Human
cuuagauuacaggcaccaauc

SEQ ID NO: 1214140 - RNA, 20 nt, Human
gaaaaaaccaucuagaaaaa

SEQ ID NO: 1214141 - RNA, 22 nt, Human
gacuaaaacaaaagcaaaacag

SEQ ID NO: 1214142 - RNA, 20 nt, Human
gagacaggguuuccccacgu

SEQ ID NO: 1214143 - RNA, 18 nt, Human
gauuacaggcuugagcca

SEQ ID NO: 1214144 - RNA, 21 nt, Human
gauuacaggcuugagccacca

SEQ ID NO: 1214145 - RNA, 24 nt, Human
gcaaaacagagcuccacugcccaa

SEQ ID NO: 1214146 - RNA, 26 nt, Human
gcaaaacagagcuccacugcccaaag

SEQ ID NO: 1214147 - RNA, 18 nt, Human
gcaccuggggcaggggca

SEQ ID NO: 1214148 - RNA, 19 nt, Human
gcccacacgcaaaauggac

SEQ ID NO: 1214149 - RNA, 19 nt, Human
gcccaggcuggagugcagu

SEQ ID NO: 1214150 - RNA, 23 nt, Human
gccgcuuuuccgacagaggccug

SEQ ID NO: 1214151 - RNA, 19 nt, Human
gccuuagcuucccaaguag

SEQ ID NO: 1214152 - RNA, 20 nt, Human
gcggcggcacaaggcccugg

SEQ ID NO: 1214153 - RNA, 21 nt, Human
gcggggggaagggcuggaagc

SEQ ID NO: 1214154 - RNA, 23 nt, Human
gcuggucucgaacuccuaaccuc

SEQ ID NO: 1214155 - RNA, 22 nt, Human
ggaaagucacaaagcaaugaaa

SEQ ID NO: 1214156 - RNA, 21 nt, Human
ggagagugaaaaagaaaguaa

SEQ ID NO: 1214157 - RNA, 19 nt, Human
ggauuacaggcuugagcca

SEQ ID NO: 1214158 - RNA, 23 nt, Human
ggcaggggcagagguguuguggg

SEQ ID NO: 1214159 - RNA, 18 nt, Human
ggcucaguguagcugugc

SEQ ID NO: 1214160 - RNA, 21 nt, Human
ggcuggaagcagcggugcugc

SEQ ID NO: 1214161 - RNA, 18 nt, Human
ggcuggccggcgggcgcc

SEQ ID NO: 1214162 - RNA, 18 nt, Human
gggaagggcuggaagcag

SEQ ID NO: 1214163 - RNA, 19 nt, Human
gggaagggcuggaagcagc

SEQ ID NO: 1214164 - RNA, 25 nt, Human
gggacaaaaaggccuucaaaaagga

SEQ ID NO: 1214165 - RNA, 19 nt, Human
ggggaagggcuggaagcag

SEQ ID NO: 1214166 - RNA, 21 nt, Human
ggggaagggcuggaagcagcg

SEQ ID NO: 1214167 - RNA, 19 nt, Human
ggguuuccccacguuggcc

SEQ ID NO: 1214168 - RNA, 21 nt, Human
guagcugugcuucuguccucg

SEQ ID NO: 1214169 - RNA, 24 nt, Human
gugauccacccgccgcggccuccc

SEQ ID NO: 1214170 - RNA, 24 nt, Human
guggccgcuuuuccgacagaggcc

SEQ ID NO: 1214171 - RNA, 26 nt, Human
guuggggucgcaguccugugggugac

SEQ ID NO: 1214172 - RNA, 18 nt, Human
uaaaacaaaagcaaaaca

SEQ ID NO: 1214173 - RNA, 19 nt, Human
uacaggcaccaaucacgcc

SEQ ID NO: 1214174 - RNA, 23 nt, Human
uacaggcuugagccaccacgccc

SEQ ID NO: 1214175 - RNA, 19 nt, Human
uaguagagacaggguuucc

SEQ ID NO: 1214176 - RNA, 24 nt, Human
uaguagagacaggguuuccccacg

SEQ ID NO: 1214177 - RNA, 21 nt, Human
uauaucacuugccuagaauuc

SEQ ID NO: 1214178 - RNA, 19 nt, Human
uaucgcccaggcuggagug

SEQ ID NO: 1214179 - RNA, 19 nt, Human
ucaagugauucuccugccu

SEQ ID NO: 1214180 - RNA, 19 nt, Human
ucacaaagcaaugaaaaaa

SEQ ID NO: 1214181 - RNA, 24 nt, Human
ucacuggaaccuccgccuccuggg

SEQ ID NO: 1214182 - RNA, 25 nt, Human
ucacuggaaccuccgccuccugggu

SEQ ID NO: 1214183 - RNA, 27 nt, Human
ucacuggaaccuccgccuccuggguuc

SEQ ID NO: 1214184 - RNA, 21 nt, Human
ucagagcaauccugggugcaa

SEQ ID NO: 1214185 - RNA, 22 nt, Human
ucagagcaauccugggugcaag

SEQ ID NO: 1214186 - RNA, 19 nt, Human
uccacccgccgcggccucc

SEQ ID NO: 1214187 - RNA, 24 nt, Human
ucccaaaguacugggauuacaggc

SEQ ID NO: 1214188 - RNA, 24 nt, Human
ucccaaguagcuuagauuacaggc

SEQ ID NO: 1214189 - RNA, 20 nt, Human
ucccccaguguggccgcuuu

SEQ ID NO: 1214190 - RNA, 20 nt, Human
ucccccaguguggccgcuuu

SEQ ID NO: 1214191 - RNA, 24 nt, Human
ucccucuaucgcccaggcuggagu

SEQ ID NO: 1214192 - RNA, 26 nt, Human
ucccugcaacaauccucaacuggccc

SEQ ID NO: 1214193 - RNA, 21 nt, Human
uccugggugcaaggcagaggc

SEQ ID NO: 1214194 - RNA, 21 nt, Human
uccuggguucaagugauucuc

SEQ ID NO: 1214195 - RNA, 24 nt, Human
uccuggguucaagugauucuccug

SEQ ID NO: 1214196 - RNA, 21 nt, Human
ucgcccaggcuggagugcagu

SEQ ID NO: 1214197 - RNA, 24 nt, Human
ucuaucgcccaggcuggagugcag

SEQ ID NO: 1214198 - RNA, 23 nt, Human
ucucccucuaucgcccaggcugg

SEQ ID NO: 1214199 - RNA, 24 nt, Human
ucucccucuaucgcccaggcugga

SEQ ID NO: 1214200 - RNA, 20 nt, Human
ugaaaaaaccaucuagaaaa

SEQ ID NO: 1214201 - RNA, 21 nt, Human
ugaaaaaaccaucuagaaaaa

SEQ ID NO: 1214202 - RNA, 23 nt, Human
ugaaaaagaaaguaacucucucg

SEQ ID NO: 1214203 - RNA, 20 nt, Human
ugaaaagauauuuaucucac

SEQ ID NO: 1214204 - RNA, 19 nt, Human
ugacucggcucagaagcag

SEQ ID NO: 1214205 - RNA, 19 nt, Human
ugagaccccagaaaccgga

SEQ ID NO: 1214206 - RNA, 20 nt, Human
ugccuuagcuucccaaguag

SEQ ID NO: 1214207 - RNA, 24 nt, Human
uggccaggcuggucucgaacuccu

SEQ ID NO: 1214208 - RNA, 18 nt, Human
ugggauuacaggcuugag

SEQ ID NO: 1214209 - RNA, 19 nt, Human
ugggauuacaggcuugagc

SEQ ID NO: 1214210 - RNA, 21 nt, Human
ugggauuacaggcuugagcca

SEQ ID NO: 1214211 - RNA, 22 nt, Human
ugggauuacaggcuugagccac

SEQ ID NO: 1214212 - RNA, 24 nt, Human
ugggauuacaggcuugagccacca

SEQ ID NO: 1214213 - RNA, 23 nt, Human
uggguucaagugauucuccugcc

SEQ ID NO: 1214214 - RNA, 18 nt, Human
uuaguagagacaggguuu

SEQ ID NO: 1214215 - RNA, 23 nt, Human
uucaagugauucuccugccuuag

SEQ ID NO: 1214216 - RNA, 24 nt, Human
uucaagugauucuccugccuuagc

SEQ ID NO: 1214217 - RNA, 21 nt, Human
uugcugccggguucucaucug

SEQ ID NO: 1214218 - RNA, 21 nt, Human
uuuuauagcaacgacaucuga

SEQ ID NO: 1214219 - RNA, 24 nt, Human
uuuucuggaugucaccaucuaaca

SEQ ID NO: 1214220 - RNA, 25 nt, Human
aaacacuagaacuugauuugaauaa

SEQ ID NO: 1214221 - RNA, 19 nt, Human
aacugcagcuucccaucuc

SEQ ID NO: 1214222 - RNA, 21 nt, Human
aagaaacauuucaaaaagagc

SEQ ID NO: 1214223 - RNA, 19 nt, Human
aagaaguauugcucaugaa

SEQ ID NO: 1214224 - RNA, 20 nt, Human
aaucuacuaagaaguauugc

SEQ ID NO: 1214225 - RNA, 21 nt, Human
acaaaacaaucuacuaagaag

SEQ ID NO: 1214226 - RNA, 22 nt, Human
acaaaacaaucuacuaagaagu

SEQ ID NO: 1214227 - RNA, 18 nt, Human
caacugaccauagacgcu

SEQ ID NO: 1214228 - RNA, 19 nt, Human
cagcaaccgugguccaugc

SEQ ID NO: 1214229 - RNA, 18 nt, Human
cauagacgcuccccaucc

SEQ ID NO: 1214230 - RNA, 19 nt, Human
caugcugccugcguccacc

SEQ ID NO: 1214231 - RNA, 21 nt, Human
cccauccgcccagcaaccgug

SEQ ID NO: 1214232 - RNA, 19 nt, Human
cccaucucaccacuucuaa

SEQ ID NO: 1214233 - RNA, 18 nt, Human
cccgcgcacagugcaccg

SEQ ID NO: 1214234 - RNA, 19 nt, Human
cccgcgcacagugcaccgc

SEQ ID NO: 1214235 - RNA, 26 nt, Human
cgcgcacagugcaccgcgccugcgca

SEQ ID NO: 1214236 - RNA, 28 nt, Human
cgcgcacagugcaccgcgccugcgcaug

SEQ ID NO: 1214237 - RNA, 26 nt, Human
cugccugcguccaccgccagcgucga

SEQ ID NO: 1214238 - RNA, 24 nt, Human
uccaccgccagcgucgaaaaaccg

SEQ ID NO: 1214239 - RNA, 19 nt, Human
ucgaaaaaccgccguggug

SEQ ID NO: 1214240 - RNA, 19 nt, Human
ugcugccugcguccaccgc

SEQ ID NO: 1214241 - RNA, 23 nt, Human
uuuuuuuuuuuuuuuuuauuuuu

SEQ ID NO: 1214242 - RNA, 22 nt, Human
agaaacacaaacucugucacca

SEQ ID NO: 1214243 - RNA, 18 nt, Human
caccacaguauugcugga

SEQ ID NO: 1214244 - RNA, 21 nt, Human
caccacaguauugcuggaauu

SEQ ID NO: 1214245 - RNA, 18 nt, Human
ggaauuguacguggcccu

SEQ ID NO: 1214246 - RNA, 19 nt, Human
gggaagcucagaaacacaa

SEQ ID NO: 1214247 - RNA, 21 nt, Human
uagcagcccuugaagauggug

SEQ ID NO: 1214248 - RNA, 24 nt, Human
ucagaaacacaaacucugucacca

SEQ ID NO: 1214249 - RNA, 25 nt, Human
ucagaaacacaaacucugucaccac

SEQ ID NO: 1214250 - RNA, 19 nt, Human
ugaccaaauagcagcccuu

SEQ ID NO: 1214251 - RNA, 19 nt, Human
ugaccaaauagcagcccuu

SEQ ID NO: 1214252 - RNA, 22 nt, Human
aagagauuacuuuuagaauccc

SEQ ID NO: 1214253 - RNA, 20 nt, Human
cagccacucuuccagugacu

SEQ ID NO: 1214254 - RNA, 23 nt, Human
uaagagauuacuuuuagaauccc

SEQ ID NO: 1214255 - RNA, 21 nt, Human
ucagccacucuuccagugacu

SEQ ID NO: 1214256 - RNA, 19 nt, Human
ucuccuaugagcuaaugag

SEQ ID NO: 1214257 - RNA, 21 nt, Human
uuuuagaaucccugaagccuu

SEQ ID NO: 1214258 - RNA, 23 nt, Human
aaagugauuugauuccuuguuuu

SEQ ID NO: 1214259 - RNA, 19 nt, Human
ugauggccucuuggcuuuu

SEQ ID NO: 1214260 - RNA, 21 nt, Human
uggcuuuuuuguuguauccaa

SEQ ID NO: 1214261 - RNA, 23 nt, Human
uuuuugauggccucuuggcuuuu

SEQ ID NO: 1214262 - RNA, 21 nt, Human
cuagcaacuuucuuuuguccu

SEQ ID NO: 1214263 - RNA, 21 nt, Human
gcaccuucucuuccuccucaa

SEQ ID NO: 1214264 - RNA, 18 nt, Human
uacccaaaugaaaugauu

SEQ ID NO: 1214265 - RNA, 18 nt, Human
ucagaggacaugcuacuu

SEQ ID NO: 1214266 - RNA, 24 nt, Human
ucaugcaggacaaaaauuuguaua

SEQ ID NO: 1214267 - RNA, 21 nt, Human
ucuccuguugcaccuucucuu

SEQ ID NO: 1214268 - RNA, 24 nt, Human
ucucucaaucuccuguugcaccuu

SEQ ID NO: 1214269 - RNA, 20 nt, Human
ucucuuccuccucaacucuc

SEQ ID NO: 1214270 - RNA, 21 nt, Human
ugcaucagaauacuccaguac

SEQ ID NO: 1214271 - RNA, 26 nt, Human
uuaaggcuaaaauuaaacaauuuuuu

SEQ ID NO: 1214272 - RNA, 19 nt, Human
uucccaguaagaaagaaaa

SEQ ID NO: 1214273 - RNA, 18 nt, Human
uuuggccuuguguuuucc

SEQ ID NO: 1214274 - RNA, 23 nt, Human
aaaagcaucacuacaagccacgg

SEQ ID NO: 1214275 - RNA, 18 nt, Human
aaaaugcucuucccaaaa

SEQ ID NO: 1214276 - RNA, 24 nt, Human
aaacagggugccacagcuuuccaa

SEQ ID NO: 1214277 - RNA, 23 nt, Human
aaaccugcacuuguacccccuga

SEQ ID NO: 1214278 - RNA, 25 nt, Human
aaaggacaaaaugcucuucccaaaa

SEQ ID NO: 1214279 - RNA, 22 nt, Human
aaauaguauauggaaaccaaga

SEQ ID NO: 1214280 - RNA, 24 nt, Human
aacagagucuuaacaacuccccaa

SEQ ID NO: 1214281 - RNA, 21 nt, Human
aaccucagcaucacucaauau

SEQ ID NO: 1214282 - RNA, 18 nt, Human
aacuuggcacuauuucug

SEQ ID NO: 1214283 - RNA, 20 nt, Human
aagcaguagaaaaaacagag

SEQ ID NO: 1214284 - RNA, 24 nt, Human
aauaguauauggaaaccaagauga

SEQ ID NO: 1214285 - RNA, 18 nt, Human
aaugauuaucuuaggguu

SEQ ID NO: 1214286 - RNA, 24 nt, Human
acacccaaacagggugccacagcu

SEQ ID NO: 1214287 - RNA, 21 nt, Human
acagcaaaaaggacaauuaga

SEQ ID NO: 1214288 - RNA, 24 nt, Human
acugaaacacuagaaaccaaagua

SEQ ID NO: 1214289 - RNA, 23 nt, Human
acugguguguuauuccuuccucg

SEQ ID NO: 1214290 - RNA, 18 nt, Human
agaaaacaggguagaugg

SEQ ID NO: 1214291 - RNA, 23 nt, Human
agaaaacaggguagaugggacac

SEQ ID NO: 1214292 - RNA, 22 nt, Human
agaagcuuuaaaacucuucuga

SEQ ID NO: 1214293 - RNA, 18 nt, Human
agagcaaaagagaaaugu

SEQ ID NO: 1214294 - RNA, 23 nt, Human
agagcagggagggagagaggagg

SEQ ID NO: 1214295 - RNA, 18 nt, Human
agcaacucccuaaagcaa

SEQ ID NO: 1214296 - RNA, 19 nt, Human
agcagacaugucuuuaugc

SEQ ID NO: 1214297 - RNA, 22 nt, Human
agcagggagggagagaggaggg

SEQ ID NO: 1214298 - RNA, 20 nt, Human
agccaagaacacaaccuaaa

SEQ ID NO: 1214299 - RNA, 26 nt, Human
aggaggcucuuuugggcagccugguu

SEQ ID NO: 1214300 - RNA, 19 nt, Human
agggagggagagaggaggg

SEQ ID NO: 1214301 - RNA, 19 nt, Human
agugaaugcaugaauggaa

SEQ ID NO: 1214302 - RNA, 21 nt, Human
auagauguagugaaaacuugg

SEQ ID NO: 1214303 - RNA, 23 nt, Human
auggggcaugguuaguuguggcc

SEQ ID NO: 1214304 - RNA, 19 nt, Human
auguuugucagugagaauu

SEQ ID NO: 1214305 - RNA, 18 nt, Human
auuagauacuaguuuuga

SEQ ID NO: 1214306 - RNA, 20 nt, Human
caaaacauaaaacugugagg

SEQ ID NO: 1214307 - RNA, 19 nt, Human
caaacagggugccacagcu

SEQ ID NO: 1214308 - RNA, 20 nt, Human
caaagcaauguaauacaggc

SEQ ID NO: 1214309 - RNA, 22 nt, Human
caaaguaguugggcuaggaggc

SEQ ID NO: 1214310 - RNA, 18 nt, Human
caacaaaaagaaacagcc

SEQ ID NO: 1214311 - RNA, 19 nt, Human
caagaacacaaccuaaaag

SEQ ID NO: 1214312 - RNA, 21 nt, Human
caccaggaaaauccucacaag

SEQ ID NO: 1214313 - RNA, 22 nt, Human
cacuacaagccacggacuccua

SEQ ID NO: 1214314 - RNA, 22 nt, Human
cagaagcuuuaaaacucuucug

SEQ ID NO: 1214315 - RNA, 20 nt, Human
cagaccagaauagacacugu

SEQ ID NO: 1214316 - RNA, 22 nt, Human
cagaggccauugaucaagguag

SEQ ID NO: 1214317 - RNA, 21 nt, Human
cagauugauguuccaaauacc

SEQ ID NO: 1214318 - RNA, 22 nt, Human
cagccuggucuucuaaaccaaa

SEQ ID NO: 1214319 - RNA, 23 nt, Human
cagccuggucuucuaaaccaaag

SEQ ID NO: 1214320 - RNA, 19 nt, Human
cagggguuauggauaaaau

SEQ ID NO: 1214321 - RNA, 20 nt, Human
caguuuaucuacagcuaccc

SEQ ID NO: 1214322 - RNA, 24 nt, Human
cauaguaacugaaacacuagaaac

SEQ ID NO: 1214323 - RNA, 19 nt, Human
cauauguaacacauauacc

SEQ ID NO: 1214324 - RNA, 18 nt, Human
ccaagaugagagcaaaag

SEQ ID NO: 1214325 - RNA, 18 nt, Human
ccacagcuuuccaacuua

SEQ ID NO: 1214326 - RNA, 22 nt, Human
ccacauaccacagcaaaaagga

SEQ ID NO: 1214327 - RNA, 20 nt, Human
ccaccuggugaugggaucug

SEQ ID NO: 1214328 - RNA, 21 nt, Human
ccuuggugugggaacaaaagu

SEQ ID NO: 1214329 - RNA, 22 nt, Human
cuaguaaaugacaaagccagaa

SEQ ID NO: 1214330 - RNA, 23 nt, Human
cucuuuugggcagccuggucuuc

SEQ ID NO: 1214331 - RNA, 25 nt, Human
cugcagaaacagaaaacaggguaga

SEQ ID NO: 1214332 - RNA, 18 nt, Human
cuguaccccaaaccucag

SEQ ID NO: 1214333 - RNA, 19 nt, Human
gagaauuugaaacaucugc

SEQ ID NO: 1214334 - RNA, 23 nt, Human
gagcagggagggagagaggaggg

SEQ ID NO: 1214335 - RNA, 21 nt, Human
gagccaagaacacaaccuaaa

SEQ ID NO: 1214336 - RNA, 19 nt, Human
gaugagagcaaaagaaaac

SEQ ID NO: 1214337 - RNA, 18 nt, Human
ggagaauaaauagaagau

SEQ ID NO: 1214338 - RNA, 18 nt, Human
gggugccacagcuuucca

SEQ ID NO: 1214339 - RNA, 20 nt, Human
gguuauggauaaaauaggag

SEQ ID NO: 1214340 - RNA, 21 nt, Human
guagaaauaaagggggaguac

SEQ ID NO: 1214341 - RNA, 23 nt, Human
gugaagcaguagaaaaaacagag

SEQ ID NO: 1214342 - RNA, 22 nt, Human
uaaaccaaaggacaaaaugcuc

SEQ ID NO: 1214343 - RNA, 22 nt, Human
uaacaacuccccaaagcaaugu

SEQ ID NO: 1214344 - RNA, 20 nt, Human
uaacaagaguccuaaaacag

SEQ ID NO: 1214345 - RNA, 18 nt, Human
uaacgguacugacaaacu

SEQ ID NO: 1214346 - RNA, 23 nt, Human
uaacugaaacacuagaaaccaaa

SEQ ID NO: 1214347 - RNA, 20 nt, Human
uaagugaaugaaaugccaca

SEQ ID NO: 1214348 - RNA, 20 nt, Human
uaccacagcaaaaaggacaa

SEQ ID NO: 1214349 - RNA, 21 nt, Human
uaccccaaaccucagcaucac

SEQ ID NO: 1214350 - RNA, 20 nt, Human
uacccccugaauuuguuccu

SEQ ID NO: 1214351 - RNA, 18 nt, Human
uagaugggacacccaaac

SEQ ID NO: 1214352 - RNA, 22 nt, Human
uagauguagugaaaacuuggca

SEQ ID NO: 1214353 - RNA, 22 nt, Human
uagcaacucccuaaagcaaugu

SEQ ID NO: 1214354 - RNA, 22 nt, Human
uagcaagugcauggcagacauu

SEQ ID NO: 1214355 - RNA, 24 nt, Human
uauacaagugguugcccuuuaaaa

SEQ ID NO: 1214356 - RNA, 18 nt, Human
uauuacagaugaugagua

SEQ ID NO: 1214357 - RNA, 20 nt, Human
ucacuacacuccgcagaggc

SEQ ID NO: 1214358 - RNA, 21 nt, Human
ucagcaucacucaauauacuc

SEQ ID NO: 1214359 - RNA, 23 nt, Human
ucaguaauaacaagaguccuaaa

SEQ ID NO: 1214360 - RNA, 24 nt, Human
ucaucccugacaaaaaacaaaaca

SEQ ID NO: 1214361 - RNA, 19 nt, Human
ucccagacacauaucaaau

SEQ ID NO: 1214362 - RNA, 25 nt, Human
ucccugacaaaaaacaaaacauaaa

SEQ ID NO: 1214363 - RNA, 19 nt, Human
ucuguaacagagucuggaa

SEQ ID NO: 1214364 - RNA, 23 nt, Human
ugaaugcaugaauggaaaaugga

SEQ ID NO: 1214365 - RNA, 21 nt, Human
ugacaaaaaacaaaacauaaa

SEQ ID NO: 1214366 - RNA, 22 nt, Human
ugacaaaaaacaaaacauaaaa

SEQ ID NO: 1214367 - RNA, 23 nt, Human
ugacaagaauuuuggggaaagug

SEQ ID NO: 1214368 - RNA, 23 nt, Human
ugaccuaaaauguuugucaguga

SEQ ID NO: 1214369 - RNA, 24 nt, Human
ugacuggccugggguaccagagcu

SEQ ID NO: 1214370 - RNA, 21 nt, Human
ugagagaaugagccaagaaca

SEQ ID NO: 1214371 - RNA, 19 nt, Human
ugaggaggggguggggcag

SEQ ID NO: 1214372 - RNA, 20 nt, Human
ugaggaggggguggggcagg

SEQ ID NO: 1214373 - RNA, 27 nt, Human
ugaggaggggguggggcaggauacuuu

SEQ ID NO: 1214374 - RNA, 22 nt, Human
ugagguauauucacuguugcua

SEQ ID NO: 1214375 - RNA, 18 nt, Human
ugauguuugugaccuguc

SEQ ID NO: 1214376 - RNA, 19 nt, Human
ugauuacuauuagaaacuc

SEQ ID NO: 1214377 - RNA, 26 nt, Human
ugauuagaucucacaaaaaaccaaaa

SEQ ID NO: 1214378 - RNA, 18 nt, Human
ugcauguguggcuauaca

SEQ ID NO: 1214379 - RNA, 26 nt, Human
ugcuauuucuaccauaauucuuauuc

SEQ ID NO: 1214380 - RNA, 23 nt, Human
ugcucuaggccucaguuuuauca

SEQ ID NO: 1214381 - RNA, 20 nt, Human
uggaaaauaaugaaauauua

SEQ ID NO: 1214382 - RNA, 21 nt, Human
uggaaaauaaugaaauauuag

SEQ ID NO: 1214383 - RNA, 20 nt, Human
uggagaaggaggaguggcca

SEQ ID NO: 1214384 - RNA, 18 nt, Human
uggaguggagaaggagga

SEQ ID NO: 1214385 - RNA, 25 nt, Human
uggcaagcaaugauggauuacauuu

SEQ ID NO: 1214386 - RNA, 20 nt, Human
ugggagaaccaccaaagugc

SEQ ID NO: 1214387 - RNA, 22 nt, Human
ugggaucuguaccccaaaccuc

SEQ ID NO: 1214388 - RNA, 19 nt, Human
ugguaagugacuggccugg

SEQ ID NO: 1214389 - RNA, 18 nt, Human
uggugugggaacaaaagu

SEQ ID NO: 1214390 - RNA, 20 nt, Human
uggugugggaacaaaaguuu

SEQ ID NO: 1214391 - RNA, 18 nt, Human
ugguuuucauaaaaaugg

SEQ ID NO: 1214392 - RNA, 23 nt, Human
uguaacacauauacccauguccc

SEQ ID NO: 1214393 - RNA, 27 nt, Human
uguaauacaggcagccuuugguuuuuu

SEQ ID NO: 1214394 - RNA, 19 nt, Human
uuagguacuaugcucaccu

SEQ ID NO: 1214395 - RNA, 21 nt, Human
uuaguuguggccagcuguuuu

SEQ ID NO: 1214396 - RNA, 20 nt, Human
uucaauuugagguauauucc

SEQ ID NO: 1214397 - RNA, 19 nt, Human
uucaucccugacaaaaaac

SEQ ID NO: 1214398 - RNA, 21 nt, Human
uucccuuaagugauaccacuc

SEQ ID NO: 1214399 - RNA, 21 nt, Human
uugaacaagccaucugcagaa

SEQ ID NO: 1214400 - RNA, 23 nt, Human
uugauuagaucucacaaaaaacc

SEQ ID NO: 1214401 - RNA, 21 nt, Human
uuguauuuauguuauucccag

SEQ ID NO: 1214402 - RNA, 20 nt, Human
uuuaaguaauuggcucucag

SEQ ID NO: 1214403 - RNA, 18 nt, Human
uuuaucuacagcuacccu

SEQ ID NO: 1214404 - RNA, 26 nt, Human
uuucagcaaucacuggauaugaucuu

SEQ ID NO: 1214405 - RNA, 20 nt, Human
uuuguuccuuggugugggaa

SEQ ID NO: 1214406 - RNA, 19 nt, Human
uuuucauuauguucuauga

SEQ ID NO: 1214407 - RNA, 22 nt, Human
aaccaccagagauggguuuuga

SEQ ID NO: 1214408 - RNA, 20 nt, Human
aggaacaggaagugaaagga

SEQ ID NO: 1214409 - RNA, 24 nt, Human
cacagcgcuuucugaaggaacagg

SEQ ID NO: 1214410 - RNA, 21 nt, Human
cccagucccggccccuccagc

SEQ ID NO: 1214411 - RNA, 19 nt, Human
ccccuccagcccggggccc

SEQ ID NO: 1214412 - RNA, 20 nt, Human
ccccuguggcuccacgucuu

SEQ ID NO: 1214413 - RNA, 25 nt, Human
ccgggcccacguagagaggggcugg

SEQ ID NO: 1214414 - RNA, 22 nt, Human
cucccgggcccacguagagagg

SEQ ID NO: 1214415 - RNA, 23 nt, Human
cuugcugucauucaaagccaaac

SEQ ID NO: 1214416 - RNA, 21 nt, Human
gaacaggaagugaaaggaagg

SEQ ID NO: 1214417 - RNA, 21 nt, Human
gaaggaacaggaagugaaagg

SEQ ID NO: 1214418 - RNA, 20 nt, Human
gaguauaggguaccacacag

SEQ ID NO: 1214419 - RNA, 21 nt, Human
gcuggggcacgcccugcaggg

SEQ ID NO: 1214420 - RNA, 20 nt, Human
ggagagaagcauguggcucu

SEQ ID NO: 1214421 - RNA, 18 nt, Human
gggcuggggcacgcccug

SEQ ID NO: 1214422 - RNA, 18 nt, Human
guagagaggggcuggggc

SEQ ID NO: 1214423 - RNA, 21 nt, Human
guggagagaagcauguggcuc

SEQ ID NO: 1214424 - RNA, 20 nt, Human
guggcuccacgucuuuaccc

SEQ ID NO: 1214425 - RNA, 21 nt, Human
uagaaaggacuggacaccacu

SEQ ID NO: 1214426 - RNA, 21 nt, Human
uauccauagaaguggagagaa

SEQ ID NO: 1214427 - RNA, 24 nt, Human
uaugagagaccgcguuaagcggca

SEQ ID NO: 1214428 - RNA, 19 nt, Human
ucaaagccaaaccaccaga

SEQ ID NO: 1214429 - RNA, 20 nt, Human
ucaauaguaagaaguaaggu

SEQ ID NO: 1214430 - RNA, 18 nt, Human
ucccggccccuccagccc

SEQ ID NO: 1214431 - RNA, 23 nt, Human
ucccggccccuccagcccggggc

SEQ ID NO: 1214432 - RNA, 20 nt, Human
ugaaggaacaggaagugaaa

SEQ ID NO: 1214433 - RNA, 19 nt, Human
ugacagggccccuguggcc

SEQ ID NO: 1214434 - RNA, 18 nt, Human
uggaaaagcacuuuccgg

SEQ ID NO: 1214435 - RNA, 21 nt, Human
uggcugaauaaacucagacac

SEQ ID NO: 1214436 - RNA, 20 nt, Human
ugucuuagucuucugggagu

SEQ ID NO: 1214437 - RNA, 22 nt, Human
uguggcucuuagaaaggacugg

SEQ ID NO: 1214438 - RNA, 22 nt, Human
uuuccggggaacugugguuucu

SEQ ID NO: 1214439 - RNA, 22 nt, Human
cccgugauugaugcagauaaac

SEQ ID NO: 1214440 - RNA, 20 nt, Human
aagcaggaggccuaacagac

SEQ ID NO: 1214441 - RNA, 19 nt, Human
aagcaggcagagcacacgg

SEQ ID NO: 1214442 - RNA, 22 nt, Human
aagcauucccugcagaggaggg

SEQ ID NO: 1214443 - RNA, 21 nt, Human
aaguggcugaggccacaggca

SEQ ID NO: 1214444 - RNA, 23 nt, Human
acccccaccagacccuuccagca

SEQ ID NO: 1214445 - RNA, 18 nt, Human
aggaagcaggcagagcac

SEQ ID NO: 1214446 - RNA, 19 nt, Human
agggaagggagggccugga

SEQ ID NO: 1214447 - RNA, 22 nt, Human
aggugccugguagagaccccag

SEQ ID NO: 1214448 - RNA, 18 nt, Human
cacuggucucacuccacg

SEQ ID NO: 1214449 - RNA, 19 nt, Human
cacuggucucacuccacgc

SEQ ID NO: 1214450 - RNA, 20 nt, Human
cagcaccacugguugcgcac

SEQ ID NO: 1214451 - RNA, 24 nt, Human
cagccuaagcguggcagagggaga

SEQ ID NO: 1214452 - RNA, 20 nt, Human
ccaacagcgaggaugguguc

SEQ ID NO: 1214453 - RNA, 18 nt, Human
ccaccagacccuuccagc

SEQ ID NO: 1214454 - RNA, 19 nt, Human
ccacgcccuucaccuagaa

SEQ ID NO: 1214455 - RNA, 22 nt, Human
cccacagacagagcugugaggc

SEQ ID NO: 1214456 - RNA, 20 nt, Human
cccccuguggggagggcagc

SEQ ID NO: 1214457 - RNA, 21 nt, Human
ccuaacccccagggccucaga

SEQ ID NO: 1214458 - RNA, 28 nt, Human
ccuauucacccccaccagacccuuccaa

SEQ ID NO: 1214459 - RNA, 19 nt, Human
ccucagaaugugaccuugu

SEQ ID NO: 1214460 - RNA, 22 nt, Human
cgagagccaguccuugcaggga

SEQ ID NO: 1214461 - RNA, 22 nt, Human
cgaggugccugguagagacccc

SEQ ID NO: 1214462 - RNA, 19 nt, Human
cgcccaucuuuccaacagc

SEQ ID NO: 1214463 - RNA, 22 nt, Human
cuaaccugggaccgaccuagga

SEQ ID NO: 1214464 - RNA, 18 nt, Human
cucacuccacgcccuuca

SEQ ID NO: 1214465 - RNA, 20 nt, Human
cucuguggacuggggagggg

SEQ ID NO: 1214466 - RNA, 21 nt, Human
cugcaguccuuacacagagug

SEQ ID NO: 1214467 - RNA, 23 nt, Human
gaagcaggcagagcacacggcgu

SEQ ID NO: 1214468 - RNA, 24 nt, Human
gagaugcaggccuguggggggcag

SEQ ID NO: 1214469 - RNA, 21 nt, Human
gauggcucuguggacugggga

SEQ ID NO: 1214470 - RNA, 19 nt, Human
gccagucacggccuugcca

SEQ ID NO: 1214471 - RNA, 25 nt, Human
gcucccacagacagagcugugaggc

SEQ ID NO: 1214472 - RNA, 19 nt, Human
ggaaugguugcagcgggga

SEQ ID NO: 1214473 - RNA, 19 nt, Human
ggacuggggaggggagcua

SEQ ID NO: 1214474 - RNA, 18 nt, Human
ggagacagaagcuguuac

SEQ ID NO: 1214475 - RNA, 19 nt, Human
ggagacugcaccccuuaac

SEQ ID NO: 1214476 - RNA, 20 nt, Human
ggcagccagccuccaggaag

SEQ ID NO: 1214477 - RNA, 21 nt, Human
ggccacacaggcuccguagcc

SEQ ID NO: 1214478 - RNA, 24 nt, Human
gggcuucuguggacggacgccagu

SEQ ID NO: 1214479 - RNA, 19 nt, Human
ggggaggggagcuaaggaa

SEQ ID NO: 1214480 - RNA, 20 nt, Human
uaaagguccguggaaaacua

SEQ ID NO: 1214481 - RNA, 19 nt, Human
uaggaggccguuuccccac

SEQ ID NO: 1214482 - RNA, 19 nt, Human
uccaugaaaaugcuggaag

SEQ ID NO: 1214483 - RNA, 21 nt, Human
uccguggaaaacuagggcagc

SEQ ID NO: 1214484 - RNA, 18 nt, Human
uccuuugcacaaaguggc

SEQ ID NO: 1214485 - RNA, 25 nt, Human
ucucacuccacgcccuucaccuaga

SEQ ID NO: 1214486 - RNA, 23 nt, Human
ugaaggccuaacccccagggccu

SEQ ID NO: 1214487 - RNA, 19 nt, Human
ugagagggcuucuguggac

SEQ ID NO: 1214488 - RNA, 23 nt, Human
ugaggccacaggcaugguggcca

SEQ ID NO: 1214489 - RNA, 24 nt, Human
ugcuggaagcauucccugcagagg

SEQ ID NO: 1214490 - RNA, 23 nt, Human
uggaagcauucccugcagaggag

SEQ ID NO: 1214491 - RNA, 22 nt, Human
uggaaugguugcagcggggaga

SEQ ID NO: 1214492 - RNA, 18 nt, Human
uggagggaagggagggcc

SEQ ID NO: 1214493 - RNA, 24 nt, Human
uggagguggccaugccugugagag

SEQ ID NO: 1214494 - RNA, 23 nt, Human
uggcucuguggacuggggagggg

SEQ ID NO: 1214495 - RNA, 19 nt, Human
uggggagggcagccagccu

SEQ ID NO: 1214496 - RNA, 22 nt, Human
uggggagggcagccagccucca

SEQ ID NO: 1214497 - RNA, 23 nt, Human
uggggaggggagcuaaggaacug

SEQ ID NO: 1214498 - RNA, 18 nt, Human
uggggggcagaacaggcu

SEQ ID NO: 1214499 - RNA, 20 nt, Human
uggggggcagaacaggcuuc

SEQ ID NO: 1214500 - RNA, 18 nt, Human
uguggggagggcagccag

SEQ ID NO: 1214501 - RNA, 19 nt, Human
uuaacacugagaugcaggc

SEQ ID NO: 1214502 - RNA, 18 nt, Human
uucaaacguccagcagca

SEQ ID NO: 1214503 - RNA, 23 nt, Human
uucacccccaccagacccuucca

SEQ ID NO: 1214504 - RNA, 21 nt, Human
uuccaacagcgaggauggugu

SEQ ID NO: 1214505 - RNA, 21 nt, Human
uuccacuggucucacuccacg

SEQ ID NO: 1214506 - RNA, 20 nt, Human
aggaggccgccgggccaggc

SEQ ID NO: 1214507 - RNA, 19 nt, Human
aggcagggcgccggcucuc

SEQ ID NO: 1214508 - RNA, 19 nt, Human
agggcaaaaggagccggcc

SEQ ID NO: 1214509 - RNA, 23 nt, Human
aggggaacaaaggggccagcggg

SEQ ID NO: 1214510 - RNA, 18 nt, Human
ccccgccgccggcagggc

SEQ ID NO: 1214511 - RNA, 22 nt, Human
ccccgggaggggaacaaagggg

SEQ ID NO: 1214512 - RNA, 21 nt, Human
cccgggagcugcgcccggaac

SEQ ID NO: 1214513 - RNA, 22 nt, Human
cgaaggccuggcagcgaacccu

SEQ ID NO: 1214514 - RNA, 20 nt, Human
cggcagcagccuggccgacu

SEQ ID NO: 1214515 - RNA, 22 nt, Human
gaacucgaaggccuggcagcga

SEQ ID NO: 1214516 - RNA, 20 nt, Human
gcagcagcaagccuucgugc

SEQ ID NO: 1214517 - RNA, 23 nt, Human
gccccgggaggggaacaaagggg

SEQ ID NO: 1214518 - RNA, 22 nt, Human
ggagcugcgcccggaacucgaa

SEQ ID NO: 1214519 - RNA, 22 nt, Human
ggccaggcagggcgccggcucu

SEQ ID NO: 1214520 - RNA, 18 nt, Human
gggaacaaaggggccagc

SEQ ID NO: 1214521 - RNA, 18 nt, Human
gggaagucggcagcagcc

SEQ ID NO: 1214522 - RNA, 21 nt, Human
guucuggagaagcagcagcaa

SEQ ID NO: 1214523 - RNA, 23 nt, Human
uggagaagcagcagcaagccuuc

SEQ ID NO: 1214524 - RNA, 19 nt, Human
uggcagcgaacccuucuca

SEQ ID NO: 1214525 - RNA, 19 nt, Human
uggccgaccucacucggcg

SEQ ID NO: 1214526 - RNA, 21 nt, Human
uuugcugugucuacgaggaag

SEQ ID NO: 1214527 - RNA, 24 nt, Human
aaccaccagccucaaagacugcuc

SEQ ID NO: 1214528 - RNA, 24 nt, Human
aagguaagcacacaauucaaacca

SEQ ID NO: 1214529 - RNA, 19 nt, Human
aauucaaaccaccagccuc

SEQ ID NO: 1214530 - RNA, 21 nt, Human
cacaauucaaaccaccagccu

SEQ ID NO: 1214531 - RNA, 20 nt, Human
cacacaauucaaaccaccag

SEQ ID NO: 1214532 - RNA, 21 nt, Human
ccucaaagacugcuccugacu

SEQ ID NO: 1214533 - RNA, 23 nt, Human
cuuuacacacuguucggcuaagu

SEQ ID NO: 1214534 - RNA, 22 nt, Human
gccucaaagacugcuccugacu

SEQ ID NO: 1214535 - RNA, 21 nt, Human
gucacgaaugaagguaagcac

SEQ ID NO: 1214536 - RNA, 22 nt, Human
uaagaguacuguccgaaaacua

SEQ ID NO: 1214537 - RNA, 21 nt, Human
uaagcacacaauucaaaccac

SEQ ID NO: 1214538 - RNA, 23 nt, Human
uaagcacacaauucaaaccacca

SEQ ID NO: 1214539 - RNA, 21 nt, Human
uccacugucacgaaugaaggu

SEQ ID NO: 1214540 - RNA, 22 nt, Human
ugaagguaagcacacaauucaa

SEQ ID NO: 1214541 - RNA, 23 nt, Human
ugaagguaagcacacaauucaaa

SEQ ID NO: 1214542 - RNA, 19 nt, Human
augaauagcaauuucuccu

SEQ ID NO: 1214543 - RNA, 23 nt, Human
caaaaccagguaaaucuucuuuc

SEQ ID NO: 1214544 - RNA, 24 nt, Human
caaaaccagguaaaucuucuuuca

SEQ ID NO: 1214545 - RNA, 21 nt, Human
cccuuaugaucugcaaagcca

SEQ ID NO: 1214546 - RNA, 19 nt, Human
ucaaauacaaaaccaggua

SEQ ID NO: 1214547 - RNA, 21 nt, Human
ucuggcuagcugauccaaaaa

SEQ ID NO: 1214548 - RNA, 19 nt, Human
ugaauuaugaauagcaauu

SEQ ID NO: 1214549 - RNA, 24 nt, Human
uguuugguuccucuauuagauuca

SEQ ID NO: 1214550 - RNA, 18 nt, Human
uuggccucgagcucuuug

SEQ ID NO: 1214551 - RNA, 24 nt, Human
aaaaaacacaugaagggcauucau

SEQ ID NO: 1214552 - RNA, 18 nt, Human
aaaaaaccagcuccugga

SEQ ID NO: 1214553 - RNA, 21 nt, Human
aaaaauguauauucuguugau

SEQ ID NO: 1214554 - RNA, 20 nt, Human
aaagcagcacccagagcuug

SEQ ID NO: 1214555 - RNA, 20 nt, Human
aaaugugucccagagauucu

SEQ ID NO: 1214556 - RNA, 20 nt, Human
aacaaagcagcacccagagc

SEQ ID NO: 1214557 - RNA, 21 nt, Human
aagaaaaaaacacaugaaggg

SEQ ID NO: 1214558 - RNA, 22 nt, Human
aagaaaaaaacacaugaagggc

SEQ ID NO: 1214559 - RNA, 18 nt, Human
acaaagcagcacccagag

SEQ ID NO: 1214560 - RNA, 19 nt, Human
acuguggucugagagacag

SEQ ID NO: 1214561 - RNA, 19 nt, Human
agagaaccuggcucugucc

SEQ ID NO: 1214562 - RNA, 21 nt, Human
agcagucugaaggggccaugg

SEQ ID NO: 1214563 - RNA, 19 nt, Human
agcuguggaaaccaggacc

SEQ ID NO: 1214564 - RNA, 22 nt, Human
aggcagggccuggcucucugug

SEQ ID NO: 1214565 - RNA, 22 nt, Human
aggccuccagccccgccgguuu

SEQ ID NO: 1214566 - RNA, 21 nt, Human
agggcaggugagcccuggggc

SEQ ID NO: 1214567 - RNA, 22 nt, Human
aggucccauggaggagcagccu

SEQ ID NO: 1214568 - RNA, 22 nt, Human
auggaggagcagccugagaaca

SEQ ID NO: 1214569 - RNA, 22 nt, Human
auucugggccuuuuccugggca

SEQ ID NO: 1214570 - RNA, 19 nt, Human
caaaaaaccagcuccugga

SEQ ID NO: 1214571 - RNA, 18 nt, Human
caaagcagcacccagagc

SEQ ID NO: 1214572 - RNA, 23 nt, Human
caaagcagcacccagagcuuguu

SEQ ID NO: 1214573 - RNA, 19 nt, Human
caauacugaaaaucaagca

SEQ ID NO: 1214574 - RNA, 18 nt, Human
cacaccaugguccaggug

SEQ ID NO: 1214575 - RNA, 18 nt, Human
cacugcacugccaggggc

SEQ ID NO: 1214576 - RNA, 21 nt, Human
cacugcuuuaaauguguccca

SEQ ID NO: 1214577 - RNA, 18 nt, Human
cagagcucagguccaugc

SEQ ID NO: 1214578 - RNA, 21 nt, Human
caggagcagguuguucgguuu

SEQ ID NO: 1214579 - RNA, 23 nt, Human
caggcagcacagcccugcuccug

SEQ ID NO: 1214580 - RNA, 18 nt, Human
cagggccuggcucucugu

SEQ ID NO: 1214581 - RNA, 18 nt, Human
caggggugccccaggggg

SEQ ID NO: 1214582 - RNA, 24 nt, Human
cagguaccaucaaaugcuguguac

SEQ ID NO: 1214583 - RNA, 20 nt, Human
cagguccaugcucaggcucu

SEQ ID NO: 1214584 - RNA, 18 nt, Human
cagugcuugcucacauuc

SEQ ID NO: 1214585 - RNA, 21 nt, Human
caucugugcuccugaugcagg

SEQ ID NO: 1214586 - RNA, 21 nt, Human
ccaacacugcacugccagggg

SEQ ID NO: 1214587 - RNA, 22 nt, Human
ccacuagaccccuaaaaauggg

SEQ ID NO: 1214588 - RNA, 25 nt, Human
ccagagcucagguccaugcucaggc

SEQ ID NO: 1214589 - RNA, 25 nt, Human
ccagccccgccgguuucccccaucu

SEQ ID NO: 1214590 - RNA, 27 nt, Human
ccagccccgccgguuucccccaucugu

SEQ ID NO: 1214591 - RNA, 18 nt, Human
ccaugcucaggcucuggg

SEQ ID NO: 1214592 - RNA, 20 nt, Human
cccaaguaaaugaauccaau

SEQ ID NO: 1214593 - RNA, 22 nt, Human
ccccaggcagcacagcccugcu

SEQ ID NO: 1214594 - RNA, 20 nt, Human
cccugggggagggucagggg

SEQ ID NO: 1214595 - RNA, 20 nt, Human
ccgguuucccccaucugugc

SEQ ID NO: 1214596 - RNA, 20 nt, Human
ccuagcucaugacccuggcc

SEQ ID NO: 1214597 - RNA, 20 nt, Human
ccuucaccuucugcugaggg

SEQ ID NO: 1214598 - RNA, 21 nt, Human
ccuucugcuagcuuuugaaug

SEQ ID NO: 1214599 - RNA, 27 nt, Human
cggggcccggggaagguguaggugcug

SEQ ID NO: 1214600 - RNA, 23 nt, Human
cgugcagccucuugauggccccg

SEQ ID NO: 1214601 - RNA, 24 nt, Human
cuagucaaagaaaaaaacacauga

SEQ ID NO: 1214602 - RNA, 18 nt, Human
cuggagcucacgugcagc

SEQ ID NO: 1214603 - RNA, 21 nt, Human
cugucuagaagccccacagcu

SEQ ID NO: 1214604 - RNA, 18 nt, Human
cuugcuucucuaguucuu

SEQ ID NO: 1214605 - RNA, 23 nt, Human
cuuuauuuguuucuuuguucagu

SEQ ID NO: 1214606 - RNA, 21 nt, Human
gaaaaaaacacaugaagggca

SEQ ID NO: 1214607 - RNA, 24 nt, Human
gaaaggcaagcucaucccugcagg

SEQ ID NO: 1214608 - RNA, 28 nt, Human
gaauaggugugguguggugacgaccucg

SEQ ID NO: 1214609 - RNA, 22 nt, Human
gagcagucugaaggggccaugg

SEQ ID NO: 1214610 - RNA, 23 nt, Human
gagcuuguuuuuuuuagagaacc

SEQ ID NO: 1214611 - RNA, 22 nt, Human
gaugcagggggaggacuguauu

SEQ ID NO: 1214612 - RNA, 20 nt, Human
gcaauacugaaaaucaagcc

SEQ ID NO: 1214613 - RNA, 20 nt, Human
gcagaacuuucuauaaacca

SEQ ID NO: 1214614 - RNA, 23 nt, Human
gcaggugagcccuggggcugacc

SEQ ID NO: 1214615 - RNA, 21 nt, Human
gccccuucuuccccaggcagc

SEQ ID NO: 1214616 - RNA, 21 nt, Human
gcccggggaagguguaggugc

SEQ ID NO: 1214617 - RNA, 21 nt, Human
gccugaagcugccaguguuug

SEQ ID NO: 1214618 - RNA, 19 nt, Human
gcugugcagcucuggagcu

SEQ ID NO: 1214619 - RNA, 21 nt, Human
gcuugcucacauucuucaauu

SEQ ID NO: 1214620 - RNA, 22 nt, Human
ggagcuguugcggggcccgggg

SEQ ID NO: 1214621 - RNA, 25 nt, Human
ggcccugggggagggucaggggugc

SEQ ID NO: 1214622 - RNA, 21 nt, Human
ggccuccagccccgccgguuu

SEQ ID NO: 1214623 - RNA, 21 nt, Human
gggagcagcugugcagcucug

SEQ ID NO: 1214624 - RNA, 18 nt, Human
ggggaagguguaggugcu

SEQ ID NO: 1214625 - RNA, 19 nt, Human
guacugagaggcgcuugcg

SEQ ID NO: 1214626 - RNA, 20 nt, Human
gucauucaggagcagguugu

SEQ ID NO: 1214627 - RNA, 27 nt, Human
guccuguggcugccacccauuucaggg

SEQ ID NO: 1214628 - RNA, 21 nt, Human
gugcaguugucccagccuggc

SEQ ID NO: 1214629 - RNA, 21 nt, Human
guggagcgcgcagccugggcc

SEQ ID NO: 1214630 - RNA, 19 nt, Human
gugguguaacccaggcccu

SEQ ID NO: 1214631 - RNA, 25 nt, Human
guucuuuuccauuugcugaggagug

SEQ ID NO: 1214632 - RNA, 21 nt, Human
uaaaccacauguggagagcuu

SEQ ID NO: 1214633 - RNA, 20 nt, Human
uaaaccaucccguggccccu

SEQ ID NO: 1214634 - RNA, 18 nt, Human
uaacccaggcccucgccc

SEQ ID NO: 1214635 - RNA, 23 nt, Human
uagagccccuucuuccccaggca

SEQ ID NO: 1214636 - RNA, 21 nt, Human
uagggcucccgcacuugucca

SEQ ID NO: 1214637 - RNA, 18 nt, Human
uagggugucaauuuuaga

SEQ ID NO: 1214638 - RNA, 24 nt, Human
uagugcuauaaauuucccucuaca

SEQ ID NO: 1214639 - RNA, 19 nt, Human
uauaaucaaagcucagagc

SEQ ID NO: 1214640 - RNA, 23 nt, Human
uauaaucaaagcucagagccaag

SEQ ID NO: 1214641 - RNA, 18 nt, Human
ucaaagaaaaaaacacau

SEQ ID NO: 1214642 - RNA, 21 nt, Human
ucaaagcucagagccaaggcc

SEQ ID NO: 1214643 - RNA, 25 nt, Human
ucacgugcagccucuugauggcccc

SEQ ID NO: 1214644 - RNA, 19 nt, Human
ucagggccuggugcaguug

SEQ ID NO: 1214645 - RNA, 23 nt, Human
ucaugacccuggcaaagggcagg

SEQ ID NO: 1214646 - RNA, 21 nt, Human
ucauucaggagcagguuguuc

SEQ ID NO: 1214647 - RNA, 21 nt, Human
uccaagcaccugugacuccca

SEQ ID NO: 1214648 - RNA, 24 nt, Human
uccacaguaaaccacauguggaga

SEQ ID NO: 1214649 - RNA, 28 nt, Human
uccagguaccaucaaaugcuguguacug

SEQ ID NO: 1214650 - RNA, 24 nt, Human
ucccagagauucugguauguugug

SEQ ID NO: 1214651 - RNA, 19 nt, Human
ucccagccuggcaggcagu

SEQ ID NO: 1214652 - RNA, 21 nt, Human
uccccaggcagcacagcccug

SEQ ID NO: 1214653 - RNA, 24 nt, Human
uccccaggcagcacagcccugcuc

SEQ ID NO: 1214654 - RNA, 27 nt, Human
uccccaggcagcacagcccugcuccug

SEQ ID NO: 1214655 - RNA, 21 nt, Human
ucccucuacacacugcuuuaa

SEQ ID NO: 1214656 - RNA, 27 nt, Human
ucccugcagguuuaguuguuucuguua

SEQ ID NO: 1214657 - RNA, 26 nt, Human
uccuuggucuagggcucccgcacuug

SEQ ID NO: 1214658 - RNA, 20 nt, Human
ucuguucuuuuccauuugcu

SEQ ID NO: 1214659 - RNA, 20 nt, Human
ucuugcuucucuaguucuuu

SEQ ID NO: 1214660 - RNA, 21 nt, Human
ucuuuguucucauugguuuca

SEQ ID NO: 1214661 - RNA, 18 nt, Human
ugaagggagcagucugaa

SEQ ID NO: 1214662 - RNA, 18 nt, Human
ugaaggguuuuuuguguc

SEQ ID NO: 1214663 - RNA, 24 nt, Human
ugacccccuggugguguaacccag

SEQ ID NO: 1214664 - RNA, 22 nt, Human
ugacucccaggccuccagcccc

SEQ ID NO: 1214665 - RNA, 21 nt, Human
ugagauccaugagccagagcu

SEQ ID NO: 1214666 - RNA, 21 nt, Human
ugagugaguuucuuaauccug

SEQ ID NO: 1214667 - RNA, 20 nt, Human
ugaugcagggggaggacugu

SEQ ID NO: 1214668 - RNA, 23 nt, Human
ugaugcagggggaggacuguauu

SEQ ID NO: 1214669 - RNA, 21 nt, Human
ugauuuggagcaggggcgggg

SEQ ID NO: 1214670 - RNA, 20 nt, Human
ugcacagaccacuagacccc

SEQ ID NO: 1214671 - RNA, 24 nt, Human
ugccccagggggugcgccccaucc

SEQ ID NO: 1214672 - RNA, 24 nt, Human
ugcucacuguguuaaaggcuuuau

SEQ ID NO: 1214673 - RNA, 18 nt, Human
ugcuccugcucacaccau

SEQ ID NO: 1214674 - RNA, 18 nt, Human
ugcuuuucucuccccucc

SEQ ID NO: 1214675 - RNA, 20 nt, Human
uggaaaccaggaccuccugc

SEQ ID NO: 1214676 - RNA, 22 nt, Human
uggaaaccaggaccuccugcuu

SEQ ID NO: 1214677 - RNA, 18 nt, Human
uggaggagcagccugaga

SEQ ID NO: 1214678 - RNA, 23 nt, Human
ugggauuuguaggcagggccugg

SEQ ID NO: 1214679 - RNA, 25 nt, Human
ugggcagaacuuucuauaaaccauc

SEQ ID NO: 1214680 - RNA, 23 nt, Human
ugggccuagcucaugacccuggc

SEQ ID NO: 1214681 - RNA, 19 nt, Human
ugguauguugugucuuugu

SEQ ID NO: 1214682 - RNA, 23 nt, Human
ugguauguugugucuuuguucuc

SEQ ID NO: 1214683 - RNA, 18 nt, Human
uguaggcagggccuggcu

SEQ ID NO: 1214684 - RNA, 23 nt, Human
uguaggugcugugucuuugcuca

SEQ ID NO: 1214685 - RNA, 21 nt, Human
ugucuagaagccccacagcug

SEQ ID NO: 1214686 - RNA, 25 nt, Human
ugucugguuuuucaaaggugaaggg

SEQ ID NO: 1214687 - RNA, 22 nt, Human
uguggagcgcgcagccugggcc

SEQ ID NO: 1214688 - RNA, 24 nt, Human
uguguacugagaggcgcuugcgua

SEQ ID NO: 1214689 - RNA, 19 nt, Human
uguugauuuugguggagag

SEQ ID NO: 1214690 - RNA, 23 nt, Human
uuacacaguucugggacaaaacu

SEQ ID NO: 1214691 - RNA, 21 nt, Human
uuagagaaccuggcucugucc

SEQ ID NO: 1214692 - RNA, 21 nt, Human
uucaaaaaaccagcuccugga

SEQ ID NO: 1214693 - RNA, 20 nt, Human
uuccaggaacagaagcaucc

SEQ ID NO: 1214694 - RNA, 24 nt, Human
uugcacuguggucugagagacagu

SEQ ID NO: 1214695 - RNA, 21 nt, Human
uugcuagcggucuaucaauau

SEQ ID NO: 1214696 - RNA, 24 nt, Human
uugcugaggagugcuuuacuucca

SEQ ID NO: 1214697 - RNA, 19 nt, Human
uuuccaggaacagaagcau

SEQ ID NO: 1214698 - RNA, 23 nt, Human
uuucuguucuuuuccauuugcuc

SEQ ID NO: 1214699 - RNA, 24 nt, Human
aaaaggagaaaaacgacgaaaaaa

SEQ ID NO: 1214700 - RNA, 18 nt, Human
aaacaccgccgacuucua

SEQ ID NO: 1214701 - RNA, 21 nt, Human
aaaggagaaaaacgacgaaaa

SEQ ID NO: 1214702 - RNA, 21 nt, Human
aauugucauccccugcaucuc

SEQ ID NO: 1214703 - RNA, 18 nt, Human
agacgugaaaucugugac

SEQ ID NO: 1214704 - RNA, 21 nt, Human
aggaaaaacaaauggaaaaag

SEQ ID NO: 1214705 - RNA, 23 nt, Human
aggaaaaacaaauggaaaaagga

SEQ ID NO: 1214706 - RNA, 21 nt, Human
aggagaaaaacgacgaaaaaa

SEQ ID NO: 1214707 - RNA, 22 nt, Human
aggagaaaaacgacgaaaaaag

SEQ ID NO: 1214708 - RNA, 18 nt, Human
agguuacucaggacucug

SEQ ID NO: 1214709 - RNA, 22 nt, Human
caaaagaagcaccagaucggug

SEQ ID NO: 1214710 - RNA, 24 nt, Human
cagcuucagcucuuucugagacuu

SEQ ID NO: 1214711 - RNA, 23 nt, Human
ccagccaucucccaaaauuguca

SEQ ID NO: 1214712 - RNA, 22 nt, Human
cccugcaucucacagggaaaac

SEQ ID NO: 1214713 - RNA, 19 nt, Human
cugacccugguucagccuc

SEQ ID NO: 1214714 - RNA, 22 nt, Human
cugaucaccgaauggaaacacu

SEQ ID NO: 1214715 - RNA, 20 nt, Human
gaccaugguugaggaauuuu

SEQ ID NO: 1214716 - RNA, 21 nt, Human
guaaauggauuaggaacaaaa

SEQ ID NO: 1214717 - RNA, 18 nt, Human
gucagcgucaaucugcau

SEQ ID NO: 1214718 - RNA, 18 nt, Human
ucacggaggucccugucc

SEQ ID NO: 1214719 - RNA, 20 nt, Human
uccccugcaucucacagggg

SEQ ID NO: 1214720 - RNA, 24 nt, Human
ucugugaccaggauccauaaagac

SEQ ID NO: 1214721 - RNA, 22 nt, Human
ugagacuucuagccugcacuua

SEQ ID NO: 1214722 - RNA, 21 nt, Human
uggaaaaaggagaaaaacgac

SEQ ID NO: 1214723 - RNA, 22 nt, Human
uggauuaggaacaaaagaagca

SEQ ID NO: 1214724 - RNA, 22 nt, Human
uuaagcagcuucagcucuuucu

SEQ ID NO: 1214725 - RNA, 19 nt, Human
acaaaguauuugguagguu

SEQ ID NO: 1214726 - RNA, 18 nt, Human
acccaaugguuugaugau

SEQ ID NO: 1214727 - RNA, 20 nt, Human
caccgcggccccgcccgggc

SEQ ID NO: 1214728 - RNA, 25 nt, Human
ccgccgggagguugguuagugcccg

SEQ ID NO: 1214729 - RNA, 21 nt, Human
cgggauuauucugaaagucac

SEQ ID NO: 1214730 - RNA, 21 nt, Human
gacgcgaaggcaucccaggga

SEQ ID NO: 1214731 - RNA, 21 nt, Human
ggccgaauaacgagcucaccg

SEQ ID NO: 1214732 - RNA, 23 nt, Human
uaaaaacaaaguuaguuacaaag

SEQ ID NO: 1214733 - RNA, 20 nt, Human
uaaaaggaaagcucucuuac

SEQ ID NO: 1214734 - RNA, 19 nt, Human
ugcggaggcagaaaagcug

SEQ ID NO: 1214735 - RNA, 18 nt, Human
uuaauccauggauucauu

SEQ ID NO: 1214736 - RNA, 24 nt, Human
cacccacacagguagaaaccagcg

SEQ ID NO: 1214737 - RNA, 20 nt, Human
uauccaaaccuucuucaccc

SEQ ID NO: 1214738 - RNA, 22 nt, Human
ucaaaacauauuauaagaucaa

SEQ ID NO: 1214739 - RNA, 19 nt, Human
ugggcucuucugggaauca

SEQ ID NO: 1214740 - RNA, 19 nt, Human
aaucaaugugucuguggug

SEQ ID NO: 1214741 - RNA, 21 nt, Human
accgccauccaccggcugguc

SEQ ID NO: 1214742 - RNA, 23 nt, Human
cacugggacccgguccgccccga

SEQ ID NO: 1214743 - RNA, 21 nt, Human
caggagugaccacugggaccc

SEQ ID NO: 1214744 - RNA, 19 nt, Human
cagggacaggagugaccac

SEQ ID NO: 1214745 - RNA, 19 nt, Human
ccacugggacccgguccgc

SEQ ID NO: 1214746 - RNA, 21 nt, Human
ccacugggacccgguccgccc

SEQ ID NO: 1214747 - RNA, 20 nt, Human
ccccagggacaggagugacc

SEQ ID NO: 1214748 - RNA, 18 nt, Human
cgccccccauuccccacc

SEQ ID NO: 1214749 - RNA, 25 nt, Human
cgggaguggcuaaaccccagggaca

SEQ ID NO: 1214750 - RNA, 20 nt, Human
cugaaaccuaagauuagcaa

SEQ ID NO: 1214751 - RNA, 21 nt, Human
cugauugauggcuaucuuucc

SEQ ID NO: 1214752 - RNA, 20 nt, Human
cuggucucagggauucagaa

SEQ ID NO: 1214753 - RNA, 22 nt, Human
gccauccaccggcuggucucag

SEQ ID NO: 1214754 - RNA, 21 nt, Human
ggcgccccccauuccccaccc

SEQ ID NO: 1214755 - RNA, 24 nt, Human
gggaguggcuaaaccccagggaca

SEQ ID NO: 1214756 - RNA, 21 nt, Human
ucagaaaaacuacaugagaua

SEQ ID NO: 1214757 - RNA, 23 nt, Human
uccccacccgucaccgccaucca

SEQ ID NO: 1214758 - RNA, 19 nt, Human
uugguugggaagaaugggg

SEQ ID NO: 1214759 - RNA, 18 nt, Human
acuagacuuaucucuauu

SEQ ID NO: 1214760 - RNA, 22 nt, Human
acuuugcagaaaugaagagaaa

SEQ ID NO: 1214761 - RNA, 19 nt, Human
aggaaacugggugaaaggg

SEQ ID NO: 1214762 - RNA, 20 nt, Human
cagcaagaaucgggaggaaa

SEQ ID NO: 1214763 - RNA, 20 nt, Human
gaaaggcugcgaggcuugag

SEQ ID NO: 1214764 - RNA, 24 nt, Human
guaacuuugcagaaaugaagagaa

SEQ ID NO: 1214765 - RNA, 24 nt, Human
ucgagaaccgcuucccaauuuugu

SEQ ID NO: 1214766 - RNA, 21 nt, Human
ugaggugggcaaaaugcaaac

SEQ ID NO: 1214767 - RNA, 22 nt, Human
ugaggugggcaaaaugcaaacu

SEQ ID NO: 1214768 - RNA, 21 nt, Human
ugcaaacuuuucucugggauc

SEQ ID NO: 1214769 - RNA, 19 nt, Human
uguacuagacuuaucucua

SEQ ID NO: 1214770 - RNA, 21 nt, Human
uuucuucacaacucacugcaa

SEQ ID NO: 1214771 - RNA, 19 nt, Human
uuuguacuagacuuaucuc

SEQ ID NO: 1214772 - RNA, 21 nt, Human
aacacagccagcagaagacac

SEQ ID NO: 1214773 - RNA, 21 nt, Human
aacagcucagcucccaaccuc

SEQ ID NO: 1214774 - RNA, 22 nt, Human
aaccagggaugagaacagcuca

SEQ ID NO: 1214775 - RNA, 24 nt, Human
aacccgaugccauaauuucugguc

SEQ ID NO: 1214776 - RNA, 22 nt, Human
aagaaccuggaguccgauguua

SEQ ID NO: 1214777 - RNA, 19 nt, Human
aagaagaaaggaagagaaa

SEQ ID NO: 1214778 - RNA, 24 nt, Human
aagaagaaaggaagagaaaugcaa

SEQ ID NO: 1214779 - RNA, 18 nt, Human
aagacaggagguagcccu

SEQ ID NO: 1214780 - RNA, 24 nt, Human
aagaggcaaauacugaaaaucagg

SEQ ID NO: 1214781 - RNA, 21 nt, Human
aagcccaagagcugggccccg

SEQ ID NO: 1214782 - RNA, 19 nt, Human
aagccccacagcccccuca

SEQ ID NO: 1214783 - RNA, 23 nt, Human
aagcuccaccccucacuccaggu

SEQ ID NO: 1214784 - RNA, 23 nt, Human
aagcuccucccugccgugccccg

SEQ ID NO: 1214785 - RNA, 22 nt, Human
aaggaaccagggaugagaacag

SEQ ID NO: 1214786 - RNA, 22 nt, Human
aaggccccacauccauugagaa

SEQ ID NO: 1214787 - RNA, 23 nt, Human
aaucaaguaagccccgcagacca

SEQ ID NO: 1214788 - RNA, 19 nt, Human
aaucaaguugacacucagu

SEQ ID NO: 1214789 - RNA, 24 nt, Human
aaucaggguucccucuccccaaga

SEQ ID NO: 1214790 - RNA, 21 nt, Human
aaugcccucacagacacuucc

SEQ ID NO: 1214791 - RNA, 26 nt, Human
aauggaggauggaggacagcgagaag

SEQ ID NO: 1214792 - RNA, 21 nt, Human
acaagacuccacaaggacagc

SEQ ID NO: 1214793 - RNA, 24 nt, Human
acacugaggucuuccaugcagcca

SEQ ID NO: 1214794 - RNA, 22 nt, Human
acagccccugccucuagccauu

SEQ ID NO: 1214795 - RNA, 21 nt, Human
acaguacccuggcccuucuca

SEQ ID NO: 1214796 - RNA, 24 nt, Human
accagcuggccacgcaacaggucu

SEQ ID NO: 1214797 - RNA, 18 nt, Human
acccagaaauucccagca

SEQ ID NO: 1214798 - RNA, 20 nt, Human
accuaucccugcuucucccu

SEQ ID NO: 1214799 - RNA, 26 nt, Human
acggugacugauucccaaugcuagag

SEQ ID NO: 1214800 - RNA, 22 nt, Human
acucaccuccccugggccccag

SEQ ID NO: 1214801 - RNA, 23 nt, Human
acucgccucuuccugaggccccu

SEQ ID NO: 1214802 - RNA, 20 nt, Human
acucugacagcgcugcuucc

SEQ ID NO: 1214803 - RNA, 20 nt, Human
acugauucccaaugcuagag

SEQ ID NO: 1214804 - RNA, 21 nt, Human
acuuuccggagcgcugggguc

SEQ ID NO: 1214805 - RNA, 22 nt, Human
acuuuggggcuguggggggcag

SEQ ID NO: 1214806 - RNA, 22 nt, Human
agaaaacucuucagcacagccc

SEQ ID NO: 1214807 - RNA, 20 nt, Human
agaagaagaaaggaagagaa

SEQ ID NO: 1214808 - RNA, 23 nt, Human
agacaagccccacagcccccuca

SEQ ID NO: 1214809 - RNA, 23 nt, Human
agaccagggaacugcagguggug

SEQ ID NO: 1214810 - RNA, 21 nt, Human
agacccagaaauucccagcaa

SEQ ID NO: 1214811 - RNA, 20 nt, Human
agauucuugccuggaggagg

SEQ ID NO: 1214812 - RNA, 18 nt, Human
agcaagagacagaccagg

SEQ ID NO: 1214813 - RNA, 21 nt, Human
agcaagagacagaccagggaa

SEQ ID NO: 1214814 - RNA, 19 nt, Human
agcaauacaguacccuggc

SEQ ID NO: 1214815 - RNA, 19 nt, Human
agcacaaggggugggggca

SEQ ID NO: 1214816 - RNA, 22 nt, Human
agcacccacggggaagggggca

SEQ ID NO: 1214817 - RNA, 20 nt, Human
agcaggagguggucagcugg

SEQ ID NO: 1214818 - RNA, 19 nt, Human
agccccuggugucaggccu

SEQ ID NO: 1214819 - RNA, 21 nt, Human
agcuguggucaaggcucagau

SEQ ID NO: 1214820 - RNA, 25 nt, Human
agcugugugagagagggagcugugg

SEQ ID NO: 1214821 - RNA, 21 nt, Human
agcuucagccauuggaggagu

SEQ ID NO: 1214822 - RNA, 24 nt, Human
aggaaaagaggcaaauacugaaaa

SEQ ID NO: 1214823 - RNA, 20 nt, Human
aggaagcagagguacuuucc

SEQ ID NO: 1214824 - RNA, 23 nt, Human
aggaagcugugugagagagggag

SEQ ID NO: 1214825 - RNA, 19 nt, Human
aggcagccagagaguggga

SEQ ID NO: 1214826 - RNA, 21 nt, Human
aggcaguuuccccaaauuagc

SEQ ID NO: 1214827 - RNA, 19 nt, Human
aggcauugucuaccuccuc

SEQ ID NO: 1214828 - RNA, 21 nt, Human
aggcccuggcaccuuuguucc

SEQ ID NO: 1214829 - RNA, 24 nt, Human
aggcugugccacccucggucacca

SEQ ID NO: 1214830 - RNA, 24 nt, Human
agggaagagcuuccucuuguuggg

SEQ ID NO: 1214831 - RNA, 21 nt, Human
aggggggcucccaggacuaca

SEQ ID NO: 1214832 - RNA, 22 nt, Human
aguagaauuucugcuggggucu

SEQ ID NO: 1214833 - RNA, 23 nt, Human
agucgcccaagcuuaagcccaga

SEQ ID NO: 1214834 - RNA, 24 nt, Human
aguggcgcacuuuggaggggcaau

SEQ ID NO: 1214835 - RNA, 24 nt, Human
auagacagauauagauauagauaa

SEQ ID NO: 1214836 - RNA, 21 nt, Human
aucccagcuccaccccgcccc

SEQ ID NO: 1214837 - RNA, 21 nt, Human
aucgaucccugcucagauucc

SEQ ID NO: 1214838 - RNA, 19 nt, Human
augcagggccuguucuguc

SEQ ID NO: 1214839 - RNA, 19 nt, Human
augcucugcaccugcaccc

SEQ ID NO: 1214840 - RNA, 20 nt, Human
augcucugcaccugcaccca

SEQ ID NO: 1214841 - RNA, 23 nt, Human
augguggcaggaagcagagguac

SEQ ID NO: 1214842 - RNA, 23 nt, Human
caaaccccaagaacaagcacagg

SEQ ID NO: 1214843 - RNA, 19 nt, Human
caaagcccgaaucagcauu

SEQ ID NO: 1214844 - RNA, 24 nt, Human
caaagugggcccacacuuccucca

SEQ ID NO: 1214845 - RNA, 18 nt, Human
caacaccagcaccuuggc

SEQ ID NO: 1214846 - RNA, 18 nt, Human
caagagacagaccaggga

SEQ ID NO: 1214847 - RNA, 19 nt, Human
caagaggaagcccaagagc

SEQ ID NO: 1214848 - RNA, 20 nt, Human
caagaggaagcccaagagcu

SEQ ID NO: 1214849 - RNA, 24 nt, Human
caagccccacagcccccucaaaaa

SEQ ID NO: 1214850 - RNA, 19 nt, Human
caagcuuaagcccagaccc

SEQ ID NO: 1214851 - RNA, 21 nt, Human
caaggccaagugagagacugg

SEQ ID NO: 1214852 - RNA, 21 nt, Human
caauaggcugucugcaaguuu

SEQ ID NO: 1214853 - RNA, 22 nt, Human
cacacuuccuccacuaccccug

SEQ ID NO: 1214854 - RNA, 18 nt, Human
cacagccccgaggaaugg

SEQ ID NO: 1214855 - RNA, 20 nt, Human
cacagccucaccuugugucc

SEQ ID NO: 1214856 - RNA, 19 nt, Human
cacagcuaccuacagagca

SEQ ID NO: 1214857 - RNA, 24 nt, Human
caccauguugugcgucagcaaggc

SEQ ID NO: 1214858 - RNA, 19 nt, Human
cacccauggucccaaugcc

SEQ ID NO: 1214859 - RNA, 22 nt, Human
cacccccaugcuuggucggggg

SEQ ID NO: 1214860 - RNA, 18 nt, Human
caccccgccccgcagcca

SEQ ID NO: 1214861 - RNA, 23 nt, Human
caccuuggcugggaagcuaaggg

SEQ ID NO: 1214862 - RNA, 18 nt, Human
cacuaccccugcuguugc

SEQ ID NO: 1214863 - RNA, 19 nt, Human
cacuaccccugcuguugcu

SEQ ID NO: 1214864 - RNA, 22 nt, Human
cagaaagggguccgugcuggug

SEQ ID NO: 1214865 - RNA, 23 nt, Human
cagaaauggguuugauucucagc

SEQ ID NO: 1214866 - RNA, 24 nt, Human
cagaauggaggauggaggacagcg

SEQ ID NO: 1214867 - RNA, 18 nt, Human
cagaggccucugccagcu

SEQ ID NO: 1214868 - RNA, 23 nt, Human
cagauguccagggcuggggggca

SEQ ID NO: 1214869 - RNA, 22 nt, Human
cagcacccuagaaauagcuugg

SEQ ID NO: 1214870 - RNA, 24 nt, Human
cagcaccgaccucacaugcacugg

SEQ ID NO: 1214871 - RNA, 19 nt, Human
cagcaccugggauuuacgc

SEQ ID NO: 1214872 - RNA, 18 nt, Human
cagcaggauccagcugua

SEQ ID NO: 1214873 - RNA, 23 nt, Human
cagcccccucaaaaacgaccacc

SEQ ID NO: 1214874 - RNA, 22 nt, Human
cagccucagcuccuccuggccc

SEQ ID NO: 1214875 - RNA, 25 nt, Human
cagcuccccaagaaggagacuguca

SEQ ID NO: 1214876 - RNA, 21 nt, Human
cagcucugacucaccuccccu

SEQ ID NO: 1214877 - RNA, 18 nt, Human
cagcugccaccuacccca

SEQ ID NO: 1214878 - RNA, 21 nt, Human
cagcugggcauccacaaagcc

SEQ ID NO: 1214879 - RNA, 24 nt, Human
cagcuuggugccagcaagagacag

SEQ ID NO: 1214880 - RNA, 25 nt, Human
caggccaaagagggccuccccaggc

SEQ ID NO: 1214881 - RNA, 19 nt, Human
cagggcagccagccccacc

SEQ ID NO: 1214882 - RNA, 21 nt, Human
caggguuagggauagaggggg

SEQ ID NO: 1214883 - RNA, 19 nt, Human
caggguuccuucauccuga

SEQ ID NO: 1214884 - RNA, 22 nt, Human
caguagaaccauuuuccuuaga

SEQ ID NO: 1214885 - RNA, 21 nt, Human
cagugggacuccuccucuuuu

SEQ ID NO: 1214886 - RNA, 22 nt, Human
cagugggacuccuccucuuuug

SEQ ID NO: 1214887 - RNA, 20 nt, Human
cagugucaaaccaaaguggg

SEQ ID NO: 1214888 - RNA, 19 nt, Human
caugcugacggugguccug

SEQ ID NO: 1214889 - RNA, 21 nt, Human
caugcuuggucggggguggga

SEQ ID NO: 1214890 - RNA, 21 nt, Human
cauggaccacagguggcccuc

SEQ ID NO: 1214891 - RNA, 18 nt, Human
cauggcucagcuagcucc

SEQ ID NO: 1214892 - RNA, 19 nt, Human
cauguguaggugugugugu

SEQ ID NO: 1214893 - RNA, 25 nt, Human
cauguguaggugugugugugugugu

SEQ ID NO: 1214894 - RNA, 21 nt, Human
cauuguuuccaccguggccaa

SEQ ID NO: 1214895 - RNA, 23 nt, Human
cauuuaccuacccagcacccacg

SEQ ID NO: 1214896 - RNA, 22 nt, Human
ccaagagcugggccccgccacc

SEQ ID NO: 1214897 - RNA, 22 nt, Human
ccacacacccagacucucagac

SEQ ID NO: 1214898 - RNA, 18 nt, Human
ccacagugggacuccucc

SEQ ID NO: 1214899 - RNA, 23 nt, Human
ccacauggaagacgcagcugaug

SEQ ID NO: 1214900 - RNA, 18 nt, Human
ccaccccgccccgcagcc

SEQ ID NO: 1214901 - RNA, 18 nt, Human
ccaccuaccccaggccac

SEQ ID NO: 1214902 - RNA, 22 nt, Human
ccacggggaagggggcacaucu

SEQ ID NO: 1214903 - RNA, 28 nt, Human
ccacugugccuacucugcccacuccucc

SEQ ID NO: 1214904 - RNA, 20 nt, Human
ccagaaggcacagccucacc

SEQ ID NO: 1214905 - RNA, 21 nt, Human
ccagacaggaacugaaguaga

SEQ ID NO: 1214906 - RNA, 23 nt, Human
ccagaggccucugccagcucuga

SEQ ID NO: 1214907 - RNA, 22 nt, Human
ccagcacccacggggaaggggg

SEQ ID NO: 1214908 - RNA, 19 nt, Human
ccagcuccaccccgccccg

SEQ ID NO: 1214909 - RNA, 21 nt, Human
ccagcucugacucaccucccc

SEQ ID NO: 1214910 - RNA, 20 nt, Human
ccaggagccaacuguugaau

SEQ ID NO: 1214911 - RNA, 23 nt, Human
ccaggcaggcaaggcagccagag

SEQ ID NO: 1214912 - RNA, 22 nt, Human
ccaggccacauggaagacgcag

SEQ ID NO: 1214913 - RNA, 18 nt, Human
ccaggccagaucgauccc

SEQ ID NO: 1214914 - RNA, 21 nt, Human
ccaggccgggcuagggacaug

SEQ ID NO: 1214915 - RNA, 21 nt, Human
ccaguggugagaacaucccag

SEQ ID NO: 1214916 - RNA, 22 nt, Human
ccauuguuuccaccguggccaa

SEQ ID NO: 1214917 - RNA, 23 nt, Human
cccaagagcugggccccgccacc

SEQ ID NO: 1214918 - RNA, 25 nt, Human
cccacagccccugccucuagccuug

SEQ ID NO: 1214919 - RNA, 23 nt, Human
cccacagugggaauauuuauacc

SEQ ID NO: 1214920 - RNA, 21 nt, Human
cccaccaguauuaaagguggg

SEQ ID NO: 1214921 - RNA, 25 nt, Human
cccaccuaucccugcuucucccuca

SEQ ID NO: 1214922 - RNA, 25 nt, Human
cccagaccuugacuuggcaggaggu

SEQ ID NO: 1214923 - RNA, 21 nt, Human
cccagcuccaccccgccccgc

SEQ ID NO: 1214924 - RNA, 22 nt, Human
cccaggccagaucgaucccugc

SEQ ID NO: 1214925 - RNA, 19 nt, Human
cccaggggcugggauagga

SEQ ID NO: 1214926 - RNA, 22 nt, Human
cccaugcuuggucggggguggg

SEQ ID NO: 1214927 - RNA, 23 nt, Human
ccccagagccucuggcuuaucac

SEQ ID NO: 1214928 - RNA, 25 nt, Human
ccccagagccucuggcuuaucacag

SEQ ID NO: 1214929 - RNA, 25 nt, Human
ccccagagccucuggcuuaucacag

SEQ ID NO: 1214930 - RNA, 23 nt, Human
ccccauuguuuccaccguggcca

SEQ ID NO: 1214931 - RNA, 21 nt, Human
cccccagagccucuggcuuau

SEQ ID NO: 1214932 - RNA, 23 nt, Human
cccccaggccagaucgaucccug

SEQ ID NO: 1214933 - RNA, 21 nt, Human
ccccgaggaauggaguuucug

SEQ ID NO: 1214934 - RNA, 23 nt, Human
ccccgccacccaggccgggcuag

SEQ ID NO: 1214935 - RNA, 19 nt, Human
ccccguaccuccucccagg

SEQ ID NO: 1214936 - RNA, 21 nt, Human
ccccguaccuccucccaggcc

SEQ ID NO: 1214937 - RNA, 21 nt, Human
ccccucaaaaacgaccaccuc

SEQ ID NO: 1214938 - RNA, 22 nt, Human
ccccucaggucacacugaacag

SEQ ID NO: 1214939 - RNA, 21 nt, Human
ccccugggccccagaggaguc

SEQ ID NO: 1214940 - RNA, 21 nt, Human
cccguaccuccucccaggcca

SEQ ID NO: 1214941 - RNA, 19 nt, Human
cccucaaaaacgaccaccu

SEQ ID NO: 1214942 - RNA, 20 nt, Human
cccucaaaaacgaccaccuc

SEQ ID NO: 1214943 - RNA, 21 nt, Human
cccucaaaccccaagaacaag

SEQ ID NO: 1214944 - RNA, 19 nt, Human
cccucacagacacuuccag

SEQ ID NO: 1214945 - RNA, 18 nt, Human
cccucagccacacguggc

SEQ ID NO: 1214946 - RNA, 23 nt, Human
cccucaggucacacugaacagca

SEQ ID NO: 1214947 - RNA, 18 nt, Human
cccuccuccugccagcac

SEQ ID NO: 1214948 - RNA, 23 nt, Human
cccugcucagauuccuucuccua

SEQ ID NO: 1214949 - RNA, 19 nt, Human
cccugcuguugcuuccugc

SEQ ID NO: 1214950 - RNA, 22 nt, Human
cccugggccccagaggagucuc

SEQ ID NO: 1214951 - RNA, 18 nt, Human
ccgagucucaaaacugaa

SEQ ID NO: 1214952 - RNA, 20 nt, Human
ccggccccauuguuuccacc

SEQ ID NO: 1214953 - RNA, 21 nt, Human
ccgggcgggggguacuuuggg

SEQ ID NO: 1214954 - RNA, 24 nt, Human
ccguccagcagccucuuuggcugc

SEQ ID NO: 1214955 - RNA, 24 nt, Human
ccuacagagcacccccaugcuugg

SEQ ID NO: 1214956 - RNA, 20 nt, Human
ccucaaaaacgaccaccucc

SEQ ID NO: 1214957 - RNA, 24 nt, Human
ccucaaaaacgaccaccuccagga

SEQ ID NO: 1214958 - RNA, 18 nt, Human
ccucagggcagccagccc

SEQ ID NO: 1214959 - RNA, 18 nt, Human
ccucaggucacacugaac

SEQ ID NO: 1214960 - RNA, 28 nt, Human
ccucaugguucugccauacggugcugcc

SEQ ID NO: 1214961 - RNA, 24 nt, Human
ccuccacuaccccugcuguugcuu

SEQ ID NO: 1214962 - RNA, 23 nt, Human
ccuccauggguuggcuggggcca

SEQ ID NO: 1214963 - RNA, 18 nt, Human
ccuccccaggcagaaggc

SEQ ID NO: 1214964 - RNA, 21 nt, Human
ccuccccugggccccagagga

SEQ ID NO: 1214965 - RNA, 22 nt, Human
ccucugcaaccagcuccccaag

SEQ ID NO: 1214966 - RNA, 24 nt, Human
ccugaggccccgccccggccacac

SEQ ID NO: 1214967 - RNA, 21 nt, Human
ccugcagauguccagggcugg

SEQ ID NO: 1214968 - RNA, 21 nt, Human
ccugcagcaggauccagcugu

SEQ ID NO: 1214969 - RNA, 18 nt, Human
ccugccgugccccgaggc

SEQ ID NO: 1214970 - RNA, 20 nt, Human
ccuguagggcugagugggag

SEQ ID NO: 1214971 - RNA, 21 nt, Human
ccuuggcaagcuccaccccuc

SEQ ID NO: 1214972 - RNA, 19 nt, Human
ccuuuuguggugauaagag

SEQ ID NO: 1214973 - RNA, 22 nt, Human
cgaaacauuuaccuacccagca

SEQ ID NO: 1214974 - RNA, 19 nt, Human
cgccacccaggccgggcua

SEQ ID NO: 1214975 - RNA, 24 nt, Human
cgccccggccacacccaugcacgg

SEQ ID NO: 1214976 - RNA, 21 nt, Human
cgcuaagaaccucccauggca

SEQ ID NO: 1214977 - RNA, 24 nt, Human
cgcuaagaaccucccauggcaggg

SEQ ID NO: 1214978 - RNA, 18 nt, Human
cggcuggaacggcucaca

SEQ ID NO: 1214979 - RNA, 21 nt, Human
cgggagcugaggcugccauug

SEQ ID NO: 1214980 - RNA, 18 nt, Human
cgucagagaucugggcca

SEQ ID NO: 1214981 - RNA, 23 nt, Human
cuaagcuccaggggcuuuccagg

SEQ ID NO: 1214982 - RNA, 22 nt, Human
cuagaaggggcugauggucugc

SEQ ID NO: 1214983 - RNA, 20 nt, Human
cucaaaaacgaccaccucca

SEQ ID NO: 1214984 - RNA, 21 nt, Human
cucaaaacugaagaaccugga

SEQ ID NO: 1214985 - RNA, 23 nt, Human
cucaccccccagagccucuggcu

SEQ ID NO: 1214986 - RNA, 21 nt, Human
cucagauucuugccuggagga

SEQ ID NO: 1214987 - RNA, 21 nt, Human
cucaggucacacugaacagca

SEQ ID NO: 1214988 - RNA, 19 nt, Human
cuccaaggccugcaccucc

SEQ ID NO: 1214989 - RNA, 21 nt, Human
cuccacuaccccugcuguugc

SEQ ID NO: 1214990 - RNA, 20 nt, Human
cuccaggaaucagugcuccc

SEQ ID NO: 1214991 - RNA, 20 nt, Human
cuccagguagcugaggacuc

SEQ ID NO: 1214992 - RNA, 18 nt, Human
cucccaaccuccccaggc

SEQ ID NO: 1214993 - RNA, 21 nt, Human
cucccaggccacgucaccacu

SEQ ID NO: 1214994 - RNA, 23 nt, Human
cuccgggugguucuaaccaaaga

SEQ ID NO: 1214995 - RNA, 19 nt, Human
cuccuccuggcccaggaca

SEQ ID NO: 1214996 - RNA, 27 nt, Human
cucuccccaagaaagcccuuugcgaaa

SEQ ID NO: 1214997 - RNA, 22 nt, Human
cucugcaaccagcuccccaaga

SEQ ID NO: 1214998 - RNA, 21 nt, Human
cucugccagcucugacucacc

SEQ ID NO: 1214999 - RNA, 20 nt, Human
cucugcccacuccuccauca

SEQ ID NO: 1215000 - RNA, 21 nt, Human
cugaggacuccucaguucgug

SEQ ID NO: 1215001 - RNA, 19 nt, Human
cugcaccugcacccaggug

SEQ ID NO: 1215002 - RNA, 24 nt, Human
cugcaccugcacccaggugucguc

SEQ ID NO: 1215003 - RNA, 24 nt, Human
cugcagccagccaccauguugugc

SEQ ID NO: 1215004 - RNA, 23 nt, Human
cugcagccucagcuccuccuggc

SEQ ID NO: 1215005 - RNA, 19 nt, Human
cugccucugagcacugccc

SEQ ID NO: 1215006 - RNA, 19 nt, Human
cugcuagaccagcuggcca

SEQ ID NO: 1215007 - RNA, 22 nt, Human
cugcuagaccagcuggccacgc

SEQ ID NO: 1215008 - RNA, 20 nt, Human
cugcuggggucugcagccuc

SEQ ID NO: 1215009 - RNA, 22 nt, Human
cugcuuccuccaggcaguuucc

SEQ ID NO: 1215010 - RNA, 22 nt, Human
cuggcaacaccagcaccuuggc

SEQ ID NO: 1215011 - RNA, 22 nt, Human
cuggcaagaggaagcccaagag

SEQ ID NO: 1215012 - RNA, 27 nt, Human
cuggcaccuuuguuccucagagaugcu

SEQ ID NO: 1215013 - RNA, 22 nt, Human
cugggccccgccacccaggccg

SEQ ID NO: 1215014 - RNA, 18 nt, Human
cugguccuggcggcagca

SEQ ID NO: 1215015 - RNA, 19 nt, Human
cuggucuaugccuuuugug

SEQ ID NO: 1215016 - RNA, 25 nt, Human
cugucugcaaguuugaggagcaagg

SEQ ID NO: 1215017 - RNA, 19 nt, Human
cugugcggcccgggcgggg

SEQ ID NO: 1215018 - RNA, 22 nt, Human
cuucccggccacgcccguccag

SEQ ID NO: 1215019 - RNA, 21 nt, Human
cuuccugaggccccuccugga

SEQ ID NO: 1215020 - RNA, 21 nt, Human
cuuggagguaguggggggggg

SEQ ID NO: 1215021 - RNA, 21 nt, Human
cuuuauauucgcuagcagcug

SEQ ID NO: 1215022 - RNA, 22 nt, Human
gaaaagaggcaaauacugaaaa

SEQ ID NO: 1215023 - RNA, 22 nt, Human
gaacacagccagcagaagacac

SEQ ID NO: 1215024 - RNA, 24 nt, Human
gaagacacauucccugucauccag

SEQ ID NO: 1215025 - RNA, 19 nt, Human
gaagaggggcuuugaaugg

SEQ ID NO: 1215026 - RNA, 22 nt, Human
gaagccucuagccuggagggua

SEQ ID NO: 1215027 - RNA, 22 nt, Human
gaagcuccucccugccgugccc

SEQ ID NO: 1215028 - RNA, 18 nt, Human
gaagugccaugcaagugc

SEQ ID NO: 1215029 - RNA, 18 nt, Human
gacagccaagccuuggga

SEQ ID NO: 1215030 - RNA, 22 nt, Human
gacucaccuccccugggcccca

SEQ ID NO: 1215031 - RNA, 20 nt, Human
gagaaaaaaucagauugccu

SEQ ID NO: 1215032 - RNA, 19 nt, Human
gagaagaagaaaggaagag

SEQ ID NO: 1215033 - RNA, 22 nt, Human
gagaaggagggcuucggguugg

SEQ ID NO: 1215034 - RNA, 19 nt, Human
gagagauggguggcucugc

SEQ ID NO: 1215035 - RNA, 19 nt, Human
gagaggcaggugauacugc

SEQ ID NO: 1215036 - RNA, 22 nt, Human
gagagugggacccagagaagcc

SEQ ID NO: 1215037 - RNA, 25 nt, Human
gagccaauccgagucucaaaacuga

SEQ ID NO: 1215038 - RNA, 21 nt, Human
gagccaccccgaugcaggggc

SEQ ID NO: 1215039 - RNA, 20 nt, Human
gagccauggccacagucacc

SEQ ID NO: 1215040 - RNA, 21 nt, Human
gaggaggcgaggugcugcagg

SEQ ID NO: 1215041 - RNA, 18 nt, Human
gaggauggaggacagcga

SEQ ID NO: 1215042 - RNA, 23 nt, Human
gagggacagcaggacugguagag

SEQ ID NO: 1215043 - RNA, 19 nt, Human
gaggucuuccaugcagccg

SEQ ID NO: 1215044 - RNA, 19 nt, Human
gaguacauauuggccagug

SEQ ID NO: 1215045 - RNA, 18 nt, Human
gagucucaaaacugaaga

SEQ ID NO: 1215046 - RNA, 24 nt, Human
gagugggagaggcucacagaggcc

SEQ ID NO: 1215047 - RNA, 19 nt, Human
gauagcagcuggaugaaau

SEQ ID NO: 1215048 - RNA, 18 nt, Human
gauggcagggucuggcug

SEQ ID NO: 1215049 - RNA, 21 nt, Human
gcaaagacaggagguagcccu

SEQ ID NO: 1215050 - RNA, 20 nt, Human
gcaccugcacccaggugucg

SEQ ID NO: 1215051 - RNA, 21 nt, Human
gcagaaaacucuucagcacag

SEQ ID NO: 1215052 - RNA, 18 nt, Human
gcagcaggagguggucag

SEQ ID NO: 1215053 - RNA, 22 nt, Human
gcaggccaagucucccagugcu

SEQ ID NO: 1215054 - RNA, 21 nt, Human
gccaaagagggccuccccagg

SEQ ID NO: 1215055 - RNA, 18 nt, Human
gccacacagagguaaggc

SEQ ID NO: 1215056 - RNA, 20 nt, Human
gccaccacucaagccaggcu

SEQ ID NO: 1215057 - RNA, 20 nt, Human
gccaccacucagucugaggc

SEQ ID NO: 1215058 - RNA, 20 nt, Human
gccagcuucaguggggcuag

SEQ ID NO: 1215059 - RNA, 22 nt, Human
gccaggccagcuucaguggggc

SEQ ID NO: 1215060 - RNA, 25 nt, Human
gcccaagcuuaagcccagaccccag

SEQ ID NO: 1215061 - RNA, 19 nt, Human
gccugcaccuccagcacca

SEQ ID NO: 1215062 - RNA, 23 nt, Human
gccuuaucugcaaagacauugau

SEQ ID NO: 1215063 - RNA, 21 nt, Human
gccuugggagccaggguggag

SEQ ID NO: 1215064 - RNA, 24 nt, Human
gcucagcucccaaccuccccaggc

SEQ ID NO: 1215065 - RNA, 18 nt, Human
gcugcauggaggcaaccc

SEQ ID NO: 1215066 - RNA, 18 nt, Human
ggaaccagggaugagaac

SEQ ID NO: 1215067 - RNA, 23 nt, Human
ggacccagagaagcccagggcca

SEQ ID NO: 1215068 - RNA, 20 nt, Human
ggacuucuaggggggcuccc

SEQ ID NO: 1215069 - RNA, 23 nt, Human
ggagagccaauccgagucucaaa

SEQ ID NO: 1215070 - RNA, 21 nt, Human
ggagagggucugcacaauaaa

SEQ ID NO: 1215071 - RNA, 19 nt, Human
ggagcuguggucaaggcuc

SEQ ID NO: 1215072 - RNA, 24 nt, Human
ggaggagucugcggccauugagag

SEQ ID NO: 1215073 - RNA, 21 nt, Human
ggaggcauucagaaacccauu

SEQ ID NO: 1215074 - RNA, 24 nt, Human
ggcaaauacugaaaaucaggguuc

SEQ ID NO: 1215075 - RNA, 18 nt, Human
ggcagccccuggugucag

SEQ ID NO: 1215076 - RNA, 27 nt, Human
ggcagggucuggcuguccacaggccgg

SEQ ID NO: 1215077 - RNA, 18 nt, Human
ggcauagggaggggagag

SEQ ID NO: 1215078 - RNA, 22 nt, Human
ggcaugacaguggggcgcacug

SEQ ID NO: 1215079 - RNA, 23 nt, Human
ggccacacccaugcacggaagcu

SEQ ID NO: 1215080 - RNA, 19 nt, Human
ggccuagaaggggcugaug

SEQ ID NO: 1215081 - RNA, 18 nt, Human
ggcugauggccuugaugg

SEQ ID NO: 1215082 - RNA, 24 nt, Human
gggacuucuaggggggcucccagg

SEQ ID NO: 1215083 - RNA, 19 nt, Human
gggagagauggguggcucu

SEQ ID NO: 1215084 - RNA, 21 nt, Human
gggagcaggcuccgccagccc

SEQ ID NO: 1215085 - RNA, 20 nt, Human
gggagcugaggcugccauug

SEQ ID NO: 1215086 - RNA, 18 nt, Human
gggagggauggguggguu

SEQ ID NO: 1215087 - RNA, 20 nt, Human
gggcaaugucagggaagagc

SEQ ID NO: 1215088 - RNA, 22 nt, Human
gggcaggagcuuauuggccuga

SEQ ID NO: 1215089 - RNA, 20 nt, Human
gggccccgccacccaggccg

SEQ ID NO: 1215090 - RNA, 22 nt, Human
gggccccgccacccaggccggg

SEQ ID NO: 1215091 - RNA, 24 nt, Human
gggggggggcaguugaagaggggc

SEQ ID NO: 1215092 - RNA, 22 nt, Human
ggggggggggcaguugaagagg

SEQ ID NO: 1215093 - RNA, 19 nt, Human
gggggucagaggcuggagg

SEQ ID NO: 1215094 - RNA, 18 nt, Human
gggucugggcauccuggg

SEQ ID NO: 1215095 - RNA, 20 nt, Human
ggguggcaucugugugcacu

SEQ ID NO: 1215096 - RNA, 24 nt, Human
ggguuagggauagagggggagggg

SEQ ID NO: 1215097 - RNA, 25 nt, Human
gguaguggggggggggcaguugaag

SEQ ID NO: 1215098 - RNA, 19 nt, Human
ggucugggcauccuggggc

SEQ ID NO: 1215099 - RNA, 19 nt, Human
ggugagaacaucccagcuc

SEQ ID NO: 1215100 - RNA, 19 nt, Human
ggugauggugguguagagu

SEQ ID NO: 1215101 - RNA, 18 nt, Human
ggugggagggauggcagg

SEQ ID NO: 1215102 - RNA, 21 nt, Human
ggugguggccagcuacugggg

SEQ ID NO: 1215103 - RNA, 21 nt, Human
ggugugugugugugugugugu

SEQ ID NO: 1215104 - RNA, 21 nt, Human
gguugcagaaagggguccgug

SEQ ID NO: 1215105 - RNA, 22 nt, Human
guaagacaagccccacagcccc

SEQ ID NO: 1215106 - RNA, 18 nt, Human
gucacuuguaggguggca

SEQ ID NO: 1215107 - RNA, 20 nt, Human
guccgugcuggugcacccuc

SEQ ID NO: 1215108 - RNA, 21 nt, Human
gucugcagccagccaccaugu

SEQ ID NO: 1215109 - RNA, 18 nt, Human
gugccaggccagcuucag

SEQ ID NO: 1215110 - RNA, 24 nt, Human
gugcuggacagaagggggcaggua

SEQ ID NO: 1215111 - RNA, 20 nt, Human
guggccauagcacaaggggu

SEQ ID NO: 1215112 - RNA, 19 nt, Human
gugggucugccuuccccag

SEQ ID NO: 1215113 - RNA, 21 nt, Human
gugguucuuaugcagggccug

SEQ ID NO: 1215114 - RNA, 23 nt, Human
gugugagagagggagcugugguc

SEQ ID NO: 1215115 - RNA, 21 nt, Human
gugugugugugugugugugug

SEQ ID NO: 1215116 - RNA, 20 nt, Human
guuagugguucuuaugcagg

SEQ ID NO: 1215117 - RNA, 22 nt, Human
guucugccauacggugcugccu

SEQ ID NO: 1215118 - RNA, 18 nt, Human
guugggccacaagacucc

SEQ ID NO: 1215119 - RNA, 21 nt, Human
uaagagcaaaacacagcacac

SEQ ID NO: 1215120 - RNA, 22 nt, Human
uaagagcaaaacacagcacacu

SEQ ID NO: 1215121 - RNA, 18 nt, Human
uaaggcuccaaggccugc

SEQ ID NO: 1215122 - RNA, 21 nt, Human
uacacaaucacaaggucccac

SEQ ID NO: 1215123 - RNA, 24 nt, Human
uacauacacccacuagggcauggu

SEQ ID NO: 1215124 - RNA, 23 nt, Human
uaccccaggccacauggaagacu

SEQ ID NO: 1215125 - RNA, 19 nt, Human
uacccuggcccuucucaac

SEQ ID NO: 1215126 - RNA, 21 nt, Human
uaccuccucccaggccacguc

SEQ ID NO: 1215127 - RNA, 21 nt, Human
uacugguccauggagauuucu

SEQ ID NO: 1215128 - RNA, 18 nt, Human
uagaaggggcugaugguc

SEQ ID NO: 1215129 - RNA, 21 nt, Human
uagaaggggcugauggucugc

SEQ ID NO: 1215130 - RNA, 23 nt, Human
uagaauuucugcuggggucugca

SEQ ID NO: 1215131 - RNA, 24 nt, Human
uagaauuucugcuggggucugcag

SEQ ID NO: 1215132 - RNA, 20 nt, Human
uagccagccugagccagcug

SEQ ID NO: 1215133 - RNA, 20 nt, Human
uaggugugugugugugugug

SEQ ID NO: 1215134 - RNA, 19 nt, Human
ucaaaccaaagugggccca

SEQ ID NO: 1215135 - RNA, 23 nt, Human
ucagaggacagcagcaaggccaa

SEQ ID NO: 1215136 - RNA, 21 nt, Human
ucagcaaggcuucccacagcc

SEQ ID NO: 1215137 - RNA, 24 nt, Human
ucagcaccagcugggcauccacaa

SEQ ID NO: 1215138 - RNA, 19 nt, Human
ucagcagcugccaccuacc

SEQ ID NO: 1215139 - RNA, 19 nt, Human
ucagcaggcacagcacagc

SEQ ID NO: 1215140 - RNA, 20 nt, Human
ucaggguucccucuccccaa

SEQ ID NO: 1215141 - RNA, 20 nt, Human
ucaucgguccugacagcacc

SEQ ID NO: 1215142 - RNA, 19 nt, Human
uccaacagaggccucugag

SEQ ID NO: 1215143 - RNA, 19 nt, Human
uccaacccgaugccauaau

SEQ ID NO: 1215144 - RNA, 21 nt, Human
uccacaaagcccgaaucagca

SEQ ID NO: 1215145 - RNA, 23 nt, Human
uccacaaagcccgaaucagcauu

SEQ ID NO: 1215146 - RNA, 23 nt, Human
uccacacacccagacucucagac

SEQ ID NO: 1215147 - RNA, 23 nt, Human
uccacagacagccaagccuuggg

SEQ ID NO: 1215148 - RNA, 19 nt, Human
uccacagagaacacagcca

SEQ ID NO: 1215149 - RNA, 19 nt, Human
uccaccccucacuccaggu

SEQ ID NO: 1215150 - RNA, 19 nt, Human
uccagggcuggggggcaga

SEQ ID NO: 1215151 - RNA, 27 nt, Human
ucccaacaaagagcccauaggguaccc

SEQ ID NO: 1215152 - RNA, 22 nt, Human
ucccacagccccugccucuagc

SEQ ID NO: 1215153 - RNA, 24 nt, Human
uccccaaauuagccucccugacuu

SEQ ID NO: 1215154 - RNA, 22 nt, Human
uccccaggccaccacucagucu

SEQ ID NO: 1215155 - RNA, 22 nt, Human
uccccaugccagccugcugccu

SEQ ID NO: 1215156 - RNA, 20 nt, Human
uccccucuaguuauccccuc

SEQ ID NO: 1215157 - RNA, 23 nt, Human
uccccugagcuccacagagaaca

SEQ ID NO: 1215158 - RNA, 21 nt, Human
ucccucaaaccccaagaacaa

SEQ ID NO: 1215159 - RNA, 24 nt, Human
ucccucaggccauucuuccagcug

SEQ ID NO: 1215160 - RNA, 21 nt, Human
ucccucuccccaagaaagccc

SEQ ID NO: 1215161 - RNA, 18 nt, Human
ucccugacuuccaacccg

SEQ ID NO: 1215162 - RNA, 21 nt, Human
ucccugcuucucccucaggcc

SEQ ID NO: 1215163 - RNA, 18 nt, Human
uccguggucuccagcugg

SEQ ID NO: 1215164 - RNA, 23 nt, Human
uccuugguccuggcaccagaagg

SEQ ID NO: 1215165 - RNA, 22 nt, Human
uccuugugggucagcaccagcu

SEQ ID NO: 1215166 - RNA, 18 nt, Human
uccuuuuucugccccucu

SEQ ID NO: 1215167 - RNA, 21 nt, Human
ucgcuguagugugccccucag

SEQ ID NO: 1215168 - RNA, 23 nt, Human
ucggacaccugcagcaggaucca

SEQ ID NO: 1215169 - RNA, 22 nt, Human
ucgggggugggagggauggcag

SEQ ID NO: 1215170 - RNA, 20 nt, Human
ucugccccucuuacacucuc

SEQ ID NO: 1215171 - RNA, 22 nt, Human
ucugcucgaggaaguagcuuca

SEQ ID NO: 1215172 - RNA, 18 nt, Human
ucugucuuggagguaguc

SEQ ID NO: 1215173 - RNA, 23 nt, Human
ucugucuuggagguagugggggg

SEQ ID NO: 1215174 - RNA, 22 nt, Human
ucuugugccaggccagcuucag

SEQ ID NO: 1215175 - RNA, 23 nt, Human
ugaaaaucaggguucccucuccc

SEQ ID NO: 1215176 - RNA, 20 nt, Human
ugaaggaaauccacacaccc

SEQ ID NO: 1215177 - RNA, 19 nt, Human
ugaaguccccaugccagcc

SEQ ID NO: 1215178 - RNA, 21 nt, Human
ugaauguugauguggaugcug

SEQ ID NO: 1215179 - RNA, 20 nt, Human
ugaauuuucaggaauuuuga

SEQ ID NO: 1215180 - RNA, 23 nt, Human
ugacagcacccuagaaauagcuu

SEQ ID NO: 1215181 - RNA, 26 nt, Human
ugacagcacccuagaaauagcuuggc

SEQ ID NO: 1215182 - RNA, 18 nt, Human
ugacuuccaacccgaugc

SEQ ID NO: 1215183 - RNA, 21 nt, Human
ugagaacagcucagcucccaa

SEQ ID NO: 1215184 - RNA, 23 nt, Human
ugagaacaucccagcuccacccc

SEQ ID NO: 1215185 - RNA, 19 nt, Human
ugagagacuggcagaggua

SEQ ID NO: 1215186 - RNA, 20 nt, Human
ugagaggcaggugauacugc

SEQ ID NO: 1215187 - RNA, 18 nt, Human
ugagcacugcccagaucc

SEQ ID NO: 1215188 - RNA, 23 nt, Human
ugagcuccacagagaacacagcc

SEQ ID NO: 1215189 - RNA, 22 nt, Human
ugaggacuccucaguucgugug

SEQ ID NO: 1215190 - RNA, 21 nt, Human
ugaggccuugcuggccggggc

SEQ ID NO: 1215191 - RNA, 18 nt, Human
ugagggacagcaggacug

SEQ ID NO: 1215192 - RNA, 20 nt, Human
ugaggggcugcaguugcaag

SEQ ID NO: 1215193 - RNA, 21 nt, Human
ugauccagcaccgaccucaca

SEQ ID NO: 1215194 - RNA, 20 nt, Human
ugauuagaaagaugguaccc

SEQ ID NO: 1215195 - RNA, 28 nt, Human
ugcaagugcuggacagaagggggcaggu

SEQ ID NO: 1215196 - RNA, 19 nt, Human
ugcaccugcacccaggugu

SEQ ID NO: 1215197 - RNA, 22 nt, Human
ugcagaaagggguccgugcugg

SEQ ID NO: 1215198 - RNA, 20 nt, Human
ugcagcaggauccagcugua

SEQ ID NO: 1215199 - RNA, 19 nt, Human
ugcagggagggaugggugg

SEQ ID NO: 1215200 - RNA, 18 nt, Human
ugcauucagccccuacuc

SEQ ID NO: 1215201 - RNA, 23 nt, Human
ugccaaggaguaaaggcucucag

SEQ ID NO: 1215202 - RNA, 19 nt, Human
ugccaccuaccccaggcca

SEQ ID NO: 1215203 - RNA, 25 nt, Human
ugccagagaggagguccuugugggu

SEQ ID NO: 1215204 - RNA, 24 nt, Human
ugccagcaugggcugcacaugccc

SEQ ID NO: 1215205 - RNA, 21 nt, Human
ugccaggagaaggagggcuuc

SEQ ID NO: 1215206 - RNA, 20 nt, Human
ugccccucuuacacucucug

SEQ ID NO: 1215207 - RNA, 27 nt, Human
ugccucuagccauugacacugaggucu

SEQ ID NO: 1215208 - RNA, 25 nt, Human
ugccuggaaggccaagggugccugc

SEQ ID NO: 1215209 - RNA, 18 nt, Human
ugccuggaggaggcgagg

SEQ ID NO: 1215210 - RNA, 23 nt, Human
ugccuggaggaggcgaggugcca

SEQ ID NO: 1215211 - RNA, 19 nt, Human
ugccuguggggacauccgg

SEQ ID NO: 1215212 - RNA, 20 nt, Human
ugcgggagcugaggcugcca

SEQ ID NO: 1215213 - RNA, 23 nt, Human
ugcgugaacaggacucgccucuu

SEQ ID NO: 1215214 - RNA, 21 nt, Human
ugcuagaccagcuggccacgc

SEQ ID NO: 1215215 - RNA, 20 nt, Human
ugcugaccuuguggggcugu

SEQ ID NO: 1215216 - RNA, 22 nt, Human
ugcugagcaggccaaagagggc

SEQ ID NO: 1215217 - RNA, 23 nt, Human
ugcugcagggagggauggguggg

SEQ ID NO: 1215218 - RNA, 18 nt, Human
ugcugccugucggacacc

SEQ ID NO: 1215219 - RNA, 19 nt, Human
ugcugcuuccuccaggcag

SEQ ID NO: 1215220 - RNA, 20 nt, Human
ugcuggacagaagggggcag

SEQ ID NO: 1215221 - RNA, 22 nt, Human
uggaaguggcgcacuuuggagg

SEQ ID NO: 1215222 - RNA, 20 nt, Human
uggagaacugcagcugcagg

SEQ ID NO: 1215223 - RNA, 20 nt, Human
uggagagggucugcacaaua

SEQ ID NO: 1215224 - RNA, 21 nt, Human
uggaggaggcgaggugcugca

SEQ ID NO: 1215225 - RNA, 18 nt, Human
uggagguagugggggggg

SEQ ID NO: 1215226 - RNA, 19 nt, Human
uggaggugaugagaggccu

SEQ ID NO: 1215227 - RNA, 23 nt, Human
uggagguuccuggagccagaggc

SEQ ID NO: 1215228 - RNA, 21 nt, Human
uggaugaagcagcagaugggc

SEQ ID NO: 1215229 - RNA, 22 nt, Human
uggauggccccguaccuccucc

SEQ ID NO: 1215230 - RNA, 25 nt, Human
uggcaagcuccaccccucacuccag

SEQ ID NO: 1215231 - RNA, 23 nt, Human
uggcaucugugugcacuggcccc

SEQ ID NO: 1215232 - RNA, 18 nt, Human
uggccaguggcuccgaga

SEQ ID NO: 1215233 - RNA, 25 nt, Human
uggcccaggacaagccugaccugca

SEQ ID NO: 1215234 - RNA, 18 nt, Human
uggccggggcuuuggaaa

SEQ ID NO: 1215235 - RNA, 18 nt, Human
uggccuggugcugccugu

SEQ ID NO: 1215236 - RNA, 22 nt, Human
uggcgcacuuuggaggggcaau

SEQ ID NO: 1215237 - RNA, 23 nt, Human
uggcggcagcagcaaauggcaua

SEQ ID NO: 1215238 - RNA, 18 nt, Human
uggcucaggcacgcaugg

SEQ ID NO: 1215239 - RNA, 19 nt, Human
uggcuccccgaccuggccc

SEQ ID NO: 1215240 - RNA, 20 nt, Human
uggcuggggccacggcuggg

SEQ ID NO: 1215241 - RNA, 18 nt, Human
uggcuugguggucacagc

SEQ ID NO: 1215242 - RNA, 19 nt, Human
ugggaucugggggugaugu

SEQ ID NO: 1215243 - RNA, 18 nt, Human
ugggccagacaggaacug

SEQ ID NO: 1215244 - RNA, 19 nt, Human
ugggcccugcugcuuccug

SEQ ID NO: 1215245 - RNA, 19 nt, Human
uggggcuagugggcccucu

SEQ ID NO: 1215246 - RNA, 18 nt, Human
uggggcuguggggggcag

SEQ ID NO: 1215247 - RNA, 24 nt, Human
uggggggggggcaguugaagaggg

SEQ ID NO: 1215248 - RNA, 18 nt, Human
uggggucugaaugggucc

SEQ ID NO: 1215249 - RNA, 19 nt, Human
ugggucagcaccagcuggg

SEQ ID NO: 1215250 - RNA, 20 nt, Human
uggugaguguaaacuccagg

SEQ ID NO: 1215251 - RNA, 21 nt, Human
uggugcugccugucggacacc

SEQ ID NO: 1215252 - RNA, 26 nt, Human
uggugcugccugucggacaccugauc

SEQ ID NO: 1215253 - RNA, 25 nt, Human
uguggucaaggcucagauucuugcc

SEQ ID NO: 1215254 - RNA, 23 nt, Human
uguguaggugugugugugugugu

SEQ ID NO: 1215255 - RNA, 28 nt, Human
uguguaggugugugugugugugugugug

SEQ ID NO: 1215256 - RNA, 18 nt, Human
ugugugugugugugugug

SEQ ID NO: 1215257 - RNA, 18 nt, Human
ugugugugugugugugug

SEQ ID NO: 1215258 - RNA, 18 nt, Human
ugugugugugugugugug

SEQ ID NO: 1215259 - RNA, 18 nt, Human
ugugugugugugugugug

SEQ ID NO: 1215260 - RNA, 21 nt, Human
ugugugugugugugugugugu

SEQ ID NO: 1215261 - RNA, 21 nt, Human
ugugugugugugugugugugu

SEQ ID NO: 1215262 - RNA, 21 nt, Human
ugugugugugugugugugugu

SEQ ID NO: 1215263 - RNA, 21 nt, Human
ugugugugugugugugugugu

SEQ ID NO: 1215264 - RNA, 21 nt, Human
ugugugugugugugugugugu

SEQ ID NO: 1215265 - RNA, 22 nt, Human
ugugugugugugugugugugug

SEQ ID NO: 1215266 - RNA, 22 nt, Human
ugugugugugugugugugugug

SEQ ID NO: 1215267 - RNA, 22 nt, Human
uguguguguguguguguguguu

SEQ ID NO: 1215268 - RNA, 23 nt, Human
uguugcgggagcugaggcugcca

SEQ ID NO: 1215269 - RNA, 18 nt, Human
uuaacuuacacaaucaca

SEQ ID NO: 1215270 - RNA, 22 nt, Human
uucacaggcuggauggccccgu

SEQ ID NO: 1215271 - RNA, 20 nt, Human
uucagccauuggaggaguug

SEQ ID NO: 1215272 - RNA, 22 nt, Human
uucaguggggcuagugggcccu

SEQ ID NO: 1215273 - RNA, 22 nt, Human
uucccucaaaccccaagaacaa

SEQ ID NO: 1215274 - RNA, 22 nt, Human
uuccuccaggcaguuuccccaa

SEQ ID NO: 1215275 - RNA, 23 nt, Human
uuccuccaggcaguuuccccaaa

SEQ ID NO: 1215276 - RNA, 20 nt, Human
uuccucuuguugggccacaa

SEQ ID NO: 1215277 - RNA, 22 nt, Human
uuccuggagccagaggccucug

SEQ ID NO: 1215278 - RNA, 23 nt, Human
uucuuaugcagggccuguucugu

SEQ ID NO: 1215279 - RNA, 23 nt, Human
uugauguggaugcugaccuugug

SEQ ID NO: 1215280 - RNA, 18 nt, Human
uugcugcuuccuccaggc

SEQ ID NO: 1215281 - RNA, 19 nt, Human
uugcuuccugcuagagagc

SEQ ID NO: 1215282 - RNA, 19 nt, Human
uuggaagagggucacgggu

SEQ ID NO: 1215283 - RNA, 19 nt, Human
uuggagguuccuggagcca

SEQ ID NO: 1215284 - RNA, 19 nt, Human
uuggcuggggugaggaggg

SEQ ID NO: 1215285 - RNA, 18 nt, Human
uugguccuggcaccagaa

SEQ ID NO: 1215286 - RNA, 19 nt, Human
uugugcgucagcaaggcuu

SEQ ID NO: 1215287 - RNA, 23 nt, Human
uuuccaccguggccaaggaacca

SEQ ID NO: 1215288 - RNA, 23 nt, Human
uuucccuccccugagcuccacag

SEQ ID NO: 1215289 - RNA, 18 nt, Human
uuugaggagcaaggagag

SEQ ID NO: 1215290 - RNA, 19 nt, Human
uuuggccagaguggaaugg

SEQ ID NO: 1215291 - RNA, 20 nt, Human
uuuggggcuguggggggcag

SEQ ID NO: 1215292 - RNA, 21 nt, Human
uuuucaggaauuuugagaggc

SEQ ID NO: 1215293 - RNA, 19 nt, Human
aaaaaaaacugaguagaca

SEQ ID NO: 1215294 - RNA, 23 nt, Human
aaccuucuucccuguuugcccac

SEQ ID NO: 1215295 - RNA, 18 nt, Human
aacuccuagcccaguccc

SEQ ID NO: 1215296 - RNA, 18 nt, Human
aaggagcacuggcugcag

SEQ ID NO: 1215297 - RNA, 24 nt, Human
aaguccccucccagaucugugacc

SEQ ID NO: 1215298 - RNA, 20 nt, Human
aauggcuguggggaucaagg

SEQ ID NO: 1215299 - RNA, 22 nt, Human
acaaaaauuuuaaaaauagcug

SEQ ID NO: 1215300 - RNA, 27 nt, Human
acacagguaccagagacugccccccac

SEQ ID NO: 1215301 - RNA, 23 nt, Human
acagagggagccugggggccaca

SEQ ID NO: 1215302 - RNA, 23 nt, Human
acagggcaaguaagaggcaaaac

SEQ ID NO: 1215303 - RNA, 20 nt, Human
acagucccagaagggcccag

SEQ ID NO: 1215304 - RNA, 19 nt, Human
acccugauguccccacuuc

SEQ ID NO: 1215305 - RNA, 21 nt, Human
acguucucuaaggaagaacaa

SEQ ID NO: 1215306 - RNA, 23 nt, Human
acuguacuccagccuggugacag

SEQ ID NO: 1215307 - RNA, 25 nt, Human
acuguacuccagccuggugacagag

SEQ ID NO: 1215308 - RNA, 19 nt, Human
acugugugaccagcaaggu

SEQ ID NO: 1215309 - RNA, 22 nt, Human
agacugccccccacggccccaa

SEQ ID NO: 1215310 - RNA, 23 nt, Human
agaguggggcugugggaccagcg

SEQ ID NO: 1215311 - RNA, 24 nt, Human
agccugggccacauagugagaccu

SEQ ID NO: 1215312 - RNA, 25 nt, Human
agccugggccacauagugagaccuu

SEQ ID NO: 1215313 - RNA, 23 nt, Human
agccuggugacagagcgagaccc

SEQ ID NO: 1215314 - RNA, 26 nt, Human
agcugggcuuggugguggcaugugcc

SEQ ID NO: 1215315 - RNA, 19 nt, Human
aggagcagaggcgagucug

SEQ ID NO: 1215316 - RNA, 24 nt, Human
aggaguucgagaccagccugggcc

SEQ ID NO: 1215317 - RNA, 24 nt, Human
aggaucacuugagcccaggaguuc

SEQ ID NO: 1215318 - RNA, 23 nt, Human
aggcaagcucauuucuucuccac

SEQ ID NO: 1215319 - RNA, 18 nt, Human
aggcaggaggaucacuug

SEQ ID NO: 1215320 - RNA, 23 nt, Human
aggcaggaggaucacuugagccc

SEQ ID NO: 1215321 - RNA, 24 nt, Human
aggcaggaggaucacuugagccca

SEQ ID NO: 1215322 - RNA, 24 nt, Human
aggccgaggcaggaggaucacuug

SEQ ID NO: 1215323 - RNA, 25 nt, Human
agguaccagagacugccccccacgg

SEQ ID NO: 1215324 - RNA, 19 nt, Human
agguggaggcugcagugag

SEQ ID NO: 1215325 - RNA, 20 nt, Human
agguggaggcugcagugagc

SEQ ID NO: 1215326 - RNA, 25 nt, Human
agugacggggggagcuugacaagga

SEQ ID NO: 1215327 - RNA, 23 nt, Human
aucacuguacuccagccugguga

SEQ ID NO: 1215328 - RNA, 21 nt, Human
aucacuugagcccaggaguuc

SEQ ID NO: 1215329 - RNA, 24 nt, Human
aucacuugagcccaggaguucgag

SEQ ID NO: 1215330 - RNA, 26 nt, Human
aucucuccccucccugugccucccag

SEQ ID NO: 1215331 - RNA, 20 nt, Human
augaagcagggauuggggcu

SEQ ID NO: 1215332 - RNA, 21 nt, Human
augugggaaccagaacacacu

SEQ ID NO: 1215333 - RNA, 22 nt, Human
augugggaaccagaacacacug

SEQ ID NO: 1215334 - RNA, 18 nt, Human
auuucuucuccacacccc

SEQ ID NO: 1215335 - RNA, 19 nt, Human
caacuccaacucccacucc

SEQ ID NO: 1215336 - RNA, 19 nt, Human
caacuccuagcccaguccc

SEQ ID NO: 1215337 - RNA, 23 nt, Human
caaguccagcgccaggaugccca

SEQ ID NO: 1215338 - RNA, 21 nt, Human
cacacagguaccagagacugc

SEQ ID NO: 1215339 - RNA, 22 nt, Human
cacacugauggaggaguuggca

SEQ ID NO: 1215340 - RNA, 26 nt, Human
caccaaaaaaaaacugaguagacagu

SEQ ID NO: 1215341 - RNA, 21 nt, Human
cacccagaccugagcuaggac

SEQ ID NO: 1215342 - RNA, 22 nt, Human
caccuggagugacggggggagc

SEQ ID NO: 1215343 - RNA, 21 nt, Human
cacuccuggaggccgaggcag

SEQ ID NO: 1215344 - RNA, 19 nt, Human
cacugcgcuggggcggggc

SEQ ID NO: 1215345 - RNA, 19 nt, Human
cacuggcugcagggggggg

SEQ ID NO: 1215346 - RNA, 18 nt, Human
cacuguacuccagccugg

SEQ ID NO: 1215347 - RNA, 18 nt, Human
cacuguacuccagccugg

SEQ ID NO: 1215348 - RNA, 20 nt, Human
cacuguacuccagccuggug

SEQ ID NO: 1215349 - RNA, 22 nt, Human
cacuguacuccagccuggugac

SEQ ID NO: 1215350 - RNA, 23 nt, Human
cacuguacuccagccuggugaca

SEQ ID NO: 1215351 - RNA, 24 nt, Human
cacuguacuccagccuggugacag

SEQ ID NO: 1215352 - RNA, 24 nt, Human
cacuuugagcccaggagguggagg

SEQ ID NO: 1215353 - RNA, 19 nt, Human
cagagccucagcaucccuu

SEQ ID NO: 1215354 - RNA, 23 nt, Human
cagagcgagacccuaucaccgcc

SEQ ID NO: 1215355 - RNA, 23 nt, Human
cagcaaggcagccagggcggcac

SEQ ID NO: 1215356 - RNA, 19 nt, Human
cagccagggcggcacaggc

SEQ ID NO: 1215357 - RNA, 20 nt, Human
caggagguggaggcugcagu

SEQ ID NO: 1215358 - RNA, 23 nt, Human
caggaugcccaggcuccugggcu

SEQ ID NO: 1215359 - RNA, 25 nt, Human
caggcuccugggcuuccuccccgag

SEQ ID NO: 1215360 - RNA, 21 nt, Human
caggcuccugggcuuccuccu

SEQ ID NO: 1215361 - RNA, 24 nt, Human
cagggcggcacaggcaccaggucc

SEQ ID NO: 1215362 - RNA, 22 nt, Human
caggugcagagcaucccugacg

SEQ ID NO: 1215363 - RNA, 24 nt, Human
cagucaucacuguacuccagccug

SEQ ID NO: 1215364 - RNA, 24 nt, Human
cagugagcagucaucacuguacuc

SEQ ID NO: 1215365 - RNA, 18 nt, Human
cauccuuuggcugggccu

SEQ ID NO: 1215366 - RNA, 24 nt, Human
caucucuccccucccugugccucc

SEQ ID NO: 1215367 - RNA, 24 nt, Human
caugcaccacgcgcugaaggaggc

SEQ ID NO: 1215368 - RNA, 22 nt, Human
ccaaaaucccccacccgggaug

SEQ ID NO: 1215369 - RNA, 20 nt, Human
ccaacuccuagcccaguccc

SEQ ID NO: 1215370 - RNA, 18 nt, Human
ccacaccccuccccgccc

SEQ ID NO: 1215371 - RNA, 21 nt, Human
ccacaccccuccccgcccgac

SEQ ID NO: 1215372 - RNA, 20 nt, Human
ccacauagugagaccuuguc

SEQ ID NO: 1215373 - RNA, 24 nt, Human
ccacggccccaaaaucccccaccc

SEQ ID NO: 1215374 - RNA, 19 nt, Human
ccacuuccaaguccugacu

SEQ ID NO: 1215375 - RNA, 22 nt, Human
ccacuuccaaguccugacuccu

SEQ ID NO: 1215376 - RNA, 20 nt, Human
ccagagacugccccccacgg

SEQ ID NO: 1215377 - RNA, 25 nt, Human
ccaggaguucgagaccagccugggc

SEQ ID NO: 1215378 - RNA, 19 nt, Human
ccaugcccccgcccgugga

SEQ ID NO: 1215379 - RNA, 25 nt, Human
cccaaaaucccccacccgggaugcc

SEQ ID NO: 1215380 - RNA, 22 nt, Human
cccacccgggaugcccagagga

SEQ ID NO: 1215381 - RNA, 20 nt, Human
cccauauauaaaaaugaagc

SEQ ID NO: 1215382 - RNA, 21 nt, Human
cccauauauaaaaaugaagca

SEQ ID NO: 1215383 - RNA, 23 nt, Human
cccccacccgggaugcccagagg

SEQ ID NO: 1215384 - RNA, 21 nt, Human
ccccccacggccccaaaaucc

SEQ ID NO: 1215385 - RNA, 25 nt, Human
cccccgccccaccaaaaaaaaacug

SEQ ID NO: 1215386 - RNA, 22 nt, Human
ccccgccccaccaaaaaaaaac

SEQ ID NO: 1215387 - RNA, 18 nt, Human
ccccgcccgacccugucu

SEQ ID NO: 1215388 - RNA, 18 nt, Human
ccccucccugugccuccc

SEQ ID NO: 1215389 - RNA, 19 nt, Human
cccgccccaccaaaaaaaa

SEQ ID NO: 1215390 - RNA, 23 nt, Human
cccgccccaccaaaaaaaaacug

SEQ ID NO: 1215391 - RNA, 22 nt, Human
cccuuucccucccagagccuca

SEQ ID NO: 1215392 - RNA, 22 nt, Human
ccgcaagggcagggaugggagu

SEQ ID NO: 1215393 - RNA, 20 nt, Human
ccgccccaccaaaaaaaaac

SEQ ID NO: 1215394 - RNA, 21 nt, Human
ccgcccccccgccccaccaaa

SEQ ID NO: 1215395 - RNA, 22 nt, Human
ccgcccccccgccccaccaaaa

SEQ ID NO: 1215396 - RNA, 22 nt, Human
ccugagcuaggacagagggagc

SEQ ID NO: 1215397 - RNA, 21 nt, Human
ccugggccacauagugagacc

SEQ ID NO: 1215398 - RNA, 20 nt, Human
ccuguaguccuagcuacucg

SEQ ID NO: 1215399 - RNA, 18 nt, Human
ccugucuaaacuaauggg

SEQ ID NO: 1215400 - RNA, 24 nt, Human
cgagaccagccugggccacauagu

SEQ ID NO: 1215401 - RNA, 21 nt, Human
cgagacccuaucaccgccccc

SEQ ID NO: 1215402 - RNA, 22 nt, Human
cgagacccuaucaccgcccccc

SEQ ID NO: 1215403 - RNA, 22 nt, Human
cgagaugcugcacaugcaccac

SEQ ID NO: 1215404 - RNA, 19 nt, Human
cgagcacacgaguguaaag

SEQ ID NO: 1215405 - RNA, 20 nt, Human
cgaggcaggaggaucacuug

SEQ ID NO: 1215406 - RNA, 20 nt, Human
cgcucagcaucaucggugac

SEQ ID NO: 1215407 - RNA, 20 nt, Human
cggagccgcuggccaauaug

SEQ ID NO: 1215408 - RNA, 20 nt, Human
cggccacuggaccacaggag

SEQ ID NO: 1215409 - RNA, 20 nt, Human
cggccccaaaaucccccacc

SEQ ID NO: 1215410 - RNA, 21 nt, Human
cggccccaaaaucccccaccc

SEQ ID NO: 1215411 - RNA, 21 nt, Human
cuacugcauccuuuggcuggg

SEQ ID NO: 1215412 - RNA, 19 nt, Human
cuccacaccccuccccgcc

SEQ ID NO: 1215413 - RNA, 22 nt, Human
cuccuagcccagucccgggggc

SEQ ID NO: 1215414 - RNA, 23 nt, Human
cugaagccuacuucacucccaaa

SEQ ID NO: 1215415 - RNA, 26 nt, Human
cugacuccagucuugcuaacacacac

SEQ ID NO: 1215416 - RNA, 23 nt, Human
cuggaccucgguguccccaucug

SEQ ID NO: 1215417 - RNA, 24 nt, Human
cuggaggccgaggcaggaggauca

SEQ ID NO: 1215418 - RNA, 20 nt, Human
cugggcuuccuccugcuggg

SEQ ID NO: 1215419 - RNA, 21 nt, Human
cuuaaguccccucccagaucu

SEQ ID NO: 1215420 - RNA, 19 nt, Human
cuuugagcccaggaggugg

SEQ ID NO: 1215421 - RNA, 24 nt, Human
cuuuggcugggccuuguugacccc

SEQ ID NO: 1215422 - RNA, 18 nt, Human
gagcgagcacacgagugu

SEQ ID NO: 1215423 - RNA, 18 nt, Human
gagcuucggugcaugggu

SEQ ID NO: 1215424 - RNA, 23 nt, Human
gaggcaggaggaucacuugagcc

SEQ ID NO: 1215425 - RNA, 18 nt, Human
gaggugugacauauggga

SEQ ID NO: 1215426 - RNA, 24 nt, Human
gaucacuugagcccaggaguucga

SEQ ID NO: 1215427 - RNA, 25 nt, Human
gcacuggcugcaggggggggggggu

SEQ ID NO: 1215428 - RNA, 23 nt, Human
gccacauagugagaccuugucuc

SEQ ID NO: 1215429 - RNA, 24 nt, Human
gcccaggagguggaggcugcagug

SEQ ID NO: 1215430 - RNA, 22 nt, Human
gcccaggaguucgagaccagcc

SEQ ID NO: 1215431 - RNA, 25 nt, Human
gcccccccgccccaccaaaaaaaaa

SEQ ID NO: 1215432 - RNA, 22 nt, Human
gcgagacccuaucaccgccccc

SEQ ID NO: 1215433 - RNA, 21 nt, Human
gcugcaggggggggggggugg

SEQ ID NO: 1215434 - RNA, 19 nt, Human
ggaagugugccccauaccc

SEQ ID NO: 1215435 - RNA, 19 nt, Human
ggacaaguggcacaccccc

SEQ ID NO: 1215436 - RNA, 18 nt, Human
ggaggcugcagugagcag

SEQ ID NO: 1215437 - RNA, 23 nt, Human
ggaucacuugagcccaggaguuc

SEQ ID NO: 1215438 - RNA, 22 nt, Human
ggcaagaucacuggacugggag

SEQ ID NO: 1215439 - RNA, 18 nt, Human
ggcacccaggucuauggu

SEQ ID NO: 1215440 - RNA, 18 nt, Human
ggccgaggcaggaggauc

SEQ ID NO: 1215441 - RNA, 21 nt, Human
ggcugcaggggggggggggug

SEQ ID NO: 1215442 - RNA, 20 nt, Human
ggcuuggugguggcaugugc

SEQ ID NO: 1215443 - RNA, 20 nt, Human
gggacaaguggcacaccccc

SEQ ID NO: 1215444 - RNA, 22 nt, Human
ggggagguggaucuuccagucg

SEQ ID NO: 1215445 - RNA, 19 nt, Human
ggggcugugggaccagcgc

SEQ ID NO: 1215446 - RNA, 22 nt, Human
ggggcugugggaccagcgccca

SEQ ID NO: 1215447 - RNA, 20 nt, Human
gggguauaggcaagcagcaa

SEQ ID NO: 1215448 - RNA, 23 nt, Human
gguagccgcaagggcagggaugg

SEQ ID NO: 1215449 - RNA, 25 nt, Human
ggucccaaccuucuucccuguuugc

SEQ ID NO: 1215450 - RNA, 20 nt, Human
gguccgcccuuggggaagug

SEQ ID NO: 1215451 - RNA, 23 nt, Human
guacuccagccuggugacagagc

SEQ ID NO: 1215452 - RNA, 26 nt, Human
guagugguagccgcaagggcagggau

SEQ ID NO: 1215453 - RNA, 18 nt, Human
guccagcgccaggaugcc

SEQ ID NO: 1215454 - RNA, 23 nt, Human
gucuuuuccucuggaccucggug

SEQ ID NO: 1215455 - RNA, 22 nt, Human
uaacugccaacgugaguucaga

SEQ ID NO: 1215456 - RNA, 19 nt, Human
uaagcuccggcaaccgccu

SEQ ID NO: 1215457 - RNA, 19 nt, Human
uacuccagccuggugacag

SEQ ID NO: 1215458 - RNA, 23 nt, Human
uacuccagccuggugacagagcg

SEQ ID NO: 1215459 - RNA, 19 nt, Human
uaggacagagggagccugg

SEQ ID NO: 1215460 - RNA, 24 nt, Human
uaggcaagucccuuucccucccag

SEQ ID NO: 1215461 - RNA, 30 nt, Human; identical to SEQ ID NO: 1084712

SEQ ID NO: 1215462 - RNA, 22 nt, Human
uaggucuuaaguccccucccag

SEQ ID NO: 1215463 - RNA, 24 nt, Human
uaguccuagcuacucgagaggcug

SEQ ID NO: 1215464 - RNA, 18 nt, Human
uauugggcaagaucacug

SEQ ID NO: 1215465 - RNA, 21 nt, Human
ucaacuccaacucccacuccu

SEQ ID NO: 1215466 - RNA, 20 nt, Human
ucaccgcccccccgccccac

SEQ ID NO: 1215467 - RNA, 22 nt, Human
ucaccgcccccccgccccacca

SEQ ID NO: 1215468 - RNA, 20 nt, Human
ucacuguacuccagccuggu

SEQ ID NO: 1215469 - RNA, 23 nt, Human
ucacuguacuccagccuggugac

SEQ ID NO: 1215470 - RNA, 24 nt, Human
uccacaccccuccccgcccgaccc

SEQ ID NO: 1215471 - RNA, 22 nt, Human
uccagccuggugacagagcgag

SEQ ID NO: 1215472 - RNA, 23 nt, Human
uccagccuggugacagagcgaga

SEQ ID NO: 1215473 - RNA, 27 nt, Human
uccagcgcacagucccagaagggcccc

SEQ ID NO: 1215474 - RNA, 22 nt, Human
ucccaggucgcccaaguccagc

SEQ ID NO: 1215475 - RNA, 24 nt, Human
ucccaggucgcccaaguccagcgc

SEQ ID NO: 1215476 - RNA, 19 nt, Human
uccggccacuggaccacag

SEQ ID NO: 1215477 - RNA, 21 nt, Human
uccggccacuggaccacagga

SEQ ID NO: 1215478 - RNA, 21 nt, Human
uccuccugcuggguccgcccc

SEQ ID NO: 1215479 - RNA, 23 nt, Human
ucuccuagaauggcuguggggau

SEQ ID NO: 1215480 - RNA, 21 nt, Human
ucucgcugcugggggcggggc

SEQ ID NO: 1215481 - RNA, 20 nt, Human
ucuuucaagaacauucacuc

SEQ ID NO: 1215482 - RNA, 18 nt, Human
ugacggggggagcuugac

SEQ ID NO: 1215483 - RNA, 20 nt, Human
ugacuccuuugagccauccc

SEQ ID NO: 1215484 - RNA, 20 nt, Human
ugagaaaaggcaguggggag

SEQ ID NO: 1215485 - RNA, 21 nt, Human
ugagaaaaggcaguggggagg

SEQ ID NO: 1215486 - RNA, 23 nt, Human
ugagaaaaggcaguggggaggug

SEQ ID NO: 1215487 - RNA, 23 nt, Human
ugagcccaggaguucgagaccag

SEQ ID NO: 1215488 - RNA, 22 nt, Human
ugcccagaggagugcccugggg

SEQ ID NO: 1215489 - RNA, 24 nt, Human
ugcccagaggagugcccuggggac

SEQ ID NO: 1215490 - RNA, 18 nt, Human
ugcccuggggacaagugg

SEQ ID NO: 1215491 - RNA, 23 nt, Human
ugcccuggggacaaguggcacac

SEQ ID NO: 1215492 - RNA, 19 nt, Human
ugcccugugaugugcuguu

SEQ ID NO: 1215493 - RNA, 22 nt, Human
ugccuguaguccuagcuacucg

SEQ ID NO: 1215494 - RNA, 23 nt, Human
ugccuguaguccuagcuacucga

SEQ ID NO: 1215495 - RNA, 21 nt, Human
ugcugggggcggggcuuaagc

SEQ ID NO: 1215496 - RNA, 18 nt, Human
ugcuugguccccagaccu

SEQ ID NO: 1215497 - RNA, 20 nt, Human
uggaccacaggagcagaggc

SEQ ID NO: 1215498 - RNA, 26 nt, Human
uggauuuccuucagcuacccugaugu

SEQ ID NO: 1215499 - RNA, 24 nt, Human
uggcagggaggagcuucggugcau

SEQ ID NO: 1215500 - RNA, 24 nt, Human
uggcaugugccuguaguccuagcu

SEQ ID NO: 1215501 - RNA, 23 nt, Human
ugggauguucucgcugcuggggg

SEQ ID NO: 1215502 - RNA, 22 nt, Human
ugguggcaugugccuguagucc

SEQ ID NO: 1215503 - RNA, 20 nt, Human
uguaaagaauggcacccaga

SEQ ID NO: 1215504 - RNA, 24 nt, Human
ugugaugugugcgugagcgagcac

SEQ ID NO: 1215505 - RNA, 21 nt, Human
ugugccuguaguccuagcuac

SEQ ID NO: 1215506 - RNA, 18 nt, Human
uguggauuuccuucagcu

SEQ ID NO: 1215507 - RNA, 23 nt, Human
uguuuugccucacucccacccac

SEQ ID NO: 1215508 - RNA, 24 nt, Human
uguuuuuguuuccaaauggcugga

SEQ ID NO: 1215509 - RNA, 24 nt, Human
uucggugcauggguguggccggca

SEQ ID NO: 1215510 - RNA, 24 nt, Human
uucucgcugcugggggcggggcuu

SEQ ID NO: 1215511 - RNA, 22 nt, Human
uugagcccaggaguucgagacc

SEQ ID NO: 1215512 - RNA, 20 nt, Human
uuggugguggcaugugccug

SEQ ID NO: 1215513 - RNA, 19 nt, Human
uuucuaaggaaaaugguuc

SEQ ID NO: 1215514 - RNA, 21 nt, Human
uuugcccacucucagaccccg

SEQ ID NO: 1215515 - RNA, 19 nt, Human
aaauaaauuuaaacuauaa

SEQ ID NO: 1215516 - RNA, 19 nt, Human
aaauaaauuuaaacuauaa

SEQ ID NO: 1215517 - RNA, 19 nt, Human
aaauaaauuuaaacuauaa

SEQ ID NO: 1215518 - RNA, 21 nt, Human
cccgcagccucuccagcuccu

SEQ ID NO: 1215519 - RNA, 22 nt, Human
ccucuccagcuccugcagaguc

SEQ ID NO: 1215520 - RNA, 19 nt, Human
gccacagccucucauccug

SEQ ID NO: 1215521 - RNA, 20 nt, Human
ggauauuaaccccuuaaaug

SEQ ID NO: 1215522 - RNA, 22 nt, Human
uaaauuagaaacacaaauaaac

SEQ ID NO: 1215523 - RNA, 27 nt, Human
uaaauuagaaacacaaauaaauuuaaa

SEQ ID NO: 1215524 - RNA, 27 nt, Human
uaaauuagaaacacaaauaaauuuaaa

SEQ ID NO: 1215525 - RNA, 27 nt, Human
uaaauuagaaacacaaauaaauuuaaa

SEQ ID NO: 1215526 - RNA, 18 nt, Human
uagaaacacaaauaaaca

SEQ ID NO: 1215527 - RNA, 19 nt, Human
ucuccagcucccgcagccu

SEQ ID NO: 1215528 - RNA, 19 nt, Human
ucuccagcucccgcagccu

SEQ ID NO: 1215529 - RNA, 21 nt, Human
uuaaauguuuuguuuuuuuuu

SEQ ID NO: 1215530 - RNA, 22 nt, Human
uuuaaacuauaaauuagaaaca

SEQ ID NO: 1215531 - RNA, 22 nt, Human
uuuaaacuauaaauuagaaaca

SEQ ID NO: 1215532 - RNA, 22 nt, Human
uuuaaacuauaaauuagaaaca

SEQ ID NO: 1215533 - RNA, 19 nt, Human
aaaaaaaacugaguagaca

SEQ ID NO: 1215534 - RNA, 23 nt, Human
aaccuucuucccuguuugcccac

SEQ ID NO: 1215535 - RNA, 18 nt, Human
aacuccuagcccaguccc

SEQ ID NO: 1215536 - RNA, 18 nt, Human
aaggagcacuggcugcag

SEQ ID NO: 1215537 - RNA, 24 nt, Human
aaguccccucccagaucugugacc

SEQ ID NO: 1215538 - RNA, 20 nt, Human
aauggcuguggggaucaagg

SEQ ID NO: 1215539 - RNA, 22 nt, Human
acaaaaauuuuaaaaauagcug

SEQ ID NO: 1215540 - RNA, 23 nt, Human
acagagggagccugggggccaca

SEQ ID NO: 1215541 - RNA, 25 nt, Human
acagguaccagagacugccccccac

SEQ ID NO: 1215542 - RNA, 20 nt, Human
acagucccagaagggcccag

SEQ ID NO: 1215543 - RNA, 21 nt, Human
accuggagugacggggggagc

SEQ ID NO: 1215544 - RNA, 23 nt, Human
acuguacuccagccuggugacag

SEQ ID NO: 1215545 - RNA, 25 nt, Human
acuguacuccagccuggugacagag

SEQ ID NO: 1215546 - RNA, 19 nt, Human
acugugugaccagcaaggu

SEQ ID NO: 1215547 - RNA, 24 nt, Human
agacccuaucaccgccccccgccc

SEQ ID NO: 1215548 - RNA, 22 nt, Human
agacugccccccacggccccaa

SEQ ID NO: 1215549 - RNA, 23 nt, Human
agaguggggcugugggaccagcg

SEQ ID NO: 1215550 - RNA, 24 nt, Human
agccugggccacauagugagaccu

SEQ ID NO: 1215551 - RNA, 25 nt, Human
agccugggccacauagugagaccuu

SEQ ID NO: 1215552 - RNA, 23 nt, Human
agccuggugacagagcgagaccc

SEQ ID NO: 1215553 - RNA, 26 nt, Human
agcugggcuuggugguggcaugugcc

SEQ ID NO: 1215554 - RNA, 19 nt, Human
aggagcagaggcgagucug

SEQ ID NO: 1215555 - RNA, 24 nt, Human
aggaguucgagaccagccugggcc

SEQ ID NO: 1215556 - RNA, 24 nt, Human
aggaucacuugagcccaggaguuc

SEQ ID NO: 1215557 - RNA, 18 nt, Human
aggcaggaggaucacuug

SEQ ID NO: 1215558 - RNA, 23 nt, Human
aggcaggaggaucacuugagccc

SEQ ID NO: 1215559 - RNA, 24 nt, Human
aggcaggaggaucacuugagccca

SEQ ID NO: 1215560 - RNA, 24 nt, Human
aggccgaggcaggaggaucacuug

SEQ ID NO: 1215561 - RNA, 22 nt, Human
aggcuauuuggcacccaggucu

SEQ ID NO: 1215562 - RNA, 25 nt, Human
agguaccagagacugccccccacgg

SEQ ID NO: 1215563 - RNA, 19 nt, Human
agguggaggcugcagugag

SEQ ID NO: 1215564 - RNA, 20 nt, Human
agguggaggcugcagugagc

SEQ ID NO: 1215565 - RNA, 19 nt, Human
aguccagcgccaggaugcc

SEQ ID NO: 1215566 - RNA, 25 nt, Human
agugacggggggagcuugacaagga

SEQ ID NO: 1215567 - RNA, 25 nt, Human
aucucuccccucccugugccuccca

SEQ ID NO: 1215568 - RNA, 20 nt, Human
augaagcagggauuggggcu

SEQ ID NO: 1215569 - RNA, 21 nt, Human
augugggaaccagaacacacu

SEQ ID NO: 1215570 - RNA, 22 nt, Human
augugggaaccagaacacacug

SEQ ID NO: 1215571 - RNA, 18 nt, Human
auuucuucuccacacccc

SEQ ID NO: 1215572 - RNA, 19 nt, Human
caacuccuagcccaguccc

SEQ ID NO: 1215573 - RNA, 23 nt, Human
caaguccagcgccaggaugccca

SEQ ID NO: 1215574 - RNA, 22 nt, Human
cacacugauggaggaguuggca

SEQ ID NO: 1215575 - RNA, 19 nt, Human
cacagguaccagagacugc

SEQ ID NO: 1215576 - RNA, 26 nt, Human
caccaaaaaaaaacugaguagacagu

SEQ ID NO: 1215577 - RNA, 19 nt, Human
caccaugcccaugcccccg

SEQ ID NO: 1215578 - RNA, 20 nt, Human
caccaugcccaugcccccgc

SEQ ID NO: 1215579 - RNA, 21 nt, Human
cacccagaccugagcuaggac

SEQ ID NO: 1215580 - RNA, 21 nt, Human
cacuccuggaggccgaggcag

SEQ ID NO: 1215581 - RNA, 19 nt, Human
cacugcgcuggggcggggc

SEQ ID NO: 1215582 - RNA, 19 nt, Human
cacuggcugcagggggggg

SEQ ID NO: 1215583 - RNA, 18 nt, Human
cacuguacuccagccugg

SEQ ID NO: 1215584 - RNA, 18 nt, Human
cacuguacuccagccugg

SEQ ID NO: 1215585 - RNA, 20 nt, Human
cacuguacuccagccuggug

SEQ ID NO: 1215586 - RNA, 21 nt, Human
cacuguacuccagccugguga

SEQ ID NO: 1215587 - RNA, 22 nt, Human
cacuguacuccagccuggugac

SEQ ID NO: 1215588 - RNA, 23 nt, Human
cacuguacuccagccuggugaca

SEQ ID NO: 1215589 - RNA, 24 nt, Human
cacuguacuccagccuggugacag

SEQ ID NO: 1215590 - RNA, 24 nt, Human
cacuuugagcccaggagguggagg

SEQ ID NO: 1215591 - RNA, 19 nt, Human
cagagccucagcaucccuu

SEQ ID NO: 1215592 - RNA, 23 nt, Human
cagagcgagacccuaucaccgcc

SEQ ID NO: 1215593 - RNA, 23 nt, Human
cagcaaggcagccagggcggcac

SEQ ID NO: 1215594 - RNA, 19 nt, Human
cagccagggcggcacaggc

SEQ ID NO: 1215595 - RNA, 20 nt, Human
caggagguggaggcugcagu

SEQ ID NO: 1215596 - RNA, 23 nt, Human
caggaugcccaggcuccugggcu

SEQ ID NO: 1215597 - RNA, 19 nt, Human
caggcaucaacuccaacuc

SEQ ID NO: 1215598 - RNA, 25 nt, Human
caggcuccugggcuuccuccccgag

SEQ ID NO: 1215599 - RNA, 21 nt, Human
caggcuccugggcuuccuccu

SEQ ID NO: 1215600 - RNA, 24 nt, Human
cagggcggcacaggcaccaggucc

SEQ ID NO: 1215601 - RNA, 18 nt, Human
cagggggggggggggggg

SEQ ID NO: 1215602 - RNA, 18 nt, Human
caggucgcccaaguccag

SEQ ID NO: 1215603 - RNA, 22 nt, Human
caggugcagagcaucccugacg

SEQ ID NO: 1215604 - RNA, 24 nt, Human
cagucaucacuguacuccagccug

SEQ ID NO: 1215605 - RNA, 24 nt, Human
cagugagcagucaucacuguacuc

SEQ ID NO: 1215606 - RNA, 18 nt, Human
cauccuuuggcugggccu

SEQ ID NO: 1215607 - RNA, 24 nt, Human
caucucuccccucccugugccucc

SEQ ID NO: 1215608 - RNA, 24 nt, Human
caugcaccacgcgcugaaggaggc

SEQ ID NO: 1215609 - RNA, 22 nt, Human
ccaaaaucccccacccgggaug

SEQ ID NO: 1215610 - RNA, 21 nt, Human
ccaacuccuagcccagucccg

SEQ ID NO: 1215611 - RNA, 18 nt, Human
ccacaccccuccccgccc

SEQ ID NO: 1215612 - RNA, 20 nt, Human
ccacauagugagaccuuguc

SEQ ID NO: 1215613 - RNA, 24 nt, Human
ccacggccccaaaaucccccaccc

SEQ ID NO: 1215614 - RNA, 24 nt, Human
ccacuggaccacaggagcagaggc

SEQ ID NO: 1215615 - RNA, 19 nt, Human
ccacuuccaaguccugacu

SEQ ID NO: 1215616 - RNA, 22 nt, Human
ccacuuccaaguccugacuccu

SEQ ID NO: 1215617 - RNA, 20 nt, Human
ccagagacugccccccacgg

SEQ ID NO: 1215618 - RNA, 25 nt, Human
ccaggaguucgagaccagccugggc

SEQ ID NO: 1215619 - RNA, 19 nt, Human
ccaugcccccgcccgugga

SEQ ID NO: 1215620 - RNA, 25 nt, Human
cccaaaaucccccacccgggaugcc

SEQ ID NO: 1215621 - RNA, 25 nt, Human
cccacagagcuccuguauccaggca

SEQ ID NO: 1215622 - RNA, 22 nt, Human
cccacccgggaugcccagagga

SEQ ID NO: 1215623 - RNA, 20 nt, Human
cccauauauaaaaaugaagc

SEQ ID NO: 1215624 - RNA, 21 nt, Human
cccauauauaaaaaugaagca

SEQ ID NO: 1215625 - RNA, 23 nt, Human
cccccacccgggaugcccagagg

SEQ ID NO: 1215626 - RNA, 21 nt, Human
ccccccacggccccaaaaucc

SEQ ID NO: 1215627 - RNA, 25 nt, Human
cccccgccccaccaaaaaaaaacug

SEQ ID NO: 1215628 - RNA, 22 nt, Human
ccccgccccaccaaaaaaaaac

SEQ ID NO: 1215629 - RNA, 18 nt, Human
ccccgcccgacccugucu

SEQ ID NO: 1215630 - RNA, 18 nt, Human
ccccucccugugccuccc

SEQ ID NO: 1215631 - RNA, 19 nt, Human
cccgccccaccaaaaaaaa

SEQ ID NO: 1215632 - RNA, 23 nt, Human
cccgccccaccaaaaaaaaacug

SEQ ID NO: 1215633 - RNA, 22 nt, Human
cccuuucccucccagagccuca

SEQ ID NO: 1215634 - RNA, 20 nt, Human
ccgccccaccaaaaaaaaac

SEQ ID NO: 1215635 - RNA, 20 nt, Human
ccgccccccgccccaccaaa

SEQ ID NO: 1215636 - RNA, 20 nt, Human
ccuagcccagucccgggggc

SEQ ID NO: 1215637 - RNA, 23 nt, Human
ccuaucaccgccccccgccccac

SEQ ID NO: 1215638 - RNA, 22 nt, Human
ccugagcuaggacagagggagc

SEQ ID NO: 1215639 - RNA, 21 nt, Human
ccugggccacauagugagacc

SEQ ID NO: 1215640 - RNA, 18 nt, Human
ccugucuaaacuaauggg

SEQ ID NO: 1215641 - RNA, 24 nt, Human
cgagaccagccugggccacauagu

SEQ ID NO: 1215642 - RNA, 21 nt, Human
cgagacccuaucaccgccccc

SEQ ID NO: 1215643 - RNA, 22 nt, Human
cgagacccuaucaccgcccccc

SEQ ID NO: 1215644 - RNA, 22 nt, Human
cgagaugcugcacaugcaccac

SEQ ID NO: 1215645 - RNA, 19 nt, Human
cgagcacacgaguguaaag

SEQ ID NO: 1215646 - RNA, 20 nt, Human
cgaggcaggaggaucacuug

SEQ ID NO: 1215647 - RNA, 24 nt, Human
cgaggcaggaggaucacuugagcc

SEQ ID NO: 1215648 - RNA, 20 nt, Human
cgcucagcaucaucggugac

SEQ ID NO: 1215649 - RNA, 20 nt, Human
cggccacuggaccacaggag

SEQ ID NO: 1215650 - RNA, 20 nt, Human
cggccccaaaaucccccacc

SEQ ID NO: 1215651 - RNA, 21 nt, Human
cggccccaaaaucccccaccc

SEQ ID NO: 1215652 - RNA, 21 nt, Human
cuacugcauccuuuggcuggg

SEQ ID NO: 1215653 - RNA, 18 nt, Human
cuccacaccccuccccgc

SEQ ID NO: 1215654 - RNA, 23 nt, Human
cuccacaccccuccccgcccgac

SEQ ID NO: 1215655 - RNA, 24 nt, Human
cuccagccuggugacagagcgaga

SEQ ID NO: 1215656 - RNA, 23 nt, Human
cugaagccuacuucacucccaaa

SEQ ID NO: 1215657 - RNA, 26 nt, Human
cugacuccagucuugcuaacacacac

SEQ ID NO: 1215658 - RNA, 23 nt, Human
cuggaccucgguguccccaucug

SEQ ID NO: 1215659 - RNA, 24 nt, Human
cuggaggccgaggcaggaggauca

SEQ ID NO: 1215660 - RNA, 20 nt, Human
cugggcuuccuccugcuggg

SEQ ID NO: 1215661 - RNA, 21 nt, Human
cuuaaguccccucccagaucu

SEQ ID NO: 1215662 - RNA, 19 nt, Human
cuuugagcccaggaggugg

SEQ ID NO: 1215663 - RNA, 23 nt, Human
cuuuggcugggccuuguugaccc

SEQ ID NO: 1215664 - RNA, 18 nt, Human
gagcgagcacacgagugu

SEQ ID NO: 1215665 - RNA, 18 nt, Human
gagcuucggugcaugggu

SEQ ID NO: 1215666 - RNA, 18 nt, Human
gagugcccugggggcaag

SEQ ID NO: 1215667 - RNA, 24 nt, Human
gaucacuugagcccaggaguucga

SEQ ID NO: 1215668 - RNA, 23 nt, Human
gccacauagugagaccuugucuc

SEQ ID NO: 1215669 - RNA, 24 nt, Human
gcccaggagguggaggcugcagug

SEQ ID NO: 1215670 - RNA, 22 nt, Human
gcccaggaguucgagaccagcc

SEQ ID NO: 1215671 - RNA, 23 nt, Human
gccgcaagggcagggaugggagu

SEQ ID NO: 1215672 - RNA, 22 nt, Human
gcgagacccuaucaccgccccc

SEQ ID NO: 1215673 - RNA, 19 nt, Human
gcugcaggggggggggggg

SEQ ID NO: 1215674 - RNA, 19 nt, Human
ggaagugugccccauaccc

SEQ ID NO: 1215675 - RNA, 18 nt, Human
ggaggcugcagugagcag

SEQ ID NO: 1215676 - RNA, 23 nt, Human
ggaucacuugagcccaggaguuc

SEQ ID NO: 1215677 - RNA, 22 nt, Human
ggcaagaucacuggacugggag

SEQ ID NO: 1215678 - RNA, 22 nt, Human
ggcaagcucauuucuucuccac

SEQ ID NO: 1215679 - RNA, 18 nt, Human
ggcaaguggcacaccccc

SEQ ID NO: 1215680 - RNA, 18 nt, Human
ggcacccaggucuauggu

SEQ ID NO: 1215681 - RNA, 18 nt, Human
ggccgaggcaggaggauc

SEQ ID NO: 1215682 - RNA, 25 nt, Human
ggcugcagggggggggggggggggu

SEQ ID NO: 1215683 - RNA, 20 nt, Human
ggcuuggugguggcaugugc

SEQ ID NO: 1215684 - RNA, 19 nt, Human
gggcaaguggcacaccccc

SEQ ID NO: 1215685 - RNA, 22 nt, Human
gggcaaguggcacacccccuuc

SEQ ID NO: 1215686 - RNA, 22 nt, Human
ggggagguggaucuuccagucg

SEQ ID NO: 1215687 - RNA, 19 nt, Human
ggggcugugggaccagcgc

SEQ ID NO: 1215688 - RNA, 22 nt, Human
ggggcugugggaccagcgccca

SEQ ID NO: 1215689 - RNA, 18 nt, Human
gggggggggggggggggu

SEQ ID NO: 1215690 - RNA, 20 nt, Human
gggguauaggcaagcagcaa

SEQ ID NO: 1215691 - RNA, 23 nt, Human
gguagccgcaagggcagggaugg

SEQ ID NO: 1215692 - RNA, 25 nt, Human
ggucccaaccuucuucccuguuugc

SEQ ID NO: 1215693 - RNA, 20 nt, Human
gguccgcccuuggggaagug

SEQ ID NO: 1215694 - RNA, 23 nt, Human
guacuccagccuggugacagagc

SEQ ID NO: 1215695 - RNA, 26 nt, Human
guagugguagccgcaagggcagggau

SEQ ID NO: 1215696 - RNA, 18 nt, Human
guccagcgccaggaugcc

SEQ ID NO: 1215697 - RNA, 23 nt, Human
gucuuuuccucuggaccucggug

SEQ ID NO: 1215698 - RNA, 20 nt, Human
guggcagggaggagcuucgg

SEQ ID NO: 1215699 - RNA, 22 nt, Human
uaacugccaacgugaguucaga

SEQ ID NO: 1215700 - RNA, 19 nt, Human
uaagcuccggcaaccgccu

SEQ ID NO: 1215701 - RNA, 19 nt, Human
uacuccagccuggugacag

SEQ ID NO: 1215702 - RNA, 23 nt, Human
uacuccagccuggugacagagcg

SEQ ID NO: 1215703 - RNA, 19 nt, Human
uaggacagagggagccugg

SEQ ID NO: 1215704 - RNA, 24 nt, Human
uaggcaagucccuuucccucccag

SEQ ID NO: 1215705 - RNA, 30 nt, Human; identical to SEQ ID NO: 1084712

SEQ ID NO: 1215706 - RNA, 22 nt, Human
uaggucuuaaguccccucccag

SEQ ID NO: 1215707 - RNA, 24 nt, Human
uaguccuagcuacucgagaggcug

SEQ ID NO: 1215708 - RNA, 18 nt, Human
uauugggcaagaucacug

SEQ ID NO: 1215709 - RNA, 21 nt, Human
ucaacuccaacucccacuccu

SEQ ID NO: 1215710 - RNA, 19 nt, Human
ucacuguacuccagccugg

SEQ ID NO: 1215711 - RNA, 20 nt, Human
ucacuguacuccagccuggu

SEQ ID NO: 1215712 - RNA, 23 nt, Human
ucacuguacuccagccuggugac

SEQ ID NO: 1215713 - RNA, 20 nt, Human
ucacuugagcccaggaguuc

SEQ ID NO: 1215714 - RNA, 24 nt, Human
uccacaccccuccccgcccgaccc

SEQ ID NO: 1215715 - RNA, 22 nt, Human
uccagccuggugacagagcgag

SEQ ID NO: 1215716 - RNA, 27 nt, Human
uccagcgcacagucccagaagggcccc

SEQ ID NO: 1215717 - RNA, 22 nt, Human
ucccaggucgcccaaguccagc

SEQ ID NO: 1215718 - RNA, 24 nt, Human
ucccaggucgcccaaguccagcgc

SEQ ID NO: 1215719 - RNA, 21 nt, Human
uccccagagcucaggacccug

SEQ ID NO: 1215720 - RNA, 19 nt, Human
uccggccacuggaccacag

SEQ ID NO: 1215721 - RNA, 21 nt, Human
uccggccacuggaccacagga

SEQ ID NO: 1215722 - RNA, 21 nt, Human
uccuccugcuggguccgcccc

SEQ ID NO: 1215723 - RNA, 23 nt, Human
ucuccuagaauggcuguggggau

SEQ ID NO: 1215724 - RNA, 21 nt, Human
ucucgcugcugggggcggggc

SEQ ID NO: 1215725 - RNA, 20 nt, Human
ucuuucaagaacauucacuc

SEQ ID NO: 1215726 - RNA, 18 nt, Human
ugacggggggagcuugac

SEQ ID NO: 1215727 - RNA, 20 nt, Human
ugacuccuuugagccauccc

SEQ ID NO: 1215728 - RNA, 18 nt, Human
ugagaaaaggcagugggg

SEQ ID NO: 1215729 - RNA, 20 nt, Human
ugagaaaaggcaguggggag

SEQ ID NO: 1215730 - RNA, 21 nt, Human
ugagaaaaggcaguggggagg

SEQ ID NO: 1215731 - RNA, 23 nt, Human
ugagaaaaggcaguggggaggug

SEQ ID NO: 1215732 - RNA, 23 nt, Human
ugagcccaggaguucgagaccag

SEQ ID NO: 1215733 - RNA, 19 nt, Human
ugaggugugacauauggga

SEQ ID NO: 1215734 - RNA, 21 nt, Human
ugcaggggggggggggggggg

SEQ ID NO: 1215735 - RNA, 22 nt, Human
ugcccagaggagugcccugggg

SEQ ID NO: 1215736 - RNA, 24 nt, Human
ugcccagaggagugcccugggggc

SEQ ID NO: 1215737 - RNA, 21 nt, Human
ugcccugggggcaaguggcac

SEQ ID NO: 1215738 - RNA, 23 nt, Human
ugcccugggggcaaguggcacac

SEQ ID NO: 1215739 - RNA, 19 nt, Human
ugcccugugaugugcuguu

SEQ ID NO: 1215740 - RNA, 22 nt, Human
ugccuguaguccuagcuacucg

SEQ ID NO: 1215741 - RNA, 23 nt, Human
ugccuguaguccuagcuacucga

SEQ ID NO: 1215742 - RNA, 21 nt, Human
ugcugggggcggggcuuaagc

SEQ ID NO: 1215743 - RNA, 26 nt, Human
uggauuuccuucagcuacccugaugu

SEQ ID NO: 1215744 - RNA, 24 nt, Human
uggcagggaggagcuucggugcau

SEQ ID NO: 1215745 - RNA, 24 nt, Human
uggcaugugccuguaguccuagcu

SEQ ID NO: 1215746 - RNA, 23 nt, Human
ugggauguucucgcugcuggggg

SEQ ID NO: 1215747 - RNA, 22 nt, Human
ugguggcaugugccuguagucc

SEQ ID NO: 1215748 - RNA, 20 nt, Human
uguaaagaauggcacccaga

SEQ ID NO: 1215749 - RNA, 24 nt, Human
ugugaugugugcgugagcgagcac

SEQ ID NO: 1215750 - RNA, 21 nt, Human
ugugccuguaguccuagcuac

SEQ ID NO: 1215751 - RNA, 24 nt, Human
uguuuuuguuuccaaauggcugga

SEQ ID NO: 1215752 - RNA, 24 nt, Human
uucggugcauggguguggccggca

SEQ ID NO: 1215753 - RNA, 20 nt, Human
uucuccacaccccuccccgc

SEQ ID NO: 1215754 - RNA, 24 nt, Human
uucucgcugcugggggcggggcuu

SEQ ID NO: 1215755 - RNA, 18 nt, Human
uucucuaaggaagaacaa

SEQ ID NO: 1215756 - RNA, 22 nt, Human
uugagcccaggaguucgagacc

SEQ ID NO: 1215757 - RNA, 19 nt, Human
uuucuaaggaaaaugguuc

SEQ ID NO: 1215758 - RNA, 21 nt, Human
uuugcccacucucagaccccg

SEQ ID NO: 1215759 - RNA, 20 nt, Human
aaaguuauauuuuauggcug

SEQ ID NO: 1215760 - RNA, 18 nt, Human
aaauaaguuauugcugug

SEQ ID NO: 1215761 - RNA, 18 nt, Human
aagaaguccaguuggaaa

SEQ ID NO: 1215762 - RNA, 23 nt, Human
aagauaccagcucccccgacccc

SEQ ID NO: 1215763 - RNA, 21 nt, Human
aagcacugcggcgaaagcccg

SEQ ID NO: 1215764 - RNA, 24 nt, Human
aauaaaaagcaaagaauccacuug

SEQ ID NO: 1215765 - RNA, 22 nt, Human
acagcagggggcgccccggcgc

SEQ ID NO: 1215766 - RNA, 21 nt, Human
accagcucccccgaccccggc

SEQ ID NO: 1215767 - RNA, 18 nt, Human
acccuccagagacagccu

SEQ ID NO: 1215768 - RNA, 18 nt, Human
agaaaauaaaaagcaaag

SEQ ID NO: 1215769 - RNA, 19 nt, Human
agaaaauaaaaagcaaaga

SEQ ID NO: 1215770 - RNA, 22 nt, Human
agaacccagagucccagauagc

SEQ ID NO: 1215771 - RNA, 21 nt, Human
agagacacacccuccagagac

SEQ ID NO: 1215772 - RNA, 22 nt, Human
agagacagccuggggggcugcc

SEQ ID NO: 1215773 - RNA, 18 nt, Human
agcagagacacacccucc

SEQ ID NO: 1215774 - RNA, 19 nt, Human
agccccgggaagaagucca

SEQ ID NO: 1215775 - RNA, 20 nt, Human
aggcaggggcaggggcgcgg

SEQ ID NO: 1215776 - RNA, 22 nt, Human
aggcaggggcaggggcgcgggg

SEQ ID NO: 1215777 - RNA, 23 nt, Human
aggcaggggcaggggcgcggggc

SEQ ID NO: 1215778 - RNA, 23 nt, Human
aggccgaggaccggggcgcggga

SEQ ID NO: 1215779 - RNA, 22 nt, Human
aggggcaggggcgcggggcugg

SEQ ID NO: 1215780 - RNA, 28 nt, Human
auggaucaucugccccucgguucgcugu

SEQ ID NO: 1215781 - RNA, 20 nt, Human
cacacccuccagagacagcc

SEQ ID NO: 1215782 - RNA, 22 nt, Human
cacacccuccagagacagccug

SEQ ID NO: 1215783 - RNA, 18 nt, Human
cagaaagagccccgggaa

SEQ ID NO: 1215784 - RNA, 23 nt, Human
caggggcaggggcgcggggcugg

SEQ ID NO: 1215785 - RNA, 19 nt, Human
ccacaccgccgcuccugac

SEQ ID NO: 1215786 - RNA, 18 nt, Human
cccagagucccagauagc

SEQ ID NO: 1215787 - RNA, 18 nt, Human
ccccggcgcuggagguga

SEQ ID NO: 1215788 - RNA, 18 nt, Human
cccgagcugcccuccucu

SEQ ID NO: 1215789 - RNA, 19 nt, Human
cccgcaccccaccucugaa

SEQ ID NO: 1215790 - RNA, 21 nt, Human
cccgcaccccaccucugaaaa

SEQ ID NO: 1215791 - RNA, 25 nt, Human
cccgcaccccaccucugaaaagccc

SEQ ID NO: 1215792 - RNA, 24 nt, Human
cccgcccccacgccaggagcccac

SEQ ID NO: 1215793 - RNA, 19 nt, Human
cccucgguucgcugucccc

SEQ ID NO: 1215794 - RNA, 26 nt, Human
ccgaccccggcuaggagcacacacgu

SEQ ID NO: 1215795 - RNA, 18 nt, Human
ccgggccacuuggcuucg

SEQ ID NO: 1215796 - RNA, 23 nt, Human
ccucccagaagggccaagauacc

SEQ ID NO: 1215797 - RNA, 24 nt, Human
ccucgggcugugcgcguccuccca

SEQ ID NO: 1215798 - RNA, 24 nt, Human
ccucugcccggucacagccgcuuc

SEQ ID NO: 1215799 - RNA, 18 nt, Human
cgaaagcccgagcugccc

SEQ ID NO: 1215800 - RNA, 21 nt, Human
cgccaggagcccacucggugg

SEQ ID NO: 1215801 - RNA, 25 nt, Human
cguccagggccacacugggauguuc

SEQ ID NO: 1215802 - RNA, 28 nt, Human
cucccggaaaaaggcaggggcaggggcu

SEQ ID NO: 1215803 - RNA, 21 nt, Human
cugaaggcugggaguccggag

SEQ ID NO: 1215804 - RNA, 24 nt, Human
cugcgcgcggcuggucccgccccc

SEQ ID NO: 1215805 - RNA, 19 nt, Human
cugcggcgaaagcccgagc

SEQ ID NO: 1215806 - RNA, 22 nt, Human
cugggcccagaaagagccccgg

SEQ ID NO: 1215807 - RNA, 18 nt, Human
cuggucccgcccccacgc

SEQ ID NO: 1215808 - RNA, 20 nt, Human
gaaagcccgagcugcccucc

SEQ ID NO: 1215809 - RNA, 22 nt, Human
gcccagaaagagccccgggaag

SEQ ID NO: 1215810 - RNA, 21 nt, Human
gcccccacgccaggagcccac

SEQ ID NO: 1215811 - RNA, 21 nt, Human
ggccaagauaccagcuccccc

SEQ ID NO: 1215812 - RNA, 25 nt, Human
ggccacuuggcuucgucugaaaaua

SEQ ID NO: 1215813 - RNA, 28 nt, Human
ggcgccccggcgcuggaggugagaggcc

SEQ ID NO: 1215814 - RNA, 18 nt, Human
gggaagcagagacacacc

SEQ ID NO: 1215815 - RNA, 22 nt, Human
gggcgccccggcgcuggaggug

SEQ ID NO: 1215816 - RNA, 23 nt, Human
gggcugggcagugccggcucuuu

SEQ ID NO: 1215817 - RNA, 23 nt, Human
ggggcaggggcgcggggcugggc

SEQ ID NO: 1215818 - RNA, 18 nt, Human
ggucccagagcuuggggc

SEQ ID NO: 1215819 - RNA, 20 nt, Human
gucugaaaauaaacacgggg

SEQ ID NO: 1215820 - RNA, 22 nt, Human
uaaaaagcaaagaauccacuug

SEQ ID NO: 1215821 - RNA, 23 nt, Human
ucacaaaggcagcugggcccaga

SEQ ID NO: 1215822 - RNA, 18 nt, Human
uccccucgcccgcacccc

SEQ ID NO: 1215823 - RNA, 21 nt, Human
uccuugaugaggggcacgacg

SEQ ID NO: 1215824 - RNA, 23 nt, Human
ucugaaggcugggaguccggagg

SEQ ID NO: 1215825 - RNA, 23 nt, Human
ugaaaauaaacacggggaaaggg

SEQ ID NO: 1215826 - RNA, 24 nt, Human
ugaccuucuccuugggguccuugg

SEQ ID NO: 1215827 - RNA, 22 nt, Human
ugaugaggggcacgacgguccc

SEQ ID NO: 1215828 - RNA, 26 nt, Human
ugcaucguccccucgcccgcacccca

SEQ ID NO: 1215829 - RNA, 18 nt, Human
uggauaaagacaaauaag

SEQ ID NO: 1215830 - RNA, 20 nt, Human
ugggcccagaaagagccccg

SEQ ID NO: 1215831 - RNA, 22 nt, Human
ugggcccagaaagagccccggg

SEQ ID NO: 1215832 - RNA, 25 nt, Human
uguacuaaaacauuuucuucagccu

SEQ ID NO: 1215833 - RNA, 21 nt, Human
ugugcgcguccucccagaagg

SEQ ID NO: 1215834 - RNA, 20 nt, Human
uucuccuugggguccuuggc

SEQ ID NO: 1215835 - RNA, 18 nt, Human
aagaaguccaguuggaaa

SEQ ID NO: 1215836 - RNA, 23 nt, Human
aauaaaaagcaaagaauccacuu

SEQ ID NO: 1215837 - RNA, 22 nt, Human
acagcagggggcgccccggcgc

SEQ ID NO: 1215838 - RNA, 18 nt, Human
agaaaauaaaaagcaaag

SEQ ID NO: 1215839 - RNA, 19 nt, Human
agaaaauaaaaagcaaaga

SEQ ID NO: 1215840 - RNA, 22 nt, Human
agaacccagagucccagauagc

SEQ ID NO: 1215841 - RNA, 19 nt, Human
agccccgggaagaagucca

SEQ ID NO: 1215842 - RNA, 23 nt, Human
aggccgaggaccggggcgcggga

SEQ ID NO: 1215843 - RNA, 18 nt, Human
cccagagucccagauagc

SEQ ID NO: 1215844 - RNA, 18 nt, Human
ccccggcgcuggagguga

SEQ ID NO: 1215845 - RNA, 19 nt, Human
cccucgguucgcugucccc

SEQ ID NO: 1215846 - RNA, 24 nt, Human
ccucugcccggucacagccgcuuc

SEQ ID NO: 1215847 - RNA, 19 nt, Human
cgcuggaggugagaggccg

SEQ ID NO: 1215848 - RNA, 22 nt, Human
cugggcccagaaagagccccgg

SEQ ID NO: 1215849 - RNA, 22 nt, Human
gcccagaaagagccccgggaag

SEQ ID NO: 1215850 - RNA, 28 nt, Human
ggcgccccggcgcuggaggugagaggcc

SEQ ID NO: 1215851 - RNA, 22 nt, Human
gggcgccccggcgcuggaggug

SEQ ID NO: 1215852 - RNA, 22 nt, Human
uaaaaagcaaagaauccacuug

SEQ ID NO: 1215853 - RNA, 23 nt, Human
ucacaaaggcagcugggcccaga

SEQ ID NO: 1215854 - RNA, 18 nt, Human
uccccgggcugagaaccc

SEQ ID NO: 1215855 - RNA, 20 nt, Human
ugggcccagaaagagccccg

SEQ ID NO: 1215856 - RNA, 22 nt, Human
ugggcccagaaagagccccggg

SEQ ID NO: 1215857 - RNA, 19 nt, Human
acacccagcuccccacacg

SEQ ID NO: 1215858 - RNA, 19 nt, Human
agaaauuggaaaagaacau

SEQ ID NO: 1215859 - RNA, 22 nt, Human
agccauggaggcuggggggcuu

SEQ ID NO: 1215860 - RNA, 22 nt, Human
auccaguaggaugcucugcacc

SEQ ID NO: 1215861 - RNA, 18 nt, Human
auggaggcuggggggcuu

SEQ ID NO: 1215862 - RNA, 24 nt, Human
cacacccagcuccccacacgaucu

SEQ ID NO: 1215863 - RNA, 21 nt, Human
caggaccccagacucucccga

SEQ ID NO: 1215864 - RNA, 30 nt, Human
ccagaucacacacccagcuccccacacgag

SEQ ID NO: 1215865 - RNA, 19 nt, Human
cccacacgaucuagagggu

SEQ ID NO: 1215866 - RNA, 26 nt, Human
cucaggaccccagacucucccgauuc

SEQ ID NO: 1215867 - RNA, 20 nt, Human
cugcaccugcagucaggagu

SEQ ID NO: 1215868 - RNA, 21 nt, Human
cuggccagaucacacacccag

SEQ ID NO: 1215869 - RNA, 21 nt, Human
gccucaucuuaguucugacuc

SEQ ID NO: 1215870 - RNA, 21 nt, Human
gggagaaacaacuggccagau

SEQ ID NO: 1215871 - RNA, 24 nt, Human
ggggggcuuuggggccgugggggc

SEQ ID NO: 1215872 - RNA, 19 nt, Human
uacccagaauuugucucca

SEQ ID NO: 1215873 - RNA, 25 nt, Human
uaccuggaacauugaggcacagggg

SEQ ID NO: 1215874 - RNA, 24 nt, Human
uagaggguuucaggucucggccuc

SEQ ID NO: 1215875 - RNA, 25 nt, Human
ucacacacccagcuccccacacgau

SEQ ID NO: 1215876 - RNA, 20 nt, Human
ugcucugcaccugcagucaa

SEQ ID NO: 1215877 - RNA, 21 nt, Human
uggaaaagaacaucuccaggu

SEQ ID NO: 1215878 - RNA, 21 nt, Human
uggaggcuggggggcuuuggg

SEQ ID NO: 1215879 - RNA, 22 nt, Human
ugggggccagcccugguaccug

SEQ ID NO: 1215880 - RNA, 22 nt, Human
uggggggcuuuggggccguggg

SEQ ID NO: 1215881 - RNA, 18 nt, Human
uuuggggccgugggggcc

SEQ ID NO: 1215882 - RNA, 19 nt, Human
auauauauauauauauaua

SEQ ID NO: 1215883 - RNA, 19 nt, Human
auauauauauauauauaua

SEQ ID NO: 1215884 - RNA, 19 nt, Human
auauauauauauauauaua

SEQ ID NO: 1215885 - RNA, 19 nt, Human
auauauauauauauauaua

SEQ ID NO: 1215886 - RNA, 19 nt, Human
auauauauauauauauaua

SEQ ID NO: 1215887 - RNA, 19 nt, Human
auauauauauauauauaua

SEQ ID NO: 1215888 - RNA, 19 nt, Human
auauauauauauauauaua

SEQ ID NO: 1215889 - RNA, 19 nt, Human
auauauauauauauauaua

SEQ ID NO: 1215890 - RNA, 19 nt, Human
auauauauauauauauaua

SEQ ID NO: 1215891 - RNA, 24 nt, Human
cgcccccggcccccuccccggccc

SEQ ID NO: 1215892 - RNA, 18 nt, Human
cucuaugugcccaccgcc

SEQ ID NO: 1215893 - RNA, 21 nt, Human
gcccccggcccccuccccggc

SEQ ID NO: 1215894 - RNA, 18 nt, Human
gugcccaccgcccccggc

SEQ ID NO: 1215895 - RNA, 22 nt, Human
uaaauauauauauauauauaua

SEQ ID NO: 1215896 - RNA, 23 nt, Human
uaaauuuuauuaugacuucauuu

SEQ ID NO: 1215897 - RNA, 19 nt, Human
uauauauauauauauauau

SEQ ID NO: 1215898 - RNA, 19 nt, Human
uauauauauauauauauau

SEQ ID NO: 1215899 - RNA, 19 nt, Human
uauauauauauauauauau

SEQ ID NO: 1215900 - RNA, 19 nt, Human
uauauauauauauauauau

SEQ ID NO: 1215901 - RNA, 19 nt, Human
uauauauauauauauauau

SEQ ID NO: 1215902 - RNA, 19 nt, Human
uauauauauauauauauau

SEQ ID NO: 1215903 - RNA, 18 nt, Human
uauuaugacuucauuugu

SEQ ID NO: 1215904 - RNA, 21 nt, Human
uguuuaaauauauauauauau

SEQ ID NO: 1215905 - RNA, 30 nt, Human
uucauuuguuuaaauauauauauauauauu

SEQ ID NO: 1215906 - RNA, 18 nt, Human
uuuauuaugacuucauuu

SEQ ID NO: 1215907 - RNA, 25 nt, Human
aagaggaaaaggggaaauaaucuga

SEQ ID NO: 1215908 - RNA, 19 nt, Human
aagcagccucggauccggg

SEQ ID NO: 1215909 - RNA, 20 nt, Human
agaagaaagggaggcugugg

SEQ ID NO: 1215910 - RNA, 20 nt, Human
agcagccucggauccgggug

SEQ ID NO: 1215911 - RNA, 22 nt, Human
aggagaagcagccucggauccg

SEQ ID NO: 1215912 - RNA, 22 nt, Human
agggaggcuguggacuggaggc

SEQ ID NO: 1215913 - RNA, 20 nt, Human
agucguucauaguuggcuuc

SEQ ID NO: 1215914 - RNA, 22 nt, Human
cacuccccgcuuugccuccgcc

SEQ ID NO: 1215915 - RNA, 22 nt, Human
ccccgccuucuccuucugucug

SEQ ID NO: 1215916 - RNA, 26 nt, Human
ccccugccccaguccuucaacagguc

SEQ ID NO: 1215917 - RNA, 22 nt, Human
ccccuuugacuuugggugacuu

SEQ ID NO: 1215918 - RNA, 19 nt, Human
cccgcuuugccuccgcccc

SEQ ID NO: 1215919 - RNA, 24 nt, Human
cucuuggcugugaguauuaucauu

SEQ ID NO: 1215920 - RNA, 21 nt, Human
cuuccuuuccucuuugaaucc

SEQ ID NO: 1215921 - RNA, 18 nt, Human
gaaagugacugaucagcc

SEQ ID NO: 1215922 - RNA, 24 nt, Human
gagugugugugugaccagggcucc

SEQ ID NO: 1215923 - RNA, 24 nt, Human
gaugcccgcguccguccccugccc

SEQ ID NO: 1215924 - RNA, 20 nt, Human
gcccacuccccgcuuugccu

SEQ ID NO: 1215925 - RNA, 27 nt, Human
gcccugggcguaugccguagaucucca

SEQ ID NO: 1215926 - RNA, 22 nt, Human
gcccuuagagucaccgcccccu

SEQ ID NO: 1215927 - RNA, 21 nt, Human
gcugccagccccgccuucucc

SEQ ID NO: 1215928 - RNA, 22 nt, Human
gcugugaguauuaucauuugca

SEQ ID NO: 1215929 - RNA, 22 nt, Human
ggcuguggacuggaggcugcca

SEQ ID NO: 1215930 - RNA, 19 nt, Human
uaccagguaacaagaaccu

SEQ ID NO: 1215931 - RNA, 24 nt, Human
uccuagcaccaaggccacacucgg

SEQ ID NO: 1215932 - RNA, 22 nt, Human
ucucgcacagguuuacagcacc

SEQ ID NO: 1215933 - RNA, 21 nt, Human
ugagaagaggaggcccugggc

SEQ ID NO: 1215934 - RNA, 23 nt, Human
ugaguauuaucauuugcaaagag

SEQ ID NO: 1215935 - RNA, 21 nt, Human
ugcaaagaggaaaaggggaaa

SEQ ID NO: 1215936 - RNA, 18 nt, Human
ugcauguccuaaggagaa

SEQ ID NO: 1215937 - RNA, 26 nt, Human
ugccccaguccuucaacaggucccca

SEQ ID NO: 1215938 - RNA, 24 nt, Human
uggaggcugccagccccgccuucu

SEQ ID NO: 1215939 - RNA, 22 nt, Human
uggcuguuccaaauggaaggau

SEQ ID NO: 1215940 - RNA, 23 nt, Human
ugucugcauguccuaaggagaag

SEQ ID NO: 1215941 - RNA, 23 nt, Human
ugugaccagggcuccuuccugcc

SEQ ID NO: 1215942 - RNA, 21 nt, Human
ugugugugugaccagggcucc

SEQ ID NO: 1215943 - RNA, 21 nt, Human
uuagaauggaaaguuuucuuc

SEQ ID NO: 1215944 - RNA, 22 nt, Human
uuccaaaaguugucuuguacca

SEQ ID NO: 1215945 - RNA, 21 nt, Human
uuccuuuagucguucauaguu

SEQ ID NO: 1215946 - RNA, 22 nt, Human
uugacuuugggugacuuuucuc

SEQ ID NO: 1215947 - RNA, 18 nt, Human
uuggcuucaauaaaugaa

SEQ ID NO: 1215948 - RNA, 23 nt, Human
caggaucacaccaauaccuccaa

SEQ ID NO: 1215949 - RNA, 24 nt, Human
cccagccaggaucacaccaauacc

SEQ ID NO: 1215950 - RNA, 20 nt, Human
cuccccuauugacaccccag

SEQ ID NO: 1215951 - RNA, 22 nt, Human
aagagcugcggggaggaggagg

SEQ ID NO: 1215952 - RNA, 21 nt, Human
agagcugcggggaggaggagg

SEQ ID NO: 1215953 - RNA, 20 nt, Human
agcugcggggaggaggaggg

SEQ ID NO: 1215954 - RNA, 23 nt, Human
cagcauaaaccacagggaucauu

SEQ ID NO: 1215955 - RNA, 23 nt, Human
gagaagagcugcggggaggagga

SEQ ID NO: 1215956 - RNA, 21 nt, Human
gagcugcggggaggaggaggg

SEQ ID NO: 1215957 - RNA, 18 nt, Human
gaucauugguggagacuu

SEQ ID NO: 1215958 - RNA, 21 nt, Human
ggagacuuagcacccagaaca

SEQ ID NO: 1215959 - RNA, 19 nt, Human
ggggaggaggagggaucug

SEQ ID NO: 1215960 - RNA, 19 nt, Human
guaaacacguacuucagau

SEQ ID NO: 1215961 - RNA, 18 nt, Human
guguuugcugaagcuuug

SEQ ID NO: 1215962 - RNA, 27 nt, Human
uacuucagaucucucauagagggaaaa

SEQ ID NO: 1215963 - RNA, 19 nt, Human
ucucuaaguguuugcugaa

SEQ ID NO: 1215964 - RNA, 23 nt, Human
uguaaacacguacuucagaucuc

SEQ ID NO: 1215965 - RNA, 18 nt, Human
uguacagaauuccucagu

SEQ ID NO: 1215966 - RNA, 18 nt, Human
aaaaucauaaagcuguga

SEQ ID NO: 1215967 - RNA, 21 nt, Human
aagacuaguuuauggaagcaa

SEQ ID NO: 1215968 - RNA, 21 nt, Human
aagaggaggaaaauagcagga

SEQ ID NO: 1215969 - RNA, 21 nt, Human
aaucuuugggcuaagcagcuu

SEQ ID NO: 1215970 - RNA, 22 nt, Human
agaaggucugguugugcuuuuc

SEQ ID NO: 1215971 - RNA, 25 nt, Human
agaauucaaagucagaguucaguuu

SEQ ID NO: 1215972 - RNA, 18 nt, Human
agacaggaagcgggguag

SEQ ID NO: 1215973 - RNA, 28 nt, Human
agacaggaagcgggguagaugagccugg

SEQ ID NO: 1215974 - RNA, 20 nt, Human
agacgauauuaaccauccca

SEQ ID NO: 1215975 - RNA, 19 nt, Human
agagcugaaucauuccugg

SEQ ID NO: 1215976 - RNA, 20 nt, Human
agcaaguacagccauccaaa

SEQ ID NO: 1215977 - RNA, 24 nt, Human
agccugggcggugggugggggccu

SEQ ID NO: 1215978 - RNA, 21 nt, Human
aggcaaaaucauaaagcugug

SEQ ID NO: 1215979 - RNA, 22 nt, Human
aggcgggcugguguuggagcag

SEQ ID NO: 1215980 - RNA, 23 nt, Human
agggacaagauauacauggaagc

SEQ ID NO: 1215981 - RNA, 21 nt, Human
agggaguggagaaggggaagc

SEQ ID NO: 1215982 - RNA, 21 nt, Human
agguuuuaguuucuucaccug

SEQ ID NO: 1215983 - RNA, 24 nt, Human
agugcucugagaguugaggggagc

SEQ ID NO: 1215984 - RNA, 22 nt, Human
auaaagggcagcacucagcuca

SEQ ID NO: 1215985 - RNA, 22 nt, Human
auauccauuuuuauagcaaagu

SEQ ID NO: 1215986 - RNA, 18 nt, Human
auccaugacagcauggag

SEQ ID NO: 1215987 - RNA, 19 nt, Human
aucccauaaacagcaucca

SEQ ID NO: 1215988 - RNA, 24 nt, Human
auugggcacagaggccuucccagg

SEQ ID NO: 1215989 - RNA, 19 nt, Human
caaaauugggcacagaggc

SEQ ID NO: 1215990 - RNA, 23 nt, Human
caaaucuuuguccccagcagccu

SEQ ID NO: 1215991 - RNA, 19 nt, Human
caagaggaggaaaauagca

SEQ ID NO: 1215992 - RNA, 24 nt, Human
cacacaggcugaaauaauugaagc

SEQ ID NO: 1215993 - RNA, 18 nt, Human
cacagaggccuucccagg

SEQ ID NO: 1215994 - RNA, 19 nt, Human
cacauacaggccaggaauu

SEQ ID NO: 1215995 - RNA, 25 nt, Human
cacauacaggccaggaauucaugua

SEQ ID NO: 1215996 - RNA, 21 nt, Human
caccuggucuugaccuucacu

SEQ ID NO: 1215997 - RNA, 23 nt, Human
cagaguucaguuuagagccaccu

SEQ ID NO: 1215998 - RNA, 19 nt, Human
cagccuuucuugacagagg

SEQ ID NO: 1215999 - RNA, 25 nt, Human
caguggaaucucucucugcaugguu

SEQ ID NO: 1216000 - RNA, 23 nt, Human
cauauccauuuuuauagcaaagu

SEQ ID NO: 1216001 - RNA, 21 nt, Human
cauugcugaguggucaucagg

SEQ ID NO: 1216002 - RNA, 20 nt, Human
cauuucagacacacaggcug

SEQ ID NO: 1216003 - RNA, 21 nt, Human
ccaaaucuuuguccccagcag

SEQ ID NO: 1216004 - RNA, 22 nt, Human
ccagcagccuuucuugacagag

SEQ ID NO: 1216005 - RNA, 18 nt, Human
ccaggagacagacuagcc

SEQ ID NO: 1216006 - RNA, 19 nt, Human
ccauaaacagcauccauga

SEQ ID NO: 1216007 - RNA, 20 nt, Human
cccauaaacagcauccauga

SEQ ID NO: 1216008 - RNA, 23 nt, Human
cccggaggguucugaaacuuacc

SEQ ID NO: 1216009 - RNA, 20 nt, Human
ccuauaaagagaggggugga

SEQ ID NO: 1216010 - RNA, 21 nt, Human
ccuauugaucauauccaggga

SEQ ID NO: 1216011 - RNA, 21 nt, Human
cgggcugguguuggagcaggg

SEQ ID NO: 1216012 - RNA, 18 nt, Human
cuaggccuauaaagagag

SEQ ID NO: 1216013 - RNA, 18 nt, Human
cugggcgguggguggggg

SEQ ID NO: 1216014 - RNA, 25 nt, Human
gaaaaaucauccauuucauuaguau

SEQ ID NO: 1216015 - RNA, 20 nt, Human
gagauugagauguagacaca

SEQ ID NO: 1216016 - RNA, 22 nt, Human
gagcagggucacagcugagugc

SEQ ID NO: 1216017 - RNA, 19 nt, Human
gagccugggcggugggugg

SEQ ID NO: 1216018 - RNA, 18 nt, Human
gaggaccuggagcagagg

SEQ ID NO: 1216019 - RNA, 21 nt, Human
gcuccaaaucuuuguccccag

SEQ ID NO: 1216020 - RNA, 24 nt, Human
gcuucaguggaaucucucucugcc

SEQ ID NO: 1216021 - RNA, 19 nt, Human
ggaccuggagcagagggug

SEQ ID NO: 1216022 - RNA, 24 nt, Human
ggagcagggucacagcugagugcu

SEQ ID NO: 1216023 - RNA, 20 nt, Human
gguaacggaggaccuggagc

SEQ ID NO: 1216024 - RNA, 18 nt, Human
guagaagacagguaggga

SEQ ID NO: 1216025 - RNA, 21 nt, Human
guccuuuuuucuuacuccccu

SEQ ID NO: 1216026 - RNA, 22 nt, Human
guccuuuuuucuuacuccccug

SEQ ID NO: 1216027 - RNA, 20 nt, Human
uaacaagaggaggaaaauag

SEQ ID NO: 1216028 - RNA, 21 nt, Human
uaagcagcuugaaccugauuu

SEQ ID NO: 1216029 - RNA, 21 nt, Human
uacugcccuuucuccacugug

SEQ ID NO: 1216030 - RNA, 21 nt, Human
uagaagacagguagggagugg

SEQ ID NO: 1216031 - RNA, 21 nt, Human
uagcaaaguuuaacuggggac

SEQ ID NO: 1216032 - RNA, 21 nt, Human
uagcaaguacagccauccaaa

SEQ ID NO: 1216033 - RNA, 23 nt, Human
uagcccacggaaugaucugcauc

SEQ ID NO: 1216034 - RNA, 21 nt, Human
uaugacagugauaggcagcaa

SEQ ID NO: 1216035 - RNA, 21 nt, Human
uaugaugugccuaggagacag

SEQ ID NO: 1216036 - RNA, 26 nt, Human
ucacugacucuuaccaccagucaugc

SEQ ID NO: 1216037 - RNA, 21 nt, Human
ucagaguucaguuuagagccc

SEQ ID NO: 1216038 - RNA, 24 nt, Human
uccaagaggacugaaauguaugga

SEQ ID NO: 1216039 - RNA, 20 nt, Human
uccaugacagcauggagcuu

SEQ ID NO: 1216040 - RNA, 19 nt, Human
ucuuccacauacaggccag

SEQ ID NO: 1216041 - RNA, 23 nt, Human
ucuuguagaagacagguagggag

SEQ ID NO: 1216042 - RNA, 22 nt, Human
ugaaagguagacuccaagagga

SEQ ID NO: 1216043 - RNA, 18 nt, Human
ugagaaggucugguugug

SEQ ID NO: 1216044 - RNA, 21 nt, Human
ugagaaggucugguugugcuu

SEQ ID NO: 1216045 - RNA, 21 nt, Human
ugagaguugaggggagcagau

SEQ ID NO: 1216046 - RNA, 20 nt, Human
ugccagauauuuugaacccc

SEQ ID NO: 1216047 - RNA, 18 nt, Human
ugcugaguggucaucagg

SEQ ID NO: 1216048 - RNA, 25 nt, Human
uggagcagggucacagcugagugcu

SEQ ID NO: 1216049 - RNA, 24 nt, Human
uggauccuugcuuguuggggcagg

SEQ ID NO: 1216050 - RNA, 26 nt, Human
uggauccuugcuuguuggggcagggu

SEQ ID NO: 1216051 - RNA, 25 nt, Human
ugggaagggcagacuucacgcagca

SEQ ID NO: 1216052 - RNA, 22 nt, Human
ugggugggggccuuaaucuuug

SEQ ID NO: 1216053 - RNA, 22 nt, Human
uguggcagugugagaaggucug

SEQ ID NO: 1216054 - RNA, 18 nt, Human
uuggagcagggucacagc

SEQ ID NO: 1216055 - RNA, 18 nt, Human
uuggagcagggucacagc

SEQ ID NO: 1216056 - RNA, 20 nt, Human
uuggagcagggucacagcug

SEQ ID NO: 1216057 - RNA, 24 nt, Human
uuuuccauacauuucaaaaugcua

SEQ ID NO: 1216058 - RNA, 20 nt, Human
agaacccucccuggccucuc

SEQ ID NO: 1216059 - RNA, 23 nt, Human
agagagggaggaggggaucggag

SEQ ID NO: 1216060 - RNA, 24 nt, Human
agagagggaggaggggaucggagc

SEQ ID NO: 1216061 - RNA, 22 nt, Human
agccuccccugcuccugccugc

SEQ ID NO: 1216062 - RNA, 21 nt, Human
agccugggugcuccuggggag

SEQ ID NO: 1216063 - RNA, 23 nt, Human
agccugggugcuccuggggaguc

SEQ ID NO: 1216064 - RNA, 21 nt, Human
ccaagccugggugcuccuggg

SEQ ID NO: 1216065 - RNA, 21 nt, Human
cccugcuccugccugcucacc

SEQ ID NO: 1216066 - RNA, 18 nt, Human
ccugcuccugccugcuca

SEQ ID NO: 1216067 - RNA, 18 nt, Human
cucccuggccucuccugg

SEQ ID NO: 1216068 - RNA, 18 nt, Human
cugccugcucacccugcc

SEQ ID NO: 1216069 - RNA, 22 nt, Human
gagggaggaggggaucggagcg

SEQ ID NO: 1216070 - RNA, 19 nt, Human
gcagagauugcugcccaag

SEQ ID NO: 1216071 - RNA, 20 nt, Human
gccugggugcuccuggggag

SEQ ID NO: 1216072 - RNA, 22 nt, Human
gcuccuggggaguccugcguua

SEQ ID NO: 1216073 - RNA, 18 nt, Human
ggcacugguuccagcgga

SEQ ID NO: 1216074 - RNA, 19 nt, Human
gggcacugguuccagcgga

SEQ ID NO: 1216075 - RNA, 19 nt, Human
uccacgcugucagugaggc

SEQ ID NO: 1216076 - RNA, 24 nt, Human
ucgaaaagaaaggcaugcagagau

SEQ ID NO: 1216077 - RNA, 19 nt, Human
ucggagagagggaggaggg

SEQ ID NO: 1216078 - RNA, 21 nt, Human
ugcgagccuccccugcuccug

SEQ ID NO: 1216079 - RNA, 27 nt, Human
uuagaugauggugguguuuaucucccu

SEQ ID NO: 1216080 - RNA, 23 nt, Human
uucggagagagggaggaggggau

SEQ ID NO: 1216081 - RNA, 21 nt, Human
aagcaagucacagucagggcc

SEQ ID NO: 1216082 - RNA, 21 nt, Human
aaguagccucgaugugaaagu

SEQ ID NO: 1216083 - RNA, 18 nt, Human
acaaagaaggaccccagg

SEQ ID NO: 1216084 - RNA, 19 nt, Human
acagagagggugggugcua

SEQ ID NO: 1216085 - RNA, 21 nt, Human
accagccccucuguccuccug

SEQ ID NO: 1216086 - RNA, 23 nt, Human
agagaagccacaccugagaccag

SEQ ID NO: 1216087 - RNA, 22 nt, Human
agccacaccugagaccagcccc

SEQ ID NO: 1216088 - RNA, 18 nt, Human
cagaaggggugaaaagua

SEQ ID NO: 1216089 - RNA, 21 nt, Human
cagccccucuguccuccugcc

SEQ ID NO: 1216090 - RNA, 21 nt, Human
cggugcagacgggagcacaga

SEQ ID NO: 1216091 - RNA, 18 nt, Human
cuccugccucugcaugca

SEQ ID NO: 1216092 - RNA, 24 nt, Human
gaaauccuaucacguccucaggcc

SEQ ID NO: 1216093 - RNA, 20 nt, Human
ggggaagcaagucacaguca

SEQ ID NO: 1216094 - RNA, 18 nt, Human
ggugcaguacaaagaagg

SEQ ID NO: 1216095 - RNA, 23 nt, Human
uacaaagaaggaccccaggacag

SEQ ID NO: 1216096 - RNA, 19 nt, Human
uccauccaaccaacaaggu

SEQ ID NO: 1216097 - RNA, 20 nt, Human
ucccugaggggggaagcaag

SEQ ID NO: 1216098 - RNA, 22 nt, Human
ucccugcaggaggcagaagggg

SEQ ID NO: 1216099 - RNA, 25 nt, Human
ucugcaugcagcgucccugcaggag

SEQ ID NO: 1216100 - RNA, 20 nt, Human
ugaaauccuaucacguccuc

SEQ ID NO: 1216101 - RNA, 23 nt, Human
ugagaccagccccucuguccucc

SEQ ID NO: 1216102 - RNA, 18 nt, Human
ugagagaagccacaccug

SEQ ID NO: 1216103 - RNA, 19 nt, Human
uggggcgggaaugaaaucc

SEQ ID NO: 1216104 - RNA, 19 nt, Human
uggggugcacaggcagcuu

SEQ ID NO: 1216105 - RNA, 19 nt, Human
ugucauugggugcaguaca

SEQ ID NO: 1216106 - RNA, 20 nt, Human
aacauagacauaagcaaaga

SEQ ID NO: 1216107 - RNA, 18 nt, Human
auugccaugucgucaugg

SEQ ID NO: 1216108 - RNA, 21 nt, Human
agguagcaggugggggccugg

SEQ ID NO: 1216109 - RNA, 23 nt, Human
caacugagucgacgaucacuuga

SEQ ID NO: 1216110 - RNA, 23 nt, Human
cugcaaggggcuuugcuucuccu

SEQ ID NO: 1216111 - RNA, 19 nt, Human
cuggccgcgugcucugggg

SEQ ID NO: 1216112 - RNA, 21 nt, Human
gccgcgugcucuggggguaga

SEQ ID NO: 1216113 - RNA, 21 nt, Human
ggagaagcucuggagguagca

SEQ ID NO: 1216114 - RNA, 22 nt, Human
gggccuggcuugggcuccuggc

SEQ ID NO: 1216115 - RNA, 24 nt, Human
uagaauggagaagcucuggaggua

SEQ ID NO: 1216116 - RNA, 20 nt, Human
ugggcuccuggcccagacag

SEQ ID NO: 1216117 - RNA, 19 nt, Human
aaauaaauuuaaacuauaa

SEQ ID NO: 1216118 - RNA, 19 nt, Human
aaauaaauuuaaacuauaa

SEQ ID NO: 1216119 - RNA, 18 nt, Human
aacagcuucuccaccucu

SEQ ID NO: 1216120 - RNA, 18 nt, Human
aagaugccagagugaaca

SEQ ID NO: 1216121 - RNA, 23 nt, Human
agccucuccugcuccuccugccg

SEQ ID NO: 1216122 - RNA, 19 nt, Human
agcucccgcagagucuccu

SEQ ID NO: 1216123 - RNA, 19 nt, Human
caccucuuccagcagccuc

SEQ ID NO: 1216124 - RNA, 20 nt, Human
cacguagccucuccuccugu

SEQ ID NO: 1216125 - RNA, 20 nt, Human
cacguagccucuccuccugu

SEQ ID NO: 1216126 - RNA, 20 nt, Human
cacguagccucuccuccugu

SEQ ID NO: 1216127 - RNA, 22 nt, Human
cagcagccucucccucuccagc

SEQ ID NO: 1216128 - RNA, 26 nt, Human
cagcagccucucccucuccagcagcc

SEQ ID NO: 1216129 - RNA, 23 nt, Human
ccagcagccucuccugcuccucc

SEQ ID NO: 1216130 - RNA, 22 nt, Human
ccuccugccgccucuccuguuc

SEQ ID NO: 1216131 - RNA, 21 nt, Human
ccucuccagcagccucuccug

SEQ ID NO: 1216132 - RNA, 23 nt, Human
ccucuccagcucccgcagagucu

SEQ ID NO: 1216133 - RNA, 23 nt, Human
ccucuccuccuguucacacagcc

SEQ ID NO: 1216134 - RNA, 23 nt, Human
cuaacagcuucuccaccucuucc

SEQ ID NO: 1216135 - RNA, 19 nt, Human
cuccuccugccgccucucc

SEQ ID NO: 1216136 - RNA, 24 nt, Human
cugcuccuccugccgccucuccug

SEQ ID NO: 1216137 - RNA, 23 nt, Human
cuguucacguagccucuccuccu

SEQ ID NO: 1216138 - RNA, 23 nt, Human
cuguucacguagccucuccuccu

SEQ ID NO: 1216139 - RNA, 23 nt, Human
cuguucacguagccucuccuccu

SEQ ID NO: 1216140 - RNA, 22 nt, Human
cuuaaauguuuuguuuuuuuuu

SEQ ID NO: 1216141 - RNA, 20 nt, Human
gaagccucuccugcuccagg

SEQ ID NO: 1216142 - RNA, 18 nt, Human
gcagccucucccucucca

SEQ ID NO: 1216143 - RNA, 19 nt, Human
gccacagccucucauccug

SEQ ID NO: 1216144 - RNA, 19 nt, Human
ggagcuccuccaccucguc

SEQ ID NO: 1216145 - RNA, 20 nt, Human
ggauauuaaccccuuaaaug

SEQ ID NO: 1216146 - RNA, 22 nt, Human
uaaaagaugccagagugaacau

SEQ ID NO: 1216147 - RNA, 22 nt, Human
uaaauuagaaacacaaauaaac

SEQ ID NO: 1216148 - RNA, 27 nt, Human
uaaauuagaaacacaaauaaauuuaaa

SEQ ID NO: 1216149 - RNA, 27 nt, Human
uaaauuagaaacacaaauaaauuuaaa

SEQ ID NO: 1216150 - RNA, 27 nt, Human
uaaauuagaaacacaaauaaauuuaaa

SEQ ID NO: 1216151 - RNA, 18 nt, Human
uagaaacacaaauaaaca

SEQ ID NO: 1216152 - RNA, 21 nt, Human
ucacacagccucuccuccugu

SEQ ID NO: 1216153 - RNA, 19 nt, Human
ucccucuccagcagccucu

SEQ ID NO: 1216154 - RNA, 18 nt, Human
ucuaacagcuucuccacc

SEQ ID NO: 1216155 - RNA, 20 nt, Human
ucuaacagcuucuccaccuc

SEQ ID NO: 1216156 - RNA, 24 nt, Human
ucuccaccucuuccagcagccucu

SEQ ID NO: 1216157 - RNA, 20 nt, Human
ucuccagcucccgcagaguc

SEQ ID NO: 1216158 - RNA, 19 nt, Human
ucuccagcucccgcagccu

SEQ ID NO: 1216159 - RNA, 19 nt, Human
ucuccagcucccgcagccu

SEQ ID NO: 1216160 - RNA, 22 nt, Human
ucuccugcuccuccugccgccu

SEQ ID NO: 1216161 - RNA, 24 nt, Human
ucuccugcugccacagccucucau

SEQ ID NO: 1216162 - RNA, 26 nt, Human
ucuccuguucuaacagcuucuccacc

SEQ ID NO: 1216163 - RNA, 23 nt, Human
ucuuccagcagccucuccugccc

SEQ ID NO: 1216164 - RNA, 18 nt, Human
ugcccuggcagcuucucc

SEQ ID NO: 1216165 - RNA, 25 nt, Human
ugcccuggcagcuucuccuguucac

SEQ ID NO: 1216166 - RNA, 22 nt, Human
uguuuuguuuuuuuuuuuuuuc

SEQ ID NO: 1216167 - RNA, 22 nt, Human
uuuaaacuauaaauuagaaaca

SEQ ID NO: 1216168 - RNA, 22 nt, Human
uuuaaacuauaaauuagaaaca

SEQ ID NO: 1216169 - RNA, 22 nt, Human
aaaagccagagcuggugaggca

SEQ ID NO: 1216170 - RNA, 21 nt, Human
aaaauaaauaaaagcaggccc

SEQ ID NO: 1216171 - RNA, 20 nt, Human
aacuguagaccaggccaggg

SEQ ID NO: 1216172 - RNA, 23 nt, Human
aagcaacaggccaaggugcguga

SEQ ID NO: 1216173 - RNA, 19 nt, Human
aagcaacuuuucccucagg

SEQ ID NO: 1216174 - RNA, 20 nt, Human
aagcagaagagggagacucc

SEQ ID NO: 1216175 - RNA, 23 nt, Human
aagcagaagagggagacuccgcg

SEQ ID NO: 1216176 - RNA, 24 nt, Human
aagcagaagagggagacuccgcgg

SEQ ID NO: 1216177 - RNA, 19 nt, Human
aagcaggccccugucagca

SEQ ID NO: 1216178 - RNA, 20 nt, Human
aagcucccagccccuacacc

SEQ ID NO: 1216179 - RNA, 21 nt, Human
acacaacccccuccaagcucc

SEQ ID NO: 1216180 - RNA, 24 nt, Human
acacaacccccuccaagcucccag

SEQ ID NO: 1216181 - RNA, 19 nt, Human
acagggcagccucaacugg

SEQ ID NO: 1216182 - RNA, 20 nt, Human
accccuaaucugcaguggau

SEQ ID NO: 1216183 - RNA, 19 nt, Human
acucccaggcugggagcug

SEQ ID NO: 1216184 - RNA, 20 nt, Human
agaagggcgggagggauggc

SEQ ID NO: 1216185 - RNA, 20 nt, Human
agagagaaaacggguuagag

SEQ ID NO: 1216186 - RNA, 18 nt, Human
agagguugguggaguugg

SEQ ID NO: 1216187 - RNA, 18 nt, Human
agaugccauuggccauag

SEQ ID NO: 1216188 - RNA, 19 nt, Human
agcauaggagcgaggaagg

SEQ ID NO: 1216189 - RNA, 23 nt, Human
agccaccagaccugauagagaag

SEQ ID NO: 1216190 - RNA, 19 nt, Human
aggcaggcuuggaaaggga

SEQ ID NO: 1216191 - RNA, 19 nt, Human
aggcaggcuuggaaaggga

SEQ ID NO: 1216192 - RNA, 22 nt, Human
aggcaggcuuggaaagggaggu

SEQ ID NO: 1216193 - RNA, 20 nt, Human
aggccagggcacaggcugcu

SEQ ID NO: 1216194 - RNA, 22 nt, Human
aggccccugucagcauaagccu

SEQ ID NO: 1216195 - RNA, 24 nt, Human
aggccucuggccgccugaguccag

SEQ ID NO: 1216196 - RNA, 18 nt, Human
agggauggcuggcuggag

SEQ ID NO: 1216197 - RNA, 19 nt, Human
aggggcgaugucaggagac

SEQ ID NO: 1216198 - RNA, 19 nt, Human
agugccuggggacugcggc

SEQ ID NO: 1216199 - RNA, 18 nt, Human
agugcuucagcaggggcc

SEQ ID NO: 1216200 - RNA, 18 nt, Human
auauauauguauauaugu

SEQ ID NO: 1216201 - RNA, 22 nt, Human
auauauauguauauaugugugu

SEQ ID NO: 1216202 - RNA, 28 nt, Human
auauauguauauaugugugugugugugu

SEQ ID NO: 1216203 - RNA, 18 nt, Human
auccaacagccaccagac

SEQ ID NO: 1216204 - RNA, 22 nt, Human
augcugccuggugacaccuggu

SEQ ID NO: 1216205 - RNA, 22 nt, Human
augugugugugugugugugugg

SEQ ID NO: 1216206 - RNA, 22 nt, Human
augugugugugugugugugugu

SEQ ID NO: 1216207 - RNA, 23 nt, Human
auguguguguguguguguguguu

SEQ ID NO: 1216208 - RNA, 19 nt, Human
caaccccuccccagucagc

SEQ ID NO: 1216209 - RNA, 21 nt, Human
caagcacagcacggggacuga

SEQ ID NO: 1216210 - RNA, 24 nt, Human
caagcucccagccccuacaccaua

SEQ ID NO: 1216211 - RNA, 22 nt, Human
cacaacccccuccaagcuccca

SEQ ID NO: 1216212 - RNA, 23 nt, Human
cacaacccccuccaagcucccag

SEQ ID NO: 1216213 - RNA, 18 nt, Human
cacaagcacagcacgggg

SEQ ID NO: 1216214 - RNA, 19 nt, Human
caccaaagcaacuuuuccc

SEQ ID NO: 1216215 - RNA, 21 nt, Human
caccaaagcaacuuuucccuc

SEQ ID NO: 1216216 - RNA, 30 nt, Human; identical to SEQ ID NO: 1084132

SEQ ID NO: 1216217 - RNA, 18 nt, Human
cacccugucuuccaacuc

SEQ ID NO: 1216218 - RNA, 21 nt, Human
cacggcccagggccaccucuu

SEQ ID NO: 1216219 - RNA, 21 nt, Human
cacguauauauauguauauau

SEQ ID NO: 1216220 - RNA, 23 nt, Human
cagaagagggagacuccgcggca

SEQ ID NO: 1216221 - RNA, 22 nt, Human
cagacuaagucacagaagaagg

SEQ ID NO: 1216222 - RNA, 22 nt, Human
cagcaacggucaaaccuggacg

SEQ ID NO: 1216223 - RNA, 20 nt, Human
cagcaguagugcuucagcag

SEQ ID NO: 1216224 - RNA, 21 nt, Human
cagccauggagaccuugagca

SEQ ID NO: 1216225 - RNA, 21 nt, Human
cagcuguggagggccggggag

SEQ ID NO: 1216226 - RNA, 19 nt, Human
caggacacccacccaggca

SEQ ID NO: 1216227 - RNA, 18 nt, Human
caggaugaugugcccagg

SEQ ID NO: 1216228 - RNA, 25 nt, Human
cauaagccuggagaagugggucugg

SEQ ID NO: 1216229 - RNA, 19 nt, Human
cauccaacagccaccagac

SEQ ID NO: 1216230 - RNA, 22 nt, Human
cauggcaagguuccuggaaaag

SEQ ID NO: 1216231 - RNA, 18 nt, Human
cauggcacccaggcaguc

SEQ ID NO: 1216232 - RNA, 24 nt, Human
ccaacucacggcccagggccaccu

SEQ ID NO: 1216233 - RNA, 22 nt, Human
ccaagcucccagccccuacacc

SEQ ID NO: 1216234 - RNA, 19 nt, Human
ccacacaacccccuccaag

SEQ ID NO: 1216235 - RNA, 18 nt, Human
ccagaccugauagagaag

SEQ ID NO: 1216236 - RNA, 25 nt, Human
ccaggcaguccacccauaguucaga

SEQ ID NO: 1216237 - RNA, 23 nt, Human
ccagggccaccucuugcuuggag

SEQ ID NO: 1216238 - RNA, 27 nt, Human
cccacacaacccccuccaagcucccag

SEQ ID NO: 1216239 - RNA, 22 nt, Human
cccacugaaugaggagccccag

SEQ ID NO: 1216240 - RNA, 19 nt, Human
cccagucagcccuuuacca

SEQ ID NO: 1216241 - RNA, 22 nt, Human
cccauccaacagccaccagacc

SEQ ID NO: 1216242 - RNA, 23 nt, Human
ccccaccccacacacgcuggcca

SEQ ID NO: 1216243 - RNA, 21 nt, Human
ccccaggcucagccauggaga

SEQ ID NO: 1216244 - RNA, 23 nt, Human
cccccaccaugucccuacaaccc

SEQ ID NO: 1216245 - RNA, 19 nt, Human
ccccccacacaacccccuc

SEQ ID NO: 1216246 - RNA, 18 nt, Human
cccccucgggcuucucuc

SEQ ID NO: 1216247 - RNA, 20 nt, Human
cccuccaagcucccagcccc

SEQ ID NO: 1216248 - RNA, 24 nt, Human
cccuccccagucagcccuuuacca

SEQ ID NO: 1216249 - RNA, 21 nt, Human
cccuggugaugggacuccugu

SEQ ID NO: 1216250 - RNA, 18 nt, Human
ccuggagaagugggucug

SEQ ID NO: 1216251 - RNA, 26 nt, Human
cgaccccuagaagcaacaggccaagg

SEQ ID NO: 1216252 - RNA, 18 nt, Human
cggcccuccccaccccac

SEQ ID NO: 1216253 - RNA, 18 nt, Human
cgggauaaaaaauacugu

SEQ ID NO: 1216254 - RNA, 23 nt, Human
cggguuagagaaaagccagagcu

SEQ ID NO: 1216255 - RNA, 23 nt, Human
cguguacauacuguagcugugua

SEQ ID NO: 1216256 - RNA, 22 nt, Human
cuaacagggcagccucaacugg

SEQ ID NO: 1216257 - RNA, 19 nt, Human
cucagcccccucgggcuuc

SEQ ID NO: 1216258 - RNA, 24 nt, Human
cucccagccccuacaccauaaacc

SEQ ID NO: 1216259 - RNA, 21 nt, Human
cucugggccaucagaaagccc

SEQ ID NO: 1216260 - RNA, 21 nt, Human
cucuugcuuggagagccccau

SEQ ID NO: 1216261 - RNA, 23 nt, Human
cugcaguggauuuggcucuuggc

SEQ ID NO: 1216262 - RNA, 21 nt, Human
cuggaagggaaaggggaggaa

SEQ ID NO: 1216263 - RNA, 23 nt, Human
cuggagucuucacccccaccaug

SEQ ID NO: 1216264 - RNA, 23 nt, Human
cuggcuguccacaggccgcgcau

SEQ ID NO: 1216265 - RNA, 22 nt, Human
cuggggguggccccccuucccc

SEQ ID NO: 1216266 - RNA, 22 nt, Human
cugguuggcggggggcugcagg

SEQ ID NO: 1216267 - RNA, 21 nt, Human
cuuccucuugcugggcuacaa

SEQ ID NO: 1216268 - RNA, 22 nt, Human
gaacacugauugaaccaaaaug

SEQ ID NO: 1216269 - RNA, 20 nt, Human
gaacagggcaggggcauacc

SEQ ID NO: 1216270 - RNA, 21 nt, Human
gaagauggagggagaagccgg

SEQ ID NO: 1216271 - RNA, 18 nt, Human
gaaggaggcggggauggg

SEQ ID NO: 1216272 - RNA, 21 nt, Human
gacuccuguuuuuuuuuuuuu

SEQ ID NO: 1216273 - RNA, 21 nt, Human
gagggagaagccggagcuuca

SEQ ID NO: 1216274 - RNA, 24 nt, Human
gaggggcuggaagggaaaggggag

SEQ ID NO: 1216275 - RNA, 20 nt, Human
gaggucucugagaagaggag

SEQ ID NO: 1216276 - RNA, 21 nt, Human
gauggagggagaagccggagc

SEQ ID NO: 1216277 - RNA, 20 nt, Human
gccaaggugcgugagccugc

SEQ ID NO: 1216278 - RNA, 19 nt, Human
gccagaggccccucugggc

SEQ ID NO: 1216279 - RNA, 22 nt, Human
gcccccucgggcuucucucuuc

SEQ ID NO: 1216280 - RNA, 19 nt, Human
gcccuuuaccauuagggua

SEQ ID NO: 1216281 - RNA, 20 nt, Human
gcgaccccuagaagcaacag

SEQ ID NO: 1216282 - RNA, 20 nt, Human
gcgggggcuggcuguccaca

SEQ ID NO: 1216283 - RNA, 21 nt, Human
gcucccaucuucuuacucaga

SEQ ID NO: 1216284 - RNA, 21 nt, Human
gcuggggguggccccccuucc

SEQ ID NO: 1216285 - RNA, 19 nt, Human
gcuuuggggcugggggagc

SEQ ID NO: 1216286 - RNA, 20 nt, Human
ggacugcggcggcccucccc

SEQ ID NO: 1216287 - RNA, 24 nt, Human
ggagcuauaagggauggcuggcug

SEQ ID NO: 1216288 - RNA, 20 nt, Human
ggagggauggcgggggcugg

SEQ ID NO: 1216289 - RNA, 22 nt, Human
ggaggucucugagaagaggagg

SEQ ID NO: 1216290 - RNA, 23 nt, Human
ggcaagguuccuggaaaagaggg

SEQ ID NO: 1216291 - RNA, 20 nt, Human
ggcagccucaacugguuggc

SEQ ID NO: 1216292 - RNA, 19 nt, Human
ggcaggaaagggaagugag

SEQ ID NO: 1216293 - RNA, 22 nt, Human
ggcaggggcauaccacagaggg

SEQ ID NO: 1216294 - RNA, 23 nt, Human
ggccagcaguagugcuucagcag

SEQ ID NO: 1216295 - RNA, 20 nt, Human
ggcugggggagccacuguca

SEQ ID NO: 1216296 - RNA, 18 nt, Human
gggaaaaaaguaaaaaaa

SEQ ID NO: 1216297 - RNA, 21 nt, Human
gggaaaggggaggaagaugga

SEQ ID NO: 1216298 - RNA, 21 nt, Human
gggaggucucugagaagagga

SEQ ID NO: 1216299 - RNA, 21 nt, Human
gggccggggaggggagggcgu

SEQ ID NO: 1216300 - RNA, 18 nt, Human
ggggaggggagggcguag

SEQ ID NO: 1216301 - RNA, 22 nt, Human
gggggcuggcuuuggggcuggg

SEQ ID NO: 1216302 - RNA, 22 nt, Human
gguuacauaggugaggcugggc

SEQ ID NO: 1216303 - RNA, 23 nt, Human
guaccuagcggagguugcagcug

SEQ ID NO: 1216304 - RNA, 20 nt, Human
guauauaugugugugugugu

SEQ ID NO: 1216305 - RNA, 18 nt, Human
gucacccugucuuccaac

SEQ ID NO: 1216306 - RNA, 23 nt, Human
gucuggagucuucacccccacca

SEQ ID NO: 1216307 - RNA, 24 nt, Human
gugacuaucaccccuaaucugcag

SEQ ID NO: 1216308 - RNA, 22 nt, Human
guguacauacuguagcugugua

SEQ ID NO: 1216309 - RNA, 21 nt, Human
gugugugugugugugugugug

SEQ ID NO: 1216310 - RNA, 21 nt, Human
gugugugugugugugugugug

SEQ ID NO: 1216311 - RNA, 18 nt, Human
guuuguuuggaggagguc

SEQ ID NO: 1216312 - RNA, 22 nt, Human
uaaaaaaacaucaugggauaaa

SEQ ID NO: 1216313 - RNA, 25 nt, Human
uaaaagaacacaaacuaaaaaauua

SEQ ID NO: 1216314 - RNA, 20 nt, Human
uaagagccagagguuggugg

SEQ ID NO: 1216315 - RNA, 20 nt, Human
uaagagcccccaggcucagc

SEQ ID NO: 1216316 - RNA, 25 nt, Human
uaccacagagggggcacaaguuuca

SEQ ID NO: 1216317 - RNA, 23 nt, Human
uaccugggagggagggaaggggg

SEQ ID NO: 1216318 - RNA, 22 nt, Human
uagagaaaagccagagcuggug

SEQ ID NO: 1216319 - RNA, 19 nt, Human
uaggagcgaggaaggaggc

SEQ ID NO: 1216320 - RNA, 23 nt, Human
uauauaugugugugugugugugu

SEQ ID NO: 1216321 - RNA, 19 nt, Human
uauauguauauaugugugu

SEQ ID NO: 1216322 - RNA, 23 nt, Human
uauauguauauaugugugugugu

SEQ ID NO: 1216323 - RNA, 19 nt, Human
uauaugugugugugugugu

SEQ ID NO: 1216324 - RNA, 25 nt, Human
uauaugugugugugugugugugugu

SEQ ID NO: 1216325 - RNA, 23 nt, Human
uauccuagaucaccacuggauug

SEQ ID NO: 1216326 - RNA, 21 nt, Human
uaugcugccuggugacaccug

SEQ ID NO: 1216327 - RNA, 22 nt, Human
uauguauauaugugugugugug

SEQ ID NO: 1216328 - RNA, 18 nt, Human
uaugugugugugugugug

SEQ ID NO: 1216329 - RNA, 23 nt, Human
uaugugugugugugugugugugu

SEQ ID NO: 1216330 - RNA, 22 nt, Human
ucacaggacacccacccaggca

SEQ ID NO: 1216331 - RNA, 19 nt, Human
ucagagaggcagcugaggc

SEQ ID NO: 1216332 - RNA, 21 nt, Human
ucagcauguccagcugggcug

SEQ ID NO: 1216333 - RNA, 19 nt, Human
ucccuacaaccccucccca

SEQ ID NO: 1216334 - RNA, 21 nt, Human
ucccuggugaugggacuccug

SEQ ID NO: 1216335 - RNA, 18 nt, Human
ucucugagaagaggagga

SEQ ID NO: 1216336 - RNA, 18 nt, Human
ucugcaguggauuuggcu

SEQ ID NO: 1216337 - RNA, 18 nt, Human
ucuucacccccaccaugu

SEQ ID NO: 1216338 - RNA, 21 nt, Human
ucuucacccccaccauguccc

SEQ ID NO: 1216339 - RNA, 18 nt, Human
ugaaaaagaaguuacggg

SEQ ID NO: 1216340 - RNA, 20 nt, Human
ugacucagacugcaugacag

SEQ ID NO: 1216341 - RNA, 21 nt, Human
ugagaagaggaggaaucuguu

SEQ ID NO: 1216342 - RNA, 21 nt, Human
ugaggcugggcccuuccugcu

SEQ ID NO: 1216343 - RNA, 20 nt, Human
ugccagaggccccucugggc

SEQ ID NO: 1216344 - RNA, 23 nt, Human
ugccagaggccccucugggccau

SEQ ID NO: 1216345 - RNA, 20 nt, Human
ugcuggccagcaguagugcu

SEQ ID NO: 1216346 - RNA, 23 nt, Human
ugcugggaaaagcagaagaggga

SEQ ID NO: 1216347 - RNA, 22 nt, Human
ugcugggcuacaagacuccaca

SEQ ID NO: 1216348 - RNA, 18 nt, Human
ugcuggggguggcccccc

SEQ ID NO: 1216349 - RNA, 20 nt, Human
ugcuggggguggccccccuu

SEQ ID NO: 1216350 - RNA, 23 nt, Human
uggaagggaaaggggaggaagau

SEQ ID NO: 1216351 - RNA, 21 nt, Human
uggaauaaauggauuuagcca

SEQ ID NO: 1216352 - RNA, 19 nt, Human
uggagaagugggucuggag

SEQ ID NO: 1216353 - RNA, 22 nt, Human
uggagguggugcacuuuggagg

SEQ ID NO: 1216354 - RNA, 21 nt, Human
uggauugcugacagauagagg

SEQ ID NO: 1216355 - RNA, 22 nt, Human
uggccgccugaguccagccccc

SEQ ID NO: 1216356 - RNA, 23 nt, Human
uggccgccugaguccagcccccc

SEQ ID NO: 1216357 - RNA, 24 nt, Human
uggcucccuggugaugggacuccu

SEQ ID NO: 1216358 - RNA, 23 nt, Human
ugggaaaaaaguaaaaaaaaaaa

SEQ ID NO: 1216359 - RNA, 22 nt, Human
ugggacuccuguuuuuuuuuuu

SEQ ID NO: 1216360 - RNA, 26 nt, Human
ugggacuccuguuuuuuuuuuuuuuu

SEQ ID NO: 1216361 - RNA, 21 nt, Human
ugggagggagggaagggggcu

SEQ ID NO: 1216362 - RNA, 19 nt, Human
uggguccugcaguuugucc

SEQ ID NO: 1216363 - RNA, 20 nt, Human
uggucacccugucuuccaac

SEQ ID NO: 1216364 - RNA, 22 nt, Human
uggugaggcaagugcagaguau

SEQ ID NO: 1216365 - RNA, 19 nt, Human
uguauauaugugugugugu

SEQ ID NO: 1216366 - RNA, 24 nt, Human
ugucaggagacagcuuccucuugc

SEQ ID NO: 1216367 - RNA, 22 nt, Human
ugucccuacaaccccuccccag

SEQ ID NO: 1216368 - RNA, 18 nt, Human
uguggcaaaaaaagaugu

SEQ ID NO: 1216369 - RNA, 23 nt, Human
ugugggaugaccgcguguauagg

SEQ ID NO: 1216370 - RNA, 18 nt, Human
ugugugugugugugugug

SEQ ID NO: 1216371 - RNA, 18 nt, Human
ugugugugugugugugug

SEQ ID NO: 1216372 - RNA, 18 nt, Human
ugugugugugugugugug

SEQ ID NO: 1216373 - RNA, 18 nt, Human
ugugugugugugugugug

SEQ ID NO: 1216374 - RNA, 21 nt, Human
ugugugugugugugugugugu

SEQ ID NO: 1216375 - RNA, 21 nt, Human
ugugugugugugugugugugu

SEQ ID NO: 1216376 - RNA, 21 nt, Human
ugugugugugugugugugugu

SEQ ID NO: 1216377 - RNA, 22 nt, Human
ugugugugugugugugugugug

SEQ ID NO: 1216378 - RNA, 20 nt, Human
uguuggggaccuuccaggcc

SEQ ID NO: 1216379 - RNA, 25 nt, Human
uguuuuuuuuuuuuuuuuugcuuuu

SEQ ID NO: 1216380 - RNA, 22 nt, Human
uuaaaagaacacaaacuaaaaa

SEQ ID NO: 1216381 - RNA, 22 nt, Human
uucagcaacggucaaaccugga

SEQ ID NO: 1216382 - RNA, 29 nt, Human
uuggccacguauauauauguauauaugug

SEQ ID NO: 1216383 - RNA, 24 nt, Human
uuucccucacuggguccugcaguu

SEQ ID NO: 1216384 - RNA, 21 nt, Human
uuuguuuggaggaggucugac

SEQ ID NO: 1216385 - RNA, 20 nt, Human
uuuuuuuuuuuuuugcuuuu

SEQ ID NO: 1216386 - RNA, 18 nt, Human
uuuuuuuuuuuuuuuuug

SEQ ID NO: 1216387 - RNA, 19 nt, Human
aaauaaauuuaaacuauaa

SEQ ID NO: 1216388 - RNA, 19 nt, Human
aaauaaauuuaaacuauaa

SEQ ID NO: 1216389 - RNA, 18 nt, Human
aacagcuucuccaccucu

SEQ ID NO: 1216390 - RNA, 18 nt, Human
aagaugccagagugaaca

SEQ ID NO: 1216391 - RNA, 19 nt, Human
acacagccucuccuccugu

SEQ ID NO: 1216392 - RNA, 23 nt, Human
agccucuccugcuccuccugccg

SEQ ID NO: 1216393 - RNA, 19 nt, Human
caccucuuccagcagccuc

SEQ ID NO: 1216394 - RNA, 18 nt, Human
cacguagccucuccuccu

SEQ ID NO: 1216395 - RNA, 18 nt, Human
cacguagccucuccuccu

SEQ ID NO: 1216396 - RNA, 20 nt, Human
cacguagccucuccuccugu

SEQ ID NO: 1216397 - RNA, 22 nt, Human
cagcagccucucccucuccagc

SEQ ID NO: 1216398 - RNA, 26 nt, Human
cagcagccucucccucuccagcagcc

SEQ ID NO: 1216399 - RNA, 20 nt, Human
cagcucccgcagagucuccu

SEQ ID NO: 1216400 - RNA, 23 nt, Human
ccagcagccucuccugcuccucc

SEQ ID NO: 1216401 - RNA, 22 nt, Human
ccuccugccgccucuccuguuc

SEQ ID NO: 1216402 - RNA, 21 nt, Human
ccucuccagcagccucuccug

SEQ ID NO: 1216403 - RNA, 23 nt, Human
ccucuccagcucccgcagagucu

SEQ ID NO: 1216404 - RNA, 23 nt, Human
ccucuccuccuguucacacagcc

SEQ ID NO: 1216405 - RNA, 21 nt, Human
cgaagccucuccugcuccagg

SEQ ID NO: 1216406 - RNA, 23 nt, Human
cuaacagcuucuccaccucuucc

SEQ ID NO: 1216407 - RNA, 19 nt, Human
cuccuccugccgccucucc

SEQ ID NO: 1216408 - RNA, 23 nt, Human
cucguccagcagccucucccucu

SEQ ID NO: 1216409 - RNA, 24 nt, Human
cugcuccuccugccgccucuccug

SEQ ID NO: 1216410 - RNA, 19 nt, Human
gccacagccucucauccug

SEQ ID NO: 1216411 - RNA, 19 nt, Human
ggagcuccuccaccucguc

SEQ ID NO: 1216412 - RNA, 20 nt, Human
ggauauuaaccccuuaaaug

SEQ ID NO: 1216413 - RNA, 22 nt, Human
uaaaagaugccagagugaacau

SEQ ID NO: 1216414 - RNA, 20 nt, Human
uaaauuagaaacacaaauaa

SEQ ID NO: 1216415 - RNA, 27 nt, Human
uaaauuagaaacacaaauaaauuuaaa

SEQ ID NO: 1216416 - RNA, 27 nt, Human
uaaauuagaaacacaaauaaauuuaaa

SEQ ID NO: 1216417 - RNA, 27 nt, Human
uaaauuagaaacacaaauaaauuuaaa

SEQ ID NO: 1216418 - RNA, 18 nt, Human
uagaaacacaaauaaaca

SEQ ID NO: 1216419 - RNA, 21 nt, Human
ucacacagccucuccuccugu

SEQ ID NO: 1216420 - RNA, 21 nt, Human
ucacguagccucuccuccugu

SEQ ID NO: 1216421 - RNA, 22 nt, Human
uccagcagccucucccucucca

SEQ ID NO: 1216422 - RNA, 19 nt, Human
ucccucuccagcagccucu

SEQ ID NO: 1216423 - RNA, 18 nt, Human
ucuaacagcuucuccacc

SEQ ID NO: 1216424 - RNA, 21 nt, Human
ucuaacagcuucuccaccucu

SEQ ID NO: 1216425 - RNA, 24 nt, Human
ucuccaccucuuccagcagccucu

SEQ ID NO: 1216426 - RNA, 20 nt, Human
ucuccagcucccgcagaguc

SEQ ID NO: 1216427 - RNA, 19 nt, Human
ucuccagcucccgcagccu

SEQ ID NO: 1216428 - RNA, 19 nt, Human
ucuccagcucccgcagccu

SEQ ID NO: 1216429 - RNA, 22 nt, Human
ucuccugcuccuccugccgccu

SEQ ID NO: 1216430 - RNA, 24 nt, Human
ucuccugcugccacagccucucau

SEQ ID NO: 1216431 - RNA, 26 nt, Human
ucuccuguucuaacagcuucuccacc

SEQ ID NO: 1216432 - RNA, 23 nt, Human
ucuuccagcagccucuccugccc

SEQ ID NO: 1216433 - RNA, 27 nt, Human
ugcccuggcagcuucuccuguucacac

SEQ ID NO: 1216434 - RNA, 22 nt, Human
uguuuuguuuuuuuuuuuuuuc

SEQ ID NO: 1216435 - RNA, 21 nt, Human
uuaaauguuuuguuuuuuuuu

SEQ ID NO: 1216436 - RNA, 22 nt, Human
uuuaaacuauaaauuagaaaca

SEQ ID NO: 1216437 - RNA, 22 nt, Human
uuuaaacuauaaauuagaaaca

SEQ ID NO: 1216438 - RNA, 19 nt, Human
aaauaaauuuaaacuauaa

SEQ ID NO: 1216439 - RNA, 19 nt, Human
aaauaaauuuaaacuauaa

SEQ ID NO: 1216440 - RNA, 19 nt, Human
aaauaaauuuaaacuauaa

SEQ ID NO: 1216441 - RNA, 19 nt, Human
aaauaaauuuaaacuauaa

SEQ ID NO: 1216442 - RNA, 18 nt, Human
aagaugccagagugaaca

SEQ ID NO: 1216443 - RNA, 20 nt, Human
agaaacacaaacauaagugg

SEQ ID NO: 1216444 - RNA, 20 nt, Human
cagcucccgcagagucuccu

SEQ ID NO: 1216445 - RNA, 23 nt, Human
ccucuccagcucccgcagagucu

SEQ ID NO: 1216446 - RNA, 22 nt, Human
cuuaaauguuuuguuuuuuuuu

SEQ ID NO: 1216447 - RNA, 19 nt, Human
gccacagccucucauccug

SEQ ID NO: 1216448 - RNA, 20 nt, Human
ggauauuaaccccuuaaaug

SEQ ID NO: 1216449 - RNA, 22 nt, Human
uaaaagaugccagagugaacau

SEQ ID NO: 1216450 - RNA, 20 nt, Human
uaaauuagaaacacaaacau

SEQ ID NO: 1216451 - RNA, 25 nt, Human
uaaauuagaaacacaaacauaagug

SEQ ID NO: 1216452 - RNA, 27 nt, Human
uaaauuagaaacacaaauaaauuuaaa

SEQ ID NO: 1216453 - RNA, 27 nt, Human
uaaauuagaaacacaaauaaauuuaaa

SEQ ID NO: 1216454 - RNA, 27 nt, Human
uaaauuagaaacacaaauaaauuuaaa

SEQ ID NO: 1216455 - RNA, 18 nt, Human
uagaaacacaaacauaag

SEQ ID NO: 1216456 - RNA, 24 nt, Human
uagaaacacaaacauaaguggcuc

SEQ ID NO: 1216457 - RNA, 19 nt, Human
ucuccagcucccgcaaccu

SEQ ID NO: 1216458 - RNA, 20 nt, Human
ucuccagcucccgcagaguc

SEQ ID NO: 1216459 - RNA, 24 nt, Human
ucuccugcugccacagccucucau

SEQ ID NO: 1216460 - RNA, 20 nt, Human
uuagaaacacaaacauaagu

SEQ ID NO: 1216461 - RNA, 22 nt, Human
uuuaaacuauaaauuagaaaca

SEQ ID NO: 1216462 - RNA, 22 nt, Human
uuuaaacuauaaauuagaaaca

SEQ ID NO: 1216463 - RNA, 22 nt, Human
uuuaaacuauaaauuagaaaca

SEQ ID NO: 1216464 - RNA, 22 nt, Human
uuuaaacuauaaauuagaaaca

SEQ ID NO: 1216465 - RNA, 22 nt, Human
aaaaguuauuuuaaaaaguuau

SEQ ID NO: 1216466 - RNA, 21 nt, Human
aaaauaaauaaaagcaggccc

SEQ ID NO: 1216467 - RNA, 21 nt, Human
aacacagccagcagaggacac

SEQ ID NO: 1216468 - RNA, 20 nt, Human
aaccccuccccagucacccc

SEQ ID NO: 1216469 - RNA, 20 nt, Human
aacuguagaccaggccaggg

SEQ ID NO: 1216470 - RNA, 23 nt, Human
aagcaacaggccaaggugcguga

SEQ ID NO: 1216471 - RNA, 19 nt, Human
aagcaacuuuucccucagg

SEQ ID NO: 1216472 - RNA, 20 nt, Human
aagcagaagagggagacucc

SEQ ID NO: 1216473 - RNA, 23 nt, Human
aagcagaagagggagacuccgcg

SEQ ID NO: 1216474 - RNA, 24 nt, Human
aagcagaagagggagacuccgcgg

SEQ ID NO: 1216475 - RNA, 19 nt, Human
aagcaggccccugucagca

SEQ ID NO: 1216476 - RNA, 21 nt, Human
aagcuccagggacuuuccagg

SEQ ID NO: 1216477 - RNA, 20 nt, Human
aagcucccagccccuacacc

SEQ ID NO: 1216478 - RNA, 23 nt, Human
aagggacagcaggacugguagag

SEQ ID NO: 1216479 - RNA, 24 nt, Human
aagggggcuggcuuuggagcuggg

SEQ ID NO: 1216480 - RNA, 21 nt, Human
acacaacccccuccaagcucc

SEQ ID NO: 1216481 - RNA, 24 nt, Human
acacaacccccuccaagcucccag

SEQ ID NO: 1216482 - RNA, 19 nt, Human
acaggccaaggugcgugag

SEQ ID NO: 1216483 - RNA, 19 nt, Human
acaggggagccucaacugg

SEQ ID NO: 1216484 - RNA, 25 nt, Human
acccccuccaagcucccagccccua

SEQ ID NO: 1216485 - RNA, 21 nt, Human
accccuuuaccauuaggguag

SEQ ID NO: 1216486 - RNA, 19 nt, Human
acucccaggcugggagcug

SEQ ID NO: 1216487 - RNA, 19 nt, Human
acuccgcggcaggaaaggg

SEQ ID NO: 1216488 - RNA, 20 nt, Human
agaagggcgggagggauggc

SEQ ID NO: 1216489 - RNA, 18 nt, Human
agagguugguggaguugg

SEQ ID NO: 1216490 - RNA, 19 nt, Human
agcauaggagcgaggaagg

SEQ ID NO: 1216491 - RNA, 22 nt, Human
agccaacugguugagaagccug

SEQ ID NO: 1216492 - RNA, 19 nt, Human
aggcaggcuuggaaaggga

SEQ ID NO: 1216493 - RNA, 19 nt, Human
aggcaggcuuggaaaggga

SEQ ID NO: 1216494 - RNA, 22 nt, Human
aggcaggcuuggaaagggaggu

SEQ ID NO: 1216495 - RNA, 20 nt, Human
aggccagggcacaggcugcu

SEQ ID NO: 1216496 - RNA, 22 nt, Human
aggccucuggccgccugagucc

SEQ ID NO: 1216497 - RNA, 24 nt, Human
aggccucuggccgccugaguccag

SEQ ID NO: 1216498 - RNA, 18 nt, Human
agggauggcuggcuggag

SEQ ID NO: 1216499 - RNA, 19 nt, Human
aggggcgaugucaggagac

SEQ ID NO: 1216500 - RNA, 18 nt, Human
agugcuucagcaggggcc

SEQ ID NO: 1216501 - RNA, 22 nt, Human
augcugccuggugacaccuggu

SEQ ID NO: 1216502 - RNA, 21 nt, Human
auggcgccuacagaguacacu

SEQ ID NO: 1216503 - RNA, 21 nt, Human
augugugugugugugugugug

SEQ ID NO: 1216504 - RNA, 22 nt, Human
augugugugugugugugugugu

SEQ ID NO: 1216505 - RNA, 23 nt, Human
auguguguguguguguguguguu

SEQ ID NO: 1216506 - RNA, 19 nt, Human
caacaacacccuaaaaaug

SEQ ID NO: 1216507 - RNA, 22 nt, Human
caaccccuccccagucaccccu

SEQ ID NO: 1216508 - RNA, 21 nt, Human
caagcacagcacggggacuga

SEQ ID NO: 1216509 - RNA, 18 nt, Human
caagggacagcaggacug

SEQ ID NO: 1216510 - RNA, 21 nt, Human
caaguuucagcaauggucaca

SEQ ID NO: 1216511 - RNA, 22 nt, Human
cacaacccccuccaagcuccca

SEQ ID NO: 1216512 - RNA, 23 nt, Human
cacaacccccuccaagcucccag

SEQ ID NO: 1216513 - RNA, 18 nt, Human
cacaagcacagcacgggg

SEQ ID NO: 1216514 - RNA, 19 nt, Human
caccaaagcaacuuuuccc

SEQ ID NO: 1216515 - RNA, 21 nt, Human
caccaaagcaacuuuucccuc

SEQ ID NO: 1216516 - RNA, 22 nt, Human
caccccuaaucugcaguggauu

SEQ ID NO: 1216517 - RNA, 30 nt, Human
caccgcuacaacagacuaagucacagaagg

SEQ ID NO: 1216518 - RNA, 22 nt, Human
caccuggacgugucagcucacc

SEQ ID NO: 1216519 - RNA, 19 nt, Human
cacguguauauauguauau

SEQ ID NO: 1216520 - RNA, 19 nt, Human
cacugacuuccauccaccc

SEQ ID NO: 1216521 - RNA, 20 nt, Human
cacugcucccaacaacaccc

SEQ ID NO: 1216522 - RNA, 23 nt, Human
cagaagagggagacuccgcggca

SEQ ID NO: 1216523 - RNA, 22 nt, Human
cagacuaagucacagaagaagg

SEQ ID NO: 1216524 - RNA, 20 nt, Human
cagcaguagugcuucagcag

SEQ ID NO: 1216525 - RNA, 24 nt, Human
cagccaccagaccugauagagaag

SEQ ID NO: 1216526 - RNA, 21 nt, Human
cagccauggagaccuugagca

SEQ ID NO: 1216527 - RNA, 19 nt, Human
cagcugccugcacagcacc

SEQ ID NO: 1216528 - RNA, 21 nt, Human
cagcuuccucuugcuggucua

SEQ ID NO: 1216529 - RNA, 19 nt, Human
caggacacccgcccaggca

SEQ ID NO: 1216530 - RNA, 22 nt, Human
cagggcccugccccuaguggcc

SEQ ID NO: 1216531 - RNA, 25 nt, Human
cauaagccuggagaagugggucugg

SEQ ID NO: 1216532 - RNA, 22 nt, Human
ccaagcucccagccccuacacc

SEQ ID NO: 1216533 - RNA, 25 nt, Human
ccaagcucccagccccuacaccaua

SEQ ID NO: 1216534 - RNA, 19 nt, Human
ccacacaacccccuccaag

SEQ ID NO: 1216535 - RNA, 18 nt, Human
ccagaccugauagagaag

SEQ ID NO: 1216536 - RNA, 27 nt, Human
cccacacaacccccuccaagcucccag

SEQ ID NO: 1216537 - RNA, 22 nt, Human
cccacugaaugaggagccccag

SEQ ID NO: 1216538 - RNA, 21 nt, Human
ccccaggcucagccauggaga

SEQ ID NO: 1216539 - RNA, 23 nt, Human
cccccaccaugucccuacaaccc

SEQ ID NO: 1216540 - RNA, 19 nt, Human
ccccccacacaacccccuc

SEQ ID NO: 1216541 - RNA, 18 nt, Human
cccccugccucccucucc

SEQ ID NO: 1216542 - RNA, 23 nt, Human
ccccuaguggccagagcuggcuu

SEQ ID NO: 1216543 - RNA, 19 nt, Human
ccccugccucccucucccc

SEQ ID NO: 1216544 - RNA, 20 nt, Human
cccuccaagcucccagcccc

SEQ ID NO: 1216545 - RNA, 18 nt, Human
ccuggagaagugggucug

SEQ ID NO: 1216546 - RNA, 26 nt, Human
cgaccccuagaagcaacaggccaagg

SEQ ID NO: 1216547 - RNA, 22 nt, Human
cgcagguucccuccaggcugag

SEQ ID NO: 1216548 - RNA, 25 nt, Human
cgugacuaucaccccuaaucugcag

SEQ ID NO: 1216549 - RNA, 23 nt, Human
cguguacauacuguagcugugua

SEQ ID NO: 1216550 - RNA, 22 nt, Human
cuaacaggggagccucaacugg

SEQ ID NO: 1216551 - RNA, 24 nt, Human
cucccagccccuacaccauaaacc

SEQ ID NO: 1216552 - RNA, 19 nt, Human
cucccaucuucuuacucag

SEQ ID NO: 1216553 - RNA, 21 nt, Human
cucugggccaucagaaagccc

SEQ ID NO: 1216554 - RNA, 24 nt, Human
cugcaguggauuuggcucuuggcc

SEQ ID NO: 1216555 - RNA, 23 nt, Human
cuggcuguccacaggccgcgcau

SEQ ID NO: 1216556 - RNA, 22 nt, Human
cuggggguggccccccuucccc

SEQ ID NO: 1216557 - RNA, 22 nt, Human
cugguuggcggggggcugcagg

SEQ ID NO: 1216558 - RNA, 20 nt, Human
gaacacagccagcagaggac

SEQ ID NO: 1216559 - RNA, 22 nt, Human
gaacacagccagcagaggacac

SEQ ID NO: 1216560 - RNA, 22 nt, Human
gaacacugauugaaccaaaaug

SEQ ID NO: 1216561 - RNA, 18 nt, Human
gaaggaggcggggauggg

SEQ ID NO: 1216562 - RNA, 22 nt, Human
gacugucaggccacacagcugc

SEQ ID NO: 1216563 - RNA, 21 nt, Human
gcagguucccuccaggcugag

SEQ ID NO: 1216564 - RNA, 20 nt, Human
gccaaggugcgugagccugc

SEQ ID NO: 1216565 - RNA, 19 nt, Human
gccagaggccccucugggc

SEQ ID NO: 1216566 - RNA, 20 nt, Human
gcgaccccuagaagcaacag

SEQ ID NO: 1216567 - RNA, 20 nt, Human
gcgggggcuggcuguccaca

SEQ ID NO: 1216568 - RNA, 21 nt, Human
gcuggggguggccccccuucc

SEQ ID NO: 1216569 - RNA, 18 nt, Human
ggaaaaaaaguaaaaaaa

SEQ ID NO: 1216570 - RNA, 24 nt, Human
ggagcuauaagggauggcuggcug

SEQ ID NO: 1216571 - RNA, 20 nt, Human
ggagggauggcgggggcugg

SEQ ID NO: 1216572 - RNA, 19 nt, Human
ggcaggaaagggaagugag

SEQ ID NO: 1216573 - RNA, 22 nt, Human
ggcaggggcauaccacagaggg

SEQ ID NO: 1216574 - RNA, 24 nt, Human
ggccacacagcugccugcacagca

SEQ ID NO: 1216575 - RNA, 23 nt, Human
ggccagcaguagugcuucagcag

SEQ ID NO: 1216576 - RNA, 22 nt, Human
gguuacauaggugaggcugggc

SEQ ID NO: 1216577 - RNA, 23 nt, Human
guaccuagcggagguugcagcug

SEQ ID NO: 1216578 - RNA, 21 nt, Human
gucccccugccucccucuccu

SEQ ID NO: 1216579 - RNA, 23 nt, Human
gucuggagucuucacccccacca

SEQ ID NO: 1216580 - RNA, 20 nt, Human
gugaggcaguuggccacgug

SEQ ID NO: 1216581 - RNA, 23 nt, Human
gugccggcugccccgcagguucc

SEQ ID NO: 1216582 - RNA, 19 nt, Human
guguauauauguauaugug

SEQ ID NO: 1216583 - RNA, 21 nt, Human
gugugugugugugugugugug

SEQ ID NO: 1216584 - RNA, 18 nt, Human
guucagggcccugccccu

SEQ ID NO: 1216585 - RNA, 19 nt, Human
guucagggcccugccccua

SEQ ID NO: 1216586 - RNA, 24 nt, Human
guucagggcccugccccuaguggc

SEQ ID NO: 1216587 - RNA, 18 nt, Human
guuuguuuggaggagguc

SEQ ID NO: 1216588 - RNA, 28 nt, Human
uaaaagaacacaaacuaaaaaaguuaac

SEQ ID NO: 1216589 - RNA, 20 nt, Human
uaagagccagagguuggugg

SEQ ID NO: 1216590 - RNA, 20 nt, Human
uaagagcccccaggcucagc

SEQ ID NO: 1216591 - RNA, 25 nt, Human
uaccacagagggggcacaaguuuca

SEQ ID NO: 1216592 - RNA, 23 nt, Human
uaccugggagggagggaaggggg

SEQ ID NO: 1216593 - RNA, 19 nt, Human
uaggagcgaggaaggaggc

SEQ ID NO: 1216594 - RNA, 19 nt, Human
uauauauguauaugugugu

SEQ ID NO: 1216595 - RNA, 21 nt, Human
uauauauguauaugugugugu

SEQ ID NO: 1216596 - RNA, 19 nt, Human
uauauguauaugugugugu

SEQ ID NO: 1216597 - RNA, 19 nt, Human
uauauguauaugugugugu

SEQ ID NO: 1216598 - RNA, 19 nt, Human
uauauguauaugugugugu

SEQ ID NO: 1216599 - RNA, 23 nt, Human
uauauguauaugugugugugugu

SEQ ID NO: 1216600 - RNA, 23 nt, Human
uauauguauaugugugugugugu

SEQ ID NO: 1216601 - RNA, 23 nt, Human
uauaugugugugugugugugugu

SEQ ID NO: 1216602 - RNA, 23 nt, Human
uauccuagaucaccacuggauug

SEQ ID NO: 1216603 - RNA, 19 nt, Human
uauguauaugugugugugu

SEQ ID NO: 1216604 - RNA, 18 nt, Human
uaugugugugugugugug

SEQ ID NO: 1216605 - RNA, 23 nt, Human
uaugugugugugugugugugugu

SEQ ID NO: 1216606 - RNA, 22 nt, Human
ucacaggacacccgcccaggca

SEQ ID NO: 1216607 - RNA, 19 nt, Human
ucagagaggcagcugaggc

SEQ ID NO: 1216608 - RNA, 21 nt, Human
ucagcauguccagcugggcug

SEQ ID NO: 1216609 - RNA, 23 nt, Human
uccaggaaaagugucccuugaaa

SEQ ID NO: 1216610 - RNA, 19 nt, Human
uccauagagaacacagcca

SEQ ID NO: 1216611 - RNA, 19 nt, Human
ucccccugccucccucucc

SEQ ID NO: 1216612 - RNA, 19 nt, Human
ucccuacaaccccucccca

SEQ ID NO: 1216613 - RNA, 21 nt, Human
ucucugagaagagggaucugu

SEQ ID NO: 1216614 - RNA, 18 nt, Human
ucugcaguggauuuggcu

SEQ ID NO: 1216615 - RNA, 21 nt, Human
ucuucacccccaccauguccc

SEQ ID NO: 1216616 - RNA, 20 nt, Human
ugacucagacugcaugacag

SEQ ID NO: 1216617 - RNA, 23 nt, Human
ugagaagccugaucuagcugugg

SEQ ID NO: 1216618 - RNA, 21 nt, Human
ugaggcugggcccuuccugcu

SEQ ID NO: 1216619 - RNA, 20 nt, Human
ugccagaggccccucugggc

SEQ ID NO: 1216620 - RNA, 23 nt, Human
ugccagaggccccucugggccau

SEQ ID NO: 1216621 - RNA, 20 nt, Human
ugcuggccagcaguagugcu

SEQ ID NO: 1216622 - RNA, 23 nt, Human
ugcugggaaaagcagaagaggga

SEQ ID NO: 1216623 - RNA, 18 nt, Human
ugcuggggguggcccccc

SEQ ID NO: 1216624 - RNA, 20 nt, Human
ugcuggggguggccccccuu

SEQ ID NO: 1216625 - RNA, 19 nt, Human
uggaaaaaaaguaaaaaaa

SEQ ID NO: 1216626 - RNA, 23 nt, Human
uggaaaaaaaguaaaaaaaaacu

SEQ ID NO: 1216627 - RNA, 21 nt, Human
uggaauaaauggauuuagcca

SEQ ID NO: 1216628 - RNA, 19 nt, Human
uggagaagugggucuggag

SEQ ID NO: 1216629 - RNA, 22 nt, Human
uggagguggugcacuuuggagg

SEQ ID NO: 1216630 - RNA, 22 nt, Human
uggagucuucacccccaccaug

SEQ ID NO: 1216631 - RNA, 21 nt, Human
uggauugcugacagauagagg

SEQ ID NO: 1216632 - RNA, 22 nt, Human
uggccgccugaguccagccccc

SEQ ID NO: 1216633 - RNA, 23 nt, Human
uggccgccugaguccagcccccc

SEQ ID NO: 1216634 - RNA, 19 nt, Human
uggccuuuuccauccccug

SEQ ID NO: 1216635 - RNA, 23 nt, Human
uggcuggcuggagugaaugccag

SEQ ID NO: 1216636 - RNA, 18 nt, Human
ugggaaaagcagaagagg

SEQ ID NO: 1216637 - RNA, 24 nt, Human
ugggacuccuguuuuuuguuuuuu

SEQ ID NO: 1216638 - RNA, 21 nt, Human
ugggagggagggaagggggcu

SEQ ID NO: 1216639 - RNA, 23 nt, Human
uggggaaggcagggagggcaggu

SEQ ID NO: 1216640 - RNA, 19 nt, Human
uggguccugcaguuugucc

SEQ ID NO: 1216641 - RNA, 20 nt, Human
uggguuucucagucaaggga

SEQ ID NO: 1216642 - RNA, 19 nt, Human
uguauauauguauaugugu

SEQ ID NO: 1216643 - RNA, 20 nt, Human
uguauauauguauaugugug

SEQ ID NO: 1216644 - RNA, 23 nt, Human
uguauauauguauaugugugugu

SEQ ID NO: 1216645 - RNA, 24 nt, Human
uguauaugugugugugugugugug

SEQ ID NO: 1216646 - RNA, 24 nt, Human
ugucaggagacagcuuccucuugc

SEQ ID NO: 1216647 - RNA, 22 nt, Human
ugucccuacaaccccuccccag

SEQ ID NO: 1216648 - RNA, 23 nt, Human
ugugggaugaccacguguauagg

SEQ ID NO: 1216649 - RNA, 18 nt, Human
ugugugugugugugugug

SEQ ID NO: 1216650 - RNA, 18 nt, Human
ugugugugugugugugug

SEQ ID NO: 1216651 - RNA, 18 nt, Human
ugugugugugugugugug

SEQ ID NO: 1216652 - RNA, 21 nt, Human
ugugugugugugugugugugu

SEQ ID NO: 1216653 - RNA, 22 nt, Human
ugugugugugugugugugugug

SEQ ID NO: 1216654 - RNA, 19 nt, Human
uguguugugggaugaccac

SEQ ID NO: 1216655 - RNA, 20 nt, Human
uguuggggaccuuccaggcc

SEQ ID NO: 1216656 - RNA, 23 nt, Human
uguuuuuuguuuuuugcuuuuga

SEQ ID NO: 1216657 - RNA, 22 nt, Human
uuaaaagaacacaaacuaaaaa

SEQ ID NO: 1216658 - RNA, 25 nt, Human
uuccauccaccccacgugucuucca

SEQ ID NO: 1216659 - RNA, 24 nt, Human
uuggccacguguauauauguauau

SEQ ID NO: 1216660 - RNA, 33 nt, Human
uuggccacguguauauauguauaugugugugau

SEQ ID NO: 1216661 - RNA, 24 nt, Human
uuucccucacuggguccugcaguu

SEQ ID NO: 1216662 - RNA, 21 nt, Human
uuuguuuggaggaggucugau

SEQ ID NO: 1216663 - RNA, 22 nt, Human
uuuuuguuuuuuguuuuuugcu

SEQ ID NO: 1216664 - RNA, 21 nt, Human
ccucuaagauuauaguuauua

SEQ ID NO: 1216665 - RNA, 20 nt, Human
aagccuccacguccacccag

SEQ ID NO: 1216666 - RNA, 22 nt, Human
cugaagccuccacguccaccca

SEQ ID NO: 1216667 - RNA, 20 nt, Human
ucugaagccuccacguccac

SEQ ID NO: 1216668 - RNA, 21 nt, Human
aacccgagcucugccugcuuc

SEQ ID NO: 1216669 - RNA, 22 nt, Human
aagagaaaaacuugagcuugga

SEQ ID NO: 1216670 - RNA, 22 nt, Human
aagagaaagacacccaaaagga

SEQ ID NO: 1216671 - RNA, 21 nt, Human
aagagcucaauguuaccugcc

SEQ ID NO: 1216672 - RNA, 21 nt, Human
accagcuccucccuccuccug

SEQ ID NO: 1216673 - RNA, 18 nt, Human
agaaaaacuugagcuugg

SEQ ID NO: 1216674 - RNA, 19 nt, Human
agacaagcccuacuucccc

SEQ ID NO: 1216675 - RNA, 20 nt, Human
agacagaguccaacuccaac

SEQ ID NO: 1216676 - RNA, 18 nt, Human
agaggcuaaaauugaccc

SEQ ID NO: 1216677 - RNA, 29 nt, Human
agcuccucccuccuccugugugcccuccc

SEQ ID NO: 1216678 - RNA, 19 nt, Human
aggcaagagaaaaacuuga

SEQ ID NO: 1216679 - RNA, 19 nt, Human
aggcaagagaaaaacuuga

SEQ ID NO: 1216680 - RNA, 24 nt, Human
aggcaagagaaaaacuugagcuug

SEQ ID NO: 1216681 - RNA, 19 nt, Human
agguauguuuuccauacuc

SEQ ID NO: 1216682 - RNA, 19 nt, Human
caaaacagguaucacaagc

SEQ ID NO: 1216683 - RNA, 19 nt, Human
cacuccauggcugcuucca

SEQ ID NO: 1216684 - RNA, 19 nt, Human
cacuuccuuaucuugaaga

SEQ ID NO: 1216685 - RNA, 23 nt, Human
cagcaggagggguggcaaccauc

SEQ ID NO: 1216686 - RNA, 18 nt, Human
cagcccuucugcccagcc

SEQ ID NO: 1216687 - RNA, 19 nt, Human
cagcccuucugcccagccu

SEQ ID NO: 1216688 - RNA, 20 nt, Human
cagcuccucccuccuccugu

SEQ ID NO: 1216689 - RNA, 18 nt, Human
ccaggaagagguagaacc

SEQ ID NO: 1216690 - RNA, 21 nt, Human
ccaggcccccagcccugugcc

SEQ ID NO: 1216691 - RNA, 26 nt, Human
cccacagcccuucugcccagccuucu

SEQ ID NO: 1216692 - RNA, 26 nt, Human
cccagcccugugccugggcuccuggc

SEQ ID NO: 1216693 - RNA, 22 nt, Human
cccuccuuuuuccaggccccca

SEQ ID NO: 1216694 - RNA, 19 nt, Human
cccugugccugggcucccu

SEQ ID NO: 1216695 - RNA, 22 nt, Human
cccuucaaaacagguaucacaa

SEQ ID NO: 1216696 - RNA, 21 nt, Human
ccgccaucugucaaaaauggg

SEQ ID NO: 1216697 - RNA, 18 nt, Human
ccgucccgccaucuguca

SEQ ID NO: 1216698 - RNA, 20 nt, Human
ccuagccccguccuuuggga

SEQ ID NO: 1216699 - RNA, 25 nt, Human
ccuccuccugacauccuucuggacg

SEQ ID NO: 1216700 - RNA, 19 nt, Human
ccuccugacauccuucugg

SEQ ID NO: 1216701 - RNA, 24 nt, Human
ccucugccuauucugcccuccuug

SEQ ID NO: 1216702 - RNA, 22 nt, Human
cuauucugcccuccuuguuucg

SEQ ID NO: 1216703 - RNA, 20 nt, Human
cucugccuauucugcccucc

SEQ ID NO: 1216704 - RNA, 19 nt, Human
cugaacccgagcucugccu

SEQ ID NO: 1216705 - RNA, 20 nt, Human
cugccugaugucuccaaaau

SEQ ID NO: 1216706 - RNA, 19 nt, Human
cugucaucaaaacacaugu

SEQ ID NO: 1216707 - RNA, 18 nt, Human
cuuugccugaaccuccuc

SEQ ID NO: 1216708 - RNA, 23 nt, Human
gaagacccuccaccuuugaagag

SEQ ID NO: 1216709 - RNA, 25 nt, Human
gacaagcccuacuuccccacagccc

SEQ ID NO: 1216710 - RNA, 20 nt, Human
gcagguauguuuuccauacu

SEQ ID NO: 1216711 - RNA, 18 nt, Human
gccaagcucuguggaggg

SEQ ID NO: 1216712 - RNA, 21 nt, Human
gccagucucuguucccuccaa

SEQ ID NO: 1216713 - RNA, 24 nt, Human
gcccccagcccugugccugggcuc

SEQ ID NO: 1216714 - RNA, 20 nt, Human
gcccuccuuuuuccaggccc

SEQ ID NO: 1216715 - RNA, 20 nt, Human
gcccugugccugggcuccug

SEQ ID NO: 1216716 - RNA, 19 nt, Human
gccugggcuccuggcagcu

SEQ ID NO: 1216717 - RNA, 19 nt, Human
ggaaggcucccagccaggc

SEQ ID NO: 1216718 - RNA, 22 nt, Human
ggagacugaggcuuuuagaggc

SEQ ID NO: 1216719 - RNA, 24 nt, Human
ggcagguauguuuuccauacucuc

SEQ ID NO: 1216720 - RNA, 24 nt, Human
gguauggccguagacuauuuugga

SEQ ID NO: 1216721 - RNA, 20 nt, Human
uaaccaggccugacccugcu

SEQ ID NO: 1216722 - RNA, 22 nt, Human
uaacuccugugauauuccuccu

SEQ ID NO: 1216723 - RNA, 19 nt, Human
uaagacagaguccaacucc

SEQ ID NO: 1216724 - RNA, 27 nt, Human
uaaggagacugaggcuuuuagaggcua

SEQ ID NO: 1216725 - RNA, 21 nt, Human
uacacuaccaucuuccugcaa

SEQ ID NO: 1216726 - RNA, 19 nt, Human
uaccaccauaacuaccacu

SEQ ID NO: 1216727 - RNA, 25 nt, Human
uauggccguagacuauuuuggauac

SEQ ID NO: 1216728 - RNA, 27 nt, Human
uauucugcccuccuuguuucgagaccu

SEQ ID NO: 1216729 - RNA, 24 nt, Human
ucaaaacacaugucuuucuugcag

SEQ ID NO: 1216730 - RNA, 20 nt, Human
ucagucccauugugagggcu

SEQ ID NO: 1216731 - RNA, 19 nt, Human
uccauacucuccccaucca

SEQ ID NO: 1216732 - RNA, 21 nt, Human
uccauccuacagcaggagggg

SEQ ID NO: 1216733 - RNA, 19 nt, Human
uccccauccagguacuaac

SEQ ID NO: 1216734 - RNA, 24 nt, Human
ucccuaccagcuccucccuccucc

SEQ ID NO: 1216735 - RNA, 20 nt, Human
ucucccuaccagcuccuccc

SEQ ID NO: 1216736 - RNA, 19 nt, Human
ugaagagcagucuuuucug

SEQ ID NO: 1216737 - RNA, 21 nt, Human
ugaagagcagucuuuucuggc

SEQ ID NO: 1216738 - RNA, 22 nt, Human
ugacagauggcaggccuagggu

SEQ ID NO: 1216739 - RNA, 20 nt, Human
ugacccaggucacccggcug

SEQ ID NO: 1216740 - RNA, 20 nt, Human
ugaugccaagcucuguggag

SEQ ID NO: 1216741 - RNA, 21 nt, Human
ugcgccucccucccacuccau

SEQ ID NO: 1216742 - RNA, 22 nt, Human
ugcuuguuccacccggccacac

SEQ ID NO: 1216743 - RNA, 23 nt, Human
uggagaagagaaagacacccaaa

SEQ ID NO: 1216744 - RNA, 21 nt, Human
uggagacaagcccuacuuccc

SEQ ID NO: 1216745 - RNA, 23 nt, Human
uggcaggccuaggguucugauuc

SEQ ID NO: 1216746 - RNA, 19 nt, Human
ugggacggagaggccucug

SEQ ID NO: 1216747 - RNA, 20 nt, Human
ugucuuauugcgccucccuc

SEQ ID NO: 1216748 - RNA, 23 nt, Human
ugucuuauugcgccucccuccca

SEQ ID NO: 1216749 - RNA, 19 nt, Human
uucaugaagacccuccacc

SEQ ID NO: 1216750 - RNA, 21 nt, Human
uucccaugaugccaagcucug

SEQ ID NO: 1216751 - RNA, 20 nt, Human
uucugauucaguccauugga

SEQ ID NO: 1216752 - RNA, 18 nt, Human
uugaagaagagcucuccu

SEQ ID NO: 1216753 - RNA, 21 nt, Human
uugggagucauggauuccuag

SEQ ID NO: 1216754 - RNA, 19 nt, Human
uuugccugaaccuccucua

SEQ ID NO: 1216755 - RNA, 18 nt, Human
aaaacaaaagccaggaac

SEQ ID NO: 1216756 - RNA, 20 nt, Human
aaaaccagaguuuaugaaaa

SEQ ID NO: 1216757 - RNA, 20 nt, Human
aaaagagaaauaauaaaaaa

SEQ ID NO: 1216758 - RNA, 23 nt, Human
aaaauugcagaagaguuaaccaa

SEQ ID NO: 1216759 - RNA, 18 nt, Human
aaacaaaagccaggaacc

SEQ ID NO: 1216760 - RNA, 20 nt, Human
aaacaaaagccaggaaccaa

SEQ ID NO: 1216761 - RNA, 22 nt, Human
aaacaaaagccaggaaccaaga

SEQ ID NO: 1216762 - RNA, 23 nt, Human
aaacaaaagccaggaaccaagaa

SEQ ID NO: 1216763 - RNA, 22 nt, Human
aaacagauugaucuauguccuu

SEQ ID NO: 1216764 - RNA, 24 nt, Human
aaauuccuggaaauacuagcacau

SEQ ID NO: 1216765 - RNA, 22 nt, Human
aacaugaaacagaucuauagac

SEQ ID NO: 1216766 - RNA, 19 nt, Human
aacugaagaaggcugcaga

SEQ ID NO: 1216767 - RNA, 22 nt, Human
aagagguuucugagagucaaac

SEQ ID NO: 1216768 - RNA, 23 nt, Human
aaucucuugauacaaaaaacaaa

SEQ ID NO: 1216769 - RNA, 19 nt, Human
aaucugauuguucuaauuu

SEQ ID NO: 1216770 - RNA, 19 nt, Human
aauugaaagcaauacucca

SEQ ID NO: 1216771 - RNA, 18 nt, Human
aauugguuuaaaucugau

SEQ ID NO: 1216772 - RNA, 18 nt, Human
acagcacccaccaaaaca

SEQ ID NO: 1216773 - RNA, 25 nt, Human
acugcaagcucuuuguaccgucagg

SEQ ID NO: 1216774 - RNA, 21 nt, Human
agaaaucauccucuguccaca

SEQ ID NO: 1216775 - RNA, 23 nt, Human
agcacccaccaaaacaugaaaca

SEQ ID NO: 1216776 - RNA, 21 nt, Human
agccaggaaccaagaagucua

SEQ ID NO: 1216777 - RNA, 21 nt, Human
auaacaaauacauuacccuaa

SEQ ID NO: 1216778 - RNA, 22 nt, Human
auacaaaaaacaaaagccagga

SEQ ID NO: 1216779 - RNA, 21 nt, Human
auaggaagaacuaacugaaga

SEQ ID NO: 1216780 - RNA, 20 nt, Human
aucacaaucucuugauacaa

SEQ ID NO: 1216781 - RNA, 21 nt, Human
caaaaaacaaaagccaggaac

SEQ ID NO: 1216782 - RNA, 23 nt, Human
caaaaaacaaaagccaggaacca

SEQ ID NO: 1216783 - RNA, 25 nt, Human
caaaaaacaaaagccaggaaccaag

SEQ ID NO: 1216784 - RNA, 18 nt, Human
caaaaagaagguaggaaa

SEQ ID NO: 1216785 - RNA, 26 nt, Human
caaauacauuacccuaacuuuucuug

SEQ ID NO: 1216786 - RNA, 19 nt, Human
cacauaaaacagauugauc

SEQ ID NO: 1216787 - RNA, 23 nt, Human
cacccaccaaaacaugaaacaga

SEQ ID NO: 1216788 - RNA, 22 nt, Human
cacuaauagccaagggcaaaau

SEQ ID NO: 1216789 - RNA, 20 nt, Human
cagggucaucccaauacaaa

SEQ ID NO: 1216790 - RNA, 21 nt, Human
cccaccaaaacaugaaacaga

SEQ ID NO: 1216791 - RNA, 24 nt, Human
cccuaacuuuucuugaggccuaca

SEQ ID NO: 1216792 - RNA, 19 nt, Human
cuccaauacuuucccagcc

SEQ ID NO: 1216793 - RNA, 23 nt, Human
gaaccuggacauggagcaaaaga

SEQ ID NO: 1216794 - RNA, 18 nt, Human
gaaucuuucccaaguaua

SEQ ID NO: 1216795 - RNA, 20 nt, Human
gaauuuucucaucuucauuc

SEQ ID NO: 1216796 - RNA, 20 nt, Human
gagacacuaauagccaaggg

SEQ ID NO: 1216797 - RNA, 20 nt, Human
gauagcagcagguggcacau

SEQ ID NO: 1216798 - RNA, 24 nt, Human
gcaaaagacccuccaauacuuucc

SEQ ID NO: 1216799 - RNA, 18 nt, Human
gcgagaauuuucucaucu

SEQ ID NO: 1216800 - RNA, 22 nt, Human
ggaaauacuagcacauaaaaca

SEQ ID NO: 1216801 - RNA, 19 nt, Human
ggaagaacuaacugaagaa

SEQ ID NO: 1216802 - RNA, 18 nt, Human
ggugaucaaauggaagag

SEQ ID NO: 1216803 - RNA, 23 nt, Human
guggaugaaauaaaaugaaauga

SEQ ID NO: 1216804 - RNA, 27 nt, Human
uaaaaguaccaaaaaaaucuagcccca

SEQ ID NO: 1216805 - RNA, 18 nt, Human
uaacaaauacauuacccu

SEQ ID NO: 1216806 - RNA, 26 nt, Human
uaacacagcacccaccaaaacaugaa

SEQ ID NO: 1216807 - RNA, 20 nt, Human
uaacugaagaaggcugcaga

SEQ ID NO: 1216808 - RNA, 19 nt, Human
uaauagccaagggcaaaau

SEQ ID NO: 1216809 - RNA, 23 nt, Human
uacaaaaaacaaaagccaggaac

SEQ ID NO: 1216810 - RNA, 22 nt, Human
uaccccagaaacaacguaaguu

SEQ ID NO: 1216811 - RNA, 23 nt, Human
uacccuaacuuuucuugaggccu

SEQ ID NO: 1216812 - RNA, 23 nt, Human
uagccaagggcaaaauaagauac

SEQ ID NO: 1216813 - RNA, 24 nt, Human
uaggaagaacuaacugaagaaggc

SEQ ID NO: 1216814 - RNA, 24 nt, Human
uauaaacaagauggcucaaccaca

SEQ ID NO: 1216815 - RNA, 24 nt, Human
uauaggaagaacuaacugaagaag

SEQ ID NO: 1216816 - RNA, 23 nt, Human
uauuggcagaaaucauccucugu

SEQ ID NO: 1216817 - RNA, 22 nt, Human
uauuuuacuugcuugccuuugc

SEQ ID NO: 1216818 - RNA, 18 nt, Human
ucaaaacucaacaaagcu

SEQ ID NO: 1216819 - RNA, 24 nt, Human
ucaucccaauacaaggaugggaau

SEQ ID NO: 1216820 - RNA, 24 nt, Human
ucauugcgagaauuuucucaucuu

SEQ ID NO: 1216821 - RNA, 18 nt, Human
uccacauagagauugagu

SEQ ID NO: 1216822 - RNA, 24 nt, Human
ucucuugauacaaaaaacaaaagc

SEQ ID NO: 1216823 - RNA, 22 nt, Human
ugaaagcaauacuccauuaaga

SEQ ID NO: 1216824 - RNA, 19 nt, Human
ugaagcauauguuugcuaa

SEQ ID NO: 1216825 - RNA, 20 nt, Human
ugagaaaaaagcuuuuccau

SEQ ID NO: 1216826 - RNA, 23 nt, Human
ugagaacugcaagcucuuuguac

SEQ ID NO: 1216827 - RNA, 22 nt, Human
ugauacaaaaaacaaaagccag

SEQ ID NO: 1216828 - RNA, 19 nt, Human
ugaucacauggcuuuuuug

SEQ ID NO: 1216829 - RNA, 18 nt, Human
uggaagagauaaaggugg

SEQ ID NO: 1216830 - RNA, 19 nt, Human
uggaagagauaaagguggu

SEQ ID NO: 1216831 - RNA, 24 nt, Human
uggaagguuuccauuuaucuucug

SEQ ID NO: 1216832 - RNA, 21 nt, Human
uggcagaaaucauccucuguc

SEQ ID NO: 1216833 - RNA, 19 nt, Human
uggcucaaccacagcaugu

SEQ ID NO: 1216834 - RNA, 19 nt, Human
ugggaaugcuaacacagca

SEQ ID NO: 1216835 - RNA, 22 nt, Human
uggugauagcagcagguggcac

SEQ ID NO: 1216836 - RNA, 19 nt, Human
ugucuacaacuguuugacg

SEQ ID NO: 1216837 - RNA, 18 nt, Human
uguggugauagcagcagg

SEQ ID NO: 1216838 - RNA, 18 nt, Human
uguggugauagcagcagg

SEQ ID NO: 1216839 - RNA, 21 nt, Human
uucuucuuuaacugcaaggaa

SEQ ID NO: 1216840 - RNA, 25 nt, Human
uuggaaaaugucaaguauuauuuca

SEQ ID NO: 1216841 - RNA, 20 nt, Human
uuuccugugaagcauauguu

SEQ ID NO: 1216842 - RNA, 21 nt, Human
uuuuacuugcuugccuuugcu

SEQ ID NO: 1216843 - RNA, 18 nt, Human
agcagcuucagcuuuucu

SEQ ID NO: 1216844 - RNA, 23 nt, Human
agugcaauggcgcaaucuuggcu

SEQ ID NO: 1216845 - RNA, 24 nt, Human
agugcaauggcgcaaucuuggcuc

SEQ ID NO: 1216846 - RNA, 23 nt, Human
cacuggaaccucugccuccuggg

SEQ ID NO: 1216847 - RNA, 19 nt, Human
cccaagcuggagugcaaug

SEQ ID NO: 1216848 - RNA, 22 nt, Human
ccuagcagcuucagcuuuucuu

SEQ ID NO: 1216849 - RNA, 24 nt, Human
ccuccuggguucaagcgauucucc

SEQ ID NO: 1216850 - RNA, 19 nt, Human
ccucugccuccuggguuca

SEQ ID NO: 1216851 - RNA, 23 nt, Human
ccuggguucaagcgauucuccug

SEQ ID NO: 1216852 - RNA, 24 nt, Human
cucacuggaaccucugccuccugg

SEQ ID NO: 1216853 - RNA, 21 nt, Human
cuccuggguucaagcgauucu

SEQ ID NO: 1216854 - RNA, 19 nt, Human
gagugcaauggcgcaaucu

SEQ ID NO: 1216855 - RNA, 21 nt, Human
gcucacuggaaccucugccuc

SEQ ID NO: 1216856 - RNA, 19 nt, Human
gcuggagugcaauggcgca

SEQ ID NO: 1216857 - RNA, 24 nt, Human
ucacuggaaccucugccuccuggg

SEQ ID NO: 1216858 - RNA, 25 nt, Human
ucacuggaaccucugccuccugggu

SEQ ID NO: 1216859 - RNA, 23 nt, Human
ucccaagcuggagugcaauggcg

SEQ ID NO: 1216860 - RNA, 21 nt, Human
uccuggguucaagcgauucuc

SEQ ID NO: 1216861 - RNA, 24 nt, Human
uccuggguucaagcgauucuccug

SEQ ID NO: 1216862 - RNA, 23 nt, Human
ucgcucuugucucccaagcugga

SEQ ID NO: 1216863 - RNA, 21 nt, Human
ucuucuggcgauguagccuag

SEQ ID NO: 1216864 - RNA, 23 nt, Human
ugcaauggcgcaaucuuggcuca

SEQ ID NO: 1216865 - RNA, 24 nt, Human
uggagugcaauggcgcaaucuugg

SEQ ID NO: 1216866 - RNA, 19 nt, Human
uggcucacuggaaccucug

SEQ ID NO: 1216867 - RNA, 23 nt, Human
uggguucaagcgauucuccugcc

SEQ ID NO: 1216868 - RNA, 19 nt, Human
uguuucgcucuugucuccc

SEQ ID NO: 1216869 - RNA, 24 nt, Human
uucgcucuugucucccaagcugga

SEQ ID NO: 1216870 - RNA, 21 nt, Human
aaacacccacccucccagcuc

SEQ ID NO: 1216871 - RNA, 23 nt, Human
aaacagccauggaauccucccag

SEQ ID NO: 1216872 - RNA, 23 nt, Human
aacacccacccucccagcucggc

SEQ ID NO: 1216873 - RNA, 21 nt, Human
aaccugagacaagaaagaggc

SEQ ID NO: 1216874 - RNA, 19 nt, Human
aagaggccaagaggcacca

SEQ ID NO: 1216875 - RNA, 19 nt, Human
aagcagagcucucuucaag

SEQ ID NO: 1216876 - RNA, 25 nt, Human
aagcaggaagagaaguacuucccaa

SEQ ID NO: 1216877 - RNA, 18 nt, Human
acacagcuaccuggccca

SEQ ID NO: 1216878 - RNA, 19 nt, Human
accgcaucaauagcucggc

SEQ ID NO: 1216879 - RNA, 19 nt, Human
agaaagaggccaagaggca

SEQ ID NO: 1216880 - RNA, 18 nt, Human
agacaagaaagaggccaa

SEQ ID NO: 1216881 - RNA, 20 nt, Human
agacaagaaagaggccaaga

SEQ ID NO: 1216882 - RNA, 18 nt, Human
aggggagcuaagcagagc

SEQ ID NO: 1216883 - RNA, 24 nt, Human
aggggccuugacuccaggggagcu

SEQ ID NO: 1216884 - RNA, 26 nt, Human
caaagggacagaaaugaggcacaggc

SEQ ID NO: 1216885 - RNA, 20 nt, Human
caaccgacaucaccagucac

SEQ ID NO: 1216886 - RNA, 18 nt, Human
caagaaagaggccaagag

SEQ ID NO: 1216887 - RNA, 21 nt, Human
caagaggcaccauccucaguc

SEQ ID NO: 1216888 - RNA, 25 nt, Human
cacccacccucccagcucggcucua

SEQ ID NO: 1216889 - RNA, 18 nt, Human
cagacugccauaaacacc

SEQ ID NO: 1216890 - RNA, 18 nt, Human
cagcauugccagccucug

SEQ ID NO: 1216891 - RNA, 21 nt, Human
caggaagagaaguacuuccca

SEQ ID NO: 1216892 - RNA, 19 nt, Human
caguaaggaugacauggca

SEQ ID NO: 1216893 - RNA, 18 nt, Human
cauaaacacccacccucc

SEQ ID NO: 1216894 - RNA, 18 nt, Human
cauaaacacccacccucc

SEQ ID NO: 1216895 - RNA, 18 nt, Human
ccaaccgacaucaccagu

SEQ ID NO: 1216896 - RNA, 18 nt, Human
ccauaaacacccacccuc

SEQ ID NO: 1216897 - RNA, 20 nt, Human
ccauggucuugaggagagag

SEQ ID NO: 1216898 - RNA, 19 nt, Human
ccgguuucuucguccaagu

SEQ ID NO: 1216899 - RNA, 22 nt, Human
ccuaaaacagccauggaauccu

SEQ ID NO: 1216900 - RNA, 18 nt, Human
ccucccagcucggcucua

SEQ ID NO: 1216901 - RNA, 21 nt, Human
ccucuggaagguaaaccugag

SEQ ID NO: 1216902 - RNA, 23 nt, Human
cugguaauaguagucauccaggc

SEQ ID NO: 1216903 - RNA, 21 nt, Human
cuucuuagccguguccuccag

SEQ ID NO: 1216904 - RNA, 19 nt, Human
gcagagcucucuucaaggc

SEQ ID NO: 1216905 - RNA, 21 nt, Human
gcagagcucucuucaaggcaa

SEQ ID NO: 1216906 - RNA, 23 nt, Human
gccauggaauccucccagcaaga

SEQ ID NO: 1216907 - RNA, 22 nt, Human
gugaaacagcauugccagccuc

SEQ ID NO: 1216908 - RNA, 26 nt, Human
uaaaccugagacaagaaagaggccaa

SEQ ID NO: 1216909 - RNA, 21 nt, Human
uaaggcguuaccagcuugagg

SEQ ID NO: 1216910 - RNA, 24 nt, Human
uaccagcuugagggacucaacccg

SEQ ID NO: 1216911 - RNA, 18 nt, Human
uaccuggcccagggaacc

SEQ ID NO: 1216912 - RNA, 22 nt, Human
uagcuucugguaauauuccuuc

SEQ ID NO: 1216913 - RNA, 21 nt, Human
uccaaguagcucuucgucugc

SEQ ID NO: 1216914 - RNA, 25 nt, Human
ucucagacugccauaaacacccacc

SEQ ID NO: 1216915 - RNA, 23 nt, Human
ucugcacuuuuaucacccagucc

SEQ ID NO: 1216916 - RNA, 19 nt, Human
ucugccugcuucuucucua

SEQ ID NO: 1216917 - RNA, 21 nt, Human
ugacauggcacccuaaaacag

SEQ ID NO: 1216918 - RNA, 18 nt, Human
ugccuucggaauguaagg

SEQ ID NO: 1216919 - RNA, 21 nt, Human
uggcaggcugguggacuuccu

SEQ ID NO: 1216920 - RNA, 22 nt, Human
uggcaggcugguggacuuccuu

SEQ ID NO: 1216921 - RNA, 23 nt, Human
uggcaggcugguggacuuccuuc

SEQ ID NO: 1216922 - RNA, 19 nt, Human
uggcccagggaacccucga

SEQ ID NO: 1216923 - RNA, 19 nt, Human
uguaaggcguuaccagcuu

SEQ ID NO: 1216924 - RNA, 25 nt, Human
uucggaccacggacucauaagccuc

SEQ ID NO: 1216925 - RNA, 18 nt, Human
aagcaggcucagcuucca

SEQ ID NO: 1216926 - RNA, 21 nt, Human
accccgccgccugggugggcu

SEQ ID NO: 1216927 - RNA, 19 nt, Human
agacccgaggguagggcag

SEQ ID NO: 1216928 - RNA, 21 nt, Human
aggcaccuccucgccagccug

SEQ ID NO: 1216929 - RNA, 19 nt, Human
agggaguugugggcccaga

SEQ ID NO: 1216930 - RNA, 21 nt, Human
aggggcaccaguuaccacuga

SEQ ID NO: 1216931 - RNA, 21 nt, Human
caccuccucgccagccugugg

SEQ ID NO: 1216932 - RNA, 20 nt, Human
cacuggacccaccaagaccc

SEQ ID NO: 1216933 - RNA, 23 nt, Human
cagccugugggcugcacccacag

SEQ ID NO: 1216934 - RNA, 22 nt, Human
caguggaugcacccugcccccu

SEQ ID NO: 1216935 - RNA, 19 nt, Human
caucugguuugaggucagg

SEQ ID NO: 1216936 - RNA, 24 nt, Human
caucugguuugaggucaggucauu

SEQ ID NO: 1216937 - RNA, 28 nt, Human
ccaccaagaccccgccgccugggugggg

SEQ ID NO: 1216938 - RNA, 20 nt, Human
ccagcagcagugacgcucag

SEQ ID NO: 1216939 - RNA, 25 nt, Human
cccaaggggagggccggcguccccg

SEQ ID NO: 1216940 - RNA, 24 nt, Human
cccagcugcugugacacccaaggg

SEQ ID NO: 1216941 - RNA, 22 nt, Human
ccccgccgccugggugggcugu

SEQ ID NO: 1216942 - RNA, 19 nt, Human
ccgccgccugggugggcug

SEQ ID NO: 1216943 - RNA, 22 nt, Human
ccucgccagacccgaggguagg

SEQ ID NO: 1216944 - RNA, 21 nt, Human
ccucugaguguucuggggagg

SEQ ID NO: 1216945 - RNA, 19 nt, Human
ccugcccccucccucgcca

SEQ ID NO: 1216946 - RNA, 18 nt, Human
gaaagcaggcucagcucc

SEQ ID NO: 1216947 - RNA, 22 nt, Human
gaggaggggguggggcggaggg

SEQ ID NO: 1216948 - RNA, 21 nt, Human
gaguguucuggggaggagggg

SEQ ID NO: 1216949 - RNA, 19 nt, Human
gcagcagugacgcucaggg

SEQ ID NO: 1216950 - RNA, 20 nt, Human
ggaggggguggggcggaggg

SEQ ID NO: 1216951 - RNA, 24 nt, Human
gggaauggaggggaggggcaccag

SEQ ID NO: 1216952 - RNA, 19 nt, Human
ggggaggaggggguggggc

SEQ ID NO: 1216953 - RNA, 19 nt, Human
gucccucugaguguucugg

SEQ ID NO: 1216954 - RNA, 18 nt, Human
ucagggccuucccagcug

SEQ ID NO: 1216955 - RNA, 23 nt, Human
ucccagcugucagccagcugccc

SEQ ID NO: 1216956 - RNA, 21 nt, Human
ucccucgccagacccgagggu

SEQ ID NO: 1216957 - RNA, 21 nt, Human
ucccucugaguguucugggga

SEQ ID NO: 1216958 - RNA, 22 nt, Human
ucccucugaguguucuggggag

SEQ ID NO: 1216959 - RNA, 22 nt, Human
ugacacccaaggggagggccgg

SEQ ID NO: 1216960 - RNA, 19 nt, Human
uggaggggaggggcaccag

SEQ ID NO: 1216961 - RNA, 18 nt, Human
uggaugcacccugccccc

SEQ ID NO: 1216962 - RNA, 20 nt, Human
ugggcugcacccacagggaa

SEQ ID NO: 1216963 - RNA, 18 nt, Human
uggggaggaggggguggg

SEQ ID NO: 1216964 - RNA, 19 nt, Human
ugugacacccaaggggagg

SEQ ID NO: 1216965 - RNA, 20 nt, Human
ugugggcccagcugcuguga

SEQ ID NO: 1216966 - RNA, 19 nt, Human
ugugggcugcacccacagg

SEQ ID NO: 1216967 - RNA, 24 nt, Human
uuccugucugugggcccagcugcu

SEQ ID NO: 1216968 - RNA, 19 nt, Human
uugugggcccagaggggcu

SEQ ID NO: 1216969 - RNA, 19 nt, Human
aaaaaaaacugaguagaca

SEQ ID NO: 1216970 - RNA, 23 nt, Human
aaccuucuucccuguuugcccac

SEQ ID NO: 1216971 - RNA, 18 nt, Human
aacuccuagcccaguccc

SEQ ID NO: 1216972 - RNA, 18 nt, Human
aaggagcacuggcugcag

SEQ ID NO: 1216973 - RNA, 24 nt, Human
aaguccccucccagaucugugacc

SEQ ID NO: 1216974 - RNA, 20 nt, Human
aauggcuguggggaucaagg

SEQ ID NO: 1216975 - RNA, 24 nt, Human
acacaaaaauuuuaaaaauagcug

SEQ ID NO: 1216976 - RNA, 23 nt, Human
acagagggagccugggggccaca

SEQ ID NO: 1216977 - RNA, 25 nt, Human
acagguaccagagacugccccccac

SEQ ID NO: 1216978 - RNA, 20 nt, Human
acagucccagaagggcccag

SEQ ID NO: 1216979 - RNA, 19 nt, Human
acccagaccugagcuagga

SEQ ID NO: 1216980 - RNA, 21 nt, Human
acccugauguccccaauucca

SEQ ID NO: 1216981 - RNA, 18 nt, Human
acuccagccuggugacag

SEQ ID NO: 1216982 - RNA, 21 nt, Human
acuccagccuggugacagagc

SEQ ID NO: 1216983 - RNA, 23 nt, Human
acuguacuccagccuggugacag

SEQ ID NO: 1216984 - RNA, 25 nt, Human
acuguacuccagccuggugacagag

SEQ ID NO: 1216985 - RNA, 19 nt, Human
acugugugaccagcaaggu

SEQ ID NO: 1216986 - RNA, 24 nt, Human
agacccuaucaccgccccccgccc

SEQ ID NO: 1216987 - RNA, 22 nt, Human
agacugccccccacggccccaa

SEQ ID NO: 1216988 - RNA, 22 nt, Human
agagcgagacccuaucaccgcc

SEQ ID NO: 1216989 - RNA, 23 nt, Human
agaguggggcugugggaccagcg

SEQ ID NO: 1216990 - RNA, 24 nt, Human
agccugggccacauagugagaccu

SEQ ID NO: 1216991 - RNA, 25 nt, Human
agccugggccacauagugagaccuu

SEQ ID NO: 1216992 - RNA, 23 nt, Human
agccuggugacagagcgagaccc

SEQ ID NO: 1216993 - RNA, 26 nt, Human
agcugggcuuggugguggcaugugcc

SEQ ID NO: 1216994 - RNA, 19 nt, Human
aggagcagaggcgagucug

SEQ ID NO: 1216995 - RNA, 24 nt, Human
aggaguucgagaccagccugggcc

SEQ ID NO: 1216996 - RNA, 24 nt, Human
aggaucacuugagcccaggaguuc

SEQ ID NO: 1216997 - RNA, 23 nt, Human
aggcaagcucauuucuucuccac

SEQ ID NO: 1216998 - RNA, 18 nt, Human
aggcaggaggaucacuug

SEQ ID NO: 1216999 - RNA, 23 nt, Human
aggcaggaggaucacuugagccc

SEQ ID NO: 1217000 - RNA, 24 nt, Human
aggcaggaggaucacuugagccca

SEQ ID NO: 1217001 - RNA, 24 nt, Human
aggccgaggcaggaggaucacuug

SEQ ID NO: 1217002 - RNA, 22 nt, Human
aggcuauuuggcacccaggucu

SEQ ID NO: 1217003 - RNA, 25 nt, Human
agguaccagagacugccccccacgg

SEQ ID NO: 1217004 - RNA, 19 nt, Human
agguggaggcugcagugag

SEQ ID NO: 1217005 - RNA, 20 nt, Human
agguggaggcugcagugagc

SEQ ID NO: 1217006 - RNA, 19 nt, Human
aguccagcgccaggaugcc

SEQ ID NO: 1217007 - RNA, 25 nt, Human
agugacggggggagcuugacaagga

SEQ ID NO: 1217008 - RNA, 26 nt, Human
aucucuccccucccugugccucccag

SEQ ID NO: 1217009 - RNA, 20 nt, Human
augaagcagggauuggggcu

SEQ ID NO: 1217010 - RNA, 25 nt, Human
augcccagaggagugcccugggggc

SEQ ID NO: 1217011 - RNA, 21 nt, Human
augugggaaccagaacacacu

SEQ ID NO: 1217012 - RNA, 22 nt, Human
augugggaaccagaacacacug

SEQ ID NO: 1217013 - RNA, 18 nt, Human
auuucuucuccacacccc

SEQ ID NO: 1217014 - RNA, 23 nt, Human
caaguccagcgccaggaugccca

SEQ ID NO: 1217015 - RNA, 22 nt, Human
cacacugauggaggaguuggca

SEQ ID NO: 1217016 - RNA, 19 nt, Human
cacagguaccagagacugc

SEQ ID NO: 1217017 - RNA, 25 nt, Human
caccaaaaaaaaacugaguagacag

SEQ ID NO: 1217018 - RNA, 19 nt, Human
caccaugcccaugcccccg

SEQ ID NO: 1217019 - RNA, 20 nt, Human
caccaugcccaugcccccgc

SEQ ID NO: 1217020 - RNA, 22 nt, Human
caccuggagugacggggggagc

SEQ ID NO: 1217021 - RNA, 21 nt, Human
cacuccuggaggccgaggcag

SEQ ID NO: 1217022 - RNA, 19 nt, Human
cacugcgcuggggcggggc

SEQ ID NO: 1217023 - RNA, 25 nt, Human
cacuggcugcagggggguggggggu

SEQ ID NO: 1217024 - RNA, 18 nt, Human
cacuguacuccagccugg

SEQ ID NO: 1217025 - RNA, 18 nt, Human
cacuguacuccagccugg

SEQ ID NO: 1217026 - RNA, 18 nt, Human
cacuguacuccagccugg

SEQ ID NO: 1217027 - RNA, 21 nt, Human
cacuguacuccagccugguga

SEQ ID NO: 1217028 - RNA, 22 nt, Human
cacuguacuccagccuggugac

SEQ ID NO: 1217029 - RNA, 23 nt, Human
cacuguacuccagccuggugaca

SEQ ID NO: 1217030 - RNA, 23 nt, Human
cacuguacuccagccuggugaca

SEQ ID NO: 1217031 - RNA, 24 nt, Human
cacuuugagcccaggagguggagg

SEQ ID NO: 1217032 - RNA, 19 nt, Human
cagagccucagcaucccuu

SEQ ID NO: 1217033 - RNA, 23 nt, Human
cagcaaggcagccagggcggcac

SEQ ID NO: 1217034 - RNA, 19 nt, Human
cagccagggcggcacaggc

SEQ ID NO: 1217035 - RNA, 20 nt, Human
caggagguggaggcugcagu

SEQ ID NO: 1217036 - RNA, 23 nt, Human
caggaugcccaggcuccugggcu

SEQ ID NO: 1217037 - RNA, 19 nt, Human
caggcaucaacuccaacuc

SEQ ID NO: 1217038 - RNA, 25 nt, Human
caggcuccugggcuuccuccccgag

SEQ ID NO: 1217039 - RNA, 21 nt, Human
caggcuccugggcuuccuccu

SEQ ID NO: 1217040 - RNA, 24 nt, Human
cagggcggcacaggcaccaggucc

SEQ ID NO: 1217041 - RNA, 21 nt, Human
cagggggguggggggugggau

SEQ ID NO: 1217042 - RNA, 22 nt, Human
caggugcagagcaucccugacg

SEQ ID NO: 1217043 - RNA, 24 nt, Human
cagucaucacuguacuccagccug

SEQ ID NO: 1217044 - RNA, 24 nt, Human
cagugagcagucaucacuguacuc

SEQ ID NO: 1217045 - RNA, 18 nt, Human
cauccuuuggcugggccu

SEQ ID NO: 1217046 - RNA, 24 nt, Human
caucucuccccucccugugccucc

SEQ ID NO: 1217047 - RNA, 23 nt, Human
caugcaccacgcgcugaaggagg

SEQ ID NO: 1217048 - RNA, 22 nt, Human
ccaaaaucccccacccgggaug

SEQ ID NO: 1217049 - RNA, 21 nt, Human
ccaacuccuagcccagucccg

SEQ ID NO: 1217050 - RNA, 18 nt, Human
ccacaccccuccccgccc

SEQ ID NO: 1217051 - RNA, 20 nt, Human
ccacauagugagaccuuguc

SEQ ID NO: 1217052 - RNA, 24 nt, Human
ccacggccccaaaaucccccaccc

SEQ ID NO: 1217053 - RNA, 24 nt, Human
ccacuggaccacaggagcagaggc

SEQ ID NO: 1217054 - RNA, 20 nt, Human
ccagagacugccccccacgg

SEQ ID NO: 1217055 - RNA, 22 nt, Human
ccaggagguggaggcugcagug

SEQ ID NO: 1217056 - RNA, 25 nt, Human
ccaggaguucgagaccagccugggc

SEQ ID NO: 1217057 - RNA, 25 nt, Human
ccaucucuccccucccugugccucc

SEQ ID NO: 1217058 - RNA, 19 nt, Human
ccaugcccccgcccgugga

SEQ ID NO: 1217059 - RNA, 25 nt, Human
cccaaaaucccccacccgggaugcc

SEQ ID NO: 1217060 - RNA, 25 nt, Human
cccacagagcuccuguauccaggca

SEQ ID NO: 1217061 - RNA, 22 nt, Human
cccacccgggaugcccagagga

SEQ ID NO: 1217062 - RNA, 24 nt, Human
cccacggccccaaaaucccccacc

SEQ ID NO: 1217063 - RNA, 20 nt, Human
cccauauauaaaaaugaagc

SEQ ID NO: 1217064 - RNA, 21 nt, Human
cccauauauaaaaaugaagca

SEQ ID NO: 1217065 - RNA, 23 nt, Human
cccccacccgggaugcccagagg

SEQ ID NO: 1217066 - RNA, 21 nt, Human
ccccccacggccccaaaaucc

SEQ ID NO: 1217067 - RNA, 25 nt, Human
cccccgccccaccaaaaaaaaacug

SEQ ID NO: 1217068 - RNA, 22 nt, Human
ccccgccccaccaaaaaaaaac

SEQ ID NO: 1217069 - RNA, 18 nt, Human
ccccgcccgacccugucu

SEQ ID NO: 1217070 - RNA, 18 nt, Human
ccccucccugugccuccc

SEQ ID NO: 1217071 - RNA, 19 nt, Human
cccgccccaccaaaaaaaa

SEQ ID NO: 1217072 - RNA, 23 nt, Human
cccgccccaccaaaaaaaaacug

SEQ ID NO: 1217073 - RNA, 22 nt, Human
cccuuucccucccagagccuca

SEQ ID NO: 1217074 - RNA, 20 nt, Human
ccgccccccgccccaccaaa

SEQ ID NO: 1217075 - RNA, 23 nt, Human
ccuaucaccgccccccgccccac

SEQ ID NO: 1217076 - RNA, 22 nt, Human
ccugagcuaggacagagggagc

SEQ ID NO: 1217077 - RNA, 21 nt, Human
ccugggccacauagugagacc

SEQ ID NO: 1217078 - RNA, 19 nt, Human
ccuguaguccuagcuacuc

SEQ ID NO: 1217079 - RNA, 18 nt, Human
ccugucuaaacuaauggg

SEQ ID NO: 1217080 - RNA, 24 nt, Human
cgagaccagccugggccacauagu

SEQ ID NO: 1217081 - RNA, 21 nt, Human
cgagacccuaucaccgccccc

SEQ ID NO: 1217082 - RNA, 22 nt, Human
cgagacccuaucaccgcccccc

SEQ ID NO: 1217083 - RNA, 22 nt, Human
cgagaugcugcacaugcaccac

SEQ ID NO: 1217084 - RNA, 19 nt, Human
cgagcacacgaguguaaag

SEQ ID NO: 1217085 - RNA, 20 nt, Human
cgaggcaggaggaucacuug

SEQ ID NO: 1217086 - RNA, 20 nt, Human
cgcucagcaucaucggugac

SEQ ID NO: 1217087 - RNA, 20 nt, Human
cggccacuggaccacaggag

SEQ ID NO: 1217088 - RNA, 21 nt, Human
cggccccaaaaucccccaccc

SEQ ID NO: 1217089 - RNA, 21 nt, Human
cuacugcauccuuuggcuggg

SEQ ID NO: 1217090 - RNA, 18 nt, Human
cuccacaccccuccccgc

SEQ ID NO: 1217091 - RNA, 23 nt, Human
cuccacaccccuccccgcccgac

SEQ ID NO: 1217092 - RNA, 24 nt, Human
cuccagccuggugacagagcgaga

SEQ ID NO: 1217093 - RNA, 22 nt, Human
cuccuagcccagucccgggggc

SEQ ID NO: 1217094 - RNA, 26 nt, Human
cugacuccagucuugcuaacacacac

SEQ ID NO: 1217095 - RNA, 23 nt, Human
cuggaccucgguguccccaucug

SEQ ID NO: 1217096 - RNA, 24 nt, Human
cuggaggccgaggcaggaggauca

SEQ ID NO: 1217097 - RNA, 20 nt, Human
cugggcuuccuccugcuggg

SEQ ID NO: 1217098 - RNA, 21 nt, Human
cuuaaguccccucccagaucu

SEQ ID NO: 1217099 - RNA, 19 nt, Human
cuuugagcccaggaggugg

SEQ ID NO: 1217100 - RNA, 24 nt, Human
cuuuggcugggccuuguugacccc

SEQ ID NO: 1217101 - RNA, 18 nt, Human
gagcgagcacacgagugu

SEQ ID NO: 1217102 - RNA, 18 nt, Human
gagcuucggugcaugggu

SEQ ID NO: 1217103 - RNA, 23 nt, Human
gaggcaggaggaucacuugagcc

SEQ ID NO: 1217104 - RNA, 18 nt, Human
gagugcccugggggcaag

SEQ ID NO: 1217105 - RNA, 24 nt, Human
gaucacuugagcccaggaguucga

SEQ ID NO: 1217106 - RNA, 22 nt, Human
gcaugugccuguaguccuagcu

SEQ ID NO: 1217107 - RNA, 23 nt, Human
gccacauagugagaccuugucuc

SEQ ID NO: 1217108 - RNA, 22 nt, Human
gcccaggaguucgagaccagcc

SEQ ID NO: 1217109 - RNA, 23 nt, Human
gccgcaagggcagggaugggagu

SEQ ID NO: 1217110 - RNA, 22 nt, Human
gcgagacccuaucaccgccccc

SEQ ID NO: 1217111 - RNA, 20 nt, Human
gcugcagggggguggggggu

SEQ ID NO: 1217112 - RNA, 19 nt, Human
ggaagugugccccauaccc

SEQ ID NO: 1217113 - RNA, 18 nt, Human
ggaggcugcagugagcag

SEQ ID NO: 1217114 - RNA, 23 nt, Human
ggaucacuugagcccaggaguuc

SEQ ID NO: 1217115 - RNA, 22 nt, Human
ggcaagaucacuggacugggag

SEQ ID NO: 1217116 - RNA, 18 nt, Human
ggcaaguggcacaccccc

SEQ ID NO: 1217117 - RNA, 18 nt, Human
ggcaaguggcacaccccc

SEQ ID NO: 1217118 - RNA, 18 nt, Human
ggcacccaggucuauggu

SEQ ID NO: 1217119 - RNA, 18 nt, Human
ggccgaggcaggaggauc

SEQ ID NO: 1217120 - RNA, 20 nt, Human
ggcugcaggggggugggggg

SEQ ID NO: 1217121 - RNA, 20 nt, Human
ggcuuggugguggcaugugc

SEQ ID NO: 1217122 - RNA, 19 nt, Human
gggcaaguggcacaccccc

SEQ ID NO: 1217123 - RNA, 22 nt, Human
ggggagguggaucuuccagucg

SEQ ID NO: 1217124 - RNA, 19 nt, Human
ggggcugugggaccagcgc

SEQ ID NO: 1217125 - RNA, 22 nt, Human
ggggcugugggaccagcgccca

SEQ ID NO: 1217126 - RNA, 20 nt, Human
gggguauaggcaagcagcaa

SEQ ID NO: 1217127 - RNA, 23 nt, Human
gguagccgcaagggcagggaugg

SEQ ID NO: 1217128 - RNA, 25 nt, Human
ggucccaaccuucuucccuguuugc

SEQ ID NO: 1217129 - RNA, 26 nt, Human
guagugguagccgcaagggcagggau

SEQ ID NO: 1217130 - RNA, 19 nt, Human
guccgcccuuggggaagug

SEQ ID NO: 1217131 - RNA, 23 nt, Human
gucuuuuccucuggaccucggug

SEQ ID NO: 1217132 - RNA, 22 nt, Human
uaacugccaacgugaguucaga

SEQ ID NO: 1217133 - RNA, 19 nt, Human
uaagcuccggcaaccgccu

SEQ ID NO: 1217134 - RNA, 19 nt, Human
uacuccagccuggugacag

SEQ ID NO: 1217135 - RNA, 23 nt, Human
uacuccagccuggugacagagcg

SEQ ID NO: 1217136 - RNA, 19 nt, Human
uaggacagagggagccugg

SEQ ID NO: 1217137 - RNA, 24 nt, Human
uaggcaagucccuuucccucccag

SEQ ID NO: 1217138 - RNA, 30 nt, Human; identical to SEQ ID NO: 1084712

SEQ ID NO: 1217139 - RNA, 22 nt, Human
uaggucuuaaguccccucccag

SEQ ID NO: 1217140 - RNA, 24 nt, Human
uaguccuagcuacucgagaggcug

SEQ ID NO: 1217141 - RNA, 18 nt, Human
uauugggcaagaucacug

SEQ ID NO: 1217142 - RNA, 21 nt, Human
ucaacuccaacucccacuccu

SEQ ID NO: 1217143 - RNA, 20 nt, Human
ucacuguacuccagccuggu

SEQ ID NO: 1217144 - RNA, 23 nt, Human
ucacuguacuccagccuggugac

SEQ ID NO: 1217145 - RNA, 20 nt, Human
ucacuugagcccaggaguuc

SEQ ID NO: 1217146 - RNA, 22 nt, Human
ucagcuacccugauguccccaa

SEQ ID NO: 1217147 - RNA, 24 nt, Human
uccacaccccuccccgcccgaccc

SEQ ID NO: 1217148 - RNA, 22 nt, Human
uccagccuggugacagagcgag

SEQ ID NO: 1217149 - RNA, 27 nt, Human
uccagcgcacagucccagaagggcccc

SEQ ID NO: 1217150 - RNA, 22 nt, Human
ucccaggucgcccaaguccagc

SEQ ID NO: 1217151 - RNA, 24 nt, Human
ucccaggucgcccaaguccagcgc

SEQ ID NO: 1217152 - RNA, 21 nt, Human
uccccagagcucaggacccug

SEQ ID NO: 1217153 - RNA, 19 nt, Human
uccggccacuggaccacag

SEQ ID NO: 1217154 - RNA, 21 nt, Human
uccggccacuggaccacagga

SEQ ID NO: 1217155 - RNA, 21 nt, Human
uccuccugcuggguccgcccc

SEQ ID NO: 1217156 - RNA, 22 nt, Human
ucggagccgcuggccaauaugu

SEQ ID NO: 1217157 - RNA, 23 nt, Human
ucuccuagaauggcuguggggau

SEQ ID NO: 1217158 - RNA, 21 nt, Human
ucucgcugcugggggcggggc

SEQ ID NO: 1217159 - RNA, 20 nt, Human
ucuuucaagaacauucacuc

SEQ ID NO: 1217160 - RNA, 22 nt, Human
ugaagccuacuucacucccaaa

SEQ ID NO: 1217161 - RNA, 18 nt, Human
ugacggggggagcuugac

SEQ ID NO: 1217162 - RNA, 20 nt, Human
ugacuccuuugagccauccc

SEQ ID NO: 1217163 - RNA, 20 nt, Human
ugagaaaaggcaguggggag

SEQ ID NO: 1217164 - RNA, 21 nt, Human
ugagaaaaggcaguggggagg

SEQ ID NO: 1217165 - RNA, 23 nt, Human
ugagaaaaggcaguggggaggug

SEQ ID NO: 1217166 - RNA, 23 nt, Human
ugagcccaggaguucgagaccag

SEQ ID NO: 1217167 - RNA, 19 nt, Human
ugaggugugacauauggga

SEQ ID NO: 1217168 - RNA, 22 nt, Human
ugcccagaggagugcccugggg

SEQ ID NO: 1217169 - RNA, 21 nt, Human
ugcccugggggcaaguggcac

SEQ ID NO: 1217170 - RNA, 23 nt, Human
ugcccugggggcaaguggcacac

SEQ ID NO: 1217171 - RNA, 19 nt, Human
ugcccugugaugugcuguu

SEQ ID NO: 1217172 - RNA, 22 nt, Human
ugccuguaguccuagcuacucg

SEQ ID NO: 1217173 - RNA, 21 nt, Human
ugcugggggcggggcuuaagc

SEQ ID NO: 1217174 - RNA, 26 nt, Human
uggauuuccuucagcuacccugaugu

SEQ ID NO: 1217175 - RNA, 24 nt, Human
uggcagggaggagcuucggugcau

SEQ ID NO: 1217176 - RNA, 18 nt, Human
uggcugcagggggguggg

SEQ ID NO: 1217177 - RNA, 21 nt, Human
uggcugcaggggggugggggg

SEQ ID NO: 1217178 - RNA, 22 nt, Human
uggcugcagggggguggggggu

SEQ ID NO: 1217179 - RNA, 23 nt, Human
ugggauguucucgcugcuggggg

SEQ ID NO: 1217180 - RNA, 22 nt, Human
ugguggcaugugccuguagucc

SEQ ID NO: 1217181 - RNA, 20 nt, Human
uguaaagaauggcacccaga

SEQ ID NO: 1217182 - RNA, 24 nt, Human
uguacuccagccuggugacagagc

SEQ ID NO: 1217183 - RNA, 24 nt, Human
ugugaugugugcgugagcgagcac

SEQ ID NO: 1217184 - RNA, 21 nt, Human
ugugccuguaguccuagcuac

SEQ ID NO: 1217185 - RNA, 24 nt, Human
uguuuuuguuuccaaauggcugga

SEQ ID NO: 1217186 - RNA, 24 nt, Human
uucggugcauggguguggccggca

SEQ ID NO: 1217187 - RNA, 20 nt, Human
uucuccacaccccuccccgc

SEQ ID NO: 1217188 - RNA, 24 nt, Human
uucucgcugcugggggcggggcuu

SEQ ID NO: 1217189 - RNA, 18 nt, Human
uucucuaaggaagaacaa

SEQ ID NO: 1217190 - RNA, 22 nt, Human
uugagcccaggaguucgagacc

SEQ ID NO: 1217191 - RNA, 20 nt, Human
uuggugguggcaugugccug

SEQ ID NO: 1217192 - RNA, 19 nt, Human
uuucuaaggaaaaugguuc

SEQ ID NO: 1217193 - RNA, 21 nt, Human
uuugcccacucucagaccccg

SEQ ID NO: 1217194 - RNA, 19 nt, Human
aaauaaauuuaaacuauaa

SEQ ID NO: 1217195 - RNA, 19 nt, Human
aaauaaauuuaaacuauaa

SEQ ID NO: 1217196 - RNA, 19 nt, Human
aaauaaauuuaaacuauaa

SEQ ID NO: 1217197 - RNA, 19 nt, Human
aaauaaauuuaaacuauaa

SEQ ID NO: 1217198 - RNA, 19 nt, Human
aaauaaauuuaaacuauaa

SEQ ID NO: 1217199 - RNA, 18 nt, Human
aagaugccagagugaaca

SEQ ID NO: 1217200 - RNA, 21 nt, Human
agaaagacccacugucauuug

SEQ ID NO: 1217201 - RNA, 20 nt, Human
cagcuccugcagagucuccu

SEQ ID NO: 1217202 - RNA, 21 nt, Human
cccgcagccucuccagcuccu

SEQ ID NO: 1217203 - RNA, 23 nt, Human
ccucuccagcuccugcagagucu

SEQ ID NO: 1217204 - RNA, 22 nt, Human
cguuuuguuguuuuuuuuuaau

SEQ ID NO: 1217205 - RNA, 19 nt, Human
gccacagccucucauccug

SEQ ID NO: 1217206 - RNA, 22 nt, Human
uaaaagaugccagagugaacau

SEQ ID NO: 1217207 - RNA, 22 nt, Human
uaaauuagaaacacaaauaaac

SEQ ID NO: 1217208 - RNA, 27 nt, Human
uaaauuagaaacacaaauaaauuuaaa

SEQ ID NO: 1217209 - RNA, 27 nt, Human
uaaauuagaaacacaaauaaauuuaaa

SEQ ID NO: 1217210 - RNA, 27 nt, Human
uaaauuagaaacacaaauaaauuuaaa

SEQ ID NO: 1217211 - RNA, 18 nt, Human
uagaaacacaaauaaaca

SEQ ID NO: 1217212 - RNA, 19 nt, Human
ucuccagcucccgcagccu

SEQ ID NO: 1217213 - RNA, 24 nt, Human
ucuccugcugccacagccucucau

SEQ ID NO: 1217214 - RNA, 23 nt, Human
ugcagagucuccugcugccacag

SEQ ID NO: 1217215 - RNA, 22 nt, Human
uuuaaacuauaaauuagaaaca

SEQ ID NO: 1217216 - RNA, 22 nt, Human
uuuaaacuauaaauuagaaaca

SEQ ID NO: 1217217 - RNA, 22 nt, Human
uuuaaacuauaaauuagaaaca

SEQ ID NO: 1217218 - RNA, 22 nt, Human
uuuaaacuauaaauuagaaaca

SEQ ID NO: 1217219 - RNA, 22 nt, Human
uuuaaacuauaaauuagaaaca

SEQ ID NO: 1217220 - RNA, 18 nt, Human
auugccaugucgucaugg

SEQ ID NO: 1217221 - RNA, 21 nt, Human
agaggggcagggcuaaggagg

SEQ ID NO: 1217222 - RNA, 23 nt, Human
caccucuguccugguccugggaa

SEQ ID NO: 1217223 - RNA, 21 nt, Human
ccugguccugggaaccccaac

SEQ ID NO: 1217224 - RNA, 19 nt, Human
cugguccugggaaccccaa

SEQ ID NO: 1217225 - RNA, 22 nt, Human
ggagguggggucagagaggggc

SEQ ID NO: 1217226 - RNA, 24 nt, Human
gggaaacucggugacucgcaaucc

SEQ ID NO: 1217227 - RNA, 18 nt, Human
uaaggagggagcgcgccc

SEQ ID NO: 1217228 - RNA, 27 nt, Human
ucacuaccaccucuguccugguccugg

SEQ ID NO: 1217229 - RNA, 19 nt, Human
uggaucgcaggugcaggca

SEQ ID NO: 1217230 - RNA, 19 nt, Human
ccuccuggcucucugcugu

SEQ ID NO: 1217231 - RNA, 22 nt, Human
ccuccuggcucucugcuguaca

SEQ ID NO: 1217232 - RNA, 22 nt, Human
ugagacgggaagauagucuuca

SEQ ID NO: 1217233 - RNA, 22 nt, Human
ugagacgggaagauagucuuca

SEQ ID NO: 1217234 - RNA, 23 nt, Human
ugagacgggaagauagucuucag

SEQ ID NO: 1217235 - RNA, 21 nt, Human
ugcuguacauccguggaucca

SEQ ID NO: 1217236 - RNA, 19 nt, Human
gaaccucugacacuuagaa

SEQ ID NO: 1217237 - RNA, 20 nt, Human
uccacaugucuccguagagu

SEQ ID NO: 1217238 - RNA, 21 nt, Human
uuagcucuaccuuuuguuucc

SEQ ID NO: 1217239 - RNA, 20 nt, Human
augccaggguucaauguaca

SEQ ID NO: 1217240 - RNA, 22 nt, Human
cgacuucuagccacuguauccu

SEQ ID NO: 1217241 - RNA, 21 nt, Human
cuucuuagcacuguuucccag

SEQ ID NO: 1217242 - RNA, 24 nt, Human
uaguuccaaagacgaagaugccaa

SEQ ID NO: 1217243 - RNA, 19 nt, Human
uuaguuccaaagacgaaga

SEQ ID NO: 1217244 - RNA, 21 nt, Human
uuugccugguuggcuuucagg

SEQ ID NO: 1217245 - RNA, 19 nt, Human
aaacgaugcaaaucgccgu

SEQ ID NO: 1217246 - RNA, 18 nt, Human
aaagugcuaggauuacaa

SEQ ID NO: 1217247 - RNA, 24 nt, Human
aaagugcuaggauuacaaacauga

SEQ ID NO: 1217248 - RNA, 24 nt, Human
aaccucaggugauccgccuaccuc

SEQ ID NO: 1217249 - RNA, 23 nt, Human
aagcagaucccccugcccgaccc

SEQ ID NO: 1217250 - RNA, 19 nt, Human
aagcagccuugugcagagg

SEQ ID NO: 1217251 - RNA, 25 nt, Human
aagugauucuccugccucagccucc

SEQ ID NO: 1217252 - RNA, 26 nt, Human
aagugcuaggauuacaaacaugagcc

SEQ ID NO: 1217253 - RNA, 19 nt, Human
aagugcugggauuacaggc

SEQ ID NO: 1217254 - RNA, 19 nt, Human
aagugcugggauuacaggc

SEQ ID NO: 1217255 - RNA, 22 nt, Human
aagugcugggauuacaggcgug

SEQ ID NO: 1217256 - RNA, 23 nt, Human
aagugcugggauuacaggcguga

SEQ ID NO: 1217257 - RNA, 26 nt, Human
aagugcugggauuacaggcgugagcc

SEQ ID NO: 1217258 - RNA, 18 nt, Human
acaaacaugagccaccau

SEQ ID NO: 1217259 - RNA, 21 nt, Human
acaggcacccaucaccacgcc

SEQ ID NO: 1217260 - RNA, 23 nt, Human
accucagccucccaaagugcuag

SEQ ID NO: 1217261 - RNA, 18 nt, Human
accuggccauuguccccu

SEQ ID NO: 1217262 - RNA, 18 nt, Human
acgggguuucaucauguu

SEQ ID NO: 1217263 - RNA, 23 nt, Human
acgggguuucaucauguuggcca

SEQ ID NO: 1217264 - RNA, 24 nt, Human
acgggguuucaucauguuggccag

SEQ ID NO: 1217265 - RNA, 23 nt, Human
agcagaucccccugcccgacccc

SEQ ID NO: 1217266 - RNA, 20 nt, Human
agccuugugcagaggcccac

SEQ ID NO: 1217267 - RNA, 25 nt, Human
aggcuggagugcaguggcacgaucu

SEQ ID NO: 1217268 - RNA, 22 nt, Human
aggcuucaccuggccauugucc

SEQ ID NO: 1217269 - RNA, 24 nt, Human
aggugauccgccuaccucggccuc

SEQ ID NO: 1217270 - RNA, 22 nt, Human
agguuucaucauguuggccagg

SEQ ID NO: 1217271 - RNA, 23 nt, Human
aguagagauaagguuucaucaug

SEQ ID NO: 1217272 - RNA, 21 nt, Human
agugcaguggcacgaucucag

SEQ ID NO: 1217273 - RNA, 23 nt, Human
agugcaguggcacgaucucagcu

SEQ ID NO: 1217274 - RNA, 18 nt, Human
aguugcuuuggcuugucu

SEQ ID NO: 1217275 - RNA, 23 nt, Human
auaagguuucaucauguuggcca

SEQ ID NO: 1217276 - RNA, 24 nt, Human
auaagguuucaucauguuggccag

SEQ ID NO: 1217277 - RNA, 24 nt, Human
augauccacccaccucagccuccc

SEQ ID NO: 1217278 - RNA, 24 nt, Human
caaagugcuaggauuacaaacaug

SEQ ID NO: 1217279 - RNA, 24 nt, Human
caagcagccuugugcagaggccca

SEQ ID NO: 1217280 - RNA, 22 nt, Human
caagugauucuccugccucagc

SEQ ID NO: 1217281 - RNA, 24 nt, Human
caccacgccuggcuaauuuuugua

SEQ ID NO: 1217282 - RNA, 22 nt, Human
caccaugcuuggcugugcuuuc

SEQ ID NO: 1217283 - RNA, 23 nt, Human
caccaugcuuggcugugcuuucu

SEQ ID NO: 1217284 - RNA, 22 nt, Human
cacccaccucagccucccaaag

SEQ ID NO: 1217285 - RNA, 23 nt, Human
cacccaccucagccucccaaagu

SEQ ID NO: 1217286 - RNA, 20 nt, Human
caccgugucacccuggagau

SEQ ID NO: 1217287 - RNA, 23 nt, Human
cacugcaaccugcaccuucuggg

SEQ ID NO: 1217288 - RNA, 19 nt, Human
cagacaaauggcaucaaag

SEQ ID NO: 1217289 - RNA, 18 nt, Human
cagccugaugcccacagu

SEQ ID NO: 1217290 - RNA, 23 nt, Human
caggaagaaccccagaaaugaca

SEQ ID NO: 1217291 - RNA, 21 nt, Human
caggcacccaucaccacgccu

SEQ ID NO: 1217292 - RNA, 24 nt, Human
caggcgugagccaccgugcccggc

SEQ ID NO: 1217293 - RNA, 20 nt, Human
cagggcacgccacgaagucc

SEQ ID NO: 1217294 - RNA, 25 nt, Human
cauacagaaucagcuacaucgacaa

SEQ ID NO: 1217295 - RNA, 24 nt, Human
caucauguuggccaggcuggucuc

SEQ ID NO: 1217296 - RNA, 27 nt, Human
caucauguuggccaggcuggucucaaa

SEQ ID NO: 1217297 - RNA, 27 nt, Human
caucauguuggccaggcuggucucgaa

SEQ ID NO: 1217298 - RNA, 18 nt, Human
cauguuggccaggcuggu

SEQ ID NO: 1217299 - RNA, 18 nt, Human
cauguuggccaggcuggu

SEQ ID NO: 1217300 - RNA, 21 nt, Human
cauguuggccaggcuggucuc

SEQ ID NO: 1217301 - RNA, 21 nt, Human
cauguuggccaggcuggucuc

SEQ ID NO: 1217302 - RNA, 24 nt, Human
cauguuggccaggcuggucucaaa

SEQ ID NO: 1217303 - RNA, 22 nt, Human
cauguuggccaggcuggucucg

SEQ ID NO: 1217304 - RNA, 24 nt, Human
cauguuggccaggcuggucucgaa

SEQ ID NO: 1217305 - RNA, 19 nt, Human
ccaaagugcuaggauuaca

SEQ ID NO: 1217306 - RNA, 24 nt, Human
ccaaagugcuaggauuacaaacau

SEQ ID NO: 1217307 - RNA, 22 nt, Human
ccaagcagccuugugcagaggc

SEQ ID NO: 1217308 - RNA, 21 nt, Human
ccacaagcucugggaggcgga

SEQ ID NO: 1217309 - RNA, 26 nt, Human
ccacccaccucagccucccaaagugc

SEQ ID NO: 1217310 - RNA, 23 nt, Human
ccacguagcugggauuacaggca

SEQ ID NO: 1217311 - RNA, 25 nt, Human
cccacaguugcuuuggcuugucugc

SEQ ID NO: 1217312 - RNA, 19 nt, Human
cccacguagcugggauuac

SEQ ID NO: 1217313 - RNA, 21 nt, Human
cccaggccagccugcagguga

SEQ ID NO: 1217314 - RNA, 18 nt, Human
ccccacagccugaugccc

SEQ ID NO: 1217315 - RNA, 24 nt, Human
cccgaagugcugggauuacaggcg

SEQ ID NO: 1217316 - RNA, 26 nt, Human
cccgaccccaggccagccugcaggug

SEQ ID NO: 1217317 - RNA, 24 nt, Human
cccgagacucuuaauuucuuucuu

SEQ ID NO: 1217318 - RNA, 28 nt, Human
cccugcccgaccccaggccagccugcag

SEQ ID NO: 1217319 - RNA, 24 nt, Human
ccgaagugcugggauuacaggcgu

SEQ ID NO: 1217320 - RNA, 21 nt, Human
ccgccccacagccugaugccc

SEQ ID NO: 1217321 - RNA, 24 nt, Human
ccuaaccucaggugauccgccuac

SEQ ID NO: 1217322 - RNA, 26 nt, Human
ccucuggggccuucgccaacuacucc

SEQ ID NO: 1217323 - RNA, 24 nt, Human
ccugaccucagaugauccacccac

SEQ ID NO: 1217324 - RNA, 19 nt, Human
ccugcaggugacuccagcc

SEQ ID NO: 1217325 - RNA, 20 nt, Human
ccugcaggugacuccagccc

SEQ ID NO: 1217326 - RNA, 27 nt, Human
ccugcaggugacuccagccccagcuga

SEQ ID NO: 1217327 - RNA, 22 nt, Human
ccuuccacaaauacuuccgugc

SEQ ID NO: 1217328 - RNA, 24 nt, Human
ccuucuggguucaagugauucucc

SEQ ID NO: 1217329 - RNA, 22 nt, Human
cgacaagcacacacucucguga

SEQ ID NO: 1217330 - RNA, 24 nt, Human
cgcucuugucgcccaggcuggagu

SEQ ID NO: 1217331 - RNA, 24 nt, Human
cgggguuucaucauguuggccagg

SEQ ID NO: 1217332 - RNA, 25 nt, Human
cguagcugggauuacaggcacccau

SEQ ID NO: 1217333 - RNA, 19 nt, Human
cucacugcaaccugcaccu

SEQ ID NO: 1217334 - RNA, 24 nt, Human
cucagccucccacguagcugggau

SEQ ID NO: 1217335 - RNA, 25 nt, Human
cuccugccucagccucccacguagc

SEQ ID NO: 1217336 - RNA, 19 nt, Human
cucuugucgcccaggcugg

SEQ ID NO: 1217337 - RNA, 21 nt, Human
cucuugucgcccaggcuggag

SEQ ID NO: 1217338 - RNA, 23 nt, Human
cugccucagccucccacguagcu

SEQ ID NO: 1217339 - RNA, 21 nt, Human
cuggggcagggcccgagacuc

SEQ ID NO: 1217340 - RNA, 24 nt, Human
cuggggccuucgccaacuacucug

SEQ ID NO: 1217341 - RNA, 22 nt, Human
cuggguucaagugauucuccug

SEQ ID NO: 1217342 - RNA, 24 nt, Human
cuugucgcccaggcuggagugcag

SEQ ID NO: 1217343 - RNA, 24 nt, Human
gaagugcugggauuacaggcguga

SEQ ID NO: 1217344 - RNA, 18 nt, Human
gacauuggguuccccuug

SEQ ID NO: 1217345 - RNA, 24 nt, Human
gaccucagaugauccacccaccuc

SEQ ID NO: 1217346 - RNA, 20 nt, Human
gagauacuuugaaacgaugc

SEQ ID NO: 1217347 - RNA, 18 nt, Human
gauuacaaacaugagcca

SEQ ID NO: 1217348 - RNA, 18 nt, Human
gauuacaggcgugagcca

SEQ ID NO: 1217349 - RNA, 20 nt, Human
gauuacaggcgugagccacc

SEQ ID NO: 1217350 - RNA, 21 nt, Human
gauuacaggcgugagccaccg

SEQ ID NO: 1217351 - RNA, 21 nt, Human
gauucuccugccucagccucc

SEQ ID NO: 1217352 - RNA, 19 nt, Human
gcccaggcuggagugcagu

SEQ ID NO: 1217353 - RNA, 23 nt, Human
gcccaggcuggagugcaguggca

SEQ ID NO: 1217354 - RNA, 20 nt, Human
gccucagccucccacguagc

SEQ ID NO: 1217355 - RNA, 19 nt, Human
gcuggagugcaguggcacg

SEQ ID NO: 1217356 - RNA, 23 nt, Human
gcuggucucaaacuccugaccuc

SEQ ID NO: 1217357 - RNA, 23 nt, Human
gcuggucucgaacuccuaaccuc

SEQ ID NO: 1217358 - RNA, 22 nt, Human
ggauuacaaacaugagccacca

SEQ ID NO: 1217359 - RNA, 18 nt, Human
ggcagggcccgagacucu

SEQ ID NO: 1217360 - RNA, 24 nt, Human
ggcuggucucaaacuccugaccuc

SEQ ID NO: 1217361 - RNA, 23 nt, Human
gggguuucaucauguuggccagg

SEQ ID NO: 1217362 - RNA, 20 nt, Human
ggguucaagugauucuccug

SEQ ID NO: 1217363 - RNA, 24 nt, Human
gugauucuccugccucagccuccc

SEQ ID NO: 1217364 - RNA, 18 nt, Human
uaaccucaggugauccgc

SEQ ID NO: 1217365 - RNA, 23 nt, Human
uaagguuucaucauguuggccag

SEQ ID NO: 1217366 - RNA, 24 nt, Human
uaagguuucaucauguuggccagg

SEQ ID NO: 1217367 - RNA, 22 nt, Human
uaauuuuuguauuuuuaguaga

SEQ ID NO: 1217368 - RNA, 24 nt, Human
uacaaacaugagccaccaugcuug

SEQ ID NO: 1217369 - RNA, 23 nt, Human
uacagaaucagcuacaucgacaa

SEQ ID NO: 1217370 - RNA, 23 nt, Human
uacaggcgugagccaccgugccc

SEQ ID NO: 1217371 - RNA, 24 nt, Human
uaccucggccucccgaagugcugg

SEQ ID NO: 1217372 - RNA, 22 nt, Human
uaggauuacaaacaugagccac

SEQ ID NO: 1217373 - RNA, 24 nt, Human
uaggauuacaaacaugagccacca

SEQ ID NO: 1217374 - RNA, 24 nt, Human
uaguagaaacgggguuucaucaug

SEQ ID NO: 1217375 - RNA, 19 nt, Human
ucaagugauucuccugccu

SEQ ID NO: 1217376 - RNA, 24 nt, Human
ucacugcaaccugcaccuucuggg

SEQ ID NO: 1217377 - RNA, 23 nt, Human
ucagacaaauggcaucaaagcca

SEQ ID NO: 1217378 - RNA, 20 nt, Human
ucagaugauccacccaccuc

SEQ ID NO: 1217379 - RNA, 18 nt, Human
ucagccucccaaagugcu

SEQ ID NO: 1217380 - RNA, 22 nt, Human
ucagcucacugcaaccugcacc

SEQ ID NO: 1217381 - RNA, 21 nt, Human
uccacccaccucagccuccca

SEQ ID NO: 1217382 - RNA, 18 nt, Human
ucccaaagugcuaggauu

SEQ ID NO: 1217383 - RNA, 24 nt, Human
ucccacguagcugggauuacaggc

SEQ ID NO: 1217384 - RNA, 21 nt, Human
ucccccugcccgaccccaggc

SEQ ID NO: 1217385 - RNA, 19 nt, Human
ucccgaagugcugggauua

SEQ ID NO: 1217386 - RNA, 24 nt, Human
ucccgaagugcugggauuacaggc

SEQ ID NO: 1217387 - RNA, 22 nt, Human
ucgcccaggcuggagugcagug

SEQ ID NO: 1217388 - RNA, 22 nt, Human
ucgcucuugucgcccaggcugg

SEQ ID NO: 1217389 - RNA, 23 nt, Human
ucgcucuugucgcccaggcugga

SEQ ID NO: 1217390 - RNA, 18 nt, Human
ucggccucccgaagugcu

SEQ ID NO: 1217391 - RNA, 18 nt, Human
ucugccaggcuucaccug

SEQ ID NO: 1217392 - RNA, 22 nt, Human
ucuuucuuucuuucuuucuuuu

SEQ ID NO: 1217393 - RNA, 18 nt, Human
ucuuuuuuuuuuuuuuuu

SEQ ID NO: 1217394 - RNA, 22 nt, Human
ugaagcagagccuuggaagcag

SEQ ID NO: 1217395 - RNA, 24 nt, Human
ugauccacccaccucagccuccca

SEQ ID NO: 1217396 - RNA, 20 nt, Human
ugauucuccugccucagccu

SEQ ID NO: 1217397 - RNA, 24 nt, Human
ugcaccuucuggguucaagugauu

SEQ ID NO: 1217398 - RNA, 22 nt, Human
ugcaguggcacgaucucagcuc

SEQ ID NO: 1217399 - RNA, 18 nt, Human
ugcccgaccccaggccag

SEQ ID NO: 1217400 - RNA, 24 nt, Human
ugccucagccucccacguagcugg

SEQ ID NO: 1217401 - RNA, 26 nt, Human
ugcuaggauuacaaacaugagccacc

SEQ ID NO: 1217402 - RNA, 28 nt, Human
ugcugcugguguacagaccccacuuuuu

SEQ ID NO: 1217403 - RNA, 24 nt, Human
ugcugggauuacaggcgugagcca

SEQ ID NO: 1217404 - RNA, 23 nt, Human
uggagugcaguggcacgaucuca

SEQ ID NO: 1217405 - RNA, 24 nt, Human
uggagugcaguggcacgaucucag

SEQ ID NO: 1217406 - RNA, 24 nt, Human
uggcacgaucucagcucacugcaa

SEQ ID NO: 1217407 - RNA, 24 nt, Human
uggccaggcuggucucaaacuccu

SEQ ID NO: 1217408 - RNA, 24 nt, Human
uggccaggcuggucucgaacuccu

SEQ ID NO: 1217409 - RNA, 18 nt, Human
ugggauuacaggcaccca

SEQ ID NO: 1217410 - RNA, 21 nt, Human
ugggauuacaggcacccauca

SEQ ID NO: 1217411 - RNA, 24 nt, Human
ugggauuacaggcacccaucacca

SEQ ID NO: 1217412 - RNA, 18 nt, Human
ugggauuacaggcgugag

SEQ ID NO: 1217413 - RNA, 21 nt, Human
ugggauuacaggcgugagcca

SEQ ID NO: 1217414 - RNA, 22 nt, Human
ugggauuacaggcgugagccac

SEQ ID NO: 1217415 - RNA, 23 nt, Human
ugggauuacaggcgugagccacc

SEQ ID NO: 1217416 - RNA, 23 nt, Human
ugggauuacaggcgugagccacc

SEQ ID NO: 1217417 - RNA, 24 nt, Human
ugggauuacaggcgugagccaccg

SEQ ID NO: 1217418 - RNA, 19 nt, Human
uggggcagggcccgagacu

SEQ ID NO: 1217419 - RNA, 23 nt, Human
uggguucaagugauucuccugcc

SEQ ID NO: 1217420 - RNA, 24 nt, Human
uggguucaagugauucuccugccu

SEQ ID NO: 1217421 - RNA, 21 nt, Human
uguaagugacaucugccaggc

SEQ ID NO: 1217422 - RNA, 21 nt, Human
uguauuuuuaguagaaacggg

SEQ ID NO: 1217423 - RNA, 19 nt, Human
uguuaacaugcagguccug

SEQ ID NO: 1217424 - RNA, 24 nt, Human
uuaguagaaacgggguuucaucau

SEQ ID NO: 1217425 - RNA, 21 nt, Human
uucaagugauucuccugccuc

SEQ ID NO: 1217426 - RNA, 23 nt, Human
uucaagugauucuccugccucag

SEQ ID NO: 1217427 - RNA, 24 nt, Human
uucaagugauucuccugccucagc

SEQ ID NO: 1217428 - RNA, 24 nt, Human
uucgcucuugucgcccaggcugga

SEQ ID NO: 1217429 - RNA, 22 nt, Human
uucuaggucuggggcagggccc

SEQ ID NO: 1217430 - RNA, 24 nt, Human
uucuggguucaagugauucuccug

SEQ ID NO: 1217431 - RNA, 19 nt, Human
uugaaauuaguaaguaucu

SEQ ID NO: 1217432 - RNA, 20 nt, Human
uuggauuaagcauucucagc

SEQ ID NO: 1217433 - RNA, 23 nt, Human
uuguauuuuuaguagaaacgggg

SEQ ID NO: 1217434 - RNA, 30 nt, Human
uuuacuguggacagggaucacagauguggg

SEQ ID NO: 1217435 - RNA, 24 nt, Human
uuucaucauguuggccaggcuggu

SEQ ID NO: 1217436 - RNA, 24 nt, Human
uuucaucauguuggccaggcuggu

SEQ ID NO: 1217437 - RNA, 24 nt, Human
uuucgcucuugucgcccaggcugg

SEQ ID NO: 1217438 - RNA, 21 nt, Human
uuuggauuaagcauucucagc

SEQ ID NO: 1217439 - RNA, 23 nt, Human
uuuggggcaggaagaaccccaga

SEQ ID NO: 1217440 - RNA, 23 nt, Human
uuuuuaguagaaacgggguuuca

SEQ ID NO: 1217441 - RNA, 18 nt, Human
uuuuuguauuuuuaguag

SEQ ID NO: 1217442 - RNA, 20 nt, Human
uuuuuuuuuuugagacagag

SEQ ID NO: 1217443 - RNA, 18 nt, Human
uuuuuuuuuuuuuuuuug

SEQ ID NO: 1217444 - RNA, 24 nt, Human
aaaaugcugggauuacaggcguga

SEQ ID NO: 1217445 - RNA, 21 nt, Human
aaacaaagugacaauagggac

SEQ ID NO: 1217446 - RNA, 24 nt, Human
aaagugcugggauuacaggcguga

SEQ ID NO: 1217447 - RNA, 24 nt, Human
aaccaaguucccaaacuuagggug

SEQ ID NO: 1217448 - RNA, 20 nt, Human
aaccucugccucccugguuc

SEQ ID NO: 1217449 - RNA, 18 nt, Human
aagcucacagcaccuuua

SEQ ID NO: 1217450 - RNA, 22 nt, Human
aaggcacagacacugacggaca

SEQ ID NO: 1217451 - RNA, 24 nt, Human
aaguagcuaggaccacaggcaugu

SEQ ID NO: 1217452 - RNA, 27 nt, Human
aaguagcuaggaccacaggcauguguu

SEQ ID NO: 1217453 - RNA, 22 nt, Human
aagucagucuacacugcugaau

SEQ ID NO: 1217454 - RNA, 19 nt, Human
aagugcugggauuacaggc

SEQ ID NO: 1217455 - RNA, 19 nt, Human
aagugcugggauuacaggc

SEQ ID NO: 1217456 - RNA, 24 nt, Human
aauuuuguauuuuuaguagagaug

SEQ ID NO: 1217457 - RNA, 19 nt, Human
acaaaguccuaaccuuugc

SEQ ID NO: 1217458 - RNA, 20 nt, Human
acauugcaaaacaaagugac

SEQ ID NO: 1217459 - RNA, 23 nt, Human
acccaugagucaggacauggcuu

SEQ ID NO: 1217460 - RNA, 22 nt, Human
accccuuccuccuagcacuuuc

SEQ ID NO: 1217461 - RNA, 19 nt, Human
accucaaagucuccugccu

SEQ ID NO: 1217462 - RNA, 23 nt, Human
accucagccucccaaguagcuag

SEQ ID NO: 1217463 - RNA, 19 nt, Human
acuaaguccuugucugcau

SEQ ID NO: 1217464 - RNA, 24 nt, Human
acuaccucagccuccugaguagcu

SEQ ID NO: 1217465 - RNA, 20 nt, Human
acucaugccaccaccagacc

SEQ ID NO: 1217466 - RNA, 23 nt, Human
acucccaugccauuggaagcugu

SEQ ID NO: 1217467 - RNA, 24 nt, Human
acucuuguugcccaggcuagagug

SEQ ID NO: 1217468 - RNA, 23 nt, Human
acuggccccagcccugcacacgc

SEQ ID NO: 1217469 - RNA, 20 nt, Human
acuggcuaaggaaaaucagu

SEQ ID NO: 1217470 - RNA, 25 nt, Human
agaacaaacuauucauuugugcaaa

SEQ ID NO: 1217471 - RNA, 20 nt, Human
agacaagcucacagcaccuu

SEQ ID NO: 1217472 - RNA, 19 nt, Human
agagauccugagggugacc

SEQ ID NO: 1217473 - RNA, 22 nt, Human
agaggucuagaacccaggccag

SEQ ID NO: 1217474 - RNA, 19 nt, Human
agauuacaggcaugugcca

SEQ ID NO: 1217475 - RNA, 20 nt, Human
agccaccgcacccggcccca

SEQ ID NO: 1217476 - RNA, 20 nt, Human
aggaacccccuccucaauag

SEQ ID NO: 1217477 - RNA, 24 nt, Human
aggcaaacuauacaauaagagguu

SEQ ID NO: 1217478 - RNA, 23 nt, Human
aggcagaaccgugcaccaagaga

SEQ ID NO: 1217479 - RNA, 19 nt, Human
aggcuggagugcaguggca

SEQ ID NO: 1217480 - RNA, 23 nt, Human
agggucuugcuguguugcccagg

SEQ ID NO: 1217481 - RNA, 23 nt, Human
aggucaaagcuuacagcaaaaga

SEQ ID NO: 1217482 - RNA, 24 nt, Human
aggugauccgccuaccucggccuc

SEQ ID NO: 1217483 - RNA, 23 nt, Human
aguagcugagauuacaggcaugu

SEQ ID NO: 1217484 - RNA, 24 nt, Human
agugcaauggcacgaucucggcuc

SEQ ID NO: 1217485 - RNA, 21 nt, Human
agugcaguggcacaaucacag

SEQ ID NO: 1217486 - RNA, 23 nt, Human
agugcaguggcacaaucacagcu

SEQ ID NO: 1217487 - RNA, 23 nt, Human
auggaccauauacguauuuauca

SEQ ID NO: 1217488 - RNA, 21 nt, Human
augggguuucuccauguuggu

SEQ ID NO: 1217489 - RNA, 24 nt, Human
augggguuucuccauguuggucag

SEQ ID NO: 1217490 - RNA, 19 nt, Human
auggguuuucgccauguug

SEQ ID NO: 1217491 - RNA, 24 nt, Human
auggguuuucgccauguugcccag

SEQ ID NO: 1217492 - RNA, 24 nt, Human
caaaaugcugggauuacaggcgug

SEQ ID NO: 1217493 - RNA, 19 nt, Human
caaaguauaagacugaguu

SEQ ID NO: 1217494 - RNA, 24 nt, Human
caaagugcugggauuacaggcgug

SEQ ID NO: 1217495 - RNA, 18 nt, Human
caacgcggacaaauuuuu

SEQ ID NO: 1217496 - RNA, 23 nt, Human
cacagagagagcugcauccccca

SEQ ID NO: 1217497 - RNA, 18 nt, Human
cacagcaccuuuaagugg

SEQ ID NO: 1217498 - RNA, 22 nt, Human
cacaggcauguguuaccaugcc

SEQ ID NO: 1217499 - RNA, 22 nt, Human
caccacaaccucugccucccug

SEQ ID NO: 1217500 - RNA, 19 nt, Human
caccgcacccggccccaga

SEQ ID NO: 1217501 - RNA, 23 nt, Human
cacugacagcugugacucaggca

SEQ ID NO: 1217502 - RNA, 27 nt, Human
cacuggccccagcccugcaccgguucc

SEQ ID NO: 1217503 - RNA, 18 nt, Human
cagaugccucugucccuc

SEQ ID NO: 1217504 - RNA, 23 nt, Human
cagauggcagcucugcugacccc

SEQ ID NO: 1217505 - RNA, 29 nt, Human
cagcaaaagacaaaaggaagagggacccc

SEQ ID NO: 1217506 - RNA, 20 nt, Human
cagcaccgaggccuagacag

SEQ ID NO: 1217507 - RNA, 24 nt, Human
cagccucaaccuuccaggccuaaa

SEQ ID NO: 1217508 - RNA, 20 nt, Human
cagccuccugaguagcugag

SEQ ID NO: 1217509 - RNA, 24 nt, Human
cagcggccugggcagaagcagcaa

SEQ ID NO: 1217510 - RNA, 19 nt, Human
caucacgcuccugccccuc

SEQ ID NO: 1217511 - RNA, 23 nt, Human
cauguugcccaggcuggucuuga

SEQ ID NO: 1217512 - RNA, 24 nt, Human
cauguugcccaggcuggucuugaa

SEQ ID NO: 1217513 - RNA, 23 nt, Human
cauuucaggaucaccggagcuug

SEQ ID NO: 1217514 - RNA, 20 nt, Human
ccaaaaugcugggauuacag

SEQ ID NO: 1217515 - RNA, 22 nt, Human
ccaaaaugcugggauuacaggc

SEQ ID NO: 1217516 - RNA, 22 nt, Human
ccaaaaugcugggauuacaggc

SEQ ID NO: 1217517 - RNA, 24 nt, Human
ccaaaaugcugggauuacaggcgu

SEQ ID NO: 1217518 - RNA, 22 nt, Human
ccaaagugcugggauuacaggc

SEQ ID NO: 1217519 - RNA, 22 nt, Human
ccaaagugcugggauuacaggc

SEQ ID NO: 1217520 - RNA, 24 nt, Human
ccaaagugcugggauuacaggcgu

SEQ ID NO: 1217521 - RNA, 24 nt, Human
ccacaaccucugccucccugguuc

SEQ ID NO: 1217522 - RNA, 22 nt, Human
ccacagagagagcugcaucccc

SEQ ID NO: 1217523 - RNA, 19 nt, Human
ccaccgcacccggccccag

SEQ ID NO: 1217524 - RNA, 23 nt, Human
ccagcaaugcuaaugccagcgga

SEQ ID NO: 1217525 - RNA, 18 nt, Human
ccaggaaggcucaggcgg

SEQ ID NO: 1217526 - RNA, 22 nt, Human
ccaggccagcaccgaggccuag

SEQ ID NO: 1217527 - RNA, 24 nt, Human
ccaggcuggucuugaacuccuggg

SEQ ID NO: 1217528 - RNA, 21 nt, Human
ccauguugcccaggcuggucu

SEQ ID NO: 1217529 - RNA, 19 nt, Human
ccauguuggucaggcuggu

SEQ ID NO: 1217530 - RNA, 22 nt, Human
ccauguuggucaggcuggucuc

SEQ ID NO: 1217531 - RNA, 21 nt, Human
cccaccuacacgaucuucagc

SEQ ID NO: 1217532 - RNA, 23 nt, Human
ccgaccucaggugauccgccuac

SEQ ID NO: 1217533 - RNA, 20 nt, Human
ccucaagcucccaaaaugcu

SEQ ID NO: 1217534 - RNA, 26 nt, Human
ccucacaccucagccucccaaguagc

SEQ ID NO: 1217535 - RNA, 19 nt, Human
ccugaguagcugagauuac

SEQ ID NO: 1217536 - RNA, 23 nt, Human
ccugaguagcugagauuacaggc

SEQ ID NO: 1217537 - RNA, 24 nt, Human
ccugaguagcugagauuacaggca

SEQ ID NO: 1217538 - RNA, 23 nt, Human
ccugggcucaagcaaucggccug

SEQ ID NO: 1217539 - RNA, 18 nt, Human
cgaccucaggugauccgc

SEQ ID NO: 1217540 - RNA, 24 nt, Human
cgccauguugcccaggcuggucuu

SEQ ID NO: 1217541 - RNA, 27 nt, Human
cgccauguugcccaggcuggucuugaa

SEQ ID NO: 1217542 - RNA, 19 nt, Human
cgggaggaacccccuccuc

SEQ ID NO: 1217543 - RNA, 23 nt, Human
cuaaaaagguuugaguguccaga

SEQ ID NO: 1217544 - RNA, 21 nt, Human
cuaaaugauccucacaccuca

SEQ ID NO: 1217545 - RNA, 19 nt, Human
cuaaugccagcggaauucc

SEQ ID NO: 1217546 - RNA, 19 nt, Human
cuaaugccagcggaauucc

SEQ ID NO: 1217547 - RNA, 19 nt, Human
cuaaugccagcggaauucc

SEQ ID NO: 1217548 - RNA, 19 nt, Human
cuaaugccagcggaauucc

SEQ ID NO: 1217549 - RNA, 19 nt, Human
cuaaugccagcggaauucc

SEQ ID NO: 1217550 - RNA, 19 nt, Human
cuaaugccagcggaauucc

SEQ ID NO: 1217551 - RNA, 19 nt, Human
cuaaugccagcggaauucc

SEQ ID NO: 1217552 - RNA, 19 nt, Human
cuaaugccagcggaauucc

SEQ ID NO: 1217553 - RNA, 19 nt, Human
cuaaugccagcggaauucc

SEQ ID NO: 1217554 - RNA, 24 nt, Human
cuaauuuuguauuuuuaguagaga

SEQ ID NO: 1217555 - RNA, 21 nt, Human
cuaccaggcugugacccgugc

SEQ ID NO: 1217556 - RNA, 18 nt, Human
cuagaacccaggccagca

SEQ ID NO: 1217557 - RNA, 19 nt, Human
cuagaacccaggccagcac

SEQ ID NO: 1217558 - RNA, 21 nt, Human
cuagaacccaggccagcaccg

SEQ ID NO: 1217559 - RNA, 27 nt, Human
cuagaacccaggccagucacucaccac

SEQ ID NO: 1217560 - RNA, 24 nt, Human
cucaaagucuccugccuccauuuc

SEQ ID NO: 1217561 - RNA, 25 nt, Human
cucacaccucagccucccaaguagc

SEQ ID NO: 1217562 - RNA, 19 nt, Human
cucaugccaccaccagacc

SEQ ID NO: 1217563 - RNA, 24 nt, Human
cucauggccaaccggugacucacc

SEQ ID NO: 1217564 - RNA, 19 nt, Human
cuccacacacugucugagc

SEQ ID NO: 1217565 - RNA, 24 nt, Human
cuccauguuggucaggcuggucuc

SEQ ID NO: 1217566 - RNA, 24 nt, Human
cucccaaguagcuaggaccacagg

SEQ ID NO: 1217567 - RNA, 18 nt, Human
cugaguagcugagauuac

SEQ ID NO: 1217568 - RNA, 23 nt, Human
cugaguagcugagauuacaggca

SEQ ID NO: 1217569 - RNA, 24 nt, Human
cugaguagcugagauuacaggcau

SEQ ID NO: 1217570 - RNA, 24 nt, Human
cugccucaagcucccaaaaugcug

SEQ ID NO: 1217571 - RNA, 19 nt, Human
cuggucuugaacuccuggg

SEQ ID NO: 1217572 - RNA, 20 nt, Human
cuguguugcccaggcuggag

SEQ ID NO: 1217573 - RNA, 21 nt, Human
cuugcuguguugcccaggcug

SEQ ID NO: 1217574 - RNA, 22 nt, Human
cuugcuguguugcccaggcugg

SEQ ID NO: 1217575 - RNA, 20 nt, Human
gacacugacggacauuuaau

SEQ ID NO: 1217576 - RNA, 25 nt, Human
gaccccacaacccaccuacacgauc

SEQ ID NO: 1217577 - RNA, 24 nt, Human
gaccucaggugauccgccuaccuc

SEQ ID NO: 1217578 - RNA, 20 nt, Human
gacgugggcagauggcagcu

SEQ ID NO: 1217579 - RNA, 19 nt, Human
gagaccucuaguccuuaga

SEQ ID NO: 1217580 - RNA, 24 nt, Human
gagaugggguuucuccauguuggu

SEQ ID NO: 1217581 - RNA, 21 nt, Human
gagggaagaggggcugcaggc

SEQ ID NO: 1217582 - RNA, 22 nt, Human
gaguagcugagauuacaggcau

SEQ ID NO: 1217583 - RNA, 25 nt, Human
gaguagcugagauuacaggcaugug

SEQ ID NO: 1217584 - RNA, 20 nt, Human
gauggcagcucugcugaccc

SEQ ID NO: 1217585 - RNA, 18 nt, Human
gauuacaggcaugugcca

SEQ ID NO: 1217586 - RNA, 24 nt, Human
gauuacaggcaugugccaccaugc

SEQ ID NO: 1217587 - RNA, 18 nt, Human
gauuacaggcgugagcca

SEQ ID NO: 1217588 - RNA, 18 nt, Human
gauuacaggcgugagcca

SEQ ID NO: 1217589 - RNA, 18 nt, Human
gauuacaggcgugagcca

SEQ ID NO: 1217590 - RNA, 22 nt, Human
gauuacaggcgugagccaccgc

SEQ ID NO: 1217591 - RNA, 23 nt, Human
gauuacaggcgugagccaccgca

SEQ ID NO: 1217592 - RNA, 22 nt, Human
gauuacaggcgugagccaucac

SEQ ID NO: 1217593 - RNA, 20 nt, Human
gcaaggccugcaaaaaugcg

SEQ ID NO: 1217594 - RNA, 28 nt, Human
gcagauggcagcucugcugaccccacaa

SEQ ID NO: 1217595 - RNA, 18 nt, Human
gcagccucaaccuuccag

SEQ ID NO: 1217596 - RNA, 19 nt, Human
gcccaggcuggagugcagu

SEQ ID NO: 1217597 - RNA, 22 nt, Human
gccugguuaauuuucguauuuu

SEQ ID NO: 1217598 - RNA, 21 nt, Human
gcuaaggaaaaucagucauga

SEQ ID NO: 1217599 - RNA, 19 nt, Human
gcuagagugcaauggcacg

SEQ ID NO: 1217600 - RNA, 19 nt, Human
gcuggagugcaguggcaca

SEQ ID NO: 1217601 - RNA, 22 nt, Human
ggaaaaaaagaaaacuuaaaaa

SEQ ID NO: 1217602 - RNA, 26 nt, Human
ggaaaaaaagaaaacuuaaaaaacau

SEQ ID NO: 1217603 - RNA, 22 nt, Human
ggaccacaggcauguguuacca

SEQ ID NO: 1217604 - RNA, 23 nt, Human
ggauuacaggcgugagccaucac

SEQ ID NO: 1217605 - RNA, 18 nt, Human
ggcuggucuugaacuccu

SEQ ID NO: 1217606 - RNA, 20 nt, Human
gggaagaggggcugcaggcg

SEQ ID NO: 1217607 - RNA, 18 nt, Human
gggguuucuccauguugg

SEQ ID NO: 1217608 - RNA, 22 nt, Human
gggguuucuccauguuggucag

SEQ ID NO: 1217609 - RNA, 19 nt, Human
ggguuuucgccauguugcc

SEQ ID NO: 1217610 - RNA, 22 nt, Human
ggguuuucgccauguugcccag

SEQ ID NO: 1217611 - RNA, 23 nt, Human
ggguuuucgccauguugcccagg

SEQ ID NO: 1217612 - RNA, 19 nt, Human
ggucucgaacuuccgaccu

SEQ ID NO: 1217613 - RNA, 21 nt, Human
guagagauggguuuucgccau

SEQ ID NO: 1217614 - RNA, 20 nt, Human
guagcugagauuacaggcau

SEQ ID NO: 1217615 - RNA, 18 nt, Human
gucccucacccgucagaa

SEQ ID NO: 1217616 - RNA, 24 nt, Human
gucuugcuguguugcccaggcugg

SEQ ID NO: 1217617 - RNA, 24 nt, Human
gugagccaucacacccagccuuuu

SEQ ID NO: 1217618 - RNA, 19 nt, Human
gugggagggaagaggggcu

SEQ ID NO: 1217619 - RNA, 22 nt, Human
uaaaaaagaacaaaguauaaga

SEQ ID NO: 1217620 - RNA, 27 nt, Human
uaaaugauccucacaccucagccuccc

SEQ ID NO: 1217621 - RNA, 27 nt, Human
uaauuuucguauuuuuuuuuguagaga

SEQ ID NO: 1217622 - RNA, 19 nt, Human
uacaaauaccuucugagga

SEQ ID NO: 1217623 - RNA, 24 nt, Human
uacaggcaugugccaccaugccca

SEQ ID NO: 1217624 - RNA, 23 nt, Human
uacaggcgugagccaccgcaccc

SEQ ID NO: 1217625 - RNA, 24 nt, Human
uacaggcgugagccaucacaccca

SEQ ID NO: 1217626 - RNA, 21 nt, Human
uaccucagccuccugaguagc

SEQ ID NO: 1217627 - RNA, 24 nt, Human
uaccucagccuccugaguagcuga

SEQ ID NO: 1217628 - RNA, 24 nt, Human
uaccucggccucccaaagugcugg

SEQ ID NO: 1217629 - RNA, 24 nt, Human
uagaacaagcucaggguggaaagc

SEQ ID NO: 1217630 - RNA, 19 nt, Human
uagaacccaggccagucac

SEQ ID NO: 1217631 - RNA, 19 nt, Human
uagacagcugugacucagg

SEQ ID NO: 1217632 - RNA, 22 nt, Human
uagagauggguuuucgccaugu

SEQ ID NO: 1217633 - RNA, 23 nt, Human
uagagugcaauggcacgaucucg

SEQ ID NO: 1217634 - RNA, 24 nt, Human
uagagugcaauggcacgaucucgg

SEQ ID NO: 1217635 - RNA, 24 nt, Human
uaggaccacaggcauguguuacca

SEQ ID NO: 1217636 - RNA, 24 nt, Human
uagggucuugcuguguugcccagg

SEQ ID NO: 1217637 - RNA, 24 nt, Human
uaguagagaugggguuucuccaug

SEQ ID NO: 1217638 - RNA, 18 nt, Human
uauggugggagaaaauaa

SEQ ID NO: 1217639 - RNA, 19 nt, Human
ucaagcucccaaaaugcug

SEQ ID NO: 1217640 - RNA, 19 nt, Human
ucacaaaagaacaaacuau

SEQ ID NO: 1217641 - RNA, 22 nt, Human
ucacaccucagccucccaagua

SEQ ID NO: 1217642 - RNA, 25 nt, Human
ucaccacaaccucugccucccuggu

SEQ ID NO: 1217643 - RNA, 28 nt, Human
ucaccacaaccucugccucccugguuca

SEQ ID NO: 1217644 - RNA, 23 nt, Human
ucacucuuguugcccaggcuaga

SEQ ID NO: 1217645 - RNA, 18 nt, Human
ucagccucccaaguagcu

SEQ ID NO: 1217646 - RNA, 20 nt, Human
ucagccucccaaguagcuag

SEQ ID NO: 1217647 - RNA, 24 nt, Human
uccauguuggucaggcuggucucg

SEQ ID NO: 1217648 - RNA, 24 nt, Human
ucccaaaaugcugggauuacaggc

SEQ ID NO: 1217649 - RNA, 22 nt, Human
ucccaaacuuagggugcccaau

SEQ ID NO: 1217650 - RNA, 24 nt, Human
ucccaaagugcugggauuacaggc

SEQ ID NO: 1217651 - RNA, 24 nt, Human
ucccagagaucuagaacccaggcc

SEQ ID NO: 1217652 - RNA, 26 nt, Human
ucccagagaucuagaacccaggccag

SEQ ID NO: 1217653 - RNA, 18 nt, Human
ucccagaggucuagaacc

SEQ ID NO: 1217654 - RNA, 24 nt, Human
ucccagaggucuagaacccaggcc

SEQ ID NO: 1217655 - RNA, 18 nt, Human
ucccccaggcucccaagc

SEQ ID NO: 1217656 - RNA, 20 nt, Human
ucccccaggcucccaagccc

SEQ ID NO: 1217657 - RNA, 19 nt, Human
ucccugguucaagcaauuc

SEQ ID NO: 1217658 - RNA, 24 nt, Human
uccugaguagcugagauuacaggc

SEQ ID NO: 1217659 - RNA, 18 nt, Human
uccugggcucaagcaauc

SEQ ID NO: 1217660 - RNA, 24 nt, Human
uccugggcucaagcaaucggccug

SEQ ID NO: 1217661 - RNA, 22 nt, Human
ucgccauguugcccaggcuggu

SEQ ID NO: 1217662 - RNA, 18 nt, Human
ucggccucccaaagugcu

SEQ ID NO: 1217663 - RNA, 18 nt, Human
ucggccugccucaagcuc

SEQ ID NO: 1217664 - RNA, 22 nt, Human
ucuagaacccaggccagcaccg

SEQ ID NO: 1217665 - RNA, 20 nt, Human
ucuagaacccaggccaguca

SEQ ID NO: 1217666 - RNA, 21 nt, Human
ucucccaacuuucccaucugu

SEQ ID NO: 1217667 - RNA, 24 nt, Human
ucugccucccugguucaagcaauu

SEQ ID NO: 1217668 - RNA, 21 nt, Human
ucugucccucacccgucagaa

SEQ ID NO: 1217669 - RNA, 19 nt, Human
ucuugaacuccugggcuca

SEQ ID NO: 1217670 - RNA, 23 nt, Human
ucuugaacuccugggcucaagca

SEQ ID NO: 1217671 - RNA, 22 nt, Human
ucuugcuguguugcccaggcug

SEQ ID NO: 1217672 - RNA, 23 nt, Human
ucuugcuguguugcccaggcugg

SEQ ID NO: 1217673 - RNA, 24 nt, Human
ucuugcuguguugcccaggcugga

SEQ ID NO: 1217674 - RNA, 18 nt, Human
ucuuguugcccaggcuag

SEQ ID NO: 1217675 - RNA, 23 nt, Human
ugaaccccagcgggaggaacccc

SEQ ID NO: 1217676 - RNA, 22 nt, Human
ugacucaggcacugguucccag

SEQ ID NO: 1217677 - RNA, 18 nt, Human
ugagauuacaggcaugug

SEQ ID NO: 1217678 - RNA, 21 nt, Human
ugagauuacaggcaugugcca

SEQ ID NO: 1217679 - RNA, 22 nt, Human
ugagauuacaggcaugugccac

SEQ ID NO: 1217680 - RNA, 24 nt, Human
ugagauuacaggcaugugccacca

SEQ ID NO: 1217681 - RNA, 24 nt, Human
ugauccgccuaccucggccuccca

SEQ ID NO: 1217682 - RNA, 24 nt, Human
ugcccaggcuagagugcaauggca

SEQ ID NO: 1217683 - RNA, 18 nt, Human
ugcccaggcuggagugca

SEQ ID NO: 1217684 - RNA, 21 nt, Human
ugcccaggcuggagugcagug

SEQ ID NO: 1217685 - RNA, 22 nt, Human
ugcccaggcuggagugcagugg

SEQ ID NO: 1217686 - RNA, 24 nt, Human
ugcccaggcuggagugcaguggca

SEQ ID NO: 1217687 - RNA, 24 nt, Human
ugcccaggcuggucuugaacuccu

SEQ ID NO: 1217688 - RNA, 28 nt, Human
ugcccaggcuggucuugaacuccugggc

SEQ ID NO: 1217689 - RNA, 24 nt, Human
ugccucaagcucccaaaaugcugg

SEQ ID NO: 1217690 - RNA, 24 nt, Human
ugccugguuaauuuucguauuuuu

SEQ ID NO: 1217691 - RNA, 24 nt, Human
ugcugggauuacaggcgugagcca

SEQ ID NO: 1217692 - RNA, 24 nt, Human
ugcugggauuacaggcgugagcca

SEQ ID NO: 1217693 - RNA, 18 nt, Human
uggaaagcaugugagugg

SEQ ID NO: 1217694 - RNA, 18 nt, Human
uggagugcaguggcacaa

SEQ ID NO: 1217695 - RNA, 19 nt, Human
uggagugcaguggcacaau

SEQ ID NO: 1217696 - RNA, 21 nt, Human
uggagugcaguggcacaauca

SEQ ID NO: 1217697 - RNA, 21 nt, Human
uggcaaucauuuauaauaguu

SEQ ID NO: 1217698 - RNA, 21 nt, Human
uggcacaaucacagcuuauag

SEQ ID NO: 1217699 - RNA, 24 nt, Human
uggcacgaucucggcucaccacaa

SEQ ID NO: 1217700 - RNA, 21 nt, Human
uggcagcucugcugaccccac

SEQ ID NO: 1217701 - RNA, 18 nt, Human
ugggauuacaggcgugag

SEQ ID NO: 1217702 - RNA, 19 nt, Human
ugggauuacaggcgugagc

SEQ ID NO: 1217703 - RNA, 19 nt, Human
ugggauuacaggcgugagc

SEQ ID NO: 1217704 - RNA, 21 nt, Human
ugggauuacaggcgugagcca

SEQ ID NO: 1217705 - RNA, 21 nt, Human
ugggauuacaggcgugagcca

SEQ ID NO: 1217706 - RNA, 21 nt, Human
ugggauuacaggcgugagcca

SEQ ID NO: 1217707 - RNA, 22 nt, Human
ugggauuacaggcgugagccac

SEQ ID NO: 1217708 - RNA, 23 nt, Human
ugggauuacaggcgugagccacc

SEQ ID NO: 1217709 - RNA, 24 nt, Human
ugggauuacaggcgugagccaccg

SEQ ID NO: 1217710 - RNA, 22 nt, Human
ugggauuacaggcgugagccau

SEQ ID NO: 1217711 - RNA, 23 nt, Human
ugggauuacaggcgugagccauc

SEQ ID NO: 1217712 - RNA, 24 nt, Human
ugggauuacaggcgugagccauca

SEQ ID NO: 1217713 - RNA, 26 nt, Human
ugggauuacaggcgugagccaucaca

SEQ ID NO: 1217714 - RNA, 27 nt, Human
ugggauuacaggcgugagccaucacac

SEQ ID NO: 1217715 - RNA, 24 nt, Human
ugggguuucuccauguuggucagg

SEQ ID NO: 1217716 - RNA, 24 nt, Human
uggguuuucgccauguugcccagg

SEQ ID NO: 1217717 - RNA, 22 nt, Human
uggucaggcuggucucgaacuu

SEQ ID NO: 1217718 - RNA, 24 nt, Human
uguagagauggguuuucgccaugu

SEQ ID NO: 1217719 - RNA, 21 nt, Human
uguauuuuuaguagagauggg

SEQ ID NO: 1217720 - RNA, 22 nt, Human
ugugacucaggcacugguuccc

SEQ ID NO: 1217721 - RNA, 20 nt, Human
ugugacucaggugcugguuc

SEQ ID NO: 1217722 - RNA, 18 nt, Human
uguguugcccaggcugga

SEQ ID NO: 1217723 - RNA, 22 nt, Human
uguguugcccaggcuggagugc

SEQ ID NO: 1217724 - RNA, 24 nt, Human
uguguugcccaggcuggagugcag

SEQ ID NO: 1217725 - RNA, 20 nt, Human
uguugcccaggcuagagugc

SEQ ID NO: 1217726 - RNA, 22 nt, Human
uguugcccaggcuagagugcaa

SEQ ID NO: 1217727 - RNA, 20 nt, Human
uuaaagucagucuacacugc

SEQ ID NO: 1217728 - RNA, 18 nt, Human
uuaguagagaugggguuu

SEQ ID NO: 1217729 - RNA, 24 nt, Human
uuaguagagaugggguuucuccau

SEQ ID NO: 1217730 - RNA, 23 nt, Human
uuauagcagccucaaccuuccag

SEQ ID NO: 1217731 - RNA, 24 nt, Human
uucaagcaauucuacuaccucagc

SEQ ID NO: 1217732 - RNA, 24 nt, Human
uucacucuuguugcccaggcuaga

SEQ ID NO: 1217733 - RNA, 21 nt, Human
uuccccauaagccauuacaaa

SEQ ID NO: 1217734 - RNA, 22 nt, Human
uucgaaggcuaauuuaugaggc

SEQ ID NO: 1217735 - RNA, 18 nt, Human
uugcccaggcuagagugc

SEQ ID NO: 1217736 - RNA, 24 nt, Human
uugcccaggcuggagugcaguggc

SEQ ID NO: 1217737 - RNA, 24 nt, Human
uugcuguguugcccaggcuggagu

SEQ ID NO: 1217738 - RNA, 24 nt, Human
uuguagagauggguuuucgccaug

SEQ ID NO: 1217739 - RNA, 23 nt, Human
uuguauuuuuaguagagaugggg

SEQ ID NO: 1217740 - RNA, 23 nt, Human
uuguugcccaggcuagagugcaa

SEQ ID NO: 1217741 - RNA, 22 nt, Human
uuucaggaucaccggagcuugu

SEQ ID NO: 1217742 - RNA, 23 nt, Human
uuucgccauguugcccaggcugu

SEQ ID NO: 1217743 - RNA, 21 nt, Human
uuucuccauguuggucaggcu

SEQ ID NO: 1217744 - RNA, 23 nt, Human
uuuucgccauguugcccaggcug

SEQ ID NO: 1217745 - RNA, 24 nt, Human
uuuucgccauguugcccaggcugg

SEQ ID NO: 1217746 - RNA, 24 nt, Human
uuuucuugaaacggaguuucacuc

SEQ ID NO: 1217747 - RNA, 19 nt, Human
uuuuguauuuuuaguagag

SEQ ID NO: 1217748 - RNA, 20 nt, Human
uuuuguauuuuuaguagaga

SEQ ID NO: 1217749 - RNA, 22 nt, Human
uuuuuaguagagaugggguuuc

SEQ ID NO: 1217750 - RNA, 24 nt, Human
uuuuuuguagagauggguuuucgc

SEQ ID NO: 1217751 - RNA, 20 nt, Human
uuuuuuuucuugaaacggag

SEQ ID NO: 1217752 - RNA, 23 nt, Human
aacacugcucgucggguccagca

SEQ ID NO: 1217753 - RNA, 18 nt, Human
aacgcaguacuuccgccc

SEQ ID NO: 1217754 - RNA, 22 nt, Human
aagcacccugcagcccuagcga

SEQ ID NO: 1217755 - RNA, 25 nt, Human
accccaaggcccgaugggucccgcg

SEQ ID NO: 1217756 - RNA, 20 nt, Human
agacaggagaggggcacgua

SEQ ID NO: 1217757 - RNA, 24 nt, Human
agacaggagaggggcacguaccgg

SEQ ID NO: 1217758 - RNA, 25 nt, Human
agagcuuguuccgaagcaagcacua

SEQ ID NO: 1217759 - RNA, 19 nt, Human
agcccagcagggacacaac

SEQ ID NO: 1217760 - RNA, 22 nt, Human
agccgaugcugaaugguacgcg

SEQ ID NO: 1217761 - RNA, 21 nt, Human
agccugaggaaggugggacuc

SEQ ID NO: 1217762 - RNA, 21 nt, Human
aggugggacucgggcggagcc

SEQ ID NO: 1217763 - RNA, 22 nt, Human
aguacuuccgcccucaagcagc

SEQ ID NO: 1217764 - RNA, 18 nt, Human
auccagcccuccccugga

SEQ ID NO: 1217765 - RNA, 23 nt, Human
caagcagccgggcuuuccagcgg

SEQ ID NO: 1217766 - RNA, 23 nt, Human
cagcccagcagggacacaacccc

SEQ ID NO: 1217767 - RNA, 25 nt, Human
cagcccagcagggacacaaccccag

SEQ ID NO: 1217768 - RNA, 21 nt, Human
cagggacacaaccccagcucg

SEQ ID NO: 1217769 - RNA, 22 nt, Human
cccccugcugugguucccgaac

SEQ ID NO: 1217770 - RNA, 23 nt, Human
ccccgguaccggggccgcgucua

SEQ ID NO: 1217771 - RNA, 21 nt, Human
ccccuggacccuaggucacgg

SEQ ID NO: 1217772 - RNA, 23 nt, Human
cccuaggucacggcaaucaaccc

SEQ ID NO: 1217773 - RNA, 22 nt, Human
ccgaagcaagcacccugcagcc

SEQ ID NO: 1217774 - RNA, 22 nt, Human
ccgcccucaagcagccgggcuu

SEQ ID NO: 1217775 - RNA, 25 nt, Human
ccuccggauaguccccgagagcuuu

SEQ ID NO: 1217776 - RNA, 22 nt, Human
cgaagcaagcacccugcagccc

SEQ ID NO: 1217777 - RNA, 23 nt, Human
cgaagcaagcacccugcagcccu

SEQ ID NO: 1217778 - RNA, 24 nt, Human
cgcggucggacuucuacacccgcc

SEQ ID NO: 1217779 - RNA, 23 nt, Human
cggaccagcgggcgagggcccug

SEQ ID NO: 1217780 - RNA, 25 nt, Human
cgggcggagccgaugcugaauggua

SEQ ID NO: 1217781 - RNA, 21 nt, Human
cuacacccgccuccagacagg

SEQ ID NO: 1217782 - RNA, 18 nt, Human
cucacuuccgcccuuacu

SEQ ID NO: 1217783 - RNA, 18 nt, Human
gaggaaggugggacucgg

SEQ ID NO: 1217784 - RNA, 19 nt, Human
gagggcccuggugagaggg

SEQ ID NO: 1217785 - RNA, 22 nt, Human
gauccagcccuccccuggaccc

SEQ ID NO: 1217786 - RNA, 22 nt, Human
gcacaaugggggccgcaaaaaa

SEQ ID NO: 1217787 - RNA, 24 nt, Human
gcagcacaaugggggccgcaaaaa

SEQ ID NO: 1217788 - RNA, 18 nt, Human
gcccuagcgauccagccc

SEQ ID NO: 1217789 - RNA, 23 nt, Human
gcggucggacuucuacacccgcc

SEQ ID NO: 1217790 - RNA, 23 nt, Human
ggaaggugggacucgggcggagc

SEQ ID NO: 1217791 - RNA, 20 nt, Human
ggacucgggcggagccgaug

SEQ ID NO: 1217792 - RNA, 20 nt, Human
ggaggccuucugugccggga

SEQ ID NO: 1217793 - RNA, 19 nt, Human
ggggcacaggccuguugag

SEQ ID NO: 1217794 - RNA, 20 nt, Human
ggggccgcgucuacgugggg

SEQ ID NO: 1217795 - RNA, 23 nt, Human
gguccagcagcacaaugggggcc

SEQ ID NO: 1217796 - RNA, 18 nt, Human
ucagccaaucagagccug

SEQ ID NO: 1217797 - RNA, 18 nt, Human
ucccgaaccccaaggccc

SEQ ID NO: 1217798 - RNA, 19 nt, Human
ucuacacccgccuccagac

SEQ ID NO: 1217799 - RNA, 22 nt, Human
ugaggaaggugggacucgggcg

SEQ ID NO: 1217800 - RNA, 26 nt, Human
ugccugaacccccgguaccggggccg

SEQ ID NO: 1217801 - RNA, 19 nt, Human
uggcuuccgcggucggacu

SEQ ID NO: 1217802 - RNA, 19 nt, Human
ugggucccgcgggggucgc

SEQ ID NO: 1217803 - RNA, 22 nt, Human
ugguucccgaaccccaaggccc

SEQ ID NO: 1217804 - RNA, 18 nt, Human
uucccgaaccccaaggcc

SEQ ID NO: 1217805 - RNA, 18 nt, Human
aacuaaaugcagcucugc

SEQ ID NO: 1217806 - RNA, 22 nt, Human
acaacgcuuccuuccuucaaag

SEQ ID NO: 1217807 - RNA, 20 nt, Human
ccccaguggaagugaaauug

SEQ ID NO: 1217808 - RNA, 21 nt, Human
cgcuuccuuccuucaaaguca

SEQ ID NO: 1217809 - RNA, 20 nt, Human
cuccccaguggaagugaaau

SEQ ID NO: 1217810 - RNA, 22 nt, Human
cucugagccccccucauucacu

SEQ ID NO: 1217811 - RNA, 19 nt, Human
uaacaacgcuuccuuccuu

SEQ ID NO: 1217812 - RNA, 20 nt, Human
ugagccccccucauucacug

SEQ ID NO: 1217813 - RNA, 24 nt, Human
ugagccccccucauucacugcucc

SEQ ID NO: 1217814 - RNA, 25 nt, Human
uuccaagggcccgccacuaauuccu

SEQ ID NO: 1217815 - RNA, 22 nt, Human
acagcucccagguugcagaccu

SEQ ID NO: 1217816 - RNA, 21 nt, Human
cagagcucucccuuugccuuc

SEQ ID NO: 1217817 - RNA, 20 nt, Human
cccuccaggggaacagcucc

SEQ ID NO: 1217818 - RNA, 23 nt, Human
ccugcagagcucucccuuugccu

SEQ ID NO: 1217819 - RNA, 23 nt, Human
cgugcugcucucggaccaccgcg

SEQ ID NO: 1217820 - RNA, 18 nt, Human
cucggaccaccgcggcag

SEQ ID NO: 1217821 - RNA, 20 nt, Human
cugggagcaguagccccucc

SEQ ID NO: 1217822 - RNA, 19 nt, Human
gagcaguagccccuccagg

SEQ ID NO: 1217823 - RNA, 23 nt, Human
gcagaccugagcagucgggccau

SEQ ID NO: 1217824 - RNA, 26 nt, Human
gccuucagagccucuacgaagucccu

SEQ ID NO: 1217825 - RNA, 22 nt, Human
gcggcaguggacacgugggaaa

SEQ ID NO: 1217826 - RNA, 18 nt, Human
ucccugcagagcucuccc

SEQ ID NO: 1217827 - RNA, 20 nt, Human
aaaaagcucgcucuuccacc

SEQ ID NO: 1217828 - RNA, 22 nt, Human
aaggcgccccgaucccuaccug

SEQ ID NO: 1217829 - RNA, 23 nt, Human
aaugccgaaggauaugagagaga

SEQ ID NO: 1217830 - RNA, 19 nt, Human
acagucacuucuuccacau

SEQ ID NO: 1217831 - RNA, 21 nt, Human
acccaaugccgaaggauauga

SEQ ID NO: 1217832 - RNA, 19 nt, Human
accgccuccugcccaggcg

SEQ ID NO: 1217833 - RNA, 21 nt, Human
acuccuugguuuagauuuuga

SEQ ID NO: 1217834 - RNA, 20 nt, Human
auacagucacuucuuccaca

SEQ ID NO: 1217835 - RNA, 21 nt, Human
aucaagucacagugccagccc

SEQ ID NO: 1217836 - RNA, 25 nt, Human
caaaaagcucgcucuuccaccuucu

SEQ ID NO: 1217837 - RNA, 19 nt, Human
caaaugguggggaaagaga

SEQ ID NO: 1217838 - RNA, 18 nt, Human
caaggcgccccgaucccu

SEQ ID NO: 1217839 - RNA, 19 nt, Human
caaugccgaaggauaugag

SEQ ID NO: 1217840 - RNA, 20 nt, Human
cacuccuugcacccauagau

SEQ ID NO: 1217841 - RNA, 18 nt, Human
cagauucaaauggugggg

SEQ ID NO: 1217842 - RNA, 18 nt, Human
ccauguugguugggcuag

SEQ ID NO: 1217843 - RNA, 19 nt, Human
ccauguugguugggcuagu

SEQ ID NO: 1217844 - RNA, 19 nt, Human
cccagcuucuuguccagag

SEQ ID NO: 1217845 - RNA, 18 nt, Human
cccugcgcccccuuuccu

SEQ ID NO: 1217846 - RNA, 18 nt, Human
ccgcacccugcacucugc

SEQ ID NO: 1217847 - RNA, 19 nt, Human
ccuccggaggccacugccu

SEQ ID NO: 1217848 - RNA, 19 nt, Human
ccucuugaaaccuaggcuu

SEQ ID NO: 1217849 - RNA, 25 nt, Human
ccugcacucugcugacuguaccgga

SEQ ID NO: 1217850 - RNA, 19 nt, Human
cgacaaggcgccccgaucc

SEQ ID NO: 1217851 - RNA, 20 nt, Human
cgcccccuuuccuggugccc

SEQ ID NO: 1217852 - RNA, 22 nt, Human
cucgcucuuccaccuucuuucc

SEQ ID NO: 1217853 - RNA, 18 nt, Human
cugcgcccccuuuccugg

SEQ ID NO: 1217854 - RNA, 18 nt, Human
cuuccaccuucuuuccca

SEQ ID NO: 1217855 - RNA, 24 nt, Human
cuucuggucuugauuggccucauu

SEQ ID NO: 1217856 - RNA, 23 nt, Human
gaacuggcauacagucacuucuu

SEQ ID NO: 1217857 - RNA, 21 nt, Human
gacuucauuuauggaagggag

SEQ ID NO: 1217858 - RNA, 26 nt, Human
gagcugcaaauuucauugccaagagg

SEQ ID NO: 1217859 - RNA, 19 nt, Human
gcccccuuuccuggugccc

SEQ ID NO: 1217860 - RNA, 18 nt, Human
gcucuuccaccuucuuuc

SEQ ID NO: 1217861 - RNA, 19 nt, Human
gggaaaccccggccacugc

SEQ ID NO: 1217862 - RNA, 22 nt, Human
gggucccuccacucagccacuu

SEQ ID NO: 1217863 - RNA, 22 nt, Human
guccaguuugugccucucccag

SEQ ID NO: 1217864 - RNA, 23 nt, Human
guguuagcugccauguugguugg

SEQ ID NO: 1217865 - RNA, 24 nt, Human
guuuuuggaaauaucauuuggagu

SEQ ID NO: 1217866 - RNA, 19 nt, Human
uaacccaaugccgaaggau

SEQ ID NO: 1217867 - RNA, 21 nt, Human
uagauaacccaaugccgaagg

SEQ ID NO: 1217868 - RNA, 19 nt, Human
ucauuuggagugggaugug

SEQ ID NO: 1217869 - RNA, 20 nt, Human
uccaaaaagcucgcucuucc

SEQ ID NO: 1217870 - RNA, 23 nt, Human
uccaaaaagcucgcucuuccacc

SEQ ID NO: 1217871 - RNA, 24 nt, Human
uccaaaaagcucgcucuuccaccu

SEQ ID NO: 1217872 - RNA, 19 nt, Human
uccaccuucuuucccacga

SEQ ID NO: 1217873 - RNA, 23 nt, Human
uccaccuucuuucccacgaccga

SEQ ID NO: 1217874 - RNA, 25 nt, Human
ucccacgaccgccuccugcccaggg

SEQ ID NO: 1217875 - RNA, 24 nt, Human
ucccuaccugagggaaaccccggc

SEQ ID NO: 1217876 - RNA, 19 nt, Human
uccggaggccacugccuca

SEQ ID NO: 1217877 - RNA, 22 nt, Human
ucuguccagugcccuccggagg

SEQ ID NO: 1217878 - RNA, 19 nt, Human
ugagagagagagaugucca

SEQ ID NO: 1217879 - RNA, 18 nt, Human
ugcccgcacccugcacuc

SEQ ID NO: 1217880 - RNA, 21 nt, Human
ugcugacuguaccggacgcca

SEQ ID NO: 1217881 - RNA, 20 nt, Human
uggcuggcggcgacaaggcg

SEQ ID NO: 1217882 - RNA, 20 nt, Human
ugggcugggaucugcuugag

SEQ ID NO: 1217883 - RNA, 21 nt, Human
ugguggggaaagagacuucau

SEQ ID NO: 1217884 - RNA, 22 nt, Human
uguccaguuugugccucuccca

SEQ ID NO: 1217885 - RNA, 22 nt, Human
ugugaaugggcaauuugggcug

SEQ ID NO: 1217886 - RNA, 22 nt, Human
ugugugaaugggcaauuugggc

SEQ ID NO: 1217887 - RNA, 20 nt, Human
uguuucuguccagugcccuc

SEQ ID NO: 1217888 - RNA, 20 nt, Human
uuuauaaggccucuugaaac

SEQ ID NO: 1217889 - RNA, 23 nt, Human
aagaguuuucuauaucuuucuca

SEQ ID NO: 1217890 - RNA, 18 nt, Human
aaguggcccucagugaag

SEQ ID NO: 1217891 - RNA, 22 nt, Human
agaccaaagcuggagucgagga

SEQ ID NO: 1217892 - RNA, 21 nt, Human
agagccugggggacagggcac

SEQ ID NO: 1217893 - RNA, 21 nt, Human
agcuauuuuuggauguuucuc

SEQ ID NO: 1217894 - RNA, 23 nt, Human
aggagacaauguccuccaaaagc

SEQ ID NO: 1217895 - RNA, 19 nt, Human
aggggcucugcgcucccac

SEQ ID NO: 1217896 - RNA, 20 nt, Human
agguuccugcugcccuaggg

SEQ ID NO: 1217897 - RNA, 22 nt, Human
caaaggucaccgacuucugaaa

SEQ ID NO: 1217898 - RNA, 22 nt, Human
caaauuuccuuuguaaaguggc

SEQ ID NO: 1217899 - RNA, 19 nt, Human
caaggcuucucucucucuc

SEQ ID NO: 1217900 - RNA, 18 nt, Human
caauagguuccugcugcc

SEQ ID NO: 1217901 - RNA, 22 nt, Human
caauuccauagcucaggcccug

SEQ ID NO: 1217902 - RNA, 20 nt, Human
caccucgggccgcuucacgc

SEQ ID NO: 1217903 - RNA, 23 nt, Human
caccucgggccgcuucacgcccg

SEQ ID NO: 1217904 - RNA, 23 nt, Human
cacgguccauacucgggaugcac

SEQ ID NO: 1217905 - RNA, 18 nt, Human
ccagagccugggggacag

SEQ ID NO: 1217906 - RNA, 20 nt, Human
ccagagccugggggacaggg

SEQ ID NO: 1217907 - RNA, 19 nt, Human
ccauagcucaggcccuggg

SEQ ID NO: 1217908 - RNA, 21 nt, Human
ccccgggccgccgcccugcuc

SEQ ID NO: 1217909 - RNA, 22 nt, Human
cccgggccgccgcccugcuccc

SEQ ID NO: 1217910 - RNA, 22 nt, Human
ccuaugucaggagccugggagc

SEQ ID NO: 1217911 - RNA, 21 nt, Human
ccucaaaggucaccgacuucu

SEQ ID NO: 1217912 - RNA, 19 nt, Human
ccugcucccucucccagcc

SEQ ID NO: 1217913 - RNA, 18 nt, Human
ccugcugcccuagggcca

SEQ ID NO: 1217914 - RNA, 20 nt, Human
ccuuuguaaaguggcccuca

SEQ ID NO: 1217915 - RNA, 18 nt, Human
cgcccugcucccucuccc

SEQ ID NO: 1217916 - RNA, 27 nt, Human
cgggcugcuucugcugccgggugaaac

SEQ ID NO: 1217917 - RNA, 22 nt, Human
cuccaaaagccgggcugcuucu

SEQ ID NO: 1217918 - RNA, 23 nt, Human
cugcagcacccagggugggagug

SEQ ID NO: 1217919 - RNA, 19 nt, Human
cuggagcuuuugggacuga

SEQ ID NO: 1217920 - RNA, 20 nt, Human
gaagagcaccccgggccgcc

SEQ ID NO: 1217921 - RNA, 21 nt, Human
gacagcaacgugcguuucccc

SEQ ID NO: 1217922 - RNA, 22 nt, Human
gagcaccccgggccgccgcccu

SEQ ID NO: 1217923 - RNA, 22 nt, Human
gagccacaaagaccaaagcugg

SEQ ID NO: 1217924 - RNA, 18 nt, Human
gcacggcacacagcgccc

SEQ ID NO: 1217925 - RNA, 18 nt, Human
gcaggggacaggccaucc

SEQ ID NO: 1217926 - RNA, 20 nt, Human
gcccugcucccucucccagc

SEQ ID NO: 1217927 - RNA, 24 nt, Human
gcgcaagcuauugagccacaaaga

SEQ ID NO: 1217928 - RNA, 22 nt, Human
gcuucacgcccgcaaauauucc

SEQ ID NO: 1217929 - RNA, 18 nt, Human
ggucaccgacuucugaaa

SEQ ID NO: 1217930 - RNA, 20 nt, Human
gugcauggcugccauccccu

SEQ ID NO: 1217931 - RNA, 18 nt, Human
guugguacaaaacaaagc

SEQ ID NO: 1217932 - RNA, 21 nt, Human
uagaauaaaaacuguuuccau

SEQ ID NO: 1217933 - RNA, 27 nt, Human
uauucaugcccucuuggagguuuuuca

SEQ ID NO: 1217934 - RNA, 19 nt, Human
uauuccaucuuuuagcugc

SEQ ID NO: 1217935 - RNA, 24 nt, Human
uccaggagacaauguccuccaaaa

SEQ ID NO: 1217936 - RNA, 22 nt, Human
uccauagcucaggcccuggggc

SEQ ID NO: 1217937 - RNA, 20 nt, Human
uccccgucucagagaagggc

SEQ ID NO: 1217938 - RNA, 25 nt, Human
ucuccauacaaguccuccauaacug

SEQ ID NO: 1217939 - RNA, 20 nt, Human
ucucccagccugggccuccu

SEQ ID NO: 1217940 - RNA, 18 nt, Human
ugaaacaauagguuccug

SEQ ID NO: 1217941 - RNA, 19 nt, Human
ugaagacuuaaauuucucc

SEQ ID NO: 1217942 - RNA, 19 nt, Human
ugcagcacccaggguggga

SEQ ID NO: 1217943 - RNA, 23 nt, Human
ugccagaccucagcaugucaaaa

SEQ ID NO: 1217944 - RNA, 19 nt, Human
ugccgggugacugggaggg

SEQ ID NO: 1217945 - RNA, 25 nt, Human
uggcugggacagcaacgugcguuuc

SEQ ID NO: 1217946 - RNA, 20 nt, Human
uggggccaggcugucaggug

SEQ ID NO: 1217947 - RNA, 24 nt, Human
ugucaaaagacuugugguaucacc

SEQ ID NO: 1217948 - RNA, 25 nt, Human
uuaaacaaauaaauuaauguaggua

SEQ ID NO: 1217949 - RNA, 18 nt, Human
uucaugcccucuuggagg

SEQ ID NO: 1217950 - RNA, 24 nt, Human
uugagccacaaagaccaaagcugg

SEQ ID NO: 1217951 - RNA, 24 nt, Human
uuuccauaugaagacucugccaua

SEQ ID NO: 1217952 - RNA, 21 nt, Human
uuucuugaugcugcugggaac

SEQ ID NO: 1217953 - RNA, 21 nt, Human
aacaaugugcacagggccccc

SEQ ID NO: 1217954 - RNA, 19 nt, Human
aagccccaggccugcucag

SEQ ID NO: 1217955 - RNA, 19 nt, Human
acacugcgaucauacccag

SEQ ID NO: 1217956 - RNA, 20 nt, Human
accggggugcaggggaccca

SEQ ID NO: 1217957 - RNA, 19 nt, Human
accugaacugggcugcuuc

SEQ ID NO: 1217958 - RNA, 21 nt, Human
accugggacugccucagaggc

SEQ ID NO: 1217959 - RNA, 19 nt, Human
acucuuggggaccucccag

SEQ ID NO: 1217960 - RNA, 25 nt, Human
agaacccccauccuugguggucacc

SEQ ID NO: 1217961 - RNA, 24 nt, Human
aggacggcccaucuaugccuguag

SEQ ID NO: 1217962 - RNA, 19 nt, Human
aggagcuuccucccgggaa

SEQ ID NO: 1217963 - RNA, 18 nt, Human
aggcauccguuaacaagg

SEQ ID NO: 1217964 - RNA, 19 nt, Human
aggcccccgacccaugacc

SEQ ID NO: 1217965 - RNA, 22 nt, Human
aggcccccgacccaugaccugc

SEQ ID NO: 1217966 - RNA, 27 nt, Human
aggcccccgacccaugaccugcccagg

SEQ ID NO: 1217967 - RNA, 19 nt, Human
agggacauagaaccaagcc

SEQ ID NO: 1217968 - RNA, 23 nt, Human
aggggaacaaugugcacagggcc

SEQ ID NO: 1217969 - RNA, 21 nt, Human
aggugguaaaggccaugcuuc

SEQ ID NO: 1217970 - RNA, 19 nt, Human
caagccccaggccugcuca

SEQ ID NO: 1217971 - RNA, 23 nt, Human
caagggaaacaaaaggacggccc

SEQ ID NO: 1217972 - RNA, 19 nt, Human
caaucucgacccugacagg

SEQ ID NO: 1217973 - RNA, 18 nt, Human
cacugguagccagccagc

SEQ ID NO: 1217974 - RNA, 19 nt, Human
cagaaggggccaccaggca

SEQ ID NO: 1217975 - RNA, 25 nt, Human
cagagcccugccugccaggccagga

SEQ ID NO: 1217976 - RNA, 21 nt, Human
cagcacccucaaggcagcagg

SEQ ID NO: 1217977 - RNA, 24 nt, Human
cagcagggaauggcccucucuggc

SEQ ID NO: 1217978 - RNA, 21 nt, Human
cagcuccugccuccauccucc

SEQ ID NO: 1217979 - RNA, 19 nt, Human
ccaugcugaggcccuagag

SEQ ID NO: 1217980 - RNA, 19 nt, Human
cccaugaccugcccagugu

SEQ ID NO: 1217981 - RNA, 20 nt, Human
cccccgacccaugaccugcc

SEQ ID NO: 1217982 - RNA, 18 nt, Human
ccgcgugcaaucucgacc

SEQ ID NO: 1217983 - RNA, 19 nt, Human
ccgcgugcaaucucgaccc

SEQ ID NO: 1217984 - RNA, 19 nt, Human
ccuccccacagcuccuccu

SEQ ID NO: 1217985 - RNA, 19 nt, Human
ccuccuucagugccaccac

SEQ ID NO: 1217986 - RNA, 19 nt, Human
ccugccuccauccucccca

SEQ ID NO: 1217987 - RNA, 20 nt, Human
ccuggcacuggaaggccccc

SEQ ID NO: 1217988 - RNA, 20 nt, Human
ccuucuagaagcuucuccca

SEQ ID NO: 1217989 - RNA, 18 nt, Human
cgggaagaugagguagca

SEQ ID NO: 1217990 - RNA, 23 nt, Human
cucaaggcagcagggaauggccc

SEQ ID NO: 1217991 - RNA, 23 nt, Human
cuccaggcucauguggauguccu

SEQ ID NO: 1217992 - RNA, 20 nt, Human
cuccuccaccucacucacca

SEQ ID NO: 1217993 - RNA, 19 nt, Human
cucgacccugacaggacag

SEQ ID NO: 1217994 - RNA, 19 nt, Human
cuggggcuguguccagagg

SEQ ID NO: 1217995 - RNA, 20 nt, Human
cugugcccccaugcccgggc

SEQ ID NO: 1217996 - RNA, 24 nt, Human
cuuggggaccucccaggcagucaa

SEQ ID NO: 1217997 - RNA, 21 nt, Human
gaccagucugguccuacccag

SEQ ID NO: 1217998 - RNA, 20 nt, Human
gagcuggcaggagguccugg

SEQ ID NO: 1217999 - RNA, 18 nt, Human
gaggggcagggaaggaag

SEQ ID NO: 1218000 - RNA, 19 nt, Human
gcaaacucucccuccccuc

SEQ ID NO: 1218001 - RNA, 23 nt, Human
gcagcagggaauggcccucucug

SEQ ID NO: 1218002 - RNA, 20 nt, Human
gcauccguuaacaagggaaa

SEQ ID NO: 1218003 - RNA, 23 nt, Human
gccaccacguuguguuccugauc

SEQ ID NO: 1218004 - RNA, 18 nt, Human
gccccaggccugcucagc

SEQ ID NO: 1218005 - RNA, 23 nt, Human
gcugugauggacauguucagcuc

SEQ ID NO: 1218006 - RNA, 18 nt, Human
ggaaacaaaaggacggcc

SEQ ID NO: 1218007 - RNA, 23 nt, Human
ggaggcacccaguuccuugaagg

SEQ ID NO: 1218008 - RNA, 18 nt, Human
ggcacaggucccuggcac

SEQ ID NO: 1218009 - RNA, 20 nt, Human
ggcagaaguaugcaccuacc

SEQ ID NO: 1218010 - RNA, 20 nt, Human
ggcagggaaggaagaaaggu

SEQ ID NO: 1218011 - RNA, 23 nt, Human
gggcucuggagagucaggcagcc

SEQ ID NO: 1218012 - RNA, 24 nt, Human
ggggugcaggggacccaaaacucc

SEQ ID NO: 1218013 - RNA, 18 nt, Human
gguguugggugugugagc

SEQ ID NO: 1218014 - RNA, 22 nt, Human
gugagcuggggcuggggagggc

SEQ ID NO: 1218015 - RNA, 22 nt, Human
gugcacagggcccccagcgggc

SEQ ID NO: 1218016 - RNA, 22 nt, Human
gugcagagguuccuccuugucc

SEQ ID NO: 1218017 - RNA, 20 nt, Human
guguagcaaguacgaugggc

SEQ ID NO: 1218018 - RNA, 22 nt, Human
guuaacaagggaaacaaaagga

SEQ ID NO: 1218019 - RNA, 19 nt, Human
uaacaagggaaacaaaagg

SEQ ID NO: 1218020 - RNA, 18 nt, Human
uacgaugggccaugcacu

SEQ ID NO: 1218021 - RNA, 23 nt, Human
uagaaccaagccccaggccugcu

SEQ ID NO: 1218022 - RNA, 22 nt, Human
uagagucagagcccugccugcc

SEQ ID NO: 1218023 - RNA, 21 nt, Human
uaggcucagaaggggccacca

SEQ ID NO: 1218024 - RNA, 18 nt, Human
ucacucaccagcuugggg

SEQ ID NO: 1218025 - RNA, 21 nt, Human
ucagagcccugccugccaggc

SEQ ID NO: 1218026 - RNA, 24 nt, Human
ucagugccaccacguuguguuccu

SEQ ID NO: 1218027 - RNA, 20 nt, Human
ucccuggcacuggaaggccc

SEQ ID NO: 1218028 - RNA, 23 nt, Human
ucccuggcacuggaaggcccccg

SEQ ID NO: 1218029 - RNA, 25 nt, Human
uccuggggcuguguccagagggugg

SEQ ID NO: 1218030 - RNA, 24 nt, Human
uccuugaaggaacugaggggcagg

SEQ ID NO: 1218031 - RNA, 21 nt, Human
ucuguccccguggccuccagg

SEQ ID NO: 1218032 - RNA, 23 nt, Human
ucuguguguuuaaggcgugcuug

SEQ ID NO: 1218033 - RNA, 18 nt, Human
ugaacugggcugcuucgc

SEQ ID NO: 1218034 - RNA, 23 nt, Human
ugaagagacuguuggucauggcg

SEQ ID NO: 1218035 - RNA, 18 nt, Human
ugaaggaacugaggggca

SEQ ID NO: 1218036 - RNA, 19 nt, Human
ugaaggagcuuccucccgg

SEQ ID NO: 1218037 - RNA, 21 nt, Human
ugaccaguggcucuggggagg

SEQ ID NO: 1218038 - RNA, 21 nt, Human
ugaccugcccagugucauguc

SEQ ID NO: 1218039 - RNA, 26 nt, Human
ugaggggaacaaugugcacagggccc

SEQ ID NO: 1218040 - RNA, 24 nt, Human
ugcaacacacugcgaucauaccca

SEQ ID NO: 1218041 - RNA, 24 nt, Human
ugcagagguuccuccuuguccuug

SEQ ID NO: 1218042 - RNA, 20 nt, Human
ugcaggggacccaaaacucc

SEQ ID NO: 1218043 - RNA, 24 nt, Human
ugccaggccaggacucuuggggac

SEQ ID NO: 1218044 - RNA, 25 nt, Human
ugcccgggcauauggaauguggagg

SEQ ID NO: 1218045 - RNA, 20 nt, Human
ugccucagaggcccaggcag

SEQ ID NO: 1218046 - RNA, 23 nt, Human
ugccuccauccuccccacagcuc

SEQ ID NO: 1218047 - RNA, 21 nt, Human
ugccuguagcccaggcguagg

SEQ ID NO: 1218048 - RNA, 24 nt, Human
uggagauuggaguguuuaugagag

SEQ ID NO: 1218049 - RNA, 24 nt, Human
ugggagcuggcaggagguccuggg

SEQ ID NO: 1218050 - RNA, 25 nt, Human
ugggagcuggcaggagguccuggga

SEQ ID NO: 1218051 - RNA, 19 nt, Human
uggggcuguguccagaggg

SEQ ID NO: 1218052 - RNA, 21 nt, Human
uguggagaccagucugguccu

SEQ ID NO: 1218053 - RNA, 19 nt, Human
uguggauguccucgagguu

SEQ ID NO: 1218054 - RNA, 26 nt, Human
uguucagcuccuccaccucacucacc

SEQ ID NO: 1218055 - RNA, 18 nt, Human
uguugggccggugugaga

SEQ ID NO: 1218056 - RNA, 19 nt, Human
uugaaggaacugaggggca

SEQ ID NO: 1218057 - RNA, 22 nt, Human
uugacggaaggaggcacccagu

SEQ ID NO: 1218058 - RNA, 22 nt, Human
aaaauaaagcuauauaaauuga

SEQ ID NO: 1218059 - RNA, 23 nt, Human
aaagauuuucauuccaguucacc

SEQ ID NO: 1218060 - RNA, 20 nt, Human
aacucaggggaguccccaca

SEQ ID NO: 1218061 - RNA, 24 nt, Human
aaguaaaaaauaaagcuauauaaa

SEQ ID NO: 1218062 - RNA, 25 nt, Human
acacaugcuuuggugcauguacacg

SEQ ID NO: 1218063 - RNA, 23 nt, Human
acagccugucuaaacauuuguuu

SEQ ID NO: 1218064 - RNA, 20 nt, Human
agauugcauuugccaacuga

SEQ ID NO: 1218065 - RNA, 19 nt, Human
agcaccggaccccuggcca

SEQ ID NO: 1218066 - RNA, 21 nt, Human
agcggauggucacccuguugg

SEQ ID NO: 1218067 - RNA, 18 nt, Human
agcuggcucguggcggaa

SEQ ID NO: 1218068 - RNA, 20 nt, Human
agggcugagccgaggggagg

SEQ ID NO: 1218069 - RNA, 21 nt, Human
aggggaagggccuuguccagg

SEQ ID NO: 1218070 - RNA, 22 nt, Human
auguacacguguguguguguau

SEQ ID NO: 1218071 - RNA, 22 nt, Human
caacucaggggaguccccacag

SEQ ID NO: 1218072 - RNA, 21 nt, Human
caaggcucaacucaggggagu

SEQ ID NO: 1218073 - RNA, 23 nt, Human
caccggaccccuggccaaggcuc

SEQ ID NO: 1218074 - RNA, 18 nt, Human
caccuuuagcuuaaaaaa

SEQ ID NO: 1218075 - RNA, 20 nt, Human
cagacacaggcuggguugac

SEQ ID NO: 1218076 - RNA, 19 nt, Human
cagcaccggaccccuggcc

SEQ ID NO: 1218077 - RNA, 20 nt, Human
caggcuggguugacuggggc

SEQ ID NO: 1218078 - RNA, 24 nt, Human
cauaaugaacagacauuuuaaaug

SEQ ID NO: 1218079 - RNA, 23 nt, Human
caugcacacgcgugucuguggua

SEQ ID NO: 1218080 - RNA, 22 nt, Human
cauguacacgugugugugugua

SEQ ID NO: 1218081 - RNA, 23 nt, Human
cauguacacguguguguguguau

SEQ ID NO: 1218082 - RNA, 18 nt, Human
ccagguaacacgcaugca

SEQ ID NO: 1218083 - RNA, 18 nt, Human
ccccauguggacauggcu

SEQ ID NO: 1218084 - RNA, 19 nt, Human
ccccuggccaaggcucaac

SEQ ID NO: 1218085 - RNA, 21 nt, Human
ccccuggccaaggcucaacuc

SEQ ID NO: 1218086 - RNA, 21 nt, Human
ccgugcuccgacgcgugcacg

SEQ ID NO: 1218087 - RNA, 21 nt, Human
cgcgugcacggaugaggugcg

SEQ ID NO: 1218088 - RNA, 24 nt, Human
cgcgugcacggaugaggugcggcg

SEQ ID NO: 1218089 - RNA, 18 nt, Human
cggcguggguguggccag

SEQ ID NO: 1218090 - RNA, 23 nt, Human
cgguguggccugcuuguucgccc

SEQ ID NO: 1218091 - RNA, 25 nt, Human
cucccucgagacgguguggccugcu

SEQ ID NO: 1218092 - RNA, 18 nt, Human
cugcuuguucgcccuguc

SEQ ID NO: 1218093 - RNA, 26 nt, Human
cuggagguuucccgcgacagcaccgg

SEQ ID NO: 1218094 - RNA, 24 nt, Human
gaaucacacuuucaugacacuucu

SEQ ID NO: 1218095 - RNA, 20 nt, Human
gacagcaccggaccccuggc

SEQ ID NO: 1218096 - RNA, 23 nt, Human
gagcuugcacguuuguggugggu

SEQ ID NO: 1218097 - RNA, 23 nt, Human
gaugcaaggaccugcauaucaag

SEQ ID NO: 1218098 - RNA, 19 nt, Human
gcauguacacgugugugug

SEQ ID NO: 1218099 - RNA, 22 nt, Human
gcccacugugcgugucugagac

SEQ ID NO: 1218100 - RNA, 22 nt, Human
gcccacugugcgugucugagac

SEQ ID NO: 1218101 - RNA, 22 nt, Human
gcccacugugcgugucugagac

SEQ ID NO: 1218102 - RNA, 18 nt, Human
ggagacgcuggccgcauc

SEQ ID NO: 1218103 - RNA, 22 nt, Human
ggcguggguguggccaguccug

SEQ ID NO: 1218104 - RNA, 21 nt, Human
gguggguacauguacauaugu

SEQ ID NO: 1218105 - RNA, 21 nt, Human
guacacgugcauguucugcau

SEQ ID NO: 1218106 - RNA, 21 nt, Human
guggagccaaaagccagguaa

SEQ ID NO: 1218107 - RNA, 21 nt, Human
guguguguguguaugcgugua

SEQ ID NO: 1218108 - RNA, 24 nt, Human
uaacuuccuaaagaaauguaggau

SEQ ID NO: 1218109 - RNA, 18 nt, Human
uacuagucagugcaaaac

SEQ ID NO: 1218110 - RNA, 23 nt, Human
uacuguguggagacugauuuaug

SEQ ID NO: 1218111 - RNA, 18 nt, Human
uagcuuaaaaaaaaaaaa

SEQ ID NO: 1218112 - RNA, 19 nt, Human
uaucccaucaaggcugcuu

SEQ ID NO: 1218113 - RNA, 24 nt, Human
uaugaugaugacaacuauggauac

SEQ ID NO: 1218114 - RNA, 21 nt, Human
uaugugcauauguauugugua

SEQ ID NO: 1218115 - RNA, 21 nt, Human
ucccgcgacagcaccggaccc

SEQ ID NO: 1218116 - RNA, 19 nt, Human
ucccucgagacgguguggc

SEQ ID NO: 1218117 - RNA, 19 nt, Human
ugagacggucuguggcagg

SEQ ID NO: 1218118 - RNA, 19 nt, Human
ugagacggucuguggcagg

SEQ ID NO: 1218119 - RNA, 19 nt, Human
ugagacggucuguggcagg

SEQ ID NO: 1218120 - RNA, 22 nt, Human
ugagcguggagccaaaagccag

SEQ ID NO: 1218121 - RNA, 25 nt, Human
ugagugauccugugugcaagccccc

SEQ ID NO: 1218122 - RNA, 18 nt, Human
ugaugaugacaacuaugg

SEQ ID NO: 1218123 - RNA, 19 nt, Human
ugcauguacacgugugugu

SEQ ID NO: 1218124 - RNA, 21 nt, Human
ugcaugucuguaggucacaca

SEQ ID NO: 1218125 - RNA, 26 nt, Human
ugcaugugugcaggagcuugcacguu

SEQ ID NO: 1218126 - RNA, 18 nt, Human
ugcauguguguaucacac

SEQ ID NO: 1218127 - RNA, 21 nt, Human
uggcuaugagugagcguggag

SEQ ID NO: 1218128 - RNA, 20 nt, Human
uggguacauguacauaugug

SEQ ID NO: 1218129 - RNA, 19 nt, Human
ugggugugaaucagugacc

SEQ ID NO: 1218130 - RNA, 23 nt, Human
uggugcauguacacgugugugug

SEQ ID NO: 1218131 - RNA, 25 nt, Human
uggugcauguacacgugugugugug

SEQ ID NO: 1218132 - RNA, 23 nt, Human
uguacacgugcauguucugcaug

SEQ ID NO: 1218133 - RNA, 19 nt, Human
uguacacgugugugugugu

SEQ ID NO: 1218134 - RNA, 18 nt, Human
uguacacguuugugugca

SEQ ID NO: 1218135 - RNA, 22 nt, Human
ugucaaauaaauaauacuaaca

SEQ ID NO: 1218136 - RNA, 18 nt, Human
ugucugagacggucugug

SEQ ID NO: 1218137 - RNA, 18 nt, Human
ugucugagacggucugug

SEQ ID NO: 1218138 - RNA, 18 nt, Human
ugucugagacggucugug

SEQ ID NO: 1218139 - RNA, 28 nt, Human
ugugcuuaccuguacaugcaugugugua

SEQ ID NO: 1218140 - RNA, 21 nt, Human
uguguacacgugcauguucug

SEQ ID NO: 1218141 - RNA, 25 nt, Human
uguguacacgugcauguucugcaug

SEQ ID NO: 1218142 - RNA, 26 nt, Human
uguguaggagcaugcacacgcguggu

SEQ ID NO: 1218143 - RNA, 21 nt, Human
uguguaucacacguccgugug

SEQ ID NO: 1218144 - RNA, 21 nt, Human
uguguaucacacguccgugug

SEQ ID NO: 1218145 - RNA, 19 nt, Human
ugugugcaggagcuugcac

SEQ ID NO: 1218146 - RNA, 18 nt, Human
ugugugcaugcaugugug

SEQ ID NO: 1218147 - RNA, 20 nt, Human
ugugugcaugcaugugugca

SEQ ID NO: 1218148 - RNA, 27 nt, Human
ugugugcaugcaugugugcaggagcuu

SEQ ID NO: 1218149 - RNA, 18 nt, Human
uguguguguguaugcgug

SEQ ID NO: 1218150 - RNA, 19 nt, Human
uguguguguguaugcgugu

SEQ ID NO: 1218151 - RNA, 20 nt, Human
uguguguguguaugcgugua

SEQ ID NO: 1218152 - RNA, 21 nt, Human
uucgcccugucugcucagaca

SEQ ID NO: 1218153 - RNA, 20 nt, Human
uuugaagaccuucuuuuauu

SEQ ID NO: 1218154 - RNA, 23 nt, Human
uuugccaacugauauuuuuccug

SEQ ID NO: 1218155 - RNA, 23 nt, Human
uuugugguggguacauguacaua

SEQ ID NO: 1218156 - RNA, 23 nt, Human
aucauuugauauuuucccacagu

SEQ ID NO: 1218157 - RNA, 20 nt, Human
ggcccggggugcuccagggu

SEQ ID NO: 1218158 - RNA, 26 nt, Human
gggaaaauuauugguaauuuucucuu

SEQ ID NO: 1218159 - RNA, 24 nt, Human
ucuuucuucuucuuuugggagucc

SEQ ID NO: 1218160 - RNA, 18 nt, Human
ugauuuguucuuucuucu

SEQ ID NO: 1218161 - RNA, 22 nt, Human
aaaagaacaaagaucaaacaaa

SEQ ID NO: 1218162 - RNA, 19 nt, Human
aaacaaaccaggaaaaaac

SEQ ID NO: 1218163 - RNA, 21 nt, Human
aaacaaaccaggaaaaaacaa

SEQ ID NO: 1218164 - RNA, 22 nt, Human
aaacaggugaaguggaaaccac

SEQ ID NO: 1218165 - RNA, 24 nt, Human
aaagugcugggauuacagguguga

SEQ ID NO: 1218166 - RNA, 21 nt, Human
aaaguggaaacaggugaagug

SEQ ID NO: 1218167 - RNA, 24 nt, Human
aaaguguugggauuacaggccuga

SEQ ID NO: 1218168 - RNA, 22 nt, Human
aaauagccagcguaagcaaaac

SEQ ID NO: 1218169 - RNA, 18 nt, Human
aaaucaacuccaaaugga

SEQ ID NO: 1218170 - RNA, 18 nt, Human
aacaaaaaucaacuccaa

SEQ ID NO: 1218171 - RNA, 21 nt, Human
aaccacugcaaucuucuaagu

SEQ ID NO: 1218172 - RNA, 22 nt, Human
aagcaacuugggauaaaacaua

SEQ ID NO: 1218173 - RNA, 25 nt, Human
aagcaauucuccugccucagccucc

SEQ ID NO: 1218174 - RNA, 24 nt, Human
aaggagaugcuguuucacaaccac

SEQ ID NO: 1218175 - RNA, 22 nt, Human
aaggagcugggauuacaggcgu

SEQ ID NO: 1218176 - RNA, 18 nt, Human
aagugcugggauuacagg

SEQ ID NO: 1218177 - RNA, 19 nt, Human
aagugcugggauuacaggu

SEQ ID NO: 1218178 - RNA, 26 nt, Human
aagugcugggauuacaggugugagcc

SEQ ID NO: 1218179 - RNA, 21 nt, Human
aaguguugggauuacaggccu

SEQ ID NO: 1218180 - RNA, 26 nt, Human
aaguguugggauuacaggccugagcc

SEQ ID NO: 1218181 - RNA, 22 nt, Human
acaucacacuuucuccuuuucu

SEQ ID NO: 1218182 - RNA, 20 nt, Human
accaacaccccaaggagaug

SEQ ID NO: 1218183 - RNA, 24 nt, Human
accauguuggccaggauggucuug

SEQ ID NO: 1218184 - RNA, 20 nt, Human
accucacaacagccucacua

SEQ ID NO: 1218185 - RNA, 24 nt, Human
accuugugauccacccaccucggc

SEQ ID NO: 1218186 - RNA, 24 nt, Human
accuugugauccgcccaccucggc

SEQ ID NO: 1218187 - RNA, 18 nt, Human
acgagguuucacuguguu

SEQ ID NO: 1218188 - RNA, 20 nt, Human
acgagguuucacuguguugg

SEQ ID NO: 1218189 - RNA, 24 nt, Human
acgagguuucacuguguuggccag

SEQ ID NO: 1218190 - RNA, 24 nt, Human
acucuguugccaggcuggagugca

SEQ ID NO: 1218191 - RNA, 26 nt, Human
agaccagguacuucauccaaaaagga

SEQ ID NO: 1218192 - RNA, 22 nt, Human
agagaagugcaaaccaacaccc

SEQ ID NO: 1218193 - RNA, 21 nt, Human
aggaaaaaacaagaccaggua

SEQ ID NO: 1218194 - RNA, 19 nt, Human
aggagaaaagaaauuucug

SEQ ID NO: 1218195 - RNA, 24 nt, Human
aggagaaaagaaauuucugaugaa

SEQ ID NO: 1218196 - RNA, 23 nt, Human
aggccagggcaagcgaaugggaa

SEQ ID NO: 1218197 - RNA, 25 nt, Human
aggccuugcaaaaauuuuuaugucc

SEQ ID NO: 1218198 - RNA, 25 nt, Human
aggcuggagugcaguggcgcgaucu

SEQ ID NO: 1218199 - RNA, 24 nt, Human
agucuacacuucugaauuuuaggu

SEQ ID NO: 1218200 - RNA, 20 nt, Human
agugcaguggcgcgaucucg

SEQ ID NO: 1218201 - RNA, 23 nt, Human
agugcaguggcgcgaucucgguu

SEQ ID NO: 1218202 - RNA, 24 nt, Human
agugcaguggcgcgaucucgguuc

SEQ ID NO: 1218203 - RNA, 24 nt, Human
aucacaaaaguggaaacaggugaa

SEQ ID NO: 1218204 - RNA, 19 nt, Human
augcuguuucacaaccacu

SEQ ID NO: 1218205 - RNA, 18 nt, Human
auggaaccucuucaaacu

SEQ ID NO: 1218206 - RNA, 18 nt, Human
auggcguuucaccauguu

SEQ ID NO: 1218207 - RNA, 24 nt, Human
auggcguuucaccauguuggccag

SEQ ID NO: 1218208 - RNA, 21 nt, Human
auucuccugccucagccuccc

SEQ ID NO: 1218209 - RNA, 24 nt, Human
auuuuucuauuuuuaguagagaug

SEQ ID NO: 1218210 - RNA, 23 nt, Human
caaaccaggaaaaaacaagacca

SEQ ID NO: 1218211 - RNA, 24 nt, Human
caaagugcugggauuacaggugug

SEQ ID NO: 1218212 - RNA, 18 nt, Human
caaaguguugggauuaca

SEQ ID NO: 1218213 - RNA, 22 nt, Human
caagcaauucuccugccucagc

SEQ ID NO: 1218214 - RNA, 23 nt, Human
caagcgaaugggaaaaacuaaac

SEQ ID NO: 1218215 - RNA, 22 nt, Human
caaguggugacucaccucacaa

SEQ ID NO: 1218216 - RNA, 23 nt, Human
caauuuuucuauuuuuaguagag

SEQ ID NO: 1218217 - RNA, 24 nt, Human
caauuuuucuauuuuuaguagaga

SEQ ID NO: 1218218 - RNA, 18 nt, Human
caccauguuggccaggau

SEQ ID NO: 1218219 - RNA, 22 nt, Human
caccauguuggccaggaugguc

SEQ ID NO: 1218220 - RNA, 24 nt, Human
caccauguuggccaggauggucuu

SEQ ID NO: 1218221 - RNA, 22 nt, Human
cacccaccucggccucccaaag

SEQ ID NO: 1218222 - RNA, 23 nt, Human
cacccaccucggccucccaaagu

SEQ ID NO: 1218223 - RNA, 23 nt, Human
caccccaaggagaugcuguuuca

SEQ ID NO: 1218224 - RNA, 24 nt, Human
caccucggccucccaaagugcugg

SEQ ID NO: 1218225 - RNA, 24 nt, Human
caccucggccucccaaaguguugg

SEQ ID NO: 1218226 - RNA, 23 nt, Human
cacucuguugccaggcuggagug

SEQ ID NO: 1218227 - RNA, 18 nt, Human
cacuguguuggccaggau

SEQ ID NO: 1218228 - RNA, 21 nt, Human
cacuguguuggccaggauggu

SEQ ID NO: 1218229 - RNA, 22 nt, Human
cacuguguuggccaggaugguc

SEQ ID NO: 1218230 - RNA, 28 nt, Human
cacuuuggaaaaaacgucacucccuaag

SEQ ID NO: 1218231 - RNA, 20 nt, Human
caggaaaaaacaagaccagg

SEQ ID NO: 1218232 - RNA, 22 nt, Human
caggaaaaaacaagaccaggua

SEQ ID NO: 1218233 - RNA, 21 nt, Human
caggccagcuccuaaggcuga

SEQ ID NO: 1218234 - RNA, 20 nt, Human
ccaaagugcugggauuacag

SEQ ID NO: 1218235 - RNA, 21 nt, Human
ccaaagugcugggauuacagg

SEQ ID NO: 1218236 - RNA, 21 nt, Human
ccaaagugcugggauuacagg

SEQ ID NO: 1218237 - RNA, 24 nt, Human
ccaaagugcugggauuacaggugu

SEQ ID NO: 1218238 - RNA, 19 nt, Human
ccaaaguguugggauuaca

SEQ ID NO: 1218239 - RNA, 22 nt, Human
ccaaaguguugggauuacaggc

SEQ ID NO: 1218240 - RNA, 24 nt, Human
ccaaaguguugggauuacaggccu

SEQ ID NO: 1218241 - RNA, 23 nt, Human
ccaagcuucugggacccuccagg

SEQ ID NO: 1218242 - RNA, 24 nt, Human
ccaaggagcugggauuacaggcgu

SEQ ID NO: 1218243 - RNA, 19 nt, Human
cccaaggagcugggauuac

SEQ ID NO: 1218244 - RNA, 23 nt, Human
cccaaggagcugggauuacaggc

SEQ ID NO: 1218245 - RNA, 21 nt, Human
cccccggccugggcuugguuu

SEQ ID NO: 1218246 - RNA, 22 nt, Human
ccugaccuugugauccacccac

SEQ ID NO: 1218247 - RNA, 22 nt, Human
ccuuuuuuuuugagacagaguc

SEQ ID NO: 1218248 - RNA, 24 nt, Human
cgagguuucacuguguuggccagg

SEQ ID NO: 1218249 - RNA, 23 nt, Human
cgcccccggccugggcuugguuu

SEQ ID NO: 1218250 - RNA, 23 nt, Human
cgugcaccaccacaucuagccaa

SEQ ID NO: 1218251 - RNA, 24 nt, Human
cguuucaccauguuggccaggaug

SEQ ID NO: 1218252 - RNA, 18 nt, Human
cucacucuguugccaggc

SEQ ID NO: 1218253 - RNA, 23 nt, Human
cucacucuguugccaggcuggag

SEQ ID NO: 1218254 - RNA, 19 nt, Human
cucauggaaccucuucaaa

SEQ ID NO: 1218255 - RNA, 18 nt, Human
cuccugaccuugugaucc

SEQ ID NO: 1218256 - RNA, 20 nt, Human
cuccugaccuugugauccgc

SEQ ID NO: 1218257 - RNA, 22 nt, Human
cuccugaccuugugauccgccc

SEQ ID NO: 1218258 - RNA, 25 nt, Human
cuccugccucagccucccaaggagc

SEQ ID NO: 1218259 - RNA, 23 nt, Human
cugccucagccucccaaggagcu

SEQ ID NO: 1218260 - RNA, 19 nt, Human
cuuaaagccuacgcagaac

SEQ ID NO: 1218261 - RNA, 20 nt, Human
cuucugggacccuccaggcc

SEQ ID NO: 1218262 - RNA, 19 nt, Human
gaaaauagccagcguaagc

SEQ ID NO: 1218263 - RNA, 22 nt, Human
gaaaccacugcaaucuucuaag

SEQ ID NO: 1218264 - RNA, 18 nt, Human
gaagugcaaaccaacacc

SEQ ID NO: 1218265 - RNA, 21 nt, Human
gaagugcaaaccaacacccca

SEQ ID NO: 1218266 - RNA, 24 nt, Human
gacagagucucacucuguugccag

SEQ ID NO: 1218267 - RNA, 22 nt, Human
gaccuugugauccacccaccuc

SEQ ID NO: 1218268 - RNA, 22 nt, Human
gaccuugugauccacccaccuc

SEQ ID NO: 1218269 - RNA, 24 nt, Human
gaccuugugauccacccaccucgg

SEQ ID NO: 1218270 - RNA, 22 nt, Human
gaccuugugauccgcccaccuc

SEQ ID NO: 1218271 - RNA, 22 nt, Human
gaccuugugauccgcccaccuc

SEQ ID NO: 1218272 - RNA, 22 nt, Human
gagaagugcaaaccaacacccc

SEQ ID NO: 1218273 - RNA, 23 nt, Human
gagguuucacuguguuggccagg

SEQ ID NO: 1218274 - RNA, 18 nt, Human
gauuacaggccugagcca

SEQ ID NO: 1218275 - RNA, 21 nt, Human
gauuacaggccugagccacca

SEQ ID NO: 1218276 - RNA, 18 nt, Human
gauuacaggugugagcca

SEQ ID NO: 1218277 - RNA, 21 nt, Human
gauuacaggugugagccaccg

SEQ ID NO: 1218278 - RNA, 22 nt, Human
gauuacaggugugagccaccgc

SEQ ID NO: 1218279 - RNA, 20 nt, Human
gcgaggcucguccaccuaca

SEQ ID NO: 1218280 - RNA, 19 nt, Human
gcuggagugcaguggcgcg

SEQ ID NO: 1218281 - RNA, 21 nt, Human
ggacugccuggaggccagggc

SEQ ID NO: 1218282 - RNA, 23 nt, Human
ggauaaaacauagaaacugugga

SEQ ID NO: 1218283 - RNA, 24 nt, Human
ggauggucaugaucuccugaccuu

SEQ ID NO: 1218284 - RNA, 24 nt, Human
ggauggucuugaucuccugaccuu

SEQ ID NO: 1218285 - RNA, 19 nt, Human
ggauuacaggccugagcca

SEQ ID NO: 1218286 - RNA, 22 nt, Human
ggcguuucaccauguuggccag

SEQ ID NO: 1218287 - RNA, 23 nt, Human
ggcguuucaccauguuggccagg

SEQ ID NO: 1218288 - RNA, 20 nt, Human
ggucuugaucuccugaccuu

SEQ ID NO: 1218289 - RNA, 24 nt, Human
gucucacucuguugccaggcugga

SEQ ID NO: 1218290 - RNA, 24 nt, Human
gugauccacccaccucggccuccc

SEQ ID NO: 1218291 - RNA, 24 nt, Human
gugauccgcccaccucggccuccc

SEQ ID NO: 1218292 - RNA, 19 nt, Human
uaaaacauagaaacugugg

SEQ ID NO: 1218293 - RNA, 26 nt, Human
uaaacuuucggauuuuuucucucaca

SEQ ID NO: 1218294 - RNA, 22 nt, Human
uacaggccugagccaccacacc

SEQ ID NO: 1218295 - RNA, 20 nt, Human
uacaggcgugcaccaccaca

SEQ ID NO: 1218296 - RNA, 23 nt, Human
uacaggugugagccaccgccccc

SEQ ID NO: 1218297 - RNA, 18 nt, Human
uacuacaucacacuuucu

SEQ ID NO: 1218298 - RNA, 20 nt, Human
uagagacgagguuucacugu

SEQ ID NO: 1218299 - RNA, 22 nt, Human
uagagauggcguuucaccaugu

SEQ ID NO: 1218300 - RNA, 18 nt, Human
uagguagagagacuauga

SEQ ID NO: 1218301 - RNA, 24 nt, Human
uaguagagauggcguuucaccaug

SEQ ID NO: 1218302 - RNA, 22 nt, Human
uaucauaacacugcuccccaag

SEQ ID NO: 1218303 - RNA, 26 nt, Human
ucaaacaaaccaggaaaaaacaagac

SEQ ID NO: 1218304 - RNA, 20 nt, Human
ucacaaaaguggaaacaggu

SEQ ID NO: 1218305 - RNA, 24 nt, Human
ucaccauguuggccaggauggucu

SEQ ID NO: 1218306 - RNA, 19 nt, Human
ucacugcaaucugugcuuc

SEQ ID NO: 1218307 - RNA, 23 nt, Human
ucacugcaaucugugcuucccau

SEQ ID NO: 1218308 - RNA, 28 nt, Human
ucacugcaaucugugcuucgggcccucc

SEQ ID NO: 1218309 - RNA, 23 nt, Human
ucagcaugaggccccgaucugga

SEQ ID NO: 1218310 - RNA, 20 nt, Human
ucagccucccaaggagcugg

SEQ ID NO: 1218311 - RNA, 23 nt, Human
ucccaaagugcugggauuacagg

SEQ ID NO: 1218312 - RNA, 24 nt, Human
ucccaaaguguugggauuacaggc

SEQ ID NO: 1218313 - RNA, 24 nt, Human
ucccaaggagcugggauuacaggc

SEQ ID NO: 1218314 - RNA, 24 nt, Human
ucccaucuucaagcaauucuccug

SEQ ID NO: 1218315 - RNA, 20 nt, Human
ucccugggcuggguaagacc

SEQ ID NO: 1218316 - RNA, 18 nt, Human
ucggccucccaaagugcu

SEQ ID NO: 1218317 - RNA, 22 nt, Human
ucgguucacugcaaucugugcu

SEQ ID NO: 1218318 - RNA, 28 nt, Human
ucuaaaaaagaacaaagaucaaacaaac

SEQ ID NO: 1218319 - RNA, 22 nt, Human
ucuaagucacaaguggugacuc

SEQ ID NO: 1218320 - RNA, 23 nt, Human
ucucacucuguugccaggcugga

SEQ ID NO: 1218321 - RNA, 26 nt, Human
ucuccugaccuugugauccacccacc

SEQ ID NO: 1218322 - RNA, 18 nt, Human
ucuguugccaggcuggag

SEQ ID NO: 1218323 - RNA, 23 nt, Human
ucuguugccaggcuggagugcag

SEQ ID NO: 1218324 - RNA, 23 nt, Human
ugaagauaaaggaaagguuguau

SEQ ID NO: 1218325 - RNA, 23 nt, Human
ugaccuugugauccacccaccuc

SEQ ID NO: 1218326 - RNA, 25 nt, Human
ugaccuugugauccgcccaccucgg

SEQ ID NO: 1218327 - RNA, 18 nt, Human
ugagacagagucucacuc

SEQ ID NO: 1218328 - RNA, 22 nt, Human
ugagacagagucucacucuguu

SEQ ID NO: 1218329 - RNA, 23 nt, Human
ugaggaaaaccacaccacuggug

SEQ ID NO: 1218330 - RNA, 24 nt, Human
ugauccacccaccucggccuccca

SEQ ID NO: 1218331 - RNA, 24 nt, Human
ugauccgcccaccucggccuccca

SEQ ID NO: 1218332 - RNA, 19 nt, Human
ugcaaaccaacaccccaag

SEQ ID NO: 1218333 - RNA, 21 nt, Human
ugccaggcuggagugcagugg

SEQ ID NO: 1218334 - RNA, 23 nt, Human
ugccaggcuggagugcaguggcg

SEQ ID NO: 1218335 - RNA, 19 nt, Human
ugcccaggagucaacaugg

SEQ ID NO: 1218336 - RNA, 21 nt, Human
ugcccaggagucaacauggca

SEQ ID NO: 1218337 - RNA, 24 nt, Human
ugccucagccucccaaggagcugg

SEQ ID NO: 1218338 - RNA, 24 nt, Human
ugcugggauuacaggugugagcca

SEQ ID NO: 1218339 - RNA, 18 nt, Human
uggaaacaggugaagugg

SEQ ID NO: 1218340 - RNA, 20 nt, Human
uggaaacaggugaaguggaa

SEQ ID NO: 1218341 - RNA, 23 nt, Human
uggagugcaguggcgcgaucucg

SEQ ID NO: 1218342 - RNA, 24 nt, Human
uggagugcaguggcgcgaucucgg

SEQ ID NO: 1218343 - RNA, 24 nt, Human
uggccaggauggucaugaucuccu

SEQ ID NO: 1218344 - RNA, 24 nt, Human
uggccaggauggucuugaucuccu

SEQ ID NO: 1218345 - RNA, 21 nt, Human
uggcguuucaccauguuggcc

SEQ ID NO: 1218346 - RNA, 24 nt, Human
uggcguuucaccauguuggccagg

SEQ ID NO: 1218347 - RNA, 20 nt, Human
ugggaaaaacuaaacuuucg

SEQ ID NO: 1218348 - RNA, 18 nt, Human
ugggauuacaggccugag

SEQ ID NO: 1218349 - RNA, 19 nt, Human
ugggauuacaggccugagc

SEQ ID NO: 1218350 - RNA, 21 nt, Human
ugggauuacaggccugagcca

SEQ ID NO: 1218351 - RNA, 22 nt, Human
ugggauuacaggccugagccac

SEQ ID NO: 1218352 - RNA, 24 nt, Human
ugggauuacaggccugagccacca

SEQ ID NO: 1218353 - RNA, 21 nt, Human
ugggauuacaggcgugcacca

SEQ ID NO: 1218354 - RNA, 22 nt, Human
ugggauuacaggcgugcaccac

SEQ ID NO: 1218355 - RNA, 24 nt, Human
ugggauuacaggcgugcaccacca

SEQ ID NO: 1218356 - RNA, 25 nt, Human
ugggauuacaggcgugcaccaccac

SEQ ID NO: 1218357 - RNA, 18 nt, Human
ugggauuacaggugugag

SEQ ID NO: 1218358 - RNA, 19 nt, Human
ugggauuacaggugugagc

SEQ ID NO: 1218359 - RNA, 21 nt, Human
ugggauuacaggugugagcca

SEQ ID NO: 1218360 - RNA, 22 nt, Human
ugggauuacaggugugagccac

SEQ ID NO: 1218361 - RNA, 23 nt, Human
ugggauuacaggugugagccacc

SEQ ID NO: 1218362 - RNA, 24 nt, Human
ugggauuacaggugugagccaccg

SEQ ID NO: 1218363 - RNA, 21 nt, Human
uggguaagaccuugucacaga

SEQ ID NO: 1218364 - RNA, 24 nt, Human
ugggugcuggugccaagcuucugg

SEQ ID NO: 1218365 - RNA, 23 nt, Human
ugugaaaacggaagucagcauga

SEQ ID NO: 1218366 - RNA, 18 nt, Human
uuaguagagauggcguuu

SEQ ID NO: 1218367 - RNA, 24 nt, Human
uuaguagagauggcguuucaccau

SEQ ID NO: 1218368 - RNA, 21 nt, Human
uucaagcaauucuccugccuc

SEQ ID NO: 1218369 - RNA, 24 nt, Human
uucaagcaauucuccugccucagc

SEQ ID NO: 1218370 - RNA, 24 nt, Human
uucuuuagguuuauccugucuggg

SEQ ID NO: 1218371 - RNA, 24 nt, Human
uugauucugucuuaaagccuacgc

SEQ ID NO: 1218372 - RNA, 21 nt, Human
uugccaggcuggagugcagug

SEQ ID NO: 1218373 - RNA, 24 nt, Human
uugccaggcuggagugcaguggcg

SEQ ID NO: 1218374 - RNA, 19 nt, Human
uuucaccauguuggccagg

SEQ ID NO: 1218375 - RNA, 20 nt, Human
uuucaccauguuggccagga

SEQ ID NO: 1218376 - RNA, 19 nt, Human
uuucacuguguuggccagg

SEQ ID NO: 1218377 - RNA, 24 nt, Human
uuuuuaguagagauggcguuucac

SEQ ID NO: 1218378 - RNA, 25 nt, Human
acccuccuaagguuuuucuucauug

SEQ ID NO: 1218379 - RNA, 20 nt, Human
accuuagagaacacugaggg

SEQ ID NO: 1218380 - RNA, 22 nt, Human
accuuagagaacacugagggcu

SEQ ID NO: 1218381 - RNA, 20 nt, Human
agaacacugagggcuuucuc

SEQ ID NO: 1218382 - RNA, 18 nt, Human
agaggucuuucaugucuu

SEQ ID NO: 1218383 - RNA, 19 nt, Human
agggcuuucucugugucug

SEQ ID NO: 1218384 - RNA, 21 nt, Human
auaccauccauauucagcaag

SEQ ID NO: 1218385 - RNA, 26 nt, Human
caacaauucucacccuccuaagguuu

SEQ ID NO: 1218386 - RNA, 25 nt, Human
caagggaucaucaaaguacugagca

SEQ ID NO: 1218387 - RNA, 20 nt, Human
cagcccgaggacacgcgcgg

SEQ ID NO: 1218388 - RNA, 21 nt, Human
cagggugaguuccugccugcc

SEQ ID NO: 1218389 - RNA, 21 nt, Human
ccacucccggaccagcuuccc

SEQ ID NO: 1218390 - RNA, 25 nt, Human
ccagcacgcaccgccgcaagaaccg

SEQ ID NO: 1218391 - RNA, 21 nt, Human
ccauccauauucagcaagacc

SEQ ID NO: 1218392 - RNA, 22 nt, Human
cccacggauggcuggaucccua

SEQ ID NO: 1218393 - RNA, 21 nt, Human
ccggcgccagcacgcaccgcc

SEQ ID NO: 1218394 - RNA, 25 nt, Human
ccugaagccaaggccacugcagggc

SEQ ID NO: 1218395 - RNA, 27 nt, Human
cuaccgcgagcggcggcgacuuucccu

SEQ ID NO: 1218396 - RNA, 18 nt, Human
cugaagccaaggccacug

SEQ ID NO: 1218397 - RNA, 22 nt, Human
gaagcgucugaaugcuccuuuc

SEQ ID NO: 1218398 - RNA, 20 nt, Human
gaggcaggcgggcgggcgcc

SEQ ID NO: 1218399 - RNA, 18 nt, Human
ggaagcggugccgggggc

SEQ ID NO: 1218400 - RNA, 18 nt, Human
gggcgggcgcccacuccc

SEQ ID NO: 1218401 - RNA, 19 nt, Human
ucccaacaauucucacccu

SEQ ID NO: 1218402 - RNA, 22 nt, Human
ucccaacaauucucacccuccu

SEQ ID NO: 1218403 - RNA, 21 nt, Human
uccccgcggacagcccgagga

SEQ ID NO: 1218404 - RNA, 18 nt, Human
ucuacuggauaccaucca

SEQ ID NO: 1218405 - RNA, 24 nt, Human
ugaaugcuccuuuccugaagccaa

SEQ ID NO: 1218406 - RNA, 24 nt, Human
ugacccacggauggcuggaucccu

SEQ ID NO: 1218407 - RNA, 24 nt, Human
ugacuucccaacaauucucacccu

SEQ ID NO: 1218408 - RNA, 21 nt, Human
ugagcagaacagcaacaaugc

SEQ ID NO: 1218409 - RNA, 21 nt, Human
ugccuagccacauuccucaag

SEQ ID NO: 1218410 - RNA, 23 nt, Human
ugccuagccacauuccucaaguc

SEQ ID NO: 1218411 - RNA, 20 nt, Human
ugcugauugccuagccacau

SEQ ID NO: 1218412 - RNA, 23 nt, Human
uggcuggaucccuauuuccagcu

SEQ ID NO: 1218413 - RNA, 19 nt, Human
uuccucaagucauggacau

SEQ ID NO: 1218414 - RNA, 18 nt, Human
uucucugugucugcugca

SEQ ID NO: 1218415 - RNA, 25 nt, Human
aaacaccacgguguccccugucuua

SEQ ID NO: 1218416 - RNA, 21 nt, Human
cacagcagugacccgcuggcc

SEQ ID NO: 1218417 - RNA, 23 nt, Human
cacagcagugacccgcuggcccc

SEQ ID NO: 1218418 - RNA, 18 nt, Human
cagcagugacccgcuggc

SEQ ID NO: 1218419 - RNA, 20 nt, Human
caggugccacuccaccuccu

SEQ ID NO: 1218420 - RNA, 25 nt, Human
ccccugucuuaaaccagccauccag

SEQ ID NO: 1218421 - RNA, 24 nt, Human
cccuccuuuucuucaaacccuggg

SEQ ID NO: 1218422 - RNA, 18 nt, Human
ccuccagggcgcugaccu

SEQ ID NO: 1218423 - RNA, 24 nt, Human
ccuccagucuugaugauguccacu

SEQ ID NO: 1218424 - RNA, 20 nt, Human
ccuucucggagggucaccac

SEQ ID NO: 1218425 - RNA, 23 nt, Human
cucuuugagcucccugugggaca

SEQ ID NO: 1218426 - RNA, 24 nt, Human
cuggcccacucuuugguccccugg

SEQ ID NO: 1218427 - RNA, 20 nt, Human
cugggaccugcccuggagag

SEQ ID NO: 1218428 - RNA, 22 nt, Human
gaggguccccucaccagcagcu

SEQ ID NO: 1218429 - RNA, 26 nt, Human
gcagggcacuguggggcgggaggugc

SEQ ID NO: 1218430 - RNA, 20 nt, Human
gggcacuguggggcgggagg

SEQ ID NO: 1218431 - RNA, 21 nt, Human
ggguccccucaccagcagcuc

SEQ ID NO: 1218432 - RNA, 22 nt, Human
ucucggagggucaccacagcag

SEQ ID NO: 1218433 - RNA, 21 nt, Human
ugcagggcacuguggggcggg

SEQ ID NO: 1218434 - RNA, 21 nt, Human
ugcccuggagagccuggcaac

SEQ ID NO: 1218435 - RNA, 19 nt, Human
ugcuggggugggccagcag

SEQ ID NO: 1218436 - RNA, 20 nt, Human
uggagucuuuguuuuuuguu

SEQ ID NO: 1218437 - RNA, 18 nt, Human
uuccuccaguggagucuu

SEQ ID NO: 1218438 - RNA, 18 nt, Human
agcggccucucggcggag

SEQ ID NO: 1218439 - RNA, 18 nt, Human
gccugcacuuggggaaga

SEQ ID NO: 1218440 - RNA, 22 nt, Human
ggcucugccugcacuuggggaa

SEQ ID NO: 1218441 - RNA, 18 nt, Human
uggggaagaggaaggacc

SEQ ID NO: 1218442 - RNA, 24 nt, Human
cucucggccucggugaauuccauc

SEQ ID NO: 1218443 - RNA, 21 nt, Human
ucauguugcucucggccucgg

SEQ ID NO: 1218444 - RNA, 22 nt, Human
ugcucucggccucggugaauuc

SEQ ID NO: 1218445 - RNA, 23 nt, Human
acagaacuggaccuggcgccuga

SEQ ID NO: 1218446 - RNA, 20 nt, Human
accucagcuccgacacagcc

SEQ ID NO: 1218447 - RNA, 21 nt, Human
accucagcuccgacacagccc

SEQ ID NO: 1218448 - RNA, 20 nt, Human
agaccuggccagagcuggug

SEQ ID NO: 1218449 - RNA, 18 nt, Human
agaggccaggaccugggc

SEQ ID NO: 1218450 - RNA, 24 nt, Human
agagugcugggaucacaggcauga

SEQ ID NO: 1218451 - RNA, 20 nt, Human
agaugcuggcagaggccgcc

SEQ ID NO: 1218452 - RNA, 19 nt, Human
aggcaugaaccaccacgcc

SEQ ID NO: 1218453 - RNA, 25 nt, Human
agggguugaaggccacaccaugcac

SEQ ID NO: 1218454 - RNA, 22 nt, Human
agugcugggaucacaggcauga

SEQ ID NO: 1218455 - RNA, 18 nt, Human
auccaccugccuuggccu

SEQ ID NO: 1218456 - RNA, 24 nt, Human
caagaagccugucaucuggugaga

SEQ ID NO: 1218457 - RNA, 18 nt, Human
caaugggcggucgugcug

SEQ ID NO: 1218458 - RNA, 23 nt, Human
caccaugcaccggcuccgggagg

SEQ ID NO: 1218459 - RNA, 22 nt, Human
caccucagcuccgacacagccc

SEQ ID NO: 1218460 - RNA, 20 nt, Human
caccugccuuggccucccag

SEQ ID NO: 1218461 - RNA, 23 nt, Human
caccugccuuggccucccagagu

SEQ ID NO: 1218462 - RNA, 24 nt, Human
caccugccuuggccucccagagug

SEQ ID NO: 1218463 - RNA, 24 nt, Human
cagagugcugggaucacaggcaug

SEQ ID NO: 1218464 - RNA, 21 nt, Human
ccaccgucauccgccucccag

SEQ ID NO: 1218465 - RNA, 22 nt, Human
ccaccgucauccgccucccagg

SEQ ID NO: 1218466 - RNA, 18 nt, Human
ccacugccucugggacug

SEQ ID NO: 1218467 - RNA, 19 nt, Human
ccacugccucugggacugg

SEQ ID NO: 1218468 - RNA, 24 nt, Human
ccagagugcugggaucacaggcau

SEQ ID NO: 1218469 - RNA, 18 nt, Human
ccaggacaagaagcagcg

SEQ ID NO: 1218470 - RNA, 22 nt, Human
cccacaggcgcagccgccccgu

SEQ ID NO: 1218471 - RNA, 21 nt, Human
cccccacugccucugggacug

SEQ ID NO: 1218472 - RNA, 24 nt, Human
cccccagugugacaagaagccugu

SEQ ID NO: 1218473 - RNA, 22 nt, Human
ccccgugcugcugccgcugacc

SEQ ID NO: 1218474 - RNA, 18 nt, Human
cccgagaacagcaacagc

SEQ ID NO: 1218475 - RNA, 21 nt, Human
ccgagaacagcaacagcccaa

SEQ ID NO: 1218476 - RNA, 25 nt, Human
ccgaggcagaggccaggaccugggc

SEQ ID NO: 1218477 - RNA, 21 nt, Human
ccucccaggacaagaagcagc

SEQ ID NO: 1218478 - RNA, 24 nt, Human
ccugccuuggccucccagagugcu

SEQ ID NO: 1218479 - RNA, 19 nt, Human
ccuggccagagcuggugcc

SEQ ID NO: 1218480 - RNA, 18 nt, Human
cgagaacagcaacagccc

SEQ ID NO: 1218481 - RNA, 23 nt, Human
cgagaacagcaacagcccaaugc

SEQ ID NO: 1218482 - RNA, 30 nt, Human
cgagaacccgagaacagcaacagcccaauu

SEQ ID NO: 1218483 - RNA, 25 nt, Human
cgaggcagaggccaggaccugggca

SEQ ID NO: 1218484 - RNA, 20 nt, Human
cgaggucagcucuccagccc

SEQ ID NO: 1218485 - RNA, 18 nt, Human
cggcccgaggcagaggcc

SEQ ID NO: 1218486 - RNA, 22 nt, Human
cugaaggagccagaaggugaca

SEQ ID NO: 1218487 - RNA, 21 nt, Human
cuggugagaaggccagggcca

SEQ ID NO: 1218488 - RNA, 24 nt, Human
gaacccgagaacagcaacagccca

SEQ ID NO: 1218489 - RNA, 21 nt, Human
gaggucagcucuccagccccc

SEQ ID NO: 1218490 - RNA, 25 nt, Human
gccagcacgguggugcuauggggga

SEQ ID NO: 1218491 - RNA, 21 nt, Human
gcccaaugccaccgucauccg

SEQ ID NO: 1218492 - RNA, 23 nt, Human
gccggcacgcgugucccagacac

SEQ ID NO: 1218493 - RNA, 20 nt, Human
ggacaagaagcagcggccgg

SEQ ID NO: 1218494 - RNA, 20 nt, Human
ggaggcggguggaggacacg

SEQ ID NO: 1218495 - RNA, 23 nt, Human
gggcacuguggcugagggccagc

SEQ ID NO: 1218496 - RNA, 21 nt, Human
gggccagcguggagaucuccg

SEQ ID NO: 1218497 - RNA, 19 nt, Human
ggggaaaaugagaugcugg

SEQ ID NO: 1218498 - RNA, 18 nt, Human
gucagcucuccagccccc

SEQ ID NO: 1218499 - RNA, 20 nt, Human
gucccagacgcggaucugac

SEQ ID NO: 1218500 - RNA, 18 nt, Human
uagguggccgugccccac

SEQ ID NO: 1218501 - RNA, 21 nt, Human
ucagcuccgacacagccccca

SEQ ID NO: 1218502 - RNA, 22 nt, Human
uccaccugccuuggccucccag

SEQ ID NO: 1218503 - RNA, 24 nt, Human
ucccagagugcugggaucacaggc

SEQ ID NO: 1218504 - RNA, 23 nt, Human
ucccagggguugaaggccacacc

SEQ ID NO: 1218505 - RNA, 18 nt, Human
ucuccagcccccacugcc

SEQ ID NO: 1218506 - RNA, 21 nt, Human
ugaaggcugaugucugcccca

SEQ ID NO: 1218507 - RNA, 21 nt, Human
ugagcccuugcaccucagcuc

SEQ ID NO: 1218508 - RNA, 21 nt, Human
ugagcucgccggcgucccagg

SEQ ID NO: 1218509 - RNA, 23 nt, Human
ugcaccucagcuccgacacagcc

SEQ ID NO: 1218510 - RNA, 19 nt, Human
ugcugggaucacaggcaug

SEQ ID NO: 1218511 - RNA, 23 nt, Human
ugcugggaucacaggcaugaacc

SEQ ID NO: 1218512 - RNA, 22 nt, Human
uggcgccugagcccuugcaccu

SEQ ID NO: 1218513 - RNA, 24 nt, Human
ugggaucacaggcaugaaccacca

SEQ ID NO: 1218514 - RNA, 24 nt, Human
ugggaucacaggcaugaaccacca

SEQ ID NO: 1218515 - RNA, 21 nt, Human
ugggcacuguggcugagggcc

SEQ ID NO: 1218516 - RNA, 22 nt, Human
ugggcacuguggcugagggcca

SEQ ID NO: 1218517 - RNA, 21 nt, Human
uggugcuaugggggaaaauga

SEQ ID NO: 1218518 - RNA, 23 nt, Human
ugucccagacacagaccuggcca

SEQ ID NO: 1218519 - RNA, 22 nt, Human
uguggcugagggccagcgugga

SEQ ID NO: 1218520 - RNA, 24 nt, Human
aaaagggcaacagguaugaaagua

SEQ ID NO: 1218521 - RNA, 18 nt, Human
accacagucccugcugca

SEQ ID NO: 1218522 - RNA, 19 nt, Human
accacagucccugcugcau

SEQ ID NO: 1218523 - RNA, 18 nt, Human
accaggcgugaugcccac

SEQ ID NO: 1218524 - RNA, 21 nt, Human
acuccacauggcggaaaggag

SEQ ID NO: 1218525 - RNA, 19 nt, Human
caacagguaugaaaguauu

SEQ ID NO: 1218526 - RNA, 27 nt, Human
caacuccacauggcggaaaggagcaau

SEQ ID NO: 1218527 - RNA, 20 nt, Human
caagauagaaacauuaaaga

SEQ ID NO: 1218528 - RNA, 22 nt, Human
ccaggugccuggcaugaccagg

SEQ ID NO: 1218529 - RNA, 21 nt, Human
ccccgugugugucccugcacu

SEQ ID NO: 1218530 - RNA, 20 nt, Human
ccuggcgccucugccaagcc

SEQ ID NO: 1218531 - RNA, 18 nt, Human
cuggccccggccaacucc

SEQ ID NO: 1218532 - RNA, 27 nt, Human
cuggcgccucugccaagccugugucca

SEQ ID NO: 1218533 - RNA, 21 nt, Human
gccaaauuuacaacagcuugc

SEQ ID NO: 1218534 - RNA, 24 nt, Human
uaaaugcccauguuuauuacaaga

SEQ ID NO: 1218535 - RNA, 18 nt, Human
uccaaaaaaauauggaac

SEQ ID NO: 1218536 - RNA, 20 nt, Human
uccacauggcggaaaggagc

SEQ ID NO: 1218537 - RNA, 18 nt, Human
ugccucuggccccggcca

SEQ ID NO: 1218538 - RNA, 20 nt, Human
ugccucuggccccggccaac

SEQ ID NO: 1218539 - RNA, 18 nt, Human
ugccuggcaugaccaggc

SEQ ID NO: 1218540 - RNA, 22 nt, Human
uggcaugaccaggcgugaugcc

SEQ ID NO: 1218541 - RNA, 24 nt, Human
uguguccaggugccuggcaugacc

SEQ ID NO: 1218542 - RNA, 24 nt, Human
uuuuuuuuuuuugaaauaaaugcc

SEQ ID NO: 1218543 - RNA, 20 nt, Human
uuuuuuuuuuuuuuuuuugg

SEQ ID NO: 1218544 - RNA, 18 nt, Human
aaaacccugauccuugaa

SEQ ID NO: 1218545 - RNA, 18 nt, Human
aaaagaagaaaaauggaa

SEQ ID NO: 1218546 - RNA, 19 nt, Human
aaaccacuuggaggccagg

SEQ ID NO: 1218547 - RNA, 22 nt, Human
aaacuuccccugcaaccaccca

SEQ ID NO: 1218548 - RNA, 20 nt, Human
aaccacuuggaggccaggca

SEQ ID NO: 1218549 - RNA, 22 nt, Human
aaccugcaccaggaggggcggg

SEQ ID NO: 1218550 - RNA, 18 nt, Human
aagaagaaaaauggaaca

SEQ ID NO: 1218551 - RNA, 21 nt, Human
aagguaaaaauuucugcacuu

SEQ ID NO: 1218552 - RNA, 18 nt, Human
aauaagucaucagccacc

SEQ ID NO: 1218553 - RNA, 23 nt, Human
acagccccuuuccucugucccuu

SEQ ID NO: 1218554 - RNA, 18 nt, Human
acaggggugaaggggcug

SEQ ID NO: 1218555 - RNA, 23 nt, Human
acaguguccugcccugaagcugg

SEQ ID NO: 1218556 - RNA, 23 nt, Human
acaucaucucucuggaccagccc

SEQ ID NO: 1218557 - RNA, 18 nt, Human
accacccacccucccccu

SEQ ID NO: 1218558 - RNA, 20 nt, Human
accccaagccuccagguggc

SEQ ID NO: 1218559 - RNA, 23 nt, Human
acccucacugucacaaggccucu

SEQ ID NO: 1218560 - RNA, 18 nt, Human
acccugccuugccucagc

SEQ ID NO: 1218561 - RNA, 23 nt, Human
acccuggcugcccccaggccucc

SEQ ID NO: 1218562 - RNA, 19 nt, Human
accuggugcugcucucugc

SEQ ID NO: 1218563 - RNA, 26 nt, Human
accuuggcagacccugagggcagcug

SEQ ID NO: 1218564 - RNA, 22 nt, Human
acucgcagcccagggccuccag

SEQ ID NO: 1218565 - RNA, 18 nt, Human
acugcucuguggcugggc

SEQ ID NO: 1218566 - RNA, 26 nt, Human
acuuagcacucucccugcugaccccc

SEQ ID NO: 1218567 - RNA, 26 nt, Human
agaagaaaaauggaacaggggugaag

SEQ ID NO: 1218568 - RNA, 18 nt, Human
agagggcaagggugagag

SEQ ID NO: 1218569 - RNA, 18 nt, Human
agcaggaguguggcugcg

SEQ ID NO: 1218570 - RNA, 24 nt, Human
agccggcccuucucucccagcaca

SEQ ID NO: 1218571 - RNA, 20 nt, Human
agccuggagcucccgggcuc

SEQ ID NO: 1218572 - RNA, 20 nt, Human
agccugggccucucuugcag

SEQ ID NO: 1218573 - RNA, 19 nt, Human
agcuaccuaaaacuucccc

SEQ ID NO: 1218574 - RNA, 21 nt, Human
agcuaccuaaaacuuccccug

SEQ ID NO: 1218575 - RNA, 23 nt, Human
agcuccucucagcugucaccccg

SEQ ID NO: 1218576 - RNA, 21 nt, Human
agcugggcuggguccugagca

SEQ ID NO: 1218577 - RNA, 23 nt, Human
aggaagcgcugccgccggaccug

SEQ ID NO: 1218578 - RNA, 24 nt, Human
aggacccuguggugagccaggucu

SEQ ID NO: 1218579 - RNA, 18 nt, Human
aggacucccuaagcccgg

SEQ ID NO: 1218580 - RNA, 23 nt, Human
aggccccagggucccagggggug

SEQ ID NO: 1218581 - RNA, 24 nt, Human
aggcugaggguccacauguggcug

SEQ ID NO: 1218582 - RNA, 19 nt, Human
agggaacccggcccugggc

SEQ ID NO: 1218583 - RNA, 19 nt, Human
agggcagcugccuggccug

SEQ ID NO: 1218584 - RNA, 18 nt, Human
agggccccucugcugcug

SEQ ID NO: 1218585 - RNA, 19 nt, Human
aggggcggggccuguagug

SEQ ID NO: 1218586 - RNA, 24 nt, Human
aguaggacccuguggugagccagg

SEQ ID NO: 1218587 - RNA, 18 nt, Human
aguggguugggccagaga

SEQ ID NO: 1218588 - RNA, 21 nt, Human
aguguccgauccccaggcagc

SEQ ID NO: 1218589 - RNA, 24 nt, Human
augaggacagcuggggccucuccu

SEQ ID NO: 1218590 - RNA, 21 nt, Human
caaccacccacccucccccug

SEQ ID NO: 1218591 - RNA, 24 nt, Human
caaccacccacccucccccugagg

SEQ ID NO: 1218592 - RNA, 23 nt, Human
cacaggacuugagcuccucucag

SEQ ID NO: 1218593 - RNA, 20 nt, Human
cacaggcucguggcuguggg

SEQ ID NO: 1218594 - RNA, 24 nt, Human
cacaucaucucucuggaccagccc

SEQ ID NO: 1218595 - RNA, 22 nt, Human
caccccgccccagcccagggga

SEQ ID NO: 1218596 - RNA, 23 nt, Human
caccccgccccagcccaggggac

SEQ ID NO: 1218597 - RNA, 23 nt, Human
cacccugcugagcugugacaacc

SEQ ID NO: 1218598 - RNA, 20 nt, Human
caccgacaugguaaguugcu

SEQ ID NO: 1218599 - RNA, 23 nt, Human
caccgcaggcugcgggccgggcg

SEQ ID NO: 1218600 - RNA, 21 nt, Human
caccuggcacggcacacucac

SEQ ID NO: 1218601 - RNA, 18 nt, Human
caccuuggcagacccuga

SEQ ID NO: 1218602 - RNA, 21 nt, Human
cagaaaaacccugauccuuga

SEQ ID NO: 1218603 - RNA, 20 nt, Human
cagaacaagagauucuaccc

SEQ ID NO: 1218604 - RNA, 23 nt, Human
cagaagccugaggccccaggguc

SEQ ID NO: 1218605 - RNA, 25 nt, Human
cagaagccugaggccccaggguccc

SEQ ID NO: 1218606 - RNA, 18 nt, Human
cagcacaggaaccgccag

SEQ ID NO: 1218607 - RNA, 24 nt, Human
cagccaucugccagccagaagccc

SEQ ID NO: 1218608 - RNA, 21 nt, Human
cagcccagggccuccagggcc

SEQ ID NO: 1218609 - RNA, 18 nt, Human
cagcgaccuccgcccacc

SEQ ID NO: 1218610 - RNA, 22 nt, Human
cagggacagggugggacaggga

SEQ ID NO: 1218611 - RNA, 23 nt, Human
cagggcagagccccauggagcuc

SEQ ID NO: 1218612 - RNA, 20 nt, Human
cagggccagcgcgugcaccc

SEQ ID NO: 1218613 - RNA, 18 nt, Human
cagggccucgguuuuucc

SEQ ID NO: 1218614 - RNA, 23 nt, Human
caguggaacugccuucuugggcu

SEQ ID NO: 1218615 - RNA, 19 nt, Human
caguggguugggccagaga

SEQ ID NO: 1218616 - RNA, 20 nt, Human
cagugugguggggacugccc

SEQ ID NO: 1218617 - RNA, 21 nt, Human
cagugugguggggacugcccu

SEQ ID NO: 1218618 - RNA, 20 nt, Human
cauccggggcaccaaggagc

SEQ ID NO: 1218619 - RNA, 21 nt, Human
caugggccguguccuuccggg

SEQ ID NO: 1218620 - RNA, 22 nt, Human
ccacaccccaagccuccaggug

SEQ ID NO: 1218621 - RNA, 23 nt, Human
ccacaccccaagccuccaggugg

SEQ ID NO: 1218622 - RNA, 25 nt, Human
ccacccaggcugaggguccacaugu

SEQ ID NO: 1218623 - RNA, 19 nt, Human
ccacuucccuccaguaccc

SEQ ID NO: 1218624 - RNA, 21 nt, Human
ccagaagccccucuucuccca

SEQ ID NO: 1218625 - RNA, 23 nt, Human
ccagaagccugaggccccagggu

SEQ ID NO: 1218626 - RNA, 19 nt, Human
ccagcgcgugcacccugcc

SEQ ID NO: 1218627 - RNA, 23 nt, Human
ccagguggggccgggcggugguc

SEQ ID NO: 1218628 - RNA, 21 nt, Human
ccagugucugacacacgcaug

SEQ ID NO: 1218629 - RNA, 23 nt, Human
ccaucauuggcgugcaccuggac

SEQ ID NO: 1218630 - RNA, 23 nt, Human
cccacaaggagcucacguucugg

SEQ ID NO: 1218631 - RNA, 22 nt, Human
cccaccugccuucccgcccgcc

SEQ ID NO: 1218632 - RNA, 23 nt, Human
cccagccccugcugggacugcac

SEQ ID NO: 1218633 - RNA, 19 nt, Human
ccccaagccuccagguggc

SEQ ID NO: 1218634 - RNA, 21 nt, Human
ccccaccugccuucccgcccg

SEQ ID NO: 1218635 - RNA, 18 nt, Human
ccccagcagucgcgagcc

SEQ ID NO: 1218636 - RNA, 20 nt, Human
ccccagcagucgcgagccuc

SEQ ID NO: 1218637 - RNA, 19 nt, Human
cccccaggccuccuccacc

SEQ ID NO: 1218638 - RNA, 21 nt, Human
cccccaggccuccuccaccac

SEQ ID NO: 1218639 - RNA, 21 nt, Human
cccccugguccauucagcccc

SEQ ID NO: 1218640 - RNA, 19 nt, Human
ccccugaggucagaccugc

SEQ ID NO: 1218641 - RNA, 21 nt, Human
ccccugaggucagaccugcuc

SEQ ID NO: 1218642 - RNA, 22 nt, Human
ccccugcaaccacccacccucc

SEQ ID NO: 1218643 - RNA, 25 nt, Human
ccccugcaaccacccacccuccccc

SEQ ID NO: 1218644 - RNA, 25 nt, Human
ccccuggguggcccccacacagucu

SEQ ID NO: 1218645 - RNA, 24 nt, Human
ccccuucccugccugggguucagg

SEQ ID NO: 1218646 - RNA, 20 nt, Human
cccgcacuucuaggcagugg

SEQ ID NO: 1218647 - RNA, 19 nt, Human
cccgccccagcccagggga

SEQ ID NO: 1218648 - RNA, 19 nt, Human
cccucaacccucacuguca

SEQ ID NO: 1218649 - RNA, 18 nt, Human
cccugagggcagcugccu

SEQ ID NO: 1218650 - RNA, 19 nt, Human
cccugcuccagccagggag

SEQ ID NO: 1218651 - RNA, 18 nt, Human
cccuggagcugccuucug

SEQ ID NO: 1218652 - RNA, 18 nt, Human
cccuguggcuucuccugg

SEQ ID NO: 1218653 - RNA, 18 nt, Human
cccuucuuucucuguccc

SEQ ID NO: 1218654 - RNA, 26 nt, Human
cccuuuccucugucccuucuuucucu

SEQ ID NO: 1218655 - RNA, 24 nt, Human
ccgcccaccccagcagucgcgagc

SEQ ID NO: 1218656 - RNA, 20 nt, Human
ccgcgcccucugccuggccc

SEQ ID NO: 1218657 - RNA, 21 nt, Human
ccggcagcccagccccgcgcc

SEQ ID NO: 1218658 - RNA, 19 nt, Human
ccggcccuucucucccagc

SEQ ID NO: 1218659 - RNA, 21 nt, Human
ccgggcuccugacucaggggg

SEQ ID NO: 1218660 - RNA, 20 nt, Human
ccuaacuugcucugcaugcu

SEQ ID NO: 1218661 - RNA, 22 nt, Human
ccucacaggcucguggcugugg

SEQ ID NO: 1218662 - RNA, 23 nt, Human
ccuccagaaaggacaguguccug

SEQ ID NO: 1218663 - RNA, 22 nt, Human
ccuccagguggcaguggggccc

SEQ ID NO: 1218664 - RNA, 21 nt, Human
ccucccuuccagguguggcag

SEQ ID NO: 1218665 - RNA, 18 nt, Human
ccucucagcugucacccc

SEQ ID NO: 1218666 - RNA, 23 nt, Human
ccugagccccaggucuuguggga

SEQ ID NO: 1218667 - RNA, 24 nt, Human
ccugcagggcuggccuagcaggga

SEQ ID NO: 1218668 - RNA, 20 nt, Human
ccugcagugcaggugcucag

SEQ ID NO: 1218669 - RNA, 20 nt, Human
ccugccuugucuguggggug

SEQ ID NO: 1218670 - RNA, 19 nt, Human
ccugcgccagcugcggcca

SEQ ID NO: 1218671 - RNA, 23 nt, Human
ccuggccccuguuccuagauggu

SEQ ID NO: 1218672 - RNA, 24 nt, Human
ccugggaggggugggcuccucucc

SEQ ID NO: 1218673 - RNA, 19 nt, Human
ccugggggccccugcaggg

SEQ ID NO: 1218674 - RNA, 20 nt, Human
ccugguccauucagccccug

SEQ ID NO: 1218675 - RNA, 22 nt, Human
ccuugggaguccccuacugcuu

SEQ ID NO: 1218676 - RNA, 19 nt, Human
cgaggccaggaaccugaag

SEQ ID NO: 1218677 - RNA, 19 nt, Human
cgccagcugcggccagacu

SEQ ID NO: 1218678 - RNA, 24 nt, Human
cgcgggcguguccacaggccaggc

SEQ ID NO: 1218679 - RNA, 19 nt, Human
cgggcuccagcagcagcag

SEQ ID NO: 1218680 - RNA, 19 nt, Human
cggggcaccaaggagcugg

SEQ ID NO: 1218681 - RNA, 22 nt, Human
cggggccuguagugggcacugg

SEQ ID NO: 1218682 - RNA, 20 nt, Human
cgggggagauccagggcacc

SEQ ID NO: 1218683 - RNA, 20 nt, Human
cuaacuugcucugcaugcug

SEQ ID NO: 1218684 - RNA, 19 nt, Human
cuccaguaccugugcugcc

SEQ ID NO: 1218685 - RNA, 21 nt, Human
cucccagaagccugaggcccc

SEQ ID NO: 1218686 - RNA, 22 nt, Human
cucccaggccucacugccccuc

SEQ ID NO: 1218687 - RNA, 24 nt, Human
cucccugccccacuuccagcuacc

SEQ ID NO: 1218688 - RNA, 24 nt, Human
cuccgcccaccccagcagucgcga

SEQ ID NO: 1218689 - RNA, 18 nt, Human
cuccggcagcccagcccc

SEQ ID NO: 1218690 - RNA, 20 nt, Human
cuccucugagugaggacucc

SEQ ID NO: 1218691 - RNA, 20 nt, Human
cucucagggcugccccagcc

SEQ ID NO: 1218692 - RNA, 22 nt, Human
cucucugcugucacagcucccc

SEQ ID NO: 1218693 - RNA, 22 nt, Human
cucugagugaggacucccuaag

SEQ ID NO: 1218694 - RNA, 25 nt, Human
cucuggaccagcccucaacccucac

SEQ ID NO: 1218695 - RNA, 23 nt, Human
cucugggcaggugggguggaccu

SEQ ID NO: 1218696 - RNA, 21 nt, Human
cugcaaccacccacccucccc

SEQ ID NO: 1218697 - RNA, 24 nt, Human
cugccccagccugggccucucuug

SEQ ID NO: 1218698 - RNA, 22 nt, Human
cugccuugucuguggggugggg

SEQ ID NO: 1218699 - RNA, 20 nt, Human
cugcucucugcugucacagc

SEQ ID NO: 1218700 - RNA, 23 nt, Human
cugcucucugcugucacagcucc

SEQ ID NO: 1218701 - RNA, 24 nt, Human
cuggacaccuggcacggcacacuc

SEQ ID NO: 1218702 - RNA, 19 nt, Human
cuggaccagcccucaaccc

SEQ ID NO: 1218703 - RNA, 21 nt, Human
cuggccccuucccugccuggg

SEQ ID NO: 1218704 - RNA, 21 nt, Human
cuggccccuucccugccuggg

SEQ ID NO: 1218705 - RNA, 23 nt, Human
cuggccucgcagggucauggcug

SEQ ID NO: 1218706 - RNA, 18 nt, Human
cuggucuguccccaaggc

SEQ ID NO: 1218707 - RNA, 22 nt, Human
cugucccuucuuucucuguccc

SEQ ID NO: 1218708 - RNA, 19 nt, Human
cuguggcugggccuccagg

SEQ ID NO: 1218709 - RNA, 18 nt, Human
gacagggaggaggcuggg

SEQ ID NO: 1218710 - RNA, 24 nt, Human
gagcgguaccacagguaggcaucc

SEQ ID NO: 1218711 - RNA, 18 nt, Human
gagcucacguucuggugg

SEQ ID NO: 1218712 - RNA, 20 nt, Human
gaggacucccuaagcccggu

SEQ ID NO: 1218713 - RNA, 18 nt, Human
gaggaggccaagaaucag

SEQ ID NO: 1218714 - RNA, 19 nt, Human
gcaccggcgucuuccagga

SEQ ID NO: 1218715 - RNA, 23 nt, Human
gcagccaccaagcugcagaacaa

SEQ ID NO: 1218716 - RNA, 19 nt, Human
gcagcccaggugaucugac

SEQ ID NO: 1218717 - RNA, 18 nt, Human
gcaggagguaggcagugg

SEQ ID NO: 1218718 - RNA, 19 nt, Human
gcaggcugcgggccgggcg

SEQ ID NO: 1218719 - RNA, 24 nt, Human
gccacaccccaagccuccaggugg

SEQ ID NO: 1218720 - RNA, 23 nt, Human
gccacacuccagggcggaguugg

SEQ ID NO: 1218721 - RNA, 18 nt, Human
gccacaggccccccgcca

SEQ ID NO: 1218722 - RNA, 18 nt, Human
gcccagggccuccagggc

SEQ ID NO: 1218723 - RNA, 18 nt, Human
gcccagggccuccagggc

SEQ ID NO: 1218724 - RNA, 27 nt, Human
gcccagggugcuucuggggaaccuggc

SEQ ID NO: 1218725 - RNA, 19 nt, Human
gcccuugacccccaccuug

SEQ ID NO: 1218726 - RNA, 24 nt, Human
gcgaggcgcuucagcaccugcucc

SEQ ID NO: 1218727 - RNA, 19 nt, Human
gcucagguaacaggaaggu

SEQ ID NO: 1218728 - RNA, 20 nt, Human
gcucaguucugugcccgggc

SEQ ID NO: 1218729 - RNA, 21 nt, Human
gcuccggccgcagcagccgca

SEQ ID NO: 1218730 - RNA, 22 nt, Human
gcugcugagcuccccuggggcc

SEQ ID NO: 1218731 - RNA, 23 nt, Human
gcuggccccuucccugccugggg

SEQ ID NO: 1218732 - RNA, 25 nt, Human
gcugggacagccccuuuccucuguu

SEQ ID NO: 1218733 - RNA, 22 nt, Human
gcugggccccucccuuccaggu

SEQ ID NO: 1218734 - RNA, 18 nt, Human
gcugggccuccagggccc

SEQ ID NO: 1218735 - RNA, 21 nt, Human
ggacagagggcaagggugaga

SEQ ID NO: 1218736 - RNA, 22 nt, Human
ggacagugaggccaggcuggag

SEQ ID NO: 1218737 - RNA, 19 nt, Human
ggcaguggcuucagucuuu

SEQ ID NO: 1218738 - RNA, 23 nt, Human
ggccaggcuggaguggcagggcc

SEQ ID NO: 1218739 - RNA, 22 nt, Human
ggcccuggagcugccuucuggu

SEQ ID NO: 1218740 - RNA, 23 nt, Human
ggccgggcgcuggggcucgaugc

SEQ ID NO: 1218741 - RNA, 20 nt, Human
ggcgcagugaggcugggagg

SEQ ID NO: 1218742 - RNA, 21 nt, Human
ggcggggccgagccuggagcu

SEQ ID NO: 1218743 - RNA, 19 nt, Human
ggcucacugcgacccuggc

SEQ ID NO: 1218744 - RNA, 23 nt, Human
ggcugaggguccacauguggcug

SEQ ID NO: 1218745 - RNA, 18 nt, Human
ggcugcagcugggccugg

SEQ ID NO: 1218746 - RNA, 23 nt, Human
ggcugcccugagccccaggucuu

SEQ ID NO: 1218747 - RNA, 18 nt, Human
ggcuggaguggcagggcc

SEQ ID NO: 1218748 - RNA, 18 nt, Human
gggcaccaaggagcuggg

SEQ ID NO: 1218749 - RNA, 33 nt, Human
gggcaggagguaggcaguggcuucagucuuucu

SEQ ID NO: 1218750 - RNA, 20 nt, Human
gggcagggaugaggacagcu

SEQ ID NO: 1218751 - RNA, 19 nt, Human
gggccuccagggcccuccu

SEQ ID NO: 1218752 - RNA, 21 nt, Human
gggcuccagcagcagcagcaa

SEQ ID NO: 1218753 - RNA, 20 nt, Human
gggcugccccagccugggcc

SEQ ID NO: 1218754 - RNA, 18 nt, Human
ggggcacagcccugcugc

SEQ ID NO: 1218755 - RNA, 21 nt, Human
ggggcaccaaggagcuggggg

SEQ ID NO: 1218756 - RNA, 24 nt, Human
ggggccgagccuggagcucccggg

SEQ ID NO: 1218757 - RNA, 18 nt, Human
ggggugggcagggcagag

SEQ ID NO: 1218758 - RNA, 23 nt, Human
ggguggcugcagcugggccuggu

SEQ ID NO: 1218759 - RNA, 24 nt, Human
gggugguggccuugccugggggcc

SEQ ID NO: 1218760 - RNA, 22 nt, Human
gguccauucagccccugggugg

SEQ ID NO: 1218761 - RNA, 19 nt, Human
gucugcagcccaggugauc

SEQ ID NO: 1218762 - RNA, 20 nt, Human
gucugugggguggggccauc

SEQ ID NO: 1218763 - RNA, 23 nt, Human
gugaagcaaaagaagaaaaaugg

SEQ ID NO: 1218764 - RNA, 24 nt, Human
gugaagcaaaagaagaaaaaugga

SEQ ID NO: 1218765 - RNA, 18 nt, Human
gugaaggggcuggagaag

SEQ ID NO: 1218766 - RNA, 24 nt, Human
gugacagggaggaggcugggaggg

SEQ ID NO: 1218767 - RNA, 19 nt, Human
gugaucugacaugcuugug

SEQ ID NO: 1218768 - RNA, 19 nt, Human
gugcucaguucugugcccg

SEQ ID NO: 1218769 - RNA, 23 nt, Human
gugguggggacugcccugaggcc

SEQ ID NO: 1218770 - RNA, 21 nt, Human
guugggagggagccugggcug

SEQ ID NO: 1218771 - RNA, 21 nt, Human
uaacaggaaggucguugggcc

SEQ ID NO: 1218772 - RNA, 19 nt, Human
uacacaacaagcugggcug

SEQ ID NO: 1218773 - RNA, 21 nt, Human
uacacaacaagcugggcuggg

SEQ ID NO: 1218774 - RNA, 21 nt, Human
uaccuaaaacuuccccugcaa

SEQ ID NO: 1218775 - RNA, 23 nt, Human
ucacugccccuccacauccuugg

SEQ ID NO: 1218776 - RNA, 21 nt, Human
ucagcaccugcuccggccgca

SEQ ID NO: 1218777 - RNA, 20 nt, Human
ucagccccuggguggccccc

SEQ ID NO: 1218778 - RNA, 21 nt, Human
ucagcgaggccaggaaccuga

SEQ ID NO: 1218779 - RNA, 21 nt, Human
ucagguguuugucugucugca

SEQ ID NO: 1218780 - RNA, 23 nt, Human
ucagucuuucuccuucuccaggg

SEQ ID NO: 1218781 - RNA, 20 nt, Human
ucagugaagcaaaagaagaa

SEQ ID NO: 1218782 - RNA, 19 nt, Human
ucauggcugugggacgcgg

SEQ ID NO: 1218783 - RNA, 24 nt, Human
uccacaccaucucagcucugggca

SEQ ID NO: 1218784 - RNA, 20 nt, Human
uccaccgucuagaaaccacu

SEQ ID NO: 1218785 - RNA, 19 nt, Human
uccacgcacaccgcgaggc

SEQ ID NO: 1218786 - RNA, 20 nt, Human
uccacgcacaccgcgaggcg

SEQ ID NO: 1218787 - RNA, 24 nt, Human
uccacgcacaccgcgaggcgcuuc

SEQ ID NO: 1218788 - RNA, 23 nt, Human
uccacgcugccgccauccauccc

SEQ ID NO: 1218789 - RNA, 23 nt, Human
uccagaaaggacaguguccugcc

SEQ ID NO: 1218790 - RNA, 22 nt, Human
uccagggcggaguuggaugagg

SEQ ID NO: 1218791 - RNA, 19 nt, Human
ucccagaagccugaggccu

SEQ ID NO: 1218792 - RNA, 23 nt, Human
uccccaggcagcgaccuccgccc

SEQ ID NO: 1218793 - RNA, 23 nt, Human
uccccugcaaccacccacccucc

SEQ ID NO: 1218794 - RNA, 23 nt, Human
ucccgaggcugggacaguccuuu

SEQ ID NO: 1218795 - RNA, 23 nt, Human
ucccgggcucucgcggcggccuc

SEQ ID NO: 1218796 - RNA, 18 nt, Human
ucccuggaggccuggacc

SEQ ID NO: 1218797 - RNA, 19 nt, Human
ucccuggaggccuggaccc

SEQ ID NO: 1218798 - RNA, 21 nt, Human
ucccuggaggccuggaccccc

SEQ ID NO: 1218799 - RNA, 21 nt, Human
uccgcccaccccagcagucgg

SEQ ID NO: 1218800 - RNA, 20 nt, Human
uccgugcagaggccgggcuu

SEQ ID NO: 1218801 - RNA, 19 nt, Human
uccuuccagccacacucca

SEQ ID NO: 1218802 - RNA, 22 nt, Human
ucggcaccggcgucuuccagga

SEQ ID NO: 1218803 - RNA, 28 nt, Human
ucguugggccacagugugguggggacug

SEQ ID NO: 1218804 - RNA, 21 nt, Human
ucucuccuggccucgcagggu

SEQ ID NO: 1218805 - RNA, 21 nt, Human
ucucuggaccagcccucaacc

SEQ ID NO: 1218806 - RNA, 22 nt, Human
ucucuggaccagcccucaaccc

SEQ ID NO: 1218807 - RNA, 24 nt, Human
ucuguccccaaggcugcaugcugu

SEQ ID NO: 1218808 - RNA, 22 nt, Human
ucugucccuucuuucucuguug

SEQ ID NO: 1218809 - RNA, 23 nt, Human
ucuguggcugggccuccagggcc

SEQ ID NO: 1218810 - RNA, 20 nt, Human
ucuguugugggcaggagguu

SEQ ID NO: 1218811 - RNA, 21 nt, Human
ucuuccaggauggcugugucc

SEQ ID NO: 1218812 - RNA, 24 nt, Human
ucuuucuccuucuccagggaaccc

SEQ ID NO: 1218813 - RNA, 22 nt, Human
ugacagccagguggggccgggc

SEQ ID NO: 1218814 - RNA, 21 nt, Human
ugacagggaggaggcugggag

SEQ ID NO: 1218815 - RNA, 20 nt, Human
ugacccccugguccauucag

SEQ ID NO: 1218816 - RNA, 25 nt, Human
ugacccccugguccauucagccccu

SEQ ID NO: 1218817 - RNA, 21 nt, Human
ugaggccccagggucccagaa

SEQ ID NO: 1218818 - RNA, 21 nt, Human
ugaggcugggagggguggggg

SEQ ID NO: 1218819 - RNA, 23 nt, Human
ugaggcugggagggguggggguc

SEQ ID NO: 1218820 - RNA, 21 nt, Human
ugcaggugcucaguucugugc

SEQ ID NO: 1218821 - RNA, 24 nt, Human
ugcaugcugucagcggcugccccg

SEQ ID NO: 1218822 - RNA, 19 nt, Human
ugccacaggccccccgcca

SEQ ID NO: 1218823 - RNA, 25 nt, Human
ugccccagccugggccucucuugca

SEQ ID NO: 1218824 - RNA, 19 nt, Human
ugcccccaggccuccucca

SEQ ID NO: 1218825 - RNA, 20 nt, Human
ugcccccaggccuccuccac

SEQ ID NO: 1218826 - RNA, 22 nt, Human
ugcccugagccccaggucuugu

SEQ ID NO: 1218827 - RNA, 20 nt, Human
ugccugagccucacaggcuc

SEQ ID NO: 1218828 - RNA, 18 nt, Human
ugccugggggccccugca

SEQ ID NO: 1218829 - RNA, 19 nt, Human
ugccugggggccccugcag

SEQ ID NO: 1218830 - RNA, 22 nt, Human
ugccuucccgcccgccuccagc

SEQ ID NO: 1218831 - RNA, 23 nt, Human
ugccuugccucagcugugccagc

SEQ ID NO: 1218832 - RNA, 20 nt, Human
ugcgggccgggcgcuggggc

SEQ ID NO: 1218833 - RNA, 27 nt, Human
ugcgugaggcccaggguggggcggggc

SEQ ID NO: 1218834 - RNA, 22 nt, Human
ugcucagcgaggccaggaaccu

SEQ ID NO: 1218835 - RNA, 19 nt, Human
ugcugggacugcacugcgg

SEQ ID NO: 1218836 - RNA, 20 nt, Human
ugcugggcagagcgaggccu

SEQ ID NO: 1218837 - RNA, 19 nt, Human
uggaacaggggugaagggg

SEQ ID NO: 1218838 - RNA, 20 nt, Human
uggaacaggggugaaggggc

SEQ ID NO: 1218839 - RNA, 19 nt, Human
uggacaaauaccgccacac

SEQ ID NO: 1218840 - RNA, 22 nt, Human
uggaggccuggacccccauccu

SEQ ID NO: 1218841 - RNA, 19 nt, Human
uggcuucagucuuucuccu

SEQ ID NO: 1218842 - RNA, 23 nt, Human
ugggacagccccuuuccucuguc

SEQ ID NO: 1218843 - RNA, 18 nt, Human
ugggacagggacagaggg

SEQ ID NO: 1218844 - RNA, 20 nt, Human
ugggcagagcgaggccuccu

SEQ ID NO: 1218845 - RNA, 27 nt, Human
ugggcaggugggguggaccuggggcuu

SEQ ID NO: 1218846 - RNA, 18 nt, Human
ugggggccccugcagggc

SEQ ID NO: 1218847 - RNA, 22 nt, Human
ugggggccccugcagggcuggc

SEQ ID NO: 1218848 - RNA, 24 nt, Human
ugggggccccugcaggggggacac

SEQ ID NO: 1218849 - RNA, 21 nt, Human
uggggggugauuucccagucg

SEQ ID NO: 1218850 - RNA, 22 nt, Human
ugggguggggccauccccucca

SEQ ID NO: 1218851 - RNA, 23 nt, Human
ugggguggggccauccccuccag

SEQ ID NO: 1218852 - RNA, 19 nt, Human
ugguggcgcccaugucaug

SEQ ID NO: 1218853 - RNA, 20 nt, Human
uggugggaggaggccaagaa

SEQ ID NO: 1218854 - RNA, 23 nt, Human
uggugugcuccacggcggcccgg

SEQ ID NO: 1218855 - RNA, 18 nt, Human
ugucacaaggccucugcc

SEQ ID NO: 1218856 - RNA, 18 nt, Human
uguggcuggggguccucc

SEQ ID NO: 1218857 - RNA, 22 nt, Human
ugugguggggacugcccugagg

SEQ ID NO: 1218858 - RNA, 24 nt, Human
ugugguggggacugcccugaggcc

SEQ ID NO: 1218859 - RNA, 20 nt, Human
uguguuaaaaaacaaacaaa

SEQ ID NO: 1218860 - RNA, 18 nt, Human
uuaaaggacugcaauaaa

SEQ ID NO: 1218861 - RNA, 20 nt, Human
uuagcacucucccugcugac

SEQ ID NO: 1218862 - RNA, 21 nt, Human
uuccaggauggcuguguccac

SEQ ID NO: 1218863 - RNA, 26 nt, Human
uuccugggugggucagggacagggug

SEQ ID NO: 1218864 - RNA, 19 nt, Human
uuccuguucaccugcagcc

SEQ ID NO: 1218865 - RNA, 22 nt, Human
uucggcccagggugcuucuggg

SEQ ID NO: 1218866 - RNA, 20 nt, Human
uucuccagggaacccggccc

SEQ ID NO: 1218867 - RNA, 23 nt, Human
uuggaugaggcccguccggaggg

SEQ ID NO: 1218868 - RNA, 22 nt, Human
uuuccugagaucucccucggac

SEQ ID NO: 1218869 - RNA, 18 nt, Human
uuuccugggugggucagg

SEQ ID NO: 1218870 - RNA, 18 nt, Human
aagcccagggcccagcac

SEQ ID NO: 1218871 - RNA, 21 nt, Human
accccacagggcgcccguggg

SEQ ID NO: 1218872 - RNA, 24 nt, Human
aggaagcccuggaccgggaccucc

SEQ ID NO: 1218873 - RNA, 24 nt, Human
aggcaagaauggcgcugggaucug

SEQ ID NO: 1218874 - RNA, 20 nt, Human
agggaggacccaggaccacu

SEQ ID NO: 1218875 - RNA, 21 nt, Human
aggucauacugugugcuggga

SEQ ID NO: 1218876 - RNA, 23 nt, Human
agguguccaguugcucccggaac

SEQ ID NO: 1218877 - RNA, 19 nt, Human
aguugcucccggaacuggg

SEQ ID NO: 1218878 - RNA, 19 nt, Human
augcugggccccaggccgg

SEQ ID NO: 1218879 - RNA, 21 nt, Human
caaagcccagggcccagcaca

SEQ ID NO: 1218880 - RNA, 25 nt, Human
caaagcccagggcccagcacaggcc

SEQ ID NO: 1218881 - RNA, 22 nt, Human
caaagcccagggccuggaacac

SEQ ID NO: 1218882 - RNA, 21 nt, Human
cacacagcucucucaggccag

SEQ ID NO: 1218883 - RNA, 23 nt, Human
cacaccccacagggcgcccgugg

SEQ ID NO: 1218884 - RNA, 19 nt, Human
cacagcucacagggccccu

SEQ ID NO: 1218885 - RNA, 18 nt, Human
cagcagcgcccccguggc

SEQ ID NO: 1218886 - RNA, 22 nt, Human
cagccacccugcggaagagcuu

SEQ ID NO: 1218887 - RNA, 24 nt, Human
cagcugcccucugggggcaucaag

SEQ ID NO: 1218888 - RNA, 19 nt, Human
cagcugcuccuggaaccaa

SEQ ID NO: 1218889 - RNA, 22 nt, Human
cauacugugugcugggaccggg

SEQ ID NO: 1218890 - RNA, 23 nt, Human
ccaggaccacuugagagcagcag

SEQ ID NO: 1218891 - RNA, 23 nt, Human
ccaggaggagggcagcccuggcc

SEQ ID NO: 1218892 - RNA, 23 nt, Human
ccagggccuggaacacguccucc

SEQ ID NO: 1218893 - RNA, 21 nt, Human
ccaguugcucccggaacuggg

SEQ ID NO: 1218894 - RNA, 22 nt, Human
cccagggcccagcacaggcccc

SEQ ID NO: 1218895 - RNA, 24 nt, Human
ccccagcgccuccacgucaugcug

SEQ ID NO: 1218896 - RNA, 22 nt, Human
cccccacgcugccacgccucgc

SEQ ID NO: 1218897 - RNA, 21 nt, Human
cccccagcgccuccacgucau

SEQ ID NO: 1218898 - RNA, 23 nt, Human
cccccugcggacucuucagccac

SEQ ID NO: 1218899 - RNA, 19 nt, Human
cccgcagggcccggcagcc

SEQ ID NO: 1218900 - RNA, 26 nt, Human
cccgugggcauccagcugcuccugga

SEQ ID NO: 1218901 - RNA, 19 nt, Human
ccggcagccgcucagcucc

SEQ ID NO: 1218902 - RNA, 20 nt, Human
ccucaaggagcuccgaagga

SEQ ID NO: 1218903 - RNA, 19 nt, Human
cgcucagcucccggaccag

SEQ ID NO: 1218904 - RNA, 19 nt, Human
cggccacacagcucucuca

SEQ ID NO: 1218905 - RNA, 24 nt, Human
cggggggaugggggguggauggag

SEQ ID NO: 1218906 - RNA, 20 nt, Human
cuccucucgcagcucucaaa

SEQ ID NO: 1218907 - RNA, 18 nt, Human
cucucagaugaggaaacc

SEQ ID NO: 1218908 - RNA, 23 nt, Human
cucucgcagcucucaaagcccag

SEQ ID NO: 1218909 - RNA, 18 nt, Human
cugggggcaucaaggcca

SEQ ID NO: 1218910 - RNA, 24 nt, Human
gaaccaagccaguuccucgaggaa

SEQ ID NO: 1218911 - RNA, 20 nt, Human
gaccacuugagagcagcagg

SEQ ID NO: 1218912 - RNA, 18 nt, Human
gaccagcugcuguggcug

SEQ ID NO: 1218913 - RNA, 20 nt, Human
gaccucccuccucucgcagc

SEQ ID NO: 1218914 - RNA, 25 nt, Human
gacuuuggggcagccccgcagggcc

SEQ ID NO: 1218915 - RNA, 25 nt, Human
gagagcagcaggaagacuuuggggc

SEQ ID NO: 1218916 - RNA, 20 nt, Human
gagcagcaggaagacuuugg

SEQ ID NO: 1218917 - RNA, 18 nt, Human
gauggaggcaagaauggc

SEQ ID NO: 1218918 - RNA, 27 nt, Human
gcccuggaccgggaccucccuccucuc

SEQ ID NO: 1218919 - RNA, 23 nt, Human
ggccaccgucucagcagcgcccc

SEQ ID NO: 1218920 - RNA, 21 nt, Human
gggaccagugaggagagcggc

SEQ ID NO: 1218921 - RNA, 23 nt, Human
gggcgcccgugggcauccagcug

SEQ ID NO: 1218922 - RNA, 18 nt, Human
ggggaugggggguggaug

SEQ ID NO: 1218923 - RNA, 20 nt, Human
gggggaugggggguggaugg

SEQ ID NO: 1218924 - RNA, 20 nt, Human
gguggauggaggcaagaaug

SEQ ID NO: 1218925 - RNA, 21 nt, Human
gucagcagcugcaccagggac

SEQ ID NO: 1218926 - RNA, 18 nt, Human
uaaggcacaccccacagg

SEQ ID NO: 1218927 - RNA, 18 nt, Human
uacugugugcugggaccg

SEQ ID NO: 1218928 - RNA, 23 nt, Human
ucacgguggucucaaagcccagg

SEQ ID NO: 1218929 - RNA, 23 nt, Human
ucagcagcgcccccguggccgcc

SEQ ID NO: 1218930 - RNA, 18 nt, Human
ucaggccagcaaggaagg

SEQ ID NO: 1218931 - RNA, 21 nt, Human
uccgggcuccagggaggaccc

SEQ ID NO: 1218932 - RNA, 18 nt, Human
ugaggaaaccggggggau

SEQ ID NO: 1218933 - RNA, 23 nt, Human
ugcaccagggaccagugaggaga

SEQ ID NO: 1218934 - RNA, 23 nt, Human
ugccucagcugcccucugggggc

SEQ ID NO: 1218935 - RNA, 23 nt, Human
uggaccgggaccucccuccucuc

SEQ ID NO: 1218936 - RNA, 21 nt, Human
uggaggcaagaauggcgcugg

SEQ ID NO: 1218937 - RNA, 20 nt, Human
uggauggaggcaagaauggc

SEQ ID NO: 1218938 - RNA, 20 nt, Human
ugggcauccagcugcuccug

SEQ ID NO: 1218939 - RNA, 19 nt, Human
ugggggguggauggaggca

SEQ ID NO: 1218940 - RNA, 23 nt, Human
uugcacggccacccccacgcuuu

SEQ ID NO: 1218941 - RNA, 19 nt, Human
uugcucccggaacugggcc

SEQ ID NO: 1218942 - RNA, 19 nt, Human
aaaaacaaacaaaaaaggc

SEQ ID NO: 1218943 - RNA, 24 nt, Human
aaacagcugucaaucuagaaaucu

SEQ ID NO: 1218944 - RNA, 20 nt, Human
aacagaguacccgucacccc

SEQ ID NO: 1218945 - RNA, 18 nt, Human
aacagcugcaggaauugg

SEQ ID NO: 1218946 - RNA, 19 nt, Human
aacaugaugaaaccccguc

SEQ ID NO: 1218947 - RNA, 20 nt, Human
aacaugaugaaaccccgucu

SEQ ID NO: 1218948 - RNA, 21 nt, Human
aacaugaugaaaccccgucuc

SEQ ID NO: 1218949 - RNA, 19 nt, Human
aacauggugaaaccccauc

SEQ ID NO: 1218950 - RNA, 20 nt, Human
aacauggugaaaccccaucu

SEQ ID NO: 1218951 - RNA, 21 nt, Human
aacauggugaaaccccaucuc

SEQ ID NO: 1218952 - RNA, 21 nt, Human
aacauggugaaaccccaucuc

SEQ ID NO: 1218953 - RNA, 19 nt, Human
aaccauuucagacagcuug

SEQ ID NO: 1218954 - RNA, 23 nt, Human
aagagcgagacuccaucucaaaa

SEQ ID NO: 1218955 - RNA, 26 nt, Human
aagagcgagacuccaucucaaaaaca

SEQ ID NO: 1218956 - RNA, 19 nt, Human
aagcugaucuucugaaugc

SEQ ID NO: 1218957 - RNA, 24 nt, Human
aagcuguugauguccauuuggauu

SEQ ID NO: 1218958 - RNA, 24 nt, Human
acaagaagaaauagaucccucuca

SEQ ID NO: 1218959 - RNA, 24 nt, Human
accccaucucuacuaaaaauacaa

SEQ ID NO: 1218960 - RNA, 24 nt, Human
accccgucucuacuaaaacuacaa

SEQ ID NO: 1218961 - RNA, 19 nt, Human
acccugaaaucuucuucuu

SEQ ID NO: 1218962 - RNA, 24 nt, Human
accugaggucaggaguucgagacc

SEQ ID NO: 1218963 - RNA, 19 nt, Human
accuugaaaguacuaaaac

SEQ ID NO: 1218964 - RNA, 21 nt, Human
acuaaaacagcugucaaucua

SEQ ID NO: 1218965 - RNA, 18 nt, Human
acugcacuccagccuggg

SEQ ID NO: 1218966 - RNA, 18 nt, Human
acugcacuccagccuggg

SEQ ID NO: 1218967 - RNA, 19 nt, Human
acugcacuccagccugggc

SEQ ID NO: 1218968 - RNA, 24 nt, Human
acugcacuccagccugggcgacaa

SEQ ID NO: 1218969 - RNA, 24 nt, Human
acugcacuccagccugggugacag

SEQ ID NO: 1218970 - RNA, 19 nt, Human
agacccaggggacucucag

SEQ ID NO: 1218971 - RNA, 24 nt, Human
agagccuacagugagcugagauca

SEQ ID NO: 1218972 - RNA, 23 nt, Human
agaguacccgucacccccugccu

SEQ ID NO: 1218973 - RNA, 22 nt, Human
agcacgcugcccagcagcucca

SEQ ID NO: 1218974 - RNA, 24 nt, Human
agcacuuugggaggcugagguggg

SEQ ID NO: 1218975 - RNA, 23 nt, Human
agccgggcaugguggcgggugcc

SEQ ID NO: 1218976 - RNA, 24 nt, Human
agccugaucaacauggugaaaccc

SEQ ID NO: 1218977 - RNA, 24 nt, Human
agccuggccaacaugaugaaaccc

SEQ ID NO: 1218978 - RNA, 25 nt, Human
agccugggcgacaagagcgagacuc

SEQ ID NO: 1218979 - RNA, 20 nt, Human
agcuggcucuggugugugcc

SEQ ID NO: 1218980 - RNA, 18 nt, Human
agcugggugugguggugc

SEQ ID NO: 1218981 - RNA, 23 nt, Human
agcugggugugguggugcgugcc

SEQ ID NO: 1218982 - RNA, 23 nt, Human
agcuugccugucuccauggaagc

SEQ ID NO: 1218983 - RNA, 19 nt, Human
aggcaggagaaucacauga

SEQ ID NO: 1218984 - RNA, 24 nt, Human
aggcaggagaaucacaugaacccg

SEQ ID NO: 1218985 - RNA, 23 nt, Human
aggcaggagaaucacuggaaccc

SEQ ID NO: 1218986 - RNA, 24 nt, Human
aggcggagguugcagggagcugag

SEQ ID NO: 1218987 - RNA, 24 nt, Human
aggcugaggcaggagaaucacaug

SEQ ID NO: 1218988 - RNA, 24 nt, Human
aggcugagguggguggaucacuug

SEQ ID NO: 1218989 - RNA, 22 nt, Human
aggcugauggaucaccugaggu

SEQ ID NO: 1218990 - RNA, 26 nt, Human
aggcugauggaucaccugaggucagg

SEQ ID NO: 1218991 - RNA, 19 nt, Human
aggggacucucaggugcca

SEQ ID NO: 1218992 - RNA, 24 nt, Human
agguagagccuacagugagcugag

SEQ ID NO: 1218993 - RNA, 24 nt, Human
aggugcaguggcucacaccuguaa

SEQ ID NO: 1218994 - RNA, 21 nt, Human
agguggcagcucaucucagag

SEQ ID NO: 1218995 - RNA, 23 nt, Human
agguggguggaucacuugagguc

SEQ ID NO: 1218996 - RNA, 24 nt, Human
aggugugguggcucaugccuguaa

SEQ ID NO: 1218997 - RNA, 24 nt, Human
aguggcucacaccuguaaucccag

SEQ ID NO: 1218998 - RNA, 24 nt, Human
aucaccugaggucaggaguucgag

SEQ ID NO: 1218999 - RNA, 24 nt, Human
aucaugccacugcacuccagccug

SEQ ID NO: 1219000 - RNA, 24 nt, Human
aucgugccacugcacuccagccug

SEQ ID NO: 1219001 - RNA, 24 nt, Human
aucuucaaagcgucugccagcgcc

SEQ ID NO: 1219002 - RNA, 21 nt, Human
augccacugcacuccagccug

SEQ ID NO: 1219003 - RNA, 19 nt, Human
augccuguaaucccaguac

SEQ ID NO: 1219004 - RNA, 24 nt, Human
caacaugaugaaaccccgucucua

SEQ ID NO: 1219005 - RNA, 22 nt, Human
caacauggugaaaccccaucuc

SEQ ID NO: 1219006 - RNA, 24 nt, Human
caacauggugaaaccccaucucua

SEQ ID NO: 1219007 - RNA, 24 nt, Human
caacuacuugggaggccgaggcag

SEQ ID NO: 1219008 - RNA, 20 nt, Human
caagaacaaaguccucggac

SEQ ID NO: 1219009 - RNA, 19 nt, Human
caagugauccaaauguucu

SEQ ID NO: 1219010 - RNA, 19 nt, Human
caaucuagaaaucucugcc

SEQ ID NO: 1219011 - RNA, 24 nt, Human
cacaccuguaaucccagcacuuug

SEQ ID NO: 1219012 - RNA, 20 nt, Human
cacaugaaguccucagggug

SEQ ID NO: 1219013 - RNA, 19 nt, Human
caccaguuuggcuccugag

SEQ ID NO: 1219014 - RNA, 23 nt, Human
caccugaggucaggaguucgaga

SEQ ID NO: 1219015 - RNA, 19 nt, Human
caccuguaaucccagcacu

SEQ ID NO: 1219016 - RNA, 24 nt, Human
caccuguaaucccagcacuuuggg

SEQ ID NO: 1219017 - RNA, 19 nt, Human
cacgcugcccagcagcucc

SEQ ID NO: 1219018 - RNA, 24 nt, Human
cacuccagccugggcgacaagagc

SEQ ID NO: 1219019 - RNA, 25 nt, Human
cacuccagccugggcgacaagagcg

SEQ ID NO: 1219020 - RNA, 18 nt, Human
cacuccagccugggugac

SEQ ID NO: 1219021 - RNA, 20 nt, Human
cacuccagccugggugacag

SEQ ID NO: 1219022 - RNA, 19 nt, Human
cacugcacuccagccuggg

SEQ ID NO: 1219023 - RNA, 19 nt, Human
cacugcacuccagccuggg

SEQ ID NO: 1219024 - RNA, 19 nt, Human
cacugcacuccagccuggg

SEQ ID NO: 1219025 - RNA, 19 nt, Human
cacugcacuccagccuggg

SEQ ID NO: 1219026 - RNA, 21 nt, Human
cacugcacuccagccugggcg

SEQ ID NO: 1219027 - RNA, 22 nt, Human
cacugcacuccagccugggcga

SEQ ID NO: 1219028 - RNA, 23 nt, Human
cacugcacuccagccugggcgac

SEQ ID NO: 1219029 - RNA, 24 nt, Human
cacugcacuccagccugggcgaca

SEQ ID NO: 1219030 - RNA, 22 nt, Human
cacugcacuccagccuggguga

SEQ ID NO: 1219031 - RNA, 24 nt, Human
cacugcacuccagccugggugaca

SEQ ID NO: 1219032 - RNA, 25 nt, Human
cacugcacuccagccugggugacag

SEQ ID NO: 1219033 - RNA, 20 nt, Human
cagaauaucugucaauuugg

SEQ ID NO: 1219034 - RNA, 23 nt, Human
cagacagagcaucaccuugaaag

SEQ ID NO: 1219035 - RNA, 21 nt, Human
cagacaggccccccagaaguc

SEQ ID NO: 1219036 - RNA, 22 nt, Human
cagcacgcugcccagcagcucc

SEQ ID NO: 1219037 - RNA, 24 nt, Human
cagcacuuugggaggcugaggugg

SEQ ID NO: 1219038 - RNA, 21 nt, Human
cagcaguggcuuuggaagccu

SEQ ID NO: 1219039 - RNA, 29 nt, Human
caggccuuuggccccuagucccuuggggg

SEQ ID NO: 1219040 - RNA, 20 nt, Human
caguacuuugggaggcccag

SEQ ID NO: 1219041 - RNA, 21 nt, Human
caguacuuugggaggcccagg

SEQ ID NO: 1219042 - RNA, 23 nt, Human
caucucaaaaacaaacaaaaaag

SEQ ID NO: 1219043 - RNA, 19 nt, Human
caugaaguccucagggugu

SEQ ID NO: 1219044 - RNA, 20 nt, Human
caugccuguaaucccaguac

SEQ ID NO: 1219045 - RNA, 24 nt, Human
caugccuguaaucccaguacuuug

SEQ ID NO: 1219046 - RNA, 20 nt, Human
cauuucaaauaauagugauc

SEQ ID NO: 1219047 - RNA, 19 nt, Human
ccaaacggaugcuccucac

SEQ ID NO: 1219048 - RNA, 20 nt, Human
ccacugcacuccagccuggg

SEQ ID NO: 1219049 - RNA, 20 nt, Human
ccacugcacuccagccuggg

SEQ ID NO: 1219050 - RNA, 20 nt, Human
ccacugcacuccagccuggg

SEQ ID NO: 1219051 - RNA, 21 nt, Human
ccacugcacuccagccugggc

SEQ ID NO: 1219052 - RNA, 21 nt, Human
ccacugcacuccagccugggc

SEQ ID NO: 1219053 - RNA, 24 nt, Human
ccacugcacuccagccugggcgac

SEQ ID NO: 1219054 - RNA, 21 nt, Human
ccacugcacuccagccugggu

SEQ ID NO: 1219055 - RNA, 21 nt, Human
ccacugcacuccagccugggu

SEQ ID NO: 1219056 - RNA, 24 nt, Human
ccacugcacuccagccugggugac

SEQ ID NO: 1219057 - RNA, 18 nt, Human
ccagacaacaugugccag

SEQ ID NO: 1219058 - RNA, 23 nt, Human
ccccuaccaaacggaugcuccuc

SEQ ID NO: 1219059 - RNA, 20 nt, Human
ccccucccuucucugugcca

SEQ ID NO: 1219060 - RNA, 18 nt, Human
ccccucuguuaccccuac

SEQ ID NO: 1219061 - RNA, 21 nt, Human
ccccucuguuaccccuaccaa

SEQ ID NO: 1219062 - RNA, 21 nt, Human
cccuggcugaggcucagggac

SEQ ID NO: 1219063 - RNA, 24 nt, Human
ccgccaagcugaucuucugaaugc

SEQ ID NO: 1219064 - RNA, 18 nt, Human
ccuccggcagcaccucuc

SEQ ID NO: 1219065 - RNA, 22 nt, Human
ccugaggucaggaguucgagac

SEQ ID NO: 1219066 - RNA, 24 nt, Human
ccugaucaacauggugaaacccca

SEQ ID NO: 1219067 - RNA, 24 nt, Human
ccuggaccacuccugcagcagaag

SEQ ID NO: 1219068 - RNA, 23 nt, Human
ccuggccaacaugaugaaacccc

SEQ ID NO: 1219069 - RNA, 24 nt, Human
ccuggccaacaugaugaaaccccg

SEQ ID NO: 1219070 - RNA, 23 nt, Human
ccugggcgacaagagcgagacuc

SEQ ID NO: 1219071 - RNA, 18 nt, Human
ccuguagacccaacuacu

SEQ ID NO: 1219072 - RNA, 22 nt, Human
ccuguagacccaacuacuuggg

SEQ ID NO: 1219073 - RNA, 18 nt, Human
ccuguauucccagcuacu

SEQ ID NO: 1219074 - RNA, 22 nt, Human
ccuguauucccagcuacugggg

SEQ ID NO: 1219075 - RNA, 18 nt, Human
ccuuuaauuggaagggag

SEQ ID NO: 1219076 - RNA, 21 nt, Human
cgagaccagccuggccaacau

SEQ ID NO: 1219077 - RNA, 19 nt, Human
cgaggcaggagaaucacug

SEQ ID NO: 1219078 - RNA, 21 nt, Human
cgaggcaggagaaucacugga

SEQ ID NO: 1219079 - RNA, 24 nt, Human
cgaggcaggagaaucacuggaacc

SEQ ID NO: 1219080 - RNA, 23 nt, Human
cgcccuggcugaggcucagggac

SEQ ID NO: 1219081 - RNA, 21 nt, Human
cgccuuggccccuuguggucc

SEQ ID NO: 1219082 - RNA, 20 nt, Human
cggagguccagagaggucag

SEQ ID NO: 1219083 - RNA, 24 nt, Human
cggagguccagagaggucagacuu

SEQ ID NO: 1219084 - RNA, 21 nt, Human
cggcaguagagcagcuggggc

SEQ ID NO: 1219085 - RNA, 21 nt, Human
cgggaccagucagccuggcca

SEQ ID NO: 1219086 - RNA, 23 nt, Human
cgggaccagucagccuggccagg

SEQ ID NO: 1219087 - RNA, 22 nt, Human
cguacaagaagaaauagauccc

SEQ ID NO: 1219088 - RNA, 23 nt, Human
cuaaaacuacaaaaauuagcccu

SEQ ID NO: 1219089 - RNA, 21 nt, Human
cuagcuggcucuggugugugc

SEQ ID NO: 1219090 - RNA, 22 nt, Human
cucacaccuguaaucccagcac

SEQ ID NO: 1219091 - RNA, 24 nt, Human
cucacaccuguaaucccagcacuu

SEQ ID NO: 1219092 - RNA, 24 nt, Human
cucaugccuguaaucccaguacuu

SEQ ID NO: 1219093 - RNA, 21 nt, Human
cucccagacaggccccccaga

SEQ ID NO: 1219094 - RNA, 24 nt, Human
cucccagacaggccccccagaagu

SEQ ID NO: 1219095 - RNA, 21 nt, Human
cuccggcagcaccucuccuuc

SEQ ID NO: 1219096 - RNA, 20 nt, Human
cucuccuuccucccugcaga

SEQ ID NO: 1219097 - RNA, 24 nt, Human
cucugaaggacgcccuggcugagg

SEQ ID NO: 1219098 - RNA, 18 nt, Human
cucugccccgcaaaaacu

SEQ ID NO: 1219099 - RNA, 19 nt, Human
cucugugccauaacagagu

SEQ ID NO: 1219100 - RNA, 19 nt, Human
cugggugacagauucuguc

SEQ ID NO: 1219101 - RNA, 18 nt, Human
cuguccggaugcucacuu

SEQ ID NO: 1219102 - RNA, 21 nt, Human
gacaagaauacaucagagacg

SEQ ID NO: 1219103 - RNA, 22 nt, Human
gacccauguucagauuuccccc

SEQ ID NO: 1219104 - RNA, 21 nt, Human
gaccuccuccggcagcaccuc

SEQ ID NO: 1219105 - RNA, 23 nt, Human
gagaucgugccacugcacuccag

SEQ ID NO: 1219106 - RNA, 21 nt, Human
gagcugagaucgugccacugc

SEQ ID NO: 1219107 - RNA, 23 nt, Human
gagguugcagggagcugagaucg

SEQ ID NO: 1219108 - RNA, 24 nt, Human
gaucaccugaggucaggaguucga

SEQ ID NO: 1219109 - RNA, 21 nt, Human
gaucacuugaggucaggaguu

SEQ ID NO: 1219110 - RNA, 21 nt, Human
gaucacuugaggucaggaguu

SEQ ID NO: 1219111 - RNA, 22 nt, Human
gaucacuugaggucaggaguua

SEQ ID NO: 1219112 - RNA, 23 nt, Human
gaucacuugaggucaggaguuaa

SEQ ID NO: 1219113 - RNA, 18 nt, Human
gcagaagaggagcucacg

SEQ ID NO: 1219114 - RNA, 18 nt, Human
gcagcguucccagcuccc

SEQ ID NO: 1219115 - RNA, 22 nt, Human
gcaggagaaucacuggaaccca

SEQ ID NO: 1219116 - RNA, 24 nt, Human
gccaacaugaugaaaccccgucuc

SEQ ID NO: 1219117 - RNA, 19 nt, Human
gccacugcacuccagccug

SEQ ID NO: 1219118 - RNA, 22 nt, Human
gccacugcacuccagccugggc

SEQ ID NO: 1219119 - RNA, 24 nt, Human
gccacugcacuccagccugggcga

SEQ ID NO: 1219120 - RNA, 24 nt, Human
gccacugcacuccagccuggguga

SEQ ID NO: 1219121 - RNA, 20 nt, Human
gccaggugcaguggcucaca

SEQ ID NO: 1219122 - RNA, 23 nt, Human
gcccuggaggcucagggagguca

SEQ ID NO: 1219123 - RNA, 19 nt, Human
gcgcggugcgcgggaccag

SEQ ID NO: 1219124 - RNA, 21 nt, Human
gcucuccauggccuccuccac

SEQ ID NO: 1219125 - RNA, 20 nt, Human
gcugagaucaugccacugca

SEQ ID NO: 1219126 - RNA, 19 nt, Human
gcugagaucgugccacugc

SEQ ID NO: 1219127 - RNA, 22 nt, Human
gcuuccagcugagcaucugccc

SEQ ID NO: 1219128 - RNA, 22 nt, Human
gcuugccugucuccauggaagc

SEQ ID NO: 1219129 - RNA, 21 nt, Human
ggagcucacgaccuccuccgg

SEQ ID NO: 1219130 - RNA, 24 nt, Human
ggaggacucuuuguuuucuccacc

SEQ ID NO: 1219131 - RNA, 18 nt, Human
ggagguugcagggagcug

SEQ ID NO: 1219132 - RNA, 24 nt, Human
ggagguugcagggagcugagaucg

SEQ ID NO: 1219133 - RNA, 22 nt, Human
ggaucaccugaggucaggaguu

SEQ ID NO: 1219134 - RNA, 18 nt, Human
ggaugauacccugaaauc

SEQ ID NO: 1219135 - RNA, 20 nt, Human
ggccagagcuuuggccccuu

SEQ ID NO: 1219136 - RNA, 19 nt, Human
ggccaggugugguggcuca

SEQ ID NO: 1219137 - RNA, 21 nt, Human
ggccaggugugguggcucaug

SEQ ID NO: 1219138 - RNA, 23 nt, Human
gggaggcugaggcaggagaauca

SEQ ID NO: 1219139 - RNA, 19 nt, Human
gggcagcaggcucugaagg

SEQ ID NO: 1219140 - RNA, 24 nt, Human
gggccaggugugguggcucaugcc

SEQ ID NO: 1219141 - RNA, 24 nt, Human
ggggaggcugaggcaggagaauca

SEQ ID NO: 1219142 - RNA, 24 nt, Human
gggguccuggaacugguugguguc

SEQ ID NO: 1219143 - RNA, 24 nt, Human
gggucuaccuccuaccuagaaguc

SEQ ID NO: 1219144 - RNA, 19 nt, Human
ggugcaucagacugggggc

SEQ ID NO: 1219145 - RNA, 21 nt, Human
gguggaucacuugaggucagg

SEQ ID NO: 1219146 - RNA, 24 nt, Human
gguggcucaugccuguaaucccag

SEQ ID NO: 1219147 - RNA, 18 nt, Human
gugcaguggcucacaccu

SEQ ID NO: 1219148 - RNA, 23 nt, Human
guggcucaugccuguaaucccag

SEQ ID NO: 1219149 - RNA, 20 nt, Human
uaaaacuacaaaaauuagcc

SEQ ID NO: 1219150 - RNA, 21 nt, Human
uaaagaaggguccccucuguu

SEQ ID NO: 1219151 - RNA, 21 nt, Human
uaaggaugauacccugaaauc

SEQ ID NO: 1219152 - RNA, 21 nt, Human
uaauaaauaaaaaauggggcc

SEQ ID NO: 1219153 - RNA, 20 nt, Human
uacuaaaacuacaaaaauua

SEQ ID NO: 1219154 - RNA, 22 nt, Human
uagacccaacuacuugggaggc

SEQ ID NO: 1219155 - RNA, 24 nt, Human
uagaggcucagcuugccugucucc

SEQ ID NO: 1219156 - RNA, 21 nt, Human
uagaucccucucauuagcacu

SEQ ID NO: 1219157 - RNA, 21 nt, Human
uagccgggcaugguggcgggu

SEQ ID NO: 1219158 - RNA, 25 nt, Human
uaguuaucaagaacaaaguccucgg

SEQ ID NO: 1219159 - RNA, 26 nt, Human
uaucaagaacaaaguccucggacuuc

SEQ ID NO: 1219160 - RNA, 22 nt, Human
ucaaaaacaaacaaaaaaggca

SEQ ID NO: 1219161 - RNA, 18 nt, Human
ucaauucugucacuucug

SEQ ID NO: 1219162 - RNA, 24 nt, Human
ucacaugaacccgggaggcggagg

SEQ ID NO: 1219163 - RNA, 18 nt, Human
ucagacagaaacaaugca

SEQ ID NO: 1219164 - RNA, 19 nt, Human
ucaggccauuuauucugca

SEQ ID NO: 1219165 - RNA, 20 nt, Human
ucagggaggucagggugcgg

SEQ ID NO: 1219166 - RNA, 19 nt, Human
ucaucuucccgaguaggcc

SEQ ID NO: 1219167 - RNA, 23 nt, Human
ucaugccacugcacuccagccug

SEQ ID NO: 1219168 - RNA, 22 nt, Human
ucaugccuguaaucccaguacu

SEQ ID NO: 1219169 - RNA, 24 nt, Human
uccagccugggcgacaagagcgag

SEQ ID NO: 1219170 - RNA, 25 nt, Human
uccagccugggcgacaagagcgaga

SEQ ID NO: 1219171 - RNA, 18 nt, Human
uccagccugggugacaga

SEQ ID NO: 1219172 - RNA, 20 nt, Human
ucccacucagcacgcugccc

SEQ ID NO: 1219173 - RNA, 19 nt, Human
ucccagcucccagacaggc

SEQ ID NO: 1219174 - RNA, 22 nt, Human
ucccagcucccagacaggcccc

SEQ ID NO: 1219175 - RNA, 23 nt, Human
uccccucuguuaccccuaccaaa

SEQ ID NO: 1219176 - RNA, 21 nt, Human
uccgccaagcugaucuucuga

SEQ ID NO: 1219177 - RNA, 23 nt, Human
ucgugccacugcacuccagccug

SEQ ID NO: 1219178 - RNA, 22 nt, Human
ucucaaaaauaaauaaagaaug

SEQ ID NO: 1219179 - RNA, 25 nt, Human
ucucauuagcacuuuaauaucagug

SEQ ID NO: 1219180 - RNA, 21 nt, Human
ucucuacuaaaaauacaaaaa

SEQ ID NO: 1219181 - RNA, 23 nt, Human
ucucuacuaaaacuacaaaaauu

SEQ ID NO: 1219182 - RNA, 22 nt, Human
ucuguaaggaugauacccugaa

SEQ ID NO: 1219183 - RNA, 19 nt, Human
ucuuacugucucuguuucc

SEQ ID NO: 1219184 - RNA, 23 nt, Human
ucuuacugucucuguuuccagaa

SEQ ID NO: 1219185 - RNA, 19 nt, Human
ugaaaccccaucucuacua

SEQ ID NO: 1219186 - RNA, 23 nt, Human
ugaacccgggaggcggagguugc

SEQ ID NO: 1219187 - RNA, 20 nt, Human
ugaaugcgacaguccuuccc

SEQ ID NO: 1219188 - RNA, 24 nt, Human
ugagaucaugccacugcacuccag

SEQ ID NO: 1219189 - RNA, 21 nt, Human
ugagcaucugcccauucuccu

SEQ ID NO: 1219190 - RNA, 22 nt, Human
ugagcugagaucaugccacugc

SEQ ID NO: 1219191 - RNA, 24 nt, Human
ugagcuuccggcaguagagcagcu

SEQ ID NO: 1219192 - RNA, 18 nt, Human
ugaggcaggagaaucaca

SEQ ID NO: 1219193 - RNA, 20 nt, Human
ugaggcaggagaaucacaug

SEQ ID NO: 1219194 - RNA, 24 nt, Human
ugaggcaggagaaucacaugaacc

SEQ ID NO: 1219195 - RNA, 25 nt, Human
ugaggcaggagaaucacaugaaccc

SEQ ID NO: 1219196 - RNA, 21 nt, Human
ugagguagagccuacagugag

SEQ ID NO: 1219197 - RNA, 24 nt, Human
ugagguggguggaucacuugaggu

SEQ ID NO: 1219198 - RNA, 26 nt, Human
ugagguggguggaucacuugagguca

SEQ ID NO: 1219199 - RNA, 24 nt, Human
ugaucaacauggugaaaccccauc

SEQ ID NO: 1219200 - RNA, 23 nt, Human
ugauggaucaccugaggucagga

SEQ ID NO: 1219201 - RNA, 19 nt, Human
ugcaaaccagcagacagag

SEQ ID NO: 1219202 - RNA, 22 nt, Human
ugcaggagguaggccagggcag

SEQ ID NO: 1219203 - RNA, 19 nt, Human
ugccagaauuggggacucc

SEQ ID NO: 1219204 - RNA, 23 nt, Human
ugccauaacagaguacccgucac

SEQ ID NO: 1219205 - RNA, 22 nt, Human
ugccugacgacagacugaacuc

SEQ ID NO: 1219206 - RNA, 20 nt, Human
ugccuggaccacuccugcag

SEQ ID NO: 1219207 - RNA, 23 nt, Human
ugccuguaaucccaguacuuugg

SEQ ID NO: 1219208 - RNA, 24 nt, Human
ugccuguaaucccaguacuuuggg

SEQ ID NO: 1219209 - RNA, 24 nt, Human
ugccuguagacccaacuacuuggg

SEQ ID NO: 1219210 - RNA, 20 nt, Human
ugccuguauucccagcuacu

SEQ ID NO: 1219211 - RNA, 23 nt, Human
ugccuguauucccagcuacuggg

SEQ ID NO: 1219212 - RNA, 24 nt, Human
uggaucaccugaggucaggaguuc

SEQ ID NO: 1219213 - RNA, 27 nt, Human
uggaucaccugaggucaggaguucgag

SEQ ID NO: 1219214 - RNA, 23 nt, Human
uggaucacuugaggucaggaguu

SEQ ID NO: 1219215 - RNA, 27 nt, Human
uggaucacuugaggucaggaguuaaag

SEQ ID NO: 1219216 - RNA, 19 nt, Human
uggcgggugccuguauucc

SEQ ID NO: 1219217 - RNA, 24 nt, Human
uggcgggugccuguauucccagcu

SEQ ID NO: 1219218 - RNA, 19 nt, Human
uggcuacugcaacucugug

SEQ ID NO: 1219219 - RNA, 21 nt, Human
uggcucacaccuguaauccca

SEQ ID NO: 1219220 - RNA, 24 nt, Human
uggcucacaccuguaaucccagca

SEQ ID NO: 1219221 - RNA, 22 nt, Human
uggcucaugccuguaaucccag

SEQ ID NO: 1219222 - RNA, 22 nt, Human
uggcucaugccuguaaucccag

SEQ ID NO: 1219223 - RNA, 24 nt, Human
ugggaggcccaggcugauggauca

SEQ ID NO: 1219224 - RNA, 19 nt, Human
ugggaggccgaggcaggag

SEQ ID NO: 1219225 - RNA, 20 nt, Human
ugggaggccgaggcaggaga

SEQ ID NO: 1219226 - RNA, 24 nt, Human
ugggaggccgaggcaggagaauca

SEQ ID NO: 1219227 - RNA, 20 nt, Human
ugggaggcugaggugggugg

SEQ ID NO: 1219228 - RNA, 23 nt, Human
ugggaggcugagguggguggauc

SEQ ID NO: 1219229 - RNA, 24 nt, Human
ugggaggcugagguggguggauca

SEQ ID NO: 1219230 - RNA, 22 nt, Human
uggggccaggugugguggcuca

SEQ ID NO: 1219231 - RNA, 24 nt, Human
uggggccaggugugguggcucaug

SEQ ID NO: 1219232 - RNA, 23 nt, Human
uggggguggccccucccuucaaa

SEQ ID NO: 1219233 - RNA, 23 nt, Human
ugggugacagauucugucucaaa

SEQ ID NO: 1219234 - RNA, 24 nt, Human
ugggugacagauucugucucaaaa

SEQ ID NO: 1219235 - RNA, 24 nt, Human
uggguggaucacuugaggucagga

SEQ ID NO: 1219236 - RNA, 18 nt, Human
ugggugugguggugcgug

SEQ ID NO: 1219237 - RNA, 24 nt, Human
ugguggcucaugccuguaauccca

SEQ ID NO: 1219238 - RNA, 24 nt, Human
ugguggugcgugccuguagaccca

SEQ ID NO: 1219239 - RNA, 20 nt, Human
ugguuccuguccggaugcuc

SEQ ID NO: 1219240 - RNA, 20 nt, Human
ugucuguuuugcucugaugg

SEQ ID NO: 1219241 - RNA, 21 nt, Human
ugugccauaacagaguacccg

SEQ ID NO: 1219242 - RNA, 19 nt, Human
uguucuuuauagcagacuu

SEQ ID NO: 1219243 - RNA, 23 nt, Human
uuaaagaccagccugaucaacau

SEQ ID NO: 1219244 - RNA, 24 nt, Human
uuagccgggcaugguggcgggugc

SEQ ID NO: 1219245 - RNA, 20 nt, Human
uuagcugggugugguggugc

SEQ ID NO: 1219246 - RNA, 22 nt, Human
uuagcugggugugguggugcgu

SEQ ID NO: 1219247 - RNA, 24 nt, Human
uuagcugggugugguggugcgugc

SEQ ID NO: 1219248 - RNA, 18 nt, Human
uucuguugaggcugcauu

SEQ ID NO: 1219249 - RNA, 21 nt, Human
uugcagggagcugagaucgug

SEQ ID NO: 1219250 - RNA, 21 nt, Human
uuggccuccugggcacaggcg

SEQ ID NO: 1219251 - RNA, 25 nt, Human
uugggaggccgaggcaggagaauca

SEQ ID NO: 1219252 - RNA, 25 nt, Human
uugggaggcugagguggguggauca

SEQ ID NO: 1219253 - RNA, 25 nt, Human
uuuauagucuucauaaauauuuucu

SEQ ID NO: 1219254 - RNA, 20 nt, Human
uuugcucugauggggucugu

SEQ ID NO: 1219255 - RNA, 22 nt, Human
uuugggaggcccaggcugaugg

SEQ ID NO: 1219256 - RNA, 18 nt, Human
uuuuguuuuauuucccag

SEQ ID NO: 1219257 - RNA, 23 nt, Human
aaaaaaaaaaaaaaaagcccuag

SEQ ID NO: 1219258 - RNA, 19 nt, Human
aaaaaaaaaaagcccuaga

SEQ ID NO: 1219259 - RNA, 22 nt, Human
aaaagaaaaaaaaaaaaaaaag

SEQ ID NO: 1219260 - RNA, 22 nt, Human
aaguaaguggggguugaaguca

SEQ ID NO: 1219261 - RNA, 24 nt, Human
aaguaaguggggguugaagucaga

SEQ ID NO: 1219262 - RNA, 18 nt, Human
acucugucacccaggcug

SEQ ID NO: 1219263 - RNA, 24 nt, Human
acucugucacccaggcuggaauga

SEQ ID NO: 1219264 - RNA, 22 nt, Human
cacucugucacccaggcuggaa

SEQ ID NO: 1219265 - RNA, 23 nt, Human
cacucugucacccaggcuggaau

SEQ ID NO: 1219266 - RNA, 21 nt, Human
cucaaaaagaaaaaaaaaaaa

SEQ ID NO: 1219267 - RNA, 23 nt, Human
cucaaaaagaaaaaaaaaaaaaa

SEQ ID NO: 1219268 - RNA, 22 nt, Human
cuggaaugagacucugucucaa

SEQ ID NO: 1219269 - RNA, 24 nt, Human
cuggaaugagacucugucucaaaa

SEQ ID NO: 1219270 - RNA, 21 nt, Human
gaaaaaaaaaaaaaaaagccc

SEQ ID NO: 1219271 - RNA, 19 nt, Human
gacucugucucaaaaagaa

SEQ ID NO: 1219272 - RNA, 24 nt, Human
gcuggaaugagacucugucucaaa

SEQ ID NO: 1219273 - RNA, 20 nt, Human
ucacccaggcuggaaugaga

SEQ ID NO: 1219274 - RNA, 23 nt, Human
ucucacucugucacccaggcugg

SEQ ID NO: 1219275 - RNA, 24 nt, Human
ucucacucugucacccaggcugga

SEQ ID NO: 1219276 - RNA, 25 nt, Human
ucucacucugucacccaggcuggaa

SEQ ID NO: 1219277 - RNA, 26 nt, Human
ucucacucugucacccaggcuggaau

SEQ ID NO: 1219278 - RNA, 18 nt, Human
ucugucacccaggcugga

SEQ ID NO: 1219279 - RNA, 23 nt, Human
ucugucucaaaaagaaaaaaaaa

SEQ ID NO: 1219280 - RNA, 24 nt, Human
ucugucucaaaaagaaaaaaaaaa

SEQ ID NO: 1219281 - RNA, 25 nt, Human
ucugucucaaaaagaaaaaaaaaaa

SEQ ID NO: 1219282 - RNA, 22 nt, Human
ugagauggggucucacucuguc

SEQ ID NO: 1219283 - RNA, 24 nt, Human
uggggucucacucugucacccagg

SEQ ID NO: 1219284 - RNA, 22 nt, Human
ugguuguaaaaggagagaccaa

SEQ ID NO: 1219285 - RNA, 22 nt, Human
uuugagauggggucucacucug

SEQ ID NO: 1219286 - RNA, 24 nt, Human
aacacacccaaaccccuccaauua

SEQ ID NO: 1219287 - RNA, 22 nt, Human
aaccccuccaauuacccuccca

SEQ ID NO: 1219288 - RNA, 26 nt, Human
acccucccaccuccuuggcauccccu

SEQ ID NO: 1219289 - RNA, 22 nt, Human
caaaccccuccaauuacccucc

SEQ ID NO: 1219290 - RNA, 23 nt, Human
caaaccccuccaauuacccuccc

SEQ ID NO: 1219291 - RNA, 30 nt, Human
cacacccaaaccccuccaauuacccucccc

SEQ ID NO: 1219292 - RNA, 19 nt, Human
ccaaaccccuccaauuacc

SEQ ID NO: 1219293 - RNA, 19 nt, Human
cccucccaccuccuuggca

SEQ ID NO: 1219294 - RNA, 24 nt, Human
cccuucccugcccucuuccucaaa

SEQ ID NO: 1219295 - RNA, 19 nt, Human
ccuucccugcccucuuccu

SEQ ID NO: 1219296 - RNA, 20 nt, Human
ccuucccugcccucuuccuc

SEQ ID NO: 1219297 - RNA, 21 nt, Human
ccuuggcauccccuucccugc

SEQ ID NO: 1219298 - RNA, 21 nt, Human
cugccgauggcggcugccccc

SEQ ID NO: 1219299 - RNA, 30 nt, Human
gccgauggcggcugcccccggccucuccuu

SEQ ID NO: 1219300 - RNA, 21 nt, Human
gcgucauuccaacacacccaa

SEQ ID NO: 1219301 - RNA, 22 nt, Human
uccaacacacccaaaccccucc

SEQ ID NO: 1219302 - RNA, 19 nt, Human
ucccugcccucuuccucaa

SEQ ID NO: 1219303 - RNA, 23 nt, Human
uccugugcucuguccccuggcgc

SEQ ID NO: 1219304 - RNA, 20 nt, Human
ucuccugguguugcugcggc

SEQ ID NO: 1219305 - RNA, 19 nt, Human
ugcucuguccccuggcgcu

SEQ ID NO: 1219306 - RNA, 27 nt, Human
uggcauccccuucccugcccucuuccu

SEQ ID NO: 1219307 - RNA, 22 nt, Human
ugugggggucccuuuccugugc

SEQ ID NO: 1219308 - RNA, 18 nt, Human
uuguuguagacgccuuca

SEQ ID NO: 1219309 - RNA, 21 nt, Human
aagcaggagaggaaaguaggg

SEQ ID NO: 1219310 - RNA, 24 nt, Human
acgccaagaccccgcccgccuggu

SEQ ID NO: 1219311 - RNA, 19 nt, Human
aggaaaguagggcuccacc

SEQ ID NO: 1219312 - RNA, 27 nt, Human
aggcagaaagcaggagaggagggaccc

SEQ ID NO: 1219313 - RNA, 23 nt, Human
aggcccuggcacaaaguaagcuc

SEQ ID NO: 1219314 - RNA, 18 nt, Human
auccccaccaaccagccc

SEQ ID NO: 1219315 - RNA, 22 nt, Human
cagcguuuagcuccgagaacgc

SEQ ID NO: 1219316 - RNA, 22 nt, Human
cauuacugaauccccaccaacc

SEQ ID NO: 1219317 - RNA, 18 nt, Human
cccaccaaccagcccaaa

SEQ ID NO: 1219318 - RNA, 26 nt, Human
cccacccucaccaucacaaccccuag

SEQ ID NO: 1219319 - RNA, 22 nt, Human
ccccacccucaccaucacaccc

SEQ ID NO: 1219320 - RNA, 23 nt, Human
ccccacccucaccaucacacccu

SEQ ID NO: 1219321 - RNA, 20 nt, Human
ccuggcucagcuggcgcggc

SEQ ID NO: 1219322 - RNA, 22 nt, Human
cgagaacgccaagaccccgccc

SEQ ID NO: 1219323 - RNA, 22 nt, Human
cgagaacgccaagaccccgccc

SEQ ID NO: 1219324 - RNA, 21 nt, Human
gagaacgccaagaccccgccc

SEQ ID NO: 1219325 - RNA, 18 nt, Human
gcagaaagcaggagagga

SEQ ID NO: 1219326 - RNA, 24 nt, Human
ggaaaguagggcuccaccuggcuc

SEQ ID NO: 1219327 - RNA, 18 nt, Human
gucacaggcagaaagcag

SEQ ID NO: 1219328 - RNA, 18 nt, Human
guggcccuagacagguca

SEQ ID NO: 1219329 - RNA, 20 nt, Human
uaaaagagagagaaccucca

SEQ ID NO: 1219330 - RNA, 19 nt, Human
uacugaauccccaccaacc

SEQ ID NO: 1219331 - RNA, 23 nt, Human
uacugaauccccaccaaccagcc

SEQ ID NO: 1219332 - RNA, 23 nt, Human
uagaaugaaugagugaauaaaug

SEQ ID NO: 1219333 - RNA, 23 nt, Human
ucauaccuaaaagagagagaacc

SEQ ID NO: 1219334 - RNA, 21 nt, Human
ugaauccccaccaaccagccc

SEQ ID NO: 1219335 - RNA, 19 nt, Human
ugucuggcagcacgucugu

SEQ ID NO: 1219336 - RNA, 21 nt, Human
uuagugugguacuggcuuuuc

SEQ ID NO: 1219337 - RNA, 24 nt, Human
uuuuguagaaugaaugagugaaua

SEQ ID NO: 1219338 - RNA, 21 nt, Human
agggggcuucucccuuggaga

SEQ ID NO: 1219339 - RNA, 21 nt, Human
cucccgcgcaggccauaagag

SEQ ID NO: 1219340 - RNA, 19 nt, Human
cuggcaagggggcuucucc

SEQ ID NO: 1219341 - RNA, 21 nt, Human
ugagaacugccagguccgcgg

SEQ ID NO: 1219342 - RNA, 20 nt, Human
ugucugaaagggaacuagaa

SEQ ID NO: 1219343 - RNA, 24 nt, Human
caagguccugacucagcccagcca

SEQ ID NO: 1219344 - RNA, 23 nt, Human
caggacaguuuccugagcuucaa

SEQ ID NO: 1219345 - RNA, 21 nt, Human
ccaguuuauuuauucaacaag

SEQ ID NO: 1219346 - RNA, 18 nt, Human
ccccuuucuucccuuccu

SEQ ID NO: 1219347 - RNA, 24 nt, Human
ccccuuucuucccuuccuucuccc

SEQ ID NO: 1219348 - RNA, 19 nt, Human
cccuuccuucucccuccca

SEQ ID NO: 1219349 - RNA, 18 nt, Human
ccguccuggcaagguccu

SEQ ID NO: 1219350 - RNA, 18 nt, Human
ccuacugugugcuaggca

SEQ ID NO: 1219351 - RNA, 20 nt, Human
ccucccaccaccucccaggc

SEQ ID NO: 1219352 - RNA, 21 nt, Human
ccucccaccaccucccaggcc

SEQ ID NO: 1219353 - RNA, 22 nt, Human
ccuuucuucccuuccuucuccc

SEQ ID NO: 1219354 - RNA, 21 nt, Human
cggcagagccccucccuuugg

SEQ ID NO: 1219355 - RNA, 19 nt, Human
cguccuggcaagguccuga

SEQ ID NO: 1219356 - RNA, 21 nt, Human
cuaagcggcagagccccuccc

SEQ ID NO: 1219357 - RNA, 19 nt, Human
cucccaccaccucccaggc

SEQ ID NO: 1219358 - RNA, 19 nt, Human
cucccucccaccaccuccc

SEQ ID NO: 1219359 - RNA, 25 nt, Human
cucccucccaccaccucccaggccc

SEQ ID NO: 1219360 - RNA, 19 nt, Human
cuccugggccuccgcccuc

SEQ ID NO: 1219361 - RNA, 19 nt, Human
cucugcuaagcggcagagc

SEQ ID NO: 1219362 - RNA, 18 nt, Human
cugggccuccgcccuccc

SEQ ID NO: 1219363 - RNA, 20 nt, Human
cugugugcuaggcagucuuc

SEQ ID NO: 1219364 - RNA, 21 nt, Human
cuucccuuccuucucccuccc

SEQ ID NO: 1219365 - RNA, 19 nt, Human
gagcaaggggacagacagc

SEQ ID NO: 1219366 - RNA, 24 nt, Human
gcuucaagguuacugucuccaauc

SEQ ID NO: 1219367 - RNA, 23 nt, Human
gggacagacagcaucccgcgguc

SEQ ID NO: 1219368 - RNA, 29 nt, Human
uccccuuucuucccuuccuucucccuccc

SEQ ID NO: 1219369 - RNA, 19 nt, Human
ucccgcggucacgcagcca

SEQ ID NO: 1219370 - RNA, 21 nt, Human
ucccgcggucacgcagccaug

SEQ ID NO: 1219371 - RNA, 24 nt, Human
uccugggccuccgccccucgggag

SEQ ID NO: 1219372 - RNA, 22 nt, Human
ucuucccuuccuucucccuccc

SEQ ID NO: 1219373 - RNA, 18 nt, Human
ugcuaagcggcagagccc

SEQ ID NO: 1219374 - RNA, 22 nt, Human
ugcuaagcggcagagccccucc

SEQ ID NO: 1219375 - RNA, 21 nt, Human
aaaacccuugccacacucugc

SEQ ID NO: 1219376 - RNA, 25 nt, Human
aaaacccuugccacacucugcacac

SEQ ID NO: 1219377 - RNA, 20 nt, Human
aaacugcugggauuacaggu

SEQ ID NO: 1219378 - RNA, 23 nt, Human
aaacugcugggauuacaggugug

SEQ ID NO: 1219379 - RNA, 20 nt, Human
aagauaccccugccucaucc

SEQ ID NO: 1219380 - RNA, 21 nt, Human
aagauaccccugccucauccu

SEQ ID NO: 1219381 - RNA, 21 nt, Human
aagggcgucaggaccaggugc

SEQ ID NO: 1219382 - RNA, 20 nt, Human
aagguaaacaaacccugguu

SEQ ID NO: 1219383 - RNA, 25 nt, Human
aagugauucucccaccucagccucc

SEQ ID NO: 1219384 - RNA, 19 nt, Human
accccucuccaccuuuuuc

SEQ ID NO: 1219385 - RNA, 19 nt, Human
accccucuccaccuuuuuc

SEQ ID NO: 1219386 - RNA, 23 nt, Human
accucagccucccaaacugcugg

SEQ ID NO: 1219387 - RNA, 18 nt, Human
acugcugggauuacaggu

SEQ ID NO: 1219388 - RNA, 19 nt, Human
acuuguauggcuucucccc

SEQ ID NO: 1219389 - RNA, 24 nt, Human
acuuuugggcucaagugauucucc

SEQ ID NO: 1219390 - RNA, 20 nt, Human
agagaccccucuccaccuuu

SEQ ID NO: 1219391 - RNA, 23 nt, Human
agagaccccucuccaccuuuuuc

SEQ ID NO: 1219392 - RNA, 18 nt, Human
auucucccaccucagccu

SEQ ID NO: 1219393 - RNA, 19 nt, Human
caaacccugguucaggcau

SEQ ID NO: 1219394 - RNA, 24 nt, Human
caaacugcugggauuacaggugug

SEQ ID NO: 1219395 - RNA, 22 nt, Human
caagauaccccugccucauccu

SEQ ID NO: 1219396 - RNA, 24 nt, Human
caagguccugacucagcccagcca

SEQ ID NO: 1219397 - RNA, 22 nt, Human
caagugauucucccaccucagc

SEQ ID NO: 1219398 - RNA, 27 nt, Human
caagugauucucccaccucagccuccc

SEQ ID NO: 1219399 - RNA, 19 nt, Human
caccacggugggugcggag

SEQ ID NO: 1219400 - RNA, 21 nt, Human
cacguggggcuggcugggucc

SEQ ID NO: 1219401 - RNA, 22 nt, Human
cagaagccacacacguggggcu

SEQ ID NO: 1219402 - RNA, 23 nt, Human
caggacaguuuccugagcuucaa

SEQ ID NO: 1219403 - RNA, 21 nt, Human
ccaaacugcugggauuacagg

SEQ ID NO: 1219404 - RNA, 21 nt, Human
ccaaacugcugggauuacagg

SEQ ID NO: 1219405 - RNA, 24 nt, Human
ccaaacugcugggauuacaggugu

SEQ ID NO: 1219406 - RNA, 21 nt, Human
ccaguuuauuuauucaacaag

SEQ ID NO: 1219407 - RNA, 22 nt, Human
cccaaagggcgucaggaccagg

SEQ ID NO: 1219408 - RNA, 21 nt, Human
cccaucucugcagcucagaag

SEQ ID NO: 1219409 - RNA, 23 nt, Human
ccccucuccaccuuuuucaugcc

SEQ ID NO: 1219410 - RNA, 18 nt, Human
ccccuuucuucccuuccu

SEQ ID NO: 1219411 - RNA, 24 nt, Human
ccccuuucuucccuuccuucuccc

SEQ ID NO: 1219412 - RNA, 21 nt, Human
cccuaccauccccuaucccaa

SEQ ID NO: 1219413 - RNA, 21 nt, Human
cccucccaccaccucccaggc

SEQ ID NO: 1219414 - RNA, 19 nt, Human
cccuuccuucucccuccca

SEQ ID NO: 1219415 - RNA, 27 nt, Human
cccuuucuucccuuccuucucccuccc

SEQ ID NO: 1219416 - RNA, 18 nt, Human
ccguccuggcaagguccu

SEQ ID NO: 1219417 - RNA, 18 nt, Human
ccuacugugugcuaggca

SEQ ID NO: 1219418 - RNA, 21 nt, Human
ccucccaccaccucccaggcc

SEQ ID NO: 1219419 - RNA, 22 nt, Human
ccuuucuucccuuccuucuccc

SEQ ID NO: 1219420 - RNA, 19 nt, Human
cgcgcagagaccccucucc

SEQ ID NO: 1219421 - RNA, 21 nt, Human
cggcagagccccucccuuugg

SEQ ID NO: 1219422 - RNA, 20 nt, Human
cggcggaagcccuugccaca

SEQ ID NO: 1219423 - RNA, 19 nt, Human
cguccuggcaagguccuga

SEQ ID NO: 1219424 - RNA, 23 nt, Human
cuaucccaaagggcgucaggacc

SEQ ID NO: 1219425 - RNA, 23 nt, Human
cucaagugauucucccaccucag

SEQ ID NO: 1219426 - RNA, 24 nt, Human
cucaagugauucucccaccucagc

SEQ ID NO: 1219427 - RNA, 18 nt, Human
cucacugcagccucaaac

SEQ ID NO: 1219428 - RNA, 21 nt, Human
cucccaaacugcugggauuac

SEQ ID NO: 1219429 - RNA, 19 nt, Human
cucccaccaccucccaggc

SEQ ID NO: 1219430 - RNA, 23 nt, Human
cucccaccucagccucccaaacu

SEQ ID NO: 1219431 - RNA, 19 nt, Human
cucccucccaccaccuccc

SEQ ID NO: 1219432 - RNA, 25 nt, Human
cucccucccaccaccucccaggccc

SEQ ID NO: 1219433 - RNA, 19 nt, Human
cuccugggccuccgcccuc

SEQ ID NO: 1219434 - RNA, 20 nt, Human
cuccugggccuccgcccucc

SEQ ID NO: 1219435 - RNA, 19 nt, Human
cucugcuaagcggcagagc

SEQ ID NO: 1219436 - RNA, 18 nt, Human
cugggccuccgcccuccc

SEQ ID NO: 1219437 - RNA, 18 nt, Human
cuggugcuugaugcgggc

SEQ ID NO: 1219438 - RNA, 20 nt, Human
cugugugcacacgauggugu

SEQ ID NO: 1219439 - RNA, 20 nt, Human
cugugugcuaggcagucuuc

SEQ ID NO: 1219440 - RNA, 21 nt, Human
cuucccuuccuucucccuccc

SEQ ID NO: 1219441 - RNA, 23 nt, Human
cuuuugggcucaagugauucucc

SEQ ID NO: 1219442 - RNA, 22 nt, Human
gaccccucuccaccuuuuucau

SEQ ID NO: 1219443 - RNA, 21 nt, Human
gagguaggguuucuccccugu

SEQ ID NO: 1219444 - RNA, 21 nt, Human
gauucucccaccucagccucc

SEQ ID NO: 1219445 - RNA, 22 nt, Human
gccuguguguacacacacacug

SEQ ID NO: 1219446 - RNA, 19 nt, Human
gcugggauuacaggugugu

SEQ ID NO: 1219447 - RNA, 24 nt, Human
gcuucaagguuacugucuccaauc

SEQ ID NO: 1219448 - RNA, 18 nt, Human
ggcucaagugauucuccc

SEQ ID NO: 1219449 - RNA, 23 nt, Human
gggaacuccuucccacagaagcc

SEQ ID NO: 1219450 - RNA, 19 nt, Human
gggcucaagugauucuccc

SEQ ID NO: 1219451 - RNA, 22 nt, Human
gggcucaagugauucucccacc

SEQ ID NO: 1219452 - RNA, 18 nt, Human
gggcucagagagcaaggg

SEQ ID NO: 1219453 - RNA, 18 nt, Human
ggugggugcggaggugcu

SEQ ID NO: 1219454 - RNA, 23 nt, Human
guacugggccagguggguuaugu

SEQ ID NO: 1219455 - RNA, 24 nt, Human
gugauucucccaccucagccuccc

SEQ ID NO: 1219456 - RNA, 19 nt, Human
uaccuuaaauuccagaagc

SEQ ID NO: 1219457 - RNA, 24 nt, Human
ucacugcagccucaaacuuuuggg

SEQ ID NO: 1219458 - RNA, 21 nt, Human
ucaggaccaggugcccacgcu

SEQ ID NO: 1219459 - RNA, 23 nt, Human
ucccaaacugcugggauuacagg

SEQ ID NO: 1219460 - RNA, 24 nt, Human
ucccaaacugcugggauuacaggu

SEQ ID NO: 1219461 - RNA, 18 nt, Human
ucccagagcaagguuggg

SEQ ID NO: 1219462 - RNA, 20 nt, Human
ucccagagcaagguugggag

SEQ ID NO: 1219463 - RNA, 20 nt, Human
uccccuuucuucccuuccuc

SEQ ID NO: 1219464 - RNA, 25 nt, Human
ucccuggaccgcgucauuccagucc

SEQ ID NO: 1219465 - RNA, 24 nt, Human
uccugggccuccgccccucgggag

SEQ ID NO: 1219466 - RNA, 19 nt, Human
uccuguugcugccuccugc

SEQ ID NO: 1219467 - RNA, 23 nt, Human
ucucccaccucagccucccaaac

SEQ ID NO: 1219468 - RNA, 24 nt, Human
ucucccagagcaagguugggaggc

SEQ ID NO: 1219469 - RNA, 22 nt, Human
ucuucccuuccuucucccuccc

SEQ ID NO: 1219470 - RNA, 19 nt, Human
ucuuccuccccuuucuucc

SEQ ID NO: 1219471 - RNA, 20 nt, Human
ugagcuccgggggaacuccu

SEQ ID NO: 1219472 - RNA, 24 nt, Human
ugcccuaccauccccuaucccaaa

SEQ ID NO: 1219473 - RNA, 18 nt, Human
ugcuaagcggcagagccc

SEQ ID NO: 1219474 - RNA, 22 nt, Human
ugcuaagcggcagagccccucc

SEQ ID NO: 1219475 - RNA, 18 nt, Human
ugcugggauuacaggugu

SEQ ID NO: 1219476 - RNA, 23 nt, Human
uggcuggguccagaaggcugggc

SEQ ID NO: 1219477 - RNA, 19 nt, Human
ugggauuacagguguguac

SEQ ID NO: 1219478 - RNA, 19 nt, Human
ugggauuacagguguguac

SEQ ID NO: 1219479 - RNA, 21 nt, Human
ugggauuacagguguguacua

SEQ ID NO: 1219480 - RNA, 22 nt, Human
ugggauuacagguguguacuac

SEQ ID NO: 1219481 - RNA, 23 nt, Human
ugggauuacagguguguacuacc

SEQ ID NO: 1219482 - RNA, 25 nt, Human
ugggauuacagguguguacuaccug

SEQ ID NO: 1219483 - RNA, 18 nt, Human
ugggcucaagugauucuc

SEQ ID NO: 1219484 - RNA, 21 nt, Human
uggugcaaucagcucacugca

SEQ ID NO: 1219485 - RNA, 22 nt, Human
uggugcaaucagcucacugcag

SEQ ID NO: 1219486 - RNA, 20 nt, Human
ugguggugguggccgggccc

SEQ ID NO: 1219487 - RNA, 22 nt, Human
ugguggugguggccgggcccgu

SEQ ID NO: 1219488 - RNA, 18 nt, Human
uguguacacacacacugu

SEQ ID NO: 1219489 - RNA, 23 nt, Human
uguguacacacacacuguccaag

SEQ ID NO: 1219490 - RNA, 21 nt, Human
ugugugcacacgaugguguuu

SEQ ID NO: 1219491 - RNA, 19 nt, Human
uuccaguccuguugcugcc

SEQ ID NO: 1219492 - RNA, 22 nt, Human
uugaugcgggcagaacugucac

SEQ ID NO: 1219493 - RNA, 20 nt, Human
aaacagguagacagcacccc

SEQ ID NO: 1219494 - RNA, 20 nt, Human
aagaagccaagcuuguacag

SEQ ID NO: 1219495 - RNA, 24 nt, Human
aaugcugauggccagaucucgcug

SEQ ID NO: 1219496 - RNA, 21 nt, Human
acagaggccaucuugcccaca

SEQ ID NO: 1219497 - RNA, 20 nt, Human
accacggagaacagcgucac

SEQ ID NO: 1219498 - RNA, 18 nt, Human
accuagcugguccaguga

SEQ ID NO: 1219499 - RNA, 18 nt, Human
acugcagccugggggaga

SEQ ID NO: 1219500 - RNA, 20 nt, Human
acugcagccugggggagagc

SEQ ID NO: 1219501 - RNA, 22 nt, Human
agagcccccacagagcugccca

SEQ ID NO: 1219502 - RNA, 24 nt, Human
agagcccccacagagcugcccuuc

SEQ ID NO: 1219503 - RNA, 19 nt, Human
agauggggccuccaugacc

SEQ ID NO: 1219504 - RNA, 22 nt, Human
agcacaggacgcagguucuggg

SEQ ID NO: 1219505 - RNA, 24 nt, Human
agcagagcccccacagagcugccc

SEQ ID NO: 1219506 - RNA, 22 nt, Human
agcuccagggagcuccccacgg

SEQ ID NO: 1219507 - RNA, 20 nt, Human
agcuggaagguggccuugcu

SEQ ID NO: 1219508 - RNA, 20 nt, Human
agcuuuggaugucaccuagc

SEQ ID NO: 1219509 - RNA, 23 nt, Human
agggagcuccccacggucagggu

SEQ ID NO: 1219510 - RNA, 18 nt, Human
aucuccaucugagcucuc

SEQ ID NO: 1219511 - RNA, 23 nt, Human
auguggcagugucuucaggcuug

SEQ ID NO: 1219512 - RNA, 26 nt, Human
cacacagucacaaucacguugagcuc

SEQ ID NO: 1219513 - RNA, 19 nt, Human
cacacugccacugcacccu

SEQ ID NO: 1219514 - RNA, 21 nt, Human
cacagagcugcccaugaugau

SEQ ID NO: 1219515 - RNA, 24 nt, Human
cacagaggccaucuugcccacagu

SEQ ID NO: 1219516 - RNA, 20 nt, Human
cacaucccacacagccaccc

SEQ ID NO: 1219517 - RNA, 18 nt, Human
caccacauccuccacaca

SEQ ID NO: 1219518 - RNA, 20 nt, Human
caccacggagaacagcguca

SEQ ID NO: 1219519 - RNA, 22 nt, Human
cacccucugcccccuaggcaag

SEQ ID NO: 1219520 - RNA, 24 nt, Human
cacgaccaacaccuucuucugcaa

SEQ ID NO: 1219521 - RNA, 21 nt, Human
cacggucagggucugcaggcc

SEQ ID NO: 1219522 - RNA, 20 nt, Human
cacugcacccucugcccccu

SEQ ID NO: 1219523 - RNA, 21 nt, Human
cagagcagagggaggccccga

SEQ ID NO: 1219524 - RNA, 22 nt, Human
cagcacaggacgcagguucugg

SEQ ID NO: 1219525 - RNA, 24 nt, Human
cagcaggacaggaacccagaaguu

SEQ ID NO: 1219526 - RNA, 23 nt, Human
cagcaguagcagagcccccacag

SEQ ID NO: 1219527 - RNA, 23 nt, Human
caggaacccagaaguuaaugcug

SEQ ID NO: 1219528 - RNA, 21 nt, Human
caggcagucagcaauggagca

SEQ ID NO: 1219529 - RNA, 23 nt, Human
cauugccuggacaccugggugaa

SEQ ID NO: 1219530 - RNA, 30 nt, Human
cauuuggggccacacagcugaaaucguccc

SEQ ID NO: 1219531 - RNA, 21 nt, Human
ccacagagcugcccaugauga

SEQ ID NO: 1219532 - RNA, 20 nt, Human
ccagcaccgguacacagccu

SEQ ID NO: 1219533 - RNA, 18 nt, Human
ccagcauuuccuuguagu

SEQ ID NO: 1219534 - RNA, 20 nt, Human
ccaggaccagguucuguacc

SEQ ID NO: 1219535 - RNA, 22 nt, Human
ccagggcacugggcuucucuuc

SEQ ID NO: 1219536 - RNA, 26 nt, Human
ccaugaccacaucccacacagccacc

SEQ ID NO: 1219537 - RNA, 22 nt, Human
cccacggucagggucugcaggc

SEQ ID NO: 1219538 - RNA, 22 nt, Human
ccccaacacugucagggcugcc

SEQ ID NO: 1219539 - RNA, 22 nt, Human
ccccaggaccagguucuguacc

SEQ ID NO: 1219540 - RNA, 18 nt, Human
ccccgggcccccacggcc

SEQ ID NO: 1219541 - RNA, 22 nt, Human
ccccuuccacagggcuagcucg

SEQ ID NO: 1219542 - RNA, 18 nt, Human
cccggggccccaauggcc

SEQ ID NO: 1219543 - RNA, 19 nt, Human
ccuggccccgggcccccac

SEQ ID NO: 1219544 - RNA, 22 nt, Human
ccuggccccgggcccccacggc

SEQ ID NO: 1219545 - RNA, 18 nt, Human
ccuugcugcuugaagccu

SEQ ID NO: 1219546 - RNA, 19 nt, Human
cgccagcaguagcagagcc

SEQ ID NO: 1219547 - RNA, 22 nt, Human
cgccagcaguagcagagccccc

SEQ ID NO: 1219548 - RNA, 19 nt, Human
cggagaacagcgucacacu

SEQ ID NO: 1219549 - RNA, 18 nt, Human
cggucagggucugcaggc

SEQ ID NO: 1219550 - RNA, 21 nt, Human
cgucacacugccacugcaccc

SEQ ID NO: 1219551 - RNA, 24 nt, Human
cguuagagcccucauggaagaugg

SEQ ID NO: 1219552 - RNA, 20 nt, Human
cucagccucuuucauuuucu

SEQ ID NO: 1219553 - RNA, 20 nt, Human
cuccagggagcuccccacgg

SEQ ID NO: 1219554 - RNA, 21 nt, Human
cugcacccucugcccccuagg

SEQ ID NO: 1219555 - RNA, 21 nt, Human
cugccacugcacccucugccc

SEQ ID NO: 1219556 - RNA, 23 nt, Human
cugcuucugggcuccugacaccc

SEQ ID NO: 1219557 - RNA, 19 nt, Human
cuucuagcaccaucuccau

SEQ ID NO: 1219558 - RNA, 21 nt, Human
cuucuugaaaucugggucagg

SEQ ID NO: 1219559 - RNA, 18 nt, Human
cuugugagcccacggcca

SEQ ID NO: 1219560 - RNA, 18 nt, Human
cuuuggaugucaccuagc

SEQ ID NO: 1219561 - RNA, 24 nt, Human
gaacccagaaguuaaugcugaugg

SEQ ID NO: 1219562 - RNA, 23 nt, Human
gaaggugccguuagagcccucau

SEQ ID NO: 1219563 - RNA, 23 nt, Human
gaccagguucuguacccccuucc

SEQ ID NO: 1219564 - RNA, 19 nt, Human
gaccucgucuucuucuagc

SEQ ID NO: 1219565 - RNA, 21 nt, Human
gagaagcugagggugacaccc

SEQ ID NO: 1219566 - RNA, 19 nt, Human
gaggccccgaaguaggagg

SEQ ID NO: 1219567 - RNA, 20 nt, Human
gaucugcgucccugugacuu

SEQ ID NO: 1219568 - RNA, 18 nt, Human
gaugggaauggcauugua

SEQ ID NO: 1219569 - RNA, 24 nt, Human
gcagagcccccacagagcugccca

SEQ ID NO: 1219570 - RNA, 18 nt, Human
gcagguucuggggggagg

SEQ ID NO: 1219571 - RNA, 20 nt, Human
gccaggcgcagggcacucug

SEQ ID NO: 1219572 - RNA, 20 nt, Human
gccccagggguggcccugcu

SEQ ID NO: 1219573 - RNA, 21 nt, Human
gccgaucugcgucccugugac

SEQ ID NO: 1219574 - RNA, 19 nt, Human
gcgucccugugacuucggc

SEQ ID NO: 1219575 - RNA, 19 nt, Human
gcuugaagccuuauuguuc

SEQ ID NO: 1219576 - RNA, 26 nt, Human
gcuuguacaguguggcugggguuugc

SEQ ID NO: 1219577 - RNA, 20 nt, Human
ggaacugcaggcagucagca

SEQ ID NO: 1219578 - RNA, 20 nt, Human
ggaagauggggugguugaaa

SEQ ID NO: 1219579 - RNA, 23 nt, Human
ggacacacggacaccuggccccc

SEQ ID NO: 1219580 - RNA, 18 nt, Human
ggagaacagcgucacacu

SEQ ID NO: 1219581 - RNA, 20 nt, Human
gggcacucugauggggcugc

SEQ ID NO: 1219582 - RNA, 20 nt, Human
gggcacucugauggggcugc

SEQ ID NO: 1219583 - RNA, 22 nt, Human
gggcccccacggccaggacccu

SEQ ID NO: 1219584 - RNA, 18 nt, Human
ggugcagaaugauggggc

SEQ ID NO: 1219585 - RNA, 23 nt, Human
gugaaacagguagacagcacccc

SEQ ID NO: 1219586 - RNA, 21 nt, Human
uacuucaccgggagcuccagc

SEQ ID NO: 1219587 - RNA, 24 nt, Human
uaguggcguuugaagaagccaagc

SEQ ID NO: 1219588 - RNA, 22 nt, Human
ucaaaccugacagagcuuugga

SEQ ID NO: 1219589 - RNA, 22 nt, Human
ucacaaucacguugagcuccag

SEQ ID NO: 1219590 - RNA, 23 nt, Human
ucacagcggaacugcaggcaguc

SEQ ID NO: 1219591 - RNA, 20 nt, Human
ucacaucccccaacacuguc

SEQ ID NO: 1219592 - RNA, 27 nt, Human
ucaccacauccuccacacaagggcccu

SEQ ID NO: 1219593 - RNA, 19 nt, Human
ucaccagugagaaguugag

SEQ ID NO: 1219594 - RNA, 22 nt, Human
ucaugguguagacugcauacuu

SEQ ID NO: 1219595 - RNA, 21 nt, Human
uccacauccacagagcagagg

SEQ ID NO: 1219596 - RNA, 29 nt, Human
uccagggagcuccccacggucagggucug

SEQ ID NO: 1219597 - RNA, 21 nt, Human
ucccacacagccaccccguuc

SEQ ID NO: 1219598 - RNA, 19 nt, Human
uccccacggucagggucug

SEQ ID NO: 1219599 - RNA, 22 nt, Human
uccccagcuuccagggcacugg

SEQ ID NO: 1219600 - RNA, 20 nt, Human
uccgcuggcugugggagggg

SEQ ID NO: 1219601 - RNA, 23 nt, Human
uccugagcaggagcaccuggccc

SEQ ID NO: 1219602 - RNA, 23 nt, Human
ucgcggacccagccgaaacugag

SEQ ID NO: 1219603 - RNA, 23 nt, Human
ucugaaacacaggggagacucug

SEQ ID NO: 1219604 - RNA, 18 nt, Human
ucugcaggccugagaagc

SEQ ID NO: 1219605 - RNA, 19 nt, Human
ucuggggggaggggauggg

SEQ ID NO: 1219606 - RNA, 22 nt, Human
ucuucuagcaccaucuccaucu

SEQ ID NO: 1219607 - RNA, 24 nt, Human
ucuucuagcaccaucuccaucuga

SEQ ID NO: 1219608 - RNA, 21 nt, Human
ucuugcccacaguucuucucg

SEQ ID NO: 1219609 - RNA, 22 nt, Human
ugacacccagguccccuucaca

SEQ ID NO: 1219610 - RNA, 20 nt, Human
ugacuucggccuucuuccuc

SEQ ID NO: 1219611 - RNA, 20 nt, Human
ugagacagacgguggcgucc

SEQ ID NO: 1219612 - RNA, 20 nt, Human
ugcagccugggggagagcug

SEQ ID NO: 1219613 - RNA, 20 nt, Human
ugcauacuucaccgggagcu

SEQ ID NO: 1219614 - RNA, 19 nt, Human
ugccacugcacccucugcc

SEQ ID NO: 1219615 - RNA, 19 nt, Human
ugccccaaagcggccccag

SEQ ID NO: 1219616 - RNA, 18 nt, Human
ugcugguagcggggggcc

SEQ ID NO: 1219617 - RNA, 21 nt, Human
uggaugucaccuagcuggucc

SEQ ID NO: 1219618 - RNA, 24 nt, Human
uggaugucaccuagcugguccagu

SEQ ID NO: 1219619 - RNA, 21 nt, Human
uggccccgggcccccacggcc

SEQ ID NO: 1219620 - RNA, 22 nt, Human
ugggugaagaugacagccuucc

SEQ ID NO: 1219621 - RNA, 19 nt, Human
ugugaugagcgccagcagu

SEQ ID NO: 1219622 - RNA, 19 nt, Human
uguggcagugucuucaggc

SEQ ID NO: 1219623 - RNA, 21 nt, Human
uucacagaggccaucuugccc

SEQ ID NO: 1219624 - RNA, 20 nt, Human
acagagucccccuggagcca

SEQ ID NO: 1219625 - RNA, 24 nt, Human
aggccuaaaguuuacucucaugag

SEQ ID NO: 1219626 - RNA, 18 nt, Human
aggcugaugccuguccac

SEQ ID NO: 1219627 - RNA, 22 nt, Human
auacauugccaaaaugacaguc

SEQ ID NO: 1219628 - RNA, 22 nt, Human
caagaauagaucuguccuagau

SEQ ID NO: 1219629 - RNA, 23 nt, Human
ccagggcccaauacauugccaaa

SEQ ID NO: 1219630 - RNA, 19 nt, Human
ccccuggagccagggugag

SEQ ID NO: 1219631 - RNA, 20 nt, Human
cccggugugggccucugggg

SEQ ID NO: 1219632 - RNA, 18 nt, Human
ccuguccacaauccaaga

SEQ ID NO: 1219633 - RNA, 19 nt, Human
cugaaguggcagugggugg

SEQ ID NO: 1219634 - RNA, 25 nt, Human
cugaaguggcaguggguggucuccu

SEQ ID NO: 1219635 - RNA, 19 nt, Human
cuuccacauggcaaagguu

SEQ ID NO: 1219636 - RNA, 22 nt, Human
gcacagagucccccuggagcca

SEQ ID NO: 1219637 - RNA, 19 nt, Human
gggccucuggggguccccc

SEQ ID NO: 1219638 - RNA, 19 nt, Human
gugcagagaggucaccagg

SEQ ID NO: 1219639 - RNA, 20 nt, Human
gugcagagaggucaccaggc

SEQ ID NO: 1219640 - RNA, 23 nt, Human
uaccauagcacagagucccccug

SEQ ID NO: 1219641 - RNA, 21 nt, Human
uagcacagagucccccuggag

SEQ ID NO: 1219642 - RNA, 22 nt, Human
uaguaggcugaugccuguccac

SEQ ID NO: 1219643 - RNA, 24 nt, Human
ucaccaggcuuuucugaaguggca

SEQ ID NO: 1219644 - RNA, 22 nt, Human
uccacaauccaagaauagaucu

SEQ ID NO: 1219645 - RNA, 18 nt, Human
ucccaucaagacaugaac

SEQ ID NO: 1219646 - RNA, 18 nt, Human
ugaaguggcagugggugg

SEQ ID NO: 1219647 - RNA, 19 nt, Human
ugagcucagacagcugcuc

SEQ ID NO: 1219648 - RNA, 20 nt, Human
ugcauccaagcacuuuggcc

SEQ ID NO: 1219649 - RNA, 18 nt, Human
ugcccggugugggccucu

SEQ ID NO: 1219650 - RNA, 18 nt, Human
uggcaguggguggucucc

SEQ ID NO: 1219651 - RNA, 18 nt, Human
uggccaggaaaagcaugg

SEQ ID NO: 1219652 - RNA, 23 nt, Human
ugggggauggauuuauugauugg

SEQ ID NO: 1219653 - RNA, 18 nt, Human
uguguugugauaaauggc

SEQ ID NO: 1219654 - RNA, 21 nt, Human
uugugauaaauggcuucagau

SEQ ID NO: 1219655 - RNA, 21 nt, Human
aacccuucuccuguggcccca

SEQ ID NO: 1219656 - RNA, 22 nt, Human
aaugggacucugagggcuaaca

SEQ ID NO: 1219657 - RNA, 22 nt, Human
aaugggacucugagggcuaaca

SEQ ID NO: 1219658 - RNA, 22 nt, Human
acaugcagggaggaaggggggg

SEQ ID NO: 1219659 - RNA, 20 nt, Human
acucugagggcuaacagaaa

SEQ ID NO: 1219660 - RNA, 24 nt, Human
acucugagggcuaacagaaauggg

SEQ ID NO: 1219661 - RNA, 23 nt, Human
acucugagggcuaacaggagagg

SEQ ID NO: 1219662 - RNA, 19 nt, Human
acugggggcuggggccugc

SEQ ID NO: 1219663 - RNA, 18 nt, Human
agaaacagagaagggggc

SEQ ID NO: 1219664 - RNA, 22 nt, Human
agaagggggcaggggcucaugu

SEQ ID NO: 1219665 - RNA, 24 nt, Human
agagagcucuagaaaccaacggag

SEQ ID NO: 1219666 - RNA, 22 nt, Human
agagaugggcagcugugggccc

SEQ ID NO: 1219667 - RNA, 18 nt, Human
agcccgagaugggagcag

SEQ ID NO: 1219668 - RNA, 21 nt, Human
agggaggaaggggggggcagg

SEQ ID NO: 1219669 - RNA, 22 nt, Human
agggaggaaggggggggcagga

SEQ ID NO: 1219670 - RNA, 21 nt, Human
agggcggccuggcucugggcc

SEQ ID NO: 1219671 - RNA, 18 nt, Human
agggcuaacaggagaggg

SEQ ID NO: 1219672 - RNA, 23 nt, Human
agggcuaacaggagagggcggcc

SEQ ID NO: 1219673 - RNA, 21 nt, Human
agggggcaggggcucauguca

SEQ ID NO: 1219674 - RNA, 22 nt, Human
augcagggaggaaggggggggc

SEQ ID NO: 1219675 - RNA, 19 nt, Human
caauagaaaugggacucug

SEQ ID NO: 1219676 - RNA, 23 nt, Human
caggggcucaugucagcaaacac

SEQ ID NO: 1219677 - RNA, 22 nt, Human
ccaccugaggcccagagauggg

SEQ ID NO: 1219678 - RNA, 18 nt, Human
ccaggguggggugggggg

SEQ ID NO: 1219679 - RNA, 18 nt, Human
ccaggguggggugggggg

SEQ ID NO: 1219680 - RNA, 18 nt, Human
cccagccaggccccagga

SEQ ID NO: 1219681 - RNA, 22 nt, Human
ccccaaggccgugggacuuccg

SEQ ID NO: 1219682 - RNA, 19 nt, Human
ccccaggaguccugucccc

SEQ ID NO: 1219683 - RNA, 22 nt, Human
ccccaggaguccuguccccucu

SEQ ID NO: 1219684 - RNA, 19 nt, Human
ccggaaacaccugggcuga

SEQ ID NO: 1219685 - RNA, 18 nt, Human
ccguggccagacuugggg

SEQ ID NO: 1219686 - RNA, 19 nt, Human
ccuggcucugggccccagc

SEQ ID NO: 1219687 - RNA, 25 nt, Human
ccugguccaccugaggguccccugg

SEQ ID NO: 1219688 - RNA, 21 nt, Human
cucugggccccagccaggccc

SEQ ID NO: 1219689 - RNA, 23 nt, Human
cuuagagauccccugguccaccu

SEQ ID NO: 1219690 - RNA, 18 nt, Human
gaaaccaacggagaaaca

SEQ ID NO: 1219691 - RNA, 20 nt, Human
gaagaggggacugggggcug

SEQ ID NO: 1219692 - RNA, 20 nt, Human
gaaggggggggcaggauuuu

SEQ ID NO: 1219693 - RNA, 18 nt, Human
gagaaggggagggagaga

SEQ ID NO: 1219694 - RNA, 20 nt, Human
gaggaaggggggggcaggau

SEQ ID NO: 1219695 - RNA, 21 nt, Human
gccccaggaguccuguccccu

SEQ ID NO: 1219696 - RNA, 19 nt, Human
gcuauuucucccguccaca

SEQ ID NO: 1219697 - RNA, 20 nt, Human
gcuggggccugcucugaugu

SEQ ID NO: 1219698 - RNA, 19 nt, Human
ggacugggggcuggggccu

SEQ ID NO: 1219699 - RNA, 23 nt, Human
ggccggaagaggggacugggggc

SEQ ID NO: 1219700 - RNA, 18 nt, Human
ggccugaccuggcccagg

SEQ ID NO: 1219701 - RNA, 25 nt, Human
gggccguggccagacuugggggggg

SEQ ID NO: 1219702 - RNA, 18 nt, Human
ggggacugggggcugggg

SEQ ID NO: 1219703 - RNA, 20 nt, Human
ggggacugggggcuggggcc

SEQ ID NO: 1219704 - RNA, 19 nt, Human
ggguggggggcucugggga

SEQ ID NO: 1219705 - RNA, 23 nt, Human
ggguggggggcucuggggacagg

SEQ ID NO: 1219706 - RNA, 19 nt, Human
uaacagaaaugggacucug

SEQ ID NO: 1219707 - RNA, 21 nt, Human
ucaacccuucuccuguggccc

SEQ ID NO: 1219708 - RNA, 21 nt, Human
uccacaggccugaccuggccc

SEQ ID NO: 1219709 - RNA, 18 nt, Human
uccaccugaggcccagag

SEQ ID NO: 1219710 - RNA, 23 nt, Human
uccaggcggccggaagaggggac

SEQ ID NO: 1219711 - RNA, 23 nt, Human
uccccucugagaaggggagggag

SEQ ID NO: 1219712 - RNA, 21 nt, Human
uccggaaacaccugggcugaa

SEQ ID NO: 1219713 - RNA, 20 nt, Human
ucucccaagcagcccgagau

SEQ ID NO: 1219714 - RNA, 18 nt, Human
ugaccuggcccagggugg

SEQ ID NO: 1219715 - RNA, 19 nt, Human
ugccccagccacgcuucaa

SEQ ID NO: 1219716 - RNA, 19 nt, Human
uggcccagggugggguggg

SEQ ID NO: 1219717 - RNA, 25 nt, Human
uggcucugggccccagccaggcccc

SEQ ID NO: 1219718 - RNA, 21 nt, Human
ugggacucugagggcuaacag

SEQ ID NO: 1219719 - RNA, 21 nt, Human
ugggacucugagggcuaacag

SEQ ID NO: 1219720 - RNA, 18 nt, Human
ugggagcaggagggccgg

SEQ ID NO: 1219721 - RNA, 24 nt, Human
uuagagauccccugguccaccuga

SEQ ID NO: 1219722 - RNA, 25 nt, Human
uucaacccuucuccuguggccccaa

SEQ ID NO: 1219723 - RNA, 22 nt, Human
aaaaacaccugguuugcagccg

SEQ ID NO: 1219724 - RNA, 19 nt, Human
aacccucagcucuugcccc

SEQ ID NO: 1219725 - RNA, 23 nt, Human
aagaucuucucagccucauagcu

SEQ ID NO: 1219726 - RNA, 20 nt, Human
aagcagacgagcaauacagc

SEQ ID NO: 1219727 - RNA, 24 nt, Human
aagccucauguuuuauuucagaac

SEQ ID NO: 1219728 - RNA, 22 nt, Human
aagcugcagacugugcaggagg

SEQ ID NO: 1219729 - RNA, 20 nt, Human
acaaagaaggccgagacagc

SEQ ID NO: 1219730 - RNA, 28 nt, Human
acacagccucagaaaaaaagggaacgcc

SEQ ID NO: 1219731 - RNA, 28 nt, Human
acacauuugcaaagcaauucccguaccg

SEQ ID NO: 1219732 - RNA, 22 nt, Human
acaccccgcuccggcccggggc

SEQ ID NO: 1219733 - RNA, 21 nt, Human
acagaacuucuuaacaaugga

SEQ ID NO: 1219734 - RNA, 18 nt, Human
acagaugaaaaggcuuuc

SEQ ID NO: 1219735 - RNA, 25 nt, Human
acagcaacaaccucuuuuucuuuau

SEQ ID NO: 1219736 - RNA, 23 nt, Human
acaggaauauucuucaagcugag

SEQ ID NO: 1219737 - RNA, 18 nt, Human
accaacacgcucauuagc

SEQ ID NO: 1219738 - RNA, 19 nt, Human
accccgcuccggcccgggg

SEQ ID NO: 1219739 - RNA, 20 nt, Human
agaacaggacucaggaagcu

SEQ ID NO: 1219740 - RNA, 21 nt, Human
agaacuggcaaagacugugaa

SEQ ID NO: 1219741 - RNA, 18 nt, Human
agaaggaggaggaggagg

SEQ ID NO: 1219742 - RNA, 18 nt, Human
agccaccaaaagaaugca

SEQ ID NO: 1219743 - RNA, 23 nt, Human
agcuccgcgaauaguuggugccg

SEQ ID NO: 1219744 - RNA, 24 nt, Human
aggacgacgaggaacaggcggugg

SEQ ID NO: 1219745 - RNA, 20 nt, Human
aggacucaggaagcugcaga

SEQ ID NO: 1219746 - RNA, 19 nt, Human
aggaggcggcggcgggcgg

SEQ ID NO: 1219747 - RNA, 23 nt, Human
auggauuucugagguucccuugg

SEQ ID NO: 1219748 - RNA, 23 nt, Human
caaaacaccaacacgcucauuag

SEQ ID NO: 1219749 - RNA, 23 nt, Human
caaaacaggaauauucuucaagc

SEQ ID NO: 1219750 - RNA, 22 nt, Human
caaaauggcuccaaacucugca

SEQ ID NO: 1219751 - RNA, 20 nt, Human
caaacucugcaaccacccag

SEQ ID NO: 1219752 - RNA, 20 nt, Human
caaagaaggccgagacagca

SEQ ID NO: 1219753 - RNA, 21 nt, Human
caacacagccucagaaaaaaa

SEQ ID NO: 1219754 - RNA, 23 nt, Human
caacacagccucagaaaaaaaca

SEQ ID NO: 1219755 - RNA, 24 nt, Human
caacacagccucagaaaaaaacac

SEQ ID NO: 1219756 - RNA, 26 nt, Human
caacuccugaagcaauuugcuacuuu

SEQ ID NO: 1219757 - RNA, 23 nt, Human
caacugccaugcugaacacuggu

SEQ ID NO: 1219758 - RNA, 24 nt, Human
caauuguuuaacuaguaccagcuu

SEQ ID NO: 1219759 - RNA, 19 nt, Human
cacagccucagaaaaaaac

SEQ ID NO: 1219760 - RNA, 20 nt, Human
cacauuguuaacccucagcu

SEQ ID NO: 1219761 - RNA, 21 nt, Human
caccacaguacuaaauacccg

SEQ ID NO: 1219762 - RNA, 21 nt, Human
cacugauggaggagggacguc

SEQ ID NO: 1219763 - RNA, 18 nt, Human
cagaugaaaaggcuuucu

SEQ ID NO: 1219764 - RNA, 21 nt, Human
cagcacgggcuacagcaacaa

SEQ ID NO: 1219765 - RNA, 22 nt, Human
cagcgugaguaaauucaagacu

SEQ ID NO: 1219766 - RNA, 18 nt, Human
caggagguuguuuagggc

SEQ ID NO: 1219767 - RNA, 21 nt, Human
cagggcccugcgcggcccacg

SEQ ID NO: 1219768 - RNA, 21 nt, Human
caguccguaagaggaagaacc

SEQ ID NO: 1219769 - RNA, 23 nt, Human
ccaaacaaacagaacuucuuaac

SEQ ID NO: 1219770 - RNA, 23 nt, Human
ccaccucuaucucuggaugaaga

SEQ ID NO: 1219771 - RNA, 19 nt, Human
ccccagaggccacauggcu

SEQ ID NO: 1219772 - RNA, 23 nt, Human
cccgcagcacaggacgaggaggc

SEQ ID NO: 1219773 - RNA, 23 nt, Human
ccgccaacaccccgcuccggccc

SEQ ID NO: 1219774 - RNA, 23 nt, Human
ccgccgccaacaccccgcuccgg

SEQ ID NO: 1219775 - RNA, 28 nt, Human
ccuacagucucuagugcuuuguaggugg

SEQ ID NO: 1219776 - RNA, 23 nt, Human
ccucagaaaaaaacaccugguuu

SEQ ID NO: 1219777 - RNA, 20 nt, Human
ccucaguaauuggagggccc

SEQ ID NO: 1219778 - RNA, 23 nt, Human
ccuccugucucaacuccugaagc

SEQ ID NO: 1219779 - RNA, 19 nt, Human
cgagcaaaacaccaacacg

SEQ ID NO: 1219780 - RNA, 21 nt, Human
cgaggaacaggcgguggcggc

SEQ ID NO: 1219781 - RNA, 19 nt, Human
cgcccgaaccggccgccgc

SEQ ID NO: 1219782 - RNA, 25 nt, Human
cgccggggcccccgaggaggaggac

SEQ ID NO: 1219783 - RNA, 22 nt, Human
cggcggcgggcgggggaagagg

SEQ ID NO: 1219784 - RNA, 18 nt, Human
cggggcucugcggcucau

SEQ ID NO: 1219785 - RNA, 24 nt, Human
cguagaaaaugcaagaucagcuag

SEQ ID NO: 1219786 - RNA, 22 nt, Human
cuaauccauauguaaugaccau

SEQ ID NO: 1219787 - RNA, 24 nt, Human
cuacagcaacaaccucuuuuucuu

SEQ ID NO: 1219788 - RNA, 21 nt, Human
cucaucacaauaagacauuga

SEQ ID NO: 1219789 - RNA, 25 nt, Human
cucuaugccauccaacuaauauacc

SEQ ID NO: 1219790 - RNA, 21 nt, Human
cuuaacacauuugcaaagcaa

SEQ ID NO: 1219791 - RNA, 22 nt, Human
cuucggucucggucguuuuccc

SEQ ID NO: 1219792 - RNA, 25 nt, Human
cuucuuaacaauggaacuucaaugg

SEQ ID NO: 1219793 - RNA, 24 nt, Human
cuuucaacugcuuuacaguagcca

SEQ ID NO: 1219794 - RNA, 21 nt, Human
gaagguugcaguccguaagag

SEQ ID NO: 1219795 - RNA, 22 nt, Human
gaauugggcugaggcuuucccc

SEQ ID NO: 1219796 - RNA, 19 nt, Human
gagaaggaggaggaggagg

SEQ ID NO: 1219797 - RNA, 21 nt, Human
gagaccccggggcucugcggc

SEQ ID NO: 1219798 - RNA, 20 nt, Human
gagagagaggcggaugaagg

SEQ ID NO: 1219799 - RNA, 19 nt, Human
gaggaggaggaggaggcgg

SEQ ID NO: 1219800 - RNA, 23 nt, Human
gaggaggaggaggaggcggcggc

SEQ ID NO: 1219801 - RNA, 18 nt, Human
gaggaggaggaggcggcg

SEQ ID NO: 1219802 - RNA, 21 nt, Human
gaggcggcggcgggcggggga

SEQ ID NO: 1219803 - RNA, 18 nt, Human
gcaaccacccagauaccc

SEQ ID NO: 1219804 - RNA, 18 nt, Human
gcaagaucagcuacccaa

SEQ ID NO: 1219805 - RNA, 22 nt, Human
gcccccgaggaggaggacgacg

SEQ ID NO: 1219806 - RNA, 18 nt, Human
gcccugcgcggcccacgu

SEQ ID NO: 1219807 - RNA, 22 nt, Human
gccgccaacaccccgcuccggc

SEQ ID NO: 1219808 - RNA, 18 nt, Human
gcggcucauuaccuuccc

SEQ ID NO: 1219809 - RNA, 18 nt, Human
gcuacagcaacaaccucu

SEQ ID NO: 1219810 - RNA, 19 nt, Human
gcugcauuacagaugaaaa

SEQ ID NO: 1219811 - RNA, 19 nt, Human
ggguugccagucauuccag

SEQ ID NO: 1219812 - RNA, 22 nt, Human
guacagcagccaagauauccaa

SEQ ID NO: 1219813 - RNA, 22 nt, Human
gucagcguggacucugguauca

SEQ ID NO: 1219814 - RNA, 18 nt, Human
gugaacucagggcugguc

SEQ ID NO: 1219815 - RNA, 24 nt, Human
uaaaguagaaagucucagaggucc

SEQ ID NO: 1219816 - RNA, 23 nt, Human
uaaauucuuucaacugcuuuaca

SEQ ID NO: 1219817 - RNA, 19 nt, Human
uaacccucagcucuugccc

SEQ ID NO: 1219818 - RNA, 20 nt, Human
uacccaaaauggcuccaaac

SEQ ID NO: 1219819 - RNA, 20 nt, Human
uagaacuggcaaagacugug

SEQ ID NO: 1219820 - RNA, 19 nt, Human
uagugcuuuguagguggca

SEQ ID NO: 1219821 - RNA, 18 nt, Human
uauagacugccacuucug

SEQ ID NO: 1219822 - RNA, 20 nt, Human
uauggccaagcgccgccgcc

SEQ ID NO: 1219823 - RNA, 20 nt, Human
uaugucagcguggacucugg

SEQ ID NO: 1219824 - RNA, 23 nt, Human
ucaacacagccucagaaaaaaac

SEQ ID NO: 1219825 - RNA, 19 nt, Human
ucagccucauagcucagag

SEQ ID NO: 1219826 - RNA, 19 nt, Human
uccaaaacaggaauauucu

SEQ ID NO: 1219827 - RNA, 20 nt, Human
uccccagugcuccucaccac

SEQ ID NO: 1219828 - RNA, 22 nt, Human
ucccuaaaauuagugcugaaaa

SEQ ID NO: 1219829 - RNA, 20 nt, Human
uccucacgcucacacggcca

SEQ ID NO: 1219830 - RNA, 23 nt, Human
ugaaacuguuaaaguagaaaguc

SEQ ID NO: 1219831 - RNA, 18 nt, Human
ugacaccguagccacccc

SEQ ID NO: 1219832 - RNA, 21 nt, Human
ugagcgaagguuucugaguau

SEQ ID NO: 1219833 - RNA, 21 nt, Human
ugaguaaauucaagacugaga

SEQ ID NO: 1219834 - RNA, 20 nt, Human
ugccgagcaaaacaccaaca

SEQ ID NO: 1219835 - RNA, 30 nt, Human; identical to SEQ ID NO: 829449

SEQ ID NO: 1219836 - RNA, 20 nt, Human
ugcuuuacaguagccaaucu

SEQ ID NO: 1219837 - RNA, 22 nt, Human
uggaauaagacaguccucuguu

SEQ ID NO: 1219838 - RNA, 21 nt, Human
uggcuaaagcacaacugccau

SEQ ID NO: 1219839 - RNA, 20 nt, Human
ugguaaugacacugauggag

SEQ ID NO: 1219840 - RNA, 18 nt, Human
ugucuuugguggcuaaag

SEQ ID NO: 1219841 - RNA, 22 nt, Human
uuccagggcccugcgcggccca

SEQ ID NO: 1219842 - RNA, 21 nt, Human
uucuccaacaacugauucugg

SEQ ID NO: 1219843 - RNA, 25 nt, Human
uugcugaauaaauucuuucaacugc

SEQ ID NO: 1219844 - RNA, 23 nt, Human
uuggcauuuccaauuguagucaa

SEQ ID NO: 1219845 - RNA, 24 nt, Human
uugguaaugacacugauggaggag

SEQ ID NO: 1219846 - RNA, 24 nt, Human
uuugcuaaaaauccacuugaagau

SEQ ID NO: 1219847 - RNA, 28 nt, Human
uuuucaguuauagacugccacuucugau

SEQ ID NO: 1219848 - RNA, 22 nt, Human
uuuucuccaacaacugauucug

SEQ ID NO: 1219849 - RNA, 23 nt, Human
aagggucccgcgggaaucggggc

SEQ ID NO: 1219850 - RNA, 22 nt, Human
acggcagcacaccaggcaccca

SEQ ID NO: 1219851 - RNA, 18 nt, Human
agcccgagggcacagcag

SEQ ID NO: 1219852 - RNA, 23 nt, Human
aggcacccaggggaaggaaccag

SEQ ID NO: 1219853 - RNA, 19 nt, Human
aggugcuggugagguucuc

SEQ ID NO: 1219854 - RNA, 20 nt, Human
caagucauuguagagacccg

SEQ ID NO: 1219855 - RNA, 20 nt, Human
caccugggagcccccagcuc

SEQ ID NO: 1219856 - RNA, 26 nt, Human
cacugucaacccuguucguccagcag

SEQ ID NO: 1219857 - RNA, 26 nt, Human
cagcaugcugaacugagcugcuggag

SEQ ID NO: 1219858 - RNA, 20 nt, Human
ccagcagcacaaugguggcc

SEQ ID NO: 1219859 - RNA, 18 nt, Human
ccaggggaaggaaccagg

SEQ ID NO: 1219860 - RNA, 23 nt, Human
ccugggagcccccagcucccgag

SEQ ID NO: 1219861 - RNA, 18 nt, Human
ccuguuaagagggggagg

SEQ ID NO: 1219862 - RNA, 24 nt, Human
cgggcagcgucacuuuuucuuggg

SEQ ID NO: 1219863 - RNA, 23 nt, Human
cuacaggggcugcugcgcucaac

SEQ ID NO: 1219864 - RNA, 21 nt, Human
cuucuugaugucggugcugac

SEQ ID NO: 1219865 - RNA, 21 nt, Human
gcacaaugguggccgcaaaaa

SEQ ID NO: 1219866 - RNA, 20 nt, Human
gcacccaggggaaggaacca

SEQ ID NO: 1219867 - RNA, 24 nt, Human
gccacugugggaagaaagggaggc

SEQ ID NO: 1219868 - RNA, 19 nt, Human
gcuggcccugaccccccag

SEQ ID NO: 1219869 - RNA, 20 nt, Human
ggaggccugaggccccaggg

SEQ ID NO: 1219870 - RNA, 22 nt, Human
ggaggccugaggccccagggac

SEQ ID NO: 1219871 - RNA, 19 nt, Human
ggagggacaaagcggguuc

SEQ ID NO: 1219872 - RNA, 22 nt, Human
ggagggacaaagcggguucuga

SEQ ID NO: 1219873 - RNA, 20 nt, Human
ggcacagcaggacugugacc

SEQ ID NO: 1219874 - RNA, 23 nt, Human
ggcuuggcggaccauuggccgag

SEQ ID NO: 1219875 - RNA, 18 nt, Human
gugccucuucagcgucca

SEQ ID NO: 1219876 - RNA, 22 nt, Human
uagugaaaaguuccuaaaauuc

SEQ ID NO: 1219877 - RNA, 24 nt, Human
uccucugcuguccugccccaagau

SEQ ID NO: 1219878 - RNA, 18 nt, Human
ucugugcccggaggaagg

SEQ ID NO: 1219879 - RNA, 19 nt, Human
ugaccugaucugccaggug

SEQ ID NO: 1219880 - RNA, 21 nt, Human
ugagacggcagcacaccaggc

SEQ ID NO: 1219881 - RNA, 25 nt, Human
ugagacggcagcacaccaggcaccc

SEQ ID NO: 1219882 - RNA, 24 nt, Human
ugaggccccagggacaggggcugg

SEQ ID NO: 1219883 - RNA, 22 nt, Human
ugccagguguccuacaggggcu

SEQ ID NO: 1219884 - RNA, 21 nt, Human
ugcuggugagguucucuucuu

SEQ ID NO: 1219885 - RNA, 20 nt, Human
ugucggugcugacacagaag

SEQ ID NO: 1219886 - RNA, 25 nt, Human
aaacaacgugggguugaacagccau

SEQ ID NO: 1219887 - RNA, 19 nt, Human
aacaccucuuccacuggcu

SEQ ID NO: 1219888 - RNA, 22 nt, Human
aacuuccgggccuucugcuccc

SEQ ID NO: 1219889 - RNA, 21 nt, Human
acgugggguugaacagccaug

SEQ ID NO: 1219890 - RNA, 21 nt, Human
acucugccacccgggagacag

SEQ ID NO: 1219891 - RNA, 20 nt, Human
agagcaaccccuccucuucc

SEQ ID NO: 1219892 - RNA, 18 nt, Human
aguaauucaagaucagaa

SEQ ID NO: 1219893 - RNA, 20 nt, Human
aguugaccccgaaacaacgu

SEQ ID NO: 1219894 - RNA, 18 nt, Human
caagagcaaccccuccuc

SEQ ID NO: 1219895 - RNA, 21 nt, Human
caccacagcgccauucuccug

SEQ ID NO: 1219896 - RNA, 18 nt, Human
cagcaaagugggguuacg

SEQ ID NO: 1219897 - RNA, 19 nt, Human
cagcaagagcaaccccucc

SEQ ID NO: 1219898 - RNA, 22 nt, Human
cagcgccauucuccugucucuc

SEQ ID NO: 1219899 - RNA, 22 nt, Human
cauuuuuaaauucaucccaaaa

SEQ ID NO: 1219900 - RNA, 21 nt, Human
ccccgaaacaacgugggguug

SEQ ID NO: 1219901 - RNA, 19 nt, Human
ccccuccucuuccuccucc

SEQ ID NO: 1219902 - RNA, 19 nt, Human
ccgcuggacucucagcagg

SEQ ID NO: 1219903 - RNA, 20 nt, Human
ccuccucuuccuccuccucu

SEQ ID NO: 1219904 - RNA, 21 nt, Human
ccuccucuuccuccuccucuu

SEQ ID NO: 1219905 - RNA, 19 nt, Human
ccucuuccuccuccucuuc

SEQ ID NO: 1219906 - RNA, 18 nt, Human
cgacauuuuuaaauucau

SEQ ID NO: 1219907 - RNA, 22 nt, Human
cugaaggcugcccgucuggcug

SEQ ID NO: 1219908 - RNA, 23 nt, Human
cugaaggcugcccgucuggcugg

SEQ ID NO: 1219909 - RNA, 21 nt, Human
gucuggcugggacaccacagc

SEQ ID NO: 1219910 - RNA, 23 nt, Human
guuugguccacucuugcucuuuc

SEQ ID NO: 1219911 - RNA, 22 nt, Human
uaacaccucuuccacuggcugg

SEQ ID NO: 1219912 - RNA, 19 nt, Human
uaguuuaucuauuucccca

SEQ ID NO: 1219913 - RNA, 22 nt, Human
ucagaaaauguuugaaauacag

SEQ ID NO: 1219914 - RNA, 19 nt, Human
ucagcagggauuccaggug

SEQ ID NO: 1219915 - RNA, 21 nt, Human
uccagcuccccuuggguccac

SEQ ID NO: 1219916 - RNA, 23 nt, Human
uccccauaaaguuugguccacuc

SEQ ID NO: 1219917 - RNA, 18 nt, Human
ucccucugggcuuccagc

SEQ ID NO: 1219918 - RNA, 19 nt, Human
ucccucugggcuuccagcu

SEQ ID NO: 1219919 - RNA, 21 nt, Human
ucccucugggcuuccagcucc

SEQ ID NO: 1219920 - RNA, 20 nt, Human
uccgacucugccacccggga

SEQ ID NO: 1219921 - RNA, 30 nt, Human
uccuucgcucugcuggugacuuccuugacu

SEQ ID NO: 1219922 - RNA, 19 nt, Human
ucuccgccucccucugggc

SEQ ID NO: 1219923 - RNA, 21 nt, Human
ucuuccuccuccucuucagcc

SEQ ID NO: 1219924 - RNA, 24 nt, Human
ugaaauacaguugaccccgaaaca

SEQ ID NO: 1219925 - RNA, 19 nt, Human
ugaccccgaaacaacgugg

SEQ ID NO: 1219926 - RNA, 21 nt, Human
ugcuuucgagcuucucuucca

SEQ ID NO: 1219927 - RNA, 21 nt, Human
ugcuuucgagcuucucuucca

SEQ ID NO: 1219928 - RNA, 23 nt, Human
ugggcuuccagcuccccuugggu

SEQ ID NO: 1219929 - RNA, 18 nt, Human
uugaccccgaaacaacgu

SEQ ID NO: 1219930 - RNA, 22 nt, Human
uugaccccgaaacaacgugggg

SEQ ID NO: 1219931 - RNA, 23 nt, Human
uugcauccuuccuuauccccaug

SEQ ID NO: 1219932 - RNA, 20 nt, Human
uuuaucuauuuccccauaaa

SEQ ID NO: 1219933 - RNA, 23 nt, Human
cccugcugggcuggcccucccug

SEQ ID NO: 1219934 - RNA, 22 nt, Human
cugcugggcuggcccucccugc

SEQ ID NO: 1219935 - RNA, 21 nt, Human
cuggcccucccugccccuuca

SEQ ID NO: 1219936 - RNA, 22 nt, Human
ucccugcugggcuggcccuccc

SEQ ID NO: 1219937 - RNA, 22 nt, Human
uccuccuucccugcugggcugg

SEQ ID NO: 1219938 - RNA, 18 nt, Human
ugcugggcuggcccuccc

SEQ ID NO: 1219939 - RNA, 23 nt, Human
aaaaaaaaaaaaaaaggaaagaa

SEQ ID NO: 1219940 - RNA, 22 nt, Human
aaaagcaguaaaaaacuacagu

SEQ ID NO: 1219941 - RNA, 21 nt, Human
aaagccaaacaagaaugaccc

SEQ ID NO: 1219942 - RNA, 22 nt, Human
aagauaaaaauauauaugaaaa

SEQ ID NO: 1219943 - RNA, 23 nt, Human
aagcagcacaacgaacaggaaac

SEQ ID NO: 1219944 - RNA, 24 nt, Human
acaaaaaaaaaaaaaaaggaaaga

SEQ ID NO: 1219945 - RNA, 23 nt, Human
acccagaaucaauuaaaaaaagg

SEQ ID NO: 1219946 - RNA, 27 nt, Human
aggaaacaaaauauaagaaaaaaauac

SEQ ID NO: 1219947 - RNA, 22 nt, Human
caaaaaaaaaaaaaaaggaaag

SEQ ID NO: 1219948 - RNA, 23 nt, Human
cagaaucaauuaaaaaaagggaa

SEQ ID NO: 1219949 - RNA, 19 nt, Human
cagcacaacgaacaggaaa

SEQ ID NO: 1219950 - RNA, 19 nt, Human
cuaaagccaaacaagaaug

SEQ ID NO: 1219951 - RNA, 23 nt, Human
cuaaagccaaacaagaaugaccc

SEQ ID NO: 1219952 - RNA, 24 nt, Human
cuaaagccaaacaagaaugacccc

SEQ ID NO: 1219953 - RNA, 20 nt, Human
gcagagaggagcauaacaaa

SEQ ID NO: 1219954 - RNA, 21 nt, Human
uaaaaaaagggaagugacagu

SEQ ID NO: 1219955 - RNA, 18 nt, Human
uaaaaggcagagaggagc

SEQ ID NO: 1219956 - RNA, 27 nt, Human
uaaggaacuucuaaauuacaaaaaaaa

SEQ ID NO: 1219957 - RNA, 22 nt, Human
uacaguugcugaaaaugaaaau

SEQ ID NO: 1219958 - RNA, 19 nt, Human
ucaauuaaaaaaagggaag

SEQ ID NO: 1219959 - RNA, 25 nt, Human
ucuaaauuacaaaaaaaaaaaaaaa

SEQ ID NO: 1219960 - RNA, 21 nt, Human
ugagaaaacacuaaagccaaa

SEQ ID NO: 1219961 - RNA, 22 nt, Human
uuacaaaaaaaaaaaaaaagga

SEQ ID NO: 1219962 - RNA, 24 nt, Human
uucuugacaauaaggaacuucuaa

SEQ ID NO: 1219963 - RNA, 22 nt, Human
aaaagaaaaaaaaaucaaaauc

SEQ ID NO: 1219964 - RNA, 20 nt, Human
aaacgagauauaauucugaa

SEQ ID NO: 1219965 - RNA, 24 nt, Human
aaauaaacaacaacaaaaaaaaca

SEQ ID NO: 1219966 - RNA, 22 nt, Human
aacaaaaccacacaguaauaca

SEQ ID NO: 1219967 - RNA, 19 nt, Human
aacaacaaaaaaaacaaaa

SEQ ID NO: 1219968 - RNA, 22 nt, Human
aacaagggaauaaaaugagaga

SEQ ID NO: 1219969 - RNA, 25 nt, Human
aagaucacauaaaagaaaaaaaaau

SEQ ID NO: 1219970 - RNA, 18 nt, Human
aagauggacaacauacca

SEQ ID NO: 1219971 - RNA, 21 nt, Human
acaacaaaaaaaacaaaacca

SEQ ID NO: 1219972 - RNA, 21 nt, Human
acaacaacaaaaaaaacaaaa

SEQ ID NO: 1219973 - RNA, 20 nt, Human
acauaaaagaaaaaaaaauc

SEQ ID NO: 1219974 - RNA, 21 nt, Human
acauaaaagaaaaaaaaauca

SEQ ID NO: 1219975 - RNA, 21 nt, Human
acauuuaaguagaaacgagau

SEQ ID NO: 1219976 - RNA, 20 nt, Human
accacgcacccgaccacgcc

SEQ ID NO: 1219977 - RNA, 24 nt, Human
acgcaccacgcacccgaccacgcc

SEQ ID NO: 1219978 - RNA, 22 nt, Human
agaaacgagauauaauucugaa

SEQ ID NO: 1219979 - RNA, 19 nt, Human
agaaaucaacaagggaaua

SEQ ID NO: 1219980 - RNA, 23 nt, Human
agagagcgugggagagaggaagg

SEQ ID NO: 1219981 - RNA, 21 nt, Human
agagaggaaggggggcaggaa

SEQ ID NO: 1219982 - RNA, 18 nt, Human
agagauaaaagagagcgu

SEQ ID NO: 1219983 - RNA, 18 nt, Human
agaggaaggggggcagga

SEQ ID NO: 1219984 - RNA, 18 nt, Human
agccggacccacgcacca

SEQ ID NO: 1219985 - RNA, 24 nt, Human
agggagacuggggaggccccaggg

SEQ ID NO: 1219986 - RNA, 21 nt, Human
aguagcaugcacccaccaaga

SEQ ID NO: 1219987 - RNA, 23 nt, Human
auaaacaacaacaaaaaaaacaa

SEQ ID NO: 1219988 - RNA, 18 nt, Human
aucacaaaaugguuccaa

SEQ ID NO: 1219989 - RNA, 19 nt, Human
aucagccacagugauuuau

SEQ ID NO: 1219990 - RNA, 19 nt, Human
caaaaaaaacaaaaccaca

SEQ ID NO: 1219991 - RNA, 21 nt, Human
caaaaaauuaacccuaagcac

SEQ ID NO: 1219992 - RNA, 23 nt, Human
caacaaaaaaaacaaaaccacac

SEQ ID NO: 1219993 - RNA, 24 nt, Human
caacaaaaaaaacaaaaccacaca

SEQ ID NO: 1219994 - RNA, 23 nt, Human
caacaacaaaaaaaacaaaacca

SEQ ID NO: 1219995 - RNA, 18 nt, Human
caacaagggaauaaaaug

SEQ ID NO: 1219996 - RNA, 21 nt, Human
caaguguacaucaacugaucc

SEQ ID NO: 1219997 - RNA, 24 nt, Human
cacugaaaacaaaaguucccaucu

SEQ ID NO: 1219998 - RNA, 20 nt, Human
cagcuccaacauuguuugca

SEQ ID NO: 1219999 - RNA, 21 nt, Human
cagcuccaacauuguuugcac

SEQ ID NO: 1220000 - RNA, 21 nt, Human
caggucgcaggcucgagccga

SEQ ID NO: 1220001 - RNA, 18 nt, Human
caguacaaaaaauuaacc

SEQ ID NO: 1220002 - RNA, 23 nt, Human
cauaaaagaaaaaaaaaucaaaa

SEQ ID NO: 1220003 - RNA, 22 nt, Human
cccacgcaccacgcacccgacc

SEQ ID NO: 1220004 - RNA, 23 nt, Human
cccacgcaccacgcacccgacca

SEQ ID NO: 1220005 - RNA, 25 nt, Human
cccacgcaccacgcacccgaccacg

SEQ ID NO: 1220006 - RNA, 19 nt, Human
ccggacccacgcaccacgc

SEQ ID NO: 1220007 - RNA, 20 nt, Human
cgggagggacagaaggcuag

SEQ ID NO: 1220008 - RNA, 29 nt, Human
cuaagcacuacauuuaaguagaaacgagg

SEQ ID NO: 1220009 - RNA, 21 nt, Human
cucuuacuauuacagcuccaa

SEQ ID NO: 1220010 - RNA, 20 nt, Human
gaaacgagauauaauucuga

SEQ ID NO: 1220011 - RNA, 23 nt, Human
gauaaaagagagcgugggagaga

SEQ ID NO: 1220012 - RNA, 19 nt, Human
gcaggucccuaagaaauuu

SEQ ID NO: 1220013 - RNA, 19 nt, Human
ggcagggcuaccgaugcac

SEQ ID NO: 1220014 - RNA, 19 nt, Human
ggcagggcuaccgaugcac

SEQ ID NO: 1220015 - RNA, 22 nt, Human
gggagggacagaaggcuaguga

SEQ ID NO: 1220016 - RNA, 20 nt, Human
ggucuggaggggugggcagg

SEQ ID NO: 1220017 - RNA, 30 nt, Human
uaaacaacaacaaaaaaaacaaaaccacaa

SEQ ID NO: 1220018 - RNA, 18 nt, Human
uaagaaccgaggucugga

SEQ ID NO: 1220019 - RNA, 21 nt, Human
ucaaauaaacaacaacaaaaa

SEQ ID NO: 1220020 - RNA, 22 nt, Human
ucacauaaaagaaaaaaaaauc

SEQ ID NO: 1220021 - RNA, 22 nt, Human
ucaguaaugcacagugauucug

SEQ ID NO: 1220022 - RNA, 20 nt, Human
ucccaaagaucacauaaaag

SEQ ID NO: 1220023 - RNA, 22 nt, Human
ucgcaggcucgagccgaagccc

SEQ ID NO: 1220024 - RNA, 24 nt, Human
ugaggugggaaaaaaucccaaauc

SEQ ID NO: 1220025 - RNA, 24 nt, Human
ugauaaacagagucucaguaaugc

SEQ ID NO: 1220026 - RNA, 24 nt, Human
ugcacugaaaacaaaaguucccaa

SEQ ID NO: 1220027 - RNA, 26 nt, Human
ugcccaggcgcgagggggagggagac

SEQ ID NO: 1220028 - RNA, 22 nt, Human
uggacaacauaccaucacaaaa

SEQ ID NO: 1220029 - RNA, 21 nt, Human
ugggagagagcugcccaggcg

SEQ ID NO: 1220030 - RNA, 22 nt, Human
uugaagcuuuuguacaaaaacu

SEQ ID NO: 1220031 - RNA, 21 nt, Human
aacacccacacucagagugac

SEQ ID NO: 1220032 - RNA, 24 nt, Human
acacacgcacgcagguguacacac

SEQ ID NO: 1220033 - RNA, 27 nt, Human
acacgcacacacacgcacgcaggugua

SEQ ID NO: 1220034 - RNA, 27 nt, Human
acacgcacacacacgcacgcaggugua

SEQ ID NO: 1220035 - RNA, 31 nt, Human
acacgcacauacacgaacacacgcgcacaca

SEQ ID NO: 1220036 - RNA, 21 nt, Human
acccacacucagagugacauc

SEQ ID NO: 1220037 - RNA, 21 nt, Human
acccagccacagauagugaca

SEQ ID NO: 1220038 - RNA, 20 nt, Human
acgcacauacacgaacacaa

SEQ ID NO: 1220039 - RNA, 23 nt, Human
acucucaguccuauucauucauc

SEQ ID NO: 1220040 - RNA, 23 nt, Human
agacacagccacccaccgugaca

SEQ ID NO: 1220041 - RNA, 21 nt, Human
agacagaaaacacgccgcagu

SEQ ID NO: 1220042 - RNA, 20 nt, Human
agacaggcccgugcaaugca

SEQ ID NO: 1220043 - RNA, 20 nt, Human
agccguucacccagccacag

SEQ ID NO: 1220044 - RNA, 20 nt, Human
auaagucacaaaaugugagu

SEQ ID NO: 1220045 - RNA, 25 nt, Human
augcacacacacgcgcacgcacaca

SEQ ID NO: 1220046 - RNA, 21 nt, Human
cacaaacagggagacaggccc

SEQ ID NO: 1220047 - RNA, 31 nt, Human
cacacacacgcgcacgcacacacgcacauag

SEQ ID NO: 1220048 - RNA, 31 nt, Human
cacacacgcacauacacgaacacacgcgcag

SEQ ID NO: 1220049 - RNA, 18 nt, Human
cacacauggcgacaccca

SEQ ID NO: 1220050 - RNA, 24 nt, Human
cacacgagcaacuccgagacacuc

SEQ ID NO: 1220051 - RNA, 21 nt, Human
cacacgcacauacacgaacac

SEQ ID NO: 1220052 - RNA, 31 nt, Human
cacgaacacacgcgcacacacgcacacagug

SEQ ID NO: 1220053 - RNA, 25 nt, Human
cacgcacacacgcacauacacgaac

SEQ ID NO: 1220054 - RNA, 18 nt, Human
cacuaggcuggggggggg

SEQ ID NO: 1220055 - RNA, 20 nt, Human
cacugugacucucaguccua

SEQ ID NO: 1220056 - RNA, 19 nt, Human
caugacacaggcaugcaug

SEQ ID NO: 1220057 - RNA, 24 nt, Human
caugcaugccacauucacugugac

SEQ ID NO: 1220058 - RNA, 22 nt, Human
ccaacacccacacucagaguga

SEQ ID NO: 1220059 - RNA, 20 nt, Human
cccugagcacacaggguggc

SEQ ID NO: 1220060 - RNA, 31 nt, Human
cgaacacacgcgcacacacgcacacacacgg

SEQ ID NO: 1220061 - RNA, 25 nt, Human
cgcacacacacgcacgcagguguac

SEQ ID NO: 1220062 - RNA, 25 nt, Human
cgcacacacgcacacacacgcacgc

SEQ ID NO: 1220063 - RNA, 26 nt, Human
cgcacgcacacacgcacauacacgaa

SEQ ID NO: 1220064 - RNA, 22 nt, Human
cgccgcaguauacucuaguaug

SEQ ID NO: 1220065 - RNA, 20 nt, Human
cugaaauguccacccuuugc

SEQ ID NO: 1220066 - RNA, 22 nt, Human
cuggugcuuguagauuuccucc

SEQ ID NO: 1220067 - RNA, 19 nt, Human
cuugacuuuauuuaucuuc

SEQ ID NO: 1220068 - RNA, 31 nt, Human
cuuugcaaaaugcacacacacgcgcacgcag

SEQ ID NO: 1220069 - RNA, 21 nt, Human
gacacagccacccaccgugac

SEQ ID NO: 1220070 - RNA, 20 nt, Human
gagacacucauucaccauga

SEQ ID NO: 1220071 - RNA, 18 nt, Human
gagugacaucugcuggag

SEQ ID NO: 1220072 - RNA, 23 nt, Human
gcacacacgcacacacacgcacg

SEQ ID NO: 1220073 - RNA, 30 nt, Human
gcacauacacgaacacacgcgcacacacgg

SEQ ID NO: 1220074 - RNA, 23 nt, Human
gcacgcacacacgcacauacacg

SEQ ID NO: 1220075 - RNA, 19 nt, Human
ggcugggggggggggguca

SEQ ID NO: 1220076 - RNA, 19 nt, Human
guguacacacacacgagca

SEQ ID NO: 1220077 - RNA, 22 nt, Human
uaaaucucccccaccaugacau

SEQ ID NO: 1220078 - RNA, 20 nt, Human
uacgugggacgaggggcagg

SEQ ID NO: 1220079 - RNA, 19 nt, Human
uaggcuggggggggggggu

SEQ ID NO: 1220080 - RNA, 21 nt, Human
uaguauguuuacacaaacagg

SEQ ID NO: 1220081 - RNA, 20 nt, Human
ugcucagacacagccaccca

SEQ ID NO: 1220082 - RNA, 23 nt, Human
uggcaggugcagccccaucuucc

SEQ ID NO: 1220083 - RNA, 19 nt, Human
uggcugccacaauguccuc

SEQ ID NO: 1220084 - RNA, 22 nt, Human
uguacacacacacgagcaacuc

SEQ ID NO: 1220085 - RNA, 20 nt, Human
ugucacaugacacaggcaug

SEQ ID NO: 1220086 - RNA, 24 nt, Human
ugucacaugacacaggcaugcaug

SEQ ID NO: 1220087 - RNA, 33 nt, Human
uuugcaaaaugcacacacacgcgcacgcacagu

SEQ ID NO: 1220088 - RNA, 26 nt, Human
aagugauucucgugccucagcaucca

SEQ ID NO: 1220089 - RNA, 24 nt, Human
acagcucggugcugacguccucgc

SEQ ID NO: 1220090 - RNA, 20 nt, Human
accaggacagccauggccag

SEQ ID NO: 1220091 - RNA, 18 nt, Human
acccacgaguagcccuga

SEQ ID NO: 1220092 - RNA, 18 nt, Human
acccuuggacaauaggau

SEQ ID NO: 1220093 - RNA, 21 nt, Human
acucugucucccaggcuggag

SEQ ID NO: 1220094 - RNA, 24 nt, Human
acucugucucccaggcuggagugc

SEQ ID NO: 1220095 - RNA, 30 nt, Human
agaaauaguagcaggagcccccgaagggcc

SEQ ID NO: 1220096 - RNA, 19 nt, Human
aggaaacugaguuucagag

SEQ ID NO: 1220097 - RNA, 24 nt, Human
aggcgugugccaccacgcccggcu

SEQ ID NO: 1220098 - RNA, 25 nt, Human
aggcuggagugcaguggcgcaaucu

SEQ ID NO: 1220099 - RNA, 20 nt, Human
agugcaguggcgcaaucucg

SEQ ID NO: 1220100 - RNA, 24 nt, Human
agugcaguggcgcaaucucggcuc

SEQ ID NO: 1220101 - RNA, 18 nt, Human
augcuggucuugaacucc

SEQ ID NO: 1220102 - RNA, 18 nt, Human
augggguuucgccacguu

SEQ ID NO: 1220103 - RNA, 19 nt, Human
augggguuucgccacguuu

SEQ ID NO: 1220104 - RNA, 19 nt, Human
auuacaggcgugugccacc

SEQ ID NO: 1220105 - RNA, 22 nt, Human
caagugauucucgugccucagc

SEQ ID NO: 1220106 - RNA, 24 nt, Human
caccccguggccagacucagggac

SEQ ID NO: 1220107 - RNA, 23 nt, Human
caccucggccucaaaacaugucc

SEQ ID NO: 1220108 - RNA, 21 nt, Human
cacugcaaccucugccuccug

SEQ ID NO: 1220109 - RNA, 23 nt, Human
cacugcaaccucugccuccuggg

SEQ ID NO: 1220110 - RNA, 24 nt, Human
cagaaucacagcccacaguacugg

SEQ ID NO: 1220111 - RNA, 25 nt, Human
cagcagcgccugcguccccgagccu

SEQ ID NO: 1220112 - RNA, 22 nt, Human
cagcagcgccugcgucggcguc

SEQ ID NO: 1220113 - RNA, 19 nt, Human
cagcccacaguacuggcga

SEQ ID NO: 1220114 - RNA, 20 nt, Human
caggagcccuuccccuaccu

SEQ ID NO: 1220115 - RNA, 19 nt, Human
cagggcucucuccugcucc

SEQ ID NO: 1220116 - RNA, 22 nt, Human
caggggacucccuuccacaccc

SEQ ID NO: 1220117 - RNA, 20 nt, Human
ccaccacgcccggcuaauuu

SEQ ID NO: 1220118 - RNA, 19 nt, Human
ccacgcacccaggacucca

SEQ ID NO: 1220119 - RNA, 20 nt, Human
ccaguauucacgggcacuag

SEQ ID NO: 1220120 - RNA, 21 nt, Human
cccacgaguagcccugaaccu

SEQ ID NO: 1220121 - RNA, 25 nt, Human
cccacgcacccaggacuccaucucc

SEQ ID NO: 1220122 - RNA, 19 nt, Human
cccaggcuggagugcagug

SEQ ID NO: 1220123 - RNA, 23 nt, Human
cccaugcuggucuugaacuccug

SEQ ID NO: 1220124 - RNA, 20 nt, Human
ccccagugcccuggcagaac

SEQ ID NO: 1220125 - RNA, 23 nt, Human
ccccaucccaaaacgcaugcccg

SEQ ID NO: 1220126 - RNA, 19 nt, Human
cccccaggacugagcccua

SEQ ID NO: 1220127 - RNA, 24 nt, Human
cccccaggacugagcccuagaggc

SEQ ID NO: 1220128 - RNA, 24 nt, Human
cccccaucccaaaacgcaugcccg

SEQ ID NO: 1220129 - RNA, 21 nt, Human
cccguggccagacucagggac

SEQ ID NO: 1220130 - RNA, 18 nt, Human
ccgccgggucacuuggga

SEQ ID NO: 1220131 - RNA, 18 nt, Human
ccuauggucacacagcuu

SEQ ID NO: 1220132 - RNA, 19 nt, Human
ccucgcggucccugccggc

SEQ ID NO: 1220133 - RNA, 22 nt, Human
ccucugccuccuggguucaagu

SEQ ID NO: 1220134 - RNA, 24 nt, Human
ccugaccucaggugauccgcccac

SEQ ID NO: 1220135 - RNA, 21 nt, Human
ccugcgccuccccaagcuccg

SEQ ID NO: 1220136 - RNA, 20 nt, Human
ccuggguucaagugauucuc

SEQ ID NO: 1220137 - RNA, 22 nt, Human
cgcagguguugcacggcccugc

SEQ ID NO: 1220138 - RNA, 19 nt, Human
cgccucugcccacgugguc

SEQ ID NO: 1220139 - RNA, 19 nt, Human
cguggucugcagcagcgcc

SEQ ID NO: 1220140 - RNA, 24 nt, Human
cucacugcaaccucugccuccugg

SEQ ID NO: 1220141 - RNA, 18 nt, Human
cucagaaucacagcccac

SEQ ID NO: 1220142 - RNA, 21 nt, Human
cucagggaccacagggccccc

SEQ ID NO: 1220143 - RNA, 19 nt, Human
cuccagcgcccgguacagc

SEQ ID NO: 1220144 - RNA, 22 nt, Human
cuccaucagcuucgccugcgcc

SEQ ID NO: 1220145 - RNA, 19 nt, Human
cucccccaggcccccuaca

SEQ ID NO: 1220146 - RNA, 20 nt, Human
cuccuggguucaagugauuc

SEQ ID NO: 1220147 - RNA, 21 nt, Human
cuccuggguucaagugauucu

SEQ ID NO: 1220148 - RNA, 23 nt, Human
cugagugggacucaguccacccc

SEQ ID NO: 1220149 - RNA, 23 nt, Human
cugcaaccucugccuccuggguu

SEQ ID NO: 1220150 - RNA, 24 nt, Human
cugcaaccucugccuccuggguuc

SEQ ID NO: 1220151 - RNA, 23 nt, Human
cugccuccuggguucaagugauu

SEQ ID NO: 1220152 - RNA, 18 nt, Human
cuggcgaccaggacagcu

SEQ ID NO: 1220153 - RNA, 24 nt, Human
gaccucaggugauccgcccaccuc

SEQ ID NO: 1220154 - RNA, 22 nt, Human
gacucaguccacccacgaguag

SEQ ID NO: 1220155 - RNA, 18 nt, Human
gacucccuuccacacccc

SEQ ID NO: 1220156 - RNA, 18 nt, Human
gagaugggguuucgccac

SEQ ID NO: 1220157 - RNA, 20 nt, Human
gagaugggguuucgccacgu

SEQ ID NO: 1220158 - RNA, 18 nt, Human
gauuacaggcgugugcca

SEQ ID NO: 1220159 - RNA, 21 nt, Human
gauucucgugccucagcaucc

SEQ ID NO: 1220160 - RNA, 25 nt, Human
gccaggaagaggggucucgggcucc

SEQ ID NO: 1220161 - RNA, 24 nt, Human
gcccccacgcacccaggacuccau

SEQ ID NO: 1220162 - RNA, 23 nt, Human
gcccggcuaauuuuuuguauuuu

SEQ ID NO: 1220163 - RNA, 19 nt, Human
gcuggagugcaguggcgca

SEQ ID NO: 1220164 - RNA, 23 nt, Human
gcuggucuugaacuccugaccuc

SEQ ID NO: 1220165 - RNA, 24 nt, Human
ggacucaggggacucccuuccaca

SEQ ID NO: 1220166 - RNA, 27 nt, Human
ggcgaccaggacagccauggccaggaa

SEQ ID NO: 1220167 - RNA, 19 nt, Human
ggcucacaggaacccucac

SEQ ID NO: 1220168 - RNA, 18 nt, Human
gggcacccagcgccgccg

SEQ ID NO: 1220169 - RNA, 18 nt, Human
gggcccccacgcacccag

SEQ ID NO: 1220170 - RNA, 23 nt, Human
gggucacuugggaggacucaggg

SEQ ID NO: 1220171 - RNA, 19 nt, Human
ggguuagcugggauuacag

SEQ ID NO: 1220172 - RNA, 19 nt, Human
ggucuugaacuccugaccu

SEQ ID NO: 1220173 - RNA, 20 nt, Human
guccugcucccccaggcccc

SEQ ID NO: 1220174 - RNA, 21 nt, Human
gugauccgcccaccucggccu

SEQ ID NO: 1220175 - RNA, 20 nt, Human
guggcccugcgccucugccc

SEQ ID NO: 1220176 - RNA, 19 nt, Human
guuagcugggauuacaggc

SEQ ID NO: 1220177 - RNA, 21 nt, Human
guuagcugggauuacaggcgu

SEQ ID NO: 1220178 - RNA, 24 nt, Human
uaaguaacuugccuauggucacac

SEQ ID NO: 1220179 - RNA, 24 nt, Human
uaauuuuuuguauuuuuaguagag

SEQ ID NO: 1220180 - RNA, 25 nt, Human
uaauuuuuuguauuuuuaguagaga

SEQ ID NO: 1220181 - RNA, 23 nt, Human
uacaggcgugugccaccacgccc

SEQ ID NO: 1220182 - RNA, 19 nt, Human
uaccugaagcugaguggga

SEQ ID NO: 1220183 - RNA, 22 nt, Human
uagagaugggguuucgccacgu

SEQ ID NO: 1220184 - RNA, 20 nt, Human
uagaggccuggguuccucuc

SEQ ID NO: 1220185 - RNA, 21 nt, Human
uagcugggauuacaggcgugu

SEQ ID NO: 1220186 - RNA, 18 nt, Human
uaguagagaugggguuuc

SEQ ID NO: 1220187 - RNA, 24 nt, Human
uaguagagaugggguuucgccacg

SEQ ID NO: 1220188 - RNA, 24 nt, Human
ucacugcaaccucugccuccuggg

SEQ ID NO: 1220189 - RNA, 25 nt, Human
ucacugcaaccucugccuccugggu

SEQ ID NO: 1220190 - RNA, 27 nt, Human
ucacugcaaccucugccuccuggguuc

SEQ ID NO: 1220191 - RNA, 24 nt, Human
ucagcaguucccgcagggcucucu

SEQ ID NO: 1220192 - RNA, 22 nt, Human
ucaguccacccacgaguagccc

SEQ ID NO: 1220193 - RNA, 23 nt, Human
ucccaggcuggagugcaguggcg

SEQ ID NO: 1220194 - RNA, 19 nt, Human
ucccaugcuggucuugaac

SEQ ID NO: 1220195 - RNA, 21 nt, Human
uccccagugcccuggcagaac

SEQ ID NO: 1220196 - RNA, 19 nt, Human
ucccgcagggcucucuccu

SEQ ID NO: 1220197 - RNA, 21 nt, Human
uccuggguucaagugauucuc

SEQ ID NO: 1220198 - RNA, 24 nt, Human
uccuggguucaagugauucucgug

SEQ ID NO: 1220199 - RNA, 24 nt, Human
ucuaacucugucucccaggcugga

SEQ ID NO: 1220200 - RNA, 24 nt, Human
ucucccaggcuggagugcaguggc

SEQ ID NO: 1220201 - RNA, 18 nt, Human
ucugcagccucacggccu

SEQ ID NO: 1220202 - RNA, 19 nt, Human
ucugucucccaggcuggag

SEQ ID NO: 1220203 - RNA, 24 nt, Human
ucugucucccaggcuggagugcag

SEQ ID NO: 1220204 - RNA, 23 nt, Human
ucuugaacuccugaccucaggug

SEQ ID NO: 1220205 - RNA, 18 nt, Human
ugaccucaggugauccgc

SEQ ID NO: 1220206 - RNA, 21 nt, Human
ugaccucaggugauccgccca

SEQ ID NO: 1220207 - RNA, 24 nt, Human
ugaccucaggugauccgcccaccu

SEQ ID NO: 1220208 - RNA, 22 nt, Human
ugauccgcccaccucggccuca

SEQ ID NO: 1220209 - RNA, 22 nt, Human
ugcaguggcgcaaucucggcuc

SEQ ID NO: 1220210 - RNA, 23 nt, Human
ugcaguggcgcaaucucggcuca

SEQ ID NO: 1220211 - RNA, 19 nt, Human
ugcccuggcagaacaagga

SEQ ID NO: 1220212 - RNA, 25 nt, Human
ugccucagcauccaggguuagcugg

SEQ ID NO: 1220213 - RNA, 19 nt, Human
ugcgccuccccaagcuccg

SEQ ID NO: 1220214 - RNA, 23 nt, Human
uggagugcaguggcgcaaucucg

SEQ ID NO: 1220215 - RNA, 24 nt, Human
uggagugcaguggcgcaaucucgg

SEQ ID NO: 1220216 - RNA, 23 nt, Human
uggcagaacaaggacggcaugcu

SEQ ID NO: 1220217 - RNA, 18 nt, Human
uggcccccagguuucacc

SEQ ID NO: 1220218 - RNA, 19 nt, Human
uggcccccagguuucacca

SEQ ID NO: 1220219 - RNA, 18 nt, Human
ugggauuacaggcgugug

SEQ ID NO: 1220220 - RNA, 19 nt, Human
ugggauuacaggcgugugc

SEQ ID NO: 1220221 - RNA, 21 nt, Human
ugggauuacaggcgugugcca

SEQ ID NO: 1220222 - RNA, 22 nt, Human
ugggauuacaggcgugugccac

SEQ ID NO: 1220223 - RNA, 24 nt, Human
ugggauuacaggcgugugccacca

SEQ ID NO: 1220224 - RNA, 23 nt, Human
uggguucaagugauucucgugcc

SEQ ID NO: 1220225 - RNA, 18 nt, Human
uuaguagagaugggguuu

SEQ ID NO: 1220226 - RNA, 22 nt, Human
uuaguagagaugggguuucgcc

SEQ ID NO: 1220227 - RNA, 25 nt, Human
uuaguagagaugggguuucgccacg

SEQ ID NO: 1220228 - RNA, 23 nt, Human
uucaagugauucucgugccucag

SEQ ID NO: 1220229 - RNA, 23 nt, Human
uuccacaccccguggccagacuc

SEQ ID NO: 1220230 - RNA, 20 nt, Human
uucccgcagggcucucuccu

SEQ ID NO: 1220231 - RNA, 23 nt, Human
uuguauuuuuaguagagaugggg

SEQ ID NO: 1220232 - RNA, 23 nt, Human
uuuuuaguagagaugggguuucg

SEQ ID NO: 1220233 - RNA, 24 nt, Human
uuuuuaguagagaugggguuucgc

SEQ ID NO: 1220234 - RNA, 21 nt, Human
uuuuuguauuuuuaguagaga

SEQ ID NO: 1220235 - RNA, 24 nt, Human
uuuuuuguauuuuuaguagagaug

SEQ ID NO: 1220236 - RNA, 22 nt, Human
aaaaauacgauuuuuugagagc

SEQ ID NO: 1220237 - RNA, 24 nt, Human
aaaaugucuacacagcuaugaaca

SEQ ID NO: 1220238 - RNA, 22 nt, Human
aaacagcggagaccacauacaa

SEQ ID NO: 1220239 - RNA, 23 nt, Human
aagaaaagggaucuccccuuugc

SEQ ID NO: 1220240 - RNA, 24 nt, Human
aagaaaccugaacgaugucacuga

SEQ ID NO: 1220241 - RNA, 22 nt, Human
aagcgggaaucccgccuuccau

SEQ ID NO: 1220242 - RNA, 24 nt, Human
aagcuugcaagcuaagacucccaa

SEQ ID NO: 1220243 - RNA, 20 nt, Human
aauaacuuaaaacacacuaa

SEQ ID NO: 1220244 - RNA, 20 nt, Human
aaugaaaaauggcaccugaa

SEQ ID NO: 1220245 - RNA, 20 nt, Human
aauugauaggauucagauaa

SEQ ID NO: 1220246 - RNA, 22 nt, Human
acaaaucaauaacuuaaaacac

SEQ ID NO: 1220247 - RNA, 18 nt, Human
acaguugaagcuuaagac

SEQ ID NO: 1220248 - RNA, 18 nt, Human
accugcgggcgggccccc

SEQ ID NO: 1220249 - RNA, 20 nt, Human
acuaauauacaaaaggucua

SEQ ID NO: 1220250 - RNA, 22 nt, Human
acucugaaaauggugcaaaagu

SEQ ID NO: 1220251 - RNA, 20 nt, Human
agaaaccugaacgaugucag

SEQ ID NO: 1220252 - RNA, 23 nt, Human
agaaagaacugaguaucgggaca

SEQ ID NO: 1220253 - RNA, 19 nt, Human
agaagcugaggugcuacaa

SEQ ID NO: 1220254 - RNA, 23 nt, Human
agagagccuccccucccccaaag

SEQ ID NO: 1220255 - RNA, 21 nt, Human
agagccuccccucccccaaag

SEQ ID NO: 1220256 - RNA, 18 nt, Human
agagcugcgacuagaggc

SEQ ID NO: 1220257 - RNA, 18 nt, Human
agcaacuagaaccuugau

SEQ ID NO: 1220258 - RNA, 24 nt, Human
agcugccuggggucuaacuaccag

SEQ ID NO: 1220259 - RNA, 24 nt, Human
aggcagcugcccuuggccaggaaa

SEQ ID NO: 1220260 - RNA, 21 nt, Human
aggggacucagcacccgggag

SEQ ID NO: 1220261 - RNA, 18 nt, Human
agggggcgaggaaagaag

SEQ ID NO: 1220262 - RNA, 21 nt, Human
agggugggguggagggacagg

SEQ ID NO: 1220263 - RNA, 18 nt, Human
agguccuaguaggugagg

SEQ ID NO: 1220264 - RNA, 22 nt, Human
agguggagggugggguggaggg

SEQ ID NO: 1220265 - RNA, 24 nt, Human
auaucacagaauuccagucauagu

SEQ ID NO: 1220266 - RNA, 20 nt, Human
aucagaaggguguuggcucc

SEQ ID NO: 1220267 - RNA, 23 nt, Human
aucugaagucuucuggguuauca

SEQ ID NO: 1220268 - RNA, 29 nt, Human
auggugcaaaaguuucauucucuuugaga

SEQ ID NO: 1220269 - RNA, 18 nt, Human
auucagauucuacugcca

SEQ ID NO: 1220270 - RNA, 18 nt, Human
caagaaagaaaccugaac

SEQ ID NO: 1220271 - RNA, 27 nt, Human
cacagagcugcgacuagaggcacagcc

SEQ ID NO: 1220272 - RNA, 21 nt, Human
caccugucccagcaucagaau

SEQ ID NO: 1220273 - RNA, 23 nt, Human
cagaagcgggaaucccgccuucc

SEQ ID NO: 1220274 - RNA, 18 nt, Human
cagcaacuagaaccuuga

SEQ ID NO: 1220275 - RNA, 25 nt, Human
cagcacagaaaacugcggcuuggca

SEQ ID NO: 1220276 - RNA, 19 nt, Human
cagcaccaccugcgggcgg

SEQ ID NO: 1220277 - RNA, 24 nt, Human
cagccaucaucucaugagagcaau

SEQ ID NO: 1220278 - RNA, 18 nt, Human
caggaaccccugaccccc

SEQ ID NO: 1220279 - RNA, 24 nt, Human
caggagaagguggcggaacccacc

SEQ ID NO: 1220280 - RNA, 19 nt, Human
caggauagaggccuccugu

SEQ ID NO: 1220281 - RNA, 22 nt, Human
cauacaaugagaauguuccuga

SEQ ID NO: 1220282 - RNA, 21 nt, Human
caucagaaggguguuggcucc

SEQ ID NO: 1220283 - RNA, 21 nt, Human
caucagaaggguguuggcucc

SEQ ID NO: 1220284 - RNA, 21 nt, Human
caucagaaggguguuggcucc

SEQ ID NO: 1220285 - RNA, 21 nt, Human
caucagaaggguguuggcucc

SEQ ID NO: 1220286 - RNA, 19 nt, Human
cauuuauucacaaggauua

SEQ ID NO: 1220287 - RNA, 18 nt, Human
ccaagcgcagacucucag

SEQ ID NO: 1220288 - RNA, 19 nt, Human
cccaaaccaacggaaaagg

SEQ ID NO: 1220289 - RNA, 28 nt, Human
cccacuucauuuauuaccaaaauaucac

SEQ ID NO: 1220290 - RNA, 18 nt, Human
cccauguaaaaacaaagu

SEQ ID NO: 1220291 - RNA, 19 nt, Human
ccccaaaccgcaucacucc

SEQ ID NO: 1220292 - RNA, 18 nt, Human
cccccgaggaagcccaug

SEQ ID NO: 1220293 - RNA, 18 nt, Human
ccccugggcugccggcuc

SEQ ID NO: 1220294 - RNA, 21 nt, Human
cccuuggccaggaaaaggcuc

SEQ ID NO: 1220295 - RNA, 22 nt, Human
ccugggcugccggcuccaaagg

SEQ ID NO: 1220296 - RNA, 27 nt, Human
cgaaauucccaaauaaaagcagagcac

SEQ ID NO: 1220297 - RNA, 22 nt, Human
cgggcgggcccccgaggaagcc

SEQ ID NO: 1220298 - RNA, 22 nt, Human
cuaaaccccaggggucucugcu

SEQ ID NO: 1220299 - RNA, 23 nt, Human
cuccaggacuaaggccaagcgca

SEQ ID NO: 1220300 - RNA, 22 nt, Human
cuucagggcugucuugcgaagu

SEQ ID NO: 1220301 - RNA, 22 nt, Human
cuuggccaggaaaaggcucacc

SEQ ID NO: 1220302 - RNA, 18 nt, Human
gaaaccugaacgauguca

SEQ ID NO: 1220303 - RNA, 22 nt, Human
gaaaccugaacgaugucacuga

SEQ ID NO: 1220304 - RNA, 22 nt, Human
gaaggcuguucaaacagcggag

SEQ ID NO: 1220305 - RNA, 19 nt, Human
gagugagacuccaggggga

SEQ ID NO: 1220306 - RNA, 24 nt, Human
gauccgagauucagauucuacugc

SEQ ID NO: 1220307 - RNA, 22 nt, Human
gcaacuagaaccuugauggaac

SEQ ID NO: 1220308 - RNA, 19 nt, Human
gcgaaaagcacauggaaau

SEQ ID NO: 1220309 - RNA, 19 nt, Human
gcggaacccacccagcacc

SEQ ID NO: 1220310 - RNA, 21 nt, Human
gcuaaauagaaauacaacuga

SEQ ID NO: 1220311 - RNA, 19 nt, Human
ggaaagaagcugaggugcu

SEQ ID NO: 1220312 - RNA, 22 nt, Human
ggagggaaucagucacagagcu

SEQ ID NO: 1220313 - RNA, 22 nt, Human
ggagugacaguuguuaagcuaa

SEQ ID NO: 1220314 - RNA, 18 nt, Human
ggauugagguggagggug

SEQ ID NO: 1220315 - RNA, 24 nt, Human
gggccggucuuggcucccaacagc

SEQ ID NO: 1220316 - RNA, 23 nt, Human
gggcgaggaaagaagcugaggug

SEQ ID NO: 1220317 - RNA, 20 nt, Human
gggcugauggaaaacugaua

SEQ ID NO: 1220318 - RNA, 19 nt, Human
ggggacucagcacccggga

SEQ ID NO: 1220319 - RNA, 20 nt, Human
gggugggguggagggacagg

SEQ ID NO: 1220320 - RNA, 23 nt, Human
gucaucauuuucacaguugaagc

SEQ ID NO: 1220321 - RNA, 18 nt, Human
gucuggggaagaugggag

SEQ ID NO: 1220322 - RNA, 20 nt, Human
uaaaaaacagccuacgguca

SEQ ID NO: 1220323 - RNA, 23 nt, Human
uaaaaaacagccuacggucacgu

SEQ ID NO: 1220324 - RNA, 25 nt, Human
uaaaacaaaucaauaacuuaaaaca

SEQ ID NO: 1220325 - RNA, 24 nt, Human
uaaauaaacagauaaauacagcca

SEQ ID NO: 1220326 - RNA, 19 nt, Human
uaaauccuuccacaagcuu

SEQ ID NO: 1220327 - RNA, 22 nt, Human
uaacacgaaccugauaccugua

SEQ ID NO: 1220328 - RNA, 24 nt, Human
uaacuaaaaaacagccuacgguca

SEQ ID NO: 1220329 - RNA, 21 nt, Human
uaagaaaugguuucuuuuggg

SEQ ID NO: 1220330 - RNA, 19 nt, Human
uaagacagaguucucuguu

SEQ ID NO: 1220331 - RNA, 23 nt, Human
uaagacucccaaauaaaggcuuu

SEQ ID NO: 1220332 - RNA, 18 nt, Human
uaagagagccuccccucc

SEQ ID NO: 1220333 - RNA, 22 nt, Human
uaagagagccuccccuccccca

SEQ ID NO: 1220334 - RNA, 19 nt, Human
uaaggcagcugcccuuggc

SEQ ID NO: 1220335 - RNA, 19 nt, Human
uacuguacaacaugggaau

SEQ ID NO: 1220336 - RNA, 21 nt, Human
uacuguacaacaugggaaucg

SEQ ID NO: 1220337 - RNA, 21 nt, Human
uagaaaaauaggauccagcca

SEQ ID NO: 1220338 - RNA, 19 nt, Human
uagaaagaacugaguaucg

SEQ ID NO: 1220339 - RNA, 24 nt, Human
uaguuaacauacagcguuuaacac

SEQ ID NO: 1220340 - RNA, 22 nt, Human
uaucacagaauuccagucauag

SEQ ID NO: 1220341 - RNA, 23 nt, Human
ucaaagccucuuugguauuuccc

SEQ ID NO: 1220342 - RNA, 19 nt, Human
ucacauggucauggucaaa

SEQ ID NO: 1220343 - RNA, 23 nt, Human
uccacaagcuugcaagcuaagac

SEQ ID NO: 1220344 - RNA, 24 nt, Human
uccacaagcuugcaagcuaagacc

SEQ ID NO: 1220345 - RNA, 19 nt, Human
ucccaaauaaaagcagagc

SEQ ID NO: 1220346 - RNA, 21 nt, Human
ucccuggaggcugggucucca

SEQ ID NO: 1220347 - RNA, 19 nt, Human
uccuaaaacacuaaagaac

SEQ ID NO: 1220348 - RNA, 18 nt, Human
ucuacacagcuaugaaca

SEQ ID NO: 1220349 - RNA, 24 nt, Human
ucuacucugaacgcuuuuucaucg

SEQ ID NO: 1220350 - RNA, 21 nt, Human
ucuucuggguuaucaaaaucu

SEQ ID NO: 1220351 - RNA, 20 nt, Human
ugacaaaaaauauucacacu

SEQ ID NO: 1220352 - RNA, 18 nt, Human
ugagaaaaaaaaaauuug

SEQ ID NO: 1220353 - RNA, 19 nt, Human
ugagguggaggguggggug

SEQ ID NO: 1220354 - RNA, 22 nt, Human
ugagguggagggugggguggag

SEQ ID NO: 1220355 - RNA, 21 nt, Human
ugcaaaaguuucauucucuuu

SEQ ID NO: 1220356 - RNA, 19 nt, Human
ugccaaugccacuuaaaag

SEQ ID NO: 1220357 - RNA, 18 nt, Human
ugcgaaaagcacauggaa

SEQ ID NO: 1220358 - RNA, 20 nt, Human
uggaaaacugauaagggcuu

SEQ ID NO: 1220359 - RNA, 22 nt, Human
uggagggugggguggagggaca

SEQ ID NO: 1220360 - RNA, 18 nt, Human
ugggaggggauugaggug

SEQ ID NO: 1220361 - RNA, 23 nt, Human
ugggcugauggaaaacugauaag

SEQ ID NO: 1220362 - RNA, 21 nt, Human
ugggguggagggacaggauag

SEQ ID NO: 1220363 - RNA, 21 nt, Human
ugguggccggggaggggacuc

SEQ ID NO: 1220364 - RNA, 18 nt, Human
uguagaaagaacugagua

SEQ ID NO: 1220365 - RNA, 18 nt, Human
uuaagaaaugguuucuuu

SEQ ID NO: 1220366 - RNA, 23 nt, Human
uuagucucacgucaagguuaaaa

SEQ ID NO: 1220367 - RNA, 19 nt, Human
uucaaguccgaugccggac

SEQ ID NO: 1220368 - RNA, 19 nt, Human
uuggcaucucuauaaaaac

SEQ ID NO: 1220369 - RNA, 20 nt, Human
uuuuuuaaauggccaagaaa

SEQ ID NO: 1220370 - RNA, 22 nt, Human
aacccagccaucccuugaccug

SEQ ID NO: 1220371 - RNA, 21 nt, Human
agccaucccuugaccugggag

SEQ ID NO: 1220372 - RNA, 19 nt, Human
caacacaagagcaaggccu

SEQ ID NO: 1220373 - RNA, 22 nt, Human
caacacaagagcaaggccuccu

SEQ ID NO: 1220374 - RNA, 22 nt, Human
cacccucaacccagccaucccu

SEQ ID NO: 1220375 - RNA, 20 nt, Human
ccaggccucgcacaguccac

SEQ ID NO: 1220376 - RNA, 20 nt, Human
ccccucaacacaagagcaag

SEQ ID NO: 1220377 - RNA, 23 nt, Human
ccucgcacaguccacccucaacc

SEQ ID NO: 1220378 - RNA, 18 nt, Human
cgaccaccuggaccugug

SEQ ID NO: 1220379 - RNA, 22 nt, Human
cucaacccagccaucccuugac

SEQ ID NO: 1220380 - RNA, 22 nt, Human
cuccugcaccggaagcgucugg

SEQ ID NO: 1220381 - RNA, 20 nt, Human
gaguggccucccgaccaccu

SEQ ID NO: 1220382 - RNA, 19 nt, Human
gcuacagcuccgccaggcc

SEQ ID NO: 1220383 - RNA, 20 nt, Human
gcuacagcuccgccaggccu

SEQ ID NO: 1220384 - RNA, 19 nt, Human
uaagcucaggugcuugggc

SEQ ID NO: 1220385 - RNA, 19 nt, Human
uacagcuccgccaggccuc

SEQ ID NO: 1220386 - RNA, 23 nt, Human
uccgccaggccucgcacagucca

SEQ ID NO: 1220387 - RNA, 19 nt, Human
ucgcacaguccacccucaa

SEQ ID NO: 1220388 - RNA, 19 nt, Human
ugaccugggagggucaggg

SEQ ID NO: 1220389 - RNA, 21 nt, Human
ugguguccccucaacacaaga

SEQ ID NO: 1220390 - RNA, 18 nt, Human
aguaggggaggcuggagg

SEQ ID NO: 1220391 - RNA, 21 nt, Human
aucccgaucucuccccagucc

SEQ ID NO: 1220392 - RNA, 23 nt, Human
aucccgaucucuccccaguccag

SEQ ID NO: 1220393 - RNA, 18 nt, Human
cagaacacuggcagucac

SEQ ID NO: 1220394 - RNA, 21 nt, Human
cggcuuccgguccaggcuccc

SEQ ID NO: 1220395 - RNA, 20 nt, Human
gccagcucucccgggagccg

SEQ ID NO: 1220396 - RNA, 21 nt, Human
ggccagcucucccgggagcca

SEQ ID NO: 1220397 - RNA, 21 nt, Human
ggcuggaggaggugaaacgcc

SEQ ID NO: 1220398 - RNA, 19 nt, Human
uccagaacacuggcaguca

SEQ ID NO: 1220399 - RNA, 18 nt, Human
ugagauggaguccaggcc

SEQ ID NO: 1220400 - RNA, 20 nt, Human
ugagauggaguccaggccug

SEQ ID NO: 1220401 - RNA, 22 nt, Human
aagcccaacagcucggaggaga

SEQ ID NO: 1220402 - RNA, 22 nt, Human
accgcagucccaacggcgcgcu

SEQ ID NO: 1220403 - RNA, 20 nt, Human
aggaggcccuggcccugccg

SEQ ID NO: 1220404 - RNA, 21 nt, Human
aggaggcccuggcccugccga

SEQ ID NO: 1220405 - RNA, 23 nt, Human
aggaggcccuggcccugccgaca

SEQ ID NO: 1220406 - RNA, 20 nt, Human
aggcccuggcccugccgaca

SEQ ID NO: 1220407 - RNA, 21 nt, Human
aggcccuggcccugccgacau

SEQ ID NO: 1220408 - RNA, 24 nt, Human
cuuggucuuguaggaggcccuggc

SEQ ID NO: 1220409 - RNA, 24 nt, Human
gcuagguuggcgagaugaagagga

SEQ ID NO: 1220410 - RNA, 24 nt, Human
uaaaagcccaacagcucggaggag

SEQ ID NO: 1220411 - RNA, 19 nt, Human
uaggaggcccuggcccugc

SEQ ID NO: 1220412 - RNA, 21 nt, Human
uccuccggcagaugcguuugg

SEQ ID NO: 1220413 - RNA, 20 nt, Human
ucucacauggacccuguagg

SEQ ID NO: 1220414 - RNA, 22 nt, Human
uggcuuggucuuguaggaggcc

SEQ ID NO: 1220415 - RNA, 20 nt, Human
aaagaaacagaaaggacuga

SEQ ID NO: 1220416 - RNA, 21 nt, Human
aacucuagguuuuacuguccu

SEQ ID NO: 1220417 - RNA, 19 nt, Human
aagcaaguguccauacagc

SEQ ID NO: 1220418 - RNA, 25 nt, Human
aagcaggaaaaugggauggaagcaa

SEQ ID NO: 1220419 - RNA, 24 nt, Human
aaucuaguuccuaaccuaccaaca

SEQ ID NO: 1220420 - RNA, 22 nt, Human
agaaacagaaaggacugaaggc

SEQ ID NO: 1220421 - RNA, 23 nt, Human
agaaaggacugaaggcuuuccca

SEQ ID NO: 1220422 - RNA, 21 nt, Human
agagagcacacaaaacagcau

SEQ ID NO: 1220423 - RNA, 21 nt, Human
agcaagagagcacacaaaaca

SEQ ID NO: 1220424 - RNA, 23 nt, Human
aggaaacacuugaaauuuccuga

SEQ ID NO: 1220425 - RNA, 20 nt, Human
aggaggaaaaaauuccuuaa

SEQ ID NO: 1220426 - RNA, 26 nt, Human
aggcugcggcggagacaccuugggcc

SEQ ID NO: 1220427 - RNA, 20 nt, Human
augagaaauuacuaugaaga

SEQ ID NO: 1220428 - RNA, 19 nt, Human
augguagcuaucaggcuga

SEQ ID NO: 1220429 - RNA, 18 nt, Human
auucugggaaaucuaguu

SEQ ID NO: 1220430 - RNA, 23 nt, Human
caauuccgucuacagacuagggg

SEQ ID NO: 1220431 - RNA, 21 nt, Human
cacaaaacagcaugacuuaac

SEQ ID NO: 1220432 - RNA, 22 nt, Human
cacacuacagcagaagaacaag

SEQ ID NO: 1220433 - RNA, 21 nt, Human
cacuacuaguaugaacaaagg

SEQ ID NO: 1220434 - RNA, 20 nt, Human
cagaaaggacugaaggcuuu

SEQ ID NO: 1220435 - RNA, 24 nt, Human
cagaaaggacugaaggcuuuccca

SEQ ID NO: 1220436 - RNA, 18 nt, Human
cagaauauucccaaccag

SEQ ID NO: 1220437 - RNA, 20 nt, Human
cagaggcugcggcggagaca

SEQ ID NO: 1220438 - RNA, 22 nt, Human
cagcagaagaacaagcuccccu

SEQ ID NO: 1220439 - RNA, 23 nt, Human
caucaaaguccugggugaggcca

SEQ ID NO: 1220440 - RNA, 25 nt, Human
caucacagaauauucccaaccagga

SEQ ID NO: 1220441 - RNA, 22 nt, Human
ccaacuccaacucuagguuuua

SEQ ID NO: 1220442 - RNA, 25 nt, Human
cccaaauuucuuacuuucauggggu

SEQ ID NO: 1220443 - RNA, 22 nt, Human
ccuaaccuaccaacacugacau

SEQ ID NO: 1220444 - RNA, 23 nt, Human
ccuaaccuaccaacacugacaua

SEQ ID NO: 1220445 - RNA, 18 nt, Human
ccucucggagaaacggag

SEQ ID NO: 1220446 - RNA, 22 nt, Human
ccuguguggaagccuaucaccu

SEQ ID NO: 1220447 - RNA, 19 nt, Human
cgacagaggcugcggcgga

SEQ ID NO: 1220448 - RNA, 25 nt, Human
cggcuuccaggugucccggcguccu

SEQ ID NO: 1220449 - RNA, 24 nt, Human
cuaaugccuucuuaacuuacuucc

SEQ ID NO: 1220450 - RNA, 30 nt, Human
cuaguacagacauaauaaugucugaaggaa

SEQ ID NO: 1220451 - RNA, 23 nt, Human
cuaguuccuaaccuaccaacacu

SEQ ID NO: 1220452 - RNA, 18 nt, Human
cucacaucaaaguccugg

SEQ ID NO: 1220453 - RNA, 22 nt, Human
cugaaucaagaauacagucacu

SEQ ID NO: 1220454 - RNA, 20 nt, Human
cuguauggugcuuccaaacc

SEQ ID NO: 1220455 - RNA, 21 nt, Human
gcgcgacagaggcugcggcgg

SEQ ID NO: 1220456 - RNA, 24 nt, Human
gcugcggcggagacaccuugggcc

SEQ ID NO: 1220457 - RNA, 18 nt, Human
guugaaagaaacagaaag

SEQ ID NO: 1220458 - RNA, 21 nt, Human
uaaaaaauacauauuagucac

SEQ ID NO: 1220459 - RNA, 24 nt, Human
uaucaccuccgagaaaauuaaagu

SEQ ID NO: 1220460 - RNA, 22 nt, Human
uaucauggaaucacaaauggaa

SEQ ID NO: 1220461 - RNA, 26 nt, Human
uauucacacagcugucucccuguaug

SEQ ID NO: 1220462 - RNA, 20 nt, Human
ucaaacaacugaaaaugaac

SEQ ID NO: 1220463 - RNA, 18 nt, Human
ucacagaauauucccaac

SEQ ID NO: 1220464 - RNA, 26 nt, Human
ugaaaaguaaaauuuacaugaggagg

SEQ ID NO: 1220465 - RNA, 22 nt, Human
ugaaagaaacagaaaggacuga

SEQ ID NO: 1220466 - RNA, 23 nt, Human
ugaaagaaacagaaaggacugaa

SEQ ID NO: 1220467 - RNA, 20 nt, Human
ugccuaguacagacauaaua

SEQ ID NO: 1220468 - RNA, 23 nt, Human
uggaaucacaaauggaauggauu

SEQ ID NO: 1220469 - RNA, 22 nt, Human
uguggaagccuaucaccuccga

SEQ ID NO: 1220470 - RNA, 23 nt, Human
uuacacccucuuugacaacaggu

SEQ ID NO: 1220471 - RNA, 20 nt, Human
uuacaguuuauuacacccuc

SEQ ID NO: 1220472 - RNA, 20 nt, Human
uucacagugucuuaacaauu

SEQ ID NO: 1220473 - RNA, 19 nt, Human
uuuuuuuuuuuuuuuuugu

SEQ ID NO: 1220474 - RNA, 22 nt, Human
uuuuuuuuuuuuuuuuuugugg

SEQ ID NO: 1220475 - RNA, 19 nt, Human
cccagauguccagcaaggu

SEQ ID NO: 1220476 - RNA, 20 nt, Human
ccucgggcagcccuaggcuc

SEQ ID NO: 1220477 - RNA, 21 nt, Human
gugugggaacccucgggcagc

SEQ ID NO: 1220478 - RNA, 18 nt, Human
aaaauuagcugggcaugg

SEQ ID NO: 1220479 - RNA, 19 nt, Human
aacacggugaaacccuguc

SEQ ID NO: 1220480 - RNA, 20 nt, Human
aacacggugaaacccugucu

SEQ ID NO: 1220481 - RNA, 20 nt, Human
aacacggugaaacccugucu

SEQ ID NO: 1220482 - RNA, 21 nt, Human
aacacggugaaacccugucuu

SEQ ID NO: 1220483 - RNA, 24 nt, Human
aacugcuugagccuggcaagugga

SEQ ID NO: 1220484 - RNA, 23 nt, Human
aagaucgcgccauugcacuccag

SEQ ID NO: 1220485 - RNA, 20 nt, Human
aaggcaggcagaucacgagg

SEQ ID NO: 1220486 - RNA, 23 nt, Human
aaggcaggcagaucacgagguca

SEQ ID NO: 1220487 - RNA, 18 nt, Human
aaggccaaggcaggcagu

SEQ ID NO: 1220488 - RNA, 24 nt, Human
aaguggaaguuacagugagccaag

SEQ ID NO: 1220489 - RNA, 20 nt, Human
aauauggugaaacucugucu

SEQ ID NO: 1220490 - RNA, 21 nt, Human
aauauggugaaacucugucuc

SEQ ID NO: 1220491 - RNA, 24 nt, Human
aauggcauaaacccgggaggugga

SEQ ID NO: 1220492 - RNA, 25 nt, Human
acagagagagacucuguccuuaaaa

SEQ ID NO: 1220493 - RNA, 24 nt, Human
acagagcgagacuccaucucaaaa

SEQ ID NO: 1220494 - RNA, 24 nt, Human
acccugucuuuacuaaaaauacaa

SEQ ID NO: 1220495 - RNA, 22 nt, Human
accucauucuauaagagacagu

SEQ ID NO: 1220496 - RNA, 24 nt, Human
acugcacuccagccugggcgacag

SEQ ID NO: 1220497 - RNA, 26 nt, Human
acugcacuccagccugggcgacagag

SEQ ID NO: 1220498 - RNA, 19 nt, Human
acugucuggggagcagggu

SEQ ID NO: 1220499 - RNA, 24 nt, Human
acuuugggaggccgaggugggcag

SEQ ID NO: 1220500 - RNA, 24 nt, Human
agacaggagaauggcauaaacccg

SEQ ID NO: 1220501 - RNA, 25 nt, Human
agaucaccugaggccaggaguuuga

SEQ ID NO: 1220502 - RNA, 24 nt, Human
agcacuuugggaggccgagguggg

SEQ ID NO: 1220503 - RNA, 24 nt, Human
agccaggcuaauauggugaaacuc

SEQ ID NO: 1220504 - RNA, 24 nt, Human
agccugggcgacagagcgagacuc

SEQ ID NO: 1220505 - RNA, 20 nt, Human
agccugggugacagagagag

SEQ ID NO: 1220506 - RNA, 24 nt, Human
agccugggugacagagagagacuc

SEQ ID NO: 1220507 - RNA, 23 nt, Human
agcugggcaugguggcgggugcc

SEQ ID NO: 1220508 - RNA, 18 nt, Human
aggcagaucacgagguca

SEQ ID NO: 1220509 - RNA, 24 nt, Human
aggcagaucacgaggucaggagau

SEQ ID NO: 1220510 - RNA, 22 nt, Human
aggcaggagaacugcuugagcc

SEQ ID NO: 1220511 - RNA, 24 nt, Human
aggcaggagaacugcuugagccug

SEQ ID NO: 1220512 - RNA, 26 nt, Human
aggcaggcagaucacgaggucaggag

SEQ ID NO: 1220513 - RNA, 22 nt, Human
aggcauuucuggaucagugcag

SEQ ID NO: 1220514 - RNA, 23 nt, Human
aggccaaggcaggcagaucacga

SEQ ID NO: 1220515 - RNA, 21 nt, Human
aggccgaggugggcagaucac

SEQ ID NO: 1220516 - RNA, 24 nt, Human
aggcugaggcaggagaacugcuug

SEQ ID NO: 1220517 - RNA, 24 nt, Human
agguggagcuugcagugagcugag

SEQ ID NO: 1220518 - RNA, 19 nt, Human
agugaguugucaaucauug

SEQ ID NO: 1220519 - RNA, 21 nt, Human
aucaguggugcaacuccagga

SEQ ID NO: 1220520 - RNA, 24 nt, Human
aucgcgccauugcacuccagccug

SEQ ID NO: 1220521 - RNA, 19 nt, Human
aucuccccucauuucucca

SEQ ID NO: 1220522 - RNA, 20 nt, Human
auggugaaacucugucucua

SEQ ID NO: 1220523 - RNA, 18 nt, Human
auugcacuccagccuggg

SEQ ID NO: 1220524 - RNA, 24 nt, Human
auugcacuccagccugggugacag

SEQ ID NO: 1220525 - RNA, 24 nt, Human
auugcgccacugcacuccagccug

SEQ ID NO: 1220526 - RNA, 18 nt, Human
cacccauccacgaugcuc

SEQ ID NO: 1220527 - RNA, 23 nt, Human
cacuccagccugggcgacagagc

SEQ ID NO: 1220528 - RNA, 24 nt, Human
cacuccagccugggcgacagagcg

SEQ ID NO: 1220529 - RNA, 18 nt, Human
cacuccagccugggugac

SEQ ID NO: 1220530 - RNA, 22 nt, Human
cacuccagccugggugacagag

SEQ ID NO: 1220531 - RNA, 19 nt, Human
cacugcacuccagccuggg

SEQ ID NO: 1220532 - RNA, 20 nt, Human
cacugcacuccagccugggc

SEQ ID NO: 1220533 - RNA, 20 nt, Human
cacugcacuccagccugggc

SEQ ID NO: 1220534 - RNA, 22 nt, Human
cacugcacuccagccugggcga

SEQ ID NO: 1220535 - RNA, 24 nt, Human
cacugcacuccagccugggcgaca

SEQ ID NO: 1220536 - RNA, 24 nt, Human
cagcacuuugggaggccgaggugg

SEQ ID NO: 1220537 - RNA, 22 nt, Human
cagccugggugacagagagaga

SEQ ID NO: 1220538 - RNA, 24 nt, Human
cagcuacucaggaggcugaggcag

SEQ ID NO: 1220539 - RNA, 22 nt, Human
caggcagaucacgaggucagga

SEQ ID NO: 1220540 - RNA, 19 nt, Human
caguggauuugaucccagc

SEQ ID NO: 1220541 - RNA, 18 nt, Human
caugguggauaucuucac

SEQ ID NO: 1220542 - RNA, 22 nt, Human
caugguggcgggugccuguagu

SEQ ID NO: 1220543 - RNA, 19 nt, Human
cauugcacuccagccuggg

SEQ ID NO: 1220544 - RNA, 19 nt, Human
cauugcacuccagccuggg

SEQ ID NO: 1220545 - RNA, 21 nt, Human
cauugcacuccagccugggug

SEQ ID NO: 1220546 - RNA, 22 nt, Human
cauugcacuccagccuggguga

SEQ ID NO: 1220547 - RNA, 24 nt, Human
cauugcacuccagccugggugaca

SEQ ID NO: 1220548 - RNA, 25 nt, Human
cauugcacuccagccugggugacag

SEQ ID NO: 1220549 - RNA, 24 nt, Human
ccacaggaccacgggugcccaacg

SEQ ID NO: 1220550 - RNA, 20 nt, Human
ccacugcacuccagccuggg

SEQ ID NO: 1220551 - RNA, 20 nt, Human
ccacugcacuccagccuggg

SEQ ID NO: 1220552 - RNA, 21 nt, Human
ccacugcacuccagccugggc

SEQ ID NO: 1220553 - RNA, 21 nt, Human
ccacugcacuccagccugggc

SEQ ID NO: 1220554 - RNA, 21 nt, Human
ccacugcacuccagccugggc

SEQ ID NO: 1220555 - RNA, 23 nt, Human
ccacugcacuccagccugggcga

SEQ ID NO: 1220556 - RNA, 24 nt, Human
ccacugcacuccagccugggcgac

SEQ ID NO: 1220557 - RNA, 23 nt, Human
ccagaguacaucauccaggucca

SEQ ID NO: 1220558 - RNA, 21 nt, Human
ccagccaggcuaauaugguga

SEQ ID NO: 1220559 - RNA, 24 nt, Human
ccaggcuaauauggugaaacucug

SEQ ID NO: 1220560 - RNA, 20 nt, Human
ccauugcacuccagccuggg

SEQ ID NO: 1220561 - RNA, 21 nt, Human
ccauugcacuccagccugggu

SEQ ID NO: 1220562 - RNA, 21 nt, Human
ccauugcacuccagccugggu

SEQ ID NO: 1220563 - RNA, 22 nt, Human
ccauugcacuccagccugggug

SEQ ID NO: 1220564 - RNA, 23 nt, Human
ccauugcacuccagccuggguga

SEQ ID NO: 1220565 - RNA, 24 nt, Human
ccauugcacuccagccugggugac

SEQ ID NO: 1220566 - RNA, 22 nt, Human
ccugaggccaggaguuugagac

SEQ ID NO: 1220567 - RNA, 25 nt, Human
ccugcaacugggagugucuuugacc

SEQ ID NO: 1220568 - RNA, 22 nt, Human
ccuggcuaacacggugaaaccc

SEQ ID NO: 1220569 - RNA, 24 nt, Human
ccuggcuaacacggugaaacccug

SEQ ID NO: 1220570 - RNA, 22 nt, Human
ccugggcgacagagcgagacuc

SEQ ID NO: 1220571 - RNA, 22 nt, Human
ccugggugacagagagagacuc

SEQ ID NO: 1220572 - RNA, 21 nt, Human
ccuguagucccagcuacucag

SEQ ID NO: 1220573 - RNA, 21 nt, Human
ccuguagucccagcuacucgg

SEQ ID NO: 1220574 - RNA, 22 nt, Human
ccuguagucccagcuacucggg

SEQ ID NO: 1220575 - RNA, 23 nt, Human
cgagacuccaucucaaaaaaaaa

SEQ ID NO: 1220576 - RNA, 19 nt, Human
cgaggugggcagaucaccu

SEQ ID NO: 1220577 - RNA, 26 nt, Human
cgccacugcacuccagccugggcgac

SEQ ID NO: 1220578 - RNA, 29 nt, Human
cgggagguggagcuugcagugacaacggu

SEQ ID NO: 1220579 - RNA, 24 nt, Human
cgggagguggagcuugcagugagc

SEQ ID NO: 1220580 - RNA, 18 nt, Human
cucaaaaaaaaaaaaaaa

SEQ ID NO: 1220581 - RNA, 19 nt, Human
cuccaggacgggcacugug

SEQ ID NO: 1220582 - RNA, 19 nt, Human
cuccaucucaaaaaaaaaa

SEQ ID NO: 1220583 - RNA, 19 nt, Human
cucucggucuggguggggc

SEQ ID NO: 1220584 - RNA, 18 nt, Human
cuggcuaacacggugaaa

SEQ ID NO: 1220585 - RNA, 24 nt, Human
cuggcuaacacggugaaacccugu

SEQ ID NO: 1220586 - RNA, 18 nt, Human
cuggguggggccaucuac

SEQ ID NO: 1220587 - RNA, 19 nt, Human
cuugcagugagcugagauu

SEQ ID NO: 1220588 - RNA, 21 nt, Human
cuugcagugagcugagauugc

SEQ ID NO: 1220589 - RNA, 19 nt, Human
gaaacccugucuuuacuaa

SEQ ID NO: 1220590 - RNA, 21 nt, Human
gacuaguggggugggguccga

SEQ ID NO: 1220591 - RNA, 23 nt, Human
gagaccauccuggcuaacacggu

SEQ ID NO: 1220592 - RNA, 23 nt, Human
gagcaggcauacagcuguugcac

SEQ ID NO: 1220593 - RNA, 23 nt, Human
gagcuugcagugagcugagauug

SEQ ID NO: 1220594 - RNA, 19 nt, Human
gaggugggcagaucaccug

SEQ ID NO: 1220595 - RNA, 25 nt, Human
gaggugggcagaucaccugaggcca

SEQ ID NO: 1220596 - RNA, 24 nt, Human
gaucaccugaggccaggaguuuga

SEQ ID NO: 1220597 - RNA, 24 nt, Human
gcacuccagccugggcgacagagc

SEQ ID NO: 1220598 - RNA, 22 nt, Human
gccacugcacuccagccugggc

SEQ ID NO: 1220599 - RNA, 24 nt, Human
gccacugcacuccagccugggcga

SEQ ID NO: 1220600 - RNA, 19 nt, Human
gccauugcacuccagccug

SEQ ID NO: 1220601 - RNA, 24 nt, Human
gccauugcacuccagccuggguga

SEQ ID NO: 1220602 - RNA, 18 nt, Human
gccccuccuggauagccu

SEQ ID NO: 1220603 - RNA, 22 nt, Human
gcgggugccuguagucccagcu

SEQ ID NO: 1220604 - RNA, 22 nt, Human
gcgggugccuguagucccagcu

SEQ ID NO: 1220605 - RNA, 24 nt, Human
gcuaacacggugaaacccugucuu

SEQ ID NO: 1220606 - RNA, 24 nt, Human
gcuaauauggugaaacucugucuc

SEQ ID NO: 1220607 - RNA, 20 nt, Human
ggagcagggugaggacucug

SEQ ID NO: 1220608 - RNA, 24 nt, Human
ggagcuugcagugagcugagauug

SEQ ID NO: 1220609 - RNA, 19 nt, Human
ggccaggaguuugagacca

SEQ ID NO: 1220610 - RNA, 21 nt, Human
ggccaucuacccucccugcaa

SEQ ID NO: 1220611 - RNA, 18 nt, Human
gggccgggagaacaccua

SEQ ID NO: 1220612 - RNA, 22 nt, Human
gggugggguccgagccagggau

SEQ ID NO: 1220613 - RNA, 19 nt, Human
gucucuacuaaaaauacaa

SEQ ID NO: 1220614 - RNA, 21 nt, Human
gugaaacucugucucuacuaa

SEQ ID NO: 1220615 - RNA, 20 nt, Human
guggagcuugcagugagcug

SEQ ID NO: 1220616 - RNA, 21 nt, Human
uaacacggugaaacccugucu

SEQ ID NO: 1220617 - RNA, 21 nt, Human
uaacacggugaaacccugucu

SEQ ID NO: 1220618 - RNA, 24 nt, Human
uaacacggugaaacccugucuuua

SEQ ID NO: 1220619 - RNA, 22 nt, Human
uaauauggugaaacucugucuc

SEQ ID NO: 1220620 - RNA, 24 nt, Human
uaauauggugaaacucugucucua

SEQ ID NO: 1220621 - RNA, 18 nt, Human
uacuaaaaauacaaaaaa

SEQ ID NO: 1220622 - RNA, 21 nt, Human
uagcugggcaugguggcgggu

SEQ ID NO: 1220623 - RNA, 18 nt, Human
uaggcugaggucaucacu

SEQ ID NO: 1220624 - RNA, 18 nt, Human
ucaccugaggccaggagu

SEQ ID NO: 1220625 - RNA, 24 nt, Human
ucacgaggucaggagauagagacc

SEQ ID NO: 1220626 - RNA, 23 nt, Human
uccagccugggcgacagagcgag

SEQ ID NO: 1220627 - RNA, 24 nt, Human
uccagccugggcgacagagcgaga

SEQ ID NO: 1220628 - RNA, 19 nt, Human
uccagccugggugacagag

SEQ ID NO: 1220629 - RNA, 20 nt, Human
uccagccugggugacagaga

SEQ ID NO: 1220630 - RNA, 20 nt, Human
uccaggacgggcacuguguc

SEQ ID NO: 1220631 - RNA, 23 nt, Human
uccaucucaaaaaaaaaaaaaaa

SEQ ID NO: 1220632 - RNA, 25 nt, Human
uccaucucaaaaaaaaaaaaaaaaa

SEQ ID NO: 1220633 - RNA, 30 nt, Human
uccuuaaaaaaaaaaaauaauaaggccaaa

SEQ ID NO: 1220634 - RNA, 23 nt, Human
ucgcgccauugcacuccagccug

SEQ ID NO: 1220635 - RNA, 23 nt, Human
ucucuacuaaaaauacaaaaauu

SEQ ID NO: 1220636 - RNA, 18 nt, Human
ucucuuggccccuccugg

SEQ ID NO: 1220637 - RNA, 25 nt, Human
ugaccaaagcacagaugauuucgga

SEQ ID NO: 1220638 - RNA, 21 nt, Human
ugagacaccacaggaccacgg

SEQ ID NO: 1220639 - RNA, 18 nt, Human
ugagacaggagaauggca

SEQ ID NO: 1220640 - RNA, 24 nt, Human
ugagacaggagaauggcauaaacc

SEQ ID NO: 1220641 - RNA, 24 nt, Human
ugagauugcgccacugcacuccag

SEQ ID NO: 1220642 - RNA, 22 nt, Human
ugagccaagaucgcgccauugc

SEQ ID NO: 1220643 - RNA, 22 nt, Human
ugagcugagauugcgccacugc

SEQ ID NO: 1220644 - RNA, 24 nt, Human
ugaggcaggagaacugcuugagcc

SEQ ID NO: 1220645 - RNA, 25 nt, Human
ugaggcaggagaacugcuugagccu

SEQ ID NO: 1220646 - RNA, 22 nt, Human
ugcacaggacuagugggguggg

SEQ ID NO: 1220647 - RNA, 24 nt, Human
ugcacuccagccugggugacagag

SEQ ID NO: 1220648 - RNA, 24 nt, Human
ugccuguagucccagcuacucagg

SEQ ID NO: 1220649 - RNA, 23 nt, Human
ugccuguagucccagcuacucgg

SEQ ID NO: 1220650 - RNA, 24 nt, Human
ugccuguagucccagcuacucggg

SEQ ID NO: 1220651 - RNA, 18 nt, Human
uggauaucuucacccguc

SEQ ID NO: 1220652 - RNA, 21 nt, Human
uggcgggugccuguaguccca

SEQ ID NO: 1220653 - RNA, 20 nt, Human
ugggaggccgaggugggcag

SEQ ID NO: 1220654 - RNA, 24 nt, Human
ugggaggccgaggugggcagauca

SEQ ID NO: 1220655 - RNA, 24 nt, Human
ugggcagaucaccugaggccagga

SEQ ID NO: 1220656 - RNA, 19 nt, Human
uggggaccugucugccuaa

SEQ ID NO: 1220657 - RNA, 24 nt, Human
ugguggcgggugccuguaguccca

SEQ ID NO: 1220658 - RNA, 20 nt, Human
ugucuggggagcagggugag

SEQ ID NO: 1220659 - RNA, 24 nt, Human
uguuggcgggugccuguaguccca

SEQ ID NO: 1220660 - RNA, 22 nt, Human
uuacagugagccaagaucgcgc

SEQ ID NO: 1220661 - RNA, 24 nt, Human
uuagcugggcaugguggcgggugc

SEQ ID NO: 1220662 - RNA, 23 nt, Human
uucuugguccaucuccccucauu

SEQ ID NO: 1220663 - RNA, 19 nt, Human
uugcagugagcugagauug

SEQ ID NO: 1220664 - RNA, 22 nt, Human
uugcagugagcugagauugcgc

SEQ ID NO: 1220665 - RNA, 23 nt, Human
uugcgccacugcacuccagccug

SEQ ID NO: 1220666 - RNA, 25 nt, Human
uugggaggccgaggugggcagauca

SEQ ID NO: 1220667 - RNA, 21 nt, Human
aaaaaaaaaaaggcaacugag

SEQ ID NO: 1220668 - RNA, 20 nt, Human
aaaaagccuuggaagaccac

SEQ ID NO: 1220669 - RNA, 20 nt, Human
aaaaaucaauaaggaggauc

SEQ ID NO: 1220670 - RNA, 22 nt, Human
aaaaaucaauaaggaggaucac

SEQ ID NO: 1220671 - RNA, 18 nt, Human
aaaauacuccugacacca

SEQ ID NO: 1220672 - RNA, 25 nt, Human
aaacacccaggagucuguuacacaa

SEQ ID NO: 1220673 - RNA, 21 nt, Human
aacaacucacauaacuuagga

SEQ ID NO: 1220674 - RNA, 19 nt, Human
aacucacauaacuuaggau

SEQ ID NO: 1220675 - RNA, 20 nt, Human
aagaccacuuccacuuccgg

SEQ ID NO: 1220676 - RNA, 21 nt, Human
aaggggacagaagaggcucca

SEQ ID NO: 1220677 - RNA, 21 nt, Human
aaguaucaggagauagaaacc

SEQ ID NO: 1220678 - RNA, 19 nt, Human
aagucuugguagaugacag

SEQ ID NO: 1220679 - RNA, 18 nt, Human
acaagacauccugcuaga

SEQ ID NO: 1220680 - RNA, 20 nt, Human
accaugcuggagugagguga

SEQ ID NO: 1220681 - RNA, 20 nt, Human
agaacuaugacagcagaagg

SEQ ID NO: 1220682 - RNA, 19 nt, Human
agaguaagguaaaacagga

SEQ ID NO: 1220683 - RNA, 19 nt, Human
aggcaucaagguuaacacu

SEQ ID NO: 1220684 - RNA, 22 nt, Human
agggcugaggauuucugaggug

SEQ ID NO: 1220685 - RNA, 18 nt, Human
aggggacagaagaggcuc

SEQ ID NO: 1220686 - RNA, 22 nt, Human
auugcagggggcacaccacugu

SEQ ID NO: 1220687 - RNA, 22 nt, Human
auuguuuucuucuacucuucaa

SEQ ID NO: 1220688 - RNA, 20 nt, Human
caagcagagcugcucugaag

SEQ ID NO: 1220689 - RNA, 18 nt, Human
cacacauaagaguaaggu

SEQ ID NO: 1220690 - RNA, 18 nt, Human
caccagcggcaaaaaagc

SEQ ID NO: 1220691 - RNA, 19 nt, Human
caccaugcuggagugaggu

SEQ ID NO: 1220692 - RNA, 25 nt, Human
cacccagaaaccucaaagauuuauc

SEQ ID NO: 1220693 - RNA, 22 nt, Human
cagaagaggcuccaaaauacag

SEQ ID NO: 1220694 - RNA, 23 nt, Human
cagacccaacccucagggggguu

SEQ ID NO: 1220695 - RNA, 22 nt, Human
cagagacacccagaaaccucaa

SEQ ID NO: 1220696 - RNA, 26 nt, Human
cagcggcaaaaaagccuuggaagacc

SEQ ID NO: 1220697 - RNA, 21 nt, Human
cagugccuucucagaggcccc

SEQ ID NO: 1220698 - RNA, 25 nt, Human
caucaagguuaacacucauaggagc

SEQ ID NO: 1220699 - RNA, 20 nt, Human
caugguagauaaugaggggg

SEQ ID NO: 1220700 - RNA, 24 nt, Human
cauucccacaugcuguguuaggga

SEQ ID NO: 1220701 - RNA, 19 nt, Human
cauuguauugcagggggca

SEQ ID NO: 1220702 - RNA, 22 nt, Human
cccaggggcuccccagagacac

SEQ ID NO: 1220703 - RNA, 23 nt, Human
cccugaaggacacugauccuagg

SEQ ID NO: 1220704 - RNA, 24 nt, Human
cggcaaaaaagccuuggaagacca

SEQ ID NO: 1220705 - RNA, 23 nt, Human
cgugaggcugagagacagucaug

SEQ ID NO: 1220706 - RNA, 23 nt, Human
cucaagcagagcugcucugaaga

SEQ ID NO: 1220707 - RNA, 22 nt, Human
cugccaugauccucuggagcca

SEQ ID NO: 1220708 - RNA, 22 nt, Human
cugcugaaaucgauagccacau

SEQ ID NO: 1220709 - RNA, 21 nt, Human
cuuggaagaccacuuccacuu

SEQ ID NO: 1220710 - RNA, 18 nt, Human
gaaaaaaaaaaaaaggca

SEQ ID NO: 1220711 - RNA, 21 nt, Human
gaaagaaggggacagaagagg

SEQ ID NO: 1220712 - RNA, 21 nt, Human
gaaaucgauagccacaucccu

SEQ ID NO: 1220713 - RNA, 19 nt, Human
gaaauguggacauuauggu

SEQ ID NO: 1220714 - RNA, 26 nt, Human
gagaaagaaaaacacccaggagucug

SEQ ID NO: 1220715 - RNA, 22 nt, Human
gagacacccagaaaccucaaag

SEQ ID NO: 1220716 - RNA, 18 nt, Human
gagcugcucugaagagau

SEQ ID NO: 1220717 - RNA, 25 nt, Human
gaggaaaaucuggcccaggggcucc

SEQ ID NO: 1220718 - RNA, 18 nt, Human
gccaugugugacauucug

SEQ ID NO: 1220719 - RNA, 21 nt, Human
gcccaggggcuccccagagac

SEQ ID NO: 1220720 - RNA, 19 nt, Human
gcggcaaaaaagccuugga

SEQ ID NO: 1220721 - RNA, 23 nt, Human
gcucugaagagaugggcuggagu

SEQ ID NO: 1220722 - RNA, 24 nt, Human
ggcuccccagagacacccagaaac

SEQ ID NO: 1220723 - RNA, 22 nt, Human
gguaaaacaggaaaaauggcca

SEQ ID NO: 1220724 - RNA, 20 nt, Human
uaacaguauucuauuguagu

SEQ ID NO: 1220725 - RNA, 26 nt, Human
uaacugggguccuagaaagaagggga

SEQ ID NO: 1220726 - RNA, 18 nt, Human
uaagguaaaacaggaaaa

SEQ ID NO: 1220727 - RNA, 21 nt, Human
uagaaagaaggggacagaaga

SEQ ID NO: 1220728 - RNA, 25 nt, Human
ucagacccaacccucagggggguuu

SEQ ID NO: 1220729 - RNA, 22 nt, Human
ucagaggcccucuccagaacag

SEQ ID NO: 1220730 - RNA, 24 nt, Human
ucagugccuucucagaggcccucu

SEQ ID NO: 1220731 - RNA, 20 nt, Human
ucauggcccuuuccagcccu

SEQ ID NO: 1220732 - RNA, 24 nt, Human
ucccagaugaccauaaaauucuua

SEQ ID NO: 1220733 - RNA, 21 nt, Human
uccccagagacacccagaaac

SEQ ID NO: 1220734 - RNA, 19 nt, Human
ucccugaaggacacugauc

SEQ ID NO: 1220735 - RNA, 22 nt, Human
ucccugaaggacacugauccua

SEQ ID NO: 1220736 - RNA, 23 nt, Human
ucggaagcuuucuugaaggugau

SEQ ID NO: 1220737 - RNA, 21 nt, Human
ucuccagaaacuguuuccgga

SEQ ID NO: 1220738 - RNA, 18 nt, Human
ucucugagaaggguccag

SEQ ID NO: 1220739 - RNA, 20 nt, Human
ugacaccagcggcaaaaaag

SEQ ID NO: 1220740 - RNA, 24 nt, Human
ugacaccagcggcaaaaaagccuu

SEQ ID NO: 1220741 - RNA, 19 nt, Human
ugacucgguuccuugucag

SEQ ID NO: 1220742 - RNA, 22 nt, Human
ugagaaggguccaggugccgcc

SEQ ID NO: 1220743 - RNA, 23 nt, Human
ugaggguuguaauaaguggucau

SEQ ID NO: 1220744 - RNA, 21 nt, Human
ugaggugagguccaauuagcu

SEQ ID NO: 1220745 - RNA, 20 nt, Human
ugaggugauuguaaaagagg

SEQ ID NO: 1220746 - RNA, 21 nt, Human
ugaguacgaaaaaaaaaaaaa

SEQ ID NO: 1220747 - RNA, 21 nt, Human
ugaguuggaagaacuaugaca

SEQ ID NO: 1220748 - RNA, 19 nt, Human
ugcuguguuagggacaguu

SEQ ID NO: 1220749 - RNA, 23 nt, Human
uggcccuuuccagcccuaaacau

SEQ ID NO: 1220750 - RNA, 23 nt, Human
ugggaagagguaacagacaccau

SEQ ID NO: 1220751 - RNA, 21 nt, Human
ugggguccuagaaagaagggg

SEQ ID NO: 1220752 - RNA, 19 nt, Human
ugguagauaaugagggggg

SEQ ID NO: 1220753 - RNA, 23 nt, Human
uggucaucacacagaauggagag

SEQ ID NO: 1220754 - RNA, 24 nt, Human
uguuacacaauguguuccacaacg

SEQ ID NO: 1220755 - RNA, 19 nt, Human
uuggaauaugaaaauacuc

SEQ ID NO: 1220756 - RNA, 24 nt, Human
uuguuuuuuuuuuuuuuaacuggg

SEQ ID NO: 1220757 - RNA, 20 nt, Human
uuucuugaaggugaugggag

SEQ ID NO: 1220758 - RNA, 20 nt, Human
uuuuuucuuuuuuuuuuugg

SEQ ID NO: 1220759 - RNA, 20 nt, Human
uuuuuucuuuuuuuuuuugu

SEQ ID NO: 1220760 - RNA, 21 nt, Human
uuuuuuuuuuuuuuaacuggg

SEQ ID NO: 1220761 - RNA, 27 nt, Human
aaacaaggaacaauuucucagaagcaa

SEQ ID NO: 1220762 - RNA, 18 nt, Human
aacaauuucucagaagca

SEQ ID NO: 1220763 - RNA, 21 nt, Human
uaaggaguuucucuucuaauc

SEQ ID NO: 1220764 - RNA, 23 nt, Human
uauccaaaaaacaaggaacaauu

SEQ ID NO: 1220765 - RNA, 19 nt, Human
uucucagaagcaacaaucc

SEQ ID NO: 1220766 - RNA, 23 nt, Human
aagcaagagagaggcauguucag

SEQ ID NO: 1220767 - RNA, 27 nt, Human
acuuuggaucugcgcucagcauuugga

SEQ ID NO: 1220768 - RNA, 22 nt, Human
gcaagagagaggcauguucaga

SEQ ID NO: 1220769 - RNA, 24 nt, Human
ucacgccuucagaguccagcugcu

SEQ ID NO: 1220770 - RNA, 23 nt, Human
ucucuccagcaggcaguggggac

SEQ ID NO: 1220771 - RNA, 19 nt, Human
ucugcgcucagcauuugga

SEQ ID NO: 1220772 - RNA, 20 nt, Human
acagagcguggagaugcccc

SEQ ID NO: 1220773 - RNA, 22 nt, Human
agaacccaggcgugcaggccuc

SEQ ID NO: 1220774 - RNA, 18 nt, Human
aggaagcccaccucguug

SEQ ID NO: 1220775 - RNA, 24 nt, Human
aggccucccagccccggcccacca

SEQ ID NO: 1220776 - RNA, 19 nt, Human
aggcgugcaggccucccag

SEQ ID NO: 1220777 - RNA, 18 nt, Human
aggggcguccagggccag

SEQ ID NO: 1220778 - RNA, 19 nt, Human
agguggaggcaggcgcuuc

SEQ ID NO: 1220779 - RNA, 24 nt, Human
cagaacccaggcgugcaggccucc

SEQ ID NO: 1220780 - RNA, 19 nt, Human
cagccccggcccaccagcc

SEQ ID NO: 1220781 - RNA, 19 nt, Human
caggggcguccagggccag

SEQ ID NO: 1220782 - RNA, 19 nt, Human
caggugccagguggaggca

SEQ ID NO: 1220783 - RNA, 23 nt, Human
cccaccagccuugacccgugggg

SEQ ID NO: 1220784 - RNA, 21 nt, Human
cccagaacccaggcgugcagg

SEQ ID NO: 1220785 - RNA, 26 nt, Human
cccagccccggcccaccagccuugac

SEQ ID NO: 1220786 - RNA, 21 nt, Human
ccggcccaccagccuugaccc

SEQ ID NO: 1220787 - RNA, 26 nt, Human
ccucccagccccggcccaguccgagg

SEQ ID NO: 1220788 - RNA, 23 nt, Human
ccuugacccguggggcuucacgg

SEQ ID NO: 1220789 - RNA, 20 nt, Human
cggcccgagaccaggcgcag

SEQ ID NO: 1220790 - RNA, 19 nt, Human
cgggugccuggagcucagc

SEQ ID NO: 1220791 - RNA, 23 nt, Human
cgugcgcgugguccugggggucc

SEQ ID NO: 1220792 - RNA, 18 nt, Human
cguggagaugccccaggc

SEQ ID NO: 1220793 - RNA, 22 nt, Human
gcgugcaggccucccagccccg

SEQ ID NO: 1220794 - RNA, 23 nt, Human
ggacccagaacccaggcgugcag

SEQ ID NO: 1220795 - RNA, 20 nt, Human
ggccgugcgcgugguccugg

SEQ ID NO: 1220796 - RNA, 21 nt, Human
gggccgugcgcgugguccugg

SEQ ID NO: 1220797 - RNA, 23 nt, Human
gggccgugcgcgugguccugggg

SEQ ID NO: 1220798 - RNA, 20 nt, Human
gucaggggcguccagggcca

SEQ ID NO: 1220799 - RNA, 22 nt, Human
gugguccuggggguccaggugg

SEQ ID NO: 1220800 - RNA, 22 nt, Human
ucccagccccggcccaccagcc

SEQ ID NO: 1220801 - RNA, 24 nt, Human
uccugcaggugccagguggaggca

SEQ ID NO: 1220802 - RNA, 20 nt, Human
ugccagguggaggcaggcgc

SEQ ID NO: 1220803 - RNA, 24 nt, Human
ugccuggagcucagcguuacagag

SEQ ID NO: 1220804 - RNA, 23 nt, Human
ugggagacucgggccuccgccau

SEQ ID NO: 1220805 - RNA, 23 nt, Human
uggggcuucacgggugccuggag

SEQ ID NO: 1220806 - RNA, 24 nt, Human
uucggccagcggcauauccagggg

SEQ ID NO: 1220807 - RNA, 18 nt, Human
aaaaagaucugacaccua

SEQ ID NO: 1220808 - RNA, 24 nt, Human
aacacugagaaacugcuccugauu

SEQ ID NO: 1220809 - RNA, 24 nt, Human
aagcacauaagggcagaggugcaa

SEQ ID NO: 1220810 - RNA, 24 nt, Human
cagggcacccagagaacucaguaa

SEQ ID NO: 1220811 - RNA, 21 nt, Human
caguaaauuuguuuucuaacc

SEQ ID NO: 1220812 - RNA, 18 nt, Human
cauccauccccgcuguca

SEQ ID NO: 1220813 - RNA, 18 nt, Human
cauggaagaugaacacug

SEQ ID NO: 1220814 - RNA, 22 nt, Human
caugggaaagauucuggagaaa

SEQ ID NO: 1220815 - RNA, 21 nt, Human
ccagcaagguggcaggaucca

SEQ ID NO: 1220816 - RNA, 19 nt, Human
cuagagagcccucccgucc

SEQ ID NO: 1220817 - RNA, 20 nt, Human
gagaaaaacacucagauaug

SEQ ID NO: 1220818 - RNA, 22 nt, Human
gagaaaaacacucagauauggg

SEQ ID NO: 1220819 - RNA, 24 nt, Human
gagccgagaaaaacacucagauau

SEQ ID NO: 1220820 - RNA, 20 nt, Human
gaugaacacugagaaacugc

SEQ ID NO: 1220821 - RNA, 20 nt, Human
ggagacuaaagggauguguc

SEQ ID NO: 1220822 - RNA, 20 nt, Human
ggcggugggguugcauggag

SEQ ID NO: 1220823 - RNA, 20 nt, Human
uaaaggagacuaaagggaug

SEQ ID NO: 1220824 - RNA, 22 nt, Human
uagaagcuuuuauuuguaagaa

SEQ ID NO: 1220825 - RNA, 23 nt, Human
uagaucacuuagcugcagggccu

SEQ ID NO: 1220826 - RNA, 24 nt, Human
uagcugcagggccuucuguagaug

SEQ ID NO: 1220827 - RNA, 19 nt, Human
uauacucuucaaaaauguc

SEQ ID NO: 1220828 - RNA, 24 nt, Human
uccagcaagguggcaggauccaaa

SEQ ID NO: 1220829 - RNA, 19 nt, Human
ucuaagggcuggcaggagc

SEQ ID NO: 1220830 - RNA, 22 nt, Human
ucuucaaaaaugucgacuucau

SEQ ID NO: 1220831 - RNA, 22 nt, Human
ugcaaucaaguagagccgagaa

SEQ ID NO: 1220832 - RNA, 18 nt, Human
ugcaugggaaagauucug

SEQ ID NO: 1220833 - RNA, 21 nt, Human
uggaagaugaacacugagaaa

SEQ ID NO: 1220834 - RNA, 22 nt, Human
uggauuuccagaaaccagccuc

SEQ ID NO: 1220835 - RNA, 19 nt, Human
uggcaggauccaaaggucu

SEQ ID NO: 1220836 - RNA, 19 nt, Human
uggcaggauccaaaggucu

SEQ ID NO: 1220837 - RNA, 23 nt, Human
uggcaggauccaaaggucugcag

SEQ ID NO: 1220838 - RNA, 18 nt, Human
ugggaugcuggcacagau

SEQ ID NO: 1220839 - RNA, 24 nt, Human
ugugucaccuaaaggcagcauaug

SEQ ID NO: 1220840 - RNA, 19 nt, Human
acacuugcagggacaggag

SEQ ID NO: 1220841 - RNA, 18 nt, Human
agugcuccagcuuggcca

SEQ ID NO: 1220842 - RNA, 22 nt, Human
auggcguggcuggugguggcag

SEQ ID NO: 1220843 - RNA, 20 nt, Human
cagggaacuaggucuccccu

SEQ ID NO: 1220844 - RNA, 18 nt, Human
cauggaggggaaggugga

SEQ ID NO: 1220845 - RNA, 18 nt, Human
cccugggcccggggcagg

SEQ ID NO: 1220846 - RNA, 24 nt, Human
cgagcagaguucagaccgcggcgc

SEQ ID NO: 1220847 - RNA, 21 nt, Human
cgcccccaggccuucugguuc

SEQ ID NO: 1220848 - RNA, 22 nt, Human
cuggugguggcaguaacacuug

SEQ ID NO: 1220849 - RNA, 23 nt, Human
cuggugguggcaguaacacuugc

SEQ ID NO: 1220850 - RNA, 18 nt, Human
cuuggccaccagagagcc

SEQ ID NO: 1220851 - RNA, 18 nt, Human
ggaauggguggccugcaa

SEQ ID NO: 1220852 - RNA, 22 nt, Human
gggcccggggcagggcagggaa

SEQ ID NO: 1220853 - RNA, 19 nt, Human
gguugguggaugugcucag

SEQ ID NO: 1220854 - RNA, 22 nt, Human
gucguagugcuccagcuuggcc

SEQ ID NO: 1220855 - RNA, 19 nt, Human
guggcaggcggcgauggcg

SEQ ID NO: 1220856 - RNA, 18 nt, Human
uacacucaguuggaaugg

SEQ ID NO: 1220857 - RNA, 20 nt, Human
uauuuuauuggcauggaggg

SEQ ID NO: 1220858 - RNA, 18 nt, Human
ucgcccaggugguuggug

SEQ ID NO: 1220859 - RNA, 19 nt, Human
uggaggggaagguggaggg

SEQ ID NO: 1220860 - RNA, 18 nt, Human
uggcaggcggcgauggcg

SEQ ID NO: 1220861 - RNA, 21 nt, Human
uggcaggcggcgauggcgugg

SEQ ID NO: 1220862 - RNA, 21 nt, Human
uggcguggcuggugguggcag

SEQ ID NO: 1220863 - RNA, 20 nt, Human
uggcucgcccaggugguugg

SEQ ID NO: 1220864 - RNA, 18 nt, Human
ugguggcaacccagggug

SEQ ID NO: 1220865 - RNA, 21 nt, Human
ugugcucagccaggcagagac

SEQ ID NO: 1220866 - RNA, 19 nt, Human
uugagccgacuacacucag

SEQ ID NO: 1220867 - RNA, 23 nt, Human
uugaugguggcaacccagggugg

SEQ ID NO: 1220868 - RNA, 22 nt, Human
uuggcauggaggggaaggugga

SEQ ID NO: 1220869 - RNA, 21 nt, Human
uuguuccucgcccccaggccu

SEQ ID NO: 1220870 - RNA, 18 nt, Human
aaaaugcccaccaaguug

SEQ ID NO: 1220871 - RNA, 20 nt, Human
aacauggugaaaucccgucu

SEQ ID NO: 1220872 - RNA, 21 nt, Human
aacauggugaaaucccgucuc

SEQ ID NO: 1220873 - RNA, 19 nt, Human
aacugugaggacuucccuc

SEQ ID NO: 1220874 - RNA, 24 nt, Human
aagcgugguggugugcaccuguaa

SEQ ID NO: 1220875 - RNA, 23 nt, Human
aagguugcaguaagaaaagauug

SEQ ID NO: 1220876 - RNA, 24 nt, Human
aaguugccugucugacacuuaaag

SEQ ID NO: 1220877 - RNA, 22 nt, Human
acaccuuggcuuccugaguagc

SEQ ID NO: 1220878 - RNA, 18 nt, Human
acagagugacuccgucuc

SEQ ID NO: 1220879 - RNA, 22 nt, Human
acagagugacuccgucucaaaa

SEQ ID NO: 1220880 - RNA, 21 nt, Human
acaugguggaaguggaugggc

SEQ ID NO: 1220881 - RNA, 24 nt, Human
accaacauggugaaaucccgucuc

SEQ ID NO: 1220882 - RNA, 18 nt, Human
agaaccaauggacgagga

SEQ ID NO: 1220883 - RNA, 24 nt, Human
agagaucaugcuguuagcaggcuc

SEQ ID NO: 1220884 - RNA, 18 nt, Human
agauccauaccugaacuc

SEQ ID NO: 1220885 - RNA, 21 nt, Human
agaugcccgccaaggcugggu

SEQ ID NO: 1220886 - RNA, 23 nt, Human
agccaagcgugguggugugcacc

SEQ ID NO: 1220887 - RNA, 22 nt, Human
agccuaggugacagagugacuc

SEQ ID NO: 1220888 - RNA, 24 nt, Human
agccugaccaacauggugaaaucc

SEQ ID NO: 1220889 - RNA, 24 nt, Human
aggaaggucgaucacgaggucagg

SEQ ID NO: 1220890 - RNA, 23 nt, Human
aggaggcugaggcaggagaauca

SEQ ID NO: 1220891 - RNA, 18 nt, Human
aggcaggagaaucacuug

SEQ ID NO: 1220892 - RNA, 24 nt, Human
aggcaggagaaucacuugaacucg

SEQ ID NO: 1220893 - RNA, 19 nt, Human
aggcgaagguugcaguaag

SEQ ID NO: 1220894 - RNA, 24 nt, Human
aggcugaggcaggagaaucacuug

SEQ ID NO: 1220895 - RNA, 22 nt, Human
aggcugggugcaguggcucaug

SEQ ID NO: 1220896 - RNA, 18 nt, Human
agggaaaagggugaggag

SEQ ID NO: 1220897 - RNA, 24 nt, Human
agggguccucacaccuuggcuucc

SEQ ID NO: 1220898 - RNA, 24 nt, Human
aggucgaucacgaggucaggaguu

SEQ ID NO: 1220899 - RNA, 23 nt, Human
aguggcucaugccuguaauccca

SEQ ID NO: 1220900 - RNA, 24 nt, Human
aguggcucaugccuguaaucccag

SEQ ID NO: 1220901 - RNA, 19 nt, Human
aucacgaggucaggaguuc

SEQ ID NO: 1220902 - RNA, 21 nt, Human
aucacgaggucaggaguucga

SEQ ID NO: 1220903 - RNA, 21 nt, Human
aucaugcuguuagcaggcucu

SEQ ID NO: 1220904 - RNA, 19 nt, Human
augccuguaaucccagcac

SEQ ID NO: 1220905 - RNA, 22 nt, Human
auuagagaucaacaggcaaacu

SEQ ID NO: 1220906 - RNA, 24 nt, Human
caacauggugaaaucccgucucua

SEQ ID NO: 1220907 - RNA, 26 nt, Human
caaguugccugucugacacuuaaagu

SEQ ID NO: 1220908 - RNA, 30 nt, Human
caaguugccugucugacacuuaaaguuuuu

SEQ ID NO: 1220909 - RNA, 23 nt, Human
caauccagccuaggugacagagu

SEQ ID NO: 1220910 - RNA, 23 nt, Human
caauggacgaggacacgccuucu

SEQ ID NO: 1220911 - RNA, 24 nt, Human
cacaccuuggcuuccugaguagcu

SEQ ID NO: 1220912 - RNA, 24 nt, Human
caccuguaaucccagguacucagg

SEQ ID NO: 1220913 - RNA, 23 nt, Human
caccuuggcuuccugaguagcuu

SEQ ID NO: 1220914 - RNA, 21 nt, Human
cagacagacauugaggucagg

SEQ ID NO: 1220915 - RNA, 20 nt, Human
cagcacuuugggaggccaag

SEQ ID NO: 1220916 - RNA, 25 nt, Human
cagcacuuugggaggccaaggaagg

SEQ ID NO: 1220917 - RNA, 20 nt, Human
caggccccacacacauggcu

SEQ ID NO: 1220918 - RNA, 24 nt, Human
cagguacucaggaggcugaggcag

SEQ ID NO: 1220919 - RNA, 19 nt, Human
caguaagaaaagauugcac

SEQ ID NO: 1220920 - RNA, 24 nt, Human
caucuccccucacacuuccaggcc

SEQ ID NO: 1220921 - RNA, 21 nt, Human
caucuuagauccauaccugaa

SEQ ID NO: 1220922 - RNA, 20 nt, Human
caugccuguaaucccagcac

SEQ ID NO: 1220923 - RNA, 21 nt, Human
cauggaaagagggauuccuca

SEQ ID NO: 1220924 - RNA, 19 nt, Human
cauugcaauccagccuagg

SEQ ID NO: 1220925 - RNA, 19 nt, Human
cauugcaauccagccuagg

SEQ ID NO: 1220926 - RNA, 21 nt, Human
cauugcaauccagccuaggug

SEQ ID NO: 1220927 - RNA, 24 nt, Human
cauugcaauccagccuaggugaca

SEQ ID NO: 1220928 - RNA, 24 nt, Human
cauugcaauccagccuaggugaca

SEQ ID NO: 1220929 - RNA, 22 nt, Human
ccaaggcugggugcaguggcuc

SEQ ID NO: 1220930 - RNA, 24 nt, Human
ccaauggacgaggacacgccuucu

SEQ ID NO: 1220931 - RNA, 20 nt, Human
ccacacacauggcugucaau

SEQ ID NO: 1220932 - RNA, 20 nt, Human
ccauugcaauccagccuagg

SEQ ID NO: 1220933 - RNA, 21 nt, Human
ccauugcaauccagccuaggu

SEQ ID NO: 1220934 - RNA, 24 nt, Human
ccauugcaauccagccuaggugac

SEQ ID NO: 1220935 - RNA, 22 nt, Human
cccacacacauggcugucaaug

SEQ ID NO: 1220936 - RNA, 26 nt, Human
cccacacacauggcugucaaugacca

SEQ ID NO: 1220937 - RNA, 22 nt, Human
cccgucucuacuaaaaauacaa

SEQ ID NO: 1220938 - RNA, 19 nt, Human
ccucaaguuauuuucccau

SEQ ID NO: 1220939 - RNA, 23 nt, Human
ccugaccaacauggugaaauccc

SEQ ID NO: 1220940 - RNA, 24 nt, Human
ccugaccaacauggugaaaucccg

SEQ ID NO: 1220941 - RNA, 20 nt, Human
ccuguaaucccagcacuuug

SEQ ID NO: 1220942 - RNA, 22 nt, Human
ccuguaaucccagcacuuuggg

SEQ ID NO: 1220943 - RNA, 24 nt, Human
cgagaccagccugaccaacauggu

SEQ ID NO: 1220944 - RNA, 21 nt, Human
cgccaaggcugggugcagugg

SEQ ID NO: 1220945 - RNA, 24 nt, Human
cucaaguuauuuucccauuuuugc

SEQ ID NO: 1220946 - RNA, 24 nt, Human
cucaugccuguaaucccagcacuu

SEQ ID NO: 1220947 - RNA, 24 nt, Human
cuccgucucaaaaaaaaaaugccc

SEQ ID NO: 1220948 - RNA, 24 nt, Human
cugccuggacuccaguccugauuc

SEQ ID NO: 1220949 - RNA, 23 nt, Human
gagaaucacuugaacucgggagg

SEQ ID NO: 1220950 - RNA, 20 nt, Human
gagugggugaaaggggcugg

SEQ ID NO: 1220951 - RNA, 20 nt, Human
gaucacgaggucaggaguuc

SEQ ID NO: 1220952 - RNA, 22 nt, Human
gaucacgaggucaggaguucga

SEQ ID NO: 1220953 - RNA, 24 nt, Human
gaucacgaggucaggaguucgaga

SEQ ID NO: 1220954 - RNA, 18 nt, Human
gaugggcaaagauguaug

SEQ ID NO: 1220955 - RNA, 22 nt, Human
gcaggagaaucacuugaacucg

SEQ ID NO: 1220956 - RNA, 20 nt, Human
gcaguaagaaaagauugcac

SEQ ID NO: 1220957 - RNA, 24 nt, Human
gccaaggcugggugcaguggcuca

SEQ ID NO: 1220958 - RNA, 22 nt, Human
gcuaggauucaggagccaggcu

SEQ ID NO: 1220959 - RNA, 22 nt, Human
gcugcagggguccucacaccuu

SEQ ID NO: 1220960 - RNA, 19 nt, Human
gcuguuagcaggcucuggg

SEQ ID NO: 1220961 - RNA, 24 nt, Human
ggaagauuauuuaaaauucuuuuu

SEQ ID NO: 1220962 - RNA, 18 nt, Human
ggaaguggaugggcaaag

SEQ ID NO: 1220963 - RNA, 18 nt, Human
ggaggccaaggaaggucg

SEQ ID NO: 1220964 - RNA, 23 nt, Human
ggcugggugcaguggcucaugcc

SEQ ID NO: 1220965 - RNA, 23 nt, Human
ggugcaguggcucaugccuguaa

SEQ ID NO: 1220966 - RNA, 24 nt, Human
gguggugugcaccuguaaucccag

SEQ ID NO: 1220967 - RNA, 21 nt, Human
ggugugcaccuguaaucccag

SEQ ID NO: 1220968 - RNA, 22 nt, Human
gugacagagugacuccgucuca

SEQ ID NO: 1220969 - RNA, 23 nt, Human
gugauguuuuaaugaccaagugu

SEQ ID NO: 1220970 - RNA, 21 nt, Human
uaaaaauacaaaaauuagcca

SEQ ID NO: 1220971 - RNA, 21 nt, Human
uaaauugcagacagacauuga

SEQ ID NO: 1220972 - RNA, 24 nt, Human
uagagaaauuaauaucugugaaaa

SEQ ID NO: 1220973 - RNA, 18 nt, Human
uagagaucaacaggcaaa

SEQ ID NO: 1220974 - RNA, 20 nt, Human
uagcaccaagaugcucagau

SEQ ID NO: 1220975 - RNA, 23 nt, Human
uagcaccaagaugcucagaucaa

SEQ ID NO: 1220976 - RNA, 23 nt, Human
ucaaugaccaaacaauggccaaa

SEQ ID NO: 1220977 - RNA, 21 nt, Human
ucacauggaaagagggauucc

SEQ ID NO: 1220978 - RNA, 19 nt, Human
ucacccuaucacagucaga

SEQ ID NO: 1220979 - RNA, 18 nt, Human
ucacgaggucaggaguuc

SEQ ID NO: 1220980 - RNA, 24 nt, Human
ucacgaggucaggaguucgagacc

SEQ ID NO: 1220981 - RNA, 22 nt, Human
ucacugaagccuugaacuccug

SEQ ID NO: 1220982 - RNA, 19 nt, Human
ucagaaauggaaggcgaug

SEQ ID NO: 1220983 - RNA, 22 nt, Human
ucaugccuguaaucccagcacu

SEQ ID NO: 1220984 - RNA, 24 nt, Human
uccccucacacuuccaggccccac

SEQ ID NO: 1220985 - RNA, 19 nt, Human
uccuaaagacaugaggguc

SEQ ID NO: 1220986 - RNA, 23 nt, Human
uccuaaagacaugagggucucau

SEQ ID NO: 1220987 - RNA, 19 nt, Human
uccugugcugcaggggucc

SEQ ID NO: 1220988 - RNA, 22 nt, Human
ucgaucacgaggucaggaguuc

SEQ ID NO: 1220989 - RNA, 24 nt, Human
ucucaaaaaaaaaaugcccaccaa

SEQ ID NO: 1220990 - RNA, 21 nt, Human
ucucauaguuaggagcuagga

SEQ ID NO: 1220991 - RNA, 21 nt, Human
ucucuacuaaaaauacaaaaa

SEQ ID NO: 1220992 - RNA, 23 nt, Human
ucuucauagaacaugguggaagu

SEQ ID NO: 1220993 - RNA, 22 nt, Human
ucuucccacacuugcaaaaucu

SEQ ID NO: 1220994 - RNA, 19 nt, Human
ugaaaggggcugggccagg

SEQ ID NO: 1220995 - RNA, 23 nt, Human
ugacagagugacuccgucucaaa

SEQ ID NO: 1220996 - RNA, 24 nt, Human
ugaccaacauggugaaaucccguc

SEQ ID NO: 1220997 - RNA, 24 nt, Human
ugagagugggugaaaggggcuggg

SEQ ID NO: 1220998 - RNA, 23 nt, Human
ugaggcaggagaaucacuugaac

SEQ ID NO: 1220999 - RNA, 24 nt, Human
ugaggcaggagaaucacuugaacu

SEQ ID NO: 1221000 - RNA, 25 nt, Human
ugaggcaggagaaucacuugaacuc

SEQ ID NO: 1221001 - RNA, 23 nt, Human
ugagggucucauaguuaggagcu

SEQ ID NO: 1221002 - RNA, 22 nt, Human
ugaggucagggagacaucuucc

SEQ ID NO: 1221003 - RNA, 22 nt, Human
ugcaauccagccuaggugacag

SEQ ID NO: 1221004 - RNA, 21 nt, Human
ugcaccauugcaauccagccu

SEQ ID NO: 1221005 - RNA, 18 nt, Human
ugcaccuguaaucccagg

SEQ ID NO: 1221006 - RNA, 23 nt, Human
ugccuguaaucccagcacuuugg

SEQ ID NO: 1221007 - RNA, 23 nt, Human
ugccuguaaucccagcacuuugg

SEQ ID NO: 1221008 - RNA, 20 nt, Human
uggccucaaguuauuuuccc

SEQ ID NO: 1221009 - RNA, 22 nt, Human
uggcucaugccuguaaucccag

SEQ ID NO: 1221010 - RNA, 24 nt, Human
uggcucaugccuguaaucccagca

SEQ ID NO: 1221011 - RNA, 21 nt, Human
uggcuuccugaguagcuuugg

SEQ ID NO: 1221012 - RNA, 19 nt, Human
ugggaggccaaggaagguc

SEQ ID NO: 1221013 - RNA, 24 nt, Human
ugggaggccaaggaaggucgauca

SEQ ID NO: 1221014 - RNA, 24 nt, Human
ugguggugugcaccuguaauccca

SEQ ID NO: 1221015 - RNA, 22 nt, Human
uggugugcaccuguaaucccag

SEQ ID NO: 1221016 - RNA, 27 nt, Human
ugucaaugaccaaacaauggccaaagu

SEQ ID NO: 1221017 - RNA, 20 nt, Human
uguggccuccccuuuuguga

SEQ ID NO: 1221018 - RNA, 18 nt, Human
uucacccuaucacaguca

SEQ ID NO: 1221019 - RNA, 23 nt, Human
uucacccuaucacagucagaacc

SEQ ID NO: 1221020 - RNA, 18 nt, Human
uucccagguacuaggaag

SEQ ID NO: 1221021 - RNA, 19 nt, Human
aaauaucacacuguacccc

SEQ ID NO: 1221022 - RNA, 18 nt, Human
aauggcucaaacuacccc

SEQ ID NO: 1221023 - RNA, 22 nt, Human
acaaaaaagagauaauugaggu

SEQ ID NO: 1221024 - RNA, 22 nt, Human
accauaggucagugcagccuca

SEQ ID NO: 1221025 - RNA, 25 nt, Human
acucuguugcccuggcuggagugca

SEQ ID NO: 1221026 - RNA, 21 nt, Human
agaauugugccucuaaaccuc

SEQ ID NO: 1221027 - RNA, 19 nt, Human
agcaaaaauacaaagacac

SEQ ID NO: 1221028 - RNA, 25 nt, Human
aggcagggaaggguaagggauaggu

SEQ ID NO: 1221029 - RNA, 19 nt, Human
agguagauaagaggaagaa

SEQ ID NO: 1221030 - RNA, 22 nt, Human
auuuuuuuuuuuggagacaggg

SEQ ID NO: 1221031 - RNA, 26 nt, Human
caaaaauacaaagacacauguggcug

SEQ ID NO: 1221032 - RNA, 20 nt, Human
caagacgcagaaauggcuca

SEQ ID NO: 1221033 - RNA, 20 nt, Human
caagacgcagaaauggcuca

SEQ ID NO: 1221034 - RNA, 23 nt, Human
caagacgcagaaauggcucaaac

SEQ ID NO: 1221035 - RNA, 21 nt, Human
cacaguuccagggaaagcaga

SEQ ID NO: 1221036 - RNA, 24 nt, Human
cacucuguugcccuggcuggagug

SEQ ID NO: 1221037 - RNA, 20 nt, Human
cagcaaaaauacaaagacac

SEQ ID NO: 1221038 - RNA, 24 nt, Human
cagccucaaucuuccagacucaag

SEQ ID NO: 1221039 - RNA, 19 nt, Human
caggaaccucagacuagga

SEQ ID NO: 1221040 - RNA, 20 nt, Human
cagguagauaagaggaagaa

SEQ ID NO: 1221041 - RNA, 22 nt, Human
cagugcagccucaaucuuccag

SEQ ID NO: 1221042 - RNA, 21 nt, Human
ccaaggcuucuuuuccccuga

SEQ ID NO: 1221043 - RNA, 20 nt, Human
ccucuaaaccucugcucuuc

SEQ ID NO: 1221044 - RNA, 22 nt, Human
ccucuaaaccucugcucuucgc

SEQ ID NO: 1221045 - RNA, 20 nt, Human
cuaggagaccggaagugucc

SEQ ID NO: 1221046 - RNA, 27 nt, Human
cuauggcugaaacacuaaccggggucc

SEQ ID NO: 1221047 - RNA, 24 nt, Human
cucacucuguugcccuggcuggag

SEQ ID NO: 1221048 - RNA, 19 nt, Human
cucuaaaccucugcucuuc

SEQ ID NO: 1221049 - RNA, 19 nt, Human
cucugcucugacaguccca

SEQ ID NO: 1221050 - RNA, 18 nt, Human
cugcagcauucucugcuc

SEQ ID NO: 1221051 - RNA, 22 nt, Human
gaacaaacucuuauacuaagac

SEQ ID NO: 1221052 - RNA, 19 nt, Human
gcaaaaauacaaagacaca

SEQ ID NO: 1221053 - RNA, 18 nt, Human
gcagccucaaucuuccag

SEQ ID NO: 1221054 - RNA, 19 nt, Human
gcuggagugcaguagcacu

SEQ ID NO: 1221055 - RNA, 21 nt, Human
gggauaggugggauggccaaa

SEQ ID NO: 1221056 - RNA, 22 nt, Human
gugaacaaacucuuauacuaag

SEQ ID NO: 1221057 - RNA, 21 nt, Human
uaaaccucugcucuucgccaa

SEQ ID NO: 1221058 - RNA, 21 nt, Human
uagaggcagggaaggguaagg

SEQ ID NO: 1221059 - RNA, 19 nt, Human
uaggugggauggccaaagg

SEQ ID NO: 1221060 - RNA, 23 nt, Human
ucagugcagccucaaucuuccag

SEQ ID NO: 1221061 - RNA, 23 nt, Human
ucaucaauuuugacauguucauc

SEQ ID NO: 1221062 - RNA, 19 nt, Human
ucucacucuguugcccugg

SEQ ID NO: 1221063 - RNA, 22 nt, Human
ucucacucuguugcccuggcug

SEQ ID NO: 1221064 - RNA, 24 nt, Human
ucucacucuguugcccuggcugga

SEQ ID NO: 1221065 - RNA, 24 nt, Human
ucuguugcccuggcuggagugcag

SEQ ID NO: 1221066 - RNA, 19 nt, Human
ugcccuggcuggagugcag

SEQ ID NO: 1221067 - RNA, 23 nt, Human
ugcccuggcuggagugcaguagc

SEQ ID NO: 1221068 - RNA, 21 nt, Human
ugcuaauuacacugauuugau

SEQ ID NO: 1221069 - RNA, 19 nt, Human
ugcuggaacaaugaauuuu

SEQ ID NO: 1221070 - RNA, 22 nt, Human
uggagacagggucucacucugu

SEQ ID NO: 1221071 - RNA, 24 nt, Human
uggaugcaaaaguacagguagaua

SEQ ID NO: 1221072 - RNA, 18 nt, Human
uggcuaauggaugcaaaa

SEQ ID NO: 1221073 - RNA, 20 nt, Human
ugggauggccaaagguuggc

SEQ ID NO: 1221074 - RNA, 18 nt, Human
uggggaagcuuaaaaagc

SEQ ID NO: 1221075 - RNA, 23 nt, Human
uucaaacugcuggaacaaugaau

SEQ ID NO: 1221076 - RNA, 24 nt, Human
uugcccuggcuggagugcaguagc

SEQ ID NO: 1221077 - RNA, 26 nt, Human
uuuuuuuuuuuggagacagggucuca

SEQ ID NO: 1221078 - RNA, 19 nt, Human
aaagugcugggauuacagg

SEQ ID NO: 1221079 - RNA, 19 nt, Human
aaagugcugggauuacagg

SEQ ID NO: 1221080 - RNA, 24 nt, Human
aaagugcugggauuacaggaguga

SEQ ID NO: 1221081 - RNA, 25 nt, Human
aagcgauccucccaccucagccucu

SEQ ID NO: 1221082 - RNA, 18 nt, Human
aagugcugggauuacagg

SEQ ID NO: 1221083 - RNA, 22 nt, Human
aagugcugggauuacaggaguc

SEQ ID NO: 1221084 - RNA, 26 nt, Human
aagugcugggauuacaggagugagcc

SEQ ID NO: 1221085 - RNA, 23 nt, Human
accucagccucuucaguagcugg

SEQ ID NO: 1221086 - RNA, 19 nt, Human
acuacaggugcgugccacc

SEQ ID NO: 1221087 - RNA, 23 nt, Human
agccauccuccugccuuggccuc

SEQ ID NO: 1221088 - RNA, 18 nt, Human
aggcugaucucaaacucc

SEQ ID NO: 1221089 - RNA, 21 nt, Human
agggagcuguucucacagacc

SEQ ID NO: 1221090 - RNA, 18 nt, Human
agguuggagugcaguggu

SEQ ID NO: 1221091 - RNA, 18 nt, Human
aguagcugggauuucagg

SEQ ID NO: 1221092 - RNA, 19 nt, Human
agugcaguggugcaaucau

SEQ ID NO: 1221093 - RNA, 21 nt, Human
agugcaguggugcaaucauag

SEQ ID NO: 1221094 - RNA, 18 nt, Human
auagcccacugcagccuc

SEQ ID NO: 1221095 - RNA, 19 nt, Human
auagcccacugcagccucg

SEQ ID NO: 1221096 - RNA, 18 nt, Human
aucauagcccacugcagc

SEQ ID NO: 1221097 - RNA, 18 nt, Human
augggguuucaccauguu

SEQ ID NO: 1221098 - RNA, 18 nt, Human
augggguuucaccauguu

SEQ ID NO: 1221099 - RNA, 20 nt, Human
augggguuucaccauguuag

SEQ ID NO: 1221100 - RNA, 24 nt, Human
augggguuucaccauguugccugg

SEQ ID NO: 1221101 - RNA, 24 nt, Human
caaagugcugggauuacaggagug

SEQ ID NO: 1221102 - RNA, 22 nt, Human
caagccauccuccugccuuggc

SEQ ID NO: 1221103 - RNA, 23 nt, Human
cacagacccccaccaugggacac

SEQ ID NO: 1221104 - RNA, 18 nt, Human
cacagccugccugccagg

SEQ ID NO: 1221105 - RNA, 22 nt, Human
caccaccacgccuggcuaauuu

SEQ ID NO: 1221106 - RNA, 18 nt, Human
caccauguuagccaggau

SEQ ID NO: 1221107 - RNA, 22 nt, Human
caccauguuagccaggaugguc

SEQ ID NO: 1221108 - RNA, 24 nt, Human
caccauguuagccaggauggucuc

SEQ ID NO: 1221109 - RNA, 24 nt, Human
caccauguugccugggcuggucuc

SEQ ID NO: 1221110 - RNA, 24 nt, Human
caccucgaccucccaaagugcugg

SEQ ID NO: 1221111 - RNA, 24 nt, Human
cagccucgaccuccggggcucaag

SEQ ID NO: 1221112 - RNA, 24 nt, Human
cagggucuggcucuguugcccagg

SEQ ID NO: 1221113 - RNA, 20 nt, Human
caggugugcaccaccacgcc

SEQ ID NO: 1221114 - RNA, 24 nt, Human
caguagcugggauuucaggugugc

SEQ ID NO: 1221115 - RNA, 24 nt, Human
cauguugccugggcuggucucaaa

SEQ ID NO: 1221116 - RNA, 19 nt, Human
ccaaagugcugggauuaca

SEQ ID NO: 1221117 - RNA, 21 nt, Human
ccaaagugcugggauuacagg

SEQ ID NO: 1221118 - RNA, 24 nt, Human
ccaaagugcugggauuacaggagu

SEQ ID NO: 1221119 - RNA, 19 nt, Human
ccaccgcgccuggcccuac

SEQ ID NO: 1221120 - RNA, 22 nt, Human
ccaccucagccucuucaguagc

SEQ ID NO: 1221121 - RNA, 23 nt, Human
ccacugcagccucgaccuccggg

SEQ ID NO: 1221122 - RNA, 22 nt, Human
cccaccagcccacagccugccu

SEQ ID NO: 1221123 - RNA, 19 nt, Human
cccagguuggagugcagug

SEQ ID NO: 1221124 - RNA, 25 nt, Human
ccccccacuagcagggacuacaggu

SEQ ID NO: 1221125 - RNA, 21 nt, Human
cccggcuccgucggcaccgga

SEQ ID NO: 1221126 - RNA, 20 nt, Human
ccggggcucaagcgauccuc

SEQ ID NO: 1221127 - RNA, 24 nt, Human
ccuacauccaccagugcccaaaga

SEQ ID NO: 1221128 - RNA, 26 nt, Human
ccucccaccucagccucuucaguagc

SEQ ID NO: 1221129 - RNA, 23 nt, Human
ccuccggggcucaagcgauccuc

SEQ ID NO: 1221130 - RNA, 18 nt, Human
ccucgaccuccggggcuc

SEQ ID NO: 1221131 - RNA, 24 nt, Human
ccugaccucaggugauccgcccac

SEQ ID NO: 1221132 - RNA, 20 nt, Human
ccugggcucaagccauccuc

SEQ ID NO: 1221133 - RNA, 23 nt, Human
ccugggcucaagccauccuccug

SEQ ID NO: 1221134 - RNA, 22 nt, Human
ccugucuaauuuucuguagagu

SEQ ID NO: 1221135 - RNA, 24 nt, Human
cgauccuccccacuucagcccccc

SEQ ID NO: 1221136 - RNA, 21 nt, Human
cgcccaccucgaccucccaaa

SEQ ID NO: 1221137 - RNA, 24 nt, Human
cgcgccuggcccuacguuagacuu

SEQ ID NO: 1221138 - RNA, 25 nt, Human
cucaaacgauccuccccacuucagc

SEQ ID NO: 1221139 - RNA, 18 nt, Human
cucaagccauccuccugc

SEQ ID NO: 1221140 - RNA, 24 nt, Human
cucaagcgauccucccaccucagc

SEQ ID NO: 1221141 - RNA, 24 nt, Human
cucagccucuucaguagcugggau

SEQ ID NO: 1221142 - RNA, 20 nt, Human
cucaggcucaaacgauccuc

SEQ ID NO: 1221143 - RNA, 23 nt, Human
cuccugggcucaagccauccucc

SEQ ID NO: 1221144 - RNA, 22 nt, Human
cugcagccucgaccuccggggc

SEQ ID NO: 1221145 - RNA, 24 nt, Human
gaccucaggugauccgcccaccuc

SEQ ID NO: 1221146 - RNA, 24 nt, Human
gaccuccggggcucaagcgauccu

SEQ ID NO: 1221147 - RNA, 18 nt, Human
gagaugggguuucaccau

SEQ ID NO: 1221148 - RNA, 18 nt, Human
gagaugggguuucaccau

SEQ ID NO: 1221149 - RNA, 24 nt, Human
gagaugggguuucaccauguuagc

SEQ ID NO: 1221150 - RNA, 23 nt, Human
gagaugggguuucaccauguugc

SEQ ID NO: 1221151 - RNA, 28 nt, Human
gauccuccccacuucagccccccacuag

SEQ ID NO: 1221152 - RNA, 20 nt, Human
gaucuagcagcuccgaucca

SEQ ID NO: 1221153 - RNA, 22 nt, Human
gaugggguuucaccauguugcc

SEQ ID NO: 1221154 - RNA, 18 nt, Human
gauuacaggagugagcca

SEQ ID NO: 1221155 - RNA, 20 nt, Human
gccauccuccugccuuggcc

SEQ ID NO: 1221156 - RNA, 23 nt, Human
gcccaaagaggaucuagcagcuc

SEQ ID NO: 1221157 - RNA, 20 nt, Human
gccugggcuggucucaaacu

SEQ ID NO: 1221158 - RNA, 22 nt, Human
gcucaagcgauccucccaccuc

SEQ ID NO: 1221159 - RNA, 19 nt, Human
gcucuguugcccagguugg

SEQ ID NO: 1221160 - RNA, 21 nt, Human
ggcaccggaaaugcaaagucc

SEQ ID NO: 1221161 - RNA, 23 nt, Human
gggacuacaggugcgugccacca

SEQ ID NO: 1221162 - RNA, 22 nt, Human
gggcucaagccauccuccugcc

SEQ ID NO: 1221163 - RNA, 22 nt, Human
gggguuucaccauguuagccag

SEQ ID NO: 1221164 - RNA, 19 nt, Human
gggguuucaccauguugcc

SEQ ID NO: 1221165 - RNA, 23 nt, Human
gggguuucaccauguugccuggg

SEQ ID NO: 1221166 - RNA, 22 nt, Human
ggguuucaccauguuagccagg

SEQ ID NO: 1221167 - RNA, 20 nt, Human
ggucucaaacuccugaccuc

SEQ ID NO: 1221168 - RNA, 24 nt, Human
gguuucaccauguuagccaggaug

SEQ ID NO: 1221169 - RNA, 19 nt, Human
guagagaugggguuucacc

SEQ ID NO: 1221170 - RNA, 21 nt, Human
guagagaugggguuucaccau

SEQ ID NO: 1221171 - RNA, 22 nt, Human
guagagaugggguuucaccaug

SEQ ID NO: 1221172 - RNA, 23 nt, Human
guagagaugggguuucaccaugu

SEQ ID NO: 1221173 - RNA, 19 nt, Human
guauuuuuuguagagaugg

SEQ ID NO: 1221174 - RNA, 24 nt, Human
gugauccgcccaccucgaccuccc

SEQ ID NO: 1221175 - RNA, 24 nt, Human
uaauuucuguauuuuuuguagaga

SEQ ID NO: 1221176 - RNA, 22 nt, Human
uacaggagugagccaccgcgcc

SEQ ID NO: 1221177 - RNA, 23 nt, Human
uacaggagugagccaccgcgccu

SEQ ID NO: 1221178 - RNA, 23 nt, Human
uacaggagugagccaccgcgccu

SEQ ID NO: 1221179 - RNA, 22 nt, Human
uagagaugggguuucaccaugu

SEQ ID NO: 1221180 - RNA, 22 nt, Human
uagagaugggguuucaccaugu

SEQ ID NO: 1221181 - RNA, 18 nt, Human
uagcagggacuacaggug

SEQ ID NO: 1221182 - RNA, 20 nt, Human
uagcccacugcagccucgac

SEQ ID NO: 1221183 - RNA, 24 nt, Human
uagcccacugcagccucgaccucc

SEQ ID NO: 1221184 - RNA, 24 nt, Human
uaguagagaugggguuucaccaug

SEQ ID NO: 1221185 - RNA, 26 nt, Human
uaguagagaugggguuucaccauguu

SEQ ID NO: 1221186 - RNA, 24 nt, Human
ucaccauguuagccaggauggucu

SEQ ID NO: 1221187 - RNA, 19 nt, Human
uccaccagugcccaaagag

SEQ ID NO: 1221188 - RNA, 18 nt, Human
ucccaaagugcugggauu

SEQ ID NO: 1221189 - RNA, 23 nt, Human
ucccaaagugcugggauuacagg

SEQ ID NO: 1221190 - RNA, 23 nt, Human
uccgggcucugcacaccuuccag

SEQ ID NO: 1221191 - RNA, 18 nt, Human
uccugggcucaagccauc

SEQ ID NO: 1221192 - RNA, 22 nt, Human
uccugggcucaagccauccucc

SEQ ID NO: 1221193 - RNA, 24 nt, Human
uccugggcucaagccauccuccug

SEQ ID NO: 1221194 - RNA, 23 nt, Human
ucucaaacuccugggcucaagcc

SEQ ID NO: 1221195 - RNA, 23 nt, Human
ucuggcucuguugcccagguugg

SEQ ID NO: 1221196 - RNA, 24 nt, Human
ucuggcucuguugcccagguugga

SEQ ID NO: 1221197 - RNA, 24 nt, Human
ucuguugcccagguuggagugcag

SEQ ID NO: 1221198 - RNA, 23 nt, Human
ucuguuuuuuagacagggucugg

SEQ ID NO: 1221199 - RNA, 24 nt, Human
ucuucaguagcugggauuucaggu

SEQ ID NO: 1221200 - RNA, 18 nt, Human
ugaccucaggugauccgc

SEQ ID NO: 1221201 - RNA, 21 nt, Human
ugaccucaggugauccgccca

SEQ ID NO: 1221202 - RNA, 24 nt, Human
ugaccucaggugauccgcccaccu

SEQ ID NO: 1221203 - RNA, 24 nt, Human
ugauccgcccaccucgaccuccca

SEQ ID NO: 1221204 - RNA, 26 nt, Human
ugccaccauaccugucuaauuuucug

SEQ ID NO: 1221205 - RNA, 18 nt, Human
ugcccagguuggagugca

SEQ ID NO: 1221206 - RNA, 24 nt, Human
ugcccagguuggagugcaguggug

SEQ ID NO: 1221207 - RNA, 24 nt, Human
ugccuacauccaccagugcccaaa

SEQ ID NO: 1221208 - RNA, 19 nt, Human
uggagaacgaugaccccau

SEQ ID NO: 1221209 - RNA, 18 nt, Human
uggagugcaguggugcaa

SEQ ID NO: 1221210 - RNA, 19 nt, Human
uggagugcaguggugcaau

SEQ ID NO: 1221211 - RNA, 21 nt, Human
uggagugcaguggugcaauca

SEQ ID NO: 1221212 - RNA, 19 nt, Human
ugggauuacaggagugagc

SEQ ID NO: 1221213 - RNA, 22 nt, Human
ugggauuacaggagugagccac

SEQ ID NO: 1221214 - RNA, 23 nt, Human
ugggauuacaggagugagccacc

SEQ ID NO: 1221215 - RNA, 24 nt, Human
ugggauuacaggagugagccaccg

SEQ ID NO: 1221216 - RNA, 24 nt, Human
ugggguuucaccauguuagccagg

SEQ ID NO: 1221217 - RNA, 23 nt, Human
ugggguuucaccauguugccugg

SEQ ID NO: 1221218 - RNA, 24 nt, Human
ugggguuucaccauguugccuggg

SEQ ID NO: 1221219 - RNA, 24 nt, Human
uggugcaaucauagcccacugcag

SEQ ID NO: 1221220 - RNA, 24 nt, Human
uguagagaugggguuucaccaugu

SEQ ID NO: 1221221 - RNA, 21 nt, Human
uguauuuuuaguagagauggg

SEQ ID NO: 1221222 - RNA, 22 nt, Human
uuagacagggucuggcucuguu

SEQ ID NO: 1221223 - RNA, 18 nt, Human
uuaguagagaugggguuu

SEQ ID NO: 1221224 - RNA, 22 nt, Human
uuaguagagaugggguuucacc

SEQ ID NO: 1221225 - RNA, 24 nt, Human
uuaguagagaugggguuucaccau

SEQ ID NO: 1221226 - RNA, 24 nt, Human
uugcccagguuggagugcaguggu

SEQ ID NO: 1221227 - RNA, 24 nt, Human
uuguagagaugggguuucaccaug

SEQ ID NO: 1221228 - RNA, 23 nt, Human
uuguauuuuuaguagagaugggg

SEQ ID NO: 1221229 - RNA, 19 nt, Human
uuucaccauguuagccagg

SEQ ID NO: 1221230 - RNA, 20 nt, Human
uuucaccauguuagccagga

SEQ ID NO: 1221231 - RNA, 24 nt, Human
uuucaccauguugccugggcuggu

SEQ ID NO: 1221232 - RNA, 23 nt, Human
uuucuguuuuuuagacagggucu

SEQ ID NO: 1221233 - RNA, 24 nt, Human
uuuguagagaugggguuucaccau

SEQ ID NO: 1221234 - RNA, 24 nt, Human
uuuuuaguagagaugggguuucac

SEQ ID NO: 1221235 - RNA, 21 nt, Human
uuuuuguauuuuuaguagaga

SEQ ID NO: 1221236 - RNA, 22 nt, Human
uuuuuuguagagaugggguuuc

SEQ ID NO: 1221237 - RNA, 24 nt, Human
uuuuuuguagagaugggguuucac

SEQ ID NO: 1221238 - RNA, 21 nt, Human
uuuuuuguauuuuuaguagag

SEQ ID NO: 1221239 - RNA, 24 nt, Human
uuuuuuguauuuuuaguagagaug

SEQ ID NO: 1221240 - RNA, 24 nt, Human
uuuuuuuuguauuuuuaguagaga

SEQ ID NO: 1221241 - RNA, 22 nt, Human
cccccgagacacagagcccccg

SEQ ID NO: 1221242 - RNA, 19 nt, Human
ccugggagcccccgagaca

SEQ ID NO: 1221243 - RNA, 25 nt, Human
cgagacacagagcccccggggcuga

SEQ ID NO: 1221244 - RNA, 22 nt, Human
cugaccagguccaggggguagg

SEQ ID NO: 1221245 - RNA, 23 nt, Human
gaccugggagcccccgagacaca

SEQ ID NO: 1221246 - RNA, 23 nt, Human
aaacaacccuugcucugcucuga

SEQ ID NO: 1221247 - RNA, 19 nt, Human
aaccccgccccacccgcgc

SEQ ID NO: 1221248 - RNA, 26 nt, Human
agcccacguauaaugucuuuccuccu

SEQ ID NO: 1221249 - RNA, 22 nt, Human
agccggggguggcagaagccug

SEQ ID NO: 1221250 - RNA, 19 nt, Human
agggaggcacugcuacuac

SEQ ID NO: 1221251 - RNA, 22 nt, Human
caccugcgcaaagccggccaac

SEQ ID NO: 1221252 - RNA, 19 nt, Human
cauagcgaguacugugcac

SEQ ID NO: 1221253 - RNA, 20 nt, Human
ccacguauaaugucuuuccu

SEQ ID NO: 1221254 - RNA, 21 nt, Human
cccaaacaacccuugcucugc

SEQ ID NO: 1221255 - RNA, 26 nt, Human
cccaggucaccccuaagguucaagag

SEQ ID NO: 1221256 - RNA, 21 nt, Human
ccccacccgcgcucgccgccu

SEQ ID NO: 1221257 - RNA, 21 nt, Human
ccccgccccacccgcgcucgc

SEQ ID NO: 1221258 - RNA, 24 nt, Human
ccccuaagguucaagagaucccua

SEQ ID NO: 1221259 - RNA, 18 nt, Human
ccgccuaaccccgccccc

SEQ ID NO: 1221260 - RNA, 18 nt, Human
ccgcgcucgccgccugcc

SEQ ID NO: 1221261 - RNA, 20 nt, Human
ccuccacagugccacagucc

SEQ ID NO: 1221262 - RNA, 24 nt, Human
ccuccaucuucuaucuuuuguccc

SEQ ID NO: 1221263 - RNA, 18 nt, Human
ccugccuacuaggcgccc

SEQ ID NO: 1221264 - RNA, 24 nt, Human
cgccccuccacagugccacagucc

SEQ ID NO: 1221265 - RNA, 22 nt, Human
cgccuaaccccgccccacccgc

SEQ ID NO: 1221266 - RNA, 18 nt, Human
cggagcgccgccuaaccc

SEQ ID NO: 1221267 - RNA, 21 nt, Human
cuaaccccgccccacccgcgc

SEQ ID NO: 1221268 - RNA, 23 nt, Human
cucgucacguaccggggagagag

SEQ ID NO: 1221269 - RNA, 19 nt, Human
gcccacguauaaugucuuu

SEQ ID NO: 1221270 - RNA, 24 nt, Human
gccccacccgcgcucgccgccugc

SEQ ID NO: 1221271 - RNA, 20 nt, Human
gccuacuaggcgccccucca

SEQ ID NO: 1221272 - RNA, 24 nt, Human
gcgcaaagccggccaaccguuggg

SEQ ID NO: 1221273 - RNA, 18 nt, Human
ggagucucgucacguacc

SEQ ID NO: 1221274 - RNA, 21 nt, Human
gggugguagaacccaggcccu

SEQ ID NO: 1221275 - RNA, 23 nt, Human
ggucagcggcugcacuuugguuc

SEQ ID NO: 1221276 - RNA, 25 nt, Human
gugacgaaugggccauagcgaguac

SEQ ID NO: 1221277 - RNA, 22 nt, Human
uacccaggcgugggcggugggg

SEQ ID NO: 1221278 - RNA, 21 nt, Human
uacugugcaccugcgcaaagc

SEQ ID NO: 1221279 - RNA, 18 nt, Human
uagaaugagcaccaugag

SEQ ID NO: 1221280 - RNA, 19 nt, Human
uauaaugucuuuccuccuc

SEQ ID NO: 1221281 - RNA, 23 nt, Human
ucccgcccucgucacgugacgaa

SEQ ID NO: 1221282 - RNA, 18 nt, Human
ucccuaggaguggggugg

SEQ ID NO: 1221283 - RNA, 24 nt, Human
ucccucgacauugucugucuugau

SEQ ID NO: 1221284 - RNA, 23 nt, Human
ucucgcggagcgccgccuaaccc

SEQ ID NO: 1221285 - RNA, 21 nt, Human
ugagggcagggauuuucucag

SEQ ID NO: 1221286 - RNA, 24 nt, Human
ugagggcagggauuuucucagcug

SEQ ID NO: 1221287 - RNA, 21 nt, Human
ugauuugcaaagaucugagcc

SEQ ID NO: 1221288 - RNA, 18 nt, Human
ugggcgguggggcugggc

SEQ ID NO: 1221289 - RNA, 21 nt, Human
ugggggcugaugagagacuug

SEQ ID NO: 1221290 - RNA, 21 nt, Human
uugccgggucagcggcugcac

SEQ ID NO: 1221291 - RNA, 24 nt, Human
aaccugucccccacccccaacccc

SEQ ID NO: 1221292 - RNA, 28 nt, Human
aaccugucccccacccccaaccccucca

SEQ ID NO: 1221293 - RNA, 21 nt, Human
accugucccccacccccaacc

SEQ ID NO: 1221294 - RNA, 24 nt, Human
cacaaaucccaguacaaccccccc

SEQ ID NO: 1221295 - RNA, 23 nt, Human
cacaaaucccaguacaacccccu

SEQ ID NO: 1221296 - RNA, 21 nt, Human
cagggauuucagaaaccuguc

SEQ ID NO: 1221297 - RNA, 19 nt, Human
ccaguacaacccccuucag

SEQ ID NO: 1221298 - RNA, 23 nt, Human
cccaguacaacccccuucaggga

SEQ ID NO: 1221299 - RNA, 24 nt, Human
ccccacccccaaccccuccagguc

SEQ ID NO: 1221300 - RNA, 20 nt, Human
cccccacccccaaccccucc

SEQ ID NO: 1221301 - RNA, 22 nt, Human
cccccacccccaaccccuccag

SEQ ID NO: 1221302 - RNA, 23 nt, Human
gcguguugaccgaggccccagag

SEQ ID NO: 1221303 - RNA, 21 nt, Human
ucacaaaucccaguacaaccc

SEQ ID NO: 1221304 - RNA, 20 nt, Human
ugucccccacccccaacccc

SEQ ID NO: 1221305 - RNA, 23 nt, Human
uucaaugaccuucucaauggggu

SEQ ID NO: 1221306 - RNA, 23 nt, Human
uucagaaaccugucccccacccc

SEQ ID NO: 1221307 - RNA, 22 nt, Human
aacagacgggcuccggaaagga

SEQ ID NO: 1221308 - RNA, 21 nt, Human
cuugaguucuccggaagcggg

SEQ ID NO: 1221309 - RNA, 21 nt, Human
gaggcggggucucccuucggg

SEQ ID NO: 1221310 - RNA, 18 nt, Human
ggggaacagacgggcucc

SEQ ID NO: 1221311 - RNA, 24 nt, Human
uccuucgggcacaaucgggagcuu

SEQ ID NO: 1221312 - RNA, 18 nt, Human
accuuaccuccugagguc

SEQ ID NO: 1221313 - RNA, 20 nt, Human
ccuccugaggucaggacagg

SEQ ID NO: 1221314 - RNA, 24 nt, Human
ccugaggucaggacagggcugggc

SEQ ID NO: 1221315 - RNA, 21 nt, Human
cuuggaacuguccaucggacu

SEQ ID NO: 1221316 - RNA, 25 nt, Human
gggcugggcugagcugagagggugg

SEQ ID NO: 1221317 - RNA, 27 nt, Human
guccaucggacuguuuuucggggucca

SEQ ID NO: 1221318 - RNA, 23 nt, Human
uccacggucagaaugaaccuguc

SEQ ID NO: 1221319 - RNA, 18 nt, Human
uccaggagacagaauagc

SEQ ID NO: 1221320 - RNA, 20 nt, Human
ugaggucaggacagggcugg

SEQ ID NO: 1221321 - RNA, 23 nt, Human
aaaaacuuacucuguuuucuaag

SEQ ID NO: 1221322 - RNA, 18 nt, Human
aaaggcuuugugacauga

SEQ ID NO: 1221323 - RNA, 19 nt, Human
aagaaauacucuucaccau

SEQ ID NO: 1221324 - RNA, 22 nt, Human
aauucuccaaaaaaucaccucc

SEQ ID NO: 1221325 - RNA, 18 nt, Human
acagacuuaacaugucaa

SEQ ID NO: 1221326 - RNA, 24 nt, Human
acuacauuacauaaaagcacaacu

SEQ ID NO: 1221327 - RNA, 18 nt, Human
agaaucccucauuuaccc

SEQ ID NO: 1221328 - RNA, 23 nt, Human
agaucaccagaggucgggaguuc

SEQ ID NO: 1221329 - RNA, 24 nt, Human
agcacuuugggaggccgaggcggg

SEQ ID NO: 1221330 - RNA, 25 nt, Human
aggccgaggcgggcagaucaccaga

SEQ ID NO: 1221331 - RNA, 19 nt, Human
aggcgggcagaucaccaga

SEQ ID NO: 1221332 - RNA, 22 nt, Human
aggcgggcagaucaccagaggu

SEQ ID NO: 1221333 - RNA, 26 nt, Human
aggcgggcagaucaccagaggucggg

SEQ ID NO: 1221334 - RNA, 22 nt, Human
aggcugggcacgguggcucacg

SEQ ID NO: 1221335 - RNA, 21 nt, Human
aguggcauaauaacacuucau

SEQ ID NO: 1221336 - RNA, 21 nt, Human
auauuuugccacauucuucau

SEQ ID NO: 1221337 - RNA, 19 nt, Human
augaagagcaugaaguaac

SEQ ID NO: 1221338 - RNA, 21 nt, Human
caaaagaaauacucuucacca

SEQ ID NO: 1221339 - RNA, 22 nt, Human
caacagacuuaacaugucaaaa

SEQ ID NO: 1221340 - RNA, 23 nt, Human
caacagacuuaacaugucaaaaa

SEQ ID NO: 1221341 - RNA, 18 nt, Human
caacauucuucacguuug

SEQ ID NO: 1221342 - RNA, 19 nt, Human
cacaacuaauauaauacau

SEQ ID NO: 1221343 - RNA, 24 nt, Human
cacgccuuuaaucccagcacuuug

SEQ ID NO: 1221344 - RNA, 20 nt, Human
cacuauguacccauaaaagu

SEQ ID NO: 1221345 - RNA, 19 nt, Human
cagagucuguaauuuuuuu

SEQ ID NO: 1221346 - RNA, 24 nt, Human
cagcacuuugggaggccgaggcgg

SEQ ID NO: 1221347 - RNA, 22 nt, Human
cauguaaauaaaguaggaauga

SEQ ID NO: 1221348 - RNA, 18 nt, Human
ccaaaaaaucaccuccuc

SEQ ID NO: 1221349 - RNA, 23 nt, Human
cgccuuuaaucccagcacuuugg

SEQ ID NO: 1221350 - RNA, 24 nt, Human
cgccuuuaaucccagcacuuuggg

SEQ ID NO: 1221351 - RNA, 22 nt, Human
cucacgccuuuaaucccagcac

SEQ ID NO: 1221352 - RNA, 24 nt, Human
cucacgccuuuaaucccagcacuu

SEQ ID NO: 1221353 - RNA, 25 nt, Human
gagcagauauuaauggcuuuuccac

SEQ ID NO: 1221354 - RNA, 20 nt, Human
gaggacguuaaaagcuuugc

SEQ ID NO: 1221355 - RNA, 20 nt, Human
gaggcgggcagaucaccaga

SEQ ID NO: 1221356 - RNA, 24 nt, Human
gaucaccagaggucgggaguucga

SEQ ID NO: 1221357 - RNA, 26 nt, Human
gaucaccagaggucgggaguucgaga

SEQ ID NO: 1221358 - RNA, 20 nt, Human
ggaauaaauguugaagguga

SEQ ID NO: 1221359 - RNA, 25 nt, Human
ggcagaucaccagaggucgggaguu

SEQ ID NO: 1221360 - RNA, 24 nt, Human
gggcacgguggcucacgccuuuaa

SEQ ID NO: 1221361 - RNA, 24 nt, Human
gguggcucacgccuuuaaucccag

SEQ ID NO: 1221362 - RNA, 23 nt, Human
guggcucacgccuuuaaucccag

SEQ ID NO: 1221363 - RNA, 23 nt, Human
uaaaaaagaaucuuucauaucuc

SEQ ID NO: 1221364 - RNA, 21 nt, Human
uaaaagcuuugcaacauucuu

SEQ ID NO: 1221365 - RNA, 22 nt, Human
uaaagccacugaaaaaaagaga

SEQ ID NO: 1221366 - RNA, 24 nt, Human
uaacacuucauugaauguacaaca

SEQ ID NO: 1221367 - RNA, 22 nt, Human
uaacaugucaaaaaauguuuaa

SEQ ID NO: 1221368 - RNA, 23 nt, Human
uaaccuacgagaacaauauucuu

SEQ ID NO: 1221369 - RNA, 24 nt, Human
uacauaaaagcacaacuaauauaa

SEQ ID NO: 1221370 - RNA, 21 nt, Human
uacccauaaaaguuaagaaaa

SEQ ID NO: 1221371 - RNA, 21 nt, Human
uacugcaucuacaaaaaaaac

SEQ ID NO: 1221372 - RNA, 23 nt, Human
uauaaacucugugauguuaagau

SEQ ID NO: 1221373 - RNA, 23 nt, Human
uauaugcaaauaacuuaucuaaa

SEQ ID NO: 1221374 - RNA, 19 nt, Human
uaucaaaauaugcuauaua

SEQ ID NO: 1221375 - RNA, 18 nt, Human
ucaaggcaaaaaaaaaaa

SEQ ID NO: 1221376 - RNA, 21 nt, Human
ucaaggcaaaaaaaaaaagaa

SEQ ID NO: 1221377 - RNA, 20 nt, Human
ucaccagaggucgggaguuc

SEQ ID NO: 1221378 - RNA, 20 nt, Human
ucacuauaaugcacaaaaau

SEQ ID NO: 1221379 - RNA, 25 nt, Human
ucagaacaccuaccucauacaucac

SEQ ID NO: 1221380 - RNA, 18 nt, Human
ucagagucuguaauuuuu

SEQ ID NO: 1221381 - RNA, 23 nt, Human
ucucacuauaaugcacaaaaaua

SEQ ID NO: 1221382 - RNA, 22 nt, Human
ucucuaggauaaauuagcuuau

SEQ ID NO: 1221383 - RNA, 21 nt, Human
ugacaaccauuuaaaggcuuu

SEQ ID NO: 1221384 - RNA, 19 nt, Human
ugauacaaauauaguacua

SEQ ID NO: 1221385 - RNA, 26 nt, Human
ugcacaaaaauauauuccucagaaca

SEQ ID NO: 1221386 - RNA, 21 nt, Human
ugccagugccuuaucauuucu

SEQ ID NO: 1221387 - RNA, 21 nt, Human
uggcucacgccuuuaauccca

SEQ ID NO: 1221388 - RNA, 22 nt, Human
uggcucacgccuuuaaucccag

SEQ ID NO: 1221389 - RNA, 24 nt, Human
uggcucacgccuuuaaucccagca

SEQ ID NO: 1221390 - RNA, 20 nt, Human
ugggaggccgaggcgggcag

SEQ ID NO: 1221391 - RNA, 24 nt, Human
ugggaggccgaggcgggcagauca

SEQ ID NO: 1221392 - RNA, 22 nt, Human
ugguaucaaaauaugcuauaua

SEQ ID NO: 1221393 - RNA, 18 nt, Human
uguagggcuaguuuccau

SEQ ID NO: 1221394 - RNA, 21 nt, Human
uguagggcuaguuuccauuau

SEQ ID NO: 1221395 - RNA, 20 nt, Human
uguaggguuucucuucagua

SEQ ID NO: 1221396 - RNA, 22 nt, Human
uguagucugaagugccagugcc

SEQ ID NO: 1221397 - RNA, 18 nt, Human
ugucaaggcaaaaaaaaa

SEQ ID NO: 1221398 - RNA, 23 nt, Human
ugucaaggcaaaaaaaaaaagaa

SEQ ID NO: 1221399 - RNA, 23 nt, Human
ugugauacaaauauaguacuaca

SEQ ID NO: 1221400 - RNA, 21 nt, Human
uuaauggcuuuuccacauucu

SEQ ID NO: 1221401 - RNA, 20 nt, Human
uuacauaaaagcacaacuaa

SEQ ID NO: 1221402 - RNA, 24 nt, Human
uucacauguaaauaaaguaggaau

SEQ ID NO: 1221403 - RNA, 25 nt, Human
uugggaggccgaggcgggcagauca

SEQ ID NO: 1221404 - RNA, 21 nt, Human
aaaaacagaauggacugugca

SEQ ID NO: 1221405 - RNA, 19 nt, Human
aaaaauuauggaaaagcag

SEQ ID NO: 1221406 - RNA, 22 nt, Human
acaaaaaaaaauucaacagaaa

SEQ ID NO: 1221407 - RNA, 20 nt, Human
agaccuggagcucugacugc

SEQ ID NO: 1221408 - RNA, 23 nt, Human
aggagaaguaagaaccagaccug

SEQ ID NO: 1221409 - RNA, 23 nt, Human
auaguaauaaaaacagaauggac

SEQ ID NO: 1221410 - RNA, 22 nt, Human
augaacaaaaaaaaauucaaca

SEQ ID NO: 1221411 - RNA, 24 nt, Human
caacagaaacuauuacucucagac

SEQ ID NO: 1221412 - RNA, 21 nt, Human
ccaauaccugcaggacacggg

SEQ ID NO: 1221413 - RNA, 18 nt, Human
ccuuuaggagaaguaaga

SEQ ID NO: 1221414 - RNA, 21 nt, Human
cuggagcucugacugcagcga

SEQ ID NO: 1221415 - RNA, 18 nt, Human
ggagaaguaagaaccaga

SEQ ID NO: 1221416 - RNA, 19 nt, Human
uaggagaaguaagaaccag

SEQ ID NO: 1221417 - RNA, 27 nt, Human
ucccggugucuuagcuguggaucuccc

SEQ ID NO: 1221418 - RNA, 19 nt, Human
ugcaaagagaacuuugaga

SEQ ID NO: 1221419 - RNA, 23 nt, Human
ugcagaaaaaugaacaaaaaaaa

SEQ ID NO: 1221420 - RNA, 20 nt, Human
uggcuuccaggaggucccuc

SEQ ID NO: 1221421 - RNA, 30 nt, Human
ugugcagaaaaaugaacaaaaaaaaauucc

SEQ ID NO: 1221422 - RNA, 18 nt, Human
uuuuuuuuuuuuuuuucg

SEQ ID NO: 1221423 - RNA, 23 nt, Human
uuuuuuuuuuuuuuuuucgaacu

SEQ ID NO: 1221424 - RNA, 18 nt, Human
acccgccucucccuuccc

SEQ ID NO: 1221425 - RNA, 22 nt, Human
acccugcccacccgccucuccc

SEQ ID NO: 1221426 - RNA, 21 nt, Human
acucacccugcccacccgccu

SEQ ID NO: 1221427 - RNA, 20 nt, Human
aggggucucugagggaggac

SEQ ID NO: 1221428 - RNA, 23 nt, Human
aggggucucugagggaggacuuu

SEQ ID NO: 1221429 - RNA, 22 nt, Human
cccgccccgaugcguuugggag

SEQ ID NO: 1221430 - RNA, 23 nt, Human
cccugcccacccgccucucccuu

SEQ ID NO: 1221431 - RNA, 21 nt, Human
ccucgaggggucucugaggga

SEQ ID NO: 1221432 - RNA, 23 nt, Human
ccugcccacccgccucucccuuc

SEQ ID NO: 1221433 - RNA, 19 nt, Human
cucaagcgccuuuugucug

SEQ ID NO: 1221434 - RNA, 19 nt, Human
uccacguugaaguuggagc

SEQ ID NO: 1221435 - RNA, 19 nt, Human
ucucugagggaggacuuug

SEQ ID NO: 1221436 - RNA, 18 nt, Human
acagacccugcccugggg

SEQ ID NO: 1221437 - RNA, 18 nt, Human
agggggccccgggggggc

SEQ ID NO: 1221438 - RNA, 21 nt, Human
cagacccugcccuggggccca

SEQ ID NO: 1221439 - RNA, 26 nt, Human
cagacccugcccuggggcccacacac

SEQ ID NO: 1221440 - RNA, 24 nt, Human
cagcgggccggccagagggggccc

SEQ ID NO: 1221441 - RNA, 18 nt, Human
ccacacacuccugccagg

SEQ ID NO: 1221442 - RNA, 22 nt, Human
ccccgggggggcgggaacuggg

SEQ ID NO: 1221443 - RNA, 27 nt, Human
ccggagccacagcuggcggggucuccg

SEQ ID NO: 1221444 - RNA, 21 nt, Human
ccgggggggcgggaacuggga

SEQ ID NO: 1221445 - RNA, 23 nt, Human
gaagggugagacggagccggaag

SEQ ID NO: 1221446 - RNA, 22 nt, Human
ggagggaagggugagacggagc

SEQ ID NO: 1221447 - RNA, 24 nt, Human
ggccagagggggccccgggggggc

SEQ ID NO: 1221448 - RNA, 19 nt, Human
uacagacccugcccugggg

SEQ ID NO: 1221449 - RNA, 19 nt, Human
ucuccgccgccagcccugc

SEQ ID NO: 1221450 - RNA, 18 nt, Human
ugcaaggaugugaacaag

SEQ ID NO: 1221451 - RNA, 22 nt, Human
ugcuacagacccugcccugggg

SEQ ID NO: 1221452 - RNA, 21 nt, Human
uggggcccacacacuccugcc

SEQ ID NO: 1221453 - RNA, 20 nt, Human
aaaaaaaaaaaaacuacaaa

SEQ ID NO: 1221454 - RNA, 18 nt, Human
aaaauuagcugggcgugg

SEQ ID NO: 1221455 - RNA, 22 nt, Human
aaacaaacccaaaaggcucaca

SEQ ID NO: 1221456 - RNA, 22 nt, Human
aaacccaaaaggcucacagcaa

SEQ ID NO: 1221457 - RNA, 24 nt, Human
aaagugcugggaugacaggcguga

SEQ ID NO: 1221458 - RNA, 19 nt, Human
aaagugcugggauuacagg

SEQ ID NO: 1221459 - RNA, 19 nt, Human
aaagugcugggauuacagg

SEQ ID NO: 1221460 - RNA, 23 nt, Human
aaagugcugggauuacaggugug

SEQ ID NO: 1221461 - RNA, 24 nt, Human
aacacuccugaaaaguagaaaaaa

SEQ ID NO: 1221462 - RNA, 20 nt, Human
aacauggugaaaccaccguc

SEQ ID NO: 1221463 - RNA, 21 nt, Human
aacauggugaaaccaccgucu

SEQ ID NO: 1221464 - RNA, 22 nt, Human
aacauggugaaaccaccgucuc

SEQ ID NO: 1221465 - RNA, 19 nt, Human
aacauggugaaaccccauc

SEQ ID NO: 1221466 - RNA, 20 nt, Human
aacauggugaaaccccaucu

SEQ ID NO: 1221467 - RNA, 20 nt, Human
aacauggugaaaccccaucu

SEQ ID NO: 1221468 - RNA, 21 nt, Human
aacauggugaaaccccaucuc

SEQ ID NO: 1221469 - RNA, 23 nt, Human
aaccaggcaugguggcgggugcc

SEQ ID NO: 1221470 - RNA, 24 nt, Human
aagcaauccaccugucucagccuc

SEQ ID NO: 1221471 - RNA, 18 nt, Human
aagccccuccuucccgcu

SEQ ID NO: 1221472 - RNA, 19 nt, Human
aagcggagaaaaaaacccc

SEQ ID NO: 1221473 - RNA, 21 nt, Human
aagcggagaaaaaaaccccaa

SEQ ID NO: 1221474 - RNA, 23 nt, Human
aagcggagaaaaaaaccccaaaa

SEQ ID NO: 1221475 - RNA, 20 nt, Human
aaggacaggaguucgagacc

SEQ ID NO: 1221476 - RNA, 24 nt, Human
aagugaucugcccgccucagccuc

SEQ ID NO: 1221477 - RNA, 18 nt, Human
aagugcugggauuacagg

SEQ ID NO: 1221478 - RNA, 19 nt, Human
aagugcugggauuacaggu

SEQ ID NO: 1221479 - RNA, 24 nt, Human
aaucgcuugaacccgggaggcgga

SEQ ID NO: 1221480 - RNA, 23 nt, Human
acacgggaaucccuguggaaccc

SEQ ID NO: 1221481 - RNA, 24 nt, Human
acagagcaagacucagucucaaaa

SEQ ID NO: 1221482 - RNA, 22 nt, Human
acagcaagcggagaaaaaaacc

SEQ ID NO: 1221483 - RNA, 20 nt, Human
acauggugaaaccaccgucu

SEQ ID NO: 1221484 - RNA, 25 nt, Human
accaacauggugaaaccaccgucuc

SEQ ID NO: 1221485 - RNA, 25 nt, Human
accacauugcccaagcuggccucaa

SEQ ID NO: 1221486 - RNA, 23 nt, Human
accaggcaugguggcgggugccu

SEQ ID NO: 1221487 - RNA, 19 nt, Human
acccaggcuggagugcagu

SEQ ID NO: 1221488 - RNA, 23 nt, Human
acccaggcuggagugcaguggug

SEQ ID NO: 1221489 - RNA, 24 nt, Human
accccaucucuacuaaaaacacaa

SEQ ID NO: 1221490 - RNA, 20 nt, Human
accggucuccgcaacuuggu

SEQ ID NO: 1221491 - RNA, 24 nt, Human
acgugugguggcucacaccuguaa

SEQ ID NO: 1221492 - RNA, 24 nt, Human
acuauguucgccaggcuggucuug

SEQ ID NO: 1221493 - RNA, 19 nt, Human
acucccaucacccaggcug

SEQ ID NO: 1221494 - RNA, 23 nt, Human
acucccaucacccaggcuggagu

SEQ ID NO: 1221495 - RNA, 24 nt, Human
acugcacuccagcccgggugacag

SEQ ID NO: 1221496 - RNA, 26 nt, Human
acugcacuccagcccgggugacagag

SEQ ID NO: 1221497 - RNA, 18 nt, Human
agaaacaagauagaugug

SEQ ID NO: 1221498 - RNA, 18 nt, Human
agaaggcggugggcagag

SEQ ID NO: 1221499 - RNA, 19 nt, Human
agaggagggccccucuaga

SEQ ID NO: 1221500 - RNA, 19 nt, Human
agaucacuuaaggacagga

SEQ ID NO: 1221501 - RNA, 23 nt, Human
agaucacuuaaggacaggaguuc

SEQ ID NO: 1221502 - RNA, 24 nt, Human
agcaagcggagaaaaaaaccccaa

SEQ ID NO: 1221503 - RNA, 22 nt, Human
agcacuuugggaggcugagggg

SEQ ID NO: 1221504 - RNA, 24 nt, Human
agcacuuugguuggcugagguggg

SEQ ID NO: 1221505 - RNA, 21 nt, Human
agccagacauucggggccacu

SEQ ID NO: 1221506 - RNA, 19 nt, Human
agcccgggugacagagcaa

SEQ ID NO: 1221507 - RNA, 24 nt, Human
agcccgggugacagagcaagacuc

SEQ ID NO: 1221508 - RNA, 22 nt, Human
agccuggccaacauggugaaac

SEQ ID NO: 1221509 - RNA, 24 nt, Human
agccuggccaacauggugaaaccc

SEQ ID NO: 1221510 - RNA, 23 nt, Human
agccugggcagcauagcgagacc

SEQ ID NO: 1221511 - RNA, 23 nt, Human
agccugggcagcauagcgagacc

SEQ ID NO: 1221512 - RNA, 24 nt, Human
agccugggcagcauagcgagaccu

SEQ ID NO: 1221513 - RNA, 25 nt, Human
agcuggccucaaaacuccuuggcuc

SEQ ID NO: 1221514 - RNA, 20 nt, Human
agcugggcgugguggcgggu

SEQ ID NO: 1221515 - RNA, 22 nt, Human
aggaaacaaacccaaaaggcuc

SEQ ID NO: 1221516 - RNA, 25 nt, Human
aggaaacaaacccaaaaggcucaca

SEQ ID NO: 1221517 - RNA, 24 nt, Human
aggauugcuugaguccaggaguuu

SEQ ID NO: 1221518 - RNA, 22 nt, Human
aggauuuggaggcuggacauag

SEQ ID NO: 1221519 - RNA, 24 nt, Human
aggcaggagaaucgcuugaacccg

SEQ ID NO: 1221520 - RNA, 23 nt, Human
aggcaggaggauugcuugagucc

SEQ ID NO: 1221521 - RNA, 24 nt, Human
aggccaaggcaggaggauugcuug

SEQ ID NO: 1221522 - RNA, 21 nt, Human
aggcggagguugcagugagcc

SEQ ID NO: 1221523 - RNA, 24 nt, Human
aggcggagguugcagugagccgag

SEQ ID NO: 1221524 - RNA, 20 nt, Human
aggcugaggcaggagaaucg

SEQ ID NO: 1221525 - RNA, 24 nt, Human
aggcugaggcaggagaaucgcuug

SEQ ID NO: 1221526 - RNA, 21 nt, Human
aggcugaggggggcagaucac

SEQ ID NO: 1221527 - RNA, 21 nt, Human
agggccugauaucagucaggc

SEQ ID NO: 1221528 - RNA, 21 nt, Human
aggggcucggauggagaggag

SEQ ID NO: 1221529 - RNA, 22 nt, Human
aggggggcagaucacuuaaggg

SEQ ID NO: 1221530 - RNA, 22 nt, Human
aggucucacuauguucgccagg

SEQ ID NO: 1221531 - RNA, 24 nt, Human
aggugggcggaucaugaggucagg

SEQ ID NO: 1221532 - RNA, 24 nt, Human
agugcaguggugcaaucaccacuc

SEQ ID NO: 1221533 - RNA, 24 nt, Human
aguggaucacuccuauaauccuag

SEQ ID NO: 1221534 - RNA, 21 nt, Human
aucaugaggucaggaguucaa

SEQ ID NO: 1221535 - RNA, 22 nt, Human
aucaugaggucaggaguucaag

SEQ ID NO: 1221536 - RNA, 22 nt, Human
auccaguuagcagaugacuuug

SEQ ID NO: 1221537 - RNA, 22 nt, Human
auccuagcacuuugggaggcca

SEQ ID NO: 1221538 - RNA, 20 nt, Human
auccugccacugcacuccag

SEQ ID NO: 1221539 - RNA, 19 nt, Human
augccuguaaucccagcac

SEQ ID NO: 1221540 - RNA, 21 nt, Human
auuuuguauuuuuuguagaga

SEQ ID NO: 1221541 - RNA, 19 nt, Human
caaacccaaaaggcucaca

SEQ ID NO: 1221542 - RNA, 23 nt, Human
caaacccaaaaggcucacagcaa

SEQ ID NO: 1221543 - RNA, 24 nt, Human
caaagugcugggaugacaggcgug

SEQ ID NO: 1221544 - RNA, 24 nt, Human
caaagugcugggauuacaggugug

SEQ ID NO: 1221545 - RNA, 20 nt, Human
caacauggugaaaccaccgu

SEQ ID NO: 1221546 - RNA, 25 nt, Human
caacauggugaaaccaccgucucua

SEQ ID NO: 1221547 - RNA, 24 nt, Human
caacauggugaaaccccaucucua

SEQ ID NO: 1221548 - RNA, 21 nt, Human
caagacucagucucaaaaaaa

SEQ ID NO: 1221549 - RNA, 19 nt, Human
caagagaccgaggacauga

SEQ ID NO: 1221550 - RNA, 20 nt, Human
caaggaaaaacaccggcuac

SEQ ID NO: 1221551 - RNA, 22 nt, Human
caauaagaaaaaugcaaacacu

SEQ ID NO: 1221552 - RNA, 24 nt, Human
cacaccuguaaucccagcacuuug

SEQ ID NO: 1221553 - RNA, 22 nt, Human
cacacucuuuacccugccccuu

SEQ ID NO: 1221554 - RNA, 20 nt, Human
cacagcaagcggagaaaaaa

SEQ ID NO: 1221555 - RNA, 21 nt, Human
cacauugcccaagcuggccuc

SEQ ID NO: 1221556 - RNA, 22 nt, Human
cacauugcccaagcuggccuca

SEQ ID NO: 1221557 - RNA, 24 nt, Human
caccacauugcccaagcuggccuc

SEQ ID NO: 1221558 - RNA, 21 nt, Human
cacccaggcuggagugcagug

SEQ ID NO: 1221559 - RNA, 19 nt, Human
cacccccggaugacguccu

SEQ ID NO: 1221560 - RNA, 19 nt, Human
caccuguaaucccagcacu

SEQ ID NO: 1221561 - RNA, 24 nt, Human
caccuguaaucccagcacuuuggg

SEQ ID NO: 1221562 - RNA, 23 nt, Human
caccugucucagccucccaaagu

SEQ ID NO: 1221563 - RNA, 24 nt, Human
cacuauguucgccaggcuggucuu

SEQ ID NO: 1221564 - RNA, 22 nt, Human
cacuccagcccgggugacagag

SEQ ID NO: 1221565 - RNA, 23 nt, Human
cacuccagcccgggugacagagc

SEQ ID NO: 1221566 - RNA, 24 nt, Human
cacuccuauaauccuagcacuuug

SEQ ID NO: 1221567 - RNA, 22 nt, Human
cacucuacaaucauaaccuagg

SEQ ID NO: 1221568 - RNA, 19 nt, Human
cacugcacuccagcccggg

SEQ ID NO: 1221569 - RNA, 21 nt, Human
cacugcacuccagcccgggug

SEQ ID NO: 1221570 - RNA, 23 nt, Human
cacugcacuccagcccgggugac

SEQ ID NO: 1221571 - RNA, 24 nt, Human
cacugcacuccagcccgggugaca

SEQ ID NO: 1221572 - RNA, 25 nt, Human
cacugcacuccagcccgggugacag

SEQ ID NO: 1221573 - RNA, 21 nt, Human
cagagaccuaaccgucucccu

SEQ ID NO: 1221574 - RNA, 21 nt, Human
cagagauaggagcugaggggg

SEQ ID NO: 1221575 - RNA, 18 nt, Human
cagagccuggcugcccac

SEQ ID NO: 1221576 - RNA, 26 nt, Human
cagcaagcacccccggaugacguccu

SEQ ID NO: 1221577 - RNA, 22 nt, Human
cagcacuuugggaggcugaggg

SEQ ID NO: 1221578 - RNA, 28 nt, Human
cagcacuuugggaggcugaggggggcag

SEQ ID NO: 1221579 - RNA, 21 nt, Human
cagcacuuugguuggcugagg

SEQ ID NO: 1221580 - RNA, 24 nt, Human
cagcacuuugguuggcugaggugg

SEQ ID NO: 1221581 - RNA, 19 nt, Human
cagcgucugggaagaugcc

SEQ ID NO: 1221582 - RNA, 24 nt, Human
cagcuacucgggaggcugaggcag

SEQ ID NO: 1221583 - RNA, 18 nt, Human
cagcugcaagacagcaga

SEQ ID NO: 1221584 - RNA, 18 nt, Human
cagcugccaggcagggag

SEQ ID NO: 1221585 - RNA, 23 nt, Human
caggccgggugcgguggcucaug

SEQ ID NO: 1221586 - RNA, 20 nt, Human
cagugagccgagauccugcc

SEQ ID NO: 1221587 - RNA, 19 nt, Human
cauaaccuaggaaaaacca

SEQ ID NO: 1221588 - RNA, 21 nt, Human
cauagcgagaccuugucucua

SEQ ID NO: 1221589 - RNA, 18 nt, Human
caucugcucccuccuguu

SEQ ID NO: 1221590 - RNA, 24 nt, Human
caugccuguaaucccagcacuuug

SEQ ID NO: 1221591 - RNA, 23 nt, Human
ccaaaaggcucacagcaagcgga

SEQ ID NO: 1221592 - RNA, 22 nt, Human
ccaaagugcugggaugacaggc

SEQ ID NO: 1221593 - RNA, 24 nt, Human
ccaaagugcugggaugacaggcgu

SEQ ID NO: 1221594 - RNA, 21 nt, Human
ccaaagugcugggauuacagg

SEQ ID NO: 1221595 - RNA, 21 nt, Human
ccaaagugcugggauuacagg

SEQ ID NO: 1221596 - RNA, 24 nt, Human
ccaaagugcugggauuacaggugu

SEQ ID NO: 1221597 - RNA, 20 nt, Human
ccaagcagccguccagagug

SEQ ID NO: 1221598 - RNA, 24 nt, Human
ccaauaaauaacagcgcagccaga

SEQ ID NO: 1221599 - RNA, 21 nt, Human
ccacaguuauccagagaccua

SEQ ID NO: 1221600 - RNA, 26 nt, Human
ccaccugucucagccucccaaagugc

SEQ ID NO: 1221601 - RNA, 20 nt, Human
ccacugcacuccagcccggg

SEQ ID NO: 1221602 - RNA, 20 nt, Human
ccacugcacuccagcccggg

SEQ ID NO: 1221603 - RNA, 21 nt, Human
ccacugcacuccagcccgggu

SEQ ID NO: 1221604 - RNA, 24 nt, Human
ccacugcacuccagcccgggugac

SEQ ID NO: 1221605 - RNA, 19 nt, Human
ccagagaccuaaccgucuc

SEQ ID NO: 1221606 - RNA, 22 nt, Human
ccagagaccuaaccgucucccu

SEQ ID NO: 1221607 - RNA, 22 nt, Human
ccauccuguacaccuggcucug

SEQ ID NO: 1221608 - RNA, 21 nt, Human
cccaggcucagguaaaucucc

SEQ ID NO: 1221609 - RNA, 23 nt, Human
cccaggcucagguaaaucuccca

SEQ ID NO: 1221610 - RNA, 24 nt, Human
cccaucacccaggcuggagugcag

SEQ ID NO: 1221611 - RNA, 19 nt, Human
cccccgggcccagcugucu

SEQ ID NO: 1221612 - RNA, 27 nt, Human
cccccuguccaguggaccggguccuuc

SEQ ID NO: 1221613 - RNA, 18 nt, Human
ccccuccuucccgcucag

SEQ ID NO: 1221614 - RNA, 21 nt, Human
ccccuuuugcuuuguauccaa

SEQ ID NO: 1221615 - RNA, 25 nt, Human
cccgcucagccucaguuuccucauc

SEQ ID NO: 1221616 - RNA, 24 nt, Human
cccggggcuccucuucccuucccc

SEQ ID NO: 1221617 - RNA, 22 nt, Human
cccgggugacagagcaagacuc

SEQ ID NO: 1221618 - RNA, 23 nt, Human
cccuccuucccgcucagccucag

SEQ ID NO: 1221619 - RNA, 22 nt, Human
cccucugcaagcugaaccaaga

SEQ ID NO: 1221620 - RNA, 24 nt, Human
ccgccucagccucccaaagugcug

SEQ ID NO: 1221621 - RNA, 22 nt, Human
ccuagcccugggccugauuagc

SEQ ID NO: 1221622 - RNA, 22 nt, Human
ccugaaaucucagcuacucggg

SEQ ID NO: 1221623 - RNA, 21 nt, Human
ccugaccaacauggugaaacc

SEQ ID NO: 1221624 - RNA, 22 nt, Human
ccugaccaacauggugaaacca

SEQ ID NO: 1221625 - RNA, 22 nt, Human
ccugagcucaagugaucugccc

SEQ ID NO: 1221626 - RNA, 22 nt, Human
ccugagcucaagugaucugccc

SEQ ID NO: 1221627 - RNA, 23 nt, Human
ccuggccaacauggugaaacccc

SEQ ID NO: 1221628 - RNA, 24 nt, Human
ccuggccaacauggugaaacccca

SEQ ID NO: 1221629 - RNA, 21 nt, Human
ccugggcagcauagcgagacc

SEQ ID NO: 1221630 - RNA, 20 nt, Human
ccuguacaccuggcucugcc

SEQ ID NO: 1221631 - RNA, 24 nt, Human
cgagaccagccuggccaacauggu

SEQ ID NO: 1221632 - RNA, 27 nt, Human
cgcagccagacauucggggccacuacc

SEQ ID NO: 1221633 - RNA, 22 nt, Human
cggaucaugaggucaggaguuc

SEQ ID NO: 1221634 - RNA, 21 nt, Human
cgggaaucccuguggaaccca

SEQ ID NO: 1221635 - RNA, 24 nt, Human
cgggaggcggagguugcagugagc

SEQ ID NO: 1221636 - RNA, 20 nt, Human
cgggaggcugaggcaggaga

SEQ ID NO: 1221637 - RNA, 24 nt, Human
cguccagagugcaggauacaucau

SEQ ID NO: 1221638 - RNA, 18 nt, Human
cucaagugaucugcccgc

SEQ ID NO: 1221639 - RNA, 22 nt, Human
cucacaccuguaaucccagcac

SEQ ID NO: 1221640 - RNA, 24 nt, Human
cucacaccuguaaucccagcacuu

SEQ ID NO: 1221641 - RNA, 21 nt, Human
cucacagcaagcggagaaaaa

SEQ ID NO: 1221642 - RNA, 20 nt, Human
cucacucccaucacccaggc

SEQ ID NO: 1221643 - RNA, 24 nt, Human
cucagucucaaaaaaaaaaaaaaa

SEQ ID NO: 1221644 - RNA, 23 nt, Human
cucaugccuguaaucccagcacu

SEQ ID NO: 1221645 - RNA, 24 nt, Human
cucaugccuguaaucccagcacuu

SEQ ID NO: 1221646 - RNA, 22 nt, Human
cuccgcaacuugguaguagugg

SEQ ID NO: 1221647 - RNA, 18 nt, Human
cuccucucucucucugcc

SEQ ID NO: 1221648 - RNA, 24 nt, Human
cuccucuucccuuccccacgacca

SEQ ID NO: 1221649 - RNA, 24 nt, Human
cuccuucccgcucagccucaguuu

SEQ ID NO: 1221650 - RNA, 20 nt, Human
cuccuuggcucaagcaaucc

SEQ ID NO: 1221651 - RNA, 23 nt, Human
cugcaagcugaaccaagaacaca

SEQ ID NO: 1221652 - RNA, 23 nt, Human
cugcagccuugaguucccaggcu

SEQ ID NO: 1221653 - RNA, 23 nt, Human
cuggccaacauggugaaacccca

SEQ ID NO: 1221654 - RNA, 23 nt, Human
cugucucagccucccaaagugcu

SEQ ID NO: 1221655 - RNA, 24 nt, Human
cugucucagccucccaaagugcug

SEQ ID NO: 1221656 - RNA, 24 nt, Human
cuugcccacaguuauccagagacc

SEQ ID NO: 1221657 - RNA, 19 nt, Human
cuugugucuuuauuucuac

SEQ ID NO: 1221658 - RNA, 21 nt, Human
gaagacucugcuccuccaccu

SEQ ID NO: 1221659 - RNA, 19 nt, Human
gaauaucucauugucuugg

SEQ ID NO: 1221660 - RNA, 18 nt, Human
gacagagcaagacucagu

SEQ ID NO: 1221661 - RNA, 23 nt, Human
gagaaucgcuugaacccgggagg

SEQ ID NO: 1221662 - RNA, 21 nt, Human
gagauccugccacugcacucc

SEQ ID NO: 1221663 - RNA, 23 nt, Human
gagauccugccacugcacuccag

SEQ ID NO: 1221664 - RNA, 20 nt, Human
gagcaagacucagucucaaa

SEQ ID NO: 1221665 - RNA, 24 nt, Human
gagcucaagugaucugcccgccuc

SEQ ID NO: 1221666 - RNA, 19 nt, Human
gaggacaugagcuguucca

SEQ ID NO: 1221667 - RNA, 18 nt, Human
gagggaaauagguggaaa

SEQ ID NO: 1221668 - RNA, 22 nt, Human
gagguugcagugagccgagauc

SEQ ID NO: 1221669 - RNA, 19 nt, Human
gaucacuuaaggacaggag

SEQ ID NO: 1221670 - RNA, 24 nt, Human
gaucacuuaaggacaggaguucga

SEQ ID NO: 1221671 - RNA, 24 nt, Human
gaucaugaggucaggaguucaaga

SEQ ID NO: 1221672 - RNA, 18 nt, Human
gaugacaggcgugagcca

SEQ ID NO: 1221673 - RNA, 22 nt, Human
gauugcuugaguccaggaguuu

SEQ ID NO: 1221674 - RNA, 24 nt, Human
gauugcuugaguccaggaguuuga

SEQ ID NO: 1221675 - RNA, 25 nt, Human
gauuuuguuuuuugagacagggucu

SEQ ID NO: 1221676 - RNA, 18 nt, Human
gcaauccaccugucucag

SEQ ID NO: 1221677 - RNA, 24 nt, Human
gcaauccaccugucucagccuccc

SEQ ID NO: 1221678 - RNA, 24 nt, Human
gcacuccagcccgggugacagagc

SEQ ID NO: 1221679 - RNA, 23 nt, Human
gcagcauagcgagaccuugucuc

SEQ ID NO: 1221680 - RNA, 24 nt, Human
gcagggguuacaaaagccuaaaga

SEQ ID NO: 1221681 - RNA, 24 nt, Human
gccaacauggugaaaccccaucuc

SEQ ID NO: 1221682 - RNA, 22 nt, Human
gccaggcuggucuugaacuccu

SEQ ID NO: 1221683 - RNA, 23 nt, Human
gccucagccucccaaagugcugg

SEQ ID NO: 1221684 - RNA, 24 nt, Human
gcucaagcaauccaccugucucag

SEQ ID NO: 1221685 - RNA, 22 nt, Human
gcuggccucaaaacuccuuggc

SEQ ID NO: 1221686 - RNA, 21 nt, Human
ggaaaaaccaggccauacaga

SEQ ID NO: 1221687 - RNA, 18 nt, Human
ggagguugcagugagccg

SEQ ID NO: 1221688 - RNA, 20 nt, Human
ggagguugcagugagccgag

SEQ ID NO: 1221689 - RNA, 22 nt, Human
ggagguugcagugagccgagau

SEQ ID NO: 1221690 - RNA, 23 nt, Human
ggagguugcagugagccgagauc

SEQ ID NO: 1221691 - RNA, 21 nt, Human
ggaucaugaggucaggaguuc

SEQ ID NO: 1221692 - RNA, 22 nt, Human
ggauugcuugaguccaggaguu

SEQ ID NO: 1221693 - RNA, 22 nt, Human
ggauuuggaggcuggacauagu

SEQ ID NO: 1221694 - RNA, 18 nt, Human
ggcaaggacaucccccuc

SEQ ID NO: 1221695 - RNA, 23 nt, Human
ggccgggugcgguggcucaugcc

SEQ ID NO: 1221696 - RNA, 19 nt, Human
ggcggggcuugggccuuag

SEQ ID NO: 1221697 - RNA, 23 nt, Human
ggcucaagcaauccaccugucuc

SEQ ID NO: 1221698 - RNA, 24 nt, Human
ggcuggucuugaacuccugagcuc

SEQ ID NO: 1221699 - RNA, 20 nt, Human
gggcauagugagguaugacc

SEQ ID NO: 1221700 - RNA, 24 nt, Human
gggcggaucaugaggucaggaguu

SEQ ID NO: 1221701 - RNA, 24 nt, Human
gggugcgguggcucaugccuguaa

SEQ ID NO: 1221702 - RNA, 19 nt, Human
ggucagagccuggcugccc

SEQ ID NO: 1221703 - RNA, 24 nt, Human
gguggcucacaccuguaaucccag

SEQ ID NO: 1221704 - RNA, 23 nt, Human
gguggcucaugccuguaauccca

SEQ ID NO: 1221705 - RNA, 24 nt, Human
gguggcucaugccuguaaucccag

SEQ ID NO: 1221706 - RNA, 23 nt, Human
ggugggcggaucaugaggucagg

SEQ ID NO: 1221707 - RNA, 24 nt, Human
guaaucccagcacuuugguuggcu

SEQ ID NO: 1221708 - RNA, 22 nt, Human
guacaguuuucugaaguugcag

SEQ ID NO: 1221709 - RNA, 24 nt, Human
guagcaguuacucuuuauuccaau

SEQ ID NO: 1221710 - RNA, 18 nt, Human
gucuccucucucucucug

SEQ ID NO: 1221711 - RNA, 24 nt, Human
gugaucugcccgccucagccuccc

SEQ ID NO: 1221712 - RNA, 23 nt, Human
guggcucaugccuguaaucccag

SEQ ID NO: 1221713 - RNA, 18 nt, Human
gugugguggcucacaccu

SEQ ID NO: 1221714 - RNA, 24 nt, Human
guugcagugagccgagauccugcc

SEQ ID NO: 1221715 - RNA, 23 nt, Human
guuuccucaucugcucccuccug

SEQ ID NO: 1221716 - RNA, 22 nt, Human
uaaaaaaaaaaaaacuacaaac

SEQ ID NO: 1221717 - RNA, 24 nt, Human
uaaaaaaaaaaaauuaggccacgu

SEQ ID NO: 1221718 - RNA, 21 nt, Human
uaaaaacacaaaaauuaacca

SEQ ID NO: 1221719 - RNA, 23 nt, Human
uaaccaggcaugguggcgggugc

SEQ ID NO: 1221720 - RNA, 23 nt, Human
uaauuuuguauuuuuuguagaga

SEQ ID NO: 1221721 - RNA, 21 nt, Human
uacagagauaggagcugaggg

SEQ ID NO: 1221722 - RNA, 21 nt, Human
uaccggucuccgcaacuuggu

SEQ ID NO: 1221723 - RNA, 22 nt, Human
uagagaugaggucucacuaugu

SEQ ID NO: 1221724 - RNA, 24 nt, Human
uagcacuuugggaggccaaggcag

SEQ ID NO: 1221725 - RNA, 25 nt, Human
uagcacuuugggaggccaaggcagg

SEQ ID NO: 1221726 - RNA, 23 nt, Human
uauaaaaugguacaguuuucuga

SEQ ID NO: 1221727 - RNA, 24 nt, Human
uauguucgccaggcuggucuugaa

SEQ ID NO: 1221728 - RNA, 18 nt, Human
ucaaggaaaaacaccggc

SEQ ID NO: 1221729 - RNA, 24 nt, Human
ucacccaggcuggagugcaguggu

SEQ ID NO: 1221730 - RNA, 24 nt, Human
ucacugcagccuugaguucccagg

SEQ ID NO: 1221731 - RNA, 23 nt, Human
ucacuuaaggacaggaguucgag

SEQ ID NO: 1221732 - RNA, 24 nt, Human
ucagucucaaaaaaaaaaaaaaaa

SEQ ID NO: 1221733 - RNA, 24 nt, Human
ucaugaggucaggaguucaagacc

SEQ ID NO: 1221734 - RNA, 18 nt, Human
uccaccucuuguggaggg

SEQ ID NO: 1221735 - RNA, 24 nt, Human
ucccaaagugcugggaugacaggc

SEQ ID NO: 1221736 - RNA, 23 nt, Human
ucccaaagugcugggauuacagg

SEQ ID NO: 1221737 - RNA, 21 nt, Human
ucccaggcucagguaaaucuc

SEQ ID NO: 1221738 - RNA, 22 nt, Human
ucccucugcaagcugaaccaag

SEQ ID NO: 1221739 - RNA, 24 nt, Human
ucccucugcaagcugaaccaagaa

SEQ ID NO: 1221740 - RNA, 21 nt, Human
uccggaauguuccuggagaag

SEQ ID NO: 1221741 - RNA, 18 nt, Human
uccucuucccuuccccac

SEQ ID NO: 1221742 - RNA, 20 nt, Human
uccuuggcucaagcaaucca

SEQ ID NO: 1221743 - RNA, 24 nt, Human
ucgcuugaacccgggaggcggagg

SEQ ID NO: 1221744 - RNA, 24 nt, Human
ucgggaggcugaggcaggagaauc

SEQ ID NO: 1221745 - RNA, 22 nt, Human
ucuacaaucauaaccuaggaaa

SEQ ID NO: 1221746 - RNA, 21 nt, Human
ucuacacucucuugucucugc

SEQ ID NO: 1221747 - RNA, 24 nt, Human
ucucacuauguucgccaggcuggu

SEQ ID NO: 1221748 - RNA, 25 nt, Human
ucucacucccaucacccaggcugga

SEQ ID NO: 1221749 - RNA, 19 nt, Human
ucucccaucucagcccagc

SEQ ID NO: 1221750 - RNA, 21 nt, Human
ucucuacuaaaaacacaaaaa

SEQ ID NO: 1221751 - RNA, 21 nt, Human
ucucuacuaaaaguacaaaaa

SEQ ID NO: 1221752 - RNA, 24 nt, Human
ucugcacacagggagagacccacc

SEQ ID NO: 1221753 - RNA, 21 nt, Human
ucugcccgccucagccuccca

SEQ ID NO: 1221754 - RNA, 23 nt, Human
ucuugaacuccugagcucaagug

SEQ ID NO: 1221755 - RNA, 19 nt, Human
ucuuucucuuugucuccuc

SEQ ID NO: 1221756 - RNA, 24 nt, Human
ugaaaaguagaaaaaagcuaugaa

SEQ ID NO: 1221757 - RNA, 19 nt, Human
ugaaaccccaucucuacua

SEQ ID NO: 1221758 - RNA, 21 nt, Human
ugaaaguacuaaaagucucug

SEQ ID NO: 1221759 - RNA, 18 nt, Human
ugaccaacauggugaaac

SEQ ID NO: 1221760 - RNA, 21 nt, Human
ugacguccucauagaugcccu

SEQ ID NO: 1221761 - RNA, 25 nt, Human
ugacucacacucuuuacccugcccc

SEQ ID NO: 1221762 - RNA, 19 nt, Human
ugagauuucuguguguguc

SEQ ID NO: 1221763 - RNA, 22 nt, Human
ugagccgagauccugccacugc

SEQ ID NO: 1221764 - RNA, 18 nt, Human
ugagcucaagugaucugc

SEQ ID NO: 1221765 - RNA, 24 nt, Human
ugaggcaagagaccgaggacauga

SEQ ID NO: 1221766 - RNA, 20 nt, Human
ugaggcaggagaaucgcuug

SEQ ID NO: 1221767 - RNA, 24 nt, Human
ugaggcaggagaaucgcuugaacc

SEQ ID NO: 1221768 - RNA, 25 nt, Human
ugaggcaggagaaucgcuugaaccc

SEQ ID NO: 1221769 - RNA, 21 nt, Human
ugaggugggcggaucaugagg

SEQ ID NO: 1221770 - RNA, 24 nt, Human
ugaggugggcggaucaugagguca

SEQ ID NO: 1221771 - RNA, 23 nt, Human
ugaggugggcggaucaugagguu

SEQ ID NO: 1221772 - RNA, 21 nt, Human
ugcagcaagcacccccggaug

SEQ ID NO: 1221773 - RNA, 25 nt, Human
ugccucagcugccaggcagggaggg

SEQ ID NO: 1221774 - RNA, 23 nt, Human
ugccugaaaucucagcuacucgg

SEQ ID NO: 1221775 - RNA, 24 nt, Human
ugccugaaaucucagcuacucggg

SEQ ID NO: 1221776 - RNA, 19 nt, Human
ugccugggacaagccccuc

SEQ ID NO: 1221777 - RNA, 21 nt, Human
ugcugggauuacaggugugca

SEQ ID NO: 1221778 - RNA, 21 nt, Human
uggagggaaauagguggaaag

SEQ ID NO: 1221779 - RNA, 18 nt, Human
uggagugcaguggugcaa

SEQ ID NO: 1221780 - RNA, 19 nt, Human
uggagugcaguggugcaau

SEQ ID NO: 1221781 - RNA, 21 nt, Human
uggagugcaguggugcaauca

SEQ ID NO: 1221782 - RNA, 20 nt, Human
uggcacauccguuuuggccc

SEQ ID NO: 1221783 - RNA, 24 nt, Human
uggccaacauggugaaaccccauc

SEQ ID NO: 1221784 - RNA, 18 nt, Human
uggcucaagcaauccacc

SEQ ID NO: 1221785 - RNA, 21 nt, Human
uggcucacaccuguaauccca

SEQ ID NO: 1221786 - RNA, 22 nt, Human
uggcucacaccuguaaucccag

SEQ ID NO: 1221787 - RNA, 24 nt, Human
uggcucacaccuguaaucccagca

SEQ ID NO: 1221788 - RNA, 22 nt, Human
uggcucaugccuguaaucccag

SEQ ID NO: 1221789 - RNA, 24 nt, Human
uggcucaugccuguaaucccagca

SEQ ID NO: 1221790 - RNA, 22 nt, Human
uggcuggaucugggcaccagag

SEQ ID NO: 1221791 - RNA, 19 nt, Human
ugggaagaugccuguugcc

SEQ ID NO: 1221792 - RNA, 24 nt, Human
ugggaggcugaggggggcagauca

SEQ ID NO: 1221793 - RNA, 18 nt, Human
ugggaugacaggcgugag

SEQ ID NO: 1221794 - RNA, 19 nt, Human
ugggaugacaggcgugagc

SEQ ID NO: 1221795 - RNA, 22 nt, Human
ugggaugacaggcgugagccac

SEQ ID NO: 1221796 - RNA, 23 nt, Human
ugggaugacaggcgugagccacc

SEQ ID NO: 1221797 - RNA, 24 nt, Human
ugggaugacaggcgugagccacca

SEQ ID NO: 1221798 - RNA, 19 nt, Human
ugggauuacaggugugcac

SEQ ID NO: 1221799 - RNA, 21 nt, Human
ugggauuacaggugugcacug

SEQ ID NO: 1221800 - RNA, 22 nt, Human
ugggauuacaggugugcacuga

SEQ ID NO: 1221801 - RNA, 22 nt, Human
ugggauuacaggugugcacugc

SEQ ID NO: 1221802 - RNA, 24 nt, Human
ugggauuacaggugugcacugcca

SEQ ID NO: 1221803 - RNA, 24 nt, Human
ugggcagaguggcuggaucugggc

SEQ ID NO: 1221804 - RNA, 24 nt, Human
ugggcagcauagcgagaccuuguc

SEQ ID NO: 1221805 - RNA, 21 nt, Human
ugggccugauuagcugugggg

SEQ ID NO: 1221806 - RNA, 19 nt, Human
ugggugaagauucagcucc

SEQ ID NO: 1221807 - RNA, 19 nt, Human
ugguggcgggugccugaaa

SEQ ID NO: 1221808 - RNA, 24 nt, Human
ugguggcucacaccuguaauccca

SEQ ID NO: 1221809 - RNA, 24 nt, Human
uguagagaugaggucucacuaugu

SEQ ID NO: 1221810 - RNA, 20 nt, Human
ugucaaggaaaaacaccggc

SEQ ID NO: 1221811 - RNA, 24 nt, Human
ugucucagccucccaaagugcugg

SEQ ID NO: 1221812 - RNA, 24 nt, Human
ugugaaagucccucugcaagcugg

SEQ ID NO: 1221813 - RNA, 24 nt, Human
ugugucuuuauuucuacacucucu

SEQ ID NO: 1221814 - RNA, 24 nt, Human
uuagcagaugacuuugcuggcaag

SEQ ID NO: 1221815 - RNA, 18 nt, Human
uuagcugggcgugguggc

SEQ ID NO: 1221816 - RNA, 24 nt, Human
uuaggccacgugugguggcucaca

SEQ ID NO: 1221817 - RNA, 18 nt, Human
uuauuuauuuauuuauuu

SEQ ID NO: 1221818 - RNA, 19 nt, Human
uuauuuauuuauuuauuua

SEQ ID NO: 1221819 - RNA, 19 nt, Human
uuauuuauuuauuuauuua

SEQ ID NO: 1221820 - RNA, 19 nt, Human
uuauuuauuuauuuauuua

SEQ ID NO: 1221821 - RNA, 19 nt, Human
uuauuuauuuauuuauuua

SEQ ID NO: 1221822 - RNA, 25 nt, Human
uuauuuauuuauuuauuuauuuauu

SEQ ID NO: 1221823 - RNA, 25 nt, Human
uuauuuauuuauuuauuuauuuauu

SEQ ID NO: 1221824 - RNA, 25 nt, Human
uuauuuauuuauuuauuuauuuauu

SEQ ID NO: 1221825 - RNA, 25 nt, Human
uuauuuauuuauuuauuuauuuauu

SEQ ID NO: 1221826 - RNA, 25 nt, Human
uuauuuauuuauuuauuuauuuauu

SEQ ID NO: 1221827 - RNA, 19 nt, Human
uuauuuauuuauuuauuuu

SEQ ID NO: 1221828 - RNA, 24 nt, Human
uuauuuuauuuuuuaguagagaca

SEQ ID NO: 1221829 - RNA, 24 nt, Human
uucagcuccggaauguuccuggag

SEQ ID NO: 1221830 - RNA, 25 nt, Human
uucccaggcucagguaaaucuccca

SEQ ID NO: 1221831 - RNA, 24 nt, Human
uugaacccgggaggcggagguugc

SEQ ID NO: 1221832 - RNA, 22 nt, Human
uugcagggguuacaaaagccua

SEQ ID NO: 1221833 - RNA, 19 nt, Human
uugcagugagccgagaucc

SEQ ID NO: 1221834 - RNA, 21 nt, Human
uugcagugagccgagaucccc

SEQ ID NO: 1221835 - RNA, 21 nt, Human
uugcagugagccgagauccug

SEQ ID NO: 1221836 - RNA, 22 nt, Human
uugcagugagccgagauccugc

SEQ ID NO: 1221837 - RNA, 23 nt, Human
uugcccacaguuauccagagacc

SEQ ID NO: 1221838 - RNA, 20 nt, Human
uugcuugaguccaggaguuu

SEQ ID NO: 1221839 - RNA, 21 nt, Human
uugcuugaguccaggaguuug

SEQ ID NO: 1221840 - RNA, 25 nt, Human
uugggaggcugaggggggcagauca

SEQ ID NO: 1221841 - RNA, 23 nt, Human
uuuauuuauuuauuuauuuauuu

SEQ ID NO: 1221842 - RNA, 18 nt, Human
uuugguuggcugaggugg

SEQ ID NO: 1221843 - RNA, 19 nt, Human
uuuuauuuuuuaguagaga

SEQ ID NO: 1221844 - RNA, 20 nt, Human
uuuuguauuuuuuguagaga

SEQ ID NO: 1221845 - RNA, 18 nt, Human
uuuuuuaguagagacagg

SEQ ID NO: 1221846 - RNA, 24 nt, Human
uuuuuuaguagagacagguuucac

SEQ ID NO: 1221847 - RNA, 19 nt, Human
aaaaggcuuugaccccaaa

SEQ ID NO: 1221848 - RNA, 18 nt, Human
agacuuggagggaaagug

SEQ ID NO: 1221849 - RNA, 23 nt, Human
ccagcgacaugguccucaccgag

SEQ ID NO: 1221850 - RNA, 22 nt, Human
cccaugcagacugcaugggcca

SEQ ID NO: 1221851 - RNA, 20 nt, Human
gcggccucugagaugcucgg

SEQ ID NO: 1221852 - RNA, 22 nt, Human
gggcaggucaugugcggccucu

SEQ ID NO: 1221853 - RNA, 24 nt, Human
uacauuuguguaacuuucccaaaa

SEQ ID NO: 1221854 - RNA, 19 nt, Human
ucagucucucuguguccau

SEQ ID NO: 1221855 - RNA, 21 nt, Human
ucccaugcagacugcaugggc

SEQ ID NO: 1221856 - RNA, 22 nt, Human
uccucaccgagggccccgggca

SEQ ID NO: 1221857 - RNA, 21 nt, Human
ugaagacuuggagggaaagug

SEQ ID NO: 1221858 - RNA, 18 nt, Human
ugaaguagagaaaucauu

SEQ ID NO: 1221859 - RNA, 21 nt, Human
uguggacuuuuucaugcgucu

SEQ ID NO: 1221860 - RNA, 24 nt, Human
uguucuacauuuguguaacuuucc

SEQ ID NO: 1221861 - RNA, 23 nt, Human
uuuuucaugcgucucucagucuc

SEQ ID NO: 1221862 - RNA, 24 nt, Human
aaaaggccggaguacguguagaug

SEQ ID NO: 1221863 - RNA, 23 nt, Human
aagcugcuuguacggguugauga

SEQ ID NO: 1221864 - RNA, 26 nt, Human
accuucuccagcugcagcuucugccg

SEQ ID NO: 1221865 - RNA, 18 nt, Human
agagcugucccacugucc

SEQ ID NO: 1221866 - RNA, 23 nt, Human
agaugcggaugcccuccaggacc

SEQ ID NO: 1221867 - RNA, 22 nt, Human
agauguggaagcugcacucguc

SEQ ID NO: 1221868 - RNA, 19 nt, Human
agcugguccagcaccagcc

SEQ ID NO: 1221869 - RNA, 23 nt, Human
aggucgaggccaaagucgaggaa

SEQ ID NO: 1221870 - RNA, 21 nt, Human
auccgucacccccagucccaa

SEQ ID NO: 1221871 - RNA, 23 nt, Human
augaggucgaugcagggcugcag

SEQ ID NO: 1221872 - RNA, 19 nt, Human
caaaacugggguugguguu

SEQ ID NO: 1221873 - RNA, 19 nt, Human
caccagccguggcuccagc

SEQ ID NO: 1221874 - RNA, 19 nt, Human
caccugcagcaguggcuuc

SEQ ID NO: 1221875 - RNA, 20 nt, Human
cacgcgguagagguuggggu

SEQ ID NO: 1221876 - RNA, 19 nt, Human
cacugcguacacguggggu

SEQ ID NO: 1221877 - RNA, 21 nt, Human
cacuguccggaacauaccccg

SEQ ID NO: 1221878 - RNA, 20 nt, Human
cagcaguggcuucaccuugg

SEQ ID NO: 1221879 - RNA, 21 nt, Human
cagcucaccggggacacccgg

SEQ ID NO: 1221880 - RNA, 19 nt, Human
cagcugcagcuucugccgc

SEQ ID NO: 1221881 - RNA, 23 nt, Human
caggaccccagcccggaagaaga

SEQ ID NO: 1221882 - RNA, 18 nt, Human
caggacccgcagcgacuc

SEQ ID NO: 1221883 - RNA, 21 nt, Human
cagggccaggaguccaggggg

SEQ ID NO: 1221884 - RNA, 24 nt, Human
cagucgcagccgccucccgcucuc

SEQ ID NO: 1221885 - RNA, 26 nt, Human
cauggugugguugaagagcugcugca

SEQ ID NO: 1221886 - RNA, 20 nt, Human
cauucagaggguccauguuu

SEQ ID NO: 1221887 - RNA, 19 nt, Human
cauucuucacugucuuggc

SEQ ID NO: 1221888 - RNA, 20 nt, Human
ccaaacuggagaacugcuga

SEQ ID NO: 1221889 - RNA, 18 nt, Human
ccacacagaaaaggccgg

SEQ ID NO: 1221890 - RNA, 23 nt, Human
ccagcuucccggcccucuucucg

SEQ ID NO: 1221891 - RNA, 20 nt, Human
ccaggaccccguugcagcga

SEQ ID NO: 1221892 - RNA, 20 nt, Human
cccacuguccggaacauacc

SEQ ID NO: 1221893 - RNA, 18 nt, Human
cccccagucccaagaggc

SEQ ID NO: 1221894 - RNA, 20 nt, Human
cccgcagcgacuccagcguc

SEQ ID NO: 1221895 - RNA, 23 nt, Human
cccgcaggugccucggccgcugg

SEQ ID NO: 1221896 - RNA, 26 nt, Human
cccgcgauguccaggaugcccaggaa

SEQ ID NO: 1221897 - RNA, 19 nt, Human
cccgcggcagucgcagccg

SEQ ID NO: 1221898 - RNA, 24 nt, Human
ccuccaggaccccguugcagcgaa

SEQ ID NO: 1221899 - RNA, 19 nt, Human
ccuccugcuccagcacgaa

SEQ ID NO: 1221900 - RNA, 19 nt, Human
ccucguggcugaaucccag

SEQ ID NO: 1221901 - RNA, 22 nt, Human
ccucguggcugaaucccaggac

SEQ ID NO: 1221902 - RNA, 21 nt, Human
ccucuaggaugggguuggccu

SEQ ID NO: 1221903 - RNA, 18 nt, Human
ccucuuccagcugggccg

SEQ ID NO: 1221904 - RNA, 22 nt, Human
cgaggaagguccaggggaugcc

SEQ ID NO: 1221905 - RNA, 22 nt, Human
cggaagaagaucuugcucuguc

SEQ ID NO: 1221906 - RNA, 20 nt, Human
cggcagucgcagccgccucc

SEQ ID NO: 1221907 - RNA, 22 nt, Human
cggcagucgcagccgccucccu

SEQ ID NO: 1221908 - RNA, 18 nt, Human
cggccauguccucggccu

SEQ ID NO: 1221909 - RNA, 22 nt, Human
cucaccggggacacccggcucc

SEQ ID NO: 1221910 - RNA, 20 nt, Human
cuccagcgccccccagcagc

SEQ ID NO: 1221911 - RNA, 21 nt, Human
cuccagcgccccccagcagcu

SEQ ID NO: 1221912 - RNA, 19 nt, Human
cucccggagguugugcagg

SEQ ID NO: 1221913 - RNA, 23 nt, Human
cuccgccagcuccaccuccgccu

SEQ ID NO: 1221914 - RNA, 21 nt, Human
cuccucuuccagcugggccag

SEQ ID NO: 1221915 - RNA, 20 nt, Human
cucgcuccucuuccagcugg

SEQ ID NO: 1221916 - RNA, 24 nt, Human
cucgcuccucuuccagcugggcca

SEQ ID NO: 1221917 - RNA, 23 nt, Human
cucggccgcuggaacuuggggug

SEQ ID NO: 1221918 - RNA, 24 nt, Human
cugcagcaguggcuucaccuuggu

SEQ ID NO: 1221919 - RNA, 24 nt, Human
cugcagcaugcuccgauaggcccc

SEQ ID NO: 1221920 - RNA, 18 nt, Human
cugccgcgcacccuccuc

SEQ ID NO: 1221921 - RNA, 24 nt, Human
cuguuccuuagucugggcuuucug

SEQ ID NO: 1221922 - RNA, 21 nt, Human
cuucuccagcugcagcuucug

SEQ ID NO: 1221923 - RNA, 19 nt, Human
cuucugccgcgcacccucc

SEQ ID NO: 1221924 - RNA, 20 nt, Human
cuuggcgggggcugcggucc

SEQ ID NO: 1221925 - RNA, 22 nt, Human
cuugguaaacagccgccaccac

SEQ ID NO: 1221926 - RNA, 23 nt, Human
cuugucuguggccuucgggaacc

SEQ ID NO: 1221927 - RNA, 18 nt, Human
gaacugcugagaccaucc

SEQ ID NO: 1221928 - RNA, 19 nt, Human
gacagaugcggaugcccuc

SEQ ID NO: 1221929 - RNA, 24 nt, Human
gagcugcugcagcuucucguuggu

SEQ ID NO: 1221930 - RNA, 18 nt, Human
gaggaugcgguuggggaa

SEQ ID NO: 1221931 - RNA, 24 nt, Human
gagguacuggaugaccuucuuggu

SEQ ID NO: 1221932 - RNA, 18 nt, Human
gauccugcagcaugcucc

SEQ ID NO: 1221933 - RNA, 20 nt, Human
gaucuugcucugucccacgc

SEQ ID NO: 1221934 - RNA, 19 nt, Human
gccagggccuccagcgcga

SEQ ID NO: 1221935 - RNA, 20 nt, Human
gccagguauccccgggcagc

SEQ ID NO: 1221936 - RNA, 21 nt, Human
gcgacagaugcggaugcccuc

SEQ ID NO: 1221937 - RNA, 22 nt, Human
ggaacuugggguggccgcccug

SEQ ID NO: 1221938 - RNA, 26 nt, Human
ggaacuugggguggccgcccugcucc

SEQ ID NO: 1221939 - RNA, 24 nt, Human
ggaugaccuucuugguguuuuccg

SEQ ID NO: 1221940 - RNA, 19 nt, Human
ggccuuggccagggccucc

SEQ ID NO: 1221941 - RNA, 19 nt, Human
ggccuuggccagggccucc

SEQ ID NO: 1221942 - RNA, 20 nt, Human
gggccaggaguccagggggg

SEQ ID NO: 1221943 - RNA, 24 nt, Human
gguagugggagcagggcucgagga

SEQ ID NO: 1221944 - RNA, 21 nt, Human
ggugagcaaggcucgggagaa

SEQ ID NO: 1221945 - RNA, 18 nt, Human
guaggucucaauguuggc

SEQ ID NO: 1221946 - RNA, 18 nt, Human
gucggcuuugagcugcuc

SEQ ID NO: 1221947 - RNA, 21 nt, Human
gugagcaaggcucgggagaaa

SEQ ID NO: 1221948 - RNA, 18 nt, Human
uacaucuccacaauggcu

SEQ ID NO: 1221949 - RNA, 18 nt, Human
uacuggaugaccuucuug

SEQ ID NO: 1221950 - RNA, 21 nt, Human
uccaggaugcccaggaaggag

SEQ ID NO: 1221951 - RNA, 21 nt, Human
ucccaggacccgcagcgacuc

SEQ ID NO: 1221952 - RNA, 19 nt, Human
uccucgccuucgucccgca

SEQ ID NO: 1221953 - RNA, 19 nt, Human
ucgaggccaaagucgagga

SEQ ID NO: 1221954 - RNA, 19 nt, Human
ucuccgccagcuccaccuc

SEQ ID NO: 1221955 - RNA, 19 nt, Human
ucucgcuccucuuccagcu

SEQ ID NO: 1221956 - RNA, 20 nt, Human
ucucugccgucagccggucu

SEQ ID NO: 1221957 - RNA, 18 nt, Human
ucuugcucugucccacgc

SEQ ID NO: 1221958 - RNA, 21 nt, Human
ugagaccauccgcagcaugga

SEQ ID NO: 1221959 - RNA, 21 nt, Human
ugagaccauccgcagcaugga

SEQ ID NO: 1221960 - RNA, 26 nt, Human
ugagcaaggcucgggagaaauccguc

SEQ ID NO: 1221961 - RNA, 18 nt, Human
ugaggcgcagaaccagcc

SEQ ID NO: 1221962 - RNA, 21 nt, Human
ugagguaggccgcgcaguucc

SEQ ID NO: 1221963 - RNA, 24 nt, Human
ugaggucgaugcagggcugcaggu

SEQ ID NO: 1221964 - RNA, 20 nt, Human
ugaugucggugaccuucagg

SEQ ID NO: 1221965 - RNA, 23 nt, Human
ugcagcaguggcuucaccuuggu

SEQ ID NO: 1221966 - RNA, 22 nt, Human
ugcaggaccgaggccucguuga

SEQ ID NO: 1221967 - RNA, 23 nt, Human
ugccaaaggccucuaggaugggg

SEQ ID NO: 1221968 - RNA, 21 nt, Human
ugccccgguacaucuccacaa

SEQ ID NO: 1221969 - RNA, 18 nt, Human
ugccgcgcacccuccuca

SEQ ID NO: 1221970 - RNA, 19 nt, Human
ugccgucagccggucugug

SEQ ID NO: 1221971 - RNA, 22 nt, Human
ugcucugguggagcaaggcugc

SEQ ID NO: 1221972 - RNA, 21 nt, Human
ugcugcugcuggcgcuucugg

SEQ ID NO: 1221973 - RNA, 27 nt, Human
uggaagaucucaaagcccgcgaugucc

SEQ ID NO: 1221974 - RNA, 23 nt, Human
uggaagcugcacucguccuuggc

SEQ ID NO: 1221975 - RNA, 23 nt, Human
uggacugguccucacgauccugc

SEQ ID NO: 1221976 - RNA, 23 nt, Human
uggagaacacugaagucggccug

SEQ ID NO: 1221977 - RNA, 25 nt, Human
uggccagggccuccagcgcgaaguc

SEQ ID NO: 1221978 - RNA, 20 nt, Human
ugggaagcugcuuguacggg

SEQ ID NO: 1221979 - RNA, 19 nt, Human
uggggacaaugcagcggac

SEQ ID NO: 1221980 - RNA, 21 nt, Human
ugggguccaguuccagcgccu

SEQ ID NO: 1221981 - RNA, 20 nt, Human
ugguguaguugaugcagagc

SEQ ID NO: 1221982 - RNA, 24 nt, Human
uggugugguugaagagcugcugca

SEQ ID NO: 1221983 - RNA, 18 nt, Human
uuccgucuucccagcucc

SEQ ID NO: 1221984 - RNA, 22 nt, Human
uucuccacaaacgacuugucug

SEQ ID NO: 1221985 - RNA, 18 nt, Human
uuggccugaagcagcugc

SEQ ID NO: 1221986 - RNA, 24 nt, Human
uuuucaucagccacucguuggccu

SEQ ID NO: 1221987 - RNA, 19 nt, Human
cagccccacccucacccug

SEQ ID NO: 1221988 - RNA, 21 nt, Human
cagguggacuuaauccuccuc

SEQ ID NO: 1221989 - RNA, 19 nt, Human
ccucacccuggcccuucuu

SEQ ID NO: 1221990 - RNA, 22 nt, Human
ccucacccuggcccuucuuggc

SEQ ID NO: 1221991 - RNA, 25 nt, Human
cuccagccccacccucacccuggcc

SEQ ID NO: 1221992 - RNA, 22 nt, Human
gacagguggacuuaauccuccu

SEQ ID NO: 1221993 - RNA, 18 nt, Human
gcagcccaggagggacag

SEQ ID NO: 1221994 - RNA, 22 nt, Human
gcuccgcuuccccgucugcgcc

SEQ ID NO: 1221995 - RNA, 21 nt, Human
ggacagguggacuuaauccuc

SEQ ID NO: 1221996 - RNA, 19 nt, Human
ggacuuaauccuccuccuc

SEQ ID NO: 1221997 - RNA, 23 nt, Human
ggcaggaaaacgagacaauccag

SEQ ID NO: 1221998 - RNA, 19 nt, Human
uccagccccacccucaccc

SEQ ID NO: 1221999 - RNA, 21 nt, Human
ucuccagccccacccucaccc

SEQ ID NO: 1222000 - RNA, 21 nt, Human
ucuccagccccacccucaccc

SEQ ID NO: 1222001 - RNA, 21 nt, Human
aaaaggccgaggugucaggca

SEQ ID NO: 1222002 - RNA, 23 nt, Human
aaacacacugaggagcgccccuc

SEQ ID NO: 1222003 - RNA, 24 nt, Human
aagcguggggaaauggggcggggc

SEQ ID NO: 1222004 - RNA, 31 nt, Human
acacugaggagcgccccuccggaagagaaag

SEQ ID NO: 1222005 - RNA, 21 nt, Human
accccaaacacacugaggagc

SEQ ID NO: 1222006 - RNA, 18 nt, Human
agaggggcaggauucaac

SEQ ID NO: 1222007 - RNA, 22 nt, Human
aggggcaggauucaaacccggg

SEQ ID NO: 1222008 - RNA, 22 nt, Human
cacaugcggcccccuggagggc

SEQ ID NO: 1222009 - RNA, 22 nt, Human
caccacaccagaggggcaggau

SEQ ID NO: 1222010 - RNA, 22 nt, Human
caccagcugcugucuauccccc

SEQ ID NO: 1222011 - RNA, 18 nt, Human
cacccugucgggaagccg

SEQ ID NO: 1222012 - RNA, 22 nt, Human
cagcugcugucuaucccccuag

SEQ ID NO: 1222013 - RNA, 20 nt, Human
cccccuggagggcguggagc

SEQ ID NO: 1222014 - RNA, 18 nt, Human
ccccuggagggcguggag

SEQ ID NO: 1222015 - RNA, 22 nt, Human
cccuggagggcguggagcgagg

SEQ ID NO: 1222016 - RNA, 24 nt, Human
cgccggugagggcuccaguugcac

SEQ ID NO: 1222017 - RNA, 24 nt, Human
cggcggggaagcgcuggcucuggu

SEQ ID NO: 1222018 - RNA, 19 nt, Human
cucgccggugagggcucca

SEQ ID NO: 1222019 - RNA, 21 nt, Human
cuucaaagcguggggaaaugg

SEQ ID NO: 1222020 - RNA, 19 nt, Human
gcaagugcacaugcggccc

SEQ ID NO: 1222021 - RNA, 24 nt, Human
gcagggcgggucaggauccguggc

SEQ ID NO: 1222022 - RNA, 18 nt, Human
gccucugggugcagcucu

SEQ ID NO: 1222023 - RNA, 22 nt, Human
gcguggggaaauggggcggggc

SEQ ID NO: 1222024 - RNA, 22 nt, Human
ggaacacugaggccaaaagucu

SEQ ID NO: 1222025 - RNA, 22 nt, Human
ggcaagugcacaugcggccccc

SEQ ID NO: 1222026 - RNA, 21 nt, Human
gggagaccccaaacacacuga

SEQ ID NO: 1222027 - RNA, 18 nt, Human
gggcguggagcgagggag

SEQ ID NO: 1222028 - RNA, 21 nt, Human
guggggaaauggggcggggcc

SEQ ID NO: 1222029 - RNA, 19 nt, Human
ucccaggcggggaacacug

SEQ ID NO: 1222030 - RNA, 24 nt, Human
ucccaggcggggaacacugaggcc

SEQ ID NO: 1222031 - RNA, 23 nt, Human
ucccccuaggaggucuguggaga

SEQ ID NO: 1222032 - RNA, 18 nt, Human
ucuguggagacucgcccc

SEQ ID NO: 1222033 - RNA, 22 nt, Human
uggcccguaguugcggccaccc

SEQ ID NO: 1222034 - RNA, 27 nt, Human
ugggaagaggccgcaccacaccagagg

SEQ ID NO: 1222035 - RNA, 18 nt, Human
uggggaaauggggcgggg

SEQ ID NO: 1222036 - RNA, 21 nt, Human
uggggcggggccaaugacacc

SEQ ID NO: 1222037 - RNA, 23 nt, Human
uguguggggucacaccagcugcu

SEQ ID NO: 1222038 - RNA, 23 nt, Human
uuccaagaaaagggguggcggcg

SEQ ID NO: 1222039 - RNA, 21 nt, Human
uugggacccuggaaccucggg

SEQ ID NO: 1222040 - RNA, 19 nt, Human
cagccaggcuccagcugug

SEQ ID NO: 1222041 - RNA, 24 nt, Human
ccagauuuccaaguagcuuucucu

SEQ ID NO: 1222042 - RNA, 24 nt, Human
ccagugugggguggagccuucugg

SEQ ID NO: 1222043 - RNA, 24 nt, Human
ugggguggagccuucugggugugg

SEQ ID NO: 1222044 - RNA, 18 nt, Human
uuccuggcuugugagugc

SEQ ID NO: 1222045 - RNA, 19 nt, Human
uuucucuuccuggcuugug

SEQ ID NO: 1222046 - RNA, 23 nt, Human
aauugauggggcuacagaaagga

SEQ ID NO: 1222047 - RNA, 25 nt, Human
caauggguccuucgcccacuaauuc

SEQ ID NO: 1222048 - RNA, 21 nt, Human
ccuucgcccacuaauuccuuu

SEQ ID NO: 1222049 - RNA, 23 nt, Human
gaaaggcaagagagugaaggagg

SEQ ID NO: 1222050 - RNA, 21 nt, Human
ucuuccugagcuggaugauga

SEQ ID NO: 1222051 - RNA, 21 nt, Human
uggugcugcuccugguccagg

SEQ ID NO: 1222052 - RNA, 23 nt, Human
aagugauccaugaagacaucaac

SEQ ID NO: 1222053 - RNA, 18 nt, Human
acuuagccucuuccuauu

SEQ ID NO: 1222054 - RNA, 22 nt, Human
auuguuucuucuuuccagacuu

SEQ ID NO: 1222055 - RNA, 24 nt, Human
caagucuuucacuuagccucuucc

SEQ ID NO: 1222056 - RNA, 22 nt, Human
cagaagaaacucagugaaguca

SEQ ID NO: 1222057 - RNA, 19 nt, Human
ccaagugauccaugaagac

SEQ ID NO: 1222058 - RNA, 18 nt, Human
ccccuguuucucuugggc

SEQ ID NO: 1222059 - RNA, 19 nt, Human
cccuuauucccuuuucuau

SEQ ID NO: 1222060 - RNA, 19 nt, Human
ccgcgcccaguggcugagu

SEQ ID NO: 1222061 - RNA, 27 nt, Human
cgguaaauucucuuuucugguagacuc

SEQ ID NO: 1222062 - RNA, 22 nt, Human
cugauaucgguaaauucucuuu

SEQ ID NO: 1222063 - RNA, 22 nt, Human
cuuuucuuucuuuuuuuucaga

SEQ ID NO: 1222064 - RNA, 26 nt, Human
gaugguuuuuuccauauucuucuucu

SEQ ID NO: 1222065 - RNA, 23 nt, Human
gcccaguggcugagugucuggag

SEQ ID NO: 1222066 - RNA, 21 nt, Human
gcugacugcagaugaagcuug

SEQ ID NO: 1222067 - RNA, 18 nt, Human
gugcuuguguccugauau

SEQ ID NO: 1222068 - RNA, 19 nt, Human
guggcugagugucuggagc

SEQ ID NO: 1222069 - RNA, 22 nt, Human
uaaauucucuuuucugguagac

SEQ ID NO: 1222070 - RNA, 22 nt, Human
uaggugaauauccuuuucuuuc

SEQ ID NO: 1222071 - RNA, 23 nt, Human
uaucuucauguuuaucaugauga

SEQ ID NO: 1222072 - RNA, 18 nt, Human
uauucuucuucucuauga

SEQ ID NO: 1222073 - RNA, 18 nt, Human
ucagaacuagauucaugc

SEQ ID NO: 1222074 - RNA, 23 nt, Human
ucuucuuucucuucaagucuuuc

SEQ ID NO: 1222075 - RNA, 20 nt, Human
uuauuaucuucauguuuauc

SEQ ID NO: 1222076 - RNA, 19 nt, Human
uucauaaucauauacuccu

SEQ ID NO: 1222077 - RNA, 22 nt, Human
uugaguuaugaugguuuuuucc

SEQ ID NO: 1222078 - RNA, 24 nt, Human
uuuucagucuuguuuuucucuuuu

SEQ ID NO: 1222079 - RNA, 20 nt, Human
uuuuccccccuguuucucuu

SEQ ID NO: 1222080 - RNA, 21 nt, Human
uuuuuuccauauucuucuucu

SEQ ID NO: 1222081 - RNA, 18 nt, Human
acuuagccucuuccuauu

SEQ ID NO: 1222082 - RNA, 24 nt, Human
caagucuuucacuuagccucuucc

SEQ ID NO: 1222083 - RNA, 23 nt, Human
ucuucuuucucuucaagucuuuc

SEQ ID NO: 1222084 - RNA, 19 nt, Human
uucauaaucauauacuccu

SEQ ID NO: 1222085 - RNA, 22 nt, Human
accacuggguuucuccccucca

SEQ ID NO: 1222086 - RNA, 24 nt, Human
accacuggguuucuccccuccaaa

SEQ ID NO: 1222087 - RNA, 18 nt, Human
cacagcuccugcacagcc

SEQ ID NO: 1222088 - RNA, 20 nt, Human
caccaaaaacuuaacuguac

SEQ ID NO: 1222089 - RNA, 18 nt, Human
caccgucacagcucccgc

SEQ ID NO: 1222090 - RNA, 18 nt, Human
caccgucccccgccgggg

SEQ ID NO: 1222091 - RNA, 21 nt, Human
cagcuccugcacagccgguca

SEQ ID NO: 1222092 - RNA, 22 nt, Human
caucuggcugugcuucuggggc

SEQ ID NO: 1222093 - RNA, 21 nt, Human
ccagcccuccuaagcccuggg

SEQ ID NO: 1222094 - RNA, 23 nt, Human
ccuaagcccuggguguggcggga

SEQ ID NO: 1222095 - RNA, 22 nt, Human
cgagagcugccagaugaaacac

SEQ ID NO: 1222096 - RNA, 24 nt, Human
cgaggccccugcgucuugccagcc

SEQ ID NO: 1222097 - RNA, 22 nt, Human
cgucuugccagcccuccuaagc

SEQ ID NO: 1222098 - RNA, 25 nt, Human
gaacaaagagguggcaguaacaaga

SEQ ID NO: 1222099 - RNA, 26 nt, Human
gucaguuaaucuucucuccgaagcuc

SEQ ID NO: 1222100 - RNA, 20 nt, Human
uaacuacuggagagaacccu

SEQ ID NO: 1222101 - RNA, 25 nt, Human
uaacuguacccgucccuagugcaga

SEQ ID NO: 1222102 - RNA, 21 nt, Human
ucuccgaagcucuggacucau

SEQ ID NO: 1222103 - RNA, 19 nt, Human
ucuugccagcccuccuaag

SEQ ID NO: 1222104 - RNA, 22 nt, Human
ugagugcgagagcugccagaug

SEQ ID NO: 1222105 - RNA, 22 nt, Human
ugcgagagcugccagaugaaac

SEQ ID NO: 1222106 - RNA, 22 nt, Human
aaacugcugggauuauaggugg

SEQ ID NO: 1222107 - RNA, 24 nt, Human
aaacugcugggauuauagguggga

SEQ ID NO: 1222108 - RNA, 22 nt, Human
aaagcccaguaacaggccaaga

SEQ ID NO: 1222109 - RNA, 23 nt, Human
aaauauucaguuuccaccaaagc

SEQ ID NO: 1222110 - RNA, 20 nt, Human
aaaugaagaugaaggaauuu

SEQ ID NO: 1222111 - RNA, 22 nt, Human
aacacccucacagacacagcca

SEQ ID NO: 1222112 - RNA, 23 nt, Human
aagcaucccgcacgggacaaaga

SEQ ID NO: 1222113 - RNA, 22 nt, Human
aagcaucccuaucugccacuga

SEQ ID NO: 1222114 - RNA, 21 nt, Human
aaggaggaaauacucaugaca

SEQ ID NO: 1222115 - RNA, 19 nt, Human
aaucaaguugacacucagu

SEQ ID NO: 1222116 - RNA, 20 nt, Human
acaauaggaugucugcaagc

SEQ ID NO: 1222117 - RNA, 21 nt, Human
acacccucacagacacagcca

SEQ ID NO: 1222118 - RNA, 21 nt, Human
acaggccccacaccacuggac

SEQ ID NO: 1222119 - RNA, 21 nt, Human
accaauccccaacccaaacac

SEQ ID NO: 1222120 - RNA, 24 nt, Human
accagguagcuugcugaucacccc

SEQ ID NO: 1222121 - RNA, 24 nt, Human
acuagaaugaaaaaauacagucug

SEQ ID NO: 1222122 - RNA, 20 nt, Human
acugcaagcuccgccucccg

SEQ ID NO: 1222123 - RNA, 20 nt, Human
acugcaauugaagucaccac

SEQ ID NO: 1222124 - RNA, 18 nt, Human
acugcugggauuauaggu

SEQ ID NO: 1222125 - RNA, 25 nt, Human
agcaaaagaaggaggaaauacucau

SEQ ID NO: 1222126 - RNA, 23 nt, Human
agcagaacguaaugucgcgggaa

SEQ ID NO: 1222127 - RNA, 21 nt, Human
agcaugagcccacugccacuc

SEQ ID NO: 1222128 - RNA, 20 nt, Human
agccaccacacccagccaaa

SEQ ID NO: 1222129 - RNA, 23 nt, Human
agccuugccagcugaaggcaaau

SEQ ID NO: 1222130 - RNA, 21 nt, Human
agcugggacuacaggagcccg

SEQ ID NO: 1222131 - RNA, 18 nt, Human
aggcaaugcuguguggaa

SEQ ID NO: 1222132 - RNA, 25 nt, Human
aggcuggagugcaguggcgcgaucu

SEQ ID NO: 1222133 - RNA, 21 nt, Human
aggugggagccaccacaccca

SEQ ID NO: 1222134 - RNA, 18 nt, Human
aguagcugggacuacagg

SEQ ID NO: 1222135 - RNA, 25 nt, Human
aguagcugggacuacaggagcccgc

SEQ ID NO: 1222136 - RNA, 20 nt, Human
agugcaguggcgcgaucucg

SEQ ID NO: 1222137 - RNA, 23 nt, Human
agugcaguggcgcgaucucggcu

SEQ ID NO: 1222138 - RNA, 24 nt, Human
agugcaguggcgcgaucucggcuc

SEQ ID NO: 1222139 - RNA, 20 nt, Human
aucaccccaaggaauggggc

SEQ ID NO: 1222140 - RNA, 22 nt, Human
aucucaacaggccccacaccac

SEQ ID NO: 1222141 - RNA, 23 nt, Human
aucuccauaagccccuacuuuaa

SEQ ID NO: 1222142 - RNA, 19 nt, Human
augaugguggguaaggcau

SEQ ID NO: 1222143 - RNA, 20 nt, Human
auggcguuucgccguguuag

SEQ ID NO: 1222144 - RNA, 21 nt, Human
auggcguuucgccguguuagc

SEQ ID NO: 1222145 - RNA, 24 nt, Human
auggcguuucgccguguuagccag

SEQ ID NO: 1222146 - RNA, 24 nt, Human
augucugcaagcugaggagcaagg

SEQ ID NO: 1222147 - RNA, 24 nt, Human
auguugcugagcccaugcguaacc

SEQ ID NO: 1222148 - RNA, 23 nt, Human
auucuaucaauccagcuacuuca

SEQ ID NO: 1222149 - RNA, 22 nt, Human
caaacugcugggauuauaggug

SEQ ID NO: 1222150 - RNA, 24 nt, Human
caacaggccccacaccacuggacc

SEQ ID NO: 1222151 - RNA, 19 nt, Human
caagugcauacauucacaa

SEQ ID NO: 1222152 - RNA, 19 nt, Human
caaguucuugauggcagca

SEQ ID NO: 1222153 - RNA, 21 nt, Human
caauccccaacccaaacacua

SEQ ID NO: 1222154 - RNA, 22 nt, Human
caaucugagucucaaaacugaa

SEQ ID NO: 1222155 - RNA, 21 nt, Human
cacaauaggaugucugcaagc

SEQ ID NO: 1222156 - RNA, 25 nt, Human
cacaggccaaaugagaaaguugaac

SEQ ID NO: 1222157 - RNA, 21 nt, Human
caccaauccccaacccaaaca

SEQ ID NO: 1222158 - RNA, 22 nt, Human
caccaauccccaacccaaacac

SEQ ID NO: 1222159 - RNA, 24 nt, Human
caccaauccccaacccaaacacua

SEQ ID NO: 1222160 - RNA, 19 nt, Human
caccuauggcagccugcca

SEQ ID NO: 1222161 - RNA, 23 nt, Human
caccugaguugaagucuuaccac

SEQ ID NO: 1222162 - RNA, 22 nt, Human
cacucaguaguggcguagccag

SEQ ID NO: 1222163 - RNA, 22 nt, Human
cagggccuugcuccaaaauccu

SEQ ID NO: 1222164 - RNA, 22 nt, Human
caguagagauggcguuucgccg

SEQ ID NO: 1222165 - RNA, 24 nt, Human
caguagagauggcguuucgccgug

SEQ ID NO: 1222166 - RNA, 22 nt, Human
caguuuccaccaaagcccagua

SEQ ID NO: 1222167 - RNA, 19 nt, Human
cauucuauccacuugauua

SEQ ID NO: 1222168 - RNA, 21 nt, Human
ccaaacugcugggauuauagg

SEQ ID NO: 1222169 - RNA, 20 nt, Human
ccaacccaaacacuauuaca

SEQ ID NO: 1222170 - RNA, 24 nt, Human
ccacacccagccaaaauaaagaua

SEQ ID NO: 1222171 - RNA, 26 nt, Human
ccacacccagccaaaauaguggaccc

SEQ ID NO: 1222172 - RNA, 22 nt, Human
ccacucagagagguccauccac

SEQ ID NO: 1222173 - RNA, 20 nt, Human
ccacuugcacuuccaccccu

SEQ ID NO: 1222174 - RNA, 21 nt, Human
ccagcccugcaaaguauuguc

SEQ ID NO: 1222175 - RNA, 24 nt, Human
ccauauauuggaugcugauucaga

SEQ ID NO: 1222176 - RNA, 22 nt, Human
cccaagugggacagcagcuucc

SEQ ID NO: 1222177 - RNA, 24 nt, Human
cccacaauaggaugucugcaagcu

SEQ ID NO: 1222178 - RNA, 24 nt, Human
cccacaccacuggaccccuagaaa

SEQ ID NO: 1222179 - RNA, 18 nt, Human
ccccacaccacuggaccc

SEQ ID NO: 1222180 - RNA, 24 nt, Human
cccuggaaucaaugucagcucaga

SEQ ID NO: 1222181 - RNA, 23 nt, Human
ccgcccgccucagccucccaaac

SEQ ID NO: 1222182 - RNA, 20 nt, Human
ccugaccuggugauccgccc

SEQ ID NO: 1222183 - RNA, 23 nt, Human
ccugaguagcugggacuacagga

SEQ ID NO: 1222184 - RNA, 24 nt, Human
cgcccaggcuggagugcaguggcg

SEQ ID NO: 1222185 - RNA, 24 nt, Human
cgccguguuagccaggauggucuu

SEQ ID NO: 1222186 - RNA, 24 nt, Human
cgccucagccucccaaacugcugg

SEQ ID NO: 1222187 - RNA, 19 nt, Human
cgccucccggguucaugcc

SEQ ID NO: 1222188 - RNA, 24 nt, Human
cgcucugucgcccaggcuggagug

SEQ ID NO: 1222189 - RNA, 24 nt, Human
cuacugcuugucaacuugaaccca

SEQ ID NO: 1222190 - RNA, 21 nt, Human
cucaguguuggucucugcugc

SEQ ID NO: 1222191 - RNA, 21 nt, Human
cucccggguucaugccauucu

SEQ ID NO: 1222192 - RNA, 24 nt, Human
cuccugaccuggugauccgcccgc

SEQ ID NO: 1222193 - RNA, 22 nt, Human
cuccuuuucacauuuuucugcc

SEQ ID NO: 1222194 - RNA, 24 nt, Human
cucgcucugucgcccaggcuggag

SEQ ID NO: 1222195 - RNA, 23 nt, Human
cugccucagaauccugaguagcu

SEQ ID NO: 1222196 - RNA, 26 nt, Human
cugcuaaaugucuaugccaauugugc

SEQ ID NO: 1222197 - RNA, 18 nt, Human
cuggaggaccacaugacg

SEQ ID NO: 1222198 - RNA, 21 nt, Human
cuguugcagauccuucuucug

SEQ ID NO: 1222199 - RNA, 19 nt, Human
cuuacaauaauccacuguc

SEQ ID NO: 1222200 - RNA, 25 nt, Human
cuuuccuuuccaugauggaagaggu

SEQ ID NO: 1222201 - RNA, 25 nt, Human
cuuuuccagcccacugacucaaaua

SEQ ID NO: 1222202 - RNA, 25 nt, Human
gaaaagaaaucuaggucucugugaa

SEQ ID NO: 1222203 - RNA, 19 nt, Human
gaagauggcagggccuugc

SEQ ID NO: 1222204 - RNA, 21 nt, Human
gacaccucaaguaccagugga

SEQ ID NO: 1222205 - RNA, 24 nt, Human
gaccuggugauccgcccgccucag

SEQ ID NO: 1222206 - RNA, 21 nt, Human
gacugagugguauccacagaa

SEQ ID NO: 1222207 - RNA, 25 nt, Human
gagccaaucugagucucaaaacuga

SEQ ID NO: 1222208 - RNA, 24 nt, Human
gagcccacugccacucuucuuuag

SEQ ID NO: 1222209 - RNA, 18 nt, Human
gagcccgccaccaugccu

SEQ ID NO: 1222210 - RNA, 21 nt, Human
gaggcuaggccaaucucuccu

SEQ ID NO: 1222211 - RNA, 23 nt, Human
gaguagcugggacuacaggagcc

SEQ ID NO: 1222212 - RNA, 18 nt, Human
gauccaaucagcauaaug

SEQ ID NO: 1222213 - RNA, 25 nt, Human
gaugagagggguggcuggggaaaga

SEQ ID NO: 1222214 - RNA, 19 nt, Human
gcccaggcuggagugcagu

SEQ ID NO: 1222215 - RNA, 20 nt, Human
gcccaggcuggagugcagug

SEQ ID NO: 1222216 - RNA, 25 nt, Human
gccucccggguucaugccauucucc

SEQ ID NO: 1222217 - RNA, 24 nt, Human
gccuggcuaauuuuuuuguauuuu

SEQ ID NO: 1222218 - RNA, 24 nt, Human
gccuugcuccaaaauccuagaggc

SEQ ID NO: 1222219 - RNA, 25 nt, Human
gcucugucgcccaggcuggagugca

SEQ ID NO: 1222220 - RNA, 19 nt, Human
ggagaacuuugccccagcc

SEQ ID NO: 1222221 - RNA, 23 nt, Human
ggagagccaaucugagucucaaa

SEQ ID NO: 1222222 - RNA, 18 nt, Human
ggcaaugcuguguggaau

SEQ ID NO: 1222223 - RNA, 22 nt, Human
ggcguuucgccguguuagccag

SEQ ID NO: 1222224 - RNA, 23 nt, Human
ggcguuucgccguguuagccagg

SEQ ID NO: 1222225 - RNA, 22 nt, Human
gggagaaagauucacugcauaa

SEQ ID NO: 1222226 - RNA, 19 nt, Human
gggccuugcuccaaaaucc

SEQ ID NO: 1222227 - RNA, 23 nt, Human
ggguucugccagcugcuaaaugu

SEQ ID NO: 1222228 - RNA, 23 nt, Human
ggucugccuuuuccagcccacug

SEQ ID NO: 1222229 - RNA, 20 nt, Human
gguuuuuggccacucagaga

SEQ ID NO: 1222230 - RNA, 24 nt, Human
gugauccgcccgccucagccuccc

SEQ ID NO: 1222231 - RNA, 20 nt, Human
guggugccacuugcacuuuc

SEQ ID NO: 1222232 - RNA, 19 nt, Human
uaaaaggccagagaucucu

SEQ ID NO: 1222233 - RNA, 19 nt, Human
uaaaucuucugucacauga

SEQ ID NO: 1222234 - RNA, 18 nt, Human
uaaauguccuaccaauaa

SEQ ID NO: 1222235 - RNA, 24 nt, Human
uaaccuccaucccugccaccaugg

SEQ ID NO: 1222236 - RNA, 23 nt, Human
uacagaauuuauaauaaagacac

SEQ ID NO: 1222237 - RNA, 23 nt, Human
uaccagucagggagccaacacgg

SEQ ID NO: 1222238 - RNA, 21 nt, Human
uaggcaaacccauaucuggag

SEQ ID NO: 1222239 - RNA, 20 nt, Human
uauaauaaagacaccugagu

SEQ ID NO: 1222240 - RNA, 20 nt, Human
uauuuuguauccuucaaucc

SEQ ID NO: 1222241 - RNA, 21 nt, Human
uauuuuguauccuucaaucca

SEQ ID NO: 1222242 - RNA, 20 nt, Human
ucacauggucauagcugaug

SEQ ID NO: 1222243 - RNA, 18 nt, Human
ucacugcaagcuccgccu

SEQ ID NO: 1222244 - RNA, 19 nt, Human
ucacugcaagcuccgccuc

SEQ ID NO: 1222245 - RNA, 24 nt, Human
ucacugcaagcuccgccucccggg

SEQ ID NO: 1222246 - RNA, 19 nt, Human
ucaguaaugugguguccuu

SEQ ID NO: 1222247 - RNA, 22 nt, Human
ucaguagagauggcguuucgcc

SEQ ID NO: 1222248 - RNA, 24 nt, Human
ucaguagagauggcguuucgccgu

SEQ ID NO: 1222249 - RNA, 19 nt, Human
ucaguauuaaccaucacaa

SEQ ID NO: 1222250 - RNA, 23 nt, Human
ucauagcugaugacucuuuuucu

SEQ ID NO: 1222251 - RNA, 21 nt, Human
ucauucuaucaauccagcuac

SEQ ID NO: 1222252 - RNA, 21 nt, Human
uccacagcagccuggaccugu

SEQ ID NO: 1222253 - RNA, 19 nt, Human
uccacauuccucuuccuca

SEQ ID NO: 1222254 - RNA, 25 nt, Human
uccauaagccccuacuuuaacugga

SEQ ID NO: 1222255 - RNA, 23 nt, Human
ucccaaacugcugggauuauagg

SEQ ID NO: 1222256 - RNA, 24 nt, Human
ucccaaacugcugggauuauaggu

SEQ ID NO: 1222257 - RNA, 19 nt, Human
ucccgcacgggacaaagau

SEQ ID NO: 1222258 - RNA, 21 nt, Human
ucccggguucaugccauucuc

SEQ ID NO: 1222259 - RNA, 24 nt, Human
ucccggguucaugccauucuccug

SEQ ID NO: 1222260 - RNA, 21 nt, Human
uccgcccgccucagccuccca

SEQ ID NO: 1222261 - RNA, 19 nt, Human
uccuaccagucagggagcc

SEQ ID NO: 1222262 - RNA, 18 nt, Human
uccugaguagcugggacu

SEQ ID NO: 1222263 - RNA, 23 nt, Human
uccuuuggcaacacccucacaga

SEQ ID NO: 1222264 - RNA, 23 nt, Human
ucgagggcucaguguuggucucu

SEQ ID NO: 1222265 - RNA, 22 nt, Human
ucgcccaggcuggagugcagug

SEQ ID NO: 1222266 - RNA, 24 nt, Human
ucgccguguuagccaggauggucu

SEQ ID NO: 1222267 - RNA, 24 nt, Human
ucgcucugucgcccaggcuggagu

SEQ ID NO: 1222268 - RNA, 22 nt, Human
ucggaccugagcuaaaauucca

SEQ ID NO: 1222269 - RNA, 23 nt, Human
ucuccugagaucauacauaauau

SEQ ID NO: 1222270 - RNA, 21 nt, Human
ucuccugccucagaauccuga

SEQ ID NO: 1222271 - RNA, 19 nt, Human
ucucgcucugucgcccagg

SEQ ID NO: 1222272 - RNA, 23 nt, Human
ucucgcucugucgcccaggcugg

SEQ ID NO: 1222273 - RNA, 24 nt, Human
ucucgcucugucgcccaggcugga

SEQ ID NO: 1222274 - RNA, 26 nt, Human
ucucgcucugucgcccaggcuggagu

SEQ ID NO: 1222275 - RNA, 21 nt, Human
ucugcuggaucauauggccca

SEQ ID NO: 1222276 - RNA, 24 nt, Human
ucugucgcccaggcuggagugcag

SEQ ID NO: 1222277 - RNA, 23 nt, Human
ugaaaaaauacagucugaaagua

SEQ ID NO: 1222278 - RNA, 23 nt, Human
ugaagucaauaaaucuucuguca

SEQ ID NO: 1222279 - RNA, 18 nt, Human
ugaccuauaguaaguuau

SEQ ID NO: 1222280 - RNA, 23 nt, Human
ugaccuggugauccgcccgccuc

SEQ ID NO: 1222281 - RNA, 22 nt, Human
ugagacggagucucgcucuguc

SEQ ID NO: 1222282 - RNA, 23 nt, Human
ugagagggguggcuggggaaaga

SEQ ID NO: 1222283 - RNA, 21 nt, Human
ugaggaauguguugccucuaa

SEQ ID NO: 1222284 - RNA, 18 nt, Human
ugaggacaaaccucuuuc

SEQ ID NO: 1222285 - RNA, 23 nt, Human
ugaguagcugggacuacaggagc

SEQ ID NO: 1222286 - RNA, 19 nt, Human
ugauggugaguggugccac

SEQ ID NO: 1222287 - RNA, 19 nt, Human
ugauucagagcacacacgg

SEQ ID NO: 1222288 - RNA, 22 nt, Human
ugcaguggcgcgaucucggcuc

SEQ ID NO: 1222289 - RNA, 21 nt, Human
ugcauaaauugucaguaaugu

SEQ ID NO: 1222290 - RNA, 20 nt, Human
ugcauacauucacaaacaug

SEQ ID NO: 1222291 - RNA, 18 nt, Human
ugcauucuggcacugggg

SEQ ID NO: 1222292 - RNA, 22 nt, Human
ugccagcugaaggcaaauugcu

SEQ ID NO: 1222293 - RNA, 21 nt, Human
ugccucagaauccugaguagc

SEQ ID NO: 1222294 - RNA, 22 nt, Human
ugccucuaaaauccaaauaggc

SEQ ID NO: 1222295 - RNA, 21 nt, Human
uggaagagguccaauauaauc

SEQ ID NO: 1222296 - RNA, 19 nt, Human
uggagaaaaaggcauuugc

SEQ ID NO: 1222297 - RNA, 24 nt, Human
uggagucugauguucgagagcagg

SEQ ID NO: 1222298 - RNA, 23 nt, Human
uggagugcaguggcgcgaucucg

SEQ ID NO: 1222299 - RNA, 24 nt, Human
uggagugcaguggcgcgaucucgg

SEQ ID NO: 1222300 - RNA, 19 nt, Human
uggcaacacccucacagac

SEQ ID NO: 1222301 - RNA, 24 nt, Human
uggcaacacccucacagacacagc

SEQ ID NO: 1222302 - RNA, 21 nt, Human
uggcacauaaauguccuacca

SEQ ID NO: 1222303 - RNA, 19 nt, Human
uggcagaguacugcaugca

SEQ ID NO: 1222304 - RNA, 20 nt, Human
uggcccaagugggacagcag

SEQ ID NO: 1222305 - RNA, 24 nt, Human
uggcguuucgccguguuagccagg

SEQ ID NO: 1222306 - RNA, 22 nt, Human
ugggacuacaggagcccgccac

SEQ ID NO: 1222307 - RNA, 24 nt, Human
ugggacuacaggagcccgccacca

SEQ ID NO: 1222308 - RNA, 22 nt, Human
ugggagccaccacacccagcca

SEQ ID NO: 1222309 - RNA, 19 nt, Human
ugggauuauaggugggagc

SEQ ID NO: 1222310 - RNA, 21 nt, Human
ugggauuauaggugggagcca

SEQ ID NO: 1222311 - RNA, 22 nt, Human
ugggauuauaggugggagccac

SEQ ID NO: 1222312 - RNA, 24 nt, Human
ugggauuauaggugggagccacca

SEQ ID NO: 1222313 - RNA, 20 nt, Human
uggggcugaucaucgagggc

SEQ ID NO: 1222314 - RNA, 21 nt, Human
ugggucacuaggggugauggu

SEQ ID NO: 1222315 - RNA, 22 nt, Human
ugucugauccuuuccuuuuccc

SEQ ID NO: 1222316 - RNA, 18 nt, Human
uguugggcgaugagaggg

SEQ ID NO: 1222317 - RNA, 23 nt, Human
uguuugcuacuucuugcccacug

SEQ ID NO: 1222318 - RNA, 20 nt, Human
uuaaaugcugauaugaaguc

SEQ ID NO: 1222319 - RNA, 18 nt, Human
uuaacuuacacaaucaca

SEQ ID NO: 1222320 - RNA, 21 nt, Human
uucacauaauacaacuauccu

SEQ ID NO: 1222321 - RNA, 19 nt, Human
uucaugccauucuccugcc

SEQ ID NO: 1222322 - RNA, 23 nt, Human
uuccaccccuugauuccuggacc

SEQ ID NO: 1222323 - RNA, 21 nt, Human
uuccacgaguucacagauagu

SEQ ID NO: 1222324 - RNA, 26 nt, Human
uucucuggcacauaaauguccuacca

SEQ ID NO: 1222325 - RNA, 21 nt, Human
uucuugauggcagcacuaauc

SEQ ID NO: 1222326 - RNA, 21 nt, Human
uugccaagucaauggcugcau

SEQ ID NO: 1222327 - RNA, 22 nt, Human
uugcugagcccaugcguaaccu

SEQ ID NO: 1222328 - RNA, 22 nt, Human
uuucccauucucuggcacauaa

SEQ ID NO: 1222329 - RNA, 21 nt, Human
uuucgccguguuagccaggau

SEQ ID NO: 1222330 - RNA, 20 nt, Human
uuugcuugucugaaaaaggc

SEQ ID NO: 1222331 - RNA, 24 nt, Human
uuuucaguagagauggcguuucgc

SEQ ID NO: 1222332 - RNA, 19 nt, Human
uuuuuguuuguuuguuuuu

SEQ ID NO: 1222333 - RNA, 20 nt, Human
uuuuuguuuguuuguuuuuu

SEQ ID NO: 1222334 - RNA, 21 nt, Human
uuuuuuguauuuucaguagag

SEQ ID NO: 1222335 - RNA, 24 nt, Human
uuuuuuguauuuucaguagagaug

SEQ ID NO: 1222336 - RNA, 23 nt, Human
aaccuuacuggcuuaaaccagga

SEQ ID NO: 1222337 - RNA, 21 nt, Human
aagaggcccaggcagaagcug

SEQ ID NO: 1222338 - RNA, 22 nt, Human
aagcauaguaggaaccugcagc

SEQ ID NO: 1222339 - RNA, 23 nt, Human
acccagcccucucuuuguggcca

SEQ ID NO: 1222340 - RNA, 24 nt, Human
aggagggaggugcugcccugcagg

SEQ ID NO: 1222341 - RNA, 24 nt, Human
caagguucuacuugugaucucuca

SEQ ID NO: 1222342 - RNA, 23 nt, Human
ccagaaggacucuaguggcuggg

SEQ ID NO: 1222343 - RNA, 23 nt, Human
cccucucuuuguggccagcacgg

SEQ ID NO: 1222344 - RNA, 27 nt, Human
ccucuugaugagaagcauaguaggaac

SEQ ID NO: 1222345 - RNA, 22 nt, Human
ccuggucucaucuguaaggacu

SEQ ID NO: 1222346 - RNA, 22 nt, Human
cucccuggucucaucuguaagg

SEQ ID NO: 1222347 - RNA, 21 nt, Human
cugccacacuguccagucgua

SEQ ID NO: 1222348 - RNA, 19 nt, Human
gagaaugguguuugugucc

SEQ ID NO: 1222349 - RNA, 18 nt, Human
gaggcaggagggaggugc

SEQ ID NO: 1222350 - RNA, 21 nt, Human
gcacccagaaggacucuagug

SEQ ID NO: 1222351 - RNA, 18 nt, Human
gcuguugaccaacuuucc

SEQ ID NO: 1222352 - RNA, 20 nt, Human
ggacagggugguguggguuu

SEQ ID NO: 1222353 - RNA, 18 nt, Human
ggacauggagcaggcacc

SEQ ID NO: 1222354 - RNA, 22 nt, Human
ggacgugaagcaggcacccaga

SEQ ID NO: 1222355 - RNA, 25 nt, Human
ggcuucuuuuucauuuuuuuuuccu

SEQ ID NO: 1222356 - RNA, 18 nt, Human
gugaagcaggcacccaga

SEQ ID NO: 1222357 - RNA, 23 nt, Human
gugaagcaggcacccagaaggac

SEQ ID NO: 1222358 - RNA, 22 nt, Human
uaacaguuggucauucccaugg

SEQ ID NO: 1222359 - RNA, 24 nt, Human
uacaugucacaauuuucuuuguca

SEQ ID NO: 1222360 - RNA, 23 nt, Human
uaggguauucaauggcuucuuuu

SEQ ID NO: 1222361 - RNA, 21 nt, Human
ucccagagcaucucuccugcc

SEQ ID NO: 1222362 - RNA, 18 nt, Human
ucccugagaacggcgccc

SEQ ID NO: 1222363 - RNA, 23 nt, Human
ucccugagaacggcgcccagucc

SEQ ID NO: 1222364 - RNA, 20 nt, Human
ucguacucaucacugagauc

SEQ ID NO: 1222365 - RNA, 25 nt, Human
ucuccauguucuuuuuccuucagug

SEQ ID NO: 1222366 - RNA, 25 nt, Human
ucucucaugaucaucccucagaagu

SEQ ID NO: 1222367 - RNA, 24 nt, Human
ucuuuuucauuuuuuuuuccuuuu

SEQ ID NO: 1222368 - RNA, 18 nt, Human
ucuuuuuuuuuuuuuuuu

SEQ ID NO: 1222369 - RNA, 23 nt, Human
ucuuuuuuuuuuuuuuuuacuuu

SEQ ID NO: 1222370 - RNA, 25 nt, Human
ucuuuuuuuuuuuuuuuuacuuugg

SEQ ID NO: 1222371 - RNA, 22 nt, Human
ugaagcaggcacccagaaggac

SEQ ID NO: 1222372 - RNA, 23 nt, Human
ugaagcaggcacccagaaggacu

SEQ ID NO: 1222373 - RNA, 23 nt, Human
ugccacacuguccagucguacuc

SEQ ID NO: 1222374 - RNA, 24 nt, Human
ugcccaguccuggucccugagaac

SEQ ID NO: 1222375 - RNA, 20 nt, Human
uggcuggggacgugaagcag

SEQ ID NO: 1222376 - RNA, 18 nt, Human
uggcuuaaaccaggaauu

SEQ ID NO: 1222377 - RNA, 23 nt, Human
ugguuaagaacaaaaagugacaa

SEQ ID NO: 1222378 - RNA, 25 nt, Human
uguauacaauaugcuaacauauaca

SEQ ID NO: 1222379 - RNA, 24 nt, Human
ugucaagacacuggacaggguggu

SEQ ID NO: 1222380 - RNA, 18 nt, Human
ugucauucuccauguucu

SEQ ID NO: 1222381 - RNA, 23 nt, Human
uucauuuuuuuuuccuuuucuuu

SEQ ID NO: 1222382 - RNA, 23 nt, Human
uucuuugucaagacacuggacag

SEQ ID NO: 1222383 - RNA, 25 nt, Human
uucuuuuucauuuuuuuuuccuuuu

SEQ ID NO: 1222384 - RNA, 29 nt, Human
uuucuuuucuuuucuuuuuuuuuuuuuuu

SEQ ID NO: 1222385 - RNA, 18 nt, Human
uuuucaagguuuuaauua

SEQ ID NO: 1222386 - RNA, 22 nt, Human
uuuucuuuucuuuucuuuuuuu

SEQ ID NO: 1222387 - RNA, 22 nt, Human
aaaggaacuuaauugagcaaug

SEQ ID NO: 1222388 - RNA, 21 nt, Human
aacacugcucaccacacuaua

SEQ ID NO: 1222389 - RNA, 21 nt, Human
aagcuuagagaugcaggaacu

SEQ ID NO: 1222390 - RNA, 18 nt, Human
aaguagaaggugagcaag

SEQ ID NO: 1222391 - RNA, 24 nt, Human
agcgcacagccccagccacuccuc

SEQ ID NO: 1222392 - RNA, 19 nt, Human
aggagugagguccagaagc

SEQ ID NO: 1222393 - RNA, 21 nt, Human
aggcugcagcuggaccaggcc

SEQ ID NO: 1222394 - RNA, 22 nt, Human
agggaaugcaguggugcccaga

SEQ ID NO: 1222395 - RNA, 21 nt, Human
cacagccccagccacuccucc

SEQ ID NO: 1222396 - RNA, 22 nt, Human
cacuauaacuccggaggcccua

SEQ ID NO: 1222397 - RNA, 20 nt, Human
cacugcugccaucacagagc

SEQ ID NO: 1222398 - RNA, 22 nt, Human
cagagccccaaagaagggggag

SEQ ID NO: 1222399 - RNA, 21 nt, Human
cagcucagaggagaccugcag

SEQ ID NO: 1222400 - RNA, 19 nt, Human
cagcugugccugggagggc

SEQ ID NO: 1222401 - RNA, 21 nt, Human
cagcugugccugggagggcgg

SEQ ID NO: 1222402 - RNA, 21 nt, Human
caggucccgaguucuuguccu

SEQ ID NO: 1222403 - RNA, 18 nt, Human
ccaaagaaggugucacag

SEQ ID NO: 1222404 - RNA, 21 nt, Human
ccaggcaccggcacaggugcc

SEQ ID NO: 1222405 - RNA, 21 nt, Human
cccagccacuccuccccacag

SEQ ID NO: 1222406 - RNA, 23 nt, Human
cccccccguuccuggcucccacc

SEQ ID NO: 1222407 - RNA, 21 nt, Human
ccggaggcccuagcaguccug

SEQ ID NO: 1222408 - RNA, 19 nt, Human
ccugggagggcggggcucc

SEQ ID NO: 1222409 - RNA, 19 nt, Human
ccuucucucuucucuucuu

SEQ ID NO: 1222410 - RNA, 19 nt, Human
ccuugcaggugccuuucuu

SEQ ID NO: 1222411 - RNA, 18 nt, Human
cggaggcccuagcagucc

SEQ ID NO: 1222412 - RNA, 20 nt, Human
cugcugccaucacagagcag

SEQ ID NO: 1222413 - RNA, 20 nt, Human
cuuguccugaguccaggaag

SEQ ID NO: 1222414 - RNA, 23 nt, Human
gagcaguccuugcaggugccuuu

SEQ ID NO: 1222415 - RNA, 22 nt, Human
gagcuccuaggucugggcuccc

SEQ ID NO: 1222416 - RNA, 20 nt, Human
gcacagccccagccacuccu

SEQ ID NO: 1222417 - RNA, 20 nt, Human
gcacaggugccagcucccug

SEQ ID NO: 1222418 - RNA, 26 nt, Human
gcagagccccaaagaagggggaacgc

SEQ ID NO: 1222419 - RNA, 23 nt, Human
gcucccugaagggccacagcucu

SEQ ID NO: 1222420 - RNA, 23 nt, Human
gcugcagcuggaccaggccgacu

SEQ ID NO: 1222421 - RNA, 20 nt, Human
gcugcagcugugccugggag

SEQ ID NO: 1222422 - RNA, 19 nt, Human
ggcuggauggcugcagcug

SEQ ID NO: 1222423 - RNA, 20 nt, Human
gggagcuccuaggucugggc

SEQ ID NO: 1222424 - RNA, 22 nt, Human
ggguaucagggaaugcaguggu

SEQ ID NO: 1222425 - RNA, 18 nt, Human
ggguggggcucccccccg

SEQ ID NO: 1222426 - RNA, 19 nt, Human
ggucugggcucccugaagg

SEQ ID NO: 1222427 - RNA, 24 nt, Human
uacagcucagaggagaccugcagu

SEQ ID NO: 1222428 - RNA, 21 nt, Human
uagcugugcacacgaugccca

SEQ ID NO: 1222429 - RNA, 20 nt, Human
uccccacagcagccaguguc

SEQ ID NO: 1222430 - RNA, 20 nt, Human
ucccugaagggccacagcuc

SEQ ID NO: 1222431 - RNA, 18 nt, Human
uccugaguccaggaagaa

SEQ ID NO: 1222432 - RNA, 18 nt, Human
uccuggcucccaccagcu

SEQ ID NO: 1222433 - RNA, 18 nt, Human
uccuugcaggugccuuuc

SEQ ID NO: 1222434 - RNA, 22 nt, Human
uccuugcaggugccuuucuugu

SEQ ID NO: 1222435 - RNA, 18 nt, Human
ucuccuucucucuucucu

SEQ ID NO: 1222436 - RNA, 19 nt, Human
ucucucuucucuucuucuc

SEQ ID NO: 1222437 - RNA, 22 nt, Human
ucucucuucucuucuucuugcc

SEQ ID NO: 1222438 - RNA, 22 nt, Human
ucuucucuccuucucucuucuc

SEQ ID NO: 1222439 - RNA, 19 nt, Human
ugaagugaggagugagguc

SEQ ID NO: 1222440 - RNA, 18 nt, Human
ugagagagacgcacggug

SEQ ID NO: 1222441 - RNA, 21 nt, Human
ugagcaaggugaagaggugcu

SEQ ID NO: 1222442 - RNA, 21 nt, Human
ugaguccaggaagaaugaggu

SEQ ID NO: 1222443 - RNA, 24 nt, Human
ugauucacgaaucaggcagccccc

SEQ ID NO: 1222444 - RNA, 20 nt, Human
ugcaguggugcccagaagcu

SEQ ID NO: 1222445 - RNA, 26 nt, Human
ugcccagaagcuuagagaugcaggag

SEQ ID NO: 1222446 - RNA, 19 nt, Human
ugccuuucuuguaccucag

SEQ ID NO: 1222447 - RNA, 20 nt, Human
ugcucaccacacuauaacuc

SEQ ID NO: 1222448 - RNA, 18 nt, Human
uggcugcagcugugccug

SEQ ID NO: 1222449 - RNA, 24 nt, Human
uggcugcagcugugccugggaggg

SEQ ID NO: 1222450 - RNA, 21 nt, Human
uggcuuggggagcuccuaggu

SEQ ID NO: 1222451 - RNA, 21 nt, Human
uggguaucagggaaugcagug

SEQ ID NO: 1222452 - RNA, 19 nt, Human
ugugccugggagggcgggg

SEQ ID NO: 1222453 - RNA, 22 nt, Human
ugugccugggagggcggggcuc

SEQ ID NO: 1222454 - RNA, 18 nt, Human
uuagaagcccuagcaaca

SEQ ID NO: 1222455 - RNA, 22 nt, Human
uuagaagcccuagcaacacugc

SEQ ID NO: 1222456 - RNA, 21 nt, Human
uuccuggcucccaccagcuuc

SEQ ID NO: 1222457 - RNA, 24 nt, Human
aaaaaaaaaaaaaaaaacaaaaaa

SEQ ID NO: 1222458 - RNA, 19 nt, Human
aaaaaaaaaaaaaagaaaa

SEQ ID NO: 1222459 - RNA, 27 nt, Human
aaaaaaacaaaaaacaaaucauucugc

SEQ ID NO: 1222460 - RNA, 27 nt, Human
aaaaaagaauagaaccaaaauagagag

SEQ ID NO: 1222461 - RNA, 18 nt, Human
aaaaagaaaaaagaaaaa

SEQ ID NO: 1222462 - RNA, 19 nt, Human
aaaaagacagacgguucaa

SEQ ID NO: 1222463 - RNA, 20 nt, Human
aaaaagacagacgguucaaa

SEQ ID NO: 1222464 - RNA, 18 nt, Human
aaaauagagagaagagga

SEQ ID NO: 1222465 - RNA, 20 nt, Human
aaagaaggauaacuguaaua

SEQ ID NO: 1222466 - RNA, 24 nt, Human
aaagaauagaaccaaaauagagag

SEQ ID NO: 1222467 - RNA, 22 nt, Human
aaagccucuuccauuauaccaa

SEQ ID NO: 1222468 - RNA, 21 nt, Human
aacaagaaagaaaagaucuga

SEQ ID NO: 1222469 - RNA, 18 nt, Human
aagaaaaaaaaagaauag

SEQ ID NO: 1222470 - RNA, 19 nt, Human
aagaggaagaagaaaaaga

SEQ ID NO: 1222471 - RNA, 27 nt, Human
aagaggaagaagaaaaagaaaagucaa

SEQ ID NO: 1222472 - RNA, 24 nt, Human
aaguaucuccauaaaugcucuucc

SEQ ID NO: 1222473 - RNA, 22 nt, Human
acaacccggcggcggcugcagg

SEQ ID NO: 1222474 - RNA, 25 nt, Human
accaaaauagagagaagaggaagaa

SEQ ID NO: 1222475 - RNA, 21 nt, Human
agaaaaaaaaagaauagaacc

SEQ ID NO: 1222476 - RNA, 19 nt, Human
agaaaaaagaaaaaaaaag

SEQ ID NO: 1222477 - RNA, 27 nt, Human
agaaagagagcgagcuugaaaucccaa

SEQ ID NO: 1222478 - RNA, 24 nt, Human
agagaaguguccaguacaaccugg

SEQ ID NO: 1222479 - RNA, 18 nt, Human
agcuagaccaccauuauu

SEQ ID NO: 1222480 - RNA, 18 nt, Human
aggaagaagaaaaagaaa

SEQ ID NO: 1222481 - RNA, 24 nt, Human
aguguccaguacaaccuggacaac

SEQ ID NO: 1222482 - RNA, 24 nt, Human
caaaaaaaaaaaaaaaaacaaaaa

SEQ ID NO: 1222483 - RNA, 18 nt, Human
caaacacucaagcaugcg

SEQ ID NO: 1222484 - RNA, 20 nt, Human
caacccggcggcggcugcag

SEQ ID NO: 1222485 - RNA, 22 nt, Human
caagaaagaaaagaucugauuc

SEQ ID NO: 1222486 - RNA, 21 nt, Human
caagaaauccuccaaaaggca

SEQ ID NO: 1222487 - RNA, 19 nt, Human
caaucacauaaaacaauca

SEQ ID NO: 1222488 - RNA, 24 nt, Human
cacaaaaaaaaaaaaaaaaaaaaa

SEQ ID NO: 1222489 - RNA, 18 nt, Human
cacagcacaaaccaggug

SEQ ID NO: 1222490 - RNA, 23 nt, Human
cacauuacacugagcagugacca

SEQ ID NO: 1222491 - RNA, 22 nt, Human
cacugcaaucgcacaaagaagg

SEQ ID NO: 1222492 - RNA, 24 nt, Human
cagcacaaaccagguguuuccauu

SEQ ID NO: 1222493 - RNA, 18 nt, Human
cagcccacugcaaucgca

SEQ ID NO: 1222494 - RNA, 20 nt, Human
cagguguuuccauucagccc

SEQ ID NO: 1222495 - RNA, 18 nt, Human
cauaaaacaaucaggaaa

SEQ ID NO: 1222496 - RNA, 19 nt, Human
cauaaaacaaucaggaaag

SEQ ID NO: 1222497 - RNA, 22 nt, Human
cauaauacaucuggaaaaaaac

SEQ ID NO: 1222498 - RNA, 22 nt, Human
cauucugcacauuacacugagc

SEQ ID NO: 1222499 - RNA, 24 nt, Human
ccaaaauagagagaagaggaagaa

SEQ ID NO: 1222500 - RNA, 21 nt, Human
ccaagguaacaagaaagaaaa

SEQ ID NO: 1222501 - RNA, 22 nt, Human
ccaccacaaaaaaaaaaaaaaa

SEQ ID NO: 1222502 - RNA, 19 nt, Human
cccacagaacagccagguc

SEQ ID NO: 1222503 - RNA, 23 nt, Human
cccacagaacagccaggucucca

SEQ ID NO: 1222504 - RNA, 21 nt, Human
cccacugcaaucgcacaaaga

SEQ ID NO: 1222505 - RNA, 20 nt, Human
ccggcggcggcugcaggcuu

SEQ ID NO: 1222506 - RNA, 21 nt, Human
ccuccaaaaggcacuuagcuc

SEQ ID NO: 1222507 - RNA, 25 nt, Human
cuauacauaguacaaaguucauaca

SEQ ID NO: 1222508 - RNA, 21 nt, Human
cuccaaaaggcacuuagcucc

SEQ ID NO: 1222509 - RNA, 21 nt, Human
cuccaacccuaacccuggaca

SEQ ID NO: 1222510 - RNA, 20 nt, Human
cuccaagguaacaagaaaga

SEQ ID NO: 1222511 - RNA, 22 nt, Human
cucuuccaagaaauccuccaaa

SEQ ID NO: 1222512 - RNA, 18 nt, Human
gaaaaaaaccgaagagua

SEQ ID NO: 1222513 - RNA, 19 nt, Human
gaagaaaaagaaaaguccu

SEQ ID NO: 1222514 - RNA, 22 nt, Human
gacagucugaggcacaacccgg

SEQ ID NO: 1222515 - RNA, 22 nt, Human
gagcagugaccaccacaaaaaa

SEQ ID NO: 1222516 - RNA, 19 nt, Human
gaggaagaagaaaaagaaa

SEQ ID NO: 1222517 - RNA, 23 nt, Human
ggacuguuuuuuuuucaagaggc

SEQ ID NO: 1222518 - RNA, 24 nt, Human
ggauuuuauuuuuuaaagaagugg

SEQ ID NO: 1222519 - RNA, 22 nt, Human
uaaaacaaucaggaaaggggug

SEQ ID NO: 1222520 - RNA, 20 nt, Human
uaacaagaaagaaaagaucu

SEQ ID NO: 1222521 - RNA, 18 nt, Human
uacaucuggaaaaaaacc

SEQ ID NO: 1222522 - RNA, 20 nt, Human
ucaaaguucagaggguggca

SEQ ID NO: 1222523 - RNA, 19 nt, Human
uccaacccuaacccuggac

SEQ ID NO: 1222524 - RNA, 22 nt, Human
uccaacccuaacccuggacaac

SEQ ID NO: 1222525 - RNA, 18 nt, Human
uccaagaaauccuccaaa

SEQ ID NO: 1222526 - RNA, 20 nt, Human
uccaagguaacaagaaagaa

SEQ ID NO: 1222527 - RNA, 23 nt, Human
ucugaggcacaacccggcggcgg

SEQ ID NO: 1222528 - RNA, 21 nt, Human
ugaaggaccaaaaaaaaaaaa

SEQ ID NO: 1222529 - RNA, 28 nt, Human
ugaccaccacaaaaaaaaaaaaaaaaaa

SEQ ID NO: 1222530 - RNA, 23 nt, Human
ugagcagugaccaccacaaaaaa

SEQ ID NO: 1222531 - RNA, 24 nt, Human
ugcacauuacacugagcagugacc

SEQ ID NO: 1222532 - RNA, 19 nt, Human
ugcauugaauuguuucacc

SEQ ID NO: 1222533 - RNA, 21 nt, Human
ugcccuuacuuaaaaagacag

SEQ ID NO: 1222534 - RNA, 21 nt, Human
ugcuagggagccuccuugagg

SEQ ID NO: 1222535 - RNA, 24 nt, Human
uggaaaaaaaccgaagaguauacc

SEQ ID NO: 1222536 - RNA, 27 nt, Human
uggaaaaaaaccgaagaguauacccug

SEQ ID NO: 1222537 - RNA, 21 nt, Human
uugcuagggagccuccuugag

SEQ ID NO: 1222538 - RNA, 23 nt, Human
cauuuaaagauaauauccaaugc

SEQ ID NO: 1222539 - RNA, 22 nt, Human
ggcuggaaaaguucuggagaac

SEQ ID NO: 1222540 - RNA, 23 nt, Human
ucuuccagacucucuaggcauca

SEQ ID NO: 1222541 - RNA, 19 nt, Human
ugccuccaaguucccaccc

SEQ ID NO: 1222542 - RNA, 21 nt, Human
uggaaaaguucuggagaacau

SEQ ID NO: 1222543 - RNA, 19 nt, Human
aagcagggacacaaaggca

SEQ ID NO: 1222544 - RNA, 22 nt, Human
acgugucuuuccgggccugggc

SEQ ID NO: 1222545 - RNA, 18 nt, Human
acuguccagaaccagccc

SEQ ID NO: 1222546 - RNA, 18 nt, Human
agaaccagcccacggcca

SEQ ID NO: 1222547 - RNA, 24 nt, Human
aguccucugcacaaguucagagag

SEQ ID NO: 1222548 - RNA, 24 nt, Human
cacaaaggcaaucaagugcauagc

SEQ ID NO: 1222549 - RNA, 19 nt, Human
cagaaccagcccacggcca

SEQ ID NO: 1222550 - RNA, 19 nt, Human
ccgggccugggcgucucag

SEQ ID NO: 1222551 - RNA, 21 nt, Human
ccuuccggacaggacagaagu

SEQ ID NO: 1222552 - RNA, 18 nt, Human
cgagcuggauccacccuu

SEQ ID NO: 1222553 - RNA, 27 nt, Human
cgucagaaagggauccccuuugggcga

SEQ ID NO: 1222554 - RNA, 18 nt, Human
cucgagcuggauccaccc

SEQ ID NO: 1222555 - RNA, 21 nt, Human
cuucaaaaggugaagcaggga

SEQ ID NO: 1222556 - RNA, 23 nt, Human
cuuucuuucccgucagaaaggga

SEQ ID NO: 1222557 - RNA, 20 nt, Human
gaccuccagaggagguuagg

SEQ ID NO: 1222558 - RNA, 20 nt, Human
ggacaggacucaccgccuuu

SEQ ID NO: 1222559 - RNA, 19 nt, Human
ggccugggcgucucaggag

SEQ ID NO: 1222560 - RNA, 19 nt, Human
ggccugggcgucucaggag

SEQ ID NO: 1222561 - RNA, 24 nt, Human
guagggagggcucagucaguuuuu

SEQ ID NO: 1222562 - RNA, 22 nt, Human
gucaguuuuugguaauagguga

SEQ ID NO: 1222563 - RNA, 21 nt, Human
uaaacuguccagaaccagccc

SEQ ID NO: 1222564 - RNA, 22 nt, Human
uaaacuguccagaaccagccca

SEQ ID NO: 1222565 - RNA, 21 nt, Human
ucaaaaggugaagcagggaca

SEQ ID NO: 1222566 - RNA, 19 nt, Human
ucacaggauuuuucuuguc

SEQ ID NO: 1222567 - RNA, 23 nt, Human
ucccuuccggacaggacagaagu

SEQ ID NO: 1222568 - RNA, 19 nt, Human
ucuguaaacuguccagaac

SEQ ID NO: 1222569 - RNA, 21 nt, Human
ucuuaccaagagaaaacuacu

SEQ ID NO: 1222570 - RNA, 18 nt, Human
ugagcagaugguuucccc

SEQ ID NO: 1222571 - RNA, 23 nt, Human
uggcuuguguagggagggcucag

SEQ ID NO: 1222572 - RNA, 18 nt, Human
uguccagaaccagcccac

SEQ ID NO: 1222573 - RNA, 21 nt, Human
aagugcuuagagaucugaagc

SEQ ID NO: 1222574 - RNA, 19 nt, Human
accagacacaggagcauca

SEQ ID NO: 1222575 - RNA, 21 nt, Human
agagcacuaccagaagccucc

SEQ ID NO: 1222576 - RNA, 21 nt, Human
agcccaggaaggagggggaag

SEQ ID NO: 1222577 - RNA, 22 nt, Human
aggaaggagggggaaggugagg

SEQ ID NO: 1222578 - RNA, 20 nt, Human
aggagggggaaggugagggc

SEQ ID NO: 1222579 - RNA, 20 nt, Human
aggcaucaagaccaggggug

SEQ ID NO: 1222580 - RNA, 18 nt, Human
caagagcacuaccagaag

SEQ ID NO: 1222581 - RNA, 23 nt, Human
caagccagguaaacagaaggaag

SEQ ID NO: 1222582 - RNA, 22 nt, Human
cacaacaucccugugagguagg

SEQ ID NO: 1222583 - RNA, 20 nt, Human
cagacacaggagcaucaaga

SEQ ID NO: 1222584 - RNA, 25 nt, Human
cagaggggacccagaaaugcugggc

SEQ ID NO: 1222585 - RNA, 19 nt, Human
caggcucaacagccacccc

SEQ ID NO: 1222586 - RNA, 19 nt, Human
caucaagaccaggggugcc

SEQ ID NO: 1222587 - RNA, 23 nt, Human
ccagaagccucccugcucucuga

SEQ ID NO: 1222588 - RNA, 18 nt, Human
ccaggaaggagggggaag

SEQ ID NO: 1222589 - RNA, 21 nt, Human
ccagguaaacagaaggaaggg

SEQ ID NO: 1222590 - RNA, 23 nt, Human
cccacagugccuucccauucugu

SEQ ID NO: 1222591 - RNA, 22 nt, Human
cccccuguaggccaagccaggu

SEQ ID NO: 1222592 - RNA, 21 nt, Human
ccuucccacagugccuuccca

SEQ ID NO: 1222593 - RNA, 24 nt, Human
cguggcccgcgggcccguacacuc

SEQ ID NO: 1222594 - RNA, 18 nt, Human
cucagugcccacucccag

SEQ ID NO: 1222595 - RNA, 19 nt, Human
cugacugacucagccugca

SEQ ID NO: 1222596 - RNA, 23 nt, Human
cugagcuugcagaggggacccag

SEQ ID NO: 1222597 - RNA, 22 nt, Human
cugcagcccaggaaggaggggg

SEQ ID NO: 1222598 - RNA, 22 nt, Human
gagcaucaagagcacuaccaga

SEQ ID NO: 1222599 - RNA, 23 nt, Human
gcccguacacuccagcugcccga

SEQ ID NO: 1222600 - RNA, 18 nt, Human
ggaagggcaggaguacug

SEQ ID NO: 1222601 - RNA, 19 nt, Human
ggacucagugcccacuccc

SEQ ID NO: 1222602 - RNA, 21 nt, Human
ggccguggcccgcgggcccgg

SEQ ID NO: 1222603 - RNA, 20 nt, Human
gggacccagaaaugcugggc

SEQ ID NO: 1222604 - RNA, 19 nt, Human
uaaacagaaggaagggcag

SEQ ID NO: 1222605 - RNA, 20 nt, Human
ucaagagcacuaccagaagc

SEQ ID NO: 1222606 - RNA, 22 nt, Human
ucucugagcuugcagaggggac

SEQ ID NO: 1222607 - RNA, 21 nt, Human
ugcaaggcguggcuagcagca

SEQ ID NO: 1222608 - RNA, 23 nt, Human
uggcuagcagcaagauuccugac

SEQ ID NO: 1222609 - RNA, 24 nt, Human
uguucccuacauaucuugaccuuu

SEQ ID NO: 1222610 - RNA, 20 nt, Human
uuccugacuuccuucccaca

SEQ ID NO: 1222611 - RNA, 18 nt, Human
uugaccuuugucaggugc

SEQ ID NO: 1222612 - RNA, 21 nt, Human
uugugccaaccagacacagga

SEQ ID NO: 1222613 - RNA, 25 nt, Human
uuuccaauuccuauuaacauucauu

SEQ ID NO: 1222614 - RNA, 23 nt, Human
aaacaacaacuuuaucuucacug

SEQ ID NO: 1222615 - RNA, 21 nt, Human
acgaacauaagaaaagcuacc

SEQ ID NO: 1222616 - RNA, 21 nt, Human
cagcacgaacauaagaaaagc

SEQ ID NO: 1222617 - RNA, 19 nt, Human
uauggcaccagcagcacga

SEQ ID NO: 1222618 - RNA, 23 nt, Human
aaacacacuggugauauagacaa

SEQ ID NO: 1222619 - RNA, 18 nt, Human
aaagaacuuguuccacug

SEQ ID NO: 1222620 - RNA, 19 nt, Human
aaagaacuuguuccacugg

SEQ ID NO: 1222621 - RNA, 23 nt, Human
aacaagacggaagggcugggcgc

SEQ ID NO: 1222622 - RNA, 22 nt, Human
accgaagcgccggaggacccgg

SEQ ID NO: 1222623 - RNA, 22 nt, Human
acggaagggcugggcgcugagg

SEQ ID NO: 1222624 - RNA, 19 nt, Human
acuccagccugagacacag

SEQ ID NO: 1222625 - RNA, 24 nt, Human
acuccagccugagacacagaguga

SEQ ID NO: 1222626 - RNA, 25 nt, Human
acuggugauauagacaauucuccuc

SEQ ID NO: 1222627 - RNA, 18 nt, Human
acuguacuccagccugag

SEQ ID NO: 1222628 - RNA, 24 nt, Human
acuguacuccagccugagacacag

SEQ ID NO: 1222629 - RNA, 24 nt, Human
acuuugagaaagacuguucuagag

SEQ ID NO: 1222630 - RNA, 19 nt, Human
agaaagacuguucuagagu

SEQ ID NO: 1222631 - RNA, 18 nt, Human
agaccgaagcgccggagg

SEQ ID NO: 1222632 - RNA, 23 nt, Human
agacuuuuaucuguaaucuccuu

SEQ ID NO: 1222633 - RNA, 21 nt, Human
agcgccagaggaggacaagcc

SEQ ID NO: 1222634 - RNA, 24 nt, Human
aggaggacaagccgaacccuucag

SEQ ID NO: 1222635 - RNA, 21 nt, Human
aggaggucgagggcugcagcc

SEQ ID NO: 1222636 - RNA, 22 nt, Human
aggaucacuugagcccaggagg

SEQ ID NO: 1222637 - RNA, 18 nt, Human
aggcaggaggaucacuug

SEQ ID NO: 1222638 - RNA, 23 nt, Human
aggcaggaggaucacuugagccc

SEQ ID NO: 1222639 - RNA, 24 nt, Human
aggcaggaggaucacuugagccca

SEQ ID NO: 1222640 - RNA, 24 nt, Human
aggcuaaggcaggaggaucacuug

SEQ ID NO: 1222641 - RNA, 18 nt, Human
auucacaggcuccucuua

SEQ ID NO: 1222642 - RNA, 26 nt, Human
caauggacuuuucaucacagguagcu

SEQ ID NO: 1222643 - RNA, 19 nt, Human
cacacuggugauauagaca

SEQ ID NO: 1222644 - RNA, 22 nt, Human
cacagguagcuugaggcaugag

SEQ ID NO: 1222645 - RNA, 20 nt, Human
caccacuguacuccagccug

SEQ ID NO: 1222646 - RNA, 18 nt, Human
cacuguacuccagccuga

SEQ ID NO: 1222647 - RNA, 19 nt, Human
cacuguacuccagccugag

SEQ ID NO: 1222648 - RNA, 19 nt, Human
cacuguacuccagccugag

SEQ ID NO: 1222649 - RNA, 22 nt, Human
cacuguacuccagccugagaca

SEQ ID NO: 1222650 - RNA, 18 nt, Human
ccaaaggcuucacauggc

SEQ ID NO: 1222651 - RNA, 25 nt, Human
ccaaaggcuucacauggcucuccag

SEQ ID NO: 1222652 - RNA, 19 nt, Human
ccacuguacuccagccuga

SEQ ID NO: 1222653 - RNA, 20 nt, Human
ccacuguacuccagccugag

SEQ ID NO: 1222654 - RNA, 20 nt, Human
ccacuguacuccagccugag

SEQ ID NO: 1222655 - RNA, 22 nt, Human
ccacuguacuccagccugagac

SEQ ID NO: 1222656 - RNA, 24 nt, Human
cgagaggcuaaggcaggaggauca

SEQ ID NO: 1222657 - RNA, 20 nt, Human
cuaggcugggugugguggug

SEQ ID NO: 1222658 - RNA, 23 nt, Human
cucugaauucacaggcuccucuu

SEQ ID NO: 1222659 - RNA, 18 nt, Human
cuguacucccagcuacuc

SEQ ID NO: 1222660 - RNA, 19 nt, Human
cuguacucccagcuacucg

SEQ ID NO: 1222661 - RNA, 22 nt, Human
cuucaggaggccgggcgucucc

SEQ ID NO: 1222662 - RNA, 18 nt, Human
cuuugagaaagacuguuc

SEQ ID NO: 1222663 - RNA, 24 nt, Human
gaucacuugagcccaggaggucga

SEQ ID NO: 1222664 - RNA, 20 nt, Human
gcccaggaggucgagggcug

SEQ ID NO: 1222665 - RNA, 20 nt, Human
gcugggugugguggugugca

SEQ ID NO: 1222666 - RNA, 22 nt, Human
ggacaagccgaacccuucagga

SEQ ID NO: 1222667 - RNA, 21 nt, Human
ggagcugagcgccagaggagg

SEQ ID NO: 1222668 - RNA, 26 nt, Human
ggcugcagccaucuacaauugcacca

SEQ ID NO: 1222669 - RNA, 24 nt, Human
guacuccagccugagacacagagu

SEQ ID NO: 1222670 - RNA, 20 nt, Human
uaaggcaggaggaucacuug

SEQ ID NO: 1222671 - RNA, 22 nt, Human
uaaggcaggaggaucacuugag

SEQ ID NO: 1222672 - RNA, 24 nt, Human
uaaggcaggaggaucacuugagcc

SEQ ID NO: 1222673 - RNA, 27 nt, Human
uaauccucaggacagaucuaccagaca

SEQ ID NO: 1222674 - RNA, 22 nt, Human
uacuccagccugagacacagag

SEQ ID NO: 1222675 - RNA, 23 nt, Human
uacuccagccugagacacagagu

SEQ ID NO: 1222676 - RNA, 24 nt, Human
uacuccagccugagacacagagug

SEQ ID NO: 1222677 - RNA, 23 nt, Human
uagcuguaaccaaauaucaacaa

SEQ ID NO: 1222678 - RNA, 22 nt, Human
uaggcugggugugguggugugc

SEQ ID NO: 1222679 - RNA, 19 nt, Human
ucagggaccucagaaagaa

SEQ ID NO: 1222680 - RNA, 18 nt, Human
ucaguaccuggauggguc

SEQ ID NO: 1222681 - RNA, 23 nt, Human
uccagccugagacacagagugag

SEQ ID NO: 1222682 - RNA, 24 nt, Human
uccagccugagacacagagugaga

SEQ ID NO: 1222683 - RNA, 23 nt, Human
ucccagaagaccgcaucaguacc

SEQ ID NO: 1222684 - RNA, 20 nt, Human
ugauauagacaauucuccuc

SEQ ID NO: 1222685 - RNA, 21 nt, Human
ugcaccacuguacuccagccu

SEQ ID NO: 1222686 - RNA, 22 nt, Human
ugcaccacuguacuccagccug

SEQ ID NO: 1222687 - RNA, 20 nt, Human
ugcaucuguacucccagcua

SEQ ID NO: 1222688 - RNA, 21 nt, Human
ugccucugaauucacaggcuc

SEQ ID NO: 1222689 - RNA, 23 nt, Human
uggcagacaauggacuuuucauc

SEQ ID NO: 1222690 - RNA, 24 nt, Human
ugucuaaaaguagcuguaaccaaa

SEQ ID NO: 1222691 - RNA, 21 nt, Human
uucauucuaggcugggugugg

SEQ ID NO: 1222692 - RNA, 23 nt, Human
uugaauugucucaguaaaccagu

SEQ ID NO: 1222693 - RNA, 24 nt, Human
uugccucugaauucacaggcuccu

SEQ ID NO: 1222694 - RNA, 23 nt, Human
aaaacaaaacaaaacaaaaaaaa

SEQ ID NO: 1222695 - RNA, 23 nt, Human
aaacaaaaaaaaggguaacaggg

SEQ ID NO: 1222696 - RNA, 19 nt, Human
aaacaaaacaaaacaaaaa

SEQ ID NO: 1222697 - RNA, 24 nt, Human
aaaccggucucucccaagguugcc

SEQ ID NO: 1222698 - RNA, 25 nt, Human
aacaaaacaaaaaaaaggguaacag

SEQ ID NO: 1222699 - RNA, 22 nt, Human
aacaaagcggggaaugcccaga

SEQ ID NO: 1222700 - RNA, 21 nt, Human
aacacagcgagacucccucuc

SEQ ID NO: 1222701 - RNA, 20 nt, Human
aacaugaugaaacccugucu

SEQ ID NO: 1222702 - RNA, 21 nt, Human
aacaugaugaaacccugucuu

SEQ ID NO: 1222703 - RNA, 21 nt, Human
aacgugaagccuucauagagc

SEQ ID NO: 1222704 - RNA, 20 nt, Human
aagggucacuucacaaauca

SEQ ID NO: 1222705 - RNA, 24 nt, Human
aaucacuugaacccaguaggcgga

SEQ ID NO: 1222706 - RNA, 25 nt, Human
acaaaacaaaaaaaaggguaacaac

SEQ ID NO: 1222707 - RNA, 24 nt, Human
acaaaacaaaacaaaaaaaagggu

SEQ ID NO: 1222708 - RNA, 25 nt, Human
acaaaacaaaacaaaaaaaagggua

SEQ ID NO: 1222709 - RNA, 19 nt, Human
acaagcaguucaccaagaa

SEQ ID NO: 1222710 - RNA, 24 nt, Human
acacagcgagacucccucucaaaa

SEQ ID NO: 1222711 - RNA, 20 nt, Human
acaccacugcacuccagccu

SEQ ID NO: 1222712 - RNA, 24 nt, Human
acaccacugcacuccagccuggac

SEQ ID NO: 1222713 - RNA, 27 nt, Human
acaccacugcacuccagccuggacaac

SEQ ID NO: 1222714 - RNA, 21 nt, Human
acaugggccauggcugaaggc

SEQ ID NO: 1222715 - RNA, 24 nt, Human
acccugucuuuacuaaaaauacaa

SEQ ID NO: 1222716 - RNA, 21 nt, Human
acccuuuccagcucucugcuc

SEQ ID NO: 1222717 - RNA, 23 nt, Human
acugcacuccagccuggacaaca

SEQ ID NO: 1222718 - RNA, 26 nt, Human
acugcacuccagccuggacaacacag

SEQ ID NO: 1222719 - RNA, 19 nt, Human
agaaaggggugggccacuu

SEQ ID NO: 1222720 - RNA, 20 nt, Human
agaacuuugggaggcugagg

SEQ ID NO: 1222721 - RNA, 20 nt, Human
agacagaaagagaaugggua

SEQ ID NO: 1222722 - RNA, 18 nt, Human
agccaggcgugauggugu

SEQ ID NO: 1222723 - RNA, 22 nt, Human
agccuggacaacacagcgagac

SEQ ID NO: 1222724 - RNA, 24 nt, Human
agccuggacaacacagcgagacuc

SEQ ID NO: 1222725 - RNA, 23 nt, Human
aggagagugaggaaagaccuggg

SEQ ID NO: 1222726 - RNA, 18 nt, Human
aggcaagagaaucacuug

SEQ ID NO: 1222727 - RNA, 24 nt, Human
aggcaagagaaucacuugaaccca

SEQ ID NO: 1222728 - RNA, 22 nt, Human
aggcacccaccacaaucccccc

SEQ ID NO: 1222729 - RNA, 24 nt, Human
aggcggagguugcaguaagccgag

SEQ ID NO: 1222730 - RNA, 22 nt, Human
aggcgggcggaucgccugaggu

SEQ ID NO: 1222731 - RNA, 26 nt, Human
aggcgggcggaucgccugaggucagg

SEQ ID NO: 1222732 - RNA, 20 nt, Human
aggcugaggcgggcggaucg

SEQ ID NO: 1222733 - RNA, 24 nt, Human
aggcugaggcgggcggaucgccug

SEQ ID NO: 1222734 - RNA, 22 nt, Human
agggugugugagugugugugug

SEQ ID NO: 1222735 - RNA, 23 nt, Human
agugaggaaagaccugggagagg

SEQ ID NO: 1222736 - RNA, 22 nt, Human
auaaacccgcauugcaucccuc

SEQ ID NO: 1222737 - RNA, 24 nt, Human
aucacaccacugcacuccagccug

SEQ ID NO: 1222738 - RNA, 24 nt, Human
aucgccugaggucaggaguuugag

SEQ ID NO: 1222739 - RNA, 21 nt, Human
augaaacccugucuuuacuaa

SEQ ID NO: 1222740 - RNA, 19 nt, Human
augaaagacauuuggggac

SEQ ID NO: 1222741 - RNA, 24 nt, Human
auuaaccacaaaacaugacccacg

SEQ ID NO: 1222742 - RNA, 22 nt, Human
caaaacaaaaaaaaggguaaca

SEQ ID NO: 1222743 - RNA, 21 nt, Human
caaaacaaaacaaaacaaaaa

SEQ ID NO: 1222744 - RNA, 24 nt, Human
caacaugaugaaacccugucuuua

SEQ ID NO: 1222745 - RNA, 22 nt, Human
caacgauauccaaagucucuga

SEQ ID NO: 1222746 - RNA, 19 nt, Human
caagcaguucaccaagaac

SEQ ID NO: 1222747 - RNA, 22 nt, Human
caagucucgaaugccccaggaa

SEQ ID NO: 1222748 - RNA, 21 nt, Human
cacaccacugcacuccagccu

SEQ ID NO: 1222749 - RNA, 24 nt, Human
cacacuuguaaucccagaacuuug

SEQ ID NO: 1222750 - RNA, 19 nt, Human
caccaagaacagggcaacg

SEQ ID NO: 1222751 - RNA, 19 nt, Human
caccaagaacagggcaacu

SEQ ID NO: 1222752 - RNA, 25 nt, Human
caccacaauccccccagggaguaaa

SEQ ID NO: 1222753 - RNA, 25 nt, Human
caccaggaaaaguuuggaagccucc

SEQ ID NO: 1222754 - RNA, 18 nt, Human
cacugcacuccagccugg

SEQ ID NO: 1222755 - RNA, 19 nt, Human
cacugcacuccagccugga

SEQ ID NO: 1222756 - RNA, 21 nt, Human
cacugcacuccagccuggaca

SEQ ID NO: 1222757 - RNA, 24 nt, Human
cacugcacuccagccuggacaaca

SEQ ID NO: 1222758 - RNA, 25 nt, Human
cacugcacuccagccuggacaacaa

SEQ ID NO: 1222759 - RNA, 23 nt, Human
cacuuguaaucccagaacuuugg

SEQ ID NO: 1222760 - RNA, 24 nt, Human
cacuuguaaucccagaacuuuggg

SEQ ID NO: 1222761 - RNA, 21 nt, Human
cagaaagagaauggguagagg

SEQ ID NO: 1222762 - RNA, 24 nt, Human
cagaacuuugggaggcugaggcgg

SEQ ID NO: 1222763 - RNA, 20 nt, Human
caggcacccaccacaauccc

SEQ ID NO: 1222764 - RNA, 18 nt, Human
caguaggcggagguugca

SEQ ID NO: 1222765 - RNA, 22 nt, Human
caguucaccaagaacagggcaa

SEQ ID NO: 1222766 - RNA, 23 nt, Human
caguucaccaagaacagggcaac

SEQ ID NO: 1222767 - RNA, 21 nt, Human
ccaacaugaugaaacccuguc

SEQ ID NO: 1222768 - RNA, 22 nt, Human
ccacagccaacuauaaacccgc

SEQ ID NO: 1222769 - RNA, 19 nt, Human
ccacugcacuccagccugg

SEQ ID NO: 1222770 - RNA, 19 nt, Human
ccacugcacuccagccugg

SEQ ID NO: 1222771 - RNA, 20 nt, Human
ccacugcacuccagccugga

SEQ ID NO: 1222772 - RNA, 21 nt, Human
ccacugcacuccagccuggac

SEQ ID NO: 1222773 - RNA, 22 nt, Human
ccacugcacuccagccuggaca

SEQ ID NO: 1222774 - RNA, 18 nt, Human
ccagccaggccaacauga

SEQ ID NO: 1222775 - RNA, 24 nt, Human
ccaggccaacaugaugaaacccug

SEQ ID NO: 1222776 - RNA, 24 nt, Human
ccaggccaacaugaugaaacccug

SEQ ID NO: 1222777 - RNA, 21 nt, Human
cccacagccaacuauaaaccc

SEQ ID NO: 1222778 - RNA, 19 nt, Human
cccaccacaauccccccag

SEQ ID NO: 1222779 - RNA, 23 nt, Human
ccccacagccaacuauaaacccg

SEQ ID NO: 1222780 - RNA, 22 nt, Human
ccccggugcucugcacuguccc

SEQ ID NO: 1222781 - RNA, 21 nt, Human
cccgcauugcaucccucaccc

SEQ ID NO: 1222782 - RNA, 22 nt, Human
ccugaggucaggaguuugagac

SEQ ID NO: 1222783 - RNA, 24 nt, Human
cgagaucacaccacugcacuccag

SEQ ID NO: 1222784 - RNA, 24 nt, Human
cgcaugcacuuucucucucuaccu

SEQ ID NO: 1222785 - RNA, 20 nt, Human
cgcauugcaucccucacccc

SEQ ID NO: 1222786 - RNA, 23 nt, Human
cgccugaggucaggaguuugaga

SEQ ID NO: 1222787 - RNA, 23 nt, Human
cgcgcacaccagcaaucagugug

SEQ ID NO: 1222788 - RNA, 24 nt, Human
cggaucgccugaggucaggaguuu

SEQ ID NO: 1222789 - RNA, 24 nt, Human
cgggcggaucgccugaggucagga

SEQ ID NO: 1222790 - RNA, 25 nt, Human
cucaaaacaaaacaaaacaaaaaaa

SEQ ID NO: 1222791 - RNA, 23 nt, Human
cucccaagguugccuaauuuucu

SEQ ID NO: 1222792 - RNA, 20 nt, Human
cugucuggugcggggggggg

SEQ ID NO: 1222793 - RNA, 24 nt, Human
cuuggggcagugcgcuggugggag

SEQ ID NO: 1222794 - RNA, 26 nt, Human
cuuuugguccuaacaagcaguucacc

SEQ ID NO: 1222795 - RNA, 23 nt, Human
gaaaauaauuucucugcaacaaa

SEQ ID NO: 1222796 - RNA, 24 nt, Human
gaacagggcaacggcuaaaagaag

SEQ ID NO: 1222797 - RNA, 22 nt, Human
gaccugcagcuuacuccuucga

SEQ ID NO: 1222798 - RNA, 22 nt, Human
gacgaaggagagugaggaaaga

SEQ ID NO: 1222799 - RNA, 22 nt, Human
gagguugcaguaagccgagauc

SEQ ID NO: 1222800 - RNA, 24 nt, Human
gaucgccugaggucaggaguuuga

SEQ ID NO: 1222801 - RNA, 24 nt, Human
gauggugucuaccuguaaucccag

SEQ ID NO: 1222802 - RNA, 22 nt, Human
gcaagagaaucacuugaaccca

SEQ ID NO: 1222803 - RNA, 23 nt, Human
gcacuccagccuggacaacacag

SEQ ID NO: 1222804 - RNA, 23 nt, Human
gccaacaugaugaaacccugucu

SEQ ID NO: 1222805 - RNA, 23 nt, Human
gcccagagaagagaaggcgccuc

SEQ ID NO: 1222806 - RNA, 20 nt, Human
gccgagaucacaccacugca

SEQ ID NO: 1222807 - RNA, 24 nt, Human
gccugaggucaggaguuugagacc

SEQ ID NO: 1222808 - RNA, 20 nt, Human
gccuggacaacacagcgaga

SEQ ID NO: 1222809 - RNA, 18 nt, Human
ggaauuaaccacaaaaca

SEQ ID NO: 1222810 - RNA, 18 nt, Human
ggacacccuuuccagcuc

SEQ ID NO: 1222811 - RNA, 25 nt, Human
ggagaaagagggaaagacgaaggag

SEQ ID NO: 1222812 - RNA, 18 nt, Human
ggagguugcaguaagccg

SEQ ID NO: 1222813 - RNA, 24 nt, Human
ggagguugcaguaagccgagauca

SEQ ID NO: 1222814 - RNA, 22 nt, Human
ggaucgccugaggucaggaguu

SEQ ID NO: 1222815 - RNA, 27 nt, Human
ggccaggcacccaccacaaucccccca

SEQ ID NO: 1222816 - RNA, 18 nt, Human
gggacaaaggucaaaaac

SEQ ID NO: 1222817 - RNA, 19 nt, Human
gggagauugaggcaagaga

SEQ ID NO: 1222818 - RNA, 20 nt, Human
gggagguugggcacgguggu

SEQ ID NO: 1222819 - RNA, 21 nt, Human
gggcagugcgcuggugggaga

SEQ ID NO: 1222820 - RNA, 25 nt, Human
ggggaaugcccagagaagagaaggc

SEQ ID NO: 1222821 - RNA, 20 nt, Human
ggggucugcguccaggaugu

SEQ ID NO: 1222822 - RNA, 18 nt, Human
gggguugggcugcugggg

SEQ ID NO: 1222823 - RNA, 19 nt, Human
ggucaggaguuugagacca

SEQ ID NO: 1222824 - RNA, 21 nt, Human
ggugacugcauccaggaagga

SEQ ID NO: 1222825 - RNA, 19 nt, Human
ggugcggggggggguuggg

SEQ ID NO: 1222826 - RNA, 20 nt, Human
ggugcggggggggguugggc

SEQ ID NO: 1222827 - RNA, 23 nt, Human
ggugguucacacuuguaauccca

SEQ ID NO: 1222828 - RNA, 24 nt, Human
ggugguucacacuuguaaucccag

SEQ ID NO: 1222829 - RNA, 21 nt, Human
ggugucuaccuguaaucccag

SEQ ID NO: 1222830 - RNA, 21 nt, Human
gguucacacuuguaaucccag

SEQ ID NO: 1222831 - RNA, 24 nt, Human
guagaaaauaauuucucugcaaca

SEQ ID NO: 1222832 - RNA, 21 nt, Human
guggagcggguuugcaaaucu

SEQ ID NO: 1222833 - RNA, 23 nt, Human
gugguucacacuuguaaucccag

SEQ ID NO: 1222834 - RNA, 19 nt, Human
gugugugagugugugugug

SEQ ID NO: 1222835 - RNA, 21 nt, Human
uaaaaauacaaaaauuagcca

SEQ ID NO: 1222836 - RNA, 23 nt, Human
uaacaagcaguucaccaagaaca

SEQ ID NO: 1222837 - RNA, 22 nt, Human
uaacaggguggauccaaaguug

SEQ ID NO: 1222838 - RNA, 25 nt, Human
uaacuggaugaaagacauuugggga

SEQ ID NO: 1222839 - RNA, 26 nt, Human
uaagccgagaucacaccaaucaacgg

SEQ ID NO: 1222840 - RNA, 21 nt, Human
uaauaauaagccugauccacc

SEQ ID NO: 1222841 - RNA, 21 nt, Human
uaauaauaauaagccugaucc

SEQ ID NO: 1222842 - RNA, 24 nt, Human
uacaaaaauuagccaggcgugaug

SEQ ID NO: 1222843 - RNA, 19 nt, Human
uaccuaggcaagcuugggg

SEQ ID NO: 1222844 - RNA, 22 nt, Human
uaccuguaaucccagguacugg

SEQ ID NO: 1222845 - RNA, 23 nt, Human
uaccuguaaucccagguacuggg

SEQ ID NO: 1222846 - RNA, 20 nt, Human
uaggaccgccacagaugcca

SEQ ID NO: 1222847 - RNA, 24 nt, Human
uaguaggaccgccacagaugccac

SEQ ID NO: 1222848 - RNA, 23 nt, Human
ucacaccacugcacuccagccug

SEQ ID NO: 1222849 - RNA, 23 nt, Human
ucacacuuguaaucccagaacuu

SEQ ID NO: 1222850 - RNA, 18 nt, Human
ucacauccuucauaccgc

SEQ ID NO: 1222851 - RNA, 22 nt, Human
ucacugaaacacugaguuccug

SEQ ID NO: 1222852 - RNA, 19 nt, Human
ucacuugaacccaguaggc

SEQ ID NO: 1222853 - RNA, 20 nt, Human
ucacuugaacccaguaggcg

SEQ ID NO: 1222854 - RNA, 19 nt, Human
ucauaccgcaugcacuuuc

SEQ ID NO: 1222855 - RNA, 24 nt, Human
uccagccuggacaacacagcgaga

SEQ ID NO: 1222856 - RNA, 19 nt, Human
uccaggauguggagcgggu

SEQ ID NO: 1222857 - RNA, 19 nt, Human
ucccucucaaaacaaaaca

SEQ ID NO: 1222858 - RNA, 18 nt, Human
uccgugcgugucugcugg

SEQ ID NO: 1222859 - RNA, 18 nt, Human
uccgugcgugucugcugg

SEQ ID NO: 1222860 - RNA, 25 nt, Human
uccgugcgugucugcuggaaaccgg

SEQ ID NO: 1222861 - RNA, 23 nt, Human
uccguguuucuucugcaaaucug

SEQ ID NO: 1222862 - RNA, 18 nt, Human
ucguuuaucaucuauggg

SEQ ID NO: 1222863 - RNA, 23 nt, Human
ucuaccuguaaucccagguacug

SEQ ID NO: 1222864 - RNA, 27 nt, Human
ucucaaaacaaaacaaaacaaaaaaaa

SEQ ID NO: 1222865 - RNA, 21 nt, Human
ucucccaagguugccuaauuu

SEQ ID NO: 1222866 - RNA, 23 nt, Human
ugaacccaguaggcggagguugg

SEQ ID NO: 1222867 - RNA, 22 nt, Human
ugacccacgacgucaagcccuc

SEQ ID NO: 1222868 - RNA, 20 nt, Human
ugagccucuggccccggugc

SEQ ID NO: 1222869 - RNA, 18 nt, Human
ugaggcaagagaaucacu

SEQ ID NO: 1222870 - RNA, 20 nt, Human
ugaggcaagagaaucacuug

SEQ ID NO: 1222871 - RNA, 24 nt, Human
ugaggcaagagaaucacuugaacc

SEQ ID NO: 1222872 - RNA, 25 nt, Human
ugaggcaagagaaucacuugaaccc

SEQ ID NO: 1222873 - RNA, 24 nt, Human
ugaggcgggcggaucgccugaggu

SEQ ID NO: 1222874 - RNA, 26 nt, Human
ugaggcgggcggaucgccugagguca

SEQ ID NO: 1222875 - RNA, 18 nt, Human
ugaggucaggaguuugag

SEQ ID NO: 1222876 - RNA, 24 nt, Human
ugauggugucuaccuguaauccca

SEQ ID NO: 1222877 - RNA, 21 nt, Human
ugcaaaucugggaagcuacac

SEQ ID NO: 1222878 - RNA, 18 nt, Human
ugccccaggaacgugaag

SEQ ID NO: 1222879 - RNA, 21 nt, Human
ugcucuggaaagucaagucuc

SEQ ID NO: 1222880 - RNA, 18 nt, Human
ugcuggaaaccggucucu

SEQ ID NO: 1222881 - RNA, 24 nt, Human
uggaucaacgauauccaaagucuc

SEQ ID NO: 1222882 - RNA, 22 nt, Human
ugggagaggaggccaggcaccc

SEQ ID NO: 1222883 - RNA, 19 nt, Human
ugggaggcugaggcgggcg

SEQ ID NO: 1222884 - RNA, 23 nt, Human
ugggaggcugaggcgggcggauc

SEQ ID NO: 1222885 - RNA, 24 nt, Human
ugggaggcugaggcgggcggaucg

SEQ ID NO: 1222886 - RNA, 21 nt, Human
uggggacaaaggucaaaaacg

SEQ ID NO: 1222887 - RNA, 19 nt, Human
uggggcagugcgcuggugg

SEQ ID NO: 1222888 - RNA, 21 nt, Human
ugguucacacuuguaauccca

SEQ ID NO: 1222889 - RNA, 21 nt, Human
ugucuggugcggggggggguu

SEQ ID NO: 1222890 - RNA, 19 nt, Human
ugugugagugugugugugc

SEQ ID NO: 1222891 - RNA, 24 nt, Human
uugaacccaguaggcggagguugc

SEQ ID NO: 1222892 - RNA, 20 nt, Human
uugcaguaagccgagaucac

SEQ ID NO: 1222893 - RNA, 23 nt, Human
uuggggcagugcgcuggugggag

SEQ ID NO: 1222894 - RNA, 22 nt, Human
uuugagaccagccaggccaaca

SEQ ID NO: 1222895 - RNA, 20 nt, Human
uuuggaagccucuggaucaa

SEQ ID NO: 1222896 - RNA, 21 nt, Human
aaaaaaaaacaaaaaacccca

SEQ ID NO: 1222897 - RNA, 23 nt, Human
aaaaaaaacaaaaaaccccaaaa

SEQ ID NO: 1222898 - RNA, 22 nt, Human
aaaaaaacaaaaaaccccaaaa

SEQ ID NO: 1222899 - RNA, 24 nt, Human
aaaaaaacaaaaaaccccaaaaga

SEQ ID NO: 1222900 - RNA, 20 nt, Human
aaaaaacaaaaaaccccaaa

SEQ ID NO: 1222901 - RNA, 21 nt, Human
aaaaaacaaaaaaccccaaaa

SEQ ID NO: 1222902 - RNA, 20 nt, Human
aaaaaagcagcgcaagucac

SEQ ID NO: 1222903 - RNA, 20 nt, Human
aaaaccccaaaagaccacac

SEQ ID NO: 1222904 - RNA, 22 nt, Human
aaaagcagcgcaagucacagcc

SEQ ID NO: 1222905 - RNA, 22 nt, Human
aaacaaaacaaaacagaaacaa

SEQ ID NO: 1222906 - RNA, 23 nt, Human
aaacaaaacagaaacaaaaccaa

SEQ ID NO: 1222907 - RNA, 19 nt, Human
aaacagaaacaaaaccaau

SEQ ID NO: 1222908 - RNA, 20 nt, Human
aaacccaugucccgauguua

SEQ ID NO: 1222909 - RNA, 18 nt, Human
aaaccccaaaagaccaca

SEQ ID NO: 1222910 - RNA, 22 nt, Human
aaagaaugccagaaaacccaga

SEQ ID NO: 1222911 - RNA, 19 nt, Human
aaaggccacccaaaggcca

SEQ ID NO: 1222912 - RNA, 23 nt, Human
aaaguaucaccuucaacuuaaaa

SEQ ID NO: 1222913 - RNA, 24 nt, Human
aaaguugguaaaaaucuguauuuu

SEQ ID NO: 1222914 - RNA, 23 nt, Human
aaaugucuuuauaaguacauacc

SEQ ID NO: 1222915 - RNA, 21 nt, Human
aacaaaaaaccccaaaagacc

SEQ ID NO: 1222916 - RNA, 26 nt, Human
aacaaaacaaaacagaaacaaaacca

SEQ ID NO: 1222917 - RNA, 19 nt, Human
aacagaccauaagagcuga

SEQ ID NO: 1222918 - RNA, 25 nt, Human
aacagcaacaacaaacagaccucua

SEQ ID NO: 1222919 - RNA, 20 nt, Human
aacagcggucaacuuugucu

SEQ ID NO: 1222920 - RNA, 22 nt, Human
aacauacagauagcuaccacaa

SEQ ID NO: 1222921 - RNA, 18 nt, Human
aacuugaaaaaguaagug

SEQ ID NO: 1222922 - RNA, 22 nt, Human
aagcaaaaaagggaaagcuuca

SEQ ID NO: 1222923 - RNA, 20 nt, Human
aaggccaaguuacaaacacc

SEQ ID NO: 1222924 - RNA, 18 nt, Human
aaucuuacaaugucagaa

SEQ ID NO: 1222925 - RNA, 22 nt, Human
acaaaaagacuucuaaaaauau

SEQ ID NO: 1222926 - RNA, 20 nt, Human
acaaaacaaaacagaaacaa

SEQ ID NO: 1222927 - RNA, 22 nt, Human
acaaaagaaaaaccaguaucac

SEQ ID NO: 1222928 - RNA, 20 nt, Human
acaaaggccacccaaaggcc

SEQ ID NO: 1222929 - RNA, 19 nt, Human
acaacaaacagaccucuag

SEQ ID NO: 1222930 - RNA, 24 nt, Human
acaacagcaacaacaaacagaccu

SEQ ID NO: 1222931 - RNA, 23 nt, Human
acagcaacaacaaacagaccucu

SEQ ID NO: 1222932 - RNA, 21 nt, Human
acaguaaggcaaucuuacaau

SEQ ID NO: 1222933 - RNA, 24 nt, Human
acaguauuauucacuugguauuuc

SEQ ID NO: 1222934 - RNA, 22 nt, Human
accaccauccauuauaaccgcc

SEQ ID NO: 1222935 - RNA, 25 nt, Human
accauuaaaaaauaguuuugaacaa

SEQ ID NO: 1222936 - RNA, 18 nt, Human
agacaacuauuucuaaua

SEQ ID NO: 1222937 - RNA, 22 nt, Human
agagaccagucugcacugaguc

SEQ ID NO: 1222938 - RNA, 22 nt, Human
agagagaccagucugcacugag

SEQ ID NO: 1222939 - RNA, 18 nt, Human
aggugcacucauuaaaaa

SEQ ID NO: 1222940 - RNA, 19 nt, Human
auaaaggacaacagcaaca

SEQ ID NO: 1222941 - RNA, 21 nt, Human
auagaacgguaacugucacca

SEQ ID NO: 1222942 - RNA, 23 nt, Human
aucaaaagaaauuaguuuacaaa

SEQ ID NO: 1222943 - RNA, 21 nt, Human
auuugaaaucugauacugccc

SEQ ID NO: 1222944 - RNA, 21 nt, Human
caaaaaaccccaaaagaccac

SEQ ID NO: 1222945 - RNA, 25 nt, Human
caaaaaaccccaaaagaccacacaa

SEQ ID NO: 1222946 - RNA, 23 nt, Human
caaaacaaaacagaaacaaaacc

SEQ ID NO: 1222947 - RNA, 26 nt, Human
caaaacaaaacagaaacaaaaccaau

SEQ ID NO: 1222948 - RNA, 24 nt, Human
caaaacagaaacaaaaccaauccc

SEQ ID NO: 1222949 - RNA, 24 nt, Human
caaaauagagauucaaaauccacu

SEQ ID NO: 1222950 - RNA, 19 nt, Human
caaagugccuagauacaca

SEQ ID NO: 1222951 - RNA, 24 nt, Human
caacaaaagaucaaacccaugucc

SEQ ID NO: 1222952 - RNA, 25 nt, Human
caacaacaaacagaccucuagggug

SEQ ID NO: 1222953 - RNA, 23 nt, Human
caacagcaauagcacuacaggua

SEQ ID NO: 1222954 - RNA, 20 nt, Human
cacacuuuuaaaauacuugg

SEQ ID NO: 1222955 - RNA, 25 nt, Human
caccaguacagagaaaccacaggaa

SEQ ID NO: 1222956 - RNA, 19 nt, Human
cacucacuagaaacagggu

SEQ ID NO: 1222957 - RNA, 19 nt, Human
cacugagucauauauacuc

SEQ ID NO: 1222958 - RNA, 21 nt, Human
cagaaacaaaaccaaucccac

SEQ ID NO: 1222959 - RNA, 18 nt, Human
cagcacaaaagaaaaacc

SEQ ID NO: 1222960 - RNA, 24 nt, Human
cagcuggauagacuuauccaaaac

SEQ ID NO: 1222961 - RNA, 22 nt, Human
cagguuuccuccacccacauuu

SEQ ID NO: 1222962 - RNA, 24 nt, Human
caucagguacaacaaaagaucaaa

SEQ ID NO: 1222963 - RNA, 20 nt, Human
cccacaaucuccaaguucac

SEQ ID NO: 1222964 - RNA, 21 nt, Human
ccccaaaagaccacacaaucc

SEQ ID NO: 1222965 - RNA, 21 nt, Human
ccuccggccugagaaaggggc

SEQ ID NO: 1222966 - RNA, 21 nt, Human
ccugaaaauuucccagcagca

SEQ ID NO: 1222967 - RNA, 20 nt, Human
cucaaagauggcagugccau

SEQ ID NO: 1222968 - RNA, 18 nt, Human
cucaggaacugaacuuuu

SEQ ID NO: 1222969 - RNA, 18 nt, Human
cuccacccacauuugggc

SEQ ID NO: 1222970 - RNA, 19 nt, Human
cucucagucaucaguaucu

SEQ ID NO: 1222971 - RNA, 19 nt, Human
cugauacugcccauguaca

SEQ ID NO: 1222972 - RNA, 23 nt, Human
cugucaccaggauaauaaagcac

SEQ ID NO: 1222973 - RNA, 22 nt, Human
cuucucuugcaacucuuucaaa

SEQ ID NO: 1222974 - RNA, 20 nt, Human
gaguauuaaaagcacagcug

SEQ ID NO: 1222975 - RNA, 18 nt, Human
gaguuucaucauauauag

SEQ ID NO: 1222976 - RNA, 20 nt, Human
gcaaucuuacaaugucagaa

SEQ ID NO: 1222977 - RNA, 21 nt, Human
gcagcgcaagucacagccuac

SEQ ID NO: 1222978 - RNA, 19 nt, Human
gccaagugcucuaaaaaag

SEQ ID NO: 1222979 - RNA, 23 nt, Human
gcugucacugauaugcccaaggg

SEQ ID NO: 1222980 - RNA, 26 nt, Human
ggaaaaacacuguauuuggugcagcg

SEQ ID NO: 1222981 - RNA, 19 nt, Human
ggacaacagcaacaacaaa

SEQ ID NO: 1222982 - RNA, 19 nt, Human
guauuucccaguggcaugc

SEQ ID NO: 1222983 - RNA, 21 nt, Human
guuucaggguaaacugguggu

SEQ ID NO: 1222984 - RNA, 21 nt, Human
uaaaaaaaaaaaaacaaaaaa

SEQ ID NO: 1222985 - RNA, 23 nt, Human
uaaaaaagaauccaaaguuggua

SEQ ID NO: 1222986 - RNA, 21 nt, Human
uaaaagaaugccagaaaaccc

SEQ ID NO: 1222987 - RNA, 23 nt, Human
uaaaagguggcacacuuuuaaaa

SEQ ID NO: 1222988 - RNA, 21 nt, Human
uaaacaaaacaaaacagaaac

SEQ ID NO: 1222989 - RNA, 23 nt, Human
uaaaugauaaacaaaacaaaaca

SEQ ID NO: 1222990 - RNA, 23 nt, Human
uaaauucuauaaauuguuaaaag

SEQ ID NO: 1222991 - RNA, 19 nt, Human
uaacagcacaaaagaaaaa

SEQ ID NO: 1222992 - RNA, 20 nt, Human
uaacuuaaaagaaugccaga

SEQ ID NO: 1222993 - RNA, 18 nt, Human
uaagagagaccagucugc

SEQ ID NO: 1222994 - RNA, 25 nt, Human
uaauucagccuaauuauaaggccaa

SEQ ID NO: 1222995 - RNA, 19 nt, Human
uacggaaaaacacuguauu

SEQ ID NO: 1222996 - RNA, 21 nt, Human
uagcacuacagguaaaugaac

SEQ ID NO: 1222997 - RNA, 18 nt, Human
uaguaguaaccacaauac

SEQ ID NO: 1222998 - RNA, 21 nt, Human
uauauagaaaaaguaucaccu

SEQ ID NO: 1222999 - RNA, 24 nt, Human
uauauauauggagauauauauaca

SEQ ID NO: 1223000 - RNA, 19 nt, Human
uaugcuaauaacguuaaca

SEQ ID NO: 1223001 - RNA, 20 nt, Human
ucaaaaaaaauauagaaaca

SEQ ID NO: 1223002 - RNA, 18 nt, Human
ucaaaauuauacagccau

SEQ ID NO: 1223003 - RNA, 22 nt, Human
ucaaacccaugucccgauguua

SEQ ID NO: 1223004 - RNA, 21 nt, Human
ucauauauacuccaacuugaa

SEQ ID NO: 1223005 - RNA, 23 nt, Human
uccacaaaggccacccaaaggcc

SEQ ID NO: 1223006 - RNA, 24 nt, Human
uccacuaguuuaucauuuuuuucc

SEQ ID NO: 1223007 - RNA, 21 nt, Human
ucuaggguguuuaaaaagaug

SEQ ID NO: 1223008 - RNA, 23 nt, Human
ucugacaaaugacagaauucagg

SEQ ID NO: 1223009 - RNA, 18 nt, Human
ucugugaggucaaauucc

SEQ ID NO: 1223010 - RNA, 23 nt, Human
ucuuaaaaaaaaaaaaacaaaaa

SEQ ID NO: 1223011 - RNA, 30 nt, Human
ucuuaaaaaaaaaaaaacaaaaaaccccaa

SEQ ID NO: 1223012 - RNA, 18 nt, Human
ugaaagacaguacaucug

SEQ ID NO: 1223013 - RNA, 21 nt, Human
ugaacagcggucaacuuuguc

SEQ ID NO: 1223014 - RNA, 23 nt, Human
ugaagucuacauuucccuugucu

SEQ ID NO: 1223015 - RNA, 22 nt, Human
ugaguauuaaaagcacagcuga

SEQ ID NO: 1223016 - RNA, 21 nt, Human
ugcaaaacauacagauagcua

SEQ ID NO: 1223017 - RNA, 20 nt, Human
ugcauuucugcaugugugca

SEQ ID NO: 1223018 - RNA, 21 nt, Human
ugccaagugcucuaaaaaagc

SEQ ID NO: 1223019 - RNA, 27 nt, Human
ugccagaaaacccagaucaacacuuuc

SEQ ID NO: 1223020 - RNA, 22 nt, Human
ugcucuaaaaaagcagcgcaag

SEQ ID NO: 1223021 - RNA, 18 nt, Human
uggcgcugcagagcuggg

SEQ ID NO: 1223022 - RNA, 21 nt, Human
uggcgcugcagagcugggcuc

SEQ ID NO: 1223023 - RNA, 19 nt, Human
uguaaccaacuagcaugca

SEQ ID NO: 1223024 - RNA, 19 nt, Human
uguauuaagauugcaaaac

SEQ ID NO: 1223025 - RNA, 22 nt, Human
uguauuuggugcaguaucugau

SEQ ID NO: 1223026 - RNA, 25 nt, Human
uguuaagaaggaaauuacagguuuc

SEQ ID NO: 1223027 - RNA, 25 nt, Human
uguuaguaacuugaccauuaaaaaa

SEQ ID NO: 1223028 - RNA, 25 nt, Human
uguuuaugaagucuacauuucccuu

SEQ ID NO: 1223029 - RNA, 26 nt, Human
uuaaaaacacuacggaaaaacacugu

SEQ ID NO: 1223030 - RNA, 24 nt, Human
uuaaaagaaugccagaaaacccag

SEQ ID NO: 1223031 - RNA, 19 nt, Human
uuaaggguaaucauugggu

SEQ ID NO: 1223032 - RNA, 23 nt, Human
uucaaaauccacuuuccuacucc

SEQ ID NO: 1223033 - RNA, 19 nt, Human
uucaaauguaaauagaagc

SEQ ID NO: 1223034 - RNA, 18 nt, Human
uuccuacuccucugagga

SEQ ID NO: 1223035 - RNA, 22 nt, Human
uugacucugcauuucugcaugu

SEQ ID NO: 1223036 - RNA, 27 nt, Human
uuuaaaaagaugaaguggcgcugcaga

SEQ ID NO: 1223037 - RNA, 20 nt, Human
aaagagucaaaacagagaaa

SEQ ID NO: 1223038 - RNA, 18 nt, Human
acaggcuguuugaagggu

SEQ ID NO: 1223039 - RNA, 22 nt, Human
acaucuuuaacauauaugaaua

SEQ ID NO: 1223040 - RNA, 23 nt, Human
caaaacagagaaaaugaaugaac

SEQ ID NO: 1223041 - RNA, 23 nt, Human
cacaacaauuucauaccagcauu

SEQ ID NO: 1223042 - RNA, 22 nt, Human
caggacuuuuuugggugaaaag

SEQ ID NO: 1223043 - RNA, 20 nt, Human
cauccucagaggcucugguu

SEQ ID NO: 1223044 - RNA, 22 nt, Human
cgcaggacuuuuccuuaguuca

SEQ ID NO: 1223045 - RNA, 22 nt, Human
gaaacaauauuauaaaugugca

SEQ ID NO: 1223046 - RNA, 22 nt, Human
gaagacgggguccuugucuguc

SEQ ID NO: 1223047 - RNA, 21 nt, Human
gauauacacaacaauuucaua

SEQ ID NO: 1223048 - RNA, 18 nt, Human
gggugaaaaggaaaaaug

SEQ ID NO: 1223049 - RNA, 19 nt, Human
gggugaaaaggaaaaaugg

SEQ ID NO: 1223050 - RNA, 22 nt, Human
uacaagguuuaaaacagagaaa

SEQ ID NO: 1223051 - RNA, 24 nt, Human
uacaagguuuaaaacagagaaaca

SEQ ID NO: 1223052 - RNA, 25 nt, Human
uacaucuuuaacauauaugaauacu

SEQ ID NO: 1223053 - RNA, 22 nt, Human
uaccagcauuguuaguaauuag

SEQ ID NO: 1223054 - RNA, 20 nt, Human
uagagagcuucucacccaca

SEQ ID NO: 1223055 - RNA, 21 nt, Human
uaggaaaauggauaaaugagc

SEQ ID NO: 1223056 - RNA, 24 nt, Human
uauacaagguuuaaaacagagaaa

SEQ ID NO: 1223057 - RNA, 19 nt, Human
uccacagugcguaccaaag

SEQ ID NO: 1223058 - RNA, 21 nt, Human
uccauaaggucagagucccug

SEQ ID NO: 1223059 - RNA, 23 nt, Human
ucccugcuagagagcuucucacc

SEQ ID NO: 1223060 - RNA, 18 nt, Human
uccucagaggcucugguu

SEQ ID NO: 1223061 - RNA, 19 nt, Human
uccucagaggcucugguug

SEQ ID NO: 1223062 - RNA, 23 nt, Human
ugcaacaguaggaaaauggauaa

SEQ ID NO: 1223063 - RNA, 20 nt, Human
uggauaaaugagcuguagua

SEQ ID NO: 1223064 - RNA, 18 nt, Human
uucauaccagcauuguua

SEQ ID NO: 1223065 - RNA, 22 nt, Human
uuuuccuauuuauacaagguuu

SEQ ID NO: 1223066 - RNA, 18 nt, Human
aaaugcuaacacauacug

SEQ ID NO: 1223067 - RNA, 22 nt, Human
aaauguggaacaguauucauau

SEQ ID NO: 1223068 - RNA, 23 nt, Human
aacaaauguggaacaguauucau

SEQ ID NO: 1223069 - RNA, 20 nt, Human
aaggcaugauuucuaacuuu

SEQ ID NO: 1223070 - RNA, 20 nt, Human
aaguaaaaggacauuuauac

SEQ ID NO: 1223071 - RNA, 20 nt, Human
acagugaaguagauacugaa

SEQ ID NO: 1223072 - RNA, 23 nt, Human
auaaaugaaaguacauaugaaug

SEQ ID NO: 1223073 - RNA, 21 nt, Human
auaagcacugacuuuccaaau

SEQ ID NO: 1223074 - RNA, 18 nt, Human
auaagugcucaaaugcua

SEQ ID NO: 1223075 - RNA, 22 nt, Human
caaaagaaacaaauguggaaca

SEQ ID NO: 1223076 - RNA, 23 nt, Human
cauaugaaugcuauuauuugaau

SEQ ID NO: 1223077 - RNA, 21 nt, Human
ccaucugcacaacugacuagg

SEQ ID NO: 1223078 - RNA, 25 nt, Human
cccaaaagaaacaaauguggaaccc

SEQ ID NO: 1223079 - RNA, 24 nt, Human
cuagaauagugagaggucuuuucu

SEQ ID NO: 1223080 - RNA, 19 nt, Human
cugaaauagacauugaaag

SEQ ID NO: 1223081 - RNA, 24 nt, Human
cuguuucacauucucuugaacuga

SEQ ID NO: 1223082 - RNA, 24 nt, Human
gaaauuacaaaugcucauauacua

SEQ ID NO: 1223083 - RNA, 18 nt, Human
gagucauuuuuagacuaa

SEQ ID NO: 1223084 - RNA, 21 nt, Human
ggaguaaaaccaacaucuaaa

SEQ ID NO: 1223085 - RNA, 22 nt, Human
ggauuuguuuuuauuuuucucu

SEQ ID NO: 1223086 - RNA, 22 nt, Human
uaaaaccaacaucuaaauguug

SEQ ID NO: 1223087 - RNA, 20 nt, Human
uaaaguaaaaggacauuuau

SEQ ID NO: 1223088 - RNA, 18 nt, Human
uaauuccauauaaaugaa

SEQ ID NO: 1223089 - RNA, 19 nt, Human
uaauuugcuuuuacauaga

SEQ ID NO: 1223090 - RNA, 19 nt, Human
uauuucaaaucauuggcaa

SEQ ID NO: 1223091 - RNA, 21 nt, Human
ucaacugaaagauuaaaaaaa

SEQ ID NO: 1223092 - RNA, 23 nt, Human
ucccaaaagaaacaaauguggaa

SEQ ID NO: 1223093 - RNA, 22 nt, Human
ugggaagaaauucaacugaaag

SEQ ID NO: 1223094 - RNA, 30 nt, Human
uuaauagaacaguaauguugauuuuucuuu

SEQ ID NO: 1223095 - RNA, 19 nt, Human
uucacauucucuugaacug

SEQ ID NO: 1223096 - RNA, 26 nt, Human
uucauaugaguuuauuuuugugauaa

SEQ ID NO: 1223097 - RNA, 22 nt, Human
uuccauauaaaugaaaguacau

SEQ ID NO: 1223098 - RNA, 23 nt, Human
uucucuauuugggaagaaauuca

SEQ ID NO: 1223099 - RNA, 21 nt, Human
uuugggcacuucuuaaaauga

SEQ ID NO: 1223100 - RNA, 25 nt, Human
aaaaaaauacuuucacagcaacacu

SEQ ID NO: 1223101 - RNA, 27 nt, Human
aaaaacuaugacuugccacuaaaucuu

SEQ ID NO: 1223102 - RNA, 19 nt, Human
aaagcgcugggacugcagg

SEQ ID NO: 1223103 - RNA, 20 nt, Human
aaaggcaggcgccacuagcc

SEQ ID NO: 1223104 - RNA, 27 nt, Human
aacacauuucacacacacauauacaca

SEQ ID NO: 1223105 - RNA, 18 nt, Human
aacuaaguaguucaugga

SEQ ID NO: 1223106 - RNA, 25 nt, Human
aagcaaagauacaaagucugagacc

SEQ ID NO: 1223107 - RNA, 18 nt, Human
aagcagucauuaucugcc

SEQ ID NO: 1223108 - RNA, 25 nt, Human
aagcgauccucccgcuucagccucc

SEQ ID NO: 1223109 - RNA, 22 nt, Human
aagcgaucugcccgccuuggcc

SEQ ID NO: 1223110 - RNA, 19 nt, Human
aagcgcugggacugcaggc

SEQ ID NO: 1223111 - RNA, 20 nt, Human
aagugacauauaaccugaaa

SEQ ID NO: 1223112 - RNA, 19 nt, Human
aaguguaccccagaaaaca

SEQ ID NO: 1223113 - RNA, 22 nt, Human
acaguaaucagagaagcgcacc

SEQ ID NO: 1223114 - RNA, 22 nt, Human
accacagacacacacgugcguu

SEQ ID NO: 1223115 - RNA, 20 nt, Human
accccagaaaacacucacca

SEQ ID NO: 1223116 - RNA, 24 nt, Human
accccagaaaacacucaccacaga

SEQ ID NO: 1223117 - RNA, 22 nt, Human
accugcaagcaaagauacaaag

SEQ ID NO: 1223118 - RNA, 19 nt, Human
acuacagccuagucacguu

SEQ ID NO: 1223119 - RNA, 18 nt, Human
acugacucacuaccaugc

SEQ ID NO: 1223120 - RNA, 23 nt, Human
agaaaugucaaaaggugaaaaug

SEQ ID NO: 1223121 - RNA, 26 nt, Human
agaagaugugugugugugugugugug

SEQ ID NO: 1223122 - RNA, 25 nt, Human
agagaaaaagcuucgcggaccacac

SEQ ID NO: 1223123 - RNA, 23 nt, Human
agagaaacagaaucaacagaaga

SEQ ID NO: 1223124 - RNA, 24 nt, Human
agaugugugugugugugugugugu

SEQ ID NO: 1223125 - RNA, 20 nt, Human
agcagcaucuaucuuuccac

SEQ ID NO: 1223126 - RNA, 21 nt, Human
agcaucuaucuuuccaccagc

SEQ ID NO: 1223127 - RNA, 25 nt, Human
aggcuggagugcaguggcacaaucu

SEQ ID NO: 1223128 - RNA, 23 nt, Human
aggguuuugcucaguugcccagg

SEQ ID NO: 1223129 - RNA, 20 nt, Human
agugcaguggcacaaucucg

SEQ ID NO: 1223130 - RNA, 19 nt, Human
agugcaguggugugauuag

SEQ ID NO: 1223131 - RNA, 23 nt, Human
agugcaguggugugauuagagcu

SEQ ID NO: 1223132 - RNA, 24 nt, Human
agugcaguggugugauuagagcuc

SEQ ID NO: 1223133 - RNA, 18 nt, Human
agugggagggagaggagg

SEQ ID NO: 1223134 - RNA, 20 nt, Human
aucagagaagcgcaccuuuu

SEQ ID NO: 1223135 - RNA, 22 nt, Human
aucaggcccauccacaucaugg

SEQ ID NO: 1223136 - RNA, 21 nt, Human
aucaucucuugcaaugaacuc

SEQ ID NO: 1223137 - RNA, 18 nt, Human
auccuggcaaacucuccc

SEQ ID NO: 1223138 - RNA, 22 nt, Human
augugugugugugugugugugu

SEQ ID NO: 1223139 - RNA, 22 nt, Human
augugugugugugugugugugu

SEQ ID NO: 1223140 - RNA, 21 nt, Human
auguuuccuuaaagugauauu

SEQ ID NO: 1223141 - RNA, 24 nt, Human
auuacaggaacuaaguaguucaug

SEQ ID NO: 1223142 - RNA, 25 nt, Human
caaagcgcugggacugcaggcgagc

SEQ ID NO: 1223143 - RNA, 27 nt, Human
caagcgauccucccgcuucagccuccc

SEQ ID NO: 1223144 - RNA, 18 nt, Human
cacacacacauauacaca

SEQ ID NO: 1223145 - RNA, 23 nt, Human
caccccgcgagcucucauugacc

SEQ ID NO: 1223146 - RNA, 21 nt, Human
cagaaaacacucaccacagac

SEQ ID NO: 1223147 - RNA, 23 nt, Human
cagaaaacacucaccacagacac

SEQ ID NO: 1223148 - RNA, 21 nt, Human
cagagaaacagaaucaacaga

SEQ ID NO: 1223149 - RNA, 23 nt, Human
cagccucccaaguaacuaggacu

SEQ ID NO: 1223150 - RNA, 26 nt, Human
cagcguggggaugagggaauucagcg

SEQ ID NO: 1223151 - RNA, 21 nt, Human
cagcuguagcuugaaagcaga

SEQ ID NO: 1223152 - RNA, 20 nt, Human
ccaaauaucuggguacuaca

SEQ ID NO: 1223153 - RNA, 21 nt, Human
ccaacagaaacucucuaaagc

SEQ ID NO: 1223154 - RNA, 22 nt, Human
ccaaguaacuaggacuaaaggc

SEQ ID NO: 1223155 - RNA, 24 nt, Human
ccaccugcaagcaaagauacaaag

SEQ ID NO: 1223156 - RNA, 23 nt, Human
ccagagaaacagaaucaacagaa

SEQ ID NO: 1223157 - RNA, 21 nt, Human
ccaggcuggagugcaguggca

SEQ ID NO: 1223158 - RNA, 22 nt, Human
ccauaucuucccauacacgacc

SEQ ID NO: 1223159 - RNA, 19 nt, Human
cccaggcuggagugcagug

SEQ ID NO: 1223160 - RNA, 18 nt, Human
ccccgcgguuaacuagca

SEQ ID NO: 1223161 - RNA, 19 nt, Human
ccuccauguccucccgcgu

SEQ ID NO: 1223162 - RNA, 24 nt, Human
ccucccgcuucagccucccaagua

SEQ ID NO: 1223163 - RNA, 19 nt, Human
ccugcaagcaaagauacaa

SEQ ID NO: 1223164 - RNA, 18 nt, Human
ccuggucucaagcgaucc

SEQ ID NO: 1223165 - RNA, 25 nt, Human
ccugugggaacaaguguaccccaga

SEQ ID NO: 1223166 - RNA, 23 nt, Human
ccuuccccagggcgccuuucucg

SEQ ID NO: 1223167 - RNA, 20 nt, Human
cuacuuuacucaaagucuaa

SEQ ID NO: 1223168 - RNA, 24 nt, Human
cucaagcgauccucccgcuucagc

SEQ ID NO: 1223169 - RNA, 18 nt, Human
cucaagcgaucugcccgc

SEQ ID NO: 1223170 - RNA, 19 nt, Human
cucaguugcccaggcugga

SEQ ID NO: 1223171 - RNA, 22 nt, Human
cucccgcguccagcggcugcgg

SEQ ID NO: 1223172 - RNA, 19 nt, Human
cugaagccucaaacuccug

SEQ ID NO: 1223173 - RNA, 21 nt, Human
cuguggcaggagguggagaag

SEQ ID NO: 1223174 - RNA, 21 nt, Human
cuugcucugucguccaggcug

SEQ ID NO: 1223175 - RNA, 24 nt, Human
cuugcucugucguccaggcuggag

SEQ ID NO: 1223176 - RNA, 18 nt, Human
cuuugaguccauaucuuc

SEQ ID NO: 1223177 - RNA, 24 nt, Human
gagcucaagcgaucugcccgccuu

SEQ ID NO: 1223178 - RNA, 19 nt, Human
gagcucucauugacccucc

SEQ ID NO: 1223179 - RNA, 26 nt, Human
gagggagaggaggacguuggugcagu

SEQ ID NO: 1223180 - RNA, 18 nt, Human
gcagaauggcgucacccc

SEQ ID NO: 1223181 - RNA, 20 nt, Human
gccaaagcgcugggacugca

SEQ ID NO: 1223182 - RNA, 24 nt, Human
gccaaagcgcugggacugcaggcg

SEQ ID NO: 1223183 - RNA, 24 nt, Human
gcccaggcuggagugcaguggugu

SEQ ID NO: 1223184 - RNA, 20 nt, Human
gccgcggcccccguucccca

SEQ ID NO: 1223185 - RNA, 24 nt, Human
gcgauccucccgcuucagccuccc

SEQ ID NO: 1223186 - RNA, 19 nt, Human
gcucaguugcccaggcugg

SEQ ID NO: 1223187 - RNA, 20 nt, Human
gcucaguugcccaggcugga

SEQ ID NO: 1223188 - RNA, 18 nt, Human
gcucucauugacccucca

SEQ ID NO: 1223189 - RNA, 19 nt, Human
gcuggagugcaguggcaca

SEQ ID NO: 1223190 - RNA, 23 nt, Human
gcuucagccucccaaguaacuag

SEQ ID NO: 1223191 - RNA, 23 nt, Human
ggaaaauucagaacaaaaaggcc

SEQ ID NO: 1223192 - RNA, 22 nt, Human
ggaacaaguguaccccagaaaa

SEQ ID NO: 1223193 - RNA, 20 nt, Human
ggagguggagaagggcccgg

SEQ ID NO: 1223194 - RNA, 19 nt, Human
ggagugugcagugggaggg

SEQ ID NO: 1223195 - RNA, 18 nt, Human
ggcaggagguggagaagg

SEQ ID NO: 1223196 - RNA, 24 nt, Human
ggcaggagguggagaagggggacc

SEQ ID NO: 1223197 - RNA, 22 nt, Human
ggcuggagugcaguggugugau

SEQ ID NO: 1223198 - RNA, 19 nt, Human
gguaggcuggagacucuga

SEQ ID NO: 1223199 - RNA, 24 nt, Human
gugugcagugggagggagaggagg

SEQ ID NO: 1223200 - RNA, 23 nt, Human
gugugugugugugugaagaggug

SEQ ID NO: 1223201 - RNA, 24 nt, Human
guuuugcucaguugcccaggcugg

SEQ ID NO: 1223202 - RNA, 25 nt, Human
uaaaaggccgugcugaccacaaacg

SEQ ID NO: 1223203 - RNA, 19 nt, Human
uaaaucuuaaaauauuccu

SEQ ID NO: 1223204 - RNA, 24 nt, Human
uaaccugaaauguaaaggaaacac

SEQ ID NO: 1223205 - RNA, 19 nt, Human
uaaggaaagaaguagcagc

SEQ ID NO: 1223206 - RNA, 23 nt, Human
uaaucagagaagcgcaccuuuuu

SEQ ID NO: 1223207 - RNA, 18 nt, Human
uagcaugauuaacauaau

SEQ ID NO: 1223208 - RNA, 24 nt, Human
uaggguuuugcucaguugcccagg

SEQ ID NO: 1223209 - RNA, 22 nt, Human
uauuccuacuucagaaauguca

SEQ ID NO: 1223210 - RNA, 18 nt, Human
uauugcccaggcuggucu

SEQ ID NO: 1223211 - RNA, 19 nt, Human
uauugcccaggcuggucug

SEQ ID NO: 1223212 - RNA, 19 nt, Human
uauugcccaggcuggucug

SEQ ID NO: 1223213 - RNA, 22 nt, Human
uauugcccaggcuggucuggaa

SEQ ID NO: 1223214 - RNA, 24 nt, Human
uauuuuauauaacuucugggaagu

SEQ ID NO: 1223215 - RNA, 22 nt, Human
ucacugaagccucaaacuccug

SEQ ID NO: 1223216 - RNA, 18 nt, Human
ucagaacaaaaaggccug

SEQ ID NO: 1223217 - RNA, 24 nt, Human
ucaguugcccaggcuggagugcag

SEQ ID NO: 1223218 - RNA, 22 nt, Human
ucauuuauuuuuacaguaauca

SEQ ID NO: 1223219 - RNA, 21 nt, Human
uccaacagaaacucucuaaag

SEQ ID NO: 1223220 - RNA, 28 nt, Human
uccaccagcacaucaucucuugcaauga

SEQ ID NO: 1223221 - RNA, 21 nt, Human
uccuuacucuuguaucugauc

SEQ ID NO: 1223222 - RNA, 24 nt, Human
ucguccaggcuggagugcaguggc

SEQ ID NO: 1223223 - RNA, 22 nt, Human
ucuacaaacucuuugaguccau

SEQ ID NO: 1223224 - RNA, 23 nt, Human
ucucgcuguauugcccaggcugg

SEQ ID NO: 1223225 - RNA, 23 nt, Human
ucucgcuguauugcccaggcugg

SEQ ID NO: 1223226 - RNA, 24 nt, Human
ucucgcuguauugcccaggcuggu

SEQ ID NO: 1223227 - RNA, 26 nt, Human
ucucgcuguauugcccaggcuggucu

SEQ ID NO: 1223228 - RNA, 22 nt, Human
ucucuugcaaugaacucuuuug

SEQ ID NO: 1223229 - RNA, 22 nt, Human
ucugaagaaacuggcuaacuca

SEQ ID NO: 1223230 - RNA, 24 nt, Human
ucugucguccaggcuggagugcag

SEQ ID NO: 1223231 - RNA, 22 nt, Human
ucuuaggcagauacauguuacc

SEQ ID NO: 1223232 - RNA, 23 nt, Human
ucuugcucugucguccaggcugg

SEQ ID NO: 1223233 - RNA, 24 nt, Human
ucuugcucugucguccaggcugga

SEQ ID NO: 1223234 - RNA, 19 nt, Human
ugacacaaaacuagccauu

SEQ ID NO: 1223235 - RNA, 21 nt, Human
ugaccacaaacgggaccgucu

SEQ ID NO: 1223236 - RNA, 21 nt, Human
ugagcugcaaagcagucauua

SEQ ID NO: 1223237 - RNA, 24 nt, Human
ugaguugaaaaaaguuucauuuuu

SEQ ID NO: 1223238 - RNA, 20 nt, Human
ugcaagcaaagauacaaagu

SEQ ID NO: 1223239 - RNA, 18 nt, Human
ugcccaggcuggagugca

SEQ ID NO: 1223240 - RNA, 21 nt, Human
ugcccaggcuggagugcagug

SEQ ID NO: 1223241 - RNA, 24 nt, Human
ugcccaggcuggagugcaguggug

SEQ ID NO: 1223242 - RNA, 22 nt, Human
ugccugagcccccgcgguuaac

SEQ ID NO: 1223243 - RNA, 21 nt, Human
ugcucaguugcccaggcugga

SEQ ID NO: 1223244 - RNA, 24 nt, Human
ugcucaguugcccaggcuggagug

SEQ ID NO: 1223245 - RNA, 24 nt, Human
ugcucugucguccaggcuggagug

SEQ ID NO: 1223246 - RNA, 23 nt, Human
uggagugcaguggcacaaucucg

SEQ ID NO: 1223247 - RNA, 24 nt, Human
uggagugcaguggcacaaucucgg

SEQ ID NO: 1223248 - RNA, 19 nt, Human
uggagugcaguggugugau

SEQ ID NO: 1223249 - RNA, 28 nt, Human
uggagugcaguggugugauggcucuagc

SEQ ID NO: 1223250 - RNA, 21 nt, Human
uggagugcaguggugugauua

SEQ ID NO: 1223251 - RNA, 18 nt, Human
uggcaggagguggagaag

SEQ ID NO: 1223252 - RNA, 19 nt, Human
uggcuaacucaauaugggg

SEQ ID NO: 1223253 - RNA, 18 nt, Human
ugggagaagcugcgagug

SEQ ID NO: 1223254 - RNA, 19 nt, Human
ugggagaagcugcgagugc

SEQ ID NO: 1223255 - RNA, 21 nt, Human
ugggagaagcugcgagugcug

SEQ ID NO: 1223256 - RNA, 21 nt, Human
ugggagggagaggaggacguu

SEQ ID NO: 1223257 - RNA, 24 nt, Human
uggguucucgcuguauugcccagg

SEQ ID NO: 1223258 - RNA, 22 nt, Human
uggucucaagcgauccucccgc

SEQ ID NO: 1223259 - RNA, 22 nt, Human
uggugugauuagagcucacuga

SEQ ID NO: 1223260 - RNA, 20 nt, Human
uguauuaggggucuccagag

SEQ ID NO: 1223261 - RNA, 23 nt, Human
uguauugcccaggcuggucugga

SEQ ID NO: 1223262 - RNA, 19 nt, Human
uguccugaagagaaaaagc

SEQ ID NO: 1223263 - RNA, 19 nt, Human
ugucguccaggcuggagug

SEQ ID NO: 1223264 - RNA, 25 nt, Human
uguggcaggagguggagaagggccc

SEQ ID NO: 1223265 - RNA, 18 nt, Human
ugugugugugugugugug

SEQ ID NO: 1223266 - RNA, 18 nt, Human
ugugugugugugugugug

SEQ ID NO: 1223267 - RNA, 23 nt, Human
uguuacagcuguagcuugaaagc

SEQ ID NO: 1223268 - RNA, 19 nt, Human
uucucgcuguauugcccag

SEQ ID NO: 1223269 - RNA, 27 nt, Human
uugacacaaaacuagccauuacaggaa

SEQ ID NO: 1223270 - RNA, 24 nt, Human
uugcccaggcuggagugcaguggu

SEQ ID NO: 1223271 - RNA, 21 nt, Human
uugcucaguugcccaggcugg

SEQ ID NO: 1223272 - RNA, 22 nt, Human
uugcucaguugcccaggcugga

SEQ ID NO: 1223273 - RNA, 24 nt, Human
uugcucaguugcccaggcuggagu

SEQ ID NO: 1223274 - RNA, 24 nt, Human
uugcucugucguccaggcuggagu

SEQ ID NO: 1223275 - RNA, 20 nt, Human
uuguuuguuuguuuguuuuu

SEQ ID NO: 1223276 - RNA, 22 nt, Human
uuguuuguuuguuuuuguuuuu

SEQ ID NO: 1223277 - RNA, 18 nt, Human
uuucugccaugcugucuc

SEQ ID NO: 1223278 - RNA, 23 nt, Human
uuuucuuuuuuuagagauagggu

SEQ ID NO: 1223279 - RNA, 24 nt, Human
uuuugcucaguugcccaggcugga

SEQ ID NO: 1223280 - RNA, 19 nt, Human
uuuuuuagagauaggguuu

SEQ ID NO: 1223281 - RNA, 24 nt, Human
uuuuuucuuuuuuuagagauaggg

SEQ ID NO: 1223282 - RNA, 20 nt, Human
acucuacuuacuggagagaa

SEQ ID NO: 1223283 - RNA, 18 nt, Human
aggaggaggaagggcuga

SEQ ID NO: 1223284 - RNA, 18 nt, Human
aggauacaaugcuugaaa

SEQ ID NO: 1223285 - RNA, 20 nt, Human
aguaguauccuuaugaguac

SEQ ID NO: 1223286 - RNA, 18 nt, Human
cugacccaaaaaaugccu

SEQ ID NO: 1223287 - RNA, 21 nt, Human
ggaccagaggugagcagagaa

SEQ ID NO: 1223288 - RNA, 18 nt, Human
ggagagaaagaaauggua

SEQ ID NO: 1223289 - RNA, 22 nt, Human
ggauuaggaggaggaagggcug

SEQ ID NO: 1223290 - RNA, 23 nt, Human
uaaaaaggacuucuaccaagaac

SEQ ID NO: 1223291 - RNA, 24 nt, Human
uaaaucacuuaauauuuucaguuc

SEQ ID NO: 1223292 - RNA, 21 nt, Human
uaccaagaacaugaaaguaac

SEQ ID NO: 1223293 - RNA, 25 nt, Human
uaugauaacuaccuuguuacugcag

SEQ ID NO: 1223294 - RNA, 21 nt, Human
ucucuuauauacaagugugau

SEQ ID NO: 1223295 - RNA, 22 nt, Human
ugaaaaggaaccuuaaaagcau

SEQ ID NO: 1223296 - RNA, 22 nt, Human
ugaaauuaggacugacccaaaa

SEQ ID NO: 1223297 - RNA, 21 nt, Human
ugaauagugaagauaggguac

SEQ ID NO: 1223298 - RNA, 18 nt, Human
ugacuauaaauaaaaagg

SEQ ID NO: 1223299 - RNA, 18 nt, Human
ugauuaacguuuuucccc

SEQ ID NO: 1223300 - RNA, 25 nt, Human
uguuacugcagaaauguagaaguuu

SEQ ID NO: 1223301 - RNA, 21 nt, Human
uuccugaacuaauauaggaac

SEQ ID NO: 1223302 - RNA, 21 nt, Human
uugcuuagcuguggaccagag

SEQ ID NO: 1223303 - RNA, 20 nt, Human
agagaagggauuccucggau

SEQ ID NO: 1223304 - RNA, 22 nt, Human
aggcugggagccccagggaguc

SEQ ID NO: 1223305 - RNA, 23 nt, Human
agggauuccucggauucccaagg

SEQ ID NO: 1223306 - RNA, 23 nt, Human
caaggcacccagcgccccugccu

SEQ ID NO: 1223307 - RNA, 24 nt, Human
cacaagacuauaauuccuuuagaa

SEQ ID NO: 1223308 - RNA, 22 nt, Human
cccaaggcacccagcgccccug

SEQ ID NO: 1223309 - RNA, 22 nt, Human
ccccuucggcucccucuagucc

SEQ ID NO: 1223310 - RNA, 20 nt, Human
cccucccagccacuccgguu

SEQ ID NO: 1223311 - RNA, 21 nt, Human
cggcucccucuaguccccucc

SEQ ID NO: 1223312 - RNA, 20 nt, Human
gaaggcugggagccccaggg

SEQ ID NO: 1223313 - RNA, 19 nt, Human
ggagucuucacgaccgcuc

SEQ ID NO: 1223314 - RNA, 25 nt, Human
ggccccuucggcucccucuaguccc

SEQ ID NO: 1223315 - RNA, 21 nt, Human
ggcgcggagagggaaggcugg

SEQ ID NO: 1223316 - RNA, 22 nt, Human
gggaaggcugggagccccaggg

SEQ ID NO: 1223317 - RNA, 20 nt, Human
ggggaggggcgcggagaggg

SEQ ID NO: 1223318 - RNA, 21 nt, Human
guuuggguuugccacaagacu

SEQ ID NO: 1223319 - RNA, 21 nt, Human
ucccagccacuccgguuuggg

SEQ ID NO: 1223320 - RNA, 22 nt, Human
uccggccccuucggcucccucu

SEQ ID NO: 1223321 - RNA, 21 nt, Human
ugggagccccagggagucuuc

SEQ ID NO: 1223322 - RNA, 19 nt, Human
uggggggaggggcgcggag

SEQ ID NO: 1223323 - RNA, 20 nt, Human
uuccucggauucccaaggca

SEQ ID NO: 1223324 - RNA, 23 nt, Human
uucggcucccucuaguccccucc

SEQ ID NO: 1223325 - RNA, 24 nt, Human
uuuaaagauuuucuuuuccccccu

SEQ ID NO: 1223326 - RNA, 24 nt, Human
acagagcgagacuccaucacaaaa

SEQ ID NO: 1223327 - RNA, 18 nt, Human
acccccagagagccucaa

SEQ ID NO: 1223328 - RNA, 22 nt, Human
agccucaaccauggagccccgu

SEQ ID NO: 1223329 - RNA, 24 nt, Human
agccugggugacagagcgagacuc

SEQ ID NO: 1223330 - RNA, 18 nt, Human
auucuggccacccccaga

SEQ ID NO: 1223331 - RNA, 22 nt, Human
caccuggcuggcuucaggugug

SEQ ID NO: 1223332 - RNA, 22 nt, Human
cacuccagccugggugacagag

SEQ ID NO: 1223333 - RNA, 24 nt, Human
cacuccagccugggugacagagcg

SEQ ID NO: 1223334 - RNA, 19 nt, Human
cacuccuccaucccacugc

SEQ ID NO: 1223335 - RNA, 19 nt, Human
caugggcugcaggccugug

SEQ ID NO: 1223336 - RNA, 23 nt, Human
ccacugccuccgggugguaucug

SEQ ID NO: 1223337 - RNA, 21 nt, Human
ccauggagccccgugcugggg

SEQ ID NO: 1223338 - RNA, 22 nt, Human
ccauggagccccgugcugggga

SEQ ID NO: 1223339 - RNA, 24 nt, Human
cccacugccuccgggugguaucug

SEQ ID NO: 1223340 - RNA, 20 nt, Human
ccccacagaauggggacagg

SEQ ID NO: 1223341 - RNA, 19 nt, Human
ccccgugcuggggaacccc

SEQ ID NO: 1223342 - RNA, 22 nt, Human
ccucggcucagcacaccccacc

SEQ ID NO: 1223343 - RNA, 22 nt, Human
ccugggugacagagcgagacuc

SEQ ID NO: 1223344 - RNA, 18 nt, Human
ccuugcuugcagcucucc

SEQ ID NO: 1223345 - RNA, 20 nt, Human
cuccaucccacugccuccgg

SEQ ID NO: 1223346 - RNA, 25 nt, Human
cugugggcuccccucccccuugcuu

SEQ ID NO: 1223347 - RNA, 18 nt, Human
gagacuccaucacaaaaa

SEQ ID NO: 1223348 - RNA, 21 nt, Human
gagcgagacuccaucacaaaa

SEQ ID NO: 1223349 - RNA, 24 nt, Human
gcacuccagccugggugacagagc

SEQ ID NO: 1223350 - RNA, 22 nt, Human
gccacccccagagagccucaac

SEQ ID NO: 1223351 - RNA, 19 nt, Human
gcgaguccccgagaggucu

SEQ ID NO: 1223352 - RNA, 18 nt, Human
gcucagcacaccccaccu

SEQ ID NO: 1223353 - RNA, 21 nt, Human
ucaaccauggagccccgugcu

SEQ ID NO: 1223354 - RNA, 21 nt, Human
ucagcacaccccaccuggcug

SEQ ID NO: 1223355 - RNA, 23 nt, Human
uccagccugggugacagagcgag

SEQ ID NO: 1223356 - RNA, 24 nt, Human
uccagccugggugacagagcgaga

SEQ ID NO: 1223357 - RNA, 26 nt, Human
uccuccaucccacugccuccgggugg

SEQ ID NO: 1223358 - RNA, 18 nt, Human
ucuggccacccccagaga

SEQ ID NO: 1223359 - RNA, 19 nt, Human
ugcacuccagccuggguga

SEQ ID NO: 1223360 - RNA, 22 nt, Human
ugcacuccagccugggugacag

SEQ ID NO: 1223361 - RNA, 22 nt, Human
uggcuucaggugugaaacucac

SEQ ID NO: 1223362 - RNA, 24 nt, Human
uggggacagggaccccucggcuca

SEQ ID NO: 1223363 - RNA, 21 nt, Human
aaagggccauuggccagagag

SEQ ID NO: 1223364 - RNA, 19 nt, Human
aagaggcaggacagagagg

SEQ ID NO: 1223365 - RNA, 25 nt, Human
aagaggcaggacagagaggggcccg

SEQ ID NO: 1223366 - RNA, 22 nt, Human
acagagaggggcccgcuucgga

SEQ ID NO: 1223367 - RNA, 18 nt, Human
accaggacccucacccaa

SEQ ID NO: 1223368 - RNA, 22 nt, Human
agaggcaggacagagaggggcc

SEQ ID NO: 1223369 - RNA, 18 nt, Human
agaggggggugccuggag

SEQ ID NO: 1223370 - RNA, 24 nt, Human
agaggggggugccuggagcugcca

SEQ ID NO: 1223371 - RNA, 21 nt, Human
agccuguagccacugucacca

SEQ ID NO: 1223372 - RNA, 20 nt, Human
aggacagagaggggcccgcu

SEQ ID NO: 1223373 - RNA, 25 nt, Human
aggaccuggggcuguaggguggggg

SEQ ID NO: 1223374 - RNA, 18 nt, Human
aggcaggacagagagggg

SEQ ID NO: 1223375 - RNA, 22 nt, Human
aggcaggacagagaggggcccg

SEQ ID NO: 1223376 - RNA, 19 nt, Human
aggcggugacgccgggggc

SEQ ID NO: 1223377 - RNA, 23 nt, Human
agggacugggccaggaccugggg

SEQ ID NO: 1223378 - RNA, 20 nt, Human
augggccagagccugugugg

SEQ ID NO: 1223379 - RNA, 22 nt, Human
caaggggacagaccacaggugc

SEQ ID NO: 1223380 - RNA, 23 nt, Human
caccaccuccugcagggccgguc

SEQ ID NO: 1223381 - RNA, 23 nt, Human
caccccugugcagaggccagaag

SEQ ID NO: 1223382 - RNA, 23 nt, Human
cagugaaagggccauuggccaga

SEQ ID NO: 1223383 - RNA, 21 nt, Human
ccaacagugucagagccagca

SEQ ID NO: 1223384 - RNA, 25 nt, Human
ccagagccugugugggcgcugccca

SEQ ID NO: 1223385 - RNA, 21 nt, Human
ccaugggccagagccugugug

SEQ ID NO: 1223386 - RNA, 24 nt, Human
ccuggggcuguagggugggggugg

SEQ ID NO: 1223387 - RNA, 19 nt, Human
cgaggcaguggagggacug

SEQ ID NO: 1223388 - RNA, 25 nt, Human
cgcuucggaccuggcaaagccuggg

SEQ ID NO: 1223389 - RNA, 21 nt, Human
cggucagggcacgccaggggc

SEQ ID NO: 1223390 - RNA, 20 nt, Human
cguggaaggacggcaggccg

SEQ ID NO: 1223391 - RNA, 21 nt, Human
cuccucaggggugaggcuggg

SEQ ID NO: 1223392 - RNA, 21 nt, Human
cuggggcucucugcugcccca

SEQ ID NO: 1223393 - RNA, 22 nt, Human
cuggggcuguagggugggggug

SEQ ID NO: 1223394 - RNA, 20 nt, Human
cuguagggugggggugggag

SEQ ID NO: 1223395 - RNA, 19 nt, Human
gaccaggacccucacccaa

SEQ ID NO: 1223396 - RNA, 19 nt, Human
gagcaggugaaaagaggca

SEQ ID NO: 1223397 - RNA, 19 nt, Human
gaggggcccgcuucggacc

SEQ ID NO: 1223398 - RNA, 23 nt, Human
gagguggcagcaguggugagugg

SEQ ID NO: 1223399 - RNA, 19 nt, Human
gcaggccggcaggggggua

SEQ ID NO: 1223400 - RNA, 19 nt, Human
gcgcgggccgcaggcggga

SEQ ID NO: 1223401 - RNA, 25 nt, Human
gcgggccgcaggcgggacgcggggc

SEQ ID NO: 1223402 - RNA, 21 nt, Human
ggacagaccacaggugcuccu

SEQ ID NO: 1223403 - RNA, 27 nt, Human
ggaccuggcaaagccugggccugagca

SEQ ID NO: 1223404 - RNA, 21 nt, Human
ggaccuggggcuguagggugg

SEQ ID NO: 1223405 - RNA, 22 nt, Human
ggacugggccaggaccuggggc

SEQ ID NO: 1223406 - RNA, 22 nt, Human
ggacugggccaggaccuggggc

SEQ ID NO: 1223407 - RNA, 18 nt, Human
ggcaaagccugggccuga

SEQ ID NO: 1223408 - RNA, 22 nt, Human
ggcaggcgggcaggaggcggug

SEQ ID NO: 1223409 - RNA, 23 nt, Human
ggcccagccuguagccacuguca

SEQ ID NO: 1223410 - RNA, 21 nt, Human
gggcuguaggguggggguggg

SEQ ID NO: 1223411 - RNA, 18 nt, Human
ggggcccagccuguagcc

SEQ ID NO: 1223412 - RNA, 22 nt, Human
ggggcuguaggguggggguggg

SEQ ID NO: 1223413 - RNA, 19 nt, Human
ggggggugccuggagcugc

SEQ ID NO: 1223414 - RNA, 22 nt, Human
gggggugggagggcgugagcag

SEQ ID NO: 1223415 - RNA, 22 nt, Human
gggggugggagggcgugagcag

SEQ ID NO: 1223416 - RNA, 24 nt, Human
gugaaagggccauuggccagagag

SEQ ID NO: 1223417 - RNA, 22 nt, Human
guggugagaggggggugccugg

SEQ ID NO: 1223418 - RNA, 20 nt, Human
uagccacugucaccaccccu

SEQ ID NO: 1223419 - RNA, 21 nt, Human
uaggcgggcaggcgggcaggc

SEQ ID NO: 1223420 - RNA, 21 nt, Human
uaggcggguaggcgggcaggc

SEQ ID NO: 1223421 - RNA, 21 nt, Human
uaggcggguaggcggguaggc

SEQ ID NO: 1223422 - RNA, 21 nt, Human
uaggcggguaggcggguaggc

SEQ ID NO: 1223423 - RNA, 21 nt, Human
uagggugggggugggagggcg

SEQ ID NO: 1223424 - RNA, 19 nt, Human
ucaccaggccagugaaagg

SEQ ID NO: 1223425 - RNA, 20 nt, Human
ucaccaggccagugaaaggg

SEQ ID NO: 1223426 - RNA, 24 nt, Human
uccagccauaagcaggaccaaggg

SEQ ID NO: 1223427 - RNA, 22 nt, Human
ucggaccuggcaaagccugggc

SEQ ID NO: 1223428 - RNA, 18 nt, Human
ugagaggggggugccugg

SEQ ID NO: 1223429 - RNA, 19 nt, Human
ugccccagccucacucugc

SEQ ID NO: 1223430 - RNA, 22 nt, Human
ugcccgaaaggaaaaggcaggg

SEQ ID NO: 1223431 - RNA, 19 nt, Human
ugccuggagcugccaguag

SEQ ID NO: 1223432 - RNA, 21 nt, Human
ugccuggagcugccaguagga

SEQ ID NO: 1223433 - RNA, 20 nt, Human
uggcagcaguggugaguggc

SEQ ID NO: 1223434 - RNA, 20 nt, Human
uggcuacagggcacucgggg

SEQ ID NO: 1223435 - RNA, 19 nt, Human
ugggagggcgugagcaggu

SEQ ID NO: 1223436 - RNA, 23 nt, Human
uggggcuguaggguggggguggg

SEQ ID NO: 1223437 - RNA, 18 nt, Human
aaaacaagcauaaauucc

SEQ ID NO: 1223438 - RNA, 18 nt, Human
aaacaagcauaaauuccu

SEQ ID NO: 1223439 - RNA, 23 nt, Human
aauguuucuuaaguuaacaugau

SEQ ID NO: 1223440 - RNA, 21 nt, Human
acaaaucaggguggugaccuu

SEQ ID NO: 1223441 - RNA, 21 nt, Human
acgcaacaucaacgccaacca

SEQ ID NO: 1223442 - RNA, 21 nt, Human
acuccagagagcauugcaaaa

SEQ ID NO: 1223443 - RNA, 25 nt, Human
agaacucuuccaagggugcaugcuu

SEQ ID NO: 1223444 - RNA, 24 nt, Human
agccugucugaucuggugcuuguu

SEQ ID NO: 1223445 - RNA, 19 nt, Human
aucaacgccaaccacuccu

SEQ ID NO: 1223446 - RNA, 18 nt, Human
aucaggguggugaccuug

SEQ ID NO: 1223447 - RNA, 19 nt, Human
caaaccuaucacuugcauc

SEQ ID NO: 1223448 - RNA, 21 nt, Human
cauuuaugaaauccucuaaaa

SEQ ID NO: 1223449 - RNA, 19 nt, Human
cgcaacaucaacgccaacc

SEQ ID NO: 1223450 - RNA, 25 nt, Human
cgccaaagcuguagaacucuuccaa

SEQ ID NO: 1223451 - RNA, 19 nt, Human
cuucuggaaauugcaguuc

SEQ ID NO: 1223452 - RNA, 18 nt, Human
gguggugaccuuggccac

SEQ ID NO: 1223453 - RNA, 22 nt, Human
uaaaacaagcauaaauuccuau

SEQ ID NO: 1223454 - RNA, 24 nt, Human
uaaauaaauauucaccaaacuccu

SEQ ID NO: 1223455 - RNA, 19 nt, Human
uaauguauguuauguauau

SEQ ID NO: 1223456 - RNA, 18 nt, Human
uaucaggacaaaucaggg

SEQ ID NO: 1223457 - RNA, 22 nt, Human
uauguuauguauaugugauauu

SEQ ID NO: 1223458 - RNA, 22 nt, Human
ucauuauugaauauaaaacaag

SEQ ID NO: 1223459 - RNA, 20 nt, Human
ucuggaaauugcaguucauc

SEQ ID NO: 1223460 - RNA, 18 nt, Human
ugccuuguucucuuuauc

SEQ ID NO: 1223461 - RNA, 24 nt, Human
ugucauagagcuucuucacagccu

SEQ ID NO: 1223462 - RNA, 23 nt, Human
ugugauauuuucugaacuccaga

SEQ ID NO: 1223463 - RNA, 24 nt, Human
uuugauucuaauuaaguugucauu

SEQ ID NO: 1223464 - RNA, 23 nt, Human
aagagucugagguccagagugga

SEQ ID NO: 1223465 - RNA, 20 nt, Human
aagcagagccugagcccgcg

SEQ ID NO: 1223466 - RNA, 20 nt, Human
aaggggcguugccagagacu

SEQ ID NO: 1223467 - RNA, 25 nt, Human
acucuguugcccagccuggccucaa

SEQ ID NO: 1223468 - RNA, 23 nt, Human
acuucagccuccugaguagcugg

SEQ ID NO: 1223469 - RNA, 22 nt, Human
agagagugguccacagcaagcc

SEQ ID NO: 1223470 - RNA, 23 nt, Human
aggcuuucuggugucauugcugc

SEQ ID NO: 1223471 - RNA, 24 nt, Human
agggauccucccacuucagccucc

SEQ ID NO: 1223472 - RNA, 18 nt, Human
aguuaggcaggcuuucug

SEQ ID NO: 1223473 - RNA, 18 nt, Human
augaaaaauuugagagga

SEQ ID NO: 1223474 - RNA, 25 nt, Human
caaacuccugagcucaagggauccu

SEQ ID NO: 1223475 - RNA, 24 nt, Human
caagggauccucccacuucagccu

SEQ ID NO: 1223476 - RNA, 19 nt, Human
cacucuguugcccagccug

SEQ ID NO: 1223477 - RNA, 24 nt, Human
cacucuguugcccagccuggccuc

SEQ ID NO: 1223478 - RNA, 19 nt, Human
cacuguaccuggacaaaga

SEQ ID NO: 1223479 - RNA, 19 nt, Human
cagccuccugaguagcugg

SEQ ID NO: 1223480 - RNA, 24 nt, Human
ccacagcaagccacggaguggcau

SEQ ID NO: 1223481 - RNA, 22 nt, Human
ccagaaccccuggccccuucuc

SEQ ID NO: 1223482 - RNA, 22 nt, Human
ccagugguaguuccaaggcugg

SEQ ID NO: 1223483 - RNA, 24 nt, Human
cccacuucagccuccugaguagcu

SEQ ID NO: 1223484 - RNA, 19 nt, Human
cccagaaccccuggccccu

SEQ ID NO: 1223485 - RNA, 23 nt, Human
cccuccacaugcuacuucaugcc

SEQ ID NO: 1223486 - RNA, 21 nt, Human
cccuggccccuucuccacucc

SEQ ID NO: 1223487 - RNA, 23 nt, Human
ccgaggagcuggaacuguaaagg

SEQ ID NO: 1223488 - RNA, 18 nt, Human
ccucacucuguugcccag

SEQ ID NO: 1223489 - RNA, 26 nt, Human
ccucacucuguugcccagccuggccu

SEQ ID NO: 1223490 - RNA, 27 nt, Human
ccucacucuguugcccagccuggccuc

SEQ ID NO: 1223491 - RNA, 23 nt, Human
ccucccacuucagccuccugagu

SEQ ID NO: 1223492 - RNA, 20 nt, Human
ccugagcucaagggauccuc

SEQ ID NO: 1223493 - RNA, 29 nt, Human
ccuggccucaaacuccugagccgguuccg

SEQ ID NO: 1223494 - RNA, 19 nt, Human
ccuggggcucccuacguga

SEQ ID NO: 1223495 - RNA, 24 nt, Human
cucaagggauccucccacuucagc

SEQ ID NO: 1223496 - RNA, 21 nt, Human
cuccacaugcuacuucaugcc

SEQ ID NO: 1223497 - RNA, 21 nt, Human
cuggacagugaagcagagccu

SEQ ID NO: 1223498 - RNA, 20 nt, Human
cuguaccuggacaaagacua

SEQ ID NO: 1223499 - RNA, 18 nt, Human
gaaguuucccauguuccc

SEQ ID NO: 1223500 - RNA, 25 nt, Human
gaggagcuggaacuguaaagguugu

SEQ ID NO: 1223501 - RNA, 25 nt, Human
gaguagcuggaacuacaggcacaug

SEQ ID NO: 1223502 - RNA, 18 nt, Human
gcccagaaccccuggccc

SEQ ID NO: 1223503 - RNA, 18 nt, Human
gcccgcggggagaaugcc

SEQ ID NO: 1223504 - RNA, 22 nt, Human
gcugcccagaaccccuggcccc

SEQ ID NO: 1223505 - RNA, 22 nt, Human
gcugggggugggcaggagucac

SEQ ID NO: 1223506 - RNA, 21 nt, Human
ggcgugguggagaacagccag

SEQ ID NO: 1223507 - RNA, 21 nt, Human
ggggugggcaggagucacuuc

SEQ ID NO: 1223508 - RNA, 18 nt, Human
guccacagcaagccacgg

SEQ ID NO: 1223509 - RNA, 22 nt, Human
gugcuuuuccuuguccugcccu

SEQ ID NO: 1223510 - RNA, 18 nt, Human
gugguaguuccaaggcug

SEQ ID NO: 1223511 - RNA, 21 nt, Human
uaaaggggcguugccagagac

SEQ ID NO: 1223512 - RNA, 24 nt, Human
uaauugcccuuaguaaagggcugg

SEQ ID NO: 1223513 - RNA, 22 nt, Human
uacaggcacaugccacuguacc

SEQ ID NO: 1223514 - RNA, 23 nt, Human
uacaucauuuucacccaaagucc

SEQ ID NO: 1223515 - RNA, 20 nt, Human
uaccuggacaaagacuaauu

SEQ ID NO: 1223516 - RNA, 23 nt, Human
uagaaguuucccauguuccccga

SEQ ID NO: 1223517 - RNA, 23 nt, Human
uaggcucaugaaaaauuugagag

SEQ ID NO: 1223518 - RNA, 23 nt, Human
uauaaaugaagagucugaggucc

SEQ ID NO: 1223519 - RNA, 18 nt, Human
ucacugccaccaggcaga

SEQ ID NO: 1223520 - RNA, 20 nt, Human
ucacugccaccaggcagagu

SEQ ID NO: 1223521 - RNA, 19 nt, Human
ucagaacgugugcaucccc

SEQ ID NO: 1223522 - RNA, 23 nt, Human
ucagccuccugaguagcuggaac

SEQ ID NO: 1223523 - RNA, 18 nt, Human
uccaggguguggggcccg

SEQ ID NO: 1223524 - RNA, 24 nt, Human
uccugaguagcuggaacuacaggc

SEQ ID NO: 1223525 - RNA, 21 nt, Human
uccugcccugggaagagcaca

SEQ ID NO: 1223526 - RNA, 22 nt, Human
ucuuugagaaguugccaagugg

SEQ ID NO: 1223527 - RNA, 19 nt, Human
ugauguggugcuuuuccuu

SEQ ID NO: 1223528 - RNA, 21 nt, Human
ugcccagaaccccuggccccu

SEQ ID NO: 1223529 - RNA, 18 nt, Human
ugcugccccucacucagc

SEQ ID NO: 1223530 - RNA, 21 nt, Human
uggaacuacaggcacaugcca

SEQ ID NO: 1223531 - RNA, 23 nt, Human
uggaacuacaggcacaugccacu

SEQ ID NO: 1223532 - RNA, 24 nt, Human
uggaacuacaggcacaugccacug

SEQ ID NO: 1223533 - RNA, 22 nt, Human
uggaccucacucuguugcccag

SEQ ID NO: 1223534 - RNA, 24 nt, Human
ugggaagagcacaucuuugagaag

SEQ ID NO: 1223535 - RNA, 19 nt, Human
ugggcaggagucacuucug

SEQ ID NO: 1223536 - RNA, 24 nt, Human
uguaauuccugaggcccuccacau

SEQ ID NO: 1223537 - RNA, 20 nt, Human
uguggggauaauugagacca

SEQ ID NO: 1223538 - RNA, 19 nt, Human
uuagagcaguuuuaggcuc

SEQ ID NO: 1223539 - RNA, 20 nt, Human
uuaggcucaugaaaaauuug

SEQ ID NO: 1223540 - RNA, 19 nt, Human
uuccuggggcucccuacgu

SEQ ID NO: 1223541 - RNA, 19 nt, Human
uugaaugcugauguggugc

SEQ ID NO: 1223542 - RNA, 18 nt, Human
uugcccagccuggccuca

SEQ ID NO: 1223543 - RNA, 21 nt, Human
caccagccgcgcccucuccgc

SEQ ID NO: 1223544 - RNA, 24 nt, Human
caccccggcgcccgccccgagggc

SEQ ID NO: 1223545 - RNA, 20 nt, Human
cagccgcgcccucuccgccg

SEQ ID NO: 1223546 - RNA, 23 nt, Human
cagccgcgcccucuccgccgccc

SEQ ID NO: 1223547 - RNA, 18 nt, Human
cagggaccgagccaggcc

SEQ ID NO: 1223548 - RNA, 19 nt, Human
cccccgagcccugcucccc

SEQ ID NO: 1223549 - RNA, 22 nt, Human
cccccgagcccugcuccccagc

SEQ ID NO: 1223550 - RNA, 23 nt, Human
ccccgagcccugcuccccagccc

SEQ ID NO: 1223551 - RNA, 22 nt, Human
cccucgggucugcaggaggcgc

SEQ ID NO: 1223552 - RNA, 18 nt, Human
cgacccuaccagcggcga

SEQ ID NO: 1223553 - RNA, 23 nt, Human
cgcacccggugcgcagggaccga

SEQ ID NO: 1223554 - RNA, 21 nt, Human
cgcggguguuaggggcggagg

SEQ ID NO: 1223555 - RNA, 22 nt, Human
cucaccagccgcgcccucuccg

SEQ ID NO: 1223556 - RNA, 21 nt, Human
cugagugccuacuguguccca

SEQ ID NO: 1223557 - RNA, 21 nt, Human
cugcccccgagcccugcuccc

SEQ ID NO: 1223558 - RNA, 19 nt, Human
gaggacgccagggcugagc

SEQ ID NO: 1223559 - RNA, 19 nt, Human
gccccgagggcugcgcgcu

SEQ ID NO: 1223560 - RNA, 21 nt, Human
gccgcgcccucuccgccgccc

SEQ ID NO: 1223561 - RNA, 25 nt, Human
gccuucaacaacgaacguuugcuga

SEQ ID NO: 1223562 - RNA, 21 nt, Human
gggacccgggccucgcccucc

SEQ ID NO: 1223563 - RNA, 20 nt, Human
gguggaggacgccagggcug

SEQ ID NO: 1223564 - RNA, 19 nt, Human
guggaggacgccagggcug

SEQ ID NO: 1223565 - RNA, 23 nt, Human
guggugguggaggacgccagggc

SEQ ID NO: 1223566 - RNA, 22 nt, Human
uaauaaaaugggauuuauuuua

SEQ ID NO: 1223567 - RNA, 20 nt, Human
uacagcaauagauaaauaga

SEQ ID NO: 1223568 - RNA, 22 nt, Human
uaccagcggcgacccucggguc

SEQ ID NO: 1223569 - RNA, 19 nt, Human
uccaggcgcgcagggagcc

SEQ ID NO: 1223570 - RNA, 20 nt, Human
ucccagggcucaccagccgc

SEQ ID NO: 1223571 - RNA, 21 nt, Human
uccugggcccucccagggcuc

SEQ ID NO: 1223572 - RNA, 22 nt, Human
ucgggucugcaggaggcgcggg

SEQ ID NO: 1223573 - RNA, 18 nt, Human
ucugaggcugccgugggg

SEQ ID NO: 1223574 - RNA, 23 nt, Human
ucuggcuccugggcccucccagg

SEQ ID NO: 1223575 - RNA, 24 nt, Human
ugaggcugccguggggcgcccagg

SEQ ID NO: 1223576 - RNA, 26 nt, Human
ugcccccgagcccugcuccccagccc

SEQ ID NO: 1223577 - RNA, 22 nt, Human
uggaggacgccagggcugagcg

SEQ ID NO: 1223578 - RNA, 20 nt, Human
ugggauuuauuuuaagccac

SEQ ID NO: 1223579 - RNA, 21 nt, Human
ugguggaggacgccagggcug

SEQ ID NO: 1223580 - RNA, 25 nt, Human
uguggugguggaggacgccagggcu

SEQ ID NO: 1223581 - RNA, 19 nt, Human
uguuaggggcggaggggcc

SEQ ID NO: 1223582 - RNA, 19 nt, Human
uguuauacagcaauagaua

SEQ ID NO: 1223583 - RNA, 18 nt, Human
cacaaaccaauaauuucc

SEQ ID NO: 1223584 - RNA, 26 nt, Human
uaacugagaauaaagcuaucaugcag

SEQ ID NO: 1223585 - RNA, 20 nt, Human
uaauggaugucaaaaccagu

SEQ ID NO: 1223586 - RNA, 21 nt, Human
uauuauggggaaagauaacuu

SEQ ID NO: 1223587 - RNA, 22 nt, Human
ucaaaaccagucagaaguaucc

SEQ ID NO: 1223588 - RNA, 22 nt, Human
ucagguguuuuuguggguuuca

SEQ ID NO: 1223589 - RNA, 26 nt, Human
ugcagagauaaaaguaaugcagauac

SEQ ID NO: 1223590 - RNA, 22 nt, Human
uugaaagccacucuaccacuag

SEQ ID NO: 1223591 - RNA, 21 nt, Human
aaaagcagguaauaaaaguca

SEQ ID NO: 1223592 - RNA, 26 nt, Human
aagcaggaaauauauaaaagggaccc

SEQ ID NO: 1223593 - RNA, 30 nt, Human
aagucaacuuuaaguuaaauuaugaccaag

SEQ ID NO: 1223594 - RNA, 21 nt, Human
cacauguauaccaaacagggc

SEQ ID NO: 1223595 - RNA, 22 nt, Human
cagaaaaaccuaaauuagcuua

SEQ ID NO: 1223596 - RNA, 23 nt, Human
cagaggugcuaagucaacuuuaa

SEQ ID NO: 1223597 - RNA, 20 nt, Human
cauaggaugugaucuggcau

SEQ ID NO: 1223598 - RNA, 19 nt, Human
cauguauaccaaacagggc

SEQ ID NO: 1223599 - RNA, 18 nt, Human
ccaaacagggcaaaccca

SEQ ID NO: 1223600 - RNA, 19 nt, Human
ccaaacagggcaaacccau

SEQ ID NO: 1223601 - RNA, 21 nt, Human
cuucacauguauaccaaacag

SEQ ID NO: 1223602 - RNA, 18 nt, Human
cuugcuucucuccucugu

SEQ ID NO: 1223603 - RNA, 21 nt, Human
cuuuggaugaguaguauagau

SEQ ID NO: 1223604 - RNA, 20 nt, Human
gaaaaaccuaaauuagcuua

SEQ ID NO: 1223605 - RNA, 19 nt, Human
gaucauaggaugugaucug

SEQ ID NO: 1223606 - RNA, 22 nt, Human
uaaaagucagcaguuggaguag

SEQ ID NO: 1223607 - RNA, 25 nt, Human
uacacagugucuuaauaaaagucag

SEQ ID NO: 1223608 - RNA, 23 nt, Human
uagaaauuacuauucuaagguuu

SEQ ID NO: 1223609 - RNA, 21 nt, Human
uauauaauuauauggguuguc

SEQ ID NO: 1223610 - RNA, 22 nt, Human
uaucacugacaaaauauugaaa

SEQ ID NO: 1223611 - RNA, 19 nt, Human
uaugcaggaaaaaaauguu

SEQ ID NO: 1223612 - RNA, 18 nt, Human
uauggguugucucuugcu

SEQ ID NO: 1223613 - RNA, 27 nt, Human
ucaaaaguaaauauacaaaaaucuuac

SEQ ID NO: 1223614 - RNA, 21 nt, Human
ucagaggugcuaagucaacuu

SEQ ID NO: 1223615 - RNA, 23 nt, Human
ucucaauacugcauuauucuuca

SEQ ID NO: 1223616 - RNA, 20 nt, Human
ucugucuuuucccugucuuc

SEQ ID NO: 1223617 - RNA, 24 nt, Human
ucuugcuucucuccucugucuuuu

SEQ ID NO: 1223618 - RNA, 22 nt, Human
ugaaacagaauaucagcaaugu

SEQ ID NO: 1223619 - RNA, 21 nt, Human
ugucauugcaacauugucugc

SEQ ID NO: 1223620 - RNA, 23 nt, Human
ugucauugcaacauugucugcaa

SEQ ID NO: 1223621 - RNA, 18 nt, Human
ugucucuugcuucucucc

SEQ ID NO: 1223622 - RNA, 22 nt, Human
ugucuuuuuuaaugauuggcuu

SEQ ID NO: 1223623 - RNA, 24 nt, Human
ugugauguagaguauuucuugcuu

SEQ ID NO: 1223624 - RNA, 20 nt, Human
uguuuuaacaaaauaagcag

SEQ ID NO: 1223625 - RNA, 19 nt, Human
uucaaggaaggugauaaga

SEQ ID NO: 1223626 - RNA, 23 nt, Human
uuccagaaaaaccuaaauuagcu

SEQ ID NO: 1223627 - RNA, 22 nt, Human
uuuuauaacagcauauaucacu

SEQ ID NO: 1223628 - RNA, 19 nt, Human
aaaaugaaaauuacccucu

SEQ ID NO: 1223629 - RNA, 23 nt, Human
aaauaccuuccuagaagaagccc

SEQ ID NO: 1223630 - RNA, 21 nt, Human
aagaagcccagacacucagca

SEQ ID NO: 1223631 - RNA, 19 nt, Human
aagaggccagagcgcccuc

SEQ ID NO: 1223632 - RNA, 25 nt, Human
aagaggccagagcgcccucugggug

SEQ ID NO: 1223633 - RNA, 18 nt, Human
aagcuccaggucugaugg

SEQ ID NO: 1223634 - RNA, 19 nt, Human
aaggucaggagggcagggc

SEQ ID NO: 1223635 - RNA, 23 nt, Human
acaacgugccacgaacaauuacc

SEQ ID NO: 1223636 - RNA, 20 nt, Human
acccaaagugugggggugag

SEQ ID NO: 1223637 - RNA, 23 nt, Human
accucugccacccugcacacccc

SEQ ID NO: 1223638 - RNA, 20 nt, Human
accugugggggcugcagggg

SEQ ID NO: 1223639 - RNA, 23 nt, Human
acuccaguggcugagucuuucug

SEQ ID NO: 1223640 - RNA, 21 nt, Human
acugaaggguggagaggggag

SEQ ID NO: 1223641 - RNA, 19 nt, Human
acugccuguggaaacccca

SEQ ID NO: 1223642 - RNA, 19 nt, Human
agaagggcucccugccucu

SEQ ID NO: 1223643 - RNA, 28 nt, Human
agacaggaggcagaagcugaggggaccc

SEQ ID NO: 1223644 - RNA, 20 nt, Human
agacaucuccacccgacugg

SEQ ID NO: 1223645 - RNA, 21 nt, Human
agcagacacccuccuguagau

SEQ ID NO: 1223646 - RNA, 18 nt, Human
agcagguggcuccugggg

SEQ ID NO: 1223647 - RNA, 26 nt, Human
agccaggaggugguuaccuucuaggg

SEQ ID NO: 1223648 - RNA, 23 nt, Human
agcccagccuugggccaggugcu

SEQ ID NO: 1223649 - RNA, 18 nt, Human
agcuaggggccccugagc

SEQ ID NO: 1223650 - RNA, 18 nt, Human
aggaagcuggaggggcug

SEQ ID NO: 1223651 - RNA, 22 nt, Human
aggaggacgcccgagugauucc

SEQ ID NO: 1223652 - RNA, 23 nt, Human
aggagggcagggcuugacuggga

SEQ ID NO: 1223653 - RNA, 19 nt, Human
aggcagcucuuucccagga

SEQ ID NO: 1223654 - RNA, 20 nt, Human
aggcagggaucucucugcag

SEQ ID NO: 1223655 - RNA, 27 nt, Human
aggcggaggugaagcugaggugauuau

SEQ ID NO: 1223656 - RNA, 20 nt, Human
agggacccaaaguguggggg

SEQ ID NO: 1223657 - RNA, 25 nt, Human
agugcaagagggcaggcaggaggga

SEQ ID NO: 1223658 - RNA, 21 nt, Human
cacacaugaugcugggguuuc

SEQ ID NO: 1223659 - RNA, 26 nt, Human
cacacucccagcaccagaagagcccc

SEQ ID NO: 1223660 - RNA, 21 nt, Human
cacagcacagcccuggagagc

SEQ ID NO: 1223661 - RNA, 19 nt, Human
cacagcccagccuugggcc

SEQ ID NO: 1223662 - RNA, 22 nt, Human
cacccugcacaccccggagagc

SEQ ID NO: 1223663 - RNA, 20 nt, Human
cacgggugaccaagaggcca

SEQ ID NO: 1223664 - RNA, 19 nt, Human
cagcaccagaagagcccca

SEQ ID NO: 1223665 - RNA, 19 nt, Human
cagcacugaaggguggaga

SEQ ID NO: 1223666 - RNA, 21 nt, Human
cagcagccacagcacagcccu

SEQ ID NO: 1223667 - RNA, 19 nt, Human
cagggaucucucugcagag

SEQ ID NO: 1223668 - RNA, 19 nt, Human
cagggcaggacaaggucag

SEQ ID NO: 1223669 - RNA, 21 nt, Human
cagggcuccaggaacugcaag

SEQ ID NO: 1223670 - RNA, 18 nt, Human
caguugccaggagaccag

SEQ ID NO: 1223671 - RNA, 21 nt, Human
caguugccaggagaccagcug

SEQ ID NO: 1223672 - RNA, 18 nt, Human
ccaacaaccugcagggcu

SEQ ID NO: 1223673 - RNA, 23 nt, Human
ccaccuagguccucaaagaggug

SEQ ID NO: 1223674 - RNA, 20 nt, Human
ccagcuggccccuagacauc

SEQ ID NO: 1223675 - RNA, 23 nt, Human
cccagcugucuaugggcccuggg

SEQ ID NO: 1223676 - RNA, 20 nt, Human
ccccaaagacccuggcugga

SEQ ID NO: 1223677 - RNA, 25 nt, Human
ccccaaagacccuggcuggagcaug

SEQ ID NO: 1223678 - RNA, 21 nt, Human
ccccacucccccagcugucua

SEQ ID NO: 1223679 - RNA, 22 nt, Human
cccccagcugucuaugggcccu

SEQ ID NO: 1223680 - RNA, 19 nt, Human
cccccggggcaugggcgcc

SEQ ID NO: 1223681 - RNA, 23 nt, Human
ccccuagacaucuccacccgacu

SEQ ID NO: 1223682 - RNA, 18 nt, Human
ccccugagccaguuaagg

SEQ ID NO: 1223683 - RNA, 27 nt, Human
ccccugagccaguuaaggccuuugugg

SEQ ID NO: 1223684 - RNA, 28 nt, Human
ccccugggcugaaacugccuguggaaac

SEQ ID NO: 1223685 - RNA, 21 nt, Human
cccugagccaguuaaggccuu

SEQ ID NO: 1223686 - RNA, 18 nt, Human
cccugcacaccccggaga

SEQ ID NO: 1223687 - RNA, 19 nt, Human
cccugcaguguaagucacc

SEQ ID NO: 1223688 - RNA, 23 nt, Human
cccugccccaggcugcugccucc

SEQ ID NO: 1223689 - RNA, 18 nt, Human
cccugccucuccaacaac

SEQ ID NO: 1223690 - RNA, 19 nt, Human
cccuggcuggagcaugcga

SEQ ID NO: 1223691 - RNA, 27 nt, Human
cccuggggucccagcacugaagggugg

SEQ ID NO: 1223692 - RNA, 21 nt, Human
ccuccugucuccccacucccc

SEQ ID NO: 1223693 - RNA, 23 nt, Human
ccuccugucuccccacuccccca

SEQ ID NO: 1223694 - RNA, 23 nt, Human
ccucugccacaacgugccacgaa

SEQ ID NO: 1223695 - RNA, 18 nt, Human
ccucuggguggcaugacu

SEQ ID NO: 1223696 - RNA, 24 nt, Human
ccugcaguguaagucaccuggggc

SEQ ID NO: 1223697 - RNA, 26 nt, Human
ccuggggucccagcacugaagggugg

SEQ ID NO: 1223698 - RNA, 20 nt, Human
ccuguccucacgccuggccc

SEQ ID NO: 1223699 - RNA, 24 nt, Human
ccuguccucacgccuggccccaac

SEQ ID NO: 1223700 - RNA, 23 nt, Human
ccuguggaaaccccagggaaacc

SEQ ID NO: 1223701 - RNA, 21 nt, Human
cucccagcaccagaagagccc

SEQ ID NO: 1223702 - RNA, 23 nt, Human
cuccccacucccccagcugucua

SEQ ID NO: 1223703 - RNA, 21 nt, Human
cuccuggggcaccuguccuca

SEQ ID NO: 1223704 - RNA, 19 nt, Human
cucuauucuugccggcucu

SEQ ID NO: 1223705 - RNA, 21 nt, Human
cucugccacccugcacacccc

SEQ ID NO: 1223706 - RNA, 19 nt, Human
cucuggguggcaugacugu

SEQ ID NO: 1223707 - RNA, 20 nt, Human
cugaaggguggagaggggag

SEQ ID NO: 1223708 - RNA, 18 nt, Human
cugaccgcagcagccaca

SEQ ID NO: 1223709 - RNA, 23 nt, Human
cugcucucuccagcccccggggc

SEQ ID NO: 1223710 - RNA, 21 nt, Human
cugcugccuccacaccacagc

SEQ ID NO: 1223711 - RNA, 19 nt, Human
cuggccccuagacaucucc

SEQ ID NO: 1223712 - RNA, 21 nt, Human
cuggguucugggagaggaagu

SEQ ID NO: 1223713 - RNA, 22 nt, Human
cuuauucguguuuauuggaacc

SEQ ID NO: 1223714 - RNA, 23 nt, Human
gaaacugccuguggaaaccccag

SEQ ID NO: 1223715 - RNA, 19 nt, Human
gaaggcuggaccugcccuc

SEQ ID NO: 1223716 - RNA, 24 nt, Human
gaccgcagcagccacagcacagcc

SEQ ID NO: 1223717 - RNA, 22 nt, Human
gagaggaagugcaagagggcag

SEQ ID NO: 1223718 - RNA, 20 nt, Human
gaggcagaagcugagcuuga

SEQ ID NO: 1223719 - RNA, 23 nt, Human
gaguuccuccugucuccccacuc

SEQ ID NO: 1223720 - RNA, 23 nt, Human
gcaagguggcccucaucucccug

SEQ ID NO: 1223721 - RNA, 22 nt, Human
gcacauuugaugauuggaaaua

SEQ ID NO: 1223722 - RNA, 20 nt, Human
gcaccagaagagccccagga

SEQ ID NO: 1223723 - RNA, 18 nt, Human
gcagcugccccaccacag

SEQ ID NO: 1223724 - RNA, 22 nt, Human
gcagcugccccaccacagggcc

SEQ ID NO: 1223725 - RNA, 21 nt, Human
gccccaccacagggccaggcu

SEQ ID NO: 1223726 - RNA, 22 nt, Human
gccccugagccaguuaaggccu

SEQ ID NO: 1223727 - RNA, 24 nt, Human
gcccgagggucccaggagacagga

SEQ ID NO: 1223728 - RNA, 18 nt, Human
gcccucuucaccccaguc

SEQ ID NO: 1223729 - RNA, 23 nt, Human
gccuggcugcucucuccagcccc

SEQ ID NO: 1223730 - RNA, 19 nt, Human
gccuguggaaaccccaggg

SEQ ID NO: 1223731 - RNA, 20 nt, Human
gcgacucaggaaauacagac

SEQ ID NO: 1223732 - RNA, 20 nt, Human
gcggcggcgggggagcaggc

SEQ ID NO: 1223733 - RNA, 18 nt, Human
ggagaggggagggaggcu

SEQ ID NO: 1223734 - RNA, 20 nt, Human
ggaggggcugcugaaggcug

SEQ ID NO: 1223735 - RNA, 21 nt, Human
ggaggugguuaccuucuaggg

SEQ ID NO: 1223736 - RNA, 18 nt, Human
ggcaggcaggagggagaa

SEQ ID NO: 1223737 - RNA, 20 nt, Human
ggcagggcuugacugggagc

SEQ ID NO: 1223738 - RNA, 19 nt, Human
gggaaggaacggggcucag

SEQ ID NO: 1223739 - RNA, 20 nt, Human
gggaaggaacggggcucagg

SEQ ID NO: 1223740 - RNA, 23 nt, Human
gggagggaggcugacgguguggg

SEQ ID NO: 1223741 - RNA, 24 nt, Human
gggcaggccccaccuagguccuca

SEQ ID NO: 1223742 - RNA, 18 nt, Human
ggggagggaggcugacgg

SEQ ID NO: 1223743 - RNA, 20 nt, Human
ggggaggggcugcugaaggc

SEQ ID NO: 1223744 - RNA, 18 nt, Human
gggggaggggcugcugaa

SEQ ID NO: 1223745 - RNA, 20 nt, Human
ggggugcagcugccccacca

SEQ ID NO: 1223746 - RNA, 24 nt, Human
ggugaccugugggggcugcagggg

SEQ ID NO: 1223747 - RNA, 18 nt, Human
guccccaaagacccuggc

SEQ ID NO: 1223748 - RNA, 24 nt, Human
gugccuggcugcucucuccagccc

SEQ ID NO: 1223749 - RNA, 18 nt, Human
guggagcagguggcuccu

SEQ ID NO: 1223750 - RNA, 20 nt, Human
gugggaggggugggucacug

SEQ ID NO: 1223751 - RNA, 18 nt, Human
guuuauuaauuaaccucu

SEQ ID NO: 1223752 - RNA, 20 nt, Human
uaaggccuuuguggaugagu

SEQ ID NO: 1223753 - RNA, 19 nt, Human
uagaagaagcccagacacu

SEQ ID NO: 1223754 - RNA, 24 nt, Human
uagaagaagcccagacacucagca

SEQ ID NO: 1223755 - RNA, 19 nt, Human
uagaagcccuccccucuuc

SEQ ID NO: 1223756 - RNA, 22 nt, Human
uagagguuacagagggguggcu

SEQ ID NO: 1223757 - RNA, 18 nt, Human
uagugcuggguucuggga

SEQ ID NO: 1223758 - RNA, 19 nt, Human
ucacacucccagcaccaga

SEQ ID NO: 1223759 - RNA, 20 nt, Human
ucacucuacagaacugguca

SEQ ID NO: 1223760 - RNA, 24 nt, Human
ucauucagcugugacucauccauu

SEQ ID NO: 1223761 - RNA, 20 nt, Human
uccacacaugaugcuggggu

SEQ ID NO: 1223762 - RNA, 24 nt, Human
uccacaccacagcguccugcaagg

SEQ ID NO: 1223763 - RNA, 28 nt, Human
ucccagcacugaaggguggggcggacgc

SEQ ID NO: 1223764 - RNA, 24 nt, Human
ucccaggaagcuggaggggcugcc

SEQ ID NO: 1223765 - RNA, 19 nt, Human
ucccaggaggacgcccgag

SEQ ID NO: 1223766 - RNA, 22 nt, Human
uccccugggcugaaacugccug

SEQ ID NO: 1223767 - RNA, 23 nt, Human
ucccugccucuccaacaaccugc

SEQ ID NO: 1223768 - RNA, 19 nt, Human
ucccugggucuuccccugg

SEQ ID NO: 1223769 - RNA, 23 nt, Human
ucccuugugcagccuacgggagc

SEQ ID NO: 1223770 - RNA, 21 nt, Human
uccugccacucaggccccugc

SEQ ID NO: 1223771 - RNA, 21 nt, Human
uccuggucucugcucuauucu

SEQ ID NO: 1223772 - RNA, 21 nt, Human
ucuccaacaaccugcagggcu

SEQ ID NO: 1223773 - RNA, 26 nt, Human
ucucugcagaggcaccucugccaccc

SEQ ID NO: 1223774 - RNA, 24 nt, Human
ucugcagaggcaccucugccaccc

SEQ ID NO: 1223775 - RNA, 19 nt, Human
ucugccgccaccguucuac

SEQ ID NO: 1223776 - RNA, 28 nt, Human
ucuggguggcaugacuguaguggggcuu

SEQ ID NO: 1223777 - RNA, 18 nt, Human
ucuuccccugggcugaaa

SEQ ID NO: 1223778 - RNA, 22 nt, Human
ugaaaggcggaggugaagcuga

SEQ ID NO: 1223779 - RNA, 24 nt, Human
ugaaaggcggaggugaagcugagg

SEQ ID NO: 1223780 - RNA, 22 nt, Human
ugagcuugaguuccuccugucu

SEQ ID NO: 1223781 - RNA, 21 nt, Human
ugccagaaggacacgggugac

SEQ ID NO: 1223782 - RNA, 19 nt, Human
ugccaggagaccagcuggc

SEQ ID NO: 1223783 - RNA, 21 nt, Human
ugccaggagaccagcuggccc

SEQ ID NO: 1223784 - RNA, 23 nt, Human
ugcccucuucaccccagucccca

SEQ ID NO: 1223785 - RNA, 18 nt, Human
ugcccuggguguuccccu

SEQ ID NO: 1223786 - RNA, 18 nt, Human
ugccuuggaagcuccagg

SEQ ID NO: 1223787 - RNA, 23 nt, Human
ugcugaaggcuggaccugcccuc

SEQ ID NO: 1223788 - RNA, 19 nt, Human
ugcugggguuucaauggcu

SEQ ID NO: 1223789 - RNA, 19 nt, Human
uggcagcaccagggcagga

SEQ ID NO: 1223790 - RNA, 22 nt, Human
uggccccuagacaucuccaccc

SEQ ID NO: 1223791 - RNA, 22 nt, Human
uggcuccuggggcaccuguccu

SEQ ID NO: 1223792 - RNA, 21 nt, Human
uggcugcucucuccagccccc

SEQ ID NO: 1223793 - RNA, 18 nt, Human
ugggaggggugggucacu

SEQ ID NO: 1223794 - RNA, 20 nt, Human
ugggccaggugcuggagcuu

SEQ ID NO: 1223795 - RNA, 18 nt, Human
ugggcccuggggucccag

SEQ ID NO: 1223796 - RNA, 28 nt, Human
ugggcugaaacugccuguggaaacccca

SEQ ID NO: 1223797 - RNA, 21 nt, Human
ugggggaggggcugcugaagg

SEQ ID NO: 1223798 - RNA, 24 nt, Human
ugggggaggggcugcugaaggcug

SEQ ID NO: 1223799 - RNA, 18 nt, Human
uguccagccaggaggugg

SEQ ID NO: 1223800 - RNA, 18 nt, Human
uguuccccuuguaauucc

SEQ ID NO: 1223801 - RNA, 23 nt, Human
uucaguugccaggagaccagcug

SEQ ID NO: 1223802 - RNA, 22 nt, Human
uugccggcucuuugagccgugu

SEQ ID NO: 1223803 - RNA, 22 nt, Human
aaagaggauccuuuccuuugga

SEQ ID NO: 1223804 - RNA, 21 nt, Human
agaggggaggcagcuugggaa

SEQ ID NO: 1223805 - RNA, 23 nt, Human
agccuggaagucggagccgacgg

SEQ ID NO: 1223806 - RNA, 21 nt, Human
aggaaggagaggggaggcagc

SEQ ID NO: 1223807 - RNA, 25 nt, Human
aggagaggggaggcagcuugggucu

SEQ ID NO: 1223808 - RNA, 24 nt, Human
caagcccagcacuagggcagcucc

SEQ ID NO: 1223809 - RNA, 19 nt, Human
cacaggaaggagaggggag

SEQ ID NO: 1223810 - RNA, 18 nt, Human
caccauguagaaaagggu

SEQ ID NO: 1223811 - RNA, 23 nt, Human
cacgccggggcaguggcagggcu

SEQ ID NO: 1223812 - RNA, 19 nt, Human
cagcccccgccccacaagc

SEQ ID NO: 1223813 - RNA, 22 nt, Human
cagcccgaagguccugccuccu

SEQ ID NO: 1223814 - RNA, 20 nt, Human
ccaccauguagaaaagggua

SEQ ID NO: 1223815 - RNA, 23 nt, Human
cccacaagcccagcacuagggca

SEQ ID NO: 1223816 - RNA, 18 nt, Human
cccacccacgccugccau

SEQ ID NO: 1223817 - RNA, 24 nt, Human
cccgaagguccugccuccugaggc

SEQ ID NO: 1223818 - RNA, 19 nt, Human
cccgccccacaagcccagc

SEQ ID NO: 1223819 - RNA, 20 nt, Human
ccuggggccugugaggugcc

SEQ ID NO: 1223820 - RNA, 21 nt, Human
cgccggggcaguggcagggcu

SEQ ID NO: 1223821 - RNA, 23 nt, Human
cugcaggugacucaggcugucca

SEQ ID NO: 1223822 - RNA, 22 nt, Human
gaccuugccuuuccccgggcac

SEQ ID NO: 1223823 - RNA, 23 nt, Human
gaggcagcuugggucucugggcg

SEQ ID NO: 1223824 - RNA, 22 nt, Human
ggcgguggcgcaggcugcagcc

SEQ ID NO: 1223825 - RNA, 19 nt, Human
gggcacagcccgaaggucc

SEQ ID NO: 1223826 - RNA, 24 nt, Human
gggccugugaggugccuggggaug

SEQ ID NO: 1223827 - RNA, 25 nt, Human
gggccugugaggugccuggggaugg

SEQ ID NO: 1223828 - RNA, 19 nt, Human
uccccgggcacagcccgaa

SEQ ID NO: 1223829 - RNA, 19 nt, Human
uccuggggccugugaggug

SEQ ID NO: 1223830 - RNA, 25 nt, Human
ucgguggcugggccuuuccuggggc

SEQ ID NO: 1223831 - RNA, 23 nt, Human
ugaagccuggaagucggagccga

SEQ ID NO: 1223832 - RNA, 19 nt, Human
ugacucaggcuguccacag

SEQ ID NO: 1223833 - RNA, 23 nt, Human
ugcagccaggcgaggcccucagu

SEQ ID NO: 1223834 - RNA, 19 nt, Human
ugccauggagcacgccggg

SEQ ID NO: 1223835 - RNA, 23 nt, Human
ugccauggagcacgccggggcag

SEQ ID NO: 1223836 - RNA, 19 nt, Human
ugccuuuccccgggcacag

SEQ ID NO: 1223837 - RNA, 23 nt, Human
ugugaggugccuggggaugggcc

SEQ ID NO: 1223838 - RNA, 21 nt, Human
uucgguggcugggccuuuccu

SEQ ID NO: 1223839 - RNA, 18 nt, Human
cagcgggaggggcggggc

SEQ ID NO: 1223840 - RNA, 21 nt, Human
cgcaccugcccacugcggccg

SEQ ID NO: 1223841 - RNA, 21 nt, Human
cugcaugcuguggggcugcag

SEQ ID NO: 1223842 - RNA, 25 nt, Human
ggagaucaagacagguggccaggcu

SEQ ID NO: 1223843 - RNA, 21 nt, Human
uccuggggcugcaugcugugg

SEQ ID NO: 1223844 - RNA, 19 nt, Human
ugcagcgggaggggcgggg

SEQ ID NO: 1223845 - RNA, 21 nt, Human
uggggcugcagcgggaggggc

SEQ ID NO: 1223846 - RNA, 22 nt, Human
uggggcugcagcgggaggggcg

SEQ ID NO: 1223847 - RNA, 18 nt, Human
aagcaggcgcucccucca

SEQ ID NO: 1223848 - RNA, 23 nt, Human
aagcuccucugaugccuuuuuuc

SEQ ID NO: 1223849 - RNA, 23 nt, Human
acacacggucaccccccuccccc

SEQ ID NO: 1223850 - RNA, 20 nt, Human
acacaggugggggcgggagu

SEQ ID NO: 1223851 - RNA, 20 nt, Human
acagcuguccagagcugagg

SEQ ID NO: 1223852 - RNA, 20 nt, Human
acaucucagacgcaacccac

SEQ ID NO: 1223853 - RNA, 23 nt, Human
agcgagcccgugcagcugacccc

SEQ ID NO: 1223854 - RNA, 18 nt, Human
agcgggacacaggugggg

SEQ ID NO: 1223855 - RNA, 20 nt, Human
aggcagggcugccagcugcc

SEQ ID NO: 1223856 - RNA, 24 nt, Human
agguguggaaauugccacgcagcc

SEQ ID NO: 1223857 - RNA, 22 nt, Human
caagggaaugaacacacgguca

SEQ ID NO: 1223858 - RNA, 24 nt, Human
cacagaucacagacgacuacgguc

SEQ ID NO: 1223859 - RNA, 18 nt, Human
caccccccuccccccugc

SEQ ID NO: 1223860 - RNA, 21 nt, Human
caccccccuccccccugccac

SEQ ID NO: 1223861 - RNA, 21 nt, Human
caccgcauaugcaugccaggc

SEQ ID NO: 1223862 - RNA, 21 nt, Human
cacugggugcgggucccugga

SEQ ID NO: 1223863 - RNA, 22 nt, Human
cagcugaccccagacgaugagu

SEQ ID NO: 1223864 - RNA, 23 nt, Human
cagcugccaggugucaggugugg

SEQ ID NO: 1223865 - RNA, 21 nt, Human
cagggaugccauaaagaggau

SEQ ID NO: 1223866 - RNA, 18 nt, Human
cauugugcggcugguggc

SEQ ID NO: 1223867 - RNA, 26 nt, Human
ccaagggaaugaacacacggucaccc

SEQ ID NO: 1223868 - RNA, 19 nt, Human
ccaggcugggcacggcucc

SEQ ID NO: 1223869 - RNA, 20 nt, Human
ccaguagcgugccgguuacc

SEQ ID NO: 1223870 - RNA, 20 nt, Human
ccagugggcguugggggagg

SEQ ID NO: 1223871 - RNA, 27 nt, Human
cccaagggaaugaacacacggucaccc

SEQ ID NO: 1223872 - RNA, 21 nt, Human
cccacugggugcgggucccug

SEQ ID NO: 1223873 - RNA, 20 nt, Human
ccccacaucucagacgcaac

SEQ ID NO: 1223874 - RNA, 19 nt, Human
ccccaggccuccaugacuc

SEQ ID NO: 1223875 - RNA, 21 nt, Human
ccccaggccuccaugacucag

SEQ ID NO: 1223876 - RNA, 18 nt, Human
cccgugcagcugacccca

SEQ ID NO: 1223877 - RNA, 22 nt, Human
cccucacaccugggcccgggca

SEQ ID NO: 1223878 - RNA, 19 nt, Human
cccugccgagggggcuguc

SEQ ID NO: 1223879 - RNA, 21 nt, Human
cccuggagcaccccucgggca

SEQ ID NO: 1223880 - RNA, 23 nt, Human
ccgcggggacccugccgaggggg

SEQ ID NO: 1223881 - RNA, 20 nt, Human
ccgcuucccccaagggaaug

SEQ ID NO: 1223882 - RNA, 18 nt, Human
ccucugagugaggccugg

SEQ ID NO: 1223883 - RNA, 22 nt, Human
ccucugagugaggccuggugca

SEQ ID NO: 1223884 - RNA, 25 nt, Human
ccuugggcagcuggugacccagccu

SEQ ID NO: 1223885 - RNA, 19 nt, Human
cgggacacaggugggggcg

SEQ ID NO: 1223886 - RNA, 23 nt, Human
cgggacacaggugggggcgggag

SEQ ID NO: 1223887 - RNA, 20 nt, Human
cucaggggccgcuccacccc

SEQ ID NO: 1223888 - RNA, 22 nt, Human
cuccccccugccaccuuugccc

SEQ ID NO: 1223889 - RNA, 18 nt, Human
cugaccugcuccgccagg

SEQ ID NO: 1223890 - RNA, 26 nt, Human
cugccgagggggcugucaugcgguuu

SEQ ID NO: 1223891 - RNA, 19 nt, Human
cuggugcacagguguggaa

SEQ ID NO: 1223892 - RNA, 21 nt, Human
gaacgugacuccgcuuccccc

SEQ ID NO: 1223893 - RNA, 24 nt, Human
gaagcuccucugaugccuuuuuuc

SEQ ID NO: 1223894 - RNA, 20 nt, Human
gagcucccugggagaggggg

SEQ ID NO: 1223895 - RNA, 22 nt, Human
gaguugaaguaccccucaggug

SEQ ID NO: 1223896 - RNA, 21 nt, Human
gcagccccauggcaggccggc

SEQ ID NO: 1223897 - RNA, 27 nt, Human
gccaggcgcagagaccccaggccucca

SEQ ID NO: 1223898 - RNA, 22 nt, Human
gcccacagggaugccauaaaga

SEQ ID NO: 1223899 - RNA, 20 nt, Human
gcgccgagaccgcagaggga

SEQ ID NO: 1223900 - RNA, 19 nt, Human
gcggauccgcggggacccu

SEQ ID NO: 1223901 - RNA, 20 nt, Human
gcgggacacaggugggggcg

SEQ ID NO: 1223902 - RNA, 19 nt, Human
ggaggaacuugcugcugug

SEQ ID NO: 1223903 - RNA, 18 nt, Human
gggcccgggcaggccagc

SEQ ID NO: 1223904 - RNA, 25 nt, Human
ggugcacauuuuccacggaaacaga

SEQ ID NO: 1223905 - RNA, 18 nt, Human
gugguucucgaaaacucu

SEQ ID NO: 1223906 - RNA, 25 nt, Human
uaaccaccgcauaugcaugccaggc

SEQ ID NO: 1223907 - RNA, 18 nt, Human
uagcgugccgguuaccag

SEQ ID NO: 1223908 - RNA, 20 nt, Human
ucaccccccuccccccugcc

SEQ ID NO: 1223909 - RNA, 22 nt, Human
ucaucagaggggagacuuuuuu

SEQ ID NO: 1223910 - RNA, 18 nt, Human
uccaagcuggagaagaag

SEQ ID NO: 1223911 - RNA, 20 nt, Human
ucccuccauuccagccacag

SEQ ID NO: 1223912 - RNA, 21 nt, Human
uccgcggggacccugccgagg

SEQ ID NO: 1223913 - RNA, 21 nt, Human
uccuagaggcagggcugccag

SEQ ID NO: 1223914 - RNA, 23 nt, Human
ucugaugccuuuuuuccgugagu

SEQ ID NO: 1223915 - RNA, 18 nt, Human
ucuucugagcucccuggg

SEQ ID NO: 1223916 - RNA, 27 nt, Human
ugaacacacggucaccccccucccccc

SEQ ID NO: 1223917 - RNA, 18 nt, Human
ugcacugaccugcuccgc

SEQ ID NO: 1223918 - RNA, 19 nt, Human
ugccaggcugggcacggcu

SEQ ID NO: 1223919 - RNA, 18 nt, Human
ugccauaaagaggaucga

SEQ ID NO: 1223920 - RNA, 20 nt, Human
ugcgugggcguggugcgggg

SEQ ID NO: 1223921 - RNA, 22 nt, Human
uggcaggccggcaccuugggca

SEQ ID NO: 1223922 - RNA, 23 nt, Human
uggcaggccggcaccuugggcag

SEQ ID NO: 1223923 - RNA, 21 nt, Human
uggccaggcgcagagacccca

SEQ ID NO: 1223924 - RNA, 20 nt, Human
ugggcagcuggugacccagc

SEQ ID NO: 1223925 - RNA, 19 nt, Human
uguccagagcugaggcuuc

SEQ ID NO: 1223926 - RNA, 18 nt, Human
ugugaguaaugcugugcu

SEQ ID NO: 1223927 - RNA, 21 nt, Human
ugugauugaagugcgugcaaa

SEQ ID NO: 1223928 - RNA, 19 nt, Human
uuuauauucaguaauuugu

SEQ ID NO: 1223929 - RNA, 23 nt, Human
aagcaccaggaccugggucccac

SEQ ID NO: 1223930 - RNA, 21 nt, Human
agggcuuugaggguggacagg

SEQ ID NO: 1223931 - RNA, 25 nt, Human
aguccagggccagauccucgggaga

SEQ ID NO: 1223932 - RNA, 21 nt, Human
caacacagggaacuacaaaug

SEQ ID NO: 1223933 - RNA, 20 nt, Human
cacuggcaacaacacaggga

SEQ ID NO: 1223934 - RNA, 21 nt, Human
cagggguucugaccccuuccu

SEQ ID NO: 1223935 - RNA, 25 nt, Human
ccaccgucgggcaccacagcuccag

SEQ ID NO: 1223936 - RNA, 19 nt, Human
ccacuggcaacaacacagg

SEQ ID NO: 1223937 - RNA, 20 nt, Human
ccagggccagauccucggga

SEQ ID NO: 1223938 - RNA, 21 nt, Human
ccucagccuggggagggcuuu

SEQ ID NO: 1223939 - RNA, 22 nt, Human
cgccacuggcaacaacacaggg

SEQ ID NO: 1223940 - RNA, 21 nt, Human
cgccgaaguuaaagauggucu

SEQ ID NO: 1223941 - RNA, 20 nt, Human
cgggagagacguucuggaug

SEQ ID NO: 1223942 - RNA, 22 nt, Human
cgggcaccacagcuccagguac

SEQ ID NO: 1223943 - RNA, 22 nt, Human
cgugccucucuuggugaugaug

SEQ ID NO: 1223944 - RNA, 25 nt, Human
cuaggauggcugagggcuggccugg

SEQ ID NO: 1223945 - RNA, 18 nt, Human
cuggcaacaacacaggga

SEQ ID NO: 1223946 - RNA, 25 nt, Human
cuggcaacaacacagggaacuacaa

SEQ ID NO: 1223947 - RNA, 19 nt, Human
cuggcagaggauggccagg

SEQ ID NO: 1223948 - RNA, 19 nt, Human
cugggggcugggggcucug

SEQ ID NO: 1223949 - RNA, 23 nt, Human
gaaggaaagcaccaggaccuggg

SEQ ID NO: 1223950 - RNA, 21 nt, Human
gagcaggguggcucgggcggc

SEQ ID NO: 1223951 - RNA, 21 nt, Human
gccaccgucgggcaccacagc

SEQ ID NO: 1223952 - RNA, 18 nt, Human
gccguggcgccaugugga

SEQ ID NO: 1223953 - RNA, 20 nt, Human
gcugaagcucagggguucug

SEQ ID NO: 1223954 - RNA, 21 nt, Human
gcuggccuggccuucucgcug

SEQ ID NO: 1223955 - RNA, 19 nt, Human
ggcuaggauggcugagggc

SEQ ID NO: 1223956 - RNA, 24 nt, Human
gggagggcuuugaggguggacagg

SEQ ID NO: 1223957 - RNA, 18 nt, Human
gggcucugagggggucug

SEQ ID NO: 1223958 - RNA, 22 nt, Human
ggggagagaaggaaagcaccag

SEQ ID NO: 1223959 - RNA, 23 nt, Human
ggggcugggggcucugagggggu

SEQ ID NO: 1223960 - RNA, 21 nt, Human
gggggcugaagcucagggguu

SEQ ID NO: 1223961 - RNA, 18 nt, Human
gggguccagggcagcagg

SEQ ID NO: 1223962 - RNA, 21 nt, Human
gugcucuuggaugucccuggg

SEQ ID NO: 1223963 - RNA, 18 nt, Human
guggagggcucuccuggg

SEQ ID NO: 1223964 - RNA, 24 nt, Human
guggagggcucuccugggggcugg

SEQ ID NO: 1223965 - RNA, 18 nt, Human
ucagcaggacaaaggggc

SEQ ID NO: 1223966 - RNA, 28 nt, Human
ucagggguucugaccccuuccugucuuu

SEQ ID NO: 1223967 - RNA, 20 nt, Human
ucggaacuagaaggaaguca

SEQ ID NO: 1223968 - RNA, 19 nt, Human
ugagggggucuggcuagga

SEQ ID NO: 1223969 - RNA, 18 nt, Human
ugauguccaguguuucuu

SEQ ID NO: 1223970 - RNA, 21 nt, Human
ugaugucgccacuggcaacaa

SEQ ID NO: 1223971 - RNA, 19 nt, Human
ugccucucuuggugaugau

SEQ ID NO: 1223972 - RNA, 21 nt, Human
ugcgggguccagggcagcagg

SEQ ID NO: 1223973 - RNA, 18 nt, Human
uggauggagaucuucuug

SEQ ID NO: 1223974 - RNA, 18 nt, Human
uggccguggcgccaugug

SEQ ID NO: 1223975 - RNA, 19 nt, Human
uggccuggccuucucgcuu

SEQ ID NO: 1223976 - RNA, 21 nt, Human
uggcgccauguggagggcggc

SEQ ID NO: 1223977 - RNA, 22 nt, Human
uggcugagggcuggccuggccu

SEQ ID NO: 1223978 - RNA, 19 nt, Human
ugggggcugggggcucuga

SEQ ID NO: 1223979 - RNA, 20 nt, Human
uguccaguguuucuugagcc

SEQ ID NO: 1223980 - RNA, 19 nt, Human
uguggagggcucuccuggg

SEQ ID NO: 1223981 - RNA, 25 nt, Human
uuggugaugauguccaguguuucuu

SEQ ID NO: 1223982 - RNA, 22 nt, Human
aagcagcagccugccuaguggg

SEQ ID NO: 1223983 - RNA, 20 nt, Human
acccgaggcuuaggcccaag

SEQ ID NO: 1223984 - RNA, 24 nt, Human
agacgucacagguggcccugagcu

SEQ ID NO: 1223985 - RNA, 20 nt, Human
agcaggaugagccccacgug

SEQ ID NO: 1223986 - RNA, 20 nt, Human
agcgggccuggggcgggcac

SEQ ID NO: 1223987 - RNA, 18 nt, Human
agguggcccugagcuccc

SEQ ID NO: 1223988 - RNA, 21 nt, Human
agugggugacgccaggggccg

SEQ ID NO: 1223989 - RNA, 20 nt, Human
caagcauuaguucuccaagc

SEQ ID NO: 1223990 - RNA, 19 nt, Human
cagcaggaugagccccacg

SEQ ID NO: 1223991 - RNA, 21 nt, Human
cagcggcaggagcggcaggag

SEQ ID NO: 1223992 - RNA, 21 nt, Human
cagcgggccuggggcgggcac

SEQ ID NO: 1223993 - RNA, 20 nt, Human
caguccgcgggcggccagcg

SEQ ID NO: 1223994 - RNA, 23 nt, Human
ccaccugcggcagcggcaggagc

SEQ ID NO: 1223995 - RNA, 23 nt, Human
ccgcgggcggccagcggcccccg

SEQ ID NO: 1223996 - RNA, 24 nt, Human
ccgguguaacauggcaccgagguu

SEQ ID NO: 1223997 - RNA, 20 nt, Human
cggcagcggcaggagcggcg

SEQ ID NO: 1223998 - RNA, 20 nt, Human
cggcaggagcggcaggagcg

SEQ ID NO: 1223999 - RNA, 20 nt, Human
cggcaggagcggcaggagcg

SEQ ID NO: 1224000 - RNA, 21 nt, Human
cgguggggugggcuggggccc

SEQ ID NO: 1224001 - RNA, 18 nt, Human
cuccagcgggccuggggc

SEQ ID NO: 1224002 - RNA, 20 nt, Human
cugcuuccggaggcagcaga

SEQ ID NO: 1224003 - RNA, 22 nt, Human
cugguccgaggggucgcagcug

SEQ ID NO: 1224004 - RNA, 20 nt, Human
gacgguggggugggcugggg

SEQ ID NO: 1224005 - RNA, 21 nt, Human
gaggcuuaggcccaaggggcc

SEQ ID NO: 1224006 - RNA, 19 nt, Human
gagggccugcuggggcugg

SEQ ID NO: 1224007 - RNA, 22 nt, Human
gcagcagccgcaguccgcgggc

SEQ ID NO: 1224008 - RNA, 22 nt, Human
gcaggagcggcaggagcggcag

SEQ ID NO: 1224009 - RNA, 22 nt, Human
gcaggagcggcaggagcggcag

SEQ ID NO: 1224010 - RNA, 23 nt, Human
ggacacaaccagcugugacacca

SEQ ID NO: 1224011 - RNA, 21 nt, Human
ggcaggagcggcagcagcagc

SEQ ID NO: 1224012 - RNA, 25 nt, Human
ggcccuuggcuccaagcauuaguuc

SEQ ID NO: 1224013 - RNA, 24 nt, Human
ggccucuuccaggcugagggccug

SEQ ID NO: 1224014 - RNA, 18 nt, Human
gggcggccagcggccccc

SEQ ID NO: 1224015 - RNA, 22 nt, Human
gggcggccagcggcccccgggc

SEQ ID NO: 1224016 - RNA, 20 nt, Human
guggcccugagcucccaccc

SEQ ID NO: 1224017 - RNA, 22 nt, Human
uaggcccaaggggccucuucca

SEQ ID NO: 1224018 - RNA, 24 nt, Human
uccaggcugagggccugcuggggc

SEQ ID NO: 1224019 - RNA, 26 nt, Human
ucuccaagcucugguccguucuccua

SEQ ID NO: 1224020 - RNA, 21 nt, Human
ugagggccugcuggggcuggg

SEQ ID NO: 1224021 - RNA, 19 nt, Human
ugccacaggcugcuccagc

SEQ ID NO: 1224022 - RNA, 24 nt, Human
ugccacaggcugcuccagcgggcc

SEQ ID NO: 1224023 - RNA, 19 nt, Human
uggcccugagcucccaccc

SEQ ID NO: 1224024 - RNA, 22 nt, Human
uggcugggccugugccugcuuc

SEQ ID NO: 1224025 - RNA, 20 nt, Human
ugugggacgguggggugggc

SEQ ID NO: 1224026 - RNA, 20 nt, Human
uuauucucucuccaagaaga

SEQ ID NO: 1224027 - RNA, 26 nt, Human
uuccaggcugagggccugcuggggcu

SEQ ID NO: 1224028 - RNA, 20 nt, Human
aagcagacgcgagagccuga

SEQ ID NO: 1224029 - RNA, 22 nt, Human
agaaaaagugagagagagcggc

SEQ ID NO: 1224030 - RNA, 20 nt, Human
agaacccugcaucgggcucc

SEQ ID NO: 1224031 - RNA, 19 nt, Human
agcggccacuuuuccuguc

SEQ ID NO: 1224032 - RNA, 21 nt, Human
auaauuccugaccgcacaaag

SEQ ID NO: 1224033 - RNA, 19 nt, Human
caccagggccucucccagg

SEQ ID NO: 1224034 - RNA, 19 nt, Human
caccagggccucucccagg

SEQ ID NO: 1224035 - RNA, 23 nt, Human
cagaacccugcaucgggcuccuc

SEQ ID NO: 1224036 - RNA, 28 nt, Human
cagugccccagagccacggagccgggga

SEQ ID NO: 1224037 - RNA, 24 nt, Human
ccacagccacgaacgauuuuaccu

SEQ ID NO: 1224038 - RNA, 23 nt, Human
cccacaacgcccccgcggcugcc

SEQ ID NO: 1224039 - RNA, 26 nt, Human
cccacaacgcccccgcggcugcccgu

SEQ ID NO: 1224040 - RNA, 24 nt, Human
cccaggcaaagcguagaagcagac

SEQ ID NO: 1224041 - RNA, 21 nt, Human
ccccagagccacggagccggg

SEQ ID NO: 1224042 - RNA, 20 nt, Human
ccccgcgggcgccgcuccuc

SEQ ID NO: 1224043 - RNA, 19 nt, Human
ccccggcgccuucacaaca

SEQ ID NO: 1224044 - RNA, 25 nt, Human
ccucucccaggcaaagcguagaagc

SEQ ID NO: 1224045 - RNA, 21 nt, Human
cgagagccugaugcagucucc

SEQ ID NO: 1224046 - RNA, 21 nt, Human
cgccaggaacgaggccaccag

SEQ ID NO: 1224047 - RNA, 18 nt, Human
cgccgcaggcauagcgcu

SEQ ID NO: 1224048 - RNA, 23 nt, Human
cgcugccccgcgggcgccgcucc

SEQ ID NO: 1224049 - RNA, 20 nt, Human
gcacagcgcuggcggaucca

SEQ ID NO: 1224050 - RNA, 23 nt, Human
gcacagcgcuggcggauccaggu

SEQ ID NO: 1224051 - RNA, 26 nt, Human
gccaggaacgaggccaccagggccuc

SEQ ID NO: 1224052 - RNA, 21 nt, Human
gccccgcgggcgccgcuccuc

SEQ ID NO: 1224053 - RNA, 22 nt, Human
gccgcagcagggacuccgggcg

SEQ ID NO: 1224054 - RNA, 18 nt, Human
gccgcggagacagcucgg

SEQ ID NO: 1224055 - RNA, 21 nt, Human
gccgcggcccacaacgccccc

SEQ ID NO: 1224056 - RNA, 23 nt, Human
ggaaacgcgccgcggcccacaac

SEQ ID NO: 1224057 - RNA, 19 nt, Human
gggaaacgcgccgcggccc

SEQ ID NO: 1224058 - RNA, 21 nt, Human
gggcagcaugggucaccguga

SEQ ID NO: 1224059 - RNA, 23 nt, Human
gggcgcccgcgggaccggaaaug

SEQ ID NO: 1224060 - RNA, 24 nt, Human
guuccagaaaaagugagagagagc

SEQ ID NO: 1224061 - RNA, 22 nt, Human
uagaagcagacgcgagagccug

SEQ ID NO: 1224062 - RNA, 18 nt, Human
uccagaaaaagugagaga

SEQ ID NO: 1224063 - RNA, 24 nt, Human
ucuccgccgcaggcauagcgcuag

SEQ ID NO: 1224064 - RNA, 19 nt, Human
ugagagacagugaccaagc

SEQ ID NO: 1224065 - RNA, 19 nt, Human
ugccccagagccacggagc

SEQ ID NO: 1224066 - RNA, 24 nt, Human
acccgcggcagcggaggcggagga

SEQ ID NO: 1224067 - RNA, 18 nt, Human
cacugggccgcugcccug

SEQ ID NO: 1224068 - RNA, 19 nt, Human
ccgcggcagcggaggcgga

SEQ ID NO: 1224069 - RNA, 23 nt, Human
cgcgcgcggcuggacggcggcgc

SEQ ID NO: 1224070 - RNA, 18 nt, Human
cgcggggccucggcggcg

SEQ ID NO: 1224071 - RNA, 19 nt, Human
cugcacugggccgcugccc

SEQ ID NO: 1224072 - RNA, 19 nt, Human
cugcuggaggcuccgggcc

SEQ ID NO: 1224073 - RNA, 21 nt, Human
cuggccgcgcgccugcuggag

SEQ ID NO: 1224074 - RNA, 20 nt, Human
gcccugggccacacgcugcu

SEQ ID NO: 1224075 - RNA, 19 nt, Human
gcugcacugggccgcugcc

SEQ ID NO: 1224076 - RNA, 18 nt, Human
ggccucacgccgcugcac

SEQ ID NO: 1224077 - RNA, 20 nt, Human
gggcccgggacccgcggcag

SEQ ID NO: 1224078 - RNA, 18 nt, Human
ugcacugggccgcugccc

SEQ ID NO: 1224079 - RNA, 24 nt, Human
ugcacugggccgcugcccugggcc

SEQ ID NO: 1224080 - RNA, 24 nt, Human
aaagaauuuaacucagaugaagac

SEQ ID NO: 1224081 - RNA, 23 nt, Human
acagcagagggggcagcccugcc

SEQ ID NO: 1224082 - RNA, 18 nt, Human
agcagagggggcagcccu

SEQ ID NO: 1224083 - RNA, 19 nt, Human
aggagagggagccucagag

SEQ ID NO: 1224084 - RNA, 18 nt, Human
agggagccucagaguuuc

SEQ ID NO: 1224085 - RNA, 24 nt, Human
caacucuaccacagagucugagau

SEQ ID NO: 1224086 - RNA, 27 nt, Human
ccucccauagaaggaaccacucggggu

SEQ ID NO: 1224087 - RNA, 19 nt, Human
cucugcaggagagggagcc

SEQ ID NO: 1224088 - RNA, 22 nt, Human
gagccucagaguuuccccucag

SEQ ID NO: 1224089 - RNA, 22 nt, Human
gcacagcagagggggcagcccu

SEQ ID NO: 1224090 - RNA, 18 nt, Human
gcccugccucugccuccc

SEQ ID NO: 1224091 - RNA, 19 nt, Human
gcccugccucugccuccca

SEQ ID NO: 1224092 - RNA, 20 nt, Human
gggcagcccugccucugccu

SEQ ID NO: 1224093 - RNA, 21 nt, Human
uagaaggaaccacucggggug

SEQ ID NO: 1224094 - RNA, 23 nt, Human
ugaagaccccaggaauugcacag

SEQ ID NO: 1224095 - RNA, 18 nt, Human
ugagaucucugcaggaga

SEQ ID NO: 1224096 - RNA, 21 nt, Human
accacugaaacucugaggagu

SEQ ID NO: 1224097 - RNA, 18 nt, Human
auggccuguaccuggaac

SEQ ID NO: 1224098 - RNA, 20 nt, Human
caaauagauaaagcccucuu

SEQ ID NO: 1224099 - RNA, 19 nt, Human
caaccucgaucucaugggc

SEQ ID NO: 1224100 - RNA, 18 nt, Human
cagugggcccuuguaguc

SEQ ID NO: 1224101 - RNA, 21 nt, Human
cauggccuguaccuggaacac

SEQ ID NO: 1224102 - RNA, 24 nt, Human
ccacugaaacucugaggagucggg

SEQ ID NO: 1224103 - RNA, 21 nt, Human
ccccagaccagcugaauucau

SEQ ID NO: 1224104 - RNA, 21 nt, Human
cuuguuaacuuuauccucgau

SEQ ID NO: 1224105 - RNA, 24 nt, Human
gagcacgggaucagugggcaugga

SEQ ID NO: 1224106 - RNA, 19 nt, Human
uccucgaucuugacccucu

SEQ ID NO: 1224107 - RNA, 19 nt, Human
ucgaucuugacccucuggg

SEQ ID NO: 1224108 - RNA, 18 nt, Human
ugggcauggacgguugcc

SEQ ID NO: 1224109 - RNA, 23 nt, Human
uuuggaccacugaaacucugagg

SEQ ID NO: 1224110 - RNA, 21 nt, Human
aaacagaacugacacugaacu

SEQ ID NO: 1224111 - RNA, 18 nt, Human
uaaacagaacugacacug

SEQ ID NO: 1224112 - RNA, 21 nt, Human
uaauacauacuuguuaaacag

SEQ ID NO: 1224113 - RNA, 23 nt, Human
ugacacugaacuuuuguccuucc

SEQ ID NO: 1224114 - RNA, 22 nt, Human
uguuaaacagaacugacacuga

SEQ ID NO: 1224115 - RNA, 20 nt, Human
uuaaacagaacugacacuga

SEQ ID NO: 1224116 - RNA, 25 nt, Human
aaaaggacagcauugauguugcaga

SEQ ID NO: 1224117 - RNA, 19 nt, Human
aaaauaccaucugucacca

SEQ ID NO: 1224118 - RNA, 19 nt, Human
aacccagugcucucucugg

SEQ ID NO: 1224119 - RNA, 19 nt, Human
aacugcuucucaaggccau

SEQ ID NO: 1224120 - RNA, 20 nt, Human
acuugucaagugugcagguu

SEQ ID NO: 1224121 - RNA, 27 nt, Human
agaaagaguggggaaaccccgugugac

SEQ ID NO: 1224122 - RNA, 27 nt, Human
agaagcacaggcacaguggcucccagg

SEQ ID NO: 1224123 - RNA, 21 nt, Human
agaaggacagagaagcacagg

SEQ ID NO: 1224124 - RNA, 22 nt, Human
agaggagagccuguuucugugg

SEQ ID NO: 1224125 - RNA, 18 nt, Human
agccuguuucuguggcug

SEQ ID NO: 1224126 - RNA, 22 nt, Human
agcuugcagucuugacuucugu

SEQ ID NO: 1224127 - RNA, 20 nt, Human
aggaagaggcagaauuuaaa

SEQ ID NO: 1224128 - RNA, 19 nt, Human
aggagagccuguuucugug

SEQ ID NO: 1224129 - RNA, 18 nt, Human
aggcacaguggcucccag

SEQ ID NO: 1224130 - RNA, 23 nt, Human
auuauccaugauguccacucagu

SEQ ID NO: 1224131 - RNA, 20 nt, Human
auuuggguuagagaguagga

SEQ ID NO: 1224132 - RNA, 18 nt, Human
caaaauagccccagagga

SEQ ID NO: 1224133 - RNA, 19 nt, Human
caagaagaggguggaaaca

SEQ ID NO: 1224134 - RNA, 21 nt, Human
caagaagaggguggaaacagu

SEQ ID NO: 1224135 - RNA, 21 nt, Human
cacccuuggcuccccaccccu

SEQ ID NO: 1224136 - RNA, 18 nt, Human
cagccuucucugcugggc

SEQ ID NO: 1224137 - RNA, 23 nt, Human
cagcuccagagcaacuuucccca

SEQ ID NO: 1224138 - RNA, 21 nt, Human
cauggcaagcaaagggagaag

SEQ ID NO: 1224139 - RNA, 22 nt, Human
ccagugcucucucugggcuucu

SEQ ID NO: 1224140 - RNA, 24 nt, Human
ccaucugucaccaugcuuaaaguc

SEQ ID NO: 1224141 - RNA, 23 nt, Human
cccacagaaccagcuccagagca

SEQ ID NO: 1224142 - RNA, 19 nt, Human
ccccaggaccugcuugggg

SEQ ID NO: 1224143 - RNA, 21 nt, Human
ccuucgggucugacagccacc

SEQ ID NO: 1224144 - RNA, 22 nt, Human
cgaaguccuaaccgccaguacc

SEQ ID NO: 1224145 - RNA, 25 nt, Human
cucaagacacacauucaguaaaggc

SEQ ID NO: 1224146 - RNA, 23 nt, Human
cugcuuggggcuucaggcugcuc

SEQ ID NO: 1224147 - RNA, 22 nt, Human
cuggagucuuccaucucagugu

SEQ ID NO: 1224148 - RNA, 21 nt, Human
cuggguacaaagucacuuggg

SEQ ID NO: 1224149 - RNA, 23 nt, Human
cuuccagcaugggcucuguuaug

SEQ ID NO: 1224150 - RNA, 18 nt, Human
cuuccugcuccuuuucuu

SEQ ID NO: 1224151 - RNA, 22 nt, Human
cuugucagcuucuguucuagcg

SEQ ID NO: 1224152 - RNA, 24 nt, Human
gaaccagcuccagagcaacuuucc

SEQ ID NO: 1224153 - RNA, 18 nt, Human
gacaccuucugggugguc

SEQ ID NO: 1224154 - RNA, 24 nt, Human
gacagccaccacuguggagccacc

SEQ ID NO: 1224155 - RNA, 21 nt, Human
gaguucucugccgcuccaccu

SEQ ID NO: 1224156 - RNA, 20 nt, Human
gauggccagcaaaaggacag

SEQ ID NO: 1224157 - RNA, 21 nt, Human
gcccaaaauaccaucugucac

SEQ ID NO: 1224158 - RNA, 19 nt, Human
gccuguuucuguggcugac

SEQ ID NO: 1224159 - RNA, 23 nt, Human
gcuaugggagcaggagugggaac

SEQ ID NO: 1224160 - RNA, 21 nt, Human
gcuccagagcaacuuucccca

SEQ ID NO: 1224161 - RNA, 24 nt, Human
gcugugacagaagcaggucaaggc

SEQ ID NO: 1224162 - RNA, 24 nt, Human
ggaacuagaaaggggaagaggaag

SEQ ID NO: 1224163 - RNA, 23 nt, Human
ggauaagggggagcaaaggugcu

SEQ ID NO: 1224164 - RNA, 21 nt, Human
ggcucuguuaugggcugaauu

SEQ ID NO: 1224165 - RNA, 25 nt, Human
gggaagaggaaggaggauaaggggg

SEQ ID NO: 1224166 - RNA, 22 nt, Human
gggcuuacccuuaaauacagag

SEQ ID NO: 1224167 - RNA, 22 nt, Human
ggggagcaaaggugcucuugga

SEQ ID NO: 1224168 - RNA, 18 nt, Human
gugacagaagcaggucaa

SEQ ID NO: 1224169 - RNA, 20 nt, Human
guggaaacaguguguuugag

SEQ ID NO: 1224170 - RNA, 21 nt, Human
guuuaaucugucuacacugaa

SEQ ID NO: 1224171 - RNA, 22 nt, Human
uaaaguccacccuuggcucccc

SEQ ID NO: 1224172 - RNA, 19 nt, Human
uagacagcaaaguaagagg

SEQ ID NO: 1224173 - RNA, 25 nt, Human
uaucagaaagaguggggaaaccccc

SEQ ID NO: 1224174 - RNA, 18 nt, Human
uauuuggguuagagagua

SEQ ID NO: 1224175 - RNA, 24 nt, Human
ucaaaagaguauuauccaugaugu

SEQ ID NO: 1224176 - RNA, 25 nt, Human
ucaaugcuugucagcuucuguucua

SEQ ID NO: 1224177 - RNA, 23 nt, Human
ucagugcugugacagaagcaggu

SEQ ID NO: 1224178 - RNA, 21 nt, Human
ucccaggcuguuugugcugcc

SEQ ID NO: 1224179 - RNA, 18 nt, Human
uccuaaccgccaguaccu

SEQ ID NO: 1224180 - RNA, 22 nt, Human
uccuuuucuuguauccuccauu

SEQ ID NO: 1224181 - RNA, 21 nt, Human
ucgaaguccuaaccgccagua

SEQ ID NO: 1224182 - RNA, 24 nt, Human
ucgggucugacagccaccacugug

SEQ ID NO: 1224183 - RNA, 20 nt, Human
ucugccgcuccaccuccugc

SEQ ID NO: 1224184 - RNA, 19 nt, Human
ucugggcuucuguuucucc

SEQ ID NO: 1224185 - RNA, 25 nt, Human
ugaauacauucaagaagagggugga

SEQ ID NO: 1224186 - RNA, 24 nt, Human
ugcccaaaauaccaucugucacca

SEQ ID NO: 1224187 - RNA, 19 nt, Human
uggccagcaaaaggacagc

SEQ ID NO: 1224188 - RNA, 27 nt, Human
uggcgaagggacacuuaacugggguca

SEQ ID NO: 1224189 - RNA, 21 nt, Human
uggguuagagaguaggaagag

SEQ ID NO: 1224190 - RNA, 24 nt, Human
uucucugccgcuccaccuccugca

SEQ ID NO: 1224191 - RNA, 18 nt, Human
uugcccccuggagucuuc

SEQ ID NO: 1224192 - RNA, 19 nt, Human
uuucagggacugucuucca

SEQ ID NO: 1224193 - RNA, 22 nt, Human
uuucugcccaaaauaccaucug

SEQ ID NO: 1224194 - RNA, 26 nt, Human
uuucuuguauccuccauuuuucuacc

SEQ ID NO: 1224195 - RNA, 24 nt, Human
aaaaaaaaaaaaaaucggccagag

SEQ ID NO: 1224196 - RNA, 24 nt, Human
aaaaaaaaaaaaucggccagaggg

SEQ ID NO: 1224197 - RNA, 19 nt, Human
aaaaggacacauacaaagc

SEQ ID NO: 1224198 - RNA, 22 nt, Human
aaaggagggggcaaagguucug

SEQ ID NO: 1224199 - RNA, 20 nt, Human
aaaggcuucugaagccagca

SEQ ID NO: 1224200 - RNA, 24 nt, Human
aaaguggugggauuacaggcguga

SEQ ID NO: 1224201 - RNA, 20 nt, Human
aacaaaggccuuuuaagaac

SEQ ID NO: 1224202 - RNA, 21 nt, Human
aacaacuuucccccuccacua

SEQ ID NO: 1224203 - RNA, 20 nt, Human
aacauggugaaacaccgucu

SEQ ID NO: 1224204 - RNA, 21 nt, Human
aacauggugaaacaccgucuc

SEQ ID NO: 1224205 - RNA, 24 nt, Human
aagcacaagaagucagucuaaacu

SEQ ID NO: 1224206 - RNA, 22 nt, Human
aaggagggggcaaagguucuga

SEQ ID NO: 1224207 - RNA, 18 nt, Human
aagggggugggggaagau

SEQ ID NO: 1224208 - RNA, 21 nt, Human
aaguggugggauuacaggcgu

SEQ ID NO: 1224209 - RNA, 20 nt, Human
aauacuauagugaucaguaa

SEQ ID NO: 1224210 - RNA, 23 nt, Human
aaucgcuugaaccugggaggugg

SEQ ID NO: 1224211 - RNA, 24 nt, Human
acacaggagaaucgcuugaaccug

SEQ ID NO: 1224212 - RNA, 22 nt, Human
acaccgucucuacuaaaaauaa

SEQ ID NO: 1224213 - RNA, 20 nt, Human
acaggagaaucgcuugaacc

SEQ ID NO: 1224214 - RNA, 18 nt, Human
accaaaaacaacuuuccc

SEQ ID NO: 1224215 - RNA, 25 nt, Human
accaaaaacaacuuucccccuccac

SEQ ID NO: 1224216 - RNA, 24 nt, Human
accaacauggugaaacaccgucuc

SEQ ID NO: 1224217 - RNA, 18 nt, Human
accaaguaguaccaaaaa

SEQ ID NO: 1224218 - RNA, 24 nt, Human
accauguuggccaggcuggucuug

SEQ ID NO: 1224219 - RNA, 21 nt, Human
acccaagauccaaccuucccc

SEQ ID NO: 1224220 - RNA, 18 nt, Human
acgggguuucaccauguu

SEQ ID NO: 1224221 - RNA, 23 nt, Human
acgggguuucaccauguuggcca

SEQ ID NO: 1224222 - RNA, 24 nt, Human
acgggguuucaccauguuggccag

SEQ ID NO: 1224223 - RNA, 19 nt, Human
acuacaaaccccuucauag

SEQ ID NO: 1224224 - RNA, 18 nt, Human
acuccaaggucuucaggc

SEQ ID NO: 1224225 - RNA, 21 nt, Human
acugcacuccagccuggcugg

SEQ ID NO: 1224226 - RNA, 24 nt, Human
acugcacuccagccuggcuggcag

SEQ ID NO: 1224227 - RNA, 21 nt, Human
acugcagugaaaacacaaaga

SEQ ID NO: 1224228 - RNA, 22 nt, Human
acuucuaaccuuuuuuaaaagu

SEQ ID NO: 1224229 - RNA, 21 nt, Human
agaaaccuuuagagcuauaga

SEQ ID NO: 1224230 - RNA, 23 nt, Human
agagagcuacucugucucaaaaa

SEQ ID NO: 1224231 - RNA, 18 nt, Human
agagcuggggugacggag

SEQ ID NO: 1224232 - RNA, 24 nt, Human
agcacuuugggaggcugagguggg

SEQ ID NO: 1224233 - RNA, 20 nt, Human
agcccauaagcccuacccag

SEQ ID NO: 1224234 - RNA, 23 nt, Human
agcugggcauaguggugggugcc

SEQ ID NO: 1224235 - RNA, 22 nt, Human
aggaaggcuagugcagcagcug

SEQ ID NO: 1224236 - RNA, 19 nt, Human
aggaauggaaguguccuug

SEQ ID NO: 1224237 - RNA, 18 nt, Human
aggcacaggcagagcugg

SEQ ID NO: 1224238 - RNA, 19 nt, Human
aggcagggggagcuggagg

SEQ ID NO: 1224239 - RNA, 18 nt, Human
aggccacuggagguggga

SEQ ID NO: 1224240 - RNA, 22 nt, Human
aggcugagguggguggaucaug

SEQ ID NO: 1224241 - RNA, 24 nt, Human
agggauucgugugucucagccucc

SEQ ID NO: 1224242 - RNA, 18 nt, Human
agggggugggggaagaug

SEQ ID NO: 1224243 - RNA, 23 nt, Human
agggggugggggaagauggggag

SEQ ID NO: 1224244 - RNA, 24 nt, Human
aggugauccaccugccucagcuuu

SEQ ID NO: 1224245 - RNA, 24 nt, Human
agguggggguugcagcgagcugag

SEQ ID NO: 1224246 - RNA, 24 nt, Human
agguggguggaucaugaggucagg

SEQ ID NO: 1224247 - RNA, 23 nt, Human
agguucugaaggcccagagagcu

SEQ ID NO: 1224248 - RNA, 18 nt, Human
aguagcugggauuacagg

SEQ ID NO: 1224249 - RNA, 22 nt, Human
aguggagacgggguuucaccau

SEQ ID NO: 1224250 - RNA, 24 nt, Human
aguggugggugccuguaaucccag

SEQ ID NO: 1224251 - RNA, 24 nt, Human
aucaugccacugcacuccagccug

SEQ ID NO: 1224252 - RNA, 22 nt, Human
augccacugcacuccagccugg

SEQ ID NO: 1224253 - RNA, 21 nt, Human
auggaaguguccuugcccucu

SEQ ID NO: 1224254 - RNA, 22 nt, Human
caaagcucaguucuugagcugu

SEQ ID NO: 1224255 - RNA, 24 nt, Human
caaaguggugggauuacaggcgug

SEQ ID NO: 1224256 - RNA, 24 nt, Human
caacauggugaaacaccgucucua

SEQ ID NO: 1224257 - RNA, 23 nt, Human
caaccucugcuuccugggcucaa

SEQ ID NO: 1224258 - RNA, 21 nt, Human
caagaggaagccacagcagcc

SEQ ID NO: 1224259 - RNA, 23 nt, Human
caagauccaaccuuccccuuacu

SEQ ID NO: 1224260 - RNA, 24 nt, Human
cacaccuguaaucccagcacuuug

SEQ ID NO: 1224261 - RNA, 21 nt, Human
caccauguuggccaggcuggu

SEQ ID NO: 1224262 - RNA, 22 nt, Human
caccauguuggccaggcugguc

SEQ ID NO: 1224263 - RNA, 23 nt, Human
caccauguuggccaggcuggucu

SEQ ID NO: 1224264 - RNA, 24 nt, Human
caccauguuggccaggcuggucuu

SEQ ID NO: 1224265 - RNA, 23 nt, Human
caccugccucagcuuuccaaagu

SEQ ID NO: 1224266 - RNA, 23 nt, Human
caccuguaaucccagcacuuugg

SEQ ID NO: 1224267 - RNA, 24 nt, Human
caccuguaaucccagcacuuuggg

SEQ ID NO: 1224268 - RNA, 19 nt, Human
cacuccagccuggcuggca

SEQ ID NO: 1224269 - RNA, 24 nt, Human
cacuccagccuggcuggcagagag

SEQ ID NO: 1224270 - RNA, 23 nt, Human
cacugcaaccucugcuuccuggg

SEQ ID NO: 1224271 - RNA, 18 nt, Human
cacugcacuccagccugg

SEQ ID NO: 1224272 - RNA, 24 nt, Human
cacugcacuccagccuggcuggca

SEQ ID NO: 1224273 - RNA, 25 nt, Human
cacugcacuccagccuggcuggcag

SEQ ID NO: 1224274 - RNA, 20 nt, Human
cagaaaaacaaagccaaagg

SEQ ID NO: 1224275 - RNA, 20 nt, Human
cagaaacucagcccauaagc

SEQ ID NO: 1224276 - RNA, 23 nt, Human
cagagagcuacucugucucaaaa

SEQ ID NO: 1224277 - RNA, 24 nt, Human
cagagucuugcucugucgcccagg

SEQ ID NO: 1224278 - RNA, 24 nt, Human
cagcacuuugggaggcugaggugg

SEQ ID NO: 1224279 - RNA, 19 nt, Human
cagcccuguuaucccccaa

SEQ ID NO: 1224280 - RNA, 22 nt, Human
caggugauccaccugccucagc

SEQ ID NO: 1224281 - RNA, 19 nt, Human
caguucuugagcugugcuu

SEQ ID NO: 1224282 - RNA, 18 nt, Human
cauggggaaaaaagucac

SEQ ID NO: 1224283 - RNA, 24 nt, Human
cauguuggccaggcuggucuugaa

SEQ ID NO: 1224284 - RNA, 22 nt, Human
cauucagaaaaacaaagccaaa

SEQ ID NO: 1224285 - RNA, 23 nt, Human
cauucuagauuauugcuguguug

SEQ ID NO: 1224286 - RNA, 22 nt, Human
ccaaaguggugggauuacaggc

SEQ ID NO: 1224287 - RNA, 22 nt, Human
ccaaaguggugggauuacaggc

SEQ ID NO: 1224288 - RNA, 24 nt, Human
ccaaaguggugggauuacaggcgu

SEQ ID NO: 1224289 - RNA, 19 nt, Human
ccacugcacuccagccugg

SEQ ID NO: 1224290 - RNA, 20 nt, Human
ccacugcacuccagccuggc

SEQ ID NO: 1224291 - RNA, 22 nt, Human
ccacugcacuccagccuggcug

SEQ ID NO: 1224292 - RNA, 24 nt, Human
ccacugcacuccagccuggcuggc

SEQ ID NO: 1224293 - RNA, 18 nt, Human
ccagcaaagcugggaaag

SEQ ID NO: 1224294 - RNA, 18 nt, Human
ccagcccuguuauccccc

SEQ ID NO: 1224295 - RNA, 18 nt, Human
cccaccaaguaguaccaa

SEQ ID NO: 1224296 - RNA, 24 nt, Human
cccacuggagucacggaacccuga

SEQ ID NO: 1224297 - RNA, 24 nt, Human
cccauaguuagaucuuuuaaaggc

SEQ ID NO: 1224298 - RNA, 20 nt, Human
ccccugagaugcuccggccu

SEQ ID NO: 1224299 - RNA, 23 nt, Human
cccuaguagcugggauuacaggc

SEQ ID NO: 1224300 - RNA, 23 nt, Human
cccuccacuaaguccuuagggaa

SEQ ID NO: 1224301 - RNA, 20 nt, Human
ccuacaaugaguuagacuua

SEQ ID NO: 1224302 - RNA, 22 nt, Human
ccuaguagcugggauuacaggc

SEQ ID NO: 1224303 - RNA, 23 nt, Human
ccugaccaacauggugaaacacc

SEQ ID NO: 1224304 - RNA, 24 nt, Human
ccugaccaacauggugaaacaccg

SEQ ID NO: 1224305 - RNA, 21 nt, Human
ccugaccucaggugauccacc

SEQ ID NO: 1224306 - RNA, 23 nt, Human
ccugaccucaggugauccaccug

SEQ ID NO: 1224307 - RNA, 23 nt, Human
ccugaccucaggugauccaccug

SEQ ID NO: 1224308 - RNA, 24 nt, Human
ccugagcugcuggggcugaagcug

SEQ ID NO: 1224309 - RNA, 21 nt, Human
ccugggagguggggguugcag

SEQ ID NO: 1224310 - RNA, 21 nt, Human
ccuguaaucccagcuacucag

SEQ ID NO: 1224311 - RNA, 23 nt, Human
ccuguuggcugguuccugggggg

SEQ ID NO: 1224312 - RNA, 24 nt, Human
cgagaccagccugaccaacauggu

SEQ ID NO: 1224313 - RNA, 23 nt, Human
cgagcugagaucaugccacugca

SEQ ID NO: 1224314 - RNA, 20 nt, Human
cgcggccugacuccucuccu

SEQ ID NO: 1224315 - RNA, 24 nt, Human
cgggguuucaccauguuggccagg

SEQ ID NO: 1224316 - RNA, 21 nt, Human
cuaguagcugggauuacaggc

SEQ ID NO: 1224317 - RNA, 25 nt, Human
cucaaaaaaaaaaaaaaaaaaaaaa

SEQ ID NO: 1224318 - RNA, 22 nt, Human
cucacaccuguaaucccagcac

SEQ ID NO: 1224319 - RNA, 24 nt, Human
cucacaccuguaaucccagcacuu

SEQ ID NO: 1224320 - RNA, 24 nt, Human
cucacugcaaccucugcuuccugg

SEQ ID NO: 1224321 - RNA, 24 nt, Human
cucagccucccuaguagcugggau

SEQ ID NO: 1224322 - RNA, 23 nt, Human
cucaggugauccaccugccucag

SEQ ID NO: 1224323 - RNA, 20 nt, Human
cuccuggaacccagccuguu

SEQ ID NO: 1224324 - RNA, 22 nt, Human
cucgcagcgccuggcuuuggcu

SEQ ID NO: 1224325 - RNA, 19 nt, Human
cucugucucaaaaaaaaaa

SEQ ID NO: 1224326 - RNA, 18 nt, Human
cugaagccagcaaagcug

SEQ ID NO: 1224327 - RNA, 23 nt, Human
cugcaaccucugcuuccugggcu

SEQ ID NO: 1224328 - RNA, 24 nt, Human
cugcaaccucugcuuccugggcuc

SEQ ID NO: 1224329 - RNA, 22 nt, Human
cugcgacuccaaggucuucagg

SEQ ID NO: 1224330 - RNA, 21 nt, Human
cugcuuccugggcucaaggga

SEQ ID NO: 1224331 - RNA, 20 nt, Human
cugcuucgccugccuccuug

SEQ ID NO: 1224332 - RNA, 21 nt, Human
cuggaacccagccuguuucug

SEQ ID NO: 1224333 - RNA, 19 nt, Human
cugggacaggcuaccacug

SEQ ID NO: 1224334 - RNA, 18 nt, Human
cuugaaccugggaggugg

SEQ ID NO: 1224335 - RNA, 22 nt, Human
cuugccucgucagccuggaggu

SEQ ID NO: 1224336 - RNA, 21 nt, Human
cuugcucugucgcccaggcug

SEQ ID NO: 1224337 - RNA, 21 nt, Human
cuuggcacugagggcagccac

SEQ ID NO: 1224338 - RNA, 20 nt, Human
cuuggcacuggccgcagccu

SEQ ID NO: 1224339 - RNA, 22 nt, Human
cuuguggaaaaaaacuaaggaa

SEQ ID NO: 1224340 - RNA, 23 nt, Human
cuuucccuguccucucucaagag

SEQ ID NO: 1224341 - RNA, 21 nt, Human
gaaaacacaaagauuuuagaa

SEQ ID NO: 1224342 - RNA, 19 nt, Human
gaacccagccuguuucugu

SEQ ID NO: 1224343 - RNA, 19 nt, Human
gaagucagucuaaacugca

SEQ ID NO: 1224344 - RNA, 21 nt, Human
gacaagaugaagcugggacag

SEQ ID NO: 1224345 - RNA, 24 nt, Human
gaccucaggugauccaccugccuc

SEQ ID NO: 1224346 - RNA, 23 nt, Human
gagaaucgcuugaaccugggagg

SEQ ID NO: 1224347 - RNA, 24 nt, Human
gagacgggguuucaccauguuggc

SEQ ID NO: 1224348 - RNA, 19 nt, Human
gagcugcuggggcugaagc

SEQ ID NO: 1224349 - RNA, 20 nt, Human
gagcugcuggggcugaagcu

SEQ ID NO: 1224350 - RNA, 21 nt, Human
gagguggguggaucaugaggu

SEQ ID NO: 1224351 - RNA, 24 nt, Human
gaucaugaggucaggaguucgaga

SEQ ID NO: 1224352 - RNA, 26 nt, Human
gauccaaccuuccccuuacuucccac

SEQ ID NO: 1224353 - RNA, 18 nt, Human
gauuacaggcgccggcca

SEQ ID NO: 1224354 - RNA, 18 nt, Human
gauuacaggcgugagcca

SEQ ID NO: 1224355 - RNA, 21 nt, Human
gauuacaggcgugagccacug

SEQ ID NO: 1224356 - RNA, 24 nt, Human
gauuacaggcgugagccacugugu

SEQ ID NO: 1224357 - RNA, 23 nt, Human
gcaaagcacaagaagucagucua

SEQ ID NO: 1224358 - RNA, 25 nt, Human
gcaauacuauagugaucaguaagcu

SEQ ID NO: 1224359 - RNA, 21 nt, Human
gcagagagcuacucugucuca

SEQ ID NO: 1224360 - RNA, 24 nt, Human
gccagccgggugcgguggcucaca

SEQ ID NO: 1224361 - RNA, 21 nt, Human
gccauuuccaacagaggccug

SEQ ID NO: 1224362 - RNA, 20 nt, Human
gcccaggcuggagugcagug

SEQ ID NO: 1224363 - RNA, 19 nt, Human
gccucagcuuuccaaagug

SEQ ID NO: 1224364 - RNA, 21 nt, Human
gcgccuggcuuuggcugcuuc

SEQ ID NO: 1224365 - RNA, 20 nt, Human
gcgguggcucacaccuguaa

SEQ ID NO: 1224366 - RNA, 25 nt, Human
gcucugucgcccaggcuggagugca

SEQ ID NO: 1224367 - RNA, 19 nt, Human
gcugcuucgccugccuccu

SEQ ID NO: 1224368 - RNA, 19 nt, Human
ggaacccuuccagucaccu

SEQ ID NO: 1224369 - RNA, 18 nt, Human
ggagaugggcuccuggaa

SEQ ID NO: 1224370 - RNA, 18 nt, Human
ggcacaggcagagcuggg

SEQ ID NO: 1224371 - RNA, 24 nt, Human
ggcagagagcuacucugucucaaa

SEQ ID NO: 1224372 - RNA, 24 nt, Human
ggcagccacuuuguacucucucug

SEQ ID NO: 1224373 - RNA, 24 nt, Human
ggcuggucuugaauuccugaccuc

SEQ ID NO: 1224374 - RNA, 20 nt, Human
gggaaaaaagucacuugugu

SEQ ID NO: 1224375 - RNA, 25 nt, Human
gggaggcuggucucagguugggagg

SEQ ID NO: 1224376 - RNA, 18 nt, Human
gggcaaagguucugaagg

SEQ ID NO: 1224377 - RNA, 21 nt, Human
gggcagggaagcaugguccag

SEQ ID NO: 1224378 - RNA, 24 nt, Human
gggcauaguggugggugccuguaa

SEQ ID NO: 1224379 - RNA, 20 nt, Human
ggggccaggggccgcuuucc

SEQ ID NO: 1224380 - RNA, 22 nt, Human
gggguugcagcgagcugagauc

SEQ ID NO: 1224381 - RNA, 23 nt, Human
gggguugcagcgagcugagauca

SEQ ID NO: 1224382 - RNA, 23 nt, Human
gggguuucaccauguuggccagg

SEQ ID NO: 1224383 - RNA, 19 nt, Human
ggucuugaauuccugaccu

SEQ ID NO: 1224384 - RNA, 23 nt, Human
gguggaucaugaggucaggaguu

SEQ ID NO: 1224385 - RNA, 23 nt, Human
gguggcucacaccuguaauccca

SEQ ID NO: 1224386 - RNA, 24 nt, Human
gguggcucacaccuguaaucccag

SEQ ID NO: 1224387 - RNA, 23 nt, Human
gguggguggaucaugaggucagg

SEQ ID NO: 1224388 - RNA, 20 nt, Human
gguugcagcgagcugagauc

SEQ ID NO: 1224389 - RNA, 18 nt, Human
guagcugggauuacaggc

SEQ ID NO: 1224390 - RNA, 19 nt, Human
guccuugcccucuuccagg

SEQ ID NO: 1224391 - RNA, 18 nt, Human
gugauccaccugccucag

SEQ ID NO: 1224392 - RNA, 24 nt, Human
gugauccaccugccucagcuuucc

SEQ ID NO: 1224393 - RNA, 24 nt, Human
gugcaacuggaggcagggguaagc

SEQ ID NO: 1224394 - RNA, 20 nt, Human
gugcagcagcugucagggau

SEQ ID NO: 1224395 - RNA, 23 nt, Human
guggagacgggguuucaccaugu

SEQ ID NO: 1224396 - RNA, 23 nt, Human
guggaucaugaggucaggaguuc

SEQ ID NO: 1224397 - RNA, 23 nt, Human
guggcucacaccuguaaucccag

SEQ ID NO: 1224398 - RNA, 20 nt, Human
guggggguugcagcgagcug

SEQ ID NO: 1224399 - RNA, 23 nt, Human
gugucucagccucccuaguagcu

SEQ ID NO: 1224400 - RNA, 19 nt, Human
uaaaaauaaaaaaauuagc

SEQ ID NO: 1224401 - RNA, 20 nt, Human
uaaaaauaaaaaaauuagcu

SEQ ID NO: 1224402 - RNA, 18 nt, Human
uaaacugcagugaaaaca

SEQ ID NO: 1224403 - RNA, 26 nt, Human
uaaaggcacaggcagagcuggagacc

SEQ ID NO: 1224404 - RNA, 21 nt, Human
uaaaggcacaucuagaagugg

SEQ ID NO: 1224405 - RNA, 23 nt, Human
uacaaucgaggcucacugcaacc

SEQ ID NO: 1224406 - RNA, 23 nt, Human
uacaggcgugagccacugugucc

SEQ ID NO: 1224407 - RNA, 24 nt, Human
uacaggcgugagccacuguguccc

SEQ ID NO: 1224408 - RNA, 18 nt, Human
uagcuggcucccaacugc

SEQ ID NO: 1224409 - RNA, 18 nt, Human
uagcugggcauaguggug

SEQ ID NO: 1224410 - RNA, 27 nt, Human
uaguagcugggauuacaggcgccggcc

SEQ ID NO: 1224411 - RNA, 24 nt, Human
uaguggagacgggguuucaccaug

SEQ ID NO: 1224412 - RNA, 24 nt, Human
uauuucaguuuugaauauuaaauc

SEQ ID NO: 1224413 - RNA, 21 nt, Human
ucaaaaaaaaaaaaaaaaaaa

SEQ ID NO: 1224414 - RNA, 22 nt, Human
ucaaaaaaaaaaaaaaaaaaaa

SEQ ID NO: 1224415 - RNA, 23 nt, Human
ucaaaaaaaaaaaaaaaaaaaaa

SEQ ID NO: 1224416 - RNA, 23 nt, Human
ucaaaaaaaaaaaaaaaaaaaaa

SEQ ID NO: 1224417 - RNA, 24 nt, Human
ucacugcaaccucugcuuccuggg

SEQ ID NO: 1224418 - RNA, 21 nt, Human
ucagaaaaacaaagccaaagg

SEQ ID NO: 1224419 - RNA, 22 nt, Human
ucagcuaccucaucaccaucca

SEQ ID NO: 1224420 - RNA, 28 nt, Human
ucaggacaagaugaagcugggacaacac

SEQ ID NO: 1224421 - RNA, 22 nt, Human
ucaggugauccaccugccucag

SEQ ID NO: 1224422 - RNA, 24 nt, Human
ucagugucuucuaggccguucucc

SEQ ID NO: 1224423 - RNA, 24 nt, Human
ucaugaggucaggaguucgagacc

SEQ ID NO: 1224424 - RNA, 23 nt, Human
ucaugccacugcacuccagccug

SEQ ID NO: 1224425 - RNA, 21 nt, Human
uccaaggcagggggagcugga

SEQ ID NO: 1224426 - RNA, 22 nt, Human
uccagcccuguuaucccccaaa

SEQ ID NO: 1224427 - RNA, 19 nt, Human
uccauccauucagaaaaac

SEQ ID NO: 1224428 - RNA, 23 nt, Human
uccauccauucagaaaaacaaag

SEQ ID NO: 1224429 - RNA, 22 nt, Human
ucccgcucugugacccacuaaa

SEQ ID NO: 1224430 - RNA, 24 nt, Human
ucccuaguagcugggauuacaggc

SEQ ID NO: 1224431 - RNA, 19 nt, Human
uccugggcucaagggauuc

SEQ ID NO: 1224432 - RNA, 24 nt, Human
ucgcccaggcuggagugcaguggu

SEQ ID NO: 1224433 - RNA, 23 nt, Human
ucgcuugaaccugggaggugggg

SEQ ID NO: 1224434 - RNA, 18 nt, Human
ucuccauccauucagaaa

SEQ ID NO: 1224435 - RNA, 21 nt, Human
ucucuacuaaaaauaaaaaaa

SEQ ID NO: 1224436 - RNA, 20 nt, Human
ucugaagccagcaaagcugg

SEQ ID NO: 1224437 - RNA, 22 nt, Human
ucugcuuccugggcucaaggga

SEQ ID NO: 1224438 - RNA, 23 nt, Human
ucugucucaaaaaaaaaaaaaaa

SEQ ID NO: 1224439 - RNA, 21 nt, Human
ucuucaggccgcgcucgcagc

SEQ ID NO: 1224440 - RNA, 23 nt, Human
ucuugcucugucgcccaggcugg

SEQ ID NO: 1224441 - RNA, 24 nt, Human
ucuugcucugucgcccaggcugga

SEQ ID NO: 1224442 - RNA, 24 nt, Human
ugaaaauuuuaaaaugauuugggu

SEQ ID NO: 1224443 - RNA, 18 nt, Human
ugaaagagcaaagcagca

SEQ ID NO: 1224444 - RNA, 22 nt, Human
ugaaagagcaaagcagcagacu

SEQ ID NO: 1224445 - RNA, 19 nt, Human
ugaaccugggagguggggg

SEQ ID NO: 1224446 - RNA, 24 nt, Human
ugaaccugggagguggggguugca

SEQ ID NO: 1224447 - RNA, 24 nt, Human
ugaagauagauagauagauagaua

SEQ ID NO: 1224448 - RNA, 24 nt, Human
ugacacaggagaaucgcuugaacc

SEQ ID NO: 1224449 - RNA, 18 nt, Human
ugaccaacauggugaaac

SEQ ID NO: 1224450 - RNA, 24 nt, Human
ugaccucaggugauccaccugccu

SEQ ID NO: 1224451 - RNA, 19 nt, Human
ugacggaguugucugggac

SEQ ID NO: 1224452 - RNA, 20 nt, Human
ugacugcaauuaaguguuaa

SEQ ID NO: 1224453 - RNA, 22 nt, Human
ugagacagagucuugcucuguc

SEQ ID NO: 1224454 - RNA, 24 nt, Human
ugagaucaugccacugcacuccag

SEQ ID NO: 1224455 - RNA, 25 nt, Human
ugaggaacaucagaaacucagccca

SEQ ID NO: 1224456 - RNA, 21 nt, Human
ugagguggguggaucaugagg

SEQ ID NO: 1224457 - RNA, 24 nt, Human
ugagguggguggaucaugagguca

SEQ ID NO: 1224458 - RNA, 21 nt, Human
ugaguaaaaggagggggcaaa

SEQ ID NO: 1224459 - RNA, 27 nt, Human
ugaguaguuaguugaguaaaaggaggg

SEQ ID NO: 1224460 - RNA, 19 nt, Human
ugcaaccucugcuuccugg

SEQ ID NO: 1224461 - RNA, 18 nt, Human
ugcacuggagguucagug

SEQ ID NO: 1224462 - RNA, 19 nt, Human
ugcacuggagguucagugu

SEQ ID NO: 1224463 - RNA, 18 nt, Human
ugcagugguacaaucgag

SEQ ID NO: 1224464 - RNA, 21 nt, Human
ugccucagcuuuccaaagugg

SEQ ID NO: 1224465 - RNA, 24 nt, Human
ugccuguaaucccagcuacucagg

SEQ ID NO: 1224466 - RNA, 20 nt, Human
ugcuccggccugagcugcuu

SEQ ID NO: 1224467 - RNA, 24 nt, Human
ugcucugucgcccaggcuggagug

SEQ ID NO: 1224468 - RNA, 18 nt, Human
ugcuggccaucggcuaca

SEQ ID NO: 1224469 - RNA, 23 nt, Human
uggaaaaaaacuaaggaaguucc

SEQ ID NO: 1224470 - RNA, 26 nt, Human
uggaaaaaaacuaaggaaguucccca

SEQ ID NO: 1224471 - RNA, 18 nt, Human
uggaacccagccuguuuc

SEQ ID NO: 1224472 - RNA, 19 nt, Human
uggaaguguccuugcccuc

SEQ ID NO: 1224473 - RNA, 18 nt, Human
uggagugcagugguacaa

SEQ ID NO: 1224474 - RNA, 21 nt, Human
uggagugcagugguacaaucg

SEQ ID NO: 1224475 - RNA, 24 nt, Human
uggagugcagugguacaaucgagg

SEQ ID NO: 1224476 - RNA, 21 nt, Human
uggauacacacccuaagggga

SEQ ID NO: 1224477 - RNA, 22 nt, Human
uggaucaugaggucaggaguuc

SEQ ID NO: 1224478 - RNA, 24 nt, Human
uggaucaugaggucaggaguucga

SEQ ID NO: 1224479 - RNA, 22 nt, Human
uggccagccgggugcgguggcu

SEQ ID NO: 1224480 - RNA, 24 nt, Human
uggccaggcuggucuugaauuccu

SEQ ID NO: 1224481 - RNA, 22 nt, Human
uggcccacuggagucacggaac

SEQ ID NO: 1224482 - RNA, 21 nt, Human
uggcucacaccuguaauccca

SEQ ID NO: 1224483 - RNA, 22 nt, Human
uggcucacaccuguaaucccag

SEQ ID NO: 1224484 - RNA, 24 nt, Human
uggcucacaccuguaaucccagca

SEQ ID NO: 1224485 - RNA, 20 nt, Human
uggcucccaacugcagguga

SEQ ID NO: 1224486 - RNA, 21 nt, Human
uggcuggcagagagcuacucu

SEQ ID NO: 1224487 - RNA, 20 nt, Human
ugggacaggcuccuccuacu

SEQ ID NO: 1224488 - RNA, 20 nt, Human
ugggaggcugaggugggugg

SEQ ID NO: 1224489 - RNA, 23 nt, Human
ugggaggcugagguggguggauc

SEQ ID NO: 1224490 - RNA, 24 nt, Human
ugggaggcugagguggguggauca

SEQ ID NO: 1224491 - RNA, 18 nt, Human
ugggaggcuuugucuugc

SEQ ID NO: 1224492 - RNA, 18 nt, Human
ugggagguggggguugca

SEQ ID NO: 1224493 - RNA, 24 nt, Human
ugggagguggggguugcagcgagc

SEQ ID NO: 1224494 - RNA, 21 nt, Human
ugggauuacaggcgccggcca

SEQ ID NO: 1224495 - RNA, 22 nt, Human
ugggauuacaggcgccggccac

SEQ ID NO: 1224496 - RNA, 24 nt, Human
ugggauuacaggcgccggccacca

SEQ ID NO: 1224497 - RNA, 25 nt, Human
ugggauuacaggcgccggccaccau

SEQ ID NO: 1224498 - RNA, 21 nt, Human
ugggauuacaggcgugagcca

SEQ ID NO: 1224499 - RNA, 22 nt, Human
ugggauuacaggcgugagccac

SEQ ID NO: 1224500 - RNA, 22 nt, Human
ugggauuacaggcgugagccac

SEQ ID NO: 1224501 - RNA, 22 nt, Human
ugggauuacaggcgugagccac

SEQ ID NO: 1224502 - RNA, 23 nt, Human
ugggauuacaggcgugagccacu

SEQ ID NO: 1224503 - RNA, 24 nt, Human
ugggauuacaggcgugagccacug

SEQ ID NO: 1224504 - RNA, 24 nt, Human
ugggcucaagggauucgugugucu

SEQ ID NO: 1224505 - RNA, 19 nt, Human
uggguggguagaccaaacc

SEQ ID NO: 1224506 - RNA, 21 nt, Human
uggguggguagaccaaaccca

SEQ ID NO: 1224507 - RNA, 21 nt, Human
uggugggugccuguaauccca

SEQ ID NO: 1224508 - RNA, 22 nt, Human
uggugggugccuguaaucccag

SEQ ID NO: 1224509 - RNA, 24 nt, Human
uggugggugccuguaaucccagcu

SEQ ID NO: 1224510 - RNA, 21 nt, Human
ugucgcccaggcuggagugca

SEQ ID NO: 1224511 - RNA, 24 nt, Human
ugucucagccucccuaguagcugg

SEQ ID NO: 1224512 - RNA, 21 nt, Human
ugucuucuaggccguucuccu

SEQ ID NO: 1224513 - RNA, 23 nt, Human
uguguguaguucccgcucuguga

SEQ ID NO: 1224514 - RNA, 23 nt, Human
uguguugcauacacgugacugca

SEQ ID NO: 1224515 - RNA, 24 nt, Human
uuagcugggcauaguggugggugc

SEQ ID NO: 1224516 - RNA, 18 nt, Human
uuaguggagacgggguuu

SEQ ID NO: 1224517 - RNA, 22 nt, Human
uuaguggagacgggguuucacc

SEQ ID NO: 1224518 - RNA, 24 nt, Human
uuaguggagacgggguuucaccau

SEQ ID NO: 1224519 - RNA, 24 nt, Human
uugaaccugggagguggggguugc

SEQ ID NO: 1224520 - RNA, 19 nt, Human
uugcagcgagcugagauca

SEQ ID NO: 1224521 - RNA, 20 nt, Human
uugcagcgagcugagaucau

SEQ ID NO: 1224522 - RNA, 24 nt, Human
uugcucugucgcccaggcuggagu

SEQ ID NO: 1224523 - RNA, 22 nt, Human
uuggcuacaacaaaggccuuuu

SEQ ID NO: 1224524 - RNA, 19 nt, Human
uuggcugguuccugggggg

SEQ ID NO: 1224525 - RNA, 20 nt, Human
uuggcugguuccuggggggc

SEQ ID NO: 1224526 - RNA, 25 nt, Human
uugggaggcugagguggguggauca

SEQ ID NO: 1224527 - RNA, 25 nt, Human
uuggugcuuggguagcagcaucucu

SEQ ID NO: 1224528 - RNA, 18 nt, Human
uuguguguaguucccgcu

SEQ ID NO: 1224529 - RNA, 24 nt, Human
uuguguuuguuuugagacagaguc

SEQ ID NO: 1224530 - RNA, 24 nt, Human
uuguuuuuguuuuuaguggagacg

SEQ ID NO: 1224531 - RNA, 24 nt, Human
uuucaccauguuggccaggcuggu

SEQ ID NO: 1224532 - RNA, 25 nt, Human
uuuccuaaggccacuggagguggga

SEQ ID NO: 1224533 - RNA, 24 nt, Human
uuuuuaguggagacgggguuucac

SEQ ID NO: 1224534 - RNA, 19 nt, Human
uuuuuguuuuuaguggaga

SEQ ID NO: 1224535 - RNA, 23 nt, Human
uuuuuucuuccaguuaacagucu

SEQ ID NO: 1224536 - RNA, 23 nt, Human
cauuuaaagauaauauccaaugc

SEQ ID NO: 1224537 - RNA, 22 nt, Human
ggcuggaaaaguucuggagaac

SEQ ID NO: 1224538 - RNA, 23 nt, Human
ucuuccagacucucuaggcauca

SEQ ID NO: 1224539 - RNA, 19 nt, Human
ugccuccaaguucccaccc

SEQ ID NO: 1224540 - RNA, 21 nt, Human
uggaaaaguucuggagaacau

SEQ ID NO: 1224541 - RNA, 19 nt, Human
aagcagggacacaaaggca

SEQ ID NO: 1224542 - RNA, 22 nt, Human
acgugucuuuccgggccugggc

SEQ ID NO: 1224543 - RNA, 24 nt, Human
aguccucugcacaaguucagagag

SEQ ID NO: 1224544 - RNA, 24 nt, Human
cacaaaggcaaucaagugcauagc

SEQ ID NO: 1224545 - RNA, 19 nt, Human
ccgggccugggcgucucag

SEQ ID NO: 1224546 - RNA, 20 nt, Human
ccucugcacaaguucagaga

SEQ ID NO: 1224547 - RNA, 21 nt, Human
ccuuccggacaggacagaagu

SEQ ID NO: 1224548 - RNA, 27 nt, Human
cgucagaaagggauccccuuugggcga

SEQ ID NO: 1224549 - RNA, 18 nt, Human
cucgagcuggauccaccc

SEQ ID NO: 1224550 - RNA, 21 nt, Human
cuucaaaaggugaagcaggga

SEQ ID NO: 1224551 - RNA, 23 nt, Human
cuuucuuucccgucagaaaggga

SEQ ID NO: 1224552 - RNA, 20 nt, Human
gaccuccagaggagguuagg

SEQ ID NO: 1224553 - RNA, 20 nt, Human
gcaguaguuacggcuugugu

SEQ ID NO: 1224554 - RNA, 18 nt, Human
gccugggcgucucaggag

SEQ ID NO: 1224555 - RNA, 20 nt, Human
ggacaggacucaccgccuuu

SEQ ID NO: 1224556 - RNA, 19 nt, Human
ggccugggcgucucaggag

SEQ ID NO: 1224557 - RNA, 21 nt, Human
ucaaaaggugaagcagggaca

SEQ ID NO: 1224558 - RNA, 19 nt, Human
ucacaggauuuuucuuguc

SEQ ID NO: 1224559 - RNA, 23 nt, Human
ucccuuccggacaggacagaagu

SEQ ID NO: 1224560 - RNA, 23 nt, Human
ucuguaaacuguccagaacccgc

SEQ ID NO: 1224561 - RNA, 21 nt, Human
ucuuaucaagagaaaacuacu

SEQ ID NO: 1224562 - RNA, 18 nt, Human
ugagcagaugguuucccc

SEQ ID NO: 1224563 - RNA, 23 nt, Human
caagagaaaagccaacauguuuu

SEQ ID NO: 1224564 - RNA, 23 nt, Human
caagagaaaagccaacauguuuu

SEQ ID NO: 1224565 - RNA, 20 nt, Human
cagcagcucccugcugagcc

SEQ ID NO: 1224566 - RNA, 22 nt, Human
cagcagcucccugcugagccuc

SEQ ID NO: 1224567 - RNA, 22 nt, Human
cagcagcucccugcugagccuc

SEQ ID NO: 1224568 - RNA, 22 nt, Human
cagcagcucccugcugagccuc

SEQ ID NO: 1224569 - RNA, 22 nt, Human
cagcagcucccugcugagccuc

SEQ ID NO: 1224570 - RNA, 19 nt, Human
cagccagcagcucccugcu

SEQ ID NO: 1224571 - RNA, 19 nt, Human
cagccagcagcucccugcu

SEQ ID NO: 1224572 - RNA, 19 nt, Human
cagccagcagcucccugcu

SEQ ID NO: 1224573 - RNA, 19 nt, Human
cagccagcagcucccugcu

SEQ ID NO: 1224574 - RNA, 19 nt, Human
cagccagcagcucccugcu

SEQ ID NO: 1224575 - RNA, 22 nt, Human
ccccuucuucuuuucuucuuug

SEQ ID NO: 1224576 - RNA, 22 nt, Human
ccccuucuucuuuucuucuuug

SEQ ID NO: 1224577 - RNA, 22 nt, Human
ccccuucuuuucuuccccuucc

SEQ ID NO: 1224578 - RNA, 22 nt, Human
ccccuucuuuucuuccccuucc

SEQ ID NO: 1224579 - RNA, 22 nt, Human
ccccuucuuuucuuccccuucu

SEQ ID NO: 1224580 - RNA, 22 nt, Human
ccccuucuuuucuuccccuucu

SEQ ID NO: 1224581 - RNA, 20 nt, Human
ccugcaagacuucaggcucu

SEQ ID NO: 1224582 - RNA, 20 nt, Human
ccugcaagacuucaggcucu

SEQ ID NO: 1224583 - RNA, 20 nt, Human
ccugcaagacuucaggcucu

SEQ ID NO: 1224584 - RNA, 20 nt, Human
ccugcaagacuucaggcucu

SEQ ID NO: 1224585 - RNA, 20 nt, Human
ccugcaagacuucaggcucu

SEQ ID NO: 1224586 - RNA, 20 nt, Human
ccugcaagacuucaggcucu

SEQ ID NO: 1224587 - RNA, 21 nt, Human
ccuuccccuucuuuucaauuu

SEQ ID NO: 1224588 - RNA, 21 nt, Human
ccuuggucuucuuccucuucu

SEQ ID NO: 1224589 - RNA, 21 nt, Human
ccuuggucuucuuccucuucu

SEQ ID NO: 1224590 - RNA, 20 nt, Human
cucccugcugagccuggggc

SEQ ID NO: 1224591 - RNA, 20 nt, Human
cucccugcugagccuggggc

SEQ ID NO: 1224592 - RNA, 20 nt, Human
cucccugcugagccuggggc

SEQ ID NO: 1224593 - RNA, 20 nt, Human
cucccugcugagccuggggc

SEQ ID NO: 1224594 - RNA, 20 nt, Human
cucccugcugagccuggggc

SEQ ID NO: 1224595 - RNA, 20 nt, Human
cucccugcugagccuggggc

SEQ ID NO: 1224596 - RNA, 20 nt, Human
cucccugcugagccuggggc

SEQ ID NO: 1224597 - RNA, 19 nt, Human
cugagccuggggcauggug

SEQ ID NO: 1224598 - RNA, 19 nt, Human
cugagccuggggcauggug

SEQ ID NO: 1224599 - RNA, 19 nt, Human
cugagccuggggcauggug

SEQ ID NO: 1224600 - RNA, 19 nt, Human
cugagccuggggcauggug

SEQ ID NO: 1224601 - RNA, 18 nt, Human
cugcagggcuggcauggg

SEQ ID NO: 1224602 - RNA, 23 nt, Human
cuucaggcucuacuaccuccagc

SEQ ID NO: 1224603 - RNA, 23 nt, Human
cuucaggcucuacuaccuccagc

SEQ ID NO: 1224604 - RNA, 20 nt, Human
cuuccccuuccccuucuuuu

SEQ ID NO: 1224605 - RNA, 20 nt, Human
cuuccccuuccccuucuuuu

SEQ ID NO: 1224606 - RNA, 19 nt, Human
cuuccccuucuuuucuucc

SEQ ID NO: 1224607 - RNA, 19 nt, Human
cuuccccuucuuuucuucc

SEQ ID NO: 1224608 - RNA, 19 nt, Human
cuuccccuucuuuucuucc

SEQ ID NO: 1224609 - RNA, 19 nt, Human
cuuccccuucuuuucuucc

SEQ ID NO: 1224610 - RNA, 20 nt, Human
cuucuuccccuucuuuucuu

SEQ ID NO: 1224611 - RNA, 20 nt, Human
cuucuuccccuucuuuucuu

SEQ ID NO: 1224612 - RNA, 21 nt, Human
cuugguccuuuuuaauucugu

SEQ ID NO: 1224613 - RNA, 21 nt, Human
cuugguccuuuuuaauucugu

SEQ ID NO: 1224614 - RNA, 24 nt, Human
cuuggucuucuuccacuucuuggu

SEQ ID NO: 1224615 - RNA, 24 nt, Human
cuuggucuucuuccacuucuuggu

SEQ ID NO: 1224616 - RNA, 24 nt, Human
cuuggucuucuuccacuucuuggu

SEQ ID NO: 1224617 - RNA, 24 nt, Human
cuuggucuucuuccucuucuuggu

SEQ ID NO: 1224618 - RNA, 24 nt, Human
cuuggucuucuuccucuucuuggu

SEQ ID NO: 1224619 - RNA, 25 nt, Human
cuuuucuuccccuuccccuucuuuu

SEQ ID NO: 1224620 - RNA, 21 nt, Human
ggcacuucuguagggcuggca

SEQ ID NO: 1224621 - RNA, 21 nt, Human
ggcacuucuguagggcuggca

SEQ ID NO: 1224622 - RNA, 21 nt, Human
ggcacuucuguagggcuggca

SEQ ID NO: 1224623 - RNA, 21 nt, Human
ggucuucuuccacuucuuggu

SEQ ID NO: 1224624 - RNA, 21 nt, Human
ggucuucuuccacuucuuggu

SEQ ID NO: 1224625 - RNA, 21 nt, Human
ggucuucuuccacuucuuggu

SEQ ID NO: 1224626 - RNA, 21 nt, Human
ggucuucuuccucuucuuggu

SEQ ID NO: 1224627 - RNA, 21 nt, Human
ggucuucuuccucuucuuggu

SEQ ID NO: 1224628 - RNA, 27 nt, Human
gguuuugaucuucuuccccuucuuuuc

SEQ ID NO: 1224629 - RNA, 27 nt, Human
gguuuugaucuucuuccccuucuuuuc

SEQ ID NO: 1224630 - RNA, 22 nt, Human
ucaagagaaaagccaacauguu

SEQ ID NO: 1224631 - RNA, 22 nt, Human
ucaagagaaaagccaacauguu

SEQ ID NO: 1224632 - RNA, 27 nt, Human
uccccuucuuuucuuccccuucccccu

SEQ ID NO: 1224633 - RNA, 27 nt, Human
uccccuucuuuucuuccccuucucccu

SEQ ID NO: 1224634 - RNA, 19 nt, Human
ucugcagggcuggcauggg

SEQ ID NO: 1224635 - RNA, 18 nt, Human
ucuuccacuucuugguac

SEQ ID NO: 1224636 - RNA, 18 nt, Human
ucuuccacuucuugguac

SEQ ID NO: 1224637 - RNA, 18 nt, Human
ucuuccacuucuugguac

SEQ ID NO: 1224638 - RNA, 19 nt, Human
ucuucuuccccuucuuuuc

SEQ ID NO: 1224639 - RNA, 19 nt, Human
ucuucuuccccuucuuuuc

SEQ ID NO: 1224640 - RNA, 19 nt, Human
ucuucuuccccuucuuuuc

SEQ ID NO: 1224641 - RNA, 19 nt, Human
ucuucuuccccuucuuuuc

SEQ ID NO: 1224642 - RNA, 19 nt, Human
ucuuuucuuccccuucccc

SEQ ID NO: 1224643 - RNA, 19 nt, Human
ucuuuucuuccccuucccc

SEQ ID NO: 1224644 - RNA, 21 nt, Human
ucuuuucuuccccuucuucuu

SEQ ID NO: 1224645 - RNA, 21 nt, Human
ucuuuucuuccccuucuucuu

SEQ ID NO: 1224646 - RNA, 20 nt, Human
uguagggcuggcaggaguca

SEQ ID NO: 1224647 - RNA, 20 nt, Human
uguagggcuggcaggaguca

SEQ ID NO: 1224648 - RNA, 18 nt, Human
uucaagacaacuggaagg

SEQ ID NO: 1224649 - RNA, 18 nt, Human
uucaagacaacuggaagg

SEQ ID NO: 1224650 - RNA, 18 nt, Human
uucaagauaaccugaagg

SEQ ID NO: 1224651 - RNA, 18 nt, Human
uucaagauaaccugaagg

SEQ ID NO: 1224652 - RNA, 19 nt, Human
uucuuccucuucuuggucc

SEQ ID NO: 1224653 - RNA, 19 nt, Human
uucuuccucuucuuggucc

SEQ ID NO: 1224654 - RNA, 27 nt, Human
uucuuugaucuucuuccccuucuuuuc

SEQ ID NO: 1224655 - RNA, 27 nt, Human
uucuuugaucuucuuccccuucuuuuc

SEQ ID NO: 1224656 - RNA, 21 nt, Human
uuggucuucuuccacuucuug

SEQ ID NO: 1224657 - RNA, 21 nt, Human
uuggucuucuuccacuucuug

SEQ ID NO: 1224658 - RNA, 21 nt, Human
uuggucuucuuccacuucuug

SEQ ID NO: 1224659 - RNA, 19 nt, Human
uuuucaauuucauccaugu

SEQ ID NO: 1224660 - RNA, 19 nt, Human
uuuucaauuucauccaugu

SEQ ID NO: 1224661 - RNA, 19 nt, Human
uuuucaauuucauccaugu

SEQ ID NO: 1224662 - RNA, 25 nt, Human
uuuucaauuucauccaugucaacag

SEQ ID NO: 1224663 - RNA, 26 nt, Human
uuuucaauuucauccaugucaacagc

SEQ ID NO: 1224664 - RNA, 26 nt, Human
uuuucaauuucauccaugucaacagc

SEQ ID NO: 1224665 - RNA, 19 nt, Human
uuuucaauuucucccacgu

SEQ ID NO: 1224666 - RNA, 20 nt, Human
uuuucaauuucucccacguc

SEQ ID NO: 1224667 - RNA, 24 nt, Human
aaggagcugcagggugacagaugu

SEQ ID NO: 1224668 - RNA, 21 nt, Human
agaauuuuuuuuuccacaagg

SEQ ID NO: 1224669 - RNA, 26 nt, Human
agggagggugaucaggucaaggaggu

SEQ ID NO: 1224670 - RNA, 23 nt, Human
caaggagguaggaacuuagagaa

SEQ ID NO: 1224671 - RNA, 21 nt, Human
caagggagaaagggaagggau

SEQ ID NO: 1224672 - RNA, 21 nt, Human
cagaauuuuuuuuuccacaag

SEQ ID NO: 1224673 - RNA, 19 nt, Human
cagggugacagauguuggc

SEQ ID NO: 1224674 - RNA, 19 nt, Human
cagggugacagauguuggc

SEQ ID NO: 1224675 - RNA, 25 nt, Human
ccuucagggaauggcugggugaaca

SEQ ID NO: 1224676 - RNA, 21 nt, Human
cuuuguuuuaacaaggccugg

SEQ ID NO: 1224677 - RNA, 24 nt, Human
gaacuuagagaacgcauuugguag

SEQ ID NO: 1224678 - RNA, 24 nt, Human
gcagggugacagauguuggcuggg

SEQ ID NO: 1224679 - RNA, 22 nt, Human
ggaggagggagggugaucaggu

SEQ ID NO: 1224680 - RNA, 23 nt, Human
gggaaucugagagguacaaugcu

SEQ ID NO: 1224681 - RNA, 21 nt, Human
uggaggagggagggugaucag

SEQ ID NO: 1224682 - RNA, 20 nt, Human
uggcugaugaucuggucagg

SEQ ID NO: 1224683 - RNA, 21 nt, Human
uggcugaugaucuggucaggg

SEQ ID NO: 1224684 - RNA, 18 nt, Human
uggggaaauuccacuggc

SEQ ID NO: 1224685 - RNA, 19 nt, Human
uggucaggguucgagaggg

SEQ ID NO: 1224686 - RNA, 23 nt, Human
uucgagaggggacaacagcuucu

SEQ ID NO: 1224687 - RNA, 18 nt, Human
aaaagggcagaaaggggg

SEQ ID NO: 1224688 - RNA, 26 nt, Human
aaacagacagguggaaaaacugagac

SEQ ID NO: 1224689 - RNA, 19 nt, Human
aaacccagagggacccaag

SEQ ID NO: 1224690 - RNA, 18 nt, Human
aaauaagaaaaaccaaaa

SEQ ID NO: 1224691 - RNA, 23 nt, Human
aacccucagccuugacuaugucu

SEQ ID NO: 1224692 - RNA, 24 nt, Human
aagaaaaaccaaaauacuccaaag

SEQ ID NO: 1224693 - RNA, 18 nt, Human
aagcuucuagaggcucau

SEQ ID NO: 1224694 - RNA, 21 nt, Human
aaguccuuuugcuugccccuc

SEQ ID NO: 1224695 - RNA, 24 nt, Human
accaaaauacuccaaagaugacuu

SEQ ID NO: 1224696 - RNA, 25 nt, Human
acccugugcccuccuucccaaucuu

SEQ ID NO: 1224697 - RNA, 22 nt, Human
acgaguagauacagaacaaugu

SEQ ID NO: 1224698 - RNA, 19 nt, Human
agaagggcugaacccucag

SEQ ID NO: 1224699 - RNA, 20 nt, Human
aggcagacucccauaaaccc

SEQ ID NO: 1224700 - RNA, 24 nt, Human
aggcagugggaggcaaauggggga

SEQ ID NO: 1224701 - RNA, 21 nt, Human
agggacccaagagaacuggcc

SEQ ID NO: 1224702 - RNA, 19 nt, Human
agggagguggaaggacccu

SEQ ID NO: 1224703 - RNA, 19 nt, Human
auuccauucccuucggcca

SEQ ID NO: 1224704 - RNA, 25 nt, Human
caaaauacuccaaagaugacuuccc

SEQ ID NO: 1224705 - RNA, 20 nt, Human
cacccggggguacccagagg

SEQ ID NO: 1224706 - RNA, 19 nt, Human
cagccuaggaggguaggca

SEQ ID NO: 1224707 - RNA, 20 nt, Human
cagcucagccccagggaccc

SEQ ID NO: 1224708 - RNA, 19 nt, Human
cauggcccuguaguuaggc

SEQ ID NO: 1224709 - RNA, 18 nt, Human
ccaaaauacuccaaagau

SEQ ID NO: 1224710 - RNA, 21 nt, Human
ccaaagaugacuuccccugcu

SEQ ID NO: 1224711 - RNA, 20 nt, Human
ccaaaugcucucucuucuua

SEQ ID NO: 1224712 - RNA, 22 nt, Human
ccaaaugcucucucuucuuauu

SEQ ID NO: 1224713 - RNA, 24 nt, Human
ccacacccaagauggucccaggca

SEQ ID NO: 1224714 - RNA, 23 nt, Human
cccaaaugcucucucuucuuauu

SEQ ID NO: 1224715 - RNA, 22 nt, Human
cccacccggggguacccagagg

SEQ ID NO: 1224716 - RNA, 25 nt, Human
cccauaaacccagagggacccaagg

SEQ ID NO: 1224717 - RNA, 22 nt, Human
ccccagggacccugggccgcuc

SEQ ID NO: 1224718 - RNA, 26 nt, Human
ccccagggacccugggccgcuccucc

SEQ ID NO: 1224719 - RNA, 24 nt, Human
ccccuaagcuucuagaggcucaug

SEQ ID NO: 1224720 - RNA, 25 nt, Human
cccgagcccugguccggcucccagg

SEQ ID NO: 1224721 - RNA, 21 nt, Human
cccucagcccacacccaagau

SEQ ID NO: 1224722 - RNA, 22 nt, Human
cccuccguccagcagcugggag

SEQ ID NO: 1224723 - RNA, 18 nt, Human
cccuccuucccaaucuuc

SEQ ID NO: 1224724 - RNA, 18 nt, Human
ccugcaacugcugcugug

SEQ ID NO: 1224725 - RNA, 23 nt, Human
cucagccccagggacccugggcc

SEQ ID NO: 1224726 - RNA, 28 nt, Human
cucccucagcccacacccaagauggucc

SEQ ID NO: 1224727 - RNA, 22 nt, Human
cucgaagcccuccguccagcag

SEQ ID NO: 1224728 - RNA, 22 nt, Human
cucucuugaaccccaaaugcuc

SEQ ID NO: 1224729 - RNA, 22 nt, Human
cugcugcugugauuccugggag

SEQ ID NO: 1224730 - RNA, 20 nt, Human
cuucccaaucuucuuuuuca

SEQ ID NO: 1224731 - RNA, 23 nt, Human
gaagcccuccguccagcagcugg

SEQ ID NO: 1224732 - RNA, 23 nt, Human
gacacuggggucuguuucuggaa

SEQ ID NO: 1224733 - RNA, 23 nt, Human
gacagguggaaaaacugagacag

SEQ ID NO: 1224734 - RNA, 18 nt, Human
gacccugugcccuccuuc

SEQ ID NO: 1224735 - RNA, 21 nt, Human
gagcccugguccggcucccag

SEQ ID NO: 1224736 - RNA, 19 nt, Human
gaugguaugugagcuagga

SEQ ID NO: 1224737 - RNA, 20 nt, Human
gcagaaagggggucgcugga

SEQ ID NO: 1224738 - RNA, 21 nt, Human
gcaguuucagagauggacaga

SEQ ID NO: 1224739 - RNA, 18 nt, Human
gccugcaacugcugcugu

SEQ ID NO: 1224740 - RNA, 18 nt, Human
gccugggaagggccugcu

SEQ ID NO: 1224741 - RNA, 22 nt, Human
gcucagccccagggacccuggg

SEQ ID NO: 1224742 - RNA, 22 nt, Human
gcuucuagaggcucauggcccu

SEQ ID NO: 1224743 - RNA, 20 nt, Human
gcuugccccucccucagccc

SEQ ID NO: 1224744 - RNA, 20 nt, Human
ggcagaaagggggucgcugg

SEQ ID NO: 1224745 - RNA, 20 nt, Human
ggcagguguaguccacucuc

SEQ ID NO: 1224746 - RNA, 21 nt, Human
ggcagguguaguccacucucc

SEQ ID NO: 1224747 - RNA, 19 nt, Human
ggcagugggaggcaaaugg

SEQ ID NO: 1224748 - RNA, 19 nt, Human
ggccaaacagacaggugga

SEQ ID NO: 1224749 - RNA, 19 nt, Human
ggcucauucugcaccuugc

SEQ ID NO: 1224750 - RNA, 21 nt, Human
gggcagguguaguccacucuc

SEQ ID NO: 1224751 - RNA, 25 nt, Human
guaguccacucuccucccaaaguuc

SEQ ID NO: 1224752 - RNA, 22 nt, Human
guccuuuugcuugccccucccu

SEQ ID NO: 1224753 - RNA, 27 nt, Human
gugccugacucuuccaaguccuuuugc

SEQ ID NO: 1224754 - RNA, 28 nt, Human
uaaacccagagggacccaagagaacugg

SEQ ID NO: 1224755 - RNA, 24 nt, Human
uaagaaaaaccaaaauacuccaaa

SEQ ID NO: 1224756 - RNA, 20 nt, Human
uagaugguggcacauuccuu

SEQ ID NO: 1224757 - RNA, 21 nt, Human
uaggaggguaggcagacuccc

SEQ ID NO: 1224758 - RNA, 20 nt, Human
uauuccauucccuucggcca

SEQ ID NO: 1224759 - RNA, 23 nt, Human
ucaccgacuccggacgccgggac

SEQ ID NO: 1224760 - RNA, 18 nt, Human
ucaggcccggccuauugc

SEQ ID NO: 1224761 - RNA, 19 nt, Human
uccccugccuccuacucca

SEQ ID NO: 1224762 - RNA, 21 nt, Human
ucccgagcccugguccggcuc

SEQ ID NO: 1224763 - RNA, 18 nt, Human
ucccuucggccaaacaga

SEQ ID NO: 1224764 - RNA, 19 nt, Human
ucugugggcagcucagccc

SEQ ID NO: 1224765 - RNA, 19 nt, Human
ucuugaaccccaaaugcuc

SEQ ID NO: 1224766 - RNA, 22 nt, Human
ugaaugggccacgucccgagcc

SEQ ID NO: 1224767 - RNA, 20 nt, Human
ugacugguuaccuccuccuc

SEQ ID NO: 1224768 - RNA, 19 nt, Human
ugagcuaggagaagggcug

SEQ ID NO: 1224769 - RNA, 22 nt, Human
ugcagaaugacggccacaccca

SEQ ID NO: 1224770 - RNA, 18 nt, Human
ugcccuccuucccaaucu

SEQ ID NO: 1224771 - RNA, 20 nt, Human
ugggaggcaaaugggauggu

SEQ ID NO: 1224772 - RNA, 23 nt, Human
ugggaugguaugugagcuaggag

SEQ ID NO: 1224773 - RNA, 18 nt, Human
ugguuggauccgggccug

SEQ ID NO: 1224774 - RNA, 18 nt, Human
ugucuagagccucuuggg

SEQ ID NO: 1224775 - RNA, 19 nt, Human
uuccccugccuccuacucc

SEQ ID NO: 1224776 - RNA, 23 nt, Human
uugcuugccccucccucagccca

SEQ ID NO: 1224777 - RNA, 22 nt, Human
uuucaggcucgccaaggccuag

SEQ ID NO: 1224778 - RNA, 25 nt, Human
uuucuuauuccccccuaagcuucua

SEQ ID NO: 1224779 - RNA, 19 nt, Human
uuuugcuugccccucccuc

SEQ ID NO: 1224780 - RNA, 23 nt, Human
uuuuucaggcucgccaaggccua

SEQ ID NO: 1224781 - RNA, 25 nt, Human
aaguguccccccauucccggguccc

SEQ ID NO: 1224782 - RNA, 26 nt, Human
aguguccccccauucccgggucccgg

SEQ ID NO: 1224783 - RNA, 21 nt, Human
ccuccucucucucagucucca

SEQ ID NO: 1224784 - RNA, 24 nt, Human
gucacagccacccaguuccuuuac

SEQ ID NO: 1224785 - RNA, 20 nt, Human
gucccggugcagaugaugcu

SEQ ID NO: 1224786 - RNA, 20 nt, Human
uaaggucuucuuuuccuggc

SEQ ID NO: 1224787 - RNA, 19 nt, Human
ucaguccauucaaaaggcu

SEQ ID NO: 1224788 - RNA, 20 nt, Human
ucaguccauucaaaaggcuc

SEQ ID NO: 1224789 - RNA, 21 nt, Human
uccaaguauucuacuggaucu

SEQ ID NO: 1224790 - RNA, 22 nt, Human
uccuccauuuaguggagguaag

SEQ ID NO: 1224791 - RNA, 20 nt, Human
ucuccaaguguccccccauu

SEQ ID NO: 1224792 - RNA, 19 nt, Human
ugacuguccuccauuuagu

SEQ ID NO: 1224793 - RNA, 19 nt, Human
uggcuuacaaauguauccc

SEQ ID NO: 1224794 - RNA, 23 nt, Human
uuaguggagguaaggucuucuuu

SEQ ID NO: 1224795 - RNA, 22 nt, Human
aaguaaccucuuucugcuucag

SEQ ID NO: 1224796 - RNA, 21 nt, Human
accuugagcccauuaaguaac

SEQ ID NO: 1224797 - RNA, 20 nt, Human
cgugcagccgcuccgcccgg

SEQ ID NO: 1224798 - RNA, 19 nt, Human
cucuuguccgugcagccgc

SEQ ID NO: 1224799 - RNA, 22 nt, Human
cuuccaggccuccgcucuuguc

SEQ ID NO: 1224800 - RNA, 22 nt, Human
uucugcuucaguuuccccuucc

SEQ ID NO: 1224801 - RNA, 19 nt, Human
aaagaggucgagggaaaca

SEQ ID NO: 1224802 - RNA, 24 nt, Human
acacaccaaugcuugccuuaacaa

SEQ ID NO: 1224803 - RNA, 20 nt, Human
acacuaggucuccaaguagc

SEQ ID NO: 1224804 - RNA, 19 nt, Human
acagaaauccccagcacuu

SEQ ID NO: 1224805 - RNA, 22 nt, Human
acagccagugaguguuggaagc

SEQ ID NO: 1224806 - RNA, 20 nt, Human
agaacccucaucacaaccuu

SEQ ID NO: 1224807 - RNA, 26 nt, Human
agacugccaucccuccccagccccag

SEQ ID NO: 1224808 - RNA, 28 nt, Human
agagaagccaucuagaagggcauucaag

SEQ ID NO: 1224809 - RNA, 29 nt, Human
agagcacaaccaggaggauggagccaguc

SEQ ID NO: 1224810 - RNA, 25 nt, Human
agaguccauucucuuccuccucugg

SEQ ID NO: 1224811 - RNA, 24 nt, Human
agaugucaaagagaaaaccaaauc

SEQ ID NO: 1224812 - RNA, 19 nt, Human
agccuggacccccaccccu

SEQ ID NO: 1224813 - RNA, 21 nt, Human
aggagccuggcccaagguggc

SEQ ID NO: 1224814 - RNA, 21 nt, Human
agggaaacaugcagggagacu

SEQ ID NO: 1224815 - RNA, 18 nt, Human
agggagcagggggugcag

SEQ ID NO: 1224816 - RNA, 19 nt, Human
caacccaggagcccagcaa

SEQ ID NO: 1224817 - RNA, 20 nt, Human
cacccccaccccauaccaag

SEQ ID NO: 1224818 - RNA, 20 nt, Human
cacccccaccccauaccaag

SEQ ID NO: 1224819 - RNA, 21 nt, Human
caccuacucgucuuucaaagc

SEQ ID NO: 1224820 - RNA, 19 nt, Human
cacuccguggaccuggagg

SEQ ID NO: 1224821 - RNA, 21 nt, Human
cagagagggaguccaacccag

SEQ ID NO: 1224822 - RNA, 18 nt, Human
cagaggcagcugugaggu

SEQ ID NO: 1224823 - RNA, 18 nt, Human
cagcagggaccacguauc

SEQ ID NO: 1224824 - RNA, 22 nt, Human
cagccagggccagcccaaggga

SEQ ID NO: 1224825 - RNA, 21 nt, Human
cagcccaagggagcagggggu

SEQ ID NO: 1224826 - RNA, 21 nt, Human
cagcccgggcugcugcgacag

SEQ ID NO: 1224827 - RNA, 18 nt, Human
cagccuggacccccaccc

SEQ ID NO: 1224828 - RNA, 21 nt, Human
cagccuggacccccaccccuc

SEQ ID NO: 1224829 - RNA, 26 nt, Human
cagccuggacccccaccccucccacu

SEQ ID NO: 1224830 - RNA, 20 nt, Human
cagggcccagauuugagggc

SEQ ID NO: 1224831 - RNA, 22 nt, Human
cagugggcuaccauuauuaagc

SEQ ID NO: 1224832 - RNA, 24 nt, Human
cagugggcuaccauuauuaagcac

SEQ ID NO: 1224833 - RNA, 22 nt, Human
cauucaagacucagcaagcucc

SEQ ID NO: 1224834 - RNA, 20 nt, Human
ccacccccacacccagagga

SEQ ID NO: 1224835 - RNA, 22 nt, Human
ccagccuggacccccaccccuc

SEQ ID NO: 1224836 - RNA, 20 nt, Human
ccaucuagaagggcauucaa

SEQ ID NO: 1224837 - RNA, 18 nt, Human
cccaagguggcgcugccc

SEQ ID NO: 1224838 - RNA, 19 nt, Human
cccaccccucccacuuccu

SEQ ID NO: 1224839 - RNA, 21 nt, Human
cccaggagcccagcaaggcgc

SEQ ID NO: 1224840 - RNA, 21 nt, Human
ccccaccccauaccaaggcug

SEQ ID NO: 1224841 - RNA, 23 nt, Human
ccccaccccauaccaaggcugcu

SEQ ID NO: 1224842 - RNA, 24 nt, Human
ccccaccccauaccaaggcugcug

SEQ ID NO: 1224843 - RNA, 19 nt, Human
cccccaccccucccacuuc

SEQ ID NO: 1224844 - RNA, 19 nt, Human
cccccguuccuccuuauuu

SEQ ID NO: 1224845 - RNA, 25 nt, Human
ccccuggagcccucuccuccacccc

SEQ ID NO: 1224846 - RNA, 20 nt, Human
cccuccagccuggaccccca

SEQ ID NO: 1224847 - RNA, 21 nt, Human
ccucagggcuguagucccucu

SEQ ID NO: 1224848 - RNA, 22 nt, Human
ccuccacccccaccacccgagg

SEQ ID NO: 1224849 - RNA, 20 nt, Human
ccuccagccuggacccccac

SEQ ID NO: 1224850 - RNA, 22 nt, Human
ccuccagccuggacccccaccc

SEQ ID NO: 1224851 - RNA, 18 nt, Human
ccugauuguggguuccug

SEQ ID NO: 1224852 - RNA, 23 nt, Human
ccuggagcccucuccuccacccc

SEQ ID NO: 1224853 - RNA, 20 nt, Human
cgccccagacaaggagccuu

SEQ ID NO: 1224854 - RNA, 18 nt, Human
cgcugccccucuuggacc

SEQ ID NO: 1224855 - RNA, 19 nt, Human
cuaaagaggucgagggaaa

SEQ ID NO: 1224856 - RNA, 19 nt, Human
cuagguaacuaaguuuggc

SEQ ID NO: 1224857 - RNA, 24 nt, Human
cuccagccuggacccccaccccuc

SEQ ID NO: 1224858 - RNA, 18 nt, Human
cuccaugccacugucucc

SEQ ID NO: 1224859 - RNA, 21 nt, Human
cucccacuuccuggcuuccca

SEQ ID NO: 1224860 - RNA, 21 nt, Human
cuccccagccccagcugcccc

SEQ ID NO: 1224861 - RNA, 21 nt, Human
cuccuccacccccacacccag

SEQ ID NO: 1224862 - RNA, 25 nt, Human
cucuacaccuacauugggccccucc

SEQ ID NO: 1224863 - RNA, 22 nt, Human
cuggagcaggggcacagagagg

SEQ ID NO: 1224864 - RNA, 19 nt, Human
cuggggccgggcgaaaaga

SEQ ID NO: 1224865 - RNA, 24 nt, Human
cuugaccccacccugacccagggc

SEQ ID NO: 1224866 - RNA, 21 nt, Human
cuuugcugacuuggcaugugc

SEQ ID NO: 1224867 - RNA, 23 nt, Human
gaagggcauucaagacucagcaa

SEQ ID NO: 1224868 - RNA, 18 nt, Human
gacacauggggacaaggg

SEQ ID NO: 1224869 - RNA, 21 nt, Human
gacccccaccccucccacuuc

SEQ ID NO: 1224870 - RNA, 23 nt, Human
gacugccaucccuccccagcccc

SEQ ID NO: 1224871 - RNA, 19 nt, Human
gagcccagcaaggcgcugc

SEQ ID NO: 1224872 - RNA, 20 nt, Human
gagcccucuccuccaccccc

SEQ ID NO: 1224873 - RNA, 24 nt, Human
gaggagccuggcccaagguggcgc

SEQ ID NO: 1224874 - RNA, 25 nt, Human
gaguguuggaagcuggauucaaacc

SEQ ID NO: 1224875 - RNA, 24 nt, Human
gcagaagccuccucaacacccucc

SEQ ID NO: 1224876 - RNA, 24 nt, Human
gcagcccgggcugcugcgacagug

SEQ ID NO: 1224877 - RNA, 20 nt, Human
gcagggcuccccuugggacc

SEQ ID NO: 1224878 - RNA, 19 nt, Human
gcccucuccuccaccccca

SEQ ID NO: 1224879 - RNA, 23 nt, Human
gcccucuccuccacccccacacc

SEQ ID NO: 1224880 - RNA, 25 nt, Human
gcccugggagccucugucuuccucu

SEQ ID NO: 1224881 - RNA, 21 nt, Human
gccuggagcaggggcacagag

SEQ ID NO: 1224882 - RNA, 21 nt, Human
gcuguagucccucuacaccua

SEQ ID NO: 1224883 - RNA, 21 nt, Human
gcuguagucccucuacaccuu

SEQ ID NO: 1224884 - RNA, 18 nt, Human
ggaaacaugcagggagac

SEQ ID NO: 1224885 - RNA, 19 nt, Human
ggcccaagguggcgcugcc

SEQ ID NO: 1224886 - RNA, 29 nt, Human
ggcccagcuggugggcgaggcuggggcca

SEQ ID NO: 1224887 - RNA, 22 nt, Human
gggccccuccagccuggacccc

SEQ ID NO: 1224888 - RNA, 20 nt, Human
gggcucucucugagcccacc

SEQ ID NO: 1224889 - RNA, 22 nt, Human
gggcuggggccgggcgaaaaga

SEQ ID NO: 1224890 - RNA, 18 nt, Human
gggugggggagggcccag

SEQ ID NO: 1224891 - RNA, 22 nt, Human
gguuccugucugucucucaggc

SEQ ID NO: 1224892 - RNA, 21 nt, Human
gucaaggcuggcugggucccc

SEQ ID NO: 1224893 - RNA, 19 nt, Human
gugaagggcaggcuuauuc

SEQ ID NO: 1224894 - RNA, 19 nt, Human
gugcuuucuccucugcccg

SEQ ID NO: 1224895 - RNA, 24 nt, Human
uacauugggccccuccagccugga

SEQ ID NO: 1224896 - RNA, 24 nt, Human
uagaaauaccgucacuggagccac

SEQ ID NO: 1224897 - RNA, 19 nt, Human
ucaaagcuccaugccacug

SEQ ID NO: 1224898 - RNA, 19 nt, Human
ucaaccagaggggcugggg

SEQ ID NO: 1224899 - RNA, 21 nt, Human
ucaaccagaggggcuggggcc

SEQ ID NO: 1224900 - RNA, 20 nt, Human
ucaggggucuucccaccccc

SEQ ID NO: 1224901 - RNA, 22 nt, Human
ucaggggucuucccacccccac

SEQ ID NO: 1224902 - RNA, 20 nt, Human
uccacccccacacccagagg

SEQ ID NO: 1224903 - RNA, 22 nt, Human
uccacccccacacccagaggac

SEQ ID NO: 1224904 - RNA, 19 nt, Human
uccagacuggacacuaggu

SEQ ID NO: 1224905 - RNA, 24 nt, Human
ucccacuuccuggcuucccauccu

SEQ ID NO: 1224906 - RNA, 19 nt, Human
uccccagccccagcugccc

SEQ ID NO: 1224907 - RNA, 19 nt, Human
ucccugcuuggucucuauc

SEQ ID NO: 1224908 - RNA, 22 nt, Human
uccuuauuuccuugcuaacacc

SEQ ID NO: 1224909 - RNA, 21 nt, Human
uccuucaggucucgcagaagc

SEQ ID NO: 1224910 - RNA, 21 nt, Human
ucuacaccuacauugggcccc

SEQ ID NO: 1224911 - RNA, 20 nt, Human
ucuccuccacccccacaccc

SEQ ID NO: 1224912 - RNA, 20 nt, Human
ucucugagcccaccugacuu

SEQ ID NO: 1224913 - RNA, 21 nt, Human
ucuuggaccuccaagaaugcc

SEQ ID NO: 1224914 - RNA, 24 nt, Human
ugaagaugucaaagagaaaaccaa

SEQ ID NO: 1224915 - RNA, 25 nt, Human
ugagcccaccugacuuuccuccagg

SEQ ID NO: 1224916 - RNA, 19 nt, Human
ugauuguggguuccugucu

SEQ ID NO: 1224917 - RNA, 21 nt, Human
ugccagaggcagcugugaggu

SEQ ID NO: 1224918 - RNA, 24 nt, Human
ugccagaggcagcugugagguggg

SEQ ID NO: 1224919 - RNA, 21 nt, Human
ugccgcauggagcagccccuc

SEQ ID NO: 1224920 - RNA, 22 nt, Human
ugccuggagcaggggcacagag

SEQ ID NO: 1224921 - RNA, 22 nt, Human
ugccuggagcaggggcacagag

SEQ ID NO: 1224922 - RNA, 19 nt, Human
uggacccccaccccuccca

SEQ ID NO: 1224923 - RNA, 21 nt, Human
uggagccaaugggugccugga

SEQ ID NO: 1224924 - RNA, 19 nt, Human
uggagcccucuccuccacc

SEQ ID NO: 1224925 - RNA, 21 nt, Human
ugggacccucucuugccagga

SEQ ID NO: 1224926 - RNA, 27 nt, Human
ugggcaaggagcccuuagggggugaag

SEQ ID NO: 1224927 - RNA, 19 nt, Human
uggguuccugucugucucu

SEQ ID NO: 1224928 - RNA, 19 nt, Human
uguagucccucuacaccua

SEQ ID NO: 1224929 - RNA, 25 nt, Human
ugucaaagagaaaaccaaaucggau

SEQ ID NO: 1224930 - RNA, 18 nt, Human
uuccuccagggucaaggc

SEQ ID NO: 1224931 - RNA, 23 nt, Human
uugaccccacccugacccagggc

SEQ ID NO: 1224932 - RNA, 19 nt, Human
uuggcaugugcuuucuccu

SEQ ID NO: 1224933 - RNA, 21 nt, Human
uuugcugacuuggcaugugcu

SEQ ID NO: 1224934 - RNA, 23 nt, Human
aaaaaaaagcgucuggcaaauga

SEQ ID NO: 1224935 - RNA, 21 nt, Human
aaaaaauucuccccucaucca

SEQ ID NO: 1224936 - RNA, 26 nt, Human
aaaagaaaugcaaauuagcuacgauc

SEQ ID NO: 1224937 - RNA, 19 nt, Human
aaacaaaacaaacaccccc

SEQ ID NO: 1224938 - RNA, 22 nt, Human
aaacaaaacaaacacccccacc

SEQ ID NO: 1224939 - RNA, 18 nt, Human
aaacaaacacccccaccc

SEQ ID NO: 1224940 - RNA, 25 nt, Human
aaacaaacacccccacccaauccca

SEQ ID NO: 1224941 - RNA, 22 nt, Human
aaacaaccauguuuucuggaac

SEQ ID NO: 1224942 - RNA, 21 nt, Human
aaacacccccacccaauccca

SEQ ID NO: 1224943 - RNA, 23 nt, Human
aaacacccccacccaaucccaaa

SEQ ID NO: 1224944 - RNA, 24 nt, Human
aaacuuuaacccuaguuagaaaca

SEQ ID NO: 1224945 - RNA, 22 nt, Human
aacaaaacaaacacccccaccc

SEQ ID NO: 1224946 - RNA, 27 nt, Human
aacaaacacccccacccaaucccaaac

SEQ ID NO: 1224947 - RNA, 20 nt, Human
acaaacccaagaacucacaa

SEQ ID NO: 1224948 - RNA, 18 nt, Human
acacagccuuuguaccuc

SEQ ID NO: 1224949 - RNA, 24 nt, Human
agagagaaaaugaauaauaaaaaa

SEQ ID NO: 1224950 - RNA, 24 nt, Human
auucuccccucauccaaaacaaaa

SEQ ID NO: 1224951 - RNA, 19 nt, Human
caaaacaaaacaaacaccc

SEQ ID NO: 1224952 - RNA, 22 nt, Human
caaaacaaaacaaacaccccca

SEQ ID NO: 1224953 - RNA, 25 nt, Human
caaaacaaaacaaacacccccaccc

SEQ ID NO: 1224954 - RNA, 22 nt, Human
caaacaaacccaagaacucaca

SEQ ID NO: 1224955 - RNA, 20 nt, Human
caaaugaacacacagccuuu

SEQ ID NO: 1224956 - RNA, 28 nt, Human
cacccaaucccaaacaaacccaagaacu

SEQ ID NO: 1224957 - RNA, 21 nt, Human
cacccccacccaaucccaaac

SEQ ID NO: 1224958 - RNA, 19 nt, Human
cagaaaaguuuagguuggg

SEQ ID NO: 1224959 - RNA, 18 nt, Human
cagccuuuguaccuccug

SEQ ID NO: 1224960 - RNA, 23 nt, Human
cauccaaaacaaaacaaacaccc

SEQ ID NO: 1224961 - RNA, 19 nt, Human
ccaaaacaaaacaaacacc

SEQ ID NO: 1224962 - RNA, 23 nt, Human
ccaaaacaaaacaaacaccccca

SEQ ID NO: 1224963 - RNA, 24 nt, Human
ccaaacaaacccaagaacucacau

SEQ ID NO: 1224964 - RNA, 23 nt, Human
ccaaucccaaacaaacccaagaa

SEQ ID NO: 1224965 - RNA, 22 nt, Human
ccacccaaucccaaacaaaccc

SEQ ID NO: 1224966 - RNA, 24 nt, Human
ccacccaaucccaaacaaacccaa

SEQ ID NO: 1224967 - RNA, 22 nt, Human
ccagcuccugauggaauccaca

SEQ ID NO: 1224968 - RNA, 18 nt, Human
ccccacccaaucccaaac

SEQ ID NO: 1224969 - RNA, 22 nt, Human
cccccacccaaucccaaacaaa

SEQ ID NO: 1224970 - RNA, 20 nt, Human
ccuaugacugggagaaggga

SEQ ID NO: 1224971 - RNA, 18 nt, Human
ccuccugcaggaaauaau

SEQ ID NO: 1224972 - RNA, 24 nt, Human
cucauccaaaacaaaacaaacacc

SEQ ID NO: 1224973 - RNA, 18 nt, Human
cuggcgcucuuuuaucag

SEQ ID NO: 1224974 - RNA, 23 nt, Human
gaaaaagaucuaauuauuguaaa

SEQ ID NO: 1224975 - RNA, 20 nt, Human
gaaaugcaaauuagcuacga

SEQ ID NO: 1224976 - RNA, 19 nt, Human
gagccucugggcucuuccu

SEQ ID NO: 1224977 - RNA, 21 nt, Human
gagugucauuuuucauuaaaa

SEQ ID NO: 1224978 - RNA, 19 nt, Human
gcaaaugaacacacagccu

SEQ ID NO: 1224979 - RNA, 21 nt, Human
gcaccgccagaagauucacac

SEQ ID NO: 1224980 - RNA, 24 nt, Human
gcgcucuuuuaucagguccucaug

SEQ ID NO: 1224981 - RNA, 18 nt, Human
ggaaaacccaauuaacuu

SEQ ID NO: 1224982 - RNA, 21 nt, Human
ggaaaacccaauuaacuugga

SEQ ID NO: 1224983 - RNA, 18 nt, Human
ggagaacaaaccuugcag

SEQ ID NO: 1224984 - RNA, 27 nt, Human
guaaaagaaaauauccugacaaaauau

SEQ ID NO: 1224985 - RNA, 22 nt, Human
uaaaaaaggcaauuccccccuc

SEQ ID NO: 1224986 - RNA, 21 nt, Human
uaaaauucuaaggcaucuuac

SEQ ID NO: 1224987 - RNA, 21 nt, Human
uaaggcaucuuaccuucaaac

SEQ ID NO: 1224988 - RNA, 21 nt, Human
uaauaaaaaaauaacucuggc

SEQ ID NO: 1224989 - RNA, 23 nt, Human
uacaauagucaucaaguagguac

SEQ ID NO: 1224990 - RNA, 20 nt, Human
uaccuccugcaggaaauaau

SEQ ID NO: 1224991 - RNA, 28 nt, Human
uaccuucaaacuuuuuuuuuaauaauuc

SEQ ID NO: 1224992 - RNA, 24 nt, Human
uacuuuagaaauuaaaugcaucau

SEQ ID NO: 1224993 - RNA, 25 nt, Human
uagauacuuaaaauuuccagaaucu

SEQ ID NO: 1224994 - RNA, 22 nt, Human
uauauacauacaucucuaugug

SEQ ID NO: 1224995 - RNA, 19 nt, Human
uaucucaaaucauucccug

SEQ ID NO: 1224996 - RNA, 27 nt, Human
ucaaaaccagcuccugauggaauccac

SEQ ID NO: 1224997 - RNA, 18 nt, Human
ucauccaaaacaaaacaa

SEQ ID NO: 1224998 - RNA, 25 nt, Human
uccaaaacaaaacaaacacccccac

SEQ ID NO: 1224999 - RNA, 24 nt, Human
uccaacaaugaauucauauagaaa

SEQ ID NO: 1225000 - RNA, 22 nt, Human
uccaagcacagcaccgccagaa

SEQ ID NO: 1225001 - RNA, 21 nt, Human
ucccugcuaagucucuucacc

SEQ ID NO: 1225002 - RNA, 22 nt, Human
uccugaaucucauauugaacaa

SEQ ID NO: 1225003 - RNA, 18 nt, Human
uccuuuuuaaagcauauc

SEQ ID NO: 1225004 - RNA, 24 nt, Human
ucuggaaccuauuuaaaaaaaaag

SEQ ID NO: 1225005 - RNA, 20 nt, Human
ugacaaaauaucagucuguc

SEQ ID NO: 1225006 - RNA, 21 nt, Human
ugagaacuccaacgacugaga

SEQ ID NO: 1225007 - RNA, 25 nt, Human
ugagacagagccucugggcucuucc

SEQ ID NO: 1225008 - RNA, 26 nt, Human
ugauauuuucaccuuuaucccucuua

SEQ ID NO: 1225009 - RNA, 20 nt, Human
ugcucacguagaagcaacag

SEQ ID NO: 1225010 - RNA, 19 nt, Human
uggaaaaagaucuaauuau

SEQ ID NO: 1225011 - RNA, 23 nt, Human
uggaaccuauuuaaaaaaaaagc

SEQ ID NO: 1225012 - RNA, 18 nt, Human
ugggcugcugguacaauc

SEQ ID NO: 1225013 - RNA, 21 nt, Human
uguuucauguugguuuuccuu

SEQ ID NO: 1225014 - RNA, 19 nt, Human
uugcaggugggcugcuggu

SEQ ID NO: 1225015 - RNA, 21 nt, Human
uuuuuugguugagaacuccaa

SEQ ID NO: 1225016 - RNA, 18 nt, Human
aaggcacuacgacuagaa

SEQ ID NO: 1225017 - RNA, 25 nt, Human
acccugaaggcacuacgacuagaag

SEQ ID NO: 1225018 - RNA, 21 nt, Human
acucaguaaggcacgaagucc

SEQ ID NO: 1225019 - RNA, 22 nt, Human
acuguggugggaguuccccgcu

SEQ ID NO: 1225020 - RNA, 22 nt, Human
agccgagaggcaccagguggca

SEQ ID NO: 1225021 - RNA, 21 nt, Human
agccugaggacaagggagccc

SEQ ID NO: 1225022 - RNA, 24 nt, Human
aggcagcuccaccgugugggugug

SEQ ID NO: 1225023 - RNA, 22 nt, Human
aggggugggggcucagccuggc

SEQ ID NO: 1225024 - RNA, 18 nt, Human
caccagguggcaggaggc

SEQ ID NO: 1225025 - RNA, 18 nt, Human
caccagguggcaggaggc

SEQ ID NO: 1225026 - RNA, 20 nt, Human
caccagguggcaggaggcac

SEQ ID NO: 1225027 - RNA, 27 nt, Human
cagccuggcugauugguguggggaggg

SEQ ID NO: 1225028 - RNA, 22 nt, Human
caggggugggggcucagccugg

SEQ ID NO: 1225029 - RNA, 21 nt, Human
cccguggagccugaggacaag

SEQ ID NO: 1225030 - RNA, 19 nt, Human
ccguguggguguggcgggg

SEQ ID NO: 1225031 - RNA, 26 nt, Human
ccuggagcuggggcaggggugggggc

SEQ ID NO: 1225032 - RNA, 19 nt, Human
ccuggcugauugguguggg

SEQ ID NO: 1225033 - RNA, 19 nt, Human
cgggcgcccggcgccgggc

SEQ ID NO: 1225034 - RNA, 21 nt, Human
cguggagccugaggacaaggg

SEQ ID NO: 1225035 - RNA, 22 nt, Human
cucccggcuucgggcgcccggc

SEQ ID NO: 1225036 - RNA, 19 nt, Human
cucccguggagccugagga

SEQ ID NO: 1225037 - RNA, 18 nt, Human
cuggggcagggguggggg

SEQ ID NO: 1225038 - RNA, 23 nt, Human
cuggggcaggggugggggcucag

SEQ ID NO: 1225039 - RNA, 21 nt, Human
gagccugaggacaagggagcc

SEQ ID NO: 1225040 - RNA, 22 nt, Human
gcggcggcucccggcuucgggc

SEQ ID NO: 1225041 - RNA, 22 nt, Human
gcuuguuuauuagaaaaagucu

SEQ ID NO: 1225042 - RNA, 24 nt, Human
gcuuguuuauuagaaaaagucuua

SEQ ID NO: 1225043 - RNA, 24 nt, Human
ggaagugggcaggguccccugggg

SEQ ID NO: 1225044 - RNA, 23 nt, Human
ggagcccuuucauccgagaugcu

SEQ ID NO: 1225045 - RNA, 19 nt, Human
ggagcuggggcaggggugg

SEQ ID NO: 1225046 - RNA, 20 nt, Human
ggaggaggggaaggaagagg

SEQ ID NO: 1225047 - RNA, 23 nt, Human
ggcaacagggaggaggggaagga

SEQ ID NO: 1225048 - RNA, 24 nt, Human
ggcaccagguggcaggaggcacca

SEQ ID NO: 1225049 - RNA, 21 nt, Human
gggauggggcucugcaggagc

SEQ ID NO: 1225050 - RNA, 21 nt, Human
gggcaggggugggggcucagc

SEQ ID NO: 1225051 - RNA, 21 nt, Human
gggcagguccuggagcugggg

SEQ ID NO: 1225052 - RNA, 21 nt, Human
gggcucagccuggcugauugg

SEQ ID NO: 1225053 - RNA, 18 nt, Human
ggggagggggcagguugg

SEQ ID NO: 1225054 - RNA, 19 nt, Human
ggggagggggcagguuggc

SEQ ID NO: 1225055 - RNA, 23 nt, Human
ggggugggggcucagccuggcug

SEQ ID NO: 1225056 - RNA, 18 nt, Human
gguccuggagcuggggca

SEQ ID NO: 1225057 - RNA, 18 nt, Human
gguguggggagggggcag

SEQ ID NO: 1225058 - RNA, 26 nt, Human
guccuggagcuggggcaggggugggg

SEQ ID NO: 1225059 - RNA, 21 nt, Human
uccuggagcuggggcaggggu

SEQ ID NO: 1225060 - RNA, 23 nt, Human
uccuggagcuggggcaggggugg

SEQ ID NO: 1225061 - RNA, 19 nt, Human
ugaccaggaacaccagggc

SEQ ID NO: 1225062 - RNA, 21 nt, Human
ugaggacaagggagcccuuuc

SEQ ID NO: 1225063 - RNA, 25 nt, Human
ugaggacaagggagcccuuucaucc

SEQ ID NO: 1225064 - RNA, 21 nt, Human
uggagccugaggacaagggag

SEQ ID NO: 1225065 - RNA, 23 nt, Human
uggcggggggauggggcucugca

SEQ ID NO: 1225066 - RNA, 24 nt, Human
uggcggggggauggggcucugcag

SEQ ID NO: 1225067 - RNA, 18 nt, Human
uggcugauuggugugggg

SEQ ID NO: 1225068 - RNA, 21 nt, Human
uguggggagggggcagguugg

SEQ ID NO: 1225069 - RNA, 22 nt, Human
uguggggagggggcagguuggc

SEQ ID NO: 1225070 - RNA, 25 nt, Human
uucagugccggaugccccacugugg

SEQ ID NO: 1225071 - RNA, 21 nt, Human
uuccccgcucucuccagcagc

SEQ ID NO: 1225072 - RNA, 18 nt, Human
aaaaaaaaaaaaaaagaa

SEQ ID NO: 1225073 - RNA, 19 nt, Human
aaaaaaaaaaaaaagaaaa

SEQ ID NO: 1225074 - RNA, 23 nt, Human
aaaaaaaaaagaaaaagaaaaaa

SEQ ID NO: 1225075 - RNA, 24 nt, Human
aaaaaagaaaaagaaauaaagaag

SEQ ID NO: 1225076 - RNA, 26 nt, Human
aaaaagaaaaagaaauaaagaaaaaa

SEQ ID NO: 1225077 - RNA, 24 nt, Human
aaaaagaaauaaagaaaaaaacac

SEQ ID NO: 1225078 - RNA, 23 nt, Human
aaaagaaaaaaaaaaaaaaagaa

SEQ ID NO: 1225079 - RNA, 24 nt, Human
aagaaaaaaacaccuucagaaaua

SEQ ID NO: 1225080 - RNA, 21 nt, Human
aagaaaaacagcaagaagcaa

SEQ ID NO: 1225081 - RNA, 23 nt, Human
aagaaaaacagcaagaagcaaag

SEQ ID NO: 1225082 - RNA, 24 nt, Human
aagaaaaagaaauaaagaaaaaaa

SEQ ID NO: 1225083 - RNA, 23 nt, Human
aagaaaaagguagggaaccucau

SEQ ID NO: 1225084 - RNA, 18 nt, Human
aagacucuucagcucaca

SEQ ID NO: 1225085 - RNA, 18 nt, Human
aagccacugacuucaucu

SEQ ID NO: 1225086 - RNA, 20 nt, Human
aagcccacuguacacuuaca

SEQ ID NO: 1225087 - RNA, 24 nt, Human
aagcccuuuccuuucuuuggaguc

SEQ ID NO: 1225088 - RNA, 25 nt, Human
aaggaaagcaguuacagggacagaa

SEQ ID NO: 1225089 - RNA, 21 nt, Human
aaggagacaaaaaagcugcca

SEQ ID NO: 1225090 - RNA, 18 nt, Human
aauggugugccauucauu

SEQ ID NO: 1225091 - RNA, 22 nt, Human
acaaacacuggcuaauacccug

SEQ ID NO: 1225092 - RNA, 18 nt, Human
acacugggauccagcagc

SEQ ID NO: 1225093 - RNA, 24 nt, Human
acagaaggcagcucccuuccccca

SEQ ID NO: 1225094 - RNA, 20 nt, Human
acagaugacagccccucuca

SEQ ID NO: 1225095 - RNA, 25 nt, Human
acaggcauuaagagguagcugaagu

SEQ ID NO: 1225096 - RNA, 21 nt, Human
acaguacauaguaguuaugua

SEQ ID NO: 1225097 - RNA, 21 nt, Human
acagugcugaugggaacuggu

SEQ ID NO: 1225098 - RNA, 20 nt, Human
accaagcaagcccugcucac

SEQ ID NO: 1225099 - RNA, 21 nt, Human
accacacugggauccagcagc

SEQ ID NO: 1225100 - RNA, 25 nt, Human
acccccauccccaaugcaagcccac

SEQ ID NO: 1225101 - RNA, 20 nt, Human
accuccccugcaucuggccc

SEQ ID NO: 1225102 - RNA, 24 nt, Human
accucugccucuucccugcaccuc

SEQ ID NO: 1225103 - RNA, 23 nt, Human
acucauggauaggcaccuccccu

SEQ ID NO: 1225104 - RNA, 21 nt, Human
acugacuucaucuguacacac

SEQ ID NO: 1225105 - RNA, 24 nt, Human
agaaaaaaaaaaaaaaagaaaaag

SEQ ID NO: 1225106 - RNA, 21 nt, Human
agaaaaacagcaagaagcaaa

SEQ ID NO: 1225107 - RNA, 26 nt, Human
agaaaaagaaauaaagaaaaaaacac

SEQ ID NO: 1225108 - RNA, 26 nt, Human
agaaaccaacacagaucuugguccua

SEQ ID NO: 1225109 - RNA, 19 nt, Human
agaacaggacacagaaaca

SEQ ID NO: 1225110 - RNA, 19 nt, Human
agaagcccuuuccuuucuu

SEQ ID NO: 1225111 - RNA, 18 nt, Human
agaaggagaaauggugug

SEQ ID NO: 1225112 - RNA, 18 nt, Human
agagaagaaaaagguagg

SEQ ID NO: 1225113 - RNA, 18 nt, Human
agagaagaaaaagguagg

SEQ ID NO: 1225114 - RNA, 22 nt, Human
agagcagcuaggagggccugag

SEQ ID NO: 1225115 - RNA, 23 nt, Human
agaggcagcuggacaugggaccc

SEQ ID NO: 1225116 - RNA, 19 nt, Human
agcagaagcagagcagcug

SEQ ID NO: 1225117 - RNA, 18 nt, Human
agccuccagagcagcuag

SEQ ID NO: 1225118 - RNA, 22 nt, Human
agcgcccugccagggcucugcc

SEQ ID NO: 1225119 - RNA, 23 nt, Human
aggaagaaguagaauccccaagg

SEQ ID NO: 1225120 - RNA, 20 nt, Human
aggacacagaaacaacuguc

SEQ ID NO: 1225121 - RNA, 22 nt, Human
aggacaggcagggaggugccag

SEQ ID NO: 1225122 - RNA, 19 nt, Human
aggagaaggagaaauggug

SEQ ID NO: 1225123 - RNA, 19 nt, Human
aggagcaggugccuggcug

SEQ ID NO: 1225124 - RNA, 24 nt, Human
aggcagcucccuucccccaggaag

SEQ ID NO: 1225125 - RNA, 27 nt, Human
aggcagcucccuucccccaggaagggc

SEQ ID NO: 1225126 - RNA, 22 nt, Human
aggccuugcaaaaugcccuaug

SEQ ID NO: 1225127 - RNA, 20 nt, Human
agguccucaauacaaacacu

SEQ ID NO: 1225128 - RNA, 21 nt, Human
agugcagcuucaaacaagucu

SEQ ID NO: 1225129 - RNA, 23 nt, Human
aguggccgggcugggccauaagg

SEQ ID NO: 1225130 - RNA, 24 nt, Human
auaaagaaaaaaacaccuucagaa

SEQ ID NO: 1225131 - RNA, 24 nt, Human
aucagaagcccuuuccuuucuuuu

SEQ ID NO: 1225132 - RNA, 19 nt, Human
auggagacagugcugaugg

SEQ ID NO: 1225133 - RNA, 21 nt, Human
auggagacagugcugauggga

SEQ ID NO: 1225134 - RNA, 18 nt, Human
auuggccugguccuggca

SEQ ID NO: 1225135 - RNA, 23 nt, Human
caaaaaaaaaagaaaaagaaaaa

SEQ ID NO: 1225136 - RNA, 19 nt, Human
caaaaacauucuccagguc

SEQ ID NO: 1225137 - RNA, 21 nt, Human
caaaauccaaaauugcaagug

SEQ ID NO: 1225138 - RNA, 24 nt, Human
caaaauugcaagugccagaugcca

SEQ ID NO: 1225139 - RNA, 22 nt, Human
caaaggagacaaaaaagcugcc

SEQ ID NO: 1225140 - RNA, 31 nt, Human
caaauaaaaaaaaaaagugcugcugacaccu

SEQ ID NO: 1225141 - RNA, 21 nt, Human
caaccugaucucaccaaacag

SEQ ID NO: 1225142 - RNA, 21 nt, Human
caagaagcaaagcccuaacca

SEQ ID NO: 1225143 - RNA, 24 nt, Human
caagacaaaugcagucaagaccug

SEQ ID NO: 1225144 - RNA, 24 nt, Human
caagcaagcccugcucacaagaca

SEQ ID NO: 1225145 - RNA, 22 nt, Human
caagcccugcucacaagacaaa

SEQ ID NO: 1225146 - RNA, 21 nt, Human
caaggcccugaaaacaauuua

SEQ ID NO: 1225147 - RNA, 19 nt, Human
caaggggcuccugaccagc

SEQ ID NO: 1225148 - RNA, 23 nt, Human
cacacugggauccagcagcucca

SEQ ID NO: 1225149 - RNA, 19 nt, Human
cacagaaacaacugucugc

SEQ ID NO: 1225150 - RNA, 21 nt, Human
cacaggaagaaguagaauccc

SEQ ID NO: 1225151 - RNA, 19 nt, Human
caccacacugggauccagc

SEQ ID NO: 1225152 - RNA, 24 nt, Human
caccaggcagcuccacuggccucc

SEQ ID NO: 1225153 - RNA, 19 nt, Human
caccuccccugcaucuggc

SEQ ID NO: 1225154 - RNA, 18 nt, Human
cacuaccaaagggcaggg

SEQ ID NO: 1225155 - RNA, 24 nt, Human
cagaaaacugcuuggcacaaacac

SEQ ID NO: 1225156 - RNA, 19 nt, Human
cagaaggcagcucccuucc

SEQ ID NO: 1225157 - RNA, 22 nt, Human
cagaaggcagcucccuuccccc

SEQ ID NO: 1225158 - RNA, 23 nt, Human
cagcaagaagcaaagcccuaacc

SEQ ID NO: 1225159 - RNA, 21 nt, Human
cagcagaacauucagcauaua

SEQ ID NO: 1225160 - RNA, 22 nt, Human
cagcaggccuuggcccuccccc

SEQ ID NO: 1225161 - RNA, 22 nt, Human
cagcaugggagccuuuuauggg

SEQ ID NO: 1225162 - RNA, 23 nt, Human
cagcuggacaaggcccugaaaac

SEQ ID NO: 1225163 - RNA, 20 nt, Human
caggaaauccccagcucuga

SEQ ID NO: 1225164 - RNA, 19 nt, Human
caggacacagaaacaacug

SEQ ID NO: 1225165 - RNA, 23 nt, Human
caggucccuuguuccaggcagga

SEQ ID NO: 1225166 - RNA, 20 nt, Human
caucaucccacgcaaaaaca

SEQ ID NO: 1225167 - RNA, 18 nt, Human
cauggauaggcaccuccc

SEQ ID NO: 1225168 - RNA, 19 nt, Human
ccaagcaagcccugcucac

SEQ ID NO: 1225169 - RNA, 21 nt, Human
ccagaaaacugcuuggcacaa

SEQ ID NO: 1225170 - RNA, 20 nt, Human
cccacaaaauccaaaauugc

SEQ ID NO: 1225171 - RNA, 22 nt, Human
cccacacaggaagaaguagaau

SEQ ID NO: 1225172 - RNA, 24 nt, Human
cccacagguaagcuuguggcaaag

SEQ ID NO: 1225173 - RNA, 26 nt, Human
cccaggcaccacugcuacagcauccc

SEQ ID NO: 1225174 - RNA, 21 nt, Human
cccugcaccucucucgccuag

SEQ ID NO: 1225175 - RNA, 23 nt, Human
ccgauaaccucauggaaaacaaa

SEQ ID NO: 1225176 - RNA, 21 nt, Human
ccuggcuguugugaauaccca

SEQ ID NO: 1225177 - RNA, 20 nt, Human
ccuggggcaggagaaggaga

SEQ ID NO: 1225178 - RNA, 21 nt, Human
cgcucccuucccagcaugacc

SEQ ID NO: 1225179 - RNA, 18 nt, Human
cuacagcaucccucuucc

SEQ ID NO: 1225180 - RNA, 22 nt, Human
cucacacagcugcuugagggca

SEQ ID NO: 1225181 - RNA, 19 nt, Human
cuccgggucagcccucagg

SEQ ID NO: 1225182 - RNA, 19 nt, Human
cuccuacaccaccacacug

SEQ ID NO: 1225183 - RNA, 25 nt, Human
cuccuacaccaccacacugggaucc

SEQ ID NO: 1225184 - RNA, 20 nt, Human
cugagccucaaaucagacag

SEQ ID NO: 1225185 - RNA, 20 nt, Human
cuguacacacccccaucccc

SEQ ID NO: 1225186 - RNA, 21 nt, Human
cuguacacacccccaucccca

SEQ ID NO: 1225187 - RNA, 25 nt, Human
cuugagcuucaccugcugugguccc

SEQ ID NO: 1225188 - RNA, 19 nt, Human
cuugaggauugcacaugug

SEQ ID NO: 1225189 - RNA, 21 nt, Human
gaaauaacagucuccuacaga

SEQ ID NO: 1225190 - RNA, 25 nt, Human
gaccaagcaagcccugcucacaaga

SEQ ID NO: 1225191 - RNA, 22 nt, Human
gagcucugaagggcagggaggg

SEQ ID NO: 1225192 - RNA, 23 nt, Human
gcaaagcccuaaccauccuaucc

SEQ ID NO: 1225193 - RNA, 22 nt, Human
gcacaugugggggugggggcag

SEQ ID NO: 1225194 - RNA, 21 nt, Human
gcaggacaaugaacuagcuuc

SEQ ID NO: 1225195 - RNA, 20 nt, Human
gccucuucccugcaccucuc

SEQ ID NO: 1225196 - RNA, 21 nt, Human
gcuacagcaucccucuuccuu

SEQ ID NO: 1225197 - RNA, 19 nt, Human
gcugacaccucucagaauc

SEQ ID NO: 1225198 - RNA, 19 nt, Human
ggcaggaagcagaaaaagg

SEQ ID NO: 1225199 - RNA, 19 nt, Human
gguauggaagaugaaggga

SEQ ID NO: 1225200 - RNA, 23 nt, Human
ggucuagagaaucaaaggagccu

SEQ ID NO: 1225201 - RNA, 18 nt, Human
ggugggggcaggaagcag

SEQ ID NO: 1225202 - RNA, 28 nt, Human
gucaugugcaaaaaaaaaagaaaaagaa

SEQ ID NO: 1225203 - RNA, 21 nt, Human
gucugaguggccgggcugggc

SEQ ID NO: 1225204 - RNA, 22 nt, Human
gugaaggaggugggacacugga

SEQ ID NO: 1225205 - RNA, 23 nt, Human
gugaauacccaaaggagacaaaa

SEQ ID NO: 1225206 - RNA, 22 nt, Human
guuccaggcaggaaauccccag

SEQ ID NO: 1225207 - RNA, 21 nt, Human
uaaaaaaaaaaagugcugcug

SEQ ID NO: 1225208 - RNA, 21 nt, Human
uaaauaaccaucuuuacagaa

SEQ ID NO: 1225209 - RNA, 20 nt, Human
uaaccauccuauccaucuug

SEQ ID NO: 1225210 - RNA, 24 nt, Human
uacaucaaaaucaagucccuggcu

SEQ ID NO: 1225211 - RNA, 26 nt, Human
uagaacaggacacagaaacaacuguc

SEQ ID NO: 1225212 - RNA, 18 nt, Human
uagaauccccaaggacag

SEQ ID NO: 1225213 - RNA, 20 nt, Human
uagaauccccaaggacaggc

SEQ ID NO: 1225214 - RNA, 22 nt, Human
uagcaaucuaagaaaccaacac

SEQ ID NO: 1225215 - RNA, 18 nt, Human
uagcagagccaugcgcuc

SEQ ID NO: 1225216 - RNA, 22 nt, Human
uagcuucaaagaaaaacagcaa

SEQ ID NO: 1225217 - RNA, 22 nt, Human
uaggagggccugagcugaccaa

SEQ ID NO: 1225218 - RNA, 21 nt, Human
uauggaagaugaagggaccug

SEQ ID NO: 1225219 - RNA, 22 nt, Human
uauguacguaaaacugacccac

SEQ ID NO: 1225220 - RNA, 23 nt, Human
ucaaagaaaaacagcaagaagca

SEQ ID NO: 1225221 - RNA, 23 nt, Human
ucaucuguacacacccccauccc

SEQ ID NO: 1225222 - RNA, 21 nt, Human
uccagacagagggauucaaag

SEQ ID NO: 1225223 - RNA, 25 nt, Human
uccccaaggacaggcagggaggugc

SEQ ID NO: 1225224 - RNA, 22 nt, Human
uccccaaugcaagcccacugua

SEQ ID NO: 1225225 - RNA, 18 nt, Human
ucccugcaccucucucgc

SEQ ID NO: 1225226 - RNA, 26 nt, Human
ucccugcaccucucucgccuagcaaa

SEQ ID NO: 1225227 - RNA, 19 nt, Human
ucccuggggugaccaccuc

SEQ ID NO: 1225228 - RNA, 22 nt, Human
uccuuggaagguccucaauaca

SEQ ID NO: 1225229 - RNA, 23 nt, Human
ucgccuagcaaacacucugugag

SEQ ID NO: 1225230 - RNA, 24 nt, Human
ucucaacacucacacagcugcuug

SEQ ID NO: 1225231 - RNA, 22 nt, Human
ucugccucuucccugcaccucu

SEQ ID NO: 1225232 - RNA, 24 nt, Human
ucugccucuucccugcaccucucc

SEQ ID NO: 1225233 - RNA, 21 nt, Human
ugaaggaggugggacacugga

SEQ ID NO: 1225234 - RNA, 19 nt, Human
ugaccaagcaagcccugcu

SEQ ID NO: 1225235 - RNA, 21 nt, Human
ugaccagcacaucaucccacg

SEQ ID NO: 1225236 - RNA, 19 nt, Human
ugagaagcaucauuggccu

SEQ ID NO: 1225237 - RNA, 25 nt, Human
ugagcgcccugccagggcucugccu

SEQ ID NO: 1225238 - RNA, 26 nt, Human
ugcaaggcggaaaggcuggggcagca

SEQ ID NO: 1225239 - RNA, 24 nt, Human
ugcauggagacagugcugauggga

SEQ ID NO: 1225240 - RNA, 22 nt, Human
ugccagggcucugccuagggac

SEQ ID NO: 1225241 - RNA, 19 nt, Human
ugccuggcugucccugggg

SEQ ID NO: 1225242 - RNA, 23 nt, Human
ugcugaugggaacuggugguggc

SEQ ID NO: 1225243 - RNA, 19 nt, Human
uggaguggggguagaacag

SEQ ID NO: 1225244 - RNA, 19 nt, Human
uggcaaagccaucagaagc

SEQ ID NO: 1225245 - RNA, 19 nt, Human
uggcaaaggagccaagugg

SEQ ID NO: 1225246 - RNA, 21 nt, Human
uggcaaaggagccaagugggg

SEQ ID NO: 1225247 - RNA, 18 nt, Human
uggcacaggggcuggggu

SEQ ID NO: 1225248 - RNA, 20 nt, Human
uggcagagaucucaacacuc

SEQ ID NO: 1225249 - RNA, 21 nt, Human
uggccgggcugggccauaagg

SEQ ID NO: 1225250 - RNA, 19 nt, Human
uggccuccgggucagcccu

SEQ ID NO: 1225251 - RNA, 19 nt, Human
uggccugaaggucuagaca

SEQ ID NO: 1225252 - RNA, 22 nt, Human
ugggauccagcagcuccagucc

SEQ ID NO: 1225253 - RNA, 24 nt, Human
ugggauccagcagcuccagucccu

SEQ ID NO: 1225254 - RNA, 22 nt, Human
ugggcugccgcucccuucccag

SEQ ID NO: 1225255 - RNA, 23 nt, Human
uggggcccacauuccugaccugg

SEQ ID NO: 1225256 - RNA, 22 nt, Human
ugggguggugaaggagguggga

SEQ ID NO: 1225257 - RNA, 22 nt, Human
ugguccgauaaccucauggaaa

SEQ ID NO: 1225258 - RNA, 21 nt, Human
ugugcaaaaaaaaaagaaaaa

SEQ ID NO: 1225259 - RNA, 19 nt, Human
uguggccuccuacaccacc

SEQ ID NO: 1225260 - RNA, 19 nt, Human
uguggccuccuacaccacc

SEQ ID NO: 1225261 - RNA, 18 nt, Human
uucaaaggggaagaaaaa

SEQ ID NO: 1225262 - RNA, 20 nt, Human
uucccagcaugacccaacac

SEQ ID NO: 1225263 - RNA, 18 nt, Human
uucuggggcccagucaau

SEQ ID NO: 1225264 - RNA, 22 nt, Human
uuuggucaaugaagagaagaaa

SEQ ID NO: 1225265 - RNA, 21 nt, Human
aaacguggaggccaccuugcu

SEQ ID NO: 1225266 - RNA, 20 nt, Human
aacguggaggccaccuugcu

SEQ ID NO: 1225267 - RNA, 20 nt, Human
aggcaaaagcgaagaagacg

SEQ ID NO: 1225268 - RNA, 23 nt, Human
aggcaaaagcgaagaagacgcuc

SEQ ID NO: 1225269 - RNA, 23 nt, Human
aggcaaaagcgaagaagagggac

SEQ ID NO: 1225270 - RNA, 19 nt, Human
guggaggccaccuugcuuc

SEQ ID NO: 1225271 - RNA, 18 nt, Human
ucgaggcaaaagcgaaga

SEQ ID NO: 1225272 - RNA, 21 nt, Human
ucgaggcaaaagcgaagaaga

SEQ ID NO: 1225273 - RNA, 25 nt, Human
ucuguggucaaggggcggucgaggc

SEQ ID NO: 1225274 - RNA, 18 nt, Human
uggcggaugacacaggcg

SEQ ID NO: 1225275 - RNA, 19 nt, Human
aaaauccacccgagugcac

SEQ ID NO: 1225276 - RNA, 18 nt, Human
aaaggcugcucaggcagg

SEQ ID NO: 1225277 - RNA, 18 nt, Human
aaaguccuucagcuucuc

SEQ ID NO: 1225278 - RNA, 18 nt, Human
aaauggagggacugccca

SEQ ID NO: 1225279 - RNA, 21 nt, Human
aaccaggaaggagccauagcc

SEQ ID NO: 1225280 - RNA, 23 nt, Human
aaccaggaaggagccauagccca

SEQ ID NO: 1225281 - RNA, 28 nt, Human
aagagcagcaaggagcugaccgguaccc

SEQ ID NO: 1225282 - RNA, 19 nt, Human
aagccucuuaagaacacag

SEQ ID NO: 1225283 - RNA, 22 nt, Human
aagcugacacccgcuguccuga

SEQ ID NO: 1225284 - RNA, 21 nt, Human
aagcuggucuccacacagugc

SEQ ID NO: 1225285 - RNA, 19 nt, Human
aaggagacgcgcugcugcu

SEQ ID NO: 1225286 - RNA, 21 nt, Human
aaggagacgcgcugcugcugc

SEQ ID NO: 1225287 - RNA, 20 nt, Human
aaggagccauagcccaggcc

SEQ ID NO: 1225288 - RNA, 18 nt, Human
aaggugcuggcccagggc

SEQ ID NO: 1225289 - RNA, 22 nt, Human
acaaacccacagaaaauccacc

SEQ ID NO: 1225290 - RNA, 23 nt, Human
acacagcagugaagcugaaauga

SEQ ID NO: 1225291 - RNA, 19 nt, Human
acacaugcacacauggcua

SEQ ID NO: 1225292 - RNA, 21 nt, Human
acccacagaaaauccacccga

SEQ ID NO: 1225293 - RNA, 24 nt, Human
acccccaugacacuccccagcccu

SEQ ID NO: 1225294 - RNA, 18 nt, Human
acccccucccaaggaagu

SEQ ID NO: 1225295 - RNA, 23 nt, Human
acccgagugcacugagcacgcca

SEQ ID NO: 1225296 - RNA, 20 nt, Human
acccugguucccccagcccc

SEQ ID NO: 1225297 - RNA, 21 nt, Human
acccugguucccccagccccc

SEQ ID NO: 1225298 - RNA, 21 nt, Human
accuugauggccuucuugcug

SEQ ID NO: 1225299 - RNA, 24 nt, Human
acucccugcuuccucucuagcccc

SEQ ID NO: 1225300 - RNA, 20 nt, Human
acugcaacgggaaagccacg

SEQ ID NO: 1225301 - RNA, 20 nt, Human
acugcaagcuccagggcccg

SEQ ID NO: 1225302 - RNA, 20 nt, Human
acuggagaacaccuguggac

SEQ ID NO: 1225303 - RNA, 19 nt, Human
agaaguccagagcucuaca

SEQ ID NO: 1225304 - RNA, 22 nt, Human
agaauuacaaggugcuggccca

SEQ ID NO: 1225305 - RNA, 22 nt, Human
agacagaaguccccgccccagc

SEQ ID NO: 1225306 - RNA, 20 nt, Human
agaggcacggggaaauggag

SEQ ID NO: 1225307 - RNA, 19 nt, Human
agcaaggagcugacagagc

SEQ ID NO: 1225308 - RNA, 21 nt, Human
agcacaggcagacagaagucc

SEQ ID NO: 1225309 - RNA, 18 nt, Human
agcagaccugcagggccc

SEQ ID NO: 1225310 - RNA, 20 nt, Human
agcagcgcuggguacaagcu

SEQ ID NO: 1225311 - RNA, 18 nt, Human
agcagcuuguccuggcug

SEQ ID NO: 1225312 - RNA, 18 nt, Human
agccaccucccagccacc

SEQ ID NO: 1225313 - RNA, 22 nt, Human
agccgggagguggggaacaggg

SEQ ID NO: 1225314 - RNA, 23 nt, Human
agcgugcacuguggggucccagg

SEQ ID NO: 1225315 - RNA, 19 nt, Human
agcuggaccccugagcuag

SEQ ID NO: 1225316 - RNA, 25 nt, Human
agcuguguggccucaagccagccuu

SEQ ID NO: 1225317 - RNA, 21 nt, Human
aggaagaaaaaggcaggacag

SEQ ID NO: 1225318 - RNA, 23 nt, Human
aggaagaaaaaggcaggacagaa

SEQ ID NO: 1225319 - RNA, 26 nt, Human
aggaaggagccauagcccaggcagga

SEQ ID NO: 1225320 - RNA, 18 nt, Human
aggaauggggaacccaga

SEQ ID NO: 1225321 - RNA, 20 nt, Human
aggacacagggguaugggga

SEQ ID NO: 1225322 - RNA, 18 nt, Human
aggagaggguggaguugg

SEQ ID NO: 1225323 - RNA, 21 nt, Human
aggagccaccucccagccacc

SEQ ID NO: 1225324 - RNA, 24 nt, Human
aggagcuggggguggugguggggg

SEQ ID NO: 1225325 - RNA, 18 nt, Human
aggcaaaagcagcgcugg

SEQ ID NO: 1225326 - RNA, 22 nt, Human
aggcaagggcucugaagucagg

SEQ ID NO: 1225327 - RNA, 22 nt, Human
aggcaggagggcugaggaccuc

SEQ ID NO: 1225328 - RNA, 19 nt, Human
agggcugaggaccucuggu

SEQ ID NO: 1225329 - RNA, 22 nt, Human
aucagcugccaucccaucccag

SEQ ID NO: 1225330 - RNA, 18 nt, Human
augacacuccccagcccu

SEQ ID NO: 1225331 - RNA, 21 nt, Human
auggagcacaggcagacagaa

SEQ ID NO: 1225332 - RNA, 20 nt, Human
caagcacuucacaaccccuc

SEQ ID NO: 1225333 - RNA, 24 nt, Human
caauggccugcaccuggcuccggc

SEQ ID NO: 1225334 - RNA, 20 nt, Human
cacaccccucggcccugccc

SEQ ID NO: 1225335 - RNA, 23 nt, Human
cacagcagugaagcugaaaugaa

SEQ ID NO: 1225336 - RNA, 24 nt, Human
cacagcagugaagcugaaaugaaa

SEQ ID NO: 1225337 - RNA, 19 nt, Human
cacaugcacacauggcuac

SEQ ID NO: 1225338 - RNA, 21 nt, Human
caccccucggcccugcccucu

SEQ ID NO: 1225339 - RNA, 19 nt, Human
cacccugcagagcuggacc

SEQ ID NO: 1225340 - RNA, 23 nt, Human
caccuccccucaaacgaggagcc

SEQ ID NO: 1225341 - RNA, 25 nt, Human
cacuccccagcccuccaaggccacu

SEQ ID NO: 1225342 - RNA, 20 nt, Human
cacugagcacgccagaaauc

SEQ ID NO: 1225343 - RNA, 18 nt, Human
cacuguacaauggggaaa

SEQ ID NO: 1225344 - RNA, 24 nt, Human
cacuuaacaaacccacagaaaauc

SEQ ID NO: 1225345 - RNA, 20 nt, Human
cagagaugccuggagggaaa

SEQ ID NO: 1225346 - RNA, 24 nt, Human
cagagcaacggcccaagucugggu

SEQ ID NO: 1225347 - RNA, 22 nt, Human
cagagcugccaggccaggcccu

SEQ ID NO: 1225348 - RNA, 18 nt, Human
cagccucagaggcacggg

SEQ ID NO: 1225349 - RNA, 19 nt, Human
cagccuccucugggggaca

SEQ ID NO: 1225350 - RNA, 19 nt, Human
cagcggcuguuugaggagc

SEQ ID NO: 1225351 - RNA, 20 nt, Human
cagggcuggaggggaggagg

SEQ ID NO: 1225352 - RNA, 21 nt, Human
caggggccagcuggcaagagc

SEQ ID NO: 1225353 - RNA, 20 nt, Human
cagggucgaggaguugacgg

SEQ ID NO: 1225354 - RNA, 19 nt, Human
caucccagucagccuccuc

SEQ ID NO: 1225355 - RNA, 21 nt, Human
caugacacuccccagcccucc

SEQ ID NO: 1225356 - RNA, 22 nt, Human
caugugcccuaggggaagcagg

SEQ ID NO: 1225357 - RNA, 21 nt, Human
ccagagccucacuuguucagg

SEQ ID NO: 1225358 - RNA, 22 nt, Human
ccagcuuucgcuccuucaugcu

SEQ ID NO: 1225359 - RNA, 19 nt, Human
ccaggauggccaagggaug

SEQ ID NO: 1225360 - RNA, 23 nt, Human
ccaggccgggccucccgcccaca

SEQ ID NO: 1225361 - RNA, 22 nt, Human
ccagggcccgcucaccuugcuc

SEQ ID NO: 1225362 - RNA, 21 nt, Human
ccagucguccucguccuccuc

SEQ ID NO: 1225363 - RNA, 21 nt, Human
cccacagaaaauccacccgag

SEQ ID NO: 1225364 - RNA, 22 nt, Human
cccacccccaugacacucccca

SEQ ID NO: 1225365 - RNA, 19 nt, Human
cccagagccucacuuguuc

SEQ ID NO: 1225366 - RNA, 21 nt, Human
cccagagccucacuuguucag

SEQ ID NO: 1225367 - RNA, 19 nt, Human
cccauggagcacaggcaga

SEQ ID NO: 1225368 - RNA, 20 nt, Human
ccccaagaggcucagagggc

SEQ ID NO: 1225369 - RNA, 25 nt, Human
ccccacccccaugacacuccccagc

SEQ ID NO: 1225370 - RNA, 19 nt, Human
ccccacccugcagagcugg

SEQ ID NO: 1225371 - RNA, 18 nt, Human
ccccaugacacuccccag

SEQ ID NO: 1225372 - RNA, 19 nt, Human
cccccaagucccucuucug

SEQ ID NO: 1225373 - RNA, 22 nt, Human
cccccaugacacuccccagccc

SEQ ID NO: 1225374 - RNA, 21 nt, Human
cccccuacgauucccagucgu

SEQ ID NO: 1225375 - RNA, 21 nt, Human
ccccucggcccugcccucugg

SEQ ID NO: 1225376 - RNA, 20 nt, Human
ccccugagcuagccaugcuc

SEQ ID NO: 1225377 - RNA, 30 nt, Human; identical to SEQ ID NO: 504575

SEQ ID NO: 1225378 - RNA, 24 nt, Human
cccgcccacaccccucggcccugc

SEQ ID NO: 1225379 - RNA, 19 nt, Human
cccucggcccugcccucug

SEQ ID NO: 1225380 - RNA, 20 nt, Human
cccuggacuggagccgggag

SEQ ID NO: 1225381 - RNA, 19 nt, Human
ccucccgcccacaccccuc

SEQ ID NO: 1225382 - RNA, 24 nt, Human
ccugcaccuggcuccggcucugcu

SEQ ID NO: 1225383 - RNA, 18 nt, Human
ccugcaggcgcccuggag

SEQ ID NO: 1225384 - RNA, 25 nt, Human
ccuggagggaaaaggcugagugagg

SEQ ID NO: 1225385 - RNA, 20 nt, Human
ccuucugcugcugcuucucc

SEQ ID NO: 1225386 - RNA, 23 nt, Human
cgcagcuuggccuugccgaugcc

SEQ ID NO: 1225387 - RNA, 19 nt, Human
cgcgguugagggugggagu

SEQ ID NO: 1225388 - RNA, 25 nt, Human
cuacaggggccgcgguuggccaggg

SEQ ID NO: 1225389 - RNA, 21 nt, Human
cuacaguuugaaaaccacuau

SEQ ID NO: 1225390 - RNA, 21 nt, Human
cucaaaaccauagugcccagg

SEQ ID NO: 1225391 - RNA, 21 nt, Human
cucagaggcacggggaaaugg

SEQ ID NO: 1225392 - RNA, 18 nt, Human
cuccacuauggcucccaa

SEQ ID NO: 1225393 - RNA, 19 nt, Human
cuccacuauggcucccaaa

SEQ ID NO: 1225394 - RNA, 20 nt, Human
cucggcccugcccucuggcc

SEQ ID NO: 1225395 - RNA, 23 nt, Human
cucucaguagggacaggcccuau

SEQ ID NO: 1225396 - RNA, 23 nt, Human
cucucccacaucaucaggggcac

SEQ ID NO: 1225397 - RNA, 18 nt, Human
cugagcccauguuccucu

SEQ ID NO: 1225398 - RNA, 18 nt, Human
cugcaaccaccugagcgc

SEQ ID NO: 1225399 - RNA, 20 nt, Human
cugcuccuucugcugcugcu

SEQ ID NO: 1225400 - RNA, 20 nt, Human
cugcucuaccugcugggaga

SEQ ID NO: 1225401 - RNA, 18 nt, Human
cuggauccuguggcgggg

SEQ ID NO: 1225402 - RNA, 21 nt, Human
cuguaccugugucugaugccc

SEQ ID NO: 1225403 - RNA, 22 nt, Human
cuguaccugugucugaugcccu

SEQ ID NO: 1225404 - RNA, 24 nt, Human
cuuccucucuagcccccacccugc

SEQ ID NO: 1225405 - RNA, 19 nt, Human
cuugcuccugcuccuucug

SEQ ID NO: 1225406 - RNA, 20 nt, Human
cuuggcacuggagaacaccu

SEQ ID NO: 1225407 - RNA, 24 nt, Human
cuuggccuugccgaugcccccagc

SEQ ID NO: 1225408 - RNA, 24 nt, Human
gaaacccugguucccccagccccc

SEQ ID NO: 1225409 - RNA, 20 nt, Human
gaagacauacuucuucuacc

SEQ ID NO: 1225410 - RNA, 22 nt, Human
gaauggggaacccagagccuca

SEQ ID NO: 1225411 - RNA, 24 nt, Human
gagaacaccuguggacacagggac

SEQ ID NO: 1225412 - RNA, 24 nt, Human
gagcagcaaggagcugacagagcu

SEQ ID NO: 1225413 - RNA, 21 nt, Human
gagccacccgucacccccugg

SEQ ID NO: 1225414 - RNA, 19 nt, Human
gagccugcugggagggaag

SEQ ID NO: 1225415 - RNA, 18 nt, Human
gagcugggggugguggug

SEQ ID NO: 1225416 - RNA, 18 nt, Human
gagggugguuggugggaa

SEQ ID NO: 1225417 - RNA, 21 nt, Human
gcaagagcagggggugggcag

SEQ ID NO: 1225418 - RNA, 24 nt, Human
gcagcgcuggguacaagcucaaaa

SEQ ID NO: 1225419 - RNA, 19 nt, Human
gcaggggccagcuggcaag

SEQ ID NO: 1225420 - RNA, 21 nt, Human
gccaaggagaccuucucucca

SEQ ID NO: 1225421 - RNA, 20 nt, Human
gcccaagucugggucugggg

SEQ ID NO: 1225422 - RNA, 23 nt, Human
gcccacaccccucggcccugccc

SEQ ID NO: 1225423 - RNA, 21 nt, Human
gcccaguagccucaggacaca

SEQ ID NO: 1225424 - RNA, 21 nt, Human
gccugggcgagaagaaagcuc

SEQ ID NO: 1225425 - RNA, 18 nt, Human
gcgcgggcauccugugug

SEQ ID NO: 1225426 - RNA, 20 nt, Human
gcucaggcagggcuggggaa

SEQ ID NO: 1225427 - RNA, 20 nt, Human
gcuguguggccucaagccag

SEQ ID NO: 1225428 - RNA, 25 nt, Human
ggaaacccugguucccccagccccc

SEQ ID NO: 1225429 - RNA, 21 nt, Human
ggaccucugguggcggcccag

SEQ ID NO: 1225430 - RNA, 18 nt, Human
ggacuggagccgggaggu

SEQ ID NO: 1225431 - RNA, 24 nt, Human
ggacuggagccgggagguggggaa

SEQ ID NO: 1225432 - RNA, 18 nt, Human
ggagaccuucucuccaau

SEQ ID NO: 1225433 - RNA, 19 nt, Human
ggagcugacagagcugaug

SEQ ID NO: 1225434 - RNA, 22 nt, Human
ggagcugggggugguggugggg

SEQ ID NO: 1225435 - RNA, 21 nt, Human
ggagggcugaggaccucuggu

SEQ ID NO: 1225436 - RNA, 21 nt, Human
ggaggggaggaggcgaucuug

SEQ ID NO: 1225437 - RNA, 23 nt, Human
ggauccuguggcgggggcgucuc

SEQ ID NO: 1225438 - RNA, 19 nt, Human
ggcacggggaaauggaggg

SEQ ID NO: 1225439 - RNA, 19 nt, Human
ggccugggccaaggagacc

SEQ ID NO: 1225440 - RNA, 19 nt, Human
ggcggcccagggcuuccag

SEQ ID NO: 1225441 - RNA, 25 nt, Human
ggcugaccauugccuuggaccgcuc

SEQ ID NO: 1225442 - RNA, 18 nt, Human
ggcugcugcgguggcggc

SEQ ID NO: 1225443 - RNA, 19 nt, Human
gggaaauggagggacugcc

SEQ ID NO: 1225444 - RNA, 24 nt, Human
gggcaagcacuucacaaccccuca

SEQ ID NO: 1225445 - RNA, 22 nt, Human
gggcacugaugagacagcggcu

SEQ ID NO: 1225446 - RNA, 21 nt, Human
gggcagccucagaggcacggg

SEQ ID NO: 1225447 - RNA, 21 nt, Human
gggccccaagaggcucagagg

SEQ ID NO: 1225448 - RNA, 18 nt, Human
gggccccucaccagcccc

SEQ ID NO: 1225449 - RNA, 18 nt, Human
ggggaacagggcaaggag

SEQ ID NO: 1225450 - RNA, 23 nt, Human
ggggucaaccacuucccugggag

SEQ ID NO: 1225451 - RNA, 22 nt, Human
ggguacuuggcacuggagaaca

SEQ ID NO: 1225452 - RNA, 23 nt, Human
gggugggagugggggugcacugg

SEQ ID NO: 1225453 - RNA, 19 nt, Human
gggugguggugggggcggu

SEQ ID NO: 1225454 - RNA, 22 nt, Human
ggugggggcgguggggguggug

SEQ ID NO: 1225455 - RNA, 20 nt, Human
gguggugggggcgguggggg

SEQ ID NO: 1225456 - RNA, 23 nt, Human
guaccugugucugaugcccuggg

SEQ ID NO: 1225457 - RNA, 25 nt, Human
gucaccuccccucaaacgaggagcc

SEQ ID NO: 1225458 - RNA, 23 nt, Human
guccagggggcggugcuugcucu

SEQ ID NO: 1225459 - RNA, 21 nt, Human
gugcacuguggggucccaggc

SEQ ID NO: 1225460 - RNA, 19 nt, Human
guggcgcaggcugggugga

SEQ ID NO: 1225461 - RNA, 21 nt, Human
guggcugcugcgguggcggca

SEQ ID NO: 1225462 - RNA, 18 nt, Human
guuccgucacccccuccc

SEQ ID NO: 1225463 - RNA, 19 nt, Human
guugcugggaagaccccca

SEQ ID NO: 1225464 - RNA, 18 nt, Human
uacacaugcacacauggc

SEQ ID NO: 1225465 - RNA, 20 nt, Human
uaggauugcuuggcaggaga

SEQ ID NO: 1225466 - RNA, 23 nt, Human
uaggggaagcaggggccagcugg

SEQ ID NO: 1225467 - RNA, 24 nt, Human
uauccaguccuccuggugugugac

SEQ ID NO: 1225468 - RNA, 18 nt, Human
ucacccccucccaaggaa

SEQ ID NO: 1225469 - RNA, 18 nt, Human
ucacccccucccaaggaa

SEQ ID NO: 1225470 - RNA, 18 nt, Human
ucagagcaacggcccaag

SEQ ID NO: 1225471 - RNA, 24 nt, Human
ucagagcaacggcccaagucuggg

SEQ ID NO: 1225472 - RNA, 24 nt, Human
ucagagccucagucgaucccugac

SEQ ID NO: 1225473 - RNA, 22 nt, Human
ucagaggcacggggaaauggag

SEQ ID NO: 1225474 - RNA, 23 nt, Human
ucaggagcugggggugguggugg

SEQ ID NO: 1225475 - RNA, 19 nt, Human
ucagggcuggaggggagga

SEQ ID NO: 1225476 - RNA, 18 nt, Human
ucaguagggacaggcccu

SEQ ID NO: 1225477 - RNA, 18 nt, Human
uccaaggccacuguguuu

SEQ ID NO: 1225478 - RNA, 25 nt, Human
uccaggaagacauacuucuucuacc

SEQ ID NO: 1225479 - RNA, 21 nt, Human
ucccaaaccaggaaggagcca

SEQ ID NO: 1225480 - RNA, 22 nt, Human
ucccaaaccaggaaggagccau

SEQ ID NO: 1225481 - RNA, 22 nt, Human
ucccagucguccucguccuccu

SEQ ID NO: 1225482 - RNA, 21 nt, Human
uccccacccccaugacacucc

SEQ ID NO: 1225483 - RNA, 24 nt, Human
uccccagcccuccaaggccacugu

SEQ ID NO: 1225484 - RNA, 21 nt, Human
ucccugcacucucaguaggga

SEQ ID NO: 1225485 - RNA, 21 nt, Human
ucccugcuuccucucuagccc

SEQ ID NO: 1225486 - RNA, 21 nt, Human
uccucugccuguggcugcugc

SEQ ID NO: 1225487 - RNA, 21 nt, Human
uccugcuccuucugcugcugc

SEQ ID NO: 1225488 - RNA, 26 nt, Human
ucgcuccuucaugcugcgcagcuugg

SEQ ID NO: 1225489 - RNA, 23 nt, Human
ucggcccugcccucuggccauac

SEQ ID NO: 1225490 - RNA, 19 nt, Human
ucggugguguugaagagca

SEQ ID NO: 1225491 - RNA, 19 nt, Human
ucuaccuacagaggcgaca

SEQ ID NO: 1225492 - RNA, 23 nt, Human
ucuagcccccacccugcagagcu

SEQ ID NO: 1225493 - RNA, 25 nt, Human
ucucacugcaacgggaaagccacag

SEQ ID NO: 1225494 - RNA, 21 nt, Human
ucuccaauggccugcaccugg

SEQ ID NO: 1225495 - RNA, 24 nt, Human
ucuccaauggccugcaccuggcuc

SEQ ID NO: 1225496 - RNA, 25 nt, Human
ucuccaauggccugcaccuggcucc

SEQ ID NO: 1225497 - RNA, 28 nt, Human
ucuccacacagugcugguuccgucaccc

SEQ ID NO: 1225498 - RNA, 26 nt, Human
ucucuaaaaauaucucaggaggcugc

SEQ ID NO: 1225499 - RNA, 21 nt, Human
ucugcugcugcuucuccagcu

SEQ ID NO: 1225500 - RNA, 19 nt, Human
ucugguggcggcccagggc

SEQ ID NO: 1225501 - RNA, 23 nt, Human
ucuugcccaaggcccuccgacug

SEQ ID NO: 1225502 - RNA, 23 nt, Human
ugaaauggaaacuauucaaaaaa

SEQ ID NO: 1225503 - RNA, 20 nt, Human
ugaagagauccgacaucaag

SEQ ID NO: 1225504 - RNA, 21 nt, Human
ugaagagcagcaaggagcuga

SEQ ID NO: 1225505 - RNA, 21 nt, Human
ugacacgcgggcaaaggcucc

SEQ ID NO: 1225506 - RNA, 18 nt, Human
ugacacuccccagcccuc

SEQ ID NO: 1225507 - RNA, 22 nt, Human
ugacacuccccagcccuccaag

SEQ ID NO: 1225508 - RNA, 21 nt, Human
ugacccagcaccgggcacuga

SEQ ID NO: 1225509 - RNA, 21 nt, Human
ugacucccuguccccaccccc

SEQ ID NO: 1225510 - RNA, 19 nt, Human
ugagcuuagagaggaaagc

SEQ ID NO: 1225511 - RNA, 18 nt, Human
ugagggugguugguggga

SEQ ID NO: 1225512 - RNA, 23 nt, Human
ugaugagacagcggcuguuugag

SEQ ID NO: 1225513 - RNA, 23 nt, Human
ugcaccuggcuccggcucugcuc

SEQ ID NO: 1225514 - RNA, 20 nt, Human
ugcacuguggggucccaggc

SEQ ID NO: 1225515 - RNA, 19 nt, Human
ugcagauacucccugcuuc

SEQ ID NO: 1225516 - RNA, 18 nt, Human
ugcaggcgcccuggagca

SEQ ID NO: 1225517 - RNA, 23 nt, Human
ugccagggccgaucuuggugcca

SEQ ID NO: 1225518 - RNA, 21 nt, Human
ugccauggagaagaucacaga

SEQ ID NO: 1225519 - RNA, 20 nt, Human
ugcccuaggggaagcagggg

SEQ ID NO: 1225520 - RNA, 21 nt, Human
ugcccuggguccccacuaagc

SEQ ID NO: 1225521 - RNA, 21 nt, Human
ugcccuugaucuucucaaucu

SEQ ID NO: 1225522 - RNA, 21 nt, Human
ugccuccuacccuugcgccuc

SEQ ID NO: 1225523 - RNA, 18 nt, Human
ugccuggggucacagagc

SEQ ID NO: 1225524 - RNA, 20 nt, Human
ugccuuggaccgcucuuggc

SEQ ID NO: 1225525 - RNA, 20 nt, Human
ugcgguggcggcagaggagg

SEQ ID NO: 1225526 - RNA, 24 nt, Human
ugcuccccacccucugcacaccuc

SEQ ID NO: 1225527 - RNA, 20 nt, Human
ugcucugacagucucaguug

SEQ ID NO: 1225528 - RNA, 20 nt, Human
ugcugcugcugucguccugc

SEQ ID NO: 1225529 - RNA, 18 nt, Human
ugcugggaagacccccaa

SEQ ID NO: 1225530 - RNA, 20 nt, Human
uggaccccugagcuagccuc

SEQ ID NO: 1225531 - RNA, 25 nt, Human
uggauccuguggcgggggcgucucu

SEQ ID NO: 1225532 - RNA, 19 nt, Human
uggcaagagcagggggugg

SEQ ID NO: 1225533 - RNA, 21 nt, Human
uggcaagagcagggggugggc

SEQ ID NO: 1225534 - RNA, 21 nt, Human
uggcacuggagaacaccugug

SEQ ID NO: 1225535 - RNA, 23 nt, Human
uggcacuggagaacaccugugga

SEQ ID NO: 1225536 - RNA, 22 nt, Human
uggccaagggauggugaauauu

SEQ ID NO: 1225537 - RNA, 22 nt, Human
uggccagccaccggagggguca

SEQ ID NO: 1225538 - RNA, 20 nt, Human
uggcccagggcgggcagcgg

SEQ ID NO: 1225539 - RNA, 21 nt, Human
uggccuucuugcugcccuuga

SEQ ID NO: 1225540 - RNA, 21 nt, Human
uggcgcaggcuggguggagcc

SEQ ID NO: 1225541 - RNA, 24 nt, Human
uggcggcagaggagggauggaguc

SEQ ID NO: 1225542 - RNA, 18 nt, Human
uggcgggggcgucucugc

SEQ ID NO: 1225543 - RNA, 18 nt, Human
ugggcagcagggcagaga

SEQ ID NO: 1225544 - RNA, 22 nt, Human
uggggcaagcacuucacaaccc

SEQ ID NO: 1225545 - RNA, 18 nt, Human
uggguacaagcucaaaac

SEQ ID NO: 1225546 - RNA, 19 nt, Human
ugguggcggcccagggcuu

SEQ ID NO: 1225547 - RNA, 23 nt, Human
ugguggcggcccagggcuuccag

SEQ ID NO: 1225548 - RNA, 22 nt, Human
uggugggggcgguggggguggu

SEQ ID NO: 1225549 - RNA, 21 nt, Human
ugguuggugggaaacccuggu

SEQ ID NO: 1225550 - RNA, 20 nt, Human
ugucauggagcccccuacga

SEQ ID NO: 1225551 - RNA, 18 nt, Human
uguccaagagccugcugg

SEQ ID NO: 1225552 - RNA, 24 nt, Human
uguccaagagccugcugggaggga

SEQ ID NO: 1225553 - RNA, 24 nt, Human
uguccccacccccaugacacuccc

SEQ ID NO: 1225554 - RNA, 22 nt, Human
ugugugacaggcuauaugcgcg

SEQ ID NO: 1225555 - RNA, 21 nt, Human
ugugugggggccugggcacug

SEQ ID NO: 1225556 - RNA, 18 nt, Human
ugugugugggggccuggg

SEQ ID NO: 1225557 - RNA, 23 nt, Human
uuacacaugcacacauggcuacu

SEQ ID NO: 1225558 - RNA, 23 nt, Human
uucaaaaaauugagaauuucuga

SEQ ID NO: 1225559 - RNA, 22 nt, Human
uucuccugagagggccaggaug

SEQ ID NO: 1225560 - RNA, 22 nt, Human
uugauggccuucuugcugcccu

SEQ ID NO: 1225561 - RNA, 22 nt, Human
uugccagggccgaucuuggugc

SEQ ID NO: 1225562 - RNA, 22 nt, Human
uuggugugccguuuucucugga

SEQ ID NO: 1225563 - RNA, 19 nt, Human
uugugccacuucuggaugc

SEQ ID NO: 1225564 - RNA, 22 nt, Human
agggaccaaaaugggccagguu

SEQ ID NO: 1225565 - RNA, 23 nt, Human
ccaaaaugggccagguuuucuuu

SEQ ID NO: 1225566 - RNA, 18 nt, Human
ccuggacccagcugccgu

SEQ ID NO: 1225567 - RNA, 20 nt, Human
gcccuggacccagcugccgu

SEQ ID NO: 1225568 - RNA, 25 nt, Human
uagggaccaaaaugggccagguuuu

SEQ ID NO: 1225569 - RNA, 21 nt, Human
ugaguuagacccugacucugg

SEQ ID NO: 1225570 - RNA, 20 nt, Human
aaaaaaagaaaagacaauuu

SEQ ID NO: 1225571 - RNA, 23 nt, Human
aaaaaagaaaagacaauuuagga

SEQ ID NO: 1225572 - RNA, 22 nt, Human
aaaaagaaaagacaauuuagga

SEQ ID NO: 1225573 - RNA, 24 nt, Human
aaaacaaauuucagacuauaugaa

SEQ ID NO: 1225574 - RNA, 26 nt, Human
aaaacccuuaacccuuuuaagcgccg

SEQ ID NO: 1225575 - RNA, 25 nt, Human
aaaaucuuuguuucuuagaccaguu

SEQ ID NO: 1225576 - RNA, 23 nt, Human
aaaccaugucacugcuaaaaaua

SEQ ID NO: 1225577 - RNA, 18 nt, Human
aaaccggauccagcagaa

SEQ ID NO: 1225578 - RNA, 23 nt, Human
aaaggaagagugugugcccaaaa

SEQ ID NO: 1225579 - RNA, 23 nt, Human
aaauaucaaaagguuaaaaacac

SEQ ID NO: 1225580 - RNA, 19 nt, Human
aacacgaugaaaccggauc

SEQ ID NO: 1225581 - RNA, 18 nt, Human
aacccagaagaggagguu

SEQ ID NO: 1225582 - RNA, 25 nt, Human
aagaaaaaccgaguucagaaucaaa

SEQ ID NO: 1225583 - RNA, 19 nt, Human
aagaaaagacaauuuagga

SEQ ID NO: 1225584 - RNA, 21 nt, Human
aagaaagaaagaaagaaagaa

SEQ ID NO: 1225585 - RNA, 21 nt, Human
aagaaagaaagagagagagga

SEQ ID NO: 1225586 - RNA, 21 nt, Human
aagaaagagagaaaaaacaaa

SEQ ID NO: 1225587 - RNA, 23 nt, Human
aagaaagagagagaggaagagaa

SEQ ID NO: 1225588 - RNA, 22 nt, Human
aagaaagagagagaggaaggaa

SEQ ID NO: 1225589 - RNA, 21 nt, Human
aagagagaaaaaacaaauuuc

SEQ ID NO: 1225590 - RNA, 24 nt, Human
aagaggagguugcggugagccgag

SEQ ID NO: 1225591 - RNA, 23 nt, Human
aagaggccgaggcaggcaguggg

SEQ ID NO: 1225592 - RNA, 26 nt, Human
aagcaacaggaaccacagauaauuau

SEQ ID NO: 1225593 - RNA, 19 nt, Human
aauaggaagaaacagaucu

SEQ ID NO: 1225594 - RNA, 19 nt, Human
aaugugacucugucucaaa

SEQ ID NO: 1225595 - RNA, 24 nt, Human
acaaaggaagagugugugcccaaa

SEQ ID NO: 1225596 - RNA, 19 nt, Human
acacgaugaaaccggaucc

SEQ ID NO: 1225597 - RNA, 19 nt, Human
acacugcacuccagccugg

SEQ ID NO: 1225598 - RNA, 20 nt, Human
acacugcacuccagccuggc

SEQ ID NO: 1225599 - RNA, 21 nt, Human
acacugcacuccagccuggcc

SEQ ID NO: 1225600 - RNA, 20 nt, Human
accaggagacgcaggcuugu

SEQ ID NO: 1225601 - RNA, 18 nt, Human
accuaguauuuuaagagg

SEQ ID NO: 1225602 - RNA, 24 nt, Human
acugcacuccagccuggccaacag

SEQ ID NO: 1225603 - RNA, 24 nt, Human
acugcacuccagccuggccaacag

SEQ ID NO: 1225604 - RNA, 22 nt, Human
agaaaaaccgaguucagaauca

SEQ ID NO: 1225605 - RNA, 23 nt, Human
agaaauugacaagaaacugguua

SEQ ID NO: 1225606 - RNA, 22 nt, Human
agaagaggagguugcggugagc

SEQ ID NO: 1225607 - RNA, 20 nt, Human
agacaggacuggccaacgug

SEQ ID NO: 1225608 - RNA, 23 nt, Human
agacaggacuggccaacgugcag

SEQ ID NO: 1225609 - RNA, 24 nt, Human
agcaauaugauugcuucagccucc

SEQ ID NO: 1225610 - RNA, 21 nt, Human
agccaggcaacaacaucacaa

SEQ ID NO: 1225611 - RNA, 22 nt, Human
agccuccagaaagcacauuuag

SEQ ID NO: 1225612 - RNA, 19 nt, Human
agccuggccaacagagcga

SEQ ID NO: 1225613 - RNA, 25 nt, Human
aggaagaaacagaucucuaguagaa

SEQ ID NO: 1225614 - RNA, 19 nt, Human
aggcaggcagaucacccga

SEQ ID NO: 1225615 - RNA, 22 nt, Human
aggcaggcagaucacccgaggg

SEQ ID NO: 1225616 - RNA, 22 nt, Human
aggcaggcagaucacccgaggu

SEQ ID NO: 1225617 - RNA, 26 nt, Human
agguaaagaaauaucuccagcaauau

SEQ ID NO: 1225618 - RNA, 24 nt, Human
aguggcucacaccuguaaaccuag

SEQ ID NO: 1225619 - RNA, 26 nt, Human
caacauaagcagaauuacaacugaug

SEQ ID NO: 1225620 - RNA, 19 nt, Human
cacacaacagcccgggacc

SEQ ID NO: 1225621 - RNA, 23 nt, Human
cacaccuguaaaccuaguauuuu

SEQ ID NO: 1225622 - RNA, 24 nt, Human
cacacgcccaagcccacacaacag

SEQ ID NO: 1225623 - RNA, 24 nt, Human
cacuccagccuggccaacagagcg

SEQ ID NO: 1225624 - RNA, 18 nt, Human
cacugcacuccagccugg

SEQ ID NO: 1225625 - RNA, 18 nt, Human
cacugcacuccagccugg

SEQ ID NO: 1225626 - RNA, 21 nt, Human
cacugcacuccagccuggcca

SEQ ID NO: 1225627 - RNA, 24 nt, Human
cacugcacuccagccuggccaaca

SEQ ID NO: 1225628 - RNA, 28 nt, Human
cacugcuaaaaauacaaaaacuagccag

SEQ ID NO: 1225629 - RNA, 21 nt, Human
cacuuuaucaaaacagcauca

SEQ ID NO: 1225630 - RNA, 21 nt, Human
cagaaacaccacgccucagau

SEQ ID NO: 1225631 - RNA, 22 nt, Human
cagaaagaaagaaagaaagaaa

SEQ ID NO: 1225632 - RNA, 20 nt, Human
cagaagaggagguugcggug

SEQ ID NO: 1225633 - RNA, 24 nt, Human
cagaucacccgaggucuggaguuu

SEQ ID NO: 1225634 - RNA, 23 nt, Human
cagcacagccaggcaacaacauc

SEQ ID NO: 1225635 - RNA, 24 nt, Human
cagccaggcaacaacaucacaacu

SEQ ID NO: 1225636 - RNA, 22 nt, Human
cccgggaaagcuugccaaaaua

SEQ ID NO: 1225637 - RNA, 20 nt, Human
cccucuuuucacacgcccaa

SEQ ID NO: 1225638 - RNA, 23 nt, Human
cccuuuuaagcgcuguuuuguca

SEQ ID NO: 1225639 - RNA, 22 nt, Human
ccgaaggcguccggucuccucu

SEQ ID NO: 1225640 - RNA, 20 nt, Human
ccgcaccguaaaucugcucc

SEQ ID NO: 1225641 - RNA, 20 nt, Human
ccgcucccggauccaccagg

SEQ ID NO: 1225642 - RNA, 23 nt, Human
cgagaucgaacacugcacuccag

SEQ ID NO: 1225643 - RNA, 22 nt, Human
cguacuucucaaccgcaccgua

SEQ ID NO: 1225644 - RNA, 21 nt, Human
cgucagaaagaaagaaagaaa

SEQ ID NO: 1225645 - RNA, 20 nt, Human
cguccggucuccucugaucu

SEQ ID NO: 1225646 - RNA, 19 nt, Human
cucacaccuguaaaccuag

SEQ ID NO: 1225647 - RNA, 23 nt, Human
cucccggauccaccaggcaauuc

SEQ ID NO: 1225648 - RNA, 21 nt, Human
cucuaguagaaguaauagauu

SEQ ID NO: 1225649 - RNA, 25 nt, Human
cuucucaaccgcaccguaaaucugc

SEQ ID NO: 1225650 - RNA, 21 nt, Human
gaaaaaacaaauuucagacua

SEQ ID NO: 1225651 - RNA, 21 nt, Human
gaacaucaaguuaauucaaga

SEQ ID NO: 1225652 - RNA, 24 nt, Human
gaagaaacagaucucuaguagaag

SEQ ID NO: 1225653 - RNA, 20 nt, Human
gagaaagaaagagagaaaag

SEQ ID NO: 1225654 - RNA, 24 nt, Human
gagacaggacuggccaacgugcag

SEQ ID NO: 1225655 - RNA, 23 nt, Human
gagguugcggugagccgagaucg

SEQ ID NO: 1225656 - RNA, 24 nt, Human
gaucacccgaggucuggaguuuga

SEQ ID NO: 1225657 - RNA, 24 nt, Human
gaucgaacacugcacuccagccug

SEQ ID NO: 1225658 - RNA, 24 nt, Human
gcacuccagccuggccaacagagc

SEQ ID NO: 1225659 - RNA, 21 nt, Human
gcagaucacccgaggucugga

SEQ ID NO: 1225660 - RNA, 26 nt, Human
gccaacgugcagaaaccaugucacug

SEQ ID NO: 1225661 - RNA, 25 nt, Human
gccaggcgagguuggugcgcgccuu

SEQ ID NO: 1225662 - RNA, 20 nt, Human
gcccaagcccacacaacagc

SEQ ID NO: 1225663 - RNA, 21 nt, Human
gcugcaguucagaacaugguu

SEQ ID NO: 1225664 - RNA, 23 nt, Human
gcuggugggcacaguggcucaca

SEQ ID NO: 1225665 - RNA, 20 nt, Human
ggagguugcggugagccgag

SEQ ID NO: 1225666 - RNA, 22 nt, Human
ggagguugcggugagccgagau

SEQ ID NO: 1225667 - RNA, 24 nt, Human
ggagguugcggugagccgagaucg

SEQ ID NO: 1225668 - RNA, 24 nt, Human
gggcacaguggcucacaccuguaa

SEQ ID NO: 1225669 - RNA, 19 nt, Human
guucagaaucaaauuauuc

SEQ ID NO: 1225670 - RNA, 19 nt, Human
guugcggugagccgagauc

SEQ ID NO: 1225671 - RNA, 20 nt, Human
uaaaaacacuuuaucaaaac

SEQ ID NO: 1225672 - RNA, 21 nt, Human
uaaaaauacaaaaacuagcca

SEQ ID NO: 1225673 - RNA, 25 nt, Human
uaaaccuaguauuuuaagaggccga

SEQ ID NO: 1225674 - RNA, 23 nt, Human
uaaagaaauaucuccagcaauau

SEQ ID NO: 1225675 - RNA, 24 nt, Human
uaagaggccgaggcaggcagauca

SEQ ID NO: 1225676 - RNA, 22 nt, Human
uaagcagaauuacaacugauga

SEQ ID NO: 1225677 - RNA, 25 nt, Human
uacaagguacucgggaggcugaggc

SEQ ID NO: 1225678 - RNA, 21 nt, Human
uagaaaaaguaaaagcuggug

SEQ ID NO: 1225679 - RNA, 22 nt, Human
uagauuucuaggaguuuuacac

SEQ ID NO: 1225680 - RNA, 18 nt, Human
uaguaccuugaacagggu

SEQ ID NO: 1225681 - RNA, 24 nt, Human
uaguauuuuaagaggccgaggcag

SEQ ID NO: 1225682 - RNA, 23 nt, Human
uauaaugugacucugucucaaaa

SEQ ID NO: 1225683 - RNA, 25 nt, Human
uaucaaaaagguaaagaaauaucuc

SEQ ID NO: 1225684 - RNA, 18 nt, Human
uaucuccagcaauaugau

SEQ ID NO: 1225685 - RNA, 26 nt, Human
ucaaaauacuucaaaaugaaauacag

SEQ ID NO: 1225686 - RNA, 18 nt, Human
ucaaaccugacgaaaagg

SEQ ID NO: 1225687 - RNA, 18 nt, Human
ucagaucacuaaggugca

SEQ ID NO: 1225688 - RNA, 23 nt, Human
uccagccuggccaacagagcgag

SEQ ID NO: 1225689 - RNA, 24 nt, Human
uccagccuggccaacagagcgaga

SEQ ID NO: 1225690 - RNA, 22 nt, Human
ucuccucugaucucgugaagau

SEQ ID NO: 1225691 - RNA, 22 nt, Human
ucuuuuauaaacauuugaaaag

SEQ ID NO: 1225692 - RNA, 22 nt, Human
ugaaaagcaauaauucauuaaa

SEQ ID NO: 1225693 - RNA, 21 nt, Human
ugaaaaguuucagggcccucu

SEQ ID NO: 1225694 - RNA, 24 nt, Human
ugaaagaaaauauucaacuguaaa

SEQ ID NO: 1225695 - RNA, 23 nt, Human
ugaaauacagacaguuacaugaa

SEQ ID NO: 1225696 - RNA, 26 nt, Human
ugacaagaaacugguuauuuuguguc

SEQ ID NO: 1225697 - RNA, 23 nt, Human
ugagaaaaccaggagacgcaggc

SEQ ID NO: 1225698 - RNA, 22 nt, Human
ugccaaaauaucaaaagguuaa

SEQ ID NO: 1225699 - RNA, 19 nt, Human
uggcucacaccuguaaacc

SEQ ID NO: 1225700 - RNA, 24 nt, Human
uggcucacaccuguaaaccuagua

SEQ ID NO: 1225701 - RNA, 19 nt, Human
ugggcggcgcaacacgaug

SEQ ID NO: 1225702 - RNA, 22 nt, Human
uguaaacagguacucuaguacc

SEQ ID NO: 1225703 - RNA, 23 nt, Human
uguaaacagguacucuaguaccu

SEQ ID NO: 1225704 - RNA, 21 nt, Human
uguaacuuauuugacaauguu

SEQ ID NO: 1225705 - RNA, 24 nt, Human
ugucaaguaaucaaaaaccuaaua

SEQ ID NO: 1225706 - RNA, 23 nt, Human
ugugaauuaauagucauuuauuu

SEQ ID NO: 1225707 - RNA, 19 nt, Human
ugugucaaacaacauaagc

SEQ ID NO: 1225708 - RNA, 18 nt, Human
uuagugugggcuaaccug

SEQ ID NO: 1225709 - RNA, 19 nt, Human
uucaaguuccucccucuuu

SEQ ID NO: 1225710 - RNA, 22 nt, Human
uucaaguuccucccucuuuacc

SEQ ID NO: 1225711 - RNA, 22 nt, Human
uucagguaugucaagaaaaacc

SEQ ID NO: 1225712 - RNA, 18 nt, Human
uugcggugagccgagauc

SEQ ID NO: 1225713 - RNA, 19 nt, Human
uugcggugagccgagaucg

SEQ ID NO: 1225714 - RNA, 24 nt, Human
uugcggugagccgagaucgaacac

SEQ ID NO: 1225715 - RNA, 21 nt, Human
aauguacauccuugagacagc

SEQ ID NO: 1225716 - RNA, 19 nt, Human
acuccuguguuaucuccaa

SEQ ID NO: 1225717 - RNA, 25 nt, Human
cccucccagaaagacuccuguguua

SEQ ID NO: 1225718 - RNA, 21 nt, Human
gaggaugguauaacuucgcgg

SEQ ID NO: 1225719 - RNA, 23 nt, Human
gaucauuaguuguaguuacuucc

SEQ ID NO: 1225720 - RNA, 18 nt, Human
uggccaaaagccugaugc

SEQ ID NO: 1225721 - RNA, 23 nt, Human
uucaggauggcagaggaaccugu

SEQ ID NO: 1225722 - RNA, 23 nt, Human
uuuauuuauuuuaaaguuggguc

SEQ ID NO: 1225723 - RNA, 21 nt, Human
uuuggccaaaagccugaugcc

SEQ ID NO: 1225724 - RNA, 20 nt, Human
aaaaagccuuuauucacuuu

SEQ ID NO: 1225725 - RNA, 19 nt, Human
aaaaccaagaucaaguucc

SEQ ID NO: 1225726 - RNA, 18 nt, Human
aaaauagcagaagggaag

SEQ ID NO: 1225727 - RNA, 26 nt, Human
aaaauugacaaauucauuuugaauaa

SEQ ID NO: 1225728 - RNA, 19 nt, Human
aaauguccucuaggcaguc

SEQ ID NO: 1225729 - RNA, 21 nt, Human
aaugcaggaaauuguaacacu

SEQ ID NO: 1225730 - RNA, 18 nt, Human
acaaaaugaaaaccagua

SEQ ID NO: 1225731 - RNA, 25 nt, Human
accaaaacaaauauuuaauaagaau

SEQ ID NO: 1225732 - RNA, 25 nt, Human
acuaaugcacuaacagaaaaaaaaa

SEQ ID NO: 1225733 - RNA, 21 nt, Human
agacauauucccacuaaugca

SEQ ID NO: 1225734 - RNA, 19 nt, Human
agaccuccggcacugcaga

SEQ ID NO: 1225735 - RNA, 23 nt, Human
agaccuccggcacugcagacacu

SEQ ID NO: 1225736 - RNA, 24 nt, Human
auaaucacuuuaaaagccagaaag

SEQ ID NO: 1225737 - RNA, 24 nt, Human
caaaauuagugauaugauuacccc

SEQ ID NO: 1225738 - RNA, 23 nt, Human
caagaacaacgccacaacaucau

SEQ ID NO: 1225739 - RNA, 22 nt, Human
caaugucuacuucaguguccca

SEQ ID NO: 1225740 - RNA, 25 nt, Human
caaugucuacuucagugucccaaaa

SEQ ID NO: 1225741 - RNA, 18 nt, Human
caggcuucauucagccgg

SEQ ID NO: 1225742 - RNA, 23 nt, Human
caucauguauauuuaauaucaca

SEQ ID NO: 1225743 - RNA, 22 nt, Human
cauccaagaacaacgccacaac

SEQ ID NO: 1225744 - RNA, 18 nt, Human
ccaagaacaacgccacaa

SEQ ID NO: 1225745 - RNA, 18 nt, Human
cccuccccuccccaaauc

SEQ ID NO: 1225746 - RNA, 19 nt, Human
ccgcgucccaggcuucauu

SEQ ID NO: 1225747 - RNA, 25 nt, Human
ccucuaggcaguccacuuaccaucc

SEQ ID NO: 1225748 - RNA, 28 nt, Human
ccugcagcagggaggcuucgcccggagc

SEQ ID NO: 1225749 - RNA, 22 nt, Human
cuaauccagauugaaaacuguu

SEQ ID NO: 1225750 - RNA, 22 nt, Human
cuaaugcacuaacagaaaaaaa

SEQ ID NO: 1225751 - RNA, 19 nt, Human
cuacccuccccuccccaaa

SEQ ID NO: 1225752 - RNA, 21 nt, Human
cuacccuccccuccccaaauc

SEQ ID NO: 1225753 - RNA, 21 nt, Human
cucccgcgucccaggcuucau

SEQ ID NO: 1225754 - RNA, 22 nt, Human
cuugcagcccgugggaccacga

SEQ ID NO: 1225755 - RNA, 24 nt, Human
gaaagcaauccagcaaaaccaaga

SEQ ID NO: 1225756 - RNA, 21 nt, Human
gcaguccacuuaccauccaag

SEQ ID NO: 1225757 - RNA, 21 nt, Human
gcauuaacugguuuuccauuu

SEQ ID NO: 1225758 - RNA, 18 nt, Human
gccacaacaucauuuuac

SEQ ID NO: 1225759 - RNA, 21 nt, Human
gcccggagccucccagaccuc

SEQ ID NO: 1225760 - RNA, 19 nt, Human
gcgcggcgcggcucccgcg

SEQ ID NO: 1225761 - RNA, 19 nt, Human
uacaauuugucuuugaccu

SEQ ID NO: 1225762 - RNA, 18 nt, Human
uacagccugccucagaau

SEQ ID NO: 1225763 - RNA, 18 nt, Human
uacagccugccucagaau

SEQ ID NO: 1225764 - RNA, 23 nt, Human
uaccaaaacaaauauuuaauaag

SEQ ID NO: 1225765 - RNA, 21 nt, Human
uauaugcagcacugaggcaca

SEQ ID NO: 1225766 - RNA, 18 nt, Human
uauuucagcccuguaaau

SEQ ID NO: 1225767 - RNA, 20 nt, Human
ucacugggucacuuuaguau

SEQ ID NO: 1225768 - RNA, 19 nt, Human
ucagugucccaaaaagccu

SEQ ID NO: 1225769 - RNA, 25 nt, Human
ucgcccggagccucccagaccuccg

SEQ ID NO: 1225770 - RNA, 24 nt, Human
ucgguucucccacaauuguguaaa

SEQ ID NO: 1225771 - RNA, 24 nt, Human
ucuguggcuacccuccccucccca

SEQ ID NO: 1225772 - RNA, 22 nt, Human
ugaaaaaauucaaaagcuucca

SEQ ID NO: 1225773 - RNA, 19 nt, Human
ugcagacacugcgcgcggc

SEQ ID NO: 1225774 - RNA, 25 nt, Human
ugccucagaauuuucaaaaguaaga

SEQ ID NO: 1225775 - RNA, 20 nt, Human
uggaaagcaauccagcaaaa

SEQ ID NO: 1225776 - RNA, 19 nt, Human
uggcuacccuccccucccc

SEQ ID NO: 1225777 - RNA, 21 nt, Human
uggcuacccuccccuccccaa

SEQ ID NO: 1225778 - RNA, 21 nt, Human
ugugauaaauuauuacauaga

SEQ ID NO: 1225779 - RNA, 21 nt, Human
uguguacagacauacagccug

SEQ ID NO: 1225780 - RNA, 20 nt, Human
uguuacagacacauuuagua

SEQ ID NO: 1225781 - RNA, 23 nt, Human
uguuguuucuuucucaaaguuuu

SEQ ID NO: 1225782 - RNA, 19 nt, Human
uuaauucuaccucagcagu

SEQ ID NO: 1225783 - RNA, 20 nt, Human
uuggcaguaaaacuuuugug

SEQ ID NO: 1225784 - RNA, 22 nt, Human
uuugaccuuuaacaaauguccu

SEQ ID NO: 1225785 - RNA, 21 nt, Human
aacuggucuggaauggggccc

SEQ ID NO: 1225786 - RNA, 23 nt, Human
aagcaauacuuuguaacccuagc

SEQ ID NO: 1225787 - RNA, 24 nt, Human
acauaccacuuucuggguaucucu

SEQ ID NO: 1225788 - RNA, 24 nt, Human
accacuuucuggguaucucuccca

SEQ ID NO: 1225789 - RNA, 23 nt, Human
acugcuauaucccagccgggugc

SEQ ID NO: 1225790 - RNA, 24 nt, Human
acuuuguaacccuagcacuugcua

SEQ ID NO: 1225791 - RNA, 23 nt, Human
agaaaacaccaaauggcggauga

SEQ ID NO: 1225792 - RNA, 23 nt, Human
agaccggagccggccagcgaacc

SEQ ID NO: 1225793 - RNA, 18 nt, Human
agccacggagcucgcgga

SEQ ID NO: 1225794 - RNA, 23 nt, Human
agccauguuaugucaggagaacc

SEQ ID NO: 1225795 - RNA, 24 nt, Human
aggaagccacccuggaagcacaug

SEQ ID NO: 1225796 - RNA, 21 nt, Human
aggagucuucgcuucugggag

SEQ ID NO: 1225797 - RNA, 21 nt, Human
agguuuugaagauuaugccuc

SEQ ID NO: 1225798 - RNA, 23 nt, Human
agugccaggauucuagcaaagga

SEQ ID NO: 1225799 - RNA, 22 nt, Human
aguggcauccgaggccgggguc

SEQ ID NO: 1225800 - RNA, 21 nt, Human
aucauccuggccuagcucucc

SEQ ID NO: 1225801 - RNA, 23 nt, Human
caaaaagcaauacuuuguaaccc

SEQ ID NO: 1225802 - RNA, 23 nt, Human
caagauaacaucccagagcugga

SEQ ID NO: 1225803 - RNA, 22 nt, Human
caagugaauccaaagugggcac

SEQ ID NO: 1225804 - RNA, 18 nt, Human
cacagccaggaagccacc

SEQ ID NO: 1225805 - RNA, 19 nt, Human
cagcaagauaacaucccag

SEQ ID NO: 1225806 - RNA, 24 nt, Human
cagcaagauaacaucccagagcug

SEQ ID NO: 1225807 - RNA, 25 nt, Human
cagcaagauaacaucccagagcugg

SEQ ID NO: 1225808 - RNA, 23 nt, Human
cagccaggaagccacccuggaag

SEQ ID NO: 1225809 - RNA, 22 nt, Human
caggaagccacccuggaagcac

SEQ ID NO: 1225810 - RNA, 20 nt, Human
caggauucuagcaaaggaag

SEQ ID NO: 1225811 - RNA, 18 nt, Human
cauagugucaccaaaagc

SEQ ID NO: 1225812 - RNA, 20 nt, Human
cauugauuuuuuccuggggg

SEQ ID NO: 1225813 - RNA, 23 nt, Human
ccaaagugggcacaagcugagaa

SEQ ID NO: 1225814 - RNA, 23 nt, Human
ccaacaaccauggguuccccaaa

SEQ ID NO: 1225815 - RNA, 19 nt, Human
ccaagugaauccaaagugg

SEQ ID NO: 1225816 - RNA, 24 nt, Human
ccauccacagggccaucauccugg

SEQ ID NO: 1225817 - RNA, 24 nt, Human
cccagaaccugaacaaaccacaag

SEQ ID NO: 1225818 - RNA, 21 nt, Human
cccauagugucaccaaaagcu

SEQ ID NO: 1225819 - RNA, 19 nt, Human
ccccaaaaagcaauacuuu

SEQ ID NO: 1225820 - RNA, 23 nt, Human
ccccaacaaccauggguucccca

SEQ ID NO: 1225821 - RNA, 20 nt, Human
ccccggggcccugggauggg

SEQ ID NO: 1225822 - RNA, 23 nt, Human
ccccuuaugagacauuguggggu

SEQ ID NO: 1225823 - RNA, 22 nt, Human
cccuagcacuugcuaucaugcc

SEQ ID NO: 1225824 - RNA, 20 nt, Human
cccuuaugagacauuguggg

SEQ ID NO: 1225825 - RNA, 21 nt, Human
cgaguccauguuggccucaca

SEQ ID NO: 1225826 - RNA, 24 nt, Human
cggaaucugagaucauugauuuuu

SEQ ID NO: 1225827 - RNA, 24 nt, Human
cggggcccugggauggggaaccau

SEQ ID NO: 1225828 - RNA, 23 nt, Human
cuagcacuugcuaucaugccuaa

SEQ ID NO: 1225829 - RNA, 18 nt, Human
cucaucuuccuuuggcuc

SEQ ID NO: 1225830 - RNA, 18 nt, Human
cugaacaaaccacaaguc

SEQ ID NO: 1225831 - RNA, 21 nt, Human
cugaacaaaccacaagucuga

SEQ ID NO: 1225832 - RNA, 23 nt, Human
cuggcugaaccaccaguguaaaa

SEQ ID NO: 1225833 - RNA, 19 nt, Human
cuggguaucucucccagau

SEQ ID NO: 1225834 - RNA, 19 nt, Human
cugugccucugacauuuug

SEQ ID NO: 1225835 - RNA, 18 nt, Human
gaaauaugcugugccucu

SEQ ID NO: 1225836 - RNA, 20 nt, Human
gaacaagaucggcaagcccc

SEQ ID NO: 1225837 - RNA, 22 nt, Human
gaagccacccuggaagcacaug

SEQ ID NO: 1225838 - RNA, 21 nt, Human
gaagugcugauucuuauuuca

SEQ ID NO: 1225839 - RNA, 21 nt, Human
gagaaaacaccaaauggcgga

SEQ ID NO: 1225840 - RNA, 23 nt, Human
gagccggccagcgaaccagguuc

SEQ ID NO: 1225841 - RNA, 22 nt, Human
gaggcaaggccaaggauaagga

SEQ ID NO: 1225842 - RNA, 18 nt, Human
gaucugucucuucucccu

SEQ ID NO: 1225843 - RNA, 22 nt, Human
gaugcccgucagcaagcugggc

SEQ ID NO: 1225844 - RNA, 21 nt, Human
gcagaagcagaccggagccgg

SEQ ID NO: 1225845 - RNA, 20 nt, Human
gcaguggcauccgaggccgg

SEQ ID NO: 1225846 - RNA, 19 nt, Human
gcauuuauuaagagucagg

SEQ ID NO: 1225847 - RNA, 18 nt, Human
gcccugggauggggaacc

SEQ ID NO: 1225848 - RNA, 18 nt, Human
gccuagcucuccauuguc

SEQ ID NO: 1225849 - RNA, 26 nt, Human
gcgcagccggcauuggguugcggggg

SEQ ID NO: 1225850 - RNA, 21 nt, Human
ggaaucugagaucauugauuu

SEQ ID NO: 1225851 - RNA, 20 nt, Human
ggagcuccuccagccauguu

SEQ ID NO: 1225852 - RNA, 22 nt, Human
ggagcuccuccagccauguuau

SEQ ID NO: 1225853 - RNA, 23 nt, Human
ggagguuucggcaguggcauccg

SEQ ID NO: 1225854 - RNA, 26 nt, Human
ggccuagcucuccauuguccccaacc

SEQ ID NO: 1225855 - RNA, 24 nt, Human
ggcuggggccgaagccacggagcu

SEQ ID NO: 1225856 - RNA, 21 nt, Human
gggcuacaacggucacgucgg

SEQ ID NO: 1225857 - RNA, 27 nt, Human
guaaaacagcaagauaacaucccagag

SEQ ID NO: 1225858 - RNA, 24 nt, Human
uaaaaaaucuaaagcagcuuuaaa

SEQ ID NO: 1225859 - RNA, 23 nt, Human
uaaaacagcaagauaacauccca

SEQ ID NO: 1225860 - RNA, 20 nt, Human
uaacugcuauaucccagcag

SEQ ID NO: 1225861 - RNA, 24 nt, Human
uaagugcuccaaggagguggccac

SEQ ID NO: 1225862 - RNA, 23 nt, Human
uaggccuugggcccacauuuguu

SEQ ID NO: 1225863 - RNA, 22 nt, Human
uaggggaacaagaucggcaagc

SEQ ID NO: 1225864 - RNA, 24 nt, Human
uaucaugccuaaugucuagcaagu

SEQ ID NO: 1225865 - RNA, 23 nt, Human
ucaaguuaaaaaaucuaaagcag

SEQ ID NO: 1225866 - RNA, 18 nt, Human
ucaauagcccuucccaua

SEQ ID NO: 1225867 - RNA, 23 nt, Human
ucagcucucaucuuccuuuggcu

SEQ ID NO: 1225868 - RNA, 21 nt, Human
ucaggagucuucgcuucuggg

SEQ ID NO: 1225869 - RNA, 18 nt, Human
ucauccuggccuagcucu

SEQ ID NO: 1225870 - RNA, 24 nt, Human
uccaaagugggcacaagcugagaa

SEQ ID NO: 1225871 - RNA, 23 nt, Human
ucccagaaccugaacaaaccaca

SEQ ID NO: 1225872 - RNA, 18 nt, Human
ucccagagcuggagcucc

SEQ ID NO: 1225873 - RNA, 20 nt, Human
ucccggaggccccggggccc

SEQ ID NO: 1225874 - RNA, 22 nt, Human
ucccggaggccccggggcccug

SEQ ID NO: 1225875 - RNA, 22 nt, Human
ucccugcccaucacggaaucug

SEQ ID NO: 1225876 - RNA, 23 nt, Human
ucccuggaggagaucugucucuu

SEQ ID NO: 1225877 - RNA, 24 nt, Human
uccugagaagauacucaauagccc

SEQ ID NO: 1225878 - RNA, 24 nt, Human
uccuuucagcucucaucuuccuuu

SEQ ID NO: 1225879 - RNA, 19 nt, Human
ucgaaauaugcugugccuc

SEQ ID NO: 1225880 - RNA, 18 nt, Human
ucucucgaggccuagguu

SEQ ID NO: 1225881 - RNA, 19 nt, Human
ucugucucuucucccugcc

SEQ ID NO: 1225882 - RNA, 19 nt, Human
ugagaucauugauuuuuuu

SEQ ID NO: 1225883 - RNA, 20 nt, Human
ugaucuucugguuucucccc

SEQ ID NO: 1225884 - RNA, 20 nt, Human
ugccguggaccaggcugggg

SEQ ID NO: 1225885 - RNA, 21 nt, Human
ugccuggucaagcacaugaag

SEQ ID NO: 1225886 - RNA, 25 nt, Human
uggaauggggcccaggcaucaguau

SEQ ID NO: 1225887 - RNA, 22 nt, Human
uggauggauggcuccagcauuu

SEQ ID NO: 1225888 - RNA, 18 nt, Human
uggcauccgaggccgggg

SEQ ID NO: 1225889 - RNA, 20 nt, Human
uggccuagcucuccauuguc

SEQ ID NO: 1225890 - RNA, 21 nt, Human
ugggauggggaaccauggugg

SEQ ID NO: 1225891 - RNA, 20 nt, Human
ugguugaucagcagaauccc

SEQ ID NO: 1225892 - RNA, 21 nt, Human
uguaaaaugagucuaguuuga

SEQ ID NO: 1225893 - RNA, 18 nt, Human
ugucucuucucccugccc

SEQ ID NO: 1225894 - RNA, 24 nt, Human
uuccaagugaauccaaagugggca

SEQ ID NO: 1225895 - RNA, 22 nt, Human
uuccguggagguuucggcagug

SEQ ID NO: 1225896 - RNA, 24 nt, Human
uucucccugcccaucacggaaucu

SEQ ID NO: 1225897 - RNA, 19 nt, Human
uuuaaaaaaugaauauauc

SEQ ID NO: 1225898 - RNA, 20 nt, Human
aaaacaauuuggaaucuggg

SEQ ID NO: 1225899 - RNA, 18 nt, Human
aagaaaccuggccauuag

SEQ ID NO: 1225900 - RNA, 21 nt, Human
aagcccauuuuucuaagaucc

SEQ ID NO: 1225901 - RNA, 22 nt, Human
aauuucuugcuuucugcaccuc

SEQ ID NO: 1225902 - RNA, 23 nt, Human
agacacuaauggagcuccaagcc

SEQ ID NO: 1225903 - RNA, 18 nt, Human
agguguuugugucuuauc

SEQ ID NO: 1225904 - RNA, 21 nt, Human
cagagcaauuucuugcuuucu

SEQ ID NO: 1225905 - RNA, 23 nt, Human
ccaagaaaccuggccauuagcuc

SEQ ID NO: 1225906 - RNA, 20 nt, Human
cccauuuuucuaagauccag

SEQ ID NO: 1225907 - RNA, 21 nt, Human
gcagacacuaauggagcucca

SEQ ID NO: 1225908 - RNA, 22 nt, Human
ucccaagaaaccuggccauuag

SEQ ID NO: 1225909 - RNA, 19 nt, Human
ucuuaucccuggggaugaa

SEQ ID NO: 1225910 - RNA, 24 nt, Human
ugccuugucuccuuucaugaguca

SEQ ID NO: 1225911 - RNA, 20 nt, Human
uggggaugaaaaaagauguu

SEQ ID NO: 1225912 - RNA, 21 nt, Human
uggggaugaaaaaagauguuc

SEQ ID NO: 1225913 - RNA, 25 nt, Human
uguacucccaagaaaccuggccauu

SEQ ID NO: 1225914 - RNA, 23 nt, Human
uguucugacaccaauaacucuaa

SEQ ID NO: 1225915 - RNA, 24 nt, Human
aaaaaaagagacauauuaaagugu

SEQ ID NO: 1225916 - RNA, 20 nt, Human
aaaaaagagacauauuaaag

SEQ ID NO: 1225917 - RNA, 21 nt, Human
aaaaaagagacauauuaaagu

SEQ ID NO: 1225918 - RNA, 23 nt, Human
aaacuagaaaggagcaggaauga

SEQ ID NO: 1225919 - RNA, 18 nt, Human
aaagagacauauuaaagu

SEQ ID NO: 1225920 - RNA, 18 nt, Human
aaagagcccaccucaugc

SEQ ID NO: 1225921 - RNA, 23 nt, Human
aaagagcccaccucaugcuaagc

SEQ ID NO: 1225922 - RNA, 19 nt, Human
aagaagaaaaugagcaaga

SEQ ID NO: 1225923 - RNA, 22 nt, Human
aagagcccaccucaugcuaagc

SEQ ID NO: 1225924 - RNA, 20 nt, Human
aaugguguuaaagagcccac

SEQ ID NO: 1225925 - RNA, 19 nt, Human
acaagcauucucucuuucc

SEQ ID NO: 1225926 - RNA, 23 nt, Human
agaagaaaaugagcaagacagaa

SEQ ID NO: 1225927 - RNA, 23 nt, Human
agacagaaaaggauauuuuucaa

SEQ ID NO: 1225928 - RNA, 19 nt, Human
aggcaaaauccucaccuuc

SEQ ID NO: 1225929 - RNA, 21 nt, Human
augaaauacagagcuguccug

SEQ ID NO: 1225930 - RNA, 25 nt, Human
caaggcaaaauccucaccuuccucu

SEQ ID NO: 1225931 - RNA, 23 nt, Human
cuaggaaaggugugauucuuuug

SEQ ID NO: 1225932 - RNA, 18 nt, Human
cucagaaugguguuaaag

SEQ ID NO: 1225933 - RNA, 19 nt, Human
cucuaaaucaacaguucuc

SEQ ID NO: 1225934 - RNA, 25 nt, Human
uaacaaauacaaaagucuuaauuuu

SEQ ID NO: 1225935 - RNA, 27 nt, Human
uagaaaggagcaggaaugaaagucuua

SEQ ID NO: 1225936 - RNA, 21 nt, Human
uagcacaagcauucucucuuu

SEQ ID NO: 1225937 - RNA, 19 nt, Human
ucaaggguguugaaggcug

SEQ ID NO: 1225938 - RNA, 24 nt, Human
ucccuaaaaaaagagacauauuaa

SEQ ID NO: 1225939 - RNA, 22 nt, Human
ucucuucuccaaggcaaaaucc

SEQ ID NO: 1225940 - RNA, 22 nt, Human
ugacuguguaggucuuggagac

SEQ ID NO: 1225941 - RNA, 18 nt, Human
ugagcaagacagaaaagg

SEQ ID NO: 1225942 - RNA, 19 nt, Human
ugagcaagacagaaaagga

SEQ ID NO: 1225943 - RNA, 24 nt, Human
ugcaaaucgcuuuaagagaugaaa

SEQ ID NO: 1225944 - RNA, 20 nt, Human
uguagcacaagcauucucuc

SEQ ID NO: 1225945 - RNA, 22 nt, Human
ugugcuuuuucccuaaaaaaag

SEQ ID NO: 1225946 - RNA, 22 nt, Human
uguguaggucuuggagacgauu

SEQ ID NO: 1225947 - RNA, 25 nt, Human
uguuaaagagcccaccucaugcuaa

SEQ ID NO: 1225948 - RNA, 25 nt, Human
uguuuuuucucuccucaaguccuuu

SEQ ID NO: 1225949 - RNA, 21 nt, Human
gauggaugggaaucugcuugg

SEQ ID NO: 1225950 - RNA, 21 nt, Human
gggcagagaccuccuuguucu

SEQ ID NO: 1225951 - RNA, 23 nt, Human
ucucuguuuugcugauuccuuug

SEQ ID NO: 1225952 - RNA, 22 nt, Human
uuggcauuagcagaagauuuca

SEQ ID NO: 1225953 - RNA, 24 nt, Human
uuucuugaucugauaucucuguuu

SEQ ID NO: 1225954 - RNA, 23 nt, Human
uuuggcauuagcagaagauuuca

SEQ ID NO: 1225955 - RNA, 23 nt, Human
uuuucuugaucugauaucucugu

SEQ ID NO: 1225956 - RNA, 21 nt, Human
aaugaaauuuaaaaauggcua

SEQ ID NO: 1225957 - RNA, 21 nt, Human
uucaccaucaggaacaaauau

SEQ ID NO: 1225958 - RNA, 22 nt, Human
aaaaacaaaaaaagaagaggca

SEQ ID NO: 1225959 - RNA, 23 nt, Human
aaaaacaaaaacaaaaacaaaaa

SEQ ID NO: 1225960 - RNA, 23 nt, Human
aaaacaaaaacaaaaaaagaaga

SEQ ID NO: 1225961 - RNA, 22 nt, Human
aaaacaaaaacaaaaacaaaaa

SEQ ID NO: 1225962 - RNA, 24 nt, Human
aaaacaaaaacaaaaacaaaaaaa

SEQ ID NO: 1225963 - RNA, 21 nt, Human
aaaaggaaaaggagagagaac

SEQ ID NO: 1225964 - RNA, 25 nt, Human
aaacaaaaaaagaagaggcagcugg

SEQ ID NO: 1225965 - RNA, 22 nt, Human
aaacaaaaacaaaaaaagaaga

SEQ ID NO: 1225966 - RNA, 28 nt, Human
aaacaaaaacaaaaacaaaaaaagaaga

SEQ ID NO: 1225967 - RNA, 22 nt, Human
aaaggagagagaacaaaacgga

SEQ ID NO: 1225968 - RNA, 24 nt, Human
aacaaaaacaaaaacaaaaaaaga

SEQ ID NO: 1225969 - RNA, 23 nt, Human
aacagaacaccccagaagcacca

SEQ ID NO: 1225970 - RNA, 20 nt, Human
aacauggugaaacuccgucu

SEQ ID NO: 1225971 - RNA, 21 nt, Human
aacauggugaaacuccgucuc

SEQ ID NO: 1225972 - RNA, 19 nt, Human
aagagacucugucucaaaa

SEQ ID NO: 1225973 - RNA, 22 nt, Human
aagagggaacuaggccaggcgc

SEQ ID NO: 1225974 - RNA, 22 nt, Human
aagcacagaauaaagagauccu

SEQ ID NO: 1225975 - RNA, 21 nt, Human
aagcacccagguaaccggcaa

SEQ ID NO: 1225976 - RNA, 22 nt, Human
aaggaagagaggaggaaaagga

SEQ ID NO: 1225977 - RNA, 24 nt, Human
aaucgcuugaacccaggaggcaga

SEQ ID NO: 1225978 - RNA, 23 nt, Human
aauugacagaaaacuagaaggga

SEQ ID NO: 1225979 - RNA, 19 nt, Human
acaaaaacaaaaaaagaag

SEQ ID NO: 1225980 - RNA, 20 nt, Human
acaaaaacaaaaaaagaaga

SEQ ID NO: 1225981 - RNA, 18 nt, Human
acagaaaacuagaaggga

SEQ ID NO: 1225982 - RNA, 24 nt, Human
acagaaagagacucugucucaaaa

SEQ ID NO: 1225983 - RNA, 19 nt, Human
acauggugaaacuccgucu

SEQ ID NO: 1225984 - RNA, 24 nt, Human
acccaggaggcagagguugcagug

SEQ ID NO: 1225985 - RNA, 20 nt, Human
acuaucaaaggaucugaggu

SEQ ID NO: 1225986 - RNA, 24 nt, Human
acuccgucucuacuaaaaauacaa

SEQ ID NO: 1225987 - RNA, 18 nt, Human
acugcacuccagccugga

SEQ ID NO: 1225988 - RNA, 19 nt, Human
acugcacuccagccuggac

SEQ ID NO: 1225989 - RNA, 22 nt, Human
acugcacuccagccuggacgac

SEQ ID NO: 1225990 - RNA, 24 nt, Human
acugcacuccagccuggacgacag

SEQ ID NO: 1225991 - RNA, 18 nt, Human
agaaagagacucugucuc

SEQ ID NO: 1225992 - RNA, 22 nt, Human
agaaagagacucugucucaaaa

SEQ ID NO: 1225993 - RNA, 18 nt, Human
agaacaaaacggaggcug

SEQ ID NO: 1225994 - RNA, 19 nt, Human
agagaacaaaacggaggcu

SEQ ID NO: 1225995 - RNA, 22 nt, Human
agagaacaaaacggaggcugaa

SEQ ID NO: 1225996 - RNA, 19 nt, Human
agaggaggaaaaggaaaag

SEQ ID NO: 1225997 - RNA, 20 nt, Human
agaggaggaaaaggaaaagg

SEQ ID NO: 1225998 - RNA, 22 nt, Human
agagguugcagugagccaagau

SEQ ID NO: 1225999 - RNA, 24 nt, Human
agagguugcagugagccaagauug

SEQ ID NO: 1226000 - RNA, 19 nt, Human
agaguguuuuugugaagau

SEQ ID NO: 1226001 - RNA, 24 nt, Human
agccuggacgacagaaagagacuc

SEQ ID NO: 1226002 - RNA, 24 nt, Human
agcguggccaacauggugaaacuc

SEQ ID NO: 1226003 - RNA, 23 nt, Human
agcuccaagaauguucacaaacg

SEQ ID NO: 1226004 - RNA, 22 nt, Human
aggaaaaggagagagaacaaaa

SEQ ID NO: 1226005 - RNA, 21 nt, Human
aggaagagaggaggaaaagga

SEQ ID NO: 1226006 - RNA, 24 nt, Human
aggcagagguugcagugagccaag

SEQ ID NO: 1226007 - RNA, 21 nt, Human
aggcagcuggauucaggauca

SEQ ID NO: 1226008 - RNA, 21 nt, Human
aggccaaggcgggcggaucac

SEQ ID NO: 1226009 - RNA, 22 nt, Human
aggccaggcgcgguggcucaug

SEQ ID NO: 1226010 - RNA, 24 nt, Human
aggcgcgguggcucaugccuguaa

SEQ ID NO: 1226011 - RNA, 21 nt, Human
aggcgggcggaucacuugagg

SEQ ID NO: 1226012 - RNA, 23 nt, Human
aggcgggcggaucacuugagguc

SEQ ID NO: 1226013 - RNA, 24 nt, Human
agguugaggcacaagaaucgcuug

SEQ ID NO: 1226014 - RNA, 19 nt, Human
augccuguaaucccagcac

SEQ ID NO: 1226015 - RNA, 24 nt, Human
auugcgcuacugcacuccagccug

SEQ ID NO: 1226016 - RNA, 24 nt, Human
caaaaacaaaaaaagaagaggcag

SEQ ID NO: 1226017 - RNA, 24 nt, Human
caacauggugaaacuccgucucua

SEQ ID NO: 1226018 - RNA, 24 nt, Human
caagaccagcguggccaacauggu

SEQ ID NO: 1226019 - RNA, 24 nt, Human
caagauugcgcuacugcacuccag

SEQ ID NO: 1226020 - RNA, 21 nt, Human
caaggcgggcggaucacuuga

SEQ ID NO: 1226021 - RNA, 24 nt, Human
caaggcgggcggaucacuugaggu

SEQ ID NO: 1226022 - RNA, 21 nt, Human
cacacagaaaagugcccagau

SEQ ID NO: 1226023 - RNA, 22 nt, Human
cacagcucaugugcagaaaucu

SEQ ID NO: 1226024 - RNA, 21 nt, Human
caccccagaagcaccaccuca

SEQ ID NO: 1226025 - RNA, 20 nt, Human
cacuccaaguugggggugga

SEQ ID NO: 1226026 - RNA, 21 nt, Human
cacuccaaguuggggguggag

SEQ ID NO: 1226027 - RNA, 18 nt, Human
cagaacaccccagaagca

SEQ ID NO: 1226028 - RNA, 20 nt, Human
cagaacaccccagaagcacc

SEQ ID NO: 1226029 - RNA, 21 nt, Human
cagaacaccccagaagcacca

SEQ ID NO: 1226030 - RNA, 23 nt, Human
cagaacaccccagaagcaccacc

SEQ ID NO: 1226031 - RNA, 21 nt, Human
cagaagcaccaccucaugccc

SEQ ID NO: 1226032 - RNA, 19 nt, Human
cagaauaaagagauccugg

SEQ ID NO: 1226033 - RNA, 22 nt, Human
cagcacuuugggaggccaaggc

SEQ ID NO: 1226034 - RNA, 24 nt, Human
cagcacuuugggaggccaaggcgg

SEQ ID NO: 1226035 - RNA, 22 nt, Human
cagccuggacgacagaaagaga

SEQ ID NO: 1226036 - RNA, 18 nt, Human
cauacacacagaaaagug

SEQ ID NO: 1226037 - RNA, 23 nt, Human
caucgugugaauauacccuaaug

SEQ ID NO: 1226038 - RNA, 20 nt, Human
caugccuguaaucccagcac

SEQ ID NO: 1226039 - RNA, 24 nt, Human
caugccuguaaucccagcacuuug

SEQ ID NO: 1226040 - RNA, 21 nt, Human
cccagaucaaaaguguacagc

SEQ ID NO: 1226041 - RNA, 23 nt, Human
ccccagaagcaccaccucaugcc

SEQ ID NO: 1226042 - RNA, 19 nt, Human
ccugcaaucccagcuccuc

SEQ ID NO: 1226043 - RNA, 20 nt, Human
ccugcaaucccagcuccucg

SEQ ID NO: 1226044 - RNA, 22 nt, Human
cgacagaaagagacucugucuc

SEQ ID NO: 1226045 - RNA, 25 nt, Human
cgccugcaaucccagcuccucguga

SEQ ID NO: 1226046 - RNA, 24 nt, Human
cggagacagcucagcgaguccaag

SEQ ID NO: 1226047 - RNA, 23 nt, Human
cggaucacuugaggucugggcuu

SEQ ID NO: 1226048 - RNA, 18 nt, Human
cgggcggaucacuugagg

SEQ ID NO: 1226049 - RNA, 24 nt, Human
cguggccaacauggugaaacuccg

SEQ ID NO: 1226050 - RNA, 19 nt, Human
cuacugcacuccagccugg

SEQ ID NO: 1226051 - RNA, 21 nt, Human
cuacugcacuccagccuggac

SEQ ID NO: 1226052 - RNA, 22 nt, Human
cucaaaaacaaaaacaaaaaca

SEQ ID NO: 1226053 - RNA, 25 nt, Human
cucaaagaauugacagaaaacuaga

SEQ ID NO: 1226054 - RNA, 23 nt, Human
cucaugccuguaaucccagcacu

SEQ ID NO: 1226055 - RNA, 24 nt, Human
cucaugccuguaaucccagcacuu

SEQ ID NO: 1226056 - RNA, 23 nt, Human
cuccucgugagguugaggcacaa

SEQ ID NO: 1226057 - RNA, 22 nt, Human
cugauaaugaaacuaagaauga

SEQ ID NO: 1226058 - RNA, 23 nt, Human
cugucucaaaaacaaaaacaaaa

SEQ ID NO: 1226059 - RNA, 27 nt, Human
cugucucaaaaacaaaaacaaaaacaa

SEQ ID NO: 1226060 - RNA, 19 nt, Human
cuucaagaccagcguggcc

SEQ ID NO: 1226061 - RNA, 21 nt, Human
cuuuaugacuugugcuucgcu

SEQ ID NO: 1226062 - RNA, 18 nt, Human
gaaagcagcauuuuucug

SEQ ID NO: 1226063 - RNA, 21 nt, Human
gaaagcagcauuuuucugacc

SEQ ID NO: 1226064 - RNA, 18 nt, Human
gaagagaggaggaaaagg

SEQ ID NO: 1226065 - RNA, 24 nt, Human
gacagaaagagacucugucucaaa

SEQ ID NO: 1226066 - RNA, 18 nt, Human
gagguugcagugagccaa

SEQ ID NO: 1226067 - RNA, 23 nt, Human
gaucacuugaggucugggcuuca

SEQ ID NO: 1226068 - RNA, 24 nt, Human
gaugcucucuguacggccccgcuu

SEQ ID NO: 1226069 - RNA, 24 nt, Human
gccaacauggugaaacuccgucuc

SEQ ID NO: 1226070 - RNA, 24 nt, Human
gcugaaucuggagggacggggcau

SEQ ID NO: 1226071 - RNA, 20 nt, Human
gcugauaaugaaacuaagaa

SEQ ID NO: 1226072 - RNA, 22 nt, Human
ggaagguaaggaagagaggagg

SEQ ID NO: 1226073 - RNA, 22 nt, Human
ggaggcagagguugcagugagc

SEQ ID NO: 1226074 - RNA, 25 nt, Human
ggcugaaucuggagggacggggcau

SEQ ID NO: 1226075 - RNA, 22 nt, Human
gggcgccugcaaucccagcucc

SEQ ID NO: 1226076 - RNA, 23 nt, Human
gggugugguggcgggcgccugca

SEQ ID NO: 1226077 - RNA, 23 nt, Human
gguggcucaugccuguaauccca

SEQ ID NO: 1226078 - RNA, 24 nt, Human
gguggcucaugccuguaaucccag

SEQ ID NO: 1226079 - RNA, 21 nt, Human
ggugugguggcgggcgccugc

SEQ ID NO: 1226080 - RNA, 21 nt, Human
gugaaacuccgucucuacuaa

SEQ ID NO: 1226081 - RNA, 18 nt, Human
gugaagcacagaauaaag

SEQ ID NO: 1226082 - RNA, 19 nt, Human
guggaagaggaaagcagca

SEQ ID NO: 1226083 - RNA, 19 nt, Human
guggccaacauggugaaac

SEQ ID NO: 1226084 - RNA, 22 nt, Human
uaacauacacacagaaaagugc

SEQ ID NO: 1226085 - RNA, 21 nt, Human
uacugcacuccagccuggacg

SEQ ID NO: 1226086 - RNA, 22 nt, Human
uacugcacuccagccuggacga

SEQ ID NO: 1226087 - RNA, 24 nt, Human
uacugcacuccagccuggacgaca

SEQ ID NO: 1226088 - RNA, 23 nt, Human
uagaagggaggucuguaggaaga

SEQ ID NO: 1226089 - RNA, 18 nt, Human
uaggaagauagguggagg

SEQ ID NO: 1226090 - RNA, 19 nt, Human
uaggaagauagguggaggc

SEQ ID NO: 1226091 - RNA, 25 nt, Human
uaggaagggugacccguccccaaau

SEQ ID NO: 1226092 - RNA, 21 nt, Human
ucaaaaacaaaaacaaaaaca

SEQ ID NO: 1226093 - RNA, 19 nt, Human
uccaaggaguggagcagaa

SEQ ID NO: 1226094 - RNA, 24 nt, Human
uccagccuggacgacagaaagaga

SEQ ID NO: 1226095 - RNA, 19 nt, Human
uccuauggugcauuuuugc

SEQ ID NO: 1226096 - RNA, 21 nt, Human
ucgcuucaucggguuaaugau

SEQ ID NO: 1226097 - RNA, 23 nt, Human
ucucacaggggaagguaaggaag

SEQ ID NO: 1226098 - RNA, 21 nt, Human
ucucuacuaaaaauacaaaaa

SEQ ID NO: 1226099 - RNA, 23 nt, Human
ugaaguauaacauacacacagaa

SEQ ID NO: 1226100 - RNA, 23 nt, Human
ugacauucccaggacgcugccau

SEQ ID NO: 1226101 - RNA, 22 nt, Human
ugagccaagauugcgcuacugc

SEQ ID NO: 1226102 - RNA, 24 nt, Human
ugaggcacaagaaucgcuugaacc

SEQ ID NO: 1226103 - RNA, 23 nt, Human
ugccuguaaucccagcacuuugg

SEQ ID NO: 1226104 - RNA, 24 nt, Human
ugccuguaaucccagcacuuuggg

SEQ ID NO: 1226105 - RNA, 21 nt, Human
uggagaguguuuuugugaaga

SEQ ID NO: 1226106 - RNA, 25 nt, Human
uggaugaauuuugcuggguuuuaaa

SEQ ID NO: 1226107 - RNA, 21 nt, Human
uggccaacauggugaaacucc

SEQ ID NO: 1226108 - RNA, 24 nt, Human
uggccaacauggugaaacuccguc

SEQ ID NO: 1226109 - RNA, 19 nt, Human
uggcucaaagaauugacag

SEQ ID NO: 1226110 - RNA, 24 nt, Human
uggcucaugccuguaaucccagca

SEQ ID NO: 1226111 - RNA, 24 nt, Human
ugggaggccaaggcgggcggauca

SEQ ID NO: 1226112 - RNA, 21 nt, Human
uggugaauacacuccaaguug

SEQ ID NO: 1226113 - RNA, 18 nt, Human
ugguggaagaggaaagca

SEQ ID NO: 1226114 - RNA, 22 nt, Human
ugugaauauacccuaaugugcu

SEQ ID NO: 1226115 - RNA, 19 nt, Human
ugugguggcgggcgccugc

SEQ ID NO: 1226116 - RNA, 18 nt, Human
uuagccgggugugguggc

SEQ ID NO: 1226117 - RNA, 22 nt, Human
uuagccgggugugguggcgggc

SEQ ID NO: 1226118 - RNA, 24 nt, Human
uuagccgggugugguggcgggcgc

SEQ ID NO: 1226119 - RNA, 18 nt, Human
uucacaaacggaaagcac

SEQ ID NO: 1226120 - RNA, 22 nt, Human
uucacaaacggaaagcacccag

SEQ ID NO: 1226121 - RNA, 18 nt, Human
uucaggaucacucuagga

SEQ ID NO: 1226122 - RNA, 27 nt, Human
uugagcaucuuaacaacacugguauua

SEQ ID NO: 1226123 - RNA, 22 nt, Human
uugcagugagccaagauugcgc

SEQ ID NO: 1226124 - RNA, 23 nt, Human
uugcgcuacugcacuccagccug

SEQ ID NO: 1226125 - RNA, 22 nt, Human
gccuguggccaccccggagaug

SEQ ID NO: 1226126 - RNA, 24 nt, Human
ugauuugggccaauuacaugacug

SEQ ID NO: 1226127 - RNA, 21 nt, Human
uggccaccccggagaugacac

SEQ ID NO: 1226128 - RNA, 25 nt, Human
uugccuguggccaccccggagauga

SEQ ID NO: 1226129 - RNA, 22 nt, Human
agcccaacccucacccggaaac

SEQ ID NO: 1226130 - RNA, 18 nt, Human
cccaacccucacccggaa

SEQ ID NO: 1226131 - RNA, 24 nt, Human
cggaguuuuaaugacacgggcugg

SEQ ID NO: 1226132 - RNA, 22 nt, Human
ucccacaugguaccaaggagcc

SEQ ID NO: 1226133 - RNA, 22 nt, Human
ugacacgggcuggaacugggaa

SEQ ID NO: 1226134 - RNA, 21 nt, Human
aaacaaacuugagaaauccau

SEQ ID NO: 1226135 - RNA, 20 nt, Human
aacccuacaugugcucugcu

SEQ ID NO: 1226136 - RNA, 22 nt, Human
accuuuuguccaggcuuuaaau

SEQ ID NO: 1226137 - RNA, 24 nt, Human
aggaacugacucauccucaugcug

SEQ ID NO: 1226138 - RNA, 19 nt, Human
auacccaugauaaugggaa

SEQ ID NO: 1226139 - RNA, 19 nt, Human
augauaaugggaaagaaug

SEQ ID NO: 1226140 - RNA, 22 nt, Human
auuaccacuuuuguucaguaua

SEQ ID NO: 1226141 - RNA, 23 nt, Human
cacuuuuguucaguauagcuuua

SEQ ID NO: 1226142 - RNA, 21 nt, Human
gcucugcugaagagaaaccua

SEQ ID NO: 1226143 - RNA, 19 nt, Human
guuucuuuguuggagggag

SEQ ID NO: 1226144 - RNA, 18 nt, Human
ucagaaaagauacccaug

SEQ ID NO: 1226145 - RNA, 20 nt, Human
ucaggaacugacucauccuc

SEQ ID NO: 1226146 - RNA, 21 nt, Human
ucagugcuguauauuucuuuc

SEQ ID NO: 1226147 - RNA, 23 nt, Human
ugaagagaaaccuaaauaaauca

SEQ ID NO: 1226148 - RNA, 23 nt, Human
ugcauuguugcuggugaagaccu

SEQ ID NO: 1226149 - RNA, 22 nt, Human
ugucaugguccaccuuuugucc

SEQ ID NO: 1226150 - RNA, 21 nt, Human
uucugcauuguugcuggugaa

SEQ ID NO: 1226151 - RNA, 22 nt, Human
uugccucuaugccaccauuuug

SEQ ID NO: 1226152 - RNA, 24 nt, Human
uugggaucugugguaacucuucuc

SEQ ID NO: 1226153 - RNA, 21 nt, Human
uuucuguuucuuuguuggagg

SEQ ID NO: 1226154 - RNA, 23 nt, Human
uuucuuucuguuucuuuguugga

SEQ ID NO: 1226155 - RNA, 19 nt, Human
uuuggaacaggaaacuccu

SEQ ID NO: 1226156 - RNA, 20 nt, Human
uuuggaacaggaaacuccuu

SEQ ID NO: 1226157 - RNA, 20 nt, Human
aaccccuugcuuuuucucau

SEQ ID NO: 1226158 - RNA, 20 nt, Human
aagagggauggugaugaggu

SEQ ID NO: 1226159 - RNA, 21 nt, Human
acccggccccagccuagcccu

SEQ ID NO: 1226160 - RNA, 21 nt, Human
accgcgaacccggccccagcc

SEQ ID NO: 1226161 - RNA, 24 nt, Human
agaauucaggggccaccuggacaa

SEQ ID NO: 1226162 - RNA, 21 nt, Human
agaguggugaggaggggcugg

SEQ ID NO: 1226163 - RNA, 19 nt, Human
agggaggaaaggaauggug

SEQ ID NO: 1226164 - RNA, 23 nt, Human
augguggugggggauggggcccc

SEQ ID NO: 1226165 - RNA, 22 nt, Human
caacaggcucugaccuccagac

SEQ ID NO: 1226166 - RNA, 21 nt, Human
caccgcgaacccggccccagc

SEQ ID NO: 1226167 - RNA, 21 nt, Human
ccaccuggacaaaccccuugc

SEQ ID NO: 1226168 - RNA, 25 nt, Human
ccaggcccaucccuugguccccugg

SEQ ID NO: 1226169 - RNA, 18 nt, Human
ccagggggaagggaggaa

SEQ ID NO: 1226170 - RNA, 21 nt, Human
cccaccccuaggcauccggaa

SEQ ID NO: 1226171 - RNA, 19 nt, Human
cccagccuagcccugaccu

SEQ ID NO: 1226172 - RNA, 24 nt, Human
cccagccuagcccugaccuguugc

SEQ ID NO: 1226173 - RNA, 22 nt, Human
cccaucccuugcgcagaauuca

SEQ ID NO: 1226174 - RNA, 20 nt, Human
ccccagccuagcccugaccu

SEQ ID NO: 1226175 - RNA, 23 nt, Human
cccggccccagccuagcccugac

SEQ ID NO: 1226176 - RNA, 23 nt, Human
cccgucccucccugccacccucc

SEQ ID NO: 1226177 - RNA, 22 nt, Human
cccuaggcauccggaaaagccc

SEQ ID NO: 1226178 - RNA, 19 nt, Human
cccucccugccacccuccc

SEQ ID NO: 1226179 - RNA, 20 nt, Human
cccucccugccacccuccca

SEQ ID NO: 1226180 - RNA, 18 nt, Human
ccgccgcggccucggccc

SEQ ID NO: 1226181 - RNA, 26 nt, Human
ccgccgcggccucggcccggcuccuc

SEQ ID NO: 1226182 - RNA, 24 nt, Human
ccggccccagccuagcccugaccu

SEQ ID NO: 1226183 - RNA, 24 nt, Human
ccucccugccacccucccaguacc

SEQ ID NO: 1226184 - RNA, 22 nt, Human
cuagcccugaccuguugcgcgc

SEQ ID NO: 1226185 - RNA, 19 nt, Human
cuccagccguagccaccgc

SEQ ID NO: 1226186 - RNA, 22 nt, Human
cuccccucuaccccugcuuucc

SEQ ID NO: 1226187 - RNA, 23 nt, Human
cucuccuccacugcaaggggaag

SEQ ID NO: 1226188 - RNA, 22 nt, Human
cuucauucaugcuagaaagagg

SEQ ID NO: 1226189 - RNA, 22 nt, Human
gagaguagagucucuaccugcc

SEQ ID NO: 1226190 - RNA, 23 nt, Human
gcccaccccuaggcauccggaaa

SEQ ID NO: 1226191 - RNA, 18 nt, Human
ggaaugguggugggggau

SEQ ID NO: 1226192 - RNA, 19 nt, Human
ggauggggccaagaagagg

SEQ ID NO: 1226193 - RNA, 20 nt, Human
gggaagaguggugaggaggg

SEQ ID NO: 1226194 - RNA, 19 nt, Human
gggacagagaguagagucu

SEQ ID NO: 1226195 - RNA, 22 nt, Human
gggcuccccucuaccccugcuu

SEQ ID NO: 1226196 - RNA, 21 nt, Human
ggggauggggccaagaagagg

SEQ ID NO: 1226197 - RNA, 18 nt, Human
gggggauggggccaagaa

SEQ ID NO: 1226198 - RNA, 19 nt, Human
uaaaaaauaguauccacuc

SEQ ID NO: 1226199 - RNA, 21 nt, Human
uaccugccagggggaagggag

SEQ ID NO: 1226200 - RNA, 18 nt, Human
uaggcauccggaaaagcc

SEQ ID NO: 1226201 - RNA, 22 nt, Human
uccacucuggcucucuccucca

SEQ ID NO: 1226202 - RNA, 21 nt, Human
uccacugcaaggggaagagug

SEQ ID NO: 1226203 - RNA, 19 nt, Human
uccagacagacgguucaaa

SEQ ID NO: 1226204 - RNA, 24 nt, Human
uccagggcuccccucuaccccugc

SEQ ID NO: 1226205 - RNA, 19 nt, Human
ucccucccugccacccucc

SEQ ID NO: 1226206 - RNA, 19 nt, Human
ucccuugcgcagaauucag

SEQ ID NO: 1226207 - RNA, 23 nt, Human
uccuuccccgucccucccugcca

SEQ ID NO: 1226208 - RNA, 22 nt, Human
ucggcccggcuccuccagccgu

SEQ ID NO: 1226209 - RNA, 21 nt, Human
ugaccuccagacagacgguuc

SEQ ID NO: 1226210 - RNA, 22 nt, Human
ugaggaggggcuggcacugccc

SEQ ID NO: 1226211 - RNA, 19 nt, Human
ugccagggggaagggagga

SEQ ID NO: 1226212 - RNA, 20 nt, Human
ugcgcagaauucaggggcca

SEQ ID NO: 1226213 - RNA, 22 nt, Human
uggggacagagaguagagucuc

SEQ ID NO: 1226214 - RNA, 22 nt, Human
uggugggggauggggccaagaa

SEQ ID NO: 1226215 - RNA, 19 nt, Human
ugguggugggggauggggc

SEQ ID NO: 1226216 - RNA, 20 nt, Human
ugguggugggggauggggcc

SEQ ID NO: 1226217 - RNA, 21 nt, Human
ugguggugggggauggggcca

SEQ ID NO: 1226218 - RNA, 20 nt, Human
uugcgcgcgggggccgccgg

SEQ ID NO: 1226219 - RNA, 21 nt, Human
uuggcauccuucauucaugcu

SEQ ID NO: 1226220 - RNA, 19 nt, Human
aaaaaccugaaacgucaac

SEQ ID NO: 1226221 - RNA, 20 nt, Human
aaacagcccugauggagccc

SEQ ID NO: 1226222 - RNA, 22 nt, Human
aaacagcccugauggagcccca

SEQ ID NO: 1226223 - RNA, 21 nt, Human
aagaaaagaaauguuuaaugu

SEQ ID NO: 1226224 - RNA, 21 nt, Human
aagaagaacagaaggcggaga

SEQ ID NO: 1226225 - RNA, 18 nt, Human
aaguaucucuuuuaaucc

SEQ ID NO: 1226226 - RNA, 18 nt, Human
acagggacccaaaagcuu

SEQ ID NO: 1226227 - RNA, 22 nt, Human
acccagguauccaaacagcccu

SEQ ID NO: 1226228 - RNA, 20 nt, Human
accuggggagaagaaggccc

SEQ ID NO: 1226229 - RNA, 24 nt, Human
agaaggcggagacuuggcagagag

SEQ ID NO: 1226230 - RNA, 22 nt, Human
agaucagcauuuccaacaagcu

SEQ ID NO: 1226231 - RNA, 24 nt, Human
agcacagugcccuucagaccgccc

SEQ ID NO: 1226232 - RNA, 18 nt, Human
agcauuuggagcugguuu

SEQ ID NO: 1226233 - RNA, 19 nt, Human
agccaggugagcauuugga

SEQ ID NO: 1226234 - RNA, 19 nt, Human
agcccaugcguccugggca

SEQ ID NO: 1226235 - RNA, 20 nt, Human
agcccgaguguggucuuggu

SEQ ID NO: 1226236 - RNA, 21 nt, Human
agcugguuucucaacaugagg

SEQ ID NO: 1226237 - RNA, 24 nt, Human
aggcagcaacagcaacgugcccag

SEQ ID NO: 1226238 - RNA, 20 nt, Human
aggcaguuauucccacagag

SEQ ID NO: 1226239 - RNA, 21 nt, Human
aggccagcaggccugaggcaa

SEQ ID NO: 1226240 - RNA, 23 nt, Human
aggccagcaggccugaggcaaca

SEQ ID NO: 1226241 - RNA, 21 nt, Human
aggcggagacuuggcagagag

SEQ ID NO: 1226242 - RNA, 18 nt, Human
aggcuuugcacaaguauc

SEQ ID NO: 1226243 - RNA, 25 nt, Human
aggggccagcuccagaacagugacc

SEQ ID NO: 1226244 - RNA, 18 nt, Human
auugccuucugcccuggg

SEQ ID NO: 1226245 - RNA, 23 nt, Human
auuucuaguggugggacgcccca

SEQ ID NO: 1226246 - RNA, 19 nt, Human
caacaugaggauggguugg

SEQ ID NO: 1226247 - RNA, 23 nt, Human
caacuugucagaaauggcacuua

SEQ ID NO: 1226248 - RNA, 22 nt, Human
caagaagaacagaaggcggaga

SEQ ID NO: 1226249 - RNA, 19 nt, Human
caagagccuccaacagggc

SEQ ID NO: 1226250 - RNA, 21 nt, Human
caagauucacaacagguguca

SEQ ID NO: 1226251 - RNA, 21 nt, Human
cacaguaucagauugagugag

SEQ ID NO: 1226252 - RNA, 23 nt, Human
cacagugcccuucagaccgcccc

SEQ ID NO: 1226253 - RNA, 22 nt, Human
cacccaugaggcuccccauccc

SEQ ID NO: 1226254 - RNA, 23 nt, Human
cacccaugaggcuccccaucccu

SEQ ID NO: 1226255 - RNA, 25 nt, Human
cacucaaaaugcaauucaggugcac

SEQ ID NO: 1226256 - RNA, 19 nt, Human
cacuuccacucugcuuuuc

SEQ ID NO: 1226257 - RNA, 21 nt, Human
cagaaggcggagacuuggcag

SEQ ID NO: 1226258 - RNA, 19 nt, Human
cagaccccaggcugcagag

SEQ ID NO: 1226259 - RNA, 21 nt, Human
cagcaacagcaacgugcccag

SEQ ID NO: 1226260 - RNA, 23 nt, Human
cagcuuucugacccccaggagcc

SEQ ID NO: 1226261 - RNA, 20 nt, Human
caggaagauuuggccagagg

SEQ ID NO: 1226262 - RNA, 20 nt, Human
cagggacccaaaagcuugac

SEQ ID NO: 1226263 - RNA, 24 nt, Human
caucccugacagccaggugagcau

SEQ ID NO: 1226264 - RNA, 18 nt, Human
caugcguccugggcacca

SEQ ID NO: 1226265 - RNA, 18 nt, Human
cauugccuucugcccugg

SEQ ID NO: 1226266 - RNA, 29 nt, Human
ccaaaauguucacagcaggaggccagcaa

SEQ ID NO: 1226267 - RNA, 20 nt, Human
ccaaacagcccugauggagc

SEQ ID NO: 1226268 - RNA, 26 nt, Human
ccaaaccaggcugugugcuucucaug

SEQ ID NO: 1226269 - RNA, 24 nt, Human
ccacaggucucucccaagccacau

SEQ ID NO: 1226270 - RNA, 19 nt, Human
ccagaugacagccacguga

SEQ ID NO: 1226271 - RNA, 24 nt, Human
ccaggugcugcugccgguccaggg

SEQ ID NO: 1226272 - RNA, 18 nt, Human
cccaugcguccugggcac

SEQ ID NO: 1226273 - RNA, 25 nt, Human
ccccaggagccucugcgaggccccu

SEQ ID NO: 1226274 - RNA, 20 nt, Human
ccccagguggugaaucucug

SEQ ID NO: 1226275 - RNA, 24 nt, Human
ccccauggccucggaucaccuggu

SEQ ID NO: 1226276 - RNA, 23 nt, Human
cccggccagcguggagggcccca

SEQ ID NO: 1226277 - RNA, 21 nt, Human
cccucuucccaucagagccca

SEQ ID NO: 1226278 - RNA, 20 nt, Human
cgaggcuccggagggcucuu

SEQ ID NO: 1226279 - RNA, 24 nt, Human
cucagaaaggagaggugagaccuc

SEQ ID NO: 1226280 - RNA, 24 nt, Human
cuccaggggcauccaggccccucu

SEQ ID NO: 1226281 - RNA, 19 nt, Human
cucccaagccacauccagc

SEQ ID NO: 1226282 - RNA, 22 nt, Human
cucccucuucccaucagagccc

SEQ ID NO: 1226283 - RNA, 21 nt, Human
cucuacacagcccggccagcg

SEQ ID NO: 1226284 - RNA, 23 nt, Human
cucucccaagccacauccagccu

SEQ ID NO: 1226285 - RNA, 19 nt, Human
cugacccccaggagccucu

SEQ ID NO: 1226286 - RNA, 25 nt, Human
cugggccccagguggugaaucucug

SEQ ID NO: 1226287 - RNA, 19 nt, Human
cuucaaggucggcaagaag

SEQ ID NO: 1226288 - RNA, 20 nt, Human
cuuuuaauccuaaaaccauc

SEQ ID NO: 1226289 - RNA, 19 nt, Human
gaccuggggagaagaaggc

SEQ ID NO: 1226290 - RNA, 18 nt, Human
gagccuccaacagggcuc

SEQ ID NO: 1226291 - RNA, 25 nt, Human
gaugauuugaaaccaacguucaccc

SEQ ID NO: 1226292 - RNA, 25 nt, Human
gcacuuacaucuucaggaccuuugg

SEQ ID NO: 1226293 - RNA, 25 nt, Human
gcagaacaggaagauuuggccagag

SEQ ID NO: 1226294 - RNA, 19 nt, Human
gccacauccagccuggaug

SEQ ID NO: 1226295 - RNA, 20 nt, Human
gccuccuaagggcacacuuc

SEQ ID NO: 1226296 - RNA, 23 nt, Human
gccuucugcccugggaacuugca

SEQ ID NO: 1226297 - RNA, 25 nt, Human
gcguccugggcaccaccacuuccac

SEQ ID NO: 1226298 - RNA, 23 nt, Human
gcuacagaggggccagcuccaga

SEQ ID NO: 1226299 - RNA, 19 nt, Human
gcucaggcccaccucccuc

SEQ ID NO: 1226300 - RNA, 20 nt, Human
gcuggacgcgcugcccauug

SEQ ID NO: 1226301 - RNA, 22 nt, Human
gcuugugccuguggguggagaa

SEQ ID NO: 1226302 - RNA, 22 nt, Human
ggaaccaugaugcucgaccucc

SEQ ID NO: 1226303 - RNA, 19 nt, Human
ggaauucuggagucccacc

SEQ ID NO: 1226304 - RNA, 24 nt, Human
ggacuggauuucuaguggugggac

SEQ ID NO: 1226305 - RNA, 23 nt, Human
ggagacaaguggacaauuggggg

SEQ ID NO: 1226306 - RNA, 31 nt, Human
ggagugucuggaaaagucccugugggggcaa

SEQ ID NO: 1226307 - RNA, 21 nt, Human
ggcaacacgggcaaccgcgaa

SEQ ID NO: 1226308 - RNA, 21 nt, Human
gggcaaccgcgaaugccucuu

SEQ ID NO: 1226309 - RNA, 20 nt, Human
ggggagaagccacacaacaa

SEQ ID NO: 1226310 - RNA, 20 nt, Human
ggggagguauuuugggagug

SEQ ID NO: 1226311 - RNA, 19 nt, Human
ggggcaggaacccagcugg

SEQ ID NO: 1226312 - RNA, 19 nt, Human
uaacaaccuccacaguauc

SEQ ID NO: 1226313 - RNA, 23 nt, Human
uagcaggcagcaucacucaaaau

SEQ ID NO: 1226314 - RNA, 22 nt, Human
uauccaaacagcccugauggag

SEQ ID NO: 1226315 - RNA, 19 nt, Human
ucagaccccaggcugcaga

SEQ ID NO: 1226316 - RNA, 20 nt, Human
ucccugcagggcaauguggg

SEQ ID NO: 1226317 - RNA, 23 nt, Human
uccuagcaaagcccuaaccacac

SEQ ID NO: 1226318 - RNA, 23 nt, Human
uccugggccccagguggugaauc

SEQ ID NO: 1226319 - RNA, 20 nt, Human
uccuguccaagcagcccgag

SEQ ID NO: 1226320 - RNA, 21 nt, Human
uccuuggcugagccggaccuu

SEQ ID NO: 1226321 - RNA, 22 nt, Human
ucucuggcauguggcuuggcuu

SEQ ID NO: 1226322 - RNA, 22 nt, Human
ucugaccuggggagaagaaggc

SEQ ID NO: 1226323 - RNA, 20 nt, Human
ucugcuuacacaucggguua

SEQ ID NO: 1226324 - RNA, 19 nt, Human
ucugugggcuccacccagg

SEQ ID NO: 1226325 - RNA, 22 nt, Human
ugaaaaccaguuugacucaagc

SEQ ID NO: 1226326 - RNA, 25 nt, Human
ugaaaccaacguucacccaacuugu

SEQ ID NO: 1226327 - RNA, 21 nt, Human
ugaccagcuacauccugucca

SEQ ID NO: 1226328 - RNA, 20 nt, Human
ugaccucaguguucccucca

SEQ ID NO: 1226329 - RNA, 23 nt, Human
ugagcacagccuugaaaaccagu

SEQ ID NO: 1226330 - RNA, 18 nt, Human
ugauccugggccccaggu

SEQ ID NO: 1226331 - RNA, 22 nt, Human
ugaugagagucggugagugaag

SEQ ID NO: 1226332 - RNA, 18 nt, Human
ugcagggcaaugugggca

SEQ ID NO: 1226333 - RNA, 20 nt, Human
ugcagggcaaugugggcauc

SEQ ID NO: 1226334 - RNA, 19 nt, Human
ugcaggugcagaugcggga

SEQ ID NO: 1226335 - RNA, 23 nt, Human
ugccaagagccuccaacagggcu

SEQ ID NO: 1226336 - RNA, 24 nt, Human
ugccaagagccuccaacagggcuc

SEQ ID NO: 1226337 - RNA, 21 nt, Human
ugccaucacaacccucuuuca

SEQ ID NO: 1226338 - RNA, 19 nt, Human
uggacaccugacaaguccu

SEQ ID NO: 1226339 - RNA, 22 nt, Human
uggagacaaguggacaauuggg

SEQ ID NO: 1226340 - RNA, 22 nt, Human
uggagacaaguggacaauuggg

SEQ ID NO: 1226341 - RNA, 26 nt, Human
uggcagaacaggaagauuuggccaga

SEQ ID NO: 1226342 - RNA, 20 nt, Human
uggccagaggugaccucagu

SEQ ID NO: 1226343 - RNA, 21 nt, Human
uggcgcacagaugggccuucc

SEQ ID NO: 1226344 - RNA, 20 nt, Human
uggcugagccggaccuuucu

SEQ ID NO: 1226345 - RNA, 19 nt, Human
uggggcaggaacccagcug

SEQ ID NO: 1226346 - RNA, 19 nt, Human
uggggcaggaacccagcug

SEQ ID NO: 1226347 - RNA, 21 nt, Human
uggguggagaaggcaccugcc

SEQ ID NO: 1226348 - RNA, 21 nt, Human
ugguguucccccuaaugacau

SEQ ID NO: 1226349 - RNA, 22 nt, Human
ugucacaggcuacagaggggcc

SEQ ID NO: 1226350 - RNA, 22 nt, Human
ugucacaggcuacagaggggcc

SEQ ID NO: 1226351 - RNA, 20 nt, Human
ugucuggaaaagucccugug

SEQ ID NO: 1226352 - RNA, 23 nt, Human
ugucuggaaaagucccugugggg

SEQ ID NO: 1226353 - RNA, 24 nt, Human
uguggguggagaaggcaccugccu

SEQ ID NO: 1226354 - RNA, 21 nt, Human
uugaccagaugacagccacgu

SEQ ID NO: 1226355 - RNA, 25 nt, Human
uugcacaaguaucucuuuuaauccu

SEQ ID NO: 1226356 - RNA, 18 nt, Human
uugcucaugucggcaggg

SEQ ID NO: 1226357 - RNA, 19 nt, Human
uugucagaaauggcacuua

SEQ ID NO: 1226358 - RNA, 21 nt, Human
uuugacucaagccuucgggcc

SEQ ID NO: 1226359 - RNA, 21 nt, Human
uuuggagcugguuucucaaca

SEQ ID NO: 1226360 - RNA, 22 nt, Human
uuugggagugcaggugcagaug

SEQ ID NO: 1226361 - RNA, 24 nt, Human
uuugggagugcaggugcagaugcg

SEQ ID NO: 1226362 - RNA, 20 nt, Human
aaaccagggcucccacccag

SEQ ID NO: 1226363 - RNA, 19 nt, Human
aagcaagcacagugaaaca

SEQ ID NO: 1226364 - RNA, 20 nt, Human
aagccagugggugaacagga

SEQ ID NO: 1226365 - RNA, 18 nt, Human
aaguccagggagaaaaca

SEQ ID NO: 1226366 - RNA, 22 nt, Human
acaacucccaaagcccgagccc

SEQ ID NO: 1226367 - RNA, 26 nt, Human
acagcaagucacucucacugcaaaca

SEQ ID NO: 1226368 - RNA, 23 nt, Human
acaggcuaugccaaaacccagca

SEQ ID NO: 1226369 - RNA, 20 nt, Human
acagugaaacaacucccaaa

SEQ ID NO: 1226370 - RNA, 24 nt, Human
acagugaaacaacucccaaagccc

SEQ ID NO: 1226371 - RNA, 26 nt, Human
acaugcuggaagcaagcacagugaaa

SEQ ID NO: 1226372 - RNA, 24 nt, Human
acccugagacaugcuggaagcaag

SEQ ID NO: 1226373 - RNA, 18 nt, Human
accuaguggcucaucccu

SEQ ID NO: 1226374 - RNA, 18 nt, Human
agacaccgucccguccuc

SEQ ID NO: 1226375 - RNA, 18 nt, Human
aggcagaacucugcccug

SEQ ID NO: 1226376 - RNA, 22 nt, Human
aggcccggaagcugccagugcu

SEQ ID NO: 1226377 - RNA, 21 nt, Human
agggcucugaggaggaacaga

SEQ ID NO: 1226378 - RNA, 21 nt, Human
caaaacccagcacacacaggc

SEQ ID NO: 1226379 - RNA, 20 nt, Human
cacacacaggcagaacucug

SEQ ID NO: 1226380 - RNA, 24 nt, Human
cacacggugggcuccucuggggcc

SEQ ID NO: 1226381 - RNA, 23 nt, Human
cacagccuuccacaagccuccag

SEQ ID NO: 1226382 - RNA, 25 nt, Human
cacccugagacaugcuggaagcaag

SEQ ID NO: 1226383 - RNA, 19 nt, Human
cagacccuggacaccaccc

SEQ ID NO: 1226384 - RNA, 20 nt, Human
cagacccuggacaccacccc

SEQ ID NO: 1226385 - RNA, 18 nt, Human
cagagguggggaaacaug

SEQ ID NO: 1226386 - RNA, 18 nt, Human
cagcacacacaggcagaa

SEQ ID NO: 1226387 - RNA, 21 nt, Human
cagccugcagacccuggacac

SEQ ID NO: 1226388 - RNA, 31 nt, Human
ccaaagcccgagccccagccugcagacccuu

SEQ ID NO: 1226389 - RNA, 21 nt, Human
ccagaccccucuagaccacgc

SEQ ID NO: 1226390 - RNA, 24 nt, Human
ccagcaugggauaccuaguggcuc

SEQ ID NO: 1226391 - RNA, 24 nt, Human
ccaggccccagccuccccaucagc

SEQ ID NO: 1226392 - RNA, 20 nt, Human
cccaaagcccgagccccagc

SEQ ID NO: 1226393 - RNA, 21 nt, Human
cccaccccacgcuccuggagg

SEQ ID NO: 1226394 - RNA, 21 nt, Human
cccagacaacccuguguggag

SEQ ID NO: 1226395 - RNA, 19 nt, Human
ccccaccccacgcuccugg

SEQ ID NO: 1226396 - RNA, 21 nt, Human
ccccacgcuccuggagggcuc

SEQ ID NO: 1226397 - RNA, 23 nt, Human
ccccaggccccagccuccccauc

SEQ ID NO: 1226398 - RNA, 19 nt, Human
ccccgugacugacagcaag

SEQ ID NO: 1226399 - RNA, 23 nt, Human
cccgagccccagccugcagaccc

SEQ ID NO: 1226400 - RNA, 21 nt, Human
cccugcgcuggcccccacccc

SEQ ID NO: 1226401 - RNA, 19 nt, Human
ccgagccccagccugcaga

SEQ ID NO: 1226402 - RNA, 18 nt, Human
ccgucccguccucccaga

SEQ ID NO: 1226403 - RNA, 25 nt, Human
ccgucccguccucccagacaacccu

SEQ ID NO: 1226404 - RNA, 21 nt, Human
ccucuagaccacgcauagccc

SEQ ID NO: 1226405 - RNA, 20 nt, Human
ccugagcccugcgcuggccc

SEQ ID NO: 1226406 - RNA, 22 nt, Human
ccugcagacccuggacaccacc

SEQ ID NO: 1226407 - RNA, 21 nt, Human
ccugcgcuggcccccaccccc

SEQ ID NO: 1226408 - RNA, 19 nt, Human
cgcuggcccccaccccacg

SEQ ID NO: 1226409 - RNA, 25 nt, Human
cgucccguccucccagacaacccug

SEQ ID NO: 1226410 - RNA, 22 nt, Human
cucacucuuuaauagaugcccu

SEQ ID NO: 1226411 - RNA, 24 nt, Human
cucuagaccacgcauagccccacc

SEQ ID NO: 1226412 - RNA, 28 nt, Human
cucuagaccacgcauagccccacccuga

SEQ ID NO: 1226413 - RNA, 18 nt, Human
cucugcccugcuggcucc

SEQ ID NO: 1226414 - RNA, 27 nt, Human
cuggagcccagcacucacacggugggc

SEQ ID NO: 1226415 - RNA, 20 nt, Human
cuggggccacaggaagucca

SEQ ID NO: 1226416 - RNA, 22 nt, Human
gaaacaacucccaaagcccgag

SEQ ID NO: 1226417 - RNA, 27 nt, Human
gacagcaagucacucucacugcaaaca

SEQ ID NO: 1226418 - RNA, 28 nt, Human
gacagcaagucacucucacugcaaacac

SEQ ID NO: 1226419 - RNA, 20 nt, Human
gccccagaccccucuagacc

SEQ ID NO: 1226420 - RNA, 20 nt, Human
gccugcagacccuggacacc

SEQ ID NO: 1226421 - RNA, 24 nt, Human
gcucugaggaggaacagagguggg

SEQ ID NO: 1226422 - RNA, 24 nt, Human
ggaaacaugggagaugggcacagc

SEQ ID NO: 1226423 - RNA, 20 nt, Human
ggaagacccuggacagaggc

SEQ ID NO: 1226424 - RNA, 21 nt, Human
ggacagaggccaaaggcccca

SEQ ID NO: 1226425 - RNA, 23 nt, Human
ggaggaacagagguggggaaaca

SEQ ID NO: 1226426 - RNA, 24 nt, Human
ggccacaggaaguccagggagaaa

SEQ ID NO: 1226427 - RNA, 19 nt, Human
ggcccggaagcugccagug

SEQ ID NO: 1226428 - RNA, 19 nt, Human
gggaagccagugggugaac

SEQ ID NO: 1226429 - RNA, 22 nt, Human
ggggccaggcagggcaccuaca

SEQ ID NO: 1226430 - RNA, 24 nt, Human
guggggccaggcagggcaccuaca

SEQ ID NO: 1226431 - RNA, 19 nt, Human
gugggugaacaggaggcug

SEQ ID NO: 1226432 - RNA, 18 nt, Human
ucaucccugugugcuucu

SEQ ID NO: 1226433 - RNA, 19 nt, Human
ucccaaagcccgagcccca

SEQ ID NO: 1226434 - RNA, 23 nt, Human
ucccagacaacccuguguggagc

SEQ ID NO: 1226435 - RNA, 26 nt, Human
ucccugugugcuucucgauguguaga

SEQ ID NO: 1226436 - RNA, 21 nt, Human
uccugagcccugcgcuggccc

SEQ ID NO: 1226437 - RNA, 23 nt, Human
ucugaggaggaacagaggugggg

SEQ ID NO: 1226438 - RNA, 22 nt, Human
ugaaacaacucccaaagcccga

SEQ ID NO: 1226439 - RNA, 18 nt, Human
ugacugacagcaagucac

SEQ ID NO: 1226440 - RNA, 22 nt, Human
ugcaaacacaggcuaugccaaa

SEQ ID NO: 1226441 - RNA, 20 nt, Human
ugccagugcuggccagagac

SEQ ID NO: 1226442 - RNA, 21 nt, Human
ugccccagaccccucuagacc

SEQ ID NO: 1226443 - RNA, 23 nt, Human
ugccccagaccccucuagaccac

SEQ ID NO: 1226444 - RNA, 18 nt, Human
ugccuggggccccugagc

SEQ ID NO: 1226445 - RNA, 22 nt, Human
uggaagcaagcacagugaaaca

SEQ ID NO: 1226446 - RNA, 18 nt, Human
uggacagaggccaaaggc

SEQ ID NO: 1226447 - RNA, 20 nt, Human
uggacagaggccaaaggccc

SEQ ID NO: 1226448 - RNA, 22 nt, Human
uggacagaggccaaaggcccca

SEQ ID NO: 1226449 - RNA, 24 nt, Human
uggacagaggccaaaggccccagg

SEQ ID NO: 1226450 - RNA, 22 nt, Human
ugggagaugggcacagccuucc

SEQ ID NO: 1226451 - RNA, 18 nt, Human
ugggcuccucuggggcca

SEQ ID NO: 1226452 - RNA, 20 nt, Human
uggggccaggcagggcaccu

SEQ ID NO: 1226453 - RNA, 19 nt, Human
uggggccccugagcauggg

SEQ ID NO: 1226454 - RNA, 22 nt, Human
aaacuggcagcgggacucccca

SEQ ID NO: 1226455 - RNA, 19 nt, Human
aagcagagggagcaaagca

SEQ ID NO: 1226456 - RNA, 20 nt, Human
aagcagagggagcaaagcag

SEQ ID NO: 1226457 - RNA, 18 nt, Human
acacagguccaccagggc

SEQ ID NO: 1226458 - RNA, 23 nt, Human
acagcgccugaagcagagggagc

SEQ ID NO: 1226459 - RNA, 25 nt, Human
acccuauuggccaggcugaucucga

SEQ ID NO: 1226460 - RNA, 24 nt, Human
acggaguuucacccuauuggccag

SEQ ID NO: 1226461 - RNA, 23 nt, Human
acgugggccaggagggaggggca

SEQ ID NO: 1226462 - RNA, 19 nt, Human
agaccagggccuccucgcg

SEQ ID NO: 1226463 - RNA, 18 nt, Human
agcacaggggccuuggga

SEQ ID NO: 1226464 - RNA, 21 nt, Human
agcacaggggccuugggaagg

SEQ ID NO: 1226465 - RNA, 21 nt, Human
agcaggguggacccuggaggc

SEQ ID NO: 1226466 - RNA, 18 nt, Human
agccugcccaggagcucu

SEQ ID NO: 1226467 - RNA, 20 nt, Human
agcugccugcccugccgagc

SEQ ID NO: 1226468 - RNA, 22 nt, Human
aggaggcuggccggcccggggc

SEQ ID NO: 1226469 - RNA, 22 nt, Human
aggcaggaggcuggccggcccg

SEQ ID NO: 1226470 - RNA, 25 nt, Human
aggcaggaggcuggccggcccgggg

SEQ ID NO: 1226471 - RNA, 19 nt, Human
aggcgcuggagguugugcu

SEQ ID NO: 1226472 - RNA, 22 nt, Human
aggcuccugagcucacgggucc

SEQ ID NO: 1226473 - RNA, 28 nt, Human
aggggcaggcuccgugcuccccaagggg

SEQ ID NO: 1226474 - RNA, 21 nt, Human
aggggccuugggaaggugggc

SEQ ID NO: 1226475 - RNA, 18 nt, Human
cacagccgggccagggac

SEQ ID NO: 1226476 - RNA, 24 nt, Human
caccagggcacacagccgggccag

SEQ ID NO: 1226477 - RNA, 22 nt, Human
caccuccgccuucagccauagg

SEQ ID NO: 1226478 - RNA, 19 nt, Human
cacugccccuggggguccc

SEQ ID NO: 1226479 - RNA, 23 nt, Human
cagcgggagcagcccagacacag

SEQ ID NO: 1226480 - RNA, 20 nt, Human
caggguggacccuggaggcg

SEQ ID NO: 1226481 - RNA, 25 nt, Human
caguagagacggaguuucacccuau

SEQ ID NO: 1226482 - RNA, 22 nt, Human
ccacgccccacaaaccugcagu

SEQ ID NO: 1226483 - RNA, 20 nt, Human
ccacgccccacaaaccugcg

SEQ ID NO: 1226484 - RNA, 20 nt, Human
ccacgcgccagaccuugcuc

SEQ ID NO: 1226485 - RNA, 20 nt, Human
ccagcacggcugcccacgcc

SEQ ID NO: 1226486 - RNA, 21 nt, Human
cccacaaaccugcaguaggca

SEQ ID NO: 1226487 - RNA, 22 nt, Human
ccccacgccagcacggcugccc

SEQ ID NO: 1226488 - RNA, 21 nt, Human
ccccgcugcccugcaccuccg

SEQ ID NO: 1226489 - RNA, 22 nt, Human
cccugccgagccugcccaggag

SEQ ID NO: 1226490 - RNA, 18 nt, Human
cccugggccccgcugccc

SEQ ID NO: 1226491 - RNA, 24 nt, Human
ccgcccggccugccccucccuggg

SEQ ID NO: 1226492 - RNA, 24 nt, Human
ccucgcgacugcgggcaaagguug

SEQ ID NO: 1226493 - RNA, 22 nt, Human
ccugcaccuccgccuucagcca

SEQ ID NO: 1226494 - RNA, 26 nt, Human
ccugcccugccgagccugcccaggag

SEQ ID NO: 1226495 - RNA, 23 nt, Human
cgccagaccuugcucuugguggc

SEQ ID NO: 1226496 - RNA, 22 nt, Human
cgccagcacggcugcccacgcc

SEQ ID NO: 1226497 - RNA, 24 nt, Human
cggaguuucacccuauuggccagg

SEQ ID NO: 1226498 - RNA, 19 nt, Human
cggcugcccacgccccaca

SEQ ID NO: 1226499 - RNA, 18 nt, Human
cggggcuguugggcagca

SEQ ID NO: 1226500 - RNA, 23 nt, Human
cgguggcgccggcagccgagccc

SEQ ID NO: 1226501 - RNA, 20 nt, Human
cgucugaggcuccugagcuc

SEQ ID NO: 1226502 - RNA, 21 nt, Human
cucacggguccacgcagucca

SEQ ID NO: 1226503 - RNA, 19 nt, Human
cuccuggagcugccugccc

SEQ ID NO: 1226504 - RNA, 20 nt, Human
cucgaacaccagcuuggcuc

SEQ ID NO: 1226505 - RNA, 20 nt, Human
cugagcucacggguccacgc

SEQ ID NO: 1226506 - RNA, 26 nt, Human
cugcaguaggcaggaggcuggccggc

SEQ ID NO: 1226507 - RNA, 19 nt, Human
cuggagguugugcugacgc

SEQ ID NO: 1226508 - RNA, 25 nt, Human
cugggccccgcugcccugcaccucc

SEQ ID NO: 1226509 - RNA, 19 nt, Human
cugguggccgcggggcugu

SEQ ID NO: 1226510 - RNA, 20 nt, Human
cugugugcaaacuggcagcg

SEQ ID NO: 1226511 - RNA, 21 nt, Human
gcagcucgaagcggccgccaa

SEQ ID NO: 1226512 - RNA, 20 nt, Human
gcaguccacuggaacuguug

SEQ ID NO: 1226513 - RNA, 20 nt, Human
gcgggagcagcccagacaca

SEQ ID NO: 1226514 - RNA, 20 nt, Human
gcugcccacgccccacaaac

SEQ ID NO: 1226515 - RNA, 23 nt, Human
ggcacacagccgggccagggacg

SEQ ID NO: 1226516 - RNA, 22 nt, Human
ggcgcuggagguugugcugacg

SEQ ID NO: 1226517 - RNA, 22 nt, Human
gggcagcaggguggacccugga

SEQ ID NO: 1226518 - RNA, 19 nt, Human
gguucgaagcccuccugga

SEQ ID NO: 1226519 - RNA, 24 nt, Human
gucggccgcccggccugccccucc

SEQ ID NO: 1226520 - RNA, 20 nt, Human
uccaccagggcacacagccg

SEQ ID NO: 1226521 - RNA, 23 nt, Human
uccccacgccagcacggcugccc

SEQ ID NO: 1226522 - RNA, 18 nt, Human
ucggcgcucacgugggcc

SEQ ID NO: 1226523 - RNA, 21 nt, Human
ucgguggcgccggcagccgag

SEQ ID NO: 1226524 - RNA, 23 nt, Human
ugcagcgggagcagcccagacac

SEQ ID NO: 1226525 - RNA, 22 nt, Human
ugcaugggggacagcgccugaa

SEQ ID NO: 1226526 - RNA, 19 nt, Human
ugccgagccugcccaggag

SEQ ID NO: 1226527 - RNA, 22 nt, Human
ugccgagccugcccaggagcuc

SEQ ID NO: 1226528 - RNA, 21 nt, Human
uggcagcgggacuccccacgc

SEQ ID NO: 1226529 - RNA, 23 nt, Human
uggccaggcugaucucgaacucc

SEQ ID NO: 1226530 - RNA, 18 nt, Human
uggccugcuuaaagcggg

SEQ ID NO: 1226531 - RNA, 19 nt, Human
ugggccaggagggaggggc

SEQ ID NO: 1226532 - RNA, 20 nt, Human
uucacccuauuggccaggcc

SEQ ID NO: 1226533 - RNA, 22 nt, Human
uuucacccuauuggccaggcug

SEQ ID NO: 1226534 - RNA, 25 nt, Human
aaaaagcuguaaccagacugagucc

SEQ ID NO: 1226535 - RNA, 20 nt, Human
aaagcucuucacaugccucu

SEQ ID NO: 1226536 - RNA, 20 nt, Human
aacccagccuaaccccguuu

SEQ ID NO: 1226537 - RNA, 21 nt, Human
aagaaaaauaaucuuuccuca

SEQ ID NO: 1226538 - RNA, 18 nt, Human
aagcaaaagcaggacagg

SEQ ID NO: 1226539 - RNA, 21 nt, Human
aagcaaaagcaggacagguga

SEQ ID NO: 1226540 - RNA, 19 nt, Human
aaugaccagguagcugugg

SEQ ID NO: 1226541 - RNA, 21 nt, Human
acacccacuuccuuccuccuu

SEQ ID NO: 1226542 - RNA, 21 nt, Human
acagaggagagaacaucccag

SEQ ID NO: 1226543 - RNA, 18 nt, Human
acccaaggcaagauuuca

SEQ ID NO: 1226544 - RNA, 19 nt, Human
accucuuagauccuguggu

SEQ ID NO: 1226545 - RNA, 24 nt, Human
acugagagguuaacauuucucuca

SEQ ID NO: 1226546 - RNA, 22 nt, Human
acuggaaaaauucauccccuca

SEQ ID NO: 1226547 - RNA, 19 nt, Human
agauaaccgggaaaaaagg

SEQ ID NO: 1226548 - RNA, 24 nt, Human
aggaaaaaauaaaaauaaaaaugu

SEQ ID NO: 1226549 - RNA, 20 nt, Human
aggcauggcaucugaauacc

SEQ ID NO: 1226550 - RNA, 21 nt, Human
aggugagaaggaaaggugagg

SEQ ID NO: 1226551 - RNA, 24 nt, Human
aguugcuggccuuaacggggagau

SEQ ID NO: 1226552 - RNA, 24 nt, Human
aucaccagauaaccgggaaaaaag

SEQ ID NO: 1226553 - RNA, 24 nt, Human
aucguucccucauuuacccaaaau

SEQ ID NO: 1226554 - RNA, 20 nt, Human
caacagugcccaucuccccu

SEQ ID NO: 1226555 - RNA, 22 nt, Human
caagccuucagcuuuucucaca

SEQ ID NO: 1226556 - RNA, 21 nt, Human
caccaaucgcuuaacacccac

SEQ ID NO: 1226557 - RNA, 26 nt, Human
caccagauaaccgggaaaaaaggguu

SEQ ID NO: 1226558 - RNA, 19 nt, Human
cacccuguaugaaaaaccc

SEQ ID NO: 1226559 - RNA, 19 nt, Human
caccuggaugaagaugaga

SEQ ID NO: 1226560 - RNA, 21 nt, Human
cacuugcuucccuugcuccca

SEQ ID NO: 1226561 - RNA, 22 nt, Human
cagcauuccccaaaaccuucuc

SEQ ID NO: 1226562 - RNA, 22 nt, Human
caggggucggcucgccucccuc

SEQ ID NO: 1226563 - RNA, 23 nt, Human
cauugucaaggucaggugcugac

SEQ ID NO: 1226564 - RNA, 25 nt, Human
ccaaacacccuguaugaaaaacccu

SEQ ID NO: 1226565 - RNA, 19 nt, Human
ccacaacagugcccaucuc

SEQ ID NO: 1226566 - RNA, 18 nt, Human
ccacaucacuccgguccu

SEQ ID NO: 1226567 - RNA, 24 nt, Human
ccaccacaacagugcccaucuccc

SEQ ID NO: 1226568 - RNA, 24 nt, Human
ccagauaaccgggaaaaaaggguu

SEQ ID NO: 1226569 - RNA, 20 nt, Human
ccaguacagaggagagaaca

SEQ ID NO: 1226570 - RNA, 18 nt, Human
cccacaucacuccugcuu

SEQ ID NO: 1226571 - RNA, 22 nt, Human
cccagacuuaaugcaccuggau

SEQ ID NO: 1226572 - RNA, 18 nt, Human
cccaucuccccuccccgc

SEQ ID NO: 1226573 - RNA, 19 nt, Human
ccccaguccuacucuuccu

SEQ ID NO: 1226574 - RNA, 19 nt, Human
ccccgucucucccucacac

SEQ ID NO: 1226575 - RNA, 21 nt, Human
ccccucuaccccaguccuacu

SEQ ID NO: 1226576 - RNA, 21 nt, Human
ccgccgccgccugcgcccugc

SEQ ID NO: 1226577 - RNA, 24 nt, Human
ccucacacccacuugcuucccuug

SEQ ID NO: 1226578 - RNA, 23 nt, Human
cgccgccugcgcccugccugcgc

SEQ ID NO: 1226579 - RNA, 24 nt, Human
cgccucccucucccaccggcccaa

SEQ ID NO: 1226580 - RNA, 21 nt, Human
cgccugcgcccugccugcgcc

SEQ ID NO: 1226581 - RNA, 26 nt, Human
cggccaaacacccuguaugaaaaacc

SEQ ID NO: 1226582 - RNA, 28 nt, Human
cggccuccuggauuccccucuaccccuc

SEQ ID NO: 1226583 - RNA, 23 nt, Human
cuaaccccguuuaaaugcuguca

SEQ ID NO: 1226584 - RNA, 20 nt, Human
cuccagcauuccccaaaacc

SEQ ID NO: 1226585 - RNA, 18 nt, Human
cucccucucccaccggcc

SEQ ID NO: 1226586 - RNA, 19 nt, Human
cucgaacuucaacccagcc

SEQ ID NO: 1226587 - RNA, 22 nt, Human
cucuaccccaguccuacucuuc

SEQ ID NO: 1226588 - RNA, 23 nt, Human
cucuacuucccccuccccauucc

SEQ ID NO: 1226589 - RNA, 23 nt, Human
cugcgcccugccugcgccugggg

SEQ ID NO: 1226590 - RNA, 18 nt, Human
cuucccccuccccauucc

SEQ ID NO: 1226591 - RNA, 20 nt, Human
cuucuuggccacacagugcc

SEQ ID NO: 1226592 - RNA, 24 nt, Human
gacaccaaaagucaugaggagaga

SEQ ID NO: 1226593 - RNA, 24 nt, Human
gagaaaggagacaccaaaagucau

SEQ ID NO: 1226594 - RNA, 19 nt, Human
gagccacuccuagcugugg

SEQ ID NO: 1226595 - RNA, 22 nt, Human
gcaaauacuuuuacuacccaaa

SEQ ID NO: 1226596 - RNA, 26 nt, Human
gccaaacacccuguaugaaaaacccu

SEQ ID NO: 1226597 - RNA, 18 nt, Human
gccauggcuaugucuuug

SEQ ID NO: 1226598 - RNA, 23 nt, Human
gcuccagcauuccccaaaaccuu

SEQ ID NO: 1226599 - RNA, 21 nt, Human
gcucuacuucccccuccccau

SEQ ID NO: 1226600 - RNA, 18 nt, Human
ggaagcaaaagcaggaca

SEQ ID NO: 1226601 - RNA, 21 nt, Human
ggacccaaggcaagauuucag

SEQ ID NO: 1226602 - RNA, 18 nt, Human
ggccccagccuuuuuaaa

SEQ ID NO: 1226603 - RNA, 20 nt, Human
ggcgccuucaggccacauca

SEQ ID NO: 1226604 - RNA, 25 nt, Human
gggcauugagggaaaacugacuuuc

SEQ ID NO: 1226605 - RNA, 24 nt, Human
ggguguccaaucaggucagagaag

SEQ ID NO: 1226606 - RNA, 20 nt, Human
ggguuuugagggaguugggg

SEQ ID NO: 1226607 - RNA, 25 nt, Human
guccccgucucucccucacacccac

SEQ ID NO: 1226608 - RNA, 20 nt, Human
uaaagcucuucacaugccuc

SEQ ID NO: 1226609 - RNA, 20 nt, Human
uaaccagacugaguccucaa

SEQ ID NO: 1226610 - RNA, 20 nt, Human
uaaccagacugaguccucaa

SEQ ID NO: 1226611 - RNA, 21 nt, Human
uacagcaaauauucacaagua

SEQ ID NO: 1226612 - RNA, 23 nt, Human
uacccaaaaucuccuuugcacac

SEQ ID NO: 1226613 - RNA, 20 nt, Human
uacuacccaaacuuccuucc

SEQ ID NO: 1226614 - RNA, 19 nt, Human
uagacuccuacgcacccaa

SEQ ID NO: 1226615 - RNA, 21 nt, Human
uagcuguggcucccacuucac

SEQ ID NO: 1226616 - RNA, 27 nt, Human
uagcuguggcugcccucagggaagggg

SEQ ID NO: 1226617 - RNA, 18 nt, Human
uaguucuccaucacuugc

SEQ ID NO: 1226618 - RNA, 22 nt, Human
uccagcucccuugguuucccac

SEQ ID NO: 1226619 - RNA, 27 nt, Human
ucccaccacaacagugcccaucucccc

SEQ ID NO: 1226620 - RNA, 19 nt, Human
ucccaccggcccagccucc

SEQ ID NO: 1226621 - RNA, 23 nt, Human
ucccaggauucuuagcaggaccc

SEQ ID NO: 1226622 - RNA, 21 nt, Human
uccccaaaaccuucucaagca

SEQ ID NO: 1226623 - RNA, 20 nt, Human
uccccggccuccuggauucc

SEQ ID NO: 1226624 - RNA, 19 nt, Human
uccccgucucucccucaca

SEQ ID NO: 1226625 - RNA, 19 nt, Human
ucccuaaaugagccacucc

SEQ ID NO: 1226626 - RNA, 18 nt, Human
uccuaaaucccaggauuc

SEQ ID NO: 1226627 - RNA, 20 nt, Human
uccuggauuccccucuaccc

SEQ ID NO: 1226628 - RNA, 19 nt, Human
uccuuuagacuccuacgca

SEQ ID NO: 1226629 - RNA, 23 nt, Human
ucuccaugcaaauacuuuuacua

SEQ ID NO: 1226630 - RNA, 18 nt, Human
ucugccaacuguccccca

SEQ ID NO: 1226631 - RNA, 23 nt, Human
ugaagaaagagcuugaaguucua

SEQ ID NO: 1226632 - RNA, 24 nt, Human
ugaagagaugcaaagaaaguggag

SEQ ID NO: 1226633 - RNA, 23 nt, Human
ugaaggccauggcuaugucuuug

SEQ ID NO: 1226634 - RNA, 21 nt, Human
ugaauaccaacuccaucugcc

SEQ ID NO: 1226635 - RNA, 24 nt, Human
ugaaucaaauguuuuaagucugcc

SEQ ID NO: 1226636 - RNA, 22 nt, Human
ugagcuacccugcccuaaccca

SEQ ID NO: 1226637 - RNA, 22 nt, Human
ugagggaaaacugacuuucugc

SEQ ID NO: 1226638 - RNA, 23 nt, Human
ugcaaauacuuuuacuacccaaa

SEQ ID NO: 1226639 - RNA, 22 nt, Human
ugccuccagcucccuugguuuc

SEQ ID NO: 1226640 - RNA, 26 nt, Human
ugcucccaccacaacagugcccauug

SEQ ID NO: 1226641 - RNA, 19 nt, Human
uggcugcccucagggaagg

SEQ ID NO: 1226642 - RNA, 19 nt, Human
uguaucaccauugucaagg

SEQ ID NO: 1226643 - RNA, 22 nt, Human
uucauggaccuccugagugaag

SEQ ID NO: 1226644 - RNA, 18 nt, Human
uuccccucuaccccaguc

SEQ ID NO: 1226645 - RNA, 19 nt, Human
uuccucugccuccagcucc

SEQ ID NO: 1226646 - RNA, 23 nt, Human
uugaaguucuaggaacugagagg

SEQ ID NO: 1226647 - RNA, 21 nt, Human
uugcugagccuugggcauuga

SEQ ID NO: 1226648 - RNA, 21 nt, Human
uugggguagaaaacuguaucu

SEQ ID NO: 1226649 - RNA, 25 nt, Human
uuuacuacccaaacuuccuuccaaa

SEQ ID NO: 1226650 - RNA, 21 nt, Human
uuucaacaacggccaaacacc

SEQ ID NO: 1226651 - RNA, 22 nt, Human
uuuguccccggccuccuggauu

SEQ ID NO: 1226652 - RNA, 18 nt, Human
uuuugcuccagcauuccc

SEQ ID NO: 1226653 - RNA, 23 nt, Human
uuuugcuccagcauuccccaaaa

SEQ ID NO: 1226654 - RNA, 20 nt, Human
aggaggagccagccagggca

SEQ ID NO: 1226655 - RNA, 26 nt, Human
agggaggaggagccagccagggcagg

SEQ ID NO: 1226656 - RNA, 21 nt, Human
cugguguguccagucuuuccc

SEQ ID NO: 1226657 - RNA, 19 nt, Human
gcccugguguguccagucu

SEQ ID NO: 1226658 - RNA, 24 nt, Human
uccccagcuggggcaggauauggc

SEQ ID NO: 1226659 - RNA, 20 nt, Human
uugugauagagacuggugau

SEQ ID NO: 1226660 - RNA, 23 nt, Human
acggugcucucgagggacaacug

SEQ ID NO: 1226661 - RNA, 19 nt, Human
agaggggcaggcaggaggg

SEQ ID NO: 1226662 - RNA, 19 nt, Human
agccaccagaagaggggca

SEQ ID NO: 1226663 - RNA, 19 nt, Human
agcgacuuuggucuucuuc

SEQ ID NO: 1226664 - RNA, 20 nt, Human
aggcaggaggggacggacgg

SEQ ID NO: 1226665 - RNA, 20 nt, Human
agugucuuggagccuggcuu

SEQ ID NO: 1226666 - RNA, 20 nt, Human
aguucccccacacgaucacc

SEQ ID NO: 1226667 - RNA, 21 nt, Human
aguucccccacacgaucaccu

SEQ ID NO: 1226668 - RNA, 26 nt, Human
caccuggaggacuuugcccuggggac

SEQ ID NO: 1226669 - RNA, 22 nt, Human
cagcagcaccugguuauacagu

SEQ ID NO: 1226670 - RNA, 23 nt, Human
caggguggucaaguccagcuccu

SEQ ID NO: 1226671 - RNA, 19 nt, Human
caguggguccagcgacuug

SEQ ID NO: 1226672 - RNA, 26 nt, Human
ccuuccacgggcaggcagagggaagc

SEQ ID NO: 1226673 - RNA, 21 nt, Human
cgagcgacuuuggucuucuuc

SEQ ID NO: 1226674 - RNA, 24 nt, Human
cgcuccauccgcccguaguucccc

SEQ ID NO: 1226675 - RNA, 18 nt, Human
cggacggauggacucgga

SEQ ID NO: 1226676 - RNA, 22 nt, Human
cuggcagugucuuggagccugg

SEQ ID NO: 1226677 - RNA, 25 nt, Human
gcuccauccgcccguaguuccccca

SEQ ID NO: 1226678 - RNA, 22 nt, Human
gcuuguaccagcccacggccag

SEQ ID NO: 1226679 - RNA, 22 nt, Human
ggacucggacaggcugcggcaa

SEQ ID NO: 1226680 - RNA, 20 nt, Human
ggaggagguggggaagagcu

SEQ ID NO: 1226681 - RNA, 18 nt, Human
ggggccuguggcuggguc

SEQ ID NO: 1226682 - RNA, 20 nt, Human
ucaccuggaggacuuugccc

SEQ ID NO: 1226683 - RNA, 20 nt, Human
ucucuagcagguaggccuug

SEQ ID NO: 1226684 - RNA, 20 nt, Human
ugggaugccugccggagcag

SEQ ID NO: 1226685 - RNA, 23 nt, Human
ugggaugccugccggagcagggg

SEQ ID NO: 1226686 - RNA, 21 nt, Human
uggggagccccuccccauucc

SEQ ID NO: 1226687 - RNA, 24 nt, Human
uggucccugcugaaccccaauucc

SEQ ID NO: 1226688 - RNA, 19 nt, Human
uguggcuggguccaccaug

SEQ ID NO: 1226689 - RNA, 21 nt, Human
aagcaaguuagaaaccuccau

SEQ ID NO: 1226690 - RNA, 22 nt, Human
acucuagucuucaugcucugcc

SEQ ID NO: 1226691 - RNA, 24 nt, Human
agaaaccuccauuucccuagaacu

SEQ ID NO: 1226692 - RNA, 18 nt, Human
agagggaaacaaagacuu

SEQ ID NO: 1226693 - RNA, 23 nt, Human
aggaagggaggaaggaaaaaugu

SEQ ID NO: 1226694 - RNA, 25 nt, Human
aggagcccaggaggggguugcucag

SEQ ID NO: 1226695 - RNA, 19 nt, Human
aggccgucaccuggggcau

SEQ ID NO: 1226696 - RNA, 19 nt, Human
cacccgggcggaagcccuc

SEQ ID NO: 1226697 - RNA, 24 nt, Human
cacuaucucucccuuuuauagaga

SEQ ID NO: 1226698 - RNA, 22 nt, Human
cagcacaacauucacgagcuuc

SEQ ID NO: 1226699 - RNA, 20 nt, Human
caggggggaaggcugcggug

SEQ ID NO: 1226700 - RNA, 22 nt, Human
ccacgaugcgcccguucaucuc

SEQ ID NO: 1226701 - RNA, 24 nt, Human
ccgggucacccagcagccccgcgc

SEQ ID NO: 1226702 - RNA, 19 nt, Human
ccuuccgcuccucuuugcg

SEQ ID NO: 1226703 - RNA, 23 nt, Human
cugguuggucaagauggccuucc

SEQ ID NO: 1226704 - RNA, 20 nt, Human
cuuugcgcugggccagugcc

SEQ ID NO: 1226705 - RNA, 20 nt, Human
gcggggcaagcaggagccgg

SEQ ID NO: 1226706 - RNA, 19 nt, Human
gcugcggggcaagcaggag

SEQ ID NO: 1226707 - RNA, 24 nt, Human
gcuuggugcccacgaugcgcccgu

SEQ ID NO: 1226708 - RNA, 19 nt, Human
ggcaggccgucaccugggg

SEQ ID NO: 1226709 - RNA, 18 nt, Human
ggcagggggccggggcug

SEQ ID NO: 1226710 - RNA, 22 nt, Human
ggccggggcugcggggcaagca

SEQ ID NO: 1226711 - RNA, 18 nt, Human
gggaagggaaggaaggga

SEQ ID NO: 1226712 - RNA, 20 nt, Human
gggcaagcaggagccggguc

SEQ ID NO: 1226713 - RNA, 24 nt, Human
gucaagauggccuuccgcuccucu

SEQ ID NO: 1226714 - RNA, 21 nt, Human
ucaccuggggcauggcaggca

SEQ ID NO: 1226715 - RNA, 18 nt, Human
ugaaaggagcccaggagg

SEQ ID NO: 1226716 - RNA, 23 nt, Human
ugaaaggagcccaggagggggaa

SEQ ID NO: 1226717 - RNA, 23 nt, Human
uggagggcugcugaaaggagccc

SEQ ID NO: 1226718 - RNA, 18 nt, Human
uggaucauuaagagucuu

SEQ ID NO: 1226719 - RNA, 21 nt, Human
ugguggagaggcgcugcaugu

SEQ ID NO: 1226720 - RNA, 28 nt, Human
aaaaaaaaaaaaaacacaaacaaaaaag

SEQ ID NO: 1226721 - RNA, 28 nt, Human
aaaaaaaaaaaacacaaacaaaaaaaga

SEQ ID NO: 1226722 - RNA, 20 nt, Human
aaaaaaaaaaacacaaacaa

SEQ ID NO: 1226723 - RNA, 20 nt, Human
aaaaaaaaaacacaaacaaa

SEQ ID NO: 1226724 - RNA, 21 nt, Human
aaaaaaaaaacacaaacaaaa

SEQ ID NO: 1226725 - RNA, 26 nt, Human
aaaaaaaaaacacaaacaaaaaaaga

SEQ ID NO: 1226726 - RNA, 20 nt, Human
aaaauggagauaaaguaguu

SEQ ID NO: 1226727 - RNA, 24 nt, Human
aaacaaaacaaacuccagaucaaa

SEQ ID NO: 1226728 - RNA, 24 nt, Human
aaacaaacuccagaucaaaguuca

SEQ ID NO: 1226729 - RNA, 21 nt, Human
aaacaaauauaccuugucagg

SEQ ID NO: 1226730 - RNA, 23 nt, Human
aaacaaauugacuucuggccaaa

SEQ ID NO: 1226731 - RNA, 18 nt, Human
aaagcccucugaucugcu

SEQ ID NO: 1226732 - RNA, 20 nt, Human
aacuuauuucuucaacuaca

SEQ ID NO: 1226733 - RNA, 18 nt, Human
aagagccaaggcaagagc

SEQ ID NO: 1226734 - RNA, 18 nt, Human
aagcaauaacagaagccc

SEQ ID NO: 1226735 - RNA, 21 nt, Human
aagcccugaagacuaacaacu

SEQ ID NO: 1226736 - RNA, 21 nt, Human
aaggcagagaacaagcgagga

SEQ ID NO: 1226737 - RNA, 19 nt, Human
acaaaacaaacuccagauc

SEQ ID NO: 1226738 - RNA, 24 nt, Human
acaaaauggagauaaaguaguuaa

SEQ ID NO: 1226739 - RNA, 22 nt, Human
acaaacaaaaaaagaauucuga

SEQ ID NO: 1226740 - RNA, 19 nt, Human
acaacaacaacaacaacua

SEQ ID NO: 1226741 - RNA, 26 nt, Human
acacaaacaaaaaaagaauucugaga

SEQ ID NO: 1226742 - RNA, 22 nt, Human
agagugagacucugucucaaaa

SEQ ID NO: 1226743 - RNA, 19 nt, Human
aggcacauucccugccuuu

SEQ ID NO: 1226744 - RNA, 24 nt, Human
aggcuagagugagacucugucuca

SEQ ID NO: 1226745 - RNA, 18 nt, Human
agguaaaguugcaggaag

SEQ ID NO: 1226746 - RNA, 23 nt, Human
agucauggcuccccaucugaggg

SEQ ID NO: 1226747 - RNA, 18 nt, Human
auccugaggugcaaccca

SEQ ID NO: 1226748 - RNA, 20 nt, Human
augcuuugguuuuuaaaacu

SEQ ID NO: 1226749 - RNA, 24 nt, Human
auucugucacccaggcuagaguga

SEQ ID NO: 1226750 - RNA, 21 nt, Human
caaagcccucugaucugcuuc

SEQ ID NO: 1226751 - RNA, 22 nt, Human
caacaacaacaacaacaacuag

SEQ ID NO: 1226752 - RNA, 24 nt, Human
caagcaauaacagaagcccaaggc

SEQ ID NO: 1226753 - RNA, 25 nt, Human
caauagacuuuacuucucugagccu

SEQ ID NO: 1226754 - RNA, 24 nt, Human
cacaaacaaaaaaagaauucugag

SEQ ID NO: 1226755 - RNA, 18 nt, Human
cagcugucuuuccaaccu

SEQ ID NO: 1226756 - RNA, 24 nt, Human
cauucugucacccaggcuagagug

SEQ ID NO: 1226757 - RNA, 22 nt, Human
ccacauagcuauuucaguugcc

SEQ ID NO: 1226758 - RNA, 22 nt, Human
ccaucugagggaaagagguaaa

SEQ ID NO: 1226759 - RNA, 21 nt, Human
cccugaagacuaacaacugcc

SEQ ID NO: 1226760 - RNA, 23 nt, Human
ccugaaacaaaacaaacuccaga

SEQ ID NO: 1226761 - RNA, 22 nt, Human
cucaaaaaaaaaaaaaaacaca

SEQ ID NO: 1226762 - RNA, 23 nt, Human
cucccagcacuauuaaguuucua

SEQ ID NO: 1226763 - RNA, 19 nt, Human
cucugucucaaaaaaaaaa

SEQ ID NO: 1226764 - RNA, 20 nt, Human
cugccauauucuagccacau

SEQ ID NO: 1226765 - RNA, 24 nt, Human
cuggccacagaagaggcacauucc

SEQ ID NO: 1226766 - RNA, 23 nt, Human
gaagaggcacauucccugccuuu

SEQ ID NO: 1226767 - RNA, 25 nt, Human
gagcaaguuucuguuagcaagguuc

SEQ ID NO: 1226768 - RNA, 21 nt, Human
gccucuugcauuuuuuaaaaa

SEQ ID NO: 1226769 - RNA, 24 nt, Human
gcuagagugagacucugucucaaa

SEQ ID NO: 1226770 - RNA, 18 nt, Human
guuguggagcucaaggac

SEQ ID NO: 1226771 - RNA, 27 nt, Human
uacagccaggucaucuacugaagagcc

SEQ ID NO: 1226772 - RNA, 19 nt, Human
uagaaaacaaauauaccuu

SEQ ID NO: 1226773 - RNA, 19 nt, Human
uagauguuguggagcucaa

SEQ ID NO: 1226774 - RNA, 20 nt, Human
uagccacaugaccuugagca

SEQ ID NO: 1226775 - RNA, 21 nt, Human
uauccgccacauagcuauuuc

SEQ ID NO: 1226776 - RNA, 25 nt, Human
ucaaaaaaaaaaaaaaacacaaaca

SEQ ID NO: 1226777 - RNA, 19 nt, Human
ucaacaacaacaacaacaa

SEQ ID NO: 1226778 - RNA, 20 nt, Human
ucaacaacaacaacaacaaa

SEQ ID NO: 1226779 - RNA, 18 nt, Human
ucaagcaauaacagaagc

SEQ ID NO: 1226780 - RNA, 23 nt, Human
ucaagcaauaacagaagcccaag

SEQ ID NO: 1226781 - RNA, 19 nt, Human
ucagcugucuuuccaaccu

SEQ ID NO: 1226782 - RNA, 22 nt, Human
ucagugccugauauauaauagg

SEQ ID NO: 1226783 - RNA, 21 nt, Human
ucaucaagcuagacugguaag

SEQ ID NO: 1226784 - RNA, 23 nt, Human
ucccagguuucaggagcaaaagc

SEQ ID NO: 1226785 - RNA, 26 nt, Human
uccguauccgccacauagcuauuuca

SEQ ID NO: 1226786 - RNA, 19 nt, Human
ucucauucugucacccagg

SEQ ID NO: 1226787 - RNA, 23 nt, Human
ucucauucugucacccaggcuag

SEQ ID NO: 1226788 - RNA, 24 nt, Human
ucucauucugucacccaggcuaga

SEQ ID NO: 1226789 - RNA, 18 nt, Human
ucucuggaagcucgaguu

SEQ ID NO: 1226790 - RNA, 24 nt, Human
ucugagccucaauuuucacaucug

SEQ ID NO: 1226791 - RNA, 22 nt, Human
ucugucacccaggcuagaguga

SEQ ID NO: 1226792 - RNA, 23 nt, Human
ucugucucaaaaaaaaaaaaaaa

SEQ ID NO: 1226793 - RNA, 22 nt, Human
ucuuuuuuuuugagacgggguc

SEQ ID NO: 1226794 - RNA, 24 nt, Human
ucuuuuuuuuugagacggggucuc

SEQ ID NO: 1226795 - RNA, 21 nt, Human
ugaaacaaaacaaacuccaga

SEQ ID NO: 1226796 - RNA, 24 nt, Human
ugaaacaaaacaaacuccagauca

SEQ ID NO: 1226797 - RNA, 20 nt, Human
ugacauaucuuaaauuuagu

SEQ ID NO: 1226798 - RNA, 22 nt, Human
ugagacggggucucauucuguc

SEQ ID NO: 1226799 - RNA, 18 nt, Human
ugcaagaaaaggugguca

SEQ ID NO: 1226800 - RNA, 21 nt, Human
uggccaaaaggcuucaucaag

SEQ ID NO: 1226801 - RNA, 22 nt, Human
uguaaaaugaggauaauaauac

SEQ ID NO: 1226802 - RNA, 24 nt, Human
uuaagucacaggguuauugugaag

SEQ ID NO: 1226803 - RNA, 25 nt, Human
uucaggcccgaaaccugccuccaug

SEQ ID NO: 1226804 - RNA, 18 nt, Human
uucccagguuucaggagc

SEQ ID NO: 1226805 - RNA, 20 nt, Human
uuccugaaacaaaacaaacu

SEQ ID NO: 1226806 - RNA, 21 nt, Human
uucuuuuuuuuugagacgggg

SEQ ID NO: 1226807 - RNA, 26 nt, Human
uucuuuuuuuuugagacggggucuca

SEQ ID NO: 1226808 - RNA, 22 nt, Human
uuugcaaagcccucugaucugc

SEQ ID NO: 1226809 - RNA, 20 nt, Human
aagguuuucuugagcugguu

SEQ ID NO: 1226810 - RNA, 24 nt, Human
aagugcuucuccaggucagagacc

SEQ ID NO: 1226811 - RNA, 22 nt, Human
acuggaaccagguaaugaucug

SEQ ID NO: 1226812 - RNA, 21 nt, Human
agacccugggagcccccaaac

SEQ ID NO: 1226813 - RNA, 23 nt, Human
agcaaagccuuuucccggaagcu

SEQ ID NO: 1226814 - RNA, 21 nt, Human
agccuugcgucguucucugcc

SEQ ID NO: 1226815 - RNA, 24 nt, Human
agcuccucgaugagugucacuucc

SEQ ID NO: 1226816 - RNA, 24 nt, Human
caccacagcugaccaccugcucca

SEQ ID NO: 1226817 - RNA, 25 nt, Human
cagcaaagccuuuucccggaagcuu

SEQ ID NO: 1226818 - RNA, 23 nt, Human
cagcuuccggaccaccuuggccu

SEQ ID NO: 1226819 - RNA, 23 nt, Human
caggacaggacccugccaggccc

SEQ ID NO: 1226820 - RNA, 21 nt, Human
ccaccugcuccaggagccugc

SEQ ID NO: 1226821 - RNA, 22 nt, Human
ccagguaaugaucuguucuucu

SEQ ID NO: 1226822 - RNA, 25 nt, Human
cccggaagcuucuguuccugacugc

SEQ ID NO: 1226823 - RNA, 19 nt, Human
ccugcagcuuccggaccac

SEQ ID NO: 1226824 - RNA, 28 nt, Human
ccugccaggcccugugcacccucuccaa

SEQ ID NO: 1226825 - RNA, 18 nt, Human
cggagugccguccagcug

SEQ ID NO: 1226826 - RNA, 24 nt, Human
cucugcagguagcugugaaacugg

SEQ ID NO: 1226827 - RNA, 23 nt, Human
cugaccaccugcuccaggagccu

SEQ ID NO: 1226828 - RNA, 27 nt, Human
cugcagcuuccggaccaccuuggccug

SEQ ID NO: 1226829 - RNA, 20 nt, Human
cuggaagguuuucuugagcu

SEQ ID NO: 1226830 - RNA, 19 nt, Human
cuggggcagaggcuggagc

SEQ ID NO: 1226831 - RNA, 18 nt, Human
cuguuccugacugcacca

SEQ ID NO: 1226832 - RNA, 24 nt, Human
cuuucggagacccugggagccccc

SEQ ID NO: 1226833 - RNA, 24 nt, Human
gaagcuccucgaugagugucacuu

SEQ ID NO: 1226834 - RNA, 24 nt, Human
gagccugcggcacgcuauuuccag

SEQ ID NO: 1226835 - RNA, 22 nt, Human
gagccuugcgucguucucugcc

SEQ ID NO: 1226836 - RNA, 21 nt, Human
gagcugggugaagugcuucuc

SEQ ID NO: 1226837 - RNA, 23 nt, Human
gcagcuuccggaccaccuuggcc

SEQ ID NO: 1226838 - RNA, 24 nt, Human
gcgcccaggcucuuaaggucuggg

SEQ ID NO: 1226839 - RNA, 18 nt, Human
gcuggagcuggcccagcc

SEQ ID NO: 1226840 - RNA, 19 nt, Human
ggacccugccaggcccugu

SEQ ID NO: 1226841 - RNA, 19 nt, Human
ggucuggggcagaggcugg

SEQ ID NO: 1226842 - RNA, 27 nt, Human
guagaacagcaaagccuuuucccggaa

SEQ ID NO: 1226843 - RNA, 20 nt, Human
guucuucugggagcccagcu

SEQ ID NO: 1226844 - RNA, 25 nt, Human
uagaacagcaaagccuuuucccgga

SEQ ID NO: 1226845 - RNA, 23 nt, Human
ugaucuguucuucugggagccca

SEQ ID NO: 1226846 - RNA, 20 nt, Human
ugccaggcccugugcacccu

SEQ ID NO: 1226847 - RNA, 19 nt, Human
uggaagguuuucuugagcu

SEQ ID NO: 1226848 - RNA, 18 nt, Human
uggcagggcaggacagga

SEQ ID NO: 1226849 - RNA, 23 nt, Human
uggcccagccgcuuccccugcag

SEQ ID NO: 1226850 - RNA, 21 nt, Human
ugggagcccccaaacagggac

SEQ ID NO: 1226851 - RNA, 23 nt, Human
uuuccagcuguccuggguacuuc

SEQ ID NO: 1226852 - RNA, 27 nt, Human
uuucccggaagcuucuguuggggggcc

SEQ ID NO: 1226853 - RNA, 18 nt, Human
uacaguuugucaacacuc

SEQ ID NO: 1226854 - RNA, 20 nt, Human
ucuccugacacacaaaucca

SEQ ID NO: 1226855 - RNA, 23 nt, Human
aacaaaugggcaucagcacccac

SEQ ID NO: 1226856 - RNA, 18 nt, Human
agacagaccaucuguccu

SEQ ID NO: 1226857 - RNA, 21 nt, Human
caaaugggcaucagcacccac

SEQ ID NO: 1226858 - RNA, 21 nt, Human
cuaaacacucaaugugaaacc

SEQ ID NO: 1226859 - RNA, 19 nt, Human
ggagcagccgugaccccug

SEQ ID NO: 1226860 - RNA, 21 nt, Human
uaccagccacaaagccaguuc

SEQ ID NO: 1226861 - RNA, 19 nt, Human
ucagcacccacugggagca

SEQ ID NO: 1226862 - RNA, 22 nt, Human
ugaccccuggguccucgguacc

SEQ ID NO: 1226863 - RNA, 20 nt, Human
ugggcaucagcacccacugg

SEQ ID NO: 1226864 - RNA, 23 nt, Human
ugugaaaccgcgcugcugggugu

SEQ ID NO: 1226865 - RNA, 23 nt, Human
aagaaaaagauaagguugcagaa

SEQ ID NO: 1226866 - RNA, 22 nt, Human
agaaaaagauaagguugcagaa

SEQ ID NO: 1226867 - RNA, 18 nt, Human
uggaagaaaaagauaagg

SEQ ID NO: 1226868 - RNA, 23 nt, Human
uuauauguagucuuguggaagaa

SEQ ID NO: 1226869 - RNA, 21 nt, Human
aaacagucugugcccaagaaa

SEQ ID NO: 1226870 - RNA, 23 nt, Human
aaaucauaucacgcugaagccag

SEQ ID NO: 1226871 - RNA, 19 nt, Human
aaccuccgccuccugguuc

SEQ ID NO: 1226872 - RNA, 23 nt, Human
aaccuucuggguucaagcaauuc

SEQ ID NO: 1226873 - RNA, 18 nt, Human
aagcaggccccccuccca

SEQ ID NO: 1226874 - RNA, 23 nt, Human
aagcuggucucagucgugacaca

SEQ ID NO: 1226875 - RNA, 23 nt, Human
aaguagcggagauuacaggcacu

SEQ ID NO: 1226876 - RNA, 21 nt, Human
acagcaccacagcauccagua

SEQ ID NO: 1226877 - RNA, 21 nt, Human
acaggguuucaucguguuggu

SEQ ID NO: 1226878 - RNA, 23 nt, Human
acaggguuucaucguguugguca

SEQ ID NO: 1226879 - RNA, 24 nt, Human
acaggguuucaucguguuggucag

SEQ ID NO: 1226880 - RNA, 19 nt, Human
accaugcccggcuaguuuu

SEQ ID NO: 1226881 - RNA, 23 nt, Human
accauguuggucaagcuggucuc

SEQ ID NO: 1226882 - RNA, 21 nt, Human
accccccaccaugggcuucca

SEQ ID NO: 1226883 - RNA, 23 nt, Human
agacagagagcaacacaggccug

SEQ ID NO: 1226884 - RNA, 18 nt, Human
agacagagugcaguggug

SEQ ID NO: 1226885 - RNA, 18 nt, Human
agacaggguuucaucgug

SEQ ID NO: 1226886 - RNA, 19 nt, Human
agagacaggguuucaucgu

SEQ ID NO: 1226887 - RNA, 23 nt, Human
agagugcaguggugugaucuugg

SEQ ID NO: 1226888 - RNA, 23 nt, Human
agcaccacagcauccaguacaac

SEQ ID NO: 1226889 - RNA, 24 nt, Human
agcauauuauuugucuuuuucaca

SEQ ID NO: 1226890 - RNA, 19 nt, Human
agccuugucucuccugcac

SEQ ID NO: 1226891 - RNA, 24 nt, Human
agcuggucucagucuccugaccuc

SEQ ID NO: 1226892 - RNA, 21 nt, Human
aguagcugggauuacaggugc

SEQ ID NO: 1226893 - RNA, 23 nt, Human
agugcaguggugugaucuuggcu

SEQ ID NO: 1226894 - RNA, 24 nt, Human
agugcaguggugugaucuuggcuc

SEQ ID NO: 1226895 - RNA, 24 nt, Human
aucguguuggucaggcuggucucg

SEQ ID NO: 1226896 - RNA, 21 nt, Human
augggguuucaccauguuggu

SEQ ID NO: 1226897 - RNA, 23 nt, Human
augggguuucaccauguugguca

SEQ ID NO: 1226898 - RNA, 25 nt, Human
augggguuucaccauguuggucaag

SEQ ID NO: 1226899 - RNA, 22 nt, Human
caagcaauucuccugccucagc

SEQ ID NO: 1226900 - RNA, 22 nt, Human
caagcaauucuccugccucagc

SEQ ID NO: 1226901 - RNA, 18 nt, Human
caccaugggcuuccacag

SEQ ID NO: 1226902 - RNA, 24 nt, Human
caccauguuggucaagcuggucuc

SEQ ID NO: 1226903 - RNA, 21 nt, Human
caccucuaauuuagacaucau

SEQ ID NO: 1226904 - RNA, 23 nt, Human
caccucuaauuuagacaucauuu

SEQ ID NO: 1226905 - RNA, 24 nt, Human
cacuacacccagcuaauuuuugua

SEQ ID NO: 1226906 - RNA, 21 nt, Human
cacugcaaccuccgccuccug

SEQ ID NO: 1226907 - RNA, 21 nt, Human
cagagugcaguggugugaucu

SEQ ID NO: 1226908 - RNA, 24 nt, Human
cagagugcaguggugugaucuugg

SEQ ID NO: 1226909 - RNA, 19 nt, Human
cagccuccuaaguagcgga

SEQ ID NO: 1226910 - RNA, 20 nt, Human
cagccuccugaguagcuggg

SEQ ID NO: 1226911 - RNA, 20 nt, Human
caggcacucgccaccaugcc

SEQ ID NO: 1226912 - RNA, 19 nt, Human
caggccccccucccacgac

SEQ ID NO: 1226913 - RNA, 24 nt, Human
caggguuucaucguguuggucagg

SEQ ID NO: 1226914 - RNA, 24 nt, Human
caguagagacaggguuucaucgug

SEQ ID NO: 1226915 - RNA, 22 nt, Human
cauaucacgcugaagccagaga

SEQ ID NO: 1226916 - RNA, 25 nt, Human
cauccaguacaacaaaggcaagaac

SEQ ID NO: 1226917 - RNA, 19 nt, Human
caucguguuggucaggcug

SEQ ID NO: 1226918 - RNA, 18 nt, Human
cauuucugauagcuaagg

SEQ ID NO: 1226919 - RNA, 25 nt, Human
ccaagaaagcaggccccccucccac

SEQ ID NO: 1226920 - RNA, 22 nt, Human
ccacuacaccuguugucccagg

SEQ ID NO: 1226921 - RNA, 19 nt, Human
ccaguacaacaaaggcaag

SEQ ID NO: 1226922 - RNA, 22 nt, Human
cccaagaaagcaggccccccuc

SEQ ID NO: 1226923 - RNA, 24 nt, Human
cccaagaaagcaggccccccuccu

SEQ ID NO: 1226924 - RNA, 22 nt, Human
cccccaccaugggcuuccacag

SEQ ID NO: 1226925 - RNA, 21 nt, Human
ccccucccacgacagcuacag

SEQ ID NO: 1226926 - RNA, 26 nt, Human
ccgccuccugguucaagcaauucuuu

SEQ ID NO: 1226927 - RNA, 24 nt, Human
ccuaaguagcggagauuacaggca

SEQ ID NO: 1226928 - RNA, 19 nt, Human
ccuaggcuggagugcaaug

SEQ ID NO: 1226929 - RNA, 24 nt, Human
ccucccacgacagcuacaggaggg

SEQ ID NO: 1226930 - RNA, 18 nt, Human
ccuccuaaguagcggaga

SEQ ID NO: 1226931 - RNA, 23 nt, Human
ccuccugguucaagcaauucucc

SEQ ID NO: 1226932 - RNA, 22 nt, Human
ccucuaauuuagacaucauuuc

SEQ ID NO: 1226933 - RNA, 19 nt, Human
ccucugagucccccuuagg

SEQ ID NO: 1226934 - RNA, 22 nt, Human
ccugaccucaagugauccaccc

SEQ ID NO: 1226935 - RNA, 21 nt, Human
ccugaccucaggugaucuccc

SEQ ID NO: 1226936 - RNA, 22 nt, Human
ccugaguagcugggauuacagg

SEQ ID NO: 1226937 - RNA, 23 nt, Human
ccugaguagcugggauuacaggu

SEQ ID NO: 1226938 - RNA, 24 nt, Human
ccugaguagcugggauuacaggug

SEQ ID NO: 1226939 - RNA, 23 nt, Human
ccugccucagccuccuaaguagc

SEQ ID NO: 1226940 - RNA, 23 nt, Human
ccugccucagccuccugaguagc

SEQ ID NO: 1226941 - RNA, 24 nt, Human
ccugccucagccuccugaguagcu

SEQ ID NO: 1226942 - RNA, 19 nt, Human
ccugguucaagcaauucuc

SEQ ID NO: 1226943 - RNA, 22 nt, Human
ccugguucaagcaauucuccug

SEQ ID NO: 1226944 - RNA, 24 nt, Human
ccuucuggguucaagcaauucucc

SEQ ID NO: 1226945 - RNA, 22 nt, Human
cgacagcuacaggagggcaaag

SEQ ID NO: 1226946 - RNA, 19 nt, Human
cgcugaagccagagaacuc

SEQ ID NO: 1226947 - RNA, 18 nt, Human
cguguuggucaggcuggu

SEQ ID NO: 1226948 - RNA, 23 nt, Human
cuaauuuuuguauuuucaguaga

SEQ ID NO: 1226949 - RNA, 24 nt, Human
cuaguuuuguauuuuuaguagaga

SEQ ID NO: 1226950 - RNA, 23 nt, Human
cuauaagucauacagagaaggga

SEQ ID NO: 1226951 - RNA, 24 nt, Human
cucacugcaaccuccgccuccugg

SEQ ID NO: 1226952 - RNA, 22 nt, Human
cucagcacuugaaauaggaagc

SEQ ID NO: 1226953 - RNA, 24 nt, Human
cucagccuccugaguagcugggau

SEQ ID NO: 1226954 - RNA, 20 nt, Human
cucagucuccugaccucagg

SEQ ID NO: 1226955 - RNA, 20 nt, Human
cucccugcaaccuucugggu

SEQ ID NO: 1226956 - RNA, 24 nt, Human
cuccugguucaagcaauucuccug

SEQ ID NO: 1226957 - RNA, 20 nt, Human
cucugggccucccacaugcu

SEQ ID NO: 1226958 - RNA, 20 nt, Human
cucuuguugccuaggcugga

SEQ ID NO: 1226959 - RNA, 19 nt, Human
cugaggccaagagggcuca

SEQ ID NO: 1226960 - RNA, 21 nt, Human
cugaguagcugggauuacagg

SEQ ID NO: 1226961 - RNA, 23 nt, Human
cugcaaccuccgccuccugguuc

SEQ ID NO: 1226962 - RNA, 23 nt, Human
cugucucuccaaguacccuuccu

SEQ ID NO: 1226963 - RNA, 23 nt, Human
cugugcccaagaaagcaggcccc

SEQ ID NO: 1226964 - RNA, 24 nt, Human
cuguuagacccaaccccccaccau

SEQ ID NO: 1226965 - RNA, 22 nt, Human
cuuccacagcaccacagcaucc

SEQ ID NO: 1226966 - RNA, 23 nt, Human
cuuccuauaagucauacagagaa

SEQ ID NO: 1226967 - RNA, 20 nt, Human
cuugaaauaggaagcucccu

SEQ ID NO: 1226968 - RNA, 22 nt, Human
cuuggcucccugcaaccuucug

SEQ ID NO: 1226969 - RNA, 22 nt, Human
cuuguugccuaggcuggagugc

SEQ ID NO: 1226970 - RNA, 19 nt, Human
gaaagcaggccccccuccc

SEQ ID NO: 1226971 - RNA, 25 nt, Human
gaagcucccuaacacaaggaagccu

SEQ ID NO: 1226972 - RNA, 18 nt, Human
gaccucaagugauccacc

SEQ ID NO: 1226973 - RNA, 21 nt, Human
gaccucaggugaucucccgcc

SEQ ID NO: 1226974 - RNA, 24 nt, Human
gagacaggguuucaucguguuggu

SEQ ID NO: 1226975 - RNA, 24 nt, Human
gagaugggguuucaccauguuggu

SEQ ID NO: 1226976 - RNA, 23 nt, Human
gagauuacaggcacucgccacca

SEQ ID NO: 1226977 - RNA, 23 nt, Human
gagguuuuuaaaggucuuggggg

SEQ ID NO: 1226978 - RNA, 24 nt, Human
gauuacaggcacucgccaccaugc

SEQ ID NO: 1226979 - RNA, 18 nt, Human
gauuacaggugccugcca

SEQ ID NO: 1226980 - RNA, 19 nt, Human
gccuaggcuggagugcaau

SEQ ID NO: 1226981 - RNA, 21 nt, Human
gcucuuguugccuaggcugga

SEQ ID NO: 1226982 - RNA, 19 nt, Human
gcuggagugcaauggcacg

SEQ ID NO: 1226983 - RNA, 23 nt, Human
gcuggucucgaacuccugaccuc

SEQ ID NO: 1226984 - RNA, 24 nt, Human
ggcuggucucgaacuccugaccuc

SEQ ID NO: 1226985 - RNA, 22 nt, Human
gggguuucaccauguuggucaa

SEQ ID NO: 1226986 - RNA, 20 nt, Human
ggguucaagcaauucuccug

SEQ ID NO: 1226987 - RNA, 22 nt, Human
ggguuucaccauguuggucaag

SEQ ID NO: 1226988 - RNA, 19 nt, Human
ggucucgaacuccugaccu

SEQ ID NO: 1226989 - RNA, 23 nt, Human
guagagaugggguuucaccaugu

SEQ ID NO: 1226990 - RNA, 18 nt, Human
guagcugggauuacaggu

SEQ ID NO: 1226991 - RNA, 19 nt, Human
gucucuccaaguacccuuc

SEQ ID NO: 1226992 - RNA, 23 nt, Human
uaaguagcggagauuacaggcac

SEQ ID NO: 1226993 - RNA, 24 nt, Human
uaauuuuuguauuuucaguagaga

SEQ ID NO: 1226994 - RNA, 25 nt, Human
uacagagaagggaauugagaacagc

SEQ ID NO: 1226995 - RNA, 18 nt, Human
uacaggagggcaaaggaa

SEQ ID NO: 1226996 - RNA, 23 nt, Human
uacaggcacucgccaccaugccc

SEQ ID NO: 1226997 - RNA, 22 nt, Human
uagagaugggguuucaccaugu

SEQ ID NO: 1226998 - RNA, 19 nt, Human
uagcggagauuacaggcac

SEQ ID NO: 1226999 - RNA, 24 nt, Human
uaguagagaugggguuucaccaug

SEQ ID NO: 1227000 - RNA, 26 nt, Human
uaguagagaugggguuucaccauguu

SEQ ID NO: 1227001 - RNA, 19 nt, Human
ucaagcaauucuccugccu

SEQ ID NO: 1227002 - RNA, 19 nt, Human
ucaagcaauucuccugccu

SEQ ID NO: 1227003 - RNA, 19 nt, Human
ucacugcaaccuccgccuc

SEQ ID NO: 1227004 - RNA, 23 nt, Human
ucacugcaaccuccgccuccugg

SEQ ID NO: 1227005 - RNA, 24 nt, Human
ucacugcaaccuccgccuccuggu

SEQ ID NO: 1227006 - RNA, 27 nt, Human
ucacugcaaccuccgccuccugguuca

SEQ ID NO: 1227007 - RNA, 20 nt, Human
ucagccuccugaguagcugg

SEQ ID NO: 1227008 - RNA, 21 nt, Human
ucagccuugucucuccugcac

SEQ ID NO: 1227009 - RNA, 20 nt, Human
ucaguagagacaggguuuca

SEQ ID NO: 1227010 - RNA, 24 nt, Human
ucaguagagacaggguuucaucgu

SEQ ID NO: 1227011 - RNA, 24 nt, Human
uccaaguacccuuccugaugccac

SEQ ID NO: 1227012 - RNA, 21 nt, Human
uccacagcaccacagcaucca

SEQ ID NO: 1227013 - RNA, 26 nt, Human
uccauccaccacuacaccuguugucc

SEQ ID NO: 1227014 - RNA, 24 nt, Human
ucccugcaaccuucuggggggccc

SEQ ID NO: 1227015 - RNA, 23 nt, Human
uccgccuccugguucaagcaauu

SEQ ID NO: 1227016 - RNA, 24 nt, Human
uccugaguagcugggauuacaggu

SEQ ID NO: 1227017 - RNA, 24 nt, Human
ucuccugccucagccuccuaagua

SEQ ID NO: 1227018 - RNA, 24 nt, Human
ucuccugccucagccuccugagua

SEQ ID NO: 1227019 - RNA, 21 nt, Human
ucucgaacuccugaccucaag

SEQ ID NO: 1227020 - RNA, 19 nt, Human
ucugaaaauaaacaagugg

SEQ ID NO: 1227021 - RNA, 19 nt, Human
ucugaggccaagagggcuc

SEQ ID NO: 1227022 - RNA, 21 nt, Human
ucuuggggggcucugcaaggu

SEQ ID NO: 1227023 - RNA, 19 nt, Human
ucuuguugccuaggcugga

SEQ ID NO: 1227024 - RNA, 18 nt, Human
ugaccucaggugaucucc

SEQ ID NO: 1227025 - RNA, 22 nt, Human
ugcaguggugugaucuuggcuc

SEQ ID NO: 1227026 - RNA, 20 nt, Human
ugccuaggcuggagugcaau

SEQ ID NO: 1227027 - RNA, 21 nt, Human
ugccuaggcuggagugcaaug

SEQ ID NO: 1227028 - RNA, 24 nt, Human
ugccuaggcuggagugcaauggca

SEQ ID NO: 1227029 - RNA, 23 nt, Human
ugccucagccuccuaaguagcgg

SEQ ID NO: 1227030 - RNA, 24 nt, Human
ugccucagccuccugaguagcugg

SEQ ID NO: 1227031 - RNA, 25 nt, Human
ugcuccauccaccacuacaccuguu

SEQ ID NO: 1227032 - RNA, 24 nt, Human
ugcucuuguugccuaggcuggagu

SEQ ID NO: 1227033 - RNA, 23 nt, Human
uggacacuuccucugaguccccc

SEQ ID NO: 1227034 - RNA, 23 nt, Human
uggagugcaauggcacgaucuca

SEQ ID NO: 1227035 - RNA, 24 nt, Human
uggagugcaauggcacgaucucag

SEQ ID NO: 1227036 - RNA, 24 nt, Human
uggcacgaucucagcucacugcaa

SEQ ID NO: 1227037 - RNA, 21 nt, Human
uggcucagcugaccaaacagu

SEQ ID NO: 1227038 - RNA, 22 nt, Human
uggcucccugcaaccuucuggg

SEQ ID NO: 1227039 - RNA, 21 nt, Human
ugggauuacaggugccugcca

SEQ ID NO: 1227040 - RNA, 22 nt, Human
ugggauuacaggugccugccac

SEQ ID NO: 1227041 - RNA, 22 nt, Human
ugggauuacaggugccugccac

SEQ ID NO: 1227042 - RNA, 24 nt, Human
ugggauuacaggugccugccacua

SEQ ID NO: 1227043 - RNA, 19 nt, Human
ugggccucccacaugcugc

SEQ ID NO: 1227044 - RNA, 24 nt, Human
ugggguuucaccauguuggucaag

SEQ ID NO: 1227045 - RNA, 21 nt, Human
uggguucaagcaauucuccug

SEQ ID NO: 1227046 - RNA, 23 nt, Human
uggguucaagcaauucuccugcc

SEQ ID NO: 1227047 - RNA, 24 nt, Human
uggguucaagcaauucuccugccu

SEQ ID NO: 1227048 - RNA, 21 nt, Human
uggucaagcuggucucagucu

SEQ ID NO: 1227049 - RNA, 24 nt, Human
uggucaggcuggucucgaacuccu

SEQ ID NO: 1227050 - RNA, 23 nt, Human
ugguucaagcaauucuccugccu

SEQ ID NO: 1227051 - RNA, 22 nt, Human
uguugccuaggcuggagugcaa

SEQ ID NO: 1227052 - RNA, 19 nt, Human
uguuggucaggcuggucuc

SEQ ID NO: 1227053 - RNA, 26 nt, Human
uguuuuacucacguccucaacucuca

SEQ ID NO: 1227054 - RNA, 21 nt, Human
uuaaaggucuuggggggcucu

SEQ ID NO: 1227055 - RNA, 21 nt, Human
uuacaggugccugccacuaca

SEQ ID NO: 1227056 - RNA, 18 nt, Human
uuaguagagaugggguuu

SEQ ID NO: 1227057 - RNA, 22 nt, Human
uuaguagagaugggguuucacc

SEQ ID NO: 1227058 - RNA, 24 nt, Human
uuaguagagaugggguuucaccau

SEQ ID NO: 1227059 - RNA, 21 nt, Human
uucaagcaauucuccugccuc

SEQ ID NO: 1227060 - RNA, 21 nt, Human
uucaagcaauucuccugccuc

SEQ ID NO: 1227061 - RNA, 24 nt, Human
uucaagcaauucuccugccucagc

SEQ ID NO: 1227062 - RNA, 24 nt, Human
uucaagcaauucuccugccucagc

SEQ ID NO: 1227063 - RNA, 24 nt, Human
uuccacagcaccacagcauccagu

SEQ ID NO: 1227064 - RNA, 24 nt, Human
uucuggguucaagcaauucuccug

SEQ ID NO: 1227065 - RNA, 18 nt, Human
uugccuaggcuggagugc

SEQ ID NO: 1227066 - RNA, 23 nt, Human
uugcucuuguugccuaggcugga

SEQ ID NO: 1227067 - RNA, 23 nt, Human
uuguauuuuuaguagagaugggg

SEQ ID NO: 1227068 - RNA, 21 nt, Human
uuucaccauguuggucaagcu

SEQ ID NO: 1227069 - RNA, 24 nt, Human
uuugcucuuguugccuaggcugga

SEQ ID NO: 1227070 - RNA, 23 nt, Human
uuuucaguagagacaggguuuca

SEQ ID NO: 1227071 - RNA, 24 nt, Human
uuuugcucuuguugccuaggcugg

SEQ ID NO: 1227072 - RNA, 19 nt, Human
uuuuguauuuuuaguagag

SEQ ID NO: 1227073 - RNA, 20 nt, Human
uuuuguauuuuuaguagaga

SEQ ID NO: 1227074 - RNA, 20 nt, Human
uuuuguauuuuuaguagaga

SEQ ID NO: 1227075 - RNA, 24 nt, Human
uuuuuaguagagaugggguuucac

SEQ ID NO: 1227076 - RNA, 20 nt, Human
uuuuuguauuuucaguagag

SEQ ID NO: 1227077 - RNA, 23 nt, Human
uuuuuguauuuucaguagagaca

SEQ ID NO: 1227078 - RNA, 20 nt, Human
aaaaacgcuggggaacaccc

SEQ ID NO: 1227079 - RNA, 24 nt, Human
aaaaagaaaaacucugugaucugg

SEQ ID NO: 1227080 - RNA, 22 nt, Human
aaaaaggaagucgggaagagaa

SEQ ID NO: 1227081 - RNA, 20 nt, Human
aacaggagcaaaaaaaggaa

SEQ ID NO: 1227082 - RNA, 19 nt, Human
aagagaagcacaaagccag

SEQ ID NO: 1227083 - RNA, 23 nt, Human
aagcagaucccuaaaugagccuc

SEQ ID NO: 1227084 - RNA, 19 nt, Human
aaggggccuaauauuugug

SEQ ID NO: 1227085 - RNA, 22 nt, Human
aagucagaaaaaagguucccag

SEQ ID NO: 1227086 - RNA, 19 nt, Human
acaaaaaggccaaugaccc

SEQ ID NO: 1227087 - RNA, 19 nt, Human
acaaaucccugaagacaac

SEQ ID NO: 1227088 - RNA, 21 nt, Human
acagcagugauggcuggaagc

SEQ ID NO: 1227089 - RNA, 21 nt, Human
acaggagcaaaaaaaggaagu

SEQ ID NO: 1227090 - RNA, 22 nt, Human
acucagaaggaggggaaagagg

SEQ ID NO: 1227091 - RNA, 20 nt, Human
acucuggcaggugugccugg

SEQ ID NO: 1227092 - RNA, 18 nt, Human
agaaaaaagguucccagg

SEQ ID NO: 1227093 - RNA, 18 nt, Human
agaaagcagaucccuaaa

SEQ ID NO: 1227094 - RNA, 18 nt, Human
agagcuccucccagccac

SEQ ID NO: 1227095 - RNA, 19 nt, Human
agcacccccaagggcuccc

SEQ ID NO: 1227096 - RNA, 22 nt, Human
agcuggaaguuggagugacuca

SEQ ID NO: 1227097 - RNA, 24 nt, Human
aggaaaggcucguguucugcagug

SEQ ID NO: 1227098 - RNA, 24 nt, Human
aggaaggaggcauucaggagaaaa

SEQ ID NO: 1227099 - RNA, 19 nt, Human
aggcaggacuugaguggga

SEQ ID NO: 1227100 - RNA, 18 nt, Human
agggggccaggaaggagg

SEQ ID NO: 1227101 - RNA, 18 nt, Human
agugcuccaucgccucuc

SEQ ID NO: 1227102 - RNA, 20 nt, Human
caaagggccucccucauggg

SEQ ID NO: 1227103 - RNA, 23 nt, Human
caaagggccucccucaugggucu

SEQ ID NO: 1227104 - RNA, 19 nt, Human
caacaggagcaaaaaaagg

SEQ ID NO: 1227105 - RNA, 22 nt, Human
caagucagaaaaaagguuccca

SEQ ID NO: 1227106 - RNA, 24 nt, Human
caaugaccccuccuccuggcauuc

SEQ ID NO: 1227107 - RNA, 18 nt, Human
cacacagugaucaggcca

SEQ ID NO: 1227108 - RNA, 19 nt, Human
caccaagucagaaaaaagg

SEQ ID NO: 1227109 - RNA, 24 nt, Human
cacgcagcccuggacccacauuuc

SEQ ID NO: 1227110 - RNA, 21 nt, Human
cagcagugauggcuggaagcc

SEQ ID NO: 1227111 - RNA, 22 nt, Human
caguaacaggcagugggguggg

SEQ ID NO: 1227112 - RNA, 24 nt, Human
caguaacaggcagugggguggguu

SEQ ID NO: 1227113 - RNA, 22 nt, Human
cagucuagggugacucagugga

SEQ ID NO: 1227114 - RNA, 25 nt, Human
ccacagacccacaaagggccucccu

SEQ ID NO: 1227115 - RNA, 22 nt, Human
ccacagcaccaacaauccuguc

SEQ ID NO: 1227116 - RNA, 21 nt, Human
cccaaguuaaggcacucuggc

SEQ ID NO: 1227117 - RNA, 20 nt, Human
cccagccacagacccacaaa

SEQ ID NO: 1227118 - RNA, 22 nt, Human
cccaggacuggggacgaaagac

SEQ ID NO: 1227119 - RNA, 19 nt, Human
ccccugcucugugcugagg

SEQ ID NO: 1227120 - RNA, 25 nt, Human
cccuaaaugagccucugggguccac

SEQ ID NO: 1227121 - RNA, 18 nt, Human
ccucccagccacagaccc

SEQ ID NO: 1227122 - RNA, 18 nt, Human
cgccucucagugagcugg

SEQ ID NO: 1227123 - RNA, 21 nt, Human
cggcuucugguccacgugccc

SEQ ID NO: 1227124 - RNA, 21 nt, Human
cucaaggcccaucuuccccag

SEQ ID NO: 1227125 - RNA, 21 nt, Human
cucaguccaaagagcacgcug

SEQ ID NO: 1227126 - RNA, 21 nt, Human
cuccccacagcaccaacaauc

SEQ ID NO: 1227127 - RNA, 18 nt, Human
cuccucuggugcuggaag

SEQ ID NO: 1227128 - RNA, 23 nt, Human
cuccucuggugcuggaagaugcu

SEQ ID NO: 1227129 - RNA, 18 nt, Human
cucugugcugaggccgcu

SEQ ID NO: 1227130 - RNA, 21 nt, Human
cucugugcugaggccgcugcc

SEQ ID NO: 1227131 - RNA, 21 nt, Human
cugaagacaacgaggcuggcc

SEQ ID NO: 1227132 - RNA, 22 nt, Human
cugaagacaacgaggcuggccc

SEQ ID NO: 1227133 - RNA, 22 nt, Human
cugaaguuacuucaagcuagca

SEQ ID NO: 1227134 - RNA, 23 nt, Human
cuggacacagaacgagcagcccu

SEQ ID NO: 1227135 - RNA, 21 nt, Human
cugguccacgugcccacggcu

SEQ ID NO: 1227136 - RNA, 21 nt, Human
cuguggcugguggcuccccug

SEQ ID NO: 1227137 - RNA, 21 nt, Human
cuugaggcaccagaaaugcuc

SEQ ID NO: 1227138 - RNA, 19 nt, Human
gaagaugcuggcacucagu

SEQ ID NO: 1227139 - RNA, 19 nt, Human
gaagggaagggagggggau

SEQ ID NO: 1227140 - RNA, 21 nt, Human
gacccacaaagggccucccuc

SEQ ID NO: 1227141 - RNA, 21 nt, Human
gacccagcuucccuugagcca

SEQ ID NO: 1227142 - RNA, 22 nt, Human
gacccagcuucccuugagccag

SEQ ID NO: 1227143 - RNA, 18 nt, Human
gagcuccucccagccaca

SEQ ID NO: 1227144 - RNA, 18 nt, Human
gcagugggguggguucgg

SEQ ID NO: 1227145 - RNA, 18 nt, Human
gccucucagugagcugga

SEQ ID NO: 1227146 - RNA, 20 nt, Human
gccucugggguccacggcuu

SEQ ID NO: 1227147 - RNA, 23 nt, Human
gcgggucuugggagcugggccuc

SEQ ID NO: 1227148 - RNA, 20 nt, Human
gcugccuguggcugguggcu

SEQ ID NO: 1227149 - RNA, 22 nt, Human
ggagaaaacaccaagucagaaa

SEQ ID NO: 1227150 - RNA, 20 nt, Human
ggcuggccguggaugugcag

SEQ ID NO: 1227151 - RNA, 21 nt, Human
gggacgaaagacucagaagga

SEQ ID NO: 1227152 - RNA, 20 nt, Human
gggcucaguggcugccugug

SEQ ID NO: 1227153 - RNA, 18 nt, Human
gggcuugcagcaccccca

SEQ ID NO: 1227154 - RNA, 20 nt, Human
ggggaugagaaaaacgcugg

SEQ ID NO: 1227155 - RNA, 24 nt, Human
ggggauggaugugauggggugugg

SEQ ID NO: 1227156 - RNA, 18 nt, Human
ggggccaggaaggaggca

SEQ ID NO: 1227157 - RNA, 21 nt, Human
guaggggaagggaagggaggg

SEQ ID NO: 1227158 - RNA, 21 nt, Human
gugcugagcugggcacuguau

SEQ ID NO: 1227159 - RNA, 22 nt, Human
uagaaggggccuaauauuugug

SEQ ID NO: 1227160 - RNA, 24 nt, Human
uagcaacagcagugauggcuggaa

SEQ ID NO: 1227161 - RNA, 20 nt, Human
ucaaaggugcuaagcuggga

SEQ ID NO: 1227162 - RNA, 18 nt, Human
ucagaaggaggggaaaga

SEQ ID NO: 1227163 - RNA, 27 nt, Human
ucaggccagguaacggugacugagacg

SEQ ID NO: 1227164 - RNA, 22 nt, Human
ucaguccaaagagcacgcugcc

SEQ ID NO: 1227165 - RNA, 23 nt, Human
ucaguccaaagagcacgcugccc

SEQ ID NO: 1227166 - RNA, 21 nt, Human
ucaguuacaccagcuucuccc

SEQ ID NO: 1227167 - RNA, 24 nt, Human
ucccuaaaugagccucuggggucc

SEQ ID NO: 1227168 - RNA, 24 nt, Human
ucccucaauaaaguugauaaggau

SEQ ID NO: 1227169 - RNA, 26 nt, Human
ucccugaagacaacgaggcuggccgu

SEQ ID NO: 1227170 - RNA, 21 nt, Human
ucccuugagccagcucagucc

SEQ ID NO: 1227171 - RNA, 19 nt, Human
uccucccagccacagaccc

SEQ ID NO: 1227172 - RNA, 20 nt, Human
ucugugcugaggccgcugcc

SEQ ID NO: 1227173 - RNA, 20 nt, Human
ucuuccccagagcuccuccc

SEQ ID NO: 1227174 - RNA, 21 nt, Human
ugaacaaaucccugaagacaa

SEQ ID NO: 1227175 - RNA, 21 nt, Human
ugaagacaacgaggcuggccg

SEQ ID NO: 1227176 - RNA, 22 nt, Human
ugagaaaaacgcuggggaacac

SEQ ID NO: 1227177 - RNA, 21 nt, Human
ugagugggaccgugaagggca

SEQ ID NO: 1227178 - RNA, 22 nt, Human
ugccaagggcucaguggcugcc

SEQ ID NO: 1227179 - RNA, 24 nt, Human
ugccaagggcucaguggcugccgc

SEQ ID NO: 1227180 - RNA, 22 nt, Human
ugcuaagcugggauuucucaag

SEQ ID NO: 1227181 - RNA, 23 nt, Human
ugcuggaagaugcuggcacucag

SEQ ID NO: 1227182 - RNA, 21 nt, Human
uggaaguuggagugacucacu

SEQ ID NO: 1227183 - RNA, 22 nt, Human
uggacccacauuucucaacagg

SEQ ID NO: 1227184 - RNA, 23 nt, Human
uggcuggaagccagauugugcuu

SEQ ID NO: 1227185 - RNA, 19 nt, Human
ugggagcugggccuccaga

SEQ ID NO: 1227186 - RNA, 20 nt, Human
ugggagcugggccuccagag

SEQ ID NO: 1227187 - RNA, 18 nt, Human
uggggauggaugugaugg

SEQ ID NO: 1227188 - RNA, 22 nt, Human
uggguuaucuuugcauucuaga

SEQ ID NO: 1227189 - RNA, 19 nt, Human
uguaggggaagggaaggga

SEQ ID NO: 1227190 - RNA, 23 nt, Human
ugucaaaggugcuaagcugggau

SEQ ID NO: 1227191 - RNA, 24 nt, Human
ugugaugggguguggcacacagug

SEQ ID NO: 1227192 - RNA, 18 nt, Human
ugugcugaggccgcugcc

SEQ ID NO: 1227193 - RNA, 28 nt, Human
uucaggagaaaacaccaagucagaaaaa

SEQ ID NO: 1227194 - RNA, 24 nt, Human
uuguggggauggaugugauggggu

SEQ ID NO: 1227195 - RNA, 25 nt, Human
aaaaaaaaaaaaaugucauacagaa

SEQ ID NO: 1227196 - RNA, 22 nt, Human
aaaaaaaaaaggaacagauugg

SEQ ID NO: 1227197 - RNA, 22 nt, Human
aaaaacagaggaaauuuaaggc

SEQ ID NO: 1227198 - RNA, 23 nt, Human
aaaaagcuccagauacagacuaa

SEQ ID NO: 1227199 - RNA, 20 nt, Human
aacauggcaaaaucccaucu

SEQ ID NO: 1227200 - RNA, 21 nt, Human
aacauggcaaaaucccaucuc

SEQ ID NO: 1227201 - RNA, 24 nt, Human
aagaaaaaugacuuuuagugccac

SEQ ID NO: 1227202 - RNA, 23 nt, Human
aaguggagugcccuaacuuuucu

SEQ ID NO: 1227203 - RNA, 24 nt, Human
acacccuugggaggcugagguggg

SEQ ID NO: 1227204 - RNA, 19 nt, Human
acagagaucccauuucaaa

SEQ ID NO: 1227205 - RNA, 23 nt, Human
acccugaauuagauauagaaauu

SEQ ID NO: 1227206 - RNA, 21 nt, Human
agacuaaaaggaagcuaccgg

SEQ ID NO: 1227207 - RNA, 18 nt, Human
agagguugcagugagccg

SEQ ID NO: 1227208 - RNA, 22 nt, Human
agagguugcagugagccgagau

SEQ ID NO: 1227209 - RNA, 24 nt, Human
agagguugcagugagccgagaugg

SEQ ID NO: 1227210 - RNA, 22 nt, Human
agcaaaacagccuagcucccuc

SEQ ID NO: 1227211 - RNA, 23 nt, Human
agcaaauugauucuaacauucau

SEQ ID NO: 1227212 - RNA, 18 nt, Human
agccaagauacuaaaaga

SEQ ID NO: 1227213 - RNA, 24 nt, Human
agccugggcaacauggcaaaaucc

SEQ ID NO: 1227214 - RNA, 23 nt, Human
agcugggcgugguaguguguacu

SEQ ID NO: 1227215 - RNA, 21 nt, Human
aggaagcuaccggcucacugu

SEQ ID NO: 1227216 - RNA, 24 nt, Human
aggaauucgagaccagccugggca

SEQ ID NO: 1227217 - RNA, 24 nt, Human
aggacuuuaggaggcugagguggg

SEQ ID NO: 1227218 - RNA, 24 nt, Human
aggaucacuugaauccaggaauuc

SEQ ID NO: 1227219 - RNA, 24 nt, Human
aggcacaguggcucaugccuauaa

SEQ ID NO: 1227220 - RNA, 21 nt, Human
aggcagagguugcagugagcc

SEQ ID NO: 1227221 - RNA, 24 nt, Human
aggcagagguugcagugagccgag

SEQ ID NO: 1227222 - RNA, 24 nt, Human
aggcugaggugggaggaucacuug

SEQ ID NO: 1227223 - RNA, 24 nt, Human
aggcugaggugggaggaucacuug

SEQ ID NO: 1227224 - RNA, 18 nt, Human
aggugggaggaucacuug

SEQ ID NO: 1227225 - RNA, 18 nt, Human
aggugggaggaucacuug

SEQ ID NO: 1227226 - RNA, 23 nt, Human
aggugggaggaucacuugaaucc

SEQ ID NO: 1227227 - RNA, 23 nt, Human
aggugggaggaucacuugagcuc

SEQ ID NO: 1227228 - RNA, 24 nt, Human
aguggcucaugccuauaauccuag

SEQ ID NO: 1227229 - RNA, 18 nt, Human
auacagaaaaaucagguu

SEQ ID NO: 1227230 - RNA, 23 nt, Human
aucacuugagcucaggaggcaga

SEQ ID NO: 1227231 - RNA, 22 nt, Human
auccauguguaaagcaauccug

SEQ ID NO: 1227232 - RNA, 19 nt, Human
augccuauaauccuaggac

SEQ ID NO: 1227233 - RNA, 22 nt, Human
caaaaacacacauuagcugggc

SEQ ID NO: 1227234 - RNA, 23 nt, Human
cacacccuugggaggcugaggug

SEQ ID NO: 1227235 - RNA, 24 nt, Human
cacacccuugggaggcugaggugg

SEQ ID NO: 1227236 - RNA, 22 nt, Human
caccauguguugauuuuaacag

SEQ ID NO: 1227237 - RNA, 20 nt, Human
cacuugaauccaggaauucg

SEQ ID NO: 1227238 - RNA, 22 nt, Human
caggugagaaaaugucacggua

SEQ ID NO: 1227239 - RNA, 20 nt, Human
caugccuauaauccuaggac

SEQ ID NO: 1227240 - RNA, 19 nt, Human
cauggcacuccaaccuggg

SEQ ID NO: 1227241 - RNA, 23 nt, Human
cauggcacuccaaccugggcgac

SEQ ID NO: 1227242 - RNA, 24 nt, Human
cauggcacuccaaccugggcgaca

SEQ ID NO: 1227243 - RNA, 22 nt, Human
ccacgugccuugcaauuaucuc

SEQ ID NO: 1227244 - RNA, 24 nt, Human
ccauggcacuccaaccugggcgac

SEQ ID NO: 1227245 - RNA, 18 nt, Human
ccugaauuagauauagaa

SEQ ID NO: 1227246 - RNA, 24 nt, Human
ccugggcaacauggcaaaauccca

SEQ ID NO: 1227247 - RNA, 24 nt, Human
cucaugccuauaauccuaggacuu

SEQ ID NO: 1227248 - RNA, 18 nt, Human
cucugaaaaaaaaaaaaa

SEQ ID NO: 1227249 - RNA, 18 nt, Human
cuggauuaucauaagugg

SEQ ID NO: 1227250 - RNA, 18 nt, Human
cuuucuuuuuuuucaacc

SEQ ID NO: 1227251 - RNA, 21 nt, Human
gaaaaaucagguucauaaaag

SEQ ID NO: 1227252 - RNA, 24 nt, Human
gaucacuugaauccaggaauucga

SEQ ID NO: 1227253 - RNA, 24 nt, Human
gaucacuugagcucaggaggcaga

SEQ ID NO: 1227254 - RNA, 23 nt, Human
gcaaaacagccuagcucccucaa

SEQ ID NO: 1227255 - RNA, 21 nt, Human
gcacuccaaccugggcgacag

SEQ ID NO: 1227256 - RNA, 24 nt, Human
gcucaggaggcagagguugcagug

SEQ ID NO: 1227257 - RNA, 26 nt, Human
ggaaaagacaguaaaaacauuuccuu

SEQ ID NO: 1227258 - RNA, 18 nt, Human
ggaagaccuucaaaauau

SEQ ID NO: 1227259 - RNA, 22 nt, Human
ggaggaucacuugaauccagga

SEQ ID NO: 1227260 - RNA, 22 nt, Human
ggaggcagagguugcagugagc

SEQ ID NO: 1227261 - RNA, 22 nt, Human
ggaggcugaggugggaggauca

SEQ ID NO: 1227262 - RNA, 21 nt, Human
gggaaaagacaguaaaaacau

SEQ ID NO: 1227263 - RNA, 24 nt, Human
gggggccaggcacaguggcucaug

SEQ ID NO: 1227264 - RNA, 24 nt, Human
guugcagugagccgagauggugcc

SEQ ID NO: 1227265 - RNA, 22 nt, Human
uaaaaggaagcuaccggcucac

SEQ ID NO: 1227266 - RNA, 19 nt, Human
uaacuuuucuuauuucaua

SEQ ID NO: 1227267 - RNA, 23 nt, Human
uaagccagaagauaaaccuuaca

SEQ ID NO: 1227268 - RNA, 24 nt, Human
uagcaaaacagccuagcucccuca

SEQ ID NO: 1227269 - RNA, 19 nt, Human
uagccauuaauuauuaagc

SEQ ID NO: 1227270 - RNA, 18 nt, Human
uagccuaauagucuagag

SEQ ID NO: 1227271 - RNA, 24 nt, Human
uaggacuuuaggaggcugaggugg

SEQ ID NO: 1227272 - RNA, 19 nt, Human
uaggaggcugaggugggag

SEQ ID NO: 1227273 - RNA, 24 nt, Human
uaggaggcugaggugggaggauca

SEQ ID NO: 1227274 - RNA, 24 nt, Human
uaggcaaaaacuaugguuuauguu

SEQ ID NO: 1227275 - RNA, 18 nt, Human
uaugcaaaauaauuucac

SEQ ID NO: 1227276 - RNA, 19 nt, Human
ucaaaaaaaaaaaggaaca

SEQ ID NO: 1227277 - RNA, 18 nt, Human
uccacagaagaaaaauga

SEQ ID NO: 1227278 - RNA, 24 nt, Human
ucccauuucaaaaaaaaaaaggaa

SEQ ID NO: 1227279 - RNA, 21 nt, Human
ucgagaccagccugggcaaca

SEQ ID NO: 1227280 - RNA, 23 nt, Human
ucucuagcaaaacagccuagcuc

SEQ ID NO: 1227281 - RNA, 22 nt, Human
ugagccgagauggugccauggc

SEQ ID NO: 1227282 - RNA, 18 nt, Human
ugagggggccaggcacag

SEQ ID NO: 1227283 - RNA, 19 nt, Human
ugaggugggaggaucacuu

SEQ ID NO: 1227284 - RNA, 19 nt, Human
ugaggugggaggaucacuu

SEQ ID NO: 1227285 - RNA, 20 nt, Human
ugaggugggaggaucacuug

SEQ ID NO: 1227286 - RNA, 20 nt, Human
ugaggugggaggaucacuug

SEQ ID NO: 1227287 - RNA, 21 nt, Human
ugaggugggaggaucacuuga

SEQ ID NO: 1227288 - RNA, 22 nt, Human
ugaggugggaggaucacuugaa

SEQ ID NO: 1227289 - RNA, 23 nt, Human
ugaggugggaggaucacuugaau

SEQ ID NO: 1227290 - RNA, 23 nt, Human
ugaggugggaggaucacuugagc

SEQ ID NO: 1227291 - RNA, 24 nt, Human
ugaggugggaggaucacuugagcu

SEQ ID NO: 1227292 - RNA, 19 nt, Human
ugauauauuuccaagaaug

SEQ ID NO: 1227293 - RNA, 20 nt, Human
ugauauauuuccaagaaugu

SEQ ID NO: 1227294 - RNA, 21 nt, Human
ugcauuguuaggcuacacuga

SEQ ID NO: 1227295 - RNA, 24 nt, Human
ugccacgugccuugcaauuaucuc

SEQ ID NO: 1227296 - RNA, 22 nt, Human
ugccauggcacuccaaccuggg

SEQ ID NO: 1227297 - RNA, 19 nt, Human
uggcccucaggaaauggcu

SEQ ID NO: 1227298 - RNA, 19 nt, Human
uggcucaugccuauaaucc

SEQ ID NO: 1227299 - RNA, 19 nt, Human
uggcucaugccuauaaucc

SEQ ID NO: 1227300 - RNA, 21 nt, Human
uggcucaugccuauaauccua

SEQ ID NO: 1227301 - RNA, 24 nt, Human
ugggaggaucacuugagcucagga

SEQ ID NO: 1227302 - RNA, 19 nt, Human
ugggaggcugaggugggag

SEQ ID NO: 1227303 - RNA, 24 nt, Human
ugggaggcugaggugggaggauca

SEQ ID NO: 1227304 - RNA, 25 nt, Human
ugugaaaaacagaggaaauuuaagg

SEQ ID NO: 1227305 - RNA, 21 nt, Human
ugugugucugggaaaagacag

SEQ ID NO: 1227306 - RNA, 21 nt, Human
uuaagccagaagauaaaccuu

SEQ ID NO: 1227307 - RNA, 19 nt, Human
uuagcugggcgugguagug

SEQ ID NO: 1227308 - RNA, 20 nt, Human
uuagcugggcgugguagugu

SEQ ID NO: 1227309 - RNA, 22 nt, Human
uuagcugggcgugguagugugu

SEQ ID NO: 1227310 - RNA, 23 nt, Human
uuccuuaaauuuucugggcuaua

SEQ ID NO: 1227311 - RNA, 22 nt, Human
uugcagugagccgagauggugc

SEQ ID NO: 1227312 - RNA, 25 nt, Human
uugggaggcugaggugggaggauca

SEQ ID NO: 1227313 - RNA, 19 nt, Human
uuuaaggcagaugguaacu

SEQ ID NO: 1227314 - RNA, 24 nt, Human
uuugugcauccauguguaaagcaa

SEQ ID NO: 1227315 - RNA, 21 nt, Human
uuuuaagccagaagauaaacc

SEQ ID NO: 1227316 - RNA, 23 nt, Human
uuuuaagccagaagauaaaccuu

SEQ ID NO: 1227317 - RNA, 22 nt, Human
aaaaugucuacugauuccggca

SEQ ID NO: 1227318 - RNA, 19 nt, Human
aaauaggagguagagacaa

SEQ ID NO: 1227319 - RNA, 21 nt, Human
aaauaggagguagagacaagg

SEQ ID NO: 1227320 - RNA, 18 nt, Human
aacaaaauacagcacuac

SEQ ID NO: 1227321 - RNA, 22 nt, Human
aacacuggggcuaacucuacca

SEQ ID NO: 1227322 - RNA, 18 nt, Human
aaccagcaagagcggccc

SEQ ID NO: 1227323 - RNA, 18 nt, Human
aagaaauaucugaacaaa

SEQ ID NO: 1227324 - RNA, 19 nt, Human
aagcagacccgcagggccc

SEQ ID NO: 1227325 - RNA, 19 nt, Human
aagcccacagcaacagucu

SEQ ID NO: 1227326 - RNA, 20 nt, Human
aagccgggguggacuggggc

SEQ ID NO: 1227327 - RNA, 26 nt, Human
aagcugaagguagagaaaggggaccc

SEQ ID NO: 1227328 - RNA, 19 nt, Human
aaugucuacugauuccggc

SEQ ID NO: 1227329 - RNA, 22 nt, Human
acacugcaaccaugggcuuccc

SEQ ID NO: 1227330 - RNA, 22 nt, Human
acagcaagaauuggccuaaagc

SEQ ID NO: 1227331 - RNA, 20 nt, Human
accaccaccccgccagggag

SEQ ID NO: 1227332 - RNA, 24 nt, Human
accuggagacaagcccacagcaac

SEQ ID NO: 1227333 - RNA, 19 nt, Human
agaaagccacggugaccac

SEQ ID NO: 1227334 - RNA, 21 nt, Human
agaaagccacggugaccacca

SEQ ID NO: 1227335 - RNA, 23 nt, Human
agaaguucugcggcgacaauucu

SEQ ID NO: 1227336 - RNA, 20 nt, Human
agcaggaagaauagcccaaa

SEQ ID NO: 1227337 - RNA, 21 nt, Human
aguaguaggcaccugaguugc

SEQ ID NO: 1227338 - RNA, 18 nt, Human
caaagggaggcauccuuu

SEQ ID NO: 1227339 - RNA, 21 nt, Human
caacaaguuaaaaguguggaa

SEQ ID NO: 1227340 - RNA, 19 nt, Human
cacacagguaaauauguac

SEQ ID NO: 1227341 - RNA, 22 nt, Human
cacagcaacagucuaggugaga

SEQ ID NO: 1227342 - RNA, 20 nt, Human
caccccgccagggaggccag

SEQ ID NO: 1227343 - RNA, 24 nt, Human
caccguggcagccgucacggagcc

SEQ ID NO: 1227344 - RNA, 23 nt, Human
cacugcaaccaugggcuucccaa

SEQ ID NO: 1227345 - RNA, 23 nt, Human
cacuuucagcuagguuuugggag

SEQ ID NO: 1227346 - RNA, 24 nt, Human
cagcuguaacugagacaugcacgg

SEQ ID NO: 1227347 - RNA, 23 nt, Human
caggccagggaaagcagacccgc

SEQ ID NO: 1227348 - RNA, 18 nt, Human
caugcacggggcaugugc

SEQ ID NO: 1227349 - RNA, 18 nt, Human
caugggggacacgacccu

SEQ ID NO: 1227350 - RNA, 25 nt, Human
ccaccaccccgccagggaggccaga

SEQ ID NO: 1227351 - RNA, 22 nt, Human
ccaccccgccagggaggccaga

SEQ ID NO: 1227352 - RNA, 19 nt, Human
ccagggaaagcagacccgc

SEQ ID NO: 1227353 - RNA, 19 nt, Human
cccacgggcaccuccgcca

SEQ ID NO: 1227354 - RNA, 21 nt, Human
cccagcaaccccgaaagucgc

SEQ ID NO: 1227355 - RNA, 26 nt, Human
cccgcacgcuccacagguuucaacca

SEQ ID NO: 1227356 - RNA, 21 nt, Human
cccgcgguccuagccugccug

SEQ ID NO: 1227357 - RNA, 26 nt, Human
ccgcgcccacgggcaccuccgccacc

SEQ ID NO: 1227358 - RNA, 25 nt, Human
ccuacagcaagaauuggccuaaagc

SEQ ID NO: 1227359 - RNA, 19 nt, Human
ccugagguggaggccaaca

SEQ ID NO: 1227360 - RNA, 23 nt, Human
ccugcgagcagccgcuccagggc

SEQ ID NO: 1227361 - RNA, 21 nt, Human
cggcccgcggcgccggggugg

SEQ ID NO: 1227362 - RNA, 19 nt, Human
cuccagggcucgagauugg

SEQ ID NO: 1227363 - RNA, 24 nt, Human
cuccucccagcaaccccgaaaguc

SEQ ID NO: 1227364 - RNA, 19 nt, Human
cucuaccaugucuccuccc

SEQ ID NO: 1227365 - RNA, 23 nt, Human
cucugggccuacagcaagaauug

SEQ ID NO: 1227366 - RNA, 18 nt, Human
cugacagccgugucccuu

SEQ ID NO: 1227367 - RNA, 18 nt, Human
cuggaacacgggaagguc

SEQ ID NO: 1227368 - RNA, 24 nt, Human
cuguaacugagacaugcacggggc

SEQ ID NO: 1227369 - RNA, 21 nt, Human
gacaugcacggggcaugugca

SEQ ID NO: 1227370 - RNA, 19 nt, Human
gcccaaagggaggcauccu

SEQ ID NO: 1227371 - RNA, 23 nt, Human
gcgcaggucacuguaggugaucu

SEQ ID NO: 1227372 - RNA, 20 nt, Human
gcgccuucccgccucgcgcc

SEQ ID NO: 1227373 - RNA, 24 nt, Human
gcggcgcggagacgucggcgggcc

SEQ ID NO: 1227374 - RNA, 21 nt, Human
gcuggaacacgggaaggucug

SEQ ID NO: 1227375 - RNA, 23 nt, Human
ggaaagcagacccgcagggcccg

SEQ ID NO: 1227376 - RNA, 21 nt, Human
ggacacaaaaacuaacugaug

SEQ ID NO: 1227377 - RNA, 23 nt, Human
ggacggggcgcucagguuuggau

SEQ ID NO: 1227378 - RNA, 24 nt, Human
ggagcccuuccgcgucccgagcgc

SEQ ID NO: 1227379 - RNA, 19 nt, Human
ggcuuuugcugugucacgu

SEQ ID NO: 1227380 - RNA, 19 nt, Human
gggcagugccgcggaggag

SEQ ID NO: 1227381 - RNA, 18 nt, Human
gguggccgggcgggcggc

SEQ ID NO: 1227382 - RNA, 25 nt, Human
gucugauuuuaaagcccaaacucug

SEQ ID NO: 1227383 - RNA, 21 nt, Human
uaaaaagaaaacggaugaggu

SEQ ID NO: 1227384 - RNA, 21 nt, Human
uacagcacuacuauaagugag

SEQ ID NO: 1227385 - RNA, 24 nt, Human
uauggcacaggguggcaccccuga

SEQ ID NO: 1227386 - RNA, 23 nt, Human
uauugcuguggcaagaaugugga

SEQ ID NO: 1227387 - RNA, 19 nt, Human
ucaacauuugccauguguc

SEQ ID NO: 1227388 - RNA, 20 nt, Human
ucccgagcgccaaggcaccu

SEQ ID NO: 1227389 - RNA, 18 nt, Human
ucccucccaagaagcuca

SEQ ID NO: 1227390 - RNA, 19 nt, Human
uccgccaccguggcagccg

SEQ ID NO: 1227391 - RNA, 21 nt, Human
uccgccaccguggcagccguc

SEQ ID NO: 1227392 - RNA, 23 nt, Human
ucuccgggaaaacauggcuguca

SEQ ID NO: 1227393 - RNA, 22 nt, Human
ucucgcggcuuugcugucgccu

SEQ ID NO: 1227394 - RNA, 25 nt, Human
ucugaccgggggcgggaccagcgcc

SEQ ID NO: 1227395 - RNA, 20 nt, Human
ucugauaaauccuucccuuu

SEQ ID NO: 1227396 - RNA, 18 nt, Human
ugaagauauaaggcuccg

SEQ ID NO: 1227397 - RNA, 23 nt, Human
ugaccgggggcgggaccagcgcc

SEQ ID NO: 1227398 - RNA, 24 nt, Human
ugagguaguggaagauccagggac

SEQ ID NO: 1227399 - RNA, 21 nt, Human
ugagguggaggccaacaaguu

SEQ ID NO: 1227400 - RNA, 21 nt, Human
ugaucuggggacgggggaagg

SEQ ID NO: 1227401 - RNA, 24 nt, Human
ugcacaggacucagcuuacuaaua

SEQ ID NO: 1227402 - RNA, 18 nt, Human
ugcagugguggacagaca

SEQ ID NO: 1227403 - RNA, 22 nt, Human
ugcauuaagaaauaucugaaca

SEQ ID NO: 1227404 - RNA, 24 nt, Human
uggaggcaauauggcacagggugg

SEQ ID NO: 1227405 - RNA, 21 nt, Human
uggcaagaauguggaggacac

SEQ ID NO: 1227406 - RNA, 19 nt, Human
ugucuccucccagcaaccc

SEQ ID NO: 1227407 - RNA, 28 nt, Human
uuaaagcccaaacucugggccuacuguc

SEQ ID NO: 1227408 - RNA, 22 nt, Human
uuggccuaaagcaauaauuuaa

SEQ ID NO: 1227409 - RNA, 20 nt, Human
uuguucccucccaagaagcu

SEQ ID NO: 1227410 - RNA, 19 nt, Human
uuuaaagcccaaacucugg

SEQ ID NO: 1227411 - RNA, 20 nt, Human
aggagucggaggagcccgac

SEQ ID NO: 1227412 - RNA, 21 nt, Human
ggguucguggcgcggccggug

SEQ ID NO: 1227413 - RNA, 19 nt, Human
aauucugcucugaaucugu

SEQ ID NO: 1227414 - RNA, 24 nt, Human
accauuauauacugccugucuuug

SEQ ID NO: 1227415 - RNA, 22 nt, Human
auuuucucucuucuuuucuugg

SEQ ID NO: 1227416 - RNA, 20 nt, Human
cauuugcaugaaaugcccuu

SEQ ID NO: 1227417 - RNA, 23 nt, Human
gaaagaagacauucuuugaaugu

SEQ ID NO: 1227418 - RNA, 26 nt, Human
gugaacuuagauugucuguuugugcu

SEQ ID NO: 1227419 - RNA, 24 nt, Human
guguuaauaguacccuugaauaac

SEQ ID NO: 1227420 - RNA, 19 nt, Human
uagaauucugcucugaauc

SEQ ID NO: 1227421 - RNA, 19 nt, Human
uauccaacucuucuagguu

SEQ ID NO: 1227422 - RNA, 21 nt, Human
uauguuuuguauuuguuguug

SEQ ID NO: 1227423 - RNA, 27 nt, Human
ucaguggugucaguuguaauauccccu

SEQ ID NO: 1227424 - RNA, 24 nt, Human
ucccagaggucuugauagguugug

SEQ ID NO: 1227425 - RNA, 22 nt, Human
ucugguagaauucugcucugaa

SEQ ID NO: 1227426 - RNA, 26 nt, Human
ucuuuuagcuacuguugcuuuaaagu

SEQ ID NO: 1227427 - RNA, 21 nt, Human
ugaaagaagacauucuuugaa

SEQ ID NO: 1227428 - RNA, 22 nt, Human
ugaaaggauugguaucauuucu

SEQ ID NO: 1227429 - RNA, 20 nt, Human
ugucucauaugagaauagcu

SEQ ID NO: 1227430 - RNA, 25 nt, Human
uguuguuguucuugugucaauuuca

SEQ ID NO: 1227431 - RNA, 23 nt, Human
uuaccauuucaaucuugcugcuu

SEQ ID NO: 1227432 - RNA, 21 nt, Human
uuccugcuucucugguucccu

SEQ ID NO: 1227433 - RNA, 21 nt, Human
uuggcuuguuccugcuucucu

SEQ ID NO: 1227434 - RNA, 23 nt, Human
uuguuuugucucauaugagaaua

SEQ ID NO: 1227435 - RNA, 18 nt, Human
uuuggauuuucucucuuc

SEQ ID NO: 1227436 - RNA, 23 nt, Human
uuugugcucuuucagacuuuuug

SEQ ID NO: 1227437 - RNA, 22 nt, Human
aacacaguuuuuaucuacugau

SEQ ID NO: 1227438 - RNA, 18 nt, Human
aauggaauuguacaguau

SEQ ID NO: 1227439 - RNA, 18 nt, Human
uacaguauaguaaacaca

SEQ ID NO: 1227440 - RNA, 20 nt, Human
uccuuuauuugcugcugugu

SEQ ID NO: 1227441 - RNA, 24 nt, Human
ucucacaaccaccuauauauuucu

SEQ ID NO: 1227442 - RNA, 24 nt, Human
uucuggaugcuucauguaaaugga

SEQ ID NO: 1227443 - RNA, 24 nt, Human
aaaagugcugagauuauaggcaug

SEQ ID NO: 1227444 - RNA, 21 nt, Human
aaacaaacacugccacaaaca

SEQ ID NO: 1227445 - RNA, 22 nt, Human
aaacacgguuauguccuucuac

SEQ ID NO: 1227446 - RNA, 18 nt, Human
aaacaggcucuaucucca

SEQ ID NO: 1227447 - RNA, 24 nt, Human
aaagugcugagauuauaggcauga

SEQ ID NO: 1227448 - RNA, 20 nt, Human
aagagcaauuugaggcugcu

SEQ ID NO: 1227449 - RNA, 24 nt, Human
aagugauccuccugucuuggccuc

SEQ ID NO: 1227450 - RNA, 22 nt, Human
acuaaguacaaaaaaacuccua

SEQ ID NO: 1227451 - RNA, 26 nt, Human
acugagcuccagccaugucuuaagag

SEQ ID NO: 1227452 - RNA, 21 nt, Human
acuucauucaaugaagacuga

SEQ ID NO: 1227453 - RNA, 26 nt, Human
agacagcaaacaaaauaaagggaccc

SEQ ID NO: 1227454 - RNA, 22 nt, Human
agacgcaaacguccaaagugac

SEQ ID NO: 1227455 - RNA, 23 nt, Human
agaggaaggugaggaccucaggc

SEQ ID NO: 1227456 - RNA, 22 nt, Human
agauuauaggcaugagccacug

SEQ ID NO: 1227457 - RNA, 20 nt, Human
aggaugcucaacccugggcu

SEQ ID NO: 1227458 - RNA, 19 nt, Human
aggcaugagccacugugcc

SEQ ID NO: 1227459 - RNA, 24 nt, Human
aggggagacagacagcaaacaaaa

SEQ ID NO: 1227460 - RNA, 23 nt, Human
agguugguugaucuugaacuccu

SEQ ID NO: 1227461 - RNA, 23 nt, Human
aguaaaacaaacacugccacaaa

SEQ ID NO: 1227462 - RNA, 18 nt, Human
aguagucacaugguuacu

SEQ ID NO: 1227463 - RNA, 22 nt, Human
augaauaauaaggucccuguuu

SEQ ID NO: 1227464 - RNA, 29 nt, Human
augugcagguacauauaugaauauaacac

SEQ ID NO: 1227465 - RNA, 19 nt, Human
caaaaaaacuccuagacuu

SEQ ID NO: 1227466 - RNA, 24 nt, Human
caaaagugcugagauuauaggcau

SEQ ID NO: 1227467 - RNA, 21 nt, Human
caaaauaaaucaauauaccac

SEQ ID NO: 1227468 - RNA, 23 nt, Human
caaacacugccacaaacacccuc

SEQ ID NO: 1227469 - RNA, 19 nt, Human
caaggcuuuuccaaagguc

SEQ ID NO: 1227470 - RNA, 19 nt, Human
caccuaaaccccuuaagag

SEQ ID NO: 1227471 - RNA, 20 nt, Human
caccuaaaccccuuaagagc

SEQ ID NO: 1227472 - RNA, 25 nt, Human
cagcaaacaaaauaaaucaauauac

SEQ ID NO: 1227473 - RNA, 21 nt, Human
cagcaaacaggcucuaucucc

SEQ ID NO: 1227474 - RNA, 22 nt, Human
cagcugcagcaucucuguugca

SEQ ID NO: 1227475 - RNA, 21 nt, Human
caggcucaugucagaagugac

SEQ ID NO: 1227476 - RNA, 21 nt, Human
caggcucccaguguaacuccu

SEQ ID NO: 1227477 - RNA, 20 nt, Human
caguaaaacaaacacugcca

SEQ ID NO: 1227478 - RNA, 20 nt, Human
caguaggguuuaagacaaaa

SEQ ID NO: 1227479 - RNA, 24 nt, Human
caugucuuaagagcgggaagaaaa

SEQ ID NO: 1227480 - RNA, 23 nt, Human
cauguuacccagguugguugauc

SEQ ID NO: 1227481 - RNA, 24 nt, Human
ccaaaagugcugagauuauaggca

SEQ ID NO: 1227482 - RNA, 21 nt, Human
ccaaagugacaaggcuuuucc

SEQ ID NO: 1227483 - RNA, 19 nt, Human
ccaagugcaugguauuucu

SEQ ID NO: 1227484 - RNA, 28 nt, Human
ccagcaguggggcaggggagacagacag

SEQ ID NO: 1227485 - RNA, 26 nt, Human
ccauacuaaaggaauaagaccuacau

SEQ ID NO: 1227486 - RNA, 22 nt, Human
ccccuuaagagcaauuugaggc

SEQ ID NO: 1227487 - RNA, 19 nt, Human
ccuccugucuuggccuccc

SEQ ID NO: 1227488 - RNA, 23 nt, Human
ccucuguuccagcaguggggcag

SEQ ID NO: 1227489 - RNA, 24 nt, Human
ccucuuuuaggggaagauaaaaac

SEQ ID NO: 1227490 - RNA, 23 nt, Human
ccugucuuggccucccaaaagug

SEQ ID NO: 1227491 - RNA, 18 nt, Human
cgggaagaaaaagcagca

SEQ ID NO: 1227492 - RNA, 18 nt, Human
cucacaccuguaauuuca

SEQ ID NO: 1227493 - RNA, 19 nt, Human
cucccaucgccucuucaaa

SEQ ID NO: 1227494 - RNA, 19 nt, Human
cucucuguaguuacugaga

SEQ ID NO: 1227495 - RNA, 21 nt, Human
cuugcccguauuuuuaggacc

SEQ ID NO: 1227496 - RNA, 22 nt, Human
cuuggccucccaaaagugcuga

SEQ ID NO: 1227497 - RNA, 18 nt, Human
gacagacagcaaacaaaa

SEQ ID NO: 1227498 - RNA, 24 nt, Human
gauuauaggcaugagccacugugc

SEQ ID NO: 1227499 - RNA, 22 nt, Human
gcacgguggcucacaccuguaa

SEQ ID NO: 1227500 - RNA, 20 nt, Human
gccacugugccuagcccuaa

SEQ ID NO: 1227501 - RNA, 20 nt, Human
ggaaaggaaagcuucugcac

SEQ ID NO: 1227502 - RNA, 19 nt, Human
ggccugaagugauccuccu

SEQ ID NO: 1227503 - RNA, 20 nt, Human
ggguuuaagacaaaacacaa

SEQ ID NO: 1227504 - RNA, 19 nt, Human
gguggcucacaccuguaau

SEQ ID NO: 1227505 - RNA, 22 nt, Human
guaaaacaaacacugccacaaa

SEQ ID NO: 1227506 - RNA, 21 nt, Human
gugcagguacauauaugaaua

SEQ ID NO: 1227507 - RNA, 19 nt, Human
guuuuauauauauauauau

SEQ ID NO: 1227508 - RNA, 22 nt, Human
uaaaacaaacacugccacaaac

SEQ ID NO: 1227509 - RNA, 25 nt, Human
uaaaacaaacacugccacaaacacc

SEQ ID NO: 1227510 - RNA, 25 nt, Human
uaaauagagauggggucuggccaug

SEQ ID NO: 1227511 - RNA, 21 nt, Human
uaagagcuugcccguauuuuu

SEQ ID NO: 1227512 - RNA, 19 nt, Human
uaaggucccuguuuucuug

SEQ ID NO: 1227513 - RNA, 20 nt, Human
uaaugaauaauaaggucccu

SEQ ID NO: 1227514 - RNA, 20 nt, Human
uacaggcucaugucagaagu

SEQ ID NO: 1227515 - RNA, 21 nt, Human
uaccacagcaaacuucauuca

SEQ ID NO: 1227516 - RNA, 22 nt, Human
ucaaagacgcaaacguccaaag

SEQ ID NO: 1227517 - RNA, 21 nt, Human
ucacuaaguacaaaaaaacuc

SEQ ID NO: 1227518 - RNA, 28 nt, Human
ucaggccggccgugcacgguggcucaca

SEQ ID NO: 1227519 - RNA, 22 nt, Human
ucagguggguacaugugcaggu

SEQ ID NO: 1227520 - RNA, 20 nt, Human
ucauuacuggggaugcagua

SEQ ID NO: 1227521 - RNA, 19 nt, Human
uccauagaaacacugaaaa

SEQ ID NO: 1227522 - RNA, 25 nt, Human
ucccaaaagugcugagauuauaggc

SEQ ID NO: 1227523 - RNA, 26 nt, Human
ucccaucgccucuucaaagacgcaaa

SEQ ID NO: 1227524 - RNA, 18 nt, Human
ucuccacaggcucugggg

SEQ ID NO: 1227525 - RNA, 26 nt, Human
ucuguucagaaaaaauacuugucacu

SEQ ID NO: 1227526 - RNA, 21 nt, Human
ucuugaacuccuggccugaag

SEQ ID NO: 1227527 - RNA, 18 nt, Human
ucuuggccucccaaaagu

SEQ ID NO: 1227528 - RNA, 18 nt, Human
ugaaaacacgguuauguc

SEQ ID NO: 1227529 - RNA, 24 nt, Human
ugaacuccuggccugaagugaucc

SEQ ID NO: 1227530 - RNA, 19 nt, Human
ugaagugauccuccugucu

SEQ ID NO: 1227531 - RNA, 23 nt, Human
ugaagugauccuccugucuuggc

SEQ ID NO: 1227532 - RNA, 22 nt, Human
ugacaaggcuuuuccaaagguc

SEQ ID NO: 1227533 - RNA, 19 nt, Human
ugacacaguucauuucugg

SEQ ID NO: 1227534 - RNA, 21 nt, Human
ugagauuauaggcaugagcca

SEQ ID NO: 1227535 - RNA, 22 nt, Human
ugagauuauaggcaugagccac

SEQ ID NO: 1227536 - RNA, 22 nt, Human
ugagauuauaggcaugagccac

SEQ ID NO: 1227537 - RNA, 23 nt, Human
ugagauuauaggcaugagccacu

SEQ ID NO: 1227538 - RNA, 24 nt, Human
ugagauuauaggcaugagccacug

SEQ ID NO: 1227539 - RNA, 21 nt, Human
ugcaauaccacagcaaacuuc

SEQ ID NO: 1227540 - RNA, 19 nt, Human
uggagccucuguuccagca

SEQ ID NO: 1227541 - RNA, 24 nt, Human
uggccugaagugauccuccugucu

SEQ ID NO: 1227542 - RNA, 21 nt, Human
uggcucacaccuguaauuuca

SEQ ID NO: 1227543 - RNA, 22 nt, Human
uggguacaugugcagguacaua

SEQ ID NO: 1227544 - RNA, 20 nt, Human
uggucauacaaaguccugcu

SEQ ID NO: 1227545 - RNA, 20 nt, Human
ugucuuggccucccaaaagu

SEQ ID NO: 1227546 - RNA, 23 nt, Human
ugugccuagcccuaacuuauauu

SEQ ID NO: 1227547 - RNA, 18 nt, Human
uuaagagcgggaagaaaa

SEQ ID NO: 1227548 - RNA, 19 nt, Human
uuauauauaauguuaaucu

SEQ ID NO: 1227549 - RNA, 24 nt, Human
uucacaguuuagauuucauucauu

SEQ ID NO: 1227550 - RNA, 19 nt, Human
uucacuaaguacaaaaaaa

SEQ ID NO: 1227551 - RNA, 20 nt, Human
uuggagccucuguuccagca

SEQ ID NO: 1227552 - RNA, 22 nt, Human
uuggagccucuguuccagcagu

SEQ ID NO: 1227553 - RNA, 18 nt, Human
uuuuauauauauauauau

SEQ ID NO: 1227554 - RNA, 23 nt, Human
caccagggcugggcugaggcgag

SEQ ID NO: 1227555 - RNA, 18 nt, Human
aaacacacgugcacgagc

SEQ ID NO: 1227556 - RNA, 21 nt, Human
aaauaaucuuuuaggaacugg

SEQ ID NO: 1227557 - RNA, 21 nt, Human
aagcacagucacguucugagg

SEQ ID NO: 1227558 - RNA, 19 nt, Human
acacgugcacgagcaacag

SEQ ID NO: 1227559 - RNA, 23 nt, Human
accuuaaucaccucuggaaaguc

SEQ ID NO: 1227560 - RNA, 20 nt, Human
agagcugcccccaagcccuu

SEQ ID NO: 1227561 - RNA, 23 nt, Human
agcgcaaacagggacccucccag

SEQ ID NO: 1227562 - RNA, 21 nt, Human
agggacccucccagagcugcc

SEQ ID NO: 1227563 - RNA, 23 nt, Human
auggcacuggaggcacacgcgca

SEQ ID NO: 1227564 - RNA, 22 nt, Human
auggcggcaaguuggaggucac

SEQ ID NO: 1227565 - RNA, 26 nt, Human
caaccucagcucugcacacccagccu

SEQ ID NO: 1227566 - RNA, 21 nt, Human
cacacccagccuuggacaccc

SEQ ID NO: 1227567 - RNA, 21 nt, Human
cacccagccuuggacacccac

SEQ ID NO: 1227568 - RNA, 22 nt, Human
cagcgcaaacagggacccuccc

SEQ ID NO: 1227569 - RNA, 20 nt, Human
cagcucugcacacccagccu

SEQ ID NO: 1227570 - RNA, 25 nt, Human
ccaagcacagucacguucugagguu

SEQ ID NO: 1227571 - RNA, 21 nt, Human
ccaagcccuccccuggccugu

SEQ ID NO: 1227572 - RNA, 21 nt, Human
ccacagcgcaaacagggaccc

SEQ ID NO: 1227573 - RNA, 19 nt, Human
cccacagcgcaaacaggga

SEQ ID NO: 1227574 - RNA, 20 nt, Human
cccccaagcccuccccuggc

SEQ ID NO: 1227575 - RNA, 24 nt, Human
cccccaagcccuccccuggccugu

SEQ ID NO: 1227576 - RNA, 21 nt, Human
ccuguguccaagcacagucac

SEQ ID NO: 1227577 - RNA, 19 nt, Human
ccuuaugcgagagucccuc

SEQ ID NO: 1227578 - RNA, 22 nt, Human
cgcaaacagggacccucccaga

SEQ ID NO: 1227579 - RNA, 18 nt, Human
cucacuucaccuuaauca

SEQ ID NO: 1227580 - RNA, 22 nt, Human
cucagcucugcacacccagccu

SEQ ID NO: 1227581 - RNA, 20 nt, Human
cugcccccaagcccuccccu

SEQ ID NO: 1227582 - RNA, 23 nt, Human
cugcccccaagcccuccccuggc

SEQ ID NO: 1227583 - RNA, 18 nt, Human
gagcggguggaggccagc

SEQ ID NO: 1227584 - RNA, 20 nt, Human
gcaaaaugcagggcugccca

SEQ ID NO: 1227585 - RNA, 19 nt, Human
gcaacagcacacuugcucg

SEQ ID NO: 1227586 - RNA, 21 nt, Human
gcagcgcugucucauucacug

SEQ ID NO: 1227587 - RNA, 23 nt, Human
gcccccaagcccuccccuggccu

SEQ ID NO: 1227588 - RNA, 19 nt, Human
gcgcagcaauguggaggga

SEQ ID NO: 1227589 - RNA, 22 nt, Human
ggcacuggaggcacacgcgcag

SEQ ID NO: 1227590 - RNA, 23 nt, Human
guggagggacccagcagauggag

SEQ ID NO: 1227591 - RNA, 24 nt, Human
uaaaacacacgugcacgagcaacc

SEQ ID NO: 1227592 - RNA, 20 nt, Human
uaaucaccucuggaaagucc

SEQ ID NO: 1227593 - RNA, 19 nt, Human
uacgaauuuugagagcauu

SEQ ID NO: 1227594 - RNA, 24 nt, Human
uacgaauuuugagagcauucaagu

SEQ ID NO: 1227595 - RNA, 24 nt, Human
uaggagccaguccacggcgcggag

SEQ ID NO: 1227596 - RNA, 19 nt, Human
ucacugggguuccaugguu

SEQ ID NO: 1227597 - RNA, 23 nt, Human
uccaagcacagucacguucugag

SEQ ID NO: 1227598 - RNA, 23 nt, Human
ucccagagcugcccccaagcccu

SEQ ID NO: 1227599 - RNA, 19 nt, Human
ucccugugagccagggucu

SEQ ID NO: 1227600 - RNA, 18 nt, Human
uccuuaugcgagaguccc

SEQ ID NO: 1227601 - RNA, 19 nt, Human
ucugaaauaaucuuuuagg

SEQ ID NO: 1227602 - RNA, 21 nt, Human
ugagagcauucaagucagccc

SEQ ID NO: 1227603 - RNA, 21 nt, Human
ugcacacccagccuuggacac

SEQ ID NO: 1227604 - RNA, 23 nt, Human
ugcacacccagccuuggacaccc

SEQ ID NO: 1227605 - RNA, 24 nt, Human
ugcccacaguggggaccccauggc

SEQ ID NO: 1227606 - RNA, 24 nt, Human
ugcccccaagcccuccccuggccu

SEQ ID NO: 1227607 - RNA, 21 nt, Human
uggcacuggaggcacacgcgc

SEQ ID NO: 1227608 - RNA, 21 nt, Human
ugggaggcaguugggcaaaau

SEQ ID NO: 1227609 - RNA, 23 nt, Human
uguccaagcacagucacguucug

SEQ ID NO: 1227610 - RNA, 18 nt, Human
ugucucauucacugucuc

SEQ ID NO: 1227611 - RNA, 29 nt, Human
uguggagggacccagcagauggagccggc

SEQ ID NO: 1227612 - RNA, 22 nt, Human
uuccaugguuugggaggcaguu

SEQ ID NO: 1227613 - RNA, 20 nt, Human
aagggggaaaaacacuugua

SEQ ID NO: 1227614 - RNA, 18 nt, Human
auuggacaagcuucagcc

SEQ ID NO: 1227615 - RNA, 20 nt, Human
caaaguaggggaaucaacaa

SEQ ID NO: 1227616 - RNA, 24 nt, Human
cacacaccuugcaugagugaggug

SEQ ID NO: 1227617 - RNA, 23 nt, Human
ccaaaguaggggaaucaacagaa

SEQ ID NO: 1227618 - RNA, 20 nt, Human
ccuugcaugagugaggugcc

SEQ ID NO: 1227619 - RNA, 20 nt, Human
gaacaagcguagauauucuc

SEQ ID NO: 1227620 - RNA, 23 nt, Human
gaacaagcguagauauucuccau

SEQ ID NO: 1227621 - RNA, 20 nt, Human
gaagggggaaaaacacuugu

SEQ ID NO: 1227622 - RNA, 18 nt, Human
gagcaucuauggagcacc

SEQ ID NO: 1227623 - RNA, 19 nt, Human
gauuggacaagcuucagcc

SEQ ID NO: 1227624 - RNA, 20 nt, Human
gauuggacaagcuucagccc

SEQ ID NO: 1227625 - RNA, 20 nt, Human
gcaugacaaagaaaaggagg

SEQ ID NO: 1227626 - RNA, 23 nt, Human
gcccacucuugaagguaaaggaa

SEQ ID NO: 1227627 - RNA, 19 nt, Human
ggcugugcauguuuucagc

SEQ ID NO: 1227628 - RNA, 25 nt, Human
guacagcauaaugguggcuuccucc

SEQ ID NO: 1227629 - RNA, 18 nt, Human
uaacauaaaaauucugcu

SEQ ID NO: 1227630 - RNA, 19 nt, Human
uagcugaaaaaagcauuau

SEQ ID NO: 1227631 - RNA, 21 nt, Human
uagcugaaaaaagcauuauca

SEQ ID NO: 1227632 - RNA, 23 nt, Human
ucaacagaacuuggguuucaaaa

SEQ ID NO: 1227633 - RNA, 19 nt, Human
ugcaugcaugacaaagaaa

SEQ ID NO: 1227634 - RNA, 27 nt, Human
ugccuggggcaguguuuaaccgggucg

SEQ ID NO: 1227635 - RNA, 19 nt, Human
ugcuuggcaacauagcuga

SEQ ID NO: 1227636 - RNA, 18 nt, Human
uggagcacccaaaguagg

SEQ ID NO: 1227637 - RNA, 19 nt, Human
uguugcuaucaucuuuguc

SEQ ID NO: 1227638 - RNA, 22 nt, Human
uuggcaacauagcugaaaaaag

SEQ ID NO: 1227639 - RNA, 18 nt, Human
aagggggaaaaacacuug

SEQ ID NO: 1227640 - RNA, 20 nt, Human
aagggggaaaaacacuugua

SEQ ID NO: 1227641 - RNA, 22 nt, Human
accuugcaugagcgaggugccc

SEQ ID NO: 1227642 - RNA, 18 nt, Human
auuggacaagcuucagcc

SEQ ID NO: 1227643 - RNA, 20 nt, Human
caaaguaggggaaucaacaa

SEQ ID NO: 1227644 - RNA, 24 nt, Human
cacgcaccuugcaugagcgaggug

SEQ ID NO: 1227645 - RNA, 24 nt, Human
cucaaaguaggggaaucaacagaa

SEQ ID NO: 1227646 - RNA, 21 nt, Human
cuugcaugagcgaggugcccu

SEQ ID NO: 1227647 - RNA, 20 nt, Human
gaacaagcguagauauucuc

SEQ ID NO: 1227648 - RNA, 23 nt, Human
gaacaagcguagauauucuccau

SEQ ID NO: 1227649 - RNA, 19 nt, Human
gauuggacaagcuucagcc

SEQ ID NO: 1227650 - RNA, 20 nt, Human
gauuggacaagcuucagccc

SEQ ID NO: 1227651 - RNA, 23 nt, Human
gcccacucuugaagguaaaggaa

SEQ ID NO: 1227652 - RNA, 19 nt, Human
gcgaggugcccuggugugu

SEQ ID NO: 1227653 - RNA, 25 nt, Human
guacagcauaaugguggcuuccucc

SEQ ID NO: 1227654 - RNA, 18 nt, Human
uaacauaaaaauucugcu

SEQ ID NO: 1227655 - RNA, 19 nt, Human
uagcugaaaaacgcauuau

SEQ ID NO: 1227656 - RNA, 23 nt, Human
ucaacagaacuuggguuugaaaa

SEQ ID NO: 1227657 - RNA, 23 nt, Human
ucauuguugcuaucaucuuuguc

SEQ ID NO: 1227658 - RNA, 21 nt, Human
ugaaaaacgcauuaucaguua

SEQ ID NO: 1227659 - RNA, 21 nt, Human
ugaacaagcguagauauucuc

SEQ ID NO: 1227660 - RNA, 21 nt, Human
ugcaugacaaagaaaaggagg

SEQ ID NO: 1227661 - RNA, 19 nt, Human
ugcaugcaugacaaagaaa

SEQ ID NO: 1227662 - RNA, 27 nt, Human
ugccuggggcaguguuuaaccgggucg

SEQ ID NO: 1227663 - RNA, 19 nt, Human
ugcuuggcaacauagcuga

SEQ ID NO: 1227664 - RNA, 19 nt, Human
ugucuccucucuugaagua

SEQ ID NO: 1227665 - RNA, 20 nt, Human
uuugggguggauucauucca

SEQ ID NO: 1227666 - RNA, 24 nt, Human
aaaacaaaccagcagagaaaaagc

SEQ ID NO: 1227667 - RNA, 21 nt, Human
aaaaccaaagcacaaacacua

SEQ ID NO: 1227668 - RNA, 19 nt, Human
aaaaggccaggcaaagggu

SEQ ID NO: 1227669 - RNA, 24 nt, Human
aaacaaaccagcagagaaaaagca

SEQ ID NO: 1227670 - RNA, 27 nt, Human
aaacaaaccagcagagaaaaagcaagc

SEQ ID NO: 1227671 - RNA, 18 nt, Human
aaacccaacagauguccc

SEQ ID NO: 1227672 - RNA, 25 nt, Human
aaacccaacagaugucccaccgaaa

SEQ ID NO: 1227673 - RNA, 19 nt, Human
aaagacaccaaaauaauga

SEQ ID NO: 1227674 - RNA, 19 nt, Human
aacacggugaaaccccguc

SEQ ID NO: 1227675 - RNA, 20 nt, Human
aacacggugaaaccccgucu

SEQ ID NO: 1227676 - RNA, 21 nt, Human
aacacggugaaaccccgucuc

SEQ ID NO: 1227677 - RNA, 21 nt, Human
aacagaauauuacucagccuu

SEQ ID NO: 1227678 - RNA, 24 nt, Human
aaccacgugaacaugaggacccca

SEQ ID NO: 1227679 - RNA, 23 nt, Human
aaccauguagcuaaaaaagcaaa

SEQ ID NO: 1227680 - RNA, 19 nt, Human
aacccaacagaugucccac

SEQ ID NO: 1227681 - RNA, 19 nt, Human
aacccuggggccagcagca

SEQ ID NO: 1227682 - RNA, 19 nt, Human
aaccucucagauccuuagu

SEQ ID NO: 1227683 - RNA, 21 nt, Human
aagaagcaggagaagaaugag

SEQ ID NO: 1227684 - RNA, 21 nt, Human
aagaagcaggagaagaaugag

SEQ ID NO: 1227685 - RNA, 20 nt, Human
aagaagccagagcacaggga

SEQ ID NO: 1227686 - RNA, 20 nt, Human
aagacaccaaaauaaugaca

SEQ ID NO: 1227687 - RNA, 22 nt, Human
aagcaaaaccaaagcacaaaca

SEQ ID NO: 1227688 - RNA, 23 nt, Human
aagcacuuuuucuucaggugguu

SEQ ID NO: 1227689 - RNA, 18 nt, Human
aagcaggagaagaaugag

SEQ ID NO: 1227690 - RNA, 23 nt, Human
aagcaggagaagaaugaggcugg

SEQ ID NO: 1227691 - RNA, 20 nt, Human
aagcaggagaagaaugaggg

SEQ ID NO: 1227692 - RNA, 19 nt, Human
aagccaagcacaaaaggac

SEQ ID NO: 1227693 - RNA, 19 nt, Human
aaggagauggaggacucca

SEQ ID NO: 1227694 - RNA, 22 nt, Human
aaggagcacccucugaaguuca

SEQ ID NO: 1227695 - RNA, 21 nt, Human
aaguugaacuugucaaagaug

SEQ ID NO: 1227696 - RNA, 20 nt, Human
acagagagcugggccugacg

SEQ ID NO: 1227697 - RNA, 24 nt, Human
acaggugaguggauaaacaaugcg

SEQ ID NO: 1227698 - RNA, 19 nt, Human
acagugcuguggcaaggug

SEQ ID NO: 1227699 - RNA, 22 nt, Human
acauggguccgguuccuggaca

SEQ ID NO: 1227700 - RNA, 18 nt, Human
acauuccagguacugugc

SEQ ID NO: 1227701 - RNA, 22 nt, Human
accaaaauaaugacagcucaug

SEQ ID NO: 1227702 - RNA, 22 nt, Human
accacgugacccagcaagccca

SEQ ID NO: 1227703 - RNA, 21 nt, Human
acccaaaagaacugaaagcag

SEQ ID NO: 1227704 - RNA, 18 nt, Human
accccagagccagggaag

SEQ ID NO: 1227705 - RNA, 24 nt, Human
accccgucucuacuaaaaauacaa

SEQ ID NO: 1227706 - RNA, 26 nt, Human
accggcccccugcaccgaacagccac

SEQ ID NO: 1227707 - RNA, 20 nt, Human
acgaggugugucucggcuuc

SEQ ID NO: 1227708 - RNA, 21 nt, Human
acucucgggaggcugaggcag

SEQ ID NO: 1227709 - RNA, 24 nt, Human
acucugacggugcuucugaaacag

SEQ ID NO: 1227710 - RNA, 21 nt, Human
acugcuuaaggguuggaggug

SEQ ID NO: 1227711 - RNA, 24 nt, Human
acuguacuccagccugggcgauag

SEQ ID NO: 1227712 - RNA, 22 nt, Human
agaaagaaggcacaggugcaaa

SEQ ID NO: 1227713 - RNA, 24 nt, Human
agaaagaaggcacaggugcaaaga

SEQ ID NO: 1227714 - RNA, 19 nt, Human
agaacuuggaaagcaaaga

SEQ ID NO: 1227715 - RNA, 18 nt, Human
agaauauuacucagccuu

SEQ ID NO: 1227716 - RNA, 19 nt, Human
agacagagcaacucaagua

SEQ ID NO: 1227717 - RNA, 24 nt, Human
agacagcaaaagugaaaacaaacc

SEQ ID NO: 1227718 - RNA, 21 nt, Human
agacguccaugagcaccucga

SEQ ID NO: 1227719 - RNA, 25 nt, Human
agagacagcaaaagugaaaacaaaa

SEQ ID NO: 1227720 - RNA, 23 nt, Human
agagagcuggcugcaauggaggg

SEQ ID NO: 1227721 - RNA, 20 nt, Human
agagcagcaggcucgcugcc

SEQ ID NO: 1227722 - RNA, 18 nt, Human
agauggacugcuuaaggg

SEQ ID NO: 1227723 - RNA, 19 nt, Human
agaugucgacagcaagaac

SEQ ID NO: 1227724 - RNA, 23 nt, Human
agcacuuugggaggcugaggcgg

SEQ ID NO: 1227725 - RNA, 24 nt, Human
agccugggcgauagcgugagauuc

SEQ ID NO: 1227726 - RNA, 24 nt, Human
agcuaaaaaagcaaaaccaaagca

SEQ ID NO: 1227727 - RNA, 19 nt, Human
agcuaauggcagaaacaca

SEQ ID NO: 1227728 - RNA, 21 nt, Human
aggacaguggucucugucucu

SEQ ID NO: 1227729 - RNA, 21 nt, Human
aggacuggcugagcagcccua

SEQ ID NO: 1227730 - RNA, 24 nt, Human
aggcacgguggcucacgccuguaa

SEQ ID NO: 1227731 - RNA, 21 nt, Human
aggcaggagaauggcgugaac

SEQ ID NO: 1227732 - RNA, 24 nt, Human
aggcaggagaauggcgugaacccg

SEQ ID NO: 1227733 - RNA, 24 nt, Human
aggcggagcuugcagugagcggag

SEQ ID NO: 1227734 - RNA, 19 nt, Human
aggcugaggcaggagaaug

SEQ ID NO: 1227735 - RNA, 20 nt, Human
aggcugaggcggauggaucg

SEQ ID NO: 1227736 - RNA, 24 nt, Human
agggaagugggaaauggcaggagg

SEQ ID NO: 1227737 - RNA, 21 nt, Human
agggcucaggcgggagcugcc

SEQ ID NO: 1227738 - RNA, 20 nt, Human
aggggucucggaaguggagc

SEQ ID NO: 1227739 - RNA, 24 nt, Human
agggguuccuuucuucucucuuuu

SEQ ID NO: 1227740 - RNA, 19 nt, Human
agguauagugagugcugaa

SEQ ID NO: 1227741 - RNA, 18 nt, Human
aguuccagagagagcugg

SEQ ID NO: 1227742 - RNA, 20 nt, Human
aucauaggugcaacauaaag

SEQ ID NO: 1227743 - RNA, 24 nt, Human
aucgcgccacuguacuccagccug

SEQ ID NO: 1227744 - RNA, 20 nt, Human
aucucgccuuccucugacac

SEQ ID NO: 1227745 - RNA, 25 nt, Human
aucucgccuuccucugacacuucca

SEQ ID NO: 1227746 - RNA, 26 nt, Human
caaaaccaaagcacaaacacuacugg

SEQ ID NO: 1227747 - RNA, 19 nt, Human
caaaacccaacagaugucc

SEQ ID NO: 1227748 - RNA, 21 nt, Human
caaaacccaacagauguccca

SEQ ID NO: 1227749 - RNA, 22 nt, Human
caaaagacaccaaaauaaugac

SEQ ID NO: 1227750 - RNA, 24 nt, Human
caaagaugucgacagcaagaacuc

SEQ ID NO: 1227751 - RNA, 20 nt, Human
caaagggugugcaauguucc

SEQ ID NO: 1227752 - RNA, 20 nt, Human
caacacaggugaaccuagag

SEQ ID NO: 1227753 - RNA, 24 nt, Human
caacagaauauuacucagccuuca

SEQ ID NO: 1227754 - RNA, 21 nt, Human
caacagaugucccaccgaaaa

SEQ ID NO: 1227755 - RNA, 21 nt, Human
caagcgccucuuacauuccuu

SEQ ID NO: 1227756 - RNA, 23 nt, Human
cacacaggccgaaagguggaaac

SEQ ID NO: 1227757 - RNA, 20 nt, Human
cacauaaaccauguagcuaa

SEQ ID NO: 1227758 - RNA, 22 nt, Human
cacauuuacgccagggaauggu

SEQ ID NO: 1227759 - RNA, 25 nt, Human
caccaccaccccggguucacacagc

SEQ ID NO: 1227760 - RNA, 22 nt, Human
cacccagcugcaagagcagcag

SEQ ID NO: 1227761 - RNA, 21 nt, Human
cacccucccgucccacugaca

SEQ ID NO: 1227762 - RNA, 24 nt, Human
cacgccuguaaucccagcacuuug

SEQ ID NO: 1227763 - RNA, 21 nt, Human
cacugacagggcacacaggga

SEQ ID NO: 1227764 - RNA, 19 nt, Human
cacuguacuccagccuggg

SEQ ID NO: 1227765 - RNA, 20 nt, Human
cacuguacuccagccugggc

SEQ ID NO: 1227766 - RNA, 20 nt, Human
cacuguacuccagccugggc

SEQ ID NO: 1227767 - RNA, 22 nt, Human
cacuguacuccagccugggcga

SEQ ID NO: 1227768 - RNA, 23 nt, Human
cacuguacuccagccugggcgau

SEQ ID NO: 1227769 - RNA, 24 nt, Human
cacuguacuccagccugggcgaua

SEQ ID NO: 1227770 - RNA, 18 nt, Human
cagaaacaacggugggca

SEQ ID NO: 1227771 - RNA, 18 nt, Human
cagaacacacagacaggc

SEQ ID NO: 1227772 - RNA, 19 nt, Human
cagaacacacagacaggcu

SEQ ID NO: 1227773 - RNA, 23 nt, Human
cagaauauuacucagccuucaaa

SEQ ID NO: 1227774 - RNA, 20 nt, Human
cagaccacccucccguccca

SEQ ID NO: 1227775 - RNA, 23 nt, Human
cagacccagaaccucccucccag

SEQ ID NO: 1227776 - RNA, 23 nt, Human
cagauccuccaaugagcacuucc

SEQ ID NO: 1227777 - RNA, 23 nt, Human
cagauugugcucccauccuucca

SEQ ID NO: 1227778 - RNA, 22 nt, Human
cagcacuuugggaggcugaggc

SEQ ID NO: 1227779 - RNA, 24 nt, Human
cagcacuuugggaggcugaggcgg

SEQ ID NO: 1227780 - RNA, 22 nt, Human
cagcagagaaaaagcaagcucc

SEQ ID NO: 1227781 - RNA, 18 nt, Human
cagcagauugaagccugg

SEQ ID NO: 1227782 - RNA, 22 nt, Human
cagcagcaggcacuacccauga

SEQ ID NO: 1227783 - RNA, 18 nt, Human
cagcccccaggacagccc

SEQ ID NO: 1227784 - RNA, 24 nt, Human
cagcccccaggacagcccccacuc

SEQ ID NO: 1227785 - RNA, 21 nt, Human
cagccugaggucaagaagcca

SEQ ID NO: 1227786 - RNA, 22 nt, Human
cagccugaggucaagaagccag

SEQ ID NO: 1227787 - RNA, 23 nt, Human
cagccugaggucaagaagccaga

SEQ ID NO: 1227788 - RNA, 18 nt, Human
cagcugcaagagcagcag

SEQ ID NO: 1227789 - RNA, 22 nt, Human
caggaccaugggaacagucucc

SEQ ID NO: 1227790 - RNA, 22 nt, Human
caggauuaggaugcucaaccuc

SEQ ID NO: 1227791 - RNA, 24 nt, Human
caggccccaaagcugcuuguggga

SEQ ID NO: 1227792 - RNA, 20 nt, Human
caggcgggagcugccccggg

SEQ ID NO: 1227793 - RNA, 18 nt, Human
caggggucucggaagugg

SEQ ID NO: 1227794 - RNA, 24 nt, Human
caggggucucggaaguggagcccc

SEQ ID NO: 1227795 - RNA, 20 nt, Human
cagugaggcagccugagguc

SEQ ID NO: 1227796 - RNA, 24 nt, Human
cagugaggcagccugaggucaaga

SEQ ID NO: 1227797 - RNA, 23 nt, Human
caguggcuggggaguggaguugg

SEQ ID NO: 1227798 - RNA, 22 nt, Human
cauaauagcuaauggcagaaac

SEQ ID NO: 1227799 - RNA, 20 nt, Human
cauaggggucaggcggagcg

SEQ ID NO: 1227800 - RNA, 24 nt, Human
cauguagcuaaaaaagcaaaacca

SEQ ID NO: 1227801 - RNA, 19 nt, Human
ccaaaccaaacagcaggua

SEQ ID NO: 1227802 - RNA, 25 nt, Human
ccacaccccaguucuaauguuuucu

SEQ ID NO: 1227803 - RNA, 21 nt, Human
ccaccaccaccccggguucac

SEQ ID NO: 1227804 - RNA, 22 nt, Human
ccacgugacccagcaagcccac

SEQ ID NO: 1227805 - RNA, 20 nt, Human
ccacuguacuccagccuggg

SEQ ID NO: 1227806 - RNA, 20 nt, Human
ccacuguacuccagccuggg

SEQ ID NO: 1227807 - RNA, 21 nt, Human
ccacuguacuccagccugggc

SEQ ID NO: 1227808 - RNA, 21 nt, Human
ccacuguacuccagccugggc

SEQ ID NO: 1227809 - RNA, 23 nt, Human
ccacuguacuccagccugggcga

SEQ ID NO: 1227810 - RNA, 20 nt, Human
ccacuucuggguauacaccc

SEQ ID NO: 1227811 - RNA, 23 nt, Human
ccagcagagaaaaagcaagcucc

SEQ ID NO: 1227812 - RNA, 19 nt, Human
ccaggccauccuggccaaa

SEQ ID NO: 1227813 - RNA, 22 nt, Human
ccauccuggccaaaccaaacag

SEQ ID NO: 1227814 - RNA, 22 nt, Human
cccaaaagaacugaaagcagac

SEQ ID NO: 1227815 - RNA, 18 nt, Human
cccacacguagcugggag

SEQ ID NO: 1227816 - RNA, 20 nt, Human
cccagaaccucccucccagg

SEQ ID NO: 1227817 - RNA, 24 nt, Human
ccccaagacagcucucagugccag

SEQ ID NO: 1227818 - RNA, 21 nt, Human
ccccuuccugccacucccucc

SEQ ID NO: 1227819 - RNA, 23 nt, Human
cccgcugcuggaaccaccaccac

SEQ ID NO: 1227820 - RNA, 18 nt, Human
cccgggacagagagcugg

SEQ ID NO: 1227821 - RNA, 19 nt, Human
cccucggggcacaagaugg

SEQ ID NO: 1227822 - RNA, 25 nt, Human
cccugggcguguggucugcggggug

SEQ ID NO: 1227823 - RNA, 22 nt, Human
ccgaacagccacccagcugcaa

SEQ ID NO: 1227824 - RNA, 18 nt, Human
ccgcuccggcccagcccc

SEQ ID NO: 1227825 - RNA, 18 nt, Human
ccggcccagccccgggcc

SEQ ID NO: 1227826 - RNA, 21 nt, Human
ccucaaaaaaucaaccacagg

SEQ ID NO: 1227827 - RNA, 22 nt, Human
ccuccugccuucgccacucuga

SEQ ID NO: 1227828 - RNA, 23 nt, Human
ccugcccuccgccagacugggaa

SEQ ID NO: 1227829 - RNA, 22 nt, Human
ccuguaaucccagcacuuuggg

SEQ ID NO: 1227830 - RNA, 22 nt, Human
ccuguagucccagcuacucucg

SEQ ID NO: 1227831 - RNA, 23 nt, Human
ccuguagucccagcuacucucgg

SEQ ID NO: 1227832 - RNA, 18 nt, Human
ccuguggcagacccagaa

SEQ ID NO: 1227833 - RNA, 24 nt, Human
cgaaaccauucuggcuaacacggu

SEQ ID NO: 1227834 - RNA, 19 nt, Human
cgacagcaagaacuccagu

SEQ ID NO: 1227835 - RNA, 22 nt, Human
cgacccaggcaugcgucaacag

SEQ ID NO: 1227836 - RNA, 23 nt, Human
cgccagggaaugguuccagaaca

SEQ ID NO: 1227837 - RNA, 26 nt, Human
cgccuguagucccagcuacucucggg

SEQ ID NO: 1227838 - RNA, 24 nt, Human
cgcucagugaaauaagccaagcac

SEQ ID NO: 1227839 - RNA, 20 nt, Human
cgggacagagagcugggccu

SEQ ID NO: 1227840 - RNA, 18 nt, Human
cgggguuguuugggucau

SEQ ID NO: 1227841 - RNA, 19 nt, Human
cgggucgggugugugggga

SEQ ID NO: 1227842 - RNA, 19 nt, Human
cuagagaacauuacgcuca

SEQ ID NO: 1227843 - RNA, 21 nt, Human
cucaaaaaaucaaccacagga

SEQ ID NO: 1227844 - RNA, 19 nt, Human
cucacauaaaccauguagc

SEQ ID NO: 1227845 - RNA, 22 nt, Human
cucacgccuguaaucccagcac

SEQ ID NO: 1227846 - RNA, 24 nt, Human
cucacgccuguaaucccagcacuu

SEQ ID NO: 1227847 - RNA, 18 nt, Human
cuccaucuccagcagggu

SEQ ID NO: 1227848 - RNA, 23 nt, Human
cuccuggcgugggcucacucacc

SEQ ID NO: 1227849 - RNA, 21 nt, Human
cucgugcaccaccuccugccu

SEQ ID NO: 1227850 - RNA, 23 nt, Human
cucuuacauuccagguacugugc

SEQ ID NO: 1227851 - RNA, 19 nt, Human
cugcaccgaacagccaccc

SEQ ID NO: 1227852 - RNA, 22 nt, Human
cugcaccgaacagccacccagc

SEQ ID NO: 1227853 - RNA, 20 nt, Human
cugcuggaaccaccaccacc

SEQ ID NO: 1227854 - RNA, 23 nt, Human
cuggccuuaccagggggccuucu

SEQ ID NO: 1227855 - RNA, 18 nt, Human
cuggcuaacacggugaaa

SEQ ID NO: 1227856 - RNA, 22 nt, Human
cuggcuaacacggugaaacccc

SEQ ID NO: 1227857 - RNA, 23 nt, Human
cuggcuaacacggugaaaccccg

SEQ ID NO: 1227858 - RNA, 18 nt, Human
cuggguauacacccaaaa

SEQ ID NO: 1227859 - RNA, 18 nt, Human
cuuccugccacucccucc

SEQ ID NO: 1227860 - RNA, 21 nt, Human
cuuccugccacucccuccugg

SEQ ID NO: 1227861 - RNA, 21 nt, Human
cuugcagugagcggagaucgc

SEQ ID NO: 1227862 - RNA, 18 nt, Human
gaacugaaagcagacgcc

SEQ ID NO: 1227863 - RNA, 20 nt, Human
gaagugggaaauggcaggag

SEQ ID NO: 1227864 - RNA, 21 nt, Human
gacccaggcaugcgucaacag

SEQ ID NO: 1227865 - RNA, 22 nt, Human
gaccccacaucagagucacccc

SEQ ID NO: 1227866 - RNA, 18 nt, Human
gagaagaaugaggcuggg

SEQ ID NO: 1227867 - RNA, 19 nt, Human
gaucugugggccccacggc

SEQ ID NO: 1227868 - RNA, 23 nt, Human
gcaagcucccuguaaagacagag

SEQ ID NO: 1227869 - RNA, 21 nt, Human
gccaagcgccucuuacauucc

SEQ ID NO: 1227870 - RNA, 22 nt, Human
gccacuguacuccagccugggc

SEQ ID NO: 1227871 - RNA, 24 nt, Human
gccacuguacuccagccugggcga

SEQ ID NO: 1227872 - RNA, 21 nt, Human
gccagaccccaaagcugggcu

SEQ ID NO: 1227873 - RNA, 21 nt, Human
gccagucuccggcccagcccc

SEQ ID NO: 1227874 - RNA, 19 nt, Human
gccccaaagcugcuugugg

SEQ ID NO: 1227875 - RNA, 22 nt, Human
gcccccacucauggcucuccac

SEQ ID NO: 1227876 - RNA, 26 nt, Human
gcgcagcccccaggacaggggaacgc

SEQ ID NO: 1227877 - RNA, 24 nt, Human
gcuaacacggugaaaccccgucuc

SEQ ID NO: 1227878 - RNA, 21 nt, Human
gcuacaacacaggugaaccua

SEQ ID NO: 1227879 - RNA, 19 nt, Human
gcucccauccuuccaccac

SEQ ID NO: 1227880 - RNA, 22 nt, Human
gcugaggcaggagaauggcgug

SEQ ID NO: 1227881 - RNA, 19 nt, Human
gcuggaaccaccaccaccc

SEQ ID NO: 1227882 - RNA, 23 nt, Human
ggacaugccauggauguguuucu

SEQ ID NO: 1227883 - RNA, 18 nt, Human
ggacucccaggccauccu

SEQ ID NO: 1227884 - RNA, 24 nt, Human
ggagaucgcgccacuguacuccag

SEQ ID NO: 1227885 - RNA, 18 nt, Human
ggagcuugcagugagcgg

SEQ ID NO: 1227886 - RNA, 24 nt, Human
ggagcuugcagugagcggagaucg

SEQ ID NO: 1227887 - RNA, 21 nt, Human
ggccaggcacgguggcucacg

SEQ ID NO: 1227888 - RNA, 18 nt, Human
ggcgguuggggucauagg

SEQ ID NO: 1227889 - RNA, 18 nt, Human
ggcgugguggcgggcgcc

SEQ ID NO: 1227890 - RNA, 22 nt, Human
ggcgugguggcgggcgccugua

SEQ ID NO: 1227891 - RNA, 21 nt, Human
gggugguccuccggcuggcug

SEQ ID NO: 1227892 - RNA, 22 nt, Human
ggucugcggggugguccuccgg

SEQ ID NO: 1227893 - RNA, 23 nt, Human
gguggcucacgccuguaauccca

SEQ ID NO: 1227894 - RNA, 24 nt, Human
gguggcucacgccuguaaucccag

SEQ ID NO: 1227895 - RNA, 20 nt, Human
ggugggcaccaguggcuggg

SEQ ID NO: 1227896 - RNA, 22 nt, Human
guaaaugggaugugaacguuaa

SEQ ID NO: 1227897 - RNA, 22 nt, Human
gucgcuucggggcgggcgccag

SEQ ID NO: 1227898 - RNA, 24 nt, Human
gucucugucucugggccaggguca

SEQ ID NO: 1227899 - RNA, 23 nt, Human
gugaaaugucacugugaaggccc

SEQ ID NO: 1227900 - RNA, 21 nt, Human
gugcguccucaaaaaaucaac

SEQ ID NO: 1227901 - RNA, 23 nt, Human
gugcuccauccacacaacagaau

SEQ ID NO: 1227902 - RNA, 23 nt, Human
guggcgggcgccuguagucccag

SEQ ID NO: 1227903 - RNA, 20 nt, Human
guuugcuacaacacagguga

SEQ ID NO: 1227904 - RNA, 23 nt, Human
guuuggggguaggcucagcgggc

SEQ ID NO: 1227905 - RNA, 20 nt, Human
uaaaaaagcaaaaccaaagc

SEQ ID NO: 1227906 - RNA, 21 nt, Human
uaaagccagaccccaaagcug

SEQ ID NO: 1227907 - RNA, 28 nt, Human
uaaauguccagcaaaagacaccaaaaua

SEQ ID NO: 1227908 - RNA, 22 nt, Human
uaacacggugaaaccccgucuc

SEQ ID NO: 1227909 - RNA, 24 nt, Human
uaacacggugaaaccccgucucua

SEQ ID NO: 1227910 - RNA, 19 nt, Human
uaacccuggggccagcagc

SEQ ID NO: 1227911 - RNA, 20 nt, Human
uaagccaagcacaaaaggac

SEQ ID NO: 1227912 - RNA, 21 nt, Human
uaagccaagcacaaaaggaca

SEQ ID NO: 1227913 - RNA, 23 nt, Human
uaagccaagcacaaaaggacaaa

SEQ ID NO: 1227914 - RNA, 20 nt, Human
uaccacgugacccagcaagc

SEQ ID NO: 1227915 - RNA, 21 nt, Human
uaccacgugacccagcaagcc

SEQ ID NO: 1227916 - RNA, 22 nt, Human
uaccacgugacccagcaagccc

SEQ ID NO: 1227917 - RNA, 18 nt, Human
uaccagggggccuucugc

SEQ ID NO: 1227918 - RNA, 22 nt, Human
uaccuaagcacuuuuucuucag

SEQ ID NO: 1227919 - RNA, 22 nt, Human
uacuccagccugggcgauagcg

SEQ ID NO: 1227920 - RNA, 24 nt, Human
uacuccagccugggcgauagcgug

SEQ ID NO: 1227921 - RNA, 20 nt, Human
uagaacuuggaaagcaaaga

SEQ ID NO: 1227922 - RNA, 22 nt, Human
uagcagcaaaacucaaacgggg

SEQ ID NO: 1227923 - RNA, 21 nt, Human
uagcgcagcccccaggacagc

SEQ ID NO: 1227924 - RNA, 26 nt, Human
uagcuaaaaaagcaaaaccaaagcac

SEQ ID NO: 1227925 - RNA, 21 nt, Human
uaggagccucuggaaugggcc

SEQ ID NO: 1227926 - RNA, 27 nt, Human
ucaaaacccaacagaugucccaccgaa

SEQ ID NO: 1227927 - RNA, 22 nt, Human
ucaagaagguucagauucugga

SEQ ID NO: 1227928 - RNA, 22 nt, Human
ucaaucacccagucacugagaa

SEQ ID NO: 1227929 - RNA, 22 nt, Human
ucacacagcugcgaugcacucc

SEQ ID NO: 1227930 - RNA, 21 nt, Human
ucacugugaaggccugugcuu

SEQ ID NO: 1227931 - RNA, 22 nt, Human
ucagaaauuuaaaaagaaagaa

SEQ ID NO: 1227932 - RNA, 22 nt, Human
ucagagcagcaccauucacaca

SEQ ID NO: 1227933 - RNA, 19 nt, Human
ucaggauuuugacuugugg

SEQ ID NO: 1227934 - RNA, 24 nt, Human
ucagggugucgcuuucaccugcug

SEQ ID NO: 1227935 - RNA, 21 nt, Human
ucaguuucaagcaugacccca

SEQ ID NO: 1227936 - RNA, 21 nt, Human
uccaaggagcacccucugaag

SEQ ID NO: 1227937 - RNA, 22 nt, Human
uccaccaggacgggccucucca

SEQ ID NO: 1227938 - RNA, 24 nt, Human
uccagccugggcgauagcgugaga

SEQ ID NO: 1227939 - RNA, 22 nt, Human
uccaggggucucggaaguggag

SEQ ID NO: 1227940 - RNA, 22 nt, Human
ucccagcagaugagagccacag

SEQ ID NO: 1227941 - RNA, 25 nt, Human
ucccaggccauccuggccaaaccaa

SEQ ID NO: 1227942 - RNA, 18 nt, Human
ucccagggacacugcagg

SEQ ID NO: 1227943 - RNA, 22 nt, Human
ucccauccuuccaccacacccc

SEQ ID NO: 1227944 - RNA, 21 nt, Human
ucccccaugaauggcuuggug

SEQ ID NO: 1227945 - RNA, 21 nt, Human
uccggcccagccccgggccgg

SEQ ID NO: 1227946 - RNA, 19 nt, Human
uccucaaaaaaucaaccac

SEQ ID NO: 1227947 - RNA, 22 nt, Human
uccucgggcugcucccaccaag

SEQ ID NO: 1227948 - RNA, 25 nt, Human
uccuuccaccacaccccaguucuaa

SEQ ID NO: 1227949 - RNA, 19 nt, Human
uccuuuaagugucagguug

SEQ ID NO: 1227950 - RNA, 19 nt, Human
ucgcaggcugcuccccacc

SEQ ID NO: 1227951 - RNA, 24 nt, Human
ucgcgaggugaggagaucgaaacc

SEQ ID NO: 1227952 - RNA, 23 nt, Human
ucgcgccacuguacuccagccug

SEQ ID NO: 1227953 - RNA, 19 nt, Human
ucgcuuucaccugcugauc

SEQ ID NO: 1227954 - RNA, 21 nt, Human
ucgugcaccaccuccugccuu

SEQ ID NO: 1227955 - RNA, 23 nt, Human
ucgugcaccaccuccugccuucg

SEQ ID NO: 1227956 - RNA, 25 nt, Human
ucuaaacagagacagcaaaagugaa

SEQ ID NO: 1227957 - RNA, 22 nt, Human
ucucaaaacccaacagaugucc

SEQ ID NO: 1227958 - RNA, 23 nt, Human
ucucaaaacccaacagauguccc

SEQ ID NO: 1227959 - RNA, 21 nt, Human
ucucacucuguuaguuccaga

SEQ ID NO: 1227960 - RNA, 22 nt, Human
ucucacucuguuaguuccagag

SEQ ID NO: 1227961 - RNA, 19 nt, Human
ucucaguuucaagcaugac

SEQ ID NO: 1227962 - RNA, 18 nt, Human
ucuccacugugcccagag

SEQ ID NO: 1227963 - RNA, 22 nt, Human
ucucuacuaaaaauacaaaaaa

SEQ ID NO: 1227964 - RNA, 24 nt, Human
ucuggcuaacacggugaaaccccg

SEQ ID NO: 1227965 - RNA, 26 nt, Human
ucuucagguggcacaauguuuuaugg

SEQ ID NO: 1227966 - RNA, 21 nt, Human
ucuuugcccggcccuggggac

SEQ ID NO: 1227967 - RNA, 19 nt, Human
ugaaacaggccagauaaac

SEQ ID NO: 1227968 - RNA, 20 nt, Human
ugaaagcagacgcccagaua

SEQ ID NO: 1227969 - RNA, 18 nt, Human
ugaaagcccggcgcccuc

SEQ ID NO: 1227970 - RNA, 18 nt, Human
ugaaaugucacugugaag

SEQ ID NO: 1227971 - RNA, 20 nt, Human
ugaaggugaacuagccagug

SEQ ID NO: 1227972 - RNA, 20 nt, Human
ugacagccucgggucgggug

SEQ ID NO: 1227973 - RNA, 18 nt, Human
ugacagggcacacaggga

SEQ ID NO: 1227974 - RNA, 19 nt, Human
ugacagggcccugcccucc

SEQ ID NO: 1227975 - RNA, 23 nt, Human
ugacccagcaagcccacuucugg

SEQ ID NO: 1227976 - RNA, 20 nt, Human
ugacggugcuucugaaacag

SEQ ID NO: 1227977 - RNA, 20 nt, Human
ugagagccacagcauggcuc

SEQ ID NO: 1227978 - RNA, 22 nt, Human
ugagcggagaucgcgccacugu

SEQ ID NO: 1227979 - RNA, 24 nt, Human
ugaggcaggagaauggcgugaacc

SEQ ID NO: 1227980 - RNA, 25 nt, Human
ugaggcaggagaauggcgugaaccc

SEQ ID NO: 1227981 - RNA, 19 nt, Human
ugaggcggauggaucgcga

SEQ ID NO: 1227982 - RNA, 20 nt, Human
ugaggcugggcugaacuggc

SEQ ID NO: 1227983 - RNA, 18 nt, Human
ugaggguagaugcuuuca

SEQ ID NO: 1227984 - RNA, 22 nt, Human
ugaucggggccucccccucggu

SEQ ID NO: 1227985 - RNA, 23 nt, Human
ugcacaaaugcccugaggacaug

SEQ ID NO: 1227986 - RNA, 18 nt, Human
ugcaggacaguggucucu

SEQ ID NO: 1227987 - RNA, 19 nt, Human
ugccagcaggugcuucuca

SEQ ID NO: 1227988 - RNA, 23 nt, Human
ugcccagaggaauugugaugggg

SEQ ID NO: 1227989 - RNA, 22 nt, Human
ugcccgggacagagagcugggc

SEQ ID NO: 1227990 - RNA, 25 nt, Human
ugcccugaggacaugccauggaugu

SEQ ID NO: 1227991 - RNA, 25 nt, Human
ugcucccauccuuccaccacacccc

SEQ ID NO: 1227992 - RNA, 18 nt, Human
ugcuucugaaacaggcca

SEQ ID NO: 1227993 - RNA, 23 nt, Human
uggaaagcaaagaagcaggagaa

SEQ ID NO: 1227994 - RNA, 21 nt, Human
uggaaccaccaccaccccggg

SEQ ID NO: 1227995 - RNA, 19 nt, Human
uggagacguccaugagcac

SEQ ID NO: 1227996 - RNA, 20 nt, Human
uggagagagagcaggucuuc

SEQ ID NO: 1227997 - RNA, 25 nt, Human
uggauaaacaaugcgugcuccaucc

SEQ ID NO: 1227998 - RNA, 18 nt, Human
uggcagaaacacaaggaa

SEQ ID NO: 1227999 - RNA, 19 nt, Human
uggccaaaccaaacagcag

SEQ ID NO: 1228000 - RNA, 22 nt, Human
uggcucacgccuguaaucccag

SEQ ID NO: 1228001 - RNA, 24 nt, Human
uggcucacgccuguaaucccagca

SEQ ID NO: 1228002 - RNA, 20 nt, Human
uggcuggggaguggaguugg

SEQ ID NO: 1228003 - RNA, 21 nt, Human
uggcuugguguccuccccuug

SEQ ID NO: 1228004 - RNA, 18 nt, Human
ugggaacagucucccuuc

SEQ ID NO: 1228005 - RNA, 25 nt, Human
ugggaaggagauggaggacuccagc

SEQ ID NO: 1228006 - RNA, 19 nt, Human
ugggaggcugaggcggaug

SEQ ID NO: 1228007 - RNA, 23 nt, Human
ugggaggcugaggcggauggauc

SEQ ID NO: 1228008 - RNA, 24 nt, Human
ugggaggcugaggcggauggaucg

SEQ ID NO: 1228009 - RNA, 19 nt, Human
ugggagggggcauuucuga

SEQ ID NO: 1228010 - RNA, 24 nt, Human
ugggagggggcauuucugacagaa

SEQ ID NO: 1228011 - RNA, 18 nt, Human
uggggagaguguuccugc

SEQ ID NO: 1228012 - RNA, 18 nt, Human
uggggagaguguuccugc

SEQ ID NO: 1228013 - RNA, 18 nt, Human
uggggucauagggcucag

SEQ ID NO: 1228014 - RNA, 22 nt, Human
ugguauggggacccccacacgu

SEQ ID NO: 1228015 - RNA, 19 nt, Human
uggucgggguuguuugggu

SEQ ID NO: 1228016 - RNA, 24 nt, Human
ugguggcgggcgccuguaguccca

SEQ ID NO: 1228017 - RNA, 21 nt, Human
ugucacagauccuccaaugag

SEQ ID NO: 1228018 - RNA, 24 nt, Human
ugucagguuggugcucaagaaggu

SEQ ID NO: 1228019 - RNA, 23 nt, Human
ugucucucucaucagggccucca

SEQ ID NO: 1228020 - RNA, 22 nt, Human
uguucagagcagcaccauucac

SEQ ID NO: 1228021 - RNA, 23 nt, Human
uguugggggcagucuuugcccgg

SEQ ID NO: 1228022 - RNA, 18 nt, Human
uuaauacauuugccacaa

SEQ ID NO: 1228023 - RNA, 25 nt, Human
uuaccagaggcugcggcgguugggg

SEQ ID NO: 1228024 - RNA, 18 nt, Human
uuagcugggcgugguggc

SEQ ID NO: 1228025 - RNA, 24 nt, Human
uuagcugggcgugguggcgggcgc

SEQ ID NO: 1228026 - RNA, 20 nt, Human
uucagagacagaaacaacgg

SEQ ID NO: 1228027 - RNA, 24 nt, Human
uucagcagauugaagccugggggu

SEQ ID NO: 1228028 - RNA, 22 nt, Human
uucauccccagagcagguuuca

SEQ ID NO: 1228029 - RNA, 21 nt, Human
uuccagggugugguguccugu

SEQ ID NO: 1228030 - RNA, 20 nt, Human
uuccuggacaggagcuugaa

SEQ ID NO: 1228031 - RNA, 20 nt, Human
uugaacuugucaaagauguc

SEQ ID NO: 1228032 - RNA, 23 nt, Human
uugaggaggggcagguuuggggg

SEQ ID NO: 1228033 - RNA, 22 nt, Human
uugcagugagcggagaucgcgc

SEQ ID NO: 1228034 - RNA, 23 nt, Human
uugcccggcccuggggacuccca

SEQ ID NO: 1228035 - RNA, 18 nt, Human
uuggaggugggcgugguc

SEQ ID NO: 1228036 - RNA, 24 nt, Human
uugggaggcugaggcggauggauc

SEQ ID NO: 1228037 - RNA, 18 nt, Human
uuguuugggucauggggg

SEQ ID NO: 1228038 - RNA, 22 nt, Human
uuguuugggucauggggguggg

SEQ ID NO: 1228039 - RNA, 18 nt, Human
auuggacaagcuucagcc

SEQ ID NO: 1228040 - RNA, 20 nt, Human
caaaguaggggaaucaacaa

SEQ ID NO: 1228041 - RNA, 24 nt, Human
cacgcaccuugcaugagcgaggug

SEQ ID NO: 1228042 - RNA, 21 nt, Human
ccuugcaugagcgaggugccc

SEQ ID NO: 1228043 - RNA, 24 nt, Human
cucaaaguaggggaaucaacagaa

SEQ ID NO: 1228044 - RNA, 21 nt, Human
cuugcaugagcgaggugcccu

SEQ ID NO: 1228045 - RNA, 20 nt, Human
gaacaagcguagauauucuc

SEQ ID NO: 1228046 - RNA, 23 nt, Human
gaacaagcguagauauucuccau

SEQ ID NO: 1228047 - RNA, 19 nt, Human
gauuggacaagcuucagcc

SEQ ID NO: 1228048 - RNA, 20 nt, Human
gauuggacaagcuucagccc

SEQ ID NO: 1228049 - RNA, 23 nt, Human
gcccacucuugaagguaaaggaa

SEQ ID NO: 1228050 - RNA, 25 nt, Human
guacagcauaaugguggcuuccucc

SEQ ID NO: 1228051 - RNA, 18 nt, Human
uaacauaaaaauucugcu

SEQ ID NO: 1228052 - RNA, 19 nt, Human
uagcugaaaaacgcauuau

SEQ ID NO: 1228053 - RNA, 23 nt, Human
ucaacagaacuuggguuugaaaa

SEQ ID NO: 1228054 - RNA, 21 nt, Human
ugaaaaacgcauuaucaguua

SEQ ID NO: 1228055 - RNA, 21 nt, Human
ugaacaagcguagauauucuc

SEQ ID NO: 1228056 - RNA, 21 nt, Human
ugcaugacaaagaaaaggagg

SEQ ID NO: 1228057 - RNA, 19 nt, Human
ugcaugcaugacaaagaaa

SEQ ID NO: 1228058 - RNA, 27 nt, Human
ugccuggggcaguguuuaaccgggucg

SEQ ID NO: 1228059 - RNA, 19 nt, Human
ugcuuggcaacauagcuga

SEQ ID NO: 1228060 - RNA, 18 nt, Human
ugucuccucucuugaagu

SEQ ID NO: 1228061 - RNA, 19 nt, Human
uguugcuaucaucuuuguc

SEQ ID NO: 1228062 - RNA, 20 nt, Human
uuugggguggauucauucca

SEQ ID NO: 1228063 - RNA, 18 nt, Human
aacccgugucuccucucu

SEQ ID NO: 1228064 - RNA, 18 nt, Human
auuggacaagcuucagcc

SEQ ID NO: 1228065 - RNA, 20 nt, Human
caaaguaggggaaucaacaa

SEQ ID NO: 1228066 - RNA, 24 nt, Human
cacgcaccuugcaugagcgaggug

SEQ ID NO: 1228067 - RNA, 25 nt, Human
ccuggggcaguguuuaaccgggucg

SEQ ID NO: 1228068 - RNA, 21 nt, Human
ccuugcaugagcgaggugccc

SEQ ID NO: 1228069 - RNA, 24 nt, Human
cucaaaguaggggaaucaacagaa

SEQ ID NO: 1228070 - RNA, 21 nt, Human
cuugcaugagcgaggugcccu

SEQ ID NO: 1228071 - RNA, 20 nt, Human
gaacaagcguagauauucuc

SEQ ID NO: 1228072 - RNA, 23 nt, Human
gaacaagcguagauauucuccau

SEQ ID NO: 1228073 - RNA, 19 nt, Human
gauuggacaagcuucagcc

SEQ ID NO: 1228074 - RNA, 20 nt, Human
gauuggacaagcuucagccc

SEQ ID NO: 1228075 - RNA, 23 nt, Human
gcccacucuugaagguaaaggaa

SEQ ID NO: 1228076 - RNA, 25 nt, Human
guacagcauaaugguggcuuccucc

SEQ ID NO: 1228077 - RNA, 18 nt, Human
uaacauaaaaauucugcu

SEQ ID NO: 1228078 - RNA, 19 nt, Human
uagcugaaaaacgcauuau

SEQ ID NO: 1228079 - RNA, 23 nt, Human
ucaacagaacuuggguuugaaaa

SEQ ID NO: 1228080 - RNA, 21 nt, Human
ugaaaaacgcauuaucaguua

SEQ ID NO: 1228081 - RNA, 21 nt, Human
ugaacaagcguagauauucuc

SEQ ID NO: 1228082 - RNA, 21 nt, Human
ugcaugacaaagaaaaggagg

SEQ ID NO: 1228083 - RNA, 19 nt, Human
ugcaugcaugacaaagaaa

SEQ ID NO: 1228084 - RNA, 19 nt, Human
ugcuuggcaacauagcuga

SEQ ID NO: 1228085 - RNA, 19 nt, Human
ugucuccucucuugaagua

SEQ ID NO: 1228086 - RNA, 19 nt, Human
uguugcuaucaucuuuguc

SEQ ID NO: 1228087 - RNA, 20 nt, Human
uuugggauggauucauucca

SEQ ID NO: 1228088 - RNA, 18 nt, Human
aaaaauaaagccaguaug

SEQ ID NO: 1228089 - RNA, 18 nt, Human
aaacaguauuuuuagauc

SEQ ID NO: 1228090 - RNA, 19 nt, Human
aacauggugaaaccccguc

SEQ ID NO: 1228091 - RNA, 20 nt, Human
aacauggugaaaccccgucu

SEQ ID NO: 1228092 - RNA, 21 nt, Human
aacauggugaaaccccgucuc

SEQ ID NO: 1228093 - RNA, 23 nt, Human
aagagcgagacucggucucaaaa

SEQ ID NO: 1228094 - RNA, 24 nt, Human
aagccacagugucaacuuccauac

SEQ ID NO: 1228095 - RNA, 24 nt, Human
aaucgcuuaaaccugggaggcaga

SEQ ID NO: 1228096 - RNA, 24 nt, Human
aauuaucaaguuuuuucuaaaaac

SEQ ID NO: 1228097 - RNA, 22 nt, Human
acaagcacucuggcacacccaa

SEQ ID NO: 1228098 - RNA, 23 nt, Human
acacccaagaccugggccaagcc

SEQ ID NO: 1228099 - RNA, 25 nt, Human
acacccaagaccugggccaagccac

SEQ ID NO: 1228100 - RNA, 24 nt, Human
accaacauggugaaaccccgucuc

SEQ ID NO: 1228101 - RNA, 18 nt, Human
accccgucucuacuaaaa

SEQ ID NO: 1228102 - RNA, 23 nt, Human
acucuacagagcaaggugggaac

SEQ ID NO: 1228103 - RNA, 18 nt, Human
acugcacuccagccuagg

SEQ ID NO: 1228104 - RNA, 25 nt, Human
acugcacuccagccuaggugacaag

SEQ ID NO: 1228105 - RNA, 27 nt, Human
acugcacuccagccuaggugacaagag

SEQ ID NO: 1228106 - RNA, 22 nt, Human
agagguuguagugagccgagau

SEQ ID NO: 1228107 - RNA, 24 nt, Human
agagguuguagugagccgagauug

SEQ ID NO: 1228108 - RNA, 21 nt, Human
agcacuuugggaggccgaggc

SEQ ID NO: 1228109 - RNA, 24 nt, Human
agcacuuugggaggccgaggcggg

SEQ ID NO: 1228110 - RNA, 22 nt, Human
agccaacacugaguaccucaca

SEQ ID NO: 1228111 - RNA, 23 nt, Human
agccgggcgcgguggcacaugcc

SEQ ID NO: 1228112 - RNA, 25 nt, Human
agccuaggugacaagagcgagacuc

SEQ ID NO: 1228113 - RNA, 24 nt, Human
agccugaccaacauggugaaaccc

SEQ ID NO: 1228114 - RNA, 20 nt, Human
agcucuacaccuuuggccgc

SEQ ID NO: 1228115 - RNA, 24 nt, Human
aggcacgguggcucacgccuguaa

SEQ ID NO: 1228116 - RNA, 22 nt, Human
aggcagaagaaucgcuuaaacc

SEQ ID NO: 1228117 - RNA, 24 nt, Human
aggcagaagaaucgcuuaaaccug

SEQ ID NO: 1228118 - RNA, 21 nt, Human
aggcagagguuguagugagcc

SEQ ID NO: 1228119 - RNA, 24 nt, Human
aggcagagguuguagugagccgag

SEQ ID NO: 1228120 - RNA, 22 nt, Human
aggccaggcacgguggcucacg

SEQ ID NO: 1228121 - RNA, 21 nt, Human
aggccgaggcggguagaucac

SEQ ID NO: 1228122 - RNA, 24 nt, Human
aggcggguagaucacgaggucagg

SEQ ID NO: 1228123 - RNA, 18 nt, Human
agguacuaaaagcugccu

SEQ ID NO: 1228124 - RNA, 19 nt, Human
aguuccuccauagcagccu

SEQ ID NO: 1228125 - RNA, 19 nt, Human
aucacgaggucaggaguuc

SEQ ID NO: 1228126 - RNA, 24 nt, Human
auugccuaucucacccacacggag

SEQ ID NO: 1228127 - RNA, 24 nt, Human
caacauggugaaaccccgucucua

SEQ ID NO: 1228128 - RNA, 26 nt, Human
cacacccaagaccugggccaagccac

SEQ ID NO: 1228129 - RNA, 23 nt, Human
caccuuuggccgcauugugaucu

SEQ ID NO: 1228130 - RNA, 24 nt, Human
cacgccuguaauccuagcacuuug

SEQ ID NO: 1228131 - RNA, 24 nt, Human
cacuccagccuaggugacaagagc

SEQ ID NO: 1228132 - RNA, 20 nt, Human
cacugaguaccucacaacga

SEQ ID NO: 1228133 - RNA, 19 nt, Human
cacugcacuccagccuagg

SEQ ID NO: 1228134 - RNA, 21 nt, Human
cacugcacuccagccuaggug

SEQ ID NO: 1228135 - RNA, 23 nt, Human
cacugcacuccagccuaggugac

SEQ ID NO: 1228136 - RNA, 24 nt, Human
cacugcacuccagccuaggugaca

SEQ ID NO: 1228137 - RNA, 25 nt, Human
cacugcacuccagccuaggugacaa

SEQ ID NO: 1228138 - RNA, 24 nt, Human
cagcuacuuaggaggcugaggcag

SEQ ID NO: 1228139 - RNA, 22 nt, Human
cagguccagaaccagucagaga

SEQ ID NO: 1228140 - RNA, 19 nt, Human
cagugagucacaagcacuc

SEQ ID NO: 1228141 - RNA, 22 nt, Human
ccaacacugaguaccucacaac

SEQ ID NO: 1228142 - RNA, 24 nt, Human
ccaacacugaguaccucacaacga

SEQ ID NO: 1228143 - RNA, 18 nt, Human
cccuguccuccuguaucu

SEQ ID NO: 1228144 - RNA, 22 nt, Human
ccuaggccaggcacgguggcuc

SEQ ID NO: 1228145 - RNA, 19 nt, Human
ccucaaaacaggacagcca

SEQ ID NO: 1228146 - RNA, 23 nt, Human
ccugaccaacauggugaaacccc

SEQ ID NO: 1228147 - RNA, 24 nt, Human
ccugaccaacauggugaaaccccg

SEQ ID NO: 1228148 - RNA, 22 nt, Human
ccuggaaacaccucuccucacc

SEQ ID NO: 1228149 - RNA, 21 nt, Human
ccugggaggcagagguuguag

SEQ ID NO: 1228150 - RNA, 22 nt, Human
ccuguaauccuagcacuuuggg

SEQ ID NO: 1228151 - RNA, 20 nt, Human
cgaagggaagcagcucuaca

SEQ ID NO: 1228152 - RNA, 24 nt, Human
cgagaccagccugaccaacauggu

SEQ ID NO: 1228153 - RNA, 24 nt, Human
cgagauugcaagcacugcacucca

SEQ ID NO: 1228154 - RNA, 24 nt, Human
cgaggcggguagaucacgagguca

SEQ ID NO: 1228155 - RNA, 18 nt, Human
cgccuguaauccuagcac

SEQ ID NO: 1228156 - RNA, 23 nt, Human
cgggaggcugagaacauggcuca

SEQ ID NO: 1228157 - RNA, 20 nt, Human
cuagauacuagccaggaacc

SEQ ID NO: 1228158 - RNA, 24 nt, Human
cucacgccuguaauccuagcacuu

SEQ ID NO: 1228159 - RNA, 22 nt, Human
cucggucucaaaaaaaaaaaaa

SEQ ID NO: 1228160 - RNA, 21 nt, Human
cucuguuaauguuuccagcuc

SEQ ID NO: 1228161 - RNA, 24 nt, Human
cugugcccaugaacuuuaaggacc

SEQ ID NO: 1228162 - RNA, 21 nt, Human
gaaccagucagagacuugccc

SEQ ID NO: 1228163 - RNA, 24 nt, Human
gagauugcaagcacugcacuccag

SEQ ID NO: 1228164 - RNA, 22 nt, Human
gagcacaacauugucuucaugc

SEQ ID NO: 1228165 - RNA, 22 nt, Human
gaucacgaggucaggaguucga

SEQ ID NO: 1228166 - RNA, 24 nt, Human
gaucacgaggucaggaguucgaga

SEQ ID NO: 1228167 - RNA, 21 nt, Human
gcacugcacuccagccuaggu

SEQ ID NO: 1228168 - RNA, 21 nt, Human
gcagagcugcccuucagugag

SEQ ID NO: 1228169 - RNA, 19 nt, Human
gcauugugaucuacaucga

SEQ ID NO: 1228170 - RNA, 23 nt, Human
gccuacaugcagccaggagcacc

SEQ ID NO: 1228171 - RNA, 18 nt, Human
ggaagcagcucuacaccu

SEQ ID NO: 1228172 - RNA, 21 nt, Human
ggagcuacuccacaucaggcc

SEQ ID NO: 1228173 - RNA, 21 nt, Human
ggaggcugaggcagaagaauc

SEQ ID NO: 1228174 - RNA, 19 nt, Human
ggcauuggcguggccgcua

SEQ ID NO: 1228175 - RNA, 23 nt, Human
ggcgcgguggcacaugccuguaa

SEQ ID NO: 1228176 - RNA, 24 nt, Human
gggaacagaagaguggccgguacc

SEQ ID NO: 1228177 - RNA, 20 nt, Human
gggcauuggcguggccgcua

SEQ ID NO: 1228178 - RNA, 24 nt, Human
ggguagaucacgaggucaggaguu

SEQ ID NO: 1228179 - RNA, 20 nt, Human
gguccagaaccagucagaga

SEQ ID NO: 1228180 - RNA, 24 nt, Human
gguggcacaugccuguaaugccag

SEQ ID NO: 1228181 - RNA, 21 nt, Human
gguggcucacgccuguaaucc

SEQ ID NO: 1228182 - RNA, 24 nt, Human
gguggcucacgccuguaauccuag

SEQ ID NO: 1228183 - RNA, 21 nt, Human
ggugggaacagaagaguggcu

SEQ ID NO: 1228184 - RNA, 18 nt, Human
guaguuccuccauagcag

SEQ ID NO: 1228185 - RNA, 19 nt, Human
gucucaaaaaaaaaaaaag

SEQ ID NO: 1228186 - RNA, 19 nt, Human
guuguagugagccgagauu

SEQ ID NO: 1228187 - RNA, 21 nt, Human
guuguagugagccgagauugc

SEQ ID NO: 1228188 - RNA, 18 nt, Human
uaagagggauguacugua

SEQ ID NO: 1228189 - RNA, 18 nt, Human
uacaccuggaaacaccuc

SEQ ID NO: 1228190 - RNA, 21 nt, Human
uacuagccaggaaccuucuga

SEQ ID NO: 1228191 - RNA, 18 nt, Human
uagauacuagccaggaac

SEQ ID NO: 1228192 - RNA, 22 nt, Human
uagaucacgaggucaggaguuc

SEQ ID NO: 1228193 - RNA, 24 nt, Human
uagcacuuugggaggccgaggcgg

SEQ ID NO: 1228194 - RNA, 23 nt, Human
uagcagccuucccuuuagucucu

SEQ ID NO: 1228195 - RNA, 26 nt, Human
uaggaggcugaggcagaagaaucgcu

SEQ ID NO: 1228196 - RNA, 22 nt, Human
uagguuaaaaauaaagccagua

SEQ ID NO: 1228197 - RNA, 22 nt, Human
ucaaaaaaaaaaaaagaaaaaa

SEQ ID NO: 1228198 - RNA, 18 nt, Human
ucaccuucaaaaggguaa

SEQ ID NO: 1228199 - RNA, 18 nt, Human
ucacgaggucaggaguuc

SEQ ID NO: 1228200 - RNA, 24 nt, Human
ucacgaggucaggaguucgagacc

SEQ ID NO: 1228201 - RNA, 19 nt, Human
uccauacaccuggaaacaa

SEQ ID NO: 1228202 - RNA, 21 nt, Human
uccucaccgcccuguccuccu

SEQ ID NO: 1228203 - RNA, 26 nt, Human
uccuccaaaguuguaucuuugaggca

SEQ ID NO: 1228204 - RNA, 18 nt, Human
uccugagucuuuaauucu

SEQ ID NO: 1228205 - RNA, 21 nt, Human
ucggucucaaaaaaaaaaaaa

SEQ ID NO: 1228206 - RNA, 20 nt, Human
ucguccucaaaacaggacag

SEQ ID NO: 1228207 - RNA, 23 nt, Human
ucucuacuaaaaaugcaaaaauu

SEQ ID NO: 1228208 - RNA, 21 nt, Human
ugaaaacagagauuaaguaau

SEQ ID NO: 1228209 - RNA, 24 nt, Human
ugaccaacauggugaaaccccguc

SEQ ID NO: 1228210 - RNA, 24 nt, Human
ugaggcagaagaaucgcuuaaacc

SEQ ID NO: 1228211 - RNA, 22 nt, Human
ugaucgacauggccaagugaac

SEQ ID NO: 1228212 - RNA, 24 nt, Human
ugcaaaaauuagccgggcgcggug

SEQ ID NO: 1228213 - RNA, 25 nt, Human
ugcccaugaacuuuaaggaccucau

SEQ ID NO: 1228214 - RNA, 19 nt, Human
ugccuguaaugccagcuac

SEQ ID NO: 1228215 - RNA, 24 nt, Human
ugccuguaaugccagcuacuuagg

SEQ ID NO: 1228216 - RNA, 18 nt, Human
uggcacaugccuguaaug

SEQ ID NO: 1228217 - RNA, 18 nt, Human
uggcagcuucuaccucag

SEQ ID NO: 1228218 - RNA, 19 nt, Human
uggcucacgccuguaaucc

SEQ ID NO: 1228219 - RNA, 24 nt, Human
uggcucacgccuguaauccuagca

SEQ ID NO: 1228220 - RNA, 20 nt, Human
ugggacaaugccacguaggg

SEQ ID NO: 1228221 - RNA, 24 nt, Human
ugggaggcagagguuguagugagc

SEQ ID NO: 1228222 - RNA, 20 nt, Human
ugggaggccgaggcggguag

SEQ ID NO: 1228223 - RNA, 24 nt, Human
ugggaggccgaggcggguagauca

SEQ ID NO: 1228224 - RNA, 19 nt, Human
ugggguaucguccucaaaa

SEQ ID NO: 1228225 - RNA, 22 nt, Human
ugggugcccaccucacugcaga

SEQ ID NO: 1228226 - RNA, 20 nt, Human
uguaaaaugggacaaugcca

SEQ ID NO: 1228227 - RNA, 24 nt, Human
uucucuguaguuccuccauagcag

SEQ ID NO: 1228228 - RNA, 25 nt, Human
uugggaggccgaggcggguagauca

SEQ ID NO: 1228229 - RNA, 18 nt, Human
uuguagugagccgagauu

SEQ ID NO: 1228230 - RNA, 19 nt, Human
uuguagugagccgagauug

SEQ ID NO: 1228231 - RNA, 20 nt, Human
uuguagugagccgagauugc

SEQ ID NO: 1228232 - RNA, 22 nt, Human
aaagggcccccagacccagaca

SEQ ID NO: 1228233 - RNA, 18 nt, Human
aacaggugugaagaggau

SEQ ID NO: 1228234 - RNA, 25 nt, Human
agacccagacaauagggcccagcag

SEQ ID NO: 1228235 - RNA, 19 nt, Human
agggagucacccagcgggc

SEQ ID NO: 1228236 - RNA, 18 nt, Human
aucccaacaggugugaag

SEQ ID NO: 1228237 - RNA, 23 nt, Human
cagcaggcagggcccgagcaggu

SEQ ID NO: 1228238 - RNA, 21 nt, Human
ccagacccagacaauagggcc

SEQ ID NO: 1228239 - RNA, 24 nt, Human
ccccagacccagacaauagggccc

SEQ ID NO: 1228240 - RNA, 24 nt, Human
cccccagacccagacaauagggcc

SEQ ID NO: 1228241 - RNA, 21 nt, Human
cccucauaccccuggagcugu

SEQ ID NO: 1228242 - RNA, 24 nt, Human
ccuuaaaaggugaggggagaaggg

SEQ ID NO: 1228243 - RNA, 18 nt, Human
cuucagggagucacccag

SEQ ID NO: 1228244 - RNA, 19 nt, Human
gacccagacaauagggccc

SEQ ID NO: 1228245 - RNA, 25 nt, Human
gcaggaaagggcccccagacccaga

SEQ ID NO: 1228246 - RNA, 18 nt, Human
gccuuggggaaagugugg

SEQ ID NO: 1228247 - RNA, 20 nt, Human
gcgggcuagaaaaccaccgg

SEQ ID NO: 1228248 - RNA, 23 nt, Human
gugugaagaggaugagaucuuca

SEQ ID NO: 1228249 - RNA, 21 nt, Human
uccaugggaggcuccauccca

SEQ ID NO: 1228250 - RNA, 19 nt, Human
ugaggagggaguagugggc

SEQ ID NO: 1228251 - RNA, 23 nt, Human
ugaggagggaguagugggcugcc

SEQ ID NO: 1228252 - RNA, 22 nt, Human
ugccaggccucccucauacccc

SEQ ID NO: 1228253 - RNA, 21 nt, Human
uguggucaguggggacuuggc

SEQ ID NO: 1228254 - RNA, 21 nt, Human
aaaaaaaaaaaaaaaaaagga

SEQ ID NO: 1228255 - RNA, 20 nt, Human
aaaaaaaaggaugccccugg

SEQ ID NO: 1228256 - RNA, 22 nt, Human
aaagccgcagccaaggauucca

SEQ ID NO: 1228257 - RNA, 23 nt, Human
aaauaagcacaaaaccuggccac

SEQ ID NO: 1228258 - RNA, 18 nt, Human
aagcacaaaaccuggcca

SEQ ID NO: 1228259 - RNA, 21 nt, Human
acccuggcgacagcuacacug

SEQ ID NO: 1228260 - RNA, 20 nt, Human
accggggugcaggcaggaag

SEQ ID NO: 1228261 - RNA, 22 nt, Human
agacaggccacagggagcuccc

SEQ ID NO: 1228262 - RNA, 27 nt, Human
agaccucugguccuagccaggcccagg

SEQ ID NO: 1228263 - RNA, 22 nt, Human
agcacaaaaccuggccacugua

SEQ ID NO: 1228264 - RNA, 26 nt, Human
aggaauaauggaggacgaucacuggc

SEQ ID NO: 1228265 - RNA, 18 nt, Human
aggauggcguuccacagc

SEQ ID NO: 1228266 - RNA, 21 nt, Human
aguguggacaugguggggccc

SEQ ID NO: 1228267 - RNA, 21 nt, Human
cacaggugguccacaagguca

SEQ ID NO: 1228268 - RNA, 18 nt, Human
cagaacccuggcgacagc

SEQ ID NO: 1228269 - RNA, 23 nt, Human
cagauagcucuucccucaaccca

SEQ ID NO: 1228270 - RNA, 22 nt, Human
cagcaacacaaagccgcagcca

SEQ ID NO: 1228271 - RNA, 23 nt, Human
cagcaacacaaagccgcagccaa

SEQ ID NO: 1228272 - RNA, 20 nt, Human
cagcccuagauccucagucu

SEQ ID NO: 1228273 - RNA, 18 nt, Human
caggcccaggaagggagc

SEQ ID NO: 1228274 - RNA, 21 nt, Human
caggcccaggaagggagccag

SEQ ID NO: 1228275 - RNA, 22 nt, Human
cagugcuugaggaccaaaggca

SEQ ID NO: 1228276 - RNA, 21 nt, Human
cauccuguccuguccugggag

SEQ ID NO: 1228277 - RNA, 21 nt, Human
cauuggaggaauaauggagga

SEQ ID NO: 1228278 - RNA, 23 nt, Human
ccacuguagucucagcccccagg

SEQ ID NO: 1228279 - RNA, 23 nt, Human
cccaaagugaccucucuuccuug

SEQ ID NO: 1228280 - RNA, 25 nt, Human
cccaauaaauaagcacaagguaccc

SEQ ID NO: 1228281 - RNA, 18 nt, Human
cccagcccuagauccuca

SEQ ID NO: 1228282 - RNA, 20 nt, Human
cccaggaagggagccaggcu

SEQ ID NO: 1228283 - RNA, 18 nt, Human
cccucaacccacccccca

SEQ ID NO: 1228284 - RNA, 22 nt, Human
ccgcagccaaggauuccagaac

SEQ ID NO: 1228285 - RNA, 19 nt, Human
ccgcuggugaucucagccg

SEQ ID NO: 1228286 - RNA, 18 nt, Human
ccuccuucccagugugga

SEQ ID NO: 1228287 - RNA, 27 nt, Human
ccucugcagcaaugcauccaacagcuu

SEQ ID NO: 1228288 - RNA, 21 nt, Human
ccugaaagacggucaggccag

SEQ ID NO: 1228289 - RNA, 25 nt, Human
ccuucccuacuccaacucuuuaaaa

SEQ ID NO: 1228290 - RNA, 26 nt, Human
ccuucccuacuccaacucuuuaaaaa

SEQ ID NO: 1228291 - RNA, 22 nt, Human
cucaacccaccccccaauaaau

SEQ ID NO: 1228292 - RNA, 22 nt, Human
cuccugggcacgacugccucca

SEQ ID NO: 1228293 - RNA, 22 nt, Human
cucuucccucaacccacccccc

SEQ ID NO: 1228294 - RNA, 21 nt, Human
cucuuuaaaaaaaaaaaaaaa

SEQ ID NO: 1228295 - RNA, 22 nt, Human
cugggcacgacugccuccaagg

SEQ ID NO: 1228296 - RNA, 18 nt, Human
gagcagaagcugggauau

SEQ ID NO: 1228297 - RNA, 18 nt, Human
gagcccaggcugaggacc

SEQ ID NO: 1228298 - RNA, 21 nt, Human
gcccaggaagggagccaggcu

SEQ ID NO: 1228299 - RNA, 22 nt, Human
gcccucauccuuccucccaccc

SEQ ID NO: 1228300 - RNA, 24 nt, Human
gcccucauccuuccucccacccac

SEQ ID NO: 1228301 - RNA, 25 nt, Human
ggacaggcagugggacccauggcuc

SEQ ID NO: 1228302 - RNA, 21 nt, Human
ggagcccaggcugaggaccgg

SEQ ID NO: 1228303 - RNA, 18 nt, Human
guaccccaaggccagaua

SEQ ID NO: 1228304 - RNA, 19 nt, Human
uaaauaagcacaaaaccug

SEQ ID NO: 1228305 - RNA, 23 nt, Human
uaaauaagcacaaaaccuggcca

SEQ ID NO: 1228306 - RNA, 25 nt, Human
uaaauaagcacaaaaccuggccacu

SEQ ID NO: 1228307 - RNA, 25 nt, Human
uaaauaagcacaaaaccuggccacu

SEQ ID NO: 1228308 - RNA, 22 nt, Human
uaaggagggcagacucacguca

SEQ ID NO: 1228309 - RNA, 18 nt, Human
uagcucuucccucaaccc

SEQ ID NO: 1228310 - RNA, 25 nt, Human
uagcucuucccucaacccacccccc

SEQ ID NO: 1228311 - RNA, 19 nt, Human
uagucucagcccccaggaa

SEQ ID NO: 1228312 - RNA, 21 nt, Human
ucaacccaccccccaauaaau

SEQ ID NO: 1228313 - RNA, 26 nt, Human
uccaacucuuuaaaaaaaaaaaaaaa

SEQ ID NO: 1228314 - RNA, 30 nt, Human
uccaacucuuuaaaaaaaaaaaaaaaaaaa

SEQ ID NO: 1228315 - RNA, 19 nt, Human
uccacagcugcugcagggg

SEQ ID NO: 1228316 - RNA, 19 nt, Human
ucccagaacccuggcgaca

SEQ ID NO: 1228317 - RNA, 21 nt, Human
ucccagacaggccacagggag

SEQ ID NO: 1228318 - RNA, 21 nt, Human
uccucagucugaagcuguggg

SEQ ID NO: 1228319 - RNA, 22 nt, Human
uccugggagcccaggcugagga

SEQ ID NO: 1228320 - RNA, 22 nt, Human
uccuuggagaggccacaggugg

SEQ ID NO: 1228321 - RNA, 20 nt, Human
ucuuuaaaaaaaaaaaaaaa

SEQ ID NO: 1228322 - RNA, 22 nt, Human
ugacaagaaguauccugaaaga

SEQ ID NO: 1228323 - RNA, 18 nt, Human
ugacaggucccagcccua

SEQ ID NO: 1228324 - RNA, 18 nt, Human
uggcagacagggacucuc

SEQ ID NO: 1228325 - RNA, 20 nt, Human
uggccuggguccucugcagc

SEQ ID NO: 1228326 - RNA, 21 nt, Human
ugggacccauggcucccagug

SEQ ID NO: 1228327 - RNA, 22 nt, Human
ugggagcccaggcugaggaccg

SEQ ID NO: 1228328 - RNA, 24 nt, Human
uggugaucucagccguggccuggg

SEQ ID NO: 1228329 - RNA, 25 nt, Human
uguccuguccugggagcccaggcug

SEQ ID NO: 1228330 - RNA, 24 nt, Human
uguccugucuauccugcuguccca

SEQ ID NO: 1228331 - RNA, 22 nt, Human
ugugcagaguccagcugggcag

SEQ ID NO: 1228332 - RNA, 20 nt, Human
uuaaaaaaaaaaaaaaaaaa

SEQ ID NO: 1228333 - RNA, 23 nt, Human
uuaaaccuucccuacuccaacuc

SEQ ID NO: 1228334 - RNA, 19 nt, Human
uuccucccacccacugggc

SEQ ID NO: 1228335 - RNA, 18 nt, Human
uuggagaggccacaggug

SEQ ID NO: 1228336 - RNA, 21 nt, Human
uuggagaggccacaggugguc

SEQ ID NO: 1228337 - RNA, 24 nt, Human
aaaaagcccgguuagagaaacgga

SEQ ID NO: 1228338 - RNA, 18 nt, Human
aaacggagcaagcccccc

SEQ ID NO: 1228339 - RNA, 21 nt, Human
aaaucaccugucuucugagcc

SEQ ID NO: 1228340 - RNA, 19 nt, Human
aaauuaaauaauauguauc

SEQ ID NO: 1228341 - RNA, 20 nt, Human
aacagagggagacuccaucu

SEQ ID NO: 1228342 - RNA, 20 nt, Human
aacguggugaaaccccaucu

SEQ ID NO: 1228343 - RNA, 21 nt, Human
aacguggugaaaccccaucuc

SEQ ID NO: 1228344 - RNA, 18 nt, Human
aagccccccagggucuag

SEQ ID NO: 1228345 - RNA, 24 nt, Human
aaucgcuugaacccgggaggugga

SEQ ID NO: 1228346 - RNA, 18 nt, Human
aauuagccaggcauggug

SEQ ID NO: 1228347 - RNA, 24 nt, Human
acagagggagacuccaucucaaaa

SEQ ID NO: 1228348 - RNA, 21 nt, Human
acauguuguggggcugugaaa

SEQ ID NO: 1228349 - RNA, 24 nt, Human
accugaggucaggaguucgagacc

SEQ ID NO: 1228350 - RNA, 23 nt, Human
acugcaccccagccuggcaacag

SEQ ID NO: 1228351 - RNA, 23 nt, Human
acugcaccccagccuggcaacag

SEQ ID NO: 1228352 - RNA, 18 nt, Human
agaccccuggauacccaa

SEQ ID NO: 1228353 - RNA, 21 nt, Human
agccaggcagaaagggaugac

SEQ ID NO: 1228354 - RNA, 21 nt, Human
agccuggcaacagagggagac

SEQ ID NO: 1228355 - RNA, 23 nt, Human
aggaguucgagaccaggcuggcc

SEQ ID NO: 1228356 - RNA, 20 nt, Human
aggcagaaagggaugaccuu

SEQ ID NO: 1228357 - RNA, 23 nt, Human
aggcagaaagggaugaccuugag

SEQ ID NO: 1228358 - RNA, 24 nt, Human
aggcaggagaaucgcuugaacccg

SEQ ID NO: 1228359 - RNA, 24 nt, Human
aggcauggugucgugugccuguaa

SEQ ID NO: 1228360 - RNA, 21 nt, Human
aggccaaggcggguggaucac

SEQ ID NO: 1228361 - RNA, 22 nt, Human
aggcggguggaucaccugaggu

SEQ ID NO: 1228362 - RNA, 26 nt, Human
aggcggguggaucaccugaggucagg

SEQ ID NO: 1228363 - RNA, 20 nt, Human
aggcugaggcaggagaaucg

SEQ ID NO: 1228364 - RNA, 24 nt, Human
aggcugaggcaggagaaucgcuug

SEQ ID NO: 1228365 - RNA, 24 nt, Human
aggcuggccaacguggugaaaccc

SEQ ID NO: 1228366 - RNA, 24 nt, Human
agguggagguugcagugagccaag

SEQ ID NO: 1228367 - RNA, 19 nt, Human
agguucccagcacccagac

SEQ ID NO: 1228368 - RNA, 21 nt, Human
aucaccugaggucaggaguuc

SEQ ID NO: 1228369 - RNA, 23 nt, Human
aucagagaccccuggauacccaa

SEQ ID NO: 1228370 - RNA, 21 nt, Human
aucagauuuuugaacagacau

SEQ ID NO: 1228371 - RNA, 24 nt, Human
aucgcaccacugcaccccagccug

SEQ ID NO: 1228372 - RNA, 19 nt, Human
augccuguaaucccagcac

SEQ ID NO: 1228373 - RNA, 22 nt, Human
caaaaaagcccgguuagagaaa

SEQ ID NO: 1228374 - RNA, 24 nt, Human
caacguggugaaaccccaucucua

SEQ ID NO: 1228375 - RNA, 24 nt, Human
caaggcggguggaucaccugaggu

SEQ ID NO: 1228376 - RNA, 26 nt, Human
caaggcggguggaucaccugagguca

SEQ ID NO: 1228377 - RNA, 24 nt, Human
caccacugcaccccagccgggugc

SEQ ID NO: 1228378 - RNA, 25 nt, Human
caccacugcaccccagccuggcaac

SEQ ID NO: 1228379 - RNA, 21 nt, Human
caccccugagggaguuaggag

SEQ ID NO: 1228380 - RNA, 21 nt, Human
caccccuuccuauuuuucuuc

SEQ ID NO: 1228381 - RNA, 18 nt, Human
cacccuggggagguagcu

SEQ ID NO: 1228382 - RNA, 23 nt, Human
caccugaggucaggaguucgaga

SEQ ID NO: 1228383 - RNA, 27 nt, Human
cacuuccaauuuucugugaauuggaag

SEQ ID NO: 1228384 - RNA, 22 nt, Human
cagagaccccuggauacccaau

SEQ ID NO: 1228385 - RNA, 24 nt, Human
cagcacuuugggaggccaaggcgg

SEQ ID NO: 1228386 - RNA, 24 nt, Human
cagcuacucgggaggcugaggcag

SEQ ID NO: 1228387 - RNA, 22 nt, Human
caucagagaccccuggauaccc

SEQ ID NO: 1228388 - RNA, 24 nt, Human
caucucuacuacaauuaaaaaauu

SEQ ID NO: 1228389 - RNA, 20 nt, Human
caugccuguaaucccagcac

SEQ ID NO: 1228390 - RNA, 24 nt, Human
caugccuguaaucccagcacuuug

SEQ ID NO: 1228391 - RNA, 19 nt, Human
cauggaguguucagaaugg

SEQ ID NO: 1228392 - RNA, 19 nt, Human
ccacugcaccccagccugg

SEQ ID NO: 1228393 - RNA, 19 nt, Human
ccacugcaccccagccugg

SEQ ID NO: 1228394 - RNA, 20 nt, Human
ccacugcaccccagccuggc

SEQ ID NO: 1228395 - RNA, 23 nt, Human
ccacugcaccccagccuggcaac

SEQ ID NO: 1228396 - RNA, 22 nt, Human
ccagcacccagacccccucuga

SEQ ID NO: 1228397 - RNA, 24 nt, Human
ccaguguuggcgguggaggucuuu

SEQ ID NO: 1228398 - RNA, 18 nt, Human
ccaugccuguaaucccag

SEQ ID NO: 1228399 - RNA, 24 nt, Human
cccaugccuguaaucccagcacuu

SEQ ID NO: 1228400 - RNA, 19 nt, Human
ccccaccuucaccccuucc

SEQ ID NO: 1228401 - RNA, 21 nt, Human
ccccagggucuagaaauggau

SEQ ID NO: 1228402 - RNA, 22 nt, Human
ccccccagggucuagaaaugga

SEQ ID NO: 1228403 - RNA, 22 nt, Human
ccccucugaagauggccaggga

SEQ ID NO: 1228404 - RNA, 21 nt, Human
cccgggagguggagguugcag

SEQ ID NO: 1228405 - RNA, 22 nt, Human
cccugggggccaaaccgacucg

SEQ ID NO: 1228406 - RNA, 21 nt, Human
ccuagaacaagagacagccac

SEQ ID NO: 1228407 - RNA, 22 nt, Human
ccuccucucccuaacuccccca

SEQ ID NO: 1228408 - RNA, 22 nt, Human
ccugaggucaggaguucgagac

SEQ ID NO: 1228409 - RNA, 19 nt, Human
ccuguaaucccagcuacuc

SEQ ID NO: 1228410 - RNA, 21 nt, Human
ccuguaaucccagcuacucgg

SEQ ID NO: 1228411 - RNA, 22 nt, Human
ccuguaaucccagcuacucggg

SEQ ID NO: 1228412 - RNA, 21 nt, Human
ccuucaccccuuccuauuuuu

SEQ ID NO: 1228413 - RNA, 24 nt, Human
ccuuccuauuuuucuucuaauccc

SEQ ID NO: 1228414 - RNA, 20 nt, Human
ccuugaggggggggucacag

SEQ ID NO: 1228415 - RNA, 24 nt, Human
cgagaccaggcuggccaacguggu

SEQ ID NO: 1228416 - RNA, 21 nt, Human
cgcaccacugcaccccagccu

SEQ ID NO: 1228417 - RNA, 29 nt, Human
cgggagguggagguugcagugacaacggu

SEQ ID NO: 1228418 - RNA, 24 nt, Human
cgggagguggagguugcagugagc

SEQ ID NO: 1228419 - RNA, 24 nt, Human
cggguggaucaccugaggucagga

SEQ ID NO: 1228420 - RNA, 23 nt, Human
cgguguuuguggggacagggccu

SEQ ID NO: 1228421 - RNA, 21 nt, Human
cgugugccuguaaucccagcu

SEQ ID NO: 1228422 - RNA, 24 nt, Human
cuaaugcucagacacucccaacug

SEQ ID NO: 1228423 - RNA, 21 nt, Human
cuagaacaagagacagccaca

SEQ ID NO: 1228424 - RNA, 18 nt, Human
cucugggaaauggggauu

SEQ ID NO: 1228425 - RNA, 21 nt, Human
cugagccuguuuccucaucug

SEQ ID NO: 1228426 - RNA, 23 nt, Human
cuggccaacguggugaaacccca

SEQ ID NO: 1228427 - RNA, 21 nt, Human
gacauccuccucucccuaacu

SEQ ID NO: 1228428 - RNA, 19 nt, Human
gagaaacggagcaagcccc

SEQ ID NO: 1228429 - RNA, 23 nt, Human
gagaaucgcuugaacccgggagg

SEQ ID NO: 1228430 - RNA, 23 nt, Human
gagguugcagugagccaagaucg

SEQ ID NO: 1228431 - RNA, 24 nt, Human
gaucaccugaggucaggaguucga

SEQ ID NO: 1228432 - RNA, 21 nt, Human
gauggcucugggaaaugggga

SEQ ID NO: 1228433 - RNA, 20 nt, Human
gcaccacugcaccccagccu

SEQ ID NO: 1228434 - RNA, 28 nt, Human
gcaccccagccuggcaacagagggagag

SEQ ID NO: 1228435 - RNA, 21 nt, Human
gcagaaagggaugaccuugag

SEQ ID NO: 1228436 - RNA, 24 nt, Human
gccaacguggugaaaccccaucuc

SEQ ID NO: 1228437 - RNA, 20 nt, Human
gccaagaucgcaccacugca

SEQ ID NO: 1228438 - RNA, 20 nt, Human
gcccaugccuguaaucccag

SEQ ID NO: 1228439 - RNA, 19 nt, Human
gcucagagcccuuuugcuc

SEQ ID NO: 1228440 - RNA, 24 nt, Human
gcuggccaacguggugaaacccca

SEQ ID NO: 1228441 - RNA, 20 nt, Human
ggacagggccuacauaauuu

SEQ ID NO: 1228442 - RNA, 19 nt, Human
ggaggcccaaagcacagag

SEQ ID NO: 1228443 - RNA, 20 nt, Human
ggagguugcagugagccaag

SEQ ID NO: 1228444 - RNA, 24 nt, Human
ggagguugcagugagccaagaucg

SEQ ID NO: 1228445 - RNA, 22 nt, Human
ggaucaccugaggucaggaguu

SEQ ID NO: 1228446 - RNA, 19 nt, Human
gggaugaccuugagggggg

SEQ ID NO: 1228447 - RNA, 21 nt, Human
gguggaucaccugaggucagg

SEQ ID NO: 1228448 - RNA, 24 nt, Human
ggugucgugugccuguaaucccag

SEQ ID NO: 1228449 - RNA, 24 nt, Human
gguguuuguggggacagggccuac

SEQ ID NO: 1228450 - RNA, 20 nt, Human
guagcucuauguacccacuu

SEQ ID NO: 1228451 - RNA, 21 nt, Human
guauccauuucguagaaugac

SEQ ID NO: 1228452 - RNA, 22 nt, Human
gucgcccaugccuguaauccca

SEQ ID NO: 1228453 - RNA, 23 nt, Human
gucgcccaugccuguaaucccag

SEQ ID NO: 1228454 - RNA, 23 nt, Human
guguuuguggggacagggccuac

SEQ ID NO: 1228455 - RNA, 21 nt, Human
uaagaagaugaggggccaggg

SEQ ID NO: 1228456 - RNA, 22 nt, Human
uagaacaucagagaccccugga

SEQ ID NO: 1228457 - RNA, 28 nt, Human
uagagagagcaaaggucuuuauccagau

SEQ ID NO: 1228458 - RNA, 22 nt, Human
uauucaagggaaaagcaggaca

SEQ ID NO: 1228459 - RNA, 23 nt, Human
uauucccauuucacaguugagga

SEQ ID NO: 1228460 - RNA, 20 nt, Human
ucaccugaggucaggaguuc

SEQ ID NO: 1228461 - RNA, 19 nt, Human
ucccagcacccagaccccc

SEQ ID NO: 1228462 - RNA, 23 nt, Human
ucccagcacccagacccccucug

SEQ ID NO: 1228463 - RNA, 19 nt, Human
ucccauguggaucuugaac

SEQ ID NO: 1228464 - RNA, 24 nt, Human
ucccccauccaggcauuuggugua

SEQ ID NO: 1228465 - RNA, 22 nt, Human
uccucucccuaacucccccauc

SEQ ID NO: 1228466 - RNA, 23 nt, Human
ucgcaccacugcaccccagccug

SEQ ID NO: 1228467 - RNA, 24 nt, Human
ucgcccaugccuguaaucccagca

SEQ ID NO: 1228468 - RNA, 24 nt, Human
ucgcuugaacccgggagguggagg

SEQ ID NO: 1228469 - RNA, 24 nt, Human
ucgggaggcugaggcaggagaauc

SEQ ID NO: 1228470 - RNA, 20 nt, Human
ucugaagauggccagggagu

SEQ ID NO: 1228471 - RNA, 20 nt, Human
ugaccuugagggggggguca

SEQ ID NO: 1228472 - RNA, 20 nt, Human
ugagcaggccuuucaaagug

SEQ ID NO: 1228473 - RNA, 24 nt, Human
ugaggcaggagaaucgcuugaacc

SEQ ID NO: 1228474 - RNA, 25 nt, Human
ugaggcaggagaaucgcuugaaccc

SEQ ID NO: 1228475 - RNA, 19 nt, Human
ugccuagaacaagagacag

SEQ ID NO: 1228476 - RNA, 23 nt, Human
ugccuguaaucccagcacuuugg

SEQ ID NO: 1228477 - RNA, 24 nt, Human
ugccuguaaucccagcacuuuggg

SEQ ID NO: 1228478 - RNA, 24 nt, Human
ugccuguaaucccagcuacucggg

SEQ ID NO: 1228479 - RNA, 24 nt, Human
uggaucaccugaggucaggaguuc

SEQ ID NO: 1228480 - RNA, 27 nt, Human
uggaucaccugaggucaggaguucgag

SEQ ID NO: 1228481 - RNA, 20 nt, Human
uggauggcucugggaaaugg

SEQ ID NO: 1228482 - RNA, 22 nt, Human
uggcaagccaggcagaaaggga

SEQ ID NO: 1228483 - RNA, 24 nt, Human
uggccaacguggugaaaccccauc

SEQ ID NO: 1228484 - RNA, 24 nt, Human
ugggaggccaaggcggguggauca

SEQ ID NO: 1228485 - RNA, 18 nt, Human
uggggcugugaaaguuuc

SEQ ID NO: 1228486 - RNA, 18 nt, Human
ugggggccaaaccgacuc

SEQ ID NO: 1228487 - RNA, 20 nt, Human
ugguaaguagguagcugggg

SEQ ID NO: 1228488 - RNA, 24 nt, Human
uggugucgugugccuguaauccca

SEQ ID NO: 1228489 - RNA, 24 nt, Human
ugucgcccaugccuguaaucccag

SEQ ID NO: 1228490 - RNA, 21 nt, Human
ugucuucugagccuguuuccu

SEQ ID NO: 1228491 - RNA, 20 nt, Human
ugugaauuggaagaugacug

SEQ ID NO: 1228492 - RNA, 24 nt, Human
uugaacccgggagguggagguugc

SEQ ID NO: 1228493 - RNA, 21 nt, Human
uugaggggggggucacagacc

SEQ ID NO: 1228494 - RNA, 22 nt, Human
uugcagugagccaagaucgcac

SEQ ID NO: 1228495 - RNA, 19 nt, Human
aaaaaaaaaaaaaauuagc

SEQ ID NO: 1228496 - RNA, 21 nt, Human
aaaaaaaaaaagauuugguua

SEQ ID NO: 1228497 - RNA, 22 nt, Human
aaacuacaggugcaugccacca

SEQ ID NO: 1228498 - RNA, 20 nt, Human
aacauggagaaaccccgucu

SEQ ID NO: 1228499 - RNA, 21 nt, Human
aacauggagaaaccccgucuc

SEQ ID NO: 1228500 - RNA, 18 nt, Human
aacauggugaaacccagu

SEQ ID NO: 1228501 - RNA, 19 nt, Human
aacauggugaaacccaguc

SEQ ID NO: 1228502 - RNA, 21 nt, Human
aacauggugaaacccagucac

SEQ ID NO: 1228503 - RNA, 20 nt, Human
aagcagaguuugcagugagc

SEQ ID NO: 1228504 - RNA, 24 nt, Human
aagcagaguuugcagugagcugag

SEQ ID NO: 1228505 - RNA, 18 nt, Human
aagcaguccucccacuuc

SEQ ID NO: 1228506 - RNA, 22 nt, Human
aagcaguccucccacuucaucc

SEQ ID NO: 1228507 - RNA, 27 nt, Human
aagcaguccucccacuucauccuccca

SEQ ID NO: 1228508 - RNA, 19 nt, Human
aagcgauucucccaccucu

SEQ ID NO: 1228509 - RNA, 19 nt, Human
aaucacuugaacccaguaa

SEQ ID NO: 1228510 - RNA, 24 nt, Human
aaucacuugaacccaguaagcaga

SEQ ID NO: 1228511 - RNA, 18 nt, Human
aauggcccugaggccagg

SEQ ID NO: 1228512 - RNA, 22 nt, Human
aauggcccugaggccaggaggg

SEQ ID NO: 1228513 - RNA, 19 nt, Human
acagagugaaacuccgucu

SEQ ID NO: 1228514 - RNA, 20 nt, Human
acagagugaaacuccgucuc

SEQ ID NO: 1228515 - RNA, 24 nt, Human
acagagugaaacuccgucucaaaa

SEQ ID NO: 1228516 - RNA, 22 nt, Human
acaggagaaucacuugaaccca

SEQ ID NO: 1228517 - RNA, 24 nt, Human
accccgucucuacuaaaaauacaa

SEQ ID NO: 1228518 - RNA, 24 nt, Human
accugaggucaggaguucaagacc

SEQ ID NO: 1228519 - RNA, 19 nt, Human
acuacaggugcaugccacc

SEQ ID NO: 1228520 - RNA, 18 nt, Human
acucagaagcugagacag

SEQ ID NO: 1228521 - RNA, 28 nt, Human
acuccgucucaaaaaaaaaaaaaaaaaa

SEQ ID NO: 1228522 - RNA, 24 nt, Human
acucuagucugggcgacagaguga

SEQ ID NO: 1228523 - RNA, 18 nt, Human
acucuggaggcugaggca

SEQ ID NO: 1228524 - RNA, 24 nt, Human
acuucugggcucaagcgauucucc

SEQ ID NO: 1228525 - RNA, 18 nt, Human
agacaggagaaucacuug

SEQ ID NO: 1228526 - RNA, 23 nt, Human
agacaggagaaucacuugaaccc

SEQ ID NO: 1228527 - RNA, 24 nt, Human
agacaggagaaucacuugaaccca

SEQ ID NO: 1228528 - RNA, 23 nt, Human
agagacagaccaugaggcccagg

SEQ ID NO: 1228529 - RNA, 18 nt, Human
agagaugggcagaucacc

SEQ ID NO: 1228530 - RNA, 19 nt, Human
agagcggggaggagguggu

SEQ ID NO: 1228531 - RNA, 18 nt, Human
agaguuugcagugagcug

SEQ ID NO: 1228532 - RNA, 19 nt, Human
agaguuugcagugagcuga

SEQ ID NO: 1228533 - RNA, 23 nt, Human
agaucaccugaggucaggaguuc

SEQ ID NO: 1228534 - RNA, 25 nt, Human
agaucaccugaggucaggaguucaa

SEQ ID NO: 1228535 - RNA, 22 nt, Human
agaugggcagaucaccugaggu

SEQ ID NO: 1228536 - RNA, 24 nt, Human
agcacuuugggaggccgaggcggg

SEQ ID NO: 1228537 - RNA, 23 nt, Human
agccagguguggugacgugcgcc

SEQ ID NO: 1228538 - RNA, 22 nt, Human
agccuggccaacauggugaaac

SEQ ID NO: 1228539 - RNA, 24 nt, Human
agccuggccaacauggugaaaccc

SEQ ID NO: 1228540 - RNA, 24 nt, Human
agcugggcgugguggcaggcaucu

SEQ ID NO: 1228541 - RNA, 18 nt, Human
aggagguggugaggcagg

SEQ ID NO: 1228542 - RNA, 25 nt, Human
aggcaaaagcacagcuggugcagga

SEQ ID NO: 1228543 - RNA, 21 nt, Human
aggccgaggcgggcggaucac

SEQ ID NO: 1228544 - RNA, 23 nt, Human
aggccgaggcgggcggaucacga

SEQ ID NO: 1228545 - RNA, 24 nt, Human
aggcgggcggaucacgaggucagg

SEQ ID NO: 1228546 - RNA, 18 nt, Human
aggcgugagucaccaggg

SEQ ID NO: 1228547 - RNA, 24 nt, Human
agguguggugacgugcgccuguaa

SEQ ID NO: 1228548 - RNA, 24 nt, Human
agucugggcgacagagugaaacuc

SEQ ID NO: 1228549 - RNA, 23 nt, Human
auugcacucuagucugggcgaca

SEQ ID NO: 1228550 - RNA, 24 nt, Human
auugcacucuagucugggcgacag

SEQ ID NO: 1228551 - RNA, 22 nt, Human
caaaaaaaaaaaaaaaaaaaaa

SEQ ID NO: 1228552 - RNA, 24 nt, Human
caacauggagaaaccccgucucua

SEQ ID NO: 1228553 - RNA, 24 nt, Human
caacauggugaaacccagucacua

SEQ ID NO: 1228554 - RNA, 24 nt, Human
caagaccagccuggccaacauggu

SEQ ID NO: 1228555 - RNA, 26 nt, Human
caagcaguccucccacuucauccucc

SEQ ID NO: 1228556 - RNA, 19 nt, Human
caagcgauucucccaccuc

SEQ ID NO: 1228557 - RNA, 23 nt, Human
caccugaggucaggaguucaaga

SEQ ID NO: 1228558 - RNA, 24 nt, Human
cacgcccguaaucccagcacuuug

SEQ ID NO: 1228559 - RNA, 24 nt, Human
cacgccuguaaucccagcacuuug

SEQ ID NO: 1228560 - RNA, 22 nt, Human
cacucuagucugggcgacagag

SEQ ID NO: 1228561 - RNA, 24 nt, Human
cacucuagucugggcgacagagug

SEQ ID NO: 1228562 - RNA, 28 nt, Human
cacuucauccucccaaguagcuuaaacu

SEQ ID NO: 1228563 - RNA, 27 nt, Human
cagagaugggcagaucaccugagguca

SEQ ID NO: 1228564 - RNA, 24 nt, Human
cagaucaccugaggucaggaguuc

SEQ ID NO: 1228565 - RNA, 18 nt, Human
cagcacuuugggagacag

SEQ ID NO: 1228566 - RNA, 24 nt, Human
cagcacuuugggaggccgaggcgg

SEQ ID NO: 1228567 - RNA, 24 nt, Human
cagccugaccaacauggagaaacc

SEQ ID NO: 1228568 - RNA, 22 nt, Human
caggauggaggggaggcccgug

SEQ ID NO: 1228569 - RNA, 22 nt, Human
cagucucccucuuuuuuugaag

SEQ ID NO: 1228570 - RNA, 19 nt, Human
caucuguaaucccagcuac

SEQ ID NO: 1228571 - RNA, 19 nt, Human
cauugcacucuagucuggg

SEQ ID NO: 1228572 - RNA, 22 nt, Human
cauugcacucuagucugggcga

SEQ ID NO: 1228573 - RNA, 23 nt, Human
cauugcacucuagucugggcgac

SEQ ID NO: 1228574 - RNA, 24 nt, Human
cauugcacucuagucugggcgaca

SEQ ID NO: 1228575 - RNA, 23 nt, Human
ccacuucauccucccaaguagcu

SEQ ID NO: 1228576 - RNA, 25 nt, Human
ccacuucauccucccaaguagcuua

SEQ ID NO: 1228577 - RNA, 18 nt, Human
ccaggcugggggaacagg

SEQ ID NO: 1228578 - RNA, 20 nt, Human
ccauugcacucuagucuggg

SEQ ID NO: 1228579 - RNA, 21 nt, Human
ccauugcacucuagucugggc

SEQ ID NO: 1228580 - RNA, 23 nt, Human
ccauugcacucuagucugggcga

SEQ ID NO: 1228581 - RNA, 24 nt, Human
ccauugcacucuagucugggcgac

SEQ ID NO: 1228582 - RNA, 22 nt, Human
cccaaguagcuuaaacuacagg

SEQ ID NO: 1228583 - RNA, 21 nt, Human
cccaggcugggggaacaggac

SEQ ID NO: 1228584 - RNA, 20 nt, Human
ccccggcucaagcaguccuc

SEQ ID NO: 1228585 - RNA, 24 nt, Human
cccggccgggcacgguggcucacg

SEQ ID NO: 1228586 - RNA, 21 nt, Human
cccugaggccaggaggggcuc

SEQ ID NO: 1228587 - RNA, 18 nt, Human
ccgagccggguggcucac

SEQ ID NO: 1228588 - RNA, 23 nt, Human
ccucccacuucauccucccaagu

SEQ ID NO: 1228589 - RNA, 18 nt, Human
ccucuuuuuuugaagugc

SEQ ID NO: 1228590 - RNA, 23 nt, Human
ccugaccaacauggagaaacccc

SEQ ID NO: 1228591 - RNA, 24 nt, Human
ccugaccaacauggagaaaccccg

SEQ ID NO: 1228592 - RNA, 22 nt, Human
ccuggccaacauggugaaaccc

SEQ ID NO: 1228593 - RNA, 23 nt, Human
ccuggccaacauggugaaaccca

SEQ ID NO: 1228594 - RNA, 24 nt, Human
ccuggccaacauggugaaacccag

SEQ ID NO: 1228595 - RNA, 20 nt, Human
ccugggagagcggggaggag

SEQ ID NO: 1228596 - RNA, 22 nt, Human
ccuguaaucccagcacuuuggg

SEQ ID NO: 1228597 - RNA, 21 nt, Human
ccuguaaucccagcuacucug

SEQ ID NO: 1228598 - RNA, 22 nt, Human
ccuguaaucccagcuacucugg

SEQ ID NO: 1228599 - RNA, 23 nt, Human
ccuguaaucccagcuacucugga

SEQ ID NO: 1228600 - RNA, 24 nt, Human
cgaggcgggcggaucacgagguca

SEQ ID NO: 1228601 - RNA, 24 nt, Human
cgcccguaaucccagcacuuuggg

SEQ ID NO: 1228602 - RNA, 23 nt, Human
cgccuguaaucccagcacuuugg

SEQ ID NO: 1228603 - RNA, 24 nt, Human
cgccuguaaucccagcuacucugg

SEQ ID NO: 1228604 - RNA, 22 nt, Human
cggaucacgaggucaggaguuc

SEQ ID NO: 1228605 - RNA, 24 nt, Human
cggccgagccggguggcucacgcc

SEQ ID NO: 1228606 - RNA, 18 nt, Human
cguguggcccaggcuggu

SEQ ID NO: 1228607 - RNA, 18 nt, Human
cucaaaaaaaaaaaaaaa

SEQ ID NO: 1228608 - RNA, 23 nt, Human
cucaaaaaaaaaaaaaaaaaaaa

SEQ ID NO: 1228609 - RNA, 21 nt, Human
cucaagcaguccucccacuuc

SEQ ID NO: 1228610 - RNA, 24 nt, Human
cucaagcgauucucccaccucugc

SEQ ID NO: 1228611 - RNA, 22 nt, Human
cucacgcccguaaucccagcac

SEQ ID NO: 1228612 - RNA, 24 nt, Human
cucacgcccguaaucccagcacuu

SEQ ID NO: 1228613 - RNA, 22 nt, Human
cucacgccuguaaucccagcac

SEQ ID NO: 1228614 - RNA, 24 nt, Human
cucacgccuguaaucccagcacuu

SEQ ID NO: 1228615 - RNA, 22 nt, Human
cuccccggcucaagcaguccuc

SEQ ID NO: 1228616 - RNA, 19 nt, Human
cuccgucucaaaaaaaaaa

SEQ ID NO: 1228617 - RNA, 22 nt, Human
cugggcgacagagugaaacucc

SEQ ID NO: 1228618 - RNA, 21 nt, Human
cuguaaucccagcuacucaga

SEQ ID NO: 1228619 - RNA, 23 nt, Human
cuucugggcucaagcgauucucc

SEQ ID NO: 1228620 - RNA, 22 nt, Human
gaaaggcgugagucaccagggc

SEQ ID NO: 1228621 - RNA, 24 nt, Human
gacagagugaaacuccgucucaaa

SEQ ID NO: 1228622 - RNA, 21 nt, Human
gagaaaccccgucucuacuaa

SEQ ID NO: 1228623 - RNA, 23 nt, Human
gagaccagccugaccaacaugga

SEQ ID NO: 1228624 - RNA, 23 nt, Human
gagcaggaggcuagaagagacag

SEQ ID NO: 1228625 - RNA, 18 nt, Human
gagguggugaggcagggg

SEQ ID NO: 1228626 - RNA, 23 nt, Human
gaucaccugaggucaggaguuca

SEQ ID NO: 1228627 - RNA, 24 nt, Human
gaucaccugaggucaggaguucaa

SEQ ID NO: 1228628 - RNA, 21 nt, Human
gaucacgaggucaggaguucg

SEQ ID NO: 1228629 - RNA, 22 nt, Human
gaucacgaggucaggaguucga

SEQ ID NO: 1228630 - RNA, 24 nt, Human
gaucacgaggucaggaguucgaga

SEQ ID NO: 1228631 - RNA, 24 nt, Human
gcacucuagucugggcgacagagu

SEQ ID NO: 1228632 - RNA, 22 nt, Human
gccaacauggugaaacccaguc

SEQ ID NO: 1228633 - RNA, 24 nt, Human
gccauugcacucuagucugggcga

SEQ ID NO: 1228634 - RNA, 18 nt, Human
ggagaugggaagagucaa

SEQ ID NO: 1228635 - RNA, 23 nt, Human
ggagguggugaggcaggggggca

SEQ ID NO: 1228636 - RNA, 23 nt, Human
ggcacgguggcucacgccuguaa

SEQ ID NO: 1228637 - RNA, 25 nt, Human
ggcagaucaccugaggucaggaguu

SEQ ID NO: 1228638 - RNA, 19 nt, Human
ggcaucuguaaucccagcu

SEQ ID NO: 1228639 - RNA, 23 nt, Human
ggcggaucacgaggucaggaguu

SEQ ID NO: 1228640 - RNA, 19 nt, Human
ggcucaagcgauucuccca

SEQ ID NO: 1228641 - RNA, 19 nt, Human
gggagacagagaugggcag

SEQ ID NO: 1228642 - RNA, 24 nt, Human
ggugacgugcgccuguaaucccag

SEQ ID NO: 1228643 - RNA, 23 nt, Human
ggugcaggauggaggggaggccc

SEQ ID NO: 1228644 - RNA, 24 nt, Human
gguggcaggcaucuguaaucccag

SEQ ID NO: 1228645 - RNA, 24 nt, Human
gguggcucacgcccguaaucccag

SEQ ID NO: 1228646 - RNA, 23 nt, Human
gguggcucacgccuguaauccca

SEQ ID NO: 1228647 - RNA, 24 nt, Human
gguggcucacgccuguaaucccag

SEQ ID NO: 1228648 - RNA, 20 nt, Human
guuugcagugagcugagauc

SEQ ID NO: 1228649 - RNA, 21 nt, Human
uaaaaauacaaaaauuagcca

SEQ ID NO: 1228650 - RNA, 19 nt, Human
uaaacuacaggugcaugcc

SEQ ID NO: 1228651 - RNA, 20 nt, Human
uacaggugcaugccaccaca

SEQ ID NO: 1228652 - RNA, 18 nt, Human
uagaagagacagaccaug

SEQ ID NO: 1228653 - RNA, 23 nt, Human
ucaaaaaaaaaaaaaaaaaaaaa

SEQ ID NO: 1228654 - RNA, 23 nt, Human
ucaccugaggucaggaguucaag

SEQ ID NO: 1228655 - RNA, 18 nt, Human
ucacgaggucaggaguuc

SEQ ID NO: 1228656 - RNA, 24 nt, Human
ucacgaggucaggaguucgagacc

SEQ ID NO: 1228657 - RNA, 24 nt, Human
ucagaagcugagacaggagaauca

SEQ ID NO: 1228658 - RNA, 22 nt, Human
ucaggcagggucuugaucuguu

SEQ ID NO: 1228659 - RNA, 24 nt, Human
ucccaaguagcuuaaacuacaggu

SEQ ID NO: 1228660 - RNA, 24 nt, Human
uccccggcucaagcaguccuccca

SEQ ID NO: 1228661 - RNA, 22 nt, Human
ucccucuuuuuuugaagugcug

SEQ ID NO: 1228662 - RNA, 23 nt, Human
uccgucucaaaaaaaaaaaaaaa

SEQ ID NO: 1228663 - RNA, 22 nt, Human
ucuagucugggcgacagaguga

SEQ ID NO: 1228664 - RNA, 23 nt, Human
ucucaaacuucugggcucaagcg

SEQ ID NO: 1228665 - RNA, 23 nt, Human
ucucuacuaaaaauacaaaaauu

SEQ ID NO: 1228666 - RNA, 21 nt, Human
ucuguaaucccagcuacucag

SEQ ID NO: 1228667 - RNA, 23 nt, Human
ucuugaucuguugcucaaacugg

SEQ ID NO: 1228668 - RNA, 24 nt, Human
ucuugaucuguugcucaaacugga

SEQ ID NO: 1228669 - RNA, 22 nt, Human
ugacgugcgccuguaaucccag

SEQ ID NO: 1228670 - RNA, 20 nt, Human
ugagacaggagaaucacuug

SEQ ID NO: 1228671 - RNA, 24 nt, Human
ugagacaggagaaucacuugaacc

SEQ ID NO: 1228672 - RNA, 18 nt, Human
ugaggcaggggggcacua

SEQ ID NO: 1228673 - RNA, 20 nt, Human
ugaggcaggggggcacuaug

SEQ ID NO: 1228674 - RNA, 22 nt, Human
ugaggccaggaggggcucagga

SEQ ID NO: 1228675 - RNA, 18 nt, Human
ugauuuauuuucaggcag

SEQ ID NO: 1228676 - RNA, 25 nt, Human
ugccaccacaucuggcuuuuuuuug

SEQ ID NO: 1228677 - RNA, 24 nt, Human
ugcucaaacuggaguucuguggcg

SEQ ID NO: 1228678 - RNA, 22 nt, Human
uggaauggcccugaggccagga

SEQ ID NO: 1228679 - RNA, 18 nt, Human
uggauggagagccucuac

SEQ ID NO: 1228680 - RNA, 24 nt, Human
uggccaacauggugaaacccaguc

SEQ ID NO: 1228681 - RNA, 22 nt, Human
uggcucacgcccguaaucccag

SEQ ID NO: 1228682 - RNA, 24 nt, Human
uggcucacgcccguaaucccagca

SEQ ID NO: 1228683 - RNA, 22 nt, Human
uggcucacgccuguaaucccag

SEQ ID NO: 1228684 - RNA, 24 nt, Human
uggcucacgccuguaaucccagca

SEQ ID NO: 1228685 - RNA, 22 nt, Human
ugggaagagucaaguuaggggc

SEQ ID NO: 1228686 - RNA, 19 nt, Human
ugggagacagagaugggca

SEQ ID NO: 1228687 - RNA, 24 nt, Human
ugggagacagagaugggcagauca

SEQ ID NO: 1228688 - RNA, 18 nt, Human
ugggagagcggggaggag

SEQ ID NO: 1228689 - RNA, 19 nt, Human
ugggagagcggggaggagg

SEQ ID NO: 1228690 - RNA, 23 nt, Human
ugggagagcggggaggagguggu

SEQ ID NO: 1228691 - RNA, 19 nt, Human
ugggaggccgaggcgggcg

SEQ ID NO: 1228692 - RNA, 24 nt, Human
ugggaggccgaggcgggcggauca

SEQ ID NO: 1228693 - RNA, 18 nt, Human
ugggcagaucaccugagg

SEQ ID NO: 1228694 - RNA, 24 nt, Human
ugggcagaucaccugaggucagga

SEQ ID NO: 1228695 - RNA, 20 nt, Human
uggggagguggauggagagc

SEQ ID NO: 1228696 - RNA, 20 nt, Human
ugguauuuuuuuuuguagcg

SEQ ID NO: 1228697 - RNA, 24 nt, Human
uggugacgugcgccuguaauccca

SEQ ID NO: 1228698 - RNA, 21 nt, Human
uggugcaggauggaggggagg

SEQ ID NO: 1228699 - RNA, 24 nt, Human
ugguggcaggcaucuguaauccca

SEQ ID NO: 1228700 - RNA, 24 nt, Human
uguagaaauggggcuuugucgugu

SEQ ID NO: 1228701 - RNA, 20 nt, Human
ugucccagucucccucuuuu

SEQ ID NO: 1228702 - RNA, 24 nt, Human
ugucguguggcccaggcuggucuc

SEQ ID NO: 1228703 - RNA, 22 nt, Human
ugugcggccgagccggguggcu

SEQ ID NO: 1228704 - RNA, 19 nt, Human
uuacuccagccuccaccuc

SEQ ID NO: 1228705 - RNA, 18 nt, Human
uuagcugggcgugguggc

SEQ ID NO: 1228706 - RNA, 24 nt, Human
uuagcugggcgugguggcaggcau

SEQ ID NO: 1228707 - RNA, 20 nt, Human
uucacuuccugcuugcggcu

SEQ ID NO: 1228708 - RNA, 23 nt, Human
uucugggcucaagcgauucuccc

SEQ ID NO: 1228709 - RNA, 25 nt, Human
uugggaggccgaggcgggcggauca

SEQ ID NO: 1228710 - RNA, 19 nt, Human
uuguagaaauggggcuuug

SEQ ID NO: 1228711 - RNA, 20 nt, Human
uuugcagugagcugagaucc

SEQ ID NO: 1228712 - RNA, 22 nt, Human
uuugcagugagcugagauccag

SEQ ID NO: 1228713 - RNA, 22 nt, Human
uuuuuugguauuuuuuuuugua

SEQ ID NO: 1228714 - RNA, 27 nt, Human
aaagaagccaauucagcagaccccaga

SEQ ID NO: 1228715 - RNA, 18 nt, Human
aaagugcugcgauuacaa

SEQ ID NO: 1228716 - RNA, 24 nt, Human
aaagugcugcgauuacaagcguga

SEQ ID NO: 1228717 - RNA, 23 nt, Human
aaccgggcccugcaaggccagcu

SEQ ID NO: 1228718 - RNA, 18 nt, Human
aacugccccacugacacu

SEQ ID NO: 1228719 - RNA, 20 nt, Human
aagaagccaauucagcagac

SEQ ID NO: 1228720 - RNA, 25 nt, Human
aagcaauucucuugccucagccucc

SEQ ID NO: 1228721 - RNA, 23 nt, Human
aagcgugagccacugugcccggc

SEQ ID NO: 1228722 - RNA, 20 nt, Human
aaggguaguuuuggagcugc

SEQ ID NO: 1228723 - RNA, 24 nt, Human
aaguagcugggauuacaggcgugu

SEQ ID NO: 1228724 - RNA, 25 nt, Human
aaguagcugggauuacaggcgugug

SEQ ID NO: 1228725 - RNA, 24 nt, Human
acauaucacuacccuggucaaaag

SEQ ID NO: 1228726 - RNA, 18 nt, Human
accaccuggagccaggcu

SEQ ID NO: 1228727 - RNA, 18 nt, Human
accacgccuggcuaauuu

SEQ ID NO: 1228728 - RNA, 19 nt, Human
acccuaaauuacccggcug

SEQ ID NO: 1228729 - RNA, 22 nt, Human
acucuuguugcccaggcuggag

SEQ ID NO: 1228730 - RNA, 23 nt, Human
agaaggaaguauuauugagccua

SEQ ID NO: 1228731 - RNA, 19 nt, Human
agcggugugaccucagcuc

SEQ ID NO: 1228732 - RNA, 24 nt, Human
aggugaucugccugcuucggccuc

SEQ ID NO: 1228733 - RNA, 19 nt, Human
agugcagcggugugaccuc

SEQ ID NO: 1228734 - RNA, 19 nt, Human
aucagaguccagcucugcc

SEQ ID NO: 1228735 - RNA, 19 nt, Human
aucccguuccccacucccc

SEQ ID NO: 1228736 - RNA, 21 nt, Human
aucccguuccccacuccccaa

SEQ ID NO: 1228737 - RNA, 19 nt, Human
auggggagccccauacccc

SEQ ID NO: 1228738 - RNA, 20 nt, Human
augggguuucaccaccuugg

SEQ ID NO: 1228739 - RNA, 21 nt, Human
augggguuucaccaccuuggu

SEQ ID NO: 1228740 - RNA, 24 nt, Human
augggguuucaccaccuuggucag

SEQ ID NO: 1228741 - RNA, 18 nt, Human
caaaagaaaagaagccaa

SEQ ID NO: 1228742 - RNA, 24 nt, Human
caaagugcugcgauuacaagcgug

SEQ ID NO: 1228743 - RNA, 20 nt, Human
caaccagauaccagacuaaa

SEQ ID NO: 1228744 - RNA, 22 nt, Human
caagcaauucucuugccucagc

SEQ ID NO: 1228745 - RNA, 23 nt, Human
caaggccagcucuaucaccaauc

SEQ ID NO: 1228746 - RNA, 26 nt, Human
cacauaucacuacccuggucaaaagc

SEQ ID NO: 1228747 - RNA, 18 nt, Human
caccaagccuucacaagc

SEQ ID NO: 1228748 - RNA, 25 nt, Human
caccaagccuucacaagccugcccc

SEQ ID NO: 1228749 - RNA, 21 nt, Human
caccaccuuggucaggcuggu

SEQ ID NO: 1228750 - RNA, 24 nt, Human
caccaccuuggucaggcuggucuc

SEQ ID NO: 1228751 - RNA, 26 nt, Human
cacggugcaggcaucaaccagauacc

SEQ ID NO: 1228752 - RNA, 24 nt, Human
cacucuuguugcccaggcuggagu

SEQ ID NO: 1228753 - RNA, 18 nt, Human
cacugggcuaacagcagg

SEQ ID NO: 1228754 - RNA, 23 nt, Human
cagaccccagauucugaccuccc

SEQ ID NO: 1228755 - RNA, 20 nt, Human
cagcagaccccagauucuga

SEQ ID NO: 1228756 - RNA, 19 nt, Human
cagcucccgacuccuggca

SEQ ID NO: 1228757 - RNA, 19 nt, Human
caggcaucaaccagauacc

SEQ ID NO: 1228758 - RNA, 20 nt, Human
cagggcucagucccuuccac

SEQ ID NO: 1228759 - RNA, 19 nt, Human
caucccguuccccacuccc

SEQ ID NO: 1228760 - RNA, 22 nt, Human
ccaaagugcugcgauuacaagc

SEQ ID NO: 1228761 - RNA, 24 nt, Human
ccaaagugcugcgauuacaagcgu

SEQ ID NO: 1228762 - RNA, 22 nt, Human
ccaaguagcugggauuacaggc

SEQ ID NO: 1228763 - RNA, 24 nt, Human
ccaaguagcugggauuacaggcgu

SEQ ID NO: 1228764 - RNA, 26 nt, Human
ccacgccugugcuccugcuaugcccu

SEQ ID NO: 1228765 - RNA, 22 nt, Human
ccacugggcuaacagcaggugc

SEQ ID NO: 1228766 - RNA, 20 nt, Human
cccaacaaagucccguccgc

SEQ ID NO: 1228767 - RNA, 23 nt, Human
cccaaguagcugggauuacaggc

SEQ ID NO: 1228768 - RNA, 23 nt, Human
cccaaguagcugggauuacaggc

SEQ ID NO: 1228769 - RNA, 19 nt, Human
cccaggcuggagugcagcg

SEQ ID NO: 1228770 - RNA, 23 nt, Human
cccauagucacggugcaggcauc

SEQ ID NO: 1228771 - RNA, 23 nt, Human
ccccaccacuaacugccccacug

SEQ ID NO: 1228772 - RNA, 21 nt, Human
ccccagcaguuccccggugcc

SEQ ID NO: 1228773 - RNA, 19 nt, Human
cccccugccuucaggcugu

SEQ ID NO: 1228774 - RNA, 21 nt, Human
cccgacuccuggcagugacac

SEQ ID NO: 1228775 - RNA, 23 nt, Human
cccguggccagaacacccugggc

SEQ ID NO: 1228776 - RNA, 27 nt, Human
ccgccuccugaguccaagcaauucuuu

SEQ ID NO: 1228777 - RNA, 19 nt, Human
ccuccacggaauuucugcc

SEQ ID NO: 1228778 - RNA, 23 nt, Human
ccuccacuccuaauccacacgga

SEQ ID NO: 1228779 - RNA, 21 nt, Human
ccugaccucaggugaucugcc

SEQ ID NO: 1228780 - RNA, 23 nt, Human
ccugaccucaggugaucugccug

SEQ ID NO: 1228781 - RNA, 23 nt, Human
ccuggagccaggcucugaaccuc

SEQ ID NO: 1228782 - RNA, 20 nt, Human
ccuuccacaaggucccacca

SEQ ID NO: 1228783 - RNA, 22 nt, Human
ccuuccacaaggucccaccaag

SEQ ID NO: 1228784 - RNA, 25 nt, Human
cgccuaagcaucccguuccccacuc

SEQ ID NO: 1228785 - RNA, 24 nt, Human
cggugugaccucagcucacugcaa

SEQ ID NO: 1228786 - RNA, 21 nt, Human
cuacacccucccuguuccagg

SEQ ID NO: 1228787 - RNA, 23 nt, Human
cucacugcaaacuccgccuccug

SEQ ID NO: 1228788 - RNA, 26 nt, Human
cucacugccacgccugugcuccugcu

SEQ ID NO: 1228789 - RNA, 23 nt, Human
cucagccucccaaguagcuggga

SEQ ID NO: 1228790 - RNA, 26 nt, Human
cuccugaccucaggugaucugccugc

SEQ ID NO: 1228791 - RNA, 18 nt, Human
cucuuguugcccaggcug

SEQ ID NO: 1228792 - RNA, 22 nt, Human
cugaagacccucugugaucugg

SEQ ID NO: 1228793 - RNA, 22 nt, Human
cugcagccgcugcucacccccg

SEQ ID NO: 1228794 - RNA, 20 nt, Human
cugccagcccccugccuuca

SEQ ID NO: 1228795 - RNA, 23 nt, Human
cugcuucggccucccaaagugcu

SEQ ID NO: 1228796 - RNA, 27 nt, Human
cuggcuaauuuuguacuuuuuuuuuuu

SEQ ID NO: 1228797 - RNA, 23 nt, Human
cuugccucagccucccaaguagc

SEQ ID NO: 1228798 - RNA, 24 nt, Human
cuuguugcccaggcuggagugcag

SEQ ID NO: 1228799 - RNA, 24 nt, Human
cuuugcuccuccccuacacccucc

SEQ ID NO: 1228800 - RNA, 23 nt, Human
gaccaccuggagccaggcucuga

SEQ ID NO: 1228801 - RNA, 24 nt, Human
gaccucaggugaucugccugcuuc

SEQ ID NO: 1228802 - RNA, 24 nt, Human
gagaugggguuucaccaccuuggu

SEQ ID NO: 1228803 - RNA, 21 nt, Human
gagcugcugcagccgcugcuc

SEQ ID NO: 1228804 - RNA, 18 nt, Human
gauuacaagcgugagcca

SEQ ID NO: 1228805 - RNA, 21 nt, Human
gauuacaagcgugagccacug

SEQ ID NO: 1228806 - RNA, 24 nt, Human
gauuacaagcgugagccacugugc

SEQ ID NO: 1228807 - RNA, 19 nt, Human
gauuacaggcgugugcuac

SEQ ID NO: 1228808 - RNA, 24 nt, Human
gcccaggcuggagugcagcggugu

SEQ ID NO: 1228809 - RNA, 22 nt, Human
gcgugugcuaccacgccuggcu

SEQ ID NO: 1228810 - RNA, 20 nt, Human
gcuccuccccuacacccucc

SEQ ID NO: 1228811 - RNA, 21 nt, Human
gcugcacauaucacuacccug

SEQ ID NO: 1228812 - RNA, 23 nt, Human
gcuggucucaaacuccugaccuc

SEQ ID NO: 1228813 - RNA, 23 nt, Human
ggagcccugccagcccccugccu

SEQ ID NO: 1228814 - RNA, 18 nt, Human
ggcaggaaccacugggcu

SEQ ID NO: 1228815 - RNA, 24 nt, Human
ggcuggucucaaacuccugaccuc

SEQ ID NO: 1228816 - RNA, 24 nt, Human
gggaucucucuaucuugugacacc

SEQ ID NO: 1228817 - RNA, 18 nt, Human
gggcccugcaaggccagc

SEQ ID NO: 1228818 - RNA, 18 nt, Human
gggcucagucccuuccac

SEQ ID NO: 1228819 - RNA, 22 nt, Human
gggguuucaccaccuuggucag

SEQ ID NO: 1228820 - RNA, 24 nt, Human
ggguccccccaccacuaacugccc

SEQ ID NO: 1228821 - RNA, 22 nt, Human
ggguuucaccaccuuggucagg

SEQ ID NO: 1228822 - RNA, 18 nt, Human
guagcugggauuacaggc

SEQ ID NO: 1228823 - RNA, 20 nt, Human
gucuuuuuuuuuuuuccuuu

SEQ ID NO: 1228824 - RNA, 30 nt, Human
guuuuuuuggucuuuuuuuuuuuuccuuuu

SEQ ID NO: 1228825 - RNA, 18 nt, Human
uaacugccccacugacac

SEQ ID NO: 1228826 - RNA, 24 nt, Human
uaaguucaaaagaaaagaagccaa

SEQ ID NO: 1228827 - RNA, 23 nt, Human
uacaagcgugagccacugugccc

SEQ ID NO: 1228828 - RNA, 22 nt, Human
uagaaugguggccuccucugcc

SEQ ID NO: 1228829 - RNA, 23 nt, Human
uagaaugguggccuccucugccc

SEQ ID NO: 1228830 - RNA, 24 nt, Human
uauuaaguucaaaagaaaagaagc

SEQ ID NO: 1228831 - RNA, 22 nt, Human
ucaaaagcccccagcaguuccc

SEQ ID NO: 1228832 - RNA, 22 nt, Human
ucacccuaaauuacccggcugc

SEQ ID NO: 1228833 - RNA, 22 nt, Human
ucacucuuguugcccaggcugg

SEQ ID NO: 1228834 - RNA, 23 nt, Human
ucacucuuguugcccaggcugga

SEQ ID NO: 1228835 - RNA, 18 nt, Human
ucacugcaaacuccgccu

SEQ ID NO: 1228836 - RNA, 19 nt, Human
ucacugcaaacuccgccuc

SEQ ID NO: 1228837 - RNA, 22 nt, Human
ucacugcaaacuccgccuccug

SEQ ID NO: 1228838 - RNA, 27 nt, Human
ucacugcaaacuccgccuccugagucc

SEQ ID NO: 1228839 - RNA, 18 nt, Human
ucagagcugagcuagcug

SEQ ID NO: 1228840 - RNA, 19 nt, Human
ucagagcugagcuagcugc

SEQ ID NO: 1228841 - RNA, 20 nt, Human
ucagccucccaaguagcugg

SEQ ID NO: 1228842 - RNA, 18 nt, Human
ucagucccuuccacaagg

SEQ ID NO: 1228843 - RNA, 21 nt, Human
ucagucccuuccacaaggucc

SEQ ID NO: 1228844 - RNA, 23 nt, Human
ucauuggcaggaaccacugggcu

SEQ ID NO: 1228845 - RNA, 24 nt, Human
ucccaaagugcugcgauuacaagc

SEQ ID NO: 1228846 - RNA, 24 nt, Human
ucccaaguagcugggauuacaggc

SEQ ID NO: 1228847 - RNA, 19 nt, Human
uccccaaccgggcccugca

SEQ ID NO: 1228848 - RNA, 23 nt, Human
uccccaaccgggcccugcaaggc

SEQ ID NO: 1228849 - RNA, 22 nt, Human
uccccacuccccaaccgggccc

SEQ ID NO: 1228850 - RNA, 19 nt, Human
uccuaauccacacggaggc

SEQ ID NO: 1228851 - RNA, 21 nt, Human
uccucugcccugggacccuac

SEQ ID NO: 1228852 - RNA, 21 nt, Human
uccugaguccaagcaauucuc

SEQ ID NO: 1228853 - RNA, 24 nt, Human
uccugaguccaagcaauucucuug

SEQ ID NO: 1228854 - RNA, 23 nt, Human
ucuccaggcaauggagaaagagc

SEQ ID NO: 1228855 - RNA, 26 nt, Human
ucuugccucagccucccaaguagcug

SEQ ID NO: 1228856 - RNA, 22 nt, Human
ucuuguugcccaggcuggagug

SEQ ID NO: 1228857 - RNA, 25 nt, Human
ucuuuuuuuuuuuuccuuuuucuuu

SEQ ID NO: 1228858 - RNA, 20 nt, Human
ugacaccaacuuugacuaca

SEQ ID NO: 1228859 - RNA, 21 nt, Human
ugacaccaacuuugacuacag

SEQ ID NO: 1228860 - RNA, 20 nt, Human
ugaccucaggugaucugccu

SEQ ID NO: 1228861 - RNA, 22 nt, Human
ugaccucaggugaucugccugc

SEQ ID NO: 1228862 - RNA, 24 nt, Human
ugaccucaggugaucugccugcuu

SEQ ID NO: 1228863 - RNA, 23 nt, Human
ugacuacaggugugcagaucugg

SEQ ID NO: 1228864 - RNA, 22 nt, Human
ugcaaggccagcucuaucacca

SEQ ID NO: 1228865 - RNA, 20 nt, Human
ugcagcggugugaccucagc

SEQ ID NO: 1228866 - RNA, 18 nt, Human
ugcccaggcuggagugca

SEQ ID NO: 1228867 - RNA, 24 nt, Human
ugcccaggcuggagugcagcggug

SEQ ID NO: 1228868 - RNA, 22 nt, Human
ugccucagccucccaaguagcu

SEQ ID NO: 1228869 - RNA, 24 nt, Human
ugccucagccucccaaguagcugg

SEQ ID NO: 1228870 - RNA, 23 nt, Human
ugccuucaggcuguuuggcuuuu

SEQ ID NO: 1228871 - RNA, 22 nt, Human
ugcgauuacaagcgugagccac

SEQ ID NO: 1228872 - RNA, 24 nt, Human
ugcgauuacaagcgugagccacug

SEQ ID NO: 1228873 - RNA, 24 nt, Human
ugcugcgauuacaagcgugagcca

SEQ ID NO: 1228874 - RNA, 18 nt, Human
ugcuguuuccuggugcau

SEQ ID NO: 1228875 - RNA, 19 nt, Human
uggagaaagagccaggggu

SEQ ID NO: 1228876 - RNA, 20 nt, Human
uggagcccugccagcccccc

SEQ ID NO: 1228877 - RNA, 19 nt, Human
uggagugcagcggugugac

SEQ ID NO: 1228878 - RNA, 28 nt, Human
uggagugcagcggugugacggcucuagc

SEQ ID NO: 1228879 - RNA, 20 nt, Human
uggcaggaaccacugggcua

SEQ ID NO: 1228880 - RNA, 20 nt, Human
uggccagaacacccugggcu

SEQ ID NO: 1228881 - RNA, 19 nt, Human
ugggagggaaaacgugggg

SEQ ID NO: 1228882 - RNA, 18 nt, Human
ugggauuacaggcgugug

SEQ ID NO: 1228883 - RNA, 19 nt, Human
ugggauuacaggcgugugc

SEQ ID NO: 1228884 - RNA, 22 nt, Human
ugggauuacaggcgugugcuac

SEQ ID NO: 1228885 - RNA, 24 nt, Human
ugggauuacaggcgugugcuacca

SEQ ID NO: 1228886 - RNA, 18 nt, Human
ugggccagagccuucugc

SEQ ID NO: 1228887 - RNA, 22 nt, Human
ugggccagagccuucugcugga

SEQ ID NO: 1228888 - RNA, 19 nt, Human
uggggcaucuuguccaucu

SEQ ID NO: 1228889 - RNA, 24 nt, Human
ugggguuucaccaccuuggucagg

SEQ ID NO: 1228890 - RNA, 24 nt, Human
uggucaggcuggucucaaacuccu

SEQ ID NO: 1228891 - RNA, 20 nt, Human
uggucuuuuuuuuuuuuccu

SEQ ID NO: 1228892 - RNA, 22 nt, Human
uggucuuuuuuuuuuuuccuuu

SEQ ID NO: 1228893 - RNA, 23 nt, Human
ugugaucagaguccagcucugcc

SEQ ID NO: 1228894 - RNA, 22 nt, Human
ugugcuccugcuaugcccuuga

SEQ ID NO: 1228895 - RNA, 21 nt, Human
uguguugggagggaaaacgug

SEQ ID NO: 1228896 - RNA, 23 nt, Human
uguguugggagggaaaacguggg

SEQ ID NO: 1228897 - RNA, 18 nt, Human
uucaaaagaaaagaagcc

SEQ ID NO: 1228898 - RNA, 24 nt, Human
uucacucuuguugcccaggcugga

SEQ ID NO: 1228899 - RNA, 19 nt, Human
uucggccucccaaagugcu

SEQ ID NO: 1228900 - RNA, 18 nt, Human
uuggagcugcugcagccg

SEQ ID NO: 1228901 - RNA, 24 nt, Human
uuucacucuuguugcccaggcugg

SEQ ID NO: 1228902 - RNA, 25 nt, Human
uuuuuaacuagagaugggguuucac

SEQ ID NO: 1228903 - RNA, 24 nt, Human
uuuuuuuuuuuuuuuuuuaacuag

SEQ ID NO: 1228904 - RNA, 19 nt, Human
aggcccccagagaguuccu

SEQ ID NO: 1228905 - RNA, 22 nt, Human
cucgccugcacauucuucucuu

SEQ ID NO: 1228906 - RNA, 21 nt, Human
cugaggcggcacucuuucccg

SEQ ID NO: 1228907 - RNA, 18 nt, Human
cuuugagcagucacugcc

SEQ ID NO: 1228908 - RNA, 21 nt, Human
gcccccagagaguuccuuuga

SEQ ID NO: 1228909 - RNA, 19 nt, Human
gguagcagcaagaauugca

SEQ ID NO: 1228910 - RNA, 21 nt, Human
ucgcuugcccucagcugaggc

SEQ ID NO: 1228911 - RNA, 23 nt, Human
ugaggcccccagagaguuccuuu

SEQ ID NO: 1228912 - RNA, 18 nt, Human
ugaggcggcacucuuucc

SEQ ID NO: 1228913 - RNA, 24 nt, Human
ugcugaggcccccagagaguuccu

SEQ ID NO: 1228914 - RNA, 23 nt, Human
agagcuugcgggagcgggaggug

SEQ ID NO: 1228915 - RNA, 21 nt, Human
auccugcgcuuugggggaggc

SEQ ID NO: 1228916 - RNA, 24 nt, Human
cagaacaucgccgcacucauccuc

SEQ ID NO: 1228917 - RNA, 19 nt, Human
cagcuucuugucuuucaaa

SEQ ID NO: 1228918 - RNA, 18 nt, Human
cagggaccacgaugagga

SEQ ID NO: 1228919 - RNA, 22 nt, Human
ccaaggugguguggaggcccau

SEQ ID NO: 1228920 - RNA, 18 nt, Human
cccccaggcagggccgcu

SEQ ID NO: 1228921 - RNA, 24 nt, Human
cccccaggcagggccgcucccccc

SEQ ID NO: 1228922 - RNA, 21 nt, Human
ccuccgcggaccaggccaccc

SEQ ID NO: 1228923 - RNA, 21 nt, Human
cgaugggccucucguaggucu

SEQ ID NO: 1228924 - RNA, 22 nt, Human
cuccuuggauuccugggcugug

SEQ ID NO: 1228925 - RNA, 22 nt, Human
cuggauccagagcuugcgggag

SEQ ID NO: 1228926 - RNA, 23 nt, Human
gaucagcuucuugucuucuccgg

SEQ ID NO: 1228927 - RNA, 20 nt, Human
gcagugugugacguuggugg

SEQ ID NO: 1228928 - RNA, 26 nt, Human
gccuuugccgcuguugccuucauugg

SEQ ID NO: 1228929 - RNA, 22 nt, Human
ggacaggugaugcagugguucu

SEQ ID NO: 1228930 - RNA, 18 nt, Human
ggcaggugcacccuccgc

SEQ ID NO: 1228931 - RNA, 18 nt, Human
ggccgcaggaaccgagac

SEQ ID NO: 1228932 - RNA, 21 nt, Human
ggggacucgauguagccggug

SEQ ID NO: 1228933 - RNA, 24 nt, Human
gguaguccucaucguaggugacau

SEQ ID NO: 1228934 - RNA, 20 nt, Human
guagggccgcaggaaccgag

SEQ ID NO: 1228935 - RNA, 30 nt, Human
gugguucuggccaaacucgggcugguaggu

SEQ ID NO: 1228936 - RNA, 21 nt, Human
uaggugccgacggggcagcgg

SEQ ID NO: 1228937 - RNA, 18 nt, Human
ucgccaggguaguugggg

SEQ ID NO: 1228938 - RNA, 18 nt, Human
ucucagggaccacgauga

SEQ ID NO: 1228939 - RNA, 21 nt, Human
ugaccagaacaucgccgcacu

SEQ ID NO: 1228940 - RNA, 23 nt, Human
ugaccagaacaucgccgcacuca

SEQ ID NO: 1228941 - RNA, 25 nt, Human
ugaucagcuucuugucuuucaaaau

SEQ ID NO: 1228942 - RNA, 21 nt, Human
uggauuccugggcuguguacu

SEQ ID NO: 1228943 - RNA, 18 nt, Human
uggguggugguguuguag

SEQ ID NO: 1228944 - RNA, 22 nt, Human
uuccucaugaccagaacaucgc

SEQ ID NO: 1228945 - RNA, 26 nt, Human
uugaucagcuucuugucuucuccggg

SEQ ID NO: 1228946 - RNA, 22 nt, Human
uugcugguaguccucaucguag

SEQ ID NO: 1228947 - RNA, 26 nt, Human
aaaaaaaaacaaacaaacaaaaacaa

SEQ ID NO: 1228948 - RNA, 25 nt, Human
aaaaaaaacaaacaaacaaaaacaa

SEQ ID NO: 1228949 - RNA, 18 nt, Human
aaaacaaacaaacaaaaa

SEQ ID NO: 1228950 - RNA, 23 nt, Human
aaaagagacuaagacaccaaaag

SEQ ID NO: 1228951 - RNA, 25 nt, Human
aaagaaaccagcuggaauuaauggg

SEQ ID NO: 1228952 - RNA, 18 nt, Human
aaagagacuaagacacca

SEQ ID NO: 1228953 - RNA, 21 nt, Human
aacaagggaaaaucccaucuc

SEQ ID NO: 1228954 - RNA, 25 nt, Human
aagauggguggaucgcuugaggcca

SEQ ID NO: 1228955 - RNA, 18 nt, Human
aauuagccaggcauggug

SEQ ID NO: 1228956 - RNA, 24 nt, Human
aauugcgugaaccugggaggcaga

SEQ ID NO: 1228957 - RNA, 24 nt, Human
acaagagugagacucugucucaaa

SEQ ID NO: 1228958 - RNA, 18 nt, Human
accacacaugaacuagau

SEQ ID NO: 1228959 - RNA, 21 nt, Human
agaaaaaguaaaaaugaacaa

SEQ ID NO: 1228960 - RNA, 18 nt, Human
agagguugcagugagcca

SEQ ID NO: 1228961 - RNA, 20 nt, Human
agagguugcagugagccaag

SEQ ID NO: 1228962 - RNA, 22 nt, Human
agagguugcagugagccaagau

SEQ ID NO: 1228963 - RNA, 24 nt, Human
agagguugcagugagccaagaugg

SEQ ID NO: 1228964 - RNA, 23 nt, Human
agauggguggaucgcuugaggcc

SEQ ID NO: 1228965 - RNA, 24 nt, Human
agcacacuaaagguaucuucacac

SEQ ID NO: 1228966 - RNA, 24 nt, Human
agcacucugggaggccaagauggg

SEQ ID NO: 1228967 - RNA, 24 nt, Human
aggcagagguugcagugagccaag

SEQ ID NO: 1228968 - RNA, 24 nt, Human
aggcaugguggcacacaccuguaa

SEQ ID NO: 1228969 - RNA, 18 nt, Human
aggcuuuuuuucugaauu

SEQ ID NO: 1228970 - RNA, 22 nt, Human
agggagaaaauagcuuuuagga

SEQ ID NO: 1228971 - RNA, 23 nt, Human
auccugggcuaguuucuaauccu

SEQ ID NO: 1228972 - RNA, 22 nt, Human
aucugcagacaccauuuuccuu

SEQ ID NO: 1228973 - RNA, 18 nt, Human
auggcgccacuacacccc

SEQ ID NO: 1228974 - RNA, 23 nt, Human
auucaugaacauggaauguauuu

SEQ ID NO: 1228975 - RNA, 18 nt, Human
caaaagagacuaagacac

SEQ ID NO: 1228976 - RNA, 19 nt, Human
caaacaaaaacaaaaugca

SEQ ID NO: 1228977 - RNA, 21 nt, Human
caagaaaacugauucccacag

SEQ ID NO: 1228978 - RNA, 24 nt, Human
caagagugagacucugucucaaaa

SEQ ID NO: 1228979 - RNA, 19 nt, Human
caauacaguccuuaaagag

SEQ ID NO: 1228980 - RNA, 23 nt, Human
caauacaguccuuaaagaguuga

SEQ ID NO: 1228981 - RNA, 21 nt, Human
cacaauagcuaauacacauua

SEQ ID NO: 1228982 - RNA, 24 nt, Human
cacaccuguaaucccagcacucug

SEQ ID NO: 1228983 - RNA, 19 nt, Human
cacaccuguaaucccugcu

SEQ ID NO: 1228984 - RNA, 20 nt, Human
caccuguaaucccagcacuc

SEQ ID NO: 1228985 - RNA, 24 nt, Human
caccuguaaucccagcacucuggg

SEQ ID NO: 1228986 - RNA, 18 nt, Human
caccuguaaucccugcua

SEQ ID NO: 1228987 - RNA, 24 nt, Human
caccuguaaucccugcuacucagg

SEQ ID NO: 1228988 - RNA, 21 nt, Human
cacuacaccccagucucgaca

SEQ ID NO: 1228989 - RNA, 21 nt, Human
cagaagacaguugguucaaag

SEQ ID NO: 1228990 - RNA, 19 nt, Human
cagaggaucuuuuaaaacc

SEQ ID NO: 1228991 - RNA, 20 nt, Human
cagcaaagaaaccagcugga

SEQ ID NO: 1228992 - RNA, 20 nt, Human
cagcacucugggaggccaag

SEQ ID NO: 1228993 - RNA, 26 nt, Human
cagcacucugggaggccaagaugggu

SEQ ID NO: 1228994 - RNA, 24 nt, Human
caguuuguguauucucuuuuguug

SEQ ID NO: 1228995 - RNA, 20 nt, Human
caugaacuagauaccuuccc

SEQ ID NO: 1228996 - RNA, 18 nt, Human
cauuacuguaguucugua

SEQ ID NO: 1228997 - RNA, 20 nt, Human
ccaaaaguggaagagcacac

SEQ ID NO: 1228998 - RNA, 20 nt, Human
ccaauagauccagaagacag

SEQ ID NO: 1228999 - RNA, 25 nt, Human
ccugggaggcagagguugcagugag

SEQ ID NO: 1229000 - RNA, 19 nt, Human
ccuguaaucccugcuacuc

SEQ ID NO: 1229001 - RNA, 21 nt, Human
ccugugaacuucuggggauac

SEQ ID NO: 1229002 - RNA, 24 nt, Human
cgacaagagugagacucugucuca

SEQ ID NO: 1229003 - RNA, 24 nt, Human
cgccacuacaccccagucucgaca

SEQ ID NO: 1229004 - RNA, 18 nt, Human
cucaaaaaaaaacaaaca

SEQ ID NO: 1229005 - RNA, 18 nt, Human
cucugucucaaaaaaaaa

SEQ ID NO: 1229006 - RNA, 19 nt, Human
cucugucucaaaaaaaaac

SEQ ID NO: 1229007 - RNA, 22 nt, Human
cugaauucucaauucuaugcca

SEQ ID NO: 1229008 - RNA, 22 nt, Human
cugacaucuucucuccuuuucu

SEQ ID NO: 1229009 - RNA, 19 nt, Human
cugauucaugaacauggaa

SEQ ID NO: 1229010 - RNA, 19 nt, Human
cuucuuugcagaaaagccu

SEQ ID NO: 1229011 - RNA, 24 nt, Human
gaggcugaguauggugauucacac

SEQ ID NO: 1229012 - RNA, 18 nt, Human
gagguugcagugagccaa

SEQ ID NO: 1229013 - RNA, 18 nt, Human
gaucgcuugaggccagga

SEQ ID NO: 1229014 - RNA, 23 nt, Human
gcacacuaaagguaucuucacac

SEQ ID NO: 1229015 - RNA, 19 nt, Human
gccacuacaccccagucuc

SEQ ID NO: 1229016 - RNA, 19 nt, Human
gggagaggaauugcuggau

SEQ ID NO: 1229017 - RNA, 20 nt, Human
ggucuuguauucuacgaccu

SEQ ID NO: 1229018 - RNA, 24 nt, Human
ggugauucacaccuguaaucccag

SEQ ID NO: 1229019 - RNA, 24 nt, Human
gguugcagugagccaagauggcgc

SEQ ID NO: 1229020 - RNA, 23 nt, Human
gucauuuguauuucuucuuugca

SEQ ID NO: 1229021 - RNA, 23 nt, Human
uaaaaauacuaaaaauuagccag

SEQ ID NO: 1229022 - RNA, 25 nt, Human
uaaaaauacuaaaaauuagccaguc

SEQ ID NO: 1229023 - RNA, 26 nt, Human
uaaaauaguuaaguuauaccuaagug

SEQ ID NO: 1229024 - RNA, 21 nt, Human
uaagacaccaaaaguggaaga

SEQ ID NO: 1229025 - RNA, 18 nt, Human
uaaucccugcuacucagg

SEQ ID NO: 1229026 - RNA, 22 nt, Human
uacagaggaucuuuuaaaacca

SEQ ID NO: 1229027 - RNA, 18 nt, Human
uaccugugaacuucuggg

SEQ ID NO: 1229028 - RNA, 21 nt, Human
uacgaguucuuuauauaccac

SEQ ID NO: 1229029 - RNA, 21 nt, Human
uacuaaaaauuagccaggcau

SEQ ID NO: 1229030 - RNA, 20 nt, Human
uagaaucagcaaagaaaccc

SEQ ID NO: 1229031 - RNA, 23 nt, Human
uauagaaggaaaaaauagaaaaa

SEQ ID NO: 1229032 - RNA, 23 nt, Human
uaucagaaguuuucaauacagag

SEQ ID NO: 1229033 - RNA, 23 nt, Human
uaucguaacucuacauuuaacca

SEQ ID NO: 1229034 - RNA, 24 nt, Human
uauuucuucuuugcagaaaagccu

SEQ ID NO: 1229035 - RNA, 28 nt, Human
ucaaaaaaaaacaaacaaacaaaaacaa

SEQ ID NO: 1229036 - RNA, 24 nt, Human
ucaaaagagacuaagacaccaaaa

SEQ ID NO: 1229037 - RNA, 22 nt, Human
ucaauuucuccacauccucauc

SEQ ID NO: 1229038 - RNA, 22 nt, Human
ucacaccuguaaucccagcacu

SEQ ID NO: 1229039 - RNA, 24 nt, Human
uccaguuuguguauucucuuuugu

SEQ ID NO: 1229040 - RNA, 23 nt, Human
uccccuuccucauucuggaacug

SEQ ID NO: 1229041 - RNA, 22 nt, Human
uccugggcuaguuucuaauccu

SEQ ID NO: 1229042 - RNA, 22 nt, Human
ucucaaaaaaaaacaaacaaac

SEQ ID NO: 1229043 - RNA, 23 nt, Human
ucucaaaaaaaaacaaacaaaca

SEQ ID NO: 1229044 - RNA, 20 nt, Human
ucuccccuuccucauucugg

SEQ ID NO: 1229045 - RNA, 22 nt, Human
ucucuacuaaaaauacuaaaaa

SEQ ID NO: 1229046 - RNA, 19 nt, Human
ucucugcuauugcugauag

SEQ ID NO: 1229047 - RNA, 23 nt, Human
ucucuuuuguugccuaugcuuug

SEQ ID NO: 1229048 - RNA, 22 nt, Human
ucugaauauucaaaacauugca

SEQ ID NO: 1229049 - RNA, 24 nt, Human
ugaaccugggaggcagagguugca

SEQ ID NO: 1229050 - RNA, 19 nt, Human
ugaacuucuggggauacau

SEQ ID NO: 1229051 - RNA, 22 nt, Human
ugaagagaaguauaaagaauua

SEQ ID NO: 1229052 - RNA, 18 nt, Human
ugacuuaauauuuggugg

SEQ ID NO: 1229053 - RNA, 22 nt, Human
ugauucacaccuguaaucccag

SEQ ID NO: 1229054 - RNA, 24 nt, Human
ugauucacaccuguaaucccagca

SEQ ID NO: 1229055 - RNA, 19 nt, Human
ugauuugcaaauauuuucu

SEQ ID NO: 1229056 - RNA, 22 nt, Human
ugauuugcaaauauuuucuccc

SEQ ID NO: 1229057 - RNA, 22 nt, Human
ugcagaaaagccuguugagcua

SEQ ID NO: 1229058 - RNA, 21 nt, Human
uggaagaaaaaguaaaaauga

SEQ ID NO: 1229059 - RNA, 21 nt, Human
uggaagagcacacuaaaggua

SEQ ID NO: 1229060 - RNA, 21 nt, Human
uggaagagcacacuaaaggua

SEQ ID NO: 1229061 - RNA, 21 nt, Human
uggaucgcuugaggccaggag

SEQ ID NO: 1229062 - RNA, 24 nt, Human
uggaucgcuugaggccaggaguuc

SEQ ID NO: 1229063 - RNA, 24 nt, Human
ugggaggcagagguugcagugagc

SEQ ID NO: 1229064 - RNA, 23 nt, Human
ugggaggccaagauggguggauc

SEQ ID NO: 1229065 - RNA, 24 nt, Human
uggguggaucgcuugaggccagga

SEQ ID NO: 1229066 - RNA, 24 nt, Human
uggugauucacaccuguaauccca

SEQ ID NO: 1229067 - RNA, 23 nt, Human
ugguggcacacaccuguaauccc

SEQ ID NO: 1229068 - RNA, 21 nt, Human
uggugucauuucaaacaacag

SEQ ID NO: 1229069 - RNA, 24 nt, Human
uguaaucccugcuacucagguggc

SEQ ID NO: 1229070 - RNA, 19 nt, Human
ugugcacagguuuuuaugu

SEQ ID NO: 1229071 - RNA, 25 nt, Human
uguuaugagaauuucaauuucucca

SEQ ID NO: 1229072 - RNA, 23 nt, Human
uguugagcuauuuugcccauuuc

SEQ ID NO: 1229073 - RNA, 23 nt, Human
uuacgaguucuuuauauaccacc

SEQ ID NO: 1229074 - RNA, 20 nt, Human
uucaaaacaaaagggggaaa

SEQ ID NO: 1229075 - RNA, 21 nt, Human
uucaaaacaaaagggggaaaa

SEQ ID NO: 1229076 - RNA, 22 nt, Human
uugcagugagccaagauggcgc

SEQ ID NO: 1229077 - RNA, 24 nt, Human
uugcgugaaccugggaggcagagg

SEQ ID NO: 1229078 - RNA, 30 nt, Human
uugcuggaucauaucguaacucuacauugu

SEQ ID NO: 1229079 - RNA, 18 nt, Human
uuucaagauucuuccuaa

SEQ ID NO: 1229080 - RNA, 22 nt, Human
uuucuccccuuccucauucugg

SEQ ID NO: 1229081 - RNA, 21 nt, Human
acccuaaagcaauauuugagg

SEQ ID NO: 1229082 - RNA, 27 nt, Human
gaugacccuaaagcaauauuugagggg

SEQ ID NO: 1229083 - RNA, 23 nt, Human
ucacuguaggugcuguacucauc

SEQ ID NO: 1229084 - RNA, 18 nt, Human
ucacuguaguuaccgaag

SEQ ID NO: 1229085 - RNA, 23 nt, Human
ucucuguuuuuuuccugauucuu

SEQ ID NO: 1229086 - RNA, 20 nt, Human
ugauuggcaaaaucuuccuc

SEQ ID NO: 1229087 - RNA, 19 nt, Human
uggcaaaaucuuccucugu

SEQ ID NO: 1229088 - RNA, 28 nt, Human
uuuuuuguuauguugacccuucuuugau

SEQ ID NO: 1229089 - RNA, 26 nt, Human
aagaaaagaaucauccccugaaaugc

SEQ ID NO: 1229090 - RNA, 24 nt, Human
aagaagaaaagaaucauccccuga

SEQ ID NO: 1229091 - RNA, 18 nt, Human
aggaaaaagaagaaaaga

SEQ ID NO: 1229092 - RNA, 20 nt, Human
aggaaaaagaagaaaagaag

SEQ ID NO: 1229093 - RNA, 27 nt, Human
auacaagaguugcggaaaguuguucuu

SEQ ID NO: 1229094 - RNA, 19 nt, Human
caccaaaacagccuagacu

SEQ ID NO: 1229095 - RNA, 25 nt, Human
cuuucagccauugucaucagcugac

SEQ ID NO: 1229096 - RNA, 19 nt, Human
uaggaaaaagaagaaaaga

SEQ ID NO: 1229097 - RNA, 21 nt, Human
ucuugguuuccaugaccuggc

SEQ ID NO: 1229098 - RNA, 25 nt, Human
ugcaagacucaaacagaaccacaga

SEQ ID NO: 1229099 - RNA, 19 nt, Human
uuacaaguaaaugcacuac

SEQ ID NO: 1229100 - RNA, 23 nt, Human
aggaauuucuuggguuccuucag

SEQ ID NO: 1229101 - RNA, 19 nt, Human
caucuagcuuugccucauc

SEQ ID NO: 1229102 - RNA, 18 nt, Human
cuucaggaaugcaucuag

SEQ ID NO: 1229103 - RNA, 19 nt, Human
uagcuuugccucaucuuug

SEQ ID NO: 1229104 - RNA, 23 nt, Human
ucgucuagagaauucauuucauu

SEQ ID NO: 1229105 - RNA, 18 nt, Human
ucuagcuuugccucaucu

SEQ ID NO: 1229106 - RNA, 23 nt, Human
acacuugaaauuccaaagagaaa

SEQ ID NO: 1229107 - RNA, 21 nt, Human
accaaggugcaccugccuggg

SEQ ID NO: 1229108 - RNA, 23 nt, Human
uuaccaaggugcaccugccuggg

SEQ ID NO: 1229109 - RNA, 21 nt, Human
accccaauuuuucauccuuuu

SEQ ID NO: 1229110 - RNA, 20 nt, Human
accuggcuuguaaucaguga

SEQ ID NO: 1229111 - RNA, 18 nt, Human
agaagccagucaggcuca

SEQ ID NO: 1229112 - RNA, 22 nt, Human
aggaaggcaugggagaagagga

SEQ ID NO: 1229113 - RNA, 23 nt, Human
aggagggacucaauguccuguga

SEQ ID NO: 1229114 - RNA, 27 nt, Human
aggauccacucauccuccacggucagc

SEQ ID NO: 1229115 - RNA, 21 nt, Human
agggaggaaggcaugggagaa

SEQ ID NO: 1229116 - RNA, 19 nt, Human
auccuccacggucagcuau

SEQ ID NO: 1229117 - RNA, 22 nt, Human
cacauguaagucuggccccugu

SEQ ID NO: 1229118 - RNA, 20 nt, Human
caccuguacuucuaaucaaa

SEQ ID NO: 1229119 - RNA, 20 nt, Human
cagcagggaggaaggcaugg

SEQ ID NO: 1229120 - RNA, 19 nt, Human
cauuuugcaaaugugacac

SEQ ID NO: 1229121 - RNA, 27 nt, Human
ccaaaacugugaccacauguaagucug

SEQ ID NO: 1229122 - RNA, 21 nt, Human
ccacauguaagucuggccccu

SEQ ID NO: 1229123 - RNA, 22 nt, Human
cccacaaccuccagcaagcagc

SEQ ID NO: 1229124 - RNA, 24 nt, Human
ccuacagacugacuaaguaggggg

SEQ ID NO: 1229125 - RNA, 21 nt, Human
ccugaccacauuuguccaucc

SEQ ID NO: 1229126 - RNA, 21 nt, Human
ccugugauggaguguagaggc

SEQ ID NO: 1229127 - RNA, 23 nt, Human
cgcugucguggccaccacccggc

SEQ ID NO: 1229128 - RNA, 21 nt, Human
cuaugugcuuauuucuuuucc

SEQ ID NO: 1229129 - RNA, 23 nt, Human
cucauccuccacggucagcuauc

SEQ ID NO: 1229130 - RNA, 20 nt, Human
gaagaggaggagggacucaa

SEQ ID NO: 1229131 - RNA, 19 nt, Human
gacuauugucucuucugcu

SEQ ID NO: 1229132 - RNA, 18 nt, Human
gcacguggggcagauguu

SEQ ID NO: 1229133 - RNA, 22 nt, Human
ggaaaaaaccaggaacaaugaa

SEQ ID NO: 1229134 - RNA, 26 nt, Human
ggaggaaggcaugggagaagaggagg

SEQ ID NO: 1229135 - RNA, 21 nt, Human
uaaauggaaguucccacaacc

SEQ ID NO: 1229136 - RNA, 18 nt, Human
uauagaagccacucggau

SEQ ID NO: 1229137 - RNA, 23 nt, Human
ucagugaaaugauccuugaucug

SEQ ID NO: 1229138 - RNA, 21 nt, Human
ucaguuccuuuccaugcagca

SEQ ID NO: 1229139 - RNA, 19 nt, Human
uccauucccaccgcggccg

SEQ ID NO: 1229140 - RNA, 21 nt, Human
uccauucccaccgcggccgcg

SEQ ID NO: 1229141 - RNA, 24 nt, Human
ucccacaaccuccagcaagcagca

SEQ ID NO: 1229142 - RNA, 26 nt, Human
ucccacaaccuccagcaaggggcccu

SEQ ID NO: 1229143 - RNA, 22 nt, Human
ucccaccgcggccgcggaagag

SEQ ID NO: 1229144 - RNA, 18 nt, Human
ucugcugccaucaagcuc

SEQ ID NO: 1229145 - RNA, 23 nt, Human
ucuucugcugccaucaagcucau

SEQ ID NO: 1229146 - RNA, 21 nt, Human
ugccacagcagggaggaaggc

SEQ ID NO: 1229147 - RNA, 20 nt, Human
ugccaucaagcucauggugc

SEQ ID NO: 1229148 - RNA, 21 nt, Human
uggaaaaaaccaggaacaaug

SEQ ID NO: 1229149 - RNA, 24 nt, Human
uggaaaaaaccaggaacaaugaaa

SEQ ID NO: 1229150 - RNA, 21 nt, Human
ugggagaagaggaggagggac

SEQ ID NO: 1229151 - RNA, 22 nt, Human
ugucguggccaccacccggcuu

SEQ ID NO: 1229152 - RNA, 20 nt, Human
ugugauggaguguagaggcu

SEQ ID NO: 1229153 - RNA, 20 nt, Human
uucccaccgcggccgcggaa

SEQ ID NO: 1229154 - RNA, 24 nt, Human
uuccuuuccaugcagcacacaaua

SEQ ID NO: 1229155 - RNA, 20 nt, Human
uugaucugcccugaccacau

SEQ ID NO: 1229156 - RNA, 18 nt, Human
uuugcaaaugugacaccc

SEQ ID NO: 1229157 - RNA, 22 nt, Human
auuuuauucauggaccccuuca

SEQ ID NO: 1229158 - RNA, 19 nt, Human
caacauaacguuggaaaag

SEQ ID NO: 1229159 - RNA, 21 nt, Human
caaggacuccaauaagcaaca

SEQ ID NO: 1229160 - RNA, 22 nt, Human
caucuuucccaaguaucaagga

SEQ ID NO: 1229161 - RNA, 26 nt, Human
gccaaguuaacuccaucuuucccaag

SEQ ID NO: 1229162 - RNA, 24 nt, Human
ucaaggacuccaauaagcaacaga

SEQ ID NO: 1229163 - RNA, 24 nt, Human
uucaucaacauaacguuggaaaag

SEQ ID NO: 1229164 - RNA, 27 nt, Human
uugcugauguccacuugugggguacuc

SEQ ID NO: 1229165 - RNA, 19 nt, Human
aacacuuccaccuggaauc

SEQ ID NO: 1229166 - RNA, 21 nt, Human
aagaaaccuacccggaauuca

SEQ ID NO: 1229167 - RNA, 24 nt, Human
aagaaaucagagaagacacaaaca

SEQ ID NO: 1229168 - RNA, 22 nt, Human
aagaguucaagaccagccuggu

SEQ ID NO: 1229169 - RNA, 19 nt, Human
aaggcucuccuacccucca

SEQ ID NO: 1229170 - RNA, 22 nt, Human
aaggcucuccuacccuccauca

SEQ ID NO: 1229171 - RNA, 21 nt, Human
aaguuccucucccuggauccc

SEQ ID NO: 1229172 - RNA, 20 nt, Human
aaucagaauacaaaaacaaa

SEQ ID NO: 1229173 - RNA, 20 nt, Human
aauuuccauuugugcauccc

SEQ ID NO: 1229174 - RNA, 24 nt, Human
acaaaaacaaccaccaacaacaac

SEQ ID NO: 1229175 - RNA, 26 nt, Human
acaaaaacaaccaccaacaacaacau

SEQ ID NO: 1229176 - RNA, 18 nt, Human
acacagaaaaaauaagau

SEQ ID NO: 1229177 - RNA, 19 nt, Human
acagccaaaaaccaucaca

SEQ ID NO: 1229178 - RNA, 21 nt, Human
accaacaacaacaucagccca

SEQ ID NO: 1229179 - RNA, 19 nt, Human
accauacuacagggcuaca

SEQ ID NO: 1229180 - RNA, 22 nt, Human
acucauuuuguccuaccucucu

SEQ ID NO: 1229181 - RNA, 22 nt, Human
agaaaaaauaagauaccuagga

SEQ ID NO: 1229182 - RNA, 18 nt, Human
agaaagaggccuuaccuc

SEQ ID NO: 1229183 - RNA, 24 nt, Human
agaaaucagagaagacacaaacaa

SEQ ID NO: 1229184 - RNA, 21 nt, Human
agaauacaaaaacaaccacca

SEQ ID NO: 1229185 - RNA, 21 nt, Human
agaauaugacugggaauccau

SEQ ID NO: 1229186 - RNA, 23 nt, Human
agccaaaaaccaucacauagucc

SEQ ID NO: 1229187 - RNA, 21 nt, Human
agcccuaccccaguccucaga

SEQ ID NO: 1229188 - RNA, 19 nt, Human
agccuggucaacauaguga

SEQ ID NO: 1229189 - RNA, 24 nt, Human
agccuggucaacauagugagauuc

SEQ ID NO: 1229190 - RNA, 24 nt, Human
agugcccgguugcccaagucaaaa

SEQ ID NO: 1229191 - RNA, 22 nt, Human
aguuguuccuucucugucuucu

SEQ ID NO: 1229192 - RNA, 20 nt, Human
auaaaaaguaauuacaauga

SEQ ID NO: 1229193 - RNA, 24 nt, Human
auaaauuuuguauuuaaaacagag

SEQ ID NO: 1229194 - RNA, 21 nt, Human
aucagaauacaaaaacaacca

SEQ ID NO: 1229195 - RNA, 23 nt, Human
aucuugaaauguccucucccuca

SEQ ID NO: 1229196 - RNA, 22 nt, Human
auuuuguccuaccucucuguga

SEQ ID NO: 1229197 - RNA, 21 nt, Human
caaaaagaacgaagcuggagg

SEQ ID NO: 1229198 - RNA, 22 nt, Human
caaaaagaacgaagcuggaggc

SEQ ID NO: 1229199 - RNA, 23 nt, Human
caaaaagaacgaagcuggaggca

SEQ ID NO: 1229200 - RNA, 23 nt, Human
caaaccauacuacagggcuacag

SEQ ID NO: 1229201 - RNA, 21 nt, Human
caaacuuccuuagaaagaggc

SEQ ID NO: 1229202 - RNA, 22 nt, Human
caacaacaucagcccaacuuuc

SEQ ID NO: 1229203 - RNA, 22 nt, Human
caacauagugagauucuaucuc

SEQ ID NO: 1229204 - RNA, 24 nt, Human
caacauagugagauucuaucuccu

SEQ ID NO: 1229205 - RNA, 18 nt, Human
caagaaaccuacccggaa

SEQ ID NO: 1229206 - RNA, 24 nt, Human
caagaccagccuggucaacauagu

SEQ ID NO: 1229207 - RNA, 21 nt, Human
caagaugauguuggccucaua

SEQ ID NO: 1229208 - RNA, 20 nt, Human
cacaguuacucagcagcacu

SEQ ID NO: 1229209 - RNA, 21 nt, Human
cacaugguuuuuaucuuuagu

SEQ ID NO: 1229210 - RNA, 22 nt, Human
caccaacaacaacaucagccca

SEQ ID NO: 1229211 - RNA, 24 nt, Human
caccaacaacaacaucagcccaac

SEQ ID NO: 1229212 - RNA, 24 nt, Human
caccuggaauccccaaagaggccc

SEQ ID NO: 1229213 - RNA, 23 nt, Human
cacucaaaauacaguucuguaau

SEQ ID NO: 1229214 - RNA, 19 nt, Human
cagaauacaaaaacaacca

SEQ ID NO: 1229215 - RNA, 21 nt, Human
cagaauacaaaaacaaccacc

SEQ ID NO: 1229216 - RNA, 23 nt, Human
cagaauacaaaaacaaccaccaa

SEQ ID NO: 1229217 - RNA, 24 nt, Human
cagaauacaaaaacaaccaccaac

SEQ ID NO: 1229218 - RNA, 25 nt, Human
cagaauacaaaaacaaccaccaaca

SEQ ID NO: 1229219 - RNA, 26 nt, Human
cagcaaaaagaacgaagcuggaggca

SEQ ID NO: 1229220 - RNA, 23 nt, Human
cagcaaaucaauuucuuccuggc

SEQ ID NO: 1229221 - RNA, 20 nt, Human
caguaaccaaaacagcauga

SEQ ID NO: 1229222 - RNA, 24 nt, Human
caguaaccaaaacagcaugauacu

SEQ ID NO: 1229223 - RNA, 19 nt, Human
caucauguuacccaacuuc

SEQ ID NO: 1229224 - RNA, 24 nt, Human
caucccaugcccagcccacccucc

SEQ ID NO: 1229225 - RNA, 20 nt, Human
ccaaaacagcaugauacuga

SEQ ID NO: 1229226 - RNA, 22 nt, Human
ccaaaguaauuuacagaugcaa

SEQ ID NO: 1229227 - RNA, 22 nt, Human
ccagcccacccuccaccagccu

SEQ ID NO: 1229228 - RNA, 23 nt, Human
ccagcuagucuauccuucagcca

SEQ ID NO: 1229229 - RNA, 18 nt, Human
ccaugaauuuauccaucu

SEQ ID NO: 1229230 - RNA, 22 nt, Human
cccaacuucaaaccauacuaca

SEQ ID NO: 1229231 - RNA, 19 nt, Human
ccccaaagaggcccgcuuu

SEQ ID NO: 1229232 - RNA, 24 nt, Human
ccccacacagccagcaugugucca

SEQ ID NO: 1229233 - RNA, 19 nt, Human
ccccuuuuuccuucaugag

SEQ ID NO: 1229234 - RNA, 22 nt, Human
cccuggauccccuuuuuccuuc

SEQ ID NO: 1229235 - RNA, 23 nt, Human
cccuuuuuccuucaugagugccc

SEQ ID NO: 1229236 - RNA, 21 nt, Human
ccuauguguuaccacacacgc

SEQ ID NO: 1229237 - RNA, 18 nt, Human
ccuccaucauuccucccu

SEQ ID NO: 1229238 - RNA, 24 nt, Human
ccucccucuaccccacacagccag

SEQ ID NO: 1229239 - RNA, 24 nt, Human
ccucugcaguucacucugcugcuu

SEQ ID NO: 1229240 - RNA, 24 nt, Human
ccuggucaacauagugagauucua

SEQ ID NO: 1229241 - RNA, 19 nt, Human
ccuguugugacuuccuaug

SEQ ID NO: 1229242 - RNA, 20 nt, Human
ccuugcauccuggggaugaa

SEQ ID NO: 1229243 - RNA, 24 nt, Human
cuacucucugacucacuucuuaac

SEQ ID NO: 1229244 - RNA, 23 nt, Human
cucuuccacaacuuuaacuucag

SEQ ID NO: 1229245 - RNA, 23 nt, Human
cugaaaucagacaaugauuagaa

SEQ ID NO: 1229246 - RNA, 24 nt, Human
cugcuaaauauaucucaauuguau

SEQ ID NO: 1229247 - RNA, 20 nt, Human
cugcucaaagaaaucagaga

SEQ ID NO: 1229248 - RNA, 19 nt, Human
cuggguucugguuucuuuc

SEQ ID NO: 1229249 - RNA, 21 nt, Human
cuguuucuauuucuguggggu

SEQ ID NO: 1229250 - RNA, 21 nt, Human
cuucaugagugcccgguugcc

SEQ ID NO: 1229251 - RNA, 18 nt, Human
cuucucuauucuaagaga

SEQ ID NO: 1229252 - RNA, 29 nt, Human
cuuggcuucucccucuaguuguuccuucu

SEQ ID NO: 1229253 - RNA, 21 nt, Human
cuuuuagccuccacacugguu

SEQ ID NO: 1229254 - RNA, 21 nt, Human
gaagacacaaacaaauggaaa

SEQ ID NO: 1229255 - RNA, 19 nt, Human
gaaucacaguuacucagca

SEQ ID NO: 1229256 - RNA, 24 nt, Human
gaaugaguuggggaggaguuccuc

SEQ ID NO: 1229257 - RNA, 18 nt, Human
gacuuccuauggacacag

SEQ ID NO: 1229258 - RNA, 20 nt, Human
gcaauccucagcaaaaagaa

SEQ ID NO: 1229259 - RNA, 19 nt, Human
gcauagaaguguuugcagu

SEQ ID NO: 1229260 - RNA, 18 nt, Human
gcccacccuccaccagcc

SEQ ID NO: 1229261 - RNA, 22 nt, Human
gcccuaauagccaagcaauccu

SEQ ID NO: 1229262 - RNA, 22 nt, Human
ggggaaucacaguuacucagca

SEQ ID NO: 1229263 - RNA, 21 nt, Human
ggucaugccuaugugugagcu

SEQ ID NO: 1229264 - RNA, 18 nt, Human
guauuuaaaacagagcuc

SEQ ID NO: 1229265 - RNA, 24 nt, Human
guccaacacuuccaccuggaaucc

SEQ ID NO: 1229266 - RNA, 21 nt, Human
gugugugugugugugugugug

SEQ ID NO: 1229267 - RNA, 21 nt, Human
gugugugugugugugugugug

SEQ ID NO: 1229268 - RNA, 21 nt, Human
gugugugugugugugugugug

SEQ ID NO: 1229269 - RNA, 21 nt, Human
gugugugugugugugugugug

SEQ ID NO: 1229270 - RNA, 21 nt, Human
gugugugugugugugugugug

SEQ ID NO: 1229271 - RNA, 23 nt, Human
guuccuguaaaaaugguaccagc

SEQ ID NO: 1229272 - RNA, 24 nt, Human
guuccuguaaaaaugguaccagcu

SEQ ID NO: 1229273 - RNA, 19 nt, Human
uaaccaaaacagcaugaua

SEQ ID NO: 1229274 - RNA, 25 nt, Human
uaauuuacagaugcaaguuaucccu

SEQ ID NO: 1229275 - RNA, 21 nt, Human
uacaaaaacaaccaccaacaa

SEQ ID NO: 1229276 - RNA, 18 nt, Human
uacaucuucuucuucacu

SEQ ID NO: 1229277 - RNA, 23 nt, Human
uacaucuucuucuucacugcauu

SEQ ID NO: 1229278 - RNA, 21 nt, Human
uacccaucuacucucugacuc

SEQ ID NO: 1229279 - RNA, 21 nt, Human
uaccucacugucccuacccau

SEQ ID NO: 1229280 - RNA, 21 nt, Human
uagaaagaggccuuaccucac

SEQ ID NO: 1229281 - RNA, 26 nt, Human
uagaaguguuugcaguaguuucugau

SEQ ID NO: 1229282 - RNA, 23 nt, Human
uagaauaugacugggaauccauc

SEQ ID NO: 1229283 - RNA, 22 nt, Human
uagugucuguggagaaacuuuu

SEQ ID NO: 1229284 - RNA, 23 nt, Human
uagugucuguggagaaacuuuuu

SEQ ID NO: 1229285 - RNA, 18 nt, Human
uauacugcccaaaguaau

SEQ ID NO: 1229286 - RNA, 18 nt, Human
ucaauuucuuccuggcuc

SEQ ID NO: 1229287 - RNA, 18 nt, Human
ucacucugcugcuucaga

SEQ ID NO: 1229288 - RNA, 19 nt, Human
ucacugcauuuuugugggc

SEQ ID NO: 1229289 - RNA, 20 nt, Human
ucacugucccuacccaucua

SEQ ID NO: 1229290 - RNA, 20 nt, Human
ucagcccacucaaaauacag

SEQ ID NO: 1229291 - RNA, 24 nt, Human
ucaguguccucucaugggcuuccu

SEQ ID NO: 1229292 - RNA, 19 nt, Human
uccaacacuuccaccugga

SEQ ID NO: 1229293 - RNA, 22 nt, Human
ucccaugcccagcccacccucc

SEQ ID NO: 1229294 - RNA, 18 nt, Human
uccccaaagaggcccgcu

SEQ ID NO: 1229295 - RNA, 23 nt, Human
ucccucaguuccuauguguuacc

SEQ ID NO: 1229296 - RNA, 20 nt, Human
ucccuggauccccuuuuucc

SEQ ID NO: 1229297 - RNA, 20 nt, Human
uccuucaugagugcccgguu

SEQ ID NO: 1229298 - RNA, 20 nt, Human
ucgcuugggugccaagaguu

SEQ ID NO: 1229299 - RNA, 24 nt, Human
ucgcuugggugccaagaguucaag

SEQ ID NO: 1229300 - RNA, 24 nt, Human
ucugugaccgugaaagaccggggc

SEQ ID NO: 1229301 - RNA, 18 nt, Human
ugaaaauuuucaggucug

SEQ ID NO: 1229302 - RNA, 18 nt, Human
ugaaauguccucucccuc

SEQ ID NO: 1229303 - RNA, 27 nt, Human
ugaagagugugugugugugugugugug

SEQ ID NO: 1229304 - RNA, 18 nt, Human
ugagauaaccacaugguu

SEQ ID NO: 1229305 - RNA, 21 nt, Human
ugaugccaucaccuggggaau

SEQ ID NO: 1229306 - RNA, 21 nt, Human
ugcccagcccacccuccacca

SEQ ID NO: 1229307 - RNA, 23 nt, Human
ugcccagcccacccuccaccagc

SEQ ID NO: 1229308 - RNA, 22 nt, Human
ugccuuggcuucucccucuagu

SEQ ID NO: 1229309 - RNA, 19 nt, Human
uggacacagccaaaaacca

SEQ ID NO: 1229310 - RNA, 20 nt, Human
uggcaaaggucaucucucug

SEQ ID NO: 1229311 - RNA, 21 nt, Human
ugggaauccaucauguucugg

SEQ ID NO: 1229312 - RNA, 22 nt, Human
ugugaauaacaaaaugaagaau

SEQ ID NO: 1229313 - RNA, 21 nt, Human
ugugaccgugaaagacggcug

SEQ ID NO: 1229314 - RNA, 21 nt, Human
ugugaugaaucagauuaauug

SEQ ID NO: 1229315 - RNA, 20 nt, Human
ugugugugugugugugucug

SEQ ID NO: 1229316 - RNA, 18 nt, Human
ugugugugugugugugug

SEQ ID NO: 1229317 - RNA, 18 nt, Human
ugugugugugugugugug

SEQ ID NO: 1229318 - RNA, 18 nt, Human
ugugugugugugugugug

SEQ ID NO: 1229319 - RNA, 18 nt, Human
ugugugugugugugugug

SEQ ID NO: 1229320 - RNA, 18 nt, Human
ugugugugugugugugug

SEQ ID NO: 1229321 - RNA, 18 nt, Human
ugugugugugugugugug

SEQ ID NO: 1229322 - RNA, 18 nt, Human
ugugugugugugugugug

SEQ ID NO: 1229323 - RNA, 18 nt, Human
ugugugugugugugugug

SEQ ID NO: 1229324 - RNA, 18 nt, Human
ugugugugugugugugug

SEQ ID NO: 1229325 - RNA, 18 nt, Human
ugugugugugugugugug

SEQ ID NO: 1229326 - RNA, 18 nt, Human
ugugugugugugugugug

SEQ ID NO: 1229327 - RNA, 18 nt, Human
ugugugugugugugugug

SEQ ID NO: 1229328 - RNA, 18 nt, Human
ugugugugugugugugug

SEQ ID NO: 1229329 - RNA, 18 nt, Human
ugugugugugugugugug

SEQ ID NO: 1229330 - RNA, 18 nt, Human
ugugugugugugugugug

SEQ ID NO: 1229331 - RNA, 18 nt, Human
ugugugugugugugugug

SEQ ID NO: 1229332 - RNA, 18 nt, Human
ugugugugugugugugug

SEQ ID NO: 1229333 - RNA, 22 nt, Human
ugugugugugugugugugucug

SEQ ID NO: 1229334 - RNA, 21 nt, Human
ugugugugugugugugugugu

SEQ ID NO: 1229335 - RNA, 21 nt, Human
ugugugugugugugugugugu

SEQ ID NO: 1229336 - RNA, 21 nt, Human
ugugugugugugugugugugu

SEQ ID NO: 1229337 - RNA, 21 nt, Human
ugugugugugugugugugugu

SEQ ID NO: 1229338 - RNA, 21 nt, Human
ugugugugugugugugugugu

SEQ ID NO: 1229339 - RNA, 21 nt, Human
ugugugugugugugugugugu

SEQ ID NO: 1229340 - RNA, 21 nt, Human
ugugugugugugugugugugu

SEQ ID NO: 1229341 - RNA, 21 nt, Human
ugugugugugugugugugugu

SEQ ID NO: 1229342 - RNA, 21 nt, Human
ugugugugugugugugugugu

SEQ ID NO: 1229343 - RNA, 21 nt, Human
ugugugugugugugugugugu

SEQ ID NO: 1229344 - RNA, 21 nt, Human
ugugugugugugugugugugu

SEQ ID NO: 1229345 - RNA, 21 nt, Human
ugugugugugugugugugugu

SEQ ID NO: 1229346 - RNA, 21 nt, Human
ugugugugugugugugugugu

SEQ ID NO: 1229347 - RNA, 21 nt, Human
ugugugugugugugugugugu

SEQ ID NO: 1229348 - RNA, 21 nt, Human
ugugugugugugugugugugu

SEQ ID NO: 1229349 - RNA, 21 nt, Human
ugugugugugugugugugugu

SEQ ID NO: 1229350 - RNA, 21 nt, Human
ugugugugugugugugugugu

SEQ ID NO: 1229351 - RNA, 21 nt, Human
ugugugugugugugugugugu

SEQ ID NO: 1229352 - RNA, 21 nt, Human
ugugugugugugugugugugu

SEQ ID NO: 1229353 - RNA, 21 nt, Human
ugugugugugugugugugugu

SEQ ID NO: 1229354 - RNA, 21 nt, Human
ugugugugugugugugugugu

SEQ ID NO: 1229355 - RNA, 21 nt, Human
ugugugugugugugugugugu

SEQ ID NO: 1229356 - RNA, 21 nt, Human
ugugugugugugugugugugu

SEQ ID NO: 1229357 - RNA, 21 nt, Human
ugugugugugugugugugugu

SEQ ID NO: 1229358 - RNA, 21 nt, Human
ugugugugugugugugugugu

SEQ ID NO: 1229359 - RNA, 21 nt, Human
ugugugugugugugugugugu

SEQ ID NO: 1229360 - RNA, 21 nt, Human
ugugugugugugugugugugu

SEQ ID NO: 1229361 - RNA, 21 nt, Human
ugugugugugugugugugugu

SEQ ID NO: 1229362 - RNA, 21 nt, Human
ugugugugugugugugugugu

SEQ ID NO: 1229363 - RNA, 21 nt, Human
ugugugugugugugugugugu

SEQ ID NO: 1229364 - RNA, 21 nt, Human
ugugugugugugugugugugu

SEQ ID NO: 1229365 - RNA, 21 nt, Human
ugugugugugugugugugugu

SEQ ID NO: 1229366 - RNA, 22 nt, Human
ugugugugugugugugugugug

SEQ ID NO: 1229367 - RNA, 22 nt, Human
ugugugugugugugugugugug

SEQ ID NO: 1229368 - RNA, 22 nt, Human
ugugugugugugugugugugug

SEQ ID NO: 1229369 - RNA, 22 nt, Human
ugugugugugugugugugugug

SEQ ID NO: 1229370 - RNA, 22 nt, Human
ugugugugugugugugugugug

SEQ ID NO: 1229371 - RNA, 22 nt, Human
ugugugugugugugugugugug

SEQ ID NO: 1229372 - RNA, 22 nt, Human
ugugugugugugugugugugug

SEQ ID NO: 1229373 - RNA, 22 nt, Human
ugugugugugugugugugugug

SEQ ID NO: 1229374 - RNA, 22 nt, Human
ugugugugugugugugugugug

SEQ ID NO: 1229375 - RNA, 22 nt, Human
ugugugugugugugugugugug

SEQ ID NO: 1229376 - RNA, 18 nt, Human
uguuccuucucugucuuc

SEQ ID NO: 1229377 - RNA, 19 nt, Human
uguuucuauuucugugggg

SEQ ID NO: 1229378 - RNA, 18 nt, Human
uuaaaacagagcucuuga

SEQ ID NO: 1229379 - RNA, 23 nt, Human
uuacagcaaaucaauuucuuccc

SEQ ID NO: 1229380 - RNA, 19 nt, Human
uucaagaaaccuacccgga

SEQ ID NO: 1229381 - RNA, 28 nt, Human
uucaagaaaccuacccggaauucauaga

SEQ ID NO: 1229382 - RNA, 19 nt, Human
uucacucugcugcuucaga

SEQ ID NO: 1229383 - RNA, 23 nt, Human
uuccauuugugcaucccaugccc

SEQ ID NO: 1229384 - RNA, 24 nt, Human
uuccucccucuaccccacacagcc

SEQ ID NO: 1229385 - RNA, 23 nt, Human
uucuguggggucagugguaacau

SEQ ID NO: 1229386 - RNA, 18 nt, Human
uugucauuucuaauugug

SEQ ID NO: 1229387 - RNA, 23 nt, Human
uugugcaucccaugcccagccca

SEQ ID NO: 1229388 - RNA, 18 nt, Human
uugugggcugcacuuacc

SEQ ID NO: 1229389 - RNA, 24 nt, Human
uuuccauuugugcaucccaugccc

SEQ ID NO: 1229390 - RNA, 20 nt, Human
aacauggcaaaacccugucu

SEQ ID NO: 1229391 - RNA, 21 nt, Human
aacauggcaaaacccugucuc

SEQ ID NO: 1229392 - RNA, 24 nt, Human
acccugucucuacuaaaaauacaa

SEQ ID NO: 1229393 - RNA, 18 nt, Human
agccacaugcuccagcac

SEQ ID NO: 1229394 - RNA, 18 nt, Human
agccuggucaacauggca

SEQ ID NO: 1229395 - RNA, 20 nt, Human
aggaguuugagaccagccug

SEQ ID NO: 1229396 - RNA, 18 nt, Human
aggcagguggaucaccug

SEQ ID NO: 1229397 - RNA, 22 nt, Human
aggcagguggaucaccugaggu

SEQ ID NO: 1229398 - RNA, 26 nt, Human
aggcagguggaucaccugaggucagg

SEQ ID NO: 1229399 - RNA, 24 nt, Human
aggcaguucccaaauggcaguccu

SEQ ID NO: 1229400 - RNA, 21 nt, Human
aggccgaggcagguggaucac

SEQ ID NO: 1229401 - RNA, 24 nt, Human
aggcguggugguggacaccuguaa

SEQ ID NO: 1229402 - RNA, 19 nt, Human
aggucaggaguuugagacc

SEQ ID NO: 1229403 - RNA, 18 nt, Human
aguucccaaauggcaguc

SEQ ID NO: 1229404 - RNA, 20 nt, Human
caacauggcaaaacccuguc

SEQ ID NO: 1229405 - RNA, 22 nt, Human
caacauggcaaaacccugucuc

SEQ ID NO: 1229406 - RNA, 24 nt, Human
caacauggcaaaacccugucucua

SEQ ID NO: 1229407 - RNA, 23 nt, Human
caccugaggucaggaguuugaga

SEQ ID NO: 1229408 - RNA, 18 nt, Human
cagccaccacgggguccu

SEQ ID NO: 1229409 - RNA, 18 nt, Human
caucacugacgggcaggc

SEQ ID NO: 1229410 - RNA, 20 nt, Human
cauguagaagaaaggaaucu

SEQ ID NO: 1229411 - RNA, 22 nt, Human
ccaccacgggguccuuggcugu

SEQ ID NO: 1229412 - RNA, 22 nt, Human
ccugaggucaggaguuugagac

SEQ ID NO: 1229413 - RNA, 21 nt, Human
ccuggauuggaaggccgaggc

SEQ ID NO: 1229414 - RNA, 22 nt, Human
ccuggucaacauggcaaaaccc

SEQ ID NO: 1229415 - RNA, 24 nt, Human
ccuggucaacauggcaaaacccug

SEQ ID NO: 1229416 - RNA, 20 nt, Human
cgaggcagguggaucaccug

SEQ ID NO: 1229417 - RNA, 24 nt, Human
cgaggcagguggaucaccugaggu

SEQ ID NO: 1229418 - RNA, 26 nt, Human
cgaggcagguggaucaccugagguca

SEQ ID NO: 1229419 - RNA, 21 nt, Human
cuggcagcaucagcgaggccu

SEQ ID NO: 1229420 - RNA, 20 nt, Human
cuucugauucuggcagcauc

SEQ ID NO: 1229421 - RNA, 24 nt, Human
gaucaccugaggucaggaguuuga

SEQ ID NO: 1229422 - RNA, 21 nt, Human
ggaaagccugggaagcuuaga

SEQ ID NO: 1229423 - RNA, 22 nt, Human
ggaucaccugaggucaggaguu

SEQ ID NO: 1229424 - RNA, 18 nt, Human
ggauuggaaggccgaggc

SEQ ID NO: 1229425 - RNA, 22 nt, Human
ggcaggcaguucccaaauggca

SEQ ID NO: 1229426 - RNA, 19 nt, Human
ggucaggaguuugagacca

SEQ ID NO: 1229427 - RNA, 21 nt, Human
gguggacaccuguaaucccag

SEQ ID NO: 1229428 - RNA, 24 nt, Human
ggugguggacaccuguaaucccag

SEQ ID NO: 1229429 - RNA, 21 nt, Human
guggaucaccugaggucagga

SEQ ID NO: 1229430 - RNA, 21 nt, Human
uaaaaauacaaaaauuagcca

SEQ ID NO: 1229431 - RNA, 19 nt, Human
ucaccugaggucaggaguu

SEQ ID NO: 1229432 - RNA, 21 nt, Human
ucucuacuaaaaauacaaaaa

SEQ ID NO: 1229433 - RNA, 23 nt, Human
ugagaccagccuggucaacaugg

SEQ ID NO: 1229434 - RNA, 21 nt, Human
ugaggaaagccugggaagcuu

SEQ ID NO: 1229435 - RNA, 18 nt, Human
ugaggucaggaguuugag

SEQ ID NO: 1229436 - RNA, 21 nt, Human
ugcagaacuccccuucugauu

SEQ ID NO: 1229437 - RNA, 24 nt, Human
uggaaggccgaggcagguggauca

SEQ ID NO: 1229438 - RNA, 23 nt, Human
uggaucaccugaggucaggaguu

SEQ ID NO: 1229439 - RNA, 24 nt, Human
uggaucaccugaggucaggaguuu

SEQ ID NO: 1229440 - RNA, 27 nt, Human
uggaucaccugaggucaggaguuugag

SEQ ID NO: 1229441 - RNA, 21 nt, Human
uggauuggaaggccgaggcag

SEQ ID NO: 1229442 - RNA, 18 nt, Human
uggcagcaucagcgaggc

SEQ ID NO: 1229443 - RNA, 19 nt, Human
ugggaagcuuagaaaggua

SEQ ID NO: 1229444 - RNA, 23 nt, Human
uggguucugggagccacaugcuc

SEQ ID NO: 1229445 - RNA, 24 nt, Human
uggugguggacaccuguaauccca

SEQ ID NO: 1229446 - RNA, 18 nt, Human
uucaucagaucagccacc

SEQ ID NO: 1229447 - RNA, 25 nt, Human
uuggaaggccgaggcagguggauca

SEQ ID NO: 1229448 - RNA, 19 nt, Human
aaaauccccccacccgacu

SEQ ID NO: 1229449 - RNA, 23 nt, Human
agaaaauccccccacccgacuca

SEQ ID NO: 1229450 - RNA, 23 nt, Human
agcacauaacaagccuucggcca

SEQ ID NO: 1229451 - RNA, 21 nt, Human
caaaauacauaaaacauacaa

SEQ ID NO: 1229452 - RNA, 23 nt, Human
cacuguccucuuccaauuuagcc

SEQ ID NO: 1229453 - RNA, 21 nt, Human
cagcccccggaaagcccuguu

SEQ ID NO: 1229454 - RNA, 20 nt, Human
caggcacagcacauaacaaa

SEQ ID NO: 1229455 - RNA, 22 nt, Human
caucauuucaaacagaaacucu

SEQ ID NO: 1229456 - RNA, 20 nt, Human
cauuuucucuucauguuuuu

SEQ ID NO: 1229457 - RNA, 21 nt, Human
ccacccgacucaaggcacaga

SEQ ID NO: 1229458 - RNA, 24 nt, Human
ccagaaguuuuucaucauuucaag

SEQ ID NO: 1229459 - RNA, 22 nt, Human
ccaucagguguguccuccuggg

SEQ ID NO: 1229460 - RNA, 18 nt, Human
cccagaaaauccccccac

SEQ ID NO: 1229461 - RNA, 21 nt, Human
ccccaucagguguguccuccu

SEQ ID NO: 1229462 - RNA, 21 nt, Human
ccugagacaaucuccccuucc

SEQ ID NO: 1229463 - RNA, 21 nt, Human
ccuguucuacauucugucucu

SEQ ID NO: 1229464 - RNA, 21 nt, Human
ccuuccuuuuuuucccccuag

SEQ ID NO: 1229465 - RNA, 19 nt, Human
cucaaggcacagauuagaa

SEQ ID NO: 1229466 - RNA, 20 nt, Human
cuccagcccccggaaagccc

SEQ ID NO: 1229467 - RNA, 19 nt, Human
cuccuugucuucuccucca

SEQ ID NO: 1229468 - RNA, 22 nt, Human
cuuccuaacaaaguuauuccgg

SEQ ID NO: 1229469 - RNA, 23 nt, Human
gaaaauccccccacccgacucaa

SEQ ID NO: 1229470 - RNA, 20 nt, Human
gcacagauuagaaaaccuuc

SEQ ID NO: 1229471 - RNA, 19 nt, Human
uaacauguguacauucugc

SEQ ID NO: 1229472 - RNA, 21 nt, Human
uaacauguguacauucugcuu

SEQ ID NO: 1229473 - RNA, 24 nt, Human
uaacugucaaguucaccuuccuaa

SEQ ID NO: 1229474 - RNA, 23 nt, Human
uaacuuucuguccucaggauaac

SEQ ID NO: 1229475 - RNA, 19 nt, Human
uagaaaaccuucccaggcc

SEQ ID NO: 1229476 - RNA, 19 nt, Human
uauuuguccuacugugucu

SEQ ID NO: 1229477 - RNA, 19 nt, Human
ucaccacaaucuauuucca

SEQ ID NO: 1229478 - RNA, 22 nt, Human
uccaggcacagcacauaacaag

SEQ ID NO: 1229479 - RNA, 19 nt, Human
ucccagaaaauccccccac

SEQ ID NO: 1229480 - RNA, 18 nt, Human
ucccagagccccaucagg

SEQ ID NO: 1229481 - RNA, 20 nt, Human
uccuccugggcagcagccuc

SEQ ID NO: 1229482 - RNA, 22 nt, Human
uccuugucuucuccuccagccc

SEQ ID NO: 1229483 - RNA, 24 nt, Human
ucuauuuccagaaguuuuucauca

SEQ ID NO: 1229484 - RNA, 18 nt, Human
ucugaccaagaagucaca

SEQ ID NO: 1229485 - RNA, 24 nt, Human
uggcaaaauacauaaaacauacaa

SEQ ID NO: 1229486 - RNA, 28 nt, Human
uggcaaaauacauaaaacauacaacuaa

SEQ ID NO: 1229487 - RNA, 18 nt, Human
uguccuacugugucuggu

SEQ ID NO: 1229488 - RNA, 24 nt, Human
ugugcacaugugaagaugugcgua

SEQ ID NO: 1229489 - RNA, 18 nt, Human
uuaacauguguacauucu

SEQ ID NO: 1229490 - RNA, 20 nt, Human
uuagaaaaccuucccaggcc

SEQ ID NO: 1229491 - RNA, 22 nt, Human
uucauuuuuguuuuacaugugu

SEQ ID NO: 1229492 - RNA, 18 nt, Human
uuuaacguguacaguuca

SEQ ID NO: 1229493 - RNA, 18 nt, Human
uuucccagaaaauccccc

SEQ ID NO: 1229494 - RNA, 20 nt, Human
uuucccagaaaaucccccca

SEQ ID NO: 1229495 - RNA, 22 nt, Human
uuuuuuuuuuuuuuugcuucau

SEQ ID NO: 1229496 - RNA, 19 nt, Human
uuuuuuuuuuuuuuuugcu

SEQ ID NO: 1229497 - RNA, 21 nt, Human
uuuuuuuuuuuuuuuuugcuu

SEQ ID NO: 1229498 - RNA, 20 nt, Human
uuuuuuuuuuuuuuuuuugg

SEQ ID NO: 1229499 - RNA, 23 nt, Human
aaauaucuucuugacaggcuccc

SEQ ID NO: 1229500 - RNA, 22 nt, Human
aagauuuuaagguuaagugauc

SEQ ID NO: 1229501 - RNA, 23 nt, Human
aagucuggagacuagggucagcu

SEQ ID NO: 1229502 - RNA, 21 nt, Human
acagcagaagaccugguugag

SEQ ID NO: 1229503 - RNA, 21 nt, Human
accuucucuagucuugagacc

SEQ ID NO: 1229504 - RNA, 24 nt, Human
auuacuauuaaguuauucauagcu

SEQ ID NO: 1229505 - RNA, 27 nt, Human
cacaggauuugacagcagaggacauac

SEQ ID NO: 1229506 - RNA, 19 nt, Human
cagaagaccugguugaguc

SEQ ID NO: 1229507 - RNA, 19 nt, Human
cugaaagguuucugaucca

SEQ ID NO: 1229508 - RNA, 19 nt, Human
gacccuggcaacuugguga

SEQ ID NO: 1229509 - RNA, 21 nt, Human
gcuccgauucugaagcugaag

SEQ ID NO: 1229510 - RNA, 20 nt, Human
ggaggcucugcuggccaugg

SEQ ID NO: 1229511 - RNA, 18 nt, Human
gggaauugggcgacugga

SEQ ID NO: 1229512 - RNA, 21 nt, Human
gggaggcucugcuggccaugg

SEQ ID NO: 1229513 - RNA, 19 nt, Human
gggcacaggauuugacagc

SEQ ID NO: 1229514 - RNA, 20 nt, Human
guugagucuugcuucugcag

SEQ ID NO: 1229515 - RNA, 21 nt, Human
guugaucugcacgacccuggc

SEQ ID NO: 1229516 - RNA, 20 nt, Human
uaauuacuaugacuuucauu

SEQ ID NO: 1229517 - RNA, 20 nt, Human
uagaauguuuucuggauauu

SEQ ID NO: 1229518 - RNA, 19 nt, Human
ucgcucaaggucacaacag

SEQ ID NO: 1229519 - RNA, 25 nt, Human
ucucuagucuugagaccaaaggaau

SEQ ID NO: 1229520 - RNA, 23 nt, Human
ugaaagucuggagacuaggguca

SEQ ID NO: 1229521 - RNA, 22 nt, Human
ugcacgacccuggcaaccggcg

SEQ ID NO: 1229522 - RNA, 23 nt, Human
ugccagugacaagcugugugacc

SEQ ID NO: 1229523 - RNA, 20 nt, Human
uugaugauuaugguuauuuc

SEQ ID NO: 1229524 - RNA, 19 nt, Human
uuucagggccuugguuuca

SEQ ID NO: 1229525 - RNA, 23 nt, Human
uuucuggauauuggcaauuaugu

SEQ ID NO: 1229526 - RNA, 23 nt, Human
cacacgaggaugaugacaaacag

SEQ ID NO: 1229527 - RNA, 24 nt, Human
aaaguguugggauuacaggcguga

SEQ ID NO: 1229528 - RNA, 25 nt, Human
aagugauccucccgccucagccucc

SEQ ID NO: 1229529 - RNA, 21 nt, Human
aaguguugggauuacaggcgu

SEQ ID NO: 1229530 - RNA, 26 nt, Human
aaguguugggauuacaggcgugagcc

SEQ ID NO: 1229531 - RNA, 19 nt, Human
aaugacaagccacuucuca

SEQ ID NO: 1229532 - RNA, 22 nt, Human
acacagccaugggggugacuuc

SEQ ID NO: 1229533 - RNA, 22 nt, Human
acucagaaccgacaaaaacucc

SEQ ID NO: 1229534 - RNA, 19 nt, Human
acugcagccccaauuuccu

SEQ ID NO: 1229535 - RNA, 25 nt, Human
agaaacccaggcacguguacagcca

SEQ ID NO: 1229536 - RNA, 18 nt, Human
agccccugguggucccag

SEQ ID NO: 1229537 - RNA, 28 nt, Human
agcucggccaacccgccaccauccgcaa

SEQ ID NO: 1229538 - RNA, 19 nt, Human
agcuggaccugcaguccaa

SEQ ID NO: 1229539 - RNA, 19 nt, Human
aggaaacaaaaucaaacac

SEQ ID NO: 1229540 - RNA, 19 nt, Human
aggcguugagcaggccgcu

SEQ ID NO: 1229541 - RNA, 23 nt, Human
aggcugggaggauccugggggcu

SEQ ID NO: 1229542 - RNA, 20 nt, Human
aguccaagacuccuugggga

SEQ ID NO: 1229543 - RNA, 19 nt, Human
agugcaguggcgcaaucag

SEQ ID NO: 1229544 - RNA, 24 nt, Human
auccgcaauagaaggcaaaggcug

SEQ ID NO: 1229545 - RNA, 18 nt, Human
augacaagccacuucuca

SEQ ID NO: 1229546 - RNA, 18 nt, Human
auuccgcuuaauccugcu

SEQ ID NO: 1229547 - RNA, 22 nt, Human
caaaaacuccaggucuuccaag

SEQ ID NO: 1229548 - RNA, 22 nt, Human
caaagcucggccaacccgccac

SEQ ID NO: 1229549 - RNA, 24 nt, Human
caaaguguugggauuacaggcgug

SEQ ID NO: 1229550 - RNA, 20 nt, Human
caagcuccucaccucugagc

SEQ ID NO: 1229551 - RNA, 27 nt, Human
caagugauccucccgccucagccuccc

SEQ ID NO: 1229552 - RNA, 27 nt, Human
caagugauccucccgccucagccuccc

SEQ ID NO: 1229553 - RNA, 19 nt, Human
cacagcacuggcauccccu

SEQ ID NO: 1229554 - RNA, 25 nt, Human
cacagccaugggggugacuucccag

SEQ ID NO: 1229555 - RNA, 21 nt, Human
caccccucccgcaggagggcc

SEQ ID NO: 1229556 - RNA, 22 nt, Human
caccuccccucacagugcuguc

SEQ ID NO: 1229557 - RNA, 22 nt, Human
caccugccccuguccccagagc

SEQ ID NO: 1229558 - RNA, 20 nt, Human
cacuacaccuggucuuuggc

SEQ ID NO: 1229559 - RNA, 22 nt, Human
cacuggcccucccaggcugcac

SEQ ID NO: 1229560 - RNA, 20 nt, Human
cagaaccgacaaaaacucca

SEQ ID NO: 1229561 - RNA, 19 nt, Human
cagagccccggcaccccuc

SEQ ID NO: 1229562 - RNA, 20 nt, Human
cagccccaauuuccugggcu

SEQ ID NO: 1229563 - RNA, 23 nt, Human
cagccccaauuuccugggcucaa

SEQ ID NO: 1229564 - RNA, 24 nt, Human
cagccccaauuuccugggcucaag

SEQ ID NO: 1229565 - RNA, 20 nt, Human
cagccuagaccuuuccauca

SEQ ID NO: 1229566 - RNA, 24 nt, Human
cagcgccgcaggcugagaucccaa

SEQ ID NO: 1229567 - RNA, 22 nt, Human
caggcaagccucccugccucuc

SEQ ID NO: 1229568 - RNA, 18 nt, Human
caggcugcaccccgcgcc

SEQ ID NO: 1229569 - RNA, 19 nt, Human
cagggaggacuuggccaca

SEQ ID NO: 1229570 - RNA, 20 nt, Human
caguggcgcaaucagagcuc

SEQ ID NO: 1229571 - RNA, 22 nt, Human
ccaaaguguugggauuacaggc

SEQ ID NO: 1229572 - RNA, 22 nt, Human
ccaaaguguugggauuacaggc

SEQ ID NO: 1229573 - RNA, 24 nt, Human
ccaaaguguugggauuacaggcgu

SEQ ID NO: 1229574 - RNA, 23 nt, Human
ccacgcccagagccaccugcccc

SEQ ID NO: 1229575 - RNA, 20 nt, Human
cccaaagucacgcugcugcu

SEQ ID NO: 1229576 - RNA, 22 nt, Human
ccccaccgagccggucagggcu

SEQ ID NO: 1229577 - RNA, 21 nt, Human
ccccaugcugaguguggcccc

SEQ ID NO: 1229578 - RNA, 21 nt, Human
ccccgcgcccagagcucaucu

SEQ ID NO: 1229579 - RNA, 24 nt, Human
ccccguauggccaggcugggagga

SEQ ID NO: 1229580 - RNA, 26 nt, Human
ccccucgggggaagagcggacacccc

SEQ ID NO: 1229581 - RNA, 18 nt, Human
cccggcaccccucccgca

SEQ ID NO: 1229582 - RNA, 24 nt, Human
cccucugcagagcuggaccugcag

SEQ ID NO: 1229583 - RNA, 24 nt, Human
ccgccucagccucccaaaguguug

SEQ ID NO: 1229584 - RNA, 26 nt, Human
ccgcgcccagagcucaucuccagaca

SEQ ID NO: 1229585 - RNA, 21 nt, Human
ccucccgcaggagggccugac

SEQ ID NO: 1229586 - RNA, 23 nt, Human
ccucccgccucagccucccaaag

SEQ ID NO: 1229587 - RNA, 22 nt, Human
ccuccugcuuugcagccaggaa

SEQ ID NO: 1229588 - RNA, 18 nt, Human
ccucuccucucucuaucc

SEQ ID NO: 1229589 - RNA, 22 nt, Human
ccucugagcgucgcuccagcuc

SEQ ID NO: 1229590 - RNA, 19 nt, Human
ccuggcacagcacuggcau

SEQ ID NO: 1229591 - RNA, 18 nt, Human
ccuggcuggccaccuccc

SEQ ID NO: 1229592 - RNA, 22 nt, Human
ccugggcucaagugauccuccc

SEQ ID NO: 1229593 - RNA, 21 nt, Human
ccuggggccagccuagaccuu

SEQ ID NO: 1229594 - RNA, 22 nt, Human
ccugggggcugaggcucccucc

SEQ ID NO: 1229595 - RNA, 18 nt, Human
cgacaaaaacuccagguc

SEQ ID NO: 1229596 - RNA, 19 nt, Human
cgaccgccccuccuggcac

SEQ ID NO: 1229597 - RNA, 23 nt, Human
cgcaaucagagcucacugcagcc

SEQ ID NO: 1229598 - RNA, 25 nt, Human
cgcccagagccaccugccccugucc

SEQ ID NO: 1229599 - RNA, 23 nt, Human
cggcaggcguugagcaggccgcu

SEQ ID NO: 1229600 - RNA, 22 nt, Human
cggccaacccgccaccauccgc

SEQ ID NO: 1229601 - RNA, 24 nt, Human
cggcuguuugggucuggcgucugc

SEQ ID NO: 1229602 - RNA, 24 nt, Human
cucaagugauccucccgccucagc

SEQ ID NO: 1229603 - RNA, 24 nt, Human
cucacugcagccccaauuuccugg

SEQ ID NO: 1229604 - RNA, 20 nt, Human
cucagcaccgaccgccccuc

SEQ ID NO: 1229605 - RNA, 19 nt, Human
cucaggcugggugccuggc

SEQ ID NO: 1229606 - RNA, 19 nt, Human
cucccaggcugcaccccgc

SEQ ID NO: 1229607 - RNA, 23 nt, Human
cucccugcagccccucugcagag

SEQ ID NO: 1229608 - RNA, 18 nt, Human
cugcaccccgcgcccaga

SEQ ID NO: 1229609 - RNA, 23 nt, Human
cugcagccccaauuuccugggcu

SEQ ID NO: 1229610 - RNA, 23 nt, Human
cuggacaagugaggaggugcacu

SEQ ID NO: 1229611 - RNA, 20 nt, Human
cuggauggagugcaguggcg

SEQ ID NO: 1229612 - RNA, 23 nt, Human
gaaaucagagccuccuugcuacc

SEQ ID NO: 1229613 - RNA, 21 nt, Human
gacuccuuggggaugaggggu

SEQ ID NO: 1229614 - RNA, 19 nt, Human
gacuggggaggaaaugaca

SEQ ID NO: 1229615 - RNA, 21 nt, Human
gacuucccagggggccugugg

SEQ ID NO: 1229616 - RNA, 19 nt, Human
gagccuccuugcuacccag

SEQ ID NO: 1229617 - RNA, 21 nt, Human
gagcucacagaucagcaauuu

SEQ ID NO: 1229618 - RNA, 22 nt, Human
gaggggucuaggguuuaguccc

SEQ ID NO: 1229619 - RNA, 18 nt, Human
gauuacaggcgugagcca

SEQ ID NO: 1229620 - RNA, 21 nt, Human
gauuacaggcgugagccacua

SEQ ID NO: 1229621 - RNA, 22 nt, Human
gauuacaggcgugagccacuac

SEQ ID NO: 1229622 - RNA, 18 nt, Human
gcacagcacuggcauccc

SEQ ID NO: 1229623 - RNA, 24 nt, Human
gcacuggcauccccugguguucca

SEQ ID NO: 1229624 - RNA, 23 nt, Human
gccagccuagaccuuuccaucau

SEQ ID NO: 1229625 - RNA, 25 nt, Human
gccaggcugggaggauccugggggc

SEQ ID NO: 1229626 - RNA, 19 nt, Human
gcccagagccaccugcccc

SEQ ID NO: 1229627 - RNA, 23 nt, Human
gccucagccucccaaaguguugg

SEQ ID NO: 1229628 - RNA, 22 nt, Human
gccugacuggggaggaaaugac

SEQ ID NO: 1229629 - RNA, 21 nt, Human
gcgucugcuccagccuggcgu

SEQ ID NO: 1229630 - RNA, 19 nt, Human
gcucaagugauccucccgc

SEQ ID NO: 1229631 - RNA, 27 nt, Human
gcuccagcuccuuucaaagacgcuggg

SEQ ID NO: 1229632 - RNA, 25 nt, Human
ggacaagugaggaggugcacuuucc

SEQ ID NO: 1229633 - RNA, 21 nt, Human
ggaccucuggucacggcucag

SEQ ID NO: 1229634 - RNA, 20 nt, Human
ggcagcgccaucauuccucc

SEQ ID NO: 1229635 - RNA, 18 nt, Human
ggcgggaaaugauuaccu

SEQ ID NO: 1229636 - RNA, 25 nt, Human
gggaagcaggccucacucagcaccc

SEQ ID NO: 1229637 - RNA, 22 nt, Human
gggccauaguaacuuuggagga

SEQ ID NO: 1229638 - RNA, 22 nt, Human
gggcucaagugauccucccgcc

SEQ ID NO: 1229639 - RNA, 19 nt, Human
ggggcugaggcucccucca

SEQ ID NO: 1229640 - RNA, 21 nt, Human
ggugccuggcuggccaccucc

SEQ ID NO: 1229641 - RNA, 24 nt, Human
gugauccucccgccucagccuccc

SEQ ID NO: 1229642 - RNA, 24 nt, Human
uaaacacagagacugagagaugag

SEQ ID NO: 1229643 - RNA, 22 nt, Human
uacaccuggucuuuggcuacaa

SEQ ID NO: 1229644 - RNA, 22 nt, Human
uacaggcgugagccacuacacc

SEQ ID NO: 1229645 - RNA, 22 nt, Human
uacaggcgugagccacuacacc

SEQ ID NO: 1229646 - RNA, 23 nt, Human
uacaggcgugagccacuacaccu

SEQ ID NO: 1229647 - RNA, 21 nt, Human
uagcagacucccaggcaagcc

SEQ ID NO: 1229648 - RNA, 24 nt, Human
ucacugcagccccaauuuccuggg

SEQ ID NO: 1229649 - RNA, 21 nt, Human
uccaaggaaacaaaaucaaac

SEQ ID NO: 1229650 - RNA, 24 nt, Human
uccaaggaaacaaaaucaaacacc

SEQ ID NO: 1229651 - RNA, 22 nt, Human
uccacgcccagagccaccugcc

SEQ ID NO: 1229652 - RNA, 24 nt, Human
ucccaaaguguugggauuacaggc

SEQ ID NO: 1229653 - RNA, 19 nt, Human
ucccaggcaagccucccug

SEQ ID NO: 1229654 - RNA, 21 nt, Human
ucccaggcugcaccccgcgcc

SEQ ID NO: 1229655 - RNA, 20 nt, Human
uccucccgccucagccuccc

SEQ ID NO: 1229656 - RNA, 21 nt, Human
uccugggcucaagugauccuc

SEQ ID NO: 1229657 - RNA, 19 nt, Human
ucucaggucaccggcaggc

SEQ ID NO: 1229658 - RNA, 23 nt, Human
ucucauaagaaugugccugauuu

SEQ ID NO: 1229659 - RNA, 22 nt, Human
ucuccucucucuauccucuaca

SEQ ID NO: 1229660 - RNA, 24 nt, Human
ucucuggcucggaccucuggucac

SEQ ID NO: 1229661 - RNA, 21 nt, Human
ucugcagacgcugggcuccuu

SEQ ID NO: 1229662 - RNA, 22 nt, Human
ucugcucgcucguuagccaggg

SEQ ID NO: 1229663 - RNA, 21 nt, Human
ucuggucacggcucaggcugg

SEQ ID NO: 1229664 - RNA, 22 nt, Human
ugacuucccagggggccugugg

SEQ ID NO: 1229665 - RNA, 18 nt, Human
ugagcaggccgcucugca

SEQ ID NO: 1229666 - RNA, 23 nt, Human
ugcaaggugccuccccgagacag

SEQ ID NO: 1229667 - RNA, 21 nt, Human
ugcaguccaagacuccuuggg

SEQ ID NO: 1229668 - RNA, 18 nt, Human
ugccaaaguccccggggg

SEQ ID NO: 1229669 - RNA, 24 nt, Human
ugccugauuugggaagcaggccuc

SEQ ID NO: 1229670 - RNA, 21 nt, Human
ugccuggcuggccaccucccc

SEQ ID NO: 1229671 - RNA, 18 nt, Human
uggagugcaguggcgcaa

SEQ ID NO: 1229672 - RNA, 19 nt, Human
uggagugcaguggcgcaau

SEQ ID NO: 1229673 - RNA, 21 nt, Human
uggagugcaguggcgcaauca

SEQ ID NO: 1229674 - RNA, 19 nt, Human
uggcauccccugguguucc

SEQ ID NO: 1229675 - RNA, 20 nt, Human
uggccuuguuuguuuucugc

SEQ ID NO: 1229676 - RNA, 24 nt, Human
uggcgcaaucagagcucacugcag

SEQ ID NO: 1229677 - RNA, 20 nt, Human
ugggaggauccugggggcug

SEQ ID NO: 1229678 - RNA, 20 nt, Human
ugggaggauccugggggcug

SEQ ID NO: 1229679 - RNA, 18 nt, Human
ugggauuacaggcgugag

SEQ ID NO: 1229680 - RNA, 19 nt, Human
ugggauuacaggcgugagc

SEQ ID NO: 1229681 - RNA, 21 nt, Human
ugggauuacaggcgugagcca

SEQ ID NO: 1229682 - RNA, 22 nt, Human
ugggauuacaggcgugagccac

SEQ ID NO: 1229683 - RNA, 22 nt, Human
ugggauuacaggcgugagccac

SEQ ID NO: 1229684 - RNA, 23 nt, Human
ugggauuacaggcgugagccacu

SEQ ID NO: 1229685 - RNA, 24 nt, Human
ugggauuacaggcgugagccacua

SEQ ID NO: 1229686 - RNA, 24 nt, Human
ugggauuacaggcgugagccacua

SEQ ID NO: 1229687 - RNA, 18 nt, Human
ugggcccuggaugcuccc

SEQ ID NO: 1229688 - RNA, 20 nt, Human
ugggcccuggaugcucccug

SEQ ID NO: 1229689 - RNA, 24 nt, Human
ugggcucaagugauccucccgccu

SEQ ID NO: 1229690 - RNA, 24 nt, Human
uggucccagggccucugcucgcuc

SEQ ID NO: 1229691 - RNA, 23 nt, Human
uuccaugguuuugguagcagacu

SEQ ID NO: 1229692 - RNA, 25 nt, Human
uuccugggcucaagugauccucccg

SEQ ID NO: 1229693 - RNA, 24 nt, Human
uuuccugggcucaagugauccucc

SEQ ID NO: 1229694 - RNA, 19 nt, Human
uuugcacaaccgcagcggc

SEQ ID NO: 1229695 - RNA, 20 nt, Human
aaaacuauacaucaauagua

SEQ ID NO: 1229696 - RNA, 19 nt, Human
aaaauccagacacaaaacc

SEQ ID NO: 1229697 - RNA, 24 nt, Human
aaacaagacaagagcuucuuccac

SEQ ID NO: 1229698 - RNA, 21 nt, Human
aaacaccagaaaaucaaacag

SEQ ID NO: 1229699 - RNA, 23 nt, Human
aacaugcaugucauugaaaacac

SEQ ID NO: 1229700 - RNA, 22 nt, Human
aaccacacagggucagacgcaa

SEQ ID NO: 1229701 - RNA, 22 nt, Human
aacuuacucacaugcuuaaaga

SEQ ID NO: 1229702 - RNA, 20 nt, Human
aagcgcagccagcgugagcc

SEQ ID NO: 1229703 - RNA, 24 nt, Human
aauuucugacagccauggcagcuu

SEQ ID NO: 1229704 - RNA, 21 nt, Human
acaccagaaaaucaaacagac

SEQ ID NO: 1229705 - RNA, 20 nt, Human
accaugccgacacggagccc

SEQ ID NO: 1229706 - RNA, 21 nt, Human
acugcucugaaauaaggaaau

SEQ ID NO: 1229707 - RNA, 25 nt, Human
agaaauucaaagccaauuauuagcc

SEQ ID NO: 1229708 - RNA, 20 nt, Human
agaacagccaauccagaaag

SEQ ID NO: 1229709 - RNA, 19 nt, Human
agacgaacgcauguacugc

SEQ ID NO: 1229710 - RNA, 23 nt, Human
agacgcaaacacaggggaugauc

SEQ ID NO: 1229711 - RNA, 23 nt, Human
agccaguggcugaugccuacaca

SEQ ID NO: 1229712 - RNA, 18 nt, Human
agcugccugguggacagc

SEQ ID NO: 1229713 - RNA, 21 nt, Human
caaaaagccccaauuucugaa

SEQ ID NO: 1229714 - RNA, 24 nt, Human
caaagcacugagaaguccaacaug

SEQ ID NO: 1229715 - RNA, 26 nt, Human
caaccaccaagguugaaggaaacagc

SEQ ID NO: 1229716 - RNA, 23 nt, Human
caagagcuucuuccacuucugcu

SEQ ID NO: 1229717 - RNA, 24 nt, Human
cacaacaccuaggcagaacaugga

SEQ ID NO: 1229718 - RNA, 20 nt, Human
cacagagaaauucaaagcca

SEQ ID NO: 1229719 - RNA, 20 nt, Human
caccagaaaaucaaacagac

SEQ ID NO: 1229720 - RNA, 24 nt, Human
caccagaaaaucaaacagacgaau

SEQ ID NO: 1229721 - RNA, 20 nt, Human
caccaugccgacacggagcc

SEQ ID NO: 1229722 - RNA, 20 nt, Human
cacugcugaggacacuaccc

SEQ ID NO: 1229723 - RNA, 18 nt, Human
cagcagccagcagccugg

SEQ ID NO: 1229724 - RNA, 19 nt, Human
cagcagccagcagccuggc

SEQ ID NO: 1229725 - RNA, 21 nt, Human
cagcagccagcagccuggcag

SEQ ID NO: 1229726 - RNA, 20 nt, Human
cagccauggcagcuuucccu

SEQ ID NO: 1229727 - RNA, 20 nt, Human
cauacugcugcaacagcaug

SEQ ID NO: 1229728 - RNA, 26 nt, Human
cauagcacuaaaaugagagcuuccca

SEQ ID NO: 1229729 - RNA, 22 nt, Human
cauguaaagccccagaucacuc

SEQ ID NO: 1229730 - RNA, 18 nt, Human
ccagaaaguagccgccug

SEQ ID NO: 1229731 - RNA, 22 nt, Human
ccaugccgacacggagcccugc

SEQ ID NO: 1229732 - RNA, 19 nt, Human
cccacuccaucaagggaau

SEQ ID NO: 1229733 - RNA, 22 nt, Human
cccagaucacucgggcaccugc

SEQ ID NO: 1229734 - RNA, 19 nt, Human
cccgugcaaccaccaaggu

SEQ ID NO: 1229735 - RNA, 21 nt, Human
cccgugcaaccaccaagguug

SEQ ID NO: 1229736 - RNA, 25 nt, Human
cccuccaccccuauuuugccaaacc

SEQ ID NO: 1229737 - RNA, 21 nt, Human
cccugcaugguuggagagcuc

SEQ ID NO: 1229738 - RNA, 21 nt, Human
ccuccuucaagcaagcgcagc

SEQ ID NO: 1229739 - RNA, 24 nt, Human
ccuguaaacacaugccuguaugaa

SEQ ID NO: 1229740 - RNA, 19 nt, Human
cgacacggagcccugcaug

SEQ ID NO: 1229741 - RNA, 18 nt, Human
cguggggcuggugagcug

SEQ ID NO: 1229742 - RNA, 19 nt, Human
cuaaagcaaagccucaggc

SEQ ID NO: 1229743 - RNA, 27 nt, Human
cuccaccccuauuuugccaaaccccca

SEQ ID NO: 1229744 - RNA, 20 nt, Human
gaaaaucaaacagacgaaug

SEQ ID NO: 1229745 - RNA, 25 nt, Human
gaacgcauguacugcucugaaauaa

SEQ ID NO: 1229746 - RNA, 21 nt, Human
gaauaaaauccagacacaaaa

SEQ ID NO: 1229747 - RNA, 19 nt, Human
gagagcucugccccucaca

SEQ ID NO: 1229748 - RNA, 18 nt, Human
gcagccagcagccuggca

SEQ ID NO: 1229749 - RNA, 20 nt, Human
gcagcuuucccuccaccccu

SEQ ID NO: 1229750 - RNA, 20 nt, Human
ggacaaaugccaaacaagac

SEQ ID NO: 1229751 - RNA, 18 nt, Human
ggacaguguuuauucauc

SEQ ID NO: 1229752 - RNA, 21 nt, Human
gggcacagagaaauucaaagc

SEQ ID NO: 1229753 - RNA, 25 nt, Human
ggucagacgcaaacacaggggauga

SEQ ID NO: 1229754 - RNA, 20 nt, Human
gguccuaaguagcugcaugu

SEQ ID NO: 1229755 - RNA, 24 nt, Human
guaaacacaugccuguaugaauaa

SEQ ID NO: 1229756 - RNA, 19 nt, Human
gucagacgcaaacacaggg

SEQ ID NO: 1229757 - RNA, 20 nt, Human
gugagcugcugcugcuaucu

SEQ ID NO: 1229758 - RNA, 21 nt, Human
uaaaauccagacacaaaacca

SEQ ID NO: 1229759 - RNA, 26 nt, Human
uaaaauccagacacaaaaccauacug

SEQ ID NO: 1229760 - RNA, 23 nt, Human
uaaacacaugccuguaugaauaa

SEQ ID NO: 1229761 - RNA, 25 nt, Human
uaagaacagccaauccagaaagcua

SEQ ID NO: 1229762 - RNA, 18 nt, Human
uacauagcacuaaaauga

SEQ ID NO: 1229763 - RNA, 22 nt, Human
uagaacccuuaaaucagccucc

SEQ ID NO: 1229764 - RNA, 18 nt, Human
uagcagagaaaccaccac

SEQ ID NO: 1229765 - RNA, 24 nt, Human
ucaaagccaauuauuagccaaaaa

SEQ ID NO: 1229766 - RNA, 19 nt, Human
ucaagggaaugcaaccaca

SEQ ID NO: 1229767 - RNA, 21 nt, Human
ucaauaguaaaagcgaaugag

SEQ ID NO: 1229768 - RNA, 22 nt, Human
ucagacgcaaacacaggggaug

SEQ ID NO: 1229769 - RNA, 21 nt, Human
uccacauguaaagccccagau

SEQ ID NO: 1229770 - RNA, 18 nt, Human
ucccagaaaguagccgcc

SEQ ID NO: 1229771 - RNA, 22 nt, Human
ucccugcuguucuugccacaac

SEQ ID NO: 1229772 - RNA, 21 nt, Human
ucucugcugaacaugcauguc

SEQ ID NO: 1229773 - RNA, 19 nt, Human
ugaaaacaccagaaaauca

SEQ ID NO: 1229774 - RNA, 22 nt, Human
ugaaaacaccagaaaaucaaac

SEQ ID NO: 1229775 - RNA, 24 nt, Human
ugaauaaaauccagacacaaaacc

SEQ ID NO: 1229776 - RNA, 22 nt, Human
ugccacaacaccuaggcagaac

SEQ ID NO: 1229777 - RNA, 24 nt, Human
ugcccucucacugcugaggacacu

SEQ ID NO: 1229778 - RNA, 22 nt, Human
uggaacagaaagauacguuaga

SEQ ID NO: 1229779 - RNA, 19 nt, Human
uguaaacacaugccuguau

SEQ ID NO: 1229780 - RNA, 18 nt, Human
uguggagagaagaauugg

SEQ ID NO: 1229781 - RNA, 24 nt, Human
uguuuauucaucuuucucugcuga

SEQ ID NO: 1229782 - RNA, 21 nt, Human
uugcacugcuaagaacagcca

SEQ ID NO: 1229783 - RNA, 18 nt, Human
accaugggccgggcuggu

SEQ ID NO: 1229784 - RNA, 22 nt, Human
acgcagagccugacaaauggcu

SEQ ID NO: 1229785 - RNA, 19 nt, Human
acggccaucgggucugcaa

SEQ ID NO: 1229786 - RNA, 20 nt, Human
agagcaaggggcccucccuc

SEQ ID NO: 1229787 - RNA, 21 nt, Human
aggcaggcacccccccacccc

SEQ ID NO: 1229788 - RNA, 18 nt, Human
caaugcaggcaggcaccc

SEQ ID NO: 1229789 - RNA, 18 nt, Human
cacccccccaccccaugc

SEQ ID NO: 1229790 - RNA, 22 nt, Human
cacccccccaccccaugcuuua

SEQ ID NO: 1229791 - RNA, 19 nt, Human
cacgcugggggaccauggg

SEQ ID NO: 1229792 - RNA, 21 nt, Human
cagccacauuccccaugcucg

SEQ ID NO: 1229793 - RNA, 25 nt, Human
caggcacccccccaccccaugcuuu

SEQ ID NO: 1229794 - RNA, 21 nt, Human
caggcaggcacccccccaccc

SEQ ID NO: 1229795 - RNA, 22 nt, Human
ccaugcucagcagcggcucaca

SEQ ID NO: 1229796 - RNA, 23 nt, Human
cccccccaccccaugcuuuacgg

SEQ ID NO: 1229797 - RNA, 24 nt, Human
ccucauggcugagcacacagugcc

SEQ ID NO: 1229798 - RNA, 20 nt, Human
cggguccgcaguccacuccu

SEQ ID NO: 1229799 - RNA, 24 nt, Human
cgucuuuuggcgaugguuccuuuc

SEQ ID NO: 1229800 - RNA, 19 nt, Human
cuccuggugcuccuucugg

SEQ ID NO: 1229801 - RNA, 20 nt, Human
cugcaaugcaggcaggcacc

SEQ ID NO: 1229802 - RNA, 24 nt, Human
cugccggggggggacgugcuggag

SEQ ID NO: 1229803 - RNA, 18 nt, Human
gacagcaucugcugcuag

SEQ ID NO: 1229804 - RNA, 19 nt, Human
gaggaggacagggagaagg

SEQ ID NO: 1229805 - RNA, 18 nt, Human
gcugacccuuccuccauc

SEQ ID NO: 1229806 - RNA, 18 nt, Human
ggagaaggcagcauugcu

SEQ ID NO: 1229807 - RNA, 21 nt, Human
ggcagugcgguguagacacuu

SEQ ID NO: 1229808 - RNA, 20 nt, Human
ggcuuuuuccucaacaaucc

SEQ ID NO: 1229809 - RNA, 19 nt, Human
gggagaaggcagcauugcu

SEQ ID NO: 1229810 - RNA, 19 nt, Human
gggcccucccuccacuccu

SEQ ID NO: 1229811 - RNA, 23 nt, Human
gggcccucccuccacugccgggg

SEQ ID NO: 1229812 - RNA, 18 nt, Human
gguccuggcucugcacug

SEQ ID NO: 1229813 - RNA, 24 nt, Human
gguccuggcucugcacugucccug

SEQ ID NO: 1229814 - RNA, 21 nt, Human
uaaacaguacuguguucuaga

SEQ ID NO: 1229815 - RNA, 22 nt, Human
uaggaguugugaggacacguga

SEQ ID NO: 1229816 - RNA, 21 nt, Human
ucgcucagccagugacugugc

SEQ ID NO: 1229817 - RNA, 21 nt, Human
ucugacagcugcaaugcaggc

SEQ ID NO: 1229818 - RNA, 19 nt, Human
ucuggagugacaggcucuc

SEQ ID NO: 1229819 - RNA, 19 nt, Human
ugacaggcucucucuccac

SEQ ID NO: 1229820 - RNA, 20 nt, Human
ugacaguaauaacugauaaa

SEQ ID NO: 1229821 - RNA, 28 nt, Human
ugacaguaauaacugauaagaaaugaaa

SEQ ID NO: 1229822 - RNA, 18 nt, Human
ugagcacacagugccggg

SEQ ID NO: 1229823 - RNA, 21 nt, Human
ugauaagaaaugaaaucacag

SEQ ID NO: 1229824 - RNA, 22 nt, Human
ugcaggcaggcacccccccacc

SEQ ID NO: 1229825 - RNA, 19 nt, Human
ugccaagguguggaacagg

SEQ ID NO: 1229826 - RNA, 18 nt, Human
ugccgggccagguggugc

SEQ ID NO: 1229827 - RNA, 18 nt, Human
ugccggggggggacgugc

SEQ ID NO: 1229828 - RNA, 19 nt, Human
ugcuggagagcgacgggcc

SEQ ID NO: 1229829 - RNA, 20 nt, Human
ugggggaccaugggccgggc

SEQ ID NO: 1229830 - RNA, 24 nt, Human
ugggggaccaugggccgggcuggu

SEQ ID NO: 1229831 - RNA, 18 nt, Human
uggugcuuuugcuggaga

SEQ ID NO: 1229832 - RNA, 20 nt, Human
uguagacacuugagcugugg

SEQ ID NO: 1229833 - RNA, 26 nt, Human
uguagacacuugagcugugggcagga

SEQ ID NO: 1229834 - RNA, 19 nt, Human
uuccucagcgucuuuuggc

SEQ ID NO: 1229835 - RNA, 22 nt, Human
uuuacauucuuuuagaaguguu

SEQ ID NO: 1229836 - RNA, 23 nt, Human
uuuugcuggagagcaaggggccc

SEQ ID NO: 1229837 - RNA, 18 nt, Human
aaaacagcagagagagau

SEQ ID NO: 1229838 - RNA, 18 nt, Human
acagcagagagagaugaa

SEQ ID NO: 1229839 - RNA, 20 nt, Human
agaaaacagcagagagagau

SEQ ID NO: 1229840 - RNA, 19 nt, Human
agagagaaaacagcagaga

SEQ ID NO: 1229841 - RNA, 18 nt, Human
agggaaaccagagagaaa

SEQ ID NO: 1229842 - RNA, 19 nt, Human
caaggacccagaucagagg

SEQ ID NO: 1229843 - RNA, 18 nt, Human
gagaaaacagcagagaga

SEQ ID NO: 1229844 - RNA, 22 nt, Human
ggacccagaucagaggcuggca

SEQ ID NO: 1229845 - RNA, 24 nt, Human
gguaaaagggaaaccagagagaaa

SEQ ID NO: 1229846 - RNA, 24 nt, Human
aaaguucccucacgucugagcaau

SEQ ID NO: 1229847 - RNA, 18 nt, Human
aacagugacuucucaaag

SEQ ID NO: 1229848 - RNA, 25 nt, Human
aaccuguugauaauagaaaaacuuu

SEQ ID NO: 1229849 - RNA, 21 nt, Human
aaccuuuucugccauuuuccu

SEQ ID NO: 1229850 - RNA, 24 nt, Human
aaccuuuucugccauuuuccuuuu

SEQ ID NO: 1229851 - RNA, 22 nt, Human
aagcucaccuuuguaacaguuu

SEQ ID NO: 1229852 - RNA, 26 nt, Human
aagucauaaaagaccuauuuauugac

SEQ ID NO: 1229853 - RNA, 21 nt, Human
aagucauagccccuccuacag

SEQ ID NO: 1229854 - RNA, 23 nt, Human
acauugaucuaccaaacacauua

SEQ ID NO: 1229855 - RNA, 19 nt, Human
accuugcccuguccagccc

SEQ ID NO: 1229856 - RNA, 20 nt, Human
acugacuggcuccaaggcuc

SEQ ID NO: 1229857 - RNA, 18 nt, Human
agaaccccuucucuggcc

SEQ ID NO: 1229858 - RNA, 25 nt, Human
agaggcuaaaacgcauaaugacagu

SEQ ID NO: 1229859 - RNA, 19 nt, Human
agagucccugugggcggaa

SEQ ID NO: 1229860 - RNA, 23 nt, Human
agcagcuguuugauuucugaguu

SEQ ID NO: 1229861 - RNA, 21 nt, Human
agccuuuggcacaauagguuu

SEQ ID NO: 1229862 - RNA, 24 nt, Human
aggaggcuggcggcuguccugggc

SEQ ID NO: 1229863 - RNA, 24 nt, Human
aggcauggggaguuuugaagcuuc

SEQ ID NO: 1229864 - RNA, 21 nt, Human
aggcuggcggcuguccugggc

SEQ ID NO: 1229865 - RNA, 21 nt, Human
agggauggacuuucuggucgu

SEQ ID NO: 1229866 - RNA, 18 nt, Human
agugguauaugaaaguuc

SEQ ID NO: 1229867 - RNA, 30 nt, Human
auaagaacaacaucuuuauugaaaaacauu

SEQ ID NO: 1229868 - RNA, 20 nt, Human
aucaguucuucauuuucuuu

SEQ ID NO: 1229869 - RNA, 18 nt, Human
augcuucaaacaaaaacc

SEQ ID NO: 1229870 - RNA, 21 nt, Human
auggagugugcauaaagcucc

SEQ ID NO: 1229871 - RNA, 22 nt, Human
auguauccguugucaaaaccug

SEQ ID NO: 1229872 - RNA, 20 nt, Human
auuucagcauuccauuuuua

SEQ ID NO: 1229873 - RNA, 22 nt, Human
caaaaauaaagcccacagcuaa

SEQ ID NO: 1229874 - RNA, 20 nt, Human
caaacaaaaaccaauuuaga

SEQ ID NO: 1229875 - RNA, 21 nt, Human
caaauguggcaucuaaugaac

SEQ ID NO: 1229876 - RNA, 19 nt, Human
caagugaaucagacggcuu

SEQ ID NO: 1229877 - RNA, 19 nt, Human
caccagagucccugugggc

SEQ ID NO: 1229878 - RNA, 22 nt, Human
caccagagucccugugggcgga

SEQ ID NO: 1229879 - RNA, 19 nt, Human
cacugugugugcugcagac

SEQ ID NO: 1229880 - RNA, 23 nt, Human
cagacaccuucaccugcaguuuu

SEQ ID NO: 1229881 - RNA, 22 nt, Human
cagacucauuucugaaggugau

SEQ ID NO: 1229882 - RNA, 25 nt, Human
caggcaggauaaauuccugcacccc

SEQ ID NO: 1229883 - RNA, 21 nt, Human
cagggcugucagcccugcucu

SEQ ID NO: 1229884 - RNA, 19 nt, Human
caguaccuugcccugucca

SEQ ID NO: 1229885 - RNA, 23 nt, Human
caugcuucaaacaaaaaccaauu

SEQ ID NO: 1229886 - RNA, 21 nt, Human
cauuccuuauucuuaucccag

SEQ ID NO: 1229887 - RNA, 22 nt, Human
ccauggcccucuuuccuccugu

SEQ ID NO: 1229888 - RNA, 23 nt, Human
ccauugccgaaauccacauugau

SEQ ID NO: 1229889 - RNA, 20 nt, Human
ccccacgccagugacaccag

SEQ ID NO: 1229890 - RNA, 21 nt, Human
ccccuaaguaggucauuauug

SEQ ID NO: 1229891 - RNA, 20 nt, Human
ccccuucccgccaccucugc

SEQ ID NO: 1229892 - RNA, 21 nt, Human
cccucagucaagugaaucaga

SEQ ID NO: 1229893 - RNA, 24 nt, Human
cccuccuacaguucugucuuccuu

SEQ ID NO: 1229894 - RNA, 18 nt, Human
cccuguccagccccaccu

SEQ ID NO: 1229895 - RNA, 18 nt, Human
ccuaaaccucuccucgga

SEQ ID NO: 1229896 - RNA, 22 nt, Human
ccucccagugguauaugaaagu

SEQ ID NO: 1229897 - RNA, 24 nt, Human
ccugcucgccucccuauagccuaa

SEQ ID NO: 1229898 - RNA, 19 nt, Human
ccugugggcggaacccagg

SEQ ID NO: 1229899 - RNA, 18 nt, Human
cgggacuggcagagaaaa

SEQ ID NO: 1229900 - RNA, 24 nt, Human
cugaagaggcuaaaacgcauaaug

SEQ ID NO: 1229901 - RNA, 19 nt, Human
cugacuggcuccaaggcuc

SEQ ID NO: 1229902 - RNA, 22 nt, Human
cugcagcuccuuuccaggcacg

SEQ ID NO: 1229903 - RNA, 18 nt, Human
cugcaucauucucuuaca

SEQ ID NO: 1229904 - RNA, 22 nt, Human
cugcaucauucucuuacaguca

SEQ ID NO: 1229905 - RNA, 23 nt, Human
cuggcaaaaauaaagcccacagc

SEQ ID NO: 1229906 - RNA, 20 nt, Human
cuggcccucaccugcucgcc

SEQ ID NO: 1229907 - RNA, 26 nt, Human
cugucagcccugcucuggaaggguug

SEQ ID NO: 1229908 - RNA, 21 nt, Human
cuguuuuccaaaacaacugug

SEQ ID NO: 1229909 - RNA, 21 nt, Human
cuuccuuguuuucuuugaggg

SEQ ID NO: 1229910 - RNA, 20 nt, Human
cuucucaucuguggaagagu

SEQ ID NO: 1229911 - RNA, 19 nt, Human
cuuugcacugacuggcucc

SEQ ID NO: 1229912 - RNA, 18 nt, Human
gaacccaggcauggggag

SEQ ID NO: 1229913 - RNA, 20 nt, Human
gacaccuucaccugcaguuu

SEQ ID NO: 1229914 - RNA, 20 nt, Human
gagaaccccuucucuggccc

SEQ ID NO: 1229915 - RNA, 22 nt, Human
gagaaccccuucucuggcccuc

SEQ ID NO: 1229916 - RNA, 18 nt, Human
gagugugcauaaagcucc

SEQ ID NO: 1229917 - RNA, 20 nt, Human
gauaguaucuuuuauacagu

SEQ ID NO: 1229918 - RNA, 21 nt, Human
gauggagcccggcugugccau

SEQ ID NO: 1229919 - RNA, 19 nt, Human
gccuagucuuaauuuaauu

SEQ ID NO: 1229920 - RNA, 21 nt, Human
gcuacaacauguuauuuaucc

SEQ ID NO: 1229921 - RNA, 23 nt, Human
gcucugagcagaugggacacucu

SEQ ID NO: 1229922 - RNA, 26 nt, Human
ggcucccauggcccucuuuccuccuu

SEQ ID NO: 1229923 - RNA, 18 nt, Human
gggaaaauguaauccugg

SEQ ID NO: 1229924 - RNA, 20 nt, Human
gggaagcugugugugcagcc

SEQ ID NO: 1229925 - RNA, 21 nt, Human
gucuuccuuguuuucuuugag

SEQ ID NO: 1229926 - RNA, 21 nt, Human
gucuuucuccagcuuuccccu

SEQ ID NO: 1229927 - RNA, 21 nt, Human
gugaaccucugggcuccuuuu

SEQ ID NO: 1229928 - RNA, 23 nt, Human
gugaaucagacggcuuuuuggug

SEQ ID NO: 1229929 - RNA, 23 nt, Human
gugcugcagacaccuucaccugc

SEQ ID NO: 1229930 - RNA, 21 nt, Human
uaggaguuucuacuuucagac

SEQ ID NO: 1229931 - RNA, 24 nt, Human
uaggaguuucuacuuucagacugg

SEQ ID NO: 1229932 - RNA, 23 nt, Human
uaggggaaaauguaauccuggga

SEQ ID NO: 1229933 - RNA, 21 nt, Human
uaucuaaacuuguaugugaaa

SEQ ID NO: 1229934 - RNA, 21 nt, Human
uauuuucuugugauaguuuua

SEQ ID NO: 1229935 - RNA, 20 nt, Human
ucacagucaaauguggcauc

SEQ ID NO: 1229936 - RNA, 24 nt, Human
ucacucugcuucucaucuguggaa

SEQ ID NO: 1229937 - RNA, 19 nt, Human
ucagacuguuuuccaaaac

SEQ ID NO: 1229938 - RNA, 23 nt, Human
uccauuuuuacaaaaauaggagu

SEQ ID NO: 1229939 - RNA, 21 nt, Human
ucccauagaaucaccugcagg

SEQ ID NO: 1229940 - RNA, 21 nt, Human
uccucuggccuccagggaaag

SEQ ID NO: 1229941 - RNA, 24 nt, Human
uccugggcacacgcugugaaccuc

SEQ ID NO: 1229942 - RNA, 26 nt, Human
uccugggcacacgcugugaaccucug

SEQ ID NO: 1229943 - RNA, 21 nt, Human
uccuuguuuucuuugagggcc

SEQ ID NO: 1229944 - RNA, 24 nt, Human
uccuuuuggcucugagcagauggg

SEQ ID NO: 1229945 - RNA, 18 nt, Human
ucucuggcccucaccugc

SEQ ID NO: 1229946 - RNA, 21 nt, Human
ucugacuuccucuggccucca

SEQ ID NO: 1229947 - RNA, 23 nt, Human
ucugagugacugacaguugauuu

SEQ ID NO: 1229948 - RNA, 19 nt, Human
ucugucccgcagcauguua

SEQ ID NO: 1229949 - RNA, 24 nt, Human
ucuuaucccagaucugcuuugcag

SEQ ID NO: 1229950 - RNA, 19 nt, Human
ugaaaugaacagugacuuc

SEQ ID NO: 1229951 - RNA, 24 nt, Human
ugaagaaaccucauuucugaagag

SEQ ID NO: 1229952 - RNA, 24 nt, Human
ugaagucauagccccuccuacagu

SEQ ID NO: 1229953 - RNA, 18 nt, Human
ugacuuauuucagcauuc

SEQ ID NO: 1229954 - RNA, 19 nt, Human
ugagugacugacaguugau

SEQ ID NO: 1229955 - RNA, 23 nt, Human
ugccugugugauggagcccggcu

SEQ ID NO: 1229956 - RNA, 21 nt, Human
ugcuuaguguaaagaacaguu

SEQ ID NO: 1229957 - RNA, 20 nt, Human
uggaaggguugugggggacc

SEQ ID NO: 1229958 - RNA, 20 nt, Human
uggcaaaaauaaagcccaca

SEQ ID NO: 1229959 - RNA, 19 nt, Human
uggcagcauccaaauuaac

SEQ ID NO: 1229960 - RNA, 24 nt, Human
uggcauuuuguauuccucccagug

SEQ ID NO: 1229961 - RNA, 24 nt, Human
uggcccucuuuccuccugucuuuc

SEQ ID NO: 1229962 - RNA, 21 nt, Human
ugggauugagcuggcugucag

SEQ ID NO: 1229963 - RNA, 21 nt, Human
uggggaccccaguuugagaac

SEQ ID NO: 1229964 - RNA, 23 nt, Human
uguccucaccugcagcuccuuuc

SEQ ID NO: 1229965 - RNA, 21 nt, Human
ugugcauaaagcucccacaga

SEQ ID NO: 1229966 - RNA, 21 nt, Human
uguggaagaguuuucagacug

SEQ ID NO: 1229967 - RNA, 20 nt, Human
uuaaauuccgggacuggcag

SEQ ID NO: 1229968 - RNA, 24 nt, Human
uucccaggccauuccacuggggac

SEQ ID NO: 1229969 - RNA, 21 nt, Human
uugacauuuuuuucuggauua

SEQ ID NO: 1229970 - RNA, 22 nt, Human
uugggcaagauucauuuucugu

SEQ ID NO: 1229971 - RNA, 23 nt, Human
uuucugugugucaaauucagauu

SEQ ID NO: 1229972 - RNA, 24 nt, Human
uuuuauggcuacaacauguuauuu

SEQ ID NO: 1229973 - RNA, 24 nt, Human
uuuugacaacuucaacaguaguug

SEQ ID NO: 1229974 - RNA, 18 nt, Human
aagcaggagaaucgcuug

SEQ ID NO: 1229975 - RNA, 23 nt, Human
aagcaggagaaucgcuugaacca

SEQ ID NO: 1229976 - RNA, 24 nt, Human
aggcugaagcaggagaaucgcuug

SEQ ID NO: 1229977 - RNA, 22 nt, Human
aucggcuacccuccguccccag

SEQ ID NO: 1229978 - RNA, 20 nt, Human
caucuguaaucccaacuacu

SEQ ID NO: 1229979 - RNA, 24 nt, Human
caucuguaaucccaacuacucagg

SEQ ID NO: 1229980 - RNA, 22 nt, Human
ccugcacuaagaaccagcaaau

SEQ ID NO: 1229981 - RNA, 25 nt, Human
cgcuugaaccaugcuuggguucugu

SEQ ID NO: 1229982 - RNA, 21 nt, Human
cuaagaaccagcaaauuugcu

SEQ ID NO: 1229983 - RNA, 19 nt, Human
cuugaaccaugcuuggguu

SEQ ID NO: 1229984 - RNA, 23 nt, Human
gcucagggccccaucggcuaccc

SEQ ID NO: 1229985 - RNA, 23 nt, Human
gguggcgggcaucuguaauccca

SEQ ID NO: 1229986 - RNA, 21 nt, Human
uaagaaccagcaaauuugcua

SEQ ID NO: 1229987 - RNA, 19 nt, Human
uccugcacuaagaaccagc

SEQ ID NO: 1229988 - RNA, 24 nt, Human
ucuguggucaaguccagaagaggc

SEQ ID NO: 1229989 - RNA, 28 nt, Human
ugaaccaugcuuggguucuguggucaag

SEQ ID NO: 1229990 - RNA, 20 nt, Human
ugaagcaggagaaucgcuug

SEQ ID NO: 1229991 - RNA, 24 nt, Human
ugaagcaggagaaucgcuugaacc

SEQ ID NO: 1229992 - RNA, 22 nt, Human
aagaacaggaaggcaaaaacgc

SEQ ID NO: 1229993 - RNA, 31 nt, Human
acuuuaaauaaacacaauucuagagaagaag

SEQ ID NO: 1229994 - RNA, 25 nt, Human
aggaggagacaauguuuaugugcaa

SEQ ID NO: 1229995 - RNA, 21 nt, Human
augcccuccacacuggugccu

SEQ ID NO: 1229996 - RNA, 24 nt, Human
cacagccuguacuuccccucacgc

SEQ ID NO: 1229997 - RNA, 20 nt, Human
cagaaaagggucagaucuga

SEQ ID NO: 1229998 - RNA, 22 nt, Human
ccagagaaucagaaaaggguca

SEQ ID NO: 1229999 - RNA, 18 nt, Human
cccaggaggagacaaugu

SEQ ID NO: 1230000 - RNA, 20 nt, Human
ccuguacuuccccucacgca

SEQ ID NO: 1230001 - RNA, 20 nt, Human
cugagaauaguaauucuuuc

SEQ ID NO: 1230002 - RNA, 19 nt, Human
cuguacuuccccucacgca

SEQ ID NO: 1230003 - RNA, 20 nt, Human
gaccuggccacagacacacu

SEQ ID NO: 1230004 - RNA, 21 nt, Human
gagggggagcuccccauggag

SEQ ID NO: 1230005 - RNA, 22 nt, Human
gcugcagugugagcuccagucc

SEQ ID NO: 1230006 - RNA, 21 nt, Human
uaaacacaauucuagagaaga

SEQ ID NO: 1230007 - RNA, 24 nt, Human
uacuuccccucacgcagaacagcc

SEQ ID NO: 1230008 - RNA, 21 nt, Human
uccccucacgcagaacagccc

SEQ ID NO: 1230009 - RNA, 21 nt, Human
ugagaauaguaauucuuuccu

SEQ ID NO: 1230010 - RNA, 20 nt, Human
ugauugcgguggaaagaaca

SEQ ID NO: 1230011 - RNA, 19 nt, Human
ugcccuccacacuggugcc

SEQ ID NO: 1230012 - RNA, 19 nt, Human
ugcccuccacacuggugcc

SEQ ID NO: 1230013 - RNA, 20 nt, Human
ugcgaugcccuccacacugg

SEQ ID NO: 1230014 - RNA, 22 nt, Human
uggaaagaacaauggccagaga

SEQ ID NO: 1230015 - RNA, 21 nt, Human
uggccauggacacacuggacc

SEQ ID NO: 1230016 - RNA, 24 nt, Human
ugguacuacugagaauaguaauuc

SEQ ID NO: 1230017 - RNA, 23 nt, Human
ugugcaagcuuagaaugguggua

SEQ ID NO: 1230018 - RNA, 25 nt, Human
uuaaauaaacacaauucuagagaag

SEQ ID NO: 1230019 - RNA, 21 nt, Human
uuucauguuugauugcggugg

SEQ ID NO: 1230020 - RNA, 25 nt, Human
uaguuggggcauugggaaagaauuu

SEQ ID NO: 1230021 - RNA, 21 nt, Human
ugggagaggaaggugcuggag

SEQ ID NO: 1230022 - RNA, 21 nt, Human
uggggcauugggaaagaauuu

SEQ ID NO: 1230023 - RNA, 21 nt, Human
uuaguuggggcauugggaaag

SEQ ID NO: 1230024 - RNA, 20 nt, Human
acagacccuggcuguguggc

SEQ ID NO: 1230025 - RNA, 22 nt, Human
agaccagacagcaggacauggg

SEQ ID NO: 1230026 - RNA, 18 nt, Human
cacccaccggugagacca

SEQ ID NO: 1230027 - RNA, 22 nt, Human
cagacccuggcuguguggccuu

SEQ ID NO: 1230028 - RNA, 21 nt, Human
ccccacucgacauaccuuccc

SEQ ID NO: 1230029 - RNA, 27 nt, Human
ccuggagcacccaccggugagaccaga

SEQ ID NO: 1230030 - RNA, 23 nt, Human
cuggagcacccaccggugagacc

SEQ ID NO: 1230031 - RNA, 23 nt, Human
gacccuggcuguguggccuuggg

SEQ ID NO: 1230032 - RNA, 19 nt, Human
gcagcuggaggccaggggc

SEQ ID NO: 1230033 - RNA, 21 nt, Human
uccuaggaucacaccuggucc

SEQ ID NO: 1230034 - RNA, 23 nt, Human
ucugcaccgcauggucucaaggg

SEQ ID NO: 1230035 - RNA, 19 nt, Human
ugagaccagacagcaggac

SEQ ID NO: 1230036 - RNA, 23 nt, Human
ugagaccagacagcaggacaugg

SEQ ID NO: 1230037 - RNA, 19 nt, Human
ugccuggagcacccaccgg

SEQ ID NO: 1230038 - RNA, 18 nt, Human
uggagcacccaccgguga

SEQ ID NO: 1230039 - RNA, 22 nt, Human
ugggaagcugguaccacaggcu

SEQ ID NO: 1230040 - RNA, 24 nt, Human
gcucguggugggccagcagcuugg

SEQ ID NO: 1230041 - RNA, 19 nt, Human
ugggccagcagcuuggcug

SEQ ID NO: 1230042 - RNA, 24 nt, Human
aaacgacagacagcuucucuccua

SEQ ID NO: 1230043 - RNA, 18 nt, Human
aagguauuuucauccuuc

SEQ ID NO: 1230044 - RNA, 29 nt, Human
acagcuucucuccuagggcuggggaccaa

SEQ ID NO: 1230045 - RNA, 18 nt, Human
agggcuggggaccagcug

SEQ ID NO: 1230046 - RNA, 25 nt, Human
caaacgacagacagcuucucuccua

SEQ ID NO: 1230047 - RNA, 19 nt, Human
caccuccaggugcccuugc

SEQ ID NO: 1230048 - RNA, 21 nt, Human
cacgcagacagagccuaccgc

SEQ ID NO: 1230049 - RNA, 19 nt, Human
cccuugccacauggagagu

SEQ ID NO: 1230050 - RNA, 20 nt, Human
cuaccgcuucuucugccagg

SEQ ID NO: 1230051 - RNA, 20 nt, Human
cucccaccuccaggugcccu

SEQ ID NO: 1230052 - RNA, 18 nt, Human
cuccugcccucccaccuc

SEQ ID NO: 1230053 - RNA, 19 nt, Human
cugcccucccaccuccagg

SEQ ID NO: 1230054 - RNA, 22 nt, Human
gacgcuccugcccucccaccuc

SEQ ID NO: 1230055 - RNA, 21 nt, Human
gcuccugcccucccaccucca

SEQ ID NO: 1230056 - RNA, 18 nt, Human
ucucuccuagggcugggg

SEQ ID NO: 1230057 - RNA, 22 nt, Human
ugccagggcaagacgacgcucc

SEQ ID NO: 1230058 - RNA, 25 nt, Human
uuuucaguucuccucucugcacucc

SEQ ID NO: 1230059 - RNA, 27 nt, Human
aaacuacuaaucaaaguuaaucacuug

SEQ ID NO: 1230060 - RNA, 19 nt, Human
aaagcagcugaaacaggca

SEQ ID NO: 1230061 - RNA, 25 nt, Human
aagagcugccagcccuuggccagug

SEQ ID NO: 1230062 - RNA, 21 nt, Human
aaguagucagcaagggcagag

SEQ ID NO: 1230063 - RNA, 19 nt, Human
aaucacuugcacacacuua

SEQ ID NO: 1230064 - RNA, 22 nt, Human
acagcagugggaagagcagggc

SEQ ID NO: 1230065 - RNA, 20 nt, Human
acaugguguuuuguccaucc

SEQ ID NO: 1230066 - RNA, 23 nt, Human
accacagacacugcugaccucug

SEQ ID NO: 1230067 - RNA, 21 nt, Human
agaagagcacauuccagaaaa

SEQ ID NO: 1230068 - RNA, 19 nt, Human
agacacugcugaccucuga

SEQ ID NO: 1230069 - RNA, 18 nt, Human
agagcagggcgccuuagg

SEQ ID NO: 1230070 - RNA, 24 nt, Human
agcacugccuccuaucugccaucu

SEQ ID NO: 1230071 - RNA, 18 nt, Human
agcugccagcccuuggcc

SEQ ID NO: 1230072 - RNA, 25 nt, Human
agugacaguggugccuccugcagcu

SEQ ID NO: 1230073 - RNA, 21 nt, Human
auaguucuuggagcacaacag

SEQ ID NO: 1230074 - RNA, 21 nt, Human
auccuacaccacagacacugc

SEQ ID NO: 1230075 - RNA, 21 nt, Human
aucuuccccugaucucaacaa

SEQ ID NO: 1230076 - RNA, 22 nt, Human
augcagcucuguggagauggga

SEQ ID NO: 1230077 - RNA, 23 nt, Human
augguguuuuguccauccaugug

SEQ ID NO: 1230078 - RNA, 19 nt, Human
cacagacacugcugaccuc

SEQ ID NO: 1230079 - RNA, 21 nt, Human
cagggacagcagugggaagag

SEQ ID NO: 1230080 - RNA, 24 nt, Human
ccagaaaaguagucagcaagggca

SEQ ID NO: 1230081 - RNA, 22 nt, Human
ccagaagagcacauuccagaaa

SEQ ID NO: 1230082 - RNA, 20 nt, Human
ccagcccuuggccagugaca

SEQ ID NO: 1230083 - RNA, 27 nt, Human
ccagugacaguggugccuccugcagcu

SEQ ID NO: 1230084 - RNA, 24 nt, Human
ccgcaacggacucugcccuccucg

SEQ ID NO: 1230085 - RNA, 20 nt, Human
ccgcugcgggugggccuccg

SEQ ID NO: 1230086 - RNA, 27 nt, Human
ccuccuaucugccaucuuccccugauc

SEQ ID NO: 1230087 - RNA, 21 nt, Human
ccuccugcagcucccgccaca

SEQ ID NO: 1230088 - RNA, 22 nt, Human
ccucgugcaggccggaggcccc

SEQ ID NO: 1230089 - RNA, 23 nt, Human
ccugggcgcgcggcgcucggucc

SEQ ID NO: 1230090 - RNA, 19 nt, Human
cgcucgguccuucacguga

SEQ ID NO: 1230091 - RNA, 21 nt, Human
cggcagccgcaacggacucug

SEQ ID NO: 1230092 - RNA, 20 nt, Human
cgugcaggccggaggccccg

SEQ ID NO: 1230093 - RNA, 18 nt, Human
cuacacauuagcacugcc

SEQ ID NO: 1230094 - RNA, 18 nt, Human
cuccagcgcacccugggc

SEQ ID NO: 1230095 - RNA, 19 nt, Human
cucccgccacaggaauggg

SEQ ID NO: 1230096 - RNA, 20 nt, Human
cucuugagaaaggacaaaua

SEQ ID NO: 1230097 - RNA, 20 nt, Human
cugaccucugaccuacuauc

SEQ ID NO: 1230098 - RNA, 24 nt, Human
gaggauccugcuuagucccgaugc

SEQ ID NO: 1230099 - RNA, 19 nt, Human
gcgggcgcggcgagcgggg

SEQ ID NO: 1230100 - RNA, 24 nt, Human
ggaggcagaaugggguccuugggg

SEQ ID NO: 1230101 - RNA, 23 nt, Human
ggccccgccugggcgcgcggcgc

SEQ ID NO: 1230102 - RNA, 19 nt, Human
guccuuggggagucucugu

SEQ ID NO: 1230103 - RNA, 20 nt, Human
uacaccacagacacugcuga

SEQ ID NO: 1230104 - RNA, 25 nt, Human
uagaauagaaggaugccuuccuccc

SEQ ID NO: 1230105 - RNA, 24 nt, Human
uauguuccuaugauaguucuugga

SEQ ID NO: 1230106 - RNA, 20 nt, Human
ucagcaagggcagaggccca

SEQ ID NO: 1230107 - RNA, 19 nt, Human
ucauuguaaagaguugaaa

SEQ ID NO: 1230108 - RNA, 18 nt, Human
uccuaucugccaucuucc

SEQ ID NO: 1230109 - RNA, 21 nt, Human
ucucacuuccagaagagcaca

SEQ ID NO: 1230110 - RNA, 22 nt, Human
ucuucuuucaaaggauccguga

SEQ ID NO: 1230111 - RNA, 21 nt, Human
ugagaaaggacaaauauucua

SEQ ID NO: 1230112 - RNA, 23 nt, Human
ugagaaaggacaaauauucuagg

SEQ ID NO: 1230113 - RNA, 20 nt, Human
ugcacacacuuaaacacacu

SEQ ID NO: 1230114 - RNA, 20 nt, Human
ugccaaggagcguggcugcc

SEQ ID NO: 1230115 - RNA, 22 nt, Human
ugccaaggagcguggcugcccc

SEQ ID NO: 1230116 - RNA, 21 nt, Human
ugccaaggagcguggcugccg

SEQ ID NO: 1230117 - RNA, 23 nt, Human
ugcuccagcgcacccugggccag

SEQ ID NO: 1230118 - RNA, 19 nt, Human
ugggaagagcagggcgccu

SEQ ID NO: 1230119 - RNA, 20 nt, Human
uggugccccggacaggcaga

SEQ ID NO: 1230120 - RNA, 24 nt, Human
uggugcuccagcgcacccugggcc

SEQ ID NO: 1230121 - RNA, 18 nt, Human
uguggagaugggauuaca

SEQ ID NO: 1230122 - RNA, 27 nt, Human
uuaguccaggccaauccacacagggca

SEQ ID NO: 1230123 - RNA, 22 nt, Human
uucccacccaagaucccagacu

SEQ ID NO: 1230124 - RNA, 26 nt, Human
uuggccagugacaguggugccuccuu

SEQ ID NO: 1230125 - RNA, 20 nt, Human
aaacuaaggcaaaacuaaug

SEQ ID NO: 1230126 - RNA, 23 nt, Human
aaagaaaaggcaaggcaacaaaa

SEQ ID NO: 1230127 - RNA, 20 nt, Human
aaagcucuuccacaucuucc

SEQ ID NO: 1230128 - RNA, 23 nt, Human
aaagcucuuccacaucuuccuuc

SEQ ID NO: 1230129 - RNA, 25 nt, Human
aaagcucuuccacaucuuccuucuc

SEQ ID NO: 1230130 - RNA, 26 nt, Human
aagacagcacacugagaguuaaaaua

SEQ ID NO: 1230131 - RNA, 18 nt, Human
aaggcaaggcaacaaaaa

SEQ ID NO: 1230132 - RNA, 19 nt, Human
aaguaccuccuuaguucau

SEQ ID NO: 1230133 - RNA, 24 nt, Human
aaguaguaagugaaauugcaaagc

SEQ ID NO: 1230134 - RNA, 21 nt, Human
aaugccauuugagaaaguuau

SEQ ID NO: 1230135 - RNA, 20 nt, Human
accaauauacaaaguacaua

SEQ ID NO: 1230136 - RNA, 21 nt, Human
agaaaaggcaaggcaacaaaa

SEQ ID NO: 1230137 - RNA, 21 nt, Human
aguaacaaugaaaagaggccg

SEQ ID NO: 1230138 - RNA, 20 nt, Human
auaaagacagcacacugaga

SEQ ID NO: 1230139 - RNA, 21 nt, Human
cucaucaucuagaaagcuguc

SEQ ID NO: 1230140 - RNA, 24 nt, Human
cugaggucaaaaaaacuaaggcaa

SEQ ID NO: 1230141 - RNA, 22 nt, Human
gcaaagcucacaucuaagguac

SEQ ID NO: 1230142 - RNA, 18 nt, Human
gccauuugagaaaguuau

SEQ ID NO: 1230143 - RNA, 23 nt, Human
gcugcauuuuuuaaagccugguu

SEQ ID NO: 1230144 - RNA, 19 nt, Human
ggaaaaaaauuuaaaaaga

SEQ ID NO: 1230145 - RNA, 24 nt, Human
uaaaaagaccaaaguuuuaugcaa

SEQ ID NO: 1230146 - RNA, 19 nt, Human
uaaaauaaucagcuaggac

SEQ ID NO: 1230147 - RNA, 21 nt, Human
uaaggcagauaugacuacaga

SEQ ID NO: 1230148 - RNA, 23 nt, Human
uaucaaaagaaggaaaauaacug

SEQ ID NO: 1230149 - RNA, 21 nt, Human
uaugggaggccagaaucuuga

SEQ ID NO: 1230150 - RNA, 25 nt, Human
ucaucuaaaacauuucucauugauu

SEQ ID NO: 1230151 - RNA, 19 nt, Human
uccuucucuucaucuuccu

SEQ ID NO: 1230152 - RNA, 19 nt, Human
ucuaccuucucugucuucc

SEQ ID NO: 1230153 - RNA, 23 nt, Human
ucugaggucaaaaaaacuaaggc

SEQ ID NO: 1230154 - RNA, 21 nt, Human
ucuuccuucucuucaucuucc

SEQ ID NO: 1230155 - RNA, 23 nt, Human
ugaaauugcaaagcucacaucua

SEQ ID NO: 1230156 - RNA, 18 nt, Human
ugaacauuucucuucuac

SEQ ID NO: 1230157 - RNA, 23 nt, Human
ugaacauuucucuucuacagccu

SEQ ID NO: 1230158 - RNA, 26 nt, Human
ugaacuuucaacuggcaaacaacuuu

SEQ ID NO: 1230159 - RNA, 24 nt, Human
ugcuacuuucaucugaggucaaaa

SEQ ID NO: 1230160 - RNA, 23 nt, Human
ugcuucuuucaaaagcucuucca

SEQ ID NO: 1230161 - RNA, 20 nt, Human
uggaaaaaaauuuaaaaaga

SEQ ID NO: 1230162 - RNA, 22 nt, Human
uggaacacaaaauaacauuccc

SEQ ID NO: 1230163 - RNA, 20 nt, Human
uguaugcacauauaaaugca

SEQ ID NO: 1230164 - RNA, 20 nt, Human
uugaaggauaaaaguaguaa

SEQ ID NO: 1230165 - RNA, 18 nt, Human
uuuccugguucccaguca

SEQ ID NO: 1230166 - RNA, 21 nt, Human
uuuggaaccaaucuucccaag

SEQ ID NO: 1230167 - RNA, 24 nt, Human
uuuuuauuaccaauauacaaagua

SEQ ID NO: 1230168 - RNA, 22 nt, Human
aagggaauguggaggucugggc

SEQ ID NO: 1230169 - RNA, 23 nt, Human
aagggaauguggaggucugggcu

SEQ ID NO: 1230170 - RNA, 25 nt, Human
aauauuuaaggucagaacuguuuaa

SEQ ID NO: 1230171 - RNA, 24 nt, Human
acaaggaaaaauuuauucuuuuca

SEQ ID NO: 1230172 - RNA, 24 nt, Human
agaaaggaaaauaaaaauggagga

SEQ ID NO: 1230173 - RNA, 20 nt, Human
agaacuguuuaaaaagaagc

SEQ ID NO: 1230174 - RNA, 22 nt, Human
aggugguucaaggaguuuuagg

SEQ ID NO: 1230175 - RNA, 21 nt, Human
cacugcuaaaaaguuauagga

SEQ ID NO: 1230176 - RNA, 23 nt, Human
cauuuuuguucuguuucugaaaa

SEQ ID NO: 1230177 - RNA, 24 nt, Human
ccaaucuggaauucacugaacgca

SEQ ID NO: 1230178 - RNA, 20 nt, Human
cuguccacugacugaugcuu

SEQ ID NO: 1230179 - RNA, 21 nt, Human
cuguccacugacugaugcuuu

SEQ ID NO: 1230180 - RNA, 19 nt, Human
gaaacauaguauuuuugua

SEQ ID NO: 1230181 - RNA, 20 nt, Human
ggaagaagguauucuguuua

SEQ ID NO: 1230182 - RNA, 18 nt, Human
gggaauguggaggucugg

SEQ ID NO: 1230183 - RNA, 26 nt, Human
ggucugggcuucccccauauucucug

SEQ ID NO: 1230184 - RNA, 22 nt, Human
uauucuguuuauuuccugucca

SEQ ID NO: 1230185 - RNA, 24 nt, Human
uauuugaauuuccucccagaaauu

SEQ ID NO: 1230186 - RNA, 25 nt, Human
uauuuugcucuccugcagaacaagc

SEQ ID NO: 1230187 - RNA, 22 nt, Human
ucgcaaggaagaagguauucug

SEQ ID NO: 1230188 - RNA, 22 nt, Human
ucuccugcagaacaagcuuaau

SEQ ID NO: 1230189 - RNA, 23 nt, Human
ucucucuacauucucuuugguuc

SEQ ID NO: 1230190 - RNA, 24 nt, Human
ucuucaaauacuauucugaaagcc

SEQ ID NO: 1230191 - RNA, 21 nt, Human
uuagggcccucuuguccuucu

SEQ ID NO: 1230192 - RNA, 20 nt, Human
uucaagguaguuuuggaaga

SEQ ID NO: 1230193 - RNA, 19 nt, Human
uuccuguccacugacugau

SEQ ID NO: 1230194 - RNA, 19 nt, Human
uuggcaacugaaaacuuug

SEQ ID NO: 1230195 - RNA, 22 nt, Human
uuucaagguaguuuuggaagau

SEQ ID NO: 1230196 - RNA, 20 nt, Human
aauggggaguagaggaaaga

SEQ ID NO: 1230197 - RNA, 22 nt, Human
acaaaauaagauuguugaccuc

SEQ ID NO: 1230198 - RNA, 20 nt, Human
acagccagacacacguccac

SEQ ID NO: 1230199 - RNA, 21 nt, Human
agacgauuugacaaggucaag

SEQ ID NO: 1230200 - RNA, 22 nt, Human
agaggaaagaugaaguaacaag

SEQ ID NO: 1230201 - RNA, 18 nt, Human
agccgacucaggaaaccu

SEQ ID NO: 1230202 - RNA, 25 nt, Human
aucucauccuuacauagcaguucca

SEQ ID NO: 1230203 - RNA, 22 nt, Human
cagccagacacacguccacguu

SEQ ID NO: 1230204 - RNA, 20 nt, Human
cagccgacucaggaaaccua

SEQ ID NO: 1230205 - RNA, 21 nt, Human
caguuccagaaggccugggcu

SEQ ID NO: 1230206 - RNA, 24 nt, Human
cauagcaguuccagaaggccuggg

SEQ ID NO: 1230207 - RNA, 23 nt, Human
ccucaaacuccacuuugcaucuc

SEQ ID NO: 1230208 - RNA, 21 nt, Human
uaagacgauuugacaagguca

SEQ ID NO: 1230209 - RNA, 23 nt, Human
uaagacgauuugacaaggucaag

SEQ ID NO: 1230210 - RNA, 24 nt, Human
uaagacgauuugacaaggucaaga

SEQ ID NO: 1230211 - RNA, 22 nt, Human
ugaccucaaacuccacuuugca

SEQ ID NO: 1230212 - RNA, 21 nt, Human
ugaccuuuauucaagaaagca

SEQ ID NO: 1230213 - RNA, 20 nt, Human
ugacuguggccauuuuccuu

SEQ ID NO: 1230214 - RNA, 26 nt, Human
ugcaucucauccuuacauagcaguuc

SEQ ID NO: 1230215 - RNA, 21 nt, Human
uuccagaaggccugggcuucc

SEQ ID NO: 1230216 - RNA, 21 nt, Human
cacccagcagccgcuguccac

SEQ ID NO: 1230217 - RNA, 18 nt, Human
cccgaguaguugggcugc

SEQ ID NO: 1230218 - RNA, 19 nt, Human
cucauagagcacccagcag

SEQ ID NO: 1230219 - RNA, 25 nt, Human
gagcacccagcagccgcuguccacg

SEQ ID NO: 1230220 - RNA, 20 nt, Human
gcccuggaagccccgguccu

SEQ ID NO: 1230221 - RNA, 19 nt, Human
gcucaaguagggcugcagg

SEQ ID NO: 1230222 - RNA, 23 nt, Human
ggcgcaggaacuacuggaggccc

SEQ ID NO: 1230223 - RNA, 27 nt, Human
uacuggaggcccgaguaguugggcugc

SEQ ID NO: 1230224 - RNA, 25 nt, Human
uaguuuccagaugaagcaagggaua

SEQ ID NO: 1230225 - RNA, 19 nt, Human
ugggguggucgcugcugca

SEQ ID NO: 1230226 - RNA, 22 nt, Human
cagcccccggaagucggccccc

SEQ ID NO: 1230227 - RNA, 25 nt, Human
ccccccgccccagccuccgcuucaa

SEQ ID NO: 1230228 - RNA, 20 nt, Human
cccccgagagcggcgguggg

SEQ ID NO: 1230229 - RNA, 20 nt, Human
cccccggaagucggcccccg

SEQ ID NO: 1230230 - RNA, 24 nt, Human
ccccgccccagccuccgcuucaac

SEQ ID NO: 1230231 - RNA, 24 nt, Human
ccccggccgcgccggcugcccccc

SEQ ID NO: 1230232 - RNA, 21 nt, Human
cccggaagucggcccccgaga

SEQ ID NO: 1230233 - RNA, 23 nt, Human
ccgagagcggcggugggcuccuc

SEQ ID NO: 1230234 - RNA, 18 nt, Human
ccgcgccggcugcccccc

SEQ ID NO: 1230235 - RNA, 20 nt, Human
ccggcugccccccgccccag

SEQ ID NO: 1230236 - RNA, 26 nt, Human
cgccccagccuccgcuucaacggcuc

SEQ ID NO: 1230237 - RNA, 23 nt, Human
cggcugccccccgccccagccuc

SEQ ID NO: 1230238 - RNA, 24 nt, Human
cuccgcuucaacggcucagccccc

SEQ ID NO: 1230239 - RNA, 18 nt, Human
cugcgccuccugccccgg

SEQ ID NO: 1230240 - RNA, 20 nt, Human
gccccagccuccgcuucaac

SEQ ID NO: 1230241 - RNA, 18 nt, Human
gcgccuccugccccggcc

SEQ ID NO: 1230242 - RNA, 20 nt, Human
uaacuuuccucaaacagcag

SEQ ID NO: 1230243 - RNA, 20 nt, Human
ucggcccccgagagcggcgg

SEQ ID NO: 1230244 - RNA, 23 nt, Human
uggcagcuuuuucaucacugcug

SEQ ID NO: 1230245 - RNA, 19 nt, Human
uuuuucaucacugcugccu

SEQ ID NO: 1230246 - RNA, 26 nt, Human
uuuuucaucacugcugccuaccaagu

SEQ ID NO: 1230247 - RNA, 23 nt, Human
ccagaugcucagcaauucuagug

SEQ ID NO: 1230248 - RNA, 19 nt, Human
uauguggaauaguguaggg

SEQ ID NO: 1230249 - RNA, 20 nt, Human
aaaguuuuugaccuuggaca

SEQ ID NO: 1230250 - RNA, 19 nt, Human
aacauggaagcagucaaaa

SEQ ID NO: 1230251 - RNA, 23 nt, Human
aagaagcuggucucagaguggug

SEQ ID NO: 1230252 - RNA, 21 nt, Human
aauacguugcccacuccacuu

SEQ ID NO: 1230253 - RNA, 21 nt, Human
accuuggacaugaacagcaag

SEQ ID NO: 1230254 - RNA, 20 nt, Human
acuguguggacaugacuggu

SEQ ID NO: 1230255 - RNA, 20 nt, Human
agacccggauggugagggug

SEQ ID NO: 1230256 - RNA, 22 nt, Human
agaguagggugcguggcuugaa

SEQ ID NO: 1230257 - RNA, 25 nt, Human
agagucuuucacccaauaucugcuu

SEQ ID NO: 1230258 - RNA, 19 nt, Human
agccagucccuaaagaccc

SEQ ID NO: 1230259 - RNA, 22 nt, Human
agccucuuucacaugguaggcu

SEQ ID NO: 1230260 - RNA, 18 nt, Human
agcuccaauaacaugcca

SEQ ID NO: 1230261 - RNA, 23 nt, Human
aggucccccacauacagcgaggc

SEQ ID NO: 1230262 - RNA, 22 nt, Human
aucacacagugcuuucucaacg

SEQ ID NO: 1230263 - RNA, 22 nt, Human
caaaguguacagauccacagcc

SEQ ID NO: 1230264 - RNA, 21 nt, Human
cacauacagcgaggccaugug

SEQ ID NO: 1230265 - RNA, 21 nt, Human
cagcugcuuccugugucucaa

SEQ ID NO: 1230266 - RNA, 21 nt, Human
caguugguacaacaguagcac

SEQ ID NO: 1230267 - RNA, 19 nt, Human
cccccacauacagcgaggc

SEQ ID NO: 1230268 - RNA, 23 nt, Human
cgagcagcugagcggauagccaa

SEQ ID NO: 1230269 - RNA, 28 nt, Human
cuccaauaacaugccagugagguacccc

SEQ ID NO: 1230270 - RNA, 20 nt, Human
cuucugcugcugaagagggg

SEQ ID NO: 1230271 - RNA, 20 nt, Human
cuuguaguacaacuacagcu

SEQ ID NO: 1230272 - RNA, 22 nt, Human
gaaccugugaagaagcuggucu

SEQ ID NO: 1230273 - RNA, 25 nt, Human
gagaauuccugaagcauauuuguac

SEQ ID NO: 1230274 - RNA, 22 nt, Human
gagccagucccuaaagacccgg

SEQ ID NO: 1230275 - RNA, 21 nt, Human
gcgauagaucgcgcugagacc

SEQ ID NO: 1230276 - RNA, 20 nt, Human
ggacacguagcccacgaaga

SEQ ID NO: 1230277 - RNA, 22 nt, Human
gguggucccugaucaauuuuaa

SEQ ID NO: 1230278 - RNA, 18 nt, Human
guagcccacgaagaggug

SEQ ID NO: 1230279 - RNA, 23 nt, Human
gugacaggaggagagcgagugcc

SEQ ID NO: 1230280 - RNA, 21 nt, Human
guggagccagcagcagcagcu

SEQ ID NO: 1230281 - RNA, 23 nt, Human
uaacaucaaaguucaugguggcc

SEQ ID NO: 1230282 - RNA, 20 nt, Human
uagcaacauacuguguggac

SEQ ID NO: 1230283 - RNA, 25 nt, Human
ucaauagcuccuucagcugcuuccu

SEQ ID NO: 1230284 - RNA, 19 nt, Human
ucccccacauacagcgagg

SEQ ID NO: 1230285 - RNA, 19 nt, Human
ugaggaaugagaauuccug

SEQ ID NO: 1230286 - RNA, 21 nt, Human
ugcugcugaagaggggcagau

SEQ ID NO: 1230287 - RNA, 23 nt, Human
ugcuuucuggagccucuuucaca

SEQ ID NO: 1230288 - RNA, 23 nt, Human
uguacagauccacagcccuuaga

SEQ ID NO: 1230289 - RNA, 18 nt, Human
uguaguacaacuacagcu

SEQ ID NO: 1230290 - RNA, 24 nt, Human
ugugguagcugggggcgcuggggu

SEQ ID NO: 1230291 - RNA, 22 nt, Human
uguguggacaugacugguggaa

SEQ ID NO: 1230292 - RNA, 19 nt, Human
uuaagcaguugguacaaca

SEQ ID NO: 1230293 - RNA, 22 nt, Human
aagcuucguaaagacaaggaaa

SEQ ID NO: 1230294 - RNA, 21 nt, Human
ccuccaguuccuugaacaaac

SEQ ID NO: 1230295 - RNA, 24 nt, Human
cucagaaugaaagcuucguaaaga

SEQ ID NO: 1230296 - RNA, 20 nt, Human
gcucaucccugcuggguucc

SEQ ID NO: 1230297 - RNA, 22 nt, Human
uggcuccugauuuucuugcccu

SEQ ID NO: 1230298 - RNA, 19 nt, Human
ugucucucuccacucccuc

SEQ ID NO: 1230299 - RNA, 21 nt, Human
aaggugccgccaggcuagagg

SEQ ID NO: 1230300 - RNA, 21 nt, Human
acacagcucuugugcaccucu

SEQ ID NO: 1230301 - RNA, 25 nt, Human
acagggaaguuggguggcuuccggg

SEQ ID NO: 1230302 - RNA, 21 nt, Human
accccauucugggcccgucuu

SEQ ID NO: 1230303 - RNA, 18 nt, Human
acuagccagcugggaccg

SEQ ID NO: 1230304 - RNA, 19 nt, Human
acucccgaccccauucugg

SEQ ID NO: 1230305 - RNA, 19 nt, Human
agccuggggguccgagacu

SEQ ID NO: 1230306 - RNA, 20 nt, Human
agcgccggggcccugcccag

SEQ ID NO: 1230307 - RNA, 21 nt, Human
aggacagugccaccaggcucu

SEQ ID NO: 1230308 - RNA, 18 nt, Human
aggacaucaggcguguga

SEQ ID NO: 1230309 - RNA, 20 nt, Human
aggcuccgagguuugcuuca

SEQ ID NO: 1230310 - RNA, 18 nt, Human
aggcugcuuguuuugaag

SEQ ID NO: 1230311 - RNA, 20 nt, Human
agggaaguuggguggcuucc

SEQ ID NO: 1230312 - RNA, 23 nt, Human
agggaaguuggguggcuuccggg

SEQ ID NO: 1230313 - RNA, 19 nt, Human
aggugcuggccagggcugg

SEQ ID NO: 1230314 - RNA, 20 nt, Human
auggcacucaggagcugcug

SEQ ID NO: 1230315 - RNA, 24 nt, Human
caccucgaagaaggcggauccgaa

SEQ ID NO: 1230316 - RNA, 23 nt, Human
cacggcccaggcuccccagcgcc

SEQ ID NO: 1230317 - RNA, 23 nt, Human
cagcaggucauccaucuuauagc

SEQ ID NO: 1230318 - RNA, 19 nt, Human
cagcauggaaggcugcccg

SEQ ID NO: 1230319 - RNA, 18 nt, Human
cagggcaccucuccagcg

SEQ ID NO: 1230320 - RNA, 24 nt, Human
caguaaaucucaucccugaaagac

SEQ ID NO: 1230321 - RNA, 19 nt, Human
cagucagacaccucccuca

SEQ ID NO: 1230322 - RNA, 21 nt, Human
ccacagcccuguccucagcag

SEQ ID NO: 1230323 - RNA, 18 nt, Human
ccacugucuuguccuuau

SEQ ID NO: 1230324 - RNA, 21 nt, Human
ccagccccgggccaggcugcu

SEQ ID NO: 1230325 - RNA, 24 nt, Human
cccagucagacaccucccucaagg

SEQ ID NO: 1230326 - RNA, 22 nt, Human
cccgucuuuuggccucccuggg

SEQ ID NO: 1230327 - RNA, 22 nt, Human
cccugcccagccuccuccucuc

SEQ ID NO: 1230328 - RNA, 24 nt, Human
ccggggcccugcccagccuccucc

SEQ ID NO: 1230329 - RNA, 23 nt, Human
ccggucguuguugaacugggccu

SEQ ID NO: 1230330 - RNA, 18 nt, Human
ccucagcagccgcgcccu

SEQ ID NO: 1230331 - RNA, 23 nt, Human
ccucccgcgaacacuuguggaau

SEQ ID NO: 1230332 - RNA, 19 nt, Human
ccuccugagaaccugcugg

SEQ ID NO: 1230333 - RNA, 22 nt, Human
ccucugagaggucccauaugca

SEQ ID NO: 1230334 - RNA, 23 nt, Human
ccucugagaggucccauaugcag

SEQ ID NO: 1230335 - RNA, 19 nt, Human
ccugcuggguucuggucca

SEQ ID NO: 1230336 - RNA, 18 nt, Human
cgccaaggacaggcccug

SEQ ID NO: 1230337 - RNA, 19 nt, Human
cgcgcccuuugcacagccc

SEQ ID NO: 1230338 - RNA, 21 nt, Human
cggcccaggcuccccagcgcc

SEQ ID NO: 1230339 - RNA, 21 nt, Human
cucgcacagcaggcggcugcc

SEQ ID NO: 1230340 - RNA, 19 nt, Human
cugcgcuggagucggcugu

SEQ ID NO: 1230341 - RNA, 21 nt, Human
cugggcccgucuuuuggccuc

SEQ ID NO: 1230342 - RNA, 24 nt, Human
cugggggcuggaggaggagaggag

SEQ ID NO: 1230343 - RNA, 22 nt, Human
cuuggagccccgcugcuuguuc

SEQ ID NO: 1230344 - RNA, 18 nt, Human
gaaagacacagaccauua

SEQ ID NO: 1230345 - RNA, 18 nt, Human
gaagaaggcggauccgaa

SEQ ID NO: 1230346 - RNA, 18 nt, Human
gaaggugggccaccggca

SEQ ID NO: 1230347 - RNA, 20 nt, Human
gaaguacaccugguagggga

SEQ ID NO: 1230348 - RNA, 21 nt, Human
gaaguucuccgagagcugcuu

SEQ ID NO: 1230349 - RNA, 20 nt, Human
gaccuggggaaggggaaggu

SEQ ID NO: 1230350 - RNA, 27 nt, Human
gagaaccugcuggguucugguccagug

SEQ ID NO: 1230351 - RNA, 22 nt, Human
gagagggccugggaaggugccg

SEQ ID NO: 1230352 - RNA, 20 nt, Human
gagcuggcucugcuccagga

SEQ ID NO: 1230353 - RNA, 21 nt, Human
gccacagcccuguccucagca

SEQ ID NO: 1230354 - RNA, 18 nt, Human
gccccgggccaggcugcu

SEQ ID NO: 1230355 - RNA, 22 nt, Human
gcccgccaaggacaggcccugg

SEQ ID NO: 1230356 - RNA, 26 nt, Human
gcccugcccagccuccuccucucuca

SEQ ID NO: 1230357 - RNA, 24 nt, Human
gccgaggcagaggcugagcaggau

SEQ ID NO: 1230358 - RNA, 22 nt, Human
gcuccaggaguuuuuauugaac

SEQ ID NO: 1230359 - RNA, 18 nt, Human
gcuggaggaggagaggag

SEQ ID NO: 1230360 - RNA, 18 nt, Human
gcuucaggaagcagcagg

SEQ ID NO: 1230361 - RNA, 23 nt, Human
ggaggaggagaggagacaggggu

SEQ ID NO: 1230362 - RNA, 18 nt, Human
ggauccagccccgggcca

SEQ ID NO: 1230363 - RNA, 24 nt, Human
ggcccgucuuuuggccucccuggg

SEQ ID NO: 1230364 - RNA, 23 nt, Human
ggccugggugcugcgcuggaguc

SEQ ID NO: 1230365 - RNA, 23 nt, Human
ggcugagugggcuuuguaugggg

SEQ ID NO: 1230366 - RNA, 23 nt, Human
ggcugcccgccaaggacaggccc

SEQ ID NO: 1230367 - RNA, 30 nt, Human
ggcuggggccuuggagccccgcugcuuguu

SEQ ID NO: 1230368 - RNA, 18 nt, Human
ggcuucaggaagcagcag

SEQ ID NO: 1230369 - RNA, 18 nt, Human
gggaagggcgccugagca

SEQ ID NO: 1230370 - RNA, 21 nt, Human
gggcugagugggcuuuguaug

SEQ ID NO: 1230371 - RNA, 18 nt, Human
ggguggggugggguuggg

SEQ ID NO: 1230372 - RNA, 21 nt, Human
gguaggggagcgucacggggg

SEQ ID NO: 1230373 - RNA, 20 nt, Human
ggugcugccgcugcuccagc

SEQ ID NO: 1230374 - RNA, 21 nt, Human
guuggguggcuuccggggacu

SEQ ID NO: 1230375 - RNA, 20 nt, Human
uaggagaguaggcugggggc

SEQ ID NO: 1230376 - RNA, 22 nt, Human
uaggagaguaggcugggggcug

SEQ ID NO: 1230377 - RNA, 21 nt, Human
uagguggugagcagguccuug

SEQ ID NO: 1230378 - RNA, 18 nt, Human
ucagcaggucauccaucu

SEQ ID NO: 1230379 - RNA, 20 nt, Human
ucaggaagcagcagguucuc

SEQ ID NO: 1230380 - RNA, 19 nt, Human
ucaggcgugugagguucuc

SEQ ID NO: 1230381 - RNA, 22 nt, Human
ucauggcacucaggagcugcug

SEQ ID NO: 1230382 - RNA, 21 nt, Human
uccagcgccggggcccugccc

SEQ ID NO: 1230383 - RNA, 23 nt, Human
ucccuggagauauguugagccac

SEQ ID NO: 1230384 - RNA, 19 nt, Human
ucccugggcagcgcccagg

SEQ ID NO: 1230385 - RNA, 21 nt, Human
ucccugggcagcgcccaggac

SEQ ID NO: 1230386 - RNA, 22 nt, Human
uccgagacucccgaccccauuc

SEQ ID NO: 1230387 - RNA, 21 nt, Human
uccgcgcagguacuugggcag

SEQ ID NO: 1230388 - RNA, 22 nt, Human
uccucagcagccgcgcccuuug

SEQ ID NO: 1230389 - RNA, 23 nt, Human
uccuucuggcugaugaccugggg

SEQ ID NO: 1230390 - RNA, 18 nt, Human
ucucugagggugggaagc

SEQ ID NO: 1230391 - RNA, 19 nt, Human
ucugcauucacauccuucc

SEQ ID NO: 1230392 - RNA, 20 nt, Human
ucuuuuggccucccugggca

SEQ ID NO: 1230393 - RNA, 20 nt, Human
ugagagggccugggaaggug

SEQ ID NO: 1230394 - RNA, 23 nt, Human
ugcccagccuccuccucucucag

SEQ ID NO: 1230395 - RNA, 25 nt, Human
ugcggggcugagugggcuuuguaug

SEQ ID NO: 1230396 - RNA, 23 nt, Human
ugcuccagcuggagaucuuggug

SEQ ID NO: 1230397 - RNA, 18 nt, Human
ugcucuuuuuccacuccu

SEQ ID NO: 1230398 - RNA, 23 nt, Human
uggaaggcugcccgccaaggaca

SEQ ID NO: 1230399 - RNA, 19 nt, Human
uggaugagcagaaccccau

SEQ ID NO: 1230400 - RNA, 23 nt, Human
uggcguguggagcuggcucugcu

SEQ ID NO: 1230401 - RNA, 19 nt, Human
ugggaagcagccgaggcag

SEQ ID NO: 1230402 - RNA, 21 nt, Human
ugggcacacagcucuugugca

SEQ ID NO: 1230403 - RNA, 22 nt, Human
uggggugggguugggagguguc

SEQ ID NO: 1230404 - RNA, 18 nt, Human
uggugggguggggugggg

SEQ ID NO: 1230405 - RNA, 21 nt, Human
uguauggggggcagcauggaa

SEQ ID NO: 1230406 - RNA, 23 nt, Human
ugucagucagucauccaccaaua

SEQ ID NO: 1230407 - RNA, 26 nt, Human
ugucugcauucacauccuuggacgac

SEQ ID NO: 1230408 - RNA, 22 nt, Human
ugucuuguccuuaugcuuguca

SEQ ID NO: 1230409 - RNA, 18 nt, Human
uucuggugggguggggug

SEQ ID NO: 1230410 - RNA, 20 nt, Human
uuggucuugggguggaugag

SEQ ID NO: 1230411 - RNA, 21 nt, Human
uuggugaagggauagguggug

SEQ ID NO: 1230412 - RNA, 23 nt, Human
uuguggaauccgcgcagguacuu

SEQ ID NO: 1230413 - RNA, 20 nt, Human
uuucuggggcuuguucuucc

SEQ ID NO: 1230414 - RNA, 19 nt, Human
uuuggccucccugggcagc

SEQ ID NO: 1230415 - RNA, 22 nt, Human
uuuugaaguucuccgagagcug

SEQ ID NO: 1230416 - RNA, 21 nt, Human
aaaaaagaaaucaccaaagaa

SEQ ID NO: 1230417 - RNA, 27 nt, Human
aaaaaagauaaagaaggaaauagaaga

SEQ ID NO: 1230418 - RNA, 21 nt, Human
aaaaaguagacacgcuaagga

SEQ ID NO: 1230419 - RNA, 19 nt, Human
aaaacaacaacaacaacaa

SEQ ID NO: 1230420 - RNA, 22 nt, Human
aaaacaacaacaacaacaaaac

SEQ ID NO: 1230421 - RNA, 19 nt, Human
aaaauacaacauaacaaaa

SEQ ID NO: 1230422 - RNA, 18 nt, Human
aaaauacaauauaacaga

SEQ ID NO: 1230423 - RNA, 20 nt, Human
aaacaaaaauacaacauaac

SEQ ID NO: 1230424 - RNA, 22 nt, Human
aaacacacuuacuagaugaccc

SEQ ID NO: 1230425 - RNA, 22 nt, Human
aaacaggaauaaaaaugcucag

SEQ ID NO: 1230426 - RNA, 23 nt, Human
aaacaggauagaagugaaaugag

SEQ ID NO: 1230427 - RNA, 24 nt, Human
aaacuggaaucaaagugucccuca

SEQ ID NO: 1230428 - RNA, 24 nt, Human
aaacuggguauccacaugaaaaag

SEQ ID NO: 1230429 - RNA, 20 nt, Human
aaagaaacaaauugaacuuc

SEQ ID NO: 1230430 - RNA, 23 nt, Human
aaagaaacaaauugaacuucaug

SEQ ID NO: 1230431 - RNA, 19 nt, Human
aaagcauaugaagcaaaaa

SEQ ID NO: 1230432 - RNA, 21 nt, Human
aaauacaacauaacaaaacuu

SEQ ID NO: 1230433 - RNA, 21 nt, Human
aaauacuguauaacuccacuu

SEQ ID NO: 1230434 - RNA, 21 nt, Human
aacaaauaguaaacaauuauu

SEQ ID NO: 1230435 - RNA, 21 nt, Human
aacaacaacaacaacaacaaa

SEQ ID NO: 1230436 - RNA, 22 nt, Human
aacaacgccagaguugaauuaa

SEQ ID NO: 1230437 - RNA, 25 nt, Human
aacagaguaaaaacgcaaccaacag

SEQ ID NO: 1230438 - RNA, 20 nt, Human
aaccuggaagugcagaugag

SEQ ID NO: 1230439 - RNA, 18 nt, Human
aacuacaaaaaucuuaga

SEQ ID NO: 1230440 - RNA, 19 nt, Human
aacugaaacauggaagcaa

SEQ ID NO: 1230441 - RNA, 23 nt, Human
aacugacagaauugaaggaagaa

SEQ ID NO: 1230442 - RNA, 22 nt, Human
aacuucaaaagcacacucucaa

SEQ ID NO: 1230443 - RNA, 18 nt, Human
aagaaacaaauagauuuu

SEQ ID NO: 1230444 - RNA, 18 nt, Human
aagaaauauaccaucaag

SEQ ID NO: 1230445 - RNA, 22 nt, Human
aagaagacauaaguauauccau

SEQ ID NO: 1230446 - RNA, 26 nt, Human
aagaagccagaauugaaaggcuacag

SEQ ID NO: 1230447 - RNA, 21 nt, Human
aagacagagaagaaaguaaaa

SEQ ID NO: 1230448 - RNA, 21 nt, Human
aagagugagacaguuccuuaa

SEQ ID NO: 1230449 - RNA, 23 nt, Human
aagcaaaaacugacagaauugaa

SEQ ID NO: 1230450 - RNA, 18 nt, Human
aagcagaagaaucucaaa

SEQ ID NO: 1230451 - RNA, 18 nt, Human
aagcagaagaaucucaaa

SEQ ID NO: 1230452 - RNA, 21 nt, Human
aagucugucucccuaagacuc

SEQ ID NO: 1230453 - RNA, 23 nt, Human
aagugucaacaaggauguggaga

SEQ ID NO: 1230454 - RNA, 26 nt, Human
aauaauggauagaaugacaaaaaaga

SEQ ID NO: 1230455 - RNA, 25 nt, Human
aaucacauaacgacaaauacuguau

SEQ ID NO: 1230456 - RNA, 18 nt, Human
aaucagucacaaagucaa

SEQ ID NO: 1230457 - RNA, 20 nt, Human
aaucagucacaaagucaagg

SEQ ID NO: 1230458 - RNA, 18 nt, Human
aaugacaaaaaagauaaa

SEQ ID NO: 1230459 - RNA, 22 nt, Human
aaugacaaaaaagauaaagaag

SEQ ID NO: 1230460 - RNA, 24 nt, Human
aaugacaaaaaagauaaagaagga

SEQ ID NO: 1230461 - RNA, 18 nt, Human
aauggaaaucaaaacuac

SEQ ID NO: 1230462 - RNA, 18 nt, Human
aauguaagaccaaaacua

SEQ ID NO: 1230463 - RNA, 25 nt, Human
acaaaaauuagcucagaauggauca

SEQ ID NO: 1230464 - RNA, 21 nt, Human
acaaaauggaugaacaacaug

SEQ ID NO: 1230465 - RNA, 25 nt, Human
acaacaacaaaaaauaacaaguguc

SEQ ID NO: 1230466 - RNA, 21 nt, Human
acaacaacaacaacaacaaaa

SEQ ID NO: 1230467 - RNA, 28 nt, Human
acaacaacaacaacaacaaaaaauaaca

SEQ ID NO: 1230468 - RNA, 19 nt, Human
acacugacucuguguuuug

SEQ ID NO: 1230469 - RNA, 21 nt, Human
acagaaucaucuauucaacag

SEQ ID NO: 1230470 - RNA, 28 nt, Human
acagcaacagcauacacauucuucccaa

SEQ ID NO: 1230471 - RNA, 19 nt, Human
acaggcagcaaaaguaaaa

SEQ ID NO: 1230472 - RNA, 21 nt, Human
acccaaaagaauugaaagcag

SEQ ID NO: 1230473 - RNA, 19 nt, Human
accuguauugguuuucccu

SEQ ID NO: 1230474 - RNA, 18 nt, Human
acuagaaugaaaagucug

SEQ ID NO: 1230475 - RNA, 19 nt, Human
acucaccaauaaagaaaca

SEQ ID NO: 1230476 - RNA, 20 nt, Human
acucaccaauaaagaaacaa

SEQ ID NO: 1230477 - RNA, 25 nt, Human
acucauucuuuccucugcauucccu

SEQ ID NO: 1230478 - RNA, 26 nt, Human
agaaaaaaccauccuaaaaguuguau

SEQ ID NO: 1230479 - RNA, 20 nt, Human
agaagaaagcuggaagacuc

SEQ ID NO: 1230480 - RNA, 19 nt, Human
agaagaaaguaaaagcagg

SEQ ID NO: 1230481 - RNA, 21 nt, Human
agacaguuccuuaaaaauuaa

SEQ ID NO: 1230482 - RNA, 25 nt, Human
agauaaaaaagaaaucaccaaagaa

SEQ ID NO: 1230483 - RNA, 19 nt, Human
agcaaaaguaaaagaaaca

SEQ ID NO: 1230484 - RNA, 22 nt, Human
aggaaaaggcaaaaccauaagg

SEQ ID NO: 1230485 - RNA, 28 nt, Human
aggaaaaggcaaaaccauaaggacaaaa

SEQ ID NO: 1230486 - RNA, 21 nt, Human
aggaaguagaaaaaaccaucc

SEQ ID NO: 1230487 - RNA, 20 nt, Human
aggauagaagugaaaugaaa

SEQ ID NO: 1230488 - RNA, 22 nt, Human
aggcuacaaaucugauuccauu

SEQ ID NO: 1230489 - RNA, 21 nt, Human
agggaccuuuaauagccaaag

SEQ ID NO: 1230490 - RNA, 22 nt, Human
agguuaccaccucacacccauu

SEQ ID NO: 1230491 - RNA, 21 nt, Human
aguaacagaaguaaauuggaa

SEQ ID NO: 1230492 - RNA, 21 nt, Human
aguagaaaaaaccauccuaaa

SEQ ID NO: 1230493 - RNA, 21 nt, Human
auaacagauauagccagagga

SEQ ID NO: 1230494 - RNA, 24 nt, Human
auaauacucaaaacagugugguac

SEQ ID NO: 1230495 - RNA, 24 nt, Human
auacaacauaacaaaacuuaugca

SEQ ID NO: 1230496 - RNA, 18 nt, Human
auaugauauucaggaaaa

SEQ ID NO: 1230497 - RNA, 24 nt, Human
aucuugacccauagggaaugagag

SEQ ID NO: 1230498 - RNA, 21 nt, Human
augaagcaaaaacugacagaa

SEQ ID NO: 1230499 - RNA, 23 nt, Human
augaauucuugauacaagcagaa

SEQ ID NO: 1230500 - RNA, 25 nt, Human
augacaaaaaagauaaagaaggaaa

SEQ ID NO: 1230501 - RNA, 24 nt, Human
auggcaauagaaauacuccauauc

SEQ ID NO: 1230502 - RNA, 26 nt, Human
caaaacagaucagcaguugcuagccc

SEQ ID NO: 1230503 - RNA, 22 nt, Human
caaaagaaaucaccaaaggaua

SEQ ID NO: 1230504 - RNA, 20 nt, Human
caaaauggaugaacaacaug

SEQ ID NO: 1230505 - RNA, 23 nt, Human
caaaauggaugaacaacaugucc

SEQ ID NO: 1230506 - RNA, 20 nt, Human
caaaauuagacacagaaagu

SEQ ID NO: 1230507 - RNA, 19 nt, Human
caaagaaaucacaaaagaa

SEQ ID NO: 1230508 - RNA, 22 nt, Human
caaaggcacaggcagcaaaagu

SEQ ID NO: 1230509 - RNA, 19 nt, Human
caaaucaaccaaccaacca

SEQ ID NO: 1230510 - RNA, 21 nt, Human
caaaucaaccaaccaaccaag

SEQ ID NO: 1230511 - RNA, 22 nt, Human
caaaucaaccaaccaaccaaga

SEQ ID NO: 1230512 - RNA, 23 nt, Human
caaaugauuuuugacaaggguac

SEQ ID NO: 1230513 - RNA, 25 nt, Human
caacaaaaaauaacaagugucaaca

SEQ ID NO: 1230514 - RNA, 26 nt, Human
caacaacaacaacaaaaaauaacaag

SEQ ID NO: 1230515 - RNA, 20 nt, Human
caacaacaacaacaacaaaa

SEQ ID NO: 1230516 - RNA, 19 nt, Human
caacagaguaaaaacgcaa

SEQ ID NO: 1230517 - RNA, 22 nt, Human
caacagaguaaaaacgcaacca

SEQ ID NO: 1230518 - RNA, 22 nt, Human
caacagaguggaagaaaauaau

SEQ ID NO: 1230519 - RNA, 24 nt, Human
caaccaaccaagauaaaacauguc

SEQ ID NO: 1230520 - RNA, 27 nt, Human
caacuacuggcgugaagccauucaagu

SEQ ID NO: 1230521 - RNA, 23 nt, Human
caagaacuaugucaauccaacaa

SEQ ID NO: 1230522 - RNA, 21 nt, Human
caagaagauauaccugugaua

SEQ ID NO: 1230523 - RNA, 22 nt, Human
caauaacugaaacauggaagca

SEQ ID NO: 1230524 - RNA, 24 nt, Human
caaucuugaaaaagcagaagaaag

SEQ ID NO: 1230525 - RNA, 23 nt, Human
cacauaacgacaaauacuguaua

SEQ ID NO: 1230526 - RNA, 20 nt, Human
caccacacucuuaaacaaca

SEQ ID NO: 1230527 - RNA, 23 nt, Human
cacccugcucucuuuugauuacu

SEQ ID NO: 1230528 - RNA, 23 nt, Human
cacgcuaaggaaaaagaaaaaaa

SEQ ID NO: 1230529 - RNA, 24 nt, Human
cacuuuauaaauuaaaaagcaaag

SEQ ID NO: 1230530 - RNA, 18 nt, Human
cagaaaguagaauggcug

SEQ ID NO: 1230531 - RNA, 23 nt, Human
cagaacaaaaaauuaugcccucu

SEQ ID NO: 1230532 - RNA, 23 nt, Human
cagaagaaagcuggaagacucac

SEQ ID NO: 1230533 - RNA, 24 nt, Human
cagaauggaucaaagaccuaaaug

SEQ ID NO: 1230534 - RNA, 21 nt, Human
cagcagacaauccugaggccc

SEQ ID NO: 1230535 - RNA, 23 nt, Human
cagcaguaagcacauagaaagau

SEQ ID NO: 1230536 - RNA, 18 nt, Human
cagcugcuguggaaaaga

SEQ ID NO: 1230537 - RNA, 22 nt, Human
cagcuuugcuucaaccuggaag

SEQ ID NO: 1230538 - RNA, 23 nt, Human
cauggaagcaacccaagugucca

SEQ ID NO: 1230539 - RNA, 30 nt, Human
ccacagauuaaguauaaauaaauuuaaaaa

SEQ ID NO: 1230540 - RNA, 22 nt, Human
cccaagaaaugauaguccuuua

SEQ ID NO: 1230541 - RNA, 22 nt, Human
ccccuagauccuuccagaacaa

SEQ ID NO: 1230542 - RNA, 21 nt, Human
ccuucucuuacuauucucuuc

SEQ ID NO: 1230543 - RNA, 23 nt, Human
cuaaagcauaugaagcaaaaacu

SEQ ID NO: 1230544 - RNA, 22 nt, Human
cucacacccauuaggauggcua

SEQ ID NO: 1230545 - RNA, 21 nt, Human
cucacaguuccugguuucaaa

SEQ ID NO: 1230546 - RNA, 18 nt, Human
cucagaauggaucaaaga

SEQ ID NO: 1230547 - RNA, 18 nt, Human
cucuccacaaguaaccca

SEQ ID NO: 1230548 - RNA, 21 nt, Human
cugcauucccucccucuccac

SEQ ID NO: 1230549 - RNA, 27 nt, Human
cugcuaaguuaacuaagccaaucacau

SEQ ID NO: 1230550 - RNA, 19 nt, Human
cuggggauacacccaaaag

SEQ ID NO: 1230551 - RNA, 19 nt, Human
cuucccaagugcacacgga

SEQ ID NO: 1230552 - RNA, 21 nt, Human
cuugauuugagccucccuugg

SEQ ID NO: 1230553 - RNA, 24 nt, Human
cuuggauaugacaccaaaggcaca

SEQ ID NO: 1230554 - RNA, 24 nt, Human
cuuuucccuguuguugcauagaag

SEQ ID NO: 1230555 - RNA, 26 nt, Human
gaaaaaaccauccuaaaaguuguaug

SEQ ID NO: 1230556 - RNA, 20 nt, Human
gaaauagaagacuugaauaa

SEQ ID NO: 1230557 - RNA, 22 nt, Human
gaagcuauauaugggcugaaga

SEQ ID NO: 1230558 - RNA, 21 nt, Human
gaaguaaauuggaaaauucac

SEQ ID NO: 1230559 - RNA, 18 nt, Human
gaauggaucaaagaccua

SEQ ID NO: 1230560 - RNA, 22 nt, Human
gacagcccugaaauaaacccug

SEQ ID NO: 1230561 - RNA, 24 nt, Human
gagaagaaaguaaaagcagggggg

SEQ ID NO: 1230562 - RNA, 19 nt, Human
gaggagggggauuaugaca

SEQ ID NO: 1230563 - RNA, 19 nt, Human
gaggcccauucuaauggcu

SEQ ID NO: 1230564 - RNA, 19 nt, Human
gagguugguuuuggauacu

SEQ ID NO: 1230565 - RNA, 21 nt, Human
gauacacccaaaagaauugaa

SEQ ID NO: 1230566 - RNA, 18 nt, Human
gaucacaucucugaucua

SEQ ID NO: 1230567 - RNA, 27 nt, Human
gauggaagguggugaugauugcacagu

SEQ ID NO: 1230568 - RNA, 19 nt, Human
gcagacaauccugaggccc

SEQ ID NO: 1230569 - RNA, 18 nt, Human
gcuaagugcaagaagcca

SEQ ID NO: 1230570 - RNA, 23 nt, Human
gcuaccauuaaaacaacaacaac

SEQ ID NO: 1230571 - RNA, 24 nt, Human
ggaaaaggcaaaaccauaaggaca

SEQ ID NO: 1230572 - RNA, 19 nt, Human
ggaaauagaagacuugaau

SEQ ID NO: 1230573 - RNA, 23 nt, Human
gggaaugagagcugaugcauaau

SEQ ID NO: 1230574 - RNA, 23 nt, Human
ggggagaggggauugagcagaaa

SEQ ID NO: 1230575 - RNA, 19 nt, Human
gggugccuggcauucagcu

SEQ ID NO: 1230576 - RNA, 20 nt, Human
gguggugaugauugcacagu

SEQ ID NO: 1230577 - RNA, 21 nt, Human
guaaaaacgcaaccaacagag

SEQ ID NO: 1230578 - RNA, 23 nt, Human
guaaacugugggcagaacuucau

SEQ ID NO: 1230579 - RNA, 21 nt, Human
gugaaacuagugcuaagauaa

SEQ ID NO: 1230580 - RNA, 19 nt, Human
gugccauguggaacagaau

SEQ ID NO: 1230581 - RNA, 20 nt, Human
guggugguuagucaacugua

SEQ ID NO: 1230582 - RNA, 25 nt, Human
uaaaacaacaacaacaacaacaaaa

SEQ ID NO: 1230583 - RNA, 24 nt, Human
uaaaaugagcaaagggcuuaagua

SEQ ID NO: 1230584 - RNA, 24 nt, Human
uaaagacagagaagaaaguaaaag

SEQ ID NO: 1230585 - RNA, 19 nt, Human
uaagauguccauacuaccc

SEQ ID NO: 1230586 - RNA, 19 nt, Human
uaagggaaauggaaaucaa

SEQ ID NO: 1230587 - RNA, 21 nt, Human
uaagggaaauggaaaucaaaa

SEQ ID NO: 1230588 - RNA, 18 nt, Human
uaagugcaagaagccaga

SEQ ID NO: 1230589 - RNA, 27 nt, Human
uaauaguuggaaacuucaaaagcacac

SEQ ID NO: 1230590 - RNA, 22 nt, Human
uaauuaccauaugguuuagcug

SEQ ID NO: 1230591 - RNA, 21 nt, Human
uacaaaaaaagaguagugaug

SEQ ID NO: 1230592 - RNA, 22 nt, Human
uacaaaucaaccaaccaaccaa

SEQ ID NO: 1230593 - RNA, 24 nt, Human
uacacagaaucaucuauucaacag

SEQ ID NO: 1230594 - RNA, 20 nt, Human
uacacauuugucaaaacaca

SEQ ID NO: 1230595 - RNA, 23 nt, Human
uaccaagcuuggccaagaagaua

SEQ ID NO: 1230596 - RNA, 21 nt, Human
uaccacaaaaacaugaaaaag

SEQ ID NO: 1230597 - RNA, 26 nt, Human
uaccacaaaaacaugaaaaaguagac

SEQ ID NO: 1230598 - RNA, 24 nt, Human
uaccauuaaaacaacaacaacaac

SEQ ID NO: 1230599 - RNA, 19 nt, Human
uacuccauaucuugaccau

SEQ ID NO: 1230600 - RNA, 24 nt, Human
uacuggcauaaaaaccaauggaau

SEQ ID NO: 1230601 - RNA, 21 nt, Human
uagaaaaaaccauccuaaaag

SEQ ID NO: 1230602 - RNA, 22 nt, Human
uagaaugaaaagucugucuccc

SEQ ID NO: 1230603 - RNA, 24 nt, Human
uagaauggcuguuuucagggcuug

SEQ ID NO: 1230604 - RNA, 19 nt, Human
uagcagcauuauucacaau

SEQ ID NO: 1230605 - RNA, 20 nt, Human
uagccaaaaucccauagauu

SEQ ID NO: 1230606 - RNA, 21 nt, Human
uagugccauguggaacagaau

SEQ ID NO: 1230607 - RNA, 23 nt, Human
uaucaacagaguaaaaacgcaac

SEQ ID NO: 1230608 - RNA, 23 nt, Human
uaugacugaauacuggguaacaa

SEQ ID NO: 1230609 - RNA, 21 nt, Human
uaugcaauguagugaaacuag

SEQ ID NO: 1230610 - RNA, 21 nt, Human
uauuuccuuuagguagaaaaa

SEQ ID NO: 1230611 - RNA, 22 nt, Human
ucaaaagcacacucucaauaau

SEQ ID NO: 1230612 - RNA, 19 nt, Human
ucagucacaaagucaaggc

SEQ ID NO: 1230613 - RNA, 22 nt, Human
uccacaaguaacccauuucuga

SEQ ID NO: 1230614 - RNA, 22 nt, Human
uccacaugaaaaagaauaaagu

SEQ ID NO: 1230615 - RNA, 22 nt, Human
uccagaacaaaaaauuaugccc

SEQ ID NO: 1230616 - RNA, 23 nt, Human
uccccaggaggaaaucuugaccc

SEQ ID NO: 1230617 - RNA, 21 nt, Human
ucccuaagacucucauaccaa

SEQ ID NO: 1230618 - RNA, 18 nt, Human
ucccuaucaaaaucucaa

SEQ ID NO: 1230619 - RNA, 20 nt, Human
ucuaaaccaucauccaguag

SEQ ID NO: 1230620 - RNA, 21 nt, Human
ucuaaaccaucauccaguagg

SEQ ID NO: 1230621 - RNA, 22 nt, Human
ucuacaguaauaguuggaaacu

SEQ ID NO: 1230622 - RNA, 21 nt, Human
ucuaggaaacaaauaguaaac

SEQ ID NO: 1230623 - RNA, 21 nt, Human
ucuauggcaauagaaauacuc

SEQ ID NO: 1230624 - RNA, 21 nt, Human
ucuauuauugcuaccugggau

SEQ ID NO: 1230625 - RNA, 23 nt, Human
ucucagggaccuuuaauagccaa

SEQ ID NO: 1230626 - RNA, 22 nt, Human
ucugaaauucucuuuucccugu

SEQ ID NO: 1230627 - RNA, 18 nt, Human
ucugcauucccucccucu

SEQ ID NO: 1230628 - RNA, 21 nt, Human
ucugcauucccucccucucca

SEQ ID NO: 1230629 - RNA, 19 nt, Human
ucuuacuauucucuucugg

SEQ ID NO: 1230630 - RNA, 22 nt, Human
ucuuggauaugacaccaaaggc

SEQ ID NO: 1230631 - RNA, 23 nt, Human
ugaaacauggaagcaacccaagu

SEQ ID NO: 1230632 - RNA, 24 nt, Human
ugaaacauggaagcaacccaagug

SEQ ID NO: 1230633 - RNA, 21 nt, Human
ugaagcaaaaacugacagaau

SEQ ID NO: 1230634 - RNA, 19 nt, Human
ugaaggaagaaauagacag

SEQ ID NO: 1230635 - RNA, 20 nt, Human
ugaauaagcaaaauguagua

SEQ ID NO: 1230636 - RNA, 25 nt, Human
ugaauagacagcccugaaauaaacc

SEQ ID NO: 1230637 - RNA, 19 nt, Human
ugaaugaauaagcaaaaug

SEQ ID NO: 1230638 - RNA, 19 nt, Human
ugacaaggguaccaagaug

SEQ ID NO: 1230639 - RNA, 20 nt, Human
ugacaccaaaggcacaggca

SEQ ID NO: 1230640 - RNA, 24 nt, Human
ugacaccaaaggcacaggcagcaa

SEQ ID NO: 1230641 - RNA, 21 nt, Human
ugacguagccaaaaucccaua

SEQ ID NO: 1230642 - RNA, 22 nt, Human
ugacguuucugaggaaguagaa

SEQ ID NO: 1230643 - RNA, 20 nt, Human
ugagcaaagggcuuaaguag

SEQ ID NO: 1230644 - RNA, 22 nt, Human
ugagcaaagggcuuaaguagac

SEQ ID NO: 1230645 - RNA, 22 nt, Human
ugaugauggaagguggugauga

SEQ ID NO: 1230646 - RNA, 21 nt, Human
ugcauucccucccucuccaca

SEQ ID NO: 1230647 - RNA, 18 nt, Human
ugccauguggaacagaau

SEQ ID NO: 1230648 - RNA, 18 nt, Human
ugcccccuagauccuucc

SEQ ID NO: 1230649 - RNA, 22 nt, Human
ugcuacaaagcuauaauacuca

SEQ ID NO: 1230650 - RNA, 31 nt, Human
ugcucuacaaguguaaacaggaauaaaaauu

SEQ ID NO: 1230651 - RNA, 20 nt, Human
ugcuucaaccuggaagugca

SEQ ID NO: 1230652 - RNA, 25 nt, Human
uggaaaauucacaaauuugugaaaa

SEQ ID NO: 1230653 - RNA, 22 nt, Human
uggaagacucacaguuccuggu

SEQ ID NO: 1230654 - RNA, 21 nt, Human
uggaagguggugaugauugca

SEQ ID NO: 1230655 - RNA, 24 nt, Human
uggaaucaaagugucccucaacug

SEQ ID NO: 1230656 - RNA, 21 nt, Human
uggauagaaugacaaaaaaga

SEQ ID NO: 1230657 - RNA, 18 nt, Human
uggaugaacaacaugucc

SEQ ID NO: 1230658 - RNA, 20 nt, Human
uggcaaaaggaugaaguuag

SEQ ID NO: 1230659 - RNA, 24 nt, Human
uggcaaaaggaugaaguuagaaau

SEQ ID NO: 1230660 - RNA, 18 nt, Human
ugggcagaacuucauugc

SEQ ID NO: 1230661 - RNA, 19 nt, Human
uggggauggggagagggga

SEQ ID NO: 1230662 - RNA, 19 nt, Human
ugggugccuggcauucagc

SEQ ID NO: 1230663 - RNA, 24 nt, Human
uguaaacaggaauaaaaaugcuca

SEQ ID NO: 1230664 - RNA, 24 nt, Human
ugucaacaaggauguggagaaacu

SEQ ID NO: 1230665 - RNA, 25 nt, Human
ugugaauuucuucuuuagcaaguuu

SEQ ID NO: 1230666 - RNA, 21 nt, Human
ugugauauacauuuacauacu

SEQ ID NO: 1230667 - RNA, 22 nt, Human
uguggagaaacuggaacccuug

SEQ ID NO: 1230668 - RNA, 23 nt, Human
uguggugacauuuaaaauccacu

SEQ ID NO: 1230669 - RNA, 18 nt, Human
uguuuugguaaagaaaua

SEQ ID NO: 1230670 - RNA, 19 nt, Human
uuaaaacaacaacaacaac

SEQ ID NO: 1230671 - RNA, 24 nt, Human
uuaacaacgccagaguugaauuaa

SEQ ID NO: 1230672 - RNA, 24 nt, Human
uuaagugguaaaauguacaaaaaa

SEQ ID NO: 1230673 - RNA, 28 nt, Human
uuaguaaucucaccuguauugguuuucc

SEQ ID NO: 1230674 - RNA, 22 nt, Human
uucacaauaacugaaacaugga

SEQ ID NO: 1230675 - RNA, 22 nt, Human
uucagcagacaauccugaggcc

SEQ ID NO: 1230676 - RNA, 25 nt, Human
uucauagcagcauuauucacaauaa

SEQ ID NO: 1230677 - RNA, 19 nt, Human
uuccauccuccacuuucaa

SEQ ID NO: 1230678 - RNA, 23 nt, Human
uuccuuuagguagaaaaauacaa

SEQ ID NO: 1230679 - RNA, 22 nt, Human
uucuuuagcaaguuuauucuaa

SEQ ID NO: 1230680 - RNA, 25 nt, Human
uuggaaaacagcuuggcaacucuua

SEQ ID NO: 1230681 - RNA, 21 nt, Human
uuuccaacaaagcacagugac

SEQ ID NO: 1230682 - RNA, 20 nt, Human
uuuugagguucuaggaaaca

SEQ ID NO: 1230683 - RNA, 19 nt, Human
ugguaagugaggugccuuc

SEQ ID NO: 1230684 - RNA, 23 nt, Human
aaaacaaauauggacacaagaca

SEQ ID NO: 1230685 - RNA, 18 nt, Human
aagcccggggcugcgcgg

SEQ ID NO: 1230686 - RNA, 22 nt, Human
aagcccggggcugcgcgggaga

SEQ ID NO: 1230687 - RNA, 24 nt, Human
accacaaaacaaauauggacacaa

SEQ ID NO: 1230688 - RNA, 22 nt, Human
agaaaggacugacuagagcuca

SEQ ID NO: 1230689 - RNA, 27 nt, Human
agacaaaaaguaacugaaaggggaccc

SEQ ID NO: 1230690 - RNA, 25 nt, Human
aguuuucaacuuaacauaggucaca

SEQ ID NO: 1230691 - RNA, 23 nt, Human
auggacacaagacaaaaaguaac

SEQ ID NO: 1230692 - RNA, 24 nt, Human
caaaaaguaacugaaaggggagaa

SEQ ID NO: 1230693 - RNA, 27 nt, Human
cacaaaacaaauauggacacaagacaa

SEQ ID NO: 1230694 - RNA, 24 nt, Human
cagaaaggacugacuagagcucag

SEQ ID NO: 1230695 - RNA, 25 nt, Human
cagaaauuucccuucugaaggaagg

SEQ ID NO: 1230696 - RNA, 25 nt, Human
ccgggcaacggcggucaaggcuccu

SEQ ID NO: 1230697 - RNA, 20 nt, Human
cgggagagggccgggcaacg

SEQ ID NO: 1230698 - RNA, 23 nt, Human
gcggaagcccggggcugcgcggg

SEQ ID NO: 1230699 - RNA, 21 nt, Human
gcuccuggccucagacgguug

SEQ ID NO: 1230700 - RNA, 19 nt, Human
gggcaacggcggucaaggc

SEQ ID NO: 1230701 - RNA, 22 nt, Human
uacagauuccccuuccugaccc

SEQ ID NO: 1230702 - RNA, 19 nt, Human
ucagacgguugcucgucgg

SEQ ID NO: 1230703 - RNA, 21 nt, Human
ugacccucagaaauuucccuu

SEQ ID NO: 1230704 - RNA, 24 nt, Human
ugacuagagcucaguaaacaacau

SEQ ID NO: 1230705 - RNA, 19 nt, Human
ugagguacagauuccccuu

SEQ ID NO: 1230706 - RNA, 19 nt, Human
ugcgcgggagagggccggg

SEQ ID NO: 1230707 - RNA, 20 nt, Human
uguuggaguauauaaauuau

SEQ ID NO: 1230708 - RNA, 18 nt, Human
uuauuauguauccccgcc

SEQ ID NO: 1230709 - RNA, 21 nt, Human
uucugaaggaaggacugcgga

SEQ ID NO: 1230710 - RNA, 26 nt, Human
uuugguuucccaauauuccuuccuug

SEQ ID NO: 1230711 - RNA, 19 nt, Human
aaagcacgggggagggcag

SEQ ID NO: 1230712 - RNA, 23 nt, Human
aaagcagcauggcaagaccuaga

SEQ ID NO: 1230713 - RNA, 23 nt, Human
agagcacuuccuuguccccgcuc

SEQ ID NO: 1230714 - RNA, 19 nt, Human
agaggcggcucgcggcggg

SEQ ID NO: 1230715 - RNA, 20 nt, Human
ccaggucagaggggaaagca

SEQ ID NO: 1230716 - RNA, 20 nt, Human
cccgggccaccaccuucaag

SEQ ID NO: 1230717 - RNA, 21 nt, Human
cccgggccaccaccuucaagg

SEQ ID NO: 1230718 - RNA, 24 nt, Human
cuuagugggaaaaaaaacccuuua

SEQ ID NO: 1230719 - RNA, 21 nt, Human
gagaggcggcucgcggcgggu

SEQ ID NO: 1230720 - RNA, 31 nt, Human
ggaaaaaaaacccuuuaggacugagucucgg

SEQ ID NO: 1230721 - RNA, 20 nt, Human
ggaacagcaccugcuggaca

SEQ ID NO: 1230722 - RNA, 21 nt, Human
ggagaaccaacccaggucaga

SEQ ID NO: 1230723 - RNA, 20 nt, Human
gggagaggcggcucgcggcg

SEQ ID NO: 1230724 - RNA, 22 nt, Human
ggggagggcaggguugagucgg

SEQ ID NO: 1230725 - RNA, 23 nt, Human
ggggagggcaggguugagucggg

SEQ ID NO: 1230726 - RNA, 18 nt, Human
uaagagcacuuccuuguc

SEQ ID NO: 1230727 - RNA, 18 nt, Human
uccccgcucuuacccggg

SEQ ID NO: 1230728 - RNA, 22 nt, Human
ugagucgggcggggaggggaga

SEQ ID NO: 1230729 - RNA, 20 nt, Human
uggcaagaccuagacccagu

SEQ ID NO: 1230730 - RNA, 22 nt, Human
ugggaaaaaaaacccuuuagga

SEQ ID NO: 1230731 - RNA, 20 nt, Human
aaacaaaaucugucugcagc

SEQ ID NO: 1230732 - RNA, 23 nt, Human
aaccgacacugacaaguuaaacg

SEQ ID NO: 1230733 - RNA, 21 nt, Human
acggcaauaauagggcgcacc

SEQ ID NO: 1230734 - RNA, 19 nt, Human
agauggaggcauuugaacu

SEQ ID NO: 1230735 - RNA, 22 nt, Human
agauggaggcauuugaacuggg

SEQ ID NO: 1230736 - RNA, 24 nt, Human
agccuuguccccugcacuccaacu

SEQ ID NO: 1230737 - RNA, 24 nt, Human
agggauugaagaucggcgucugug

SEQ ID NO: 1230738 - RNA, 23 nt, Human
aggugcuguggggacaccgagau

SEQ ID NO: 1230739 - RNA, 20 nt, Human
auugaagaucggcgucugug

SEQ ID NO: 1230740 - RNA, 23 nt, Human
caaacauguaacagcaggaguuu

SEQ ID NO: 1230741 - RNA, 23 nt, Human
cacaguuugcagaguuaugugga

SEQ ID NO: 1230742 - RNA, 19 nt, Human
cacccucgcugccccgggg

SEQ ID NO: 1230743 - RNA, 21 nt, Human
caccgagauggugacacccuc

SEQ ID NO: 1230744 - RNA, 21 nt, Human
cagagggaaacaaaaucuguc

SEQ ID NO: 1230745 - RNA, 18 nt, Human
ccccggggagugugacau

SEQ ID NO: 1230746 - RNA, 19 nt, Human
ccgagauggugacacccuc

SEQ ID NO: 1230747 - RNA, 22 nt, Human
ccgagauggugacacccucgcu

SEQ ID NO: 1230748 - RNA, 22 nt, Human
ccuauccccaaccacgaacuga

SEQ ID NO: 1230749 - RNA, 22 nt, Human
cugcaggggugcagaaccgaca

SEQ ID NO: 1230750 - RNA, 24 nt, Human
cugcaggggugcagaaccgacacu

SEQ ID NO: 1230751 - RNA, 24 nt, Human
gcacuccaacuuuacagagggaaa

SEQ ID NO: 1230752 - RNA, 23 nt, Human
gccccuacagagccugcaggggu

SEQ ID NO: 1230753 - RNA, 21 nt, Human
uccaucggcagcuugcuacga

SEQ ID NO: 1230754 - RNA, 19 nt, Human
ugacggcagaaggcgaagg

SEQ ID NO: 1230755 - RNA, 21 nt, Human
ugacuagggcugucaccggug

SEQ ID NO: 1230756 - RNA, 23 nt, Human
ugggccuugaaggaugacuaggg

SEQ ID NO: 1230757 - RNA, 19 nt, Human
ugguauggagauggaggca

SEQ ID NO: 1230758 - RNA, 19 nt, Human
uguggagucacauaaucca

SEQ ID NO: 1230759 - RNA, 24 nt, Human
uugcagaguuauguggagucacau

SEQ ID NO: 1230760 - RNA, 19 nt, Human
aauuaagagcucaucuuca

SEQ ID NO: 1230761 - RNA, 22 nt, Human
aauucgcagcgccaucuuccuc

SEQ ID NO: 1230762 - RNA, 25 nt, Human
acagagccuuccccaguagaccgaa

SEQ ID NO: 1230763 - RNA, 21 nt, Human
cacugaaaacauuaaaugggu

SEQ ID NO: 1230764 - RNA, 26 nt, Human
cacugaaaacauuaaauggguuuugu

SEQ ID NO: 1230765 - RNA, 24 nt, Human
cagagccuuccccaguagaccgaa

SEQ ID NO: 1230766 - RNA, 22 nt, Human
cagcaaaaaagagcaagucaca

SEQ ID NO: 1230767 - RNA, 22 nt, Human
caggcauucacugaaaacauua

SEQ ID NO: 1230768 - RNA, 18 nt, Human
ccucccgggaccgggccg

SEQ ID NO: 1230769 - RNA, 21 nt, Human
gaaagaaccggaggcaaacac

SEQ ID NO: 1230770 - RNA, 21 nt, Human
gcuucccacgguggaaagaac

SEQ ID NO: 1230771 - RNA, 18 nt, Human
gguggggguggcguucgc

SEQ ID NO: 1230772 - RNA, 20 nt, Human
gugaaaaauuaagagcucau

SEQ ID NO: 1230773 - RNA, 23 nt, Human
uaaauaccccaggcauucacuga

SEQ ID NO: 1230774 - RNA, 21 nt, Human
uaacuggccacuacuagaacu

SEQ ID NO: 1230775 - RNA, 26 nt, Human
ugaauagacucuaauuuagcaccuac

SEQ ID NO: 1230776 - RNA, 18 nt, Human
uggaaagaaccggaggca

SEQ ID NO: 1230777 - RNA, 20 nt, Human
ugugaaaaauuaagagcuca

SEQ ID NO: 1230778 - RNA, 20 nt, Human
uguucuuccccaguuccucc

SEQ ID NO: 1230779 - RNA, 27 nt, Human
uuccccaguuccuccauugagugaaua

SEQ ID NO: 1230780 - RNA, 22 nt, Human
uucuuccccaguuccuccauug

SEQ ID NO: 1230781 - RNA, 25 nt, Human
uuuguucuuccccaguuccuccauu

SEQ ID NO: 1230782 - RNA, 22 nt, Human
aaaucugcacuuuuuauuucua

SEQ ID NO: 1230783 - RNA, 19 nt, Human
aagcaggaggagguggacg

SEQ ID NO: 1230784 - RNA, 20 nt, Human
aagcaggaggagguggacgg

SEQ ID NO: 1230785 - RNA, 18 nt, Human
aggcaaaaauacaggaac

SEQ ID NO: 1230786 - RNA, 24 nt, Human
aggcaaaaauacaggaacagagaa

SEQ ID NO: 1230787 - RNA, 20 nt, Human
aggcaggggugaggagagau

SEQ ID NO: 1230788 - RNA, 25 nt, Human
aggcaggggugaggagagaugaggg

SEQ ID NO: 1230789 - RNA, 21 nt, Human
cacuccagguagacccauccc

SEQ ID NO: 1230790 - RNA, 20 nt, Human
cauucuagaaaaggcaaaaa

SEQ ID NO: 1230791 - RNA, 23 nt, Human
cuagaaaaggcaaaaauacagga

SEQ ID NO: 1230792 - RNA, 24 nt, Human
ggguauuccucaagucacuccagg

SEQ ID NO: 1230793 - RNA, 25 nt, Human
uagaaaaggcaaaaauacaggaaca

SEQ ID NO: 1230794 - RNA, 21 nt, Human
ucuguggugguggcugugaga

SEQ ID NO: 1230795 - RNA, 23 nt, Human
ugagggcguucucuggaguauug

SEQ ID NO: 1230796 - RNA, 25 nt, Human
uguacugucuguggugguggcugug

SEQ ID NO: 1230797 - RNA, 24 nt, Human
uguggugguggcugugagaaucca

SEQ ID NO: 1230798 - RNA, 23 nt, Human
aacuaauuuuauuuuauuuuuua

SEQ ID NO: 1230799 - RNA, 21 nt, Human
aagcugagagaacacuccacg

SEQ ID NO: 1230800 - RNA, 18 nt, Human
ccagcagucccauagcua

SEQ ID NO: 1230801 - RNA, 23 nt, Human
cccacaggguuggagaggcaguc

SEQ ID NO: 1230802 - RNA, 20 nt, Human
cccgccaagucuccugucca

SEQ ID NO: 1230803 - RNA, 18 nt, Human
ccuggacuaggagccagc

SEQ ID NO: 1230804 - RNA, 20 nt, Human
cuggagcaucucccgccaag

SEQ ID NO: 1230805 - RNA, 23 nt, Human
cuuacagcccacaggguuggaga

SEQ ID NO: 1230806 - RNA, 27 nt, Human
gaccuaagcugagagaaccggggguuc

SEQ ID NO: 1230807 - RNA, 20 nt, Human
gagcuugcuuacagcccaca

SEQ ID NO: 1230808 - RNA, 20 nt, Human
gcccacggaaccgucccagg

SEQ ID NO: 1230809 - RNA, 21 nt, Human
gccugagcuugcuuacagccc

SEQ ID NO: 1230810 - RNA, 19 nt, Human
ggagaggcagucauacccc

SEQ ID NO: 1230811 - RNA, 22 nt, Human
ggagcaucucccgccaagucuc

SEQ ID NO: 1230812 - RNA, 21 nt, Human
gggauguuagcuuugucugca

SEQ ID NO: 1230813 - RNA, 23 nt, Human
uaagcugagagaacacuccacga

SEQ ID NO: 1230814 - RNA, 23 nt, Human
ucauacccccaugauuccuggac

SEQ ID NO: 1230815 - RNA, 20 nt, Human
ugagagaacacuccacgaug

SEQ ID NO: 1230816 - RNA, 22 nt, Human
ugggauguuagcuuugucugca

SEQ ID NO: 1230817 - RNA, 20 nt, Human
ugucugggauguuagcuuug

SEQ ID NO: 1230818 - RNA, 21 nt, Human
uuugucugcagggguucccag

SEQ ID NO: 1230819 - RNA, 24 nt, Human
aaauaaauaaauaauagaaggcag

SEQ ID NO: 1230820 - RNA, 26 nt, Human
aaggcagcuuuaaauuaguauacuga

SEQ ID NO: 1230821 - RNA, 25 nt, Human
aggcagcuuuaaauuaguauacuga

SEQ ID NO: 1230822 - RNA, 27 nt, Human
auaaauaauagaaggcagccgguaccc

SEQ ID NO: 1230823 - RNA, 22 nt, Human
uaagaaaaauguuauauauaug

SEQ ID NO: 1230824 - RNA, 19 nt, Human
uagaagaaacaugcuagca

SEQ ID NO: 1230825 - RNA, 19 nt, Human
aaacauggucauauguacc

SEQ ID NO: 1230826 - RNA, 24 nt, Human
aaagugcugggauuacaggcguga

SEQ ID NO: 1230827 - RNA, 24 nt, Human
aaccaccaauacauagauuucuac

SEQ ID NO: 1230828 - RNA, 19 nt, Human
aaccuggaagggaccggcg

SEQ ID NO: 1230829 - RNA, 23 nt, Human
aaccuggaagggaccggcgcgcu

SEQ ID NO: 1230830 - RNA, 19 nt, Human
aaguagcugggacuacagg

SEQ ID NO: 1230831 - RNA, 20 nt, Human
aaguagcugggacuacaggu

SEQ ID NO: 1230832 - RNA, 19 nt, Human
aagugcugggauuacaggc

SEQ ID NO: 1230833 - RNA, 19 nt, Human
aagugcugggauuacaggc

SEQ ID NO: 1230834 - RNA, 26 nt, Human
aagugcugggauuacaggcgugagcc

SEQ ID NO: 1230835 - RNA, 21 nt, Human
acaguggcuugaucucggcuc

SEQ ID NO: 1230836 - RNA, 23 nt, Human
accucggccucccaaagugcugg

SEQ ID NO: 1230837 - RNA, 18 nt, Human
acugcaagcucugccucc

SEQ ID NO: 1230838 - RNA, 21 nt, Human
agaaauguauacaucucuagu

SEQ ID NO: 1230839 - RNA, 23 nt, Human
agaaauuuggcaucagguggaca

SEQ ID NO: 1230840 - RNA, 19 nt, Human
agacaagacauggauaacc

SEQ ID NO: 1230841 - RNA, 18 nt, Human
agcucugccuccuggguu

SEQ ID NO: 1230842 - RNA, 24 nt, Human
aguacaguggcuugaucucggcuc

SEQ ID NO: 1230843 - RNA, 22 nt, Human
aguaucccucacccccucagac

SEQ ID NO: 1230844 - RNA, 20 nt, Human
agucugcgggcgcuccgagg

SEQ ID NO: 1230845 - RNA, 18 nt, Human
agugcugggauuacaggc

SEQ ID NO: 1230846 - RNA, 24 nt, Human
augaucugcccaccucggccuccc

SEQ ID NO: 1230847 - RNA, 24 nt, Human
caaagugcugggauuacaggcgug

SEQ ID NO: 1230848 - RNA, 25 nt, Human
caaauauagacaaauacauaggaac

SEQ ID NO: 1230849 - RNA, 22 nt, Human
cacaccauucuccugccucagc

SEQ ID NO: 1230850 - RNA, 18 nt, Human
cacacccagccggucucu

SEQ ID NO: 1230851 - RNA, 20 nt, Human
caccacacccagccggucuc

SEQ ID NO: 1230852 - RNA, 18 nt, Human
caccguguuagccaggau

SEQ ID NO: 1230853 - RNA, 24 nt, Human
caccguguuagccaggauggucuc

SEQ ID NO: 1230854 - RNA, 23 nt, Human
cacugcaagcucugccuccuggg

SEQ ID NO: 1230855 - RNA, 22 nt, Human
ccaaagugcugggauuacaggc

SEQ ID NO: 1230856 - RNA, 22 nt, Human
ccaaagugcugggauuacaggc

SEQ ID NO: 1230857 - RNA, 24 nt, Human
ccaaagugcugggauuacaggcgu

SEQ ID NO: 1230858 - RNA, 21 nt, Human
ccaccaauacauagauuucua

SEQ ID NO: 1230859 - RNA, 20 nt, Human
ccaggcccagggagccgcgc

SEQ ID NO: 1230860 - RNA, 23 nt, Human
cccaaguagcugggacuacaggu

SEQ ID NO: 1230861 - RNA, 24 nt, Human
cccaaguagcugggacuacaggug

SEQ ID NO: 1230862 - RNA, 19 nt, Human
ccccucagacacgggcuag

SEQ ID NO: 1230863 - RNA, 20 nt, Human
cccuuuucucagagcucuga

SEQ ID NO: 1230864 - RNA, 18 nt, Human
ccugaaaaagacaacaac

SEQ ID NO: 1230865 - RNA, 23 nt, Human
ccugccucagccucccaaguagc

SEQ ID NO: 1230866 - RNA, 25 nt, Human
cgcgcggggcugcccggcugggcug

SEQ ID NO: 1230867 - RNA, 19 nt, Human
cggggcugcccggcugggc

SEQ ID NO: 1230868 - RNA, 24 nt, Human
cucacugcaagcucugccuccugg

SEQ ID NO: 1230869 - RNA, 19 nt, Human
cucagagcucugauauuuu

SEQ ID NO: 1230870 - RNA, 24 nt, Human
cucagccucccaaguagcugggac

SEQ ID NO: 1230871 - RNA, 19 nt, Human
cuccugaaaaagacaacaa

SEQ ID NO: 1230872 - RNA, 25 nt, Human
cuccugccucagccucccaaguagc

SEQ ID NO: 1230873 - RNA, 21 nt, Human
cuccuggguucacaccauucu

SEQ ID NO: 1230874 - RNA, 18 nt, Human
cucugucacccaggaugg

SEQ ID NO: 1230875 - RNA, 19 nt, Human
cugcaagcucugccuccug

SEQ ID NO: 1230876 - RNA, 23 nt, Human
cugccucagccucccaaguagcu

SEQ ID NO: 1230877 - RNA, 19 nt, Human
cugcgggcgcuccgaggcu

SEQ ID NO: 1230878 - RNA, 24 nt, Human
cuggguuucaccguguuagccagg

SEQ ID NO: 1230879 - RNA, 20 nt, Human
cuucugaccucaugaucugc

SEQ ID NO: 1230880 - RNA, 24 nt, Human
cuuugucccuuuucucagagcucu

SEQ ID NO: 1230881 - RNA, 22 nt, Human
gaaaaagacaacaacaucaaaa

SEQ ID NO: 1230882 - RNA, 22 nt, Human
gaccucaugaucugcccaccuc

SEQ ID NO: 1230883 - RNA, 20 nt, Human
gagcgcgcggggcugcccgg

SEQ ID NO: 1230884 - RNA, 18 nt, Human
gauuacaggcgugagcca

SEQ ID NO: 1230885 - RNA, 21 nt, Human
gauuacaggcgugagccacca

SEQ ID NO: 1230886 - RNA, 22 nt, Human
gauuacaggcgugagccaccac

SEQ ID NO: 1230887 - RNA, 25 nt, Human
gccuccuggguucacaccauucucc

SEQ ID NO: 1230888 - RNA, 20 nt, Human
gcuggguuucaccguguuag

SEQ ID NO: 1230889 - RNA, 24 nt, Human
gcuggguuucaccguguuagccag

SEQ ID NO: 1230890 - RNA, 24 nt, Human
ggauggucucgaucuucugaccuc

SEQ ID NO: 1230891 - RNA, 19 nt, Human
ggauuacaggcgugagcca

SEQ ID NO: 1230892 - RNA, 18 nt, Human
ggggcugcccggcugggc

SEQ ID NO: 1230893 - RNA, 21 nt, Human
ggguuucaccguguuagccag

SEQ ID NO: 1230894 - RNA, 20 nt, Human
gugccugcaaccacgccuag

SEQ ID NO: 1230895 - RNA, 24 nt, Human
uaaagauucuaaccagaaaugcua

SEQ ID NO: 1230896 - RNA, 18 nt, Human
uaagaaauuuggcaucag

SEQ ID NO: 1230897 - RNA, 24 nt, Human
uacaaaguuucaucauugccccca

SEQ ID NO: 1230898 - RNA, 24 nt, Human
uacaggcgugagccaccacaccca

SEQ ID NO: 1230899 - RNA, 23 nt, Human
uacauagauuucuacacuccuga

SEQ ID NO: 1230900 - RNA, 21 nt, Human
uaguagaggcuggguuucacc

SEQ ID NO: 1230901 - RNA, 23 nt, Human
uaguagaggcuggguuucaccgu

SEQ ID NO: 1230902 - RNA, 24 nt, Human
uaguagaggcuggguuucaccgug

SEQ ID NO: 1230903 - RNA, 21 nt, Human
ucacaccauucuccugccuca

SEQ ID NO: 1230904 - RNA, 24 nt, Human
ucaccguguuagccaggauggucu

SEQ ID NO: 1230905 - RNA, 18 nt, Human
ucacugcaagcucugccu

SEQ ID NO: 1230906 - RNA, 23 nt, Human
ucacugcaagcucugccuccugg

SEQ ID NO: 1230907 - RNA, 24 nt, Human
ucacugcaagcucugccuccuggg

SEQ ID NO: 1230908 - RNA, 18 nt, Human
ucagccucccaaguagcu

SEQ ID NO: 1230909 - RNA, 20 nt, Human
ucagccucccaaguagcugg

SEQ ID NO: 1230910 - RNA, 21 nt, Human
ucagguggacaacaucuaggu

SEQ ID NO: 1230911 - RNA, 24 nt, Human
ucccaaagugcugggauuacaggc

SEQ ID NO: 1230912 - RNA, 24 nt, Human
ucccaaguagcugggacuacaggu

SEQ ID NO: 1230913 - RNA, 18 nt, Human
ucccucacccccucagac

SEQ ID NO: 1230914 - RNA, 20 nt, Human
uccggagcccgcgcaaccug

SEQ ID NO: 1230915 - RNA, 24 nt, Human
uccuggguucacaccauucuccug

SEQ ID NO: 1230916 - RNA, 18 nt, Human
ucggccucccaaagugcu

SEQ ID NO: 1230917 - RNA, 26 nt, Human
ucucagagcucugauauuuuccuaac

SEQ ID NO: 1230918 - RNA, 28 nt, Human
ucucuugguuuacaaauauagacaaaua

SEQ ID NO: 1230919 - RNA, 24 nt, Human
ucugucacccaggauggaguacag

SEQ ID NO: 1230920 - RNA, 20 nt, Human
ucuugcucugucacccagga

SEQ ID NO: 1230921 - RNA, 24 nt, Human
ucuugcucugucacccaggaugga

SEQ ID NO: 1230922 - RNA, 22 nt, Human
ugaaaaagacaacaacaucaaa

SEQ ID NO: 1230923 - RNA, 22 nt, Human
ugagauggagucuugcucuguc

SEQ ID NO: 1230924 - RNA, 24 nt, Human
ugaucugcccaccucggccuccca

SEQ ID NO: 1230925 - RNA, 21 nt, Human
ugcccccaaccuuggaauuuc

SEQ ID NO: 1230926 - RNA, 27 nt, Human
ugcccggcugggcugggucucguccgg

SEQ ID NO: 1230927 - RNA, 24 nt, Human
ugccucagccucccaaguagcugg

SEQ ID NO: 1230928 - RNA, 19 nt, Human
ugccuccuggguucacacc

SEQ ID NO: 1230929 - RNA, 21 nt, Human
ugcgggcgcuccgaggcuccg

SEQ ID NO: 1230930 - RNA, 24 nt, Human
ugcugggauuacaggcgugagcca

SEQ ID NO: 1230931 - RNA, 22 nt, Human
uggaauuucagagugagagcau

SEQ ID NO: 1230932 - RNA, 19 nt, Human
uggaguacaguggcuugau

SEQ ID NO: 1230933 - RNA, 24 nt, Human
uggaguacaguggcuugaucucgg

SEQ ID NO: 1230934 - RNA, 19 nt, Human
uggagucuugcucugucac

SEQ ID NO: 1230935 - RNA, 22 nt, Human
uggcaaaugacaaccaccaaua

SEQ ID NO: 1230936 - RNA, 19 nt, Human
ugggacuacaggugccugc

SEQ ID NO: 1230937 - RNA, 24 nt, Human
ugggacuacaggugccugcaacca

SEQ ID NO: 1230938 - RNA, 18 nt, Human
ugggauuacaggcgugag

SEQ ID NO: 1230939 - RNA, 19 nt, Human
ugggauuacaggcgugagc

SEQ ID NO: 1230940 - RNA, 22 nt, Human
ugggauuacaggcgugagccac

SEQ ID NO: 1230941 - RNA, 23 nt, Human
ugggauuacaggcgugagccacc

SEQ ID NO: 1230942 - RNA, 24 nt, Human
ugggauuacaggcgugagccacca

SEQ ID NO: 1230943 - RNA, 20 nt, Human
uggguucacaccauucuccu

SEQ ID NO: 1230944 - RNA, 23 nt, Human
uggguuucaccguguuagccagg

SEQ ID NO: 1230945 - RNA, 21 nt, Human
ugucccuuuucucagagcucu

SEQ ID NO: 1230946 - RNA, 22 nt, Human
uuaguagaggcuggguuucacc

SEQ ID NO: 1230947 - RNA, 24 nt, Human
uuaguagaggcuggguuucaccgu

SEQ ID NO: 1230948 - RNA, 21 nt, Human
uugagauggagucuugcucug

SEQ ID NO: 1230949 - RNA, 24 nt, Human
uugcuuugucccuuuucucagagc

SEQ ID NO: 1230950 - RNA, 19 nt, Human
uuucaccguguuagccagg

SEQ ID NO: 1230951 - RNA, 22 nt, Human
uuugucccuuuucucagagcuc

SEQ ID NO: 1230952 - RNA, 24 nt, Human
uuuuuaguagaggcuggguuucac

SEQ ID NO: 1230953 - RNA, 20 nt, Human
uuuuuguauuuuuaguagag

SEQ ID NO: 1230954 - RNA, 18 nt, Human
uuuuuuguauuuuuagua

SEQ ID NO: 1230955 - RNA, 22 nt, Human
uuuuuuguauuuuuaguagagg

SEQ ID NO: 1230956 - RNA, 29 nt, Human
uuuuuuuuuuuuuguauuuuuaguagagg

SEQ ID NO: 1230957 - RNA, 20 nt, Human
aaaaguacauagcgacacuc

SEQ ID NO: 1230958 - RNA, 24 nt, Human
aaauugcugggauuacagguguga

SEQ ID NO: 1230959 - RNA, 19 nt, Human
acccagcuggggcuggagu

SEQ ID NO: 1230960 - RNA, 19 nt, Human
acucacuugucuccauccu

SEQ ID NO: 1230961 - RNA, 24 nt, Human
acucugucacccagcuggggcugg

SEQ ID NO: 1230962 - RNA, 18 nt, Human
acucuguucuucagugcu

SEQ ID NO: 1230963 - RNA, 24 nt, Human
aucauguugguaaggcuguucuug

SEQ ID NO: 1230964 - RNA, 18 nt, Human
auugcugggauuacaggu

SEQ ID NO: 1230965 - RNA, 24 nt, Human
caaauugcugggauuacaggugug

SEQ ID NO: 1230966 - RNA, 23 nt, Human
caaccuccaccucccagguucaa

SEQ ID NO: 1230967 - RNA, 22 nt, Human
caagggauucuccugcuucagc

SEQ ID NO: 1230968 - RNA, 24 nt, Human
caagggauucuccugcuucagccu

SEQ ID NO: 1230969 - RNA, 18 nt, Human
cacccaccaccacgccug

SEQ ID NO: 1230970 - RNA, 22 nt, Human
cacucugucacccagcuggggc

SEQ ID NO: 1230971 - RNA, 29 nt, Human
cacucugucacccagcuggggcuggagug

SEQ ID NO: 1230972 - RNA, 20 nt, Human
cacugcaaccuccaccuccc

SEQ ID NO: 1230973 - RNA, 19 nt, Human
cagcagccugggaaccagc

SEQ ID NO: 1230974 - RNA, 19 nt, Human
cagguucaagggauucucc

SEQ ID NO: 1230975 - RNA, 24 nt, Human
cagguuguuuuguuuuuguuuuug

SEQ ID NO: 1230976 - RNA, 24 nt, Human
caucauguugguaaggcuguucuu

SEQ ID NO: 1230977 - RNA, 20 nt, Human
cauguugguaaggcuguucu

SEQ ID NO: 1230978 - RNA, 24 nt, Human
cauguugguaaggcuguucuugaa

SEQ ID NO: 1230979 - RNA, 21 nt, Human
ccaaauugcugggauuacagg

SEQ ID NO: 1230980 - RNA, 21 nt, Human
ccaaauugcugggauuacagg

SEQ ID NO: 1230981 - RNA, 24 nt, Human
ccaaauugcugggauuacaggugu

SEQ ID NO: 1230982 - RNA, 24 nt, Human
ccacugcaaccuccaccucccagg

SEQ ID NO: 1230983 - RNA, 27 nt, Human
ccacugcaaccuccaccucccagguuc

SEQ ID NO: 1230984 - RNA, 22 nt, Human
cccaaguaccugggauuagagu

SEQ ID NO: 1230985 - RNA, 24 nt, Human
cccacugcaaccuccaccucccag

SEQ ID NO: 1230986 - RNA, 24 nt, Human
ccucccagguucaagggauucucc

SEQ ID NO: 1230987 - RNA, 21 nt, Human
ccugaccucaguugauccacc

SEQ ID NO: 1230988 - RNA, 23 nt, Human
ccugaccucaguugauccaccug

SEQ ID NO: 1230989 - RNA, 21 nt, Human
ccugccuuggucucccaaauu

SEQ ID NO: 1230990 - RNA, 22 nt, Human
ccuuggucucccaaauugcugg

SEQ ID NO: 1230991 - RNA, 24 nt, Human
cgccuggguaauuuuuguauuuuu

SEQ ID NO: 1230992 - RNA, 23 nt, Human
cucacucugucacccagcugggg

SEQ ID NO: 1230993 - RNA, 24 nt, Human
cucaguugauccaccugccuuggu

SEQ ID NO: 1230994 - RNA, 25 nt, Human
cuccauccucagucaucuuuuaaaa

SEQ ID NO: 1230995 - RNA, 23 nt, Human
cugcaaccuccaccucccagguu

SEQ ID NO: 1230996 - RNA, 24 nt, Human
cugcaaccuccaccucccagguuc

SEQ ID NO: 1230997 - RNA, 24 nt, Human
gaccucaguugauccaccugccuu

SEQ ID NO: 1230998 - RNA, 22 nt, Human
gagaugguuucaucauguuggu

SEQ ID NO: 1230999 - RNA, 18 nt, Human
gauuacaggugugagcca

SEQ ID NO: 1231000 - RNA, 21 nt, Human
gauuacaggugugagccacca

SEQ ID NO: 1231001 - RNA, 22 nt, Human
gauuacaggugugagccaccac

SEQ ID NO: 1231002 - RNA, 22 nt, Human
gauucuccugcuucagccuccc

SEQ ID NO: 1231003 - RNA, 24 nt, Human
gccuuggucucccaaauugcuggg

SEQ ID NO: 1231004 - RNA, 22 nt, Human
ggauucuccugcuucagccucc

SEQ ID NO: 1231005 - RNA, 24 nt, Human
ggcuggagugcaguagcacgaucu

SEQ ID NO: 1231006 - RNA, 24 nt, Human
ggcuguucuugaacuccugaccuc

SEQ ID NO: 1231007 - RNA, 21 nt, Human
guuguuuuguuuuuguuuuug

SEQ ID NO: 1231008 - RNA, 24 nt, Human
uaauuuuuguauuuuuagaagaga

SEQ ID NO: 1231009 - RNA, 22 nt, Human
uacaggugugagccaccacacc

SEQ ID NO: 1231010 - RNA, 22 nt, Human
uacaggugugagccaccacacc

SEQ ID NO: 1231011 - RNA, 23 nt, Human
uacaggugugagccaccacaccu

SEQ ID NO: 1231012 - RNA, 22 nt, Human
uagaagagaugguuucaucaug

SEQ ID NO: 1231013 - RNA, 22 nt, Human
uagagucacccaccaccacgcc

SEQ ID NO: 1231014 - RNA, 23 nt, Human
ucacugaaaauugccuuggaguu

SEQ ID NO: 1231015 - RNA, 21 nt, Human
ucagucaucuuuuaaaaguac

SEQ ID NO: 1231016 - RNA, 23 nt, Human
ucccaaauugcugggauuacagg

SEQ ID NO: 1231017 - RNA, 24 nt, Human
ucccaaauugcugggauuacaggu

SEQ ID NO: 1231018 - RNA, 21 nt, Human
ucccagguucaagggauucuc

SEQ ID NO: 1231019 - RNA, 24 nt, Human
ucccagguucaagggauucuccug

SEQ ID NO: 1231020 - RNA, 23 nt, Human
ucucacucugucacccagcuggg

SEQ ID NO: 1231021 - RNA, 30 nt, Human
ucucacucugucacccagcuggggcuggaa

SEQ ID NO: 1231022 - RNA, 21 nt, Human
ucuccauccucagucaucuuu

SEQ ID NO: 1231023 - RNA, 23 nt, Human
ucuucagugcugcaauuucugau

SEQ ID NO: 1231024 - RNA, 20 nt, Human
ugaacuccugaccucaguug

SEQ ID NO: 1231025 - RNA, 24 nt, Human
ugaccucaguugauccaccugccu

SEQ ID NO: 1231026 - RNA, 20 nt, Human
ugcugggauuacagguguga

SEQ ID NO: 1231027 - RNA, 24 nt, Human
ugcugggauuacaggugugagcca

SEQ ID NO: 1231028 - RNA, 24 nt, Human
ugcuucagccucccaaguaccugg

SEQ ID NO: 1231029 - RNA, 23 nt, Human
uggagugcaguagcacgaucuug

SEQ ID NO: 1231030 - RNA, 24 nt, Human
uggagugcaguagcacgaucuugg

SEQ ID NO: 1231031 - RNA, 22 nt, Human
ugggacuuucggagcagcagcc

SEQ ID NO: 1231032 - RNA, 23 nt, Human
ugggacuuucggagcagcagccu

SEQ ID NO: 1231033 - RNA, 18 nt, Human
ugggauuacaggugugag

SEQ ID NO: 1231034 - RNA, 19 nt, Human
ugggauuacaggugugagc

SEQ ID NO: 1231035 - RNA, 22 nt, Human
ugggauuacaggugugagccac

SEQ ID NO: 1231036 - RNA, 23 nt, Human
ugggauuacaggugugagccacc

SEQ ID NO: 1231037 - RNA, 24 nt, Human
ugggauuacaggugugagccacca

SEQ ID NO: 1231038 - RNA, 24 nt, Human
ugguaaggcuguucuugaacuccu

SEQ ID NO: 1231039 - RNA, 26 nt, Human
ugucacccagcuggggcuggagugca

SEQ ID NO: 1231040 - RNA, 22 nt, Human
uuagaagagaugguuucaucau

SEQ ID NO: 1231041 - RNA, 18 nt, Human
uucaagggauucuccugc

SEQ ID NO: 1231042 - RNA, 24 nt, Human
uucuucagugcugcaauuucugau

SEQ ID NO: 1231043 - RNA, 25 nt, Human
uugagacagugucucacucugucac

SEQ ID NO: 1231044 - RNA, 24 nt, Human
uugauccaccugccuuggucuccc

SEQ ID NO: 1231045 - RNA, 19 nt, Human
uugcugggauuacaggugu

SEQ ID NO: 1231046 - RNA, 19 nt, Human
uuguuuuuguuuuguuuuu

SEQ ID NO: 1231047 - RNA, 21 nt, Human
uuucaucauguugguaaggcu

SEQ ID NO: 1231048 - RNA, 21 nt, Human
uuuuuagaagagaugguuuca

SEQ ID NO: 1231049 - RNA, 20 nt, Human
uuuuuguauuuuuagaagag

SEQ ID NO: 1231050 - RNA, 23 nt, Human
uuuuuguauuuuuagaagagaug

SEQ ID NO: 1231051 - RNA, 18 nt, Human
aaaaaagucccuuuccuu

SEQ ID NO: 1231052 - RNA, 21 nt, Human
aaaaaggcuuauuauaaaaaa

SEQ ID NO: 1231053 - RNA, 24 nt, Human
aaaacauaaacccaugaagaaaau

SEQ ID NO: 1231054 - RNA, 24 nt, Human
aaaauacucuuuuccagcuaauua

SEQ ID NO: 1231055 - RNA, 21 nt, Human
aaagaaggaguggggaaaggg

SEQ ID NO: 1231056 - RNA, 24 nt, Human
aaaguggcgagucuggguuuggag

SEQ ID NO: 1231057 - RNA, 18 nt, Human
aaccagaugcuugcuagc

SEQ ID NO: 1231058 - RNA, 19 nt, Human
aaggaguggggaaagggag

SEQ ID NO: 1231059 - RNA, 19 nt, Human
aaggaguggggaaagggag

SEQ ID NO: 1231060 - RNA, 23 nt, Human
acaaaacccaccgaaaaucagca

SEQ ID NO: 1231061 - RNA, 25 nt, Human
acaaacaaaaaacagcugggauaug

SEQ ID NO: 1231062 - RNA, 20 nt, Human
acauauuagaaaccauaaaa

SEQ ID NO: 1231063 - RNA, 18 nt, Human
accacagauacaaaaaua

SEQ ID NO: 1231064 - RNA, 20 nt, Human
accuccuauacauaauaacu

SEQ ID NO: 1231065 - RNA, 22 nt, Human
acugcagcuuacaugggaaauu

SEQ ID NO: 1231066 - RNA, 21 nt, Human
agaaggaguggggaaagggag

SEQ ID NO: 1231067 - RNA, 21 nt, Human
agaaggggaagcagggcgcgg

SEQ ID NO: 1231068 - RNA, 18 nt, Human
agaagugguggcaacaca

SEQ ID NO: 1231069 - RNA, 25 nt, Human
agccagggguuggggggaagaagcu

SEQ ID NO: 1231070 - RNA, 21 nt, Human
aggaaacgaacauuaguguug

SEQ ID NO: 1231071 - RNA, 27 nt, Human
auaaacccaugaagaaaaugcaaccca

SEQ ID NO: 1231072 - RNA, 21 nt, Human
auggagggagaagggagggaa

SEQ ID NO: 1231073 - RNA, 21 nt, Human
auuuaaaaauccccucucccc

SEQ ID NO: 1231074 - RNA, 23 nt, Human
caaacaaaaaacagcugggauau

SEQ ID NO: 1231075 - RNA, 20 nt, Human
cacaaaccaaaaaguauacg

SEQ ID NO: 1231076 - RNA, 21 nt, Human
cacugugcgagcgugugugua

SEQ ID NO: 1231077 - RNA, 23 nt, Human
cacuguucagcugcaguguggca

SEQ ID NO: 1231078 - RNA, 25 nt, Human
cacuugaacugaggucuaaggaaac

SEQ ID NO: 1231079 - RNA, 21 nt, Human
cagaaaaugaugaugggcuaa

SEQ ID NO: 1231080 - RNA, 23 nt, Human
cagaaccaguuggcugaccuaac

SEQ ID NO: 1231081 - RNA, 26 nt, Human
cagcgucccuggcuggaauggugccc

SEQ ID NO: 1231082 - RNA, 18 nt, Human
cagggcgcgggauagggu

SEQ ID NO: 1231083 - RNA, 19 nt, Human
ccaaaaugaaacgaaaaca

SEQ ID NO: 1231084 - RNA, 21 nt, Human
ccaggcauggaugagguucuc

SEQ ID NO: 1231085 - RNA, 19 nt, Human
cgaaaaucagcaguuccaa

SEQ ID NO: 1231086 - RNA, 22 nt, Human
cgagcuggaaacagccccauga

SEQ ID NO: 1231087 - RNA, 21 nt, Human
cgccccccuucuucacaucuc

SEQ ID NO: 1231088 - RNA, 20 nt, Human
cgccugucccgcggcgggca

SEQ ID NO: 1231089 - RNA, 21 nt, Human
cgcucgccccccuucuucaca

SEQ ID NO: 1231090 - RNA, 22 nt, Human
cgcuugcccuccucgcuccuug

SEQ ID NO: 1231091 - RNA, 23 nt, Human
cuaauccuugcaacguauuagaa

SEQ ID NO: 1231092 - RNA, 18 nt, Human
cugcugcagugugggcgg

SEQ ID NO: 1231093 - RNA, 22 nt, Human
cuggaggcuggcugaagguuuu

SEQ ID NO: 1231094 - RNA, 20 nt, Human
cuuggaguggaagggagcgg

SEQ ID NO: 1231095 - RNA, 23 nt, Human
gaaaaaucaacuacaaaacccac

SEQ ID NO: 1231096 - RNA, 19 nt, Human
gaaacgaaaacauaaaccc

SEQ ID NO: 1231097 - RNA, 26 nt, Human
gaagggagcgggggagaagaugagag

SEQ ID NO: 1231098 - RNA, 23 nt, Human
gaaggguuuuuacauauggccuu

SEQ ID NO: 1231099 - RNA, 23 nt, Human
gagacccuagagaaagaccccaa

SEQ ID NO: 1231100 - RNA, 19 nt, Human
gauagaaacugcagcuuac

SEQ ID NO: 1231101 - RNA, 21 nt, Human
gaugagcuuguggacgagcug

SEQ ID NO: 1231102 - RNA, 22 nt, Human
gcagggggaguggagagucuac

SEQ ID NO: 1231103 - RNA, 19 nt, Human
gccucgagguaccagggag

SEQ ID NO: 1231104 - RNA, 26 nt, Human
gccugauuuggggagggggggcggcu

SEQ ID NO: 1231105 - RNA, 20 nt, Human
gcgggcagcuuugcucccuu

SEQ ID NO: 1231106 - RNA, 23 nt, Human
ggaaaaaagucccuuuccuugaa

SEQ ID NO: 1231107 - RNA, 18 nt, Human
ggaaaauacuacacacug

SEQ ID NO: 1231108 - RNA, 18 nt, Human
ggaaacagccccaugaag

SEQ ID NO: 1231109 - RNA, 24 nt, Human
ggaagaacagccggcguccgcaag

SEQ ID NO: 1231110 - RNA, 21 nt, Human
ggaagguggucucucgacagc

SEQ ID NO: 1231111 - RNA, 18 nt, Human
ggagaagggagggaaacu

SEQ ID NO: 1231112 - RNA, 22 nt, Human
gggaggcuucuggacagaaaau

SEQ ID NO: 1231113 - RNA, 28 nt, Human
gggcgcgggauaggguuugggggaaggg

SEQ ID NO: 1231114 - RNA, 24 nt, Human
gggggaagguggucucucgacagc

SEQ ID NO: 1231115 - RNA, 18 nt, Human
gggggcagaaaaugauga

SEQ ID NO: 1231116 - RNA, 24 nt, Human
ggguuuggaguugcaggagaaaga

SEQ ID NO: 1231117 - RNA, 25 nt, Human
gguuggggggaagaagcucccuaug

SEQ ID NO: 1231118 - RNA, 19 nt, Human
gugaaccaagagaaagaga

SEQ ID NO: 1231119 - RNA, 27 nt, Human
uaaaaaggcuuauuauaaaaaaaucaa

SEQ ID NO: 1231120 - RNA, 18 nt, Human
uaaaaauccccucucccc

SEQ ID NO: 1231121 - RNA, 23 nt, Human
uaaaauagccagggguugggggg

SEQ ID NO: 1231122 - RNA, 21 nt, Human
uaaacccaugaagaaaaugca

SEQ ID NO: 1231123 - RNA, 22 nt, Human
uaaacccaugaagaaaaugcaa

SEQ ID NO: 1231124 - RNA, 24 nt, Human
uaaccgaugccuucacaaaccaaa

SEQ ID NO: 1231125 - RNA, 18 nt, Human
uaacuagcucaccuccua

SEQ ID NO: 1231126 - RNA, 19 nt, Human
uaauguuuuguuaccacag

SEQ ID NO: 1231127 - RNA, 22 nt, Human
uacaaaacccaccgaaaaucag

SEQ ID NO: 1231128 - RNA, 25 nt, Human
uauuagaaaaauacucuuuuccagc

SEQ ID NO: 1231129 - RNA, 22 nt, Human
ucacaaaccaaaaaguauacgu

SEQ ID NO: 1231130 - RNA, 18 nt, Human
ucaccuagacgccugucc

SEQ ID NO: 1231131 - RNA, 18 nt, Human
uccaagaggaugcaaugc

SEQ ID NO: 1231132 - RNA, 25 nt, Human
uccguggcaaggcgacaggcagaac

SEQ ID NO: 1231133 - RNA, 19 nt, Human
uccuuggaguggaagggag

SEQ ID NO: 1231134 - RNA, 20 nt, Human
ucgccugauuuggggagggg

SEQ ID NO: 1231135 - RNA, 21 nt, Human
ucucagucuauuacgggugaa

SEQ ID NO: 1231136 - RNA, 21 nt, Human
ucuccaggcauggaugagguu

SEQ ID NO: 1231137 - RNA, 21 nt, Human
ucuccggagaucgccugauuu

SEQ ID NO: 1231138 - RNA, 24 nt, Human
ucucugcuccuuuuccaaacugga

SEQ ID NO: 1231139 - RNA, 20 nt, Human
ugaaacgaaaacauaaaccc

SEQ ID NO: 1231140 - RNA, 21 nt, Human
ugaaagaagagagaaacaggu

SEQ ID NO: 1231141 - RNA, 22 nt, Human
ugaaccagaugcuugcuagcga

SEQ ID NO: 1231142 - RNA, 23 nt, Human
ugaaccagaugcuugcuagcgac

SEQ ID NO: 1231143 - RNA, 23 nt, Human
ugaagacugguguccugugugca

SEQ ID NO: 1231144 - RNA, 21 nt, Human
ugaaugaagacgucuacuaac

SEQ ID NO: 1231145 - RNA, 19 nt, Human
ugacaaacaaaaaacagcu

SEQ ID NO: 1231146 - RNA, 24 nt, Human
ugaccuaaccaccugugcacccaa

SEQ ID NO: 1231147 - RNA, 19 nt, Human
ugauuuggggagggggggc

SEQ ID NO: 1231148 - RNA, 21 nt, Human
ugcaucagugaaucauuucaa

SEQ ID NO: 1231149 - RNA, 18 nt, Human
ugcucccuucaucuuccu

SEQ ID NO: 1231150 - RNA, 21 nt, Human
ugcugcagugugggcggcagg

SEQ ID NO: 1231151 - RNA, 24 nt, Human
ugcugcagugugggcggcaggggg

SEQ ID NO: 1231152 - RNA, 22 nt, Human
uggaagaggcgggggaggagga

SEQ ID NO: 1231153 - RNA, 18 nt, Human
uggagggagaagggaggg

SEQ ID NO: 1231154 - RNA, 22 nt, Human
uggcagacuggaaaaaaguccc

SEQ ID NO: 1231155 - RNA, 21 nt, Human
uggcgaagguuccuuccucag

SEQ ID NO: 1231156 - RNA, 19 nt, Human
uggcgggaagaacagccgg

SEQ ID NO: 1231157 - RNA, 19 nt, Human
uggcugcggauggagggag

SEQ ID NO: 1231158 - RNA, 21 nt, Human
ugggggggcagaaaaugauga

SEQ ID NO: 1231159 - RNA, 24 nt, Human
ugggggggcagaaaaugaugaugg

SEQ ID NO: 1231160 - RNA, 21 nt, Human
uggguuuggaguugcaggaga

SEQ ID NO: 1231161 - RNA, 22 nt, Human
uguacaucauacacuuguauau

SEQ ID NO: 1231162 - RNA, 27 nt, Human
uguacaucauacacuuguauauauauu

SEQ ID NO: 1231163 - RNA, 22 nt, Human
uguauggauguggcugcugcag

SEQ ID NO: 1231164 - RNA, 18 nt, Human
uguccgcucgccccccuu

SEQ ID NO: 1231165 - RNA, 19 nt, Human
uguggacgagcuggaaaca

SEQ ID NO: 1231166 - RNA, 24 nt, Human
uuaaugugagcaaauagcuugggg

SEQ ID NO: 1231167 - RNA, 23 nt, Human
uuaguauacagguaaagaaugaa

SEQ ID NO: 1231168 - RNA, 25 nt, Human
uuaguauacagguaaagaaugaauu

SEQ ID NO: 1231169 - RNA, 19 nt, Human
uucaucuuccuguccgcuc

SEQ ID NO: 1231170 - RNA, 19 nt, Human
uuccugauucucacaaguu

SEQ ID NO: 1231171 - RNA, 19 nt, Human
uugcucccuucaucuuccc

SEQ ID NO: 1231172 - RNA, 20 nt, Human
uugcucccuucaucuuccug

SEQ ID NO: 1231173 - RNA, 19 nt, Human
uuggucauacauauuagaa

SEQ ID NO: 1231174 - RNA, 20 nt, Human
uuggugaugugaaauugagu

SEQ ID NO: 1231175 - RNA, 24 nt, Human
uuguguuugaggaaacuauuuggu

SEQ ID NO: 1231176 - RNA, 23 nt, Human
uuguuaauaguacaggagucugu

SEQ ID NO: 1231177 - RNA, 19 nt, Human
uuucuagauguucuccagg

SEQ ID NO: 1231178 - RNA, 21 nt, Human
aacaaaaaucacuuuauucac

SEQ ID NO: 1231179 - RNA, 19 nt, Human
aacaugauuuuguacccuc

SEQ ID NO: 1231180 - RNA, 21 nt, Human
aagauccagccuuucccccac

SEQ ID NO: 1231181 - RNA, 22 nt, Human
agauuugaauuuuuaaaaaauu

SEQ ID NO: 1231182 - RNA, 19 nt, Human
cagccuuucccccacgagu

SEQ ID NO: 1231183 - RNA, 19 nt, Human
ccagagcaggauuuuaaga

SEQ ID NO: 1231184 - RNA, 21 nt, Human
ggacgacgucaacauguccuc

SEQ ID NO: 1231185 - RNA, 22 nt, Human
ugcacaaagguaaaauaauauc

SEQ ID NO: 1231186 - RNA, 25 nt, Human
uuccccauuguuuuguuguuucaac

SEQ ID NO: 1231187 - RNA, 19 nt, Human
uugcacauggcucacuccu

SEQ ID NO: 1231188 - RNA, 18 nt, Human
uugcuuaauuccccauug

SEQ ID NO: 1231189 - RNA, 20 nt, Human
uuuaagacucucggacgacg

SEQ ID NO: 1231190 - RNA, 21 nt, Human
uuuauucacaugccagaacag

SEQ ID NO: 1231191 - RNA, 23 nt, Human
uuucccccacgagucuggaaucc

SEQ ID NO: 1231192 - RNA, 19 nt, Human
aagcugccgcuaccgagcc

SEQ ID NO: 1231193 - RNA, 27 nt, Human
aauguccaccucuucccagcgcugggc

SEQ ID NO: 1231194 - RNA, 18 nt, Human
acaccccgcccccgcccg

SEQ ID NO: 1231195 - RNA, 21 nt, Human
acuuguagaaggccagaauag

SEQ ID NO: 1231196 - RNA, 22 nt, Human
agaaggccagaauaguggagug

SEQ ID NO: 1231197 - RNA, 23 nt, Human
agcgccucuguuaccugcagugg

SEQ ID NO: 1231198 - RNA, 21 nt, Human
caaguuuuuugcuucaucaca

SEQ ID NO: 1231199 - RNA, 21 nt, Human
cacaccccgcccccgcccgcu

SEQ ID NO: 1231200 - RNA, 18 nt, Human
caccgcccgcgcucgcgc

SEQ ID NO: 1231201 - RNA, 20 nt, Human
ccauagauaaauauucagca

SEQ ID NO: 1231202 - RNA, 22 nt, Human
ccccgcccccgcccgcuugcag

SEQ ID NO: 1231203 - RNA, 21 nt, Human
cccgcgcucgcgcccugaagc

SEQ ID NO: 1231204 - RNA, 18 nt, Human
ccgcaaccccguccgcag

SEQ ID NO: 1231205 - RNA, 22 nt, Human
ccucgcagcgccucuguuaccu

SEQ ID NO: 1231206 - RNA, 19 nt, Human
cgccucuguuaccugcagu

SEQ ID NO: 1231207 - RNA, 24 nt, Human
cugaagcugccgcuaccgagcccg

SEQ ID NO: 1231208 - RNA, 22 nt, Human
gagcccgcaaccccguccgcag

SEQ ID NO: 1231209 - RNA, 19 nt, Human
gcaucgcaguucuacuacu

SEQ ID NO: 1231210 - RNA, 24 nt, Human
gccucacaccccgcccccgcccgc

SEQ ID NO: 1231211 - RNA, 21 nt, Human
guccgcagcgccucacacccc

SEQ ID NO: 1231212 - RNA, 24 nt, Human
uaaucucugugccucaauuuccuc

SEQ ID NO: 1231213 - RNA, 24 nt, Human
ucucugugccucaauuuccucauc

SEQ ID NO: 1231214 - RNA, 22 nt, Human
ugguucagauuaguuaaucucu

SEQ ID NO: 1231215 - RNA, 22 nt, Human
uguagaaggccagaauagugga

SEQ ID NO: 1231216 - RNA, 18 nt, Human
uguccaaguuugcaucgc

SEQ ID NO: 1231217 - RNA, 23 nt, Human
uguccaaguuugcaucgcaguuc

SEQ ID NO: 1231218 - RNA, 21 nt, Human
uugcaucgcaguucuacuacu

SEQ ID NO: 1231219 - RNA, 23 nt, Human
aagcagccaggccaccacgggca

SEQ ID NO: 1231220 - RNA, 24 nt, Human
agagaggaguuucccacaggauug

SEQ ID NO: 1231221 - RNA, 18 nt, Human
aggcuccaucagggcagu

SEQ ID NO: 1231222 - RNA, 22 nt, Human
agguccacucuucacagacagc

SEQ ID NO: 1231223 - RNA, 22 nt, Human
agguccuggcaugcagcagaug

SEQ ID NO: 1231224 - RNA, 18 nt, Human
caccacgggcaagagagu

SEQ ID NO: 1231225 - RNA, 20 nt, Human
cacucuucacagacagcaag

SEQ ID NO: 1231226 - RNA, 19 nt, Human
cagccaggccaccacgggc

SEQ ID NO: 1231227 - RNA, 22 nt, Human
ccugcuggcaaccccaguucca

SEQ ID NO: 1231228 - RNA, 23 nt, Human
gcagguccuggcaugcagcagau

SEQ ID NO: 1231229 - RNA, 20 nt, Human
gcaugcagcagaugcccagu

SEQ ID NO: 1231230 - RNA, 20 nt, Human
gcaugcagcagaugcccagu

SEQ ID NO: 1231231 - RNA, 21 nt, Human
ggcuccaucagggcaguccca

SEQ ID NO: 1231232 - RNA, 21 nt, Human
gggcaagagagugcagcucuu

SEQ ID NO: 1231233 - RNA, 25 nt, Human
uacacggccaccagggagacgcagc

SEQ ID NO: 1231234 - RNA, 19 nt, Human
ucacagacagcaagcagcc

SEQ ID NO: 1231235 - RNA, 22 nt, Human
ucacagacagcaagcagccagg

SEQ ID NO: 1231236 - RNA, 19 nt, Human
ucccaccgcuucugagccu

SEQ ID NO: 1231237 - RNA, 19 nt, Human
ucuagagaggaguuuccca

SEQ ID NO: 1231238 - RNA, 19 nt, Human
ugaaugugucucauuuguu

SEQ ID NO: 1231239 - RNA, 20 nt, Human
ugcagcagaugcccagugaa

SEQ ID NO: 1231240 - RNA, 19 nt, Human
ugcuggcaaccccaguucc

SEQ ID NO: 1231241 - RNA, 19 nt, Human
uucacagacagcaagcagc

SEQ ID NO: 1231242 - RNA, 24 nt, Human
uucacagacagcaagcagccaggc

SEQ ID NO: 1231243 - RNA, 18 nt, Human
aacacccuccuaauacaa

SEQ ID NO: 1231244 - RNA, 21 nt, Human
aacacccuccuaauacaaaag

SEQ ID NO: 1231245 - RNA, 20 nt, Human
aaggagaaacaacccgaggc

SEQ ID NO: 1231246 - RNA, 20 nt, Human
agaaacccccaggguuuaga

SEQ ID NO: 1231247 - RNA, 18 nt, Human
agacaguccccauccuga

SEQ ID NO: 1231248 - RNA, 24 nt, Human
agacaguccccauccugaaauuca

SEQ ID NO: 1231249 - RNA, 21 nt, Human
aggaacccacccugagucacc

SEQ ID NO: 1231250 - RNA, 18 nt, Human
auaaacucaggugugguc

SEQ ID NO: 1231251 - RNA, 25 nt, Human
auacaucuucuguuaugcaacaccc

SEQ ID NO: 1231252 - RNA, 20 nt, Human
auccaggacaaagaccugau

SEQ ID NO: 1231253 - RNA, 21 nt, Human
caacacccuccuaauacaaaa

SEQ ID NO: 1231254 - RNA, 22 nt, Human
cacccugagucaccucauuagc

SEQ ID NO: 1231255 - RNA, 18 nt, Human
cacuucugagaaaccccc

SEQ ID NO: 1231256 - RNA, 18 nt, Human
cagaacugggucuuccug

SEQ ID NO: 1231257 - RNA, 21 nt, Human
cagcagacaguccccauccug

SEQ ID NO: 1231258 - RNA, 21 nt, Human
caggacuaaugcagacgcucc

SEQ ID NO: 1231259 - RNA, 19 nt, Human
caggggcccgccaggacua

SEQ ID NO: 1231260 - RNA, 22 nt, Human
ccacgacugaggagcugaaggc

SEQ ID NO: 1231261 - RNA, 21 nt, Human
ccagcuguguaucugcagcuu

SEQ ID NO: 1231262 - RNA, 24 nt, Human
cgccaggacuaaugcagacgcucc

SEQ ID NO: 1231263 - RNA, 18 nt, Human
cggcaggaaaggacaccc

SEQ ID NO: 1231264 - RNA, 18 nt, Human
cggcuccugggcuuuccu

SEQ ID NO: 1231265 - RNA, 19 nt, Human
cggcuccugggcuuuccuc

SEQ ID NO: 1231266 - RNA, 18 nt, Human
cucaaagccccaacccuc

SEQ ID NO: 1231267 - RNA, 20 nt, Human
cuccacacuucugagaaacc

SEQ ID NO: 1231268 - RNA, 20 nt, Human
cugaaggcccuccaggccca

SEQ ID NO: 1231269 - RNA, 19 nt, Human
gacugcugggagguugggc

SEQ ID NO: 1231270 - RNA, 22 nt, Human
gcagcuuuguucuucuguuucu

SEQ ID NO: 1231271 - RNA, 21 nt, Human
gcaucuggguugccuccagcu

SEQ ID NO: 1231272 - RNA, 24 nt, Human
gcaugcugagcugccagaacuggg

SEQ ID NO: 1231273 - RNA, 18 nt, Human
ggccuuucccagcugugu

SEQ ID NO: 1231274 - RNA, 23 nt, Human
gggcaucuggguugccuccagcu

SEQ ID NO: 1231275 - RNA, 21 nt, Human
gggucuuucagcagacagucc

SEQ ID NO: 1231276 - RNA, 18 nt, Human
ggugcacacgugucucug

SEQ ID NO: 1231277 - RNA, 21 nt, Human
gguguggucccaggggcccgc

SEQ ID NO: 1231278 - RNA, 22 nt, Human
gucaccucauuagcauaaacuc

SEQ ID NO: 1231279 - RNA, 19 nt, Human
guggucccaggggcccgcc

SEQ ID NO: 1231280 - RNA, 22 nt, Human
uaaugcagacgcuccacacuuc

SEQ ID NO: 1231281 - RNA, 19 nt, Human
uacagcaaugucacagaca

SEQ ID NO: 1231282 - RNA, 20 nt, Human
uacagcaaugucacagacau

SEQ ID NO: 1231283 - RNA, 20 nt, Human
uagaagcuuccuccgaggau

SEQ ID NO: 1231284 - RNA, 20 nt, Human
uaggugauugaagcccacuu

SEQ ID NO: 1231285 - RNA, 23 nt, Human
ucagguguggucccaggggcccg

SEQ ID NO: 1231286 - RNA, 24 nt, Human
ucaguaggaacccacccugaguca

SEQ ID NO: 1231287 - RNA, 18 nt, Human
uccaaaggagaaacaacc

SEQ ID NO: 1231288 - RNA, 24 nt, Human
uccaaaggagaaacaacccgaggc

SEQ ID NO: 1231289 - RNA, 23 nt, Human
uccacacuucugagaaaccccca

SEQ ID NO: 1231290 - RNA, 21 nt, Human
uccuguggcuguucuuccuuc

SEQ ID NO: 1231291 - RNA, 21 nt, Human
ugaaggcccuccaggcccagu

SEQ ID NO: 1231292 - RNA, 22 nt, Human
ugcagacgcuccacacuucuga

SEQ ID NO: 1231293 - RNA, 23 nt, Human
ugggcccagagagauccuuccaa

SEQ ID NO: 1231294 - RNA, 22 nt, Human
uuccacgggcaucuggguugcc

SEQ ID NO: 1231295 - RNA, 21 nt, Human
uucccagcuguguaucugcag

SEQ ID NO: 1231296 - RNA, 22 nt, Human
uuccuguggcuguucuuccuuc

SEQ ID NO: 1231297 - RNA, 23 nt, Human
uuccuuccacgggcaucuggguu

SEQ ID NO: 1231298 - RNA, 23 nt, Human
uucucacuuaucaaagcaucucg

SEQ ID NO: 1231299 - RNA, 24 nt, Human
uuucccagcuguguaucugcagcu

SEQ ID NO: 1231300 - RNA, 18 nt, Human
aacaugugcccaaggugg

SEQ ID NO: 1231301 - RNA, 23 nt, Human
agaaagcccacaaccagcggaac

SEQ ID NO: 1231302 - RNA, 21 nt, Human
aggcaggacagcucaaagugg

SEQ ID NO: 1231303 - RNA, 22 nt, Human
agguaaauuuaaacauuuucua

SEQ ID NO: 1231304 - RNA, 24 nt, Human
cagcccucaggagguccugagaac

SEQ ID NO: 1231305 - RNA, 18 nt, Human
cauggcccgugacacagc

SEQ ID NO: 1231306 - RNA, 23 nt, Human
cauggcccgugacacagcccuca

SEQ ID NO: 1231307 - RNA, 21 nt, Human
ccagcggaacgcaggcgaugg

SEQ ID NO: 1231308 - RNA, 21 nt, Human
cccacaaccagcggaacgcag

SEQ ID NO: 1231309 - RNA, 21 nt, Human
gaaauacauugguuugguuca

SEQ ID NO: 1231310 - RNA, 19 nt, Human
gaacaugugcccaaggugg

SEQ ID NO: 1231311 - RNA, 24 nt, Human
gagaacaugugcccaagguggucg

SEQ ID NO: 1231312 - RNA, 18 nt, Human
ggccgcagaaagcccaca

SEQ ID NO: 1231313 - RNA, 19 nt, Human
ggccgcagaaagcccacaa

SEQ ID NO: 1231314 - RNA, 21 nt, Human
ggccgcagaaagcccacaacc

SEQ ID NO: 1231315 - RNA, 22 nt, Human
ggcggaggggagacgcgcccuc

SEQ ID NO: 1231316 - RNA, 23 nt, Human
uccaggcuauagguaaauuuaaa

SEQ ID NO: 1231317 - RNA, 21 nt, Human
ucggagccuaauaugagugac

SEQ ID NO: 1231318 - RNA, 20 nt, Human
uggggagaggagcgagcagg

SEQ ID NO: 1231319 - RNA, 21 nt, Human
uggggagaggagcgagcaggc

SEQ ID NO: 1231320 - RNA, 22 nt, Human
agcagaagcugaaaaaagcuuc

SEQ ID NO: 1231321 - RNA, 24 nt, Human
agcagaagcugaaaaaagcuucca

SEQ ID NO: 1231322 - RNA, 18 nt, Human
caccugaggggacagagc

SEQ ID NO: 1231323 - RNA, 19 nt, Human
cagcuccugucuuuccccc

SEQ ID NO: 1231324 - RNA, 23 nt, Human
cagggccaggugccugagagacc

SEQ ID NO: 1231325 - RNA, 21 nt, Human
caggggccagaauccccagau

SEQ ID NO: 1231326 - RNA, 21 nt, Human
ccagcagaagcugaaaaaagc

SEQ ID NO: 1231327 - RNA, 22 nt, Human
ccaggggccagaauccccagau

SEQ ID NO: 1231328 - RNA, 25 nt, Human
cccagcugcccuucugguaccucag

SEQ ID NO: 1231329 - RNA, 24 nt, Human
cccccgagaugcugugccugcagg

SEQ ID NO: 1231330 - RNA, 24 nt, Human
ccccugagaccuccccaguguaga

SEQ ID NO: 1231331 - RNA, 21 nt, Human
ccucugaagccaggggccaga

SEQ ID NO: 1231332 - RNA, 20 nt, Human
ccugagagacccccagcucc

SEQ ID NO: 1231333 - RNA, 22 nt, Human
cggccugggccccccgagaugc

SEQ ID NO: 1231334 - RNA, 22 nt, Human
cugaagccaggggccagaaucc

SEQ ID NO: 1231335 - RNA, 21 nt, Human
gcuccaccugggccucugaag

SEQ ID NO: 1231336 - RNA, 20 nt, Human
ggccaggugccugagagacc

SEQ ID NO: 1231337 - RNA, 23 nt, Human
ugaggcauugccccugagaccuc

SEQ ID NO: 1231338 - RNA, 19 nt, Human
ugggccucugaagccaggg

SEQ ID NO: 1231339 - RNA, 21 nt, Human
uguagagccagcagaagcuga

SEQ ID NO: 1231340 - RNA, 18 nt, Human
acccaagggcgcacacug

SEQ ID NO: 1231341 - RNA, 22 nt, Human
agggagguaggggcaggccaga

SEQ ID NO: 1231342 - RNA, 22 nt, Human
cagagucccagcuguccuggac

SEQ ID NO: 1231343 - RNA, 24 nt, Human
cagcagcuccgucucacaccugcc

SEQ ID NO: 1231344 - RNA, 18 nt, Human
cagggagguaggggcagg

SEQ ID NO: 1231345 - RNA, 18 nt, Human
ccagagucccagcugucc

SEQ ID NO: 1231346 - RNA, 18 nt, Human
ccagguggugggacgugu

SEQ ID NO: 1231347 - RNA, 22 nt, Human
ccagguggugggacguguggcu

SEQ ID NO: 1231348 - RNA, 24 nt, Human
cccagguggugggacguguggcug

SEQ ID NO: 1231349 - RNA, 22 nt, Human
cucacaccugccuccagagcuc

SEQ ID NO: 1231350 - RNA, 22 nt, Human
cuggacucugggcgcucaccag

SEQ ID NO: 1231351 - RNA, 24 nt, Human
cuuccuggacccacugaguaaccc

SEQ ID NO: 1231352 - RNA, 24 nt, Human
gcacacuggggacugggccccucc

SEQ ID NO: 1231353 - RNA, 25 nt, Human
ggacugggugggugggcucacaggg

SEQ ID NO: 1231354 - RNA, 19 nt, Human
ggccccuccggguucuucc

SEQ ID NO: 1231355 - RNA, 25 nt, Human
gugggcucacagggagguaggggca

SEQ ID NO: 1231356 - RNA, 19 nt, Human
uccagagcucaggacuggg

SEQ ID NO: 1231357 - RNA, 22 nt, Human
uccuggacccacugaguaaccc

SEQ ID NO: 1231358 - RNA, 23 nt, Human
ugaguaacccagguggugggacg

SEQ ID NO: 1231359 - RNA, 24 nt, Human
uggacccacugaguaacccaggug

SEQ ID NO: 1231360 - RNA, 27 nt, Human
uggacucugggcgcucaccagcagcuc

SEQ ID NO: 1231361 - RNA, 22 nt, Human
uggugggacguguggcugugag

SEQ ID NO: 1231362 - RNA, 18 nt, Human
ugugaguccuggacucug

SEQ ID NO: 1231363 - RNA, 24 nt, Human
aaacagacauaaucacaauuccaa

SEQ ID NO: 1231364 - RNA, 25 nt, Human
aaacagacauaaucacaauuccaac

SEQ ID NO: 1231365 - RNA, 24 nt, Human
aaaguggugggauuacaggcauga

SEQ ID NO: 1231366 - RNA, 26 nt, Human
aagcgauucucaugccucagccuccu

SEQ ID NO: 1231367 - RNA, 22 nt, Human
aagugauccuccugcaucaccc

SEQ ID NO: 1231368 - RNA, 21 nt, Human
aaguggugggauuacaggcau

SEQ ID NO: 1231369 - RNA, 21 nt, Human
aaugugucuacauccuuggau

SEQ ID NO: 1231370 - RNA, 21 nt, Human
acaaucucagcucauagcaac

SEQ ID NO: 1231371 - RNA, 18 nt, Human
acaggguuucaccauguu

SEQ ID NO: 1231372 - RNA, 23 nt, Human
acaggguuucaccauguuggcca

SEQ ID NO: 1231373 - RNA, 24 nt, Human
acaggguuucaccauguuggccag

SEQ ID NO: 1231374 - RNA, 18 nt, Human
accauauaauaggaaaau

SEQ ID NO: 1231375 - RNA, 18 nt, Human
accauguuggccaggcug

SEQ ID NO: 1231376 - RNA, 24 nt, Human
acccuguugcccaggguggaauga

SEQ ID NO: 1231377 - RNA, 18 nt, Human
agccuccugaguagcuag

SEQ ID NO: 1231378 - RNA, 24 nt, Human
agcgauucucaugccucagccucc

SEQ ID NO: 1231379 - RNA, 21 nt, Human
aggcuggucuccaacuccugg

SEQ ID NO: 1231380 - RNA, 21 nt, Human
aguagcuaggauuacaggcau

SEQ ID NO: 1231381 - RNA, 24 nt, Human
agugauccuccugcaucacccucc

SEQ ID NO: 1231382 - RNA, 22 nt, Human
augccucagccuccugaguagc

SEQ ID NO: 1231383 - RNA, 21 nt, Human
auuuuuuuaaaguuucaaauu

SEQ ID NO: 1231384 - RNA, 20 nt, Human
caaagaccaauccgcucuuc

SEQ ID NO: 1231385 - RNA, 24 nt, Human
caaaguggugggauuacaggcaug

SEQ ID NO: 1231386 - RNA, 24 nt, Human
caacuccuggccucaagugauccu

SEQ ID NO: 1231387 - RNA, 21 nt, Human
caccagguccagcuaauuuuu

SEQ ID NO: 1231388 - RNA, 21 nt, Human
caccauguuggccaggcuggu

SEQ ID NO: 1231389 - RNA, 24 nt, Human
caccauguuggccaggcuggucuc

SEQ ID NO: 1231390 - RNA, 27 nt, Human
caccauguuggccaggcuggucuccaa

SEQ ID NO: 1231391 - RNA, 19 nt, Human
cacccuguugcccagggug

SEQ ID NO: 1231392 - RNA, 24 nt, Human
cagagucucacccuguugcccagg

SEQ ID NO: 1231393 - RNA, 19 nt, Human
cagccuccugaguagcuag

SEQ ID NO: 1231394 - RNA, 24 nt, Human
caggguuucaccauguuggccagg

SEQ ID NO: 1231395 - RNA, 25 nt, Human
cauacaaagguacagcuuugucaag

SEQ ID NO: 1231396 - RNA, 24 nt, Human
caugccucagccuccugaguagcu

SEQ ID NO: 1231397 - RNA, 24 nt, Human
cauguuggccaggcuggucuccaa

SEQ ID NO: 1231398 - RNA, 19 nt, Human
ccaaaguggugggauuaca

SEQ ID NO: 1231399 - RNA, 24 nt, Human
ccaaaguggugggauuacaggcau

SEQ ID NO: 1231400 - RNA, 20 nt, Human
ccaggcuggucuccaacucc

SEQ ID NO: 1231401 - RNA, 24 nt, Human
cccaaaguggugggauuacaggca

SEQ ID NO: 1231402 - RNA, 19 nt, Human
ccuccugcaucacccuccc

SEQ ID NO: 1231403 - RNA, 22 nt, Human
ccuccugcaucacccucccaaa

SEQ ID NO: 1231404 - RNA, 23 nt, Human
ccugaguagcuaggauuacaggc

SEQ ID NO: 1231405 - RNA, 24 nt, Human
ccugaguagcuaggauuacaggca

SEQ ID NO: 1231406 - RNA, 18 nt, Human
ccuggccucaagugaucc

SEQ ID NO: 1231407 - RNA, 21 nt, Human
ccuggccucaagugauccucc

SEQ ID NO: 1231408 - RNA, 22 nt, Human
ccuggccucaagugauccuccu

SEQ ID NO: 1231409 - RNA, 23 nt, Human
ccuggccucaagugauccuccug

SEQ ID NO: 1231410 - RNA, 24 nt, Human
cuaaugugucuacauccuuggaua

SEQ ID NO: 1231411 - RNA, 22 nt, Human
cucauagcaaccuccacuugcu

SEQ ID NO: 1231412 - RNA, 24 nt, Human
cucauagcaaccuccacuugcuga

SEQ ID NO: 1231413 - RNA, 25 nt, Human
cucaugccucagccuccugaguagc

SEQ ID NO: 1231414 - RNA, 24 nt, Human
cuccugaguagcuaggauuacagg

SEQ ID NO: 1231415 - RNA, 21 nt, Human
cuccugcaucacccucccaaa

SEQ ID NO: 1231416 - RNA, 24 nt, Human
cugaguagcuaggauuacaggcau

SEQ ID NO: 1231417 - RNA, 21 nt, Human
cugcaucacccucccaaagug

SEQ ID NO: 1231418 - RNA, 19 nt, Human
gaacaaagaccaauccgcu

SEQ ID NO: 1231419 - RNA, 22 nt, Human
gaguagcuaggauuacaggcau

SEQ ID NO: 1231420 - RNA, 24 nt, Human
gaguagcuaggauuacaggcaugc

SEQ ID NO: 1231421 - RNA, 18 nt, Human
gauuacaggcaugagcca

SEQ ID NO: 1231422 - RNA, 21 nt, Human
gauuacaggcaugagccacca

SEQ ID NO: 1231423 - RNA, 22 nt, Human
gauuacaggcaugagccaccau

SEQ ID NO: 1231424 - RNA, 18 nt, Human
gauuacaggcaugcgcca

SEQ ID NO: 1231425 - RNA, 24 nt, Human
gcgauucucaugccucagccuccu

SEQ ID NO: 1231426 - RNA, 20 nt, Human
gcucuuguugaacaaagacu

SEQ ID NO: 1231427 - RNA, 23 nt, Human
gcuggucuccaacuccuggccuc

SEQ ID NO: 1231428 - RNA, 24 nt, Human
ggauuacaggcaugagccaccaug

SEQ ID NO: 1231429 - RNA, 19 nt, Human
ggauuacaggcaugcgcca

SEQ ID NO: 1231430 - RNA, 22 nt, Human
ggauuacaggcaugcgccacca

SEQ ID NO: 1231431 - RNA, 24 nt, Human
ggcuggucuccaacuccuggccuc

SEQ ID NO: 1231432 - RNA, 22 nt, Human
ggguuucaccauguuggccagg

SEQ ID NO: 1231433 - RNA, 20 nt, Human
guagcuaggauuacaggcau

SEQ ID NO: 1231434 - RNA, 25 nt, Human
uaaaacagacauaaucacaauucca

SEQ ID NO: 1231435 - RNA, 25 nt, Human
uaaacaacuaaaacagacauaauca

SEQ ID NO: 1231436 - RNA, 18 nt, Human
uaaagaacagcuaaguuc

SEQ ID NO: 1231437 - RNA, 20 nt, Human
uaagguacauuugcaaagaa

SEQ ID NO: 1231438 - RNA, 28 nt, Human
uaauuuuuuuuuguauuuuuaguagaga

SEQ ID NO: 1231439 - RNA, 22 nt, Human
uacaggcaugagccaccaugcc

SEQ ID NO: 1231440 - RNA, 22 nt, Human
uagagacaggguuucaccaugu

SEQ ID NO: 1231441 - RNA, 24 nt, Human
uaggaaaauucuuuuaaacaacua

SEQ ID NO: 1231442 - RNA, 21 nt, Human
uaggauuacaggcaugcgcca

SEQ ID NO: 1231443 - RNA, 22 nt, Human
uaggauuacaggcaugcgccac

SEQ ID NO: 1231444 - RNA, 24 nt, Human
uaggauuacaggcaugcgccacca

SEQ ID NO: 1231445 - RNA, 24 nt, Human
uaguagagacaggguuucaccaug

SEQ ID NO: 1231446 - RNA, 26 nt, Human
uaguagagacaggguuucaccauguu

SEQ ID NO: 1231447 - RNA, 21 nt, Human
ucaagugauccuccugcauca

SEQ ID NO: 1231448 - RNA, 26 nt, Human
ucauagcaaccuccacuuggggcccu

SEQ ID NO: 1231449 - RNA, 26 nt, Human
ucauagcaaccuccacuugggguccu

SEQ ID NO: 1231450 - RNA, 18 nt, Human
ucaugauuugcuccucau

SEQ ID NO: 1231451 - RNA, 24 nt, Human
ucccaaaguggugggauuacaggc

SEQ ID NO: 1231452 - RNA, 23 nt, Human
uccuccugcaucacccucccaaa

SEQ ID NO: 1231453 - RNA, 19 nt, Human
uccugaguagcuaggauua

SEQ ID NO: 1231454 - RNA, 24 nt, Human
uccugaguagcuaggauuacaggc

SEQ ID NO: 1231455 - RNA, 20 nt, Human
ucucacccuguugcccaggg

SEQ ID NO: 1231456 - RNA, 24 nt, Human
ucucacccuguugcccagggugga

SEQ ID NO: 1231457 - RNA, 26 nt, Human
ucucacccuguugcccaggguggaau

SEQ ID NO: 1231458 - RNA, 27 nt, Human
ucucacccuguugcccaggguggaaug

SEQ ID NO: 1231459 - RNA, 18 nt, Human
ugagacagagucucaccc

SEQ ID NO: 1231460 - RNA, 22 nt, Human
ugagacagagucucacccuguu

SEQ ID NO: 1231461 - RNA, 23 nt, Human
ugccucagccuccugaguagcua

SEQ ID NO: 1231462 - RNA, 24 nt, Human
ugccucagccuccugaguagcuag

SEQ ID NO: 1231463 - RNA, 22 nt, Human
uggaauuuuugaacuccuuguc

SEQ ID NO: 1231464 - RNA, 24 nt, Human
uggcacaaucucagcucauagcaa

SEQ ID NO: 1231465 - RNA, 24 nt, Human
uggccaggcuggucuccaacuccu

SEQ ID NO: 1231466 - RNA, 18 nt, Human
uggccucaagugauccuc

SEQ ID NO: 1231467 - RNA, 20 nt, Human
uggccucaagugauccuccu

SEQ ID NO: 1231468 - RNA, 24 nt, Human
uggccucaagugauccuccugcau

SEQ ID NO: 1231469 - RNA, 18 nt, Human
ugggauuacaggcaugag

SEQ ID NO: 1231470 - RNA, 22 nt, Human
ugggauuacaggcaugagccac

SEQ ID NO: 1231471 - RNA, 23 nt, Human
ugggauuacaggcaugagccacc

SEQ ID NO: 1231472 - RNA, 24 nt, Human
ugggauuacaggcaugagccacca

SEQ ID NO: 1231473 - RNA, 25 nt, Human
ugggauuacaggcaugagccaccau

SEQ ID NO: 1231474 - RNA, 24 nt, Human
uuaguagagacaggguuucaccau

SEQ ID NO: 1231475 - RNA, 23 nt, Human
uucaagcgauucucaugccucag

SEQ ID NO: 1231476 - RNA, 24 nt, Human
uuucaccauguuggccaggcuggu

SEQ ID NO: 1231477 - RNA, 22 nt, Human
uuuuguauuuuuaguagagaca

SEQ ID NO: 1231478 - RNA, 24 nt, Human
uuuuuaguagagacaggguuucac

SEQ ID NO: 1231479 - RNA, 21 nt, Human
uuuuuguauuuuuaguagaga

SEQ ID NO: 1231480 - RNA, 21 nt, Human
uuuuuuguauuuuuaguagag

SEQ ID NO: 1231481 - RNA, 20 nt, Human
uuuuuuuuuuugagacagag

SEQ ID NO: 1231482 - RNA, 26 nt, Human
uuuuuuuuuuuugagacagagucuca

SEQ ID NO: 1231483 - RNA, 20 nt, Human
uuuuuuuuuuuuuuuuuugg

SEQ ID NO: 1231484 - RNA, 24 nt, Human
aaccaauucauucaccaggcggca

SEQ ID NO: 1231485 - RNA, 22 nt, Human
acggagucucacugauugcuag

SEQ ID NO: 1231486 - RNA, 20 nt, Human
aggugucucuuuaaagaaag

SEQ ID NO: 1231487 - RNA, 25 nt, Human
cauuucagcuucuggccacugggag

SEQ ID NO: 1231488 - RNA, 18 nt, Human
cuacgcccacggagucuc

SEQ ID NO: 1231489 - RNA, 19 nt, Human
cucacugauugcuagcaca

SEQ ID NO: 1231490 - RNA, 22 nt, Human
cuuaaaaaacggcgcaccacaa

SEQ ID NO: 1231491 - RNA, 22 nt, Human
uaaaaaacggcgcaccacaaga

SEQ ID NO: 1231492 - RNA, 22 nt, Human
uccuacgcccacggagucucac

SEQ ID NO: 1231493 - RNA, 18 nt, Human
ugccgucauuucagcuuc

SEQ ID NO: 1231494 - RNA, 27 nt, Human
aaaaauggcaaagagagaccgguaccc

SEQ ID NO: 1231495 - RNA, 22 nt, Human
aaggaccagcugccguucugga

SEQ ID NO: 1231496 - RNA, 19 nt, Human
acagguuggagaggaagaa

SEQ ID NO: 1231497 - RNA, 18 nt, Human
agaggaagaaguacaugg

SEQ ID NO: 1231498 - RNA, 23 nt, Human
agaggaagaaguacaugggggug

SEQ ID NO: 1231499 - RNA, 20 nt, Human
agcauacuggaugggcugcc

SEQ ID NO: 1231500 - RNA, 25 nt, Human
agccugcauagaagaugacucugcc

SEQ ID NO: 1231501 - RNA, 19 nt, Human
agcucacccacgccggccu

SEQ ID NO: 1231502 - RNA, 19 nt, Human
aggacaccugccccaaggc

SEQ ID NO: 1231503 - RNA, 23 nt, Human
agguguaggugccaugguccucc

SEQ ID NO: 1231504 - RNA, 21 nt, Human
augaucagguuccccagcacc

SEQ ID NO: 1231505 - RNA, 19 nt, Human
caaaaauggcaaagagaga

SEQ ID NO: 1231506 - RNA, 21 nt, Human
caaggacagguuggagaggaa

SEQ ID NO: 1231507 - RNA, 18 nt, Human
cacauggacaggaacagc

SEQ ID NO: 1231508 - RNA, 20 nt, Human
cagcaugggggugaccaccg

SEQ ID NO: 1231509 - RNA, 19 nt, Human
cagccugcauagaagauga

SEQ ID NO: 1231510 - RNA, 24 nt, Human
cagcugccguucuggauccucuga

SEQ ID NO: 1231511 - RNA, 18 nt, Human
caggacaccugccccaag

SEQ ID NO: 1231512 - RNA, 22 nt, Human
cagggcauccuggauguggagc

SEQ ID NO: 1231513 - RNA, 21 nt, Human
ccagcugccguucuggauccu

SEQ ID NO: 1231514 - RNA, 23 nt, Human
ccaggaugaugaucagguucccc

SEQ ID NO: 1231515 - RNA, 22 nt, Human
ccaggcagguguaggugccaug

SEQ ID NO: 1231516 - RNA, 22 nt, Human
ccggccucgcagguggagcgag

SEQ ID NO: 1231517 - RNA, 23 nt, Human
ccuccaaaaauggcaaagagaga

SEQ ID NO: 1231518 - RNA, 18 nt, Human
cucugagcacggacggug

SEQ ID NO: 1231519 - RNA, 21 nt, Human
cuggauccucugagcacggac

SEQ ID NO: 1231520 - RNA, 19 nt, Human
cuuccaugccuccaaaaau

SEQ ID NO: 1231521 - RNA, 23 nt, Human
gcucacccacgccggccucgcag

SEQ ID NO: 1231522 - RNA, 21 nt, Human
ggagcucacccacgccggccu

SEQ ID NO: 1231523 - RNA, 23 nt, Human
ggcagggcauccuggauguggag

SEQ ID NO: 1231524 - RNA, 19 nt, Human
ggggaggugggagucaggg

SEQ ID NO: 1231525 - RNA, 18 nt, Human
ggggguggggagguggga

SEQ ID NO: 1231526 - RNA, 19 nt, Human
ggggguggggaggugggag

SEQ ID NO: 1231527 - RNA, 23 nt, Human
ggggguggggaggugggagucag

SEQ ID NO: 1231528 - RNA, 23 nt, Human
ggguggggaggugggagucaggg

SEQ ID NO: 1231529 - RNA, 21 nt, Human
uacauggggguggggaggugg

SEQ ID NO: 1231530 - RNA, 23 nt, Human
uccaaaaauggcaaagagagaca

SEQ ID NO: 1231531 - RNA, 21 nt, Human
uccuccggcagggcauccugg

SEQ ID NO: 1231532 - RNA, 20 nt, Human
ugaagggguucagcaugggg

SEQ ID NO: 1231533 - RNA, 18 nt, Human
ugagcacggacggugacc

SEQ ID NO: 1231534 - RNA, 23 nt, Human
ugaugaucagguuccccagcacc

SEQ ID NO: 1231535 - RNA, 20 nt, Human
ugccccaaggcauucucagc

SEQ ID NO: 1231536 - RNA, 23 nt, Human
uggagcucacccacgccggccuc

SEQ ID NO: 1231537 - RNA, 18 nt, Human
uggauguccacaaucauc

SEQ ID NO: 1231538 - RNA, 18 nt, Human
uggggaggugggagucag

SEQ ID NO: 1231539 - RNA, 19 nt, Human
uggggaggugggagucagg

SEQ ID NO: 1231540 - RNA, 21 nt, Human
uggggaggugggagucagggc

SEQ ID NO: 1231541 - RNA, 18 nt, Human
uggggguggggagguggg

SEQ ID NO: 1231542 - RNA, 19 nt, Human
uggggguggggagguggga

SEQ ID NO: 1231543 - RNA, 20 nt, Human
uggggguggggaggugggag

SEQ ID NO: 1231544 - RNA, 23 nt, Human
uggggguggggaggugggaguca

SEQ ID NO: 1231545 - RNA, 24 nt, Human
uuucucaggcuguagaugaagggg

SEQ ID NO: 1231546 - RNA, 21 nt, Human
auggcccucaggcuccaggag

SEQ ID NO: 1231547 - RNA, 19 nt, Human
caccaggguuccccaaguc

SEQ ID NO: 1231548 - RNA, 19 nt, Human
cacccucaugugcacacac

SEQ ID NO: 1231549 - RNA, 18 nt, Human
caggguuccccaaguccc

SEQ ID NO: 1231550 - RNA, 20 nt, Human
cauggcccucaggcuccagg

SEQ ID NO: 1231551 - RNA, 25 nt, Human
cucaugugcacacacacaccuccca

SEQ ID NO: 1231552 - RNA, 19 nt, Human
guaguucuuccaccacugg

SEQ ID NO: 1231553 - RNA, 22 nt, Human
guaguucuuccaccacuggagg

SEQ ID NO: 1231554 - RNA, 24 nt, Human
uagacaugggcaccuccaagcacc

SEQ ID NO: 1231555 - RNA, 18 nt, Human
ucccaccuagacaugggc

SEQ ID NO: 1231556 - RNA, 19 nt, Human
uccccaagucccaccuaga

SEQ ID NO: 1231557 - RNA, 22 nt, Human
uaagauucuaacuuugcagaau

SEQ ID NO: 1231558 - RNA, 21 nt, Human
uugcagaauaggaaauggagg

SEQ ID NO: 1231559 - RNA, 24 nt, Human
aaacuaccagacauauuuucuagu

SEQ ID NO: 1231560 - RNA, 26 nt, Human
aaccccaaacgaacuuuugcuccacc

SEQ ID NO: 1231561 - RNA, 19 nt, Human
aagaaaccacccccaaaac

SEQ ID NO: 1231562 - RNA, 20 nt, Human
aagaacagcauaggggaaac

SEQ ID NO: 1231563 - RNA, 20 nt, Human
aagaacucaaguacaaauaa

SEQ ID NO: 1231564 - RNA, 21 nt, Human
aagaggacaaacaugacuagg

SEQ ID NO: 1231565 - RNA, 23 nt, Human
aagcauuacccaucagaaguugc

SEQ ID NO: 1231566 - RNA, 22 nt, Human
aaggcaaaaugccaaaauugga

SEQ ID NO: 1231567 - RNA, 22 nt, Human
aaguggaacaaccccaaacgaa

SEQ ID NO: 1231568 - RNA, 18 nt, Human
aaucauuuauucucauac

SEQ ID NO: 1231569 - RNA, 18 nt, Human
aaucuaguaacauuccau

SEQ ID NO: 1231570 - RNA, 19 nt, Human
aauuacaauucaacaugag

SEQ ID NO: 1231571 - RNA, 22 nt, Human
acaagaacucaaguacaaauaa

SEQ ID NO: 1231572 - RNA, 21 nt, Human
acacagacccaaaccauauca

SEQ ID NO: 1231573 - RNA, 18 nt, Human
acccaccagaaggaaaca

SEQ ID NO: 1231574 - RNA, 18 nt, Human
acccuaguagguguuugg

SEQ ID NO: 1231575 - RNA, 25 nt, Human
accucccuccaugucccuuccccaa

SEQ ID NO: 1231576 - RNA, 22 nt, Human
acuaacccacucaagacaacac

SEQ ID NO: 1231577 - RNA, 25 nt, Human
agaaaccacccccaaaacucagugg

SEQ ID NO: 1231578 - RNA, 23 nt, Human
agaaggaaacaacuccagacaca

SEQ ID NO: 1231579 - RNA, 25 nt, Human
agaaggacaagaacucaaguacaaa

SEQ ID NO: 1231580 - RNA, 21 nt, Human
agacaaagaugaaaauacucu

SEQ ID NO: 1231581 - RNA, 23 nt, Human
agcaccuucuuuacaugguggca

SEQ ID NO: 1231582 - RNA, 21 nt, Human
agccaaacacuuauaaaaccg

SEQ ID NO: 1231583 - RNA, 18 nt, Human
aggcuguagaagguuuau

SEQ ID NO: 1231584 - RNA, 22 nt, Human
agguguuuggggaaagaggguu

SEQ ID NO: 1231585 - RNA, 18 nt, Human
agugaugaugguagaagg

SEQ ID NO: 1231586 - RNA, 20 nt, Human
auccugaguccaguuugggg

SEQ ID NO: 1231587 - RNA, 19 nt, Human
auuuggguggggacacaga

SEQ ID NO: 1231588 - RNA, 22 nt, Human
caaaauaaagucuugaccaaua

SEQ ID NO: 1231589 - RNA, 19 nt, Human
caagaacagcauaggggaa

SEQ ID NO: 1231590 - RNA, 23 nt, Human
caaucaccucccuccaugucccu

SEQ ID NO: 1231591 - RNA, 20 nt, Human
caccagaaggaaacaacucc

SEQ ID NO: 1231592 - RNA, 21 nt, Human
caccagaaggaaacaacucca

SEQ ID NO: 1231593 - RNA, 24 nt, Human
cacccccaaaacucaguggcuuaa

SEQ ID NO: 1231594 - RNA, 19 nt, Human
caccucaagccaccuuccc

SEQ ID NO: 1231595 - RNA, 24 nt, Human
cacuccuccaccucaagccaccuu

SEQ ID NO: 1231596 - RNA, 21 nt, Human
cagaagacgaagggaaagcaa

SEQ ID NO: 1231597 - RNA, 21 nt, Human
cagcagccagaacccacucag

SEQ ID NO: 1231598 - RNA, 19 nt, Human
caucaggaauuacaauuca

SEQ ID NO: 1231599 - RNA, 21 nt, Human
caucaggaauuacaauucaac

SEQ ID NO: 1231600 - RNA, 25 nt, Human
cauucccccaugauccaaucaccuc

SEQ ID NO: 1231601 - RNA, 24 nt, Human
ccaaaccauaucacuccuccaccu

SEQ ID NO: 1231602 - RNA, 23 nt, Human
ccaaauccauaaacacaggaaaa

SEQ ID NO: 1231603 - RNA, 20 nt, Human
ccaccacaaauuuaccuaga

SEQ ID NO: 1231604 - RNA, 22 nt, Human
ccacucaagacaacacuagcag

SEQ ID NO: 1231605 - RNA, 24 nt, Human
ccagaaggaaacaacuccagacac

SEQ ID NO: 1231606 - RNA, 21 nt, Human
ccagacauauuuucuaguucu

SEQ ID NO: 1231607 - RNA, 25 nt, Human
ccagugaugaugguagaaggacaag

SEQ ID NO: 1231608 - RNA, 18 nt, Human
cccaaaccauaucacucc

SEQ ID NO: 1231609 - RNA, 24 nt, Human
cccauuagcauuauucugguccaa

SEQ ID NO: 1231610 - RNA, 23 nt, Human
ccccaugauccaaucaccucccu

SEQ ID NO: 1231611 - RNA, 23 nt, Human
cccccaugauccaaucaccuccc

SEQ ID NO: 1231612 - RNA, 22 nt, Human
ccucuccaaagccuuaaaaauc

SEQ ID NO: 1231613 - RNA, 24 nt, Human
cgauagggguacaucuacuaucau

SEQ ID NO: 1231614 - RNA, 21 nt, Human
cuaacccacucaagacaacac

SEQ ID NO: 1231615 - RNA, 24 nt, Human
cucaagacaacacuagcagaaaaa

SEQ ID NO: 1231616 - RNA, 22 nt, Human
cucacuuacuaucacaagaaca

SEQ ID NO: 1231617 - RNA, 19 nt, Human
cucuucacaauaaaucuug

SEQ ID NO: 1231618 - RNA, 22 nt, Human
gaaagaaaagaggacaaacaug

SEQ ID NO: 1231619 - RNA, 23 nt, Human
gaccaugaacccaccagaaggaa

SEQ ID NO: 1231620 - RNA, 21 nt, Human
gagauuuggguggggacacag

SEQ ID NO: 1231621 - RNA, 21 nt, Human
gaguccaguuuggggaggcag

SEQ ID NO: 1231622 - RNA, 18 nt, Human
gcagugacuacccagaga

SEQ ID NO: 1231623 - RNA, 24 nt, Human
gcauaagaaaccacccccaaaacu

SEQ ID NO: 1231624 - RNA, 21 nt, Human
ggaggcagugacuacccagag

SEQ ID NO: 1231625 - RNA, 28 nt, Human
ggcagaagacgaagggaaaggggacccc

SEQ ID NO: 1231626 - RNA, 23 nt, Human
gggcaaagaguaagggguaagug

SEQ ID NO: 1231627 - RNA, 23 nt, Human
guuuggggaggcagugacuaccc

SEQ ID NO: 1231628 - RNA, 19 nt, Human
uaaaagaaucgauaggggu

SEQ ID NO: 1231629 - RNA, 19 nt, Human
uaacaggaagcaugacugg

SEQ ID NO: 1231630 - RNA, 24 nt, Human
uaacuaacccacucaagacaacac

SEQ ID NO: 1231631 - RNA, 19 nt, Human
uaagaaaccacccccaaaa

SEQ ID NO: 1231632 - RNA, 20 nt, Human
uacaugguggcagaaugggg

SEQ ID NO: 1231633 - RNA, 24 nt, Human
uacaugguggcagaaugggguggg

SEQ ID NO: 1231634 - RNA, 22 nt, Human
uagaaggacaagaacucaagua

SEQ ID NO: 1231635 - RNA, 25 nt, Human
uauaaagaaagaaaagaggacaaac

SEQ ID NO: 1231636 - RNA, 18 nt, Human
uauaaguucuauuuacca

SEQ ID NO: 1231637 - RNA, 21 nt, Human
uaucacaagaacagcauaggg

SEQ ID NO: 1231638 - RNA, 19 nt, Human
uaucuuguccuuuguugag

SEQ ID NO: 1231639 - RNA, 22 nt, Human
uaugaagaaaagaaguuuaauu

SEQ ID NO: 1231640 - RNA, 18 nt, Human
ucaccucccuccaugucc

SEQ ID NO: 1231641 - RNA, 24 nt, Human
uccaccucaagccaccuuccagag

SEQ ID NO: 1231642 - RNA, 19 nt, Human
ucccagacaaagaugaaaa

SEQ ID NO: 1231643 - RNA, 20 nt, Human
ucccagacaaagaugaaaau

SEQ ID NO: 1231644 - RNA, 22 nt, Human
ucccuccaugucccuuccccaa

SEQ ID NO: 1231645 - RNA, 21 nt, Human
ucuacaaacaaaauaaagucu

SEQ ID NO: 1231646 - RNA, 21 nt, Human
ucuaguaacauuccaugggga

SEQ ID NO: 1231647 - RNA, 23 nt, Human
ucuccaaagccuuaaaaaucugc

SEQ ID NO: 1231648 - RNA, 22 nt, Human
ucucuggaggaagaaaauaauu

SEQ ID NO: 1231649 - RNA, 23 nt, Human
ugaacccaccagaaggaaacaac

SEQ ID NO: 1231650 - RNA, 21 nt, Human
ugaauaucucccaauaguuuu

SEQ ID NO: 1231651 - RNA, 22 nt, Human
ugaugaugguagaaggacaaga

SEQ ID NO: 1231652 - RNA, 22 nt, Human
ugcauaagaaaccacccccaaa

SEQ ID NO: 1231653 - RNA, 28 nt, Human
uggaacaaccccaaacgaaaggucaucc

SEQ ID NO: 1231654 - RNA, 18 nt, Human
uggcuccauucuugaagu

SEQ ID NO: 1231655 - RNA, 18 nt, Human
ugggaauaaaagcuggcc

SEQ ID NO: 1231656 - RNA, 18 nt, Human
uggggugggggaggagcc

SEQ ID NO: 1231657 - RNA, 21 nt, Human
uggggugggggaggagccaaa

SEQ ID NO: 1231658 - RNA, 18 nt, Human
uguagaaauaauguaugg

SEQ ID NO: 1231659 - RNA, 19 nt, Human
ugugaagguccauggcucc

SEQ ID NO: 1231660 - RNA, 22 nt, Human
uguguagaaauaauguaugggg

SEQ ID NO: 1231661 - RNA, 25 nt, Human
uuaaaaccaguaaaaccuguaaugu

SEQ ID NO: 1231662 - RNA, 24 nt, Human
uuacaugguggcagaauggggugg

SEQ ID NO: 1231663 - RNA, 24 nt, Human
uucaacaugagauuugggugggga

SEQ ID NO: 1231664 - RNA, 20 nt, Human
uuccagaguacuauuaaaac

SEQ ID NO: 1231665 - RNA, 20 nt, Human
uucccagacaaagaugaaaa

SEQ ID NO: 1231666 - RNA, 25 nt, Human
uucuauaaucagagcaagcauuacc

SEQ ID NO: 1231667 - RNA, 25 nt, Human
uugaagucagcgagaccaugaaccc

SEQ ID NO: 1231668 - RNA, 19 nt, Human
uugagacaaagaaugccac

SEQ ID NO: 1231669 - RNA, 18 nt, Human
uuggcuucuacaaacaaa

SEQ ID NO: 1231670 - RNA, 21 nt, Human
uuguaguugucuguccacagg

SEQ ID NO: 1231671 - RNA, 23 nt, Human
uuuccagugaugaugguagaagg

SEQ ID NO: 1231672 - RNA, 19 nt, Human
uuuggcuucuacaaacaaa

SEQ ID NO: 1231673 - RNA, 20 nt, Human
uuuguaguugucuguccaca

SEQ ID NO: 1231674 - RNA, 23 nt, Human
uuuguaguugucuguccacagga

SEQ ID NO: 1231675 - RNA, 25 nt, Human
uuuguaguugucuguccacaggauc

SEQ ID NO: 1231676 - RNA, 20 nt, Human
aaacugcuaccacacacuca

SEQ ID NO: 1231677 - RNA, 22 nt, Human
aaauaaacauuugaucuagaac

SEQ ID NO: 1231678 - RNA, 21 nt, Human
aaaucggcuggcgggaaccca

SEQ ID NO: 1231679 - RNA, 24 nt, Human
accacacacucauacuaucccaaa

SEQ ID NO: 1231680 - RNA, 24 nt, Human
auaaacauuugaucuagaacaaag

SEQ ID NO: 1231681 - RNA, 20 nt, Human
cagcaccauugcggcuccag

SEQ ID NO: 1231682 - RNA, 22 nt, Human
cagcgaguggcgugacccugac

SEQ ID NO: 1231683 - RNA, 23 nt, Human
ccccuccggccccuggucagcuc

SEQ ID NO: 1231684 - RNA, 20 nt, Human
cccgacgggugggaaagggc

SEQ ID NO: 1231685 - RNA, 26 nt, Human
cccgcagggggcccagggcuuggggg

SEQ ID NO: 1231686 - RNA, 18 nt, Human
cccgcccuccaucagcac

SEQ ID NO: 1231687 - RNA, 22 nt, Human
ccuggacggacuccgggccguc

SEQ ID NO: 1231688 - RNA, 18 nt, Human
cggacuccgggccguccc

SEQ ID NO: 1231689 - RNA, 20 nt, Human
cgggaacccaggagcccgac

SEQ ID NO: 1231690 - RNA, 21 nt, Human
cgugacggggcgcccagucgc

SEQ ID NO: 1231691 - RNA, 25 nt, Human
cuccagccuccgcggugcccggguc

SEQ ID NO: 1231692 - RNA, 18 nt, Human
cuccaucucccgcccucc

SEQ ID NO: 1231693 - RNA, 21 nt, Human
cucccgcccuccaucagcacc

SEQ ID NO: 1231694 - RNA, 19 nt, Human
cucccgcugccgccccacc

SEQ ID NO: 1231695 - RNA, 19 nt, Human
gaacccaggagcccgacgg

SEQ ID NO: 1231696 - RNA, 23 nt, Human
gacauucagcuauaguaaaaaua

SEQ ID NO: 1231697 - RNA, 19 nt, Human
gccgccccaccccagaauc

SEQ ID NO: 1231698 - RNA, 18 nt, Human
gcggagccacagacaacc

SEQ ID NO: 1231699 - RNA, 21 nt, Human
gcuccaucucccgcccuccau

SEQ ID NO: 1231700 - RNA, 23 nt, Human
ggccccuggucagcuccaucucc

SEQ ID NO: 1231701 - RNA, 19 nt, Human
ggcuuggggggcacagagu

SEQ ID NO: 1231702 - RNA, 21 nt, Human
ggcuuggggggcacagaguuc

SEQ ID NO: 1231703 - RNA, 26 nt, Human
uaccacacacucauacuaucccaaag

SEQ ID NO: 1231704 - RNA, 19 nt, Human
uagcagacauaacaucaaa

SEQ ID NO: 1231705 - RNA, 22 nt, Human
ucagcuccaucucccgcccucc

SEQ ID NO: 1231706 - RNA, 19 nt, Human
ugcccgggucuggggaggg

SEQ ID NO: 1231707 - RNA, 20 nt, Human
ugccuggacggacuccgggc

SEQ ID NO: 1231708 - RNA, 25 nt, Human
uggcgggaacccaggagcccgacgg

SEQ ID NO: 1231709 - RNA, 19 nt, Human
uggcgugacccugacggcu

SEQ ID NO: 1231710 - RNA, 20 nt, Human
uggggggcacagaguucagg

SEQ ID NO: 1231711 - RNA, 21 nt, Human
uucaggguuuccagcgagugg

SEQ ID NO: 1231712 - RNA, 25 nt, Human
aaaaaaaaaaaaaaaaagaaaagaa

SEQ ID NO: 1231713 - RNA, 23 nt, Human
aaaaaaaaaagaaaagaaaagaa

SEQ ID NO: 1231714 - RNA, 20 nt, Human
aaacagacauaugauagcau

SEQ ID NO: 1231715 - RNA, 23 nt, Human
aaagaaaagaaaagaaaaaggga

SEQ ID NO: 1231716 - RNA, 18 nt, Human
aaagcucuguuaagggua

SEQ ID NO: 1231717 - RNA, 19 nt, Human
aacaaaacauggaggaguc

SEQ ID NO: 1231718 - RNA, 20 nt, Human
aacagugcgagacuccaucu

SEQ ID NO: 1231719 - RNA, 19 nt, Human
aacauagugaaaccccauc

SEQ ID NO: 1231720 - RNA, 20 nt, Human
aacauagugaaaccccaucu

SEQ ID NO: 1231721 - RNA, 20 nt, Human
aacauagugaaaccccaucu

SEQ ID NO: 1231722 - RNA, 21 nt, Human
aacauagugaaaccccaucuc

SEQ ID NO: 1231723 - RNA, 22 nt, Human
aacuuccuucugguccucacug

SEQ ID NO: 1231724 - RNA, 24 nt, Human
aagaaaagaaaaagggagaaggga

SEQ ID NO: 1231725 - RNA, 22 nt, Human
aagaaagcauuccccuagggcc

SEQ ID NO: 1231726 - RNA, 21 nt, Human
aagucuuuuuccacccaacag

SEQ ID NO: 1231727 - RNA, 24 nt, Human
acaggcugggcgcaguggcucaug

SEQ ID NO: 1231728 - RNA, 24 nt, Human
acagugcgagacuccaucucaaaa

SEQ ID NO: 1231729 - RNA, 20 nt, Human
accagccccugcaacagugc

SEQ ID NO: 1231730 - RNA, 24 nt, Human
accccaucucuacuaaaaauacaa

SEQ ID NO: 1231731 - RNA, 21 nt, Human
agaaaagaaaaagggagaagg

SEQ ID NO: 1231732 - RNA, 18 nt, Human
agaaaagaaaagaaaaag

SEQ ID NO: 1231733 - RNA, 19 nt, Human
agaaaagaaaagaaaaagg

SEQ ID NO: 1231734 - RNA, 26 nt, Human
agaaaucauuuuagcacuguaauaag

SEQ ID NO: 1231735 - RNA, 22 nt, Human
agaagaaagucuuuuuccaccc

SEQ ID NO: 1231736 - RNA, 21 nt, Human
agacugugccacugcacacca

SEQ ID NO: 1231737 - RNA, 24 nt, Human
agcacuuugggaggcugaggcagg

SEQ ID NO: 1231738 - RNA, 21 nt, Human
agcaucacuugaacccgagag

SEQ ID NO: 1231739 - RNA, 21 nt, Human
agccgagacugugccacugca

SEQ ID NO: 1231740 - RNA, 20 nt, Human
agcugggcgugguggugggc

SEQ ID NO: 1231741 - RNA, 24 nt, Human
aggaggaucaccaggucaggaguu

SEQ ID NO: 1231742 - RNA, 22 nt, Human
aggaguucaagaccagacugcc

SEQ ID NO: 1231743 - RNA, 22 nt, Human
aggaucaccaggucaggaguuc

SEQ ID NO: 1231744 - RNA, 18 nt, Human
aggcaggagcaucacuug

SEQ ID NO: 1231745 - RNA, 24 nt, Human
aggcaggagcaucacuugaacccg

SEQ ID NO: 1231746 - RNA, 20 nt, Human
aggcaggaggaucaccaggu

SEQ ID NO: 1231747 - RNA, 24 nt, Human
aggcaggaggaucaccaggucagg

SEQ ID NO: 1231748 - RNA, 21 nt, Human
aggcggagguugcagugagcc

SEQ ID NO: 1231749 - RNA, 24 nt, Human
aggcggagguugcagugagccgag

SEQ ID NO: 1231750 - RNA, 24 nt, Human
aggcugaggcaggagcaucacuug

SEQ ID NO: 1231751 - RNA, 19 nt, Human
aggcugaggcaggaggauc

SEQ ID NO: 1231752 - RNA, 24 nt, Human
aguggcucaugccuauaaucccag

SEQ ID NO: 1231753 - RNA, 28 nt, Human
auaccagcaucccuuuccaaccggaggg

SEQ ID NO: 1231754 - RNA, 21 nt, Human
auacuguacuuaagagaagga

SEQ ID NO: 1231755 - RNA, 21 nt, Human
aucauaaaccucccaggauac

SEQ ID NO: 1231756 - RNA, 19 nt, Human
augccuauaaucccagcac

SEQ ID NO: 1231757 - RNA, 21 nt, Human
auuucagcuauacaagccaau

SEQ ID NO: 1231758 - RNA, 22 nt, Human
caagccaaucaccugaguaaaa

SEQ ID NO: 1231759 - RNA, 18 nt, Human
cacaaaacuuccuucugg

SEQ ID NO: 1231760 - RNA, 21 nt, Human
caccuguaauccuagcuauuc

SEQ ID NO: 1231761 - RNA, 24 nt, Human
caccuguaauccuagcuauucagg

SEQ ID NO: 1231762 - RNA, 20 nt, Human
cacugcacaccagccccugc

SEQ ID NO: 1231763 - RNA, 24 nt, Human
cacugcacaccagccccugcaaca

SEQ ID NO: 1231764 - RNA, 24 nt, Human
cagcacuuugggaggcugaggcag

SEQ ID NO: 1231765 - RNA, 25 nt, Human
cagcacuuugggaggcugaggcagg

SEQ ID NO: 1231766 - RNA, 18 nt, Human
cagcugaaaccuacuaca

SEQ ID NO: 1231767 - RNA, 19 nt, Human
caggaaccuguggcagggu

SEQ ID NO: 1231768 - RNA, 24 nt, Human
caggaggcugaggcaggagcauca

SEQ ID NO: 1231769 - RNA, 21 nt, Human
caucaugaguacucugcuuau

SEQ ID NO: 1231770 - RNA, 19 nt, Human
caucuggaacuaagagacu

SEQ ID NO: 1231771 - RNA, 20 nt, Human
caugccuauaaucccagcac

SEQ ID NO: 1231772 - RNA, 24 nt, Human
caugccuauaaucccagcacuuug

SEQ ID NO: 1231773 - RNA, 24 nt, Human
ccaacagaggaggccaaacaccag

SEQ ID NO: 1231774 - RNA, 21 nt, Human
ccacugcacaccagccccugc

SEQ ID NO: 1231775 - RNA, 18 nt, Human
ccagacugcccaacauag

SEQ ID NO: 1231776 - RNA, 22 nt, Human
ccccugcaacagugcgagacuc

SEQ ID NO: 1231777 - RNA, 19 nt, Human
ccuacaugauguuuugauu

SEQ ID NO: 1231778 - RNA, 20 nt, Human
ccuacuacagggcaaagauu

SEQ ID NO: 1231779 - RNA, 22 nt, Human
ccuauaaucccagcacuuuggg

SEQ ID NO: 1231780 - RNA, 23 nt, Human
cgagacuccaucucaaaaaaaaa

SEQ ID NO: 1231781 - RNA, 24 nt, Human
cgagaggcggagguugcagugagc

SEQ ID NO: 1231782 - RNA, 18 nt, Human
cucaaaaaaaaaaaaaaa

SEQ ID NO: 1231783 - RNA, 26 nt, Human
cucaaaaaaaaaaaaaaaaagaaaag

SEQ ID NO: 1231784 - RNA, 23 nt, Human
cucaugccuauaaucccagcacu

SEQ ID NO: 1231785 - RNA, 24 nt, Human
cucaugccuauaaucccagcacuu

SEQ ID NO: 1231786 - RNA, 19 nt, Human
cuccaucucaaaaaaaaaa

SEQ ID NO: 1231787 - RNA, 21 nt, Human
cuguaauccuagcuauucagg

SEQ ID NO: 1231788 - RNA, 20 nt, Human
gacaggcugggcgcaguggc

SEQ ID NO: 1231789 - RNA, 21 nt, Human
gacaggcugggcgcaguggcu

SEQ ID NO: 1231790 - RNA, 26 nt, Human
gacaggcugggcgcaguggcucaugc

SEQ ID NO: 1231791 - RNA, 19 nt, Human
gagaaagaacuauacugua

SEQ ID NO: 1231792 - RNA, 23 nt, Human
gagguugcagugagccgagacug

SEQ ID NO: 1231793 - RNA, 22 nt, Human
gaucaccaggucaggaguucaa

SEQ ID NO: 1231794 - RNA, 24 nt, Human
gaucaccaggucaggaguucaaga

SEQ ID NO: 1231795 - RNA, 24 nt, Human
gccaaagcacaaaacuuccuucug

SEQ ID NO: 1231796 - RNA, 21 nt, Human
gcucagcugaaaccuacuaca

SEQ ID NO: 1231797 - RNA, 19 nt, Human
ggacaggcugggcgcagug

SEQ ID NO: 1231798 - RNA, 21 nt, Human
ggacaggcugggcgcaguggc

SEQ ID NO: 1231799 - RNA, 22 nt, Human
ggagaaaaacagacauaugaua

SEQ ID NO: 1231800 - RNA, 18 nt, Human
ggagguugcagugagccg

SEQ ID NO: 1231801 - RNA, 20 nt, Human
ggagguugcagugagccgag

SEQ ID NO: 1231802 - RNA, 22 nt, Human
ggagguugcagugagccgagac

SEQ ID NO: 1231803 - RNA, 23 nt, Human
ggcgcaguggcucaugccuauaa

SEQ ID NO: 1231804 - RNA, 23 nt, Human
ggcugggcgcaguggcucaugcc

SEQ ID NO: 1231805 - RNA, 24 nt, Human
gggcgugguggugggcaccuguaa

SEQ ID NO: 1231806 - RNA, 24 nt, Human
gguggugggcaccuguaauccuag

SEQ ID NO: 1231807 - RNA, 30 nt, Human
uaaaaacaucaaaaaucauaaaccucccag

SEQ ID NO: 1231808 - RNA, 22 nt, Human
uaaaagaaaaaaaauaucucac

SEQ ID NO: 1231809 - RNA, 20 nt, Human
uaaaccucccaggauaccag

SEQ ID NO: 1231810 - RNA, 23 nt, Human
uaaaccucccaggauaccagcau

SEQ ID NO: 1231811 - RNA, 19 nt, Human
uaauauuacaauacuacuu

SEQ ID NO: 1231812 - RNA, 23 nt, Human
uaccagcaucccuuuccaagaga

SEQ ID NO: 1231813 - RNA, 22 nt, Human
uagagaacccaucuggaacuaa

SEQ ID NO: 1231814 - RNA, 24 nt, Human
uagcacuguaauaagaaaagcucu

SEQ ID NO: 1231815 - RNA, 24 nt, Human
uagcuauucaggaggcugaggcag

SEQ ID NO: 1231816 - RNA, 25 nt, Human
uaggaaguaacccagucauucaaau

SEQ ID NO: 1231817 - RNA, 22 nt, Human
uauaacuaggaaaauagagaag

SEQ ID NO: 1231818 - RNA, 21 nt, Human
uaugcauagaaagaaacaguu

SEQ ID NO: 1231819 - RNA, 24 nt, Human
ucaccaggucaggaguucaagacc

SEQ ID NO: 1231820 - RNA, 26 nt, Human
ucagcugaaaccuacuacagggcaaa

SEQ ID NO: 1231821 - RNA, 18 nt, Human
ucaugaguacucugcuua

SEQ ID NO: 1231822 - RNA, 20 nt, Human
ucauucaaauucuaccucuc

SEQ ID NO: 1231823 - RNA, 23 nt, Human
uccaucucaaaaaaaaaaaaaaa

SEQ ID NO: 1231824 - RNA, 22 nt, Human
ucucuacuaaaaauacaaaaaa

SEQ ID NO: 1231825 - RNA, 19 nt, Human
ugaaaccccaucucuacua

SEQ ID NO: 1231826 - RNA, 18 nt, Human
ugaaaccuacuacagggc

SEQ ID NO: 1231827 - RNA, 22 nt, Human
ugaacaggcacaugcauacuca

SEQ ID NO: 1231828 - RNA, 22 nt, Human
ugagccgagacugugccacugc

SEQ ID NO: 1231829 - RNA, 24 nt, Human
ugaggcaggagcaucacuugaacc

SEQ ID NO: 1231830 - RNA, 25 nt, Human
ugaggcaggagcaucacuugaaccc

SEQ ID NO: 1231831 - RNA, 20 nt, Human
ugaggcaggaggaucaccag

SEQ ID NO: 1231832 - RNA, 23 nt, Human
ugaggcaggaggaucaccagguc

SEQ ID NO: 1231833 - RNA, 24 nt, Human
ugaggcaggaggaucaccagguca

SEQ ID NO: 1231834 - RNA, 20 nt, Human
ugauuggaacaguuuuccuu

SEQ ID NO: 1231835 - RNA, 23 nt, Human
ugccuauaaucccagcacuuugg

SEQ ID NO: 1231836 - RNA, 22 nt, Human
uggaacaguuuuccuuuaauau

SEQ ID NO: 1231837 - RNA, 21 nt, Human
uggcucaugccuauaauccca

SEQ ID NO: 1231838 - RNA, 24 nt, Human
uggcucaugccuauaaucccagca

SEQ ID NO: 1231839 - RNA, 20 nt, Human
ugggaggcugaggcaggagg

SEQ ID NO: 1231840 - RNA, 24 nt, Human
ugggaggcugaggcaggaggauca

SEQ ID NO: 1231841 - RNA, 24 nt, Human
ugguagacaguacacuugggaauu

SEQ ID NO: 1231842 - RNA, 19 nt, Human
uggugggcaccuguaaucc

SEQ ID NO: 1231843 - RNA, 22 nt, Human
ugguggugggcaccuguaaucc

SEQ ID NO: 1231844 - RNA, 22 nt, Human
uguccuguauucuuaccauaga

SEQ ID NO: 1231845 - RNA, 18 nt, Human
uuagcugggcgugguggu

SEQ ID NO: 1231846 - RNA, 24 nt, Human
uuagcugggcgugguggugggcac

SEQ ID NO: 1231847 - RNA, 20 nt, Human
uucaagaggagaaaaacaga

SEQ ID NO: 1231848 - RNA, 19 nt, Human
uucaagaggagaaaaacga

SEQ ID NO: 1231849 - RNA, 24 nt, Human
uugaacccgagaggcggagguugc

SEQ ID NO: 1231850 - RNA, 19 nt, Human
uugcagugagccgagacug

SEQ ID NO: 1231851 - RNA, 22 nt, Human
uugcagugagccgagacugugc

SEQ ID NO: 1231852 - RNA, 23 nt, Human
uugcagugagccgagacugugcc

SEQ ID NO: 1231853 - RNA, 25 nt, Human
uugggaggcugaggcaggaggauca

SEQ ID NO: 1231854 - RNA, 19 nt, Human
uuuaagaaaaagggacagg

SEQ ID NO: 1231855 - RNA, 20 nt, Human
uuugauuuuucucaaaggca

SEQ ID NO: 1231856 - RNA, 25 nt, Human
uuuuuuauuaguuuuguuuuuuuuu

SEQ ID NO: 1231857 - RNA, 25 nt, Human
aaacuaaacuuaaaaucuaaaaauu

SEQ ID NO: 1231858 - RNA, 21 nt, Human
aaaucaggcuucaaaucgcag

SEQ ID NO: 1231859 - RNA, 26 nt, Human
aacaaaagcgacuccauugggaccac

SEQ ID NO: 1231860 - RNA, 22 nt, Human
aacagaaaaccuaaaacuaaac

SEQ ID NO: 1231861 - RNA, 24 nt, Human
aaccacucaaaauaaacgucucug

SEQ ID NO: 1231862 - RNA, 21 nt, Human
aagaagcucagagcccaaagc

SEQ ID NO: 1231863 - RNA, 23 nt, Human
aagaauaguaguaguguauuagc

SEQ ID NO: 1231864 - RNA, 20 nt, Human
aagacagugagacuccaucu

SEQ ID NO: 1231865 - RNA, 19 nt, Human
aagcacaaauuuaacugaa

SEQ ID NO: 1231866 - RNA, 20 nt, Human
aagcucagagcccaaagcaa

SEQ ID NO: 1231867 - RNA, 24 nt, Human
aaguagcuagaacuacaggcgugc

SEQ ID NO: 1231868 - RNA, 24 nt, Human
acaacagaaacacgguguacuaaa

SEQ ID NO: 1231869 - RNA, 25 nt, Human
acaauacaagcacucagaagcaccg

SEQ ID NO: 1231870 - RNA, 22 nt, Human
accacagaacacaacagaaaca

SEQ ID NO: 1231871 - RNA, 22 nt, Human
accaucaucaccaucaucaggu

SEQ ID NO: 1231872 - RNA, 21 nt, Human
acguuuacuuuuuguagaaac

SEQ ID NO: 1231873 - RNA, 22 nt, Human
acucacagcugacaauuacuga

SEQ ID NO: 1231874 - RNA, 19 nt, Human
agaaaagaaaaaugcugcg

SEQ ID NO: 1231875 - RNA, 23 nt, Human
agaagaagcucagagcccaaagc

SEQ ID NO: 1231876 - RNA, 20 nt, Human
agagaugaaaggcagaggaa

SEQ ID NO: 1231877 - RNA, 21 nt, Human
agaggaagcucagagcccaag

SEQ ID NO: 1231878 - RNA, 19 nt, Human
agcaggaggugucuccccc

SEQ ID NO: 1231879 - RNA, 24 nt, Human
agccugggcaagacagugagacuc

SEQ ID NO: 1231880 - RNA, 24 nt, Human
agcggguggggcuucauccugcag

SEQ ID NO: 1231881 - RNA, 19 nt, Human
agcuacuacuaauacucac

SEQ ID NO: 1231882 - RNA, 23 nt, Human
agcuauauacacuuugaggacca

SEQ ID NO: 1231883 - RNA, 19 nt, Human
agcugacaauuacugagca

SEQ ID NO: 1231884 - RNA, 20 nt, Human
aggaguuugagaccagccug

SEQ ID NO: 1231885 - RNA, 23 nt, Human
aggcagaagaagcucagagccca

SEQ ID NO: 1231886 - RNA, 23 nt, Human
aggcagaggaagcucagagccca

SEQ ID NO: 1231887 - RNA, 22 nt, Human
aggcaggccccaaggcacucca

SEQ ID NO: 1231888 - RNA, 23 nt, Human
aggcgggaggaucgcuugagccu

SEQ ID NO: 1231889 - RNA, 18 nt, Human
aguaacggcgaggacaca

SEQ ID NO: 1231890 - RNA, 28 nt, Human
auccaggcaggccccaaggcacuccagu

SEQ ID NO: 1231891 - RNA, 21 nt, Human
augagauggaccagaaaccug

SEQ ID NO: 1231892 - RNA, 24 nt, Human
augggguuucgcucugucucccag

SEQ ID NO: 1231893 - RNA, 22 nt, Human
auuuccucaauacucccuccca

SEQ ID NO: 1231894 - RNA, 19 nt, Human
caaaaacaugagcccccac

SEQ ID NO: 1231895 - RNA, 21 nt, Human
caaaaagaagggcagagaaca

SEQ ID NO: 1231896 - RNA, 22 nt, Human
caaaauaaaguaaaugugaauc

SEQ ID NO: 1231897 - RNA, 19 nt, Human
caaacaauaacgcugaccu

SEQ ID NO: 1231898 - RNA, 21 nt, Human
caaaucgcagcccugcaacuu

SEQ ID NO: 1231899 - RNA, 21 nt, Human
caacacaacuaugaaccuucc

SEQ ID NO: 1231900 - RNA, 22 nt, Human
caaccucccaggcugaagugau

SEQ ID NO: 1231901 - RNA, 22 nt, Human
caaugcagccucaaccucccag

SEQ ID NO: 1231902 - RNA, 21 nt, Human
cacaaauuuaacugaagugag

SEQ ID NO: 1231903 - RNA, 19 nt, Human
cacagggccacagggugaa

SEQ ID NO: 1231904 - RNA, 24 nt, Human
cacagggccacagggugaaugcuc

SEQ ID NO: 1231905 - RNA, 19 nt, Human
caccaggcagagguguggu

SEQ ID NO: 1231906 - RNA, 26 nt, Human
cagagcccaaagcaaagggguggagg

SEQ ID NO: 1231907 - RNA, 24 nt, Human
cagccucaaccucccaggcugaag

SEQ ID NO: 1231908 - RNA, 19 nt, Human
cagcucaaugcagccucaa

SEQ ID NO: 1231909 - RNA, 24 nt, Human
caucucagccucccaaguagcuag

SEQ ID NO: 1231910 - RNA, 22 nt, Human
ccacagaacacaacagaaacac

SEQ ID NO: 1231911 - RNA, 26 nt, Human
ccacccccaaacaauaacgcugaccu

SEQ ID NO: 1231912 - RNA, 23 nt, Human
ccauuugcauccacuguggucaa

SEQ ID NO: 1231913 - RNA, 23 nt, Human
cccaaguagcuagaacuacaggc

SEQ ID NO: 1231914 - RNA, 26 nt, Human
cccacccccaaacaauaacgcugacc

SEQ ID NO: 1231915 - RNA, 19 nt, Human
cccaggcuggagugccgug

SEQ ID NO: 1231916 - RNA, 23 nt, Human
cccccaaacaauaacgcugaccu

SEQ ID NO: 1231917 - RNA, 19 nt, Human
ccucaaccucccaggcuga

SEQ ID NO: 1231918 - RNA, 22 nt, Human
ccucuggugaaaauacgggaac

SEQ ID NO: 1231919 - RNA, 19 nt, Human
ccugcaacuucagagcuac

SEQ ID NO: 1231920 - RNA, 21 nt, Human
ccugcagagaugaaaggcaga

SEQ ID NO: 1231921 - RNA, 19 nt, Human
ccuguacagcggguggggc

SEQ ID NO: 1231922 - RNA, 25 nt, Human
cgaggacacaaaacugguagagcca

SEQ ID NO: 1231923 - RNA, 24 nt, Human
cgcaugcauuuccucaauacuccc

SEQ ID NO: 1231924 - RNA, 20 nt, Human
cgggccacaaauaccuucuc

SEQ ID NO: 1231925 - RNA, 20 nt, Human
cuaaacuuaaaaucuaaaaa

SEQ ID NO: 1231926 - RNA, 19 nt, Human
cucacaauguugccaaggc

SEQ ID NO: 1231927 - RNA, 22 nt, Human
cuccugugcaaagaagucucau

SEQ ID NO: 1231928 - RNA, 20 nt, Human
cucugucucccaggcuggag

SEQ ID NO: 1231929 - RNA, 20 nt, Human
cugaagugaucuucccaucu

SEQ ID NO: 1231930 - RNA, 24 nt, Human
cugaccauauugaacagacgaugc

SEQ ID NO: 1231931 - RNA, 20 nt, Human
cugagcacuugcucugugcc

SEQ ID NO: 1231932 - RNA, 21 nt, Human
cugcaacuucagagcuaccac

SEQ ID NO: 1231933 - RNA, 18 nt, Human
cugccaaggagggcaggc

SEQ ID NO: 1231934 - RNA, 26 nt, Human
cuucccaucucagccucccaaguagc

SEQ ID NO: 1231935 - RNA, 28 nt, Human
cuuugaggaccagcugaacuugggcagg

SEQ ID NO: 1231936 - RNA, 22 nt, Human
gaaaaccuaaaacuaaacuuaa

SEQ ID NO: 1231937 - RNA, 20 nt, Human
gaacuugggcagaacuaaca

SEQ ID NO: 1231938 - RNA, 20 nt, Human
gaagaagcucagagcccaaa

SEQ ID NO: 1231939 - RNA, 22 nt, Human
gagcuggcuuguuagccaagaa

SEQ ID NO: 1231940 - RNA, 24 nt, Human
gaucgcuugagccuaggaguuuga

SEQ ID NO: 1231941 - RNA, 20 nt, Human
gcagagaacagucuucuuca

SEQ ID NO: 1231942 - RNA, 21 nt, Human
gccguggcuugaucucagcuc

SEQ ID NO: 1231943 - RNA, 20 nt, Human
gccucaaccucccaggcuga

SEQ ID NO: 1231944 - RNA, 23 nt, Human
gcugaaaucaagauuauguucug

SEQ ID NO: 1231945 - RNA, 20 nt, Human
gcuggaaaaccacucaaaau

SEQ ID NO: 1231946 - RNA, 22 nt, Human
gcuuugcauccuguacagcggg

SEQ ID NO: 1231947 - RNA, 21 nt, Human
ggaaaaacacagggccacagg

SEQ ID NO: 1231948 - RNA, 19 nt, Human
ggaugccaccaggcagagg

SEQ ID NO: 1231949 - RNA, 24 nt, Human
ggcaggccccaaggcacuccagug

SEQ ID NO: 1231950 - RNA, 22 nt, Human
gggaacccaaacacacgaguca

SEQ ID NO: 1231951 - RNA, 23 nt, Human
gggaacccaaacacacgagucag

SEQ ID NO: 1231952 - RNA, 22 nt, Human
gggcagaacuaacacccucugg

SEQ ID NO: 1231953 - RNA, 19 nt, Human
gggcuucauccuacagaga

SEQ ID NO: 1231954 - RNA, 24 nt, Human
gugaucuucccaucucagccuccc

SEQ ID NO: 1231955 - RNA, 18 nt, Human
gugccuagcccaggggug

SEQ ID NO: 1231956 - RNA, 22 nt, Human
uaaaguaaaugugaaucaacug

SEQ ID NO: 1231957 - RNA, 25 nt, Human
uaaaguaaaugugaaucauguuggc

SEQ ID NO: 1231958 - RNA, 22 nt, Human
uaacaaccugccuuauuccaga

SEQ ID NO: 1231959 - RNA, 25 nt, Human
uaagucagacacugauuucaaagug

SEQ ID NO: 1231960 - RNA, 19 nt, Human
uacaaaaacaugagccccc

SEQ ID NO: 1231961 - RNA, 22 nt, Human
uacaauacaagcacucagaagc

SEQ ID NO: 1231962 - RNA, 21 nt, Human
uacauacaacacaacuaugaa

SEQ ID NO: 1231963 - RNA, 25 nt, Human
uacauacaacacaacuaugaaccuu

SEQ ID NO: 1231964 - RNA, 21 nt, Human
uaccaugcuaaugagguccag

SEQ ID NO: 1231965 - RNA, 25 nt, Human
uaccaugcuaaugagguccaguauu

SEQ ID NO: 1231966 - RNA, 18 nt, Human
uaccucuacucuaaacuc

SEQ ID NO: 1231967 - RNA, 22 nt, Human
uagaaacagggucucacaaugu

SEQ ID NO: 1231968 - RNA, 21 nt, Human
uagaacuacaggcgugcacca

SEQ ID NO: 1231969 - RNA, 24 nt, Human
uagaacuacaggcgugcaccacua

SEQ ID NO: 1231970 - RNA, 19 nt, Human
uagcagcugaaaucaagau

SEQ ID NO: 1231971 - RNA, 19 nt, Human
uagcccaggggugugagug

SEQ ID NO: 1231972 - RNA, 20 nt, Human
uaggaugccaccaggcagag

SEQ ID NO: 1231973 - RNA, 24 nt, Human
uaguagaggcgggaggaucgcuug

SEQ ID NO: 1231974 - RNA, 21 nt, Human
ucaaagcuuugagcuggcuug

SEQ ID NO: 1231975 - RNA, 23 nt, Human
ucaaugcagccucaaccucccag

SEQ ID NO: 1231976 - RNA, 24 nt, Human
ucaaugcagccucaaccucccagg

SEQ ID NO: 1231977 - RNA, 18 nt, Human
ucagccucccaaguagcu

SEQ ID NO: 1231978 - RNA, 20 nt, Human
ucagccucccaaguagcuag

SEQ ID NO: 1231979 - RNA, 20 nt, Human
uccagaaggaauucaggaaa

SEQ ID NO: 1231980 - RNA, 24 nt, Human
ucccaaguagcuagaacuacaggc

SEQ ID NO: 1231981 - RNA, 23 nt, Human
ucccucccaguaacggcgaggac

SEQ ID NO: 1231982 - RNA, 21 nt, Human
uccguguggcucgugucaccc

SEQ ID NO: 1231983 - RNA, 21 nt, Human
uccugaagggcggguggggcu

SEQ ID NO: 1231984 - RNA, 21 nt, Human
uccuguacagcggguggggcu

SEQ ID NO: 1231985 - RNA, 20 nt, Human
ucgcucugucucccaggcug

SEQ ID NO: 1231986 - RNA, 21 nt, Human
ucgcucugucucccaggcugg

SEQ ID NO: 1231987 - RNA, 22 nt, Human
ucgcucugucucccaggcugga

SEQ ID NO: 1231988 - RNA, 21 nt, Human
ucgcuugagccuaggaguuug

SEQ ID NO: 1231989 - RNA, 18 nt, Human
ucucccaggcuggagugc

SEQ ID NO: 1231990 - RNA, 23 nt, Human
ucucucucaagcaggcuccuggu

SEQ ID NO: 1231991 - RNA, 18 nt, Human
ucuggugaaaauacggga

SEQ ID NO: 1231992 - RNA, 19 nt, Human
ucugucucccaggcuggag

SEQ ID NO: 1231993 - RNA, 20 nt, Human
ugaacagacgaugcacagag

SEQ ID NO: 1231994 - RNA, 23 nt, Human
ugagccuaggaguuugagaccag

SEQ ID NO: 1231995 - RNA, 25 nt, Human
ugcaaaaagaagggcagagaacagu

SEQ ID NO: 1231996 - RNA, 18 nt, Human
ugcagccucaaccuccca

SEQ ID NO: 1231997 - RNA, 18 nt, Human
ugccaaggcuggcauccu

SEQ ID NO: 1231998 - RNA, 25 nt, Human
ugccaggaaucacggaagcaccucg

SEQ ID NO: 1231999 - RNA, 18 nt, Human
ugccuguacauacaacac

SEQ ID NO: 1232000 - RNA, 18 nt, Human
uggaaaaacacagggccc

SEQ ID NO: 1232001 - RNA, 21 nt, Human
uggaaaaccacucaaaauaaa

SEQ ID NO: 1232002 - RNA, 21 nt, Human
uggaaaccaucaucaccauca

SEQ ID NO: 1232003 - RNA, 20 nt, Human
uggaccagaaaccugugcuu

SEQ ID NO: 1232004 - RNA, 20 nt, Human
uggcaggagcagcgugcauc

SEQ ID NO: 1232005 - RNA, 24 nt, Human
uggcuugaucucagcucaaugcag

SEQ ID NO: 1232006 - RNA, 20 nt, Human
ugggaccacggugagagggu

SEQ ID NO: 1232007 - RNA, 18 nt, Human
uggguuaagucagacacu

SEQ ID NO: 1232008 - RNA, 18 nt, Human
ugugaggagcaaaccacc

SEQ ID NO: 1232009 - RNA, 18 nt, Human
ugugaguguucaggaagu

SEQ ID NO: 1232010 - RNA, 22 nt, Human
ugugccaggaaucacggaagca

SEQ ID NO: 1232011 - RNA, 20 nt, Human
ugugguggaaaaacacaggg

SEQ ID NO: 1232012 - RNA, 18 nt, Human
ugugugccuguacauaca

SEQ ID NO: 1232013 - RNA, 22 nt, Human
uuaguagcagcugaaaucaaga

SEQ ID NO: 1232014 - RNA, 22 nt, Human
uuaguucuacuaucaaaacaga

SEQ ID NO: 1232015 - RNA, 19 nt, Human
uucaaagugucucaggaau

SEQ ID NO: 1232016 - RNA, 19 nt, Human
uucaggaaacacaaagaca

SEQ ID NO: 1232017 - RNA, 20 nt, Human
uugcauccuguacagcgggu

SEQ ID NO: 1232018 - RNA, 24 nt, Human
uuguagaaacagggucucacaaug

SEQ ID NO: 1232019 - RNA, 22 nt, Human
uuucgcucugucucccaggcug

SEQ ID NO: 1232020 - RNA, 23 nt, Human
uuucgcucugucucccaggcugg

SEQ ID NO: 1232021 - RNA, 24 nt, Human
uuucgcucugucucccaggcugga

SEQ ID NO: 1232022 - RNA, 19 nt, Human
aaaggugcacuuuuuuaca

SEQ ID NO: 1232023 - RNA, 19 nt, Human
aaauagccuuuaaauuggg

SEQ ID NO: 1232024 - RNA, 23 nt, Human
aaggaacugauccaggacaggac

SEQ ID NO: 1232025 - RNA, 21 nt, Human
acagacuuucuuuuuugccuc

SEQ ID NO: 1232026 - RNA, 22 nt, Human
acaucagauuccuccauuucau

SEQ ID NO: 1232027 - RNA, 27 nt, Human
acccuaaaaagucauuucuuggagaag

SEQ ID NO: 1232028 - RNA, 21 nt, Human
acgcgcugccggguaccacgg

SEQ ID NO: 1232029 - RNA, 20 nt, Human
acugaaucuguuucuccagu

SEQ ID NO: 1232030 - RNA, 19 nt, Human
acuguguguaaaauacugc

SEQ ID NO: 1232031 - RNA, 19 nt, Human
agauuaaucugagaguuac

SEQ ID NO: 1232032 - RNA, 19 nt, Human
agcucauggauguuccuuc

SEQ ID NO: 1232033 - RNA, 23 nt, Human
aggcccuugaucacaagcguauc

SEQ ID NO: 1232034 - RNA, 18 nt, Human
aggguugggaggaccucu

SEQ ID NO: 1232035 - RNA, 24 nt, Human
aucaucuaucacuuucuccaguuu

SEQ ID NO: 1232036 - RNA, 21 nt, Human
aucccuucuucuuccucuuca

SEQ ID NO: 1232037 - RNA, 24 nt, Human
augcagcaggugucacagaaggac

SEQ ID NO: 1232038 - RNA, 20 nt, Human
caaaaucuuccagcgccucc

SEQ ID NO: 1232039 - RNA, 22 nt, Human
cacacccuccagcacgcaggcc

SEQ ID NO: 1232040 - RNA, 20 nt, Human
cacagaaggacccuguccca

SEQ ID NO: 1232041 - RNA, 21 nt, Human
cacccagccuggugaugcagc

SEQ ID NO: 1232042 - RNA, 24 nt, Human
cacccuaaaaagucauuucuugga

SEQ ID NO: 1232043 - RNA, 20 nt, Human
cagagucccucacagccucc

SEQ ID NO: 1232044 - RNA, 21 nt, Human
caggacaggacagacuuucuu

SEQ ID NO: 1232045 - RNA, 23 nt, Human
caggagcugaaguucugaaauca

SEQ ID NO: 1232046 - RNA, 20 nt, Human
caggugucacagaaggaccc

SEQ ID NO: 1232047 - RNA, 23 nt, Human
caucagauucuuuuucuugguuu

SEQ ID NO: 1232048 - RNA, 21 nt, Human
ccaccccccgacauccuccca

SEQ ID NO: 1232049 - RNA, 21 nt, Human
ccagagucccucacagccucc

SEQ ID NO: 1232050 - RNA, 24 nt, Human
ccagccuggugaugcagcaggugu

SEQ ID NO: 1232051 - RNA, 18 nt, Human
ccagcgccuccuggagcc

SEQ ID NO: 1232052 - RNA, 22 nt, Human
cccaccccccgacauccuccca

SEQ ID NO: 1232053 - RNA, 24 nt, Human
ccccaagccgcuaccaccagcccu

SEQ ID NO: 1232054 - RNA, 25 nt, Human
cccgacauccucccacucccucgca

SEQ ID NO: 1232055 - RNA, 19 nt, Human
cccuccagcacgcaggcca

SEQ ID NO: 1232056 - RNA, 20 nt, Human
cccugucccagcugguccug

SEQ ID NO: 1232057 - RNA, 25 nt, Human
ccuccuggagccugucgacgucccc

SEQ ID NO: 1232058 - RNA, 18 nt, Human
cgacauccucccacuccc

SEQ ID NO: 1232059 - RNA, 21 nt, Human
cgcgcugccggguaccacggc

SEQ ID NO: 1232060 - RNA, 19 nt, Human
cgcugccggguaccacggc

SEQ ID NO: 1232061 - RNA, 21 nt, Human
cggaacgccuccccccacccc

SEQ ID NO: 1232062 - RNA, 22 nt, Human
cggaacgccuccccccaccccc

SEQ ID NO: 1232063 - RNA, 23 nt, Human
cggaacgccuccccccacccccc

SEQ ID NO: 1232064 - RNA, 20 nt, Human
cggcagucagaagaaccacu

SEQ ID NO: 1232065 - RNA, 22 nt, Human
cuccccccaccccccgacaucc

SEQ ID NO: 1232066 - RNA, 18 nt, Human
cucuccaguuuuacugga

SEQ ID NO: 1232067 - RNA, 24 nt, Human
cugccggguaccacggcuuucuuu

SEQ ID NO: 1232068 - RNA, 20 nt, Human
cugucccagcugguccugcu

SEQ ID NO: 1232069 - RNA, 22 nt, Human
cugugaguucuggcaauugugu

SEQ ID NO: 1232070 - RNA, 19 nt, Human
gaacugauccaggacagga

SEQ ID NO: 1232071 - RNA, 18 nt, Human
gaccggaacgccuccccc

SEQ ID NO: 1232072 - RNA, 24 nt, Human
gaccggaacgccuccccccacccc

SEQ ID NO: 1232073 - RNA, 23 nt, Human
gagcaccuccccaagccgcuacc

SEQ ID NO: 1232074 - RNA, 21 nt, Human
gaggaccucuuggcgcaggag

SEQ ID NO: 1232075 - RNA, 21 nt, Human
gcaggccaagugggguggggg

SEQ ID NO: 1232076 - RNA, 21 nt, Human
gcaggugucacagaaggaccc

SEQ ID NO: 1232077 - RNA, 23 nt, Human
gugaugcagcaggugucacagaa

SEQ ID NO: 1232078 - RNA, 22 nt, Human
uaaaaccagaacuguguguaaa

SEQ ID NO: 1232079 - RNA, 18 nt, Human
uaaaacuaaaggugcacu

SEQ ID NO: 1232080 - RNA, 26 nt, Human
uaaaagacucaaucccuucuucuucc

SEQ ID NO: 1232081 - RNA, 23 nt, Human
uaaaauagccuuuaaauugggac

SEQ ID NO: 1232082 - RNA, 25 nt, Human
uaaauccagugacaguuuucaguau

SEQ ID NO: 1232083 - RNA, 24 nt, Human
uaaauugggaccacugaaucuguu

SEQ ID NO: 1232084 - RNA, 21 nt, Human
uaaucugagaguuacuauuaa

SEQ ID NO: 1232085 - RNA, 21 nt, Human
uaggaugguguggccucugau

SEQ ID NO: 1232086 - RNA, 23 nt, Human
uauaguuucuccuuggaucuguu

SEQ ID NO: 1232087 - RNA, 25 nt, Human
ucccacucccucgcacacccuccag

SEQ ID NO: 1232088 - RNA, 19 nt, Human
ucccagcugguccugcucc

SEQ ID NO: 1232089 - RNA, 24 nt, Human
uccccaagccgcuaccaccagccc

SEQ ID NO: 1232090 - RNA, 24 nt, Human
uccucuucaucuucaucuucuucu

SEQ ID NO: 1232091 - RNA, 24 nt, Human
uccuuggaucuguuaacaauucac

SEQ ID NO: 1232092 - RNA, 24 nt, Human
ucucaaaaucuuccagcgccuccu

SEQ ID NO: 1232093 - RNA, 19 nt, Human
ucucccuccgcgggucucu

SEQ ID NO: 1232094 - RNA, 21 nt, Human
ucuucaucuucaucuucuucu

SEQ ID NO: 1232095 - RNA, 20 nt, Human
ucuugguuuuuucuuucugg

SEQ ID NO: 1232096 - RNA, 24 nt, Human
ugaacgcgcugccggguaccacgg

SEQ ID NO: 1232097 - RNA, 20 nt, Human
ugacaaaggaacugauccag

SEQ ID NO: 1232098 - RNA, 23 nt, Human
ugaguucuggcaauuguguccgu

SEQ ID NO: 1232099 - RNA, 21 nt, Human
ugccucuucucaaaaucuucc

SEQ ID NO: 1232100 - RNA, 18 nt, Human
uggcuucccagagucccu

SEQ ID NO: 1232101 - RNA, 18 nt, Human
ugggaggaccucuuggcg

SEQ ID NO: 1232102 - RNA, 25 nt, Human
uggggaccggaacgccuccccccac

SEQ ID NO: 1232103 - RNA, 25 nt, Human
uggggugggggggaacgaagggagc

SEQ ID NO: 1232104 - RNA, 20 nt, Human
ugguguggccucugaucugu

SEQ ID NO: 1232105 - RNA, 23 nt, Human
uguauaguuucuccuuggaucug

SEQ ID NO: 1232106 - RNA, 18 nt, Human
uuacuggaauuggauccu

SEQ ID NO: 1232107 - RNA, 22 nt, Human
uucgucaucauuauccauggau

SEQ ID NO: 1232108 - RNA, 24 nt, Human
uugaaugcaucuuguuuauaacug

SEQ ID NO: 1232109 - RNA, 18 nt, Human
uuggagaagcgauggaug

SEQ ID NO: 1232110 - RNA, 24 nt, Human
uugggaggaccucuuggcgcagga

SEQ ID NO: 1232111 - RNA, 22 nt, Human
uuggggaccggaacgccucccc

SEQ ID NO: 1232112 - RNA, 20 nt, Human
uuuccugugagguuucggug

SEQ ID NO: 1232113 - RNA, 24 nt, Human
uuucucagcuugagacacaucaga

SEQ ID NO: 1232114 - RNA, 18 nt, Human
aacaagagcgaaaccccg

SEQ ID NO: 1232115 - RNA, 20 nt, Human
aacauggagaaaccccgucu

SEQ ID NO: 1232116 - RNA, 21 nt, Human
aacauggagaaaccccgucuc

SEQ ID NO: 1232117 - RNA, 19 nt, Human
aaccccgucucaaaaaaaa

SEQ ID NO: 1232118 - RNA, 20 nt, Human
aagaaaaaaaaagaauguag

SEQ ID NO: 1232119 - RNA, 24 nt, Human
aaucacuugaaccugggaggugga

SEQ ID NO: 1232120 - RNA, 19 nt, Human
aaugagugaaucaaccacc

SEQ ID NO: 1232121 - RNA, 20 nt, Human
acaagagcgaaaccccgucu

SEQ ID NO: 1232122 - RNA, 21 nt, Human
acaagagcgaaaccccgucuc

SEQ ID NO: 1232123 - RNA, 24 nt, Human
acagagcaagacacuaucucaaaa

SEQ ID NO: 1232124 - RNA, 22 nt, Human
acauggccuccaccugccucuc

SEQ ID NO: 1232125 - RNA, 19 nt, Human
accacugcacuccagccug

SEQ ID NO: 1232126 - RNA, 24 nt, Human
accccgucucuacuaaaaauacaa

SEQ ID NO: 1232127 - RNA, 19 nt, Human
acccgggugugguggcgca

SEQ ID NO: 1232128 - RNA, 23 nt, Human
acccgggugugguggcgcaugcc

SEQ ID NO: 1232129 - RNA, 24 nt, Human
acugcacuccagccugggugacag

SEQ ID NO: 1232130 - RNA, 26 nt, Human
acugcacuccagccugggugacagag

SEQ ID NO: 1232131 - RNA, 22 nt, Human
agaaucacuugaaccugggagg

SEQ ID NO: 1232132 - RNA, 24 nt, Human
agagagacccaccaacuccaugcc

SEQ ID NO: 1232133 - RNA, 20 nt, Human
agcagaaaaaucccccaaag

SEQ ID NO: 1232134 - RNA, 19 nt, Human
agcccugacccucguccug

SEQ ID NO: 1232135 - RNA, 22 nt, Human
aggcaggagaaucacuugaacc

SEQ ID NO: 1232136 - RNA, 24 nt, Human
aggcaggagaaucacuugaaccug

SEQ ID NO: 1232137 - RNA, 24 nt, Human
aggcugaggcaggagaaucacuug

SEQ ID NO: 1232138 - RNA, 21 nt, Human
aggcugaggcgggaggauugc

SEQ ID NO: 1232139 - RNA, 24 nt, Human
aggcugaggcgggaggauugcuug

SEQ ID NO: 1232140 - RNA, 23 nt, Human
agggauuagaagccacuucaacu

SEQ ID NO: 1232141 - RNA, 22 nt, Human
agguaggcggaucaccugaggg

SEQ ID NO: 1232142 - RNA, 19 nt, Human
agguggagguugcagugaa

SEQ ID NO: 1232143 - RNA, 24 nt, Human
agguggagguugcagugaaccaag

SEQ ID NO: 1232144 - RNA, 22 nt, Human
aggugggagcagacgcugaggg

SEQ ID NO: 1232145 - RNA, 21 nt, Human
aguggccugagcagcggcuag

SEQ ID NO: 1232146 - RNA, 22 nt, Human
aucccagcacuuugggaggcca

SEQ ID NO: 1232147 - RNA, 19 nt, Human
auggggcacaggaucugaa

SEQ ID NO: 1232148 - RNA, 24 nt, Human
auugcaccacugcacuccagccug

SEQ ID NO: 1232149 - RNA, 18 nt, Human
auugcacuccagccugga

SEQ ID NO: 1232150 - RNA, 25 nt, Human
auugcacuccagccuggacaacaag

SEQ ID NO: 1232151 - RNA, 24 nt, Human
auugcgccauugcacuccagccug

SEQ ID NO: 1232152 - RNA, 22 nt, Human
auuugccuuccacaucacaaaa

SEQ ID NO: 1232153 - RNA, 18 nt, Human
caacugcugcagcugcug

SEQ ID NO: 1232154 - RNA, 19 nt, Human
caagagcgaaaccccgucu

SEQ ID NO: 1232155 - RNA, 24 nt, Human
caagauugcgccauugcacuccag

SEQ ID NO: 1232156 - RNA, 24 nt, Human
caagguaggcggaucaccugaggu

SEQ ID NO: 1232157 - RNA, 20 nt, Human
caccacugcacuccagccug

SEQ ID NO: 1232158 - RNA, 23 nt, Human
caccuguggucccagcuacucgg

SEQ ID NO: 1232159 - RNA, 24 nt, Human
caccuguggucccagcuacucggg

SEQ ID NO: 1232160 - RNA, 21 nt, Human
cacgcacccucaacucauccc

SEQ ID NO: 1232161 - RNA, 24 nt, Human
cacgccuguaaucccagcacuuug

SEQ ID NO: 1232162 - RNA, 24 nt, Human
cacuccagccuggacaacaagagc

SEQ ID NO: 1232163 - RNA, 25 nt, Human
cacuccagccuggacaacaagagcg

SEQ ID NO: 1232164 - RNA, 22 nt, Human
cacuccagccugggugacagag

SEQ ID NO: 1232165 - RNA, 23 nt, Human
cacuccagccugggugacagagc

SEQ ID NO: 1232166 - RNA, 19 nt, Human
cacuccgccuugagagaga

SEQ ID NO: 1232167 - RNA, 19 nt, Human
cacugcacuccagccuggg

SEQ ID NO: 1232168 - RNA, 19 nt, Human
cacugcacuccagccuggg

SEQ ID NO: 1232169 - RNA, 22 nt, Human
cacugcacuccagccuggguga

SEQ ID NO: 1232170 - RNA, 23 nt, Human
cacugcacuccagccugggugac

SEQ ID NO: 1232171 - RNA, 24 nt, Human
cacugcacuccagccugggugaca

SEQ ID NO: 1232172 - RNA, 24 nt, Human
cacugcacuccagccugggugaca

SEQ ID NO: 1232173 - RNA, 21 nt, Human
cacuucaacugcugcagcugc

SEQ ID NO: 1232174 - RNA, 21 nt, Human
cacuugaaccugggaggugga

SEQ ID NO: 1232175 - RNA, 21 nt, Human
cagcacuuugggaggccaagg

SEQ ID NO: 1232176 - RNA, 24 nt, Human
cagcacuuugggaggccaagguag

SEQ ID NO: 1232177 - RNA, 20 nt, Human
cagcagaaaaaucccccaaa

SEQ ID NO: 1232178 - RNA, 24 nt, Human
cagcccuccccucuguccuguggu

SEQ ID NO: 1232179 - RNA, 24 nt, Human
cagccugacuaacauggagaaacc

SEQ ID NO: 1232180 - RNA, 24 nt, Human
cagccuuggcuggcccgauggcuc

SEQ ID NO: 1232181 - RNA, 24 nt, Human
cagcuacucgggaggcugaggcgg

SEQ ID NO: 1232182 - RNA, 19 nt, Human
caggaccuucaugaaugag

SEQ ID NO: 1232183 - RNA, 21 nt, Human
caggucgggcgugguggcuca

SEQ ID NO: 1232184 - RNA, 22 nt, Human
cagugcccucccccacccccuc

SEQ ID NO: 1232185 - RNA, 22 nt, Human
caguugugaaggaggcugggga

SEQ ID NO: 1232186 - RNA, 18 nt, Human
cauugcacuccagccugg

SEQ ID NO: 1232187 - RNA, 19 nt, Human
cauugcacuccagccugga

SEQ ID NO: 1232188 - RNA, 20 nt, Human
cauugcacuccagccuggac

SEQ ID NO: 1232189 - RNA, 21 nt, Human
cauugcacuccagccuggaca

SEQ ID NO: 1232190 - RNA, 24 nt, Human
cauugcacuccagccuggacaaca

SEQ ID NO: 1232191 - RNA, 24 nt, Human
cauugccuuucaacagcucccacc

SEQ ID NO: 1232192 - RNA, 19 nt, Human
ccacaugguucuucccggg

SEQ ID NO: 1232193 - RNA, 22 nt, Human
ccacaugguucuucccggguca

SEQ ID NO: 1232194 - RNA, 20 nt, Human
ccacugcacuccagccuggg

SEQ ID NO: 1232195 - RNA, 20 nt, Human
ccacugcacuccagccuggg

SEQ ID NO: 1232196 - RNA, 20 nt, Human
ccacugcacuccagccuggg

SEQ ID NO: 1232197 - RNA, 21 nt, Human
ccacugcacuccagccugggu

SEQ ID NO: 1232198 - RNA, 21 nt, Human
ccacugcacuccagccugggu

SEQ ID NO: 1232199 - RNA, 23 nt, Human
ccacugcacuccagccuggguga

SEQ ID NO: 1232200 - RNA, 23 nt, Human
ccacugcacuccagccuggguga

SEQ ID NO: 1232201 - RNA, 24 nt, Human
ccacugcacuccagccugggugac

SEQ ID NO: 1232202 - RNA, 25 nt, Human
ccacugcacuccagccugggugaca

SEQ ID NO: 1232203 - RNA, 19 nt, Human
ccacuggaggggagagcuc

SEQ ID NO: 1232204 - RNA, 22 nt, Human
ccagugcccucccccacccccu

SEQ ID NO: 1232205 - RNA, 19 nt, Human
ccauugcacuccagccugg

SEQ ID NO: 1232206 - RNA, 21 nt, Human
ccauugcacuccagccuggac

SEQ ID NO: 1232207 - RNA, 21 nt, Human
cccacgcacccucaacucauc

SEQ ID NO: 1232208 - RNA, 23 nt, Human
cccacgcacccucaacucauccc

SEQ ID NO: 1232209 - RNA, 18 nt, Human
cccauacaccuguggucc

SEQ ID NO: 1232210 - RNA, 26 nt, Human
ccccacccccuccgcggcuugccccg

SEQ ID NO: 1232211 - RNA, 19 nt, Human
ccccgucucaaaaaaaaaa

SEQ ID NO: 1232212 - RNA, 23 nt, Human
cccgagaagcugaagccaggacc

SEQ ID NO: 1232213 - RNA, 24 nt, Human
ccgucucaaaaaaaaaaaacaaaa

SEQ ID NO: 1232214 - RNA, 25 nt, Human
ccgucucaaaaaaaaaaaacaaaaa

SEQ ID NO: 1232215 - RNA, 19 nt, Human
ccuccgcggcuugccccgc

SEQ ID NO: 1232216 - RNA, 23 nt, Human
ccugacuaacauggagaaacccc

SEQ ID NO: 1232217 - RNA, 24 nt, Human
ccugacuaacauggagaaaccccg

SEQ ID NO: 1232218 - RNA, 18 nt, Human
ccuggaggcuuucugccu

SEQ ID NO: 1232219 - RNA, 21 nt, Human
ccugggagguggagguugcag

SEQ ID NO: 1232220 - RNA, 20 nt, Human
ccugggugacagagcaagac

SEQ ID NO: 1232221 - RNA, 22 nt, Human
ccuguaaucccagcacuuuggg

SEQ ID NO: 1232222 - RNA, 19 nt, Human
ccuguaaucucagcuuuag

SEQ ID NO: 1232223 - RNA, 21 nt, Human
ccuguggucccagcuacucgg

SEQ ID NO: 1232224 - RNA, 18 nt, Human
ccugugguguuugcugcc

SEQ ID NO: 1232225 - RNA, 23 nt, Human
ccuucucacucacccgguccugg

SEQ ID NO: 1232226 - RNA, 22 nt, Human
ccuugcagagagacccaccaac

SEQ ID NO: 1232227 - RNA, 18 nt, Human
cgagaagcugaagccagg

SEQ ID NO: 1232228 - RNA, 23 nt, Human
cgaguggaugaaugagugaauca

SEQ ID NO: 1232229 - RNA, 24 nt, Human
cgccauugcacuccagccuggaca

SEQ ID NO: 1232230 - RNA, 23 nt, Human
cgccuguaaucccagcacuuugg

SEQ ID NO: 1232231 - RNA, 20 nt, Human
cggcuugccccgcucuccuu

SEQ ID NO: 1232232 - RNA, 22 nt, Human
cgggaggcugaggcgggaggau

SEQ ID NO: 1232233 - RNA, 19 nt, Human
cucaaaaaagaaaagaaaa

SEQ ID NO: 1232234 - RNA, 22 nt, Human
cucacgccuguaaucccagcac

SEQ ID NO: 1232235 - RNA, 24 nt, Human
cucacgccuguaaucccagcacuu

SEQ ID NO: 1232236 - RNA, 22 nt, Human
cucccccacccccuccgcggcu

SEQ ID NO: 1232237 - RNA, 22 nt, Human
cuccuucucacucacccggucc

SEQ ID NO: 1232238 - RNA, 20 nt, Human
cucugugcccacgcacccuc

SEQ ID NO: 1232239 - RNA, 20 nt, Human
cugaagguggcaggaccuuc

SEQ ID NO: 1232240 - RNA, 18 nt, Human
cugcauugccuuucaaca

SEQ ID NO: 1232241 - RNA, 23 nt, Human
cuggaggcuuucugccucggcag

SEQ ID NO: 1232242 - RNA, 19 nt, Human
cugugggauggggcacagg

SEQ ID NO: 1232243 - RNA, 23 nt, Human
cuuccacaucacaaaagugcaca

SEQ ID NO: 1232244 - RNA, 21 nt, Human
cuugaaccugggagguggagg

SEQ ID NO: 1232245 - RNA, 21 nt, Human
cuuuuggccugaggucgagga

SEQ ID NO: 1232246 - RNA, 26 nt, Human
gacccaccaacuccaugccucacuua

SEQ ID NO: 1232247 - RNA, 19 nt, Human
gacuuuuaucccuggucuc

SEQ ID NO: 1232248 - RNA, 21 nt, Human
gagaaaccccgucucuacuaa

SEQ ID NO: 1232249 - RNA, 18 nt, Human
gagaagcugaagccagga

SEQ ID NO: 1232250 - RNA, 23 nt, Human
gagaccagccugacuaacaugga

SEQ ID NO: 1232251 - RNA, 22 nt, Human
gagaggucaaagcuacagugag

SEQ ID NO: 1232252 - RNA, 24 nt, Human
gaggcgggaggauugcuugagccu

SEQ ID NO: 1232253 - RNA, 23 nt, Human
gagguugcagugaaccaagauug

SEQ ID NO: 1232254 - RNA, 18 nt, Human
gaucaccugagguggaga

SEQ ID NO: 1232255 - RNA, 18 nt, Human
gauugcuugagccugaga

SEQ ID NO: 1232256 - RNA, 22 nt, Human
gcaagacacuaucucaaaaaag

SEQ ID NO: 1232257 - RNA, 24 nt, Human
gcacuccagccugggugacagagc

SEQ ID NO: 1232258 - RNA, 24 nt, Human
gcagcaguuguccuuucuccugac

SEQ ID NO: 1232259 - RNA, 23 nt, Human
gcaggagaaucacuugaaccugg

SEQ ID NO: 1232260 - RNA, 19 nt, Human
gccccgcucuccuucucac

SEQ ID NO: 1232261 - RNA, 18 nt, Human
gcccucccccacccccuc

SEQ ID NO: 1232262 - RNA, 21 nt, Human
gcccucccccacccccuccgc

SEQ ID NO: 1232263 - RNA, 21 nt, Human
gccuuucaacagcucccacag

SEQ ID NO: 1232264 - RNA, 21 nt, Human
gcuagagcagcaaggacccug

SEQ ID NO: 1232265 - RNA, 18 nt, Human
gcugaagccaggacccug

SEQ ID NO: 1232266 - RNA, 23 nt, Human
ggaaggaggauguccacuggagg

SEQ ID NO: 1232267 - RNA, 22 nt, Human
ggagguugcagugaaccaagau

SEQ ID NO: 1232268 - RNA, 24 nt, Human
ggagguugcagugaaccaagauug

SEQ ID NO: 1232269 - RNA, 23 nt, Human
ggcgugguggcucacgccuguaa

SEQ ID NO: 1232270 - RNA, 21 nt, Human
ggcucacgccuguaaucccag

SEQ ID NO: 1232271 - RNA, 19 nt, Human
ggcuuaaacuccagggagg

SEQ ID NO: 1232272 - RNA, 27 nt, Human
gggaaggaggauguccacuggagggga

SEQ ID NO: 1232273 - RNA, 23 nt, Human
gggaggcugaggcaggagaauca

SEQ ID NO: 1232274 - RNA, 24 nt, Human
gggugugguggcgcaugccuguaa

SEQ ID NO: 1232275 - RNA, 18 nt, Human
ggucgggcgugguggcuc

SEQ ID NO: 1232276 - RNA, 19 nt, Human
ggugugguggcgcaugccu

SEQ ID NO: 1232277 - RNA, 18 nt, Human
gucacugugggauggggc

SEQ ID NO: 1232278 - RNA, 20 nt, Human
guccugcagguccagccagg

SEQ ID NO: 1232279 - RNA, 20 nt, Human
gugcccucccccacccccuc

SEQ ID NO: 1232280 - RNA, 23 nt, Human
guggcgcaugccuguaaucucag

SEQ ID NO: 1232281 - RNA, 23 nt, Human
guggcucacgccuguaaucccag

SEQ ID NO: 1232282 - RNA, 24 nt, Human
uaacauggagaaaccccgucucua

SEQ ID NO: 1232283 - RNA, 20 nt, Human
uaaggaagagcuuuuaaaaa

SEQ ID NO: 1232284 - RNA, 31 nt, Human
uaaguccauccuacacagauuuuuaaggaaa

SEQ ID NO: 1232285 - RNA, 18 nt, Human
uacagugagcugcgauug

SEQ ID NO: 1232286 - RNA, 21 nt, Human
uaccagcagaaaaauccccca

SEQ ID NO: 1232287 - RNA, 18 nt, Human
uacccuaggccagucacu

SEQ ID NO: 1232288 - RNA, 19 nt, Human
uagagcagcaaggacccug

SEQ ID NO: 1232289 - RNA, 22 nt, Human
uagccagguguggugacccaua

SEQ ID NO: 1232290 - RNA, 24 nt, Human
uagcuacucgggaggcugaggcag

SEQ ID NO: 1232291 - RNA, 20 nt, Human
uagcuucucagcuaugaucc

SEQ ID NO: 1232292 - RNA, 18 nt, Human
uaggcggaucaccugagg

SEQ ID NO: 1232293 - RNA, 23 nt, Human
ucaaaaaaaaaaaacaaaaacua

SEQ ID NO: 1232294 - RNA, 19 nt, Human
ucaaaaaagaaaagaaaaa

SEQ ID NO: 1232295 - RNA, 18 nt, Human
ucaagcccacacuacugc

SEQ ID NO: 1232296 - RNA, 19 nt, Human
ucacuugaaccugggaggu

SEQ ID NO: 1232297 - RNA, 24 nt, Human
ucacuugaaccugggagguggagg

SEQ ID NO: 1232298 - RNA, 24 nt, Human
ucaggucgggcgugguggcucacg

SEQ ID NO: 1232299 - RNA, 21 nt, Human
uccacaucacaaaagugcaca

SEQ ID NO: 1232300 - RNA, 24 nt, Human
uccagccugggugacagagcaaga

SEQ ID NO: 1232301 - RNA, 23 nt, Human
uccaugccucacuuaccagcaga

SEQ ID NO: 1232302 - RNA, 22 nt, Human
ucccagccucugccuuaggguc

SEQ ID NO: 1232303 - RNA, 22 nt, Human
ucccagccucugccuuaggguc

SEQ ID NO: 1232304 - RNA, 22 nt, Human
ucccccaaagucacguggagau

SEQ ID NO: 1232305 - RNA, 24 nt, Human
uccccugugcugggagggacccac

SEQ ID NO: 1232306 - RNA, 19 nt, Human
uccgcggcuugccccgcuc

SEQ ID NO: 1232307 - RNA, 19 nt, Human
uccugguggugcucugugc

SEQ ID NO: 1232308 - RNA, 22 nt, Human
uccuugcagagagacccaccaa

SEQ ID NO: 1232309 - RNA, 25 nt, Human
ucgggaggcugaggcaggagaauca

SEQ ID NO: 1232310 - RNA, 20 nt, Human
ucgggaggcugaggcgggag

SEQ ID NO: 1232311 - RNA, 22 nt, Human
ucuaacagauggaucuuuuggc

SEQ ID NO: 1232312 - RNA, 21 nt, Human
ucucacucacccgguccuggu

SEQ ID NO: 1232313 - RNA, 24 nt, Human
ucucuacuaaaaauacaaaaaauu

SEQ ID NO: 1232314 - RNA, 24 nt, Human
ucucugagcagccuuggcuggccc

SEQ ID NO: 1232315 - RNA, 24 nt, Human
ugaaccugggagguggagguugca

SEQ ID NO: 1232316 - RNA, 20 nt, Human
ugaaggaggcuggggaaugu

SEQ ID NO: 1232317 - RNA, 19 nt, Human
ugaaugagugaaucaacca

SEQ ID NO: 1232318 - RNA, 23 nt, Human
ugacauggccuccaccugccucu

SEQ ID NO: 1232319 - RNA, 24 nt, Human
ugacccauacaccuguggucccag

SEQ ID NO: 1232320 - RNA, 21 nt, Human
ugagaggucaaagcuacagug

SEQ ID NO: 1232321 - RNA, 19 nt, Human
ugagauggaggaaggggcu

SEQ ID NO: 1232322 - RNA, 20 nt, Human
ugagcagccuuggcuggccc

SEQ ID NO: 1232323 - RNA, 22 nt, Human
ugagccccgucuucuccacaga

SEQ ID NO: 1232324 - RNA, 23 nt, Human
ugaggagggagacuucuuagggc

SEQ ID NO: 1232325 - RNA, 23 nt, Human
ugaggagugggcagccuggagcu

SEQ ID NO: 1232326 - RNA, 20 nt, Human
ugaggcaggagaaucacuug

SEQ ID NO: 1232327 - RNA, 24 nt, Human
ugaggcaggagaaucacuugaacc

SEQ ID NO: 1232328 - RNA, 25 nt, Human
ugaggcaggagaaucacuugaaccu

SEQ ID NO: 1232329 - RNA, 23 nt, Human
ugaggcgggaggauugcuugagc

SEQ ID NO: 1232330 - RNA, 24 nt, Human
ugaggcgggaggauugcuugagcc

SEQ ID NO: 1232331 - RNA, 18 nt, Human
ugaggcugggaaggagga

SEQ ID NO: 1232332 - RNA, 19 nt, Human
ugagguggagaccagccug

SEQ ID NO: 1232333 - RNA, 21 nt, Human
ugcaccacugcacuccagccu

SEQ ID NO: 1232334 - RNA, 22 nt, Human
ugcacuccagccuggacaacaa

SEQ ID NO: 1232335 - RNA, 25 nt, Human
ugcacuccagccuggacaacaagag

SEQ ID NO: 1232336 - RNA, 23 nt, Human
ugcagagagacccaccaacucca

SEQ ID NO: 1232337 - RNA, 19 nt, Human
ugcauugccuuucaacagc

SEQ ID NO: 1232338 - RNA, 23 nt, Human
ugccccgcucuccuucucacuca

SEQ ID NO: 1232339 - RNA, 31 nt, Human
ugccuguaaucucagcuuuagcuacucgggg

SEQ ID NO: 1232340 - RNA, 20 nt, Human
ugccuuagggucugggacac

SEQ ID NO: 1232341 - RNA, 19 nt, Human
ugcuguuguacacccgaga

SEQ ID NO: 1232342 - RNA, 19 nt, Human
uggaggcugccccugcagu

SEQ ID NO: 1232343 - RNA, 20 nt, Human
uggccaccuggcugagcccu

SEQ ID NO: 1232344 - RNA, 21 nt, Human
uggccaccuggcugagcccug

SEQ ID NO: 1232345 - RNA, 20 nt, Human
uggcccgauggcucuaacag

SEQ ID NO: 1232346 - RNA, 21 nt, Human
uggcgcaugccuguaaucuca

SEQ ID NO: 1232347 - RNA, 22 nt, Human
uggcgcaugccuguaaucucag

SEQ ID NO: 1232348 - RNA, 19 nt, Human
uggcgguaggguggaggcc

SEQ ID NO: 1232349 - RNA, 20 nt, Human
uggcgguaggguggaggcug

SEQ ID NO: 1232350 - RNA, 22 nt, Human
uggcucacgccuguaaucccag

SEQ ID NO: 1232351 - RNA, 24 nt, Human
uggcucacgccuguaaucccagca

SEQ ID NO: 1232352 - RNA, 22 nt, Human
uggcugagcccugacccucguc

SEQ ID NO: 1232353 - RNA, 21 nt, Human
ugggaaggaggauguccacug

SEQ ID NO: 1232354 - RNA, 24 nt, Human
ugggaggccaagguaggcggauca

SEQ ID NO: 1232355 - RNA, 18 nt, Human
ugggagguggagguugca

SEQ ID NO: 1232356 - RNA, 24 nt, Human
ugggagguggagguugcagugaac

SEQ ID NO: 1232357 - RNA, 29 nt, Human
ugggagguggagguugcagugacaacggu

SEQ ID NO: 1232358 - RNA, 19 nt, Human
ugggauggggcacaggauc

SEQ ID NO: 1232359 - RNA, 24 nt, Human
ugguggcgcaugccuguaaucuca

SEQ ID NO: 1232360 - RNA, 24 nt, Human
ugguggcucacgccuguaauccca

SEQ ID NO: 1232361 - RNA, 23 nt, Human
uguccuggaggcuuucugccucg

SEQ ID NO: 1232362 - RNA, 27 nt, Human
uguccugugguguuugcugccguguac

SEQ ID NO: 1232363 - RNA, 21 nt, Human
uguccuugcagagagacccac

SEQ ID NO: 1232364 - RNA, 22 nt, Human
ugugcugggagggacccacagg

SEQ ID NO: 1232365 - RNA, 23 nt, Human
ugugggauggggcacaggaucug

SEQ ID NO: 1232366 - RNA, 24 nt, Human
ugugguguuugcugccugcauugc

SEQ ID NO: 1232367 - RNA, 22 nt, Human
uguuugcugccugcauugccuu

SEQ ID NO: 1232368 - RNA, 21 nt, Human
uuagaaaugacauggccucca

SEQ ID NO: 1232369 - RNA, 23 nt, Human
uuccauuugccuuccacaucaca

SEQ ID NO: 1232370 - RNA, 23 nt, Human
uuccuguuccccugugcugggag

SEQ ID NO: 1232371 - RNA, 24 nt, Human
uugaaccugggagguggagguugc

SEQ ID NO: 1232372 - RNA, 20 nt, Human
uugaaucuuucaugaggcug

SEQ ID NO: 1232373 - RNA, 22 nt, Human
uugcagugaaccaagauugcgc

SEQ ID NO: 1232374 - RNA, 23 nt, Human
uugccuuucaacagcucccacag

SEQ ID NO: 1232375 - RNA, 23 nt, Human
uugcgccauugcacuccagccug

SEQ ID NO: 1232376 - RNA, 18 nt, Human
uugcuugagccugagagg

SEQ ID NO: 1232377 - RNA, 25 nt, Human
uuggguccuggugagauggaggaag

SEQ ID NO: 1232378 - RNA, 21 nt, Human
agaccccacucauguacccag

SEQ ID NO: 1232379 - RNA, 23 nt, Human
agcagcggcggcggcggcggcgg

SEQ ID NO: 1232380 - RNA, 20 nt, Human
agggagcccgggagcggugc

SEQ ID NO: 1232381 - RNA, 22 nt, Human
aucuaagcucccauuugaucuu

SEQ ID NO: 1232382 - RNA, 19 nt, Human
caagagcagaggcuaauag

SEQ ID NO: 1232383 - RNA, 21 nt, Human
cagaguccuacaaggauucac

SEQ ID NO: 1232384 - RNA, 21 nt, Human
cagcgcaaguccacaaacugu

SEQ ID NO: 1232385 - RNA, 26 nt, Human
cagcggcggcggcggcggcggcuccc

SEQ ID NO: 1232386 - RNA, 22 nt, Human
cagcuaacuucuuacaagagca

SEQ ID NO: 1232387 - RNA, 24 nt, Human
caucuaagcucccauuugaucuuc

SEQ ID NO: 1232388 - RNA, 18 nt, Human
ccccccacaccccggccg

SEQ ID NO: 1232389 - RNA, 18 nt, Human
ccccggccggcgcgcugg

SEQ ID NO: 1232390 - RNA, 22 nt, Human
ccccgugugcgcccccuggccc

SEQ ID NO: 1232391 - RNA, 20 nt, Human
cccgccgccccccacacccc

SEQ ID NO: 1232392 - RNA, 25 nt, Human
ccgugugcgcccccuggcccgcccu

SEQ ID NO: 1232393 - RNA, 24 nt, Human
cgcaaguccacaaacuguucccuu

SEQ ID NO: 1232394 - RNA, 18 nt, Human
cgccccccacaccccggc

SEQ ID NO: 1232395 - RNA, 19 nt, Human
cgcccucgccccuccggcc

SEQ ID NO: 1232396 - RNA, 20 nt, Human
cucacaaaauuccugaaaau

SEQ ID NO: 1232397 - RNA, 25 nt, Human
cucauguacccagaucuauguuggg

SEQ ID NO: 1232398 - RNA, 21 nt, Human
cucccauuugaucuucuccag

SEQ ID NO: 1232399 - RNA, 19 nt, Human
cuccggcccgccgcccccc

SEQ ID NO: 1232400 - RNA, 21 nt, Human
cuggcccgcccucgccccucc

SEQ ID NO: 1232401 - RNA, 24 nt, Human
cuuccacaucuaagcucccauuug

SEQ ID NO: 1232402 - RNA, 19 nt, Human
cuucuuacaagagcagagg

SEQ ID NO: 1232403 - RNA, 18 nt, Human
gaaugagauggaagaggg

SEQ ID NO: 1232404 - RNA, 22 nt, Human
gcagaggcuaauagaugugccc

SEQ ID NO: 1232405 - RNA, 23 nt, Human
gcagcagcggcggcggcggcggc

SEQ ID NO: 1232406 - RNA, 23 nt, Human
gcagcagcggcggcggcggcggc

SEQ ID NO: 1232407 - RNA, 19 nt, Human
gcggcggcggcggcggcuc

SEQ ID NO: 1232408 - RNA, 20 nt, Human
gcggcggcggcggcucgggc

SEQ ID NO: 1232409 - RNA, 22 nt, Human
gcggcggcggcucgggcucggc

SEQ ID NO: 1232410 - RNA, 21 nt, Human
ggcggcggcggcggcggcucg

SEQ ID NO: 1232411 - RNA, 21 nt, Human
ggcggcggcggcggcucgggc

SEQ ID NO: 1232412 - RNA, 20 nt, Human
ggcggcggcucgggcucggc

SEQ ID NO: 1232413 - RNA, 20 nt, Human
gggaaugagauggaagaggg

SEQ ID NO: 1232414 - RNA, 21 nt, Human
gggaaugagauggaagaggga

SEQ ID NO: 1232415 - RNA, 24 nt, Human
gggagguagagaaucuaagaaaga

SEQ ID NO: 1232416 - RNA, 28 nt, Human
gggagguagagaaucuaagaaagacugu

SEQ ID NO: 1232417 - RNA, 22 nt, Human
gguagugcaugauccaagggug

SEQ ID NO: 1232418 - RNA, 18 nt, Human
uaauaagaccccacucau

SEQ ID NO: 1232419 - RNA, 18 nt, Human
uauaacaaugucacucga

SEQ ID NO: 1232420 - RNA, 21 nt, Human
ucacaagauuauaauaagacc

SEQ ID NO: 1232421 - RNA, 19 nt, Human
ucacucgaaguguggucca

SEQ ID NO: 1232422 - RNA, 21 nt, Human
ucaucuauaacaaugucacuc

SEQ ID NO: 1232423 - RNA, 19 nt, Human
uccacaucuaagcucccau

SEQ ID NO: 1232424 - RNA, 24 nt, Human
ucuaagaaagacugugcauuuucc

SEQ ID NO: 1232425 - RNA, 18 nt, Human
ugccuggucaccuagggg

SEQ ID NO: 1232426 - RNA, 23 nt, Human
ugggagggagcccgggagcggug

SEQ ID NO: 1232427 - RNA, 20 nt, Human
uucagaguguuucuugguuu

SEQ ID NO: 1232428 - RNA, 19 nt, Human
aaggcauuccaauugugga

SEQ ID NO: 1232429 - RNA, 21 nt, Human
cagcuuggcucuccccuuugu

SEQ ID NO: 1232430 - RNA, 21 nt, Human
ccucucaggaagggccaggga

SEQ ID NO: 1232431 - RNA, 22 nt, Human
cuuuauacagucacugccaaau

SEQ ID NO: 1232432 - RNA, 19 nt, Human
gaaaggcucagcuuggcuc

SEQ ID NO: 1232433 - RNA, 20 nt, Human
gaauuuguuuuuaacuucuu

SEQ ID NO: 1232434 - RNA, 21 nt, Human
ggaagggccagggauucaggc

SEQ ID NO: 1232435 - RNA, 21 nt, Human
ucacaucuuccuggaucugaa

SEQ ID NO: 1232436 - RNA, 19 nt, Human
ugaguggauccucucagga

SEQ ID NO: 1232437 - RNA, 19 nt, Human
uggugggaucugaguggau

SEQ ID NO: 1232438 - RNA, 26 nt, Human
uuuaacuucuuuauacagucacugcc

SEQ ID NO: 1232439 - RNA, 22 nt, Human
aaaagccugacaaugucaagga

SEQ ID NO: 1232440 - RNA, 19 nt, Human
aaauauauucauuuuccca

SEQ ID NO: 1232441 - RNA, 23 nt, Human
aaguagcgaaagucgcuuuggcc

SEQ ID NO: 1232442 - RNA, 22 nt, Human
acuaccaacauuagaaaagccu

SEQ ID NO: 1232443 - RNA, 19 nt, Human
auggguguggaauggcagc

SEQ ID NO: 1232444 - RNA, 25 nt, Human
caaaaaaggcugcaacauuugucua

SEQ ID NO: 1232445 - RNA, 20 nt, Human
caagagugccacaugugaug

SEQ ID NO: 1232446 - RNA, 20 nt, Human
cagaagcaggggccgcacag

SEQ ID NO: 1232447 - RNA, 18 nt, Human
caggugcuggggacucag

SEQ ID NO: 1232448 - RNA, 23 nt, Human
ccaaagcuacgccgaccaaucca

SEQ ID NO: 1232449 - RNA, 22 nt, Human
ccaacauuagaaaagccugaca

SEQ ID NO: 1232450 - RNA, 22 nt, Human
ccacaugugauggguguggaau

SEQ ID NO: 1232451 - RNA, 25 nt, Human
ccucagcauccgcagaagcaggggc

SEQ ID NO: 1232452 - RNA, 19 nt, Human
cgccaggaagccaggccaa

SEQ ID NO: 1232453 - RNA, 20 nt, Human
cucagcauccgcagaagcag

SEQ ID NO: 1232454 - RNA, 22 nt, Human
gucaaggaguggcaagagugcc

SEQ ID NO: 1232455 - RNA, 23 nt, Human
uaagguccggccgcccaaagcua

SEQ ID NO: 1232456 - RNA, 18 nt, Human
uagaaaagccugacaaug

SEQ ID NO: 1232457 - RNA, 21 nt, Human
uagcgaaagucgcuuuggccc

SEQ ID NO: 1232458 - RNA, 23 nt, Human
uauauucauuuucccaucacugg

SEQ ID NO: 1232459 - RNA, 21 nt, Human
ucuacaaaccucuggauauac

SEQ ID NO: 1232460 - RNA, 22 nt, Human
ugaaggguaugugcaucuucau

SEQ ID NO: 1232461 - RNA, 19 nt, Human
uggaauggcagcucacugu

SEQ ID NO: 1232462 - RNA, 20 nt, Human
uggaauggcagcucacugua

SEQ ID NO: 1232463 - RNA, 19 nt, Human
ugugugacuuucuaagguc

SEQ ID NO: 1232464 - RNA, 22 nt, Human
uuaaaccagaaaacaccuucau

SEQ ID NO: 1232465 - RNA, 20 nt, Human
uuggaaucugcuuuggguuc

SEQ ID NO: 1232466 - RNA, 20 nt, Human
uuggagagacaguuauagca

SEQ ID NO: 1232467 - RNA, 20 nt, Human
aaccuccaccuccugggcuc

SEQ ID NO: 1232468 - RNA, 24 nt, Human
aaggugcugagaucacagguguga

SEQ ID NO: 1232469 - RNA, 18 nt, Human
aauuuuguauuuuuagua

SEQ ID NO: 1232470 - RNA, 19 nt, Human
acaaugccugacuaauuuu

SEQ ID NO: 1232471 - RNA, 18 nt, Human
accacguuggucaggcug

SEQ ID NO: 1232472 - RNA, 22 nt, Human
accauagggaaaugucuucuca

SEQ ID NO: 1232473 - RNA, 24 nt, Human
accuauucagguacuggaggugaa

SEQ ID NO: 1232474 - RNA, 25 nt, Human
acucuguugcccaggcuagaaugca

SEQ ID NO: 1232475 - RNA, 18 nt, Human
agaacucaagggacagga

SEQ ID NO: 1232476 - RNA, 25 nt, Human
agacaagauggggguuuugcucuaa

SEQ ID NO: 1232477 - RNA, 19 nt, Human
agaucacaggugugagcca

SEQ ID NO: 1232478 - RNA, 18 nt, Human
agccuccagaguagcugg

SEQ ID NO: 1232479 - RNA, 20 nt, Human
agcuaugacagagagaggca

SEQ ID NO: 1232480 - RNA, 21 nt, Human
aggaaggcagguuugggcugg

SEQ ID NO: 1232481 - RNA, 24 nt, Human
agggauucuccugccucagccucc

SEQ ID NO: 1232482 - RNA, 24 nt, Human
aggugaucugccugccucggccuc

SEQ ID NO: 1232483 - RNA, 26 nt, Human
aggugcugagaucacaggugugagcc

SEQ ID NO: 1232484 - RNA, 18 nt, Human
aguagcugggauuacagg

SEQ ID NO: 1232485 - RNA, 24 nt, Human
aguggcaugaucuccgcucagugc

SEQ ID NO: 1232486 - RNA, 22 nt, Human
augacagagagaggcaggguac

SEQ ID NO: 1232487 - RNA, 21 nt, Human
augggguuucaccacguuggu

SEQ ID NO: 1232488 - RNA, 24 nt, Human
augggguuucaccacguuggucag

SEQ ID NO: 1232489 - RNA, 24 nt, Human
auuuuuguauuuuuaguagagaug

SEQ ID NO: 1232490 - RNA, 23 nt, Human
caaccuccaccuccugggcucag

SEQ ID NO: 1232491 - RNA, 24 nt, Human
caagauggggguuuugcucuaagc

SEQ ID NO: 1232492 - RNA, 22 nt, Human
caagccccugcagagaagcaag

SEQ ID NO: 1232493 - RNA, 22 nt, Human
caagggauucuccugccucagc

SEQ ID NO: 1232494 - RNA, 24 nt, Human
caaggugcugagaucacaggugug

SEQ ID NO: 1232495 - RNA, 23 nt, Human
caaugugugccaggacagauggg

SEQ ID NO: 1232496 - RNA, 24 nt, Human
cacacuggacauuucaagccccug

SEQ ID NO: 1232497 - RNA, 19 nt, Human
cacagaacucaagggacag

SEQ ID NO: 1232498 - RNA, 18 nt, Human
cacaggugugagccacca

SEQ ID NO: 1232499 - RNA, 24 nt, Human
caccacacccggcuaauuuuugua

SEQ ID NO: 1232500 - RNA, 21 nt, Human
caccacguuggucaggcuggu

SEQ ID NO: 1232501 - RNA, 24 nt, Human
caccacguuggucaggcuggucuc

SEQ ID NO: 1232502 - RNA, 18 nt, Human
caccaugcugggcuaggc

SEQ ID NO: 1232503 - RNA, 20 nt, Human
cacuggacauuucaagcccc

SEQ ID NO: 1232504 - RNA, 21 nt, Human
caggugcccaacaccacaccc

SEQ ID NO: 1232505 - RNA, 22 nt, Human
cagguguuucuccugccucagc

SEQ ID NO: 1232506 - RNA, 19 nt, Human
cagguucaagggauucucc

SEQ ID NO: 1232507 - RNA, 20 nt, Human
cauuguaacacagacaaagc

SEQ ID NO: 1232508 - RNA, 24 nt, Human
ccaaagcacugauagaccuauuca

SEQ ID NO: 1232509 - RNA, 19 nt, Human
ccaacaccacacccggcua

SEQ ID NO: 1232510 - RNA, 21 nt, Human
ccaaggugcugagaucacagg

SEQ ID NO: 1232511 - RNA, 24 nt, Human
ccaaggugcugagaucacaggugu

SEQ ID NO: 1232512 - RNA, 19 nt, Human
ccagaguagcugggauuac

SEQ ID NO: 1232513 - RNA, 22 nt, Human
ccagaguagcugggauuacagg

SEQ ID NO: 1232514 - RNA, 23 nt, Human
ccagaguagcugggauuacaggu

SEQ ID NO: 1232515 - RNA, 24 nt, Human
ccagaguagcugggauuacaggug

SEQ ID NO: 1232516 - RNA, 22 nt, Human
cccaacaccacacccggcuaau

SEQ ID NO: 1232517 - RNA, 23 nt, Human
cccaggcuagaaugcaguggcau

SEQ ID NO: 1232518 - RNA, 22 nt, Human
ccuccaccuccugggcucaggu

SEQ ID NO: 1232519 - RNA, 24 nt, Human
ccucccagguucaagggauucucc

SEQ ID NO: 1232520 - RNA, 21 nt, Human
ccugaccuaaggugaucugcc

SEQ ID NO: 1232521 - RNA, 23 nt, Human
ccugaccuaaggugaucugccug

SEQ ID NO: 1232522 - RNA, 24 nt, Human
ccugccucagccuccagaguagcu

SEQ ID NO: 1232523 - RNA, 23 nt, Human
ccugccucagccucccaaguagc

SEQ ID NO: 1232524 - RNA, 23 nt, Human
cuaauuuuuguauuuuuaguaga

SEQ ID NO: 1232525 - RNA, 23 nt, Human
cucagccuccagaguagcuggga

SEQ ID NO: 1232526 - RNA, 21 nt, Human
cucccaaggugcugagaucac

SEQ ID NO: 1232527 - RNA, 26 nt, Human
cuccugaccuaaggugaucugccugc

SEQ ID NO: 1232528 - RNA, 22 nt, Human
cuccugccucagccuccagagu

SEQ ID NO: 1232529 - RNA, 23 nt, Human
cugccucagccucccaaguagcu

SEQ ID NO: 1232530 - RNA, 23 nt, Human
cugccucggccucccaaggugcu

SEQ ID NO: 1232531 - RNA, 21 nt, Human
cuggaucuugauauguguuuc

SEQ ID NO: 1232532 - RNA, 24 nt, Human
cuggggaacccaccucccagguuc

SEQ ID NO: 1232533 - RNA, 26 nt, Human
cuuacugugcugggaguacuugugga

SEQ ID NO: 1232534 - RNA, 19 nt, Human
cuuguggagugggggcugu

SEQ ID NO: 1232535 - RNA, 21 nt, Human
cuuguggagugggggcugugu

SEQ ID NO: 1232536 - RNA, 19 nt, Human
gaauuggaggcugggacag

SEQ ID NO: 1232537 - RNA, 19 nt, Human
gacacagaacucaagggac

SEQ ID NO: 1232538 - RNA, 21 nt, Human
gacaggaaggagaugaauugg

SEQ ID NO: 1232539 - RNA, 24 nt, Human
gaccuaaggugaucugccugccuc

SEQ ID NO: 1232540 - RNA, 20 nt, Human
gagaugaauuggaggcuggg

SEQ ID NO: 1232541 - RNA, 24 nt, Human
gagaugggguuucaccacguuggu

SEQ ID NO: 1232542 - RNA, 20 nt, Human
gaggcugggacagggguccc

SEQ ID NO: 1232543 - RNA, 25 nt, Human
gaguagcugggauuacaggugccca

SEQ ID NO: 1232544 - RNA, 18 nt, Human
gaucacaggugugagcca

SEQ ID NO: 1232545 - RNA, 22 nt, Human
gaucacaggugugagccaccau

SEQ ID NO: 1232546 - RNA, 20 nt, Human
gccugguuuggggaauguuu

SEQ ID NO: 1232547 - RNA, 25 nt, Human
gcuagaaugcaguggcaugaucucc

SEQ ID NO: 1232548 - RNA, 25 nt, Human
ggacaggggucccugccagggaugc

SEQ ID NO: 1232549 - RNA, 20 nt, Human
ggagacagacaagauggggg

SEQ ID NO: 1232550 - RNA, 23 nt, Human
ggagucuuacucuguugcccagg

SEQ ID NO: 1232551 - RNA, 24 nt, Human
gggauucuccugccucagccuccc

SEQ ID NO: 1232552 - RNA, 26 nt, Human
gggcaaugugugccaggacagauggg

SEQ ID NO: 1232553 - RNA, 19 nt, Human
gggcuaggaaggcagguuu

SEQ ID NO: 1232554 - RNA, 18 nt, Human
gggguuucaccacguugg

SEQ ID NO: 1232555 - RNA, 22 nt, Human
gggguuucaccacguuggucag

SEQ ID NO: 1232556 - RNA, 22 nt, Human
ggguuucaccacguuggucagg

SEQ ID NO: 1232557 - RNA, 19 nt, Human
gugaucugccugccucggc

SEQ ID NO: 1232558 - RNA, 20 nt, Human
gugcaaccuccaccuccugg

SEQ ID NO: 1232559 - RNA, 21 nt, Human
gugcugagaucacagguguga

SEQ ID NO: 1232560 - RNA, 22 nt, Human
uaagacggagucuuacucuguu

SEQ ID NO: 1232561 - RNA, 18 nt, Human
uaaggugaucugccugcc

SEQ ID NO: 1232562 - RNA, 21 nt, Human
uaauuuuguauuuuuaguaga

SEQ ID NO: 1232563 - RNA, 24 nt, Human
uaauuuuuguauuuuuaguagaga

SEQ ID NO: 1232564 - RNA, 23 nt, Human
uacaggugcccaacaccacaccc

SEQ ID NO: 1232565 - RNA, 23 nt, Human
uacaggugcccaacaccacaccc

SEQ ID NO: 1232566 - RNA, 24 nt, Human
uacucuguugcccaggcuagaaug

SEQ ID NO: 1232567 - RNA, 24 nt, Human
uagaaugcaguggcaugaucuccg

SEQ ID NO: 1232568 - RNA, 22 nt, Human
uagagaugggguuucaccacgu

SEQ ID NO: 1232569 - RNA, 18 nt, Human
uagcauuguaacacagac

SEQ ID NO: 1232570 - RNA, 23 nt, Human
uagcuaugacagagagaggcagg

SEQ ID NO: 1232571 - RNA, 25 nt, Human
uaggaaggcagguuugggcuggaga

SEQ ID NO: 1232572 - RNA, 19 nt, Human
uaguagagaugggguuuca

SEQ ID NO: 1232573 - RNA, 24 nt, Human
uaguagagaugggguuucaccacg

SEQ ID NO: 1232574 - RNA, 26 nt, Human
uaguagagaugggguuucaccacguu

SEQ ID NO: 1232575 - RNA, 19 nt, Human
uauguguuucucaguugga

SEQ ID NO: 1232576 - RNA, 24 nt, Human
uauuuauuuuuuaagacggagucu

SEQ ID NO: 1232577 - RNA, 20 nt, Human
ucagccucccaaguagcugg

SEQ ID NO: 1232578 - RNA, 24 nt, Human
ucagugcaaccuccaccuccuggg

SEQ ID NO: 1232579 - RNA, 27 nt, Human
ucagugcaaccuccaccuccugggcuc

SEQ ID NO: 1232580 - RNA, 24 nt, Human
uccagaguagcugggauuacaggu

SEQ ID NO: 1232581 - RNA, 23 nt, Human
ucccaaggugcugagaucacagg

SEQ ID NO: 1232582 - RNA, 24 nt, Human
ucccaaguagcugggaacgcaggu

SEQ ID NO: 1232583 - RNA, 24 nt, Human
ucccagguagacagugguugaggc

SEQ ID NO: 1232584 - RNA, 21 nt, Human
ucccagguucaagggauucuc

SEQ ID NO: 1232585 - RNA, 24 nt, Human
ucccagguucaagggauucuccug

SEQ ID NO: 1232586 - RNA, 24 nt, Human
uccugggcucagguguuucuccug

SEQ ID NO: 1232587 - RNA, 18 nt, Human
ucggccucccaaggugcu

SEQ ID NO: 1232588 - RNA, 22 nt, Human
ucuagacuccauccuccauccc

SEQ ID NO: 1232589 - RNA, 26 nt, Human
ucuccugccucagccucccaaguagc

SEQ ID NO: 1232590 - RNA, 18 nt, Human
ucuguugcccaggcuaga

SEQ ID NO: 1232591 - RNA, 24 nt, Human
ucuguugcccaggcuagaaugcag

SEQ ID NO: 1232592 - RNA, 19 nt, Human
ucuuacucuguugcccagg

SEQ ID NO: 1232593 - RNA, 23 nt, Human
ucuuacucuguugcccaggcuag

SEQ ID NO: 1232594 - RNA, 24 nt, Human
ucuuacucuguugcccaggcuaga

SEQ ID NO: 1232595 - RNA, 19 nt, Human
ugacacagaacucaaggga

SEQ ID NO: 1232596 - RNA, 18 nt, Human
ugacagagagaggcaggg

SEQ ID NO: 1232597 - RNA, 24 nt, Human
ugaccuaaggugaucugccugccu

SEQ ID NO: 1232598 - RNA, 22 nt, Human
ugagaucacaggugugagccac

SEQ ID NO: 1232599 - RNA, 24 nt, Human
ugagaucacaggugugagccacca

SEQ ID NO: 1232600 - RNA, 23 nt, Human
ugaucuccgcucagugcaaccuc

SEQ ID NO: 1232601 - RNA, 24 nt, Human
ugcccaggcuagaaugcaguggca

SEQ ID NO: 1232602 - RNA, 24 nt, Human
ugccucagccuccagaguagcugg

SEQ ID NO: 1232603 - RNA, 24 nt, Human
ugccucagccucccaaguagcugg

SEQ ID NO: 1232604 - RNA, 21 nt, Human
ugccucggccucccaaggugc

SEQ ID NO: 1232605 - RNA, 24 nt, Human
ugccucggccucccaaggugcuga

SEQ ID NO: 1232606 - RNA, 22 nt, Human
ugccugggaugagaguggagac

SEQ ID NO: 1232607 - RNA, 24 nt, Human
ugcugagaucacaggugugagcca

SEQ ID NO: 1232608 - RNA, 27 nt, Human
uggagacucgggcuugggaggcauccc

SEQ ID NO: 1232609 - RNA, 20 nt, Human
uggcagugucaggcaaggac

SEQ ID NO: 1232610 - RNA, 23 nt, Human
ugggaacgcaggugcgugccaca

SEQ ID NO: 1232611 - RNA, 20 nt, Human
ugggaugagaguggagacag

SEQ ID NO: 1232612 - RNA, 19 nt, Human
ugggauuacaggugcccaa

SEQ ID NO: 1232613 - RNA, 22 nt, Human
ugggauuacaggugcccaacac

SEQ ID NO: 1232614 - RNA, 24 nt, Human
ugggauuacaggugcccaacacca

SEQ ID NO: 1232615 - RNA, 26 nt, Human
ugggcucagguguuucuccugccccg

SEQ ID NO: 1232616 - RNA, 24 nt, Human
ugggcucagguguuucuccugccu

SEQ ID NO: 1232617 - RNA, 20 nt, Human
ugggcuggagacucgggcuu

SEQ ID NO: 1232618 - RNA, 24 nt, Human
ugggguuucaccacguuggucagg

SEQ ID NO: 1232619 - RNA, 25 nt, Human
uggucaagucugaucucagggcugg

SEQ ID NO: 1232620 - RNA, 24 nt, Human
uggucaggcuggucucaaacuccu

SEQ ID NO: 1232621 - RNA, 21 nt, Human
uguauuuuuaguagagauggg

SEQ ID NO: 1232622 - RNA, 22 nt, Human
ugugacacagaacucaagggac

SEQ ID NO: 1232623 - RNA, 20 nt, Human
uuacaggugcccaacaccac

SEQ ID NO: 1232624 - RNA, 18 nt, Human
uuaguagagaugggguuu

SEQ ID NO: 1232625 - RNA, 22 nt, Human
uuaguagagaugggguuucacc

SEQ ID NO: 1232626 - RNA, 25 nt, Human
uuaguagagaugggguuucaccacg

SEQ ID NO: 1232627 - RNA, 23 nt, Human
uucaagggauucuccugccucag

SEQ ID NO: 1232628 - RNA, 18 nt, Human
uucuucuuguggccucug

SEQ ID NO: 1232629 - RNA, 19 nt, Human
uugauauguguuucucagu

SEQ ID NO: 1232630 - RNA, 19 nt, Human
uugcuugggacccaggggg

SEQ ID NO: 1232631 - RNA, 20 nt, Human
uuggaggcugggacaggggu

SEQ ID NO: 1232632 - RNA, 21 nt, Human
uugggaggcaucccagguaga

SEQ ID NO: 1232633 - RNA, 21 nt, Human
uuucaccacguuggucaggcu

SEQ ID NO: 1232634 - RNA, 18 nt, Human
uuuuguauuuuuaguaga

SEQ ID NO: 1232635 - RNA, 19 nt, Human
uuuuguauuuuuaguagag

SEQ ID NO: 1232636 - RNA, 24 nt, Human
uuuuuaguagagaugggguuucac

SEQ ID NO: 1232637 - RNA, 21 nt, Human
uuuuucuucuuguggccucug

SEQ ID NO: 1232638 - RNA, 20 nt, Human
uuuuuguauuuuuaguagag

SEQ ID NO: 1232639 - RNA, 21 nt, Human
ccaauuucuugguauuucuca

SEQ ID NO: 1232640 - RNA, 19 nt, Human
cucggguuuccgcuccugg

SEQ ID NO: 1232641 - RNA, 22 nt, Human
cucuacaguuaccuaguggcug

SEQ ID NO: 1232642 - RNA, 24 nt, Human
cucuacaguuaccuaguggcugcu

SEQ ID NO: 1232643 - RNA, 19 nt, Human
uggccucuacaguuaccuu

SEQ ID NO: 1232644 - RNA, 20 nt, Human
uugcaguggccucuacaguu

SEQ ID NO: 1232645 - RNA, 18 nt, Human
aaacuaaaccucuguuga

SEQ ID NO: 1232646 - RNA, 20 nt, Human
aagaagggaugauuggagca

SEQ ID NO: 1232647 - RNA, 19 nt, Human
aaguagcugggauuacaga

SEQ ID NO: 1232648 - RNA, 25 nt, Human
aaguagcugggauuacagacaccca

SEQ ID NO: 1232649 - RNA, 24 nt, Human
accauguuggccaggcuggucucg

SEQ ID NO: 1232650 - RNA, 18 nt, Human
acccaccaccacacccaa

SEQ ID NO: 1232651 - RNA, 21 nt, Human
accuggaugaugugcagcacu

SEQ ID NO: 1232652 - RNA, 18 nt, Human
acgggguuucaccauguu

SEQ ID NO: 1232653 - RNA, 23 nt, Human
acgggguuucaccauguuggcca

SEQ ID NO: 1232654 - RNA, 24 nt, Human
acgggguuucaccauguuggccag

SEQ ID NO: 1232655 - RNA, 24 nt, Human
acucuugucgcccaggcuggagcg

SEQ ID NO: 1232656 - RNA, 22 nt, Human
acugcaaugcagagguacccag

SEQ ID NO: 1232657 - RNA, 24 nt, Human
agagugcugggauuacagcugugg

SEQ ID NO: 1232658 - RNA, 25 nt, Human
agagugcugggauuacagcuguggg

SEQ ID NO: 1232659 - RNA, 21 nt, Human
agcacuguuugcaggagguga

SEQ ID NO: 1232660 - RNA, 21 nt, Human
agcaggugugugugugugugu

SEQ ID NO: 1232661 - RNA, 24 nt, Human
agccugucacccccucacgacucc

SEQ ID NO: 1232662 - RNA, 19 nt, Human
aggaaucacgucuucaagu

SEQ ID NO: 1232663 - RNA, 22 nt, Human
aggugugugugugugugugugu

SEQ ID NO: 1232664 - RNA, 24 nt, Human
aggugugugugugugugugugugg

SEQ ID NO: 1232665 - RNA, 21 nt, Human
agguucaagugauucuccugc

SEQ ID NO: 1232666 - RNA, 22 nt, Human
aguagagacgggguuucaccau

SEQ ID NO: 1232667 - RNA, 22 nt, Human
agugcugggauuacagcugugg

SEQ ID NO: 1232668 - RNA, 24 nt, Human
aucucagcuuauuagaaaaaacaa

SEQ ID NO: 1232669 - RNA, 18 nt, Human
caaaguguuaagugggaa

SEQ ID NO: 1232670 - RNA, 19 nt, Human
caagaaaaguugagaguca

SEQ ID NO: 1232671 - RNA, 19 nt, Human
caaguccagccacuagagc

SEQ ID NO: 1232672 - RNA, 22 nt, Human
caagugauucuccugccucagc

SEQ ID NO: 1232673 - RNA, 22 nt, Human
caaguucaugcuaaucaaagug

SEQ ID NO: 1232674 - RNA, 21 nt, Human
caccauguuggccaggcuggu

SEQ ID NO: 1232675 - RNA, 24 nt, Human
caccauguuggccaggcuggucuc

SEQ ID NO: 1232676 - RNA, 27 nt, Human
caccauguuggccaggcuggucucgaa

SEQ ID NO: 1232677 - RNA, 21 nt, Human
cacugcaacguccgccuccua

SEQ ID NO: 1232678 - RNA, 22 nt, Human
cagaagauucuucccaggucaa

SEQ ID NO: 1232679 - RNA, 21 nt, Human
cagacacccaccaccacaccc

SEQ ID NO: 1232680 - RNA, 23 nt, Human
cagacacccaccaccacacccaa

SEQ ID NO: 1232681 - RNA, 24 nt, Human
cagacacccaccaccacacccaac

SEQ ID NO: 1232682 - RNA, 24 nt, Human
cagagugcugggauuacagcugug

SEQ ID NO: 1232683 - RNA, 24 nt, Human
cauccagaaaggaagcagaugaua

SEQ ID NO: 1232684 - RNA, 24 nt, Human
cauguuggccaggcuggucucgaa

SEQ ID NO: 1232685 - RNA, 21 nt, Human
ccacuagagccucucucucca

SEQ ID NO: 1232686 - RNA, 20 nt, Human
ccagagugcugggauuacag

SEQ ID NO: 1232687 - RNA, 24 nt, Human
ccagagugcugggauuacagcugu

SEQ ID NO: 1232688 - RNA, 20 nt, Human
ccauccaagaauacacacuc

SEQ ID NO: 1232689 - RNA, 25 nt, Human
ccauccaagaauacacacucugcaa

SEQ ID NO: 1232690 - RNA, 21 nt, Human
cccaccaccacacccaacuaa

SEQ ID NO: 1232691 - RNA, 22 nt, Human
ccccagagugcugggauuacag

SEQ ID NO: 1232692 - RNA, 20 nt, Human
cccccucacgacuccucgaa

SEQ ID NO: 1232693 - RNA, 24 nt, Human
ccgccuccuagguucaagugauuc

SEQ ID NO: 1232694 - RNA, 23 nt, Human
ccuagguucaagugauucuccuc

SEQ ID NO: 1232695 - RNA, 23 nt, Human
ccuagguucaagugauucuccug

SEQ ID NO: 1232696 - RNA, 22 nt, Human
ccucaggugauccagccugccu

SEQ ID NO: 1232697 - RNA, 22 nt, Human
ccucaggugauccagccugccu

SEQ ID NO: 1232698 - RNA, 24 nt, Human
ccuccuagguucaagugauucucc

SEQ ID NO: 1232699 - RNA, 25 nt, Human
ccugcccucaggugauccagccugc

SEQ ID NO: 1232700 - RNA, 18 nt, Human
ccugggacaggcauggaa

SEQ ID NO: 1232701 - RNA, 18 nt, Human
ccuuuccaucacugaccc

SEQ ID NO: 1232702 - RNA, 24 nt, Human
cgggguuucaccauguuggccagg

SEQ ID NO: 1232703 - RNA, 23 nt, Human
cuaauuuuuguauuuuuaguaga

SEQ ID NO: 1232704 - RNA, 22 nt, Human
cucagagacuguaaacuaaacc

SEQ ID NO: 1232705 - RNA, 24 nt, Human
cucagccuucuaaguagcugggau

SEQ ID NO: 1232706 - RNA, 19 nt, Human
cuccuagguucaagugauu

SEQ ID NO: 1232707 - RNA, 22 nt, Human
cuccugccucagccuucuaagu

SEQ ID NO: 1232708 - RNA, 19 nt, Human
cucuugucgcccaggcugg

SEQ ID NO: 1232709 - RNA, 23 nt, Human
cugcaacguccgccuccuagguu

SEQ ID NO: 1232710 - RNA, 23 nt, Human
cugccucagccuucuaaguagcu

SEQ ID NO: 1232711 - RNA, 24 nt, Human
cugugggccacugcgcccggccuu

SEQ ID NO: 1232712 - RNA, 23 nt, Human
cuuuuuuuuuuuuuuuuugagau

SEQ ID NO: 1232713 - RNA, 24 nt, Human
gaaugcaagucaaugagucagcca

SEQ ID NO: 1232714 - RNA, 21 nt, Human
gagaaggaaaagacaucucau

SEQ ID NO: 1232715 - RNA, 24 nt, Human
gagaaugguuuuacuuaaaaauau

SEQ ID NO: 1232716 - RNA, 24 nt, Human
gagacgggguuucaccauguuggc

SEQ ID NO: 1232717 - RNA, 20 nt, Human
gaugauggagaaggaaaaga

SEQ ID NO: 1232718 - RNA, 18 nt, Human
gauuacagcugugggcca

SEQ ID NO: 1232719 - RNA, 22 nt, Human
gauuacagcugugggccacugc

SEQ ID NO: 1232720 - RNA, 22 nt, Human
gauuacagcugugggccacugc

SEQ ID NO: 1232721 - RNA, 19 nt, Human
gauucuccugccucagccu

SEQ ID NO: 1232722 - RNA, 22 nt, Human
gccacuagagccucucucucca

SEQ ID NO: 1232723 - RNA, 20 nt, Human
gcccaggcuggagcgcaaug

SEQ ID NO: 1232724 - RNA, 21 nt, Human
gcuggagcgcaauggugccag

SEQ ID NO: 1232725 - RNA, 19 nt, Human
ggaagcagaugauaaaguc

SEQ ID NO: 1232726 - RNA, 23 nt, Human
gggguuucaccauguuggccagg

SEQ ID NO: 1232727 - RNA, 21 nt, Human
gguagcuuaugaccaccugga

SEQ ID NO: 1232728 - RNA, 23 nt, Human
guagagacgggguuucaccaugu

SEQ ID NO: 1232729 - RNA, 22 nt, Human
gugauccagccugccuuggccc

SEQ ID NO: 1232730 - RNA, 21 nt, Human
gugauucuccugccucagccu

SEQ ID NO: 1232731 - RNA, 18 nt, Human
gugccaucuuggcucacu

SEQ ID NO: 1232732 - RNA, 21 nt, Human
gugugugugugugugugugug

SEQ ID NO: 1232733 - RNA, 22 nt, Human
gugugugugugugugugugugu

SEQ ID NO: 1232734 - RNA, 19 nt, Human
uaacuuggcucuaagauga

SEQ ID NO: 1232735 - RNA, 21 nt, Human
uaagaacauauaacuuggcuc

SEQ ID NO: 1232736 - RNA, 24 nt, Human
uaauuuuuguauuuuuaguagaga

SEQ ID NO: 1232737 - RNA, 23 nt, Human
uacgugcacaaagaggagcaaga

SEQ ID NO: 1232738 - RNA, 22 nt, Human
uagagacgggguuucaccaugu

SEQ ID NO: 1232739 - RNA, 19 nt, Human
uagcaaaagcugacuugug

SEQ ID NO: 1232740 - RNA, 23 nt, Human
uagguucaagugauucuccugcc

SEQ ID NO: 1232741 - RNA, 24 nt, Human
uagguucaagugauucuccugccu

SEQ ID NO: 1232742 - RNA, 24 nt, Human
uaguagagacgggguuucaccaug

SEQ ID NO: 1232743 - RNA, 26 nt, Human
uaguagagacgggguuucaccauguu

SEQ ID NO: 1232744 - RNA, 18 nt, Human
uauuucuauuuucucaaa

SEQ ID NO: 1232745 - RNA, 19 nt, Human
ucaagugauucuccugccu

SEQ ID NO: 1232746 - RNA, 20 nt, Human
ucaaugaacaaaaagcuaca

SEQ ID NO: 1232747 - RNA, 23 nt, Human
ucacucuugucgcccaggcugga

SEQ ID NO: 1232748 - RNA, 24 nt, Human
ucacugcaacguccgccuccuagg

SEQ ID NO: 1232749 - RNA, 25 nt, Human
ucacugcaacguccgccuccuaggu

SEQ ID NO: 1232750 - RNA, 27 nt, Human
ucacugcaacguccgccuccuagguuc

SEQ ID NO: 1232751 - RNA, 21 nt, Human
ucagcaucugcugcccaacag

SEQ ID NO: 1232752 - RNA, 20 nt, Human
ucccacucauugaauccaaa

SEQ ID NO: 1232753 - RNA, 22 nt, Human
ucccaggucaaguccagccacc

SEQ ID NO: 1232754 - RNA, 21 nt, Human
uccuagguucaagugauucuc

SEQ ID NO: 1232755 - RNA, 24 nt, Human
uccuagguucaagugauucuccug

SEQ ID NO: 1232756 - RNA, 20 nt, Human
uccucgaauggccccuccac

SEQ ID NO: 1232757 - RNA, 18 nt, Human
ucgcccaggcuggagcgc

SEQ ID NO: 1232758 - RNA, 19 nt, Human
ucuaaguagcugggauuac

SEQ ID NO: 1232759 - RNA, 24 nt, Human
ucuccaaaucuuagccugucaccc

SEQ ID NO: 1232760 - RNA, 21 nt, Human
ucuccuuaagagaaaugggaa

SEQ ID NO: 1232761 - RNA, 22 nt, Human
ucuccuuaagagaaaugggaau

SEQ ID NO: 1232762 - RNA, 18 nt, Human
ucuuuuuuuuuuuuuuuu

SEQ ID NO: 1232763 - RNA, 20 nt, Human
ugaacaaaaagcuacaugga

SEQ ID NO: 1232764 - RNA, 20 nt, Human
ugauucuccugccucagccu

SEQ ID NO: 1232765 - RNA, 22 nt, Human
ugccaucaauccuggcugaagu

SEQ ID NO: 1232766 - RNA, 24 nt, Human
ugccucagccuucuaaguagcugg

SEQ ID NO: 1232767 - RNA, 21 nt, Human
ugccuuggccccccagagugc

SEQ ID NO: 1232768 - RNA, 21 nt, Human
ugccuuggccccccagagugc

SEQ ID NO: 1232769 - RNA, 24 nt, Human
ugcgcccggccuuggaccuuguuu

SEQ ID NO: 1232770 - RNA, 19 nt, Human
uggaccuuguuuucuaaug

SEQ ID NO: 1232771 - RNA, 24 nt, Human
uggccaggcuggucucgaacuccu

SEQ ID NO: 1232772 - RNA, 18 nt, Human
uggcucacugcaacgucc

SEQ ID NO: 1232773 - RNA, 19 nt, Human
ugggauuacagacacccac

SEQ ID NO: 1232774 - RNA, 21 nt, Human
ugggauuacagacacccacca

SEQ ID NO: 1232775 - RNA, 24 nt, Human
ugggauuacagacacccaccacca

SEQ ID NO: 1232776 - RNA, 19 nt, Human
ugggauuacagcugugggc

SEQ ID NO: 1232777 - RNA, 22 nt, Human
ugggauuacagcugugggccac

SEQ ID NO: 1232778 - RNA, 22 nt, Human
ugggauuacagcugugggccac

SEQ ID NO: 1232779 - RNA, 24 nt, Human
ugggauuacagcugugggccacug

SEQ ID NO: 1232780 - RNA, 23 nt, Human
ugucuacauaaggaugguuccau

SEQ ID NO: 1232781 - RNA, 21 nt, Human
uguguguguguguguacgugc

SEQ ID NO: 1232782 - RNA, 21 nt, Human
uguguguguguguguguacgu

SEQ ID NO: 1232783 - RNA, 22 nt, Human
uguguguguguguguguacgug

SEQ ID NO: 1232784 - RNA, 18 nt, Human
ugugugugugugugugug

SEQ ID NO: 1232785 - RNA, 18 nt, Human
ugugugugugugugugug

SEQ ID NO: 1232786 - RNA, 18 nt, Human
ugugugugugugugugug

SEQ ID NO: 1232787 - RNA, 18 nt, Human
ugugugugugugugugug

SEQ ID NO: 1232788 - RNA, 18 nt, Human
ugugugugugugugugug

SEQ ID NO: 1232789 - RNA, 18 nt, Human
ugugugugugugugugug

SEQ ID NO: 1232790 - RNA, 18 nt, Human
ugugugugugugugugug

SEQ ID NO: 1232791 - RNA, 18 nt, Human
ugugugugugugugugug

SEQ ID NO: 1232792 - RNA, 20 nt, Human
ugugugugugugugugugua

SEQ ID NO: 1232793 - RNA, 21 nt, Human
ugugugugugugugugugugu

SEQ ID NO: 1232794 - RNA, 21 nt, Human
ugugugugugugugugugugu

SEQ ID NO: 1232795 - RNA, 21 nt, Human
ugugugugugugugugugugu

SEQ ID NO: 1232796 - RNA, 21 nt, Human
ugugugugugugugugugugu

SEQ ID NO: 1232797 - RNA, 21 nt, Human
ugugugugugugugugugugu

SEQ ID NO: 1232798 - RNA, 21 nt, Human
ugugugugugugugugugugu

SEQ ID NO: 1232799 - RNA, 21 nt, Human
ugugugugugugugugugugu

SEQ ID NO: 1232800 - RNA, 21 nt, Human
ugugugugugugugugugugu

SEQ ID NO: 1232801 - RNA, 21 nt, Human
ugugugugugugugugugugu

SEQ ID NO: 1232802 - RNA, 21 nt, Human
ugugugugugugugugugugu

SEQ ID NO: 1232803 - RNA, 21 nt, Human
ugugugugugugugugugugu

SEQ ID NO: 1232804 - RNA, 21 nt, Human
ugugugugugugugugugugu

SEQ ID NO: 1232805 - RNA, 22 nt, Human
ugugugugugugugugugugua

SEQ ID NO: 1232806 - RNA, 22 nt, Human
ugugugugugugugugugugug

SEQ ID NO: 1232807 - RNA, 22 nt, Human
ugugugugugugugugugugug

SEQ ID NO: 1232808 - RNA, 22 nt, Human
ugugugugugugugugugugug

SEQ ID NO: 1232809 - RNA, 22 nt, Human
ugugugugugugugugugugug

SEQ ID NO: 1232810 - RNA, 22 nt, Human
ugugugugugugugugugugug

SEQ ID NO: 1232811 - RNA, 23 nt, Human
ugugugugugugugugugugugu

SEQ ID NO: 1232812 - RNA, 19 nt, Human
uuaagugggaaugcaaguc

SEQ ID NO: 1232813 - RNA, 18 nt, Human
uuaguagagacgggguuu

SEQ ID NO: 1232814 - RNA, 22 nt, Human
uuaguagagacgggguuucacc

SEQ ID NO: 1232815 - RNA, 24 nt, Human
uuaguagagacgggguuucaccau

SEQ ID NO: 1232816 - RNA, 23 nt, Human
uucaaaccgccccucugcacacu

SEQ ID NO: 1232817 - RNA, 21 nt, Human
uucaagugauucuccugccuc

SEQ ID NO: 1232818 - RNA, 23 nt, Human
uucaagugauucuccugccucag

SEQ ID NO: 1232819 - RNA, 24 nt, Human
uucaagugauucuccugccucagc

SEQ ID NO: 1232820 - RNA, 24 nt, Human
uucacucuugucgcccaggcugga

SEQ ID NO: 1232821 - RNA, 23 nt, Human
uuguauuuuuaguagagacgggg

SEQ ID NO: 1232822 - RNA, 24 nt, Human
uuucaccauguuggccaggcuggu

SEQ ID NO: 1232823 - RNA, 20 nt, Human
uuugggaguuuacugcuuua

SEQ ID NO: 1232824 - RNA, 21 nt, Human
uuuuguauuuuuaguagagac

SEQ ID NO: 1232825 - RNA, 24 nt, Human
uuuuuaguagagacgggguuucac

SEQ ID NO: 1232826 - RNA, 20 nt, Human
uuuuuguauuuuuaguagag

SEQ ID NO: 1232827 - RNA, 19 nt, Human
uuuuuuuuugagauggagc

SEQ ID NO: 1232828 - RNA, 22 nt, Human
uuuuuuuuuuuuuugagaugga

SEQ ID NO: 1232829 - RNA, 18 nt, Human
uuuuuuuuuuuuuuuuug

SEQ ID NO: 1232830 - RNA, 22 nt, Human
caauugcccaggcuuuccugaa

SEQ ID NO: 1232831 - RNA, 25 nt, Human
cauuccaauugcccaggcuuuccug

SEQ ID NO: 1232832 - RNA, 20 nt, Human
ccaauggggaucauuccuuc

SEQ ID NO: 1232833 - RNA, 18 nt, Human
ccagcugggggcgcaauu

SEQ ID NO: 1232834 - RNA, 19 nt, Human
cccaggcuuuccugaaaca

SEQ ID NO: 1232835 - RNA, 27 nt, Human
ugaaacacaggcacccuagucucaccu

SEQ ID NO: 1232836 - RNA, 19 nt, Human
aaagcacacggcauaaaac

SEQ ID NO: 1232837 - RNA, 24 nt, Human
acaaaacuuaaaacaccuuccagg

SEQ ID NO: 1232838 - RNA, 25 nt, Human
acagacaccaccgugggugccgagc

SEQ ID NO: 1232839 - RNA, 25 nt, Human
acagcacagacaccaccgugggugc

SEQ ID NO: 1232840 - RNA, 27 nt, Human
agagaccaaagcagcacagcacagaca

SEQ ID NO: 1232841 - RNA, 18 nt, Human
agcaccagggaacgaggg

SEQ ID NO: 1232842 - RNA, 23 nt, Human
aggcaagauccaaagcaauuuua

SEQ ID NO: 1232843 - RNA, 19 nt, Human
agggcaaguuccacagggc

SEQ ID NO: 1232844 - RNA, 21 nt, Human
auggcaauggagcccagcgcc

SEQ ID NO: 1232845 - RNA, 20 nt, Human
caaagcagcacagcacagac

SEQ ID NO: 1232846 - RNA, 23 nt, Human
caaagcagcacagcacagacacc

SEQ ID NO: 1232847 - RNA, 20 nt, Human
cacacggcauaaaacgaggu

SEQ ID NO: 1232848 - RNA, 24 nt, Human
caccuuccaggcaagauccaaagc

SEQ ID NO: 1232849 - RNA, 18 nt, Human
cagagaccaaagcagcac

SEQ ID NO: 1232850 - RNA, 19 nt, Human
cagagcagaguccgccucu

SEQ ID NO: 1232851 - RNA, 21 nt, Human
cauuuccaccagcaccaggga

SEQ ID NO: 1232852 - RNA, 18 nt, Human
ccaaagcagcacagcaca

SEQ ID NO: 1232853 - RNA, 21 nt, Human
ccagagcagaguccgccucuu

SEQ ID NO: 1232854 - RNA, 19 nt, Human
cucuuccagagcagagucc

SEQ ID NO: 1232855 - RNA, 25 nt, Human
cuuaaaacaccuuccaggcaagauc

SEQ ID NO: 1232856 - RNA, 19 nt, Human
gcacagcacagacaccacc

SEQ ID NO: 1232857 - RNA, 23 nt, Human
ggauccagagaccaaagcagcac

SEQ ID NO: 1232858 - RNA, 18 nt, Human
guugacaagggggaaugc

SEQ ID NO: 1232859 - RNA, 22 nt, Human
uaaaagcacacggcauaaaacg

SEQ ID NO: 1232860 - RNA, 25 nt, Human
uacaaaacuuaaaacaccuuccagg

SEQ ID NO: 1232861 - RNA, 19 nt, Human
uagagucaaauguaucugc

SEQ ID NO: 1232862 - RNA, 23 nt, Human
uauuacaaaacuuaaaacaccuu

SEQ ID NO: 1232863 - RNA, 21 nt, Human
ucagcagguaaaagcacacgg

SEQ ID NO: 1232864 - RNA, 21 nt, Human
uccaccagcaccagggaacga

SEQ ID NO: 1232865 - RNA, 20 nt, Human
uccagagcagaguccgccuc

SEQ ID NO: 1232866 - RNA, 19 nt, Human
uccaggcaagauccaaagc

SEQ ID NO: 1232867 - RNA, 20 nt, Human
uggcaauggagcccagcgcc

SEQ ID NO: 1232868 - RNA, 22 nt, Human
uucauuguccaagccauccacc

SEQ ID NO: 1232869 - RNA, 25 nt, Human
aaacaaaacauacauacagcaagaa

SEQ ID NO: 1232870 - RNA, 21 nt, Human
aaacaaaccagacucuaacag

SEQ ID NO: 1232871 - RNA, 22 nt, Human
aaaccaaacucucaacaaaauu

SEQ ID NO: 1232872 - RNA, 20 nt, Human
aaaccagguaauuaaaacag

SEQ ID NO: 1232873 - RNA, 20 nt, Human
aaagagacaauuauaaacca

SEQ ID NO: 1232874 - RNA, 19 nt, Human
aaaguguauacagccaaca

SEQ ID NO: 1232875 - RNA, 23 nt, Human
aacaaaacaaccuguuuguccuu

SEQ ID NO: 1232876 - RNA, 18 nt, Human
aacaucagaaucuuggca

SEQ ID NO: 1232877 - RNA, 23 nt, Human
aaccaaacucucaacaaaauucg

SEQ ID NO: 1232878 - RNA, 21 nt, Human
aaccaaagaaagugcuccagg

SEQ ID NO: 1232879 - RNA, 21 nt, Human
aacccaagcaucgaugugucu

SEQ ID NO: 1232880 - RNA, 21 nt, Human
aacgaaaccuucaaauauugc

SEQ ID NO: 1232881 - RNA, 18 nt, Human
aaggacuugaucacuucc

SEQ ID NO: 1232882 - RNA, 21 nt, Human
acaaaagaaaaacucucagcu

SEQ ID NO: 1232883 - RNA, 24 nt, Human
acaaaaugagucaauacaacacau

SEQ ID NO: 1232884 - RNA, 21 nt, Human
acaccaacuccagcacccggc

SEQ ID NO: 1232885 - RNA, 20 nt, Human
accaucagugcucugagcaa

SEQ ID NO: 1232886 - RNA, 21 nt, Human
acgaaaccuucaaauauugcc

SEQ ID NO: 1232887 - RNA, 24 nt, Human
agaaagaacaggcaguuguaaaaa

SEQ ID NO: 1232888 - RNA, 18 nt, Human
agacaaaagagacaauua

SEQ ID NO: 1232889 - RNA, 21 nt, Human
agcaauccaagaaucccggcc

SEQ ID NO: 1232890 - RNA, 18 nt, Human
agccggcccccggccccc

SEQ ID NO: 1232891 - RNA, 21 nt, Human
agcgguaccagugcuugcaca

SEQ ID NO: 1232892 - RNA, 18 nt, Human
agcucauguggguuggau

SEQ ID NO: 1232893 - RNA, 18 nt, Human
agcugggcagguugcaca

SEQ ID NO: 1232894 - RNA, 19 nt, Human
aguaacgucugcuuccaca

SEQ ID NO: 1232895 - RNA, 19 nt, Human
agugaagggagggagcaag

SEQ ID NO: 1232896 - RNA, 19 nt, Human
aguuuucagcacaaggugu

SEQ ID NO: 1232897 - RNA, 23 nt, Human
auacuaugaauugaaacagaaca

SEQ ID NO: 1232898 - RNA, 19 nt, Human
augcuucucaauauauuaa

SEQ ID NO: 1232899 - RNA, 18 nt, Human
auguaucuaaaaccauac

SEQ ID NO: 1232900 - RNA, 25 nt, Human
caaaacauacauacagcaagaacuc

SEQ ID NO: 1232901 - RNA, 19 nt, Human
caaaagaaaaacucucagc

SEQ ID NO: 1232902 - RNA, 23 nt, Human
caaaauaaaaggaccauuaauca

SEQ ID NO: 1232903 - RNA, 26 nt, Human
caagacaaaagagacaauuauaaacc

SEQ ID NO: 1232904 - RNA, 19 nt, Human
caagcaauguaucaaauac

SEQ ID NO: 1232905 - RNA, 23 nt, Human
caaggagcaauccaagaaucccg

SEQ ID NO: 1232906 - RNA, 19 nt, Human
caauucuuauguaucuaaa

SEQ ID NO: 1232907 - RNA, 22 nt, Human
cacaaccugaaaaagaaacaag

SEQ ID NO: 1232908 - RNA, 20 nt, Human
cacggcacaagcacuuuccc

SEQ ID NO: 1232909 - RNA, 18 nt, Human
cagaucucuccuccauuc

SEQ ID NO: 1232910 - RNA, 21 nt, Human
cagcaccaaugacaaagauau

SEQ ID NO: 1232911 - RNA, 18 nt, Human
cagcuccgcagcucggac

SEQ ID NO: 1232912 - RNA, 18 nt, Human
cagcucggacagcuccag

SEQ ID NO: 1232913 - RNA, 20 nt, Human
caguagaaagaggaaacacg

SEQ ID NO: 1232914 - RNA, 27 nt, Human
caucgaaaagaaucuuuaacagauuuc

SEQ ID NO: 1232915 - RNA, 19 nt, Human
caucgccgugcaggcagcg

SEQ ID NO: 1232916 - RNA, 26 nt, Human
cauucgggaauuuaaaucuuugaaac

SEQ ID NO: 1232917 - RNA, 18 nt, Human
ccaaccugaaguuuucag

SEQ ID NO: 1232918 - RNA, 20 nt, Human
ccaccacacuucccaugcau

SEQ ID NO: 1232919 - RNA, 20 nt, Human
cccaaauguuauuccaauuu

SEQ ID NO: 1232920 - RNA, 23 nt, Human
cccaauaacgaguuugaggcuua

SEQ ID NO: 1232921 - RNA, 22 nt, Human
cccacucaaccaacugcaaccc

SEQ ID NO: 1232922 - RNA, 19 nt, Human
cccagagggcccucccacc

SEQ ID NO: 1232923 - RNA, 24 nt, Human
ccccaaauguuauuccaauuuugu

SEQ ID NO: 1232924 - RNA, 18 nt, Human
ccccagagcccgagcccg

SEQ ID NO: 1232925 - RNA, 19 nt, Human
cccucccaccacacuuccc

SEQ ID NO: 1232926 - RNA, 19 nt, Human
ccucacugaaaccaaucuu

SEQ ID NO: 1232927 - RNA, 18 nt, Human
ccugaaccacuucucuug

SEQ ID NO: 1232928 - RNA, 18 nt, Human
ccugaggauuuuucuggc

SEQ ID NO: 1232929 - RNA, 20 nt, Human
cggccccagagcccgagccc

SEQ ID NO: 1232930 - RNA, 23 nt, Human
cggcccccgcggccccagagccc

SEQ ID NO: 1232931 - RNA, 22 nt, Human
cggcccccggcccccgcggccc

SEQ ID NO: 1232932 - RNA, 23 nt, Human
cggcccccggcccccgcggcccc

SEQ ID NO: 1232933 - RNA, 19 nt, Human
cgggugcaacaugcauaug

SEQ ID NO: 1232934 - RNA, 20 nt, Human
cucacuuuuagagaagugca

SEQ ID NO: 1232935 - RNA, 23 nt, Human
cuccagcacccggcugggcagcc

SEQ ID NO: 1232936 - RNA, 21 nt, Human
cucuucuacaacgaaaccuuc

SEQ ID NO: 1232937 - RNA, 22 nt, Human
cucuucuacaacgaaaccuuca

SEQ ID NO: 1232938 - RNA, 26 nt, Human
cuggacaucgaaaagaaucuuuaaca

SEQ ID NO: 1232939 - RNA, 22 nt, Human
cuggagcagucauuagugcuga

SEQ ID NO: 1232940 - RNA, 19 nt, Human
cugggcagccggcccccgg

SEQ ID NO: 1232941 - RNA, 24 nt, Human
cuuuaagccuuaauauuucuucuu

SEQ ID NO: 1232942 - RNA, 21 nt, Human
gaacaccaacuccagcacccg

SEQ ID NO: 1232943 - RNA, 18 nt, Human
gagaaccacugguuugaa

SEQ ID NO: 1232944 - RNA, 22 nt, Human
gaucacuuccuaacaaguccau

SEQ ID NO: 1232945 - RNA, 21 nt, Human
gcaauguaucaaauacacaau

SEQ ID NO: 1232946 - RNA, 22 nt, Human
gcagcauauugaaaugaccaga

SEQ ID NO: 1232947 - RNA, 20 nt, Human
gcaguccaggcagaccaugc

SEQ ID NO: 1232948 - RNA, 21 nt, Human
gcaugauguaaacaauaugaa

SEQ ID NO: 1232949 - RNA, 23 nt, Human
gcccucaugacccagaugcuccu

SEQ ID NO: 1232950 - RNA, 19 nt, Human
gcuaacuuagagacaacau

SEQ ID NO: 1232951 - RNA, 25 nt, Human
ggaaaaaaaaggacuggagaaagga

SEQ ID NO: 1232952 - RNA, 28 nt, Human
ggacagcuccagguaagaggggaacgcc

SEQ ID NO: 1232953 - RNA, 20 nt, Human
ggagcagucauuagugcuga

SEQ ID NO: 1232954 - RNA, 24 nt, Human
ggcccccggcccccgcggccccag

SEQ ID NO: 1232955 - RNA, 19 nt, Human
gugcuccagguuucccaag

SEQ ID NO: 1232956 - RNA, 20 nt, Human
guuacaaaauaaaaggacca

SEQ ID NO: 1232957 - RNA, 18 nt, Human
uaaaacaaaacauacaua

SEQ ID NO: 1232958 - RNA, 20 nt, Human
uaagagaacaccaacuccag

SEQ ID NO: 1232959 - RNA, 24 nt, Human
uaagccaaaaauaauacaaaauga

SEQ ID NO: 1232960 - RNA, 24 nt, Human
uacaccaagaaaaaucaauuucua

SEQ ID NO: 1232961 - RNA, 24 nt, Human
uacaccaagaaaaaucaauuucua

SEQ ID NO: 1232962 - RNA, 19 nt, Human
uacagcaagaacucagaag

SEQ ID NO: 1232963 - RNA, 18 nt, Human
uacagcauuuauaagguu

SEQ ID NO: 1232964 - RNA, 21 nt, Human
uaccagugcuugcacaccagg

SEQ ID NO: 1232965 - RNA, 23 nt, Human
uagaaagaggaaacacgaagaua

SEQ ID NO: 1232966 - RNA, 20 nt, Human
uagaacaaaacaaccuguuu

SEQ ID NO: 1232967 - RNA, 20 nt, Human
uagaacuagaacaaaacaac

SEQ ID NO: 1232968 - RNA, 21 nt, Human
uaguaacgucugcuuccacau

SEQ ID NO: 1232969 - RNA, 28 nt, Human
uauagccccaauaacgaguuugagggga

SEQ ID NO: 1232970 - RNA, 18 nt, Human
uaugacuaauagcuuuca

SEQ ID NO: 1232971 - RNA, 24 nt, Human
ucaacaaaauucggaauggccaca

SEQ ID NO: 1232972 - RNA, 22 nt, Human
ucagcaccaaugacaaagauau

SEQ ID NO: 1232973 - RNA, 23 nt, Human
ucagucuucacaaacacacuacu

SEQ ID NO: 1232974 - RNA, 23 nt, Human
uccacaucugcaugcuucguuaa

SEQ ID NO: 1232975 - RNA, 19 nt, Human
ucccauaagcagaucucuc

SEQ ID NO: 1232976 - RNA, 22 nt, Human
uccuaacaaguccaucuucaac

SEQ ID NO: 1232977 - RNA, 21 nt, Human
ucuacaaucucaccuuuaaag

SEQ ID NO: 1232978 - RNA, 22 nt, Human
ucuaccgaaaugcucuccucag

SEQ ID NO: 1232979 - RNA, 20 nt, Human
ucucaucgccgugcaggcag

SEQ ID NO: 1232980 - RNA, 23 nt, Human
ucucaucgccgugcaggcagcgg

SEQ ID NO: 1232981 - RNA, 18 nt, Human
ucuccaguuuacgacuuc

SEQ ID NO: 1232982 - RNA, 23 nt, Human
ucugucaucacaagaaagccacu

SEQ ID NO: 1232983 - RNA, 24 nt, Human
ugaaaagcacguaucuuggccuug

SEQ ID NO: 1232984 - RNA, 18 nt, Human
ugaaacagaacacuccuu

SEQ ID NO: 1232985 - RNA, 18 nt, Human
ugaaggcccucaugaccc

SEQ ID NO: 1232986 - RNA, 22 nt, Human
ugacaaagauauuccaucuccu

SEQ ID NO: 1232987 - RNA, 22 nt, Human
ugacccagaugcucaugcugcu

SEQ ID NO: 1232988 - RNA, 18 nt, Human
ugacuacaaaguguauac

SEQ ID NO: 1232989 - RNA, 23 nt, Human
ugagaguaaaaacaaaaacaaac

SEQ ID NO: 1232990 - RNA, 19 nt, Human
ugagcaaugggguuucgau

SEQ ID NO: 1232991 - RNA, 23 nt, Human
ugagguagugaagggagggagca

SEQ ID NO: 1232992 - RNA, 22 nt, Human
ugccacagugcccagagggccc

SEQ ID NO: 1232993 - RNA, 20 nt, Human
ugcgggcgcacaggcuccgg

SEQ ID NO: 1232994 - RNA, 23 nt, Human
ugcuaacuuagagacaacaucgg

SEQ ID NO: 1232995 - RNA, 21 nt, Human
uggaaaaaaaaggacuggaga

SEQ ID NO: 1232996 - RNA, 20 nt, Human
uggcagcauauugaaaugac

SEQ ID NO: 1232997 - RNA, 24 nt, Human
uguaaaguaaagccauucuucuua

SEQ ID NO: 1232998 - RNA, 19 nt, Human
uguaagccaaaaauaauac

SEQ ID NO: 1232999 - RNA, 21 nt, Human
uguucuguguuaugagacacu

SEQ ID NO: 1233000 - RNA, 18 nt, Human
uuaaagcuggaaauaaca

SEQ ID NO: 1233001 - RNA, 19 nt, Human
uuccacucagcaccuucaa

SEQ ID NO: 1233002 - RNA, 22 nt, Human
uucccaugcauggcggcccuca

SEQ ID NO: 1233003 - RNA, 18 nt, Human
uucgcucgcuuuugucaa

SEQ ID NO: 1233004 - RNA, 19 nt, Human
uucuaccgaaaugcucucc

SEQ ID NO: 1233005 - RNA, 22 nt, Human
uugaaacagaacacuccuuuga

SEQ ID NO: 1233006 - RNA, 21 nt, Human
uugcaccaucagugcucugag

SEQ ID NO: 1233007 - RNA, 19 nt, Human
uugccgaacugaguuguuc

SEQ ID NO: 1233008 - RNA, 24 nt, Human
uuuguaguuaacccaguugucccc

SEQ ID NO: 1233009 - RNA, 25 nt, Human
aacacccagaaacuuguuagaaaug

SEQ ID NO: 1233010 - RNA, 19 nt, Human
aacugggaccacaagugcu

SEQ ID NO: 1233011 - RNA, 20 nt, Human
aagcagggcaagggcaaugu

SEQ ID NO: 1233012 - RNA, 21 nt, Human
acagaugaggaagaggaaguu

SEQ ID NO: 1233013 - RNA, 23 nt, Human
agaaaugcaaauccucaggucuc

SEQ ID NO: 1233014 - RNA, 19 nt, Human
agacuggcuccagguccca

SEQ ID NO: 1233015 - RNA, 24 nt, Human
agcggcggaggcaacacccagaaa

SEQ ID NO: 1233016 - RNA, 20 nt, Human
aggaagaggaaguucaggga

SEQ ID NO: 1233017 - RNA, 18 nt, Human
auccucaggucucaccca

SEQ ID NO: 1233018 - RNA, 24 nt, Human
caacacccagaaacuuguuagaaa

SEQ ID NO: 1233019 - RNA, 21 nt, Human
cagccagcagcuaccucccuc

SEQ ID NO: 1233020 - RNA, 21 nt, Human
ccaagccacaucccuccagga

SEQ ID NO: 1233021 - RNA, 20 nt, Human
ccagaucagcggcggaggca

SEQ ID NO: 1233022 - RNA, 23 nt, Human
ccucaggucucacccagacugga

SEQ ID NO: 1233023 - RNA, 18 nt, Human
cggaggcaacacccagaa

SEQ ID NO: 1233024 - RNA, 23 nt, Human
cucccagcuucacuguguauucc

SEQ ID NO: 1233025 - RNA, 18 nt, Human
cucugcuuccacaccuuc

SEQ ID NO: 1233026 - RNA, 21 nt, Human
gcggcggaggcaacacccaga

SEQ ID NO: 1233027 - RNA, 18 nt, Human
gcuaccucccucucucca

SEQ ID NO: 1233028 - RNA, 18 nt, Human
ggacagacuggcuccagg

SEQ ID NO: 1233029 - RNA, 18 nt, Human
ggcggaggcaacacccag

SEQ ID NO: 1233030 - RNA, 21 nt, Human
ggcugcaggaagauccuccag

SEQ ID NO: 1233031 - RNA, 19 nt, Human
gguaccaucuuccuaugcc

SEQ ID NO: 1233032 - RNA, 19 nt, Human
uccccagaucagcggcgga

SEQ ID NO: 1233033 - RNA, 20 nt, Human
ucccgccugguaccaucuuc

SEQ ID NO: 1233034 - RNA, 22 nt, Human
ucccgccugguaccaucuuccu

SEQ ID NO: 1233035 - RNA, 19 nt, Human
uccucaggucucacccaga

SEQ ID NO: 1233036 - RNA, 24 nt, Human
uccucaggucucacccagacugga

SEQ ID NO: 1233037 - RNA, 20 nt, Human
ucucccagcuucacugugua

SEQ ID NO: 1233038 - RNA, 19 nt, Human
ugaccacuuuagccaguag

SEQ ID NO: 1233039 - RNA, 23 nt, Human
ugaggaagaggaaguucagggag

SEQ ID NO: 1233040 - RNA, 27 nt, Human
ugaggaagaggaaguucagggaggggg

SEQ ID NO: 1233041 - RNA, 19 nt, Human
uggcuccaggucccacagc

SEQ ID NO: 1233042 - RNA, 21 nt, Human
uggcuccaggucccacagccu

SEQ ID NO: 1233043 - RNA, 24 nt, Human
uggcugcaggaagauccuccaggg

SEQ ID NO: 1233044 - RNA, 22 nt, Human
uuccuaugccagccagcagcua

SEQ ID NO: 1233045 - RNA, 21 nt, Human
aacaaggaggcccuggucccc

SEQ ID NO: 1233046 - RNA, 22 nt, Human
aaguagcugggauuacaggcau

SEQ ID NO: 1233047 - RNA, 24 nt, Human
aaguagcugggauuacaggcaugc

SEQ ID NO: 1233048 - RNA, 18 nt, Human
accggcccgccucaaaca

SEQ ID NO: 1233049 - RNA, 22 nt, Human
accuccgccucccagguucuag

SEQ ID NO: 1233050 - RNA, 20 nt, Human
acggguuuucgcuauguugg

SEQ ID NO: 1233051 - RNA, 24 nt, Human
acggguuuucgcuauguuggccag

SEQ ID NO: 1233052 - RNA, 25 nt, Human
acucugucgcccaggcuggagugca

SEQ ID NO: 1233053 - RNA, 19 nt, Human
acuucaggcccccuguggc

SEQ ID NO: 1233054 - RNA, 22 nt, Human
agaaaucuucugagguuucugg

SEQ ID NO: 1233055 - RNA, 22 nt, Human
aggagauccgccugccucagcc

SEQ ID NO: 1233056 - RNA, 24 nt, Human
aggagauccgccugccucagccuc

SEQ ID NO: 1233057 - RNA, 25 nt, Human
aggcuggagugcaguggcgcgaucu

SEQ ID NO: 1233058 - RNA, 20 nt, Human
agugauucuccugccucagc

SEQ ID NO: 1233059 - RNA, 21 nt, Human
agugcaguggcgcgaucucag

SEQ ID NO: 1233060 - RNA, 23 nt, Human
agugcaguggcgcgaucucagcu

SEQ ID NO: 1233061 - RNA, 24 nt, Human
agugcaguggcgcgaucucagcuc

SEQ ID NO: 1233062 - RNA, 20 nt, Human
auguuggccaggcuggucuc

SEQ ID NO: 1233063 - RNA, 24 nt, Human
auuuuuguauuuuuaguagagacg

SEQ ID NO: 1233064 - RNA, 19 nt, Human
caagaaaucuucugagguu

SEQ ID NO: 1233065 - RNA, 21 nt, Human
cacacccccacacucacgccg

SEQ ID NO: 1233066 - RNA, 24 nt, Human
caccacgcccugcuaauuuuugua

SEQ ID NO: 1233067 - RNA, 19 nt, Human
caccuccgccucccagguu

SEQ ID NO: 1233068 - RNA, 22 nt, Human
cacucugucgcccaggcuggag

SEQ ID NO: 1233069 - RNA, 23 nt, Human
cagcucacugccaccuccgccuc

SEQ ID NO: 1233070 - RNA, 22 nt, Human
caggaauggcaaggcgccaccu

SEQ ID NO: 1233071 - RNA, 21 nt, Human
caggagauccgccugccucag

SEQ ID NO: 1233072 - RNA, 18 nt, Human
caggugccccucccguuc

SEQ ID NO: 1233073 - RNA, 19 nt, Human
cagguucuagugauucucc

SEQ ID NO: 1233074 - RNA, 23 nt, Human
ccaaguagcugggauuacaggca

SEQ ID NO: 1233075 - RNA, 24 nt, Human
ccaaguagcugggauuacaggcau

SEQ ID NO: 1233076 - RNA, 20 nt, Human
ccaccacgcccugcuaauuu

SEQ ID NO: 1233077 - RNA, 18 nt, Human
ccaccuccgccucccagg

SEQ ID NO: 1233078 - RNA, 23 nt, Human
ccaccuggagacacgcucugagc

SEQ ID NO: 1233079 - RNA, 21 nt, Human
ccaggaauggcaaggcgccac

SEQ ID NO: 1233080 - RNA, 20 nt, Human
ccaggugccccucccguucc

SEQ ID NO: 1233081 - RNA, 23 nt, Human
cccaaguagcugggauuacaggc

SEQ ID NO: 1233082 - RNA, 24 nt, Human
cccaaguagcugggauuacaggca

SEQ ID NO: 1233083 - RNA, 23 nt, Human
cccaggaauggcaaggcgccacc

SEQ ID NO: 1233084 - RNA, 22 nt, Human
cccaggcuggagugcaguggcg

SEQ ID NO: 1233085 - RNA, 24 nt, Human
ccccaggaauggcaaggcgccacc

SEQ ID NO: 1233086 - RNA, 23 nt, Human
ccccuguggccaccggcccgccu

SEQ ID NO: 1233087 - RNA, 20 nt, Human
cccugguccccaggaauggc

SEQ ID NO: 1233088 - RNA, 19 nt, Human
ccgccugccucagccuccc

SEQ ID NO: 1233089 - RNA, 22 nt, Human
ccuacugcgagauucuugaggc

SEQ ID NO: 1233090 - RNA, 21 nt, Human
ccuccaggugccccucccguu

SEQ ID NO: 1233091 - RNA, 24 nt, Human
ccucccagguucuagugauucucc

SEQ ID NO: 1233092 - RNA, 19 nt, Human
ccucccguuccuccacugc

SEQ ID NO: 1233093 - RNA, 22 nt, Human
ccucccguuccuccacugcaga

SEQ ID NO: 1233094 - RNA, 23 nt, Human
ccugaccucaggagauccgccug

SEQ ID NO: 1233095 - RNA, 23 nt, Human
ccugccucagccucccaaguagc

SEQ ID NO: 1233096 - RNA, 24 nt, Human
ccugccucagccucccaaguagcu

SEQ ID NO: 1233097 - RNA, 21 nt, Human
cgccggaauggccacccucgg

SEQ ID NO: 1233098 - RNA, 21 nt, Human
cgcgaucucagcucacugcca

SEQ ID NO: 1233099 - RNA, 24 nt, Human
cgcuauguuggccaggcuggucuc

SEQ ID NO: 1233100 - RNA, 21 nt, Human
cggagcagcuggcacgagagg

SEQ ID NO: 1233101 - RNA, 18 nt, Human
cggcccgccucaaacacu

SEQ ID NO: 1233102 - RNA, 24 nt, Human
cggguuuucgcuauguuggccagg

SEQ ID NO: 1233103 - RNA, 22 nt, Human
cuaauggccggccgccucucuc

SEQ ID NO: 1233104 - RNA, 22 nt, Human
cuagugauucuccugccucagc

SEQ ID NO: 1233105 - RNA, 27 nt, Human
cuagugauucuccugccucagccuccc

SEQ ID NO: 1233106 - RNA, 24 nt, Human
cucacucugucgcccaggcuggag

SEQ ID NO: 1233107 - RNA, 23 nt, Human
cucagccucccaaguagcuggga

SEQ ID NO: 1233108 - RNA, 22 nt, Human
cucagcucacugccaccuccgc

SEQ ID NO: 1233109 - RNA, 24 nt, Human
cucauuuuccgccucuucuccacc

SEQ ID NO: 1233110 - RNA, 26 nt, Human
cuccugaccucaggagauccgccugc

SEQ ID NO: 1233111 - RNA, 25 nt, Human
cuccugccucagccucccaaguagc

SEQ ID NO: 1233112 - RNA, 20 nt, Human
cucggcccaccuggcaugca

SEQ ID NO: 1233113 - RNA, 21 nt, Human
cuguggccaccggcccgccuc

SEQ ID NO: 1233114 - RNA, 19 nt, Human
gaaagagaaaggaggcaag

SEQ ID NO: 1233115 - RNA, 19 nt, Human
gaauggcaaggcgccaccu

SEQ ID NO: 1233116 - RNA, 24 nt, Human
gaccucaggagauccgccugccuc

SEQ ID NO: 1233117 - RNA, 24 nt, Human
gagauccgccugccucagccuccc

SEQ ID NO: 1233118 - RNA, 24 nt, Human
gagcacagaugauacuuggguggu

SEQ ID NO: 1233119 - RNA, 18 nt, Human
gagcagcuggcacgagag

SEQ ID NO: 1233120 - RNA, 20 nt, Human
gagcagcuggcacgagaggc

SEQ ID NO: 1233121 - RNA, 18 nt, Human
gauuacaggcaugcgcca

SEQ ID NO: 1233122 - RNA, 21 nt, Human
gauucuccugccucagccucc

SEQ ID NO: 1233123 - RNA, 22 nt, Human
gccaccuccgccucccagguuc

SEQ ID NO: 1233124 - RNA, 19 nt, Human
gcccaggcuggagugcagu

SEQ ID NO: 1233125 - RNA, 20 nt, Human
gcccaggcuggagugcagug

SEQ ID NO: 1233126 - RNA, 22 nt, Human
gcccugcuaauuuuuguauuuu

SEQ ID NO: 1233127 - RNA, 24 nt, Human
gcuauguuggccaggcuggucucg

SEQ ID NO: 1233128 - RNA, 23 nt, Human
gcuggucucgagcuccugaccuc

SEQ ID NO: 1233129 - RNA, 24 nt, Human
ggagauccgccugccucagccucc

SEQ ID NO: 1233130 - RNA, 20 nt, Human
ggagcagcuggcacgagagg

SEQ ID NO: 1233131 - RNA, 19 nt, Human
ggauuacaggcaugcgcca

SEQ ID NO: 1233132 - RNA, 24 nt, Human
ggcuggucucgagcuccugaccuc

SEQ ID NO: 1233133 - RNA, 23 nt, Human
ggguuuucgcuauguuggccagg

SEQ ID NO: 1233134 - RNA, 19 nt, Human
ggucucgagcuccugaccu

SEQ ID NO: 1233135 - RNA, 19 nt, Human
gguggaacugguggccagg

SEQ ID NO: 1233136 - RNA, 18 nt, Human
guagcugggauuacaggc

SEQ ID NO: 1233137 - RNA, 24 nt, Human
gugauucuccugccucagccuccc

SEQ ID NO: 1233138 - RNA, 22 nt, Human
guucccucacacccccacacuc

SEQ ID NO: 1233139 - RNA, 24 nt, Human
uaauuuuuguauuuuuaguagaga

SEQ ID NO: 1233140 - RNA, 22 nt, Human
uagagacggguuuucgcuaugu

SEQ ID NO: 1233141 - RNA, 21 nt, Human
uagcagaaaaaaucaggucuc

SEQ ID NO: 1233142 - RNA, 24 nt, Human
uaguagagacggguuuucgcuaug

SEQ ID NO: 1233143 - RNA, 20 nt, Human
uaugaccagaacaaggaggc

SEQ ID NO: 1233144 - RNA, 23 nt, Human
uauguuggccaggcuggucucga

SEQ ID NO: 1233145 - RNA, 24 nt, Human
uauguuggccaggcuggucucgag

SEQ ID NO: 1233146 - RNA, 18 nt, Human
ucaaagagaaaucccagc

SEQ ID NO: 1233147 - RNA, 24 nt, Human
ucacucugucgcccaggcuggagu

SEQ ID NO: 1233148 - RNA, 18 nt, Human
ucacugccaccuccgccu

SEQ ID NO: 1233149 - RNA, 19 nt, Human
ucacugccaccuccgccuc

SEQ ID NO: 1233150 - RNA, 24 nt, Human
ucacugccaccuccgccucccagg

SEQ ID NO: 1233151 - RNA, 18 nt, Human
ucagccucccaaguagcu

SEQ ID NO: 1233152 - RNA, 20 nt, Human
ucagccucccaaguagcugg

SEQ ID NO: 1233153 - RNA, 21 nt, Human
ucaggagauccgccugccuca

SEQ ID NO: 1233154 - RNA, 24 nt, Human
ucaggcccccuguggccaccggcc

SEQ ID NO: 1233155 - RNA, 21 nt, Human
uccacugcagaaaguucuagc

SEQ ID NO: 1233156 - RNA, 24 nt, Human
ucccaaguagcugggauuacaggc

SEQ ID NO: 1233157 - RNA, 21 nt, Human
ucccagguucuagugauucuc

SEQ ID NO: 1233158 - RNA, 24 nt, Human
ucccagguucuagugauucuccug

SEQ ID NO: 1233159 - RNA, 22 nt, Human
ucccguuccuccacugcagaaa

SEQ ID NO: 1233160 - RNA, 21 nt, Human
uccgccugccucagccuccca

SEQ ID NO: 1233161 - RNA, 22 nt, Human
ucgcccaggcuggagugcagug

SEQ ID NO: 1233162 - RNA, 22 nt, Human
ucgcuauguuggccaggcuggu

SEQ ID NO: 1233163 - RNA, 23 nt, Human
ucucacucugucgcccaggcugg

SEQ ID NO: 1233164 - RNA, 24 nt, Human
ucucacucugucgcccaggcugga

SEQ ID NO: 1233165 - RNA, 26 nt, Human
ucucacucugucgcccaggcuggagu

SEQ ID NO: 1233166 - RNA, 25 nt, Human
ucucugggucuccgcuccucgggag

SEQ ID NO: 1233167 - RNA, 24 nt, Human
ucugucgcccaggcuggagugcag

SEQ ID NO: 1233168 - RNA, 19 nt, Human
ucuuuccagaggccucaca

SEQ ID NO: 1233169 - RNA, 18 nt, Human
ugaccucaggagauccgc

SEQ ID NO: 1233170 - RNA, 24 nt, Human
ugaccucaggagauccgccugccu

SEQ ID NO: 1233171 - RNA, 28 nt, Human
ugagguuucuggccugcugaccacaggg

SEQ ID NO: 1233172 - RNA, 20 nt, Human
ugauucuccugccucagccu

SEQ ID NO: 1233173 - RNA, 22 nt, Human
ugcaguggcgcgaucucagcuc

SEQ ID NO: 1233174 - RNA, 23 nt, Human
ugccucagccucccaaagugugg

SEQ ID NO: 1233175 - RNA, 24 nt, Human
ugccucagccucccaaguagcugg

SEQ ID NO: 1233176 - RNA, 18 nt, Human
uggaggaaagagaaagga

SEQ ID NO: 1233177 - RNA, 19 nt, Human
uggaggaaagagaaaggag

SEQ ID NO: 1233178 - RNA, 23 nt, Human
uggagugcaguggcgcgaucuca

SEQ ID NO: 1233179 - RNA, 24 nt, Human
uggagugcaguggcgcgaucucag

SEQ ID NO: 1233180 - RNA, 23 nt, Human
uggcaaggcgccaccugugagga

SEQ ID NO: 1233181 - RNA, 24 nt, Human
uggccaggcuggucucgagcuccu

SEQ ID NO: 1233182 - RNA, 24 nt, Human
uggccaggggccagagcacagaug

SEQ ID NO: 1233183 - RNA, 24 nt, Human
uggcgcgaucucagcucacugcca

SEQ ID NO: 1233184 - RNA, 19 nt, Human
uggcucccggggcguaccc

SEQ ID NO: 1233185 - RNA, 18 nt, Human
ugggauuacaggcaugcg

SEQ ID NO: 1233186 - RNA, 21 nt, Human
ugggauuacaggcaugcgcca

SEQ ID NO: 1233187 - RNA, 22 nt, Human
ugggauuacaggcaugcgccac

SEQ ID NO: 1233188 - RNA, 24 nt, Human
ugggauuacaggcaugcgccacca

SEQ ID NO: 1233189 - RNA, 23 nt, Human
uggguggucugagcaagggcagg

SEQ ID NO: 1233190 - RNA, 18 nt, Human
uguggccaccggcccgcc

SEQ ID NO: 1233191 - RNA, 19 nt, Human
uuaguagagacggguuuuc

SEQ ID NO: 1233192 - RNA, 24 nt, Human
uuaguagagacggguuuucgcuau

SEQ ID NO: 1233193 - RNA, 18 nt, Human
uucuagugauucuccugc

SEQ ID NO: 1233194 - RNA, 23 nt, Human
uucuagugauucuccugccucag

SEQ ID NO: 1233195 - RNA, 23 nt, Human
uuucgcuauguuggccaggcugg

SEQ ID NO: 1233196 - RNA, 24 nt, Human
uuucgcuauguuggccaggcuggu

SEQ ID NO: 1233197 - RNA, 24 nt, Human
uuuuuaguagagacggguuuucgc

SEQ ID NO: 1233198 - RNA, 20 nt, Human
uuuuuguauuuuuaguagag

SEQ ID NO: 1233199 - RNA, 22 nt, Human
aaaggcuccccuaacccaaggc

SEQ ID NO: 1233200 - RNA, 20 nt, Human
aacccaaggccccaaggcag

SEQ ID NO: 1233201 - RNA, 24 nt, Human
acccugaagagcaugaggccagcu

SEQ ID NO: 1233202 - RNA, 24 nt, Human
acuaaagacaaaggcuccccuaac

SEQ ID NO: 1233203 - RNA, 18 nt, Human
agagggcucaaagccagc

SEQ ID NO: 1233204 - RNA, 22 nt, Human
agcaguguagagggcucaaagc

SEQ ID NO: 1233205 - RNA, 24 nt, Human
aggcagccuggcagcugagauuuu

SEQ ID NO: 1233206 - RNA, 22 nt, Human
caaacucccuggguccucacaa

SEQ ID NO: 1233207 - RNA, 25 nt, Human
caaaggcuccccuaacccaaggccc

SEQ ID NO: 1233208 - RNA, 20 nt, Human
caaccagcaguguagagggc

SEQ ID NO: 1233209 - RNA, 25 nt, Human
caaggccccaaggcaguguuucaag

SEQ ID NO: 1233210 - RNA, 21 nt, Human
cacccucucaacucuccuggg

SEQ ID NO: 1233211 - RNA, 25 nt, Human
cacuaaagacaaaggcuccccuaac

SEQ ID NO: 1233212 - RNA, 19 nt, Human
cagacuguaggccucacug

SEQ ID NO: 1233213 - RNA, 20 nt, Human
cauccaaacucccugggucc

SEQ ID NO: 1233214 - RNA, 21 nt, Human
ccacagugaguguccucagca

SEQ ID NO: 1233215 - RNA, 22 nt, Human
cccccaugccucucucauccca

SEQ ID NO: 1233216 - RNA, 22 nt, Human
cccuggguccucacaacagccc

SEQ ID NO: 1233217 - RNA, 23 nt, Human
ccucucuauucucucuguguccc

SEQ ID NO: 1233218 - RNA, 25 nt, Human
cgcuccggcccucuggcaguuccca

SEQ ID NO: 1233219 - RNA, 24 nt, Human
cucaaagccagcauuccuccacuu

SEQ ID NO: 1233220 - RNA, 21 nt, Human
cucaacucuccugggucugca

SEQ ID NO: 1233221 - RNA, 21 nt, Human
cucacccccaugccucucuca

SEQ ID NO: 1233222 - RNA, 26 nt, Human
cuccagauaggaacugacccugaaga

SEQ ID NO: 1233223 - RNA, 22 nt, Human
cucccuggguccucacaacagc

SEQ ID NO: 1233224 - RNA, 24 nt, Human
cucucuauucucucuguguccccc

SEQ ID NO: 1233225 - RNA, 21 nt, Human
cugcacuaaagacaaaggcuc

SEQ ID NO: 1233226 - RNA, 21 nt, Human
cugcucagacuguaggccuca

SEQ ID NO: 1233227 - RNA, 24 nt, Human
gaccuugccuucacccgccggugc

SEQ ID NO: 1233228 - RNA, 18 nt, Human
gaggaugcugaggcacag

SEQ ID NO: 1233229 - RNA, 21 nt, Human
gcaaaaggagccauagaaaua

SEQ ID NO: 1233230 - RNA, 19 nt, Human
gcagcaaaaggagccauag

SEQ ID NO: 1233231 - RNA, 21 nt, Human
gccaguggcaggccaugcugu

SEQ ID NO: 1233232 - RNA, 24 nt, Human
gccucuggcaaugagcugcuccag

SEQ ID NO: 1233233 - RNA, 23 nt, Human
ggcagccuggcagcugagauuuu

SEQ ID NO: 1233234 - RNA, 22 nt, Human
gucaacuccagauaggaacuga

SEQ ID NO: 1233235 - RNA, 21 nt, Human
uaacccaaggccccaaggcag

SEQ ID NO: 1233236 - RNA, 23 nt, Human
uaggucccagggcaaggauggag

SEQ ID NO: 1233237 - RNA, 22 nt, Human
uccacauccaaacucccugggu

SEQ ID NO: 1233238 - RNA, 21 nt, Human
uccccauuuauagaugaggau

SEQ ID NO: 1233239 - RNA, 19 nt, Human
ucccccacccucucaacuc

SEQ ID NO: 1233240 - RNA, 21 nt, Human
ucuccugggucugcagggacu

SEQ ID NO: 1233241 - RNA, 22 nt, Human
ucucugugucccccacccucuc

SEQ ID NO: 1233242 - RNA, 19 nt, Human
ugaagugacuuguccaagg

SEQ ID NO: 1233243 - RNA, 22 nt, Human
ugaagugacuuguccaagguca

SEQ ID NO: 1233244 - RNA, 20 nt, Human
ugcacuaaagacaaaggcuc

SEQ ID NO: 1233245 - RNA, 18 nt, Human
ugccagggccacaagagg

SEQ ID NO: 1233246 - RNA, 18 nt, Human
ugcugcagggguacgggg

SEQ ID NO: 1233247 - RNA, 19 nt, Human
uguagagggcucaaagcca

SEQ ID NO: 1233248 - RNA, 19 nt, Human
uguccugcacuaaagacaa

SEQ ID NO: 1233249 - RNA, 23 nt, Human
uguccugcacuaaagacaaaggc

SEQ ID NO: 1233250 - RNA, 22 nt, Human
uucagagauccccauuuauaga

SEQ ID NO: 1233251 - RNA, 18 nt, Human
uuccuccacuugaacucc

SEQ ID NO: 1233252 - RNA, 24 nt, Human
uuccuccacuugaacuccugcgcu

SEQ ID NO: 1233253 - RNA, 18 nt, Human
uugcuucuccccauuucc

SEQ ID NO: 1233254 - RNA, 20 nt, Human
uuugcuucuccccauuuccc

SEQ ID NO: 1233255 - RNA, 24 nt, Human
aaacagccugagcuggagccccag

SEQ ID NO: 1233256 - RNA, 19 nt, Human
acaaagccuccugagauug

SEQ ID NO: 1233257 - RNA, 22 nt, Human
acccacccagccagcuuccccc

SEQ ID NO: 1233258 - RNA, 24 nt, Human
accccagagcaaacugagacagca

SEQ ID NO: 1233259 - RNA, 18 nt, Human
accugggucagucugucc

SEQ ID NO: 1233260 - RNA, 18 nt, Human
acgccauggugggucggc

SEQ ID NO: 1233261 - RNA, 21 nt, Human
acucccauccccaccaagccc

SEQ ID NO: 1233262 - RNA, 23 nt, Human
acucccauccccaccaagcccac

SEQ ID NO: 1233263 - RNA, 18 nt, Human
agaguuccuccuauuccc

SEQ ID NO: 1233264 - RNA, 22 nt, Human
agcaaccaacacagagggaccu

SEQ ID NO: 1233265 - RNA, 21 nt, Human
agcccagcccucagggaagcc

SEQ ID NO: 1233266 - RNA, 18 nt, Human
aggccugggacuggagcc

SEQ ID NO: 1233267 - RNA, 23 nt, Human
agggcccucugaggccucugccc

SEQ ID NO: 1233268 - RNA, 24 nt, Human
agggccucugccccagccuccucc

SEQ ID NO: 1233269 - RNA, 23 nt, Human
aguuccuccuauucccaaacagc

SEQ ID NO: 1233270 - RNA, 31 nt, Human
auccccaccaagcccacccaccuccugccag

SEQ ID NO: 1233271 - RNA, 19 nt, Human
caaacaaagccuccugaga

SEQ ID NO: 1233272 - RNA, 24 nt, Human
caaagcccccacgauauucacucc

SEQ ID NO: 1233273 - RNA, 20 nt, Human
caaagcuucaaccuggacac

SEQ ID NO: 1233274 - RNA, 19 nt, Human
cacacacagccacacacgg

SEQ ID NO: 1233275 - RNA, 19 nt, Human
cacacagccacacacggcu

SEQ ID NO: 1233276 - RNA, 24 nt, Human
cacacagccacacacggcucugcc

SEQ ID NO: 1233277 - RNA, 19 nt, Human
caccaagcccacccaccuc

SEQ ID NO: 1233278 - RNA, 21 nt, Human
caccaagcccacccaccuccu

SEQ ID NO: 1233279 - RNA, 18 nt, Human
cacccaccuccugccagg

SEQ ID NO: 1233280 - RNA, 22 nt, Human
cacccagccagcuucccccacc

SEQ ID NO: 1233281 - RNA, 21 nt, Human
cacccccagucugagcugcuc

SEQ ID NO: 1233282 - RNA, 23 nt, Human
caccuccugccagggccucugcc

SEQ ID NO: 1233283 - RNA, 22 nt, Human
cagagcagcaaccaacacagag

SEQ ID NO: 1233284 - RNA, 18 nt, Human
cagcacagguccacuccu

SEQ ID NO: 1233285 - RNA, 19 nt, Human
cagcacagguccacuccuu

SEQ ID NO: 1233286 - RNA, 27 nt, Human
cagccuccuccugaccugguccugccu

SEQ ID NO: 1233287 - RNA, 19 nt, Human
caggaauagcaaacucaaa

SEQ ID NO: 1233288 - RNA, 22 nt, Human
cagggccucugccccagccucc

SEQ ID NO: 1233289 - RNA, 22 nt, Human
caggggcuacagccgcugacca

SEQ ID NO: 1233290 - RNA, 19 nt, Human
ccaaagcuucaaccuggac

SEQ ID NO: 1233291 - RNA, 23 nt, Human
ccacaggacugcccagaccccag

SEQ ID NO: 1233292 - RNA, 21 nt, Human
ccacccagccagcuuccccca

SEQ ID NO: 1233293 - RNA, 25 nt, Human
ccacccagccagcuucccccacccc

SEQ ID NO: 1233294 - RNA, 19 nt, Human
ccacccaggcaggagcgag

SEQ ID NO: 1233295 - RNA, 21 nt, Human
ccacccccagcuguuuccagg

SEQ ID NO: 1233296 - RNA, 19 nt, Human
ccacucucccgacuuggcc

SEQ ID NO: 1233297 - RNA, 21 nt, Human
ccagagcagcaaccaacacag

SEQ ID NO: 1233298 - RNA, 20 nt, Human
ccagggccucugccccagcc

SEQ ID NO: 1233299 - RNA, 19 nt, Human
cccaccaagcccacccacc

SEQ ID NO: 1233300 - RNA, 18 nt, Human
cccaccuccugccagggc

SEQ ID NO: 1233301 - RNA, 21 nt, Human
cccacgauauucacuccugag

SEQ ID NO: 1233302 - RNA, 23 nt, Human
cccacuggagagcuaagccccag

SEQ ID NO: 1233303 - RNA, 20 nt, Human
cccagcacuggccacucucc

SEQ ID NO: 1233304 - RNA, 21 nt, Human
cccagccagcuucccccaccc

SEQ ID NO: 1233305 - RNA, 22 nt, Human
cccagcuguuuccaggccuggg

SEQ ID NO: 1233306 - RNA, 24 nt, Human
cccauccccaccaagcccacccac

SEQ ID NO: 1233307 - RNA, 24 nt, Human
ccccaccaagcccacccaccuccu

SEQ ID NO: 1233308 - RNA, 21 nt, Human
ccccacccccagcuguuucca

SEQ ID NO: 1233309 - RNA, 23 nt, Human
ccccagagcaaacugagacagca

SEQ ID NO: 1233310 - RNA, 24 nt, Human
ccccaggaacagccaucuggcccu

SEQ ID NO: 1233311 - RNA, 24 nt, Human
ccccaggccccaggaacagccauc

SEQ ID NO: 1233312 - RNA, 24 nt, Human
cccgcagaccaaccaucccaggcc

SEQ ID NO: 1233313 - RNA, 20 nt, Human
cccugaguucccagacacuc

SEQ ID NO: 1233314 - RNA, 18 nt, Human
cccugcugagaccuuguc

SEQ ID NO: 1233315 - RNA, 20 nt, Human
ccucagagccguuggcccag

SEQ ID NO: 1233316 - RNA, 25 nt, Human
ccuccuauucccaaacagccugagc

SEQ ID NO: 1233317 - RNA, 18 nt, Human
ccuccugaccugguccug

SEQ ID NO: 1233318 - RNA, 20 nt, Human
ccuccugaccugguccugcc

SEQ ID NO: 1233319 - RNA, 19 nt, Human
ccucuccucccugcacaca

SEQ ID NO: 1233320 - RNA, 24 nt, Human
ccucugccccagccuccuccugac

SEQ ID NO: 1233321 - RNA, 22 nt, Human
ccugacccugaguucccagaca

SEQ ID NO: 1233322 - RNA, 19 nt, Human
ccugagcuggagccccagg

SEQ ID NO: 1233323 - RNA, 25 nt, Human
ccugcaggcccaagcugggugcugg

SEQ ID NO: 1233324 - RNA, 21 nt, Human
ccugccagggccucugcccca

SEQ ID NO: 1233325 - RNA, 22 nt, Human
ccugcugagaccuugucccaca

SEQ ID NO: 1233326 - RNA, 25 nt, Human
ccugggacuggagcccugcugagac

SEQ ID NO: 1233327 - RNA, 24 nt, Human
ccugggucagucugucccuagggc

SEQ ID NO: 1233328 - RNA, 20 nt, Human
cuacucccauccccaccaag

SEQ ID NO: 1233329 - RNA, 27 nt, Human
cucacucccaccuagacuccugggauc

SEQ ID NO: 1233330 - RNA, 22 nt, Human
cuccgggcuugacugagggcug

SEQ ID NO: 1233331 - RNA, 18 nt, Human
cuccugaccugguccugc

SEQ ID NO: 1233332 - RNA, 18 nt, Human
cuccugggaucugguccu

SEQ ID NO: 1233333 - RNA, 21 nt, Human
cuccugggaucugguccuguc

SEQ ID NO: 1233334 - RNA, 23 nt, Human
cucugccccagccuccuccugac

SEQ ID NO: 1233335 - RNA, 23 nt, Human
cugaccugguccugccugggccu

SEQ ID NO: 1233336 - RNA, 19 nt, Human
cugagacagcacaggucca

SEQ ID NO: 1233337 - RNA, 22 nt, Human
cugaguccccaccugcaggccc

SEQ ID NO: 1233338 - RNA, 18 nt, Human
cugcugagaccuuguccc

SEQ ID NO: 1233339 - RNA, 19 nt, Human
cugggcccagagggucuug

SEQ ID NO: 1233340 - RNA, 19 nt, Human
cugucccuagggcccucug

SEQ ID NO: 1233341 - RNA, 20 nt, Human
cuuagccacuagcucccgac

SEQ ID NO: 1233342 - RNA, 23 nt, Human
cuuagugacuggucacauccuaa

SEQ ID NO: 1233343 - RNA, 21 nt, Human
cuugcugccuccaagggcucc

SEQ ID NO: 1233344 - RNA, 21 nt, Human
gaacaagcugaagacauggag

SEQ ID NO: 1233345 - RNA, 21 nt, Human
gaagccaggcaccaucuugcc

SEQ ID NO: 1233346 - RNA, 20 nt, Human
gaccugguccugccugggcc

SEQ ID NO: 1233347 - RNA, 19 nt, Human
gagcaaacugagacagcac

SEQ ID NO: 1233348 - RNA, 21 nt, Human
gagcagcaaccaacacagagg

SEQ ID NO: 1233349 - RNA, 18 nt, Human
gaggcaggggggccccuu

SEQ ID NO: 1233350 - RNA, 20 nt, Human
gcccaggggcuacagccgcu

SEQ ID NO: 1233351 - RNA, 22 nt, Human
gccccaggccccaggaacagcc

SEQ ID NO: 1233352 - RNA, 20 nt, Human
gccccaguucagaggaagcu

SEQ ID NO: 1233353 - RNA, 20 nt, Human
gcccugacccugaguuccca

SEQ ID NO: 1233354 - RNA, 24 nt, Human
gccugagcuggagccccaggcccc

SEQ ID NO: 1233355 - RNA, 22 nt, Human
gcucaaagcccccacgauauuc

SEQ ID NO: 1233356 - RNA, 18 nt, Human
ggagccccaggccccagg

SEQ ID NO: 1233357 - RNA, 22 nt, Human
ggagcguccucaagcaaguccc

SEQ ID NO: 1233358 - RNA, 24 nt, Human
ggcuggggcuucagggacuccccu

SEQ ID NO: 1233359 - RNA, 21 nt, Human
ggggcuaacggagagcccaga

SEQ ID NO: 1233360 - RNA, 28 nt, Human
gguccugucuuugccacacuuggggcug

SEQ ID NO: 1233361 - RNA, 18 nt, Human
ggugcugggucccagagg

SEQ ID NO: 1233362 - RNA, 24 nt, Human
guagauuuuauuaaccaaacaaag

SEQ ID NO: 1233363 - RNA, 18 nt, Human
guccuuguggcccucggg

SEQ ID NO: 1233364 - RNA, 18 nt, Human
gugcugggucccagaggc

SEQ ID NO: 1233365 - RNA, 21 nt, Human
uaaccaaacaaagccuccuga

SEQ ID NO: 1233366 - RNA, 21 nt, Human
uaaccacacccacccagccag

SEQ ID NO: 1233367 - RNA, 26 nt, Human
uaaccacacccacccagccagcuucc

SEQ ID NO: 1233368 - RNA, 23 nt, Human
uaauaaaaauagguuucugcaga

SEQ ID NO: 1233369 - RNA, 22 nt, Human
uagagagggcccagcacuggcc

SEQ ID NO: 1233370 - RNA, 25 nt, Human
uauaaaacaggaauagcaaacucaa

SEQ ID NO: 1233371 - RNA, 20 nt, Human
ucacuccugaguccccaccu

SEQ ID NO: 1233372 - RNA, 21 nt, Human
ucagcaggccacggugcagcc

SEQ ID NO: 1233373 - RNA, 19 nt, Human
ucccaaagcuucaaccugg

SEQ ID NO: 1233374 - RNA, 20 nt, Human
ucccaaagcuucaaccugga

SEQ ID NO: 1233375 - RNA, 22 nt, Human
ucccagacacucccaugacccu

SEQ ID NO: 1233376 - RNA, 22 nt, Human
ucccaugacccugcagagggca

SEQ ID NO: 1233377 - RNA, 18 nt, Human
ucccccacccccagcugu

SEQ ID NO: 1233378 - RNA, 25 nt, Human
ucccuagggcccucugaggccucug

SEQ ID NO: 1233379 - RNA, 22 nt, Human
ucccugcacacauuugccuccg

SEQ ID NO: 1233380 - RNA, 21 nt, Human
ucccuuagccacuagcucccg

SEQ ID NO: 1233381 - RNA, 24 nt, Human
uccugaguccccaccugcaggccc

SEQ ID NO: 1233382 - RNA, 23 nt, Human
uccuuguggcccucgggcuccuu

SEQ ID NO: 1233383 - RNA, 21 nt, Human
ucuacagcuguggccacggac

SEQ ID NO: 1233384 - RNA, 21 nt, Human
ucuacagcuguggccacggac

SEQ ID NO: 1233385 - RNA, 29 nt, Human
ucuggcccugacccugaguuccgguuccg

SEQ ID NO: 1233386 - RNA, 25 nt, Human
ugacccugaguucccagacacuccc

SEQ ID NO: 1233387 - RNA, 18 nt, Human
ugaccugguccugccugg

SEQ ID NO: 1233388 - RNA, 21 nt, Human
ugaggcugggcccagaggguc

SEQ ID NO: 1233389 - RNA, 26 nt, Human
ugaggcugggcccagagggucuugcu

SEQ ID NO: 1233390 - RNA, 19 nt, Human
ugagggcugggauuggcca

SEQ ID NO: 1233391 - RNA, 20 nt, Human
ugcaaggagcccugucuaca

SEQ ID NO: 1233392 - RNA, 22 nt, Human
ugcagaacagguuauaaaacag

SEQ ID NO: 1233393 - RNA, 19 nt, Human
ugcaggaaggcagugcccc

SEQ ID NO: 1233394 - RNA, 19 nt, Human
ugccacccccagucugagc

SEQ ID NO: 1233395 - RNA, 19 nt, Human
ugcccagaccccagagcaa

SEQ ID NO: 1233396 - RNA, 18 nt, Human
ugccccagccuccuccug

SEQ ID NO: 1233397 - RNA, 26 nt, Human
ugccuugcugccuccaagggcuccca

SEQ ID NO: 1233398 - RNA, 19 nt, Human
uggagcccugcugagaccu

SEQ ID NO: 1233399 - RNA, 24 nt, Human
ugucuacagcuguggccacggacg

SEQ ID NO: 1233400 - RNA, 22 nt, Human
uucacuccugaguccccaccug

SEQ ID NO: 1233401 - RNA, 26 nt, Human
aacgcagcugcagucugaccccuugg

SEQ ID NO: 1233402 - RNA, 21 nt, Human
acauacacuccgguggaugug

SEQ ID NO: 1233403 - RNA, 25 nt, Human
acugaaacacagaacaugugccagu

SEQ ID NO: 1233404 - RNA, 21 nt, Human
caaggugaguccaaggacacc

SEQ ID NO: 1233405 - RNA, 23 nt, Human
cacagaacaugugccaaggugag

SEQ ID NO: 1233406 - RNA, 19 nt, Human
caccgcugcuccacagaac

SEQ ID NO: 1233407 - RNA, 18 nt, Human
cagcugcagucugucggg

SEQ ID NO: 1233408 - RNA, 18 nt, Human
cagcugcagucugucggu

SEQ ID NO: 1233409 - RNA, 19 nt, Human
ccccuccccauacauacac

SEQ ID NO: 1233410 - RNA, 25 nt, Human
cuccacagaacugcuggcugucucu

SEQ ID NO: 1233411 - RNA, 18 nt, Human
cuccgguggaugugagcg

SEQ ID NO: 1233412 - RNA, 24 nt, Human
cugggaacaggugaagccccuccc

SEQ ID NO: 1233413 - RNA, 22 nt, Human
gaacaggugaagccccucccca

SEQ ID NO: 1233414 - RNA, 22 nt, Human
gaacaggugaagccccucccca

SEQ ID NO: 1233415 - RNA, 28 nt, Human
gaagccccuccccauacauacacucuuc

SEQ ID NO: 1233416 - RNA, 24 nt, Human
gccaaggugaguccaaggacaccu

SEQ ID NO: 1233417 - RNA, 19 nt, Human
ggcagcacccucuuuuggc

SEQ ID NO: 1233418 - RNA, 22 nt, Human
ggccaccgcugcuccacagaac

SEQ ID NO: 1233419 - RNA, 18 nt, Human
uagccggccaccgcugcu

SEQ ID NO: 1233420 - RNA, 23 nt, Human
ugaguccaaggacaccucuggga

SEQ ID NO: 1233421 - RNA, 20 nt, Human
ugggggcccaggcuaggggc

SEQ ID NO: 1233422 - RNA, 21 nt, Human
ugggggcccaggcuaggggca

SEQ ID NO: 1233423 - RNA, 21 nt, Human
ugggguuaggggcuuggacau

SEQ ID NO: 1233424 - RNA, 19 nt, Human
ugggugaucaggucucucu

SEQ ID NO: 1233425 - RNA, 27 nt, Human
aaaaaaaaaaaaaaaugagauucagag

SEQ ID NO: 1233426 - RNA, 24 nt, Human
aaaagaccagagauaaguaagaua

SEQ ID NO: 1233427 - RNA, 24 nt, Human
aaagaacuguccccccacacacca

SEQ ID NO: 1233428 - RNA, 18 nt, Human
aaagagccauggccaacu

SEQ ID NO: 1233429 - RNA, 21 nt, Human
aaaggaacguggaaaagagcc

SEQ ID NO: 1233430 - RNA, 21 nt, Human
aaaggggaauuacaggcauga

SEQ ID NO: 1233431 - RNA, 21 nt, Human
aacagagguggcagaaacugc

SEQ ID NO: 1233432 - RNA, 18 nt, Human
aagagcugucuggacaaa

SEQ ID NO: 1233433 - RNA, 23 nt, Human
aagcagccugagaggaaucugaa

SEQ ID NO: 1233434 - RNA, 21 nt, Human
aauuacaggcaugagccacug

SEQ ID NO: 1233435 - RNA, 24 nt, Human
aauuacaggcaugagccacugugc

SEQ ID NO: 1233436 - RNA, 24 nt, Human
acagcucccuugccacugcaggga

SEQ ID NO: 1233437 - RNA, 21 nt, Human
acaggaaaggcaggggacagc

SEQ ID NO: 1233438 - RNA, 22 nt, Human
acaggucccucagccaggagug

SEQ ID NO: 1233439 - RNA, 18 nt, Human
accugcuccacugggucc

SEQ ID NO: 1233440 - RNA, 24 nt, Human
acuucaaaacagcagcuuuagaag

SEQ ID NO: 1233441 - RNA, 21 nt, Human
agaaacagugacagaaagccg

SEQ ID NO: 1233442 - RNA, 21 nt, Human
agaagugggcagaggguagug

SEQ ID NO: 1233443 - RNA, 23 nt, Human
agaggaaaagguuccucccaagg

SEQ ID NO: 1233444 - RNA, 19 nt, Human
agccgggccuacccucuga

SEQ ID NO: 1233445 - RNA, 25 nt, Human
agcggcaguaacagagguggcagaa

SEQ ID NO: 1233446 - RNA, 18 nt, Human
aggaaacacagggguuga

SEQ ID NO: 1233447 - RNA, 24 nt, Human
aggaacguggaaaagagccauggc

SEQ ID NO: 1233448 - RNA, 20 nt, Human
aucuccucuucaccuggcua

SEQ ID NO: 1233449 - RNA, 20 nt, Human
augcacuucaaaacagcagc

SEQ ID NO: 1233450 - RNA, 24 nt, Human
augccacacagaggaagggcaggc

SEQ ID NO: 1233451 - RNA, 21 nt, Human
caaaacagcagcuuuagaagc

SEQ ID NO: 1233452 - RNA, 22 nt, Human
caaguccccaucaaaaaagacc

SEQ ID NO: 1233453 - RNA, 21 nt, Human
cacaaagaacuguccccccac

SEQ ID NO: 1233454 - RNA, 23 nt, Human
cacaagcagccugagaggaaucu

SEQ ID NO: 1233455 - RNA, 24 nt, Human
cacaaggaaaggugaaagcggcag

SEQ ID NO: 1233456 - RNA, 18 nt, Human
cacacaccauucaagucc

SEQ ID NO: 1233457 - RNA, 21 nt, Human
cacaccaagccauccuucccc

SEQ ID NO: 1233458 - RNA, 18 nt, Human
cacagaggaagggcaggc

SEQ ID NO: 1233459 - RNA, 22 nt, Human
caccaagccauccuucccccau

SEQ ID NO: 1233460 - RNA, 23 nt, Human
cacccugaacuugauaauggccu

SEQ ID NO: 1233461 - RNA, 24 nt, Human
caccgcguggcuggccaucuccuu

SEQ ID NO: 1233462 - RNA, 23 nt, Human
cacuucaaaacagcagcuuuaga

SEQ ID NO: 1233463 - RNA, 20 nt, Human
cagacuuucuuauguugagu

SEQ ID NO: 1233464 - RNA, 24 nt, Human
cagcucccuugccacugcagggaa

SEQ ID NO: 1233465 - RNA, 22 nt, Human
caggccccacaggaaaggcagg

SEQ ID NO: 1233466 - RNA, 19 nt, Human
caucgcccuuuccuucugc

SEQ ID NO: 1233467 - RNA, 21 nt, Human
ccaaaggggaauuacaggcau

SEQ ID NO: 1233468 - RNA, 21 nt, Human
ccacacaaagaacuguccccc

SEQ ID NO: 1233469 - RNA, 23 nt, Human
ccacacaccauucaaguccccau

SEQ ID NO: 1233470 - RNA, 20 nt, Human
cccacacaggacaccagagc

SEQ ID NO: 1233471 - RNA, 23 nt, Human
cccauagggacauggagaaauac

SEQ ID NO: 1233472 - RNA, 21 nt, Human
cccauccugcggcagcagagg

SEQ ID NO: 1233473 - RNA, 24 nt, Human
ccccacacaccauucaagucccca

SEQ ID NO: 1233474 - RNA, 21 nt, Human
ccccagcaucuccucuucacc

SEQ ID NO: 1233475 - RNA, 26 nt, Human
ccccagcaucuccucuucaccugguc

SEQ ID NO: 1233476 - RNA, 20 nt, Human
cccucccacccugaacuuga

SEQ ID NO: 1233477 - RNA, 19 nt, Human
ccuucccccauccccacug

SEQ ID NO: 1233478 - RNA, 20 nt, Human
cgaggaggagaauguggagc

SEQ ID NO: 1233479 - RNA, 22 nt, Human
cguggaaaagagccauggccaa

SEQ ID NO: 1233480 - RNA, 24 nt, Human
cuaaaacccagcuuuucuggcugc

SEQ ID NO: 1233481 - RNA, 21 nt, Human
cucaaaagccuccaauggcuc

SEQ ID NO: 1233482 - RNA, 23 nt, Human
cucaaaagccuccaauggcucgc

SEQ ID NO: 1233483 - RNA, 18 nt, Human
cuccccagcaucuccucu

SEQ ID NO: 1233484 - RNA, 18 nt, Human
cuccuucccugaccuucc

SEQ ID NO: 1233485 - RNA, 18 nt, Human
cuccuucccugaccuucc

SEQ ID NO: 1233486 - RNA, 25 nt, Human
gaaaagguuccucccaaggcuuaag

SEQ ID NO: 1233487 - RNA, 20 nt, Human
gaaaccccuuccuuccucaa

SEQ ID NO: 1233488 - RNA, 24 nt, Human
gaauuacaggcaugagccacugug

SEQ ID NO: 1233489 - RNA, 20 nt, Human
gacagccgggccuacccucu

SEQ ID NO: 1233490 - RNA, 18 nt, Human
gagcuggggcuaaaaccc

SEQ ID NO: 1233491 - RNA, 22 nt, Human
gaugaaaggaacguggaaaaga

SEQ ID NO: 1233492 - RNA, 19 nt, Human
gauucagagaagucaagca

SEQ ID NO: 1233493 - RNA, 21 nt, Human
gcagccugagaggaaucugaa

SEQ ID NO: 1233494 - RNA, 23 nt, Human
gcucagggcagcugugacugcuc

SEQ ID NO: 1233495 - RNA, 21 nt, Human
gcuggccaucuccuucccuga

SEQ ID NO: 1233496 - RNA, 22 nt, Human
ggaauguccugcucaggggugc

SEQ ID NO: 1233497 - RNA, 23 nt, Human
ggaauuacaggcaugagccacug

SEQ ID NO: 1233498 - RNA, 25 nt, Human
ggaauuacaggcaugagccacugug

SEQ ID NO: 1233499 - RNA, 24 nt, Human
ggacagacacaccaagccauccuu

SEQ ID NO: 1233500 - RNA, 19 nt, Human
ggagaauguggagcucagg

SEQ ID NO: 1233501 - RNA, 21 nt, Human
ggccuggggcucucacugggg

SEQ ID NO: 1233502 - RNA, 24 nt, Human
gggaauuacaggcaugagccacug

SEQ ID NO: 1233503 - RNA, 18 nt, Human
ggguggggauaacuggca

SEQ ID NO: 1233504 - RNA, 19 nt, Human
gucaagcauucugcccaca

SEQ ID NO: 1233505 - RNA, 23 nt, Human
uaacugcuacaugauguucaaac

SEQ ID NO: 1233506 - RNA, 24 nt, Human
uacaggcaugagccacugugccca

SEQ ID NO: 1233507 - RNA, 21 nt, Human
uacccacucaaaagccuccaa

SEQ ID NO: 1233508 - RNA, 24 nt, Human
uagcauggcccaggcccuggguuu

SEQ ID NO: 1233509 - RNA, 21 nt, Human
uauggaggucaagaagcuucu

SEQ ID NO: 1233510 - RNA, 18 nt, Human
uccaauggcucgcaguua

SEQ ID NO: 1233511 - RNA, 19 nt, Human
uccacccacacaggacacc

SEQ ID NO: 1233512 - RNA, 19 nt, Human
uccaccgcguggcuggcca

SEQ ID NO: 1233513 - RNA, 23 nt, Human
uccacuggguccucacuuuucca

SEQ ID NO: 1233514 - RNA, 21 nt, Human
ucccaaaggggaauuacaggc

SEQ ID NO: 1233515 - RNA, 20 nt, Human
ucccaaggcuuaagagcugu

SEQ ID NO: 1233516 - RNA, 24 nt, Human
ucccacacaaagaacugucccccc

SEQ ID NO: 1233517 - RNA, 19 nt, Human
ucccagagaauggcagguc

SEQ ID NO: 1233518 - RNA, 23 nt, Human
uccccagcaucuccucuucaccu

SEQ ID NO: 1233519 - RNA, 24 nt, Human
ucccccauccccacuggucacaaa

SEQ ID NO: 1233520 - RNA, 18 nt, Human
ucccucacacacagaaac

SEQ ID NO: 1233521 - RNA, 19 nt, Human
ucccucacacacagaaaca

SEQ ID NO: 1233522 - RNA, 24 nt, Human
ucccucacacacagaaacagugac

SEQ ID NO: 1233523 - RNA, 19 nt, Human
ucccugaccuuccugguug

SEQ ID NO: 1233524 - RNA, 24 nt, Human
ucccugugagagaauuaaucaccc

SEQ ID NO: 1233525 - RNA, 20 nt, Human
uccuucagccggaguccugg

SEQ ID NO: 1233526 - RNA, 21 nt, Human
ucuaagggaugcagcaaggcc

SEQ ID NO: 1233527 - RNA, 23 nt, Human
ugaacagcucccuugccacugca

SEQ ID NO: 1233528 - RNA, 19 nt, Human
ugacaaaaaaaaaaaaaaa

SEQ ID NO: 1233529 - RNA, 21 nt, Human
ugacauuuggguuguaacaau

SEQ ID NO: 1233530 - RNA, 20 nt, Human
ugagaggaaucugaaucacg

SEQ ID NO: 1233531 - RNA, 22 nt, Human
ugagaggaaucugaaucacgaa

SEQ ID NO: 1233532 - RNA, 20 nt, Human
ugcaaacuagauuaugucau

SEQ ID NO: 1233533 - RNA, 23 nt, Human
ugccacacagaggaagggcaggc

SEQ ID NO: 1233534 - RNA, 24 nt, Human
uggaaaagagccauggccaacuca

SEQ ID NO: 1233535 - RNA, 18 nt, Human
uggaagugucgggccugg

SEQ ID NO: 1233536 - RNA, 25 nt, Human
uggaaucaagauccagguagagacu

SEQ ID NO: 1233537 - RNA, 21 nt, Human
uggcuaacugcuacaugaugu

SEQ ID NO: 1233538 - RNA, 21 nt, Human
uggcuggccaucuccuucccu

SEQ ID NO: 1233539 - RNA, 23 nt, Human
ugggaugaaaggaacguggaaaa

SEQ ID NO: 1233540 - RNA, 24 nt, Human
uggggagaggggguacgugcaguc

SEQ ID NO: 1233541 - RNA, 20 nt, Human
ugguggggggugacauuugg

SEQ ID NO: 1233542 - RNA, 19 nt, Human
uguggagcucagggcagcu

SEQ ID NO: 1233543 - RNA, 23 nt, Human
uguugcuugcaccuaacugauuu

SEQ ID NO: 1233544 - RNA, 20 nt, Human
uucaaaacagcagcuuuagg

SEQ ID NO: 1233545 - RNA, 25 nt, Human
uucaccuggcuaacugcuacaugau

SEQ ID NO: 1233546 - RNA, 19 nt, Human
uucccugaccuuccugguu

SEQ ID NO: 1233547 - RNA, 19 nt, Human
uugcuugcaccuaacugau

SEQ ID NO: 1233548 - RNA, 19 nt, Human
uuuguuagaaaccccuucc

SEQ ID NO: 1233549 - RNA, 26 nt, Human
aaaagacccaggcagcuuagugggca

SEQ ID NO: 1233550 - RNA, 23 nt, Human
aaacuccuggguucuccaggccu

SEQ ID NO: 1233551 - RNA, 23 nt, Human
acaggccaccacagccaggugga

SEQ ID NO: 1233552 - RNA, 19 nt, Human
agaaaaaaaaauaaggaaa

SEQ ID NO: 1233553 - RNA, 19 nt, Human
agaaaaaaaaauaaggaaa

SEQ ID NO: 1233554 - RNA, 21 nt, Human
agaaaaaaaaauaaggaaaag

SEQ ID NO: 1233555 - RNA, 18 nt, Human
agucuuuuuuuuuuuucc

SEQ ID NO: 1233556 - RNA, 23 nt, Human
caagacaccuaauugacuugcaa

SEQ ID NO: 1233557 - RNA, 24 nt, Human
caagacaccuaauugacuugcaac

SEQ ID NO: 1233558 - RNA, 20 nt, Human
ccacaggccaccacagccag

SEQ ID NO: 1233559 - RNA, 19 nt, Human
cuccuggguucuccaggcc

SEQ ID NO: 1233560 - RNA, 21 nt, Human
gaaacuccuggguucuccagg

SEQ ID NO: 1233561 - RNA, 22 nt, Human
gagcaccauuaaauauucacac

SEQ ID NO: 1233562 - RNA, 24 nt, Human
guuaaaugaguaauagucuuuuuu

SEQ ID NO: 1233563 - RNA, 24 nt, Human
uaaaugaguaauagucuuuuuuuu

SEQ ID NO: 1233564 - RNA, 22 nt, Human
uaauagucuuuuuuuuuuuucc

SEQ ID NO: 1233565 - RNA, 24 nt, Human
uagcucaaccugcuuaaacaaugu

SEQ ID NO: 1233566 - RNA, 26 nt, Human
uagucuuuuuuuuuuuuccuuagaga

SEQ ID NO: 1233567 - RNA, 23 nt, Human
uggcagcacagcuuggaaacucc

SEQ ID NO: 1233568 - RNA, 18 nt, Human
uuaaaacucaacagucau

SEQ ID NO: 1233569 - RNA, 19 nt, Human
uucccuuuugggggcaacu

SEQ ID NO: 1233570 - RNA, 20 nt, Human
acuccagagcccucccucuu

SEQ ID NO: 1233571 - RNA, 25 nt, Human
acuccagagcccucccucuuuaacu

SEQ ID NO: 1233572 - RNA, 19 nt, Human
agagcugggugaccuugag

SEQ ID NO: 1233573 - RNA, 19 nt, Human
agcagguugcuuaaccuuc

SEQ ID NO: 1233574 - RNA, 21 nt, Human
auggagccucugugcugggca

SEQ ID NO: 1233575 - RNA, 18 nt, Human
ccuugagcagguugcuua

SEQ ID NO: 1233576 - RNA, 18 nt, Human
cucgcuaguauccuucca

SEQ ID NO: 1233577 - RNA, 22 nt, Human
cucuuuaacugcugcuuuuaac

SEQ ID NO: 1233578 - RNA, 19 nt, Human
cugggcaccggggcuaggc

SEQ ID NO: 1233579 - RNA, 26 nt, Human
gcagcuuuugcccagagucuggguuc

SEQ ID NO: 1233580 - RNA, 20 nt, Human
ggugacacauauggagccuc

SEQ ID NO: 1233581 - RNA, 24 nt, Human
uaggcccuuccuaugcacucucau

SEQ ID NO: 1233582 - RNA, 20 nt, Human
ucaaacgcaaacaguccaac

SEQ ID NO: 1233583 - RNA, 23 nt, Human
uccagagcccucccucuuuaacu

SEQ ID NO: 1233584 - RNA, 19 nt, Human
uggagccucugugcugggc

SEQ ID NO: 1233585 - RNA, 23 nt, Human
aaaagcacaagaagacagaaacc

SEQ ID NO: 1233586 - RNA, 21 nt, Human
aaaugccacaggaaacaaacu

SEQ ID NO: 1233587 - RNA, 25 nt, Human
aacagccuuccaauugccccuccac

SEQ ID NO: 1233588 - RNA, 19 nt, Human
aagacagaaaccuguaagc

SEQ ID NO: 1233589 - RNA, 18 nt, Human
aagugcaggguggaggug

SEQ ID NO: 1233590 - RNA, 21 nt, Human
acagagagguuaaaaucugga

SEQ ID NO: 1233591 - RNA, 21 nt, Human
accccacccccaccccuugag

SEQ ID NO: 1233592 - RNA, 23 nt, Human
acccucaccggggaacccucacu

SEQ ID NO: 1233593 - RNA, 20 nt, Human
accugcaucaccuccuccuc

SEQ ID NO: 1233594 - RNA, 24 nt, Human
agcacaagaagacagaaaccugua

SEQ ID NO: 1233595 - RNA, 18 nt, Human
agccuguaguucuuuggg

SEQ ID NO: 1233596 - RNA, 20 nt, Human
agcucugaccccacccccac

SEQ ID NO: 1233597 - RNA, 20 nt, Human
aggaaaaaccaaauauacau

SEQ ID NO: 1233598 - RNA, 22 nt, Human
aggcccggucaccuggucagga

SEQ ID NO: 1233599 - RNA, 24 nt, Human
agggugccucucaucucuggguuu

SEQ ID NO: 1233600 - RNA, 18 nt, Human
aggucucagcucuuggag

SEQ ID NO: 1233601 - RNA, 22 nt, Human
aggucucagcucuuggaggagg

SEQ ID NO: 1233602 - RNA, 21 nt, Human
agguuaaaaucuggagcagga

SEQ ID NO: 1233603 - RNA, 26 nt, Human
augaaucugaacugcccucuccugug

SEQ ID NO: 1233604 - RNA, 19 nt, Human
cacaagcacagaucccaga

SEQ ID NO: 1233605 - RNA, 19 nt, Human
caccuggucaggacagagc

SEQ ID NO: 1233606 - RNA, 21 nt, Human
caccuuguccugugucugagg

SEQ ID NO: 1233607 - RNA, 19 nt, Human
cacucccgccugccccaga

SEQ ID NO: 1233608 - RNA, 26 nt, Human
cacucccgccugccccagacuggaga

SEQ ID NO: 1233609 - RNA, 22 nt, Human
cagagcaacugcaucuaaaagc

SEQ ID NO: 1233610 - RNA, 23 nt, Human
cagaucccagacuuugccagagg

SEQ ID NO: 1233611 - RNA, 20 nt, Human
caucagcaaacauugaacca

SEQ ID NO: 1233612 - RNA, 22 nt, Human
ccaauugccccuccacccccag

SEQ ID NO: 1233613 - RNA, 18 nt, Human
ccauacagaaugaaucug

SEQ ID NO: 1233614 - RNA, 23 nt, Human
ccaucuuggcugcuguccugccu

SEQ ID NO: 1233615 - RNA, 21 nt, Human
cccacccccaccccuugagag

SEQ ID NO: 1233616 - RNA, 24 nt, Human
cccacguuguugaauguccagaaa

SEQ ID NO: 1233617 - RNA, 22 nt, Human
ccccaccaaccuuacccucacc

SEQ ID NO: 1233618 - RNA, 21 nt, Human
cccccgccgggucaccucccc

SEQ ID NO: 1233619 - RNA, 23 nt, Human
cccccgccgggucaccuccccgc

SEQ ID NO: 1233620 - RNA, 19 nt, Human
ccccgcccccucggucccc

SEQ ID NO: 1233621 - RNA, 20 nt, Human
ccccgccgggucaccucccc

SEQ ID NO: 1233622 - RNA, 22 nt, Human
ccccggcccgccaggccccgga

SEQ ID NO: 1233623 - RNA, 20 nt, Human
cccgcccccucgguccccgg

SEQ ID NO: 1233624 - RNA, 22 nt, Human
cccgcccgcuggcuccgccccc

SEQ ID NO: 1233625 - RNA, 21 nt, Human
cccggcccgccaggccccgga

SEQ ID NO: 1233626 - RNA, 23 nt, Human
cccggcccgccaggccccggaag

SEQ ID NO: 1233627 - RNA, 23 nt, Human
ccgcuggcuccgcccccgccggg

SEQ ID NO: 1233628 - RNA, 22 nt, Human
ccuccacccccagcugaggccc

SEQ ID NO: 1233629 - RNA, 19 nt, Human
ccucccgcgccgcgcccgc

SEQ ID NO: 1233630 - RNA, 20 nt, Human
ccuguaagcucugaccccac

SEQ ID NO: 1233631 - RNA, 19 nt, Human
ccuguggcuggacagcagc

SEQ ID NO: 1233632 - RNA, 19 nt, Human
ccuguggcuggucaggugc

SEQ ID NO: 1233633 - RNA, 23 nt, Human
ccuuucccacagaagggggugcc

SEQ ID NO: 1233634 - RNA, 21 nt, Human
cgccaggccccggaagacgcc

SEQ ID NO: 1233635 - RNA, 18 nt, Human
cgccgggucaccuccccg

SEQ ID NO: 1233636 - RNA, 26 nt, Human
cgccucccgcgccgcgcccgcccgcu

SEQ ID NO: 1233637 - RNA, 18 nt, Human
cgcugcacccccaccaac

SEQ ID NO: 1233638 - RNA, 19 nt, Human
cuccccguuucucucccca

SEQ ID NO: 1233639 - RNA, 22 nt, Human
cucugaccaguggccgcccccc

SEQ ID NO: 1233640 - RNA, 23 nt, Human
cugcaccauccucgcuguuuccc

SEQ ID NO: 1233641 - RNA, 24 nt, Human
cugcaucaccuccuccucuugcag

SEQ ID NO: 1233642 - RNA, 20 nt, Human
cuggucaggugcccccagcc

SEQ ID NO: 1233643 - RNA, 21 nt, Human
cuuuauguguguguguaugug

SEQ ID NO: 1233644 - RNA, 19 nt, Human
gaaacuuugugcaaagaau

SEQ ID NO: 1233645 - RNA, 21 nt, Human
gaccccacccccaccccuuga

SEQ ID NO: 1233646 - RNA, 20 nt, Human
gcacgugggccucauagcag

SEQ ID NO: 1233647 - RNA, 23 nt, Human
gccacaggaaacaaacuuuaugu

SEQ ID NO: 1233648 - RNA, 19 nt, Human
gccagaggcaaacagccuu

SEQ ID NO: 1233649 - RNA, 21 nt, Human
gcugcacccccaccaaccuua

SEQ ID NO: 1233650 - RNA, 24 nt, Human
ggaaaaaccaaauauacauacuua

SEQ ID NO: 1233651 - RNA, 18 nt, Human
ggagcccccugaugggcu

SEQ ID NO: 1233652 - RNA, 22 nt, Human
ggccccggaagacgccgcggcg

SEQ ID NO: 1233653 - RNA, 18 nt, Human
ggccccuucagacccaaa

SEQ ID NO: 1233654 - RNA, 19 nt, Human
gggaacccucacuagcagg

SEQ ID NO: 1233655 - RNA, 18 nt, Human
gggccccuucagacccaa

SEQ ID NO: 1233656 - RNA, 18 nt, Human
gguggagucucaccuggg

SEQ ID NO: 1233657 - RNA, 22 nt, Human
gguugggcaggcuuguuuuugc

SEQ ID NO: 1233658 - RNA, 22 nt, Human
guaccagagucucuugggcuca

SEQ ID NO: 1233659 - RNA, 22 nt, Human
gugaagcgcugcacccccacca

SEQ ID NO: 1233660 - RNA, 18 nt, Human
uaaaagcacaagaagaca

SEQ ID NO: 1233661 - RNA, 23 nt, Human
uaaaagcacaagaagacagaaac

SEQ ID NO: 1233662 - RNA, 18 nt, Human
uaaccucacacaagcaca

SEQ ID NO: 1233663 - RNA, 21 nt, Human
uaaccucacacaagcacagau

SEQ ID NO: 1233664 - RNA, 20 nt, Human
uaaggaauaauucuuccuuc

SEQ ID NO: 1233665 - RNA, 23 nt, Human
uacccucaccggggaacccucac

SEQ ID NO: 1233666 - RNA, 20 nt, Human
uauguguguguguaugugug

SEQ ID NO: 1233667 - RNA, 22 nt, Human
ucagacccaaagcuuuaggcau

SEQ ID NO: 1233668 - RNA, 22 nt, Human
ucagcaccuguuuccuuuccca

SEQ ID NO: 1233669 - RNA, 23 nt, Human
ucagcaccuguuuccuuucccac

SEQ ID NO: 1233670 - RNA, 21 nt, Human
uccugugucugagguccugug

SEQ ID NO: 1233671 - RNA, 21 nt, Human
ucucuggguuuagccuggcuu

SEQ ID NO: 1233672 - RNA, 20 nt, Human
ucuguaucucuuggcuuugu

SEQ ID NO: 1233673 - RNA, 20 nt, Human
ucuuggaggagggcuaaggc

SEQ ID NO: 1233674 - RNA, 23 nt, Human
ucuugggcucagcaccuguuucc

SEQ ID NO: 1233675 - RNA, 23 nt, Human
ucuuugggguggagggaagaagg

SEQ ID NO: 1233676 - RNA, 22 nt, Human
ugaaccagggcccacucccgcc

SEQ ID NO: 1233677 - RNA, 21 nt, Human
ugaagcgcugcacccccacca

SEQ ID NO: 1233678 - RNA, 21 nt, Human
ugaaucugaacugcccucucc

SEQ ID NO: 1233679 - RNA, 21 nt, Human
ugaccaguggccgccccccuc

SEQ ID NO: 1233680 - RNA, 18 nt, Human
ugaccccacccccacccc

SEQ ID NO: 1233681 - RNA, 20 nt, Human
ugaccccacccccaccccuu

SEQ ID NO: 1233682 - RNA, 18 nt, Human
ugagaggucucagcucuu

SEQ ID NO: 1233683 - RNA, 27 nt, Human
ugcccccagcccacagagagguuaaaa

SEQ ID NO: 1233684 - RNA, 23 nt, Human
ugcccucuccuguggcuggucag

SEQ ID NO: 1233685 - RNA, 18 nt, Human
ugccucugaccaguggcc

SEQ ID NO: 1233686 - RNA, 22 nt, Human
ugccucuuuuuuuuuuuuuccu

SEQ ID NO: 1233687 - RNA, 19 nt, Human
ugccuggagaugaacugga

SEQ ID NO: 1233688 - RNA, 24 nt, Human
uggagcaggaggcagcacgugggc

SEQ ID NO: 1233689 - RNA, 19 nt, Human
uggagggaagaagggaagg

SEQ ID NO: 1233690 - RNA, 19 nt, Human
uggagucucaauaaagcuc

SEQ ID NO: 1233691 - RNA, 23 nt, Human
uggagucucaccuggggccuaga

SEQ ID NO: 1233692 - RNA, 18 nt, Human
uggcuggacagcagcagc

SEQ ID NO: 1233693 - RNA, 19 nt, Human
ugggcaggcuuguuuuugc

SEQ ID NO: 1233694 - RNA, 21 nt, Human
uggguaccagagucucuuggg

SEQ ID NO: 1233695 - RNA, 18 nt, Human
uggucaggugcccccagc

SEQ ID NO: 1233696 - RNA, 22 nt, Human
ugguggagucucaccuggggcc

SEQ ID NO: 1233697 - RNA, 25 nt, Human
uggugguggagucucaccuggggcc

SEQ ID NO: 1233698 - RNA, 26 nt, Human
ugucagaggccuggagccaaggccac

SEQ ID NO: 1233699 - RNA, 23 nt, Human
uguucauuuuuuuuggggggggu

SEQ ID NO: 1233700 - RNA, 18 nt, Human
uguugggggccccuucag

SEQ ID NO: 1233701 - RNA, 25 nt, Human
uuaggcaugauuccaacuggcugca

SEQ ID NO: 1233702 - RNA, 21 nt, Human
uucagacccaaagcuuuaggc

SEQ ID NO: 1233703 - RNA, 25 nt, Human
uucccacagaagggggugccuguca

SEQ ID NO: 1233704 - RNA, 24 nt, Human
uugcccugggacaucuguaucucu

SEQ ID NO: 1233705 - RNA, 19 nt, Human
uugugaagcgcugcacccc

SEQ ID NO: 1233706 - RNA, 23 nt, Human
uuugggguggagggaagaaggga

SEQ ID NO: 1233707 - RNA, 19 nt, Human
uuuuuuuuggggggggucu

SEQ ID NO: 1233708 - RNA, 21 nt, Human
acgcaguugcgacaggaggcc

SEQ ID NO: 1233709 - RNA, 24 nt, Human
cugggcuccugggcugaacaugga

SEQ ID NO: 1233710 - RNA, 20 nt, Human
gcgacaggaggccaggggaa

SEQ ID NO: 1233711 - RNA, 22 nt, Human
gcuccugggcugaacauggacc

SEQ ID NO: 1233712 - RNA, 18 nt, Human
aaaaucccagaaccaaga

SEQ ID NO: 1233713 - RNA, 21 nt, Human
aagcaggcugagcgcccggcu

SEQ ID NO: 1233714 - RNA, 22 nt, Human
aagcaggcugagcgcccggcug

SEQ ID NO: 1233715 - RNA, 21 nt, Human
accugccugcuccccagcccu

SEQ ID NO: 1233716 - RNA, 19 nt, Human
agcgaagcaggcugagcgc

SEQ ID NO: 1233717 - RNA, 25 nt, Human
agucacaaagccccugcuacugggg

SEQ ID NO: 1233718 - RNA, 19 nt, Human
caccuccagggcugggguc

SEQ ID NO: 1233719 - RNA, 21 nt, Human
caccugccugcuccccagccc

SEQ ID NO: 1233720 - RNA, 20 nt, Human
cacugguugucaccugccug

SEQ ID NO: 1233721 - RNA, 22 nt, Human
cagcgaagcaggcugagcgccc

SEQ ID NO: 1233722 - RNA, 19 nt, Human
cauauugcccaggccuggc

SEQ ID NO: 1233723 - RNA, 18 nt, Human
cccucagguccccucuuc

SEQ ID NO: 1233724 - RNA, 20 nt, Human
ccugcuacuggggaaagaga

SEQ ID NO: 1233725 - RNA, 20 nt, Human
cuccagggcuggggucucuc

SEQ ID NO: 1233726 - RNA, 23 nt, Human
cugauagucacaaagccccugcu

SEQ ID NO: 1233727 - RNA, 18 nt, Human
gaaaaucccagaaccaag

SEQ ID NO: 1233728 - RNA, 23 nt, Human
gacacugguugucaccugccugc

SEQ ID NO: 1233729 - RNA, 20 nt, Human
gccauauugcccaggccugg

SEQ ID NO: 1233730 - RNA, 20 nt, Human
gcgaagcaggcugagcgccc

SEQ ID NO: 1233731 - RNA, 19 nt, Human
ggaaaguaggacacugguu

SEQ ID NO: 1233732 - RNA, 18 nt, Human
gggaaagagaaaggaagg

SEQ ID NO: 1233733 - RNA, 21 nt, Human
ggggaaagagaaaggaaggcc

SEQ ID NO: 1233734 - RNA, 20 nt, Human
guggugccgucccgaccucg

SEQ ID NO: 1233735 - RNA, 24 nt, Human
uaagacccaauuaagaaaauccca

SEQ ID NO: 1233736 - RNA, 21 nt, Human
uauuccaacguccaccccagg

SEQ ID NO: 1233737 - RNA, 20 nt, Human
ucccgaccucgacaagcauc

SEQ ID NO: 1233738 - RNA, 18 nt, Human
uccugggccccgcagggc

SEQ ID NO: 1233739 - RNA, 25 nt, Human
ucucgccauauugcccaggccuggc

SEQ ID NO: 1233740 - RNA, 25 nt, Human
ucucucaucguguuguccccacuuu

SEQ ID NO: 1233741 - RNA, 24 nt, Human
ugaggucucgccauauugcccagg

SEQ ID NO: 1233742 - RNA, 22 nt, Human
ugcuacuggggaaagagaaagg

SEQ ID NO: 1233743 - RNA, 24 nt, Human
ugcuguccagccacgaaucuccca

SEQ ID NO: 1233744 - RNA, 19 nt, Human
uggccgagggcaccuccag

SEQ ID NO: 1233745 - RNA, 24 nt, Human
uggggucucucaucguguuguccc

SEQ ID NO: 1233746 - RNA, 21 nt, Human
uguccagccacgaaucuccca

SEQ ID NO: 1233747 - RNA, 21 nt, Human
uuccaacguccaccccaggcc

SEQ ID NO: 1233748 - RNA, 21 nt, Human
uugcccaggccuggcaggugu

SEQ ID NO: 1233749 - RNA, 20 nt, Human
acagugcagagcaggcccac

SEQ ID NO: 1233750 - RNA, 19 nt, Human
acccuggucagcugccugg

SEQ ID NO: 1233751 - RNA, 21 nt, Human
agaucgggagcaggaagugga

SEQ ID NO: 1233752 - RNA, 20 nt, Human
aggcccacgagcagcagccc

SEQ ID NO: 1233753 - RNA, 22 nt, Human
agggaagccccaugcaaggggc

SEQ ID NO: 1233754 - RNA, 24 nt, Human
caacuuuauugaggggaaauauau

SEQ ID NO: 1233755 - RNA, 23 nt, Human
cagagguucugcuugcccccucc

SEQ ID NO: 1233756 - RNA, 25 nt, Human
caggauccuggacaaaggggucaag

SEQ ID NO: 1233757 - RNA, 27 nt, Human
caugcaaggggcaaagucaugccaccc

SEQ ID NO: 1233758 - RNA, 22 nt, Human
ccaagagugagcagccucuucc

SEQ ID NO: 1233759 - RNA, 23 nt, Human
ccacccggaggcugagcuuccag

SEQ ID NO: 1233760 - RNA, 20 nt, Human
ccacccuggucagcugccug

SEQ ID NO: 1233761 - RNA, 19 nt, Human
cccaaccagggaagcccca

SEQ ID NO: 1233762 - RNA, 19 nt, Human
cccccuuagcacugcucac

SEQ ID NO: 1233763 - RNA, 21 nt, Human
cccugagccaacaccugccac

SEQ ID NO: 1233764 - RNA, 22 nt, Human
cugcuugcccccuccgagggug

SEQ ID NO: 1233765 - RNA, 19 nt, Human
cuucccugagccaacaccu

SEQ ID NO: 1233766 - RNA, 24 nt, Human
gagcaggaaguggauguugcagag

SEQ ID NO: 1233767 - RNA, 22 nt, Human
gcacagugcagagcaggcccac

SEQ ID NO: 1233768 - RNA, 20 nt, Human
ggaaauauauacaccuuuga

SEQ ID NO: 1233769 - RNA, 18 nt, Human
ggaggccagagguucugc

SEQ ID NO: 1233770 - RNA, 19 nt, Human
ggauguccuuucuuuuauc

SEQ ID NO: 1233771 - RNA, 22 nt, Human
gucaugccacccggaggcugag

SEQ ID NO: 1233772 - RNA, 23 nt, Human
uacaccuuugaaaauuagaaaaa

SEQ ID NO: 1233773 - RNA, 24 nt, Human
ucagcugccugguccccaaccagg

SEQ ID NO: 1233774 - RNA, 19 nt, Human
ucagggagaucgggagcag

SEQ ID NO: 1233775 - RNA, 19 nt, Human
ucaugccacccggaggcug

SEQ ID NO: 1233776 - RNA, 24 nt, Human
ucccugagccaacaccugccaccc

SEQ ID NO: 1233777 - RNA, 26 nt, Human
ucccugagccaacaccugccacccug

SEQ ID NO: 1233778 - RNA, 24 nt, Human
uccuuucuuuuaucugcuccugau

SEQ ID NO: 1233779 - RNA, 20 nt, Human
ugagaugcagaugccuccaa

SEQ ID NO: 1233780 - RNA, 24 nt, Human
ugaggggaaauauauacaccuuug

SEQ ID NO: 1233781 - RNA, 20 nt, Human
ugccaagagugagcagccuc

SEQ ID NO: 1233782 - RNA, 20 nt, Human
ugcccccuccgaggguguug

SEQ ID NO: 1233783 - RNA, 18 nt, Human
uuagcacugcucacuugc

SEQ ID NO: 1233784 - RNA, 20 nt, Human
uuccaguggccuucccacag

SEQ ID NO: 1233785 - RNA, 18 nt, Human
cacccgcagaaccacauc

SEQ ID NO: 1233786 - RNA, 21 nt, Human
cagcaccgccucgcucugguu

SEQ ID NO: 1233787 - RNA, 18 nt, Human
cagcagcaggcggugggc

SEQ ID NO: 1233788 - RNA, 19 nt, Human
cagcaggcggugggcgugg

SEQ ID NO: 1233789 - RNA, 20 nt, Human
cagcggcgcaguccuguggc

SEQ ID NO: 1233790 - RNA, 19 nt, Human
cagcucacugugcaguccc

SEQ ID NO: 1233791 - RNA, 19 nt, Human
caggaacagcucacugugc

SEQ ID NO: 1233792 - RNA, 23 nt, Human
ccacucgggcccagcugcgucug

SEQ ID NO: 1233793 - RNA, 20 nt, Human
ccugcagcuggaacagcugu

SEQ ID NO: 1233794 - RNA, 22 nt, Human
ccugcagcuggaacagcugugc

SEQ ID NO: 1233795 - RNA, 24 nt, Human
cgcaguacagguaccugaugaacu

SEQ ID NO: 1233796 - RNA, 30 nt, Human
cgccucgcucugguuacuuagcagcuccaa

SEQ ID NO: 1233797 - RNA, 21 nt, Human
cugugcagggggauggccugg

SEQ ID NO: 1233798 - RNA, 23 nt, Human
gcagcuccaggaacaggggaacc

SEQ ID NO: 1233799 - RNA, 21 nt, Human
gcccgcagccugcacccgcag

SEQ ID NO: 1233800 - RNA, 23 nt, Human
gcgggcgcgagguaguugcgggg

SEQ ID NO: 1233801 - RNA, 20 nt, Human
ggauggccugggucagcagc

SEQ ID NO: 1233802 - RNA, 24 nt, Human
ggcccagcugcgucuggaagcugg

SEQ ID NO: 1233803 - RNA, 19 nt, Human
ggcggugggcguggaauac

SEQ ID NO: 1233804 - RNA, 20 nt, Human
gggauggccugggucagcag

SEQ ID NO: 1233805 - RNA, 21 nt, Human
gucuggaagcuggugcugcgg

SEQ ID NO: 1233806 - RNA, 22 nt, Human
guggcuccugcagcaccgccuc

SEQ ID NO: 1233807 - RNA, 24 nt, Human
uacagguaccugaugaacuugucg

SEQ ID NO: 1233808 - RNA, 22 nt, Human
ucagcagcacggucagcucccc

SEQ ID NO: 1233809 - RNA, 23 nt, Human
ucagcuccccgcaguacaggacu

SEQ ID NO: 1233810 - RNA, 20 nt, Human
ucgaagaacuuggcguagug

SEQ ID NO: 1233811 - RNA, 18 nt, Human
ugacccggcggcccgcgu

SEQ ID NO: 1233812 - RNA, 18 nt, Human
ugacgucgaagaacuugg

SEQ ID NO: 1233813 - RNA, 21 nt, Human
ugcggggcaggaaggcgcugc

SEQ ID NO: 1233814 - RNA, 19 nt, Human
uggaauacccggaccucau

SEQ ID NO: 1233815 - RNA, 21 nt, Human
ugggcguggaauacccggacc

SEQ ID NO: 1233816 - RNA, 23 nt, Human
ugugcagucccagcagcaggcgg

SEQ ID NO: 1233817 - RNA, 23 nt, Human
uugacgucgaagaacuuggcgua

SEQ ID NO: 1233818 - RNA, 18 nt, Human
caucccagcccccacacc

SEQ ID NO: 1233819 - RNA, 21 nt, Human
cccaucccagcccccacacca

SEQ ID NO: 1233820 - RNA, 23 nt, Human
cccccacaccaccgaugagagcc

SEQ ID NO: 1233821 - RNA, 23 nt, Human
gcccccacaccaccgaugagagc

SEQ ID NO: 1233822 - RNA, 19 nt, Human
guggccucaagcagcgcaa

SEQ ID NO: 1233823 - RNA, 19 nt, Human
ugagucccaucccagcccc

SEQ ID NO: 1233824 - RNA, 19 nt, Human
ugagucccaucccagcccc

SEQ ID NO: 1233825 - RNA, 22 nt, Human
ugccuggaagagaaguggccuc

SEQ ID NO: 1233826 - RNA, 18 nt, Human
uggaagagaaguggccuc

SEQ ID NO: 1233827 - RNA, 21 nt, Human
uggccucaagcagcgcaacag

SEQ ID NO: 1233828 - RNA, 21 nt, Human
uucugagucccaucccagccc

SEQ ID NO: 1233829 - RNA, 23 nt, Human
agcgagcgagcaguuggcugaaa

SEQ ID NO: 1233830 - RNA, 19 nt, Human
agggccagcucgugcucuc

SEQ ID NO: 1233831 - RNA, 21 nt, Human
aguuggcugaaaaaagggaag

SEQ ID NO: 1233832 - RNA, 18 nt, Human
aucugcaucuccagguca

SEQ ID NO: 1233833 - RNA, 22 nt, Human
cacgcaccuugucuagguagga

SEQ ID NO: 1233834 - RNA, 20 nt, Human
cacuugguccugaagucauc

SEQ ID NO: 1233835 - RNA, 19 nt, Human
cagcugccagccuggcauu

SEQ ID NO: 1233836 - RNA, 23 nt, Human
cagggucagcucguccaacaccc

SEQ ID NO: 1233837 - RNA, 21 nt, Human
ccacgccaggugcggcauccg

SEQ ID NO: 1233838 - RNA, 22 nt, Human
ccggucugaccucgcagagcaa

SEQ ID NO: 1233839 - RNA, 21 nt, Human
ccuucaggccuucuaucugca

SEQ ID NO: 1233840 - RNA, 25 nt, Human
cgagcaguuggcugaaaaaagggaa

SEQ ID NO: 1233841 - RNA, 21 nt, Human
cgugccaaggagggaggugag

SEQ ID NO: 1233842 - RNA, 21 nt, Human
cucgugcucucacuugguccu

SEQ ID NO: 1233843 - RNA, 19 nt, Human
cucugugguugugcuuugc

SEQ ID NO: 1233844 - RNA, 19 nt, Human
gugguugugcuuugccauc

SEQ ID NO: 1233845 - RNA, 19 nt, Human
uaggaggccaggcggucac

SEQ ID NO: 1233846 - RNA, 24 nt, Human
ucaaugguggccgcaaugaucuuu

SEQ ID NO: 1233847 - RNA, 22 nt, Human
ucacuuccaggucggcguuggc

SEQ ID NO: 1233848 - RNA, 19 nt, Human
ucagguccacgccaggugc

SEQ ID NO: 1233849 - RNA, 18 nt, Human
ucaguccuggccaggguc

SEQ ID NO: 1233850 - RNA, 21 nt, Human
ucaguccuggccagggucagc

SEQ ID NO: 1233851 - RNA, 19 nt, Human
uccacagucagccgcaggg

SEQ ID NO: 1233852 - RNA, 22 nt, Human
uccugaagucaucagcugccag

SEQ ID NO: 1233853 - RNA, 20 nt, Human
uccuucaggccuucuaucug

SEQ ID NO: 1233854 - RNA, 22 nt, Human
ucgugcucucacuugguccuga

SEQ ID NO: 1233855 - RNA, 23 nt, Human
ucuagguaggaggccaggcgguc

SEQ ID NO: 1233856 - RNA, 18 nt, Human
ucucacuugguccugaag

SEQ ID NO: 1233857 - RNA, 25 nt, Human
ugcaaaaugggcugcgcauucucaa

SEQ ID NO: 1233858 - RNA, 25 nt, Human
ugucaaucugcaaaaugggcugcgc

SEQ ID NO: 1233859 - RNA, 20 nt, Human
uugguccugaagucaucagc

SEQ ID NO: 1233860 - RNA, 23 nt, Human
aagggguggcccauuuggccucc

SEQ ID NO: 1233861 - RNA, 19 nt, Human
caggccccuucaccuucac

SEQ ID NO: 1233862 - RNA, 20 nt, Human
ccccuucaccuucacacugg

SEQ ID NO: 1233863 - RNA, 21 nt, Human
gggcaggccccuucaccuuca

SEQ ID NO: 1233864 - RNA, 20 nt, Human
ugccagaaaaaccuuuauuu

SEQ ID NO: 1233865 - RNA, 23 nt, Human
aagagggugauugaaaaaaacac

SEQ ID NO: 1233866 - RNA, 18 nt, Human
acacauuaguccccgccc

SEQ ID NO: 1233867 - RNA, 19 nt, Human
acagggacuggcuggccca

SEQ ID NO: 1233868 - RNA, 23 nt, Human
acagggacuggcuggcccagagc

SEQ ID NO: 1233869 - RNA, 24 nt, Human
agauaaaagaugaaauuuaauggg

SEQ ID NO: 1233870 - RNA, 18 nt, Human
agcaggcgugcugggggc

SEQ ID NO: 1233871 - RNA, 18 nt, Human
agccacacgcagagaagg

SEQ ID NO: 1233872 - RNA, 19 nt, Human
aggagggaccguggugcca

SEQ ID NO: 1233873 - RNA, 21 nt, Human
agggacuggcuggcccagagc

SEQ ID NO: 1233874 - RNA, 25 nt, Human
aguaaaacagggacuggcuggccca

SEQ ID NO: 1233875 - RNA, 23 nt, Human
auggggggugggggggcacaaga

SEQ ID NO: 1233876 - RNA, 21 nt, Human
caaagcaggcgugcugggggc

SEQ ID NO: 1233877 - RNA, 20 nt, Human
caccccuucccucuucgucc

SEQ ID NO: 1233878 - RNA, 19 nt, Human
cacgcugcugccucucuuc

SEQ ID NO: 1233879 - RNA, 22 nt, Human
cagcgcagcagcguacgggucc

SEQ ID NO: 1233880 - RNA, 21 nt, Human
caggagccacgucagcgcagc

SEQ ID NO: 1233881 - RNA, 21 nt, Human
ccaccccuucccucuucgucc

SEQ ID NO: 1233882 - RNA, 18 nt, Human
ccagcccugcuuccagga

SEQ ID NO: 1233883 - RNA, 21 nt, Human
ccagcccugcuuccaggagcc

SEQ ID NO: 1233884 - RNA, 21 nt, Human
cccuacgccagcccugcuucc

SEQ ID NO: 1233885 - RNA, 23 nt, Human
cccuguucguucguucuuucucu

SEQ ID NO: 1233886 - RNA, 20 nt, Human
ccucucuccucucuccucuc

SEQ ID NO: 1233887 - RNA, 22 nt, Human
ccucuucguccucgccuaggag

SEQ ID NO: 1233888 - RNA, 21 nt, Human
ccuucuccgucacucucuucc

SEQ ID NO: 1233889 - RNA, 21 nt, Human
cgacccgucaccaagggccag

SEQ ID NO: 1233890 - RNA, 23 nt, Human
cgcauccuuccucggggccgcag

SEQ ID NO: 1233891 - RNA, 18 nt, Human
cucaccgcauccuuccuc

SEQ ID NO: 1233892 - RNA, 20 nt, Human
cuccucucucucucuuucuc

SEQ ID NO: 1233893 - RNA, 23 nt, Human
cuccuucuccgucacucucuucc

SEQ ID NO: 1233894 - RNA, 21 nt, Human
cucuccugcgaggagcuucag

SEQ ID NO: 1233895 - RNA, 18 nt, Human
cucucuccucucucucuc

SEQ ID NO: 1233896 - RNA, 23 nt, Human
cucucucucucucucuccugcga

SEQ ID NO: 1233897 - RNA, 18 nt, Human
cucucucucucucucucu

SEQ ID NO: 1233898 - RNA, 18 nt, Human
cucucucucucucucucu

SEQ ID NO: 1233899 - RNA, 18 nt, Human
cucucucucucucucucu

SEQ ID NO: 1233900 - RNA, 21 nt, Human
cucuucguccucgccuaggag

SEQ ID NO: 1233901 - RNA, 18 nt, Human
cugcugccucucuucugc

SEQ ID NO: 1233902 - RNA, 22 nt, Human
cuggcuggcccagagccuuggg

SEQ ID NO: 1233903 - RNA, 20 nt, Human
cuuucucucuccucucuccc

SEQ ID NO: 1233904 - RNA, 19 nt, Human
gcuugcagggaccacgcug

SEQ ID NO: 1233905 - RNA, 21 nt, Human
ggauccccuccuuugucugga

SEQ ID NO: 1233906 - RNA, 20 nt, Human
gucauucuguaaagggacgc

SEQ ID NO: 1233907 - RNA, 20 nt, Human
gucucuuucucuccuucucc

SEQ ID NO: 1233908 - RNA, 22 nt, Human
gugcugggggcugcuuggccag

SEQ ID NO: 1233909 - RNA, 21 nt, Human
guucuuucucucucuccgggc

SEQ ID NO: 1233910 - RNA, 21 nt, Human
uaaaagaugaaauuuaauggg

SEQ ID NO: 1233911 - RNA, 19 nt, Human
uacgccagcccugcuucca

SEQ ID NO: 1233912 - RNA, 19 nt, Human
ucaccgcauccuuccucgg

SEQ ID NO: 1233913 - RNA, 19 nt, Human
ucacucucuucccucccuc

SEQ ID NO: 1233914 - RNA, 23 nt, Human
ucagcgcagcagcguacgggucc

SEQ ID NO: 1233915 - RNA, 19 nt, Human
uccaggagccacgucagcg

SEQ ID NO: 1233916 - RNA, 20 nt, Human
uccccgcccucggaaguaag

SEQ ID NO: 1233917 - RNA, 23 nt, Human
uccccgcccucggaaguaagggc

SEQ ID NO: 1233918 - RNA, 24 nt, Human
ucccucccucucuccucucuccuc

SEQ ID NO: 1233919 - RNA, 18 nt, Human
ucucccgucucuuucucu

SEQ ID NO: 1233920 - RNA, 22 nt, Human
ucuccugcgaggagcuucagau

SEQ ID NO: 1233921 - RNA, 22 nt, Human
ucucuccuucuccgucacucuc

SEQ ID NO: 1233922 - RNA, 29 nt, Human
ucucucuccucucucccgucucuuucucu

SEQ ID NO: 1233923 - RNA, 26 nt, Human
ucucucucuccucucucucucuuucu

SEQ ID NO: 1233924 - RNA, 18 nt, Human
ucucucucuuucucucuc

SEQ ID NO: 1233925 - RNA, 27 nt, Human
ucuucugcccuuuuccccuuaguuuua

SEQ ID NO: 1233926 - RNA, 18 nt, Human
ucuuucucucuccucucu

SEQ ID NO: 1233927 - RNA, 19 nt, Human
ucuuucucucucuccucuc

SEQ ID NO: 1233928 - RNA, 19 nt, Human
uggaacccucuggcucacc

SEQ ID NO: 1233929 - RNA, 23 nt, Human
uggaacccucuggcucaccgcau

SEQ ID NO: 1233930 - RNA, 23 nt, Human
uggccaggaaagcggacgcuugc

SEQ ID NO: 1233931 - RNA, 19 nt, Human
uucccucuucguccucgcc

SEQ ID NO: 1233932 - RNA, 19 nt, Human
aaccagcagcccaggucag

SEQ ID NO: 1233933 - RNA, 23 nt, Human
agacuacaucaaaaucugggcag

SEQ ID NO: 1233934 - RNA, 21 nt, Human
caaagagcugccuaaagaaac

SEQ ID NO: 1233935 - RNA, 19 nt, Human
cagggggcgcugcgcccgg

SEQ ID NO: 1233936 - RNA, 18 nt, Human
ccccaaucauuccuccuu

SEQ ID NO: 1233937 - RNA, 20 nt, Human
cccggcccgcccggccgcug

SEQ ID NO: 1233938 - RNA, 22 nt, Human
ccgcagcgcggcgccugcccgg

SEQ ID NO: 1233939 - RNA, 26 nt, Human
ccuccuuuucagggcaggagaggcag

SEQ ID NO: 1233940 - RNA, 22 nt, Human
ccugcgcgcgcccccgccgccc

SEQ ID NO: 1233941 - RNA, 19 nt, Human
cggcagggagagcaaaguu

SEQ ID NO: 1233942 - RNA, 21 nt, Human
cugcgcgcgcccccgccgccc

SEQ ID NO: 1233943 - RNA, 24 nt, Human
cugcgcgcgcccccgccgcccgcc

SEQ ID NO: 1233944 - RNA, 21 nt, Human
gcagagggaggacaaagagcu

SEQ ID NO: 1233945 - RNA, 20 nt, Human
gcaggagggagacccggccc

SEQ ID NO: 1233946 - RNA, 21 nt, Human
gccagccgcgccccgcagcgc

SEQ ID NO: 1233947 - RNA, 18 nt, Human
gcgcgcgcccccgccgcc

SEQ ID NO: 1233948 - RNA, 22 nt, Human
gcgcgcgcccccgccgcccgcc

SEQ ID NO: 1233949 - RNA, 18 nt, Human
ggcgcugcgcccggcugc

SEQ ID NO: 1233950 - RNA, 18 nt, Human
uaaaagaucacacaaaag

SEQ ID NO: 1233951 - RNA, 19 nt, Human
uagcuggagcaaacugcag

SEQ ID NO: 1233952 - RNA, 23 nt, Human
ucaggagcaccaccgaggcacgg

SEQ ID NO: 1233953 - RNA, 18 nt, Human
ucuucaggcccagggggc

SEQ ID NO: 1233954 - RNA, 24 nt, Human
uggagcaaacugcagagaucaaga

SEQ ID NO: 1233955 - RNA, 20 nt, Human
uucagggcaggagaggcaga

SEQ ID NO: 1233956 - RNA, 19 nt, Human
aaaaacacacagcacugaa

SEQ ID NO: 1233957 - RNA, 23 nt, Human
aaaauaaaaaaaguuaaaagccc

SEQ ID NO: 1233958 - RNA, 21 nt, Human
aaauaaccuggaacauuucac

SEQ ID NO: 1233959 - RNA, 20 nt, Human
aacauggugaaacccugucu

SEQ ID NO: 1233960 - RNA, 21 nt, Human
aacauggugaaacccugucuc

SEQ ID NO: 1233961 - RNA, 21 nt, Human
aagcaggagggacuuuucuag

SEQ ID NO: 1233962 - RNA, 25 nt, Human
aaggaaaaacacacagcacugaagg

SEQ ID NO: 1233963 - RNA, 18 nt, Human
aaguaacccuaaaaagga

SEQ ID NO: 1233964 - RNA, 30 nt, Human
aauaaauaaauaaaauaaaaaaaguuaaaa

SEQ ID NO: 1233965 - RNA, 24 nt, Human
aaucguuugaacccaggaggcaga

SEQ ID NO: 1233966 - RNA, 24 nt, Human
acagagugagacuccaucucaaaa

SEQ ID NO: 1233967 - RNA, 24 nt, Human
accaacauggugaaacccugucuc

SEQ ID NO: 1233968 - RNA, 19 nt, Human
accacagcacuuacuaccc

SEQ ID NO: 1233969 - RNA, 18 nt, Human
acccugucucuacuaaaa

SEQ ID NO: 1233970 - RNA, 23 nt, Human
acuaaaaauaccaaaaaaaaaau

SEQ ID NO: 1233971 - RNA, 19 nt, Human
acuccagccugggccacag

SEQ ID NO: 1233972 - RNA, 24 nt, Human
acuccagccugggccacagaguga

SEQ ID NO: 1233973 - RNA, 18 nt, Human
acugcacuccagccuggg

SEQ ID NO: 1233974 - RNA, 24 nt, Human
acugcacuccagccugggccacag

SEQ ID NO: 1233975 - RNA, 24 nt, Human
acuugaggucaggaguuugagacc

SEQ ID NO: 1233976 - RNA, 26 nt, Human
agaacauguuuauucagaugugccag

SEQ ID NO: 1233977 - RNA, 22 nt, Human
agaacgcacagcagcccgcagg

SEQ ID NO: 1233978 - RNA, 18 nt, Human
agacaccacggccugaag

SEQ ID NO: 1233979 - RNA, 20 nt, Human
agaggaugcagugagccgag

SEQ ID NO: 1233980 - RNA, 24 nt, Human
agaggaugcagugagccgagguug

SEQ ID NO: 1233981 - RNA, 23 nt, Human
agcaagaaaaaggucuggcccga

SEQ ID NO: 1233982 - RNA, 23 nt, Human
agcacuuugggaggcggaagugg

SEQ ID NO: 1233983 - RNA, 24 nt, Human
agccuaaccaacauggugaaaccc

SEQ ID NO: 1233984 - RNA, 24 nt, Human
agccugggccacagagugagacuc

SEQ ID NO: 1233985 - RNA, 22 nt, Human
aggaaaaacacacagcacugaa

SEQ ID NO: 1233986 - RNA, 22 nt, Human
aggacauuaaaaguuaaaagcc

SEQ ID NO: 1233987 - RNA, 21 nt, Human
aggcagaggaugcagugagcc

SEQ ID NO: 1233988 - RNA, 24 nt, Human
aggcagaggaugcagugagccgag

SEQ ID NO: 1233989 - RNA, 23 nt, Human
aggcaggacaaucguuugaaccc

SEQ ID NO: 1233990 - RNA, 24 nt, Human
aggcaggacaaucguuugaaccca

SEQ ID NO: 1233991 - RNA, 20 nt, Human
aggcugaggcaggacaaucg

SEQ ID NO: 1233992 - RNA, 24 nt, Human
aggcugaggcaggacaaucguuug

SEQ ID NO: 1233993 - RNA, 21 nt, Human
agggagaugcugaaagggccc

SEQ ID NO: 1233994 - RNA, 23 nt, Human
agguguuaaagguaaggucacuu

SEQ ID NO: 1233995 - RNA, 24 nt, Human
agguguuguggcaggcaccuguaa

SEQ ID NO: 1233996 - RNA, 24 nt, Human
auagaaacagcugcuggccaucag

SEQ ID NO: 1233997 - RNA, 24 nt, Human
aucacuugaggucaggaguuugag

SEQ ID NO: 1233998 - RNA, 22 nt, Human
augcagugagccgagguugugc

SEQ ID NO: 1233999 - RNA, 21 nt, Human
caaaaaaaaaaucagccaggu

SEQ ID NO: 1234000 - RNA, 20 nt, Human
caaaaguaacccuaaaaagg

SEQ ID NO: 1234001 - RNA, 24 nt, Human
caacauggugaaacccugucucua

SEQ ID NO: 1234002 - RNA, 19 nt, Human
caagggaacagccagccuu

SEQ ID NO: 1234003 - RNA, 24 nt, Human
cacaccuguaaucccagcacuuug

SEQ ID NO: 1234004 - RNA, 24 nt, Human
cacagagugagacuccaucucaaa

SEQ ID NO: 1234005 - RNA, 23 nt, Human
caccuguaaucccagcacuuugg

SEQ ID NO: 1234006 - RNA, 24 nt, Human
caccuguaaucccagcacuuuggg

SEQ ID NO: 1234007 - RNA, 23 nt, Human
caccuguaaucccagcuacucgg

SEQ ID NO: 1234008 - RNA, 24 nt, Human
caccuguaaucccagcuacucggg

SEQ ID NO: 1234009 - RNA, 19 nt, Human
cacucacaucuucccuucc

SEQ ID NO: 1234010 - RNA, 19 nt, Human
cacucaugaaagcaccccg

SEQ ID NO: 1234011 - RNA, 22 nt, Human
cacuccagccugggccacagag

SEQ ID NO: 1234012 - RNA, 23 nt, Human
cacuccagccugggccacagagu

SEQ ID NO: 1234013 - RNA, 24 nt, Human
cacuccagccugggccacagagug

SEQ ID NO: 1234014 - RNA, 18 nt, Human
cacugcacuccagccugg

SEQ ID NO: 1234015 - RNA, 19 nt, Human
cacugcacuccagccuggg

SEQ ID NO: 1234016 - RNA, 20 nt, Human
cacugcacuccagccugggc

SEQ ID NO: 1234017 - RNA, 24 nt, Human
cacugcacuccagccugggccaca

SEQ ID NO: 1234018 - RNA, 23 nt, Human
cacuugaggucaggaguuugaga

SEQ ID NO: 1234019 - RNA, 18 nt, Human
cagcacuuugggaggcgg

SEQ ID NO: 1234020 - RNA, 24 nt, Human
cagcuacucgggaggcugaggcag

SEQ ID NO: 1234021 - RNA, 21 nt, Human
caggaggcagaggaugcagug

SEQ ID NO: 1234022 - RNA, 18 nt, Human
caggaugggcccuggggc

SEQ ID NO: 1234023 - RNA, 18 nt, Human
cauggcuagcagaccuca

SEQ ID NO: 1234024 - RNA, 19 nt, Human
cauuaaaaguuaaaagccc

SEQ ID NO: 1234025 - RNA, 28 nt, Human
ccaaaccaagauacggaccacacucaug

SEQ ID NO: 1234026 - RNA, 22 nt, Human
ccaaccaaccccagucgugcca

SEQ ID NO: 1234027 - RNA, 22 nt, Human
ccacagagugagacuccaucuc

SEQ ID NO: 1234028 - RNA, 18 nt, Human
ccacagcacuuacuaccc

SEQ ID NO: 1234029 - RNA, 20 nt, Human
ccacugcacuccagccuggg

SEQ ID NO: 1234030 - RNA, 20 nt, Human
ccacugcacuccagccuggg

SEQ ID NO: 1234031 - RNA, 21 nt, Human
ccacugcacuccagccugggc

SEQ ID NO: 1234032 - RNA, 24 nt, Human
ccacugcacuccagccugggccac

SEQ ID NO: 1234033 - RNA, 22 nt, Human
cccaaccaaccccagucgugcu

SEQ ID NO: 1234034 - RNA, 22 nt, Human
cccgcagggagggcucagcccc

SEQ ID NO: 1234035 - RNA, 24 nt, Human
cccggccgggcauggcggcucaca

SEQ ID NO: 1234036 - RNA, 21 nt, Human
cccugagcugcaaauaagaac

SEQ ID NO: 1234037 - RNA, 22 nt, Human
ccuaaccaacauggugaaaccc

SEQ ID NO: 1234038 - RNA, 18 nt, Human
ccucuuccccgcucuccu

SEQ ID NO: 1234039 - RNA, 21 nt, Human
ccuguaaucccagcuacucgg

SEQ ID NO: 1234040 - RNA, 24 nt, Human
cgagguugugccacugcacuccag

SEQ ID NO: 1234041 - RNA, 26 nt, Human
cgcuaauccgggacccacagccacgc

SEQ ID NO: 1234042 - RNA, 24 nt, Human
cggaagugguggaucacuugaggu

SEQ ID NO: 1234043 - RNA, 22 nt, Human
cggcucacaccuguaaucccag

SEQ ID NO: 1234044 - RNA, 22 nt, Human
cucacaccuguaaucccagcac

SEQ ID NO: 1234045 - RNA, 24 nt, Human
cucacaccuguaaucccagcacuu

SEQ ID NO: 1234046 - RNA, 23 nt, Human
cucaucauacagaaauaugacaa

SEQ ID NO: 1234047 - RNA, 20 nt, Human
cuccucuuccccgcucuccu

SEQ ID NO: 1234048 - RNA, 28 nt, Human
cucuacuaaaaauaccaaaaaaaaaauc

SEQ ID NO: 1234049 - RNA, 19 nt, Human
cucuccucuccuccggucc

SEQ ID NO: 1234050 - RNA, 18 nt, Human
cugaagcugcucuccucu

SEQ ID NO: 1234051 - RNA, 21 nt, Human
cuguaaucccagcuacucggg

SEQ ID NO: 1234052 - RNA, 20 nt, Human
cugugcuguagcagaaguuu

SEQ ID NO: 1234053 - RNA, 24 nt, Human
cuuacuacccaaggacaggcugcu

SEQ ID NO: 1234054 - RNA, 21 nt, Human
cuuccaagcuggcuugccuaa

SEQ ID NO: 1234055 - RNA, 24 nt, Human
cuuccaaucuauauauuauacuuu

SEQ ID NO: 1234056 - RNA, 19 nt, Human
cuuggcacuggcgugcaua

SEQ ID NO: 1234057 - RNA, 19 nt, Human
gaaacccugucucuacuaa

SEQ ID NO: 1234058 - RNA, 18 nt, Human
gaacauguuuauucagau

SEQ ID NO: 1234059 - RNA, 18 nt, Human
gaacccaggaggcagagg

SEQ ID NO: 1234060 - RNA, 22 nt, Human
gaagugguggaucacuugaggu

SEQ ID NO: 1234061 - RNA, 24 nt, Human
gaucacuugaggucaggaguuuga

SEQ ID NO: 1234062 - RNA, 18 nt, Human
gcaagaaaaaggucuggc

SEQ ID NO: 1234063 - RNA, 22 nt, Human
gcacauggcuagcagaccucag

SEQ ID NO: 1234064 - RNA, 24 nt, Human
gcacuccagccugggccacagagu

SEQ ID NO: 1234065 - RNA, 23 nt, Human
gcacugaagggucucuggguggu

SEQ ID NO: 1234066 - RNA, 22 nt, Human
gcacugugccuuuucugugcug

SEQ ID NO: 1234067 - RNA, 19 nt, Human
gccacugcacuccagccug

SEQ ID NO: 1234068 - RNA, 22 nt, Human
gccacugcacuccagccugggc

SEQ ID NO: 1234069 - RNA, 18 nt, Human
ggagacaccacggccuga

SEQ ID NO: 1234070 - RNA, 22 nt, Human
ggaucacuugaggucaggaguu

SEQ ID NO: 1234071 - RNA, 20 nt, Human
ggaucgaccuggaagaggca

SEQ ID NO: 1234072 - RNA, 19 nt, Human
ggcaccuguaaucccagcu

SEQ ID NO: 1234073 - RNA, 23 nt, Human
ggcauggcggcucacaccuguaa

SEQ ID NO: 1234074 - RNA, 24 nt, Human
ggcggcucacaccuguaaucccag

SEQ ID NO: 1234075 - RNA, 23 nt, Human
ggcucacaccuguaaucccagca

SEQ ID NO: 1234076 - RNA, 18 nt, Human
gggcuggggaggugagac

SEQ ID NO: 1234077 - RNA, 19 nt, Human
ggucaggaguuugagacca

SEQ ID NO: 1234078 - RNA, 22 nt, Human
guggcaggcaccuguaauccca

SEQ ID NO: 1234079 - RNA, 24 nt, Human
uaaaaauaccaaaaaaaaaaucag

SEQ ID NO: 1234080 - RNA, 22 nt, Human
uaaaacaauuucuggugacuuc

SEQ ID NO: 1234081 - RNA, 24 nt, Human
uaaccaacauggugaaacccuguc

SEQ ID NO: 1234082 - RNA, 23 nt, Human
uaacugacccgaaguaacagaaa

SEQ ID NO: 1234083 - RNA, 21 nt, Human
uaacuuccaagcuggcuugcc

SEQ ID NO: 1234084 - RNA, 23 nt, Human
uaagaacacagacgugggagaca

SEQ ID NO: 1234085 - RNA, 26 nt, Human
uaagaacacagacgugggagacacca

SEQ ID NO: 1234086 - RNA, 18 nt, Human
uaagaacauguuuauucc

SEQ ID NO: 1234087 - RNA, 18 nt, Human
uaccugggaaugcaaacc

SEQ ID NO: 1234088 - RNA, 18 nt, Human
uaggccccaaccaacccc

SEQ ID NO: 1234089 - RNA, 20 nt, Human
uauaugacacacacauuaua

SEQ ID NO: 1234090 - RNA, 19 nt, Human
uaucuguauaugacacaca

SEQ ID NO: 1234091 - RNA, 25 nt, Human
ucagccagguguuguggcaggcacc

SEQ ID NO: 1234092 - RNA, 19 nt, Human
ucaggaugggcccuggggc

SEQ ID NO: 1234093 - RNA, 23 nt, Human
uccagccugggccacagagugag

SEQ ID NO: 1234094 - RNA, 24 nt, Human
uccagccugggccacagagugaga

SEQ ID NO: 1234095 - RNA, 21 nt, Human
uccuccugacuuccauuuccu

SEQ ID NO: 1234096 - RNA, 24 nt, Human
ucgggaggcugaggcaggacaauc

SEQ ID NO: 1234097 - RNA, 18 nt, Human
ucuaaacacacaacaaaa

SEQ ID NO: 1234098 - RNA, 22 nt, Human
ucuccucuccuccggucccgug

SEQ ID NO: 1234099 - RNA, 21 nt, Human
ugaaagcaccccguggcaggu

SEQ ID NO: 1234100 - RNA, 22 nt, Human
ugacaagaugaugaagucacaa

SEQ ID NO: 1234101 - RNA, 23 nt, Human
ugacaggggcagacugugaggga

SEQ ID NO: 1234102 - RNA, 18 nt, Human
ugacccgaaguaacagaa

SEQ ID NO: 1234103 - RNA, 23 nt, Human
ugagaccagccuaaccaacaugg

SEQ ID NO: 1234104 - RNA, 24 nt, Human
ugagaccagccuaaccaacauggu

SEQ ID NO: 1234105 - RNA, 22 nt, Human
ugagccgagguugugccacugc

SEQ ID NO: 1234106 - RNA, 24 nt, Human
ugaggcaggacaaucguuugaacc

SEQ ID NO: 1234107 - RNA, 25 nt, Human
ugaggcaggacaaucguuugaaccc

SEQ ID NO: 1234108 - RNA, 28 nt, Human
ugaggcaggacaaucguuugaacccccu

SEQ ID NO: 1234109 - RNA, 18 nt, Human
ugaggucaggaguuugag

SEQ ID NO: 1234110 - RNA, 18 nt, Human
ugcaaacccugagcugca

SEQ ID NO: 1234111 - RNA, 21 nt, Human
ugccgaggucucccucccuca

SEQ ID NO: 1234112 - RNA, 24 nt, Human
uggaacauuucacaguguacgaca

SEQ ID NO: 1234113 - RNA, 23 nt, Human
uggaucacuugaggucaggaguu

SEQ ID NO: 1234114 - RNA, 24 nt, Human
uggaucacuugaggucaggaguuu

SEQ ID NO: 1234115 - RNA, 26 nt, Human
uggaucacuugaggucaggaguuuga

SEQ ID NO: 1234116 - RNA, 19 nt, Human
uggcaaaggagcaagaaaa

SEQ ID NO: 1234117 - RNA, 26 nt, Human
uggcacuggcgugcauacugguuuua

SEQ ID NO: 1234118 - RNA, 24 nt, Human
uggcggcucacaccuguaauccca

SEQ ID NO: 1234119 - RNA, 18 nt, Human
ugggaggcggaaguggug

SEQ ID NO: 1234120 - RNA, 23 nt, Human
ugguggaucacuugaggucagga

SEQ ID NO: 1234121 - RNA, 24 nt, Human
uguggcaggcaccuguaaucccag

SEQ ID NO: 1234122 - RNA, 22 nt, Human
uuaaaagcccaacauagaaaca

SEQ ID NO: 1234123 - RNA, 23 nt, Human
uugugccacugcacuccagccug

SEQ ID NO: 1234124 - RNA, 18 nt, Human
uuugggaggcggaagugg

SEQ ID NO: 1234125 - RNA, 25 nt, Human
ucccggaaggucucuauuucuuucc

SEQ ID NO: 1234126 - RNA, 24 nt, Human
aaagugcugggauuacaggcguga

SEQ ID NO: 1234127 - RNA, 22 nt, Human
aacagccaacucuccuacauau

SEQ ID NO: 1234128 - RNA, 20 nt, Human
aacauggugaaacuccgucu

SEQ ID NO: 1234129 - RNA, 21 nt, Human
aacauggugaaacuccgucuc

SEQ ID NO: 1234130 - RNA, 22 nt, Human
aacuagaacccagcugacuucc

SEQ ID NO: 1234131 - RNA, 19 nt, Human
aagagaaugaggagaaggg

SEQ ID NO: 1234132 - RNA, 19 nt, Human
aagcaaaggugaaagcaga

SEQ ID NO: 1234133 - RNA, 21 nt, Human
aagcaaaggugaaagcagaaa

SEQ ID NO: 1234134 - RNA, 22 nt, Human
aagcaggagaaucacuugaacc

SEQ ID NO: 1234135 - RNA, 24 nt, Human
aagcaggagaaucacuugaaccug

SEQ ID NO: 1234136 - RNA, 25 nt, Human
aagcaggagaaucacuugaaccugg

SEQ ID NO: 1234137 - RNA, 21 nt, Human
aaggcccaggaaggccuccag

SEQ ID NO: 1234138 - RNA, 19 nt, Human
aagugcugggauuacaggc

SEQ ID NO: 1234139 - RNA, 19 nt, Human
aagugcugggauuacaggc

SEQ ID NO: 1234140 - RNA, 26 nt, Human
aagugcugggauuacaggcgugagcc

SEQ ID NO: 1234141 - RNA, 21 nt, Human
aauacuaaaggcaacugucac

SEQ ID NO: 1234142 - RNA, 24 nt, Human
aaucacuugaaccugggaggcaga

SEQ ID NO: 1234143 - RNA, 21 nt, Human
acagcacuucuagggucaccu

SEQ ID NO: 1234144 - RNA, 19 nt, Human
acauggugaaacuccgucu

SEQ ID NO: 1234145 - RNA, 21 nt, Human
acauugcacuucagccugggc

SEQ ID NO: 1234146 - RNA, 23 nt, Human
acauugcacuucagccugggcaa

SEQ ID NO: 1234147 - RNA, 24 nt, Human
acauugcacuucagccugggcaac

SEQ ID NO: 1234148 - RNA, 24 nt, Human
accaacauggugaaacuccgucuc

SEQ ID NO: 1234149 - RNA, 23 nt, Human
accagaguaaaaggaaaagacug

SEQ ID NO: 1234150 - RNA, 24 nt, Human
acuagaacccagcugacuuccccc

SEQ ID NO: 1234151 - RNA, 18 nt, Human
acucaacacagccauucc

SEQ ID NO: 1234152 - RNA, 18 nt, Human
acuccagcgccugcugug

SEQ ID NO: 1234153 - RNA, 18 nt, Human
acuccagcgccugcugug

SEQ ID NO: 1234154 - RNA, 24 nt, Human
acuccgucucuacuaaaaauacaa

SEQ ID NO: 1234155 - RNA, 21 nt, Human
acugcaagcucugccucccag

SEQ ID NO: 1234156 - RNA, 23 nt, Human
agaaacaaucucuauuuaagagc

SEQ ID NO: 1234157 - RNA, 18 nt, Human
agaaacuccaucucaaaa

SEQ ID NO: 1234158 - RNA, 21 nt, Human
agaacccagcugacuuccccc

SEQ ID NO: 1234159 - RNA, 24 nt, Human
agaacuuugggaggccgagguggg

SEQ ID NO: 1234160 - RNA, 22 nt, Human
agaaucacuugaaccugggagg

SEQ ID NO: 1234161 - RNA, 19 nt, Human
agacaguagcauacuuggc

SEQ ID NO: 1234162 - RNA, 24 nt, Human
agagguugcagugagccgagaucg

SEQ ID NO: 1234163 - RNA, 19 nt, Human
agcacgccuucccauccug

SEQ ID NO: 1234164 - RNA, 18 nt, Human
agccaggugugguggugc

SEQ ID NO: 1234165 - RNA, 22 nt, Human
agccugaccaacauggugaaac

SEQ ID NO: 1234166 - RNA, 20 nt, Human
aggaaggauuugggccucag

SEQ ID NO: 1234167 - RNA, 25 nt, Human
aggaaggccuccaggaaaaggcugc

SEQ ID NO: 1234168 - RNA, 22 nt, Human
aggagaagggagaguugacaag

SEQ ID NO: 1234169 - RNA, 21 nt, Human
aggcagagguugcagugagcc

SEQ ID NO: 1234170 - RNA, 24 nt, Human
aggcagagguugcagugagccgag

SEQ ID NO: 1234171 - RNA, 18 nt, Human
aggcaggacacagaggac

SEQ ID NO: 1234172 - RNA, 21 nt, Human
aggccgagguggggggaucac

SEQ ID NO: 1234173 - RNA, 22 nt, Human
aggccgagguggggggaucacu

SEQ ID NO: 1234174 - RNA, 25 nt, Human
aggcuggagugcaguggugcaaucu

SEQ ID NO: 1234175 - RNA, 24 nt, Human
aggggggccgggugugguggcuca

SEQ ID NO: 1234176 - RNA, 21 nt, Human
agguggggggaucacugaggu

SEQ ID NO: 1234177 - RNA, 21 nt, Human
aggugguguagccaccauacc

SEQ ID NO: 1234178 - RNA, 20 nt, Human
aguaaaaggaaaagacugga

SEQ ID NO: 1234179 - RNA, 20 nt, Human
agugcaguggugcaaucucg

SEQ ID NO: 1234180 - RNA, 24 nt, Human
agugcaguggugcaaucucggcuc

SEQ ID NO: 1234181 - RNA, 18 nt, Human
agugcugggauuacaggc

SEQ ID NO: 1234182 - RNA, 18 nt, Human
auaaaacacuguagcccc

SEQ ID NO: 1234183 - RNA, 18 nt, Human
auaaaacacuguagcccc

SEQ ID NO: 1234184 - RNA, 24 nt, Human
aucgcaacauugcacuucagccug

SEQ ID NO: 1234185 - RNA, 24 nt, Human
augauccgcccgccucggccuccc

SEQ ID NO: 1234186 - RNA, 18 nt, Human
augggguuucaccauguu

SEQ ID NO: 1234187 - RNA, 24 nt, Human
augggguuucaccauguuagccag

SEQ ID NO: 1234188 - RNA, 24 nt, Human
auugcacuucagccugggcaacaa

SEQ ID NO: 1234189 - RNA, 25 nt, Human
auugcacuucagccugggcaacaag

SEQ ID NO: 1234190 - RNA, 20 nt, Human
caaagcaggagaaucacuug

SEQ ID NO: 1234191 - RNA, 24 nt, Human
caaagcaggagaaucacuugaacc

SEQ ID NO: 1234192 - RNA, 24 nt, Human
caaagugcugggauuacaggcgug

SEQ ID NO: 1234193 - RNA, 24 nt, Human
caacauggugaaacuccgucucua

SEQ ID NO: 1234194 - RNA, 19 nt, Human
caagaaggugcuucaucuu

SEQ ID NO: 1234195 - RNA, 24 nt, Human
caagcacgccuucccauccugccc

SEQ ID NO: 1234196 - RNA, 19 nt, Human
caccacacccagccucuuc

SEQ ID NO: 1234197 - RNA, 18 nt, Human
caccauguuagccaggau

SEQ ID NO: 1234198 - RNA, 22 nt, Human
caccauguuagccaggaugguc

SEQ ID NO: 1234199 - RNA, 23 nt, Human
caccauguuagccaggauggucu

SEQ ID NO: 1234200 - RNA, 24 nt, Human
caccauguuagccaggauggucuu

SEQ ID NO: 1234201 - RNA, 18 nt, Human
cacccaccaccaugccug

SEQ ID NO: 1234202 - RNA, 18 nt, Human
caccccucuccuccccuu

SEQ ID NO: 1234203 - RNA, 18 nt, Human
caccccucuccuccccuu

SEQ ID NO: 1234204 - RNA, 22 nt, Human
cacgccauucuccugccucagc

SEQ ID NO: 1234205 - RNA, 24 nt, Human
cagaacuuugggaggccgaggugg

SEQ ID NO: 1234206 - RNA, 18 nt, Human
cagccugggcaacaagag

SEQ ID NO: 1234207 - RNA, 20 nt, Human
caggacuccagcgccugcug

SEQ ID NO: 1234208 - RNA, 24 nt, Human
caggaggccaaagcaggagaauca

SEQ ID NO: 1234209 - RNA, 19 nt, Human
caggauauucagaagugcu

SEQ ID NO: 1234210 - RNA, 21 nt, Human
caguagcauacuuggcccugg

SEQ ID NO: 1234211 - RNA, 19 nt, Human
cauaccugcaaucccagcu

SEQ ID NO: 1234212 - RNA, 21 nt, Human
caucaucauugagaucgggag

SEQ ID NO: 1234213 - RNA, 18 nt, Human
cauguuaaaucauuuccu

SEQ ID NO: 1234214 - RNA, 19 nt, Human
cauugcacuucagccuggg

SEQ ID NO: 1234215 - RNA, 19 nt, Human
cauugcacuucagccuggg

SEQ ID NO: 1234216 - RNA, 20 nt, Human
cauugcacuucagccugggc

SEQ ID NO: 1234217 - RNA, 21 nt, Human
cauugcacuucagccugggca

SEQ ID NO: 1234218 - RNA, 22 nt, Human
cauugcacuucagccugggcaa

SEQ ID NO: 1234219 - RNA, 24 nt, Human
cauugcacuucagccugggcaaca

SEQ ID NO: 1234220 - RNA, 22 nt, Human
ccaaagugcugggauuacaggc

SEQ ID NO: 1234221 - RNA, 22 nt, Human
ccaaagugcugggauuacaggc

SEQ ID NO: 1234222 - RNA, 24 nt, Human
ccaaagugcugggauuacaggcgu

SEQ ID NO: 1234223 - RNA, 22 nt, Human
ccagcgccugcugugguggggu

SEQ ID NO: 1234224 - RNA, 21 nt, Human
ccaggcacccaccaccaugcc

SEQ ID NO: 1234225 - RNA, 20 nt, Human
cccagguucacgccauucuc

SEQ ID NO: 1234226 - RNA, 21 nt, Human
cccauccugcccugccggaac

SEQ ID NO: 1234227 - RNA, 21 nt, Human
ccccacagccguucuuaccua

SEQ ID NO: 1234228 - RNA, 21 nt, Human
cccccacagccguucuuaccu

SEQ ID NO: 1234229 - RNA, 23 nt, Human
ccucagacccugguggucccagg

SEQ ID NO: 1234230 - RNA, 18 nt, Human
ccucaggauauucagaag

SEQ ID NO: 1234231 - RNA, 23 nt, Human
ccugaccaacauggugaaacucc

SEQ ID NO: 1234232 - RNA, 24 nt, Human
ccugaccaacauggugaaacuccg

SEQ ID NO: 1234233 - RNA, 21 nt, Human
ccugcaaucccagcuacucag

SEQ ID NO: 1234234 - RNA, 22 nt, Human
ccugccggaacaccccucuccu

SEQ ID NO: 1234235 - RNA, 23 nt, Human
ccugccucagccucccgaguagc

SEQ ID NO: 1234236 - RNA, 25 nt, Human
ccugggaggcagagguugcagugag

SEQ ID NO: 1234237 - RNA, 24 nt, Human
cgagaccagccugaccaacauggu

SEQ ID NO: 1234238 - RNA, 21 nt, Human
cgaggacuccaaauuuucugu

SEQ ID NO: 1234239 - RNA, 23 nt, Human
cgagguggggggaucacugaggu

SEQ ID NO: 1234240 - RNA, 25 nt, Human
cgagguggggggaucacugagguca

SEQ ID NO: 1234241 - RNA, 24 nt, Human
cgcccaggcuggagugcaguggug

SEQ ID NO: 1234242 - RNA, 21 nt, Human
cgcccugucuuuaugacaccu

SEQ ID NO: 1234243 - RNA, 24 nt, Human
cgccucggccucccaaagugcugg

SEQ ID NO: 1234244 - RNA, 25 nt, Human
cuagaacccagcugacuucccccac

SEQ ID NO: 1234245 - RNA, 20 nt, Human
cuaggcuacaaaccuguacu

SEQ ID NO: 1234246 - RNA, 22 nt, Human
cucacacccauaaucccagaac

SEQ ID NO: 1234247 - RNA, 22 nt, Human
cucaccuaaauuucacaacaau

SEQ ID NO: 1234248 - RNA, 24 nt, Human
cucagccucccgaguagcugggac

SEQ ID NO: 1234249 - RNA, 24 nt, Human
cuccugaccucaugauccgcccgc

SEQ ID NO: 1234250 - RNA, 23 nt, Human
cucuccuccccuuagugaggaag

SEQ ID NO: 1234251 - RNA, 20 nt, Human
cucugucgcccaggcuggag

SEQ ID NO: 1234252 - RNA, 24 nt, Human
cugcaagcucugccucccagguuc

SEQ ID NO: 1234253 - RNA, 23 nt, Human
cugccucagccucccgaguagcu

SEQ ID NO: 1234254 - RNA, 22 nt, Human
cuguauuuuuaguagagauggg

SEQ ID NO: 1234255 - RNA, 23 nt, Human
cuguauuuuuaguagagaugggg

SEQ ID NO: 1234256 - RNA, 18 nt, Human
cuucaucuuauuuuagug

SEQ ID NO: 1234257 - RNA, 20 nt, Human
cuugaagucuccuugguggg

SEQ ID NO: 1234258 - RNA, 21 nt, Human
cuugcucugucgcccaggcug

SEQ ID NO: 1234259 - RNA, 21 nt, Human
cuuugggaggccgaggugggg

SEQ ID NO: 1234260 - RNA, 24 nt, Human
gaaaaauuucaaaacacuuugcaa

SEQ ID NO: 1234261 - RNA, 20 nt, Human
gaaauccgagaacacucuuc

SEQ ID NO: 1234262 - RNA, 21 nt, Human
gaaggggggccggguguggug

SEQ ID NO: 1234263 - RNA, 22 nt, Human
gaccucaugauccgcccgccuc

SEQ ID NO: 1234264 - RNA, 26 nt, Human
gacuccagcgccugcugugguggggu

SEQ ID NO: 1234265 - RNA, 22 nt, Human
gacuccaggcacccaccaccau

SEQ ID NO: 1234266 - RNA, 21 nt, Human
gagauggagucuugcucuguc

SEQ ID NO: 1234267 - RNA, 18 nt, Human
gagaugggguuucaccau

SEQ ID NO: 1234268 - RNA, 24 nt, Human
gagaugggguuucaccauguuagc

SEQ ID NO: 1234269 - RNA, 19 nt, Human
gaggacuccaaauuuucug

SEQ ID NO: 1234270 - RNA, 20 nt, Human
gaguaaaaggaaaagacugg

SEQ ID NO: 1234271 - RNA, 20 nt, Human
gaguagcugggacuccaggc

SEQ ID NO: 1234272 - RNA, 18 nt, Human
gagugcugacuuccucuc

SEQ ID NO: 1234273 - RNA, 23 nt, Human
gaucacugaggucagaaguucga

SEQ ID NO: 1234274 - RNA, 18 nt, Human
gauuacaggcgugagcca

SEQ ID NO: 1234275 - RNA, 21 nt, Human
gauuacaggcgugagccacca

SEQ ID NO: 1234276 - RNA, 22 nt, Human
gauuacaggcgugagccaccac

SEQ ID NO: 1234277 - RNA, 19 nt, Human
gcccaggcuggagugcagu

SEQ ID NO: 1234278 - RNA, 20 nt, Human
gcccaggcuggagugcagug

SEQ ID NO: 1234279 - RNA, 23 nt, Human
gcccaggcuggagugcaguggug

SEQ ID NO: 1234280 - RNA, 22 nt, Human
gcccuggguuugacauaaaacu

SEQ ID NO: 1234281 - RNA, 25 nt, Human
gccucccagguucacgccauucucc

SEQ ID NO: 1234282 - RNA, 25 nt, Human
gcucugucgcccaggcuggagugca

SEQ ID NO: 1234283 - RNA, 21 nt, Human
gcuuggggagauaaagaaggc

SEQ ID NO: 1234284 - RNA, 21 nt, Human
ggacuccuaggcuacaaaccu

SEQ ID NO: 1234285 - RNA, 24 nt, Human
ggauggucuugaucuccugaccuc

SEQ ID NO: 1234286 - RNA, 19 nt, Human
ggauuacaggcgugagcca

SEQ ID NO: 1234287 - RNA, 21 nt, Human
ggccgggugugguggcucaca

SEQ ID NO: 1234288 - RNA, 22 nt, Human
gggggccgggugugguggcuca

SEQ ID NO: 1234289 - RNA, 18 nt, Human
gggguuucaccauguuag

SEQ ID NO: 1234290 - RNA, 22 nt, Human
gggguuucaccauguuagccag

SEQ ID NO: 1234291 - RNA, 24 nt, Human
gguggcucacacccauaaucccag

SEQ ID NO: 1234292 - RNA, 19 nt, Human
ggugggggcgcggcagagc

SEQ ID NO: 1234293 - RNA, 23 nt, Human
ggugugguggcucacacccauaa

SEQ ID NO: 1234294 - RNA, 24 nt, Human
gguuucaccauguuagccaggaug

SEQ ID NO: 1234295 - RNA, 23 nt, Human
guagagaugggguuucaccaugu

SEQ ID NO: 1234296 - RNA, 20 nt, Human
gucaguuguccauauggcuc

SEQ ID NO: 1234297 - RNA, 21 nt, Human
gugaaacuccgucucuacuaa

SEQ ID NO: 1234298 - RNA, 24 nt, Human
gugagccaccacacccagccucuu

SEQ ID NO: 1234299 - RNA, 18 nt, Human
guggugggguaggguggg

SEQ ID NO: 1234300 - RNA, 19 nt, Human
guugcagugagccgagauc

SEQ ID NO: 1234301 - RNA, 20 nt, Human
uaaaaauacaaaauuagcca

SEQ ID NO: 1234302 - RNA, 22 nt, Human
uaaaaauacaaaauuagccagg

SEQ ID NO: 1234303 - RNA, 23 nt, Human
uaaaaauacaaaauuagccaggu

SEQ ID NO: 1234304 - RNA, 22 nt, Human
uaaagagggugaagcgaaaaug

SEQ ID NO: 1234305 - RNA, 19 nt, Human
uaaggugaaauccgagaac

SEQ ID NO: 1234306 - RNA, 24 nt, Human
uaauuuagaaacaaucucuauuua

SEQ ID NO: 1234307 - RNA, 28 nt, Human
uaauuuuuuucuguauuuuuaguagaga

SEQ ID NO: 1234308 - RNA, 23 nt, Human
uacacaaaccuaggugguguagc

SEQ ID NO: 1234309 - RNA, 24 nt, Human
uacaggcgugagccaccacaccca

SEQ ID NO: 1234310 - RNA, 24 nt, Human
uaccugcaaucccagcuacucagg

SEQ ID NO: 1234311 - RNA, 22 nt, Human
uagagaugggguuucaccaugu

SEQ ID NO: 1234312 - RNA, 20 nt, Human
uagcaugauccccaguuuaa

SEQ ID NO: 1234313 - RNA, 22 nt, Human
uagccccaaguuaaguucccuc

SEQ ID NO: 1234314 - RNA, 24 nt, Human
uaguagagaugggguuucaccaug

SEQ ID NO: 1234315 - RNA, 26 nt, Human
uaguagagaugggguuucaccauguu

SEQ ID NO: 1234316 - RNA, 23 nt, Human
uauucacucaccuaaauuucaca

SEQ ID NO: 1234317 - RNA, 23 nt, Human
ucaacacagccauuccccuagaa

SEQ ID NO: 1234318 - RNA, 24 nt, Human
ucaccauguuagccaggauggucu

SEQ ID NO: 1234319 - RNA, 21 nt, Human
ucaccuguguucagagaucua

SEQ ID NO: 1234320 - RNA, 25 nt, Human
ucacuaggugauuucaccauugugc

SEQ ID NO: 1234321 - RNA, 18 nt, Human
ucacugcaagcucugccu

SEQ ID NO: 1234322 - RNA, 18 nt, Human
ucacugcaagcucugccu

SEQ ID NO: 1234323 - RNA, 19 nt, Human
ucacugcaagcucugccuc

SEQ ID NO: 1234324 - RNA, 24 nt, Human
ucacugcaagcucugccucccagg

SEQ ID NO: 1234325 - RNA, 25 nt, Human
ucacuugaaccugggaggcagaggu

SEQ ID NO: 1234326 - RNA, 23 nt, Human
ucagccucccgaguagcugggac

SEQ ID NO: 1234327 - RNA, 21 nt, Human
ucaggcaggacacagaggaca

SEQ ID NO: 1234328 - RNA, 23 nt, Human
ucauauauucacucaccuaaaag

SEQ ID NO: 1234329 - RNA, 24 nt, Human
ucccaaagugcugggauuacaggc

SEQ ID NO: 1234330 - RNA, 21 nt, Human
ucccaaggaagucaccggacc

SEQ ID NO: 1234331 - RNA, 22 nt, Human
ucccaaggaagucaccggaccu

SEQ ID NO: 1234332 - RNA, 18 nt, Human
ucccaggacuccagcgcc

SEQ ID NO: 1234333 - RNA, 19 nt, Human
ucccagguucacgccauuc

SEQ ID NO: 1234334 - RNA, 21 nt, Human
ucccagguucacgccauucuc

SEQ ID NO: 1234335 - RNA, 24 nt, Human
ucccagguucacgccauucuccug

SEQ ID NO: 1234336 - RNA, 19 nt, Human
ucccauccugcccugccgg

SEQ ID NO: 1234337 - RNA, 23 nt, Human
uccccaguuuaaaggugaggaaa

SEQ ID NO: 1234338 - RNA, 19 nt, Human
uccccuagaaguuacagca

SEQ ID NO: 1234339 - RNA, 24 nt, Human
ucccgaguagcugggacuccaggc

SEQ ID NO: 1234340 - RNA, 20 nt, Human
ucgcaacauugcacuucagc

SEQ ID NO: 1234341 - RNA, 24 nt, Human
ucgcccaggcuggagugcaguggu

SEQ ID NO: 1234342 - RNA, 18 nt, Human
ucggccucccaaagugcu

SEQ ID NO: 1234343 - RNA, 23 nt, Human
ucuacauauagaaagcuagggac

SEQ ID NO: 1234344 - RNA, 24 nt, Human
ucuccugccucagccucccgagua

SEQ ID NO: 1234345 - RNA, 22 nt, Human
ucucuacuaaaaauacaaaauu

SEQ ID NO: 1234346 - RNA, 24 nt, Human
ucugucgcccaggcuggagugcag

SEQ ID NO: 1234347 - RNA, 23 nt, Human
ucuugcucugucgcccaggcugg

SEQ ID NO: 1234348 - RNA, 24 nt, Human
ucuugcucugucgcccaggcugga

SEQ ID NO: 1234349 - RNA, 20 nt, Human
ugaaaugcuaacuagcauga

SEQ ID NO: 1234350 - RNA, 24 nt, Human
ugaaccugggaggcagagguugca

SEQ ID NO: 1234351 - RNA, 24 nt, Human
ugaccaacauggugaaacuccguc

SEQ ID NO: 1234352 - RNA, 20 nt, Human
ugagaaaugugucacuaggg

SEQ ID NO: 1234353 - RNA, 20 nt, Human
ugaggaaauugagucacagg

SEQ ID NO: 1234354 - RNA, 20 nt, Human
ugaggagaagggagaguuga

SEQ ID NO: 1234355 - RNA, 20 nt, Human
ugcacacauggagaagaggc

SEQ ID NO: 1234356 - RNA, 19 nt, Human
ugcacuucagccugggcaa

SEQ ID NO: 1234357 - RNA, 22 nt, Human
ugcaguggugcaaucucggcuc

SEQ ID NO: 1234358 - RNA, 24 nt, Human
ugccucagccucccgaguagcugg

SEQ ID NO: 1234359 - RNA, 19 nt, Human
ugccucccagguucacgcc

SEQ ID NO: 1234360 - RNA, 24 nt, Human
ugcugggauuacaggcgugagcca

SEQ ID NO: 1234361 - RNA, 23 nt, Human
uggaagagaguccaagauucacc

SEQ ID NO: 1234362 - RNA, 23 nt, Human
uggagucuugcucugucgcccag

SEQ ID NO: 1234363 - RNA, 24 nt, Human
uggagucuugcucugucgcccagg

SEQ ID NO: 1234364 - RNA, 23 nt, Human
uggagugcaguggugcaaucucg

SEQ ID NO: 1234365 - RNA, 24 nt, Human
uggagugcaguggugcaaucucgg

SEQ ID NO: 1234366 - RNA, 18 nt, Human
ugggaggaggcugaacug

SEQ ID NO: 1234367 - RNA, 24 nt, Human
ugggaggcagagguugcagugagc

SEQ ID NO: 1234368 - RNA, 24 nt, Human
ugggaggccgagguggggggauca

SEQ ID NO: 1234369 - RNA, 18 nt, Human
ugggauuacaggcgugag

SEQ ID NO: 1234370 - RNA, 19 nt, Human
ugggauuacaggcgugagc

SEQ ID NO: 1234371 - RNA, 22 nt, Human
ugggauuacaggcgugagccac

SEQ ID NO: 1234372 - RNA, 23 nt, Human
ugggauuacaggcgugagccacc

SEQ ID NO: 1234373 - RNA, 24 nt, Human
ugggauuacaggcgugagccacca

SEQ ID NO: 1234374 - RNA, 27 nt, Human
ugggccucagacccugguggucccagg

SEQ ID NO: 1234375 - RNA, 23 nt, Human
uggggugggggcgcggcagagcu

SEQ ID NO: 1234376 - RNA, 24 nt, Human
ugggguuucaccauguuagccagg

SEQ ID NO: 1234377 - RNA, 22 nt, Human
uggugcauaccugcaaucccag

SEQ ID NO: 1234378 - RNA, 21 nt, Human
uguaacuagaacccagcugac

SEQ ID NO: 1234379 - RNA, 24 nt, Human
uguucagagaucuacccugugugc

SEQ ID NO: 1234380 - RNA, 18 nt, Human
uuaguagagaugggguuu

SEQ ID NO: 1234381 - RNA, 22 nt, Human
uuaguagagaugggguuucacc

SEQ ID NO: 1234382 - RNA, 24 nt, Human
uuaguagagaugggguuucaccau

SEQ ID NO: 1234383 - RNA, 23 nt, Human
uucaucuuauuuuagugcuuggc

SEQ ID NO: 1234384 - RNA, 24 nt, Human
uugaaccugggaggcagagguugc

SEQ ID NO: 1234385 - RNA, 22 nt, Human
uugagucacaggcagaauaacu

SEQ ID NO: 1234386 - RNA, 18 nt, Human
uugcagugagccgagauc

SEQ ID NO: 1234387 - RNA, 19 nt, Human
uugcagugagccgagaucg

SEQ ID NO: 1234388 - RNA, 20 nt, Human
uugcagugagccgagaucgc

SEQ ID NO: 1234389 - RNA, 24 nt, Human
uugcucugucgcccaggcuggagu

SEQ ID NO: 1234390 - RNA, 25 nt, Human
uugggaggccgagguggggggauca

SEQ ID NO: 1234391 - RNA, 25 nt, Human
uugggguaaaaguuaaauaaaacac

SEQ ID NO: 1234392 - RNA, 19 nt, Human
uuucaccauguuagccagg

SEQ ID NO: 1234393 - RNA, 20 nt, Human
uuucaccauguuagccagga

SEQ ID NO: 1234394 - RNA, 24 nt, Human
uuucauaugcagucaugcauugcu

SEQ ID NO: 1234395 - RNA, 21 nt, Human
uuucuguauuuuuaguagaga

SEQ ID NO: 1234396 - RNA, 21 nt, Human
uuuucuguauuuuuaguagag

SEQ ID NO: 1234397 - RNA, 24 nt, Human
uuuucuguauuuuuaguagagaug

SEQ ID NO: 1234398 - RNA, 24 nt, Human
uuuuuaguagagaugggguuucac

SEQ ID NO: 1234399 - RNA, 19 nt, Human
aaaaacuccgagcgggauu

SEQ ID NO: 1234400 - RNA, 20 nt, Human
aaucuggccacccagauuca

SEQ ID NO: 1234401 - RNA, 24 nt, Human
agagcgccgggcagaacuuccucc

SEQ ID NO: 1234402 - RNA, 22 nt, Human
agccccagcacacccccugccc

SEQ ID NO: 1234403 - RNA, 23 nt, Human
aggaacucccuuaccucuauauc

SEQ ID NO: 1234404 - RNA, 23 nt, Human
aggaacucccuuaccucuauauc

SEQ ID NO: 1234405 - RNA, 23 nt, Human
aggaacucccuuaccucuauauc

SEQ ID NO: 1234406 - RNA, 24 nt, Human
aggccauggccucucuugacacca

SEQ ID NO: 1234407 - RNA, 20 nt, Human
caacaauauaaccagggagg

SEQ ID NO: 1234408 - RNA, 21 nt, Human
cacagccccagcacacccccu

SEQ ID NO: 1234409 - RNA, 18 nt, Human
caccaucccccacccccu

SEQ ID NO: 1234410 - RNA, 26 nt, Human
cacccccugcccucaggggccccaag

SEQ ID NO: 1234411 - RNA, 18 nt, Human
cagcacacccccugcccu

SEQ ID NO: 1234412 - RNA, 18 nt, Human
cagccccagggcccuccg

SEQ ID NO: 1234413 - RNA, 20 nt, Human
cagggcccuccgccuugggg

SEQ ID NO: 1234414 - RNA, 22 nt, Human
cagguuaggccccuaccaucga

SEQ ID NO: 1234415 - RNA, 22 nt, Human
caguguucugggaggaagaagg

SEQ ID NO: 1234416 - RNA, 20 nt, Human
cauuacaagccacagcccca

SEQ ID NO: 1234417 - RNA, 23 nt, Human
cauuacaagccacagccccagca

SEQ ID NO: 1234418 - RNA, 20 nt, Human
ccacacuuccucugagaauc

SEQ ID NO: 1234419 - RNA, 18 nt, Human
ccaccaucccccaccccc

SEQ ID NO: 1234420 - RNA, 21 nt, Human
ccagcgccugaggagcgaaga

SEQ ID NO: 1234421 - RNA, 22 nt, Human
ccaggaguccagccccagggcc

SEQ ID NO: 1234422 - RNA, 18 nt, Human
ccagggaggcaccggcgg

SEQ ID NO: 1234423 - RNA, 26 nt, Human
ccauggccucucuugacaccaccucc

SEQ ID NO: 1234424 - RNA, 23 nt, Human
cccaccaucccccacccccucuu

SEQ ID NO: 1234425 - RNA, 18 nt, Human
cccagcacacccccugcc

SEQ ID NO: 1234426 - RNA, 18 nt, Human
ccccagcacacccccugc

SEQ ID NO: 1234427 - RNA, 22 nt, Human
ccccagggcccuccgccuuggg

SEQ ID NO: 1234428 - RNA, 20 nt, Human
cccccacccccucuugaucc

SEQ ID NO: 1234429 - RNA, 19 nt, Human
ccccuccccugccuuuccc

SEQ ID NO: 1234430 - RNA, 19 nt, Human
cccugggcgggguuuccag

SEQ ID NO: 1234431 - RNA, 20 nt, Human
ccgcgcucccuccucgacug

SEQ ID NO: 1234432 - RNA, 19 nt, Human
ccggagaggcugcgcggaa

SEQ ID NO: 1234433 - RNA, 19 nt, Human
ccucccaccaucccccacc

SEQ ID NO: 1234434 - RNA, 20 nt, Human
ccucgcccugaucugagccu

SEQ ID NO: 1234435 - RNA, 18 nt, Human
ccucucuggacaagcagc

SEQ ID NO: 1234436 - RNA, 22 nt, Human
ccucugagaaucugugugucug

SEQ ID NO: 1234437 - RNA, 25 nt, Human
ccucugggcuuccagggagcuuugg

SEQ ID NO: 1234438 - RNA, 19 nt, Human
ccuggcuuccuguccccuc

SEQ ID NO: 1234439 - RNA, 20 nt, Human
ccuuccccgacccucggggc

SEQ ID NO: 1234440 - RNA, 24 nt, Human
cgccgggcagaacuuccucccgga

SEQ ID NO: 1234441 - RNA, 20 nt, Human
cgcgguuggggagagggagc

SEQ ID NO: 1234442 - RNA, 18 nt, Human
cggcugggcgggccucag

SEQ ID NO: 1234443 - RNA, 19 nt, Human
cgguguccuggcuuccugu

SEQ ID NO: 1234444 - RNA, 21 nt, Human
cgguuccuuccccgacccucg

SEQ ID NO: 1234445 - RNA, 25 nt, Human
cucagaacaaccuccaggaguccag

SEQ ID NO: 1234446 - RNA, 30 nt, Human
cuccucgacugugcggcucccgcgcugccu

SEQ ID NO: 1234447 - RNA, 18 nt, Human
cucugcuaggcauugccc

SEQ ID NO: 1234448 - RNA, 21 nt, Human
cucugggcuuccagggagcuu

SEQ ID NO: 1234449 - RNA, 21 nt, Human
cucuugacaccaccuccuggg

SEQ ID NO: 1234450 - RNA, 18 nt, Human
cugagccuugguggcacc

SEQ ID NO: 1234451 - RNA, 18 nt, Human
cuugacaccaccuccugg

SEQ ID NO: 1234452 - RNA, 22 nt, Human
gaaaaacuccgagcgggauucc

SEQ ID NO: 1234453 - RNA, 20 nt, Human
gaagacgccacccccucccc

SEQ ID NO: 1234454 - RNA, 20 nt, Human
gagccggcgguggcugcagg

SEQ ID NO: 1234455 - RNA, 19 nt, Human
gagccugcacucacuccag

SEQ ID NO: 1234456 - RNA, 20 nt, Human
gaggaagaagggcccgcauc

SEQ ID NO: 1234457 - RNA, 24 nt, Human
gauugcccucccaccaucccccac

SEQ ID NO: 1234458 - RNA, 19 nt, Human
gcaccuggcugucuccagg

SEQ ID NO: 1234459 - RNA, 23 nt, Human
gcccugggcgggguuuccagggg

SEQ ID NO: 1234460 - RNA, 22 nt, Human
gccucucuggacaagcagccuc

SEQ ID NO: 1234461 - RNA, 20 nt, Human
gccuuucccggagcagcccg

SEQ ID NO: 1234462 - RNA, 19 nt, Human
gcgggccucagggagccca

SEQ ID NO: 1234463 - RNA, 23 nt, Human
gcggggcugagauggugggacug

SEQ ID NO: 1234464 - RNA, 19 nt, Human
gcucgaugucucgggcugg

SEQ ID NO: 1234465 - RNA, 19 nt, Human
gcugggugggcggagccgg

SEQ ID NO: 1234466 - RNA, 19 nt, Human
ggacuggggagggcgggag

SEQ ID NO: 1234467 - RNA, 25 nt, Human
ggacuggggcugggcugcgguugcg

SEQ ID NO: 1234468 - RNA, 20 nt, Human
ggcauugcccaccugugagu

SEQ ID NO: 1234469 - RNA, 21 nt, Human
ggccgggccagcgccugagga

SEQ ID NO: 1234470 - RNA, 20 nt, Human
ggcggagccggcgguggcug

SEQ ID NO: 1234471 - RNA, 18 nt, Human
gggauccugggccgcacc

SEQ ID NO: 1234472 - RNA, 28 nt, Human
gggcagaacuuccucccggacuggggcu

SEQ ID NO: 1234473 - RNA, 22 nt, Human
gggccgggccagcgccugagga

SEQ ID NO: 1234474 - RNA, 22 nt, Human
gguggcugcagguuaggccccu

SEQ ID NO: 1234475 - RNA, 23 nt, Human
guccuggcuuccuguccccucug

SEQ ID NO: 1234476 - RNA, 24 nt, Human
uacaagccacagccccagcacacc

SEQ ID NO: 1234477 - RNA, 20 nt, Human
uaguaaguaaggaacucccu

SEQ ID NO: 1234478 - RNA, 20 nt, Human
uaguaaguaaggaacucccu

SEQ ID NO: 1234479 - RNA, 24 nt, Human
uccacacuuccucugagaaucugu

SEQ ID NO: 1234480 - RNA, 19 nt, Human
uccagggagcuuuggagcu

SEQ ID NO: 1234481 - RNA, 22 nt, Human
ucccaccaucccccacccccuc

SEQ ID NO: 1234482 - RNA, 21 nt, Human
uccgccuugggggucuucugu

SEQ ID NO: 1234483 - RNA, 19 nt, Human
uccucccggacuggggcug

SEQ ID NO: 1234484 - RNA, 21 nt, Human
ucucuugacaccaccuccugg

SEQ ID NO: 1234485 - RNA, 19 nt, Human
ucuugacaccaccuccugg

SEQ ID NO: 1234486 - RNA, 21 nt, Human
ugagauggugggacuggggag

SEQ ID NO: 1234487 - RNA, 18 nt, Human
ugaucugagccugcacuc

SEQ ID NO: 1234488 - RNA, 22 nt, Human
ugcggggcugagauggugggac

SEQ ID NO: 1234489 - RNA, 24 nt, Human
uggcugucuccagggagaaagagg

SEQ ID NO: 1234490 - RNA, 25 nt, Human
ugggaagcugaaucuggccacccag

SEQ ID NO: 1234491 - RNA, 27 nt, Human
ugggacuggggagggcgggagccuccc

SEQ ID NO: 1234492 - RNA, 19 nt, Human
ugggaggaagaagggcccg

SEQ ID NO: 1234493 - RNA, 23 nt, Human
ugggccgcaccuggcugucucca

SEQ ID NO: 1234494 - RNA, 23 nt, Human
ugggcggagccggcgguggcugc

SEQ ID NO: 1234495 - RNA, 21 nt, Human
ugucugagccuugguggcacc

SEQ ID NO: 1234496 - RNA, 18 nt, Human
ugugccuguggaccuggc

SEQ ID NO: 1234497 - RNA, 20 nt, Human
ugugcggcucccgcgcugcc

SEQ ID NO: 1234498 - RNA, 21 nt, Human
ugugugccaagagcuggcuga

SEQ ID NO: 1234499 - RNA, 21 nt, Human
uucugggaggaagaagggccc

SEQ ID NO: 1234500 - RNA, 21 nt, Human
aaagccccaggucauuuccag

SEQ ID NO: 1234501 - RNA, 21 nt, Human
agagcucccugagccugagca

SEQ ID NO: 1234502 - RNA, 19 nt, Human
agaguauuuauuuggccuu

SEQ ID NO: 1234503 - RNA, 23 nt, Human
agccaaaagcuucacucaauguu

SEQ ID NO: 1234504 - RNA, 21 nt, Human
agcccugggaagguuuugggg

SEQ ID NO: 1234505 - RNA, 21 nt, Human
aggcaguuucuucagccgccu

SEQ ID NO: 1234506 - RNA, 23 nt, Human
aucaccucucuggcucuggauuc

SEQ ID NO: 1234507 - RNA, 24 nt, Human
aucaccucucuggcucuggauucc

SEQ ID NO: 1234508 - RNA, 27 nt, Human
aucaccucucuggcucuggauuccuac

SEQ ID NO: 1234509 - RNA, 24 nt, Human
caccaauaucaccucucuggcucu

SEQ ID NO: 1234510 - RNA, 25 nt, Human
caccuggagagucuuccugcagggg

SEQ ID NO: 1234511 - RNA, 22 nt, Human
cagggccaaccccagggcugga

SEQ ID NO: 1234512 - RNA, 23 nt, Human
cccugagccugagcagagggccc

SEQ ID NO: 1234513 - RNA, 23 nt, Human
ccugcagggccaaccccagggcu

SEQ ID NO: 1234514 - RNA, 21 nt, Human
cucauaauggccacccccucc

SEQ ID NO: 1234515 - RNA, 19 nt, Human
cugagccugagcagagggc

SEQ ID NO: 1234516 - RNA, 21 nt, Human
cugcagggccaaccccagggc

SEQ ID NO: 1234517 - RNA, 20 nt, Human
cuggcucuggauuccuaccu

SEQ ID NO: 1234518 - RNA, 19 nt, Human
cuguggccggagcacugcc

SEQ ID NO: 1234519 - RNA, 24 nt, Human
gggacagagcccugggaagguuuu

SEQ ID NO: 1234520 - RNA, 18 nt, Human
uacagccaaaagcuucac

SEQ ID NO: 1234521 - RNA, 26 nt, Human
uacccugccauccuagccauuagugg

SEQ ID NO: 1234522 - RNA, 23 nt, Human
ucaaaaagccccaggucauuucc

SEQ ID NO: 1234523 - RNA, 18 nt, Human
ucccugagccugagcaga

SEQ ID NO: 1234524 - RNA, 20 nt, Human
ucucuggcucuggauuccua

SEQ ID NO: 1234525 - RNA, 23 nt, Human
ucuuccugcagggccaaccccag

SEQ ID NO: 1234526 - RNA, 18 nt, Human
ugaaaugggaacuuccuu

SEQ ID NO: 1234527 - RNA, 20 nt, Human
ugaaaugggaacuuccuuua

SEQ ID NO: 1234528 - RNA, 19 nt, Human
ugcaauugguguuuucagc

SEQ ID NO: 1234529 - RNA, 26 nt, Human
ugcaccaauaucaccucucuggcucu

SEQ ID NO: 1234530 - RNA, 18 nt, Human
ugcagggccaaccccagg

SEQ ID NO: 1234531 - RNA, 23 nt, Human
uggccacccccuccccacugccc

SEQ ID NO: 1234532 - RNA, 21 nt, Human
uggccggagcacugccaacaa

SEQ ID NO: 1234533 - RNA, 23 nt, Human
uggcucauagggaauuaaggguc

SEQ ID NO: 1234534 - RNA, 19 nt, Human
uggcucuggauuccuaccu

SEQ ID NO: 1234535 - RNA, 30 nt, Human
ugggaagguuuuggggguagagcccagggg

SEQ ID NO: 1234536 - RNA, 22 nt, Human
ugucagagggccccuguccuag

SEQ ID NO: 1234537 - RNA, 18 nt, Human
uuagaaugugcccuaccc

SEQ ID NO: 1234538 - RNA, 19 nt, Human
uucagccgccuacccugcc

SEQ ID NO: 1234539 - RNA, 18 nt, Human
uuuauuuggccuucugcc

SEQ ID NO: 1234540 - RNA, 20 nt, Human
aacccccuccccuggcucca

SEQ ID NO: 1234541 - RNA, 18 nt, Human
aaggaccccaagaccauc

SEQ ID NO: 1234542 - RNA, 19 nt, Human
acccccuccccuggcucca

SEQ ID NO: 1234543 - RNA, 18 nt, Human
cacagccucacuucuccc

SEQ ID NO: 1234544 - RNA, 23 nt, Human
cacagcucauacauccaaagcac

SEQ ID NO: 1234545 - RNA, 18 nt, Human
cacaguggaaggcagggc

SEQ ID NO: 1234546 - RNA, 22 nt, Human
cagccucacuucucccaccugc

SEQ ID NO: 1234547 - RNA, 23 nt, Human
cagucacagccucacuucuccca

SEQ ID NO: 1234548 - RNA, 18 nt, Human
caguggaaggcagggcug

SEQ ID NO: 1234549 - RNA, 21 nt, Human
cccaacccccuccccuggcuc

SEQ ID NO: 1234550 - RNA, 26 nt, Human
cccaacccccuccccuggcuccaacc

SEQ ID NO: 1234551 - RNA, 21 nt, Human
cccaagaccaucauccucgac

SEQ ID NO: 1234552 - RNA, 19 nt, Human
ccccaacccccuccccugg

SEQ ID NO: 1234553 - RNA, 18 nt, Human
ccccccaacccccucccc

SEQ ID NO: 1234554 - RNA, 24 nt, Human
ccccccaacccccuccccuggcuc

SEQ ID NO: 1234555 - RNA, 22 nt, Human
cccccuccccuggcuccaaccc

SEQ ID NO: 1234556 - RNA, 21 nt, Human
ccccuggcuccaaccccaguc

SEQ ID NO: 1234557 - RNA, 23 nt, Human
cccuccccuggcuccaaccccag

SEQ ID NO: 1234558 - RNA, 21 nt, Human
cccucugcugcccugcccccc

SEQ ID NO: 1234559 - RNA, 23 nt, Human
cccugccccccaacccccucccc

SEQ ID NO: 1234560 - RNA, 27 nt, Human
ccucccucugcugcccugccccccaac

SEQ ID NO: 1234561 - RNA, 20 nt, Human
ccucgacucuuccccuuccu

SEQ ID NO: 1234562 - RNA, 19 nt, Human
ccugccugcucucuucagg

SEQ ID NO: 1234563 - RNA, 24 nt, Human
ccuggcuccaaccccagucacagc

SEQ ID NO: 1234564 - RNA, 22 nt, Human
cuaauggacagacagacagacu

SEQ ID NO: 1234565 - RNA, 20 nt, Human
cuccaaccccagucacagcc

SEQ ID NO: 1234566 - RNA, 19 nt, Human
cuccccuggcuccaacccc

SEQ ID NO: 1234567 - RNA, 21 nt, Human
cuccccuggcuccaaccccag

SEQ ID NO: 1234568 - RNA, 18 nt, Human
cucccucugcugcccugc

SEQ ID NO: 1234569 - RNA, 19 nt, Human
cucuucagggucccucccu

SEQ ID NO: 1234570 - RNA, 23 nt, Human
cugcugcccugccccccaacccc

SEQ ID NO: 1234571 - RNA, 26 nt, Human
cugugcccugccugcucucuucaggg

SEQ ID NO: 1234572 - RNA, 23 nt, Human
cuuggccuuugcccuuaauuggc

SEQ ID NO: 1234573 - RNA, 19 nt, Human
gaacaagaugacaaagccc

SEQ ID NO: 1234574 - RNA, 20 nt, Human
gacaaagcccaaggacccca

SEQ ID NO: 1234575 - RNA, 20 nt, Human
gacugggaacaagaugacaa

SEQ ID NO: 1234576 - RNA, 21 nt, Human
gagcacaguggaaggcagggc

SEQ ID NO: 1234577 - RNA, 22 nt, Human
gaggugagucuuggccuuugcc

SEQ ID NO: 1234578 - RNA, 22 nt, Human
gcuaauggacagacagacagac

SEQ ID NO: 1234579 - RNA, 24 nt, Human
ggguaggcccugggaaggggaggu

SEQ ID NO: 1234580 - RNA, 20 nt, Human
guaggcccugggaaggggag

SEQ ID NO: 1234581 - RNA, 20 nt, Human
ucauccucgacucuuccccu

SEQ ID NO: 1234582 - RNA, 21 nt, Human
ucuccagccugcucugcugug

SEQ ID NO: 1234583 - RNA, 18 nt, Human
ugcccugccccccaaccc

SEQ ID NO: 1234584 - RNA, 19 nt, Human
ugcccugccccccaacccc

SEQ ID NO: 1234585 - RNA, 24 nt, Human
ugcccugccccccaacccccuccc

SEQ ID NO: 1234586 - RNA, 22 nt, Human
uggaaggcagggcugggccccu

SEQ ID NO: 1234587 - RNA, 24 nt, Human
uggacagacagacagacugggaac

SEQ ID NO: 1234588 - RNA, 21 nt, Human
uggcuccaaccccagucacag

SEQ ID NO: 1234589 - RNA, 24 nt, Human
uggcuccaaccccagucacagccu

SEQ ID NO: 1234590 - RNA, 25 nt, Human
ugggaacaagaugacaaagcccaag

SEQ ID NO: 1234591 - RNA, 22 nt, Human
ugggaaggggaggugagucuug

SEQ ID NO: 1234592 - RNA, 20 nt, Human
aaagugcugggauuacaggg

SEQ ID NO: 1234593 - RNA, 24 nt, Human
aaagugcugggauuacagggguga

SEQ ID NO: 1234594 - RNA, 20 nt, Human
aaccacaggcaggauaaaga

SEQ ID NO: 1234595 - RNA, 24 nt, Human
aaguaaucgacccgccuuggccuc

SEQ ID NO: 1234596 - RNA, 18 nt, Human
aagugcugggauuacagg

SEQ ID NO: 1234597 - RNA, 21 nt, Human
aagugcugggauuacaggggu

SEQ ID NO: 1234598 - RNA, 26 nt, Human
aagugcugggauuacaggggugagcc

SEQ ID NO: 1234599 - RNA, 24 nt, Human
aauguuggccaggcuggucgugaa

SEQ ID NO: 1234600 - RNA, 25 nt, Human
acccgccuuggccucccaaagugcu

SEQ ID NO: 1234601 - RNA, 21 nt, Human
acugagcggccacucugguga

SEQ ID NO: 1234602 - RNA, 18 nt, Human
agccacugagcccagcca

SEQ ID NO: 1234603 - RNA, 25 nt, Human
aggcaggauaaagagcagccuccaa

SEQ ID NO: 1234604 - RNA, 25 nt, Human
aggcuggagugcaguggcacgaucu

SEQ ID NO: 1234605 - RNA, 20 nt, Human
agugcaguggcacgaucucg

SEQ ID NO: 1234606 - RNA, 23 nt, Human
agugcaguggcacgaucucggcu

SEQ ID NO: 1234607 - RNA, 24 nt, Human
agugcaguggcacgaucucggcuc

SEQ ID NO: 1234608 - RNA, 25 nt, Human
aucucaaccagugaggcccaucugc

SEQ ID NO: 1234609 - RNA, 18 nt, Human
augggguuucacaauguu

SEQ ID NO: 1234610 - RNA, 24 nt, Human
augggguuucacaauguuggccag

SEQ ID NO: 1234611 - RNA, 21 nt, Human
auucuccugccucagccuccc

SEQ ID NO: 1234612 - RNA, 24 nt, Human
caaagugcugggauuacaggggug

SEQ ID NO: 1234613 - RNA, 22 nt, Human
caagcaauucuccugccucagc

SEQ ID NO: 1234614 - RNA, 21 nt, Human
cacaauguuggccaggcuggu

SEQ ID NO: 1234615 - RNA, 22 nt, Human
cacaauguuggccaggcugguc

SEQ ID NO: 1234616 - RNA, 26 nt, Human
cacuccugcccccugguggcuggagg

SEQ ID NO: 1234617 - RNA, 23 nt, Human
caggcaggauaaagagcagccuc

SEQ ID NO: 1234618 - RNA, 19 nt, Human
ccaaagugcugggauuaca

SEQ ID NO: 1234619 - RNA, 21 nt, Human
ccaaagugcugggauuacagg

SEQ ID NO: 1234620 - RNA, 24 nt, Human
ccaaagugcugggauuacaggggu

SEQ ID NO: 1234621 - RNA, 24 nt, Human
ccccggguagcugggauuacaggc

SEQ ID NO: 1234622 - RNA, 23 nt, Human
cccggguagcugggauuacaggc

SEQ ID NO: 1234623 - RNA, 24 nt, Human
cccggguagcugggauuacaggca

SEQ ID NO: 1234624 - RNA, 27 nt, Human
ccgccuucugaguucaagcaauucuuu

SEQ ID NO: 1234625 - RNA, 24 nt, Human
ccggguagcugggauuacaggcau

SEQ ID NO: 1234626 - RNA, 20 nt, Human
ccugaccucaaguaaucgac

SEQ ID NO: 1234627 - RNA, 24 nt, Human
ccuucugaguucaagcaauucucc

SEQ ID NO: 1234628 - RNA, 22 nt, Human
cgagauggagucuugcucuguu

SEQ ID NO: 1234629 - RNA, 23 nt, Human
cugcagccuccgccuucugaguu

SEQ ID NO: 1234630 - RNA, 24 nt, Human
cugccucagccuccccggguagcu

SEQ ID NO: 1234631 - RNA, 24 nt, Human
gaccucaaguaaucgacccgccuu

SEQ ID NO: 1234632 - RNA, 22 nt, Human
gagcugaaaaccacaggcagga

SEQ ID NO: 1234633 - RNA, 20 nt, Human
gaguucaagcaauucuccug

SEQ ID NO: 1234634 - RNA, 18 nt, Human
gauuacaggcaugugcca

SEQ ID NO: 1234635 - RNA, 22 nt, Human
gauuacaggcaugugccacuac

SEQ ID NO: 1234636 - RNA, 18 nt, Human
gauuacaggggugagcca

SEQ ID NO: 1234637 - RNA, 18 nt, Human
gcagagaugggguuucac

SEQ ID NO: 1234638 - RNA, 22 nt, Human
gccuuggccucccaaagugcug

SEQ ID NO: 1234639 - RNA, 19 nt, Human
gcuggagugcaguggcacg

SEQ ID NO: 1234640 - RNA, 23 nt, Human
gcuggucgugaacuccugaccuc

SEQ ID NO: 1234641 - RNA, 19 nt, Human
ggauuacaggcaugugcca

SEQ ID NO: 1234642 - RNA, 19 nt, Human
ggccaggcuggucgugaac

SEQ ID NO: 1234643 - RNA, 24 nt, Human
ggcuggucgugaacuccugaccuc

SEQ ID NO: 1234644 - RNA, 20 nt, Human
gggaauuuuuuuuuuuuuuu

SEQ ID NO: 1234645 - RNA, 29 nt, Human
gggguggggaauuuuuuuuuuuuuucuuc

SEQ ID NO: 1234646 - RNA, 18 nt, Human
gggguuucacaauguugg

SEQ ID NO: 1234647 - RNA, 22 nt, Human
gggguuucacaauguuggccag

SEQ ID NO: 1234648 - RNA, 22 nt, Human
ggguuucacaauguuggccagg

SEQ ID NO: 1234649 - RNA, 24 nt, Human
guaaucgacccgccuuggccuccc

SEQ ID NO: 1234650 - RNA, 18 nt, Human
guagcugggauuacaggc

SEQ ID NO: 1234651 - RNA, 19 nt, Human
guagcugggauuacaggca

SEQ ID NO: 1234652 - RNA, 22 nt, Human
guagcugggauuacaggcaugu

SEQ ID NO: 1234653 - RNA, 19 nt, Human
gugagccacugagcccagc

SEQ ID NO: 1234654 - RNA, 19 nt, Human
guugaccaggcuggagugc

SEQ ID NO: 1234655 - RNA, 21 nt, Human
uaaagagcagccuccaagagc

SEQ ID NO: 1234656 - RNA, 20 nt, Human
uaacuuauaaauagaagucc

SEQ ID NO: 1234657 - RNA, 24 nt, Human
uaacuuuuguauuuuuggcagaga

SEQ ID NO: 1234658 - RNA, 23 nt, Human
uacaggcaugugccacuacgccc

SEQ ID NO: 1234659 - RNA, 18 nt, Human
uacaggggugagccacug

SEQ ID NO: 1234660 - RNA, 19 nt, Human
uacaggggugagccacuga

SEQ ID NO: 1234661 - RNA, 24 nt, Human
uacaggggugagccacugagccca

SEQ ID NO: 1234662 - RNA, 18 nt, Human
ucacugcagccuccgccu

SEQ ID NO: 1234663 - RNA, 18 nt, Human
ucacugcagccuccgccu

SEQ ID NO: 1234664 - RNA, 19 nt, Human
ucacugcagccuccgccuu

SEQ ID NO: 1234665 - RNA, 22 nt, Human
ucacugcagccuccgccuucug

SEQ ID NO: 1234666 - RNA, 24 nt, Human
ucacugcagccuccgccuucugag

SEQ ID NO: 1234667 - RNA, 25 nt, Human
ucacugcagccuccgccuucugagu

SEQ ID NO: 1234668 - RNA, 22 nt, Human
ucaucuaagcaacucuggucau

SEQ ID NO: 1234669 - RNA, 23 nt, Human
ucccaaagugcugggauuacagg

SEQ ID NO: 1234670 - RNA, 22 nt, Human
uccgccuucugaguucaagccg

SEQ ID NO: 1234671 - RNA, 26 nt, Human
ucuccugccucagccuccccggguag

SEQ ID NO: 1234672 - RNA, 20 nt, Human
ucugaguucaagcaauucuc

SEQ ID NO: 1234673 - RNA, 23 nt, Human
ucugaguucaagcaauucuccug

SEQ ID NO: 1234674 - RNA, 19 nt, Human
ucuguugaccaggcuggag

SEQ ID NO: 1234675 - RNA, 24 nt, Human
ucuguugaccaggcuggagugcag

SEQ ID NO: 1234676 - RNA, 23 nt, Human
ucuugcucuguugaccaggcugg

SEQ ID NO: 1234677 - RNA, 24 nt, Human
ucuugcucuguugaccaggcugga

SEQ ID NO: 1234678 - RNA, 24 nt, Human
ugaccaggcuggagugcaguggca

SEQ ID NO: 1234679 - RNA, 20 nt, Human
ugaccucaaguaaucgaccc

SEQ ID NO: 1234680 - RNA, 21 nt, Human
ugaccucaaguaaucgacccg

SEQ ID NO: 1234681 - RNA, 25 nt, Human
ugaccucaaguaaucgacccgccuu

SEQ ID NO: 1234682 - RNA, 21 nt, Human
ugaguucaagcaauucuccug

SEQ ID NO: 1234683 - RNA, 24 nt, Human
ugaguucaagcaauucuccugccu

SEQ ID NO: 1234684 - RNA, 22 nt, Human
ugcaguggcacgaucucggcuc

SEQ ID NO: 1234685 - RNA, 25 nt, Human
ugccucagccuccccggguagcugg

SEQ ID NO: 1234686 - RNA, 23 nt, Human
uggagugcaguggcacgaucucg

SEQ ID NO: 1234687 - RNA, 24 nt, Human
uggagugcaguggcacgaucucgg

SEQ ID NO: 1234688 - RNA, 24 nt, Human
uggcagagaugggguuucacaaug

SEQ ID NO: 1234689 - RNA, 24 nt, Human
uggccaggcuggucgugaacuccu

SEQ ID NO: 1234690 - RNA, 22 nt, Human
uggcgggcugggcacugagcgg

SEQ ID NO: 1234691 - RNA, 19 nt, Human
uggcuggagggagcggcag

SEQ ID NO: 1234692 - RNA, 18 nt, Human
ugggauuacaggcaugug

SEQ ID NO: 1234693 - RNA, 21 nt, Human
ugggauuacaggcaugugcca

SEQ ID NO: 1234694 - RNA, 22 nt, Human
ugggauuacaggcaugugccac

SEQ ID NO: 1234695 - RNA, 22 nt, Human
ugggauuacaggcaugugccac

SEQ ID NO: 1234696 - RNA, 24 nt, Human
ugggauuacaggcaugugccacua

SEQ ID NO: 1234697 - RNA, 24 nt, Human
ugggauuacaggcaugugccacua

SEQ ID NO: 1234698 - RNA, 19 nt, Human
ugggauuacaggggugagc

SEQ ID NO: 1234699 - RNA, 22 nt, Human
ugggauuacaggggugagccac

SEQ ID NO: 1234700 - RNA, 22 nt, Human
ugggauuacaggggugagccac

SEQ ID NO: 1234701 - RNA, 24 nt, Human
ugggauuacaggggugagccacug

SEQ ID NO: 1234702 - RNA, 24 nt, Human
ugggguuucacaauguuggccagg

SEQ ID NO: 1234703 - RNA, 21 nt, Human
uucaagcaauucuccugccuc

SEQ ID NO: 1234704 - RNA, 24 nt, Human
uucaagcaauucuccugccucagc

SEQ ID NO: 1234705 - RNA, 25 nt, Human
uucacaauguuggccaggcuggucg

SEQ ID NO: 1234706 - RNA, 18 nt, Human
uuggccucccaaagugcu

SEQ ID NO: 1234707 - RNA, 21 nt, Human
uuggcuuuacgaaaucaagag

SEQ ID NO: 1234708 - RNA, 23 nt, Human
uuguauuuuuggcagagaugggg

SEQ ID NO: 1234709 - RNA, 21 nt, Human
uuucacaauguuggccaggcu

SEQ ID NO: 1234710 - RNA, 22 nt, Human
uuucacaauguuggccaggcug

SEQ ID NO: 1234711 - RNA, 24 nt, Human
uuuuuggcagagaugggguuucac

SEQ ID NO: 1234712 - RNA, 18 nt, Human
uuuuuuuuuucuucgaga

SEQ ID NO: 1234713 - RNA, 23 nt, Human
uuuuuuuuuuuuuucuucgagau

SEQ ID NO: 1234714 - RNA, 20 nt, Human
uuuuuuuuuuuuuucuucgg

SEQ ID NO: 1234715 - RNA, 25 nt, Human
caguaaagucuuuucucucuggcuu

SEQ ID NO: 1234716 - RNA, 26 nt, Human
ccagcaucaucaucugacccuuccuc

SEQ ID NO: 1234717 - RNA, 21 nt, Human
ccagugguaggcacuuucucu

SEQ ID NO: 1234718 - RNA, 25 nt, Human
cccccauucuuccucagaggguucc

SEQ ID NO: 1234719 - RNA, 19 nt, Human
ccucccagugguaggcacu

SEQ ID NO: 1234720 - RNA, 29 nt, Human
ccucccagugguaggcacuuucucucccc

SEQ ID NO: 1234721 - RNA, 24 nt, Human
ccuuaaucucuccucucuccaucu

SEQ ID NO: 1234722 - RNA, 18 nt, Human
cucugcucaucucucccc

SEQ ID NO: 1234723 - RNA, 21 nt, Human
cucugcucaucucuccccacu

SEQ ID NO: 1234724 - RNA, 20 nt, Human
gcacuuucucuccugggucc

SEQ ID NO: 1234725 - RNA, 20 nt, Human
ucagcaguaaagucuuuucu

SEQ ID NO: 1234726 - RNA, 22 nt, Human
ucaucaucugacccuuccucug

SEQ ID NO: 1234727 - RNA, 23 nt, Human
ucaucucuccccacuuaggucuc

SEQ ID NO: 1234728 - RNA, 24 nt, Human
ucccaccuuagcuuugagucucaa

SEQ ID NO: 1234729 - RNA, 22 nt, Human
ucccccauucuuccucagaggg

SEQ ID NO: 1234730 - RNA, 18 nt, Human
ugggccccauggacaauu

SEQ ID NO: 1234731 - RNA, 20 nt, Human
ugguaggcacuuucucuccu

SEQ ID NO: 1234732 - RNA, 26 nt, Human
uucucucuggcuucuuucccccauuc

SEQ ID NO: 1234733 - RNA, 19 nt, Human
aagugacaggguaagagag

SEQ ID NO: 1234734 - RNA, 19 nt, Human
acagcccccuggaagagug

SEQ ID NO: 1234735 - RNA, 18 nt, Human
acaggacagaggagggga

SEQ ID NO: 1234736 - RNA, 19 nt, Human
accaggucuugaaugggcc

SEQ ID NO: 1234737 - RNA, 21 nt, Human
accccagccccacgauggccu

SEQ ID NO: 1234738 - RNA, 27 nt, Human
agagcucucccaccacacagcccuucg

SEQ ID NO: 1234739 - RNA, 26 nt, Human
agaggaggggagagggagaaggggau

SEQ ID NO: 1234740 - RNA, 21 nt, Human
agagggagaaggggauguuca

SEQ ID NO: 1234741 - RNA, 20 nt, Human
agcagaggggggauaagggc

SEQ ID NO: 1234742 - RNA, 22 nt, Human
aggacagaggaggggagaggga

SEQ ID NO: 1234743 - RNA, 22 nt, Human
aggagcuggagggguuuccaag

SEQ ID NO: 1234744 - RNA, 24 nt, Human
aggcaagcaggcaggcaggccucc

SEQ ID NO: 1234745 - RNA, 22 nt, Human
aggcaggcaggccuccuagcuc

SEQ ID NO: 1234746 - RNA, 25 nt, Human
agggaagcagagcuugcaccgccug

SEQ ID NO: 1234747 - RNA, 18 nt, Human
auggugccaguguccuca

SEQ ID NO: 1234748 - RNA, 19 nt, Human
caagcgggagcccccaggc

SEQ ID NO: 1234749 - RNA, 24 nt, Human
caccacacagcccccuggaagagu

SEQ ID NO: 1234750 - RNA, 22 nt, Human
caccccagccccacgauggccu

SEQ ID NO: 1234751 - RNA, 19 nt, Human
cagagcucucccaccacac

SEQ ID NO: 1234752 - RNA, 26 nt, Human
cagccccacgauggccugagggcaau

SEQ ID NO: 1234753 - RNA, 23 nt, Human
cagcccuggccucucugcccucu

SEQ ID NO: 1234754 - RNA, 22 nt, Human
cagcgcccagguccagccuccc

SEQ ID NO: 1234755 - RNA, 26 nt, Human
caggcaggcaggccuccuagcucccc

SEQ ID NO: 1234756 - RNA, 20 nt, Human
cagggugacccccaggucca

SEQ ID NO: 1234757 - RNA, 23 nt, Human
caguucugagcccacugauuccc

SEQ ID NO: 1234758 - RNA, 22 nt, Human
caucucgcccccugggacccac

SEQ ID NO: 1234759 - RNA, 19 nt, Human
ccacuggccucuuggggga

SEQ ID NO: 1234760 - RNA, 21 nt, Human
ccaggcugcuuucucugcgcu

SEQ ID NO: 1234761 - RNA, 24 nt, Human
ccaguguccucauaucuguuuccc

SEQ ID NO: 1234762 - RNA, 21 nt, Human
cccaccacacagcccccugga

SEQ ID NO: 1234763 - RNA, 23 nt, Human
cccagacuugccucagcccuggc

SEQ ID NO: 1234764 - RNA, 19 nt, Human
cccagccucccagacuugc

SEQ ID NO: 1234765 - RNA, 20 nt, Human
cccagguacagggugcuggc

SEQ ID NO: 1234766 - RNA, 22 nt, Human
cccagguccaggaacuuucggc

SEQ ID NO: 1234767 - RNA, 24 nt, Human
ccccaggaacucugugccaaacaa

SEQ ID NO: 1234768 - RNA, 22 nt, Human
ccccaggccucaucgguaacuc

SEQ ID NO: 1234769 - RNA, 18 nt, Human
ccccagguccaggaacuu

SEQ ID NO: 1234770 - RNA, 19 nt, Human
cccccagguuuugccucuc

SEQ ID NO: 1234771 - RNA, 18 nt, Human
ccccuccaccccagcccc

SEQ ID NO: 1234772 - RNA, 24 nt, Human
ccccucuugaguccuggcaaagac

SEQ ID NO: 1234773 - RNA, 19 nt, Human
ccccugggacccacaggac

SEQ ID NO: 1234774 - RNA, 19 nt, Human
cccuccgaagccccucucc

SEQ ID NO: 1234775 - RNA, 22 nt, Human
cccuccgaagccccucucccag

SEQ ID NO: 1234776 - RNA, 18 nt, Human
ccucagggccucuggcag

SEQ ID NO: 1234777 - RNA, 22 nt, Human
ccucagggccucuggcaggcaa

SEQ ID NO: 1234778 - RNA, 24 nt, Human
ccuccaccccagccccacgauggc

SEQ ID NO: 1234779 - RNA, 21 nt, Human
ccucccagacuugccucagcc

SEQ ID NO: 1234780 - RNA, 18 nt, Human
ccuccuagcuccccucca

SEQ ID NO: 1234781 - RNA, 19 nt, Human
ccucugaggaagcagcagg

SEQ ID NO: 1234782 - RNA, 20 nt, Human
ccucuugggggagcaggaca

SEQ ID NO: 1234783 - RNA, 19 nt, Human
ccugacccagccucccaga

SEQ ID NO: 1234784 - RNA, 19 nt, Human
ccugccaguucugagccca

SEQ ID NO: 1234785 - RNA, 20 nt, Human
ccugcugaaaugcccagccc

SEQ ID NO: 1234786 - RNA, 21 nt, Human
ccugcugaaaugcccagccca

SEQ ID NO: 1234787 - RNA, 21 nt, Human
ccuucaucugcuccuccccca

SEQ ID NO: 1234788 - RNA, 23 nt, Human
cuagcuccccuccaccccagccc

SEQ ID NO: 1234789 - RNA, 18 nt, Human
cuaggcccucucccuggg

SEQ ID NO: 1234790 - RNA, 23 nt, Human
cuccaccccagccccacgauggc

SEQ ID NO: 1234791 - RNA, 24 nt, Human
cuccaccccagccccacgauggcc

SEQ ID NO: 1234792 - RNA, 18 nt, Human
cuccccuccaccccagcc

SEQ ID NO: 1234793 - RNA, 23 nt, Human
cucugagcccuggggcccggccu

SEQ ID NO: 1234794 - RNA, 21 nt, Human
cucugugccaaacaaguccuc

SEQ ID NO: 1234795 - RNA, 18 nt, Human
cugagcccuggggcccgg

SEQ ID NO: 1234796 - RNA, 20 nt, Human
cugauucccugacaaugccu

SEQ ID NO: 1234797 - RNA, 21 nt, Human
cugccuggcuggggugagggc

SEQ ID NO: 1234798 - RNA, 24 nt, Human
cugggcagaugggaggagcuggag

SEQ ID NO: 1234799 - RNA, 19 nt, Human
cuggggucucccuuucugg

SEQ ID NO: 1234800 - RNA, 21 nt, Human
cuucacaugcaggugggcacc

SEQ ID NO: 1234801 - RNA, 25 nt, Human
cuuccuccaaggacauuuccuaaaa

SEQ ID NO: 1234802 - RNA, 24 nt, Human
cuugccucagcccuggccucucug

SEQ ID NO: 1234803 - RNA, 20 nt, Human
gaacacuuccuccaaggaca

SEQ ID NO: 1234804 - RNA, 18 nt, Human
gagcccuggggcccggcc

SEQ ID NO: 1234805 - RNA, 23 nt, Human
gaggagcuggagggguuuccaag

SEQ ID NO: 1234806 - RNA, 20 nt, Human
gaggccugugcccgcggagc

SEQ ID NO: 1234807 - RNA, 18 nt, Human
gauaagggcugaguccca

SEQ ID NO: 1234808 - RNA, 19 nt, Human
gcagaugggaggagcugga

SEQ ID NO: 1234809 - RNA, 24 nt, Human
gcaggacagagcucucccaccaca

SEQ ID NO: 1234810 - RNA, 18 nt, Human
gccucucugccuggcugg

SEQ ID NO: 1234811 - RNA, 22 nt, Human
gcugcagcgcccacuggccucu

SEQ ID NO: 1234812 - RNA, 20 nt, Human
gcugcuuucucugcgcuccu

SEQ ID NO: 1234813 - RNA, 24 nt, Human
gcuggccccagcccucaguguggc

SEQ ID NO: 1234814 - RNA, 18 nt, Human
ggagcuggccccagcccu

SEQ ID NO: 1234815 - RNA, 23 nt, Human
ggaggagcuggagggguuuccaa

SEQ ID NO: 1234816 - RNA, 18 nt, Human
ggcaaugggacagccuga

SEQ ID NO: 1234817 - RNA, 18 nt, Human
ggcccucucccugggguc

SEQ ID NO: 1234818 - RNA, 18 nt, Human
ggcucaggaggacuggcg

SEQ ID NO: 1234819 - RNA, 23 nt, Human
ggcugcugguaaacuccaccccc

SEQ ID NO: 1234820 - RNA, 22 nt, Human
gggcagaugggaggagcuggag

SEQ ID NO: 1234821 - RNA, 21 nt, Human
gggucucccuuucuggggucu

SEQ ID NO: 1234822 - RNA, 23 nt, Human
ggucagcagcuccuaggccuugg

SEQ ID NO: 1234823 - RNA, 23 nt, Human
guccucugucccuaucaguuccu

SEQ ID NO: 1234824 - RNA, 22 nt, Human
guggaagugguguccucugucc

SEQ ID NO: 1234825 - RNA, 22 nt, Human
guggagaggagccgcucccaca

SEQ ID NO: 1234826 - RNA, 18 nt, Human
uaacucugaccagugucc

SEQ ID NO: 1234827 - RNA, 18 nt, Human
uagcccaagugcagcgcc

SEQ ID NO: 1234828 - RNA, 25 nt, Human
uagcuccccuccaccccagccccac

SEQ ID NO: 1234829 - RNA, 19 nt, Human
uagcugccggggaccccca

SEQ ID NO: 1234830 - RNA, 23 nt, Human
uaucuguuucccuccgaagcccc

SEQ ID NO: 1234831 - RNA, 18 nt, Human
uccacccccauccaggga

SEQ ID NO: 1234832 - RNA, 21 nt, Human
ucccagacuugccucagcccu

SEQ ID NO: 1234833 - RNA, 21 nt, Human
ucccauggcccugccaccagg

SEQ ID NO: 1234834 - RNA, 20 nt, Human
ucccuggugaggccugugcc

SEQ ID NO: 1234835 - RNA, 21 nt, Human
uccgaagccccucucccagca

SEQ ID NO: 1234836 - RNA, 23 nt, Human
uccuaggccuuggcugguggaag

SEQ ID NO: 1234837 - RNA, 18 nt, Human
uccuggaagcgggacuag

SEQ ID NO: 1234838 - RNA, 20 nt, Human
ucugucccuaucaguuccug

SEQ ID NO: 1234839 - RNA, 18 nt, Human
ugaccaguguccuggaag

SEQ ID NO: 1234840 - RNA, 18 nt, Human
ugaggaguuuggcuggga

SEQ ID NO: 1234841 - RNA, 19 nt, Human
ugccaguucugagcccacu

SEQ ID NO: 1234842 - RNA, 24 nt, Human
ugccuggggcagaugggggagggc

SEQ ID NO: 1234843 - RNA, 20 nt, Human
uggaagaguggagaggagcc

SEQ ID NO: 1234844 - RNA, 18 nt, Human
uggcccagggaagcagag

SEQ ID NO: 1234845 - RNA, 24 nt, Human
uggccccagcccucaguguggccc

SEQ ID NO: 1234846 - RNA, 21 nt, Human
uggcgggcucaggaggacugg

SEQ ID NO: 1234847 - RNA, 24 nt, Human
uggcugguggaagugguguccucu

SEQ ID NO: 1234848 - RNA, 21 nt, Human
ugggaccaggcuagcccaagu

SEQ ID NO: 1234849 - RNA, 20 nt, Human
uggggucucccuuucugggg

SEQ ID NO: 1234850 - RNA, 22 nt, Human
uggugaggccugugcccgcgga

SEQ ID NO: 1234851 - RNA, 23 nt, Human
ugguggggcuggcgggcucagga

SEQ ID NO: 1234852 - RNA, 20 nt, Human
ugugccaaacaaguccucaa

SEQ ID NO: 1234853 - RNA, 22 nt, Human
uguggcccagggaagcagagcu

SEQ ID NO: 1234854 - RNA, 26 nt, Human
uguuucccuccgaagccccucuccca

SEQ ID NO: 1234855 - RNA, 23 nt, Human
uuccaagcgggagcccccaggcc

SEQ ID NO: 1234856 - RNA, 23 nt, Human
uuccuccaaggacauuuccuaaa

SEQ ID NO: 1234857 - RNA, 19 nt, Human
uugcugcagcgcccacugg

SEQ ID NO: 1234858 - RNA, 25 nt, Human
uugcugcagcgcccacuggccucuu

SEQ ID NO: 1234859 - RNA, 18 nt, Human
uuugccucucugccuggc

SEQ ID NO: 1234860 - RNA, 21 nt, Human
uuugccucucugccuggcugg

SEQ ID NO: 1234861 - RNA, 19 nt, Human
agcacacacacacacauau

SEQ ID NO: 1234862 - RNA, 25 nt, Human
cacacacacacacauauauaucuua

SEQ ID NO: 1234863 - RNA, 23 nt, Human
cacacacacacauauauaucuua

SEQ ID NO: 1234864 - RNA, 20 nt, Human
cauuuugguuauguguuuca

SEQ ID NO: 1234865 - RNA, 19 nt, Human
guagcacacacacacacau

SEQ ID NO: 1234866 - RNA, 27 nt, Human
uagcacacacacacacauauauaucuu

SEQ ID NO: 1234867 - RNA, 23 nt, Human
uauguagcacacacacacacagu

SEQ ID NO: 1234868 - RNA, 26 nt, Human
uauguagcacacacacacacauauag

SEQ ID NO: 1234869 - RNA, 26 nt, Human
uguagcacacacacacacauauauag

SEQ ID NO: 1234870 - RNA, 21 nt, Human
aggggcugcggagcccagugg

SEQ ID NO: 1234871 - RNA, 20 nt, Human
ugcccuuaguucuuggaucc

SEQ ID NO: 1234872 - RNA, 20 nt, Human
aaaaaaauggacaugguaga

SEQ ID NO: 1234873 - RNA, 24 nt, Human
aacacaaaaauaugacuauuugga

SEQ ID NO: 1234874 - RNA, 21 nt, Human
aacuuuauuucaguuuaaaca

SEQ ID NO: 1234875 - RNA, 18 nt, Human
acgacggcggcggcggcg

SEQ ID NO: 1234876 - RNA, 25 nt, Human
acgacggcggcggcggcggcugcuc

SEQ ID NO: 1234877 - RNA, 18 nt, Human
aguuuuaaagaucaggaa

SEQ ID NO: 1234878 - RNA, 23 nt, Human
caccuccgggcccucugaacucu

SEQ ID NO: 1234879 - RNA, 18 nt, Human
caccugaaaaaggucuca

SEQ ID NO: 1234880 - RNA, 18 nt, Human
cagggacagauaggagag

SEQ ID NO: 1234881 - RNA, 19 nt, Human
cauucuucauagcaguuuc

SEQ ID NO: 1234882 - RNA, 19 nt, Human
ccaaauaacuacacaucac

SEQ ID NO: 1234883 - RNA, 18 nt, Human
ccaccuccgggcccucug

SEQ ID NO: 1234884 - RNA, 19 nt, Human
ccucugaacuccgcugcgg

SEQ ID NO: 1234885 - RNA, 18 nt, Human
cuacacaucacugauuuc

SEQ ID NO: 1234886 - RNA, 21 nt, Human
cuucauagcaguuucauugcc

SEQ ID NO: 1234887 - RNA, 22 nt, Human
gaagucaccucagauaaacuga

SEQ ID NO: 1234888 - RNA, 19 nt, Human
gcggcggcggcggcugcuc

SEQ ID NO: 1234889 - RNA, 21 nt, Human
ggcggcggcggcugcucgagg

SEQ ID NO: 1234890 - RNA, 18 nt, Human
guagaauugcuacacacc

SEQ ID NO: 1234891 - RNA, 24 nt, Human
guagcaacgacggcggcggcggcg

SEQ ID NO: 1234892 - RNA, 22 nt, Human
uaaacaacaaagcaaaugauau

SEQ ID NO: 1234893 - RNA, 23 nt, Human
uaaacugagaaagugaugucuaa

SEQ ID NO: 1234894 - RNA, 25 nt, Human
uaaauguuaggaacaaugauaugca

SEQ ID NO: 1234895 - RNA, 22 nt, Human
uaacuacacaucacugauuucc

SEQ ID NO: 1234896 - RNA, 22 nt, Human
uaagguacaccuagaaauaaca

SEQ ID NO: 1234897 - RNA, 21 nt, Human
uaggagaguacagucauucuu

SEQ ID NO: 1234898 - RNA, 22 nt, Human
uauuaggauucaagaugguauu

SEQ ID NO: 1234899 - RNA, 19 nt, Human
ucaggaacaucuuuauggg

SEQ ID NO: 1234900 - RNA, 20 nt, Human
ucaguuagucagugccaaaa

SEQ ID NO: 1234901 - RNA, 25 nt, Human
ucugaacuccgcugcggcaguagca

SEQ ID NO: 1234902 - RNA, 22 nt, Human
ugagaaagugaugucuaaugcu

SEQ ID NO: 1234903 - RNA, 23 nt, Human
uggaaaauucuguuucuacuuaa

SEQ ID NO: 1234904 - RNA, 23 nt, Human
ugguaaguuccuuuuuaaugcuu

SEQ ID NO: 1234905 - RNA, 21 nt, Human
uucaagaugguauuuaaaauc

SEQ ID NO: 1234906 - RNA, 19 nt, Human
uugagccuggcugcugcug

SEQ ID NO: 1234907 - RNA, 21 nt, Human
uugcuacacaccugaaaaagg

SEQ ID NO: 1234908 - RNA, 19 nt, Human
uuuagaggaaacacaaaaa

SEQ ID NO: 1234909 - RNA, 18 nt, Human
uuuuuccucuuuaacuaa

SEQ ID NO: 1234910 - RNA, 20 nt, Human
aucuuggucucggucucauu

SEQ ID NO: 1234911 - RNA, 19 nt, Human
uaaaacugcaggaagaucu

SEQ ID NO: 1234912 - RNA, 20 nt, Human
aaaaaaguuuccauaaauag

SEQ ID NO: 1234913 - RNA, 24 nt, Human
aaaaauacaaaaauuagccaugug

SEQ ID NO: 1234914 - RNA, 23 nt, Human
aaagcaggagaaucgcuugaacc

SEQ ID NO: 1234915 - RNA, 20 nt, Human
aaaggagaaugaggagaagg

SEQ ID NO: 1234916 - RNA, 24 nt, Human
aaagugcugggauuacaggcguga

SEQ ID NO: 1234917 - RNA, 22 nt, Human
aacagccaacucuccuacauau

SEQ ID NO: 1234918 - RNA, 19 nt, Human
aacauggugaaacuccauc

SEQ ID NO: 1234919 - RNA, 20 nt, Human
aacauggugaaacuccaucu

SEQ ID NO: 1234920 - RNA, 21 nt, Human
aacauggugaaacuccaucuc

SEQ ID NO: 1234921 - RNA, 22 nt, Human
aacuagaacccagcugacuucc

SEQ ID NO: 1234922 - RNA, 18 nt, Human
aagaaggugcuucaucuu

SEQ ID NO: 1234923 - RNA, 19 nt, Human
aagaugaguucuggacaaa

SEQ ID NO: 1234924 - RNA, 19 nt, Human
aagcaaaaaugggaggaga

SEQ ID NO: 1234925 - RNA, 19 nt, Human
aagcaaaggugaaagcaga

SEQ ID NO: 1234926 - RNA, 21 nt, Human
aagcaaaggugaaagcagaaa

SEQ ID NO: 1234927 - RNA, 22 nt, Human
aagcaggagaaucgcuugaacc

SEQ ID NO: 1234928 - RNA, 24 nt, Human
aagcaggagaaucgcuugaaccug

SEQ ID NO: 1234929 - RNA, 25 nt, Human
aagcaggagaaucgcuugaaccugg

SEQ ID NO: 1234930 - RNA, 19 nt, Human
aagugcugggauuacaggc

SEQ ID NO: 1234931 - RNA, 19 nt, Human
aagugcugggauuacaggc

SEQ ID NO: 1234932 - RNA, 26 nt, Human
aagugcugggauuacaggcgugagcc

SEQ ID NO: 1234933 - RNA, 18 nt, Human
aaucgcuugaaccuggga

SEQ ID NO: 1234934 - RNA, 24 nt, Human
aaucgcuugaaccugggaggcaga

SEQ ID NO: 1234935 - RNA, 20 nt, Human
acaccccucuccuccccuua

SEQ ID NO: 1234936 - RNA, 21 nt, Human
acagcacuucuagggucaccu

SEQ ID NO: 1234937 - RNA, 26 nt, Human
acauuaaaggagaaugaggagaaggg

SEQ ID NO: 1234938 - RNA, 21 nt, Human
acauugcacuucagccugggc

SEQ ID NO: 1234939 - RNA, 23 nt, Human
acauugcacuucagccugggcaa

SEQ ID NO: 1234940 - RNA, 24 nt, Human
acauugcacuucagccugggcaac

SEQ ID NO: 1234941 - RNA, 24 nt, Human
accaacauggugaaacuccaucuc

SEQ ID NO: 1234942 - RNA, 23 nt, Human
accagaguaaaaggaaaagacug

SEQ ID NO: 1234943 - RNA, 19 nt, Human
acccaggcuggagugcagu

SEQ ID NO: 1234944 - RNA, 23 nt, Human
acccaggcuggagugcaguggug

SEQ ID NO: 1234945 - RNA, 19 nt, Human
accccucuccuccccuuag

SEQ ID NO: 1234946 - RNA, 23 nt, Human
accucggccucccaaagugcugg

SEQ ID NO: 1234947 - RNA, 20 nt, Human
accugcaaucccagcuacuc

SEQ ID NO: 1234948 - RNA, 23 nt, Human
accugcaaucccagcuacucagg

SEQ ID NO: 1234949 - RNA, 24 nt, Human
acuagaacccagcugacuuccccc

SEQ ID NO: 1234950 - RNA, 18 nt, Human
acucaacacagccauucc

SEQ ID NO: 1234951 - RNA, 18 nt, Human
acuccagcgccugcugug

SEQ ID NO: 1234952 - RNA, 18 nt, Human
acuccagcgccugcugug

SEQ ID NO: 1234953 - RNA, 24 nt, Human
acuccaucucuacuaaaaauacaa

SEQ ID NO: 1234954 - RNA, 21 nt, Human
acugcaagcucugccucccag

SEQ ID NO: 1234955 - RNA, 22 nt, Human
acuuugggaggccgaggugggg

SEQ ID NO: 1234956 - RNA, 23 nt, Human
agaaacaaucccuauuuaagagc

SEQ ID NO: 1234957 - RNA, 18 nt, Human
agaaacuccaucucaaaa

SEQ ID NO: 1234958 - RNA, 21 nt, Human
agaacccagcugacuuccccc

SEQ ID NO: 1234959 - RNA, 24 nt, Human
agaacuuugggaggccgagguggg

SEQ ID NO: 1234960 - RNA, 22 nt, Human
agaaucgcuugaaccugggagg

SEQ ID NO: 1234961 - RNA, 19 nt, Human
agacaguagcauacuuggc

SEQ ID NO: 1234962 - RNA, 24 nt, Human
agagguugcagugagccgagaucg

SEQ ID NO: 1234963 - RNA, 19 nt, Human
agcacgccuucccauccug

SEQ ID NO: 1234964 - RNA, 22 nt, Human
agccugaccaacauggugaaac

SEQ ID NO: 1234965 - RNA, 20 nt, Human
aggaaggauuugggccucag

SEQ ID NO: 1234966 - RNA, 22 nt, Human
aggagaagggagaguugacaag

SEQ ID NO: 1234967 - RNA, 21 nt, Human
aggcagagguugcagugagcc

SEQ ID NO: 1234968 - RNA, 24 nt, Human
aggcagagguugcagugagccgag

SEQ ID NO: 1234969 - RNA, 21 nt, Human
aggccgagguggggggaucac

SEQ ID NO: 1234970 - RNA, 23 nt, Human
aggccgagguggggggaucacug

SEQ ID NO: 1234971 - RNA, 25 nt, Human
aggcuggagugcaguggugcaaucu

SEQ ID NO: 1234972 - RNA, 21 nt, Human
agguggggggaucacugaggu

SEQ ID NO: 1234973 - RNA, 21 nt, Human
aggugguguagccaccauacc

SEQ ID NO: 1234974 - RNA, 20 nt, Human
aguaaaaggaaaagacugga

SEQ ID NO: 1234975 - RNA, 22 nt, Human
aguagagaugggguuucaccau

SEQ ID NO: 1234976 - RNA, 19 nt, Human
aguagcugggacuccaggc

SEQ ID NO: 1234977 - RNA, 23 nt, Human
agugcaguggugcaaucuuggcu

SEQ ID NO: 1234978 - RNA, 24 nt, Human
agugcaguggugcaaucuuggcuc

SEQ ID NO: 1234979 - RNA, 18 nt, Human
agugcugggauuacaggc

SEQ ID NO: 1234980 - RNA, 18 nt, Human
auaaaacacuguagcccc

SEQ ID NO: 1234981 - RNA, 18 nt, Human
auaaaacacuguagcccc

SEQ ID NO: 1234982 - RNA, 23 nt, Human
auacgaaaacgaguaaaagacca

SEQ ID NO: 1234983 - RNA, 24 nt, Human
aucgcaacauugcacuucagccug

SEQ ID NO: 1234984 - RNA, 18 nt, Human
augggguuucaccauguu

SEQ ID NO: 1234985 - RNA, 19 nt, Human
augggguuucaccauguua

SEQ ID NO: 1234986 - RNA, 20 nt, Human
augggguuucaccauguuag

SEQ ID NO: 1234987 - RNA, 24 nt, Human
augggguuucaccauguuagccag

SEQ ID NO: 1234988 - RNA, 24 nt, Human
auugcacuucagccugggcaacaa

SEQ ID NO: 1234989 - RNA, 25 nt, Human
auugcacuucagccugggcaacaag

SEQ ID NO: 1234990 - RNA, 24 nt, Human
caaagugcugggauuacaggcgug

SEQ ID NO: 1234991 - RNA, 24 nt, Human
caacauggugaaacuccaucucua

SEQ ID NO: 1234992 - RNA, 18 nt, Human
cacacauggagaagaggc

SEQ ID NO: 1234993 - RNA, 19 nt, Human
caccacacccagccucuuc

SEQ ID NO: 1234994 - RNA, 18 nt, Human
caccauguuagccaggau

SEQ ID NO: 1234995 - RNA, 22 nt, Human
caccauguuagccaggaugguc

SEQ ID NO: 1234996 - RNA, 24 nt, Human
caccauguuagccaggauggucuu

SEQ ID NO: 1234997 - RNA, 18 nt, Human
cacccaccaccaugccug

SEQ ID NO: 1234998 - RNA, 24 nt, Human
cacccaggcuggagugcaguggug

SEQ ID NO: 1234999 - RNA, 18 nt, Human
caccccucuccuccccuu

SEQ ID NO: 1235000 - RNA, 22 nt, Human
cacgccauucuccugccucagc

SEQ ID NO: 1235001 - RNA, 20 nt, Human
cacgccuucccauccugccc

SEQ ID NO: 1235002 - RNA, 24 nt, Human
cagaacuuugggaggccgaggugg

SEQ ID NO: 1235003 - RNA, 22 nt, Human
cagaguaaaaggaaaagacugg

SEQ ID NO: 1235004 - RNA, 18 nt, Human
cagccugggcaacaagag

SEQ ID NO: 1235005 - RNA, 20 nt, Human
caggacuccagcgccugcug

SEQ ID NO: 1235006 - RNA, 19 nt, Human
caggauauucagaagugcu

SEQ ID NO: 1235007 - RNA, 21 nt, Human
caguagcauacuuggcccugg

SEQ ID NO: 1235008 - RNA, 19 nt, Human
cauaccugcaaucccagcu

SEQ ID NO: 1235009 - RNA, 18 nt, Human
cauguuaaaucauuuccu

SEQ ID NO: 1235010 - RNA, 18 nt, Human
cauugcacuucagccugg

SEQ ID NO: 1235011 - RNA, 19 nt, Human
cauugcacuucagccuggg

SEQ ID NO: 1235012 - RNA, 20 nt, Human
cauugcacuucagccugggc

SEQ ID NO: 1235013 - RNA, 21 nt, Human
cauugcacuucagccugggca

SEQ ID NO: 1235014 - RNA, 24 nt, Human
cauugcacuucagccugggcaaca

SEQ ID NO: 1235015 - RNA, 20 nt, Human
ccaaagugcugggauuacag

SEQ ID NO: 1235016 - RNA, 22 nt, Human
ccaaagugcugggauuacaggc

SEQ ID NO: 1235017 - RNA, 22 nt, Human
ccaaagugcugggauuacaggc

SEQ ID NO: 1235018 - RNA, 24 nt, Human
ccaaagugcugggauuacaggcgu

SEQ ID NO: 1235019 - RNA, 18 nt, Human
ccaacucuccuacauaug

SEQ ID NO: 1235020 - RNA, 19 nt, Human
ccaacucuccuacauaugc

SEQ ID NO: 1235021 - RNA, 22 nt, Human
ccagcgccugcugugguggggu

SEQ ID NO: 1235022 - RNA, 21 nt, Human
ccaggcacccaccaccaugcc

SEQ ID NO: 1235023 - RNA, 20 nt, Human
cccagguucacgccauucuc

SEQ ID NO: 1235024 - RNA, 21 nt, Human
cccauccugcccugccggaac

SEQ ID NO: 1235025 - RNA, 21 nt, Human
ccccacagccguucuuaccua

SEQ ID NO: 1235026 - RNA, 21 nt, Human
cccccacagccguucuuaccu

SEQ ID NO: 1235027 - RNA, 18 nt, Human
cccugucuuuaugacacc

SEQ ID NO: 1235028 - RNA, 24 nt, Human
ccuaacauuaaaggagaaugagga

SEQ ID NO: 1235029 - RNA, 21 nt, Human
ccuaggcuacaaaccuguacu

SEQ ID NO: 1235030 - RNA, 23 nt, Human
ccucagacccugguggucccagg

SEQ ID NO: 1235031 - RNA, 18 nt, Human
ccucaggauauucagaag

SEQ ID NO: 1235032 - RNA, 24 nt, Human
ccugaccaacauggugaaacucca

SEQ ID NO: 1235033 - RNA, 21 nt, Human
ccugcaaucccagcuacucag

SEQ ID NO: 1235034 - RNA, 22 nt, Human
ccugccggaacaccccucuccu

SEQ ID NO: 1235035 - RNA, 25 nt, Human
ccugggaggcagagguugcagugag

SEQ ID NO: 1235036 - RNA, 24 nt, Human
cgagaccagccugaccaacauggu

SEQ ID NO: 1235037 - RNA, 21 nt, Human
cgaggacuccaaauuuucugu

SEQ ID NO: 1235038 - RNA, 23 nt, Human
cgagguggggggaucacugaggu

SEQ ID NO: 1235039 - RNA, 25 nt, Human
cuagaacccagcugacuucccccac

SEQ ID NO: 1235040 - RNA, 22 nt, Human
cucacacccauaaucccagaac

SEQ ID NO: 1235041 - RNA, 22 nt, Human
cucaccuaaauuucacaacaau

SEQ ID NO: 1235042 - RNA, 24 nt, Human
cucagccucccgaguagcugggac

SEQ ID NO: 1235043 - RNA, 22 nt, Human
cuccugaccucgugauccgccc

SEQ ID NO: 1235044 - RNA, 23 nt, Human
cucuccuccccuuagugaggaag

SEQ ID NO: 1235045 - RNA, 23 nt, Human
cugccucagccucccgaguagcu

SEQ ID NO: 1235046 - RNA, 22 nt, Human
cuguauuuuuaguagagauggg

SEQ ID NO: 1235047 - RNA, 23 nt, Human
cuguauuuuuaguagagaugggg

SEQ ID NO: 1235048 - RNA, 18 nt, Human
cugucacccaggcuggag

SEQ ID NO: 1235049 - RNA, 22 nt, Human
cuuaggacuccuaggcuacaaa

SEQ ID NO: 1235050 - RNA, 20 nt, Human
cuugaagucuccuugguggg

SEQ ID NO: 1235051 - RNA, 21 nt, Human
cuugcucugucacccaggcug

SEQ ID NO: 1235052 - RNA, 20 nt, Human
cuuguaagcgugagucccgc

SEQ ID NO: 1235053 - RNA, 24 nt, Human
gaaaaauuucaaaacacuuugcaa

SEQ ID NO: 1235054 - RNA, 20 nt, Human
gaaauccgagaacacucuuc

SEQ ID NO: 1235055 - RNA, 21 nt, Human
gaaggggggccggguguggug

SEQ ID NO: 1235056 - RNA, 24 nt, Human
gaauacuaaaggcaacugucacac

SEQ ID NO: 1235057 - RNA, 22 nt, Human
gaccucgugauccgcccaccuc

SEQ ID NO: 1235058 - RNA, 22 nt, Human
gaccucgugauccgcccaccuc

SEQ ID NO: 1235059 - RNA, 24 nt, Human
gaccucgugauccgcccaccucgg

SEQ ID NO: 1235060 - RNA, 26 nt, Human
gacuccagcgccugcugugguggggu

SEQ ID NO: 1235061 - RNA, 21 nt, Human
gagauggagucuugcucuguc

SEQ ID NO: 1235062 - RNA, 18 nt, Human
gagaugggguuucaccau

SEQ ID NO: 1235063 - RNA, 24 nt, Human
gagaugggguuucaccauguuagc

SEQ ID NO: 1235064 - RNA, 19 nt, Human
gaggacuccaaauuuucug

SEQ ID NO: 1235065 - RNA, 24 nt, Human
gagguggggggaucacugagguca

SEQ ID NO: 1235066 - RNA, 18 nt, Human
gagugcugacuuccucuc

SEQ ID NO: 1235067 - RNA, 23 nt, Human
gaucacugaggucagaaguucga

SEQ ID NO: 1235068 - RNA, 18 nt, Human
gauuacaggcgugagcca

SEQ ID NO: 1235069 - RNA, 21 nt, Human
gauuacaggcgugagccacca

SEQ ID NO: 1235070 - RNA, 22 nt, Human
gauuacaggcgugagccaccac

SEQ ID NO: 1235071 - RNA, 22 nt, Human
gcaagcucugccucccagguuc

SEQ ID NO: 1235072 - RNA, 20 nt, Human
gccucagccucccgaguagc

SEQ ID NO: 1235073 - RNA, 25 nt, Human
gccucccagguucacgccauucucc

SEQ ID NO: 1235074 - RNA, 21 nt, Human
gcucacugcaagcucugccuc

SEQ ID NO: 1235075 - RNA, 25 nt, Human
gcucugucacccaggcuggagugca

SEQ ID NO: 1235076 - RNA, 21 nt, Human
ggacuccuaggcuacaaaccu

SEQ ID NO: 1235077 - RNA, 19 nt, Human
ggauuacaggcgugagcca

SEQ ID NO: 1235078 - RNA, 20 nt, Human
gggccgggugugguggcuca

SEQ ID NO: 1235079 - RNA, 22 nt, Human
gggggccgggugugguggcuca

SEQ ID NO: 1235080 - RNA, 24 nt, Human
gggggccgggugugguggcucaca

SEQ ID NO: 1235081 - RNA, 22 nt, Human
gggguuucaccauguuagccag

SEQ ID NO: 1235082 - RNA, 20 nt, Human
ggucuugaucuccugaccuc

SEQ ID NO: 1235083 - RNA, 24 nt, Human
gguggcucacacccauaaucccag

SEQ ID NO: 1235084 - RNA, 23 nt, Human
ggugugguggcucacacccauaa

SEQ ID NO: 1235085 - RNA, 24 nt, Human
gguuucaccauguuagccaggaug

SEQ ID NO: 1235086 - RNA, 23 nt, Human
guagagaugggguuucaccaugu

SEQ ID NO: 1235087 - RNA, 24 nt, Human
gucuugcucugucacccaggcugg

SEQ ID NO: 1235088 - RNA, 24 nt, Human
gugagccaccacacccagccucuu

SEQ ID NO: 1235089 - RNA, 24 nt, Human
gugauccgcccaccucggccuccc

SEQ ID NO: 1235090 - RNA, 18 nt, Human
guggugggguaggguggg

SEQ ID NO: 1235091 - RNA, 19 nt, Human
guugcagugagccgagauc

SEQ ID NO: 1235092 - RNA, 21 nt, Human
guugcagugagccgagaucgc

SEQ ID NO: 1235093 - RNA, 21 nt, Human
uaaaaauacaaaaauuagcca

SEQ ID NO: 1235094 - RNA, 22 nt, Human
uaaagagggugaagcaaaaaug

SEQ ID NO: 1235095 - RNA, 23 nt, Human
uaaagagggugaagcaaaaaugg

SEQ ID NO: 1235096 - RNA, 22 nt, Human
uaaggugaaauccgagaacacu

SEQ ID NO: 1235097 - RNA, 24 nt, Human
uaauuuagaaacaaucccuauuua

SEQ ID NO: 1235098 - RNA, 28 nt, Human
uaauuuuuuucuguauuuuuaguagaga

SEQ ID NO: 1235099 - RNA, 23 nt, Human
uacacaaaccuaggugguguagc

SEQ ID NO: 1235100 - RNA, 24 nt, Human
uacaggcgugagccaccacaccca

SEQ ID NO: 1235101 - RNA, 24 nt, Human
uaccugcaaucccagcuacucagg

SEQ ID NO: 1235102 - RNA, 22 nt, Human
uagagaugggguuucaccaugu

SEQ ID NO: 1235103 - RNA, 20 nt, Human
uagcaugauccccaguuuaa

SEQ ID NO: 1235104 - RNA, 22 nt, Human
uagccccaaguuaaguucccuc

SEQ ID NO: 1235105 - RNA, 24 nt, Human
uaguagagaugggguuucaccaug

SEQ ID NO: 1235106 - RNA, 25 nt, Human
uaguagagaugggguuucaccaugu

SEQ ID NO: 1235107 - RNA, 18 nt, Human
uaugaaaugcaaacuagc

SEQ ID NO: 1235108 - RNA, 23 nt, Human
uauucacucaccuaaauuucaca

SEQ ID NO: 1235109 - RNA, 23 nt, Human
ucaacacagccauuccccuagaa

SEQ ID NO: 1235110 - RNA, 24 nt, Human
ucaccauguuagccaggauggucu

SEQ ID NO: 1235111 - RNA, 22 nt, Human
ucacccaggcuggagugcagug

SEQ ID NO: 1235112 - RNA, 21 nt, Human
ucaccuguguucagagaucua

SEQ ID NO: 1235113 - RNA, 25 nt, Human
ucacuaggugauuucaccauugugc

SEQ ID NO: 1235114 - RNA, 18 nt, Human
ucacugcaagcucugccu

SEQ ID NO: 1235115 - RNA, 18 nt, Human
ucacugcaagcucugccu

SEQ ID NO: 1235116 - RNA, 19 nt, Human
ucacugcaagcucugccuc

SEQ ID NO: 1235117 - RNA, 24 nt, Human
ucacugcaagcucugccucccagg

SEQ ID NO: 1235118 - RNA, 23 nt, Human
ucagccucccgaguagcugggac

SEQ ID NO: 1235119 - RNA, 23 nt, Human
ucauauauucacucaccuaaaag

SEQ ID NO: 1235120 - RNA, 19 nt, Human
uccaggcacccaccaccau

SEQ ID NO: 1235121 - RNA, 24 nt, Human
ucccaaagugcugggauuacaggc

SEQ ID NO: 1235122 - RNA, 21 nt, Human
ucccaaggaagucaccggacc

SEQ ID NO: 1235123 - RNA, 22 nt, Human
ucccaaggaagucaccggaccu

SEQ ID NO: 1235124 - RNA, 18 nt, Human
ucccaggacuccagcgcc

SEQ ID NO: 1235125 - RNA, 19 nt, Human
ucccagguucacgccauuc

SEQ ID NO: 1235126 - RNA, 20 nt, Human
ucccagguucacgccauucu

SEQ ID NO: 1235127 - RNA, 21 nt, Human
ucccagguucacgccauucuc

SEQ ID NO: 1235128 - RNA, 24 nt, Human
ucccagguucacgccauucuccug

SEQ ID NO: 1235129 - RNA, 19 nt, Human
ucccauccugcccugccgg

SEQ ID NO: 1235130 - RNA, 23 nt, Human
uccccaguuuaaaggugaggaaa

SEQ ID NO: 1235131 - RNA, 19 nt, Human
uccccuagaaguuacagca

SEQ ID NO: 1235132 - RNA, 24 nt, Human
ucccgaguagcugggacuccaggc

SEQ ID NO: 1235133 - RNA, 20 nt, Human
ucgcaacauugcacuucagc

SEQ ID NO: 1235134 - RNA, 18 nt, Human
ucgcuugaaccugggagg

SEQ ID NO: 1235135 - RNA, 18 nt, Human
ucggccucccaaagugcu

SEQ ID NO: 1235136 - RNA, 23 nt, Human
ucuacauauagaaagcuagggac

SEQ ID NO: 1235137 - RNA, 24 nt, Human
ucuccugccucagccucccgagua

SEQ ID NO: 1235138 - RNA, 21 nt, Human
ucucuacuaaaaauacaaaaa

SEQ ID NO: 1235139 - RNA, 24 nt, Human
ucugucacccaggcuggagugcag

SEQ ID NO: 1235140 - RNA, 23 nt, Human
ucuugcucugucacccaggcugg

SEQ ID NO: 1235141 - RNA, 24 nt, Human
ucuugcucugucacccaggcugga

SEQ ID NO: 1235142 - RNA, 20 nt, Human
ugaaaugcaaacuagcauga

SEQ ID NO: 1235143 - RNA, 24 nt, Human
ugaaccugggaggcagagguugca

SEQ ID NO: 1235144 - RNA, 24 nt, Human
ugaccaacauggugaaacuccauc

SEQ ID NO: 1235145 - RNA, 21 nt, Human
ugagaaaugcgucacuaggug

SEQ ID NO: 1235146 - RNA, 20 nt, Human
ugaggaaauugagucacagg

SEQ ID NO: 1235147 - RNA, 20 nt, Human
ugaggagaagggagaguuga

SEQ ID NO: 1235148 - RNA, 24 nt, Human
ugauccgcccaccucggccuccca

SEQ ID NO: 1235149 - RNA, 19 nt, Human
ugcacuucagccugggcaa

SEQ ID NO: 1235150 - RNA, 22 nt, Human
ugcaguggugcaaucuuggcuc

SEQ ID NO: 1235151 - RNA, 24 nt, Human
ugccucagccucccgaguagcugg

SEQ ID NO: 1235152 - RNA, 19 nt, Human
ugccucccagguucacgcc

SEQ ID NO: 1235153 - RNA, 20 nt, Human
ugccuggcauaggcauaggg

SEQ ID NO: 1235154 - RNA, 24 nt, Human
ugcucugucacccaggcuggagug

SEQ ID NO: 1235155 - RNA, 24 nt, Human
ugcugggauuacaggcgugagcca

SEQ ID NO: 1235156 - RNA, 18 nt, Human
uggaaucaacucuuaacc

SEQ ID NO: 1235157 - RNA, 19 nt, Human
uggagucuugcucugucac

SEQ ID NO: 1235158 - RNA, 23 nt, Human
uggagugcaguggugcaaucuug

SEQ ID NO: 1235159 - RNA, 24 nt, Human
uggagugcaguggugcaaucuugg

SEQ ID NO: 1235160 - RNA, 19 nt, Human
uggcucacugcaagcucug

SEQ ID NO: 1235161 - RNA, 18 nt, Human
ugggaggaggcugaacug

SEQ ID NO: 1235162 - RNA, 24 nt, Human
ugggaggcagagguugcagugagc

SEQ ID NO: 1235163 - RNA, 24 nt, Human
ugggaggccgagguggggggauca

SEQ ID NO: 1235164 - RNA, 18 nt, Human
ugggauuacaggcgugag

SEQ ID NO: 1235165 - RNA, 19 nt, Human
ugggauuacaggcgugagc

SEQ ID NO: 1235166 - RNA, 22 nt, Human
ugggauuacaggcgugagccac

SEQ ID NO: 1235167 - RNA, 23 nt, Human
ugggauuacaggcgugagccacc

SEQ ID NO: 1235168 - RNA, 24 nt, Human
ugggauuacaggcgugagccacca

SEQ ID NO: 1235169 - RNA, 27 nt, Human
ugggccucagacccugguggucccagg

SEQ ID NO: 1235170 - RNA, 24 nt, Human
ugggguuucaccauguuagccagg

SEQ ID NO: 1235171 - RNA, 22 nt, Human
uggugcauaccugcaaucccag

SEQ ID NO: 1235172 - RNA, 21 nt, Human
uguaacuagaacccagcugac

SEQ ID NO: 1235173 - RNA, 21 nt, Human
ugucacccaggcuggagugca

SEQ ID NO: 1235174 - RNA, 24 nt, Human
uguucagagaucuacccugugugc

SEQ ID NO: 1235175 - RNA, 18 nt, Human
uuaguagagaugggguuu

SEQ ID NO: 1235176 - RNA, 22 nt, Human
uuaguagagaugggguuucacc

SEQ ID NO: 1235177 - RNA, 24 nt, Human
uuaguagagaugggguuucaccau

SEQ ID NO: 1235178 - RNA, 23 nt, Human
uucaucuuauuccagugccuggc

SEQ ID NO: 1235179 - RNA, 20 nt, Human
uucuguauuuuuaguagaga

SEQ ID NO: 1235180 - RNA, 24 nt, Human
uugaaccugggaggcagagguugc

SEQ ID NO: 1235181 - RNA, 22 nt, Human
uugagucacaggcagaauaacu

SEQ ID NO: 1235182 - RNA, 19 nt, Human
uugcagugagccgagaucg

SEQ ID NO: 1235183 - RNA, 20 nt, Human
uugcagugagccgagaucgc

SEQ ID NO: 1235184 - RNA, 24 nt, Human
uugcucugucacccaggcuggagu

SEQ ID NO: 1235185 - RNA, 25 nt, Human
uugggaggccgagguggggggauca

SEQ ID NO: 1235186 - RNA, 25 nt, Human
uugggguaaaaguuaaauaaaacac

SEQ ID NO: 1235187 - RNA, 19 nt, Human
uuucaccauguuagccagg

SEQ ID NO: 1235188 - RNA, 20 nt, Human
uuucaccauguuagccagga

SEQ ID NO: 1235189 - RNA, 24 nt, Human
uuucauaugcagucaugcauugcu

SEQ ID NO: 1235190 - RNA, 21 nt, Human
uuucuguauuuuuaguagaga

SEQ ID NO: 1235191 - RNA, 21 nt, Human
uuuucuguauuuuuaguagag

SEQ ID NO: 1235192 - RNA, 24 nt, Human
uuuuuaguagagaugggguuucac

SEQ ID NO: 1235193 - RNA, 25 nt, Human
aaggagccaccucuccgggugucuc

SEQ ID NO: 1235194 - RNA, 21 nt, Human
agacggcccgcaugggccuca

SEQ ID NO: 1235195 - RNA, 19 nt, Human
aucugggacccgggugucc

SEQ ID NO: 1235196 - RNA, 23 nt, Human
cacaggcccagcucucgcuggcu

SEQ ID NO: 1235197 - RNA, 24 nt, Human
ccacaggcccagcucucgcuggcu

SEQ ID NO: 1235198 - RNA, 20 nt, Human
ccaccacuuggccuuuucug

SEQ ID NO: 1235199 - RNA, 18 nt, Human
ccccucgugggccgcaaa

SEQ ID NO: 1235200 - RNA, 22 nt, Human
ccgcaaaccucuccgccaccac

SEQ ID NO: 1235201 - RNA, 22 nt, Human
cgccaccacuuggccuuuucug

SEQ ID NO: 1235202 - RNA, 20 nt, Human
cgucugggugcauaucaucc

SEQ ID NO: 1235203 - RNA, 23 nt, Human
gcccuggcgcgugaagacggccc

SEQ ID NO: 1235204 - RNA, 18 nt, Human
gcugcggggcgcucacgc

SEQ ID NO: 1235205 - RNA, 21 nt, Human
ggcccagcucucgcuggcuca

SEQ ID NO: 1235206 - RNA, 21 nt, Human
ggcccuggcgcgugaagacgg

SEQ ID NO: 1235207 - RNA, 21 nt, Human
uccaggcucagcagcaccucc

SEQ ID NO: 1235208 - RNA, 22 nt, Human
ucucgcuggcucaugcggguga

SEQ ID NO: 1235209 - RNA, 24 nt, Human
ugcaggugguggcuagcaggcuac

SEQ ID NO: 1235210 - RNA, 22 nt, Human
ugcagugccacuggcuccucga

SEQ ID NO: 1235211 - RNA, 19 nt, Human
ugccacuggcuccucgaag

SEQ ID NO: 1235212 - RNA, 18 nt, Human
uggcuagcaggcuaccgu

SEQ ID NO: 1235213 - RNA, 20 nt, Human
ugguccugagcgggcugcgg

SEQ ID NO: 1235214 - RNA, 27 nt, Human
uuucuggggucaaugaugcgcaagguc

SEQ ID NO: 1235215 - RNA, 19 nt, Human
aaacaaaaaacugagaccc

SEQ ID NO: 1235216 - RNA, 21 nt, Human
aaacaaaaaacugagacccga

SEQ ID NO: 1235217 - RNA, 24 nt, Human
aaauguagucuugggccccacccc

SEQ ID NO: 1235218 - RNA, 23 nt, Human
aacaaaaaacugagacccgaugc

SEQ ID NO: 1235219 - RNA, 22 nt, Human
aacugcaaggauacaaacaaac

SEQ ID NO: 1235220 - RNA, 18 nt, Human
aagcaggaagacccugag

SEQ ID NO: 1235221 - RNA, 20 nt, Human
aagugccaguggaaagagac

SEQ ID NO: 1235222 - RNA, 26 nt, Human
aagugugcuccugaaccagcaaaacc

SEQ ID NO: 1235223 - RNA, 21 nt, Human
acagaggggagaaugccuaca

SEQ ID NO: 1235224 - RNA, 20 nt, Human
acccaccuucucccccuccc

SEQ ID NO: 1235225 - RNA, 24 nt, Human
acccaccuucucccccucccuucc

SEQ ID NO: 1235226 - RNA, 24 nt, Human
acccugaggggcaaucacuaggaa

SEQ ID NO: 1235227 - RNA, 26 nt, Human
acccugaggggcaaucacuaggaaac

SEQ ID NO: 1235228 - RNA, 19 nt, Human
acuucaaggacacugucaa

SEQ ID NO: 1235229 - RNA, 26 nt, Human
agaaaagcaggaagacccugaggggc

SEQ ID NO: 1235230 - RNA, 20 nt, Human
agcugcuuuggcgucucucc

SEQ ID NO: 1235231 - RNA, 20 nt, Human
aggccagaguccauggcagc

SEQ ID NO: 1235232 - RNA, 24 nt, Human
agggcgcugcaggagcagaggagg

SEQ ID NO: 1235233 - RNA, 20 nt, Human
caaaaaacugagacccgaug

SEQ ID NO: 1235234 - RNA, 24 nt, Human
caaaaaacugagacccgaugcggu

SEQ ID NO: 1235235 - RNA, 21 nt, Human
caaacaaaaaacugagacccg

SEQ ID NO: 1235236 - RNA, 24 nt, Human
caaacaaaaaacugagacccgaug

SEQ ID NO: 1235237 - RNA, 21 nt, Human
caaagacccaccagaucaaac

SEQ ID NO: 1235238 - RNA, 20 nt, Human
caagaggagccucuggagca

SEQ ID NO: 1235239 - RNA, 19 nt, Human
caccccaaagacccaccag

SEQ ID NO: 1235240 - RNA, 24 nt, Human
caccccaaagacccaccagaucaa

SEQ ID NO: 1235241 - RNA, 27 nt, Human
caccccaaagacccaccagaucaaacc

SEQ ID NO: 1235242 - RNA, 24 nt, Human
cacccucggagcucucaguuuugu

SEQ ID NO: 1235243 - RNA, 19 nt, Human
cagcucugacaucagccau

SEQ ID NO: 1235244 - RNA, 21 nt, Human
cagcugcugcugcugagcucc

SEQ ID NO: 1235245 - RNA, 18 nt, Human
caguggccuccgaaccag

SEQ ID NO: 1235246 - RNA, 23 nt, Human
caguggggcuucucucugcaucu

SEQ ID NO: 1235247 - RNA, 23 nt, Human
cauaacugcaaggauacaaacaa

SEQ ID NO: 1235248 - RNA, 20 nt, Human
ccacgaugguagcaaagcag

SEQ ID NO: 1235249 - RNA, 19 nt, Human
ccagcucugacaucagcca

SEQ ID NO: 1235250 - RNA, 21 nt, Human
ccaguggaaagagacugcagg

SEQ ID NO: 1235251 - RNA, 23 nt, Human
ccccaaagacccaccagaucaaa

SEQ ID NO: 1235252 - RNA, 19 nt, Human
ccccaccccaaagacccac

SEQ ID NO: 1235253 - RNA, 22 nt, Human
cccccucccuuccauucuucca

SEQ ID NO: 1235254 - RNA, 20 nt, Human
ccccucccuuccauucuucc

SEQ ID NO: 1235255 - RNA, 20 nt, Human
cccugaaggcaaggcccagg

SEQ ID NO: 1235256 - RNA, 19 nt, Human
ccgaaccaguucugcuccu

SEQ ID NO: 1235257 - RNA, 21 nt, Human
ccucuggagcaaggucagcuu

SEQ ID NO: 1235258 - RNA, 22 nt, Human
ccuuggucggcagcugcuggca

SEQ ID NO: 1235259 - RNA, 23 nt, Human
cgggagcucaucacaaauguagu

SEQ ID NO: 1235260 - RNA, 23 nt, Human
cgguagagcugcaguggccuccg

SEQ ID NO: 1235261 - RNA, 21 nt, Human
cucccugaaggcaaggcccag

SEQ ID NO: 1235262 - RNA, 19 nt, Human
cuccuuggcagacugcugg

SEQ ID NO: 1235263 - RNA, 23 nt, Human
cucgcaaacaaaaaacugagacc

SEQ ID NO: 1235264 - RNA, 21 nt, Human
cugcaguggccuccgaaccag

SEQ ID NO: 1235265 - RNA, 18 nt, Human
cugucaugugccacaucc

SEQ ID NO: 1235266 - RNA, 24 nt, Human
cuucaaggacacugucaacucccu

SEQ ID NO: 1235267 - RNA, 18 nt, Human
cuugggccccaccccaaa

SEQ ID NO: 1235268 - RNA, 21 nt, Human
cuugggccccaccccaaagac

SEQ ID NO: 1235269 - RNA, 19 nt, Human
gagcccacccaccuucucc

SEQ ID NO: 1235270 - RNA, 19 nt, Human
gaguccauggcagcugcuu

SEQ ID NO: 1235271 - RNA, 18 nt, Human
gcagcugcuggcaacagc

SEQ ID NO: 1235272 - RNA, 18 nt, Human
gcuuucagccaacaaggc

SEQ ID NO: 1235273 - RNA, 22 nt, Human
ggagaaugccuacaggccugag

SEQ ID NO: 1235274 - RNA, 22 nt, Human
ggagcagaggagggggcggggc

SEQ ID NO: 1235275 - RNA, 21 nt, Human
ggcccagggcuuugacuuccc

SEQ ID NO: 1235276 - RNA, 19 nt, Human
ggccgcggcaagaggagcc

SEQ ID NO: 1235277 - RNA, 23 nt, Human
ggcuuucagccaacaaggccaau

SEQ ID NO: 1235278 - RNA, 19 nt, Human
gggccccaccccaaagacc

SEQ ID NO: 1235279 - RNA, 23 nt, Human
gggcggggcaggacggcuuccuu

SEQ ID NO: 1235280 - RNA, 18 nt, Human
ggucggcagcugcuggca

SEQ ID NO: 1235281 - RNA, 20 nt, Human
guagagcugcaguggccucc

SEQ ID NO: 1235282 - RNA, 18 nt, Human
guagucuugggccccacc

SEQ ID NO: 1235283 - RNA, 21 nt, Human
uaacugcaaggauacaaacaa

SEQ ID NO: 1235284 - RNA, 22 nt, Human
uaacugcaaggauacaaacaaa

SEQ ID NO: 1235285 - RNA, 19 nt, Human
uacaagcagggacagggca

SEQ ID NO: 1235286 - RNA, 19 nt, Human
uagagcugcaguggccucc

SEQ ID NO: 1235287 - RNA, 24 nt, Human
uagauaucucugagucacuuuuuu

SEQ ID NO: 1235288 - RNA, 22 nt, Human
ucaauggcucuuuuaauaaucu

SEQ ID NO: 1235289 - RNA, 19 nt, Human
ucaggcacugucaugugcc

SEQ ID NO: 1235290 - RNA, 19 nt, Human
uccacgaugguagcaaagc

SEQ ID NO: 1235291 - RNA, 20 nt, Human
uccagaggccaggaaggcuc

SEQ ID NO: 1235292 - RNA, 22 nt, Human
uccagucagcaucuucaauggc

SEQ ID NO: 1235293 - RNA, 20 nt, Human
uccccugauuucuggcuuuc

SEQ ID NO: 1235294 - RNA, 19 nt, Human
ucccuaggcauggagagac

SEQ ID NO: 1235295 - RNA, 22 nt, Human
ucccucaccggcaggguagggu

SEQ ID NO: 1235296 - RNA, 22 nt, Human
ucccugaaggcaaggcccaggg

SEQ ID NO: 1235297 - RNA, 20 nt, Human
ucccugagcccacccaccuu

SEQ ID NO: 1235298 - RNA, 19 nt, Human
uccgugagacccucugucc

SEQ ID NO: 1235299 - RNA, 20 nt, Human
uccgugagacccucugucca

SEQ ID NO: 1235300 - RNA, 19 nt, Human
uccugaaccagcaaaaccc

SEQ ID NO: 1235301 - RNA, 21 nt, Human
ucugaaugaacccgaaaacuc

SEQ ID NO: 1235302 - RNA, 21 nt, Human
ucuggaacucaacuucaagug

SEQ ID NO: 1235303 - RNA, 24 nt, Human
ucuuccaaaccagcugcugcugcc

SEQ ID NO: 1235304 - RNA, 21 nt, Human
ucuucuggccacucuggccgu

SEQ ID NO: 1235305 - RNA, 18 nt, Human
ucuugggccccaccccaa

SEQ ID NO: 1235306 - RNA, 24 nt, Human
ucuugggccccaccccaaagaccc

SEQ ID NO: 1235307 - RNA, 22 nt, Human
ugagaagacacacgagcuucca

SEQ ID NO: 1235308 - RNA, 18 nt, Human
ugagacccucuguccagc

SEQ ID NO: 1235309 - RNA, 18 nt, Human
ugcaaggauacaaacaaa

SEQ ID NO: 1235310 - RNA, 21 nt, Human
ugcaggcacauuuuaaagucu

SEQ ID NO: 1235311 - RNA, 19 nt, Human
uggaaagagacugcaggug

SEQ ID NO: 1235312 - RNA, 19 nt, Human
uggcagacugcugggugug

SEQ ID NO: 1235313 - RNA, 24 nt, Human
uggcucuuccaaaccagcugcugc

SEQ ID NO: 1235314 - RNA, 18 nt, Human
ugugagggcucaggggcu

SEQ ID NO: 1235315 - RNA, 18 nt, Human
ugugccacauccugugug

SEQ ID NO: 1235316 - RNA, 18 nt, Human
uguggugggcacuucacc

SEQ ID NO: 1235317 - RNA, 25 nt, Human
uucaaagugugcuccugaaccagca

SEQ ID NO: 1235318 - RNA, 18 nt, Human
uuccagaggccaggaagg

SEQ ID NO: 1235319 - RNA, 19 nt, Human
uugaagggagcccuucagg

SEQ ID NO: 1235320 - RNA, 19 nt, Human
aagccugcuaggagcgccu

SEQ ID NO: 1235321 - RNA, 18 nt, Human
caaugggcucccgccucc

SEQ ID NO: 1235322 - RNA, 30 nt, Human
caaugggcucccgccuccuccgccgguccu

SEQ ID NO: 1235323 - RNA, 19 nt, Human
cagcagaacaggcagcgaa

SEQ ID NO: 1235324 - RNA, 23 nt, Human
ccugcuaggagcgccugucucca

SEQ ID NO: 1235325 - RNA, 19 nt, Human
cgcgucuuaaacccgaagc

SEQ ID NO: 1235326 - RNA, 22 nt, Human
cuuaaacccgaagccggaaaag

SEQ ID NO: 1235327 - RNA, 21 nt, Human
gaucagcagaacaggcagcga

SEQ ID NO: 1235328 - RNA, 26 nt, Human
gccacaggcucucgggacaaugggcu

SEQ ID NO: 1235329 - RNA, 18 nt, Human
gccgguccagccaucacg

SEQ ID NO: 1235330 - RNA, 22 nt, Human
gggcucccgccuccuccgccgg

SEQ ID NO: 1235331 - RNA, 21 nt, Human
uccuccgccgguccagccauc

SEQ ID NO: 1235332 - RNA, 20 nt, Human
ugcuuguacucaccugcccu

SEQ ID NO: 1235333 - RNA, 21 nt, Human
ugggcucacucguguguaggu

SEQ ID NO: 1235334 - RNA, 20 nt, Human
uggggccgaucagcagaaca

SEQ ID NO: 1235335 - RNA, 21 nt, Human
uuguacucaccugcccugggc

SEQ ID NO: 1235336 - RNA, 19 nt, Human
aaaaagcaaaaggcugcug

SEQ ID NO: 1235337 - RNA, 24 nt, Human
aagcaaccaggaggagguaagagc

SEQ ID NO: 1235338 - RNA, 21 nt, Human
aaggggagggaagaaaaaaga

SEQ ID NO: 1235339 - RNA, 19 nt, Human
aaggugaaaagcugguguu

SEQ ID NO: 1235340 - RNA, 21 nt, Human
acccuugauaaggggagggaa

SEQ ID NO: 1235341 - RNA, 21 nt, Human
agaaaaaagaaaaagcaaaag

SEQ ID NO: 1235342 - RNA, 18 nt, Human
agcuggcugguuccuucu

SEQ ID NO: 1235343 - RNA, 20 nt, Human
aggaaaaggugaaaagcugg

SEQ ID NO: 1235344 - RNA, 20 nt, Human
auaaacuuggggugggggca

SEQ ID NO: 1235345 - RNA, 25 nt, Human
aucuuccuuggugucauuccuguug

SEQ ID NO: 1235346 - RNA, 19 nt, Human
caagaaaagcaaccaggag

SEQ ID NO: 1235347 - RNA, 18 nt, Human
cagaaacuuccugggguu

SEQ ID NO: 1235348 - RNA, 19 nt, Human
cagcggggcccgaggcggc

SEQ ID NO: 1235349 - RNA, 21 nt, Human
cagguggcacaugacagauca

SEQ ID NO: 1235350 - RNA, 19 nt, Human
cauuuggaaaaacuggcag

SEQ ID NO: 1235351 - RNA, 19 nt, Human
ccgggggggcggggguucc

SEQ ID NO: 1235352 - RNA, 26 nt, Human
cgcccuucucuccuuccacgacauca

SEQ ID NO: 1235353 - RNA, 22 nt, Human
cggcugcccuucacggguacuc

SEQ ID NO: 1235354 - RNA, 25 nt, Human
cugaacaguaaggauggcucccuuc

SEQ ID NO: 1235355 - RNA, 19 nt, Human
cugcgcagaaacuuccugg

SEQ ID NO: 1235356 - RNA, 24 nt, Human
cuggugaacaaagacaucuuccuu

SEQ ID NO: 1235357 - RNA, 20 nt, Human
gcagauaccagauggcagcu

SEQ ID NO: 1235358 - RNA, 21 nt, Human
gcugguuccuucucagccuga

SEQ ID NO: 1235359 - RNA, 23 nt, Human
ggcaagaaaagcaaccaggagga

SEQ ID NO: 1235360 - RNA, 27 nt, Human
ggcaagaaaagcaaccaggaggaggua

SEQ ID NO: 1235361 - RNA, 24 nt, Human
ggcagcucuggguguccuuugagu

SEQ ID NO: 1235362 - RNA, 22 nt, Human
gggaagaaaaaagaaaaagcaa

SEQ ID NO: 1235363 - RNA, 22 nt, Human
ggggucccagcagcggggcccg

SEQ ID NO: 1235364 - RNA, 21 nt, Human
ggugguggggcaacugaggga

SEQ ID NO: 1235365 - RNA, 28 nt, Human
guugcugucucugaacaguaaggauggc

SEQ ID NO: 1235366 - RNA, 18 nt, Human
uccgggccgggggggcgg

SEQ ID NO: 1235367 - RNA, 19 nt, Human
uccgggccgggggggcggg

SEQ ID NO: 1235368 - RNA, 22 nt, Human
uccugagucucaaggaaaaggu

SEQ ID NO: 1235369 - RNA, 21 nt, Human
ucgccggauugccaggggugc

SEQ ID NO: 1235370 - RNA, 20 nt, Human
ugaacaaagacaucuuccuu

SEQ ID NO: 1235371 - RNA, 21 nt, Human
ugcgcagaaacuuccuggggu

SEQ ID NO: 1235372 - RNA, 21 nt, Human
ugcgcccuucucuccuuccac

SEQ ID NO: 1235373 - RNA, 23 nt, Human
uggcuucugcgcccuucucuccu

SEQ ID NO: 1235374 - RNA, 19 nt, Human
uggguaggguacaggucau

SEQ ID NO: 1235375 - RNA, 22 nt, Human
uuaguggcuucugcgcccuucu

SEQ ID NO: 1235376 - RNA, 19 nt, Human
uuccuuggugucauuccug

SEQ ID NO: 1235377 - RNA, 24 nt, Human
uuccuuggugucauuccuguugau

SEQ ID NO: 1235378 - RNA, 19 nt, Human
uucuuuuaauagcugucug

SEQ ID NO: 1235379 - RNA, 23 nt, Human
aacggcgguggcggcggcggcgg

SEQ ID NO: 1235380 - RNA, 26 nt, Human
aacggcgguggcggcggcggcggcga

SEQ ID NO: 1235381 - RNA, 28 nt, Human
acccugguggccccacagccccacauug

SEQ ID NO: 1235382 - RNA, 18 nt, Human
accugggccaccccccuc

SEQ ID NO: 1235383 - RNA, 19 nt, Human
accugggccaccccccucu

SEQ ID NO: 1235384 - RNA, 21 nt, Human
auggaggggggguccuagggc

SEQ ID NO: 1235385 - RNA, 24 nt, Human
cacagccccacauuggagggcagg

SEQ ID NO: 1235386 - RNA, 21 nt, Human
caccccccucugccccccacc

SEQ ID NO: 1235387 - RNA, 18 nt, Human
caccugcacaggguccag

SEQ ID NO: 1235388 - RNA, 18 nt, Human
cagcagcaggaguaagag

SEQ ID NO: 1235389 - RNA, 21 nt, Human
cagcagcgacggcgacaacgg

SEQ ID NO: 1235390 - RNA, 18 nt, Human
cagcgacggcgacaacgg

SEQ ID NO: 1235391 - RNA, 27 nt, Human
caggagaaagaggaguacugcgugggu

SEQ ID NO: 1235392 - RNA, 22 nt, Human
caggaugcaguggauguggaca

SEQ ID NO: 1235393 - RNA, 21 nt, Human
cauaguugccacguugaugcc

SEQ ID NO: 1235394 - RNA, 22 nt, Human
ccacauuggagggcaggcccgc

SEQ ID NO: 1235395 - RNA, 19 nt, Human
cccacccccggccccaacc

SEQ ID NO: 1235396 - RNA, 22 nt, Human
cccacccccggccccaacccac

SEQ ID NO: 1235397 - RNA, 18 nt, Human
ccccacccccggccccaa

SEQ ID NO: 1235398 - RNA, 18 nt, Human
ccccccacccccggcccc

SEQ ID NO: 1235399 - RNA, 23 nt, Human
ccccccacccccggccccaaccc

SEQ ID NO: 1235400 - RNA, 18 nt, Human
ccccccucugccccccac

SEQ ID NO: 1235401 - RNA, 18 nt, Human
cccccggccccaacccac

SEQ ID NO: 1235402 - RNA, 18 nt, Human
ccuccuccagguaggaau

SEQ ID NO: 1235403 - RNA, 18 nt, Human
ccucugccccccaccccc

SEQ ID NO: 1235404 - RNA, 19 nt, Human
ccugaucaaagaaaggcac

SEQ ID NO: 1235405 - RNA, 19 nt, Human
ccugggccaccccccucug

SEQ ID NO: 1235406 - RNA, 24 nt, Human
ccugggccaccccccucugccccc

SEQ ID NO: 1235407 - RNA, 24 nt, Human
cggcgacgaacacagcgaagaaga

SEQ ID NO: 1235408 - RNA, 21 nt, Human
cuaaggcguucuggaguccau

SEQ ID NO: 1235409 - RNA, 19 nt, Human
cugcggccacugcuggugg

SEQ ID NO: 1235410 - RNA, 23 nt, Human
gacaacggcgguggcggcggcgg

SEQ ID NO: 1235411 - RNA, 20 nt, Human
gacaagaacgaugaggccca

SEQ ID NO: 1235412 - RNA, 20 nt, Human
gagaaagaggaguacugcgu

SEQ ID NO: 1235413 - RNA, 23 nt, Human
gcagcgacggcgacaacggcggu

SEQ ID NO: 1235414 - RNA, 21 nt, Human
gcaucgugggggcuuucuugg

SEQ ID NO: 1235415 - RNA, 22 nt, Human
gcgacgaacacagcgaagaaga

SEQ ID NO: 1235416 - RNA, 23 nt, Human
gcggcggcggcggcgacgaacac

SEQ ID NO: 1235417 - RNA, 22 nt, Human
ggacaucuucaccugcacaggg

SEQ ID NO: 1235418 - RNA, 20 nt, Human
ggacugcagccucagcucaa

SEQ ID NO: 1235419 - RNA, 19 nt, Human
ggcaggagaaagaggagua

SEQ ID NO: 1235420 - RNA, 30 nt, Human; identical to SEQ ID NO: 1097729

SEQ ID NO: 1235421 - RNA, 21 nt, Human
ggcgacgaacacagcgaagaa

SEQ ID NO: 1235422 - RNA, 23 nt, Human
ggcgacgaacacagcgaagaaga

SEQ ID NO: 1235423 - RNA, 29 nt, Human
ggcggcggcggcgacgaacacagcgaagg

SEQ ID NO: 1235424 - RNA, 20 nt, Human
gggccaccccccucugcccc

SEQ ID NO: 1235425 - RNA, 24 nt, Human
ggggguccuagggccaccugggcc

SEQ ID NO: 1235426 - RNA, 23 nt, Human
gggguccuagggccaccugggcc

SEQ ID NO: 1235427 - RNA, 20 nt, Human
gucugggggaccacuugggg

SEQ ID NO: 1235428 - RNA, 22 nt, Human
uaccacccugguggccccacag

SEQ ID NO: 1235429 - RNA, 21 nt, Human
uacgggaagggcagguugucc

SEQ ID NO: 1235430 - RNA, 20 nt, Human
uagagagagggugguggcag

SEQ ID NO: 1235431 - RNA, 23 nt, Human
uagcugguuuuccauggaggggg

SEQ ID NO: 1235432 - RNA, 26 nt, Human
uagcugguuuuccauggagggggggu

SEQ ID NO: 1235433 - RNA, 18 nt, Human
uaguucugcggccacugc

SEQ ID NO: 1235434 - RNA, 24 nt, Human
uauugauugcaacaucucacggug

SEQ ID NO: 1235435 - RNA, 19 nt, Human
ucugaguagcccaaucaau

SEQ ID NO: 1235436 - RNA, 20 nt, Human
ugacaagaacgaugaggccc

SEQ ID NO: 1235437 - RNA, 21 nt, Human
ugacaagaacgaugaggccca

SEQ ID NO: 1235438 - RNA, 24 nt, Human
ugacagguagagagaggguggugg

SEQ ID NO: 1235439 - RNA, 21 nt, Human
ugcaguggauguggacauccu

SEQ ID NO: 1235440 - RNA, 21 nt, Human
uggauguggacauccugagcc

SEQ ID NO: 1235441 - RNA, 19 nt, Human
uggcggcggcggcggcgac

SEQ ID NO: 1235442 - RNA, 20 nt, Human
ugggauacgggaagggcagg

SEQ ID NO: 1235443 - RNA, 20 nt, Human
uguccuccuccuccagguaa

SEQ ID NO: 1235444 - RNA, 18 nt, Human
uuggagaaaugguggcag

SEQ ID NO: 1235445 - RNA, 25 nt, Human
aagaggcagagcagggccacgagca

SEQ ID NO: 1235446 - RNA, 21 nt, Human
aaggaguuccuaaggaugaug

SEQ ID NO: 1235447 - RNA, 18 nt, Human
acaaagucgaagugcucu

SEQ ID NO: 1235448 - RNA, 19 nt, Human
acagcccucggugcaccac

SEQ ID NO: 1235449 - RNA, 21 nt, Human
acccucugggaucagacacuu

SEQ ID NO: 1235450 - RNA, 22 nt, Human
accgaagcagccugaacccagc

SEQ ID NO: 1235451 - RNA, 26 nt, Human
agaccaggucuccagcuccaccuggu

SEQ ID NO: 1235452 - RNA, 23 nt, Human
agcacgugugggugcuccaaguu

SEQ ID NO: 1235453 - RNA, 20 nt, Human
agcagcucuuuuccuccaag

SEQ ID NO: 1235454 - RNA, 20 nt, Human
agcccgcgggcccccaggua

SEQ ID NO: 1235455 - RNA, 23 nt, Human
agccugaacccagcagcuccccu

SEQ ID NO: 1235456 - RNA, 18 nt, Human
aggaagaggcagagcagg

SEQ ID NO: 1235457 - RNA, 18 nt, Human
aggcccuagagagaccag

SEQ ID NO: 1235458 - RNA, 18 nt, Human
agguggaacgucuacccc

SEQ ID NO: 1235459 - RNA, 19 nt, Human
aucgggccuucgggaccua

SEQ ID NO: 1235460 - RNA, 19 nt, Human
caacuggaugucccggagc

SEQ ID NO: 1235461 - RNA, 22 nt, Human
cacaugguccaguguggccccu

SEQ ID NO: 1235462 - RNA, 18 nt, Human
caccagcccgcgggcccc

SEQ ID NO: 1235463 - RNA, 21 nt, Human
caccagcccgcgggcccccag

SEQ ID NO: 1235464 - RNA, 22 nt, Human
cacccacgauggcccuggacca

SEQ ID NO: 1235465 - RNA, 22 nt, Human
cacccacgauggcccuggaccc

SEQ ID NO: 1235466 - RNA, 18 nt, Human
cacccucugggaucagac

SEQ ID NO: 1235467 - RNA, 20 nt, Human
caccgaagcagccugaaccc

SEQ ID NO: 1235468 - RNA, 21 nt, Human
cagaagccaaggagcauggga

SEQ ID NO: 1235469 - RNA, 18 nt, Human
cagccuucagaagccaag

SEQ ID NO: 1235470 - RNA, 23 nt, Human
caucaaauguccuugagugcaag

SEQ ID NO: 1235471 - RNA, 21 nt, Human
ccaaugccguccagguccuca

SEQ ID NO: 1235472 - RNA, 22 nt, Human
ccaaugccguccagguccucag

SEQ ID NO: 1235473 - RNA, 25 nt, Human
ccaguguggccccuugauccucucu

SEQ ID NO: 1235474 - RNA, 24 nt, Human
cccccagguacgccauggcucccg

SEQ ID NO: 1235475 - RNA, 22 nt, Human
cccccagguacgccauggcucu

SEQ ID NO: 1235476 - RNA, 18 nt, Human
cccccaguucugugccca

SEQ ID NO: 1235477 - RNA, 23 nt, Human
cccggagcagcuucaguagccac

SEQ ID NO: 1235478 - RNA, 20 nt, Human
cccgggcaccgcccagaggc

SEQ ID NO: 1235479 - RNA, 19 nt, Human
cccucugggaucagacacu

SEQ ID NO: 1235480 - RNA, 18 nt, Human
cccuggaccaaacgaagg

SEQ ID NO: 1235481 - RNA, 24 nt, Human
ccgauaccucucgcaggaaguccc

SEQ ID NO: 1235482 - RNA, 18 nt, Human
ccuggucaaggcggaagc

SEQ ID NO: 1235483 - RNA, 18 nt, Human
cgagaaggcuccguggcg

SEQ ID NO: 1235484 - RNA, 21 nt, Human
cgcugggcaggccggcccaug

SEQ ID NO: 1235485 - RNA, 21 nt, Human
cgugcagacgcagcacgugug

SEQ ID NO: 1235486 - RNA, 23 nt, Human
cgugcagacgcagcacguguggg

SEQ ID NO: 1235487 - RNA, 22 nt, Human
cuagcgcauagaagcuuccucu

SEQ ID NO: 1235488 - RNA, 24 nt, Human
cucauaauccauacuaccagcauc

SEQ ID NO: 1235489 - RNA, 19 nt, Human
cuccagcuccaccugguca

SEQ ID NO: 1235490 - RNA, 25 nt, Human
cugugcccaucgggccuucgggacc

SEQ ID NO: 1235491 - RNA, 21 nt, Human
cuugaggccccccucuggcuc

SEQ ID NO: 1235492 - RNA, 19 nt, Human
gaacccagcagcuccccuc

SEQ ID NO: 1235493 - RNA, 20 nt, Human
gacccaguucuuagacuuag

SEQ ID NO: 1235494 - RNA, 22 nt, Human
gagcagcgggggugucggggcc

SEQ ID NO: 1235495 - RNA, 19 nt, Human
gagcaugggagggaggaga

SEQ ID NO: 1235496 - RNA, 19 nt, Human
gcagggccacgagcagcgg

SEQ ID NO: 1235497 - RNA, 18 nt, Human
gcaguucaggauggcugu

SEQ ID NO: 1235498 - RNA, 19 nt, Human
gcccagaggccgcaccagc

SEQ ID NO: 1235499 - RNA, 23 nt, Human
gcccuagagagaccaggucucca

SEQ ID NO: 1235500 - RNA, 19 nt, Human
gcccucaggggccuaggcu

SEQ ID NO: 1235501 - RNA, 22 nt, Human
gccggggccguuaggcgcgcgu

SEQ ID NO: 1235502 - RNA, 18 nt, Human
gccugaacccagcagcuc

SEQ ID NO: 1235503 - RNA, 20 nt, Human
gcuuggucccauguggccag

SEQ ID NO: 1235504 - RNA, 26 nt, Human
ggcccagaacguagccuuuucagagc

SEQ ID NO: 1235505 - RNA, 23 nt, Human
ggcccagccaaaggagcuucagc

SEQ ID NO: 1235506 - RNA, 20 nt, Human
ggcgcaggcucucugggggc

SEQ ID NO: 1235507 - RNA, 23 nt, Human
gggaggagacauuugccagugcc

SEQ ID NO: 1235508 - RNA, 25 nt, Human
gggcccccagguacgccauggcucc

SEQ ID NO: 1235509 - RNA, 19 nt, Human
gggggugucggggccgggg

SEQ ID NO: 1235510 - RNA, 21 nt, Human
guauagcagcucuuuuccucc

SEQ ID NO: 1235511 - RNA, 18 nt, Human
gugcuccaaguucaucau

SEQ ID NO: 1235512 - RNA, 21 nt, Human
guggcgcaggcucucuggggg

SEQ ID NO: 1235513 - RNA, 22 nt, Human
guugguaugggaaaaaacaaag

SEQ ID NO: 1235514 - RNA, 24 nt, Human
uagcagcucuuuuccuccaagucc

SEQ ID NO: 1235515 - RNA, 23 nt, Human
uagggcggggcccgcccaugacg

SEQ ID NO: 1235516 - RNA, 24 nt, Human
uaggggaggguagaagcaguuggu

SEQ ID NO: 1235517 - RNA, 20 nt, Human
uaugauguauagcagcucuu

SEQ ID NO: 1235518 - RNA, 23 nt, Human
uaugauguauagcagcucuuuuc

SEQ ID NO: 1235519 - RNA, 23 nt, Human
ucagccuucagaagccaaggagc

SEQ ID NO: 1235520 - RNA, 22 nt, Human
uccaccuggucaaggcggaagc

SEQ ID NO: 1235521 - RNA, 20 nt, Human
uccauacuaccagcaucaaa

SEQ ID NO: 1235522 - RNA, 22 nt, Human
uccaucauccaggauggcugcc

SEQ ID NO: 1235523 - RNA, 20 nt, Human
ucggacagucugcgcugggc

SEQ ID NO: 1235524 - RNA, 24 nt, Human
ugacagccacugggacacucuugc

SEQ ID NO: 1235525 - RNA, 21 nt, Human
ugcaccacaccgaagcagccu

SEQ ID NO: 1235526 - RNA, 23 nt, Human
ugcaccacaccgaagcagccuga

SEQ ID NO: 1235527 - RNA, 21 nt, Human
ugccaaugccguccagguccu

SEQ ID NO: 1235528 - RNA, 23 nt, Human
ugccgcaggaagaggcagagcag

SEQ ID NO: 1235529 - RNA, 18 nt, Human
uggccaggcccucagggg

SEQ ID NO: 1235530 - RNA, 23 nt, Human
uggcccaguacaaggccgugcag

SEQ ID NO: 1235531 - RNA, 21 nt, Human
uggcucagggaggugccgugg

SEQ ID NO: 1235532 - RNA, 21 nt, Human
ugggaucagacacuugaggcc

SEQ ID NO: 1235533 - RNA, 23 nt, Human
ugggaucuccccagguggaacgu

SEQ ID NO: 1235534 - RNA, 21 nt, Human
uggucaaggcggaagcggcga

SEQ ID NO: 1235535 - RNA, 21 nt, Human
uguagugggcagacuagaucc

SEQ ID NO: 1235536 - RNA, 19 nt, Human
ugucccggagcagcuucag

SEQ ID NO: 1235537 - RNA, 24 nt, Human
ugucggggccggggccguuaggcg

SEQ ID NO: 1235538 - RNA, 25 nt, Human
ugugagagcugggcuggggcagggg

SEQ ID NO: 1235539 - RNA, 22 nt, Human
uguggccaggcccucaggggcc

SEQ ID NO: 1235540 - RNA, 21 nt, Human
uuuacaaagucgaagugcucu

SEQ ID NO: 1235541 - RNA, 27 nt, Human
uuuccuccaaguccucuuguuugagaa

SEQ ID NO: 1235542 - RNA, 21 nt, Human
uuugccagugcccaacucugg

SEQ ID NO: 1235543 - RNA, 24 nt, Human
aaaaugccaaaggcauuuucacac

SEQ ID NO: 1235544 - RNA, 18 nt, Human
aaacacaucucccagugu

SEQ ID NO: 1235545 - RNA, 18 nt, Human
aagcaggcaaauacauug

SEQ ID NO: 1235546 - RNA, 22 nt, Human
aagcaggcaaauacauugagca

SEQ ID NO: 1235547 - RNA, 22 nt, Human
aaugccaaaggcauuuucacac

SEQ ID NO: 1235548 - RNA, 20 nt, Human
agauuacacccccaagucug

SEQ ID NO: 1235549 - RNA, 19 nt, Human
agcuugaccgccaccacua

SEQ ID NO: 1235550 - RNA, 21 nt, Human
aguugccggagauuacacccc

SEQ ID NO: 1235551 - RNA, 23 nt, Human
cacacaauaucaauugcaggaac

SEQ ID NO: 1235552 - RNA, 18 nt, Human
cacagugucugucucugg

SEQ ID NO: 1235553 - RNA, 22 nt, Human
ccugcacagugucugucucugg

SEQ ID NO: 1235554 - RNA, 19 nt, Human
cuggugcucuugugaugag

SEQ ID NO: 1235555 - RNA, 27 nt, Human
ucucccaguguuguaagcaggcaaaua

SEQ ID NO: 1235556 - RNA, 24 nt, Human
ucucuggcuguuaacuuacucauu

SEQ ID NO: 1235557 - RNA, 21 nt, Human
ucuugugaugagcaacuuacu

SEQ ID NO: 1235558 - RNA, 28 nt, Human
ugaccgccaccacuaggguauaagagcc

SEQ ID NO: 1235559 - RNA, 19 nt, Human
ugaugagcaacuuacuggc

SEQ ID NO: 1235560 - RNA, 24 nt, Human
ugauugcacuuuuuuaaaaaugcc

SEQ ID NO: 1235561 - RNA, 18 nt, Human
uggcaaacacaucuccca

SEQ ID NO: 1235562 - RNA, 24 nt, Human
uggugcucuugugaugagcaacuu

SEQ ID NO: 1235563 - RNA, 27 nt, Human
ugugaugagcaacuuacuggcaaacac

SEQ ID NO: 1235564 - RNA, 23 nt, Human
uuagcuugaccgccaccacuagg

SEQ ID NO: 1235565 - RNA, 20 nt, Human
uuucacacaauaucaauugc

SEQ ID NO: 1235566 - RNA, 24 nt, Human
uuugcaaugccugcacagugucug

SEQ ID NO: 1235567 - RNA, 24 nt, Human
aaaguucugggauuacaggcguga

SEQ ID NO: 1235568 - RNA, 21 nt, Human
accuugccugucucccuucca

SEQ ID NO: 1235569 - RNA, 23 nt, Human
accuugccugucucccuuccaac

SEQ ID NO: 1235570 - RNA, 18 nt, Human
acgggguuuuaccaaguu

SEQ ID NO: 1235571 - RNA, 19 nt, Human
acgggguuuuaccaaguug

SEQ ID NO: 1235572 - RNA, 24 nt, Human
acgggguuuuaccaaguugaccag

SEQ ID NO: 1235573 - RNA, 24 nt, Human
agccugggguggcuuuggggaccu

SEQ ID NO: 1235574 - RNA, 21 nt, Human
aggaacauuaaagucuggucc

SEQ ID NO: 1235575 - RNA, 21 nt, Human
aggcagaaggccagggcccca

SEQ ID NO: 1235576 - RNA, 24 nt, Human
aggcagaaggccagggccccaggg

SEQ ID NO: 1235577 - RNA, 22 nt, Human
agggugcuggggagccuggggu

SEQ ID NO: 1235578 - RNA, 20 nt, Human
aggucuggaaguuguucacc

SEQ ID NO: 1235579 - RNA, 24 nt, Human
aggugaucugcccaccucggcuuc

SEQ ID NO: 1235580 - RNA, 19 nt, Human
aggugauuuacaggucacc

SEQ ID NO: 1235581 - RNA, 21 nt, Human
aguaguugggauuacaggcau

SEQ ID NO: 1235582 - RNA, 23 nt, Human
aguaguugggauuacaggcaugc

SEQ ID NO: 1235583 - RNA, 19 nt, Human
agugaaggcggggggcugg

SEQ ID NO: 1235584 - RNA, 24 nt, Human
agugauucucaugccucagccucc

SEQ ID NO: 1235585 - RNA, 20 nt, Human
agugcaguggcgcgaucucg

SEQ ID NO: 1235586 - RNA, 23 nt, Human
agugcaguggcgcgaucucggcu

SEQ ID NO: 1235587 - RNA, 24 nt, Human
agugcaguggcgcgaucucggcuc

SEQ ID NO: 1235588 - RNA, 18 nt, Human
augcuccucagggugcug

SEQ ID NO: 1235589 - RNA, 24 nt, Human
auuuuuguauuuuuaguagagacg

SEQ ID NO: 1235590 - RNA, 24 nt, Human
caaaguucugggauuacaggcgug

SEQ ID NO: 1235591 - RNA, 20 nt, Human
caagaaaagagcuaacagac

SEQ ID NO: 1235592 - RNA, 22 nt, Human
caagaaaagagcuaacagacau

SEQ ID NO: 1235593 - RNA, 22 nt, Human
caagugauucucaugccucagc

SEQ ID NO: 1235594 - RNA, 28 nt, Human
caagugauucucaugccucagccuccug

SEQ ID NO: 1235595 - RNA, 18 nt, Human
caccguguggaugcugug

SEQ ID NO: 1235596 - RNA, 24 nt, Human
caccucggcuucccaaaguucugg

SEQ ID NO: 1235597 - RNA, 18 nt, Human
caccugacuaauuuuugu

SEQ ID NO: 1235598 - RNA, 18 nt, Human
cacugcaaccucugcuuc

SEQ ID NO: 1235599 - RNA, 23 nt, Human
cagcaucagcccuguucccacgg

SEQ ID NO: 1235600 - RNA, 20 nt, Human
cagccuccugaguaguuggg

SEQ ID NO: 1235601 - RNA, 20 nt, Human
cagggugcuggggagccugg

SEQ ID NO: 1235602 - RNA, 19 nt, Human
cagucucagcuccguaagg

SEQ ID NO: 1235603 - RNA, 23 nt, Human
caugcaccaccacaccugacuaa

SEQ ID NO: 1235604 - RNA, 24 nt, Human
caugccucagccuccugaguaguu

SEQ ID NO: 1235605 - RNA, 20 nt, Human
caugcuccuuucuccucuuu

SEQ ID NO: 1235606 - RNA, 22 nt, Human
cauucagggcaccccagugcuc

SEQ ID NO: 1235607 - RNA, 22 nt, Human
ccaaaguucugggauuacaggc

SEQ ID NO: 1235608 - RNA, 24 nt, Human
ccaaaguucugggauuacaggcgu

SEQ ID NO: 1235609 - RNA, 23 nt, Human
cccagguucaagugauucucaug

SEQ ID NO: 1235610 - RNA, 18 nt, Human
cccuggcuggagcuucag

SEQ ID NO: 1235611 - RNA, 20 nt, Human
ccggcagcccagaaacggcc

SEQ ID NO: 1235612 - RNA, 18 nt, Human
ccuagugcagucucagcu

SEQ ID NO: 1235613 - RNA, 22 nt, Human
ccucaggugaucugcccaccuc

SEQ ID NO: 1235614 - RNA, 23 nt, Human
ccugaguaguugggauuacaggc

SEQ ID NO: 1235615 - RNA, 24 nt, Human
ccugaguaguugggauuacaggca

SEQ ID NO: 1235616 - RNA, 24 nt, Human
ccuggccucaggugaucugcccac

SEQ ID NO: 1235617 - RNA, 21 nt, Human
ccugucucccuuccaacaagg

SEQ ID NO: 1235618 - RNA, 21 nt, Human
ccugugcagauuucuggagcu

SEQ ID NO: 1235619 - RNA, 20 nt, Human
ccugugccggcagcccagaa

SEQ ID NO: 1235620 - RNA, 22 nt, Human
ccuugcgggauucugcccugaa

SEQ ID NO: 1235621 - RNA, 19 nt, Human
cggccuucaggcagaaggc

SEQ ID NO: 1235622 - RNA, 24 nt, Human
cgggguuuuaccaaguugaccagg

SEQ ID NO: 1235623 - RNA, 25 nt, Human
cgucacuacaauuucaagaaaagag

SEQ ID NO: 1235624 - RNA, 23 nt, Human
cuaauuuuuguauuuuuaguaga

SEQ ID NO: 1235625 - RNA, 19 nt, Human
cuagugcagucucagcucc

SEQ ID NO: 1235626 - RNA, 24 nt, Human
cucacugcaaccucugcuucccag

SEQ ID NO: 1235627 - RNA, 24 nt, Human
cucacugcaaccucugcuucccag

SEQ ID NO: 1235628 - RNA, 23 nt, Human
cucagaaaguuccaagacugccc

SEQ ID NO: 1235629 - RNA, 19 nt, Human
cugaauguccacagugauc

SEQ ID NO: 1235630 - RNA, 24 nt, Human
cugaguaguugggauuacaggcau

SEQ ID NO: 1235631 - RNA, 23 nt, Human
cugcaaccucugcuucccagguu

SEQ ID NO: 1235632 - RNA, 24 nt, Human
cugcaaccucugcuucccagguuc

SEQ ID NO: 1235633 - RNA, 25 nt, Human
cugcccuguccuuucagaagccaca

SEQ ID NO: 1235634 - RNA, 22 nt, Human
cugcucugucacucaggcuaga

SEQ ID NO: 1235635 - RNA, 18 nt, Human
cugcuucccagguucaag

SEQ ID NO: 1235636 - RNA, 25 nt, Human
cugcuucccucccugugccggcagc

SEQ ID NO: 1235637 - RNA, 23 nt, Human
cugguucuuggauuccuguagcu

SEQ ID NO: 1235638 - RNA, 21 nt, Human
cuguggggcugugcauccagc

SEQ ID NO: 1235639 - RNA, 18 nt, Human
gaccaguuguccaauguc

SEQ ID NO: 1235640 - RNA, 20 nt, Human
gagacgggguuuuaccaagu

SEQ ID NO: 1235641 - RNA, 23 nt, Human
gaggaggagcugugggauuggcg

SEQ ID NO: 1235642 - RNA, 22 nt, Human
gaguaguugggauuacaggcau

SEQ ID NO: 1235643 - RNA, 18 nt, Human
gauuacaggcgugagccg

SEQ ID NO: 1235644 - RNA, 21 nt, Human
gauuacaggcgugagccgcca

SEQ ID NO: 1235645 - RNA, 24 nt, Human
gauuacaggcgugagccgccaugc

SEQ ID NO: 1235646 - RNA, 19 nt, Human
gcuagagugcaguggcgcg

SEQ ID NO: 1235647 - RNA, 19 nt, Human
gcuccuccugagucuccac

SEQ ID NO: 1235648 - RNA, 22 nt, Human
gcugguugugaacuccuggccu

SEQ ID NO: 1235649 - RNA, 23 nt, Human
gcugguugugaacuccuggccuc

SEQ ID NO: 1235650 - RNA, 22 nt, Human
ggagcugugggauuggcgacca

SEQ ID NO: 1235651 - RNA, 21 nt, Human
ggccagagcacugguucuugg

SEQ ID NO: 1235652 - RNA, 24 nt, Human
ggcugguugugaacuccuggccuc

SEQ ID NO: 1235653 - RNA, 22 nt, Human
ggugcuggggagccuggggugg

SEQ ID NO: 1235654 - RNA, 20 nt, Human
guaguugggauuacaggcau

SEQ ID NO: 1235655 - RNA, 24 nt, Human
gugaucugcccaccucggcuuccc

SEQ ID NO: 1235656 - RNA, 24 nt, Human
gugauucucaugccucagccuccu

SEQ ID NO: 1235657 - RNA, 24 nt, Human
uaauuuuuguauuuuuaguagaga

SEQ ID NO: 1235658 - RNA, 22 nt, Human
uacaggcaugcaccaccacacc

SEQ ID NO: 1235659 - RNA, 20 nt, Human
uacaugcuccuuucuccucu

SEQ ID NO: 1235660 - RNA, 21 nt, Human
uacggccuggccagaagcaga

SEQ ID NO: 1235661 - RNA, 22 nt, Human
uagagugcaguggcgcgaucuc

SEQ ID NO: 1235662 - RNA, 24 nt, Human
uagagugcaguggcgcgaucucgg

SEQ ID NO: 1235663 - RNA, 22 nt, Human
uaguagagacgggguuuuacca

SEQ ID NO: 1235664 - RNA, 24 nt, Human
uaguagagacgggguuuuaccaag

SEQ ID NO: 1235665 - RNA, 26 nt, Human
uaguagagacgggguuuuaccaaguu

SEQ ID NO: 1235666 - RNA, 18 nt, Human
uaguugggauuacaggca

SEQ ID NO: 1235667 - RNA, 20 nt, Human
uauuucaacacaaguuacuu

SEQ ID NO: 1235668 - RNA, 18 nt, Human
ucaagaaaagagcuaaca

SEQ ID NO: 1235669 - RNA, 19 nt, Human
ucacugcaaccucugcuuc

SEQ ID NO: 1235670 - RNA, 24 nt, Human
ucacugcaaccucugcuucccagg

SEQ ID NO: 1235671 - RNA, 20 nt, Human
ucagccuccugaguaguugg

SEQ ID NO: 1235672 - RNA, 19 nt, Human
ucaguacagacucaagaga

SEQ ID NO: 1235673 - RNA, 23 nt, Human
ucagugaaggcggggggcugggg

SEQ ID NO: 1235674 - RNA, 24 nt, Human
ucccaaaguucugggauuacaggc

SEQ ID NO: 1235675 - RNA, 20 nt, Human
ucccagguucaagugauucu

SEQ ID NO: 1235676 - RNA, 21 nt, Human
ucccagguucaagugauucuc

SEQ ID NO: 1235677 - RNA, 24 nt, Human
ucccagguucaagugauucucaug

SEQ ID NO: 1235678 - RNA, 19 nt, Human
uccguaagggugcucagcu

SEQ ID NO: 1235679 - RNA, 24 nt, Human
uccugaguaguugggauuacaggc

SEQ ID NO: 1235680 - RNA, 26 nt, Human
ucucaggcagguucuagacgagccuu

SEQ ID NO: 1235681 - RNA, 18 nt, Human
ucugcucugucacucagg

SEQ ID NO: 1235682 - RNA, 23 nt, Human
ucugcucugucacucaggcuaga

SEQ ID NO: 1235683 - RNA, 19 nt, Human
ucugcuucccagguucaag

SEQ ID NO: 1235684 - RNA, 24 nt, Human
ucugucacucaggcuagagugcag

SEQ ID NO: 1235685 - RNA, 24 nt, Human
ugaccaggcugguugugaacuccu

SEQ ID NO: 1235686 - RNA, 22 nt, Human
ugagacaggagucugcucuguc

SEQ ID NO: 1235687 - RNA, 23 nt, Human
ugaucugcccaccucggcuuccc

SEQ ID NO: 1235688 - RNA, 24 nt, Human
ugaucugcccaccucggcuuccca

SEQ ID NO: 1235689 - RNA, 21 nt, Human
ugcagucucagcuccguaagg

SEQ ID NO: 1235690 - RNA, 22 nt, Human
ugcaguggcgcgaucucggcuc

SEQ ID NO: 1235691 - RNA, 27 nt, Human
ugcccuguccuuucagaagccacaggu

SEQ ID NO: 1235692 - RNA, 23 nt, Human
ugccggcagcccagaaacggccu

SEQ ID NO: 1235693 - RNA, 24 nt, Human
ugccggcagcccagaaacggccuu

SEQ ID NO: 1235694 - RNA, 24 nt, Human
ugccucagccuccugaguaguugg

SEQ ID NO: 1235695 - RNA, 24 nt, Human
ugcucugucacucaggcuagagug

SEQ ID NO: 1235696 - RNA, 20 nt, Human
ugcuggggagccuggggugg

SEQ ID NO: 1235697 - RNA, 21 nt, Human
uggaaguuguucaccuuacau

SEQ ID NO: 1235698 - RNA, 22 nt, Human
uggauuucuguagcugcaguuu

SEQ ID NO: 1235699 - RNA, 20 nt, Human
uggcaaaggaggaggagcug

SEQ ID NO: 1235700 - RNA, 18 nt, Human
uggccagaagcagaagug

SEQ ID NO: 1235701 - RNA, 28 nt, Human
uggccagagcacugguucuuggauuccu

SEQ ID NO: 1235702 - RNA, 20 nt, Human
uggccucaggugaucugccc

SEQ ID NO: 1235703 - RNA, 24 nt, Human
uggccucaggugaucugcccaccu

SEQ ID NO: 1235704 - RNA, 21 nt, Human
uggcuuuggggaccugucuuc

SEQ ID NO: 1235705 - RNA, 21 nt, Human
ugggauuacaggcaugcacca

SEQ ID NO: 1235706 - RNA, 24 nt, Human
ugggauuacaggcaugcaccacca

SEQ ID NO: 1235707 - RNA, 18 nt, Human
ugggauuacaggcgugag

SEQ ID NO: 1235708 - RNA, 21 nt, Human
ugggauuacaggcgugagccg

SEQ ID NO: 1235709 - RNA, 22 nt, Human
ugggauuacaggcgugagccgc

SEQ ID NO: 1235710 - RNA, 23 nt, Human
ugggauuacaggcgugagccgcc

SEQ ID NO: 1235711 - RNA, 24 nt, Human
ugggauuacaggcgugagccgcca

SEQ ID NO: 1235712 - RNA, 25 nt, Human
ugggauuacaggcgugagccgccau

SEQ ID NO: 1235713 - RNA, 26 nt, Human
ugggauuacaggcgugagccgccaug

SEQ ID NO: 1235714 - RNA, 27 nt, Human
ugggauuacaggcgugagccgccaugc

SEQ ID NO: 1235715 - RNA, 21 nt, Human
uguauuuuuaguagagacggg

SEQ ID NO: 1235716 - RNA, 20 nt, Human
uguccccagacccuagugca

SEQ ID NO: 1235717 - RNA, 20 nt, Human
uguggggcugugcauccagc

SEQ ID NO: 1235718 - RNA, 19 nt, Human
uuacaggcgugagccgcca

SEQ ID NO: 1235719 - RNA, 18 nt, Human
uuaguagagacgggguuu

SEQ ID NO: 1235720 - RNA, 22 nt, Human
uuaguagagacgggguuuuacc

SEQ ID NO: 1235721 - RNA, 23 nt, Human
uuaguagagacgggguuuuacca

SEQ ID NO: 1235722 - RNA, 23 nt, Human
uucaagugauucucaugccucag

SEQ ID NO: 1235723 - RNA, 19 nt, Human
uucccagguucaagugauu

SEQ ID NO: 1235724 - RNA, 19 nt, Human
uucuucuauacauguacag

SEQ ID NO: 1235725 - RNA, 18 nt, Human
uugccuggcuuuguggag

SEQ ID NO: 1235726 - RNA, 23 nt, Human
uuguauuuuuaguagagacgggg

SEQ ID NO: 1235727 - RNA, 24 nt, Human
uuuuuaguagagacgggguuuuac

SEQ ID NO: 1235728 - RNA, 20 nt, Human
uuuuuguauuuuuaguagag

SEQ ID NO: 1235729 - RNA, 19 nt, Human
agacaugaaggguuaucua

SEQ ID NO: 1235730 - RNA, 19 nt, Human
agccaaguuaauuaccaca

SEQ ID NO: 1235731 - RNA, 23 nt, Human
cuguauauguguacugagaaacu

SEQ ID NO: 1235732 - RNA, 21 nt, Human
gagacagaaucuggcucuguc

SEQ ID NO: 1235733 - RNA, 21 nt, Human
gucgcccagugagacuccuau

SEQ ID NO: 1235734 - RNA, 23 nt, Human
uaaaaaauucaccugaccaugac

SEQ ID NO: 1235735 - RNA, 25 nt, Human
uaauuaccacaguuuaaauaagaac

SEQ ID NO: 1235736 - RNA, 23 nt, Human
uacaaguaaaaaauucaccugac

SEQ ID NO: 1235737 - RNA, 19 nt, Human
uauacugguagacaugaag

SEQ ID NO: 1235738 - RNA, 19 nt, Human
uccaguuacaaguaaaaaa

SEQ ID NO: 1235739 - RNA, 21 nt, Human
ucuggcucugucgcccaguga

SEQ ID NO: 1235740 - RNA, 21 nt, Human
ucuggcucugucgcccaguga

SEQ ID NO: 1235741 - RNA, 23 nt, Human
ucuggcucugucgcccagugaga

SEQ ID NO: 1235742 - RNA, 20 nt, Human
ccugcccgcuggacuucccu

SEQ ID NO: 1235743 - RNA, 19 nt, Human
ucaaucucugaagaugcau

SEQ ID NO: 1235744 - RNA, 22 nt, Human
ucccugacauuuucaaucucug

SEQ ID NO: 1235745 - RNA, 23 nt, Human
ccagcaugcuacugccacgcccc

SEQ ID NO: 1235746 - RNA, 22 nt, Human
cucccagcaugcuacugccacg

SEQ ID NO: 1235747 - RNA, 18 nt, Human
cuuccugcugugcugaac

SEQ ID NO: 1235748 - RNA, 19 nt, Human
gcauggccuguugucuuuc

SEQ ID NO: 1235749 - RNA, 18 nt, Human
uaauuucugugcauuccc

SEQ ID NO: 1235750 - RNA, 22 nt, Human
uccugcugugcugaaccccugc

SEQ ID NO: 1235751 - RNA, 19 nt, Human
ugcugaaccccugcccuuu

SEQ ID NO: 1235752 - RNA, 19 nt, Human
ugcugugcugaaccccugc

SEQ ID NO: 1235753 - RNA, 22 nt, Human
ugcugugcugaaccccugcccu

SEQ ID NO: 1235754 - RNA, 21 nt, Human
aaaagaaaaaaaaugagcuaa

SEQ ID NO: 1235755 - RNA, 22 nt, Human
aaacaaaaucacccccuggaaa

SEQ ID NO: 1235756 - RNA, 19 nt, Human
aaacaggaauaaggugaca

SEQ ID NO: 1235757 - RNA, 24 nt, Human
aaacaggaauaaggugacaaccag

SEQ ID NO: 1235758 - RNA, 19 nt, Human
aagcugaacccuaagaaau

SEQ ID NO: 1235759 - RNA, 20 nt, Human
aagguccuuauuuuuggaga

SEQ ID NO: 1235760 - RNA, 25 nt, Human
aagguccuuauuuuuggagaacagu

SEQ ID NO: 1235761 - RNA, 24 nt, Human
acagaauccauaaaacaccaugcu

SEQ ID NO: 1235762 - RNA, 21 nt, Human
acugaaauaaaccugaaagcu

SEQ ID NO: 1235763 - RNA, 18 nt, Human
acuguaauuucuggauuu

SEQ ID NO: 1235764 - RNA, 21 nt, Human
acuugcaaauauuccugagag

SEQ ID NO: 1235765 - RNA, 21 nt, Human
agagaguaaggaaggcucacg

SEQ ID NO: 1235766 - RNA, 18 nt, Human
agauaggaaagugggaaa

SEQ ID NO: 1235767 - RNA, 25 nt, Human
agcaucuacuuucucauacugugac

SEQ ID NO: 1235768 - RNA, 18 nt, Human
aggaaggaaggcucccau

SEQ ID NO: 1235769 - RNA, 19 nt, Human
aggcagugagaaaagucag

SEQ ID NO: 1235770 - RNA, 22 nt, Human
aguuugugagaaaggcugaccu

SEQ ID NO: 1235771 - RNA, 22 nt, Human
auaaaaccagauguaccuucca

SEQ ID NO: 1235772 - RNA, 19 nt, Human
auaaaaugugccuuacauc

SEQ ID NO: 1235773 - RNA, 20 nt, Human
aucucugucuggaucaucuc

SEQ ID NO: 1235774 - RNA, 18 nt, Human
augacagcuauuuuuagu

SEQ ID NO: 1235775 - RNA, 18 nt, Human
caaaauuccacaagucuc

SEQ ID NO: 1235776 - RNA, 25 nt, Human
caaaugucucuguacucaaagcucu

SEQ ID NO: 1235777 - RNA, 18 nt, Human
caccccuguagcaauggg

SEQ ID NO: 1235778 - RNA, 21 nt, Human
caccucaccagugccaucugu

SEQ ID NO: 1235779 - RNA, 18 nt, Human
caccuuguuguagaaaca

SEQ ID NO: 1235780 - RNA, 23 nt, Human
cagcucuucuaaaaacaaaauca

SEQ ID NO: 1235781 - RNA, 18 nt, Human
caggaggccuccccuugc

SEQ ID NO: 1235782 - RNA, 28 nt, Human
cagguuucuuccauucacaucguguucc

SEQ ID NO: 1235783 - RNA, 22 nt, Human
caucagucucuuuuugcuaaca

SEQ ID NO: 1235784 - RNA, 22 nt, Human
ccaaagacaaaauuccacaagu

SEQ ID NO: 1235785 - RNA, 19 nt, Human
ccuccccuugccucccaag

SEQ ID NO: 1235786 - RNA, 21 nt, Human
ccuguccaaagacaaaauucc

SEQ ID NO: 1235787 - RNA, 19 nt, Human
ccuugauuaggaaggaagg

SEQ ID NO: 1235788 - RNA, 24 nt, Human
cgaauggacaauaauuuuuaaagc

SEQ ID NO: 1235789 - RNA, 26 nt, Human
cgacagauaaccccauuaaacucucu

SEQ ID NO: 1235790 - RNA, 21 nt, Human
cuacaggacaaaauauaaaac

SEQ ID NO: 1235791 - RNA, 18 nt, Human
cuagaguuuuuauuauuc

SEQ ID NO: 1235792 - RNA, 20 nt, Human
cucacaaauauaaauaccau

SEQ ID NO: 1235793 - RNA, 22 nt, Human
cucacaaggacagacaugucug

SEQ ID NO: 1235794 - RNA, 18 nt, Human
cuccaggugugccagaag

SEQ ID NO: 1235795 - RNA, 19 nt, Human
cucccauggaagcuuuuau

SEQ ID NO: 1235796 - RNA, 21 nt, Human
cugaccuacaggacuaaaacc

SEQ ID NO: 1235797 - RNA, 22 nt, Human
cugcaacggaacucccaccacc

SEQ ID NO: 1235798 - RNA, 21 nt, Human
cuguccaaagacaaaauucca

SEQ ID NO: 1235799 - RNA, 20 nt, Human
cuguguucuggaguugcucc

SEQ ID NO: 1235800 - RNA, 18 nt, Human
cuuccucuugaaaagggc

SEQ ID NO: 1235801 - RNA, 22 nt, Human
cuucuaaaaacaaaaucacccc

SEQ ID NO: 1235802 - RNA, 24 nt, Human
cuuuuugcuaacagaaugaccaag

SEQ ID NO: 1235803 - RNA, 18 nt, Human
gaaaacuuaagcuaaugu

SEQ ID NO: 1235804 - RNA, 22 nt, Human
gacuguguucuggaguugcucc

SEQ ID NO: 1235805 - RNA, 18 nt, Human
gagaaugaauccaaggga

SEQ ID NO: 1235806 - RNA, 21 nt, Human
ggaaaaaccugaacaucucug

SEQ ID NO: 1235807 - RNA, 18 nt, Human
gguaguguaaggaccauu

SEQ ID NO: 1235808 - RNA, 24 nt, Human
gguccuuauuuuuggagaacaguc

SEQ ID NO: 1235809 - RNA, 20 nt, Human
guccacggacguccaaaaau

SEQ ID NO: 1235810 - RNA, 24 nt, Human
guuugucuggagaggguaucuuuc

SEQ ID NO: 1235811 - RNA, 20 nt, Human
uaaaacaggaauaaggugac

SEQ ID NO: 1235812 - RNA, 24 nt, Human
uaacacucacaaauauaaauacca

SEQ ID NO: 1235813 - RNA, 22 nt, Human
uaacgaaggcagugagaaaagu

SEQ ID NO: 1235814 - RNA, 27 nt, Human
uaagaaauuguccaaaaauauguacaa

SEQ ID NO: 1235815 - RNA, 23 nt, Human
uaagcugcuaaaaacuaaaacag

SEQ ID NO: 1235816 - RNA, 24 nt, Human
uacacaaggaaaaaccugaacauc

SEQ ID NO: 1235817 - RNA, 19 nt, Human
uagcagaggugguuuguca

SEQ ID NO: 1235818 - RNA, 20 nt, Human
uaggaaggaaggcucccaug

SEQ ID NO: 1235819 - RNA, 22 nt, Human
uagugcagaguauucacaaaug

SEQ ID NO: 1235820 - RNA, 24 nt, Human
uauagcugagaccugcaacggaac

SEQ ID NO: 1235821 - RNA, 20 nt, Human
uauuuggggaauggaaauaa

SEQ ID NO: 1235822 - RNA, 26 nt, Human
ucaaucaaguaggagaaugaauccaa

SEQ ID NO: 1235823 - RNA, 22 nt, Human
ucaccuaggcaaaucuuaguuc

SEQ ID NO: 1235824 - RNA, 23 nt, Human
ucagggugggaggugauccaauc

SEQ ID NO: 1235825 - RNA, 23 nt, Human
uccagacaaccgucauccccaau

SEQ ID NO: 1235826 - RNA, 21 nt, Human
uccauaaaacaccaugcucca

SEQ ID NO: 1235827 - RNA, 20 nt, Human
ucccauuauccucacgacug

SEQ ID NO: 1235828 - RNA, 22 nt, Human
uccuuccacggguuucaguaaa

SEQ ID NO: 1235829 - RNA, 18 nt, Human
uccuuggggcaucuacag

SEQ ID NO: 1235830 - RNA, 20 nt, Human
uccuuggggcaucuacaguu

SEQ ID NO: 1235831 - RNA, 20 nt, Human
ucuacaguucuuuuucaagu

SEQ ID NO: 1235832 - RNA, 27 nt, Human
ucuccagacaaccgucauccccaauuu

SEQ ID NO: 1235833 - RNA, 23 nt, Human
ucugucaaagaggccuguccaaa

SEQ ID NO: 1235834 - RNA, 21 nt, Human
ugacuagggguauaaaaugug

SEQ ID NO: 1235835 - RNA, 21 nt, Human
ugagaccugcaacggaacucc

SEQ ID NO: 1235836 - RNA, 24 nt, Human
ugauugaaccucugaauucugggg

SEQ ID NO: 1235837 - RNA, 24 nt, Human
ugcaacggaacucccaccaccaaa

SEQ ID NO: 1235838 - RNA, 23 nt, Human
ugcagaguauucacaaauggacc

SEQ ID NO: 1235839 - RNA, 18 nt, Human
ugcucauuaccgccaguc

SEQ ID NO: 1235840 - RNA, 26 nt, Human
uggccagaaggaaguuggucgacacg

SEQ ID NO: 1235841 - RNA, 21 nt, Human
ugggaaaugcugucugcucac

SEQ ID NO: 1235842 - RNA, 23 nt, Human
ugggaaaugcugucugcucacug

SEQ ID NO: 1235843 - RNA, 22 nt, Human
ugguugguuccuuggggcaucu

SEQ ID NO: 1235844 - RNA, 20 nt, Human
uguaaucgaauggacaauaa

SEQ ID NO: 1235845 - RNA, 23 nt, Human
uguccaaagacaaaauuccacaa

SEQ ID NO: 1235846 - RNA, 22 nt, Human
ugugacacaagcacuggauucu

SEQ ID NO: 1235847 - RNA, 24 nt, Human
ugugacacaagcacuggauucuuu

SEQ ID NO: 1235848 - RNA, 18 nt, Human
ugugguaguguaaggacc

SEQ ID NO: 1235849 - RNA, 19 nt, Human
uguuauagcugagaccugc

SEQ ID NO: 1235850 - RNA, 19 nt, Human
uuacucucaagcgauagaa

SEQ ID NO: 1235851 - RNA, 21 nt, Human
uuagcaagagugaacgauuuc

SEQ ID NO: 1235852 - RNA, 21 nt, Human
uuccccagcaucuacuuucuc

SEQ ID NO: 1235853 - RNA, 19 nt, Human
uuccuuggggcaucuacag

SEQ ID NO: 1235854 - RNA, 20 nt, Human
uucuucacugauaauucugg

SEQ ID NO: 1235855 - RNA, 19 nt, Human
uugaauuacacaaggaaaa

SEQ ID NO: 1235856 - RNA, 20 nt, Human
uugcuccaggugugccagaa

SEQ ID NO: 1235857 - RNA, 22 nt, Human
uugcugaauaaaugcaucauau

SEQ ID NO: 1235858 - RNA, 22 nt, Human
uuggguaaagaucaaucauugu

SEQ ID NO: 1235859 - RNA, 20 nt, Human
uuuuguguguucucauugac

SEQ ID NO: 1235860 - RNA, 19 nt, Human
acccugguaaauauuaugg

SEQ ID NO: 1235861 - RNA, 26 nt, Human
caguguaagauaacaccuucagauua

SEQ ID NO: 1235862 - RNA, 24 nt, Human
cauacucuuuuguuacuuccaaaa

SEQ ID NO: 1235863 - RNA, 21 nt, Human
cauuugcaaaauccacuuaaa

SEQ ID NO: 1235864 - RNA, 21 nt, Human
cauuuugcaacuucugcugca

SEQ ID NO: 1235865 - RNA, 22 nt, Human
ccugguaaauauuauggaaaag

SEQ ID NO: 1235866 - RNA, 27 nt, Human
cuggcucuucccaugugggggacgauc

SEQ ID NO: 1235867 - RNA, 18 nt, Human
gacuaggcuaagcugucu

SEQ ID NO: 1235868 - RNA, 18 nt, Human
uaaaagaaguuacuguuu

SEQ ID NO: 1235869 - RNA, 22 nt, Human
uacauaaauuuucaucagacau

SEQ ID NO: 1235870 - RNA, 23 nt, Human
uaccccauccuuuuuauguuucu

SEQ ID NO: 1235871 - RNA, 21 nt, Human
uagcugaagaggccaagaaac

SEQ ID NO: 1235872 - RNA, 20 nt, Human
uaguagcagcugcuacuucu

SEQ ID NO: 1235873 - RNA, 22 nt, Human
uauaacuguuaccccauccuuu

SEQ ID NO: 1235874 - RNA, 22 nt, Human
ucacuagaaaugcauuuucauc

SEQ ID NO: 1235875 - RNA, 18 nt, Human
ucaguaauacugguuuuc

SEQ ID NO: 1235876 - RNA, 20 nt, Human
ucucacuuugaucucuucca

SEQ ID NO: 1235877 - RNA, 23 nt, Human
ucugugaucuggcucuucccaug

SEQ ID NO: 1235878 - RNA, 23 nt, Human
ugauuuacaguguaagauaacac

SEQ ID NO: 1235879 - RNA, 19 nt, Human
ugccuuaucuuucagagua

SEQ ID NO: 1235880 - RNA, 25 nt, Human
ugcucuuguuuccuuucuaguucuc

SEQ ID NO: 1235881 - RNA, 24 nt, Human
uuugagagguagugaggaaagaaa

SEQ ID NO: 1235882 - RNA, 22 nt, Human
uuuuaaggcaagucugcaguua

SEQ ID NO: 1235883 - RNA, 23 nt, Human
aaagcacucagagcuaggcagca

SEQ ID NO: 1235884 - RNA, 21 nt, Human
aacacaccucucaaccucagu

SEQ ID NO: 1235885 - RNA, 20 nt, Human
aacagagcaagacuccaucu

SEQ ID NO: 1235886 - RNA, 19 nt, Human
aacauggugaaaccccguc

SEQ ID NO: 1235887 - RNA, 20 nt, Human
aacauggugaaaccccgucu

SEQ ID NO: 1235888 - RNA, 21 nt, Human
aacauggugaaaccccgucuc

SEQ ID NO: 1235889 - RNA, 18 nt, Human
aaccucccccuccgccuc

SEQ ID NO: 1235890 - RNA, 22 nt, Human
aaccucccccuccgccucccac

SEQ ID NO: 1235891 - RNA, 24 nt, Human
aagaaauaaaaacggccgggcucc

SEQ ID NO: 1235892 - RNA, 18 nt, Human
aagccggagucugaaccc

SEQ ID NO: 1235893 - RNA, 21 nt, Human
aaggaagaacucaaagcacuc

SEQ ID NO: 1235894 - RNA, 23 nt, Human
aaucacuugaacccggaggcgga

SEQ ID NO: 1235895 - RNA, 24 nt, Human
aaucgcuugaacccaggaggcgga

SEQ ID NO: 1235896 - RNA, 24 nt, Human
aauggcaugcaccuguagucccag

SEQ ID NO: 1235897 - RNA, 24 nt, Human
acagagcaagacuccaucucaaaa

SEQ ID NO: 1235898 - RNA, 20 nt, Human
acagagcgagacuccgucuc

SEQ ID NO: 1235899 - RNA, 24 nt, Human
acagagcgagacuccgucucaaaa

SEQ ID NO: 1235900 - RNA, 24 nt, Human
acagggaggaggccaggcccccag

SEQ ID NO: 1235901 - RNA, 19 nt, Human
acccaggugguccagagcc

SEQ ID NO: 1235902 - RNA, 23 nt, Human
accccagcuccucccacccccaa

SEQ ID NO: 1235903 - RNA, 24 nt, Human
accccgucucuacuaaaaauacaa

SEQ ID NO: 1235904 - RNA, 21 nt, Human
accgcuaauagucacugacca

SEQ ID NO: 1235905 - RNA, 24 nt, Human
accucagugaggaacccuccccag

SEQ ID NO: 1235906 - RNA, 24 nt, Human
acugcacuccagccugggcgacag

SEQ ID NO: 1235907 - RNA, 26 nt, Human
acugcacuccagccugggcgacagag

SEQ ID NO: 1235908 - RNA, 23 nt, Human
acugcacucuggccuggcaacag

SEQ ID NO: 1235909 - RNA, 23 nt, Human
acugcacucuggccuggcaacag

SEQ ID NO: 1235910 - RNA, 22 nt, Human
agaaucgcuugaacccaggagg

SEQ ID NO: 1235911 - RNA, 18 nt, Human
agacagggaggaggccag

SEQ ID NO: 1235912 - RNA, 23 nt, Human
agcacugugagugugugggucca

SEQ ID NO: 1235913 - RNA, 24 nt, Human
agcacuuugggaggucgagguggg

SEQ ID NO: 1235914 - RNA, 19 nt, Human
agcagagccuguugcaccc

SEQ ID NO: 1235915 - RNA, 20 nt, Human
agcagggucaggaggcuggg

SEQ ID NO: 1235916 - RNA, 24 nt, Human
agcagggucaggaggcuggggcgg

SEQ ID NO: 1235917 - RNA, 24 nt, Human
agccugggcgacagagcgagacuc

SEQ ID NO: 1235918 - RNA, 27 nt, Human
agcuccucccacccccaaccucccccu

SEQ ID NO: 1235919 - RNA, 21 nt, Human
aggaccagcaaggggcaggug

SEQ ID NO: 1235920 - RNA, 26 nt, Human
aggaggucaagagauugagaccaucc

SEQ ID NO: 1235921 - RNA, 24 nt, Human
aggcagcaggaaauggggaggccu

SEQ ID NO: 1235922 - RNA, 23 nt, Human
aggcaggagaaucgcuugaaccc

SEQ ID NO: 1235923 - RNA, 24 nt, Human
aggcaggagaaucgcuugaaccca

SEQ ID NO: 1235924 - RNA, 23 nt, Human
aggcagggaaucacuugaacccg

SEQ ID NO: 1235925 - RNA, 24 nt, Human
aggcauaauggcaugcaccuguag

SEQ ID NO: 1235926 - RNA, 24 nt, Human
aggcggagguugcagugagccaag

SEQ ID NO: 1235927 - RNA, 24 nt, Human
aggcggagguugcagugagcugag

SEQ ID NO: 1235928 - RNA, 20 nt, Human
aggcugaggcaggagaaucg

SEQ ID NO: 1235929 - RNA, 24 nt, Human
aggcugaggcaggagaaucgcuug

SEQ ID NO: 1235930 - RNA, 19 nt, Human
aggcugaggcagggaauca

SEQ ID NO: 1235931 - RNA, 21 nt, Human
aggcuggggcggggccggagg

SEQ ID NO: 1235932 - RNA, 22 nt, Human
aggcuggggcggggccggaggg

SEQ ID NO: 1235933 - RNA, 21 nt, Human
agggaggguggcugggaggga

SEQ ID NO: 1235934 - RNA, 24 nt, Human
agggaggguggcugggagggacgg

SEQ ID NO: 1235935 - RNA, 24 nt, Human
agguggguggaucaggaggucaag

SEQ ID NO: 1235936 - RNA, 20 nt, Human
agugacccagccccaccccu

SEQ ID NO: 1235937 - RNA, 21 nt, Human
auccuggccaacauggugaaa

SEQ ID NO: 1235938 - RNA, 24 nt, Human
aucgcgccacugcacuccagccug

SEQ ID NO: 1235939 - RNA, 24 nt, Human
auugcaccacugcacucuggccug

SEQ ID NO: 1235940 - RNA, 24 nt, Human
caacauggugaaaccccgucucua

SEQ ID NO: 1235941 - RNA, 21 nt, Human
caagacuccaucucaaaaaaa

SEQ ID NO: 1235942 - RNA, 18 nt, Human
cacaaacaaggcuggaga

SEQ ID NO: 1235943 - RNA, 26 nt, Human
cacacuaacggaaugcacaaacaagg

SEQ ID NO: 1235944 - RNA, 18 nt, Human
caccacugcacucuggcc

SEQ ID NO: 1235945 - RNA, 23 nt, Human
cacccccaaccucccccuccgcc

SEQ ID NO: 1235946 - RNA, 21 nt, Human
caccgcuucggagaggcaguc

SEQ ID NO: 1235947 - RNA, 22 nt, Human
caccgcuucggagaggcagucu

SEQ ID NO: 1235948 - RNA, 19 nt, Human
caccuguagucccaguuac

SEQ ID NO: 1235949 - RNA, 22 nt, Human
caccuguagucccaguuacuca

SEQ ID NO: 1235950 - RNA, 24 nt, Human
cacgccuguaaucccagcacuuug

SEQ ID NO: 1235951 - RNA, 20 nt, Human
cacucagagcuaggcagcag

SEQ ID NO: 1235952 - RNA, 24 nt, Human
cacuccagccugggcgacagagcg

SEQ ID NO: 1235953 - RNA, 22 nt, Human
cacucuggccuggcaacagagc

SEQ ID NO: 1235954 - RNA, 19 nt, Human
cacugcacuccagccuggg

SEQ ID NO: 1235955 - RNA, 20 nt, Human
cacugcacuccagccugggc

SEQ ID NO: 1235956 - RNA, 22 nt, Human
cacugcacuccagccugggcga

SEQ ID NO: 1235957 - RNA, 23 nt, Human
cacugcacuccagccugggcgac

SEQ ID NO: 1235958 - RNA, 24 nt, Human
cacugcacuccagccugggcgaca

SEQ ID NO: 1235959 - RNA, 18 nt, Human
cacugcacucuggccugg

SEQ ID NO: 1235960 - RNA, 20 nt, Human
cacugcacucuggccuggca

SEQ ID NO: 1235961 - RNA, 23 nt, Human
cacugcacucuggccuggcaaca

SEQ ID NO: 1235962 - RNA, 23 nt, Human
cacugcacucuggccuggcaaca

SEQ ID NO: 1235963 - RNA, 21 nt, Human
cagagccuguugcacccauaa

SEQ ID NO: 1235964 - RNA, 21 nt, Human
cagcacuuugggaggucgagg

SEQ ID NO: 1235965 - RNA, 24 nt, Human
cagcacuuugggaggucgaggugg

SEQ ID NO: 1235966 - RNA, 23 nt, Human
cagcaggcugaggcagggaauca

SEQ ID NO: 1235967 - RNA, 23 nt, Human
cagccccaccccagcuccuccca

SEQ ID NO: 1235968 - RNA, 18 nt, Human
cagcgaagccacaggauu

SEQ ID NO: 1235969 - RNA, 24 nt, Human
cagcuacuugggaggcugaggcag

SEQ ID NO: 1235970 - RNA, 19 nt, Human
caggaccagcaaggggcag

SEQ ID NO: 1235971 - RNA, 22 nt, Human
caggcccccagugacaaccaug

SEQ ID NO: 1235972 - RNA, 21 nt, Human
caggccgggcgugguggcuca

SEQ ID NO: 1235973 - RNA, 24 nt, Human
caggcugaggcagggaaucacuug

SEQ ID NO: 1235974 - RNA, 22 nt, Human
cagggaccaccuguaaccuaau

SEQ ID NO: 1235975 - RNA, 19 nt, Human
caggugggaucaguccuau

SEQ ID NO: 1235976 - RNA, 25 nt, Human
caucucaaaaaaacaauuagccagg

SEQ ID NO: 1235977 - RNA, 20 nt, Human
ccaaggcugcuaagcaguga

SEQ ID NO: 1235978 - RNA, 22 nt, Human
ccaccuguaaccuaaugggggc

SEQ ID NO: 1235979 - RNA, 23 nt, Human
ccaccuguaaccuaaugggggca

SEQ ID NO: 1235980 - RNA, 20 nt, Human
ccacugcacuccagccuggg

SEQ ID NO: 1235981 - RNA, 20 nt, Human
ccacugcacuccagccuggg

SEQ ID NO: 1235982 - RNA, 21 nt, Human
ccacugcacuccagccugggc

SEQ ID NO: 1235983 - RNA, 21 nt, Human
ccacugcacuccagccugggc

SEQ ID NO: 1235984 - RNA, 24 nt, Human
ccacugcacuccagccugggcgac

SEQ ID NO: 1235985 - RNA, 19 nt, Human
ccacugcacucuggccugg

SEQ ID NO: 1235986 - RNA, 19 nt, Human
ccacugcacucuggccugg

SEQ ID NO: 1235987 - RNA, 20 nt, Human
ccacugcacucuggccuggc

SEQ ID NO: 1235988 - RNA, 23 nt, Human
ccacugcacucuggccuggcaac

SEQ ID NO: 1235989 - RNA, 23 nt, Human
ccagcuccucccacccccaaccu

SEQ ID NO: 1235990 - RNA, 24 nt, Human
ccagcuccucccacccccaaccuc

SEQ ID NO: 1235991 - RNA, 22 nt, Human
ccaggaggcggagguugcagug

SEQ ID NO: 1235992 - RNA, 21 nt, Human
ccaggcauuguggcacgugcc

SEQ ID NO: 1235993 - RNA, 26 nt, Human
ccaggccgggcgugguggcucacgcc

SEQ ID NO: 1235994 - RNA, 25 nt, Human
ccaggccgggcgugguggcucacgg

SEQ ID NO: 1235995 - RNA, 22 nt, Human
cccacccccaaccucccccucc

SEQ ID NO: 1235996 - RNA, 21 nt, Human
cccagcuccucccacccccaa

SEQ ID NO: 1235997 - RNA, 18 nt, Human
ccccaaccucccccuccg

SEQ ID NO: 1235998 - RNA, 20 nt, Human
ccccaaccucccccuccgcc

SEQ ID NO: 1235999 - RNA, 20 nt, Human
ccccaaccucccccuccgcc

SEQ ID NO: 1236000 - RNA, 24 nt, Human
ccccaaccucccccuccgccuccc

SEQ ID NO: 1236001 - RNA, 30 nt, Human
ccccaaccucccccuccgccucccaccccc

SEQ ID NO: 1236002 - RNA, 19 nt, Human
ccccaccccagcuccuccc

SEQ ID NO: 1236003 - RNA, 19 nt, Human
ccccaccccagcuccuccc

SEQ ID NO: 1236004 - RNA, 22 nt, Human
ccccaccccagcuccucccacc

SEQ ID NO: 1236005 - RNA, 18 nt, Human
ccccagcuccucccaccc

SEQ ID NO: 1236006 - RNA, 19 nt, Human
cccccaaccucccccuccg

SEQ ID NO: 1236007 - RNA, 22 nt, Human
cccccaaccucccccuccgccu

SEQ ID NO: 1236008 - RNA, 24 nt, Human
cccgucccugcagcgagccuuagc

SEQ ID NO: 1236009 - RNA, 18 nt, Human
cccuccgccucccacccc

SEQ ID NO: 1236010 - RNA, 24 nt, Human
ccgugggcagggaccaccuguaac

SEQ ID NO: 1236011 - RNA, 18 nt, Human
ccucagugacccagcccc

SEQ ID NO: 1236012 - RNA, 27 nt, Human
ccucccacccccaaccucccccuccgc

SEQ ID NO: 1236013 - RNA, 19 nt, Human
ccugcaccuuccccagcug

SEQ ID NO: 1236014 - RNA, 18 nt, Human
ccugcagcgagccuuagc

SEQ ID NO: 1236015 - RNA, 21 nt, Human
ccuggcaacagagcaagacuc

SEQ ID NO: 1236016 - RNA, 20 nt, Human
ccuggcaugcugggucccug

SEQ ID NO: 1236017 - RNA, 22 nt, Human
ccuggccaacauggugaaaccc

SEQ ID NO: 1236018 - RNA, 23 nt, Human
ccuggccaacauggugaaacccc

SEQ ID NO: 1236019 - RNA, 24 nt, Human
ccuggccaacauggugaaaccccg

SEQ ID NO: 1236020 - RNA, 22 nt, Human
ccugggcgacagagcgagacuc

SEQ ID NO: 1236021 - RNA, 22 nt, Human
ccuguaaucccagcacuuuggg

SEQ ID NO: 1236022 - RNA, 18 nt, Human
ccuguagucccagcuacu

SEQ ID NO: 1236023 - RNA, 21 nt, Human
ccuguagucccagcuacuugg

SEQ ID NO: 1236024 - RNA, 22 nt, Human
ccuguagucccagcuacuuggg

SEQ ID NO: 1236025 - RNA, 24 nt, Human
ccuguagucccaguuacucagcag

SEQ ID NO: 1236026 - RNA, 22 nt, Human
cgagguggguggaucaggaggu

SEQ ID NO: 1236027 - RNA, 24 nt, Human
cgagguggguggaucaggagguca

SEQ ID NO: 1236028 - RNA, 26 nt, Human
cgccacugcacuccagccugggcgac

SEQ ID NO: 1236029 - RNA, 25 nt, Human
cgcuucggagaggcagucucccagg

SEQ ID NO: 1236030 - RNA, 21 nt, Human
cggcagggcgguggcggagga

SEQ ID NO: 1236031 - RNA, 26 nt, Human
cggccgggcuccgaggggcccuggcu

SEQ ID NO: 1236032 - RNA, 19 nt, Human
cgggaacuugcccaaggcu

SEQ ID NO: 1236033 - RNA, 22 nt, Human
cucacgccuguaaucccagcac

SEQ ID NO: 1236034 - RNA, 24 nt, Human
cucacgccuguaaucccagcacuu

SEQ ID NO: 1236035 - RNA, 23 nt, Human
cucagagcuaggcagcaggaaau

SEQ ID NO: 1236036 - RNA, 22 nt, Human
cucccacccccaaccucccccu

SEQ ID NO: 1236037 - RNA, 19 nt, Human
cuccgccucccaccccagg

SEQ ID NO: 1236038 - RNA, 21 nt, Human
cuccucccacccccaaccuuc

SEQ ID NO: 1236039 - RNA, 20 nt, Human
cugcggccucuucagggccc

SEQ ID NO: 1236040 - RNA, 19 nt, Human
cuucagggcccagauucca

SEQ ID NO: 1236041 - RNA, 24 nt, Human
cuugaacccggaggcggagguugc

SEQ ID NO: 1236042 - RNA, 21 nt, Human
cuuuguacugacaccacgcuc

SEQ ID NO: 1236043 - RNA, 18 nt, Human
gaagacagcgaagccaca

SEQ ID NO: 1236044 - RNA, 24 nt, Human
gaaugcacaaacaaggcuggagaa

SEQ ID NO: 1236045 - RNA, 24 nt, Human
gacagagcgagacuccgucucaaa

SEQ ID NO: 1236046 - RNA, 23 nt, Human
gagaucgcgccacugcacuccag

SEQ ID NO: 1236047 - RNA, 23 nt, Human
gaggaacccuccccagcacacua

SEQ ID NO: 1236048 - RNA, 22 nt, Human
gagggaugcggacacagcacgg

SEQ ID NO: 1236049 - RNA, 21 nt, Human
gagguggguggaucaggaggu

SEQ ID NO: 1236050 - RNA, 18 nt, Human
gagguugcagugagccaa

SEQ ID NO: 1236051 - RNA, 21 nt, Human
gagguugcagugagccaagau

SEQ ID NO: 1236052 - RNA, 23 nt, Human
gagguugcagugagccaagauug

SEQ ID NO: 1236053 - RNA, 23 nt, Human
gagguugcagugagcugagaucg

SEQ ID NO: 1236054 - RNA, 24 nt, Human
gcacuccagccugggcgacagagc

SEQ ID NO: 1236055 - RNA, 23 nt, Human
gcacucuggccuggcaacagagc

SEQ ID NO: 1236056 - RNA, 22 nt, Human
gcaggagaaucgcuugaaccca

SEQ ID NO: 1236057 - RNA, 24 nt, Human
gccaacauggugaaaccccgucuc

SEQ ID NO: 1236058 - RNA, 22 nt, Human
gccacugcacuccagccugggc

SEQ ID NO: 1236059 - RNA, 24 nt, Human
gccacugcacuccagccugggcga

SEQ ID NO: 1236060 - RNA, 22 nt, Human
gccuggcaacagagcaagacuc

SEQ ID NO: 1236061 - RNA, 21 nt, Human
gccugggacuaaaggagaaag

SEQ ID NO: 1236062 - RNA, 24 nt, Human
gcgaagccacaggauuaugcaaag

SEQ ID NO: 1236063 - RNA, 20 nt, Human
gcgguggcggaggaggaagc

SEQ ID NO: 1236064 - RNA, 23 nt, Human
gcuaggcagcaggaaauggggag

SEQ ID NO: 1236065 - RNA, 20 nt, Human
gcugagaucgcgccacugca

SEQ ID NO: 1236066 - RNA, 19 nt, Human
ggaacccuccccagcacac

SEQ ID NO: 1236067 - RNA, 25 nt, Human
ggaaugcacaaacaaggcuggagac

SEQ ID NO: 1236068 - RNA, 18 nt, Human
ggagacagggaggaggcc

SEQ ID NO: 1236069 - RNA, 18 nt, Human
ggagcaggcagggaggcc

SEQ ID NO: 1236070 - RNA, 22 nt, Human
ggaggcggagguugcagugagc

SEQ ID NO: 1236071 - RNA, 22 nt, Human
ggaggcggagguugcagugagc

SEQ ID NO: 1236072 - RNA, 22 nt, Human
ggagguugcagugagccaagau

SEQ ID NO: 1236073 - RNA, 24 nt, Human
ggagguugcagugagccaagauug

SEQ ID NO: 1236074 - RNA, 22 nt, Human
ggagguugcagugagcugagau

SEQ ID NO: 1236075 - RNA, 24 nt, Human
ggagguugcagugagcugagaucg

SEQ ID NO: 1236076 - RNA, 23 nt, Human
ggcgugguggcucacgccuguaa

SEQ ID NO: 1236077 - RNA, 20 nt, Human
gggaggguggcugggaggga

SEQ ID NO: 1236078 - RNA, 22 nt, Human
ggggcaggugggaucaguccua

SEQ ID NO: 1236079 - RNA, 24 nt, Human
gguggcucacgccuguaaucccag

SEQ ID NO: 1236080 - RNA, 23 nt, Human
guacaggaccagcaaggggcagg

SEQ ID NO: 1236081 - RNA, 18 nt, Human
guccagagcccaugugcu

SEQ ID NO: 1236082 - RNA, 22 nt, Human
guggcacgugccuguaguccca

SEQ ID NO: 1236083 - RNA, 23 nt, Human
guggcucacgccuguaaucccag

SEQ ID NO: 1236084 - RNA, 24 nt, Human
gugguccagagcccaugugcugga

SEQ ID NO: 1236085 - RNA, 19 nt, Human
guugcagugagcugagauc

SEQ ID NO: 1236086 - RNA, 21 nt, Human
uaaaaauacaaaaauuagcca

SEQ ID NO: 1236087 - RNA, 19 nt, Human
uaaccuaaugggggcagag

SEQ ID NO: 1236088 - RNA, 18 nt, Human
uaagaaauaaaaacggcc

SEQ ID NO: 1236089 - RNA, 19 nt, Human
uaagacacccuagcuagaa

SEQ ID NO: 1236090 - RNA, 19 nt, Human
uaaggaagaacucaaagca

SEQ ID NO: 1236091 - RNA, 19 nt, Human
uaauccucaacagaagcca

SEQ ID NO: 1236092 - RNA, 24 nt, Human
uacaggaccagcaaggggcaggug

SEQ ID NO: 1236093 - RNA, 21 nt, Human
uacugacaccacgcucagcac

SEQ ID NO: 1236094 - RNA, 23 nt, Human
uauacaugguuuaagaaauaaaa

SEQ ID NO: 1236095 - RNA, 28 nt, Human
ucaacagaagccagaacuaaucaacggg

SEQ ID NO: 1236096 - RNA, 24 nt, Human
ucaggaggucaagagauugagacc

SEQ ID NO: 1236097 - RNA, 22 nt, Human
ucagggcccagauuccacaggg

SEQ ID NO: 1236098 - RNA, 23 nt, Human
ucagggcccagauuccacaggga

SEQ ID NO: 1236099 - RNA, 25 nt, Human
uccaacacaccucucaaccucagug

SEQ ID NO: 1236100 - RNA, 23 nt, Human
uccagccugggcgacagagcgag

SEQ ID NO: 1236101 - RNA, 24 nt, Human
uccagccugggcgacagagcgaga

SEQ ID NO: 1236102 - RNA, 20 nt, Human
ucccacccccaaccuccccc

SEQ ID NO: 1236103 - RNA, 23 nt, Human
ucccacccccaaccucccccucc

SEQ ID NO: 1236104 - RNA, 18 nt, Human
ucccugcaccgugggcag

SEQ ID NO: 1236105 - RNA, 25 nt, Human
ucccugcuauaagacacccuaggac

SEQ ID NO: 1236106 - RNA, 23 nt, Human
ucgcgccacugcacuccagccug

SEQ ID NO: 1236107 - RNA, 24 nt, Human
ucgcuugaacccaggaggcggagg

SEQ ID NO: 1236108 - RNA, 22 nt, Human
ucggagaggcagucucccaggc

SEQ ID NO: 1236109 - RNA, 22 nt, Human
ucucccaggcccccugcaccuu

SEQ ID NO: 1236110 - RNA, 27 nt, Human
ucucccugcaccgugggcagggacugg

SEQ ID NO: 1236111 - RNA, 23 nt, Human
ucucuacuaaaaauacaaaaauu

SEQ ID NO: 1236112 - RNA, 20 nt, Human
ugaagacagcgaagccacag

SEQ ID NO: 1236113 - RNA, 24 nt, Human
ugacaaccaugauuuaagacagaa

SEQ ID NO: 1236114 - RNA, 24 nt, Human
ugagaccauccuggccaacauggu

SEQ ID NO: 1236115 - RNA, 22 nt, Human
ugagcugagaucgcgccacugc

SEQ ID NO: 1236116 - RNA, 20 nt, Human
ugaggcaggagaaucgcuug

SEQ ID NO: 1236117 - RNA, 24 nt, Human
ugaggcaggagaaucgcuugaacc

SEQ ID NO: 1236118 - RNA, 25 nt, Human
ugaggcaggagaaucgcuugaaccc

SEQ ID NO: 1236119 - RNA, 19 nt, Human
ugaggcagggaaucacuug

SEQ ID NO: 1236120 - RNA, 23 nt, Human
ugaggcagggaaucacuugaacc

SEQ ID NO: 1236121 - RNA, 24 nt, Human
ugaggcagggaaucacuugaaccc

SEQ ID NO: 1236122 - RNA, 19 nt, Human
ugaggcuggggagaggguc

SEQ ID NO: 1236123 - RNA, 24 nt, Human
ugccuguagucccagcuacuuggg

SEQ ID NO: 1236124 - RNA, 23 nt, Human
ugcugggucccugcuauaagaca

SEQ ID NO: 1236125 - RNA, 19 nt, Human
uggcaagcuccccgucccu

SEQ ID NO: 1236126 - RNA, 22 nt, Human
uggcaagcuccccgucccugca

SEQ ID NO: 1236127 - RNA, 24 nt, Human
uggcaagcuccccgucccugcagc

SEQ ID NO: 1236128 - RNA, 24 nt, Human
uggccaacauggugaaaccccguc

SEQ ID NO: 1236129 - RNA, 24 nt, Human
uggcucacgccuguaaucccagca

SEQ ID NO: 1236130 - RNA, 19 nt, Human
ugggaggcugaggcaggag

SEQ ID NO: 1236131 - RNA, 23 nt, Human
ugggaggcugaggcaggagaauc

SEQ ID NO: 1236132 - RNA, 19 nt, Human
ugggagggacggaagggug

SEQ ID NO: 1236133 - RNA, 23 nt, Human
ugggagggacggaagggugaggg

SEQ ID NO: 1236134 - RNA, 23 nt, Human
ugggaggucgagguggguggauc

SEQ ID NO: 1236135 - RNA, 27 nt, Human
ugggggcagaggagcagaaccacgagg

SEQ ID NO: 1236136 - RNA, 22 nt, Human
uggguggaucaggaggucaaga

SEQ ID NO: 1236137 - RNA, 24 nt, Human
ugguggcucacgccuguaauccca

SEQ ID NO: 1236138 - RNA, 23 nt, Human
uuaauccucaacagaagccagaa

SEQ ID NO: 1236139 - RNA, 23 nt, Human
uucccuguccgcuggugcugggu

SEQ ID NO: 1236140 - RNA, 24 nt, Human
uugaacccaggaggcggagguugc

SEQ ID NO: 1236141 - RNA, 22 nt, Human
uugcagugagccaagauugcac

SEQ ID NO: 1236142 - RNA, 18 nt, Human
uugcagugagcugagauc

SEQ ID NO: 1236143 - RNA, 20 nt, Human
uugcagugagcugagaucgc

SEQ ID NO: 1236144 - RNA, 22 nt, Human
uugcagugagcugagaucgcgc

SEQ ID NO: 1236145 - RNA, 21 nt, Human
uugcccaaggcugcuaagcag

SEQ ID NO: 1236146 - RNA, 24 nt, Human
uugggaggcugaggcaggagaauc

SEQ ID NO: 1236147 - RNA, 23 nt, Human
augaaguguuugaggaagugggu

SEQ ID NO: 1236148 - RNA, 24 nt, Human
auggcacaggugauggucucccuc

SEQ ID NO: 1236149 - RNA, 20 nt, Human
cagcucuggguccaucuccc

SEQ ID NO: 1236150 - RNA, 23 nt, Human
caggagcacccugcuggagaggc

SEQ ID NO: 1236151 - RNA, 26 nt, Human
caggagcacccugcuggagaggccaa

SEQ ID NO: 1236152 - RNA, 22 nt, Human
cgggaaggcuggggcagcagca

SEQ ID NO: 1236153 - RNA, 21 nt, Human
cuccccacccuacauguuccc

SEQ ID NO: 1236154 - RNA, 24 nt, Human
cuuuuauuauuauugcuuuuauua

SEQ ID NO: 1236155 - RNA, 23 nt, Human
gagcacccugcuggagaggccaa

SEQ ID NO: 1236156 - RNA, 20 nt, Human
ggaaggcuggggcagcagca

SEQ ID NO: 1236157 - RNA, 20 nt, Human
gguguuucuggagugcagag

SEQ ID NO: 1236158 - RNA, 21 nt, Human
uacauguucccagguucuguc

SEQ ID NO: 1236159 - RNA, 22 nt, Human
ucaggguguuucuggagugcag

SEQ ID NO: 1236160 - RNA, 20 nt, Human
uccaucuccucucugagccu

SEQ ID NO: 1236161 - RNA, 22 nt, Human
uccaugcccaccauuugccccu

SEQ ID NO: 1236162 - RNA, 22 nt, Human
ucccauggcacaggugaugguc

SEQ ID NO: 1236163 - RNA, 21 nt, Human
uccccacccuacauguuccca

SEQ ID NO: 1236164 - RNA, 20 nt, Human
ucccucucagcucugggucc

SEQ ID NO: 1236165 - RNA, 21 nt, Human
ucuaguucuuguuuugucucu

SEQ ID NO: 1236166 - RNA, 24 nt, Human
ucucccucucagcucuggguccau

SEQ ID NO: 1236167 - RNA, 25 nt, Human
uggcacaggugauggucucccucuc

SEQ ID NO: 1236168 - RNA, 23 nt, Human
ugggaauucucaccaagaguuuc

SEQ ID NO: 1236169 - RNA, 22 nt, Human
uugccccuuuguccuaggguac

SEQ ID NO: 1236170 - RNA, 23 nt, Human
uuucauuaggccaagucugcggg

SEQ ID NO: 1236171 - RNA, 18 nt, Human
uuuccaucuccucucuga

SEQ ID NO: 1236172 - RNA, 24 nt, Human
aaaauaacgcucugagacaggaug

SEQ ID NO: 1236173 - RNA, 20 nt, Human
agcagcagccaggcugggga

SEQ ID NO: 1236174 - RNA, 22 nt, Human
agccaaagaggaaccgaggcac

SEQ ID NO: 1236175 - RNA, 22 nt, Human
agccaggcuggggaccccaggc

SEQ ID NO: 1236176 - RNA, 18 nt, Human
agccggaguccccgagga

SEQ ID NO: 1236177 - RNA, 26 nt, Human
aggcacaggcccaggccucccacgca

SEQ ID NO: 1236178 - RNA, 18 nt, Human
aggcaggacgaguguagg

SEQ ID NO: 1236179 - RNA, 19 nt, Human
auucagggcccagcagcag

SEQ ID NO: 1236180 - RNA, 19 nt, Human
caaaauaacgcucugagac

SEQ ID NO: 1236181 - RNA, 19 nt, Human
cagaguucagguaccugcc

SEQ ID NO: 1236182 - RNA, 21 nt, Human
cagcccagccacaggguccug

SEQ ID NO: 1236183 - RNA, 21 nt, Human
caggaugcuccaggcccuuga

SEQ ID NO: 1236184 - RNA, 19 nt, Human
caggcaggacgaguguagg

SEQ ID NO: 1236185 - RNA, 22 nt, Human
caggcaggacgaguguaggcag

SEQ ID NO: 1236186 - RNA, 19 nt, Human
caggcuggggaccccaggc

SEQ ID NO: 1236187 - RNA, 23 nt, Human
cccaggcuggggcagccuugagc

SEQ ID NO: 1236188 - RNA, 23 nt, Human
ccccgaggacagccaaagaggaa

SEQ ID NO: 1236189 - RNA, 24 nt, Human
cgaggacagccaaagaggaaccga

SEQ ID NO: 1236190 - RNA, 18 nt, Human
cuuuguacuggccucucu

SEQ ID NO: 1236191 - RNA, 24 nt, Human
gaccaaaauaacgcucugagacag

SEQ ID NO: 1236192 - RNA, 19 nt, Human
gccacaggguccugccagc

SEQ ID NO: 1236193 - RNA, 19 nt, Human
gcccagcagcagccaggcu

SEQ ID NO: 1236194 - RNA, 25 nt, Human
ggaugcuccaggcccuugaacucag

SEQ ID NO: 1236195 - RNA, 22 nt, Human
gggcuuuguacuggccucucuu

SEQ ID NO: 1236196 - RNA, 22 nt, Human
ucagggcccagcagcagccagg

SEQ ID NO: 1236197 - RNA, 21 nt, Human
ucccagcccagccacaggguc

SEQ ID NO: 1236198 - RNA, 23 nt, Human
uccucugugaagcccucucagag

SEQ ID NO: 1236199 - RNA, 22 nt, Human
ugacagcuccauucccagccca

SEQ ID NO: 1236200 - RNA, 22 nt, Human
ugagacaggaugcuccaggccc

SEQ ID NO: 1236201 - RNA, 23 nt, Human
ugcuccaggcccuugaacucagc

SEQ ID NO: 1236202 - RNA, 20 nt, Human
uggcgugccuuccacucucu

SEQ ID NO: 1236203 - RNA, 20 nt, Human
aagggcagaaggugcugggg

SEQ ID NO: 1236204 - RNA, 26 nt, Human
aaggugcuggggccagcccgcugggg

SEQ ID NO: 1236205 - RNA, 18 nt, Human
agaaagaaucugaauaug

SEQ ID NO: 1236206 - RNA, 22 nt, Human
agaaggugcuggggccagcccg

SEQ ID NO: 1236207 - RNA, 20 nt, Human
agaggcugucucagcaucua

SEQ ID NO: 1236208 - RNA, 20 nt, Human
agggagaggcugucucagca

SEQ ID NO: 1236209 - RNA, 24 nt, Human
cagcccgcuggggguggcgguccg

SEQ ID NO: 1236210 - RNA, 22 nt, Human
cgucccggccucugugcccugg

SEQ ID NO: 1236211 - RNA, 23 nt, Human
cuggggccagcccgcugggggug

SEQ ID NO: 1236212 - RNA, 23 nt, Human
cuugccuggcguacccucccuuu

SEQ ID NO: 1236213 - RNA, 22 nt, Human
gcuguggggcaggccgucuguc

SEQ ID NO: 1236214 - RNA, 24 nt, Human
ggagaggcugucucagcaucuaug

SEQ ID NO: 1236215 - RNA, 19 nt, Human
gggaagggcagaaggugcu

SEQ ID NO: 1236216 - RNA, 22 nt, Human
gucccggccucugugcccuggg

SEQ ID NO: 1236217 - RNA, 18 nt, Human
guggacacgggccuccgu

SEQ ID NO: 1236218 - RNA, 20 nt, Human
uaaagcgaggguaucuucag

SEQ ID NO: 1236219 - RNA, 26 nt, Human
uaacaucaaagaaagaaucugaauau

SEQ ID NO: 1236220 - RNA, 23 nt, Human
ucccggccucugugcccugggcu

SEQ ID NO: 1236221 - RNA, 21 nt, Human
ucugagugggagcugcagcug

SEQ ID NO: 1236222 - RNA, 21 nt, Human
ugagugggagcugcagcugau

SEQ ID NO: 1236223 - RNA, 22 nt, Human
ugcagcugauguggacacgggc

SEQ ID NO: 1236224 - RNA, 20 nt, Human
ugcccugggcuugccuggcg

SEQ ID NO: 1236225 - RNA, 20 nt, Human
ugcccugggcuugccuggcg

SEQ ID NO: 1236226 - RNA, 23 nt, Human
uggcaaacccugcguucacuggc

SEQ ID NO: 1236227 - RNA, 18 nt, Human
ugggaagggcagaaggug

SEQ ID NO: 1236228 - RNA, 19 nt, Human
ugggaagggcagaaggugc

SEQ ID NO: 1236229 - RNA, 19 nt, Human
uggggcaggccgucugucu

SEQ ID NO: 1236230 - RNA, 21 nt, Human
ugguagcaauggcaaacccug

SEQ ID NO: 1236231 - RNA, 24 nt, Human
uuguggugcuugcuugguagcaau

SEQ ID NO: 1236232 - RNA, 23 nt, Human
acagaucuuuccaagacccaaag

SEQ ID NO: 1236233 - RNA, 20 nt, Human
agacccaaagaucagggcga

SEQ ID NO: 1236234 - RNA, 23 nt, Human
caaagucuacagaucuuuccaag

SEQ ID NO: 1236235 - RNA, 22 nt, Human
cagaucuuuccaagacccaaag

SEQ ID NO: 1236236 - RNA, 19 nt, Human
ccaccaacguucagaucca

SEQ ID NO: 1236237 - RNA, 19 nt, Human
cccgcagguggcgguggcc

SEQ ID NO: 1236238 - RNA, 18 nt, Human
cgaccaacuugcaguaga

SEQ ID NO: 1236239 - RNA, 18 nt, Human
cgggugaaggcugagccc

SEQ ID NO: 1236240 - RNA, 22 nt, Human
cucgccggguccccucuccccg

SEQ ID NO: 1236241 - RNA, 22 nt, Human
cugaggacaggggagggcuuug

SEQ ID NO: 1236242 - RNA, 19 nt, Human
gacaggggagggcuuugcc

SEQ ID NO: 1236243 - RNA, 21 nt, Human
gcaguagagcucgggcugggg

SEQ ID NO: 1236244 - RNA, 21 nt, Human
gggcccccgaccaacuugcag

SEQ ID NO: 1236245 - RNA, 18 nt, Human
gugcuuccaaagucuaca

SEQ ID NO: 1236246 - RNA, 23 nt, Human
uacagaucuuuccaagacccaaa

SEQ ID NO: 1236247 - RNA, 20 nt, Human
uagagcucgggcuggggccu

SEQ ID NO: 1236248 - RNA, 22 nt, Human
ugaguaggugcuuccaaagucu

SEQ ID NO: 1236249 - RNA, 21 nt, Human
ugauugcauuuuauuuaaucu

SEQ ID NO: 1236250 - RNA, 23 nt, Human
ugccuggggcgguggggcccccg

SEQ ID NO: 1236251 - RNA, 20 nt, Human
ugguguggccgcugccuggg

SEQ ID NO: 1236252 - RNA, 22 nt, Human
uuccuggggucuucagaauugc

SEQ ID NO: 1236253 - RNA, 19 nt, Human
uugcaguagagcucgggcu

SEQ ID NO: 1236254 - RNA, 24 nt, Human
uugccucccgcccaaauucuuuua

SEQ ID NO: 1236255 - RNA, 23 nt, Human
uuggugacaggaugugcuuuccu

SEQ ID NO: 1236256 - RNA, 24 nt, Human
aacagcuuuacuaaaaagccaacc

SEQ ID NO: 1236257 - RNA, 20 nt, Human
aacauggugaaacccugucu

SEQ ID NO: 1236258 - RNA, 21 nt, Human
aacauggugaaacccugucuc

SEQ ID NO: 1236259 - RNA, 24 nt, Human
aaucacuugaaccugggaggcaga

SEQ ID NO: 1236260 - RNA, 20 nt, Human
aaucuccucuccaaaggagc

SEQ ID NO: 1236261 - RNA, 24 nt, Human
accaacauggugaaacccugucuc

SEQ ID NO: 1236262 - RNA, 24 nt, Human
acccugucucuacuaaaaauacaa

SEQ ID NO: 1236263 - RNA, 24 nt, Human
acgaaacuccaucucaaaaaaaua

SEQ ID NO: 1236264 - RNA, 19 nt, Human
acgagaacgaaacuccauc

SEQ ID NO: 1236265 - RNA, 22 nt, Human
agaaucacuugaaccugggagg

SEQ ID NO: 1236266 - RNA, 22 nt, Human
agagguugcagugagcugagau

SEQ ID NO: 1236267 - RNA, 24 nt, Human
agagguugcagugagcugagauug

SEQ ID NO: 1236268 - RNA, 24 nt, Human
agcacuuugggaggcugagguggg

SEQ ID NO: 1236269 - RNA, 24 nt, Human
agccugaccaacauggugaaaccc

SEQ ID NO: 1236270 - RNA, 24 nt, Human
aggcacaguggcucacgccuguaa

SEQ ID NO: 1236271 - RNA, 20 nt, Human
aggcagagguugcagugagc

SEQ ID NO: 1236272 - RNA, 24 nt, Human
aggcagagguugcagugagcugag

SEQ ID NO: 1236273 - RNA, 22 nt, Human
aggcaggagaaucacuugaacc

SEQ ID NO: 1236274 - RNA, 24 nt, Human
aggcaggagaaucacuugaaccug

SEQ ID NO: 1236275 - RNA, 24 nt, Human
aggcugaggcaggagaaucacuug

SEQ ID NO: 1236276 - RNA, 24 nt, Human
aggcuuuagcauaauuuucaauuc

SEQ ID NO: 1236277 - RNA, 22 nt, Human
agguggguagaucaccugaggu

SEQ ID NO: 1236278 - RNA, 24 nt, Human
aguggcucacgccuguaaucccag

SEQ ID NO: 1236279 - RNA, 19 nt, Human
auagaucuaucaugugauu

SEQ ID NO: 1236280 - RNA, 23 nt, Human
auugcacuccagguugggcaacg

SEQ ID NO: 1236281 - RNA, 24 nt, Human
caacauggugaaacccugucucua

SEQ ID NO: 1236282 - RNA, 24 nt, Human
cacaccuguaaucucagcuacuug

SEQ ID NO: 1236283 - RNA, 21 nt, Human
cacaucauaaucuccucucca

SEQ ID NO: 1236284 - RNA, 22 nt, Human
caccugaggucuggaguucgag

SEQ ID NO: 1236285 - RNA, 23 nt, Human
caccuguaaucucagcuacuugg

SEQ ID NO: 1236286 - RNA, 24 nt, Human
caccuguaaucucagcuacuuggg

SEQ ID NO: 1236287 - RNA, 24 nt, Human
cacgccuguaaucccagcacuuug

SEQ ID NO: 1236288 - RNA, 24 nt, Human
cagcacuuugggaggcugaggugg

SEQ ID NO: 1236289 - RNA, 24 nt, Human
cagcuacuugggaggcugaggcag

SEQ ID NO: 1236290 - RNA, 20 nt, Human
cagcuuuacuaaaaagccau

SEQ ID NO: 1236291 - RNA, 20 nt, Human
caucauaaucuccucuccaa

SEQ ID NO: 1236292 - RNA, 19 nt, Human
cauugcacuccagguuggg

SEQ ID NO: 1236293 - RNA, 22 nt, Human
cauugcacuccagguugggcaa

SEQ ID NO: 1236294 - RNA, 23 nt, Human
cauugcacuccagguugggcaac

SEQ ID NO: 1236295 - RNA, 18 nt, Human
ccauugcacuccagguug

SEQ ID NO: 1236296 - RNA, 20 nt, Human
ccauugcacuccagguuggg

SEQ ID NO: 1236297 - RNA, 21 nt, Human
ccauugcacuccagguugggc

SEQ ID NO: 1236298 - RNA, 24 nt, Human
ccauugcacuccagguugggcaac

SEQ ID NO: 1236299 - RNA, 22 nt, Human
ccugaccaacauggugaaaccc

SEQ ID NO: 1236300 - RNA, 24 nt, Human
ccugaccaacauggugaaacccug

SEQ ID NO: 1236301 - RNA, 25 nt, Human
ccugggaggcagagguugcagugag

SEQ ID NO: 1236302 - RNA, 21 nt, Human
ccuguaaucucagcuacuugg

SEQ ID NO: 1236303 - RNA, 24 nt, Human
cgagaccagccugaccaacauggu

SEQ ID NO: 1236304 - RNA, 23 nt, Human
cgccuguaaucccagcacuuugg

SEQ ID NO: 1236305 - RNA, 24 nt, Human
cgccuguaaucccagcacuuuggg

SEQ ID NO: 1236306 - RNA, 22 nt, Human
cucacgccuguaaucccagcac

SEQ ID NO: 1236307 - RNA, 24 nt, Human
cucacgccuguaaucccagcacuu

SEQ ID NO: 1236308 - RNA, 24 nt, Human
cugaccaacauggugaaacccugu

SEQ ID NO: 1236309 - RNA, 23 nt, Human
cugaguaaaagacaaggguuuau

SEQ ID NO: 1236310 - RNA, 21 nt, Human
cuguaaucucagcuacuuggg

SEQ ID NO: 1236311 - RNA, 23 nt, Human
gagauugugccauugcacuccag

SEQ ID NO: 1236312 - RNA, 23 nt, Human
gagguggguagaucaccugaggu

SEQ ID NO: 1236313 - RNA, 18 nt, Human
gaucaccugaggucugga

SEQ ID NO: 1236314 - RNA, 24 nt, Human
gaucaccugaggucuggaguucga

SEQ ID NO: 1236315 - RNA, 23 nt, Human
gcaggagaaucacuugaaccugg

SEQ ID NO: 1236316 - RNA, 19 nt, Human
gcauaaucuuucacaucau

SEQ ID NO: 1236317 - RNA, 24 nt, Human
gccauugcacuccagguugggcaa

SEQ ID NO: 1236318 - RNA, 24 nt, Human
gggcaugguggcgcacaccuguaa

SEQ ID NO: 1236319 - RNA, 21 nt, Human
gugaaacccugucucuacuaa

SEQ ID NO: 1236320 - RNA, 24 nt, Human
guugcagugagcugagauugugcc

SEQ ID NO: 1236321 - RNA, 21 nt, Human
uaaacagcuuuacuaaaaagc

SEQ ID NO: 1236322 - RNA, 24 nt, Human
uagaucaccugaggucuggaguuc

SEQ ID NO: 1236323 - RNA, 18 nt, Human
uaguuacaucuuuuucuc

SEQ ID NO: 1236324 - RNA, 25 nt, Human
ucacuugaaccugggaggcagaggu

SEQ ID NO: 1236325 - RNA, 25 nt, Human
ucaggccaggcacaguggcucacgc

SEQ ID NO: 1236326 - RNA, 22 nt, Human
ucucuacuaaaaauacaaaaaa

SEQ ID NO: 1236327 - RNA, 24 nt, Human
ugaaccugggaggcagagguugca

SEQ ID NO: 1236328 - RNA, 24 nt, Human
ugaccaacauggugaaacccuguc

SEQ ID NO: 1236329 - RNA, 20 nt, Human
ugaggcaggagaaucacuug

SEQ ID NO: 1236330 - RNA, 24 nt, Human
ugaggcaggagaaucacuugaacc

SEQ ID NO: 1236331 - RNA, 25 nt, Human
ugaggcaggagaaucacuugaaccu

SEQ ID NO: 1236332 - RNA, 20 nt, Human
ugagguggguagaucaccug

SEQ ID NO: 1236333 - RNA, 21 nt, Human
ugagguggguagaucaccuga

SEQ ID NO: 1236334 - RNA, 24 nt, Human
ugagguggguagaucaccugaggu

SEQ ID NO: 1236335 - RNA, 24 nt, Human
ugaguaaaagacaaggguuuauag

SEQ ID NO: 1236336 - RNA, 23 nt, Human
ugcacuccagguugggcaacgag

SEQ ID NO: 1236337 - RNA, 23 nt, Human
ugccucgcuuacagaggguugcu

SEQ ID NO: 1236338 - RNA, 19 nt, Human
uggagaaaccaugugaaaa

SEQ ID NO: 1236339 - RNA, 22 nt, Human
uggcgcacaccuguaaucucag

SEQ ID NO: 1236340 - RNA, 22 nt, Human
uggcucacgccuguaaucccag

SEQ ID NO: 1236341 - RNA, 24 nt, Human
uggcucacgccuguaaucccagca

SEQ ID NO: 1236342 - RNA, 19 nt, Human
ugggaauguuuguuccaua

SEQ ID NO: 1236343 - RNA, 22 nt, Human
ugggaauguuuguuccauauag

SEQ ID NO: 1236344 - RNA, 24 nt, Human
ugggaggcagagguugcagugagc

SEQ ID NO: 1236345 - RNA, 19 nt, Human
ugggaggcugaggcaggag

SEQ ID NO: 1236346 - RNA, 24 nt, Human
ugggaggcugaggcaggagaauca

SEQ ID NO: 1236347 - RNA, 20 nt, Human
ugggaggcugagguggguag

SEQ ID NO: 1236348 - RNA, 24 nt, Human
ugggaggcugagguggguagauca

SEQ ID NO: 1236349 - RNA, 24 nt, Human
uggguagaucaccugaggucugga

SEQ ID NO: 1236350 - RNA, 24 nt, Human
ugguggcgcacaccuguaaucuca

SEQ ID NO: 1236351 - RNA, 18 nt, Human
uuagcugggcaugguggc

SEQ ID NO: 1236352 - RNA, 20 nt, Human
uuagcugggcaugguggcgc

SEQ ID NO: 1236353 - RNA, 25 nt, Human
uucuaaauuucauaaagaaugucag

SEQ ID NO: 1236354 - RNA, 21 nt, Human
uugaacccuacugaaguguua

SEQ ID NO: 1236355 - RNA, 24 nt, Human
uugaaccugggaggcagagguugc

SEQ ID NO: 1236356 - RNA, 22 nt, Human
uugcagugagcugagauugugc

SEQ ID NO: 1236357 - RNA, 25 nt, Human
uugggaggcugaggcaggagaauca

SEQ ID NO: 1236358 - RNA, 25 nt, Human
uugggaggcugagguggguagauca

SEQ ID NO: 1236359 - RNA, 23 nt, Human
aagaaagaagggaagaagucugg

SEQ ID NO: 1236360 - RNA, 23 nt, Human
aagagacucgguccagugaggac

SEQ ID NO: 1236361 - RNA, 22 nt, Human
aauaaggaagcaucaguagaga

SEQ ID NO: 1236362 - RNA, 21 nt, Human
acccccagaagguggcauuga

SEQ ID NO: 1236363 - RNA, 22 nt, Human
acuuugcaauuaaagaaugcca

SEQ ID NO: 1236364 - RNA, 24 nt, Human
caaauuuaccacauuccuuuaaga

SEQ ID NO: 1236365 - RNA, 21 nt, Human
cauccuggagcggcacgggcc

SEQ ID NO: 1236366 - RNA, 18 nt, Human
cguagaggagaaaggcug

SEQ ID NO: 1236367 - RNA, 20 nt, Human
cugaagagacucgguccagu

SEQ ID NO: 1236368 - RNA, 21 nt, Human
gaaaaauaauaaggaagcauc

SEQ ID NO: 1236369 - RNA, 24 nt, Human
gagacagagccaguucugaagaga

SEQ ID NO: 1236370 - RNA, 25 nt, Human
gcccugggaugacacacggguccca

SEQ ID NO: 1236371 - RNA, 23 nt, Human
ggucugggaggauacuggugcca

SEQ ID NO: 1236372 - RNA, 25 nt, Human
guucccucaccucaaccuuuaauuu

SEQ ID NO: 1236373 - RNA, 21 nt, Human
uagaggagaaaggcugguuuc

SEQ ID NO: 1236374 - RNA, 21 nt, Human
uccuggagcggcacgggcccu

SEQ ID NO: 1236375 - RNA, 19 nt, Human
ugagggcaauucuuaacuc

SEQ ID NO: 1236376 - RNA, 19 nt, Human
ugaguaggggcuaccccca

SEQ ID NO: 1236377 - RNA, 26 nt, Human
ugcaguacguagaggagaaaggcugg

SEQ ID NO: 1236378 - RNA, 22 nt, Human
ugccaaaagauuauaaagugac

SEQ ID NO: 1236379 - RNA, 22 nt, Human
uggagcggcacgggcccugcug

SEQ ID NO: 1236380 - RNA, 20 nt, Human
uggcaaacagugaugcagua

SEQ ID NO: 1236381 - RNA, 19 nt, Human
uggcauugagagugauggu

SEQ ID NO: 1236382 - RNA, 21 nt, Human
uucacaagcccugggaugaca

SEQ ID NO: 1236383 - RNA, 20 nt, Human
uucugaagagacucggucca

SEQ ID NO: 1236384 - RNA, 23 nt, Human
uucuuaacucggacaucaaaauu

SEQ ID NO: 1236385 - RNA, 19 nt, Human
aaaaaaaaaaaaaaaaaga

SEQ ID NO: 1236386 - RNA, 23 nt, Human
aaaaaaaaaaaaaaaaagaacac

SEQ ID NO: 1236387 - RNA, 22 nt, Human
aaaaaaaaaaaaaagaacacag

SEQ ID NO: 1236388 - RNA, 19 nt, Human
aaaaaaaaaaaaagaacac

SEQ ID NO: 1236389 - RNA, 25 nt, Human
aaaaaaaaaaaagaacacagucuag

SEQ ID NO: 1236390 - RNA, 22 nt, Human
aaaaaaaagaacacagucuagg

SEQ ID NO: 1236391 - RNA, 22 nt, Human
aaaagaacgagaguaaccccua

SEQ ID NO: 1236392 - RNA, 25 nt, Human
aacacacacuugauacacaugcaug

SEQ ID NO: 1236393 - RNA, 19 nt, Human
aacuaugacauagaaaaua

SEQ ID NO: 1236394 - RNA, 20 nt, Human
aacuuuuucccucaagacag

SEQ ID NO: 1236395 - RNA, 23 nt, Human
aagcagccaaagucaguucccaa

SEQ ID NO: 1236396 - RNA, 24 nt, Human
aagucaguucccaaauaaugccca

SEQ ID NO: 1236397 - RNA, 22 nt, Human
aauaacuuuuucccucaagaca

SEQ ID NO: 1236398 - RNA, 23 nt, Human
accaagaucaacauacucuccug

SEQ ID NO: 1236399 - RNA, 19 nt, Human
accacacuuaaagaaagua

SEQ ID NO: 1236400 - RNA, 23 nt, Human
acccacuccccgcucacacacac

SEQ ID NO: 1236401 - RNA, 25 nt, Human
agaauagaacguuuuuuccccuuuc

SEQ ID NO: 1236402 - RNA, 22 nt, Human
agacagaaaaucagcaacagga

SEQ ID NO: 1236403 - RNA, 18 nt, Human
agagugcugggggcaggc

SEQ ID NO: 1236404 - RNA, 19 nt, Human
agagugcugggggcaggcg

SEQ ID NO: 1236405 - RNA, 21 nt, Human
agagugcugggggcaggcgug

SEQ ID NO: 1236406 - RNA, 19 nt, Human
aggaaucauuuccacuuug

SEQ ID NO: 1236407 - RNA, 22 nt, Human
aggcaaauacacguauguucuu

SEQ ID NO: 1236408 - RNA, 19 nt, Human
agugcugggggcaggcgug

SEQ ID NO: 1236409 - RNA, 19 nt, Human
agugcugggggcaggcgug

SEQ ID NO: 1236410 - RNA, 23 nt, Human
augccacacaagaaacacacacu

SEQ ID NO: 1236411 - RNA, 20 nt, Human
augucuccuucuuagugaua

SEQ ID NO: 1236412 - RNA, 19 nt, Human
auuuacaaguuaguguaua

SEQ ID NO: 1236413 - RNA, 19 nt, Human
caaagaauucauuucucag

SEQ ID NO: 1236414 - RNA, 23 nt, Human
caaauaaugcccaaagugagcac

SEQ ID NO: 1236415 - RNA, 19 nt, Human
caacauacucuccugaaua

SEQ ID NO: 1236416 - RNA, 19 nt, Human
caaucccuaagaauucaca

SEQ ID NO: 1236417 - RNA, 21 nt, Human
caaugccacacaagaaacaca

SEQ ID NO: 1236418 - RNA, 18 nt, Human
caccuagagugcuggggg

SEQ ID NO: 1236419 - RNA, 19 nt, Human
cagaauaucuucuguccuc

SEQ ID NO: 1236420 - RNA, 20 nt, Human
caguucccaaauaaugcccu

SEQ ID NO: 1236421 - RNA, 24 nt, Human
ccaaauaaugcccaaagugagcac

SEQ ID NO: 1236422 - RNA, 24 nt, Human
ccaagagcaacaaugccacacaag

SEQ ID NO: 1236423 - RNA, 23 nt, Human
ccacaaagaauucauuucucaga

SEQ ID NO: 1236424 - RNA, 20 nt, Human
cccaagagcaacaaugccac

SEQ ID NO: 1236425 - RNA, 23 nt, Human
cccacuccccgcucacacacaca

SEQ ID NO: 1236426 - RNA, 22 nt, Human
ccccuuggcacuucuguaauaa

SEQ ID NO: 1236427 - RNA, 21 nt, Human
cccuuggcacuucuguaauaa

SEQ ID NO: 1236428 - RNA, 21 nt, Human
ccuagagugcugggggcaggc

SEQ ID NO: 1236429 - RNA, 24 nt, Human
ccugaccugcugugucccuaagaa

SEQ ID NO: 1236430 - RNA, 21 nt, Human
cuagagugcugggggcaggcg

SEQ ID NO: 1236431 - RNA, 22 nt, Human
cuagagugcugggggcaggcgu

SEQ ID NO: 1236432 - RNA, 21 nt, Human
cucaagacagaaaaucagcaa

SEQ ID NO: 1236433 - RNA, 24 nt, Human
cucaagacagaaaaucagcaacag

SEQ ID NO: 1236434 - RNA, 24 nt, Human
cucagagcucacuaaccaccaccu

SEQ ID NO: 1236435 - RNA, 22 nt, Human
cuccaauacuucagaugcuacc

SEQ ID NO: 1236436 - RNA, 22 nt, Human
cuuaaucagaauaagcuucacc

SEQ ID NO: 1236437 - RNA, 25 nt, Human
gagaguaaccccuauuucccuuuga

SEQ ID NO: 1236438 - RNA, 21 nt, Human
gagcucacuaaccaccaccua

SEQ ID NO: 1236439 - RNA, 21 nt, Human
ggcaaauacacguauguucuu

SEQ ID NO: 1236440 - RNA, 18 nt, Human
ggcaaaucaucaaauguc

SEQ ID NO: 1236441 - RNA, 21 nt, Human
guauguacacuagacacuggg

SEQ ID NO: 1236442 - RNA, 23 nt, Human
guguauguacacuagacacuggg

SEQ ID NO: 1236443 - RNA, 19 nt, Human
uaaaacgguaagcaaagca

SEQ ID NO: 1236444 - RNA, 19 nt, Human
uaaaaucuuuuucuauagu

SEQ ID NO: 1236445 - RNA, 24 nt, Human
uaaauaaccuuccaugacggccau

SEQ ID NO: 1236446 - RNA, 19 nt, Human
uaaccaaaacuuacccagg

SEQ ID NO: 1236447 - RNA, 23 nt, Human
uaagaaaaagcagccaaagucag

SEQ ID NO: 1236448 - RNA, 27 nt, Human
uaagaaaaagcagccaaagucaguucc

SEQ ID NO: 1236449 - RNA, 22 nt, Human
uacagaguguuuaggcaaauac

SEQ ID NO: 1236450 - RNA, 22 nt, Human
uacccaagagcaacaaugccac

SEQ ID NO: 1236451 - RNA, 20 nt, Human
uagagugcugggggcaggcg

SEQ ID NO: 1236452 - RNA, 19 nt, Human
uaggaccaagucaaaucca

SEQ ID NO: 1236453 - RNA, 23 nt, Human
uaggaccaagucaaauccaaccc

SEQ ID NO: 1236454 - RNA, 22 nt, Human
uagugauaucauauacuaauau

SEQ ID NO: 1236455 - RNA, 19 nt, Human
uauaaccaaaacuuaccca

SEQ ID NO: 1236456 - RNA, 23 nt, Human
uaugauccccuuggcacuucugu

SEQ ID NO: 1236457 - RNA, 18 nt, Human
uauugaaucuuuguaguu

SEQ ID NO: 1236458 - RNA, 21 nt, Human
uauugaaucuuuguaguucuu

SEQ ID NO: 1236459 - RNA, 21 nt, Human
ucagagcucacuaaccaccac

SEQ ID NO: 1236460 - RNA, 24 nt, Human
ucagagcucacuaaccaccaccua

SEQ ID NO: 1236461 - RNA, 22 nt, Human
uccaaacaaucaaucccuaaga

SEQ ID NO: 1236462 - RNA, 18 nt, Human
uccaaugcaaacauagau

SEQ ID NO: 1236463 - RNA, 18 nt, Human
ucccaaauaaugcccaaa

SEQ ID NO: 1236464 - RNA, 19 nt, Human
ucccuaagaaaaagcagcc

SEQ ID NO: 1236465 - RNA, 21 nt, Human
ucccuaagaaaaagcagccaa

SEQ ID NO: 1236466 - RNA, 21 nt, Human
ucccucaagacagaaaaucag

SEQ ID NO: 1236467 - RNA, 24 nt, Human
uccuaggauugugaaaaugaaugc

SEQ ID NO: 1236468 - RNA, 21 nt, Human
ucuccugaauaacuuuuuccc

SEQ ID NO: 1236469 - RNA, 25 nt, Human
ugaaccaagaucaacauacucuccu

SEQ ID NO: 1236470 - RNA, 23 nt, Human
ugaaugaaauauaauaauuugga

SEQ ID NO: 1236471 - RNA, 24 nt, Human
ugaccugaugaccacacuuaaaga

SEQ ID NO: 1236472 - RNA, 20 nt, Human
ugagagagauucuguggccu

SEQ ID NO: 1236473 - RNA, 21 nt, Human
ugagagagauucuguggccuu

SEQ ID NO: 1236474 - RNA, 18 nt, Human
ugauauaguaaaaugcau

SEQ ID NO: 1236475 - RNA, 24 nt, Human
ugcaaacauagauuauaugcugca

SEQ ID NO: 1236476 - RNA, 18 nt, Human
ugccacacaagaaacaca

SEQ ID NO: 1236477 - RNA, 20 nt, Human
ugcugggggcaggcgugggg

SEQ ID NO: 1236478 - RNA, 21 nt, Human
ugggggcaggcguggggcaca

SEQ ID NO: 1236479 - RNA, 26 nt, Human
uguaauaagcugagguaaugcuguug

SEQ ID NO: 1236480 - RNA, 24 nt, Human
ugucuccuucuuagugauaucauu

SEQ ID NO: 1236481 - RNA, 19 nt, Human
ugugaaaaugaaugcccuc

SEQ ID NO: 1236482 - RNA, 23 nt, Human
uuaauggagauggauuaugaacc

SEQ ID NO: 1236483 - RNA, 21 nt, Human
uuauaugcugcaguuuuucug

SEQ ID NO: 1236484 - RNA, 25 nt, Human
uucaaaaagucuuuaguuuuacaaa

SEQ ID NO: 1236485 - RNA, 19 nt, Human
uuccaaugcaaacauaggg

SEQ ID NO: 1236486 - RNA, 24 nt, Human
uuccuaaaauaaaaugggggaaaa

SEQ ID NO: 1236487 - RNA, 19 nt, Human
uuuguaguucuuaaaagca

SEQ ID NO: 1236488 - RNA, 21 nt, Human
uuuuccuaaaauaaaaugggg

SEQ ID NO: 1236489 - RNA, 24 nt, Human
uuuucugcgaaaaaagaacgagag

SEQ ID NO: 1236490 - RNA, 21 nt, Human
aagagacauagcuucugagac

SEQ ID NO: 1236491 - RNA, 19 nt, Human
aagaguggauuagcagccu

SEQ ID NO: 1236492 - RNA, 20 nt, Human
aaggcacauuuuuccauaag

SEQ ID NO: 1236493 - RNA, 25 nt, Human
agacagguaggagacaggaggcugg

SEQ ID NO: 1236494 - RNA, 18 nt, Human
aggagccucuaacugugg

SEQ ID NO: 1236495 - RNA, 18 nt, Human
caaucguugccauuguag

SEQ ID NO: 1236496 - RNA, 21 nt, Human
caggagccucuaacuguggag

SEQ ID NO: 1236497 - RNA, 24 nt, Human
caggagccucuaacuguggaggag

SEQ ID NO: 1236498 - RNA, 23 nt, Human
caggaggcugggagaaggucaaa

SEQ ID NO: 1236499 - RNA, 23 nt, Human
caucuuuuccuuuuucagagugu

SEQ ID NO: 1236500 - RNA, 18 nt, Human
cccaggacagaugcggcc

SEQ ID NO: 1236501 - RNA, 21 nt, Human
ccucaucuccugagaacuggg

SEQ ID NO: 1236502 - RNA, 18 nt, Human
ccugguagccucaucucc

SEQ ID NO: 1236503 - RNA, 18 nt, Human
cuuuucuucucuguucuc

SEQ ID NO: 1236504 - RNA, 24 nt, Human
gcguggacuuuucaacaacaguuu

SEQ ID NO: 1236505 - RNA, 20 nt, Human
guaguauuguaauuuuuccc

SEQ ID NO: 1236506 - RNA, 22 nt, Human
uacagaaagagaaaaaaucuuc

SEQ ID NO: 1236507 - RNA, 21 nt, Human
uacuaguugugcccugugggc

SEQ ID NO: 1236508 - RNA, 21 nt, Human
uagcuucugagacauuuccuc

SEQ ID NO: 1236509 - RNA, 23 nt, Human
uccuuuuucagagugucuuuucu

SEQ ID NO: 1236510 - RNA, 19 nt, Human
ucuuuucuucucuguucuc

SEQ ID NO: 1236511 - RNA, 22 nt, Human
ucuuuucuucucuguucucucc

SEQ ID NO: 1236512 - RNA, 23 nt, Human
ugaagaaggacaaaugagcccca

SEQ ID NO: 1236513 - RNA, 21 nt, Human
ugagccccaggacagaugcgg

SEQ ID NO: 1236514 - RNA, 20 nt, Human
ugggagaaggucaaagagac

SEQ ID NO: 1236515 - RNA, 21 nt, Human
ugucuuuucuucucuguucuc

SEQ ID NO: 1236516 - RNA, 22 nt, Human
uucagagugucuuuucuucucu

SEQ ID NO: 1236517 - RNA, 26 nt, Human
uucucuguucucuccugguagccuca

SEQ ID NO: 1236518 - RNA, 22 nt, Human
uugucuucagugacauaccgag

SEQ ID NO: 1236519 - RNA, 24 nt, Human
auuuaaagccccuggauccugcuc

SEQ ID NO: 1236520 - RNA, 18 nt, Human
cagguuaaaauuuaaagc

SEQ ID NO: 1236521 - RNA, 23 nt, Human
ccccuggauccugcuccagucgc

SEQ ID NO: 1236522 - RNA, 24 nt, Human
ccccuggauccugcuccagucgcc

SEQ ID NO: 1236523 - RNA, 23 nt, Human
ggaaaaccagucugaaaaaauaa

SEQ ID NO: 1236524 - RNA, 19 nt, Human
guggaacguaauaaaagug

SEQ ID NO: 1236525 - RNA, 25 nt, Human
guuaaaauuuaaagccccuggaucc

SEQ ID NO: 1236526 - RNA, 20 nt, Human
uaaaagugacuaaauuggau

SEQ ID NO: 1236527 - RNA, 22 nt, Human
uaaauacaaucugugaccauga

SEQ ID NO: 1236528 - RNA, 23 nt, Human
uaaauacaaucugugaccaugaa

SEQ ID NO: 1236529 - RNA, 21 nt, Human
uagaagcaauuuacaacgaag

SEQ ID NO: 1236530 - RNA, 19 nt, Human
ugauugggggaggcaaagu

SEQ ID NO: 1236531 - RNA, 22 nt, Human
uggaccuucucgguagcaauuu

SEQ ID NO: 1236532 - RNA, 19 nt, Human
uuuaaagccccuggauccu

SEQ ID NO: 1236533 - RNA, 18 nt, Human
aaacaaaagccccaacac

SEQ ID NO: 1236534 - RNA, 20 nt, Human
aaacaaaagccccaacacca

SEQ ID NO: 1236535 - RNA, 21 nt, Human
aaaccaaagcaaacuuggcaa

SEQ ID NO: 1236536 - RNA, 25 nt, Human
aaaccaaagcaaacuuggcaagaaa

SEQ ID NO: 1236537 - RNA, 22 nt, Human
aagaagucaucaccuuuacaaa

SEQ ID NO: 1236538 - RNA, 23 nt, Human
aagccccaacaccacuggauucc

SEQ ID NO: 1236539 - RNA, 21 nt, Human
acaaaauaaaaacaaaagccc

SEQ ID NO: 1236540 - RNA, 20 nt, Human
accuuuacaaaauaaaaaca

SEQ ID NO: 1236541 - RNA, 18 nt, Human
agaaaagagaggggaggg

SEQ ID NO: 1236542 - RNA, 21 nt, Human
agaaaccaaagcaaacuuggc

SEQ ID NO: 1236543 - RNA, 19 nt, Human
caaaagccccaacaccacu

SEQ ID NO: 1236544 - RNA, 23 nt, Human
caaaauaaaaacaaaagccccaa

SEQ ID NO: 1236545 - RNA, 23 nt, Human
cagaaaccaaagcaaacuuggca

SEQ ID NO: 1236546 - RNA, 19 nt, Human
cccaacaccacuggauucc

SEQ ID NO: 1236547 - RNA, 20 nt, Human
ccccaacaccacuggauucc

SEQ ID NO: 1236548 - RNA, 21 nt, Human
cccugggcucucccuggggac

SEQ ID NO: 1236549 - RNA, 28 nt, Human
ccuuuuuuuuuuuuuuuccucucuuuua

SEQ ID NO: 1236550 - RNA, 26 nt, Human
cuuuuuuuuuuuuuuuccucucuuuu

SEQ ID NO: 1236551 - RNA, 23 nt, Human
ggcaagaaaagagaggggaggga

SEQ ID NO: 1236552 - RNA, 18 nt, Human
uaaaaacaaaagccccaa

SEQ ID NO: 1236553 - RNA, 18 nt, Human
uaagaagucaucaccuuu

SEQ ID NO: 1236554 - RNA, 24 nt, Human
ucccuggggacgaacccuccuccu

SEQ ID NO: 1236555 - RNA, 18 nt, Human
uccuuuuuuuuuuuuuuu

SEQ ID NO: 1236556 - RNA, 26 nt, Human
uccuuuuuuuuuuuuuuuccucucuu

SEQ ID NO: 1236557 - RNA, 20 nt, Human
uggcaagaaaagagagggga

SEQ ID NO: 1236558 - RNA, 24 nt, Human
uguuuccuuuuuuuuuuuuuuuuu

SEQ ID NO: 1236559 - RNA, 24 nt, Human
uuuacaaaauaaaaacaaaagccc

SEQ ID NO: 1236560 - RNA, 22 nt, Human
caaacuagccacacugccgagc

SEQ ID NO: 1236561 - RNA, 20 nt, Human
cacaaacuagccacacugcc

SEQ ID NO: 1236562 - RNA, 21 nt, Human
cacagguaggaggucaccagg

SEQ ID NO: 1236563 - RNA, 21 nt, Human
caccagguaggacaccaccgg

SEQ ID NO: 1236564 - RNA, 23 nt, Human
cagcaucaagucgcuggcguccc

SEQ ID NO: 1236565 - RNA, 26 nt, Human
ccacacaaacuagccacacugccgag

SEQ ID NO: 1236566 - RNA, 18 nt, Human
gcugggcaccaggggcag

SEQ ID NO: 1236567 - RNA, 19 nt, Human
ggauguccgccucgcugcg

SEQ ID NO: 1236568 - RNA, 22 nt, Human
ggcccggggugcgcucggaguc

SEQ ID NO: 1236569 - RNA, 19 nt, Human
uaacugaaaagagcgucag

SEQ ID NO: 1236570 - RNA, 23 nt, Human
uaggacaccaccggacuugggug

SEQ ID NO: 1236571 - RNA, 19 nt, Human
ucgcugcgcccugcggagu

SEQ ID NO: 1236572 - RNA, 22 nt, Human
uguccgccucgcugcgcccugc

SEQ ID NO: 1236573 - RNA, 24 nt, Human
accuccaaagaaacgaggagcggg

SEQ ID NO: 1236574 - RNA, 20 nt, Human
accugggcagaacuggagcu

SEQ ID NO: 1236575 - RNA, 18 nt, Human
caggcggggccgaccgcg

SEQ ID NO: 1236576 - RNA, 22 nt, Human
ccagcccccggcggcccuugcc

SEQ ID NO: 1236577 - RNA, 20 nt, Human
cccgggcgcgucggaucccg

SEQ ID NO: 1236578 - RNA, 21 nt, Human
cgucgccuccucguccagccc

SEQ ID NO: 1236579 - RNA, 18 nt, Human
cuggaagggccaaccucc

SEQ ID NO: 1236580 - RNA, 19 nt, Human
gaacuggagcuggaagggc

SEQ ID NO: 1236581 - RNA, 26 nt, Human
gaacuggagcuggaagggccaaccuc

SEQ ID NO: 1236582 - RNA, 18 nt, Human
uagaagguggggacgguc

SEQ ID NO: 1236583 - RNA, 21 nt, Human
ucacagugucauuuacaggca

SEQ ID NO: 1236584 - RNA, 22 nt, Human
uggaagggccaaccuccaaaga

SEQ ID NO: 1236585 - RNA, 22 nt, Human
ugggcagaacuggagcuggaag

SEQ ID NO: 1236586 - RNA, 27 nt, Human
agagagcucccaaacagaaacucaaag

SEQ ID NO: 1236587 - RNA, 25 nt, Human
agagcucccaaacagaaacucaaag

SEQ ID NO: 1236588 - RNA, 22 nt, Human
agaggaaggaggaucacuugag

SEQ ID NO: 1236589 - RNA, 18 nt, Human
aggaaggaggaucacuug

SEQ ID NO: 1236590 - RNA, 24 nt, Human
aggaucacuugagaccaggaguuu

SEQ ID NO: 1236591 - RNA, 23 nt, Human
aguggcucaugcuuguaauccca

SEQ ID NO: 1236592 - RNA, 24 nt, Human
aucacuugagaccaggaguuugag

SEQ ID NO: 1236593 - RNA, 18 nt, Human
caggaguuugaggcuaug

SEQ ID NO: 1236594 - RNA, 20 nt, Human
ccaccacuuucggaagcaga

SEQ ID NO: 1236595 - RNA, 19 nt, Human
cccaaacagaaacucaaag

SEQ ID NO: 1236596 - RNA, 24 nt, Human
cucaugcuuguaaucccaccacuu

SEQ ID NO: 1236597 - RNA, 24 nt, Human
gaucacuugagaccaggaguuuga

SEQ ID NO: 1236598 - RNA, 20 nt, Human
gcaggguacaguggcucaug

SEQ ID NO: 1236599 - RNA, 22 nt, Human
ggaucacuugagaccaggaguu

SEQ ID NO: 1236600 - RNA, 24 nt, Human
ggguacaguggcucaugcuuguaa

SEQ ID NO: 1236601 - RNA, 20 nt, Human
uaagccacgauugccacuga

SEQ ID NO: 1236602 - RNA, 22 nt, Human
ucaugcuuguaaucccaccacu

SEQ ID NO: 1236603 - RNA, 21 nt, Human
uggcucaugcuuguaauccca

SEQ ID NO: 1236604 - RNA, 24 nt, Human
uggcucaugcuuguaaucccacca

SEQ ID NO: 1236605 - RNA, 19 nt, Human
uguaaucccaccacuuucg

SEQ ID NO: 1236606 - RNA, 23 nt, Human
aagcccccagcagauaccagcuc

SEQ ID NO: 1236607 - RNA, 18 nt, Human
acgauucucuacuguuua

SEQ ID NO: 1236608 - RNA, 24 nt, Human
acggaggcccgggagacccacggc

SEQ ID NO: 1236609 - RNA, 23 nt, Human
agagugcaauguggcucccgaaa

SEQ ID NO: 1236610 - RNA, 18 nt, Human
agauaccagcucagcucc

SEQ ID NO: 1236611 - RNA, 22 nt, Human
augaaaaugguaaaccuuccca

SEQ ID NO: 1236612 - RNA, 19 nt, Human
auguccacagcuaaaccag

SEQ ID NO: 1236613 - RNA, 21 nt, Human
cagagugcaauguggcucccg

SEQ ID NO: 1236614 - RNA, 21 nt, Human
cagccgaaacgcgucccgggc

SEQ ID NO: 1236615 - RNA, 19 nt, Human
ccaggcaagucagagugca

SEQ ID NO: 1236616 - RNA, 23 nt, Human
ccauguguaaugucaaccauuuc

SEQ ID NO: 1236617 - RNA, 25 nt, Human
cccaggaagcccccagcagauaccc

SEQ ID NO: 1236618 - RNA, 18 nt, Human
ccccagcagauaccagcu

SEQ ID NO: 1236619 - RNA, 20 nt, Human
ccccucgcucggcgccccuc

SEQ ID NO: 1236620 - RNA, 22 nt, Human
cccucggccgccguggaaccuu

SEQ ID NO: 1236621 - RNA, 22 nt, Human
ccggaacucccguggcccgcgc

SEQ ID NO: 1236622 - RNA, 18 nt, Human
ccuccggccagagguggg

SEQ ID NO: 1236623 - RNA, 22 nt, Human
ccuucccgggaagcucuccccg

SEQ ID NO: 1236624 - RNA, 18 nt, Human
ccuuuauuaccacauagu

SEQ ID NO: 1236625 - RNA, 20 nt, Human
cgaaagcgucccacacaccg

SEQ ID NO: 1236626 - RNA, 23 nt, Human
cgccgggacagccuucccgccga

SEQ ID NO: 1236627 - RNA, 21 nt, Human
cgccguggaaccuucccggga

SEQ ID NO: 1236628 - RNA, 18 nt, Human
cgcgagcgauaagucuga

SEQ ID NO: 1236629 - RNA, 19 nt, Human
cucacggccacucuccuua

SEQ ID NO: 1236630 - RNA, 19 nt, Human
cucagugaugugacacugc

SEQ ID NO: 1236631 - RNA, 22 nt, Human
cucccguggcccgcgccucccc

SEQ ID NO: 1236632 - RNA, 20 nt, Human
cuggaauaagaccuuuccug

SEQ ID NO: 1236633 - RNA, 20 nt, Human
cuucccgggaagcucucccc

SEQ ID NO: 1236634 - RNA, 21 nt, Human
gagcaguaugagacaguccau

SEQ ID NO: 1236635 - RNA, 22 nt, Human
gcgaggaagucaccccggccca

SEQ ID NO: 1236636 - RNA, 18 nt, Human
gggaaggaggacgguacg

SEQ ID NO: 1236637 - RNA, 20 nt, Human
gggcgcggaaacccucggcc

SEQ ID NO: 1236638 - RNA, 21 nt, Human
gucaaccauuuccaugaaaau

SEQ ID NO: 1236639 - RNA, 24 nt, Human
guccgcgagcgauaagucugagga

SEQ ID NO: 1236640 - RNA, 19 nt, Human
gugcaagguuuagcuucuu

SEQ ID NO: 1236641 - RNA, 23 nt, Human
uaguccagagcaguaugagacag

SEQ ID NO: 1236642 - RNA, 21 nt, Human
uccaugcuagggcaugacaaa

SEQ ID NO: 1236643 - RNA, 24 nt, Human
uccaugcuagggcaugaccggggc

SEQ ID NO: 1236644 - RNA, 22 nt, Human
ucccgaaagcgucccacacacc

SEQ ID NO: 1236645 - RNA, 18 nt, Human
ucccgggcgcggaaaccc

SEQ ID NO: 1236646 - RNA, 18 nt, Human
ucccgggcgcggaaaccc

SEQ ID NO: 1236647 - RNA, 19 nt, Human
ucucacggccacucuccuu

SEQ ID NO: 1236648 - RNA, 20 nt, Human
uggaauaagaccuuuccuga

SEQ ID NO: 1236649 - RNA, 19 nt, Human
uggcucccgaaagcguccc

SEQ ID NO: 1236650 - RNA, 22 nt, Human
uuucggauggcacucucacggc

SEQ ID NO: 1236651 - RNA, 24 nt, Human
aagaaacaccucccucuucaggcc

SEQ ID NO: 1236652 - RNA, 21 nt, Human
aagcaagacaauaaauugaaa

SEQ ID NO: 1236653 - RNA, 22 nt, Human
aauauacauacuugcauacaua

SEQ ID NO: 1236654 - RNA, 19 nt, Human
agaagaaacaccucccucu

SEQ ID NO: 1236655 - RNA, 18 nt, Human
agccuuacauuuuaauga

SEQ ID NO: 1236656 - RNA, 21 nt, Human
auacuuuagugaacaaaacug

SEQ ID NO: 1236657 - RNA, 20 nt, Human
cauacauauuuauacacauu

SEQ ID NO: 1236658 - RNA, 27 nt, Human
cuagcagugacuagcucugcucuuuuu

SEQ ID NO: 1236659 - RNA, 19 nt, Human
uaaauugaaagcauaauca

SEQ ID NO: 1236660 - RNA, 26 nt, Human
uacauacuugcauacauauuuauaca

SEQ ID NO: 1236661 - RNA, 22 nt, Human
uauacacauuaucagaccagca

SEQ ID NO: 1236662 - RNA, 23 nt, Human
uauccuuguccuguuucuaagga

SEQ ID NO: 1236663 - RNA, 18 nt, Human
ucgaagaacuguuccagc

SEQ ID NO: 1236664 - RNA, 22 nt, Human
ugaacaaaacugacaaauucca

SEQ ID NO: 1236665 - RNA, 21 nt, Human
ugaugauuagggaaacuauuu

SEQ ID NO: 1236666 - RNA, 18 nt, Human
uggaaauguuccacuuuc

SEQ ID NO: 1236667 - RNA, 19 nt, Human
uguuccagccaucuuguuc

SEQ ID NO: 1236668 - RNA, 22 nt, Human
uuauggacccuuccugagaucu

SEQ ID NO: 1236669 - RNA, 23 nt, Human
uuggaaauguuccacuuucccaa

SEQ ID NO: 1236670 - RNA, 24 nt, Human
aaggagauguugagguggguggcc

SEQ ID NO: 1236671 - RNA, 23 nt, Human
acuccuguccccagggcccaggg

SEQ ID NO: 1236672 - RNA, 19 nt, Human
agauacugcaggcagcucg

SEQ ID NO: 1236673 - RNA, 18 nt, Human
agcagguuacccagcugg

SEQ ID NO: 1236674 - RNA, 22 nt, Human
agcugguuguuccacagcacca

SEQ ID NO: 1236675 - RNA, 22 nt, Human
agcuguggcggcugcuccuucu

SEQ ID NO: 1236676 - RNA, 25 nt, Human
aggcacccucgaaggggcccgggag

SEQ ID NO: 1236677 - RNA, 18 nt, Human
agggaguccguggggggc

SEQ ID NO: 1236678 - RNA, 22 nt, Human
agguggguggccgacucguagu

SEQ ID NO: 1236679 - RNA, 21 nt, Human
caagugcagcacugccaggcu

SEQ ID NO: 1236680 - RNA, 22 nt, Human
cacccgggucaccacaaacacc

SEQ ID NO: 1236681 - RNA, 23 nt, Human
cagcagcgccuucugcgucucga

SEQ ID NO: 1236682 - RNA, 23 nt, Human
cagccccuuccucugcuccuuga

SEQ ID NO: 1236683 - RNA, 26 nt, Human
cagcccgaggcgcagcacgcugcggg

SEQ ID NO: 1236684 - RNA, 28 nt, Human
cagggcaggacagggggucucgucccuc

SEQ ID NO: 1236685 - RNA, 25 nt, Human
caugaagagagaaacaaagggcagg

SEQ ID NO: 1236686 - RNA, 23 nt, Human
ccaccgcgcccucgcacgugagc

SEQ ID NO: 1236687 - RNA, 25 nt, Human
ccaccgcgcccucgcacgugagcuu

SEQ ID NO: 1236688 - RNA, 23 nt, Human
ccagccccgggugccgaugugcu

SEQ ID NO: 1236689 - RNA, 23 nt, Human
ccagguucagcgucuccaggcuc

SEQ ID NO: 1236690 - RNA, 24 nt, Human
cccagguucagcgucuccaggcuc

SEQ ID NO: 1236691 - RNA, 19 nt, Human
ccccagggcccagggaguc

SEQ ID NO: 1236692 - RNA, 19 nt, Human
cccgcgcgcgccugcccgu

SEQ ID NO: 1236693 - RNA, 20 nt, Human
cccgcgcgcgccugcccguu

SEQ ID NO: 1236694 - RNA, 18 nt, Human
cccgcgggugacaugaag

SEQ ID NO: 1236695 - RNA, 18 nt, Human
cccuuccucuuccuccuc

SEQ ID NO: 1236696 - RNA, 22 nt, Human
ccgccaccgccaccgcgcccuc

SEQ ID NO: 1236697 - RNA, 19 nt, Human
ccgccgccgcuucaggcgc

SEQ ID NO: 1236698 - RNA, 23 nt, Human
ccgccgccgcuucaggcgccgcc

SEQ ID NO: 1236699 - RNA, 24 nt, Human
ccgccgccgcuucaggcgccgccu

SEQ ID NO: 1236700 - RNA, 20 nt, Human
ccgcgccagcaccaaguugc

SEQ ID NO: 1236701 - RNA, 26 nt, Human
ccuccgccgagccccgcgcgcgccug

SEQ ID NO: 1236702 - RNA, 24 nt, Human
ccuccucacgggggccccggggac

SEQ ID NO: 1236703 - RNA, 21 nt, Human
ccuuccucuuccuccucuucc

SEQ ID NO: 1236704 - RNA, 18 nt, Human
ccuucuccucccucuccc

SEQ ID NO: 1236705 - RNA, 22 nt, Human
cgccgagugguccagcaggggc

SEQ ID NO: 1236706 - RNA, 19 nt, Human
cggcccgggcuggacacgg

SEQ ID NO: 1236707 - RNA, 24 nt, Human
cggcccgggcuggacacggaaauc

SEQ ID NO: 1236708 - RNA, 19 nt, Human
cggccgccugccagccccg

SEQ ID NO: 1236709 - RNA, 23 nt, Human
cgggcuggacacggaaauccgcu

SEQ ID NO: 1236710 - RNA, 18 nt, Human
cgggucaccacaaacacc

SEQ ID NO: 1236711 - RNA, 23 nt, Human
cguccgcucuccuaguggucgua

SEQ ID NO: 1236712 - RNA, 19 nt, Human
cucgcagauguaggccaga

SEQ ID NO: 1236713 - RNA, 21 nt, Human
cucguaguacucgaucauguc

SEQ ID NO: 1236714 - RNA, 19 nt, Human
cucuuccuccccauccgag

SEQ ID NO: 1236715 - RNA, 20 nt, Human
cuuccucuuccuccucuucc

SEQ ID NO: 1236716 - RNA, 19 nt, Human
cuuggguucacggucgagg

SEQ ID NO: 1236717 - RNA, 19 nt, Human
cuuggguucacggucgagg

SEQ ID NO: 1236718 - RNA, 20 nt, Human
gacuccuguccccagggccc

SEQ ID NO: 1236719 - RNA, 19 nt, Human
gagcuugguggaggccagc

SEQ ID NO: 1236720 - RNA, 30 nt, Human
gaucucguucucccgaagguccagucucaa

SEQ ID NO: 1236721 - RNA, 23 nt, Human
gccccgggccccggauuugucuc

SEQ ID NO: 1236722 - RNA, 19 nt, Human
gccccuuccucugcuccuu

SEQ ID NO: 1236723 - RNA, 22 nt, Human
gccugcccguucgcagucacac

SEQ ID NO: 1236724 - RNA, 18 nt, Human
gcgcuugcagccguucug

SEQ ID NO: 1236725 - RNA, 19 nt, Human
gcgcuugcagccguucugg

SEQ ID NO: 1236726 - RNA, 20 nt, Human
gcuguggcggcugcuccuuc

SEQ ID NO: 1236727 - RNA, 19 nt, Human
ggcuggggcucgguggcgg

SEQ ID NO: 1236728 - RNA, 20 nt, Human
gggcgggcucuccacccggg

SEQ ID NO: 1236729 - RNA, 22 nt, Human
gggcugccugggggacuccugu

SEQ ID NO: 1236730 - RNA, 21 nt, Human
ggggacgcagggggcucugcc

SEQ ID NO: 1236731 - RNA, 19 nt, Human
gggggacgcagggggcucu

SEQ ID NO: 1236732 - RNA, 20 nt, Human
gggugggggacgcagggggc

SEQ ID NO: 1236733 - RNA, 19 nt, Human
gguucacggucgaggucca

SEQ ID NO: 1236734 - RNA, 19 nt, Human
guccgggcugggugcgggg

SEQ ID NO: 1236735 - RNA, 22 nt, Human
gugcuuguugaaggagauguug

SEQ ID NO: 1236736 - RNA, 24 nt, Human
guggggggcaccagggcaggacag

SEQ ID NO: 1236737 - RNA, 21 nt, Human
guucucccgaagguccagucu

SEQ ID NO: 1236738 - RNA, 24 nt, Human
uacccagcugggccgaggaggucc

SEQ ID NO: 1236739 - RNA, 22 nt, Human
ucaccacaaacaccuuguggcc

SEQ ID NO: 1236740 - RNA, 24 nt, Human
ucaccagccccuuccucugcuccu

SEQ ID NO: 1236741 - RNA, 21 nt, Human
ucaugcccaggaaggccaugc

SEQ ID NO: 1236742 - RNA, 23 nt, Human
uccccagggcccagggaguccgu

SEQ ID NO: 1236743 - RNA, 19 nt, Human
ucccgaagguccagucuca

SEQ ID NO: 1236744 - RNA, 21 nt, Human
uccugcaggccguugagcuug

SEQ ID NO: 1236745 - RNA, 20 nt, Human
ucuccccuuccucuuccucc

SEQ ID NO: 1236746 - RNA, 30 nt, Human
ucucgucccucuccccuuccucuuccuccc

SEQ ID NO: 1236747 - RNA, 18 nt, Human
ucuuccuccucuuccucc

SEQ ID NO: 1236748 - RNA, 21 nt, Human
ugaagagagaaacaaagggca

SEQ ID NO: 1236749 - RNA, 27 nt, Human
ugaaggagauguugagguggguggccg

SEQ ID NO: 1236750 - RNA, 25 nt, Human
ugaggugccgcacacccucguuccc

SEQ ID NO: 1236751 - RNA, 24 nt, Human
ugagguggguggccgacucguagu

SEQ ID NO: 1236752 - RNA, 23 nt, Human
ugagugguucaccuugagggcca

SEQ ID NO: 1236753 - RNA, 23 nt, Human
ugccccgggccccggauuugucu

SEQ ID NO: 1236754 - RNA, 18 nt, Human
ugcucgguggguguggag

SEQ ID NO: 1236755 - RNA, 21 nt, Human
uggucucaggcauggaggccg

SEQ ID NO: 1236756 - RNA, 19 nt, Human
ugucucuccggguccgccc

SEQ ID NO: 1236757 - RNA, 20 nt, Human
uuccacagcaccagggucac

SEQ ID NO: 1236758 - RNA, 22 nt, Human
uucuugaggugccgcacacccu

SEQ ID NO: 1236759 - RNA, 21 nt, Human
uuguggccccggcccgggcug

SEQ ID NO: 1236760 - RNA, 20 nt, Human
uuucuuggguucacggucga

SEQ ID NO: 1236761 - RNA, 18 nt, Human
aaacagaugacuggaccc

SEQ ID NO: 1236762 - RNA, 20 nt, Human
cagcgagccaccgcauaagc

SEQ ID NO: 1236763 - RNA, 22 nt, Human
caucccuguucugagcagcgag

SEQ ID NO: 1236764 - RNA, 19 nt, Human
caucucugccaucccuguu

SEQ ID NO: 1236765 - RNA, 20 nt, Human
ccuugaguuuuugauggugg

SEQ ID NO: 1236766 - RNA, 22 nt, Human
cuggacccacagcacugguccu

SEQ ID NO: 1236767 - RNA, 23 nt, Human
cuggacccacagcacugguccuu

SEQ ID NO: 1236768 - RNA, 20 nt, Human
gccaucccuguucugagcag

SEQ ID NO: 1236769 - RNA, 21 nt, Human
guucugagcagcgagccaccg

SEQ ID NO: 1236770 - RNA, 20 nt, Human
ugaaacagaugacuggaccc

SEQ ID NO: 1236771 - RNA, 21 nt, Human
uugaugguggugcucaucucu

SEQ ID NO: 1236772 - RNA, 24 nt, Human
agaaucacauguggcagccaaguu

SEQ ID NO: 1236773 - RNA, 22 nt, Human
aggaagcguguucuagugucca

SEQ ID NO: 1236774 - RNA, 19 nt, Human
auucacagccacgggcugc

SEQ ID NO: 1236775 - RNA, 18 nt, Human
cacauguggcagccaagu

SEQ ID NO: 1236776 - RNA, 19 nt, Human
uaggaaaggucacggggua

SEQ ID NO: 1236777 - RNA, 22 nt, Human
ucacgggguaaugaaagacagg

SEQ ID NO: 1236778 - RNA, 19 nt, Human
ucccagggauaaagaauuc

SEQ ID NO: 1236779 - RNA, 20 nt, Human
aauagcugcuagguaggcac

SEQ ID NO: 1236780 - RNA, 18 nt, Human
acaccuccgccccaugac

SEQ ID NO: 1236781 - RNA, 19 nt, Human
accuccgccccaugacccu

SEQ ID NO: 1236782 - RNA, 26 nt, Human
aggcaccagugaaaaccuggauugug

SEQ ID NO: 1236783 - RNA, 21 nt, Human
cacaccuccgccccaugaccu

SEQ ID NO: 1236784 - RNA, 21 nt, Human
cagauagagaagccuccaaca

SEQ ID NO: 1236785 - RNA, 18 nt, Human
cagcacacagugccgacu

SEQ ID NO: 1236786 - RNA, 23 nt, Human
caggaugcucccagaugcccuga

SEQ ID NO: 1236787 - RNA, 24 nt, Human
ccacggugacgccacaccuccgcc

SEQ ID NO: 1236788 - RNA, 20 nt, Human
ccagaagagccccgacggug

SEQ ID NO: 1236789 - RNA, 19 nt, Human
ccaugcacccacggugacg

SEQ ID NO: 1236790 - RNA, 25 nt, Human
cccacggugacgccacaccuccgcc

SEQ ID NO: 1236791 - RNA, 25 nt, Human
cccaugacccucucaggaugcuccc

SEQ ID NO: 1236792 - RNA, 19 nt, Human
ccggagcggggcgggcggc

SEQ ID NO: 1236793 - RNA, 25 nt, Human
ccggagcggggcgggcggcugggcu

SEQ ID NO: 1236794 - RNA, 20 nt, Human
cgcucuucaggaaaagcuga

SEQ ID NO: 1236795 - RNA, 21 nt, Human
cuccgccccaugacccucuca

SEQ ID NO: 1236796 - RNA, 24 nt, Human
cuccuugcugucauacacacuaac

SEQ ID NO: 1236797 - RNA, 20 nt, Human
cuggguuucugugcacaucu

SEQ ID NO: 1236798 - RNA, 21 nt, Human
gagcggggcgggcggcugggc

SEQ ID NO: 1236799 - RNA, 18 nt, Human
gcacggcgucccuuccug

SEQ ID NO: 1236800 - RNA, 19 nt, Human
gccacaccuccgccccaug

SEQ ID NO: 1236801 - RNA, 21 nt, Human
gcggggcgggcggcugggcuc

SEQ ID NO: 1236802 - RNA, 18 nt, Human
ggccggagcggggcgggc

SEQ ID NO: 1236803 - RNA, 19 nt, Human
guaggcaccagugaaaacc

SEQ ID NO: 1236804 - RNA, 23 nt, Human
gugcacaucucagauagagaagc

SEQ ID NO: 1236805 - RNA, 20 nt, Human
ucaggaggcagcacgcagca

SEQ ID NO: 1236806 - RNA, 22 nt, Human
uccaugcacccacggugacgcc

SEQ ID NO: 1236807 - RNA, 23 nt, Human
uccaugcacccacggugacgcca

SEQ ID NO: 1236808 - RNA, 23 nt, Human
uccaugcacccacggugacgcca

SEQ ID NO: 1236809 - RNA, 20 nt, Human
ugacgccacaccuccgcccc

SEQ ID NO: 1236810 - RNA, 24 nt, Human
ugacgccacaccuccgccccauga

SEQ ID NO: 1236811 - RNA, 22 nt, Human
aaaaaaggcuccaugaagaaga

SEQ ID NO: 1236812 - RNA, 21 nt, Human
aaaaaggcuccaugaagaaga

SEQ ID NO: 1236813 - RNA, 21 nt, Human
aaaaguauccaaacagaagag

SEQ ID NO: 1236814 - RNA, 29 nt, Human
aaacagaagagugaaugaaaagggacccc

SEQ ID NO: 1236815 - RNA, 22 nt, Human
aaggcagcugcaggggaugggg

SEQ ID NO: 1236816 - RNA, 25 nt, Human
aaguuuccagcaugcagucaagcac

SEQ ID NO: 1236817 - RNA, 21 nt, Human
aauggugcugugaaaaggacu

SEQ ID NO: 1236818 - RNA, 23 nt, Human
acagaguuugccgcuucaaaaga

SEQ ID NO: 1236819 - RNA, 18 nt, Human
acaggcacuaccccgaag

SEQ ID NO: 1236820 - RNA, 22 nt, Human
accccgaagcuucauagacaua

SEQ ID NO: 1236821 - RNA, 22 nt, Human
acccugcccccaaaaaaaggca

SEQ ID NO: 1236822 - RNA, 18 nt, Human
acucaaaaaaucugcagc

SEQ ID NO: 1236823 - RNA, 21 nt, Human
agacaaugucgguaguaccaa

SEQ ID NO: 1236824 - RNA, 21 nt, Human
agcaaaaguauccaaacagaa

SEQ ID NO: 1236825 - RNA, 22 nt, Human
aggaaaaaaggcuccaugaagg

SEQ ID NO: 1236826 - RNA, 25 nt, Human
aggcagcugcaggggaugggggagg

SEQ ID NO: 1236827 - RNA, 20 nt, Human
aguaccaaacuauuucuugg

SEQ ID NO: 1236828 - RNA, 24 nt, Human
caacccccacccugcccccaaaag

SEQ ID NO: 1236829 - RNA, 19 nt, Human
caauccuuucuugaggagu

SEQ ID NO: 1236830 - RNA, 19 nt, Human
cagaguuugccgcuucaaa

SEQ ID NO: 1236831 - RNA, 22 nt, Human
caucaacccccacccugccccc

SEQ ID NO: 1236832 - RNA, 20 nt, Human
caugaaggacacagaaggac

SEQ ID NO: 1236833 - RNA, 26 nt, Human
ccacccugcccccaaaaaaaggcagc

SEQ ID NO: 1236834 - RNA, 21 nt, Human
ccccaaaaaaaggcagcugca

SEQ ID NO: 1236835 - RNA, 18 nt, Human
ccccacccugcccccaaa

SEQ ID NO: 1236836 - RNA, 22 nt, Human
ccccacccugcccccaaaaaaa

SEQ ID NO: 1236837 - RNA, 20 nt, Human
cccccacccugcccccaaaa

SEQ ID NO: 1236838 - RNA, 23 nt, Human
cccccacccugcccccaaaaaaa

SEQ ID NO: 1236839 - RNA, 25 nt, Human
cgcuucaaaaauacaaaguuuccag

SEQ ID NO: 1236840 - RNA, 24 nt, Human
cuaccccgaagcuucauagacaua

SEQ ID NO: 1236841 - RNA, 19 nt, Human
cugcccccaaaaaaaggca

SEQ ID NO: 1236842 - RNA, 20 nt, Human
gcccccaaaaaaaggcagcc

SEQ ID NO: 1236843 - RNA, 20 nt, Human
gcuaaacacacugcagacug

SEQ ID NO: 1236844 - RNA, 24 nt, Human
gcugcuccaacaugcggagaugac

SEQ ID NO: 1236845 - RNA, 26 nt, Human
guaccaaacuauuucuuggcugcucc

SEQ ID NO: 1236846 - RNA, 24 nt, Human
guugcaguaccaauccuuucuuga

SEQ ID NO: 1236847 - RNA, 19 nt, Human
uaaaauaaaaucucaggcc

SEQ ID NO: 1236848 - RNA, 20 nt, Human
uaaaauaaaaucucaggccu

SEQ ID NO: 1236849 - RNA, 18 nt, Human
uaacuucagagcauucca

SEQ ID NO: 1236850 - RNA, 20 nt, Human
uaccccgaagcuucauagac

SEQ ID NO: 1236851 - RNA, 21 nt, Human
uacucagagguguucugagaa

SEQ ID NO: 1236852 - RNA, 20 nt, Human
uaguaccaaacuauuucuug

SEQ ID NO: 1236853 - RNA, 20 nt, Human
uauccaaacagaagagugaa

SEQ ID NO: 1236854 - RNA, 21 nt, Human
ucaacccccacccugccccca

SEQ ID NO: 1236855 - RNA, 24 nt, Human
ucaacccccacccugcccccaaaa

SEQ ID NO: 1236856 - RNA, 24 nt, Human
ucagagguguucugagaauggugc

SEQ ID NO: 1236857 - RNA, 21 nt, Human
ucagauacaugaaggacacag

SEQ ID NO: 1236858 - RNA, 18 nt, Human
ucagugcaucagugagaa

SEQ ID NO: 1236859 - RNA, 27 nt, Human
ucauugaaaaguuuguuuuggugggag

SEQ ID NO: 1236860 - RNA, 23 nt, Human
uccaaacagaagagugaaugaaa

SEQ ID NO: 1236861 - RNA, 24 nt, Human
uccaugugcuuucacuaacacagc

SEQ ID NO: 1236862 - RNA, 20 nt, Human
ucccccuuucugagaccugu

SEQ ID NO: 1236863 - RNA, 22 nt, Human
ucuaaaauaaaaucucaggccc

SEQ ID NO: 1236864 - RNA, 20 nt, Human
ucuaaagcaacaccuuccaa

SEQ ID NO: 1236865 - RNA, 19 nt, Human
ucuaugaaacguauuggga

SEQ ID NO: 1236866 - RNA, 23 nt, Human
ucucaaguacuuaguguuacagg

SEQ ID NO: 1236867 - RNA, 21 nt, Human
ugaaacauaacuauacugcaa

SEQ ID NO: 1236868 - RNA, 21 nt, Human
ugaaaugaacuggccagggug

SEQ ID NO: 1236869 - RNA, 20 nt, Human
ugagcuauugagcucccccu

SEQ ID NO: 1236870 - RNA, 18 nt, Human
ugcaggggaugggggagg

SEQ ID NO: 1236871 - RNA, 25 nt, Human
ugcccgaagcccgcucuccuagcgc

SEQ ID NO: 1236872 - RNA, 22 nt, Human
ugcuuuuagcucaugacagccc

SEQ ID NO: 1236873 - RNA, 18 nt, Human
ugggcuuucacauuuuca

SEQ ID NO: 1236874 - RNA, 24 nt, Human
uguuacaggucuucauugaucaga

SEQ ID NO: 1236875 - RNA, 22 nt, Human
uuaaugcacaucuaaacuuggg

SEQ ID NO: 1236876 - RNA, 18 nt, Human
uuacaggcacuaccccga

SEQ ID NO: 1236877 - RNA, 19 nt, Human
uucagggccaucagugcau

SEQ ID NO: 1236878 - RNA, 19 nt, Human
uucuuggcugcuccaacau

SEQ ID NO: 1236879 - RNA, 20 nt, Human
uuuaauacuuaaugcacauc

SEQ ID NO: 1236880 - RNA, 24 nt, Human
aaagugcugggauuacaggcaaga

SEQ ID NO: 1236881 - RNA, 18 nt, Human
aaauagcaaaauagaaag

SEQ ID NO: 1236882 - RNA, 20 nt, Human
aagagccaccgcgcccagca

SEQ ID NO: 1236883 - RNA, 27 nt, Human
aagcaauucuccugccucggccuccca

SEQ ID NO: 1236884 - RNA, 22 nt, Human
aaguagcugggauuacaggcau

SEQ ID NO: 1236885 - RNA, 24 nt, Human
aaguagcugggauuacaggcaugc

SEQ ID NO: 1236886 - RNA, 18 nt, Human
aagugcugggauuacagg

SEQ ID NO: 1236887 - RNA, 19 nt, Human
aagugcugggauuacaggc

SEQ ID NO: 1236888 - RNA, 26 nt, Human
aagugcugggauuacaggcaagagcc

SEQ ID NO: 1236889 - RNA, 24 nt, Human
aauuuuguauucuuaguagagaca

SEQ ID NO: 1236890 - RNA, 24 nt, Human
acacacacacacacacacacacgg

SEQ ID NO: 1236891 - RNA, 23 nt, Human
accucagccucccaaagugcugg

SEQ ID NO: 1236892 - RNA, 18 nt, Human
acuaaaagaacaagacua

SEQ ID NO: 1236893 - RNA, 21 nt, Human
agaaggcauuccccacuccca

SEQ ID NO: 1236894 - RNA, 18 nt, Human
agacaggguuucuccaua

SEQ ID NO: 1236895 - RNA, 18 nt, Human
agccaccgcgcccagcac

SEQ ID NO: 1236896 - RNA, 23 nt, Human
aggauuucauugcuacuaaaaga

SEQ ID NO: 1236897 - RNA, 20 nt, Human
aggcaugcaccaccaugccc

SEQ ID NO: 1236898 - RNA, 24 nt, Human
aggugaucugcccaccucagccuc

SEQ ID NO: 1236899 - RNA, 22 nt, Human
aguagagacaggguuucuccau

SEQ ID NO: 1236900 - RNA, 18 nt, Human
agugcugggauuacaggc

SEQ ID NO: 1236901 - RNA, 24 nt, Human
auuucauugcuacuaaaagaacaa

SEQ ID NO: 1236902 - RNA, 27 nt, Human
caaagugcugggauuacaggcaagagc

SEQ ID NO: 1236903 - RNA, 21 nt, Human
caaauagcaaaauagaaagaa

SEQ ID NO: 1236904 - RNA, 22 nt, Human
caagcaauucuccugccucggc

SEQ ID NO: 1236905 - RNA, 20 nt, Human
cacacacacacacacacaca

SEQ ID NO: 1236906 - RNA, 22 nt, Human
caccaccaugcccagcuaauuu

SEQ ID NO: 1236907 - RNA, 23 nt, Human
cacucccacuccaggaguuuggg

SEQ ID NO: 1236908 - RNA, 21 nt, Human
cacugcaaccucugccucccg

SEQ ID NO: 1236909 - RNA, 23 nt, Human
cacugcaaccucugccucccggg

SEQ ID NO: 1236910 - RNA, 25 nt, Human
cagagcuccaucauuuuuuuuuuuu

SEQ ID NO: 1236911 - RNA, 24 nt, Human
caggguuucuccauauuggucagg

SEQ ID NO: 1236912 - RNA, 18 nt, Human
cauucaaacacacacaca

SEQ ID NO: 1236913 - RNA, 19 nt, Human
ccaaagugcugggauuaca

SEQ ID NO: 1236914 - RNA, 23 nt, Human
ccaaagugcugggauuacaggca

SEQ ID NO: 1236915 - RNA, 23 nt, Human
ccaaguagcugggauuacaggca

SEQ ID NO: 1236916 - RNA, 24 nt, Human
ccaaguagcugggauuacaggcau

SEQ ID NO: 1236917 - RNA, 24 nt, Human
cccaaagugcugggauuacaggca

SEQ ID NO: 1236918 - RNA, 23 nt, Human
cccaaguagcugggauuacaggc

SEQ ID NO: 1236919 - RNA, 24 nt, Human
cccaaguagcugggauuacaggca

SEQ ID NO: 1236920 - RNA, 18 nt, Human
cccacucccacuccagga

SEQ ID NO: 1236921 - RNA, 22 nt, Human
cccaggcuggagugcaauggcg

SEQ ID NO: 1236922 - RNA, 22 nt, Human
ccccuuauaaggaagacagaaa

SEQ ID NO: 1236923 - RNA, 24 nt, Human
cccgaucucaggugaucugcccac

SEQ ID NO: 1236924 - RNA, 23 nt, Human
cccggguucaagcaauucuccug

SEQ ID NO: 1236925 - RNA, 24 nt, Human
ccucccggguucaagcaauucucc

SEQ ID NO: 1236926 - RNA, 24 nt, Human
cucacugcaaccucugccucccgg

SEQ ID NO: 1236927 - RNA, 24 nt, Human
cucggccucccaaguagcugggau

SEQ ID NO: 1236928 - RNA, 20 nt, Human
cugaugcugucucagaugag

SEQ ID NO: 1236929 - RNA, 19 nt, Human
cugcaaccucugccucccg

SEQ ID NO: 1236930 - RNA, 23 nt, Human
cugcaaccucugccucccggguu

SEQ ID NO: 1236931 - RNA, 24 nt, Human
cugcaaccucugccucccggguuc

SEQ ID NO: 1236932 - RNA, 23 nt, Human
cugccucggccucccaaguagcu

SEQ ID NO: 1236933 - RNA, 23 nt, Human
gagacaggguuucuccauauugg

SEQ ID NO: 1236934 - RNA, 28 nt, Human
gagcuccaucauuuuuuuuuuuuuuuuu

SEQ ID NO: 1236935 - RNA, 24 nt, Human
gaucucaggugaucugcccaccuc

SEQ ID NO: 1236936 - RNA, 18 nt, Human
gauuacaggcaagagcca

SEQ ID NO: 1236937 - RNA, 24 nt, Human
gauuacaggcaugcaccaccaugc

SEQ ID NO: 1236938 - RNA, 22 nt, Human
gcaaccucugccucccggguuc

SEQ ID NO: 1236939 - RNA, 20 nt, Human
gcaccaccaugcccagcuaa

SEQ ID NO: 1236940 - RNA, 19 nt, Human
gcccaggcuggagugcaau

SEQ ID NO: 1236941 - RNA, 20 nt, Human
gccucggccucccaaguagc

SEQ ID NO: 1236942 - RNA, 21 nt, Human
gccucggccucccaaguagcu

SEQ ID NO: 1236943 - RNA, 21 nt, Human
gcucuuguugcccaggcugga

SEQ ID NO: 1236944 - RNA, 24 nt, Human
gcucuuguugcccaggcuggagug

SEQ ID NO: 1236945 - RNA, 21 nt, Human
gcuggagugcaauggcgcuag

SEQ ID NO: 1236946 - RNA, 22 nt, Human
ggauuacaggcaagagccaccg

SEQ ID NO: 1236947 - RNA, 24 nt, Human
ggauuacaggcaugcaccaccaug

SEQ ID NO: 1236948 - RNA, 21 nt, Human
gggugaguccuaggaaacauu

SEQ ID NO: 1236949 - RNA, 18 nt, Human
guagcugggauuacaggc

SEQ ID NO: 1236950 - RNA, 24 nt, Human
gugaucugcccaccucagccuccc

SEQ ID NO: 1236951 - RNA, 24 nt, Human
uaaaaaacaaccauauuucauaga

SEQ ID NO: 1236952 - RNA, 25 nt, Human
uaaaaaacaaccauauuucauagau

SEQ ID NO: 1236953 - RNA, 20 nt, Human
uaagcauuuuucauucaaac

SEQ ID NO: 1236954 - RNA, 24 nt, Human
uacaggcaagagccaccgcgccca

SEQ ID NO: 1236955 - RNA, 24 nt, Human
uacaggcaugcaccaccaugccca

SEQ ID NO: 1236956 - RNA, 21 nt, Human
uagaaagaaauaaaugguuuc

SEQ ID NO: 1236957 - RNA, 26 nt, Human
uagauaucuuuccacuuaagcacauu

SEQ ID NO: 1236958 - RNA, 18 nt, Human
uagcaaaauagaaagaaa

SEQ ID NO: 1236959 - RNA, 18 nt, Human
uagcaaaauagaaagaaa

SEQ ID NO: 1236960 - RNA, 18 nt, Human
uaguagagacaggguuuc

SEQ ID NO: 1236961 - RNA, 24 nt, Human
uaguagagacaggguuucuccaua

SEQ ID NO: 1236962 - RNA, 25 nt, Human
ucaaaauaguccaaaauaaaucuga

SEQ ID NO: 1236963 - RNA, 24 nt, Human
ucacugcaaccucugccucccggg

SEQ ID NO: 1236964 - RNA, 25 nt, Human
ucacugcaaccucugccucccgggu

SEQ ID NO: 1236965 - RNA, 22 nt, Human
ucagaugaguaacugcaaauca

SEQ ID NO: 1236966 - RNA, 18 nt, Human
ucagccucccaaagugcu

SEQ ID NO: 1236967 - RNA, 24 nt, Human
ucagguuggcaggugaauggccuc

SEQ ID NO: 1236968 - RNA, 33 nt, Human
ucauucaaacacacacacacacacacacacggu

SEQ ID NO: 1236969 - RNA, 22 nt, Human
ucauugacuagaagugaccaaa

SEQ ID NO: 1236970 - RNA, 24 nt, Human
ucccaaagugcugggauuacaggc

SEQ ID NO: 1236971 - RNA, 24 nt, Human
ucccaaguagcugggauuacaggc

SEQ ID NO: 1236972 - RNA, 21 nt, Human
ucccggguucaagcaauucuc

SEQ ID NO: 1236973 - RNA, 24 nt, Human
ucccggguucaagcaauucuccug

SEQ ID NO: 1236974 - RNA, 21 nt, Human
ucugcccaccucagccuccca

SEQ ID NO: 1236975 - RNA, 24 nt, Human
ucugccucccggguucaagcaauu

SEQ ID NO: 1236976 - RNA, 22 nt, Human
ucuuguugcccaggcuggagug

SEQ ID NO: 1236977 - RNA, 19 nt, Human
ugaaaaagguuacugccac

SEQ ID NO: 1236978 - RNA, 20 nt, Human
ugaccaaaauagauucuacu

SEQ ID NO: 1236979 - RNA, 21 nt, Human
ugagaaaagacuuuugaaagc

SEQ ID NO: 1236980 - RNA, 23 nt, Human
ugagacagaguuuugcucuuguu

SEQ ID NO: 1236981 - RNA, 24 nt, Human
ugaucugcccaccucagccuccca

SEQ ID NO: 1236982 - RNA, 18 nt, Human
ugcccaggcuggagugca

SEQ ID NO: 1236983 - RNA, 21 nt, Human
ugcccaggcuggagugcaaug

SEQ ID NO: 1236984 - RNA, 21 nt, Human
ugcccaggcuggagugcaaug

SEQ ID NO: 1236985 - RNA, 21 nt, Human
ugccucggccucccaaguagc

SEQ ID NO: 1236986 - RNA, 24 nt, Human
ugccucggccucccaaguagcugg

SEQ ID NO: 1236987 - RNA, 26 nt, Human
ugcuacuaaaagaacaagacuauuca

SEQ ID NO: 1236988 - RNA, 24 nt, Human
ugcucuuguugcccaggcuggagu

SEQ ID NO: 1236989 - RNA, 22 nt, Human
ugcugggauuacaggcaagagc

SEQ ID NO: 1236990 - RNA, 23 nt, Human
uggagugcaauggcgcuaucuca

SEQ ID NO: 1236991 - RNA, 24 nt, Human
uggcgcuaucucagcucacugcaa

SEQ ID NO: 1236992 - RNA, 22 nt, Human
ugggauuacaggcaagagccac

SEQ ID NO: 1236993 - RNA, 23 nt, Human
ugggauuacaggcaagagccacc

SEQ ID NO: 1236994 - RNA, 24 nt, Human
ugggauuacaggcaagagccaccg

SEQ ID NO: 1236995 - RNA, 21 nt, Human
ugggauuacaggcaugcacca

SEQ ID NO: 1236996 - RNA, 24 nt, Human
ugggauuacaggcaugcaccacca

SEQ ID NO: 1236997 - RNA, 20 nt, Human
uguugcccaggcuggagugc

SEQ ID NO: 1236998 - RNA, 22 nt, Human
uguugcccaggcuggagugcaa

SEQ ID NO: 1236999 - RNA, 25 nt, Human
uuaaaaaacaaccauauuucauaga

SEQ ID NO: 1237000 - RNA, 24 nt, Human
uuaguagagacaggguuucuccau

SEQ ID NO: 1237001 - RNA, 21 nt, Human
uuauauccagacugcauuacu

SEQ ID NO: 1237002 - RNA, 21 nt, Human
uucaagcaauucuccugccuc

SEQ ID NO: 1237003 - RNA, 24 nt, Human
uucaagcaauucuccugccucggc

SEQ ID NO: 1237004 - RNA, 31 nt, Human
uucauucaaacacacacacacacacacacag

SEQ ID NO: 1237005 - RNA, 19 nt, Human
uuccacuuaagcacauuca

SEQ ID NO: 1237006 - RNA, 18 nt, Human
uugcccaggcuggagugc

SEQ ID NO: 1237007 - RNA, 23 nt, Human
uugcucuuguugcccaggcugga

SEQ ID NO: 1237008 - RNA, 24 nt, Human
uuugcucuuguugcccaggcugga

SEQ ID NO: 1237009 - RNA, 24 nt, Human
uuuugcucuuguugcccaggcugg

SEQ ID NO: 1237010 - RNA, 20 nt, Human
uuuuguauucuuaguagaga

SEQ ID NO: 1237011 - RNA, 18 nt, Human
uuuuuuuuuuuuuuuuug

SEQ ID NO: 1237012 - RNA, 22 nt, Human
aaacagcuguucucaacaagcc

SEQ ID NO: 1237013 - RNA, 24 nt, Human
aaagguacauacuauucugcacuu

SEQ ID NO: 1237014 - RNA, 20 nt, Human
aacaaaaucauugugaaugg

SEQ ID NO: 1237015 - RNA, 20 nt, Human
aacccuuucucuuucacuuu

SEQ ID NO: 1237016 - RNA, 18 nt, Human
aagcaacagaaaauauac

SEQ ID NO: 1237017 - RNA, 18 nt, Human
aaguaugcaugugccagg

SEQ ID NO: 1237018 - RNA, 18 nt, Human
acagcaguaauaaugugu

SEQ ID NO: 1237019 - RNA, 19 nt, Human
aggaaccagaacagugcau

SEQ ID NO: 1237020 - RNA, 22 nt, Human
aguaagcaacagaaaauauaca

SEQ ID NO: 1237021 - RNA, 18 nt, Human
agucacagaaaaugaacu

SEQ ID NO: 1237022 - RNA, 22 nt, Human
augagucacagaaaaugaacuu

SEQ ID NO: 1237023 - RNA, 21 nt, Human
caccuuggaaaagaaaaucag

SEQ ID NO: 1237024 - RNA, 23 nt, Human
cacuuuuacuaaacaacuggaga

SEQ ID NO: 1237025 - RNA, 26 nt, Human
cagcaguaauaaugugucaacauaaa

SEQ ID NO: 1237026 - RNA, 19 nt, Human
cagcagugcucugucuugc

SEQ ID NO: 1237027 - RNA, 20 nt, Human
caguacuaagauaccaaaac

SEQ ID NO: 1237028 - RNA, 18 nt, Human
cagugguguguuaugcuu

SEQ ID NO: 1237029 - RNA, 22 nt, Human
cauuagaaaucgaaaacagcug

SEQ ID NO: 1237030 - RNA, 18 nt, Human
ccaggcaaaguuguuaca

SEQ ID NO: 1237031 - RNA, 20 nt, Human
cccucagcgccgcgaggccg

SEQ ID NO: 1237032 - RNA, 24 nt, Human
ccggcggcgggucuagcucuccuc

SEQ ID NO: 1237033 - RNA, 18 nt, Human
ccuccgccgccgccgccu

SEQ ID NO: 1237034 - RNA, 18 nt, Human
cgggucuagcucuccucc

SEQ ID NO: 1237035 - RNA, 22 nt, Human
cuacaccuuggaaaagaaaauc

SEQ ID NO: 1237036 - RNA, 21 nt, Human
cuagacauuuacagcagugcu

SEQ ID NO: 1237037 - RNA, 22 nt, Human
cucaucacauuuugucacuugu

SEQ ID NO: 1237038 - RNA, 19 nt, Human
cuccuccgccgccgccgcc

SEQ ID NO: 1237039 - RNA, 23 nt, Human
cuccuccgccgccgccgccuggu

SEQ ID NO: 1237040 - RNA, 18 nt, Human
cugcacuuuuccaccaaa

SEQ ID NO: 1237041 - RNA, 21 nt, Human
cugggcggggacccggaggag

SEQ ID NO: 1237042 - RNA, 24 nt, Human
gaaaacagcuguucucaacaagcc

SEQ ID NO: 1237043 - RNA, 23 nt, Human
gaaaucgaaaacagcuguucuca

SEQ ID NO: 1237044 - RNA, 28 nt, Human
gaagcucucaucacauuuugucacuuuu

SEQ ID NO: 1237045 - RNA, 28 nt, Human
gaggaggaggaagaaaaaggaggaggga

SEQ ID NO: 1237046 - RNA, 19 nt, Human
gcuguucucaacaagccaa

SEQ ID NO: 1237047 - RNA, 22 nt, Human
ggaagaaaaaggaggagggaag

SEQ ID NO: 1237048 - RNA, 22 nt, Human
ggacuggggguggaggaagcgg

SEQ ID NO: 1237049 - RNA, 20 nt, Human
gugucaacauaaaaaaacua

SEQ ID NO: 1237050 - RNA, 20 nt, Human
uaaaagguacauacuauucu

SEQ ID NO: 1237051 - RNA, 26 nt, Human
uaagaaaaugcauauagcacuaaaga

SEQ ID NO: 1237052 - RNA, 25 nt, Human
uaagcaacauccuguguaguugcca

SEQ ID NO: 1237053 - RNA, 20 nt, Human
uauggagcagagaacaaaau

SEQ ID NO: 1237054 - RNA, 23 nt, Human
uauuuuuuuaaucaggcauugcc

SEQ ID NO: 1237055 - RNA, 23 nt, Human
ucacagaaaaugaacuuuggaua

SEQ ID NO: 1237056 - RNA, 20 nt, Human
uccuguggcaggaaaaaccc

SEQ ID NO: 1237057 - RNA, 21 nt, Human
ucucagagcaaacaguaagca

SEQ ID NO: 1237058 - RNA, 19 nt, Human
ucuguaaguaccuggugaa

SEQ ID NO: 1237059 - RNA, 22 nt, Human
ugaaaaaaguccaggcaaaguu

SEQ ID NO: 1237060 - RNA, 22 nt, Human
ugaaugauguaugaaaucugcu

SEQ ID NO: 1237061 - RNA, 23 nt, Human
ugccaugauuuccaaaaaauaua

SEQ ID NO: 1237062 - RNA, 27 nt, Human
uggauaccuguccacuuuaaggguuuu

SEQ ID NO: 1237063 - RNA, 21 nt, Human
uguaccaauaaaaaaaaaauc

SEQ ID NO: 1237064 - RNA, 21 nt, Human
uguguuaugcuuguuauauaa

SEQ ID NO: 1237065 - RNA, 19 nt, Human
uguuguaaaaugaaaaaag

SEQ ID NO: 1237066 - RNA, 25 nt, Human
uucacuuuuacuaaacaaccccuag

SEQ ID NO: 1237067 - RNA, 20 nt, Human
uucagccauuuuauuguucu

SEQ ID NO: 1237068 - RNA, 18 nt, Human
uugacaacugucacauuu

SEQ ID NO: 1237069 - RNA, 18 nt, Human
uugaugaaacauucuuug

SEQ ID NO: 1237070 - RNA, 21 nt, Human
uuuccaccaaaagcaguggug

SEQ ID NO: 1237071 - RNA, 18 nt, Human
uuuggugcaguuagucca

SEQ ID NO: 1237072 - RNA, 21 nt, Human
aaacccuaggcagaugagagu

SEQ ID NO: 1237073 - RNA, 23 nt, Human
cagaaugaaaggcuuucugaaca

SEQ ID NO: 1237074 - RNA, 19 nt, Human
cccuccaugcaaugguuca

SEQ ID NO: 1237075 - RNA, 23 nt, Human
ggagguuguaaaucacccuccau

SEQ ID NO: 1237076 - RNA, 19 nt, Human
uaaaucacccuccaugcaa

SEQ ID NO: 1237077 - RNA, 20 nt, Human
ugagaguggagguuguaaau

SEQ ID NO: 1237078 - RNA, 22 nt, Human
aaagacagagagagggggaagc

SEQ ID NO: 1237079 - RNA, 18 nt, Human
aacaaaagccuuaacaac

SEQ ID NO: 1237080 - RNA, 20 nt, Human
aaccaagccaucuugacucc

SEQ ID NO: 1237081 - RNA, 21 nt, Human
aaccgugggucaggcugaccu

SEQ ID NO: 1237082 - RNA, 18 nt, Human
aagagggcaggaacuggg

SEQ ID NO: 1237083 - RNA, 21 nt, Human
aagcaaggcucuugcuuuggg

SEQ ID NO: 1237084 - RNA, 23 nt, Human
aagcaaggcucuugcuuugggau

SEQ ID NO: 1237085 - RNA, 20 nt, Human
aagccaguuuguugaaacca

SEQ ID NO: 1237086 - RNA, 21 nt, Human
aaggccaggaccagggugaaa

SEQ ID NO: 1237087 - RNA, 23 nt, Human
aauauccaccuacaagguacagc

SEQ ID NO: 1237088 - RNA, 19 nt, Human
acaaccgugggucaggcug

SEQ ID NO: 1237089 - RNA, 21 nt, Human
acacaggcacagacguccucc

SEQ ID NO: 1237090 - RNA, 24 nt, Human
acacuggaaggcaaggccaggacc

SEQ ID NO: 1237091 - RNA, 25 nt, Human
acagagcagagcagcuaaagggcaa

SEQ ID NO: 1237092 - RNA, 20 nt, Human
acagaggugaaggcacagcc

SEQ ID NO: 1237093 - RNA, 19 nt, Human
agagagagaaagacagaga

SEQ ID NO: 1237094 - RNA, 23 nt, Human
agagagagaaagacagagagagg

SEQ ID NO: 1237095 - RNA, 18 nt, Human
agagagagaggaguugga

SEQ ID NO: 1237096 - RNA, 21 nt, Human
agagagagaggaguuggagag

SEQ ID NO: 1237097 - RNA, 20 nt, Human
agagagagggggaagcaguc

SEQ ID NO: 1237098 - RNA, 21 nt, Human
agagagagggggaagcaguca

SEQ ID NO: 1237099 - RNA, 21 nt, Human
agagcuuuccuaccccugccu

SEQ ID NO: 1237100 - RNA, 18 nt, Human
agcaaggcucuugcuuug

SEQ ID NO: 1237101 - RNA, 18 nt, Human
agcccagcacagagcaga

SEQ ID NO: 1237102 - RNA, 23 nt, Human
agccugaccagugagaacaaugc

SEQ ID NO: 1237103 - RNA, 20 nt, Human
aggaaaugucaaaaagcuca

SEQ ID NO: 1237104 - RNA, 22 nt, Human
aggcaaggccaggaccagggug

SEQ ID NO: 1237105 - RNA, 26 nt, Human
auaacacauccuucaagcccaggaua

SEQ ID NO: 1237106 - RNA, 23 nt, Human
augaugaacaaggucaggaucug

SEQ ID NO: 1237107 - RNA, 22 nt, Human
augcaugguagcauuucagagu

SEQ ID NO: 1237108 - RNA, 19 nt, Human
auuucagaguuucugucuc

SEQ ID NO: 1237109 - RNA, 20 nt, Human
caaaaauuccaugaugaaca

SEQ ID NO: 1237110 - RNA, 23 nt, Human
caaccacagcuaacauuagagcc

SEQ ID NO: 1237111 - RNA, 18 nt, Human
caacugagacguugucuu

SEQ ID NO: 1237112 - RNA, 19 nt, Human
caagagcuuuccuaccccu

SEQ ID NO: 1237113 - RNA, 19 nt, Human
caagcuggcugauucucaa

SEQ ID NO: 1237114 - RNA, 18 nt, Human
cacaagcccagcacagag

SEQ ID NO: 1237115 - RNA, 23 nt, Human
cacagcucagccucacucacuuc

SEQ ID NO: 1237116 - RNA, 18 nt, Human
cacauccccaaaggaggg

SEQ ID NO: 1237117 - RNA, 23 nt, Human
caccccacaagcccagcacagag

SEQ ID NO: 1237118 - RNA, 22 nt, Human
cacggccaagagcuuuccuacc

SEQ ID NO: 1237119 - RNA, 20 nt, Human
cagaaaugcagagcuggcag

SEQ ID NO: 1237120 - RNA, 19 nt, Human
cagagcagcuaaagggcaa

SEQ ID NO: 1237121 - RNA, 21 nt, Human
cagcauagagaauauccaaua

SEQ ID NO: 1237122 - RNA, 19 nt, Human
cagccucacucacuucauc

SEQ ID NO: 1237123 - RNA, 18 nt, Human
cagccuccccucuccucc

SEQ ID NO: 1237124 - RNA, 24 nt, Human
cagccuccccucuccuccuucucc

SEQ ID NO: 1237125 - RNA, 24 nt, Human
cagcuaaagggcaaggacuggcac

SEQ ID NO: 1237126 - RNA, 24 nt, Human
caggaacugggucucucugugcac

SEQ ID NO: 1237127 - RNA, 23 nt, Human
caggaccagggugaaacaagcaa

SEQ ID NO: 1237128 - RNA, 19 nt, Human
caggcacagacguccuccc

SEQ ID NO: 1237129 - RNA, 22 nt, Human
cauacacaggcacagacguccu

SEQ ID NO: 1237130 - RNA, 21 nt, Human
caugaaccaauuacuccuccc

SEQ ID NO: 1237131 - RNA, 19 nt, Human
cauguuaacacugaaaaau

SEQ ID NO: 1237132 - RNA, 18 nt, Human
ccaacauacacaggcaca

SEQ ID NO: 1237133 - RNA, 18 nt, Human
ccaaccucuugcuagugc

SEQ ID NO: 1237134 - RNA, 22 nt, Human
ccaagagcuuuccuaccccugc

SEQ ID NO: 1237135 - RNA, 21 nt, Human
cccacaagcccagcacagagc

SEQ ID NO: 1237136 - RNA, 22 nt, Human
cccacaagcccagcacagagca

SEQ ID NO: 1237137 - RNA, 18 nt, Human
cccagcacagagcagagc

SEQ ID NO: 1237138 - RNA, 22 nt, Human
ccuaaucccagcccuguuggau

SEQ ID NO: 1237139 - RNA, 23 nt, Human
ccuaccccugccuccucugggag

SEQ ID NO: 1237140 - RNA, 27 nt, Human
ccuccagggcaacacuccuggacucac

SEQ ID NO: 1237141 - RNA, 19 nt, Human
ccuccgucugguagcuucc

SEQ ID NO: 1237142 - RNA, 18 nt, Human
ccuccuucucccuauucu

SEQ ID NO: 1237143 - RNA, 20 nt, Human
cggccaagagcuuuccuacc

SEQ ID NO: 1237144 - RNA, 22 nt, Human
cuaccccugccuccucugggag

SEQ ID NO: 1237145 - RNA, 23 nt, Human
cuccuggacucaccuuguuaacc

SEQ ID NO: 1237146 - RNA, 23 nt, Human
cucuccuccuucucccuauucug

SEQ ID NO: 1237147 - RNA, 21 nt, Human
cugaccagugagaacaaugcu

SEQ ID NO: 1237148 - RNA, 23 nt, Human
cuuaaaauauccaccuacaaggu

SEQ ID NO: 1237149 - RNA, 21 nt, Human
cuucccaagcuggcugauucu

SEQ ID NO: 1237150 - RNA, 22 nt, Human
cuugacucccgucucccagaca

SEQ ID NO: 1237151 - RNA, 19 nt, Human
cuugcuagugccucccuug

SEQ ID NO: 1237152 - RNA, 23 nt, Human
gaacaaggucaggaucugaccuc

SEQ ID NO: 1237153 - RNA, 22 nt, Human
gaccauuuggauugccuauuuu

SEQ ID NO: 1237154 - RNA, 27 nt, Human
gagaaagacagagagagggggaaggaa

SEQ ID NO: 1237155 - RNA, 21 nt, Human
gagcacagagccaaacgccaa

SEQ ID NO: 1237156 - RNA, 19 nt, Human
gcccuugccaggcauaaag

SEQ ID NO: 1237157 - RNA, 21 nt, Human
gcuaaagggcaaggacuggca

SEQ ID NO: 1237158 - RNA, 21 nt, Human
ggauggaucuagaacugauuu

SEQ ID NO: 1237159 - RNA, 19 nt, Human
ggcaguggaguuuggcugg

SEQ ID NO: 1237160 - RNA, 21 nt, Human
ggccaggaccagggugaaaca

SEQ ID NO: 1237161 - RNA, 18 nt, Human
gggcauggacagauccug

SEQ ID NO: 1237162 - RNA, 19 nt, Human
ggucaggcugaccuggcca

SEQ ID NO: 1237163 - RNA, 21 nt, Human
gucaauuccaaccacagcuaa

SEQ ID NO: 1237164 - RNA, 24 nt, Human
guccucuggggugacaaccguggg

SEQ ID NO: 1237165 - RNA, 22 nt, Human
gugcguuccauaaacgaguccc

SEQ ID NO: 1237166 - RNA, 23 nt, Human
guugaaaccaagccaucuugacu

SEQ ID NO: 1237167 - RNA, 24 nt, Human
uaaucagggaucaggaccugguuu

SEQ ID NO: 1237168 - RNA, 21 nt, Human
uacaauaauuugcaggcaaaa

SEQ ID NO: 1237169 - RNA, 19 nt, Human
uacacaggcacagacgucc

SEQ ID NO: 1237170 - RNA, 18 nt, Human
uacacuugcuucuugucu

SEQ ID NO: 1237171 - RNA, 26 nt, Human
uaccccugccuccucugggagucugc

SEQ ID NO: 1237172 - RNA, 18 nt, Human
uacuaugugucacucauu

SEQ ID NO: 1237173 - RNA, 22 nt, Human
uagaacuagagaguccugaggc

SEQ ID NO: 1237174 - RNA, 24 nt, Human
uauaaacuccaagagggcaggaac

SEQ ID NO: 1237175 - RNA, 23 nt, Human
uaugccuccagggcaacacuccu

SEQ ID NO: 1237176 - RNA, 22 nt, Human
uauggagcuuagggauucugug

SEQ ID NO: 1237177 - RNA, 19 nt, Human
uauucugucuccucucuca

SEQ ID NO: 1237178 - RNA, 24 nt, Human
uauucugucuccucucucacccca

SEQ ID NO: 1237179 - RNA, 24 nt, Human
ucaccccacaagcccagcacagag

SEQ ID NO: 1237180 - RNA, 18 nt, Human
ucacuugggaugaaaaag

SEQ ID NO: 1237181 - RNA, 21 nt, Human
ucagccucacucacuucaucc

SEQ ID NO: 1237182 - RNA, 19 nt, Human
uccaaaggcugggccccug

SEQ ID NO: 1237183 - RNA, 18 nt, Human
ucccauaaacaacucaaa

SEQ ID NO: 1237184 - RNA, 22 nt, Human
uccugcuuucauuacagcugca

SEQ ID NO: 1237185 - RNA, 23 nt, Human
ucguauuugcacagcucagccuc

SEQ ID NO: 1237186 - RNA, 21 nt, Human
ucuccuccuucucccuauucu

SEQ ID NO: 1237187 - RNA, 19 nt, Human
ucuccucucucaccccaca

SEQ ID NO: 1237188 - RNA, 22 nt, Human
ucuccugcugccauuuaggacc

SEQ ID NO: 1237189 - RNA, 21 nt, Human
ucucugugcguaaaugugucc

SEQ ID NO: 1237190 - RNA, 20 nt, Human
ucugggaugcacacagcaag

SEQ ID NO: 1237191 - RNA, 20 nt, Human
ucugucuccucucucacccc

SEQ ID NO: 1237192 - RNA, 21 nt, Human
ucugucuccucucucaccccc

SEQ ID NO: 1237193 - RNA, 22 nt, Human
ucugugaagucauacuuggccu

SEQ ID NO: 1237194 - RNA, 24 nt, Human
ucuucuccugcugccauuuaggac

SEQ ID NO: 1237195 - RNA, 26 nt, Human
ucuucuguuacccuugcuuuguaugg

SEQ ID NO: 1237196 - RNA, 23 nt, Human
ugaaaccaagccaucuugacucc

SEQ ID NO: 1237197 - RNA, 25 nt, Human
ugaaagcagcauagagaauauccaa

SEQ ID NO: 1237198 - RNA, 22 nt, Human
ugaaaugauaggcagcauggca

SEQ ID NO: 1237199 - RNA, 23 nt, Human
ugaaccaauuacuccucccuuua

SEQ ID NO: 1237200 - RNA, 23 nt, Human
ugacucccgucucccagacaauc

SEQ ID NO: 1237201 - RNA, 21 nt, Human
ugcuuccuccgucugguagcu

SEQ ID NO: 1237202 - RNA, 21 nt, Human
uggaaggcaaggccaggacca

SEQ ID NO: 1237203 - RNA, 24 nt, Human
uggauucugucuccuuaaaauuuu

SEQ ID NO: 1237204 - RNA, 22 nt, Human
uggcagaggcucagagcaugaa

SEQ ID NO: 1237205 - RNA, 24 nt, Human
ugggauaaagucuaaggaaauguc

SEQ ID NO: 1237206 - RNA, 18 nt, Human
ugggaugaaaaagcuccu

SEQ ID NO: 1237207 - RNA, 21 nt, Human
ugggucaggcugaccuggcca

SEQ ID NO: 1237208 - RNA, 24 nt, Human
uggugaacauguuaacacugaaaa

SEQ ID NO: 1237209 - RNA, 21 nt, Human
uguuuuaugccuccagggcaa

SEQ ID NO: 1237210 - RNA, 25 nt, Human
uugcaggcaaaaagaaucgcuuccu

SEQ ID NO: 1237211 - RNA, 19 nt, Human
uuggauugccuauuuuucu

SEQ ID NO: 1237212 - RNA, 20 nt, Human
uuuauuaaaauccugcuuuc

SEQ ID NO: 1237213 - RNA, 24 nt, Human
auauauuuuaaguaggacagguuu

SEQ ID NO: 1237214 - RNA, 25 nt, Human
gguuuuuuuuuuuuuaaacuuuugg

SEQ ID NO: 1237215 - RNA, 26 nt, Human
uaggacagguuuuuuuuuuuuuaaaa

SEQ ID NO: 1237216 - RNA, 24 nt, Human
uuuuuuuuuuuuuaaacuuuugga

SEQ ID NO: 1237217 - RNA, 24 nt, Human
aaaaacaaaaacaaaaacaaaaac

SEQ ID NO: 1237218 - RNA, 25 nt, Human
aaaaagaaguuuuuuauuucagaga

SEQ ID NO: 1237219 - RNA, 22 nt, Human
aaaacaaaaacaaaaacaaaaa

SEQ ID NO: 1237220 - RNA, 27 nt, Human
aaaacaaaaacaaaaacaaacaaacaa

SEQ ID NO: 1237221 - RNA, 19 nt, Human
aaaacaaacaaacaaaaaa

SEQ ID NO: 1237222 - RNA, 23 nt, Human
aaaaccccuucauuuucaaacuu

SEQ ID NO: 1237223 - RNA, 26 nt, Human
aaacaaaaacaaaaacaaaaacaaac

SEQ ID NO: 1237224 - RNA, 22 nt, Human
aaaguacagauguuaucaaaag

SEQ ID NO: 1237225 - RNA, 24 nt, Human
aacacuuugggaggccgagguggg

SEQ ID NO: 1237226 - RNA, 23 nt, Human
aaccuccugcaaacagaugacau

SEQ ID NO: 1237227 - RNA, 21 nt, Human
aacguggcgaaaccccauuuc

SEQ ID NO: 1237228 - RNA, 21 nt, Human
aacguggcgaaaccccauuuc

SEQ ID NO: 1237229 - RNA, 24 nt, Human
aagggccgggugcgguggcucacg

SEQ ID NO: 1237230 - RNA, 27 nt, Human
acaaaaacaaaaacaaacaaacaaaaa

SEQ ID NO: 1237231 - RNA, 22 nt, Human
acaaacaaacaaaaaacacgcu

SEQ ID NO: 1237232 - RNA, 19 nt, Human
acaagagugaaacuccauc

SEQ ID NO: 1237233 - RNA, 20 nt, Human
acaagagugaaacuccaucu

SEQ ID NO: 1237234 - RNA, 21 nt, Human
acaagagugaaacuccaucuc

SEQ ID NO: 1237235 - RNA, 22 nt, Human
acauauccuuuuagaagagucc

SEQ ID NO: 1237236 - RNA, 24 nt, Human
accccauuucuacuaaaaauacaa

SEQ ID NO: 1237237 - RNA, 24 nt, Human
accugaggucaggaguucaagacc

SEQ ID NO: 1237238 - RNA, 25 nt, Human
acuccagccugggcaacaagaguga

SEQ ID NO: 1237239 - RNA, 20 nt, Human
acuggggaaaaucaaagcuu

SEQ ID NO: 1237240 - RNA, 19 nt, Human
agagacagugcggaugaga

SEQ ID NO: 1237241 - RNA, 21 nt, Human
agagauuaaagaauuugaaac

SEQ ID NO: 1237242 - RNA, 23 nt, Human
agccagacauguuggcgcacgcc

SEQ ID NO: 1237243 - RNA, 24 nt, Human
agccuggccaacguggcgaaaccc

SEQ ID NO: 1237244 - RNA, 18 nt, Human
agcuaauacagcuaaugc

SEQ ID NO: 1237245 - RNA, 23 nt, Human
aggcaggagaaucgcuuaaaccc

SEQ ID NO: 1237246 - RNA, 24 nt, Human
aggcaggagaaucgcuuaaaccca

SEQ ID NO: 1237247 - RNA, 21 nt, Human
aggccgagguggguggaucac

SEQ ID NO: 1237248 - RNA, 22 nt, Human
agguggguggaucaccugaggu

SEQ ID NO: 1237249 - RNA, 19 nt, Human
auaacgaagacaucaggaa

SEQ ID NO: 1237250 - RNA, 20 nt, Human
augaacauuuuucaugggca

SEQ ID NO: 1237251 - RNA, 24 nt, Human
auugcacuccagccugggcaacaa

SEQ ID NO: 1237252 - RNA, 25 nt, Human
auugcacuccagccugggcaacaag

SEQ ID NO: 1237253 - RNA, 24 nt, Human
caaaaacaaacaaacaaaaaacac

SEQ ID NO: 1237254 - RNA, 18 nt, Human
caaaagaggaaauucuua

SEQ ID NO: 1237255 - RNA, 26 nt, Human
caaacaaacaaaaaacacgcuaauuc

SEQ ID NO: 1237256 - RNA, 24 nt, Human
caacacuuugggaggccgaggugg

SEQ ID NO: 1237257 - RNA, 21 nt, Human
caagauccgaagaaacuucca

SEQ ID NO: 1237258 - RNA, 19 nt, Human
caagcugucagaaaacacu

SEQ ID NO: 1237259 - RNA, 19 nt, Human
cacaguauggguacagaac

SEQ ID NO: 1237260 - RNA, 20 nt, Human
cacccuuaacuuaaauacau

SEQ ID NO: 1237261 - RNA, 23 nt, Human
caccugaggucaggaguucaaga

SEQ ID NO: 1237262 - RNA, 24 nt, Human
cacgccuguaaucccaacacuuug

SEQ ID NO: 1237263 - RNA, 18 nt, Human
cacgccuguaaucccagc

SEQ ID NO: 1237264 - RNA, 19 nt, Human
cacgccuguaaucccagcu

SEQ ID NO: 1237265 - RNA, 23 nt, Human
cacuccagccugggcaacaagag

SEQ ID NO: 1237266 - RNA, 24 nt, Human
cacuccagccugggcaacaagagu

SEQ ID NO: 1237267 - RNA, 25 nt, Human
cacuccagccugggcaacaagagug

SEQ ID NO: 1237268 - RNA, 21 nt, Human
cagaaaacacugcgcggucaa

SEQ ID NO: 1237269 - RNA, 18 nt, Human
cagagaugcuuaaaaguc

SEQ ID NO: 1237270 - RNA, 24 nt, Human
cagcuaaugcauuauaaauaaugu

SEQ ID NO: 1237271 - RNA, 27 nt, Human
caguaaagauggguauuagcaacacag

SEQ ID NO: 1237272 - RNA, 21 nt, Human
caucaaaaaagcaacagcuaa

SEQ ID NO: 1237273 - RNA, 22 nt, Human
caucaaaaaagcaacagcuaau

SEQ ID NO: 1237274 - RNA, 26 nt, Human
caucucaaaaaaacaaaaacaaaaac

SEQ ID NO: 1237275 - RNA, 28 nt, Human
caucucaaaaaaacaaaaacaaaaacaa

SEQ ID NO: 1237276 - RNA, 18 nt, Human
cauugcacuccagccugg

SEQ ID NO: 1237277 - RNA, 19 nt, Human
cauugcacuccagccuggg

SEQ ID NO: 1237278 - RNA, 21 nt, Human
cauugcacuccagccugggca

SEQ ID NO: 1237279 - RNA, 24 nt, Human
cauugcacuccagccugggcaaca

SEQ ID NO: 1237280 - RNA, 22 nt, Human
ccacuacucaaccuuuuuccug

SEQ ID NO: 1237281 - RNA, 22 nt, Human
ccaucucaaaaaaacaaaaacc

SEQ ID NO: 1237282 - RNA, 20 nt, Human
ccauugcacuccagccuggg

SEQ ID NO: 1237283 - RNA, 21 nt, Human
ccauugcacuccagccugggc

SEQ ID NO: 1237284 - RNA, 23 nt, Human
ccauugcacuccagccugggcaa

SEQ ID NO: 1237285 - RNA, 24 nt, Human
ccauugcacuccagccugggcaac

SEQ ID NO: 1237286 - RNA, 23 nt, Human
ccccucgagcccgaaggccucua

SEQ ID NO: 1237287 - RNA, 25 nt, Human
ccuccugcaaacagaugacaucggc

SEQ ID NO: 1237288 - RNA, 18 nt, Human
ccucgagcccgaaggccu

SEQ ID NO: 1237289 - RNA, 24 nt, Human
ccuggccaacguggcgaaacccca

SEQ ID NO: 1237290 - RNA, 22 nt, Human
ccuguaaucccaacacuuuggg

SEQ ID NO: 1237291 - RNA, 21 nt, Human
ccuguaaucccagcuacucgg

SEQ ID NO: 1237292 - RNA, 25 nt, Human
cgaaacacccccucgagcccgaagg

SEQ ID NO: 1237293 - RNA, 24 nt, Human
cgagguggguggaucaccugaggu

SEQ ID NO: 1237294 - RNA, 26 nt, Human
cgagguggguggaucaccugagguca

SEQ ID NO: 1237295 - RNA, 23 nt, Human
cgccuguaaucccagcuacucgg

SEQ ID NO: 1237296 - RNA, 24 nt, Human
cgccuguaaucccagcuacucggg

SEQ ID NO: 1237297 - RNA, 26 nt, Human
cggugaguuccuucuggauaagguuc

SEQ ID NO: 1237298 - RNA, 22 nt, Human
cucacgccuguaaucccaacac

SEQ ID NO: 1237299 - RNA, 24 nt, Human
cucacgccuguaaucccaacacuu

SEQ ID NO: 1237300 - RNA, 24 nt, Human
cuccagcaguucuuugugaagugg

SEQ ID NO: 1237301 - RNA, 23 nt, Human
cugaaaccugaagaacagaagau

SEQ ID NO: 1237302 - RNA, 19 nt, Human
cugcgcguacgugucugcc

SEQ ID NO: 1237303 - RNA, 25 nt, Human
cuuccacuuuaauuuuccccuugga

SEQ ID NO: 1237304 - RNA, 24 nt, Human
gaaaacacugcgcggucaaccucc

SEQ ID NO: 1237305 - RNA, 23 nt, Human
gagauugugccauugcacuccag

SEQ ID NO: 1237306 - RNA, 21 nt, Human
gagguugcagugagccgagau

SEQ ID NO: 1237307 - RNA, 23 nt, Human
gagguugcagugagccgagauug

SEQ ID NO: 1237308 - RNA, 21 nt, Human
gaucaccugaggucaggaguu

SEQ ID NO: 1237309 - RNA, 23 nt, Human
gaucaccugaggucaggaguuca

SEQ ID NO: 1237310 - RNA, 24 nt, Human
gaucaccugaggucaggaguucaa

SEQ ID NO: 1237311 - RNA, 18 nt, Human
gaugcaaacaucaacagu

SEQ ID NO: 1237312 - RNA, 22 nt, Human
gcaggagaaucgcuuaaaccca

SEQ ID NO: 1237313 - RNA, 21 nt, Human
gccaacguggcgaaaccccau

SEQ ID NO: 1237314 - RNA, 19 nt, Human
gccauugcacuccagccug

SEQ ID NO: 1237315 - RNA, 22 nt, Human
gccauugcacuccagccugggc

SEQ ID NO: 1237316 - RNA, 24 nt, Human
gccauugcacuccagccugggcaa

SEQ ID NO: 1237317 - RNA, 23 nt, Human
gccuguaaucccagcuacucggg

SEQ ID NO: 1237318 - RNA, 21 nt, Human
ggaaagagaagauguaugaug

SEQ ID NO: 1237319 - RNA, 22 nt, Human
ggagguugcagugagccgagau

SEQ ID NO: 1237320 - RNA, 24 nt, Human
ggagguugcagugagccgagauug

SEQ ID NO: 1237321 - RNA, 18 nt, Human
ggccgggugcgguggcuc

SEQ ID NO: 1237322 - RNA, 21 nt, Human
ggcgcacgccuguaaucccag

SEQ ID NO: 1237323 - RNA, 19 nt, Human
ggcggagguugcagugagc

SEQ ID NO: 1237324 - RNA, 20 nt, Human
ggcggagguugcagugagcc

SEQ ID NO: 1237325 - RNA, 23 nt, Human
ggcggagguugcagugagccgag

SEQ ID NO: 1237326 - RNA, 20 nt, Human
ggcucacgccuguaauccca

SEQ ID NO: 1237327 - RNA, 24 nt, Human
gggugcgguggcucacgccuguaa

SEQ ID NO: 1237328 - RNA, 21 nt, Human
gguggaucaccugaggucagg

SEQ ID NO: 1237329 - RNA, 23 nt, Human
gguggcucacgccuguaauccca

SEQ ID NO: 1237330 - RNA, 22 nt, Human
guggcucacgccuguaauccca

SEQ ID NO: 1237331 - RNA, 24 nt, Human
guuggcgcacgccuguaaucccag

SEQ ID NO: 1237332 - RNA, 18 nt, Human
uaaaaauaagaaugaaaa

SEQ ID NO: 1237333 - RNA, 21 nt, Human
uaaaaauacaaaaauuagcca

SEQ ID NO: 1237334 - RNA, 22 nt, Human
uaaaaccccuucauuuucaaac

SEQ ID NO: 1237335 - RNA, 23 nt, Human
uaaagauggguauuagcaacaca

SEQ ID NO: 1237336 - RNA, 21 nt, Human
uaacuuaaauacauuuucccu

SEQ ID NO: 1237337 - RNA, 23 nt, Human
uacucaaccuuuuuccuguuuau

SEQ ID NO: 1237338 - RNA, 18 nt, Human
uagaaaguggccaggccu

SEQ ID NO: 1237339 - RNA, 19 nt, Human
uagaggaaaacaaggaaag

SEQ ID NO: 1237340 - RNA, 23 nt, Human
uagcuaaaaaaauucucuuauaa

SEQ ID NO: 1237341 - RNA, 20 nt, Human
uaggagggcugaacauuuua

SEQ ID NO: 1237342 - RNA, 22 nt, Human
uaggaugccaguaaagaugggu

SEQ ID NO: 1237343 - RNA, 23 nt, Human
uaguuucuccagcaguucuuugu

SEQ ID NO: 1237344 - RNA, 22 nt, Human
uauaguuuuuucuaaacaagau

SEQ ID NO: 1237345 - RNA, 22 nt, Human
uauauacacacuguugucugua

SEQ ID NO: 1237346 - RNA, 23 nt, Human
uauauauauuacauauauacaca

SEQ ID NO: 1237347 - RNA, 24 nt, Human
uauauauauuacauauauacacac

SEQ ID NO: 1237348 - RNA, 18 nt, Human
uaucaaaagaggaaauuc

SEQ ID NO: 1237349 - RNA, 23 nt, Human
ucaaaaaaacaaaaacaaaaaca

SEQ ID NO: 1237350 - RNA, 31 nt, Human
ucaaaaaaacaaaaacaaaaacaaaaacaaa

SEQ ID NO: 1237351 - RNA, 22 nt, Human
ucaaugauucauccaaaauuuc

SEQ ID NO: 1237352 - RNA, 23 nt, Human
ucaccugaggucaggaguucaag

SEQ ID NO: 1237353 - RNA, 22 nt, Human
ucauccaaaauuucaagcccau

SEQ ID NO: 1237354 - RNA, 21 nt, Human
uccuaaaaauaagaaugaaaa

SEQ ID NO: 1237355 - RNA, 24 nt, Human
ugaaaauaccuuacuuguucauug

SEQ ID NO: 1237356 - RNA, 21 nt, Human
ugaaagaaaaauuaagaucau

SEQ ID NO: 1237357 - RNA, 19 nt, Human
ugaagaacagaagaucucu

SEQ ID NO: 1237358 - RNA, 24 nt, Human
ugaagaacugaaaccugaagaaca

SEQ ID NO: 1237359 - RNA, 21 nt, Human
ugagagcguccucagucaccu

SEQ ID NO: 1237360 - RNA, 22 nt, Human
ugagccgagauugugccauugc

SEQ ID NO: 1237361 - RNA, 19 nt, Human
ugaggcaggagaaucgcuu

SEQ ID NO: 1237362 - RNA, 24 nt, Human
ugaggcaggagaaucgcuuaaacc

SEQ ID NO: 1237363 - RNA, 21 nt, Human
ugauagugagcagaauaugaa

SEQ ID NO: 1237364 - RNA, 22 nt, Human
ugaugcaaacaucaacaguuuc

SEQ ID NO: 1237365 - RNA, 20 nt, Human
ugauucgaaacacccccucg

SEQ ID NO: 1237366 - RNA, 19 nt, Human
ugcacuccagccugggcaa

SEQ ID NO: 1237367 - RNA, 24 nt, Human
ugccauugcacuccagccugggca

SEQ ID NO: 1237368 - RNA, 19 nt, Human
ugcgcugauggguacaaaa

SEQ ID NO: 1237369 - RNA, 23 nt, Human
ugcuuaaaagucccacuacucaa

SEQ ID NO: 1237370 - RNA, 20 nt, Human
uggaauguguugucaugaaa

SEQ ID NO: 1237371 - RNA, 24 nt, Human
uggaucaccugaggucaggaguuc

SEQ ID NO: 1237372 - RNA, 27 nt, Human
uggaucaccugaggucaggaguucaag

SEQ ID NO: 1237373 - RNA, 24 nt, Human
uggccaacguggcgaaaccccauu

SEQ ID NO: 1237374 - RNA, 18 nt, Human
uggccaggccuucgugcu

SEQ ID NO: 1237375 - RNA, 20 nt, Human
uggccaggccuucgugcugc

SEQ ID NO: 1237376 - RNA, 21 nt, Human
uggcgcacgccuguaauccca

SEQ ID NO: 1237377 - RNA, 18 nt, Human
uggcuaagaaggcugaac

SEQ ID NO: 1237378 - RNA, 24 nt, Human
uggcucacgccuguaaucccaaca

SEQ ID NO: 1237379 - RNA, 23 nt, Human
ugggaggccgagguggguggauc

SEQ ID NO: 1237380 - RNA, 24 nt, Human
ugggaggccgagguggguggauca

SEQ ID NO: 1237381 - RNA, 24 nt, Human
uggguacaaaacuaguuucuccag

SEQ ID NO: 1237382 - RNA, 24 nt, Human
uggguggaucaccugaggucagga

SEQ ID NO: 1237383 - RNA, 18 nt, Human
ugucugccaggauguugu

SEQ ID NO: 1237384 - RNA, 24 nt, Human
uguuggcgcacgccuguaauccca

SEQ ID NO: 1237385 - RNA, 21 nt, Human
uguuucuccuccaauuguaga

SEQ ID NO: 1237386 - RNA, 20 nt, Human
uuaaaagucccacuacucaa

SEQ ID NO: 1237387 - RNA, 24 nt, Human
uuaaacccagggggcggagguugc

SEQ ID NO: 1237388 - RNA, 23 nt, Human
uuaaagaauuugaaacaagggcu

SEQ ID NO: 1237389 - RNA, 23 nt, Human
uuaaagcucugaaauuguaguaa

SEQ ID NO: 1237390 - RNA, 21 nt, Human
uuacuccuuccaugugucaag

SEQ ID NO: 1237391 - RNA, 21 nt, Human
uuaguaaagcaugguuaccac

SEQ ID NO: 1237392 - RNA, 21 nt, Human
uucauccaaaauuucaagccc

SEQ ID NO: 1237393 - RNA, 21 nt, Human
uucaugggcaagaguaacuga

SEQ ID NO: 1237394 - RNA, 21 nt, Human
uucauuuuacuauauauauau

SEQ ID NO: 1237395 - RNA, 18 nt, Human
uuccccuuggaguacuua

SEQ ID NO: 1237396 - RNA, 22 nt, Human
uuccccuuggaguacuuaaagu

SEQ ID NO: 1237397 - RNA, 18 nt, Human
uucgaaacacccccucga

SEQ ID NO: 1237398 - RNA, 20 nt, Human
uucuaauuuuaaaaaguuug

SEQ ID NO: 1237399 - RNA, 18 nt, Human
uugcagugagccgagauu

SEQ ID NO: 1237400 - RNA, 19 nt, Human
uugcagugagccgagauug

SEQ ID NO: 1237401 - RNA, 22 nt, Human
uugcagugagccgagauugugc

SEQ ID NO: 1237402 - RNA, 23 nt, Human
uugcagugagccgagauugugcc

SEQ ID NO: 1237403 - RNA, 21 nt, Human
uuggcgcacgccuguaauccc

SEQ ID NO: 1237404 - RNA, 25 nt, Human
uugggaggccgagguggguggauca

SEQ ID NO: 1237405 - RNA, 23 nt, Human
uugugccauugcacuccagccug

SEQ ID NO: 1237406 - RNA, 22 nt, Human
uuucauuuuacuauauauauau

SEQ ID NO: 1237407 - RNA, 21 nt, Human
uuucuacuaaaaauacaaaaa

SEQ ID NO: 1237408 - RNA, 25 nt, Human
aaaaaaaaaaaaaguggcuucugua

SEQ ID NO: 1237409 - RNA, 22 nt, Human
aaaaaaaagacaaaucuaaaaa

SEQ ID NO: 1237410 - RNA, 25 nt, Human
aaaaaaagacaaaucuaaaaaucac

SEQ ID NO: 1237411 - RNA, 25 nt, Human
aaaacagaaacaaaaacaacaacaa

SEQ ID NO: 1237412 - RNA, 23 nt, Human
aaaauaacucauaugauccaagg

SEQ ID NO: 1237413 - RNA, 25 nt, Human
aaaauaacucauaugauccaaggca

SEQ ID NO: 1237414 - RNA, 21 nt, Human
aaacaaaaacaacaacaacaa

SEQ ID NO: 1237415 - RNA, 24 nt, Human
aaacaacaacaacaaaagcuaacc

SEQ ID NO: 1237416 - RNA, 22 nt, Human
aaacaacccuacucuaccaaau

SEQ ID NO: 1237417 - RNA, 25 nt, Human
aaacagaaacaaaaacaacaacaac

SEQ ID NO: 1237418 - RNA, 26 nt, Human
aaacagaaacaaaaacaacaacaaca

SEQ ID NO: 1237419 - RNA, 19 nt, Human
aaagugcuaggauuacagg

SEQ ID NO: 1237420 - RNA, 24 nt, Human
aaagugcuaggauuacaggcguga

SEQ ID NO: 1237421 - RNA, 22 nt, Human
aaaugccauauucucucuauga

SEQ ID NO: 1237422 - RNA, 21 nt, Human
aaaugccuucacaaaaccucu

SEQ ID NO: 1237423 - RNA, 18 nt, Human
aacaaaacagaaacaaaa

SEQ ID NO: 1237424 - RNA, 22 nt, Human
aacaaaacagaaacaaaaacaa

SEQ ID NO: 1237425 - RNA, 19 nt, Human
aacauggagaaaccccauc

SEQ ID NO: 1237426 - RNA, 20 nt, Human
aacauggagaaaccccaucu

SEQ ID NO: 1237427 - RNA, 21 nt, Human
aacauggagaaaccccaucuc

SEQ ID NO: 1237428 - RNA, 22 nt, Human
aaccaaacaacccuacucuacc

SEQ ID NO: 1237429 - RNA, 18 nt, Human
aagacaccauuaucaugc

SEQ ID NO: 1237430 - RNA, 19 nt, Human
aagcuggaguccaggggug

SEQ ID NO: 1237431 - RNA, 24 nt, Human
aaguagcugggauuacaggcgcgu

SEQ ID NO: 1237432 - RNA, 26 nt, Human
aaguagcugggauuacaggcgcgugc

SEQ ID NO: 1237433 - RNA, 26 nt, Human
aagugcuaggauuacaggcgugagcc

SEQ ID NO: 1237434 - RNA, 24 nt, Human
aaugaccauaaaugccuucacaaa

SEQ ID NO: 1237435 - RNA, 20 nt, Human
acaaaaacaacaacaacaaa

SEQ ID NO: 1237436 - RNA, 24 nt, Human
acaaaacagaaacaaaaacaacaa

SEQ ID NO: 1237437 - RNA, 30 nt, Human
acaaaccaaacaacccuacucuaccaaauu

SEQ ID NO: 1237438 - RNA, 28 nt, Human
acaacaacaacaaaagcuaaccaugaca

SEQ ID NO: 1237439 - RNA, 22 nt, Human
acaacagaaggcacuacauaag

SEQ ID NO: 1237440 - RNA, 25 nt, Human
acaacccuacucuaccaaaucacau

SEQ ID NO: 1237441 - RNA, 20 nt, Human
acaagagcaaaacuccaucu

SEQ ID NO: 1237442 - RNA, 24 nt, Human
accauguuggccaggcuggucuug

SEQ ID NO: 1237443 - RNA, 24 nt, Human
accccaucucuacuaaaaauacaa

SEQ ID NO: 1237444 - RNA, 25 nt, Human
accuuuuugaaaaauaauaagauga

SEQ ID NO: 1237445 - RNA, 18 nt, Human
acgggguuucaccauguu

SEQ ID NO: 1237446 - RNA, 23 nt, Human
acgggguuucaccauguuggcca

SEQ ID NO: 1237447 - RNA, 24 nt, Human
acgggguuucaccauguuggccag

SEQ ID NO: 1237448 - RNA, 20 nt, Human
acucuuucccagguucccag

SEQ ID NO: 1237449 - RNA, 25 nt, Human
acugugucacccaagcuggagucca

SEQ ID NO: 1237450 - RNA, 19 nt, Human
acuugcacccgggaggugg

SEQ ID NO: 1237451 - RNA, 21 nt, Human
acuugcacccgggagguggag

SEQ ID NO: 1237452 - RNA, 19 nt, Human
agaaggcacuaggcauuac

SEQ ID NO: 1237453 - RNA, 24 nt, Human
agcacuuugggaggccgaggcggg

SEQ ID NO: 1237454 - RNA, 19 nt, Human
agccaccacacccagccua

SEQ ID NO: 1237455 - RNA, 20 nt, Human
agccgagauugcgccauugc

SEQ ID NO: 1237456 - RNA, 18 nt, Human
agcggaccgcgccgcaga

SEQ ID NO: 1237457 - RNA, 18 nt, Human
aggcaggacaaucacuug

SEQ ID NO: 1237458 - RNA, 24 nt, Human
aggcaggacaaucacuugcacccg

SEQ ID NO: 1237459 - RNA, 21 nt, Human
aggccgaggcgggcggaucac

SEQ ID NO: 1237460 - RNA, 22 nt, Human
aggcgggcggaucaccugaggg

SEQ ID NO: 1237461 - RNA, 22 nt, Human
aggcgggcggaucaccugaggu

SEQ ID NO: 1237462 - RNA, 24 nt, Human
aggcgugguggcacauaccuguaa

SEQ ID NO: 1237463 - RNA, 21 nt, Human
aggcugaggcaggacaaucac

SEQ ID NO: 1237464 - RNA, 20 nt, Human
agggguguaaucucagcuca

SEQ ID NO: 1237465 - RNA, 22 nt, Human
agguaguauuguuuaaacaaaa

SEQ ID NO: 1237466 - RNA, 21 nt, Human
agguaugcuucaagagacugu

SEQ ID NO: 1237467 - RNA, 24 nt, Human
aggugcgguggcucacaccuguaa

SEQ ID NO: 1237468 - RNA, 24 nt, Human
agguggagguugcagucagccgag

SEQ ID NO: 1237469 - RNA, 24 nt, Human
aguccagggguguaaucucagcuc

SEQ ID NO: 1237470 - RNA, 23 nt, Human
agucuuucuugggucaggaaugc

SEQ ID NO: 1237471 - RNA, 24 nt, Human
agugauucucacaucucagccucc

SEQ ID NO: 1237472 - RNA, 22 nt, Human
auagaaggcacuaggcauuaca

SEQ ID NO: 1237473 - RNA, 18 nt, Human
aucagucacucuuuccca

SEQ ID NO: 1237474 - RNA, 19 nt, Human
aucucaaaaaaaaaaaaag

SEQ ID NO: 1237475 - RNA, 22 nt, Human
augaaaaucuauaugacaacug

SEQ ID NO: 1237476 - RNA, 22 nt, Human
auguaggacaacagaaggcacu

SEQ ID NO: 1237477 - RNA, 24 nt, Human
auugcacuccagccugggcaacaa

SEQ ID NO: 1237478 - RNA, 25 nt, Human
auugcacuccagccugggcaacaag

SEQ ID NO: 1237479 - RNA, 21 nt, Human
auugggcaaagcagcaccaau

SEQ ID NO: 1237480 - RNA, 26 nt, Human
caaaacagaaacaaaaacaacaacaa

SEQ ID NO: 1237481 - RNA, 25 nt, Human
caaaauaacucauaugauccaaggc

SEQ ID NO: 1237482 - RNA, 23 nt, Human
caaacacaaaccaaacaacccua

SEQ ID NO: 1237483 - RNA, 25 nt, Human
caaacacaaaccaaacaacccuacu

SEQ ID NO: 1237484 - RNA, 22 nt, Human
caaacgcaaggagucuuucuug

SEQ ID NO: 1237485 - RNA, 24 nt, Human
caaagugcuaggauuacaggcgug

SEQ ID NO: 1237486 - RNA, 18 nt, Human
caacaacaaaagcuaacc

SEQ ID NO: 1237487 - RNA, 21 nt, Human
caacaacaaaagcuaaccaug

SEQ ID NO: 1237488 - RNA, 22 nt, Human
caacaacaacaaaagcuaacca

SEQ ID NO: 1237489 - RNA, 21 nt, Human
caacaagagcaaaacuccauc

SEQ ID NO: 1237490 - RNA, 24 nt, Human
caagagcaaaacuccaucucaaaa

SEQ ID NO: 1237491 - RNA, 22 nt, Human
caagugauucucacaucucagc

SEQ ID NO: 1237492 - RNA, 23 nt, Human
caaugccagcacugcaguaugaa

SEQ ID NO: 1237493 - RNA, 19 nt, Human
cacacccagccuaauguuu

SEQ ID NO: 1237494 - RNA, 24 nt, Human
cacaccuguaaucccagcacuuug

SEQ ID NO: 1237495 - RNA, 21 nt, Human
cacauaaaaaacucaugaaug

SEQ ID NO: 1237496 - RNA, 23 nt, Human
caccacacccagccuaauguuua

SEQ ID NO: 1237497 - RNA, 24 nt, Human
caccaugccuggcuaauuuuugua

SEQ ID NO: 1237498 - RNA, 21 nt, Human
caccauguuggccaggcuggu

SEQ ID NO: 1237499 - RNA, 23 nt, Human
caccauguuggccaggcuggucu

SEQ ID NO: 1237500 - RNA, 24 nt, Human
caccauguuggccaggcuggucuu

SEQ ID NO: 1237501 - RNA, 31 nt, Human; identical to SEQ ID NO: 952325

SEQ ID NO: 1237502 - RNA, 20 nt, Human
cacccgggagguggagguug

SEQ ID NO: 1237503 - RNA, 23 nt, Human
caccuguaaucccagcacuuugg

SEQ ID NO: 1237504 - RNA, 24 nt, Human
caccuguaaucccagcacuuuggg

SEQ ID NO: 1237505 - RNA, 21 nt, Human
cacuaauacugauggcccaca

SEQ ID NO: 1237506 - RNA, 24 nt, Human
cacuccagccugggcaacaagagc

SEQ ID NO: 1237507 - RNA, 21 nt, Human
cacugcaaccuccgccuccca

SEQ ID NO: 1237508 - RNA, 24 nt, Human
cacuuuaaaaaguaaugcacuaaa

SEQ ID NO: 1237509 - RNA, 24 nt, Human
cagagaacaaaagauagcuucuga

SEQ ID NO: 1237510 - RNA, 24 nt, Human
cagcacuuugggaggccgaggcgg

SEQ ID NO: 1237511 - RNA, 24 nt, Human
cagccugaccaacauggagaaacc

SEQ ID NO: 1237512 - RNA, 24 nt, Human
cagcuacucaggaggcugaggcag

SEQ ID NO: 1237513 - RNA, 24 nt, Human
caggaggcugaggcaggacaauca

SEQ ID NO: 1237514 - RNA, 20 nt, Human
caguaaaaaugaagacacca

SEQ ID NO: 1237515 - RNA, 26 nt, Human
caguuuaaaaaaauagcugauuauga

SEQ ID NO: 1237516 - RNA, 19 nt, Human
cauaccuguaaucccagcu

SEQ ID NO: 1237517 - RNA, 23 nt, Human
cauguuggccaggcuggucuugg

SEQ ID NO: 1237518 - RNA, 24 nt, Human
cauguuggccaggcuggucuugga

SEQ ID NO: 1237519 - RNA, 18 nt, Human
cauugcacuccagccugg

SEQ ID NO: 1237520 - RNA, 19 nt, Human
cauugcacuccagccuggg

SEQ ID NO: 1237521 - RNA, 21 nt, Human
cauugcacuccagccugggca

SEQ ID NO: 1237522 - RNA, 24 nt, Human
cauugcacuccagccugggcaaca

SEQ ID NO: 1237523 - RNA, 24 nt, Human
ccaaacaacccuacucuaccaaau

SEQ ID NO: 1237524 - RNA, 20 nt, Human
ccaaagugcuaggauuacag

SEQ ID NO: 1237525 - RNA, 22 nt, Human
ccaaagugcuaggauuacaggc

SEQ ID NO: 1237526 - RNA, 24 nt, Human
ccaaagugcuaggauuacaggcgu

SEQ ID NO: 1237527 - RNA, 22 nt, Human
ccaaguagcugggauuacaggc

SEQ ID NO: 1237528 - RNA, 20 nt, Human
ccauugcacuccagccuggg

SEQ ID NO: 1237529 - RNA, 21 nt, Human
ccauugcacuccagccugggc

SEQ ID NO: 1237530 - RNA, 23 nt, Human
ccauugcacuccagccugggcaa

SEQ ID NO: 1237531 - RNA, 24 nt, Human
ccauugcacuccagccugggcaac

SEQ ID NO: 1237532 - RNA, 23 nt, Human
cccaaguagcugggauuacaggc

SEQ ID NO: 1237533 - RNA, 24 nt, Human
cccaaguagcugggauuacaggcg

SEQ ID NO: 1237534 - RNA, 20 nt, Human
cccagguucaagugauucuc

SEQ ID NO: 1237535 - RNA, 22 nt, Human
cccccugaccguucgcgccgcc

SEQ ID NO: 1237536 - RNA, 21 nt, Human
cccgggagguggagguugcag

SEQ ID NO: 1237537 - RNA, 24 nt, Human
ccgccucccagguucaagugauuc

SEQ ID NO: 1237538 - RNA, 22 nt, Human
ccucccagguucaagugauucu

SEQ ID NO: 1237539 - RNA, 24 nt, Human
ccugaccaacauggagaaacccca

SEQ ID NO: 1237540 - RNA, 22 nt, Human
ccugaggucgggaguuugagac

SEQ ID NO: 1237541 - RNA, 21 nt, Human
ccuguaaucccagcuacucag

SEQ ID NO: 1237542 - RNA, 24 nt, Human
cgagauugcgccauugcacuccag

SEQ ID NO: 1237543 - RNA, 20 nt, Human
cgaggcgggcggaucaccug

SEQ ID NO: 1237544 - RNA, 24 nt, Human
cgaggcgggcggaucaccugaggu

SEQ ID NO: 1237545 - RNA, 20 nt, Human
cgccauugcacuccagccug

SEQ ID NO: 1237546 - RNA, 24 nt, Human
cgccauugcacuccagccugggca

SEQ ID NO: 1237547 - RNA, 22 nt, Human
cgccucccagguucaagugauu

SEQ ID NO: 1237548 - RNA, 24 nt, Human
cggaucaccugaggucgggaguuu

SEQ ID NO: 1237549 - RNA, 24 nt, Human
cgggagguggagguugcagucagc

SEQ ID NO: 1237550 - RNA, 18 nt, Human
cgggcggaucaccugagg

SEQ ID NO: 1237551 - RNA, 24 nt, Human
cgggcggaucaccugaggucggga

SEQ ID NO: 1237552 - RNA, 24 nt, Human
cgggguuucaccauguuggccagg

SEQ ID NO: 1237553 - RNA, 21 nt, Human
cuaaccauaggacaguucagu

SEQ ID NO: 1237554 - RNA, 19 nt, Human
cuaggcauuacauaauacc

SEQ ID NO: 1237555 - RNA, 22 nt, Human
cucacaccuguaaucccagcac

SEQ ID NO: 1237556 - RNA, 24 nt, Human
cucacaccuguaaucccagcacuu

SEQ ID NO: 1237557 - RNA, 24 nt, Human
cucacugcaaccuccgccucccag

SEQ ID NO: 1237558 - RNA, 21 nt, Human
cucagccucccaaguagcugg

SEQ ID NO: 1237559 - RNA, 23 nt, Human
cucagccucccaaguagcuggga

SEQ ID NO: 1237560 - RNA, 19 nt, Human
cuccacagcggaccgcgcc

SEQ ID NO: 1237561 - RNA, 19 nt, Human
cuccaucucaaaaaaaaaa

SEQ ID NO: 1237562 - RNA, 19 nt, Human
cucccagguucaagugauu

SEQ ID NO: 1237563 - RNA, 19 nt, Human
cugaggcaggacaaucacu

SEQ ID NO: 1237564 - RNA, 23 nt, Human
cugcaaccuccgccucccagguu

SEQ ID NO: 1237565 - RNA, 24 nt, Human
cugggcaacaagagcaaaacucca

SEQ ID NO: 1237566 - RNA, 21 nt, Human
cuugcacccgggagguggagg

SEQ ID NO: 1237567 - RNA, 25 nt, Human
gaaaagcuucaagacuagcagcuga

SEQ ID NO: 1237568 - RNA, 24 nt, Human
gaccuuaagugaccuguccaccuu

SEQ ID NO: 1237569 - RNA, 24 nt, Human
gagacgggguuucaccauguuggc

SEQ ID NO: 1237570 - RNA, 23 nt, Human
gagguugcagucagccgagauug

SEQ ID NO: 1237571 - RNA, 24 nt, Human
gaucaccugaggucgggaguuuga

SEQ ID NO: 1237572 - RNA, 18 nt, Human
gauuacaggcgcgugcca

SEQ ID NO: 1237573 - RNA, 18 nt, Human
gauuacaggcgugagcca

SEQ ID NO: 1237574 - RNA, 21 nt, Human
gauuacaggcgugagccacca

SEQ ID NO: 1237575 - RNA, 22 nt, Human
gauuacaggcgugagccaccac

SEQ ID NO: 1237576 - RNA, 22 nt, Human
gcaaccuccgccucccagguuc

SEQ ID NO: 1237577 - RNA, 18 nt, Human
gcaguaugaaaucacuaa

SEQ ID NO: 1237578 - RNA, 22 nt, Human
gccauugcacuccagccugggc

SEQ ID NO: 1237579 - RNA, 24 nt, Human
gccauugcacuccagccugggcaa

SEQ ID NO: 1237580 - RNA, 19 nt, Human
gcuaccaaacaaauaaugc

SEQ ID NO: 1237581 - RNA, 22 nt, Human
ggagguugcagucagccgagau

SEQ ID NO: 1237582 - RNA, 24 nt, Human
ggagguugcagucagccgagauug

SEQ ID NO: 1237583 - RNA, 19 nt, Human
ggaguuugagaccagccug

SEQ ID NO: 1237584 - RNA, 22 nt, Human
ggaucaccugaggucgggaguu

SEQ ID NO: 1237585 - RNA, 19 nt, Human
ggauuacaggcgugagcca

SEQ ID NO: 1237586 - RNA, 22 nt, Human
ggauuacaggcgugagccacca

SEQ ID NO: 1237587 - RNA, 23 nt, Human
gggguuucaccauguuggccagg

SEQ ID NO: 1237588 - RNA, 19 nt, Human
ggucgggaguuugagacca

SEQ ID NO: 1237589 - RNA, 24 nt, Human
gguggcacauaccuguaaucccag

SEQ ID NO: 1237590 - RNA, 23 nt, Human
gguggcucacaccuguaauccca

SEQ ID NO: 1237591 - RNA, 24 nt, Human
gguggcucacaccuguaaucccag

SEQ ID NO: 1237592 - RNA, 23 nt, Human
gguguaaucucagcucacugcaa

SEQ ID NO: 1237593 - RNA, 18 nt, Human
guagcugggauuacaggc

SEQ ID NO: 1237594 - RNA, 26 nt, Human
guaggaaaaguguuuuaagaaacauu

SEQ ID NO: 1237595 - RNA, 27 nt, Human
guaggacaacagaaggcacuacauaag

SEQ ID NO: 1237596 - RNA, 20 nt, Human
gugauucucacaucucagcc

SEQ ID NO: 1237597 - RNA, 24 nt, Human
gugauucucacaucucagccuccc

SEQ ID NO: 1237598 - RNA, 23 nt, Human
guggcucacaccuguaaucccag

SEQ ID NO: 1237599 - RNA, 19 nt, Human
uaaaaaaauagcugauuau

SEQ ID NO: 1237600 - RNA, 20 nt, Human
uaaaaauacaaaauuagcca

SEQ ID NO: 1237601 - RNA, 22 nt, Human
uaaaaauacaaaauuagccagg

SEQ ID NO: 1237602 - RNA, 23 nt, Human
uaaaaauacaaaauuagccaggc

SEQ ID NO: 1237603 - RNA, 20 nt, Human
uaaaauauagaaugccuuuc

SEQ ID NO: 1237604 - RNA, 24 nt, Human
uaaacaaaacagaaacaaaaacaa

SEQ ID NO: 1237605 - RNA, 20 nt, Human
uaaaguggaaccaccacaga

SEQ ID NO: 1237606 - RNA, 21 nt, Human
uaagagcacuuuagacaugau

SEQ ID NO: 1237607 - RNA, 23 nt, Human
uaagagcacuuuagacaugauua

SEQ ID NO: 1237608 - RNA, 24 nt, Human
uaauuuuuguauuuuuacuagaga

SEQ ID NO: 1237609 - RNA, 24 nt, Human
uacaggcgugagccaccacaccca

SEQ ID NO: 1237610 - RNA, 22 nt, Human
uacaguaaaaaugaagacacca

SEQ ID NO: 1237611 - RNA, 22 nt, Human
uaccaaacaaauaaugccagaa

SEQ ID NO: 1237612 - RNA, 24 nt, Human
uaccuguaaucccagcuacucagg

SEQ ID NO: 1237613 - RNA, 24 nt, Human
uacuagagacgggguuucaccaug

SEQ ID NO: 1237614 - RNA, 20 nt, Human
uagagacgggguuucaccau

SEQ ID NO: 1237615 - RNA, 21 nt, Human
uagagacgggguuucaccaug

SEQ ID NO: 1237616 - RNA, 22 nt, Human
uagagacgggguuucaccaugu

SEQ ID NO: 1237617 - RNA, 21 nt, Human
uagcuucugaagccauauccu

SEQ ID NO: 1237618 - RNA, 18 nt, Human
uaggauuacaggcgugag

SEQ ID NO: 1237619 - RNA, 19 nt, Human
uaggauuacaggcgugagc

SEQ ID NO: 1237620 - RNA, 22 nt, Human
uaggauuacaggcgugagccac

SEQ ID NO: 1237621 - RNA, 24 nt, Human
uaggauuacaggcgugagccacca

SEQ ID NO: 1237622 - RNA, 19 nt, Human
uaucaucacucaaauaagu

SEQ ID NO: 1237623 - RNA, 20 nt, Human
uaugacaccaacaacuuaca

SEQ ID NO: 1237624 - RNA, 21 nt, Human
uaugacaccaacaacuuacaa

SEQ ID NO: 1237625 - RNA, 21 nt, Human
ucaaaugccauauucucucua

SEQ ID NO: 1237626 - RNA, 20 nt, Human
ucacgcaccaaaaauuauca

SEQ ID NO: 1237627 - RNA, 19 nt, Human
ucacugcaaccuccgccuc

SEQ ID NO: 1237628 - RNA, 24 nt, Human
ucacugcaaccuccgccucccagg

SEQ ID NO: 1237629 - RNA, 25 nt, Human
ucacugcaaccuccgccucccaggu

SEQ ID NO: 1237630 - RNA, 27 nt, Human
ucacugcaaccuccgccucccagguuc

SEQ ID NO: 1237631 - RNA, 20 nt, Human
ucagccucccaaguagcugg

SEQ ID NO: 1237632 - RNA, 27 nt, Human
ucagcucacugcaaccuccgccuccca

SEQ ID NO: 1237633 - RNA, 19 nt, Human
uccacuccgcugccacuga

SEQ ID NO: 1237634 - RNA, 24 nt, Human
ucccaaagugcuaggauuacaggc

SEQ ID NO: 1237635 - RNA, 24 nt, Human
ucccaaguagcugggauuacaggc

SEQ ID NO: 1237636 - RNA, 23 nt, Human
ucccagaaaguuaugaaauacuu

SEQ ID NO: 1237637 - RNA, 19 nt, Human
ucccagguucaagugauuc

SEQ ID NO: 1237638 - RNA, 21 nt, Human
ucccagguucaagugauucuc

SEQ ID NO: 1237639 - RNA, 25 nt, Human
ucucaaaaaaaaaaaaaguggcuuc

SEQ ID NO: 1237640 - RNA, 24 nt, Human
ucucacugugucacccaagcugga

SEQ ID NO: 1237641 - RNA, 26 nt, Human
ucucacugugucacccaagcuggagu

SEQ ID NO: 1237642 - RNA, 20 nt, Human
ucucuacuaaaaauacaaaa

SEQ ID NO: 1237643 - RNA, 24 nt, Human
ucuggccaggugcgguggcucaca

SEQ ID NO: 1237644 - RNA, 20 nt, Human
ucuguuuauacaauacaguc

SEQ ID NO: 1237645 - RNA, 18 nt, Human
ucuuucccagguucccag

SEQ ID NO: 1237646 - RNA, 23 nt, Human
ucuuuugcuacuguuuagcugug

SEQ ID NO: 1237647 - RNA, 22 nt, Human
ugaaaaauaauaagaugaccau

SEQ ID NO: 1237648 - RNA, 22 nt, Human
ugaaauuaagagauaaacuagg

SEQ ID NO: 1237649 - RNA, 24 nt, Human
ugaagacaccauuaucaugcuaau

SEQ ID NO: 1237650 - RNA, 24 nt, Human
ugaccuguccaccuuggccuccca

SEQ ID NO: 1237651 - RNA, 24 nt, Human
ugagaccagccugaccaacaugga

SEQ ID NO: 1237652 - RNA, 19 nt, Human
ugagagaucuccuuugugc

SEQ ID NO: 1237653 - RNA, 20 nt, Human
ugaggcaggacaaucacuug

SEQ ID NO: 1237654 - RNA, 24 nt, Human
ugaggcaggacaaucacuugcacc

SEQ ID NO: 1237655 - RNA, 18 nt, Human
ugaggucgggaguuugag

SEQ ID NO: 1237656 - RNA, 24 nt, Human
ugaugcugguagagauaaaacauu

SEQ ID NO: 1237657 - RNA, 19 nt, Human
ugcacuccagccugggcaa

SEQ ID NO: 1237658 - RNA, 18 nt, Human
ugccacugagagaucucc

SEQ ID NO: 1237659 - RNA, 24 nt, Human
ugcuaggauuacaggcgugagcca

SEQ ID NO: 1237660 - RNA, 24 nt, Human
uggaagggaaaauaaugaaaaucu

SEQ ID NO: 1237661 - RNA, 23 nt, Human
uggccaggcuggucuuggacucu

SEQ ID NO: 1237662 - RNA, 24 nt, Human
uggccaggugcgguggcucacacc

SEQ ID NO: 1237663 - RNA, 21 nt, Human
uggcucacaccuguaauccca

SEQ ID NO: 1237664 - RNA, 22 nt, Human
uggcucacaccuguaaucccag

SEQ ID NO: 1237665 - RNA, 24 nt, Human
uggcucacaccuguaaucccagca

SEQ ID NO: 1237666 - RNA, 24 nt, Human
ugggaaaaauaaaacgcuaccaaa

SEQ ID NO: 1237667 - RNA, 19 nt, Human
ugggaggccgaggcgggcg

SEQ ID NO: 1237668 - RNA, 24 nt, Human
ugggaggccgaggcgggcggauca

SEQ ID NO: 1237669 - RNA, 21 nt, Human
ugggauuacaggcgcgugcca

SEQ ID NO: 1237670 - RNA, 22 nt, Human
ugggauuacaggcgcgugccac

SEQ ID NO: 1237671 - RNA, 24 nt, Human
ugggauuacaggcgcgugccacca

SEQ ID NO: 1237672 - RNA, 25 nt, Human
ugggauuacaggcgcgugccaccau

SEQ ID NO: 1237673 - RNA, 23 nt, Human
ugguggcacauaccuguaauccc

SEQ ID NO: 1237674 - RNA, 24 nt, Human
ugguggcacauaccuguaauccca

SEQ ID NO: 1237675 - RNA, 24 nt, Human
uuaaaaaaauaucugcaaugccag

SEQ ID NO: 1237676 - RNA, 24 nt, Human
uuacuagagacgggguuucaccau

SEQ ID NO: 1237677 - RNA, 19 nt, Human
uucaagugauucucacauc

SEQ ID NO: 1237678 - RNA, 23 nt, Human
uucaagugauucucacaucucag

SEQ ID NO: 1237679 - RNA, 19 nt, Human
uucuggccaggugcggugg

SEQ ID NO: 1237680 - RNA, 24 nt, Human
uugcacccgggagguggagguugc

SEQ ID NO: 1237681 - RNA, 20 nt, Human
uugcagucagccgagauugc

SEQ ID NO: 1237682 - RNA, 22 nt, Human
uugcagucagccgagauugcgc

SEQ ID NO: 1237683 - RNA, 23 nt, Human
uugcgccauugcacuccagccug

SEQ ID NO: 1237684 - RNA, 20 nt, Human
uuggagaaacugguaacauu

SEQ ID NO: 1237685 - RNA, 18 nt, Human
uuggccucccaaagugcu

SEQ ID NO: 1237686 - RNA, 25 nt, Human
uugggaggccgaggcgggcggauca

SEQ ID NO: 1237687 - RNA, 24 nt, Human
uuucaccauguuggccaggcuggu

SEQ ID NO: 1237688 - RNA, 23 nt, Human
uuugaaaaauaauaagaugacca

SEQ ID NO: 1237689 - RNA, 22 nt, Human
uuuggguauuagaccacaguua

SEQ ID NO: 1237690 - RNA, 23 nt, Human
uuuucugaaaagucagcuguugu

SEQ ID NO: 1237691 - RNA, 24 nt, Human
uuuuuacuagagacgggguuucac

SEQ ID NO: 1237692 - RNA, 20 nt, Human
uuuuuguauuuuuacuagag

SEQ ID NO: 1237693 - RNA, 23 nt, Human
uuuuuguauuuuuacuagagacg

SEQ ID NO: 1237694 - RNA, 22 nt, Human
gcguggugguagauuccagcca

SEQ ID NO: 1237695 - RNA, 19 nt, Human
uagcguggugguagauucc

SEQ ID NO: 1237696 - RNA, 25 nt, Human
uccuggagcagagaaguagcguggu

SEQ ID NO: 1237697 - RNA, 21 nt, Human
uguuuucagcauucuuuucag

SEQ ID NO: 1237698 - RNA, 21 nt, Human
uucagcauucuuuucaggccu

SEQ ID NO: 1237699 - RNA, 24 nt, Human
uuuucagcauucuuuucaggccuu

SEQ ID NO: 1237700 - RNA, 22 nt, Human
aaccuggcaccgugcucagcca

SEQ ID NO: 1237701 - RNA, 23 nt, Human
acacacacacauacacacacaca

SEQ ID NO: 1237702 - RNA, 23 nt, Human
acacacacauacacacacacaca

SEQ ID NO: 1237703 - RNA, 23 nt, Human
acacacauacacacacacacaca

SEQ ID NO: 1237704 - RNA, 23 nt, Human
acauacacacacacacacacacg

SEQ ID NO: 1237705 - RNA, 23 nt, Human
agacaaaaguguaucuuccagaa

SEQ ID NO: 1237706 - RNA, 22 nt, Human
auagcaaagacaaaaguguauc

SEQ ID NO: 1237707 - RNA, 22 nt, Human
cacacacacacacacacgcagc

SEQ ID NO: 1237708 - RNA, 25 nt, Human
cacacacacacacacacgcagcacu

SEQ ID NO: 1237709 - RNA, 22 nt, Human
cacacacacacauacacacaca

SEQ ID NO: 1237710 - RNA, 24 nt, Human
cacacacacacauacacacacaca

SEQ ID NO: 1237711 - RNA, 28 nt, Human
cacacacacacauacacacacacacaca

SEQ ID NO: 1237712 - RNA, 25 nt, Human
cacauacacacacacacacacacgc

SEQ ID NO: 1237713 - RNA, 33 nt, Human
cacucaacugaacacacacacacauacacagug

SEQ ID NO: 1237714 - RNA, 19 nt, Human
cacugauggagaguacagc

SEQ ID NO: 1237715 - RNA, 27 nt, Human
cauacacacacacacacacacgcagca

SEQ ID NO: 1237716 - RNA, 21 nt, Human
ccaagcaauggaaucuggaac

SEQ ID NO: 1237717 - RNA, 19 nt, Human
cuauaauagcaaagacaaa

SEQ ID NO: 1237718 - RNA, 20 nt, Human
ggaaccuggcaccgugcuca

SEQ ID NO: 1237719 - RNA, 26 nt, Human
ucaucuauaauagcaaagacaaaagu

SEQ ID NO: 1237720 - RNA, 21 nt, Human
ucuuccagaagaugccucugg

SEQ ID NO: 1237721 - RNA, 26 nt, Human
ugaacacacacacacauacacacaca

SEQ ID NO: 1237722 - RNA, 25 nt, Human
ugaacacacacacacauacacacag

SEQ ID NO: 1237723 - RNA, 24 nt, Human
augagauuuaaaauaguucuuuua

SEQ ID NO: 1237724 - RNA, 22 nt, Human
ccccaaggaccccugcaaucag

SEQ ID NO: 1237725 - RNA, 21 nt, Human
ccccugcaaucagaaacaaaa

SEQ ID NO: 1237726 - RNA, 23 nt, Human
cuauccacaccagucaccagagu

SEQ ID NO: 1237727 - RNA, 20 nt, Human
gaguauaaacauaauaugcc

SEQ ID NO: 1237728 - RNA, 21 nt, Human
ggaccccugcaaucagaaaca

SEQ ID NO: 1237729 - RNA, 22 nt, Human
uauaaacauaauaugccccaag

SEQ ID NO: 1237730 - RNA, 22 nt, Human
ugaaguguuuuguuaucuaaca

SEQ ID NO: 1237731 - RNA, 26 nt, Human
ugaaguguuuuguuaucuaacauguu

SEQ ID NO: 1237732 - RNA, 24 nt, Human
ugagagaggaguauaaacauaaua

SEQ ID NO: 1237733 - RNA, 22 nt, Human
ugcaaucagaaacaaaauaguc

SEQ ID NO: 1237734 - RNA, 23 nt, Human
aaaaagugagcucauuugaauaa

SEQ ID NO: 1237735 - RNA, 24 nt, Human
aagugagcucauuugaauaaagau

SEQ ID NO: 1237736 - RNA, 19 nt, Human
agguguucugaucuccagg

SEQ ID NO: 1237737 - RNA, 22 nt, Human
ggagggaaagaaacaacuggag

SEQ ID NO: 1237738 - RNA, 19 nt, Human
gguguggagggagggaaag

SEQ ID NO: 1237739 - RNA, 19 nt, Human
uaccccacagagccaguca

SEQ ID NO: 1237740 - RNA, 20 nt, Human
uagugagaacccaagguuau

SEQ ID NO: 1237741 - RNA, 20 nt, Human
ucugaucuccagguguggag

SEQ ID NO: 1237742 - RNA, 23 nt, Human
uggagggagggaaagaaacaacu

SEQ ID NO: 1237743 - RNA, 19 nt, Human
ugguugaaaaaaagugagc

SEQ ID NO: 1237744 - RNA, 20 nt, Human
uugaaaaaaagugagcucau

SEQ ID NO: 1237745 - RNA, 21 nt, Human
aaacagaccucacugggcucu

SEQ ID NO: 1237746 - RNA, 24 nt, Human
aaagugcugggauuacagguguga

SEQ ID NO: 1237747 - RNA, 19 nt, Human
aaaugaucagcacaggaag

SEQ ID NO: 1237748 - RNA, 23 nt, Human
aagcaaaugauaaaaugcaaacc

SEQ ID NO: 1237749 - RNA, 26 nt, Human
aagcaaaugauaaaaugcaaaccaga

SEQ ID NO: 1237750 - RNA, 27 nt, Human
aagcaaaugauaaaaugcaaaccagaa

SEQ ID NO: 1237751 - RNA, 18 nt, Human
aagugcugggauuacagg

SEQ ID NO: 1237752 - RNA, 19 nt, Human
aagugcugggauuacaggu

SEQ ID NO: 1237753 - RNA, 26 nt, Human
aagugcugggauuacaggugugagcc

SEQ ID NO: 1237754 - RNA, 18 nt, Human
aauagcugggauuacagg

SEQ ID NO: 1237755 - RNA, 23 nt, Human
aaugauaaaaugcaaaccagaaa

SEQ ID NO: 1237756 - RNA, 24 nt, Human
accagguuggccaugcuggucuug

SEQ ID NO: 1237757 - RNA, 19 nt, Human
acccugcugcccugucugc

SEQ ID NO: 1237758 - RNA, 26 nt, Human
acgcacacauaguagaugcucacaca

SEQ ID NO: 1237759 - RNA, 24 nt, Human
acuauguuucccaggcuggucuug

SEQ ID NO: 1237760 - RNA, 24 nt, Human
acugccuuggccuccugaguagcu

SEQ ID NO: 1237761 - RNA, 19 nt, Human
acugcucugagauauaagc

SEQ ID NO: 1237762 - RNA, 18 nt, Human
agaaaacagaccucacug

SEQ ID NO: 1237763 - RNA, 19 nt, Human
agaaagacacagguucaga

SEQ ID NO: 1237764 - RNA, 19 nt, Human
agaugaacagcuggacuug

SEQ ID NO: 1237765 - RNA, 19 nt, Human
agcaaaugauaaaaugcaa

SEQ ID NO: 1237766 - RNA, 20 nt, Human
agccauucuccugccucagc

SEQ ID NO: 1237767 - RNA, 20 nt, Human
agcugacugcaaccucuucc

SEQ ID NO: 1237768 - RNA, 24 nt, Human
aggugauccgccugccucggccuc

SEQ ID NO: 1237769 - RNA, 21 nt, Human
aguaacacacuggaaaaaucc

SEQ ID NO: 1237770 - RNA, 23 nt, Human
agugacugugggaugaggucuug

SEQ ID NO: 1237771 - RNA, 23 nt, Human
agugcaguggcauaaucuuagcu

SEQ ID NO: 1237772 - RNA, 24 nt, Human
agugcaguggcauaaucuuagcug

SEQ ID NO: 1237773 - RNA, 22 nt, Human
aguuagccagaguuaaaacaga

SEQ ID NO: 1237774 - RNA, 24 nt, Human
aucugagaacaggaguggggaucu

SEQ ID NO: 1237775 - RNA, 19 nt, Human
aucuuucuuuucuuuuucu

SEQ ID NO: 1237776 - RNA, 18 nt, Human
augggguuucaccagguu

SEQ ID NO: 1237777 - RNA, 20 nt, Human
augggguuucaccagguugg

SEQ ID NO: 1237778 - RNA, 21 nt, Human
caaaaagaauggauuucaagu

SEQ ID NO: 1237779 - RNA, 24 nt, Human
caaagugcugggauuacaggugug

SEQ ID NO: 1237780 - RNA, 24 nt, Human
caccagguuggccaugcuggucuu

SEQ ID NO: 1237781 - RNA, 24 nt, Human
cacuauguuucccaggcuggucuu

SEQ ID NO: 1237782 - RNA, 19 nt, Human
cagaaaacagaccucacug

SEQ ID NO: 1237783 - RNA, 24 nt, Human
cagaacucauagaguuuacaacau

SEQ ID NO: 1237784 - RNA, 24 nt, Human
cagaccagcuugcucucagagcuc

SEQ ID NO: 1237785 - RNA, 19 nt, Human
cagcuugaaauaccuugug

SEQ ID NO: 1237786 - RNA, 20 nt, Human
cagcuugcucucagagcucc

SEQ ID NO: 1237787 - RNA, 24 nt, Human
caggaagcaaaugauaaaaugcaa

SEQ ID NO: 1237788 - RNA, 22 nt, Human
caggugauccgccugccucggc

SEQ ID NO: 1237789 - RNA, 21 nt, Human
cauccauggauucaaccaacc

SEQ ID NO: 1237790 - RNA, 24 nt, Human
caucuuguccuucaauugcaguca

SEQ ID NO: 1237791 - RNA, 21 nt, Human
ccaaagugcugggauuacagg

SEQ ID NO: 1237792 - RNA, 21 nt, Human
ccaaagugcugggauuacagg

SEQ ID NO: 1237793 - RNA, 24 nt, Human
ccaaagugcugggauuacaggugu

SEQ ID NO: 1237794 - RNA, 18 nt, Human
ccagaaaacagaccucac

SEQ ID NO: 1237795 - RNA, 24 nt, Human
ccaggcuggucuugaacuccuggg

SEQ ID NO: 1237796 - RNA, 22 nt, Human
ccauccucuuuuaauuccuagc

SEQ ID NO: 1237797 - RNA, 20 nt, Human
ccaugcuggucuugaacucc

SEQ ID NO: 1237798 - RNA, 23 nt, Human
cccaaaagucuaacccacccauu

SEQ ID NO: 1237799 - RNA, 24 nt, Human
ccccugaauagcugggauuacagg

SEQ ID NO: 1237800 - RNA, 24 nt, Human
cccugaauagcugggauuacaggc

SEQ ID NO: 1237801 - RNA, 23 nt, Human
ccuagcccaaaagucuaacccac

SEQ ID NO: 1237802 - RNA, 19 nt, Human
ccugaaggaagccagacca

SEQ ID NO: 1237803 - RNA, 23 nt, Human
ccugaauagcugggauuacaggc

SEQ ID NO: 1237804 - RNA, 24 nt, Human
ccugaauagcugggauuacaggca

SEQ ID NO: 1237805 - RNA, 18 nt, Human
ccugaccucaggugaucc

SEQ ID NO: 1237806 - RNA, 21 nt, Human
ccugaccucaggugauccgcc

SEQ ID NO: 1237807 - RNA, 23 nt, Human
ccugaccucaggugauccgccug

SEQ ID NO: 1237808 - RNA, 24 nt, Human
ccugggcucaaguaauacugccuu

SEQ ID NO: 1237809 - RNA, 19 nt, Human
ccugguauguaaaugagcc

SEQ ID NO: 1237810 - RNA, 20 nt, Human
ccuuggguccccugcggccc

SEQ ID NO: 1237811 - RNA, 22 nt, Human
cucauaugauccuuauaacugc

SEQ ID NO: 1237812 - RNA, 26 nt, Human
cuccugaccucaggugauccgccugc

SEQ ID NO: 1237813 - RNA, 23 nt, Human
cuccugccucagcccccugaaua

SEQ ID NO: 1237814 - RNA, 22 nt, Human
cucuugcccuguuguccaggcu

SEQ ID NO: 1237815 - RNA, 20 nt, Human
cugagaacaggaguggggau

SEQ ID NO: 1237816 - RNA, 19 nt, Human
cugagguucagaauaaagu

SEQ ID NO: 1237817 - RNA, 20 nt, Human
cugcccugucugcuggcugc

SEQ ID NO: 1237818 - RNA, 20 nt, Human
cugcccugucugcuggcugc

SEQ ID NO: 1237819 - RNA, 23 nt, Human
cugccucggccucccaaagugcu

SEQ ID NO: 1237820 - RNA, 25 nt, Human
cugcuccauccucuuuuaauuccua

SEQ ID NO: 1237821 - RNA, 22 nt, Human
cugcugcccugucugcuggcug

SEQ ID NO: 1237822 - RNA, 19 nt, Human
cuggaaaaauccaaaaaga

SEQ ID NO: 1237823 - RNA, 18 nt, Human
cuggagucuccuaaacca

SEQ ID NO: 1237824 - RNA, 19 nt, Human
cuggucuugaacuccuggg

SEQ ID NO: 1237825 - RNA, 20 nt, Human
cuguauguuuauuuccccac

SEQ ID NO: 1237826 - RNA, 23 nt, Human
cuugaaauaccuugugcccuuga

SEQ ID NO: 1237827 - RNA, 24 nt, Human
cuuggccuccugaguagcugggac

SEQ ID NO: 1237828 - RNA, 23 nt, Human
cuugggagcauccucagugcucu

SEQ ID NO: 1237829 - RNA, 24 nt, Human
cuuggguccccugcggcccccagg

SEQ ID NO: 1237830 - RNA, 23 nt, Human
cuuucuuuucuuuuucuucuuuu

SEQ ID NO: 1237831 - RNA, 18 nt, Human
cuuuuuuuuuuuuuucuu

SEQ ID NO: 1237832 - RNA, 22 nt, Human
gaagggauucaaugagacuggg

SEQ ID NO: 1237833 - RNA, 24 nt, Human
gaauagcugggauuacaggcacac

SEQ ID NO: 1237834 - RNA, 18 nt, Human
gacccucuuuuccuacag

SEQ ID NO: 1237835 - RNA, 21 nt, Human
gacccucuuuuccuacagagc

SEQ ID NO: 1237836 - RNA, 24 nt, Human
gaccucaggugauccgccugccuc

SEQ ID NO: 1237837 - RNA, 19 nt, Human
gagaacaaccagagugacc

SEQ ID NO: 1237838 - RNA, 20 nt, Human
gagacaguuuuaggucuggg

SEQ ID NO: 1237839 - RNA, 20 nt, Human
gagaugggguuucaccaggu

SEQ ID NO: 1237840 - RNA, 19 nt, Human
gagccaccgugcuccaccc

SEQ ID NO: 1237841 - RNA, 18 nt, Human
gagcuccuuggguccccu

SEQ ID NO: 1237842 - RNA, 22 nt, Human
gagucuacagaauuggaacugg

SEQ ID NO: 1237843 - RNA, 22 nt, Human
gagugcaguggcauaaucuuag

SEQ ID NO: 1237844 - RNA, 18 nt, Human
gauuacaggugugagcca

SEQ ID NO: 1237845 - RNA, 21 nt, Human
gauuacaggugugagccaccg

SEQ ID NO: 1237846 - RNA, 24 nt, Human
gauuacaggugugagccaccgugc

SEQ ID NO: 1237847 - RNA, 22 nt, Human
gcaaccucuuccugccggguuc

SEQ ID NO: 1237848 - RNA, 20 nt, Human
gccuccugaguagcugggac

SEQ ID NO: 1237849 - RNA, 19 nt, Human
gcuagaauuccaggguaag

SEQ ID NO: 1237850 - RNA, 19 nt, Human
gcuccauccucuuuuaauu

SEQ ID NO: 1237851 - RNA, 23 nt, Human
gcuggucuugaacuccugaccuc

SEQ ID NO: 1237852 - RNA, 22 nt, Human
ggccuugacggcgaacagugcc

SEQ ID NO: 1237853 - RNA, 18 nt, Human
ggcuggucuugaacuccu

SEQ ID NO: 1237854 - RNA, 18 nt, Human
gggguuucaccagguugg

SEQ ID NO: 1237855 - RNA, 18 nt, Human
gguaucugcagcuugaaa

SEQ ID NO: 1237856 - RNA, 19 nt, Human
ggucuugaacuccugaccu

SEQ ID NO: 1237857 - RNA, 19 nt, Human
gguuuaguggguuggagau

SEQ ID NO: 1237858 - RNA, 20 nt, Human
guaauacugccuuggccucc

SEQ ID NO: 1237859 - RNA, 19 nt, Human
gugugagccaccgugcucc

SEQ ID NO: 1237860 - RNA, 24 nt, Human
guuuuuguauuuuuaguagagaug

SEQ ID NO: 1237861 - RNA, 20 nt, Human
uacacuuuuauaaugccuua

SEQ ID NO: 1237862 - RNA, 27 nt, Human
uacagaauuggaacuggagucuccuaa

SEQ ID NO: 1237863 - RNA, 22 nt, Human
uacaggugugagccaccgugcu

SEQ ID NO: 1237864 - RNA, 25 nt, Human
uacaggugugagccaccgugcucca

SEQ ID NO: 1237865 - RNA, 24 nt, Human
uaccuugugcccuugauuaauuca

SEQ ID NO: 1237866 - RNA, 22 nt, Human
uagcaaauugacccugcugccc

SEQ ID NO: 1237867 - RNA, 19 nt, Human
uagcagaauuggaaaggga

SEQ ID NO: 1237868 - RNA, 25 nt, Human
uagccuuguguccuggagacaguuu

SEQ ID NO: 1237869 - RNA, 19 nt, Human
uaguagagaugggguuuca

SEQ ID NO: 1237870 - RNA, 20 nt, Human
uaguagagaugggguuucac

SEQ ID NO: 1237871 - RNA, 22 nt, Human
uaguagagaugggguuucacca

SEQ ID NO: 1237872 - RNA, 23 nt, Human
uaguagagaugggguuucaccag

SEQ ID NO: 1237873 - RNA, 24 nt, Human
uaguagagaugggguuucaccagg

SEQ ID NO: 1237874 - RNA, 26 nt, Human
uaguagagaugggguuucaccagguu

SEQ ID NO: 1237875 - RNA, 24 nt, Human
uaguuuuuguauuuuuaguagaga

SEQ ID NO: 1237876 - RNA, 19 nt, Human
uaugccacugugucuggcu

SEQ ID NO: 1237877 - RNA, 23 nt, Human
uauguuucccaggcuggucuuga

SEQ ID NO: 1237878 - RNA, 24 nt, Human
uauguuucccaggcuggucuugaa

SEQ ID NO: 1237879 - RNA, 21 nt, Human
ucaauaaaguagacaagucca

SEQ ID NO: 1237880 - RNA, 18 nt, Human
ucagaauaaaguuagcca

SEQ ID NO: 1237881 - RNA, 18 nt, Human
ucagcccccugaauagcu

SEQ ID NO: 1237882 - RNA, 24 nt, Human
ucagcccucuguauccaugguuuc

SEQ ID NO: 1237883 - RNA, 21 nt, Human
ucaggugauccgccugccucg

SEQ ID NO: 1237884 - RNA, 21 nt, Human
ucauaucuucucagucauugc

SEQ ID NO: 1237885 - RNA, 22 nt, Human
ucauaugauccuuauaacugcu

SEQ ID NO: 1237886 - RNA, 19 nt, Human
uccaaaaagaauggauuuc

SEQ ID NO: 1237887 - RNA, 23 nt, Human
ucccaaagugcugggauuacagg

SEQ ID NO: 1237888 - RNA, 23 nt, Human
uccuaaaccaguguuucuuuugc

SEQ ID NO: 1237889 - RNA, 24 nt, Human
uccucagugcucucuggaaaauag

SEQ ID NO: 1237890 - RNA, 18 nt, Human
uccugaguagcugggacc

SEQ ID NO: 1237891 - RNA, 21 nt, Human
uccugggcucaaguaauacug

SEQ ID NO: 1237892 - RNA, 18 nt, Human
ucggccucccaaagugcu

SEQ ID NO: 1237893 - RNA, 24 nt, Human
ucucacuauguuucccaggcuggu

SEQ ID NO: 1237894 - RNA, 24 nt, Human
ucuccugccucagcccccugaaua

SEQ ID NO: 1237895 - RNA, 18 nt, Human
ucuggaaaauagcuccuu

SEQ ID NO: 1237896 - RNA, 23 nt, Human
ucuugaacuccugaccucaggug

SEQ ID NO: 1237897 - RNA, 22 nt, Human
ucuugaacuccugggcucaagu

SEQ ID NO: 1237898 - RNA, 23 nt, Human
ucuugaacuccugggcucaagua

SEQ ID NO: 1237899 - RNA, 19 nt, Human
ucuugcccuguuguccagg

SEQ ID NO: 1237900 - RNA, 24 nt, Human
ucuugcccuguuguccaggcuuga

SEQ ID NO: 1237901 - RNA, 25 nt, Human
ucuugcccuguuguccaggcuugag

SEQ ID NO: 1237902 - RNA, 23 nt, Human
ucuugcgaaugaccucacugcuu

SEQ ID NO: 1237903 - RNA, 20 nt, Human
ucuuucuuuucuuuuucuuc

SEQ ID NO: 1237904 - RNA, 18 nt, Human
ucuuuuuuuuuuuuuuuu

SEQ ID NO: 1237905 - RNA, 19 nt, Human
ugaaauaccuugugcccuu

SEQ ID NO: 1237906 - RNA, 22 nt, Human
ugaaauaccuugugcccuugau

SEQ ID NO: 1237907 - RNA, 18 nt, Human
ugaccucaggugauccgc

SEQ ID NO: 1237908 - RNA, 24 nt, Human
ugaccucaggugauccgccugccu

SEQ ID NO: 1237909 - RNA, 18 nt, Human
ugacuuggcucuuuucag

SEQ ID NO: 1237910 - RNA, 23 nt, Human
ugagaacaggaguggggaucuug

SEQ ID NO: 1237911 - RNA, 22 nt, Human
ugagguggacucuugcccuguu

SEQ ID NO: 1237912 - RNA, 23 nt, Human
ugagguggacucuugcccuguug

SEQ ID NO: 1237913 - RNA, 23 nt, Human
ugaucuucagcaagaccugguau

SEQ ID NO: 1237914 - RNA, 22 nt, Human
ugcaaaccagaaaacagaccuc

SEQ ID NO: 1237915 - RNA, 21 nt, Human
ugcaucccugagcuucaucca

SEQ ID NO: 1237916 - RNA, 25 nt, Human
ugcccugucugcuggcugcuuucuu

SEQ ID NO: 1237917 - RNA, 24 nt, Human
ugccggguucgagccauucuccug

SEQ ID NO: 1237918 - RNA, 21 nt, Human
ugccucagcccccugaauagc

SEQ ID NO: 1237919 - RNA, 27 nt, Human
ugccucagcccccugaauagcugggau

SEQ ID NO: 1237920 - RNA, 21 nt, Human
ugccucggccucccaaagugc

SEQ ID NO: 1237921 - RNA, 24 nt, Human
ugccucggccucccaaagugcugg

SEQ ID NO: 1237922 - RNA, 20 nt, Human
ugccuuggccuccugaguaa

SEQ ID NO: 1237923 - RNA, 21 nt, Human
ugccuuggccuccugaguagc

SEQ ID NO: 1237924 - RNA, 24 nt, Human
ugcgaaugaccucacugcuuuuug

SEQ ID NO: 1237925 - RNA, 24 nt, Human
ugcugggauuacaggugugagcca

SEQ ID NO: 1237926 - RNA, 21 nt, Human
ugcuggucuuugucauaucuu

SEQ ID NO: 1237927 - RNA, 18 nt, Human
uggaagggauucaaugag

SEQ ID NO: 1237928 - RNA, 24 nt, Human
uggccaugcuggucuugaacuccu

SEQ ID NO: 1237929 - RNA, 20 nt, Human
uggccuccugaguagcuggg

SEQ ID NO: 1237930 - RNA, 23 nt, Human
uggcuugggcugugggguggagg

SEQ ID NO: 1237931 - RNA, 22 nt, Human
ugggaaaggccugaaggaagcc

SEQ ID NO: 1237932 - RNA, 24 nt, Human
ugggaaaggccugaaggaagccag

SEQ ID NO: 1237933 - RNA, 24 nt, Human
ugggaauguggcuugggcuguggg

SEQ ID NO: 1237934 - RNA, 21 nt, Human
ugggaccauagacauaugcca

SEQ ID NO: 1237935 - RNA, 24 nt, Human
ugggaccauagacauaugccacug

SEQ ID NO: 1237936 - RNA, 21 nt, Human
ugggauuacaggcacacacca

SEQ ID NO: 1237937 - RNA, 22 nt, Human
ugggauuacaggcacacaccac

SEQ ID NO: 1237938 - RNA, 24 nt, Human
ugggauuacaggcacacaccacca

SEQ ID NO: 1237939 - RNA, 18 nt, Human
ugggauuacaggugugag

SEQ ID NO: 1237940 - RNA, 21 nt, Human
ugggauuacaggugugagcca

SEQ ID NO: 1237941 - RNA, 22 nt, Human
ugggauuacaggugugagccac

SEQ ID NO: 1237942 - RNA, 23 nt, Human
ugggauuacaggugugagccacc

SEQ ID NO: 1237943 - RNA, 23 nt, Human
ugggauuacaggugugagccacc

SEQ ID NO: 1237944 - RNA, 24 nt, Human
ugggauuacaggugugagccaccg

SEQ ID NO: 1237945 - RNA, 22 nt, Human
ugggguggagguagaugaacag

SEQ ID NO: 1237946 - RNA, 19 nt, Human
ugggguuucaccagguugg

SEQ ID NO: 1237947 - RNA, 18 nt, Human
ugguauguaaaugagccu

SEQ ID NO: 1237948 - RNA, 21 nt, Human
uguauuuuuaguagagauggg

SEQ ID NO: 1237949 - RNA, 19 nt, Human
ugucagggaucacaagcuc

SEQ ID NO: 1237950 - RNA, 20 nt, Human
uguuggaagggauucaauga

SEQ ID NO: 1237951 - RNA, 28 nt, Human
uuaaccucucugaaccucagucuuccua

SEQ ID NO: 1237952 - RNA, 23 nt, Human
uuaauuccuagcccaaaagucua

SEQ ID NO: 1237953 - RNA, 22 nt, Human
uuacaacaucuuguccuucaau

SEQ ID NO: 1237954 - RNA, 18 nt, Human
uuaguagagaugggguuu

SEQ ID NO: 1237955 - RNA, 22 nt, Human
uuaguagagaugggguuucacc

SEQ ID NO: 1237956 - RNA, 23 nt, Human
uuaguagagaugggguuucacca

SEQ ID NO: 1237957 - RNA, 24 nt, Human
uucccaggcuggucuugaacuccu

SEQ ID NO: 1237958 - RNA, 21 nt, Human
uucgagccauucuccugccuc

SEQ ID NO: 1237959 - RNA, 23 nt, Human
uugcucucagagcuccuuggguc

SEQ ID NO: 1237960 - RNA, 18 nt, Human
uugcugggguucaaaucu

SEQ ID NO: 1237961 - RNA, 23 nt, Human
uuguauuuuuaguagagaugggg

SEQ ID NO: 1237962 - RNA, 24 nt, Human
uuguccaggcuugagugcaguggc

SEQ ID NO: 1237963 - RNA, 20 nt, Human
uuuaaucuccaauuuucagg

SEQ ID NO: 1237964 - RNA, 20 nt, Human
uuuaaucuccaauuuucagg

SEQ ID NO: 1237965 - RNA, 24 nt, Human
uuuuuaguagagaugggguuucac

SEQ ID NO: 1237966 - RNA, 20 nt, Human
uuuuuguauuuuuaguagag

SEQ ID NO: 1237967 - RNA, 21 nt, Human
uuuuuguauuuuuaguagaga

SEQ ID NO: 1237968 - RNA, 24 nt, Human
uuuuuuuuuucuugagguggacuc

SEQ ID NO: 1237969 - RNA, 23 nt, Human
uuuuuuuuuuuucuuuucuuuuu

SEQ ID NO: 1237970 - RNA, 20 nt, Human
uuuuuuuuuuuuuaaagaug

SEQ ID NO: 1237971 - RNA, 18 nt, Human
uuuuuuuuuuuuuucuug

SEQ ID NO: 1237972 - RNA, 21 nt, Human
uuuuuuuuuuuuuucuugagg

SEQ ID NO: 1237973 - RNA, 19 nt, Human
uuuuuuuuuuuuuuuuuaa

SEQ ID NO: 1237974 - RNA, 21 nt, Human
aaacaggaaccccacaaaggc

SEQ ID NO: 1237975 - RNA, 22 nt, Human
aaagaggcaggcccaggaaugg

SEQ ID NO: 1237976 - RNA, 18 nt, Human
aaagccauccucccgccu

SEQ ID NO: 1237977 - RNA, 24 nt, Human
aaagugcugggauuacagguguga

SEQ ID NO: 1237978 - RNA, 21 nt, Human
aaauggcccacagggaaaggc

SEQ ID NO: 1237979 - RNA, 23 nt, Human
aagaacacagaggaagcagugac

SEQ ID NO: 1237980 - RNA, 20 nt, Human
aaguagcugggacuacaggu

SEQ ID NO: 1237981 - RNA, 24 nt, Human
aaguagcugggacuacaggugugu

SEQ ID NO: 1237982 - RNA, 25 nt, Human
aaguagcugggacuacaggugugua

SEQ ID NO: 1237983 - RNA, 18 nt, Human
aagugcugggauuacagg

SEQ ID NO: 1237984 - RNA, 19 nt, Human
aagugcugggauuacaggu

SEQ ID NO: 1237985 - RNA, 26 nt, Human
aagugcugggauuacaggugugagcc

SEQ ID NO: 1237986 - RNA, 18 nt, Human
aaucagggaucugacuua

SEQ ID NO: 1237987 - RNA, 18 nt, Human
acaagaaaaaggaugcgg

SEQ ID NO: 1237988 - RNA, 19 nt, Human
acacagaggaagcagugac

SEQ ID NO: 1237989 - RNA, 18 nt, Human
acagcccacccagaggcc

SEQ ID NO: 1237990 - RNA, 22 nt, Human
acagugaccucugucaacccug

SEQ ID NO: 1237991 - RNA, 24 nt, Human
acaguggggcugugagcacccugc

SEQ ID NO: 1237992 - RNA, 19 nt, Human
acccaggcuggagugcagu

SEQ ID NO: 1237993 - RNA, 23 nt, Human
acccaggcuggagugcaguggug

SEQ ID NO: 1237994 - RNA, 21 nt, Human
acccugcagccacugcugggc

SEQ ID NO: 1237995 - RNA, 18 nt, Human
acccugucacccaggcug

SEQ ID NO: 1237996 - RNA, 25 nt, Human
acccugucacccaggcuggagugca

SEQ ID NO: 1237997 - RNA, 21 nt, Human
accuagaagaacacagaggaa

SEQ ID NO: 1237998 - RNA, 20 nt, Human
accucaaggaaucacucuuu

SEQ ID NO: 1237999 - RNA, 19 nt, Human
acuacagguguguaccacc

SEQ ID NO: 1238000 - RNA, 24 nt, Human
acuauguugcccaggcuggucuug

SEQ ID NO: 1238001 - RNA, 25 nt, Human
acuauguugcccaggcuggucuuga

SEQ ID NO: 1238002 - RNA, 24 nt, Human
acugcugggcaaaaccugcccagu

SEQ ID NO: 1238003 - RNA, 25 nt, Human
agaggcaggcccaggaauggaauuu

SEQ ID NO: 1238004 - RNA, 21 nt, Human
agcagugacggucccuccaua

SEQ ID NO: 1238005 - RNA, 22 nt, Human
agccacugaguaggguaccacc

SEQ ID NO: 1238006 - RNA, 18 nt, Human
agccauccucccgccuca

SEQ ID NO: 1238007 - RNA, 21 nt, Human
agccucaaccuccugggcuaa

SEQ ID NO: 1238008 - RNA, 23 nt, Human
agccucaaccuccugggcuaaag

SEQ ID NO: 1238009 - RNA, 19 nt, Human
agcuggauucacugcccag

SEQ ID NO: 1238010 - RNA, 19 nt, Human
agggacacuggggacuuau

SEQ ID NO: 1238011 - RNA, 18 nt, Human
agggggcuucccugguca

SEQ ID NO: 1238012 - RNA, 22 nt, Human
aggucucacuauguugcccagg

SEQ ID NO: 1238013 - RNA, 20 nt, Human
agugauuacagaccaccuca

SEQ ID NO: 1238014 - RNA, 24 nt, Human
aguuuuucaaccagcaggcaacuu

SEQ ID NO: 1238015 - RNA, 22 nt, Human
aucccagagccaagucagcccc

SEQ ID NO: 1238016 - RNA, 21 nt, Human
auccucccgccucagccuccc

SEQ ID NO: 1238017 - RNA, 21 nt, Human
aucuccccuacugucuaaacc

SEQ ID NO: 1238018 - RNA, 24 nt, Human
caaagugcugggauuacaggugug

SEQ ID NO: 1238019 - RNA, 21 nt, Human
caacaggaaaaaugcucuacc

SEQ ID NO: 1238020 - RNA, 24 nt, Human
caaggucucacuauguugcccagg

SEQ ID NO: 1238021 - RNA, 20 nt, Human
cacagcccacccagaggccc

SEQ ID NO: 1238022 - RNA, 19 nt, Human
cacaggagccucaaccucc

SEQ ID NO: 1238023 - RNA, 24 nt, Human
cacccaggcuggagugcaguggug

SEQ ID NO: 1238024 - RNA, 22 nt, Human
cacccugcagccacugcugggc

SEQ ID NO: 1238025 - RNA, 22 nt, Human
cacccugucacccaggcuggag

SEQ ID NO: 1238026 - RNA, 23 nt, Human
cacccugucacccaggcuggagu

SEQ ID NO: 1238027 - RNA, 25 nt, Human
cacccugucacccaggcuggagugc

SEQ ID NO: 1238028 - RNA, 19 nt, Human
caccuccacgagugauuac

SEQ ID NO: 1238029 - RNA, 22 nt, Human
cacgcagacugacacgcugggc

SEQ ID NO: 1238030 - RNA, 24 nt, Human
cacggacacagcccacccagaggc

SEQ ID NO: 1238031 - RNA, 19 nt, Human
cacuauguugcccaggcug

SEQ ID NO: 1238032 - RNA, 24 nt, Human
cacuauguugcccaggcuggucuu

SEQ ID NO: 1238033 - RNA, 27 nt, Human
cacuauguugcccaggcuggucuugaa

SEQ ID NO: 1238034 - RNA, 20 nt, Human
cagaccaccucaaggaauca

SEQ ID NO: 1238035 - RNA, 19 nt, Human
cagaccuggcaccugcaug

SEQ ID NO: 1238036 - RNA, 18 nt, Human
caggagccugggagcaag

SEQ ID NO: 1238037 - RNA, 19 nt, Human
caggagccugggagcaagg

SEQ ID NO: 1238038 - RNA, 22 nt, Human
caggagccugggagcaagggcu

SEQ ID NO: 1238039 - RNA, 18 nt, Human
caggcaggagccugggag

SEQ ID NO: 1238040 - RNA, 18 nt, Human
cagggggcuucccugguc

SEQ ID NO: 1238041 - RNA, 24 nt, Human
cagugaccucugucaacccugguu

SEQ ID NO: 1238042 - RNA, 20 nt, Human
cauggcguggucucccugca

SEQ ID NO: 1238043 - RNA, 21 nt, Human
ccaaagugcugggauuacagg

SEQ ID NO: 1238044 - RNA, 21 nt, Human
ccaaagugcugggauuacagg

SEQ ID NO: 1238045 - RNA, 24 nt, Human
ccaaagugcugggauuacaggugu

SEQ ID NO: 1238046 - RNA, 20 nt, Human
ccaaauggcccacagggaaa

SEQ ID NO: 1238047 - RNA, 22 nt, Human
ccacagggaaaggcuggggaaa

SEQ ID NO: 1238048 - RNA, 23 nt, Human
cccaaguagcugggacuacaggu

SEQ ID NO: 1238049 - RNA, 24 nt, Human
cccaaguagcugggacuacaggug

SEQ ID NO: 1238050 - RNA, 26 nt, Human
ccccgcaugggccccacauguaccua

SEQ ID NO: 1238051 - RNA, 23 nt, Human
cccgccucagccucccaaguagc

SEQ ID NO: 1238052 - RNA, 21 nt, Human
cccucuuggcuuaucaggggg

SEQ ID NO: 1238053 - RNA, 19 nt, Human
ccucaaggaaucacucuuu

SEQ ID NO: 1238054 - RNA, 20 nt, Human
ccugagcucaagugaccuuc

SEQ ID NO: 1238055 - RNA, 23 nt, Human
ccugcacaucauggcagauuguu

SEQ ID NO: 1238056 - RNA, 19 nt, Human
ccugcuacaguggggcugu

SEQ ID NO: 1238057 - RNA, 18 nt, Human
ccugggagcaagggcugu

SEQ ID NO: 1238058 - RNA, 19 nt, Human
ccuguagggugggccucug

SEQ ID NO: 1238059 - RNA, 20 nt, Human
ccuguagggugggccucugc

SEQ ID NO: 1238060 - RNA, 24 nt, Human
ccugucacccaggcuggagugcag

SEQ ID NO: 1238061 - RNA, 24 nt, Human
cgccucagccucccaaguagcugg

SEQ ID NO: 1238062 - RNA, 18 nt, Human
cucaagugaccuucccaa

SEQ ID NO: 1238063 - RNA, 23 nt, Human
cucaagugaccuucccaaagugc

SEQ ID NO: 1238064 - RNA, 24 nt, Human
cucacccugucacccaggcuggag

SEQ ID NO: 1238065 - RNA, 21 nt, Human
cucagagugacaacaggaaaa

SEQ ID NO: 1238066 - RNA, 24 nt, Human
cucagccucccaaguagcugggac

SEQ ID NO: 1238067 - RNA, 19 nt, Human
cucaugugucccaggacac

SEQ ID NO: 1238068 - RNA, 18 nt, Human
cucgugccccgcaugggc

SEQ ID NO: 1238069 - RNA, 23 nt, Human
cucuaccuacagaccuggcaccu

SEQ ID NO: 1238070 - RNA, 21 nt, Human
cucugucaacccugguuuacc

SEQ ID NO: 1238071 - RNA, 25 nt, Human
cugaaaaucuccccuacugucuaag

SEQ ID NO: 1238072 - RNA, 19 nt, Human
cugcucagagugacaacag

SEQ ID NO: 1238073 - RNA, 20 nt, Human
cuugcagcucaagaaggagg

SEQ ID NO: 1238074 - RNA, 20 nt, Human
gaacagaugcauguuagcau

SEQ ID NO: 1238075 - RNA, 24 nt, Human
gacuacagguguguaccaccaugc

SEQ ID NO: 1238076 - RNA, 19 nt, Human
gagccagcccacacucgug

SEQ ID NO: 1238077 - RNA, 20 nt, Human
gagcccugcaccuggcccug

SEQ ID NO: 1238078 - RNA, 23 nt, Human
gaguaggguaccaccuggguccu

SEQ ID NO: 1238079 - RNA, 21 nt, Human
gauuacaggugugagcccugc

SEQ ID NO: 1238080 - RNA, 22 nt, Human
gauuacaggugugagcccugca

SEQ ID NO: 1238081 - RNA, 19 nt, Human
gcucaagugaccuucccaa

SEQ ID NO: 1238082 - RNA, 23 nt, Human
gcugaaaaucuccccuacugucu

SEQ ID NO: 1238083 - RNA, 21 nt, Human
gcuggagugcaguggugccag

SEQ ID NO: 1238084 - RNA, 20 nt, Human
ggaaaaaugcucuaccuaca

SEQ ID NO: 1238085 - RNA, 22 nt, Human
ggaaaaaugcucuaccuacaga

SEQ ID NO: 1238086 - RNA, 18 nt, Human
ggaaaggcuggggaaaag

SEQ ID NO: 1238087 - RNA, 26 nt, Human
ggacacagcccacccagaggcccagc

SEQ ID NO: 1238088 - RNA, 24 nt, Human
ggacuacagguguguaccaccaug

SEQ ID NO: 1238089 - RNA, 23 nt, Human
ggagccugggagcaagggcugug

SEQ ID NO: 1238090 - RNA, 22 nt, Human
ggauaaacaggaaccccacaaa

SEQ ID NO: 1238091 - RNA, 25 nt, Human
ggauaaguacacacacccugccccu

SEQ ID NO: 1238092 - RNA, 21 nt, Human
ggauuacaggugugagcccug

SEQ ID NO: 1238093 - RNA, 19 nt, Human
ggcaaaaccugcccagugg

SEQ ID NO: 1238094 - RNA, 19 nt, Human
ggcaacuuuccccucucaa

SEQ ID NO: 1238095 - RNA, 23 nt, Human
ggcccucuuggcuuaucaggggg

SEQ ID NO: 1238096 - RNA, 24 nt, Human
ggcuggucuugaacuccugagcuc

SEQ ID NO: 1238097 - RNA, 19 nt, Human
gggauaaacaggaacccca

SEQ ID NO: 1238098 - RNA, 24 nt, Human
gggauaaacaggaaccccacaaag

SEQ ID NO: 1238099 - RNA, 22 nt, Human
gggauaaguacacacacccugc

SEQ ID NO: 1238100 - RNA, 24 nt, Human
ggggacgacagagggucacuugug

SEQ ID NO: 1238101 - RNA, 18 nt, Human
ggucuggcaggcacccag

SEQ ID NO: 1238102 - RNA, 20 nt, Human
ggucuggcaggcacccagcc

SEQ ID NO: 1238103 - RNA, 18 nt, Human
gugugacuuacugccuca

SEQ ID NO: 1238104 - RNA, 21 nt, Human
guguguaccaccaugcccagc

SEQ ID NO: 1238105 - RNA, 23 nt, Human
uaaacaggaaccccacaaaggca

SEQ ID NO: 1238106 - RNA, 26 nt, Human
uaaccauccuccccuucugucccucc

SEQ ID NO: 1238107 - RNA, 23 nt, Human
uaaguacacacacccugccccug

SEQ ID NO: 1238108 - RNA, 20 nt, Human
uacagccuaaagugacacgg

SEQ ID NO: 1238109 - RNA, 22 nt, Human
uacaggugugagcccugcaccu

SEQ ID NO: 1238110 - RNA, 18 nt, Human
uaccuacagaccuggcac

SEQ ID NO: 1238111 - RNA, 21 nt, Human
uaccugccucacucugagagu

SEQ ID NO: 1238112 - RNA, 18 nt, Human
uacugugugacuuacugc

SEQ ID NO: 1238113 - RNA, 20 nt, Human
uagaagaacacagaggaagc

SEQ ID NO: 1238114 - RNA, 21 nt, Human
uagaagaacacagaggaagca

SEQ ID NO: 1238115 - RNA, 20 nt, Human
uagacauccacagugaccuc

SEQ ID NO: 1238116 - RNA, 20 nt, Human
uagacauccacagugaccuc

SEQ ID NO: 1238117 - RNA, 25 nt, Human
uaggcagcgagaaaggaaaagccag

SEQ ID NO: 1238118 - RNA, 24 nt, Human
uagggugggccucugcuuccagaa

SEQ ID NO: 1238119 - RNA, 19 nt, Human
uauguugcccaggcugguc

SEQ ID NO: 1238120 - RNA, 24 nt, Human
uauguugcccaggcuggucuugaa

SEQ ID NO: 1238121 - RNA, 24 nt, Human
ucacccaggcuggagugcaguggu

SEQ ID NO: 1238122 - RNA, 24 nt, Human
ucacccugucacccaggcuggagu

SEQ ID NO: 1238123 - RNA, 20 nt, Human
ucagccucccaaguagcugg

SEQ ID NO: 1238124 - RNA, 23 nt, Human
uccacagugaccucugucaaccc

SEQ ID NO: 1238125 - RNA, 18 nt, Human
uccagagacaaggucuca

SEQ ID NO: 1238126 - RNA, 23 nt, Human
ucccaaagugcugggauuacagg

SEQ ID NO: 1238127 - RNA, 23 nt, Human
ucccaaguagcugggacuacagg

SEQ ID NO: 1238128 - RNA, 22 nt, Human
ucccuccaggaggcagggagga

SEQ ID NO: 1238129 - RNA, 19 nt, Human
ucccuccauagacauccac

SEQ ID NO: 1238130 - RNA, 21 nt, Human
ucccuccauagacauccacag

SEQ ID NO: 1238131 - RNA, 22 nt, Human
ucccuggucauccuccagcagc

SEQ ID NO: 1238132 - RNA, 27 nt, Human
uccucccgccucagccucccaaguagc

SEQ ID NO: 1238133 - RNA, 21 nt, Human
ucgcgaacccuccgugggucu

SEQ ID NO: 1238134 - RNA, 24 nt, Human
ucucacccugucacccaggcugga

SEQ ID NO: 1238135 - RNA, 26 nt, Human
ucucacccugucacccaggcuggagu

SEQ ID NO: 1238136 - RNA, 27 nt, Human
ucucacccugucacccaggcuggagug

SEQ ID NO: 1238137 - RNA, 19 nt, Human
ucucacuauguugcccagg

SEQ ID NO: 1238138 - RNA, 23 nt, Human
ucucacuauguugcccaggcugg

SEQ ID NO: 1238139 - RNA, 24 nt, Human
ucucacuauguugcccaggcuggu

SEQ ID NO: 1238140 - RNA, 26 nt, Human
ucucacuauguugcccaggcuggucu

SEQ ID NO: 1238141 - RNA, 27 nt, Human
ucucacuauguugcccaggcuggucuu

SEQ ID NO: 1238142 - RNA, 23 nt, Human
ucuugaacuccugagcucaagug

SEQ ID NO: 1238143 - RNA, 21 nt, Human
ugaacacaagaaaaaggaugc

SEQ ID NO: 1238144 - RNA, 24 nt, Human
ugaacuccugagcucaagugaccu

SEQ ID NO: 1238145 - RNA, 18 nt, Human
ugagccagcccacacucg

SEQ ID NO: 1238146 - RNA, 18 nt, Human
ugaguaggguaccaccug

SEQ ID NO: 1238147 - RNA, 19 nt, Human
ugcaaagaggcaggcccag

SEQ ID NO: 1238148 - RNA, 21 nt, Human
ugcagccacugcugggcaaaa

SEQ ID NO: 1238149 - RNA, 22 nt, Human
ugcauggcguggucucccugca

SEQ ID NO: 1238150 - RNA, 20 nt, Human
ugccagcccaggcugaacua

SEQ ID NO: 1238151 - RNA, 24 nt, Human
ugcccaggcuggucuugaacuccu

SEQ ID NO: 1238152 - RNA, 28 nt, Human
ugcccaggcuggucuugaacuccugagc

SEQ ID NO: 1238153 - RNA, 19 nt, Human
ugccccugcuacagugggg

SEQ ID NO: 1238154 - RNA, 19 nt, Human
ugccucagcuaaagcuugc

SEQ ID NO: 1238155 - RNA, 23 nt, Human
ugcuacaguggggcugugagcac

SEQ ID NO: 1238156 - RNA, 20 nt, Human
ugcugggauuacagguguga

SEQ ID NO: 1238157 - RNA, 21 nt, Human
uggagugcaguggugccauca

SEQ ID NO: 1238158 - RNA, 22 nt, Human
uggagugcaguggugccaucag

SEQ ID NO: 1238159 - RNA, 23 nt, Human
uggagugcaguggugccaucagg

SEQ ID NO: 1238160 - RNA, 28 nt, Human
uggagugcaguggugccauccuagcacg

SEQ ID NO: 1238161 - RNA, 19 nt, Human
uggauucacugcccaguac

SEQ ID NO: 1238162 - RNA, 21 nt, Human
uggcagauuguucugaaagcu

SEQ ID NO: 1238163 - RNA, 20 nt, Human
uggcaggcacccagccucug

SEQ ID NO: 1238164 - RNA, 21 nt, Human
uggcccacagggaaaggcugg

SEQ ID NO: 1238165 - RNA, 21 nt, Human
ugggacuacagguguguacca

SEQ ID NO: 1238166 - RNA, 24 nt, Human
ugggacuacagguguguaccacca

SEQ ID NO: 1238167 - RNA, 25 nt, Human
ugggacuacagguguguaccaccau

SEQ ID NO: 1238168 - RNA, 18 nt, Human
ugggagcaagggcugugc

SEQ ID NO: 1238169 - RNA, 18 nt, Human
ugggauuacaggugugag

SEQ ID NO: 1238170 - RNA, 19 nt, Human
ugggauuacaggugugagc

SEQ ID NO: 1238171 - RNA, 20 nt, Human
ugggauuacaggugugagcc

SEQ ID NO: 1238172 - RNA, 20 nt, Human
ugggauuacaggugugagcc

SEQ ID NO: 1238173 - RNA, 21 nt, Human
ugggauuacaggugugagccc

SEQ ID NO: 1238174 - RNA, 23 nt, Human
ugggauuacaggugugagcccug

SEQ ID NO: 1238175 - RNA, 23 nt, Human
ugggauuacaggugugagcccug

SEQ ID NO: 1238176 - RNA, 20 nt, Human
ugguuuaccuguaggguggg

SEQ ID NO: 1238177 - RNA, 19 nt, Human
uguagggcagggauaagua

SEQ ID NO: 1238178 - RNA, 21 nt, Human
ugucacccaggcuggagugca

SEQ ID NO: 1238179 - RNA, 18 nt, Human
ugucccaggacacuacgg

SEQ ID NO: 1238180 - RNA, 18 nt, Human
ugugacuuacugccucag

SEQ ID NO: 1238181 - RNA, 22 nt, Human
uuaugugccagcccaggcugaa

SEQ ID NO: 1238182 - RNA, 24 nt, Human
uucacaggagccucaaccuccugg

SEQ ID NO: 1238183 - RNA, 23 nt, Human
uucacugcccaguacuugucuug

SEQ ID NO: 1238184 - RNA, 20 nt, Human
uucagggauaaacaggaacc

SEQ ID NO: 1238185 - RNA, 18 nt, Human
acagugcccuucuugcca

SEQ ID NO: 1238186 - RNA, 20 nt, Human
acugguaacagugguuuccu

SEQ ID NO: 1238187 - RNA, 21 nt, Human
ggaaagggcaggagaugaggu

SEQ ID NO: 1238188 - RNA, 21 nt, Human
guacuguauucccccauuugu

SEQ ID NO: 1238189 - RNA, 20 nt, Human
uacuguauucccccauuugu

SEQ ID NO: 1238190 - RNA, 24 nt, Human
uccagauaugugaaguguguacug

SEQ ID NO: 1238191 - RNA, 23 nt, Human
uccaucaucaccaggggagggaa

SEQ ID NO: 1238192 - RNA, 21 nt, Human
aaaaaaaaaaaaaaaggcaca

SEQ ID NO: 1238193 - RNA, 19 nt, Human
aaaaaaauccaaaaccucu

SEQ ID NO: 1238194 - RNA, 19 nt, Human
aaaaacaaaccacaagaga

SEQ ID NO: 1238195 - RNA, 18 nt, Human
aaacaaacaaggcaacau

SEQ ID NO: 1238196 - RNA, 20 nt, Human
aaagaccaaugaguagacac

SEQ ID NO: 1238197 - RNA, 21 nt, Human
aaccacaagagaaaaaaaucc

SEQ ID NO: 1238198 - RNA, 25 nt, Human
aacugaacucuugacaucauuucca

SEQ ID NO: 1238199 - RNA, 20 nt, Human
aacuguggcccccuagccuc

SEQ ID NO: 1238200 - RNA, 21 nt, Human
aagaagccagaaggaaaaaac

SEQ ID NO: 1238201 - RNA, 23 nt, Human
aagaagccagaaggaaaaaacaa

SEQ ID NO: 1238202 - RNA, 25 nt, Human
aagaagccagaaggaaaaaacaaac

SEQ ID NO: 1238203 - RNA, 23 nt, Human
aaugaagagacuguaauagaaga

SEQ ID NO: 1238204 - RNA, 24 nt, Human
aaugaagagacuguaauagaagaa

SEQ ID NO: 1238205 - RNA, 24 nt, Human
aauuuuuaaaacuucaccauucaa

SEQ ID NO: 1238206 - RNA, 19 nt, Human
acaagagugaaacuccauc

SEQ ID NO: 1238207 - RNA, 20 nt, Human
acaagagugaaacuccaucu

SEQ ID NO: 1238208 - RNA, 21 nt, Human
acaagagugaaacuccaucuc

SEQ ID NO: 1238209 - RNA, 24 nt, Human
accacagccacaucacagcuccug

SEQ ID NO: 1238210 - RNA, 24 nt, Human
accucgucucuacuaaaaauacaa

SEQ ID NO: 1238211 - RNA, 24 nt, Human
accugggaggcaguggcugcagug

SEQ ID NO: 1238212 - RNA, 25 nt, Human
acuccagccugggcaacaagaguga

SEQ ID NO: 1238213 - RNA, 22 nt, Human
acugaauggauuauuauucuuc

SEQ ID NO: 1238214 - RNA, 21 nt, Human
acuggagaacaaaagcgaaua

SEQ ID NO: 1238215 - RNA, 20 nt, Human
acuuaaaaaacaaaccacaa

SEQ ID NO: 1238216 - RNA, 24 nt, Human
agaacaaagaccaaugaguagaca

SEQ ID NO: 1238217 - RNA, 22 nt, Human
agaaucacuugaaccugggagg

SEQ ID NO: 1238218 - RNA, 21 nt, Human
agagaaaaaaauccaaaaccu

SEQ ID NO: 1238219 - RNA, 19 nt, Human
agaggaaacugaacucuug

SEQ ID NO: 1238220 - RNA, 20 nt, Human
agaugccaguggccugccua

SEQ ID NO: 1238221 - RNA, 22 nt, Human
agcaccuauuuuacuaccuggc

SEQ ID NO: 1238222 - RNA, 24 nt, Human
agcaguuugggaggcugagguggg

SEQ ID NO: 1238223 - RNA, 20 nt, Human
agccacaucacagcuccugg

SEQ ID NO: 1238224 - RNA, 21 nt, Human
agcgcaugccuguaaucccag

SEQ ID NO: 1238225 - RNA, 23 nt, Human
agcuggguguguuagcgcaugcc

SEQ ID NO: 1238226 - RNA, 22 nt, Human
aggcaggagaaucacuugaacc

SEQ ID NO: 1238227 - RNA, 24 nt, Human
aggcaggagaaucacuugaaccug

SEQ ID NO: 1238228 - RNA, 20 nt, Human
aggcaguggcugcagugagc

SEQ ID NO: 1238229 - RNA, 21 nt, Human
aggcaguggcugcagugagcu

SEQ ID NO: 1238230 - RNA, 24 nt, Human
aggcaguggcugcagugagcugag

SEQ ID NO: 1238231 - RNA, 24 nt, Human
aggcugaggcaggagaaucacuug

SEQ ID NO: 1238232 - RNA, 22 nt, Human
auaaaacacauccaguacuuga

SEQ ID NO: 1238233 - RNA, 24 nt, Human
aucgcgccauugcacuccagccug

SEQ ID NO: 1238234 - RNA, 22 nt, Human
augaagcagcaacuguggcccc

SEQ ID NO: 1238235 - RNA, 24 nt, Human
auugcacuccagccugggcaacaa

SEQ ID NO: 1238236 - RNA, 20 nt, Human
caaaacagaggaaacugaac

SEQ ID NO: 1238237 - RNA, 18 nt, Human
caaagaaugauccuugga

SEQ ID NO: 1238238 - RNA, 21 nt, Human
caaagaccaaugaguagacac

SEQ ID NO: 1238239 - RNA, 23 nt, Human
caaauggaugaguaauuuuuuuu

SEQ ID NO: 1238240 - RNA, 22 nt, Human
caagagaaaaaaauccaaaacc

SEQ ID NO: 1238241 - RNA, 21 nt, Human
caaugaagagacuguaauaga

SEQ ID NO: 1238242 - RNA, 24 nt, Human
cacaagagaaaaaaauccaaaacc

SEQ ID NO: 1238243 - RNA, 24 nt, Human
cacaccuguaaucccagcaguuug

SEQ ID NO: 1238244 - RNA, 22 nt, Human
caccucaaaaauccaccuccgg

SEQ ID NO: 1238245 - RNA, 23 nt, Human
caccuguaaucccagcaguuugg

SEQ ID NO: 1238246 - RNA, 24 nt, Human
caccuguaaucccagcaguuuggg

SEQ ID NO: 1238247 - RNA, 23 nt, Human
cacuauggcauccugacaugggg

SEQ ID NO: 1238248 - RNA, 23 nt, Human
cacuccagccugggcaacaagag

SEQ ID NO: 1238249 - RNA, 24 nt, Human
cacuccagccugggcaacaagagu

SEQ ID NO: 1238250 - RNA, 25 nt, Human
cacuccagccugggcaacaagagug

SEQ ID NO: 1238251 - RNA, 21 nt, Human
cagagauaauucugaccucac

SEQ ID NO: 1238252 - RNA, 21 nt, Human
cagagcccuggccagagcugu

SEQ ID NO: 1238253 - RNA, 23 nt, Human
cagagcccuggccagagcugucc

SEQ ID NO: 1238254 - RNA, 18 nt, Human
cagcaggucucucuuuuu

SEQ ID NO: 1238255 - RNA, 24 nt, Human
cagcaguuugggaggcugaggugg

SEQ ID NO: 1238256 - RNA, 24 nt, Human
cagcuacucgggaggcugaggcag

SEQ ID NO: 1238257 - RNA, 20 nt, Human
caggcacagaccucaucuca

SEQ ID NO: 1238258 - RNA, 24 nt, Human
caguggccugccuagaaagccacu

SEQ ID NO: 1238259 - RNA, 20 nt, Human
caugucacuggcuaguuugu

SEQ ID NO: 1238260 - RNA, 19 nt, Human
cauugcacuccagccuggg

SEQ ID NO: 1238261 - RNA, 21 nt, Human
cauugcacuccagccugggca

SEQ ID NO: 1238262 - RNA, 22 nt, Human
cauugcacuccagccugggcaa

SEQ ID NO: 1238263 - RNA, 24 nt, Human
cauugcacuccagccugggcaaca

SEQ ID NO: 1238264 - RNA, 18 nt, Human
ccacagauuugaugucca

SEQ ID NO: 1238265 - RNA, 18 nt, Human
ccacuggguaauacugug

SEQ ID NO: 1238266 - RNA, 23 nt, Human
ccacuuaaaaaacaaaccacaag

SEQ ID NO: 1238267 - RNA, 23 nt, Human
ccagagcugucccacaugucacu

SEQ ID NO: 1238268 - RNA, 24 nt, Human
ccaucucaaaaaaaaaaaaaaaaa

SEQ ID NO: 1238269 - RNA, 20 nt, Human
ccauugcacuccagccuggg

SEQ ID NO: 1238270 - RNA, 21 nt, Human
ccauugcacuccagccugggc

SEQ ID NO: 1238271 - RNA, 23 nt, Human
ccauugcacuccagccugggcaa

SEQ ID NO: 1238272 - RNA, 24 nt, Human
ccauugcacuccagccugggcaac

SEQ ID NO: 1238273 - RNA, 22 nt, Human
ccuagaccacagccacaucaca

SEQ ID NO: 1238274 - RNA, 19 nt, Human
ccugacauggggccugucu

SEQ ID NO: 1238275 - RNA, 19 nt, Human
ccuguaaucccagcuacuc

SEQ ID NO: 1238276 - RNA, 21 nt, Human
ccuguaaucccagcuacucgg

SEQ ID NO: 1238277 - RNA, 22 nt, Human
ccuguaaucccagcuacucggg

SEQ ID NO: 1238278 - RNA, 19 nt, Human
ccugucccaauggcuggga

SEQ ID NO: 1238279 - RNA, 24 nt, Human
cgccauugcacuccagccugggca

SEQ ID NO: 1238280 - RNA, 19 nt, Human
cggagguguuccugaaucg

SEQ ID NO: 1238281 - RNA, 24 nt, Human
cggagguguuccugaaucgguggc

SEQ ID NO: 1238282 - RNA, 24 nt, Human
cgggaggcugaggcaggagaauca

SEQ ID NO: 1238283 - RNA, 27 nt, Human
cucaaaaaaaaaaaaaaaaaggcacaa

SEQ ID NO: 1238284 - RNA, 21 nt, Human
cucacaccuguaaucccagca

SEQ ID NO: 1238285 - RNA, 21 nt, Human
cucacaccuguaaucccagca

SEQ ID NO: 1238286 - RNA, 19 nt, Human
cuccaucucaaaaaaaaaa

SEQ ID NO: 1238287 - RNA, 25 nt, Human
cugaacucuugacaucauuuccacc

SEQ ID NO: 1238288 - RNA, 19 nt, Human
cugcagugagcugagaucg

SEQ ID NO: 1238289 - RNA, 20 nt, Human
cugcagugagcugagaucgc

SEQ ID NO: 1238290 - RNA, 22 nt, Human
cugcagugagcugagaucgcgc

SEQ ID NO: 1238291 - RNA, 18 nt, Human
cugggaggcaaauggaug

SEQ ID NO: 1238292 - RNA, 19 nt, Human
cuguggcccccuagccucc

SEQ ID NO: 1238293 - RNA, 21 nt, Human
cuuaaacuuaccuggggaaau

SEQ ID NO: 1238294 - RNA, 21 nt, Human
cuugcaccucaaaaauccacc

SEQ ID NO: 1238295 - RNA, 24 nt, Human
gaacauggagaaaccucgucucua

SEQ ID NO: 1238296 - RNA, 21 nt, Human
gagaaaccucgucucuacuaa

SEQ ID NO: 1238297 - RNA, 23 nt, Human
gagaccagccugucgaacaugga

SEQ ID NO: 1238298 - RNA, 20 nt, Human
gagucugccaauccacuuag

SEQ ID NO: 1238299 - RNA, 19 nt, Human
gauaacaacuuuaacuuuu

SEQ ID NO: 1238300 - RNA, 23 nt, Human
gcaacuguggcccccuagccucc

SEQ ID NO: 1238301 - RNA, 23 nt, Human
gcaggagaaucacuugaaccugg

SEQ ID NO: 1238302 - RNA, 22 nt, Human
gccauugcacuccagccugggc

SEQ ID NO: 1238303 - RNA, 24 nt, Human
gccauugcacuccagccugggcaa

SEQ ID NO: 1238304 - RNA, 25 nt, Human
gcgcaacuccauggggcaggcagga

SEQ ID NO: 1238305 - RNA, 20 nt, Human
gcgcaaguacacugcagucc

SEQ ID NO: 1238306 - RNA, 19 nt, Human
ggcccccuagccuccucca

SEQ ID NO: 1238307 - RNA, 20 nt, Human
ggcugcagugagcugagauc

SEQ ID NO: 1238308 - RNA, 21 nt, Human
ggcugcagugagcugagaucg

SEQ ID NO: 1238309 - RNA, 19 nt, Human
gggaagcugaagaaagacu

SEQ ID NO: 1238310 - RNA, 24 nt, Human
ggguguguuagcgcaugccuguaa

SEQ ID NO: 1238311 - RNA, 24 nt, Human
ggucacgguggcucacaccuguaa

SEQ ID NO: 1238312 - RNA, 23 nt, Human
gguggcucacaccuguaauccca

SEQ ID NO: 1238313 - RNA, 24 nt, Human
gguggcucacaccuguaaucccag

SEQ ID NO: 1238314 - RNA, 26 nt, Human
gucggagguguuccugaaucgguggc

SEQ ID NO: 1238315 - RNA, 23 nt, Human
guggcucacaccuguaaucccag

SEQ ID NO: 1238316 - RNA, 26 nt, Human
guugcaacugcauuaucucauuuaaa

SEQ ID NO: 1238317 - RNA, 19 nt, Human
uaaaaaacaaaccacaaga

SEQ ID NO: 1238318 - RNA, 18 nt, Human
uaaaaauacaaaauuagc

SEQ ID NO: 1238319 - RNA, 19 nt, Human
uaaaaauacaaaauuagcu

SEQ ID NO: 1238320 - RNA, 24 nt, Human
uaaaaucaucaaacgcuaggcugu

SEQ ID NO: 1238321 - RNA, 23 nt, Human
uaagacuguuauucucuccuucc

SEQ ID NO: 1238322 - RNA, 23 nt, Human
uaagaggaauuaaaaaaaaaagc

SEQ ID NO: 1238323 - RNA, 22 nt, Human
uacaacuagauauguacaaaug

SEQ ID NO: 1238324 - RNA, 20 nt, Human
uaccuggcacacaauguagg

SEQ ID NO: 1238325 - RNA, 22 nt, Human
uacuuguggacacacaguugca

SEQ ID NO: 1238326 - RNA, 21 nt, Human
uagaagaagccagaaggaaaa

SEQ ID NO: 1238327 - RNA, 19 nt, Human
uagaggccauguucugcag

SEQ ID NO: 1238328 - RNA, 22 nt, Human
uagcgcaugccuguaaucccag

SEQ ID NO: 1238329 - RNA, 23 nt, Human
uagcugugcccucugucuauaag

SEQ ID NO: 1238330 - RNA, 22 nt, Human
uaugaaagggaagcugaagaaa

SEQ ID NO: 1238331 - RNA, 21 nt, Human
uaugacugcuuacuuccuuug

SEQ ID NO: 1238332 - RNA, 24 nt, Human
uauggcauccugacauggggccug

SEQ ID NO: 1238333 - RNA, 27 nt, Human
uauggcauccugacauggggccugucu

SEQ ID NO: 1238334 - RNA, 22 nt, Human
ucacuugaaccugggaggcagu

SEQ ID NO: 1238335 - RNA, 24 nt, Human
ucagcacaggggaaggguuucaca

SEQ ID NO: 1238336 - RNA, 23 nt, Human
uccaucucaaaaaaaaaaaaaaa

SEQ ID NO: 1238337 - RNA, 21 nt, Human
uccauggggcaggcaggauuc

SEQ ID NO: 1238338 - RNA, 18 nt, Human
ucccagagcccuggccag

SEQ ID NO: 1238339 - RNA, 19 nt, Human
ucccagagcccuggccaga

SEQ ID NO: 1238340 - RNA, 23 nt, Human
ucgcgccauugcacuccagccug

SEQ ID NO: 1238341 - RNA, 21 nt, Human
ucggagguguuccugaaucgg

SEQ ID NO: 1238342 - RNA, 25 nt, Human
ucgggaggcugaggcaggagaauca

SEQ ID NO: 1238343 - RNA, 18 nt, Human
ucucaagauaauaaguuc

SEQ ID NO: 1238344 - RNA, 20 nt, Human
ucucuacuaaaaauacaaaa

SEQ ID NO: 1238345 - RNA, 22 nt, Human
ucugcagugggagagcaauggg

SEQ ID NO: 1238346 - RNA, 22 nt, Human
ucuggacaaagucuucaauggc

SEQ ID NO: 1238347 - RNA, 23 nt, Human
ucuucagugcgauacacucugau

SEQ ID NO: 1238348 - RNA, 18 nt, Human
ucuugacaucauuuccac

SEQ ID NO: 1238349 - RNA, 25 nt, Human
ugaaaaguagcaaaaugacaguuga

SEQ ID NO: 1238350 - RNA, 19 nt, Human
ugaaccugggaggcagugg

SEQ ID NO: 1238351 - RNA, 24 nt, Human
ugaaccugggaggcaguggcugca

SEQ ID NO: 1238352 - RNA, 18 nt, Human
ugacauggggccugucuc

SEQ ID NO: 1238353 - RNA, 21 nt, Human
ugagacaauguguaugaaagc

SEQ ID NO: 1238354 - RNA, 24 nt, Human
ugagaucgcgccauugcacuccag

SEQ ID NO: 1238355 - RNA, 22 nt, Human
ugagcugagaucgcgccauugc

SEQ ID NO: 1238356 - RNA, 20 nt, Human
ugaggcaggagaaucacuug

SEQ ID NO: 1238357 - RNA, 24 nt, Human
ugaggcaggagaaucacuugaacc

SEQ ID NO: 1238358 - RNA, 25 nt, Human
ugaggcaggagaaucacuugaaccu

SEQ ID NO: 1238359 - RNA, 20 nt, Human
ugagguaaagugauagugag

SEQ ID NO: 1238360 - RNA, 21 nt, Human
ugaggugggaguucgagacca

SEQ ID NO: 1238361 - RNA, 24 nt, Human
ugaguuaaucaaaucacuggagaa

SEQ ID NO: 1238362 - RNA, 19 nt, Human
ugcacuccagccugggcaa

SEQ ID NO: 1238363 - RNA, 22 nt, Human
ugcacuccagccugggcaacaa

SEQ ID NO: 1238364 - RNA, 24 nt, Human
ugccuguaaucccagcuacucggg

SEQ ID NO: 1238365 - RNA, 18 nt, Human
uggaccgugcagagcgca

SEQ ID NO: 1238366 - RNA, 21 nt, Human
uggcaauuggagccaggguug

SEQ ID NO: 1238367 - RNA, 22 nt, Human
uggcaauuggagccaggguugu

SEQ ID NO: 1238368 - RNA, 18 nt, Human
uggcauaaaacacaucca

SEQ ID NO: 1238369 - RNA, 20 nt, Human
uggcauuaaucuagaggcca

SEQ ID NO: 1238370 - RNA, 21 nt, Human
uggcucacaccuguaauccca

SEQ ID NO: 1238371 - RNA, 22 nt, Human
uggcucacaccuguaaucccag

SEQ ID NO: 1238372 - RNA, 24 nt, Human
uggcucacaccuguaaucccagca

SEQ ID NO: 1238373 - RNA, 19 nt, Human
ugggaggcaguggcugcag

SEQ ID NO: 1238374 - RNA, 19 nt, Human
ugggaggcugaggugggag

SEQ ID NO: 1238375 - RNA, 23 nt, Human
ugggaggcugaggugggaguucg

SEQ ID NO: 1238376 - RNA, 18 nt, Human
uggguaauacugugcucc

SEQ ID NO: 1238377 - RNA, 19 nt, Human
uguaauagaagaagccaga

SEQ ID NO: 1238378 - RNA, 24 nt, Human
uguaauagaagaagccagaaggaa

SEQ ID NO: 1238379 - RNA, 24 nt, Human
ugucaaugaugaauucagaugcca

SEQ ID NO: 1238380 - RNA, 18 nt, Human
ugucgaacauggagaaac

SEQ ID NO: 1238381 - RNA, 24 nt, Human
ugugaagaaugaaguuccgucaug

SEQ ID NO: 1238382 - RNA, 24 nt, Human
uguuagcgcaugccuguaauccca

SEQ ID NO: 1238383 - RNA, 21 nt, Human
uuagcgcaugccuguaauccc

SEQ ID NO: 1238384 - RNA, 24 nt, Human
uuagcuggguguguuagcgcaugc

SEQ ID NO: 1238385 - RNA, 24 nt, Human
uuauauaaucauuuuugcgcugcu

SEQ ID NO: 1238386 - RNA, 18 nt, Human
uucagccuugcccugagu

SEQ ID NO: 1238387 - RNA, 20 nt, Human
uuccugaaucgguggcauua

SEQ ID NO: 1238388 - RNA, 22 nt, Human
uugagacaauguguaugaaagc

SEQ ID NO: 1238389 - RNA, 21 nt, Human
uuggauauuagaaaaaucugu

SEQ ID NO: 1238390 - RNA, 22 nt, Human
uuggauauuagaaaaaucuguu

SEQ ID NO: 1238391 - RNA, 19 nt, Human
uugugaagaaugaaguucc

SEQ ID NO: 1238392 - RNA, 22 nt, Human
uuugucaaacauuuauggagua

SEQ ID NO: 1238393 - RNA, 23 nt, Human
uuuugugggaaggauaccaaagu

SEQ ID NO: 1238394 - RNA, 18 nt, Human
gagcggcuuuauuuauaa

SEQ ID NO: 1238395 - RNA, 20 nt, Human
aaaaguccugugaccggaca

SEQ ID NO: 1238396 - RNA, 25 nt, Human
acuccagccugggugacaagaguga

SEQ ID NO: 1238397 - RNA, 24 nt, Human
agacugaggcaggagaauaucuug

SEQ ID NO: 1238398 - RNA, 22 nt, Human
agagguugcagugagcugagau

SEQ ID NO: 1238399 - RNA, 24 nt, Human
agagguugcagugagcugagaucg

SEQ ID NO: 1238400 - RNA, 24 nt, Human
aggagucagagguugcagugagcu

SEQ ID NO: 1238401 - RNA, 21 nt, Human
aggauguugacagcugggaau

SEQ ID NO: 1238402 - RNA, 22 nt, Human
aggcagagggagggagcgcggg

SEQ ID NO: 1238403 - RNA, 24 nt, Human
aggcagagggagggagcgcggggc

SEQ ID NO: 1238404 - RNA, 18 nt, Human
aggcaggagaauaucuug

SEQ ID NO: 1238405 - RNA, 24 nt, Human
aggcaggagaauaucuugaaccca

SEQ ID NO: 1238406 - RNA, 24 nt, Human
agucagagguugcagugagcugag

SEQ ID NO: 1238407 - RNA, 24 nt, Human
aucgagccauugcacuccagccug

SEQ ID NO: 1238408 - RNA, 21 nt, Human
auugcacuccagccuggguga

SEQ ID NO: 1238409 - RNA, 20 nt, Human
caagguccacuucucacucu

SEQ ID NO: 1238410 - RNA, 23 nt, Human
cacuccagccugggugacaagag

SEQ ID NO: 1238411 - RNA, 23 nt, Human
cacuccagccugggugacaagag

SEQ ID NO: 1238412 - RNA, 25 nt, Human
cacuccagccugggugacaagagug

SEQ ID NO: 1238413 - RNA, 20 nt, Human
cacucuuuacagacuguucu

SEQ ID NO: 1238414 - RNA, 23 nt, Human
cagagggcaaaaaguccugugac

SEQ ID NO: 1238415 - RNA, 28 nt, Human
caguggauuucucuucuuuccugagcuu

SEQ ID NO: 1238416 - RNA, 19 nt, Human
cauugcacuccagccuggg

SEQ ID NO: 1238417 - RNA, 19 nt, Human
cauugcacuccagccuggg

SEQ ID NO: 1238418 - RNA, 21 nt, Human
cauugcacuccagccugggug

SEQ ID NO: 1238419 - RNA, 22 nt, Human
cauugcacuccagccuggguga

SEQ ID NO: 1238420 - RNA, 24 nt, Human
cauugcacuccagccugggugaca

SEQ ID NO: 1238421 - RNA, 25 nt, Human
cauugcacuccagccugggugacaa

SEQ ID NO: 1238422 - RNA, 19 nt, Human
ccaggagucagagguugca

SEQ ID NO: 1238423 - RNA, 18 nt, Human
ccauugcacuccagccug

SEQ ID NO: 1238424 - RNA, 20 nt, Human
ccauugcacuccagccuggg

SEQ ID NO: 1238425 - RNA, 21 nt, Human
ccauugcacuccagccugggu

SEQ ID NO: 1238426 - RNA, 21 nt, Human
ccauugcacuccagccugggu

SEQ ID NO: 1238427 - RNA, 22 nt, Human
ccauugcacuccagccugggug

SEQ ID NO: 1238428 - RNA, 23 nt, Human
ccauugcacuccagccuggguga

SEQ ID NO: 1238429 - RNA, 24 nt, Human
ccauugcacuccagccugggugac

SEQ ID NO: 1238430 - RNA, 24 nt, Human
ccgccugagggacccgggaacaga

SEQ ID NO: 1238431 - RNA, 23 nt, Human
ccugugaccggacagagcagagc

SEQ ID NO: 1238432 - RNA, 24 nt, Human
cugggaaugaaaggcagagggagg

SEQ ID NO: 1238433 - RNA, 18 nt, Human
gacccgggaacagagggc

SEQ ID NO: 1238434 - RNA, 23 nt, Human
gagaucgagccauugcacuccag

SEQ ID NO: 1238435 - RNA, 22 nt, Human
gcaggagaauaucuugaaccca

SEQ ID NO: 1238436 - RNA, 19 nt, Human
gccauugcacuccagccug

SEQ ID NO: 1238437 - RNA, 24 nt, Human
gccauugcacuccagccuggguga

SEQ ID NO: 1238438 - RNA, 23 nt, Human
gccuguaauaccagcuacucggg

SEQ ID NO: 1238439 - RNA, 22 nt, Human
ggagucagagguugcagugagc

SEQ ID NO: 1238440 - RNA, 21 nt, Human
gggaaugaaaggcagagggag

SEQ ID NO: 1238441 - RNA, 24 nt, Human
gggaaugaaaggcagagggaggga

SEQ ID NO: 1238442 - RNA, 22 nt, Human
guccaagguccacuucucacuc

SEQ ID NO: 1238443 - RNA, 19 nt, Human
guugcagugagcugagauc

SEQ ID NO: 1238444 - RNA, 22 nt, Human
uacagacuguucucaguggauu

SEQ ID NO: 1238445 - RNA, 18 nt, Human
ucaguggauuucucuucu

SEQ ID NO: 1238446 - RNA, 24 nt, Human
uccagccugggugacaagagugag

SEQ ID NO: 1238447 - RNA, 25 nt, Human
uccagccugggugacaagagugaga

SEQ ID NO: 1238448 - RNA, 18 nt, Human
uccaggauguugacagcu

SEQ ID NO: 1238449 - RNA, 23 nt, Human
ucucacucuuuacagacuguucu

SEQ ID NO: 1238450 - RNA, 21 nt, Human
ugaaaggcagagggagggagc

SEQ ID NO: 1238451 - RNA, 24 nt, Human
ugacagcugggaaugaaaggcaga

SEQ ID NO: 1238452 - RNA, 24 nt, Human
ugaggcaggagaauaucuugaacc

SEQ ID NO: 1238453 - RNA, 25 nt, Human
ugaggcaggagaauaucuugaaccc

SEQ ID NO: 1238454 - RNA, 22 nt, Human
ugcacuccagccugggugacaa

SEQ ID NO: 1238455 - RNA, 23 nt, Human
ugcacuccagccugggugacaag

SEQ ID NO: 1238456 - RNA, 23 nt, Human
uucaaagcuuccaggauguugac

SEQ ID NO: 1238457 - RNA, 22 nt, Human
uuccugagcuucaaagcuucca

SEQ ID NO: 1238458 - RNA, 18 nt, Human
uugaacccaggagucaga

SEQ ID NO: 1238459 - RNA, 19 nt, Human
uugcagugagcugagaucg

SEQ ID NO: 1238460 - RNA, 22 nt, Human
uugcagugagcugagaucgagc

SEQ ID NO: 1238461 - RNA, 21 nt, Human
uuucucuucuuuccugagcuu

SEQ ID NO: 1238462 - RNA, 20 nt, Human
aacccagcccaucacuuugg

SEQ ID NO: 1238463 - RNA, 21 nt, Human
acccaggcuggagugcagugu

SEQ ID NO: 1238464 - RNA, 18 nt, Human
accugcugggggcacagg

SEQ ID NO: 1238465 - RNA, 18 nt, Human
acucugucacccaggcug

SEQ ID NO: 1238466 - RNA, 21 nt, Human
acucugucacccaggcuggag

SEQ ID NO: 1238467 - RNA, 25 nt, Human
acucugucacccaggcuggagugca

SEQ ID NO: 1238468 - RNA, 19 nt, Human
acugcagccucgacuuccu

SEQ ID NO: 1238469 - RNA, 19 nt, Human
aggcgcugggugggaguuc

SEQ ID NO: 1238470 - RNA, 22 nt, Human
aggcugcagccacccauccccu

SEQ ID NO: 1238471 - RNA, 25 nt, Human
aggcuggagugcaguguugcgaucu

SEQ ID NO: 1238472 - RNA, 21 nt, Human
agugcaguguugcgaucucag

SEQ ID NO: 1238473 - RNA, 30 nt, Human
auccuccaaccucagccuccugaguagcuu

SEQ ID NO: 1238474 - RNA, 23 nt, Human
auguggcuggacgcgguggcuca

SEQ ID NO: 1238475 - RNA, 24 nt, Human
caaaaaaagucaaauguggcugga

SEQ ID NO: 1238476 - RNA, 18 nt, Human
caaccucagccuccugag

SEQ ID NO: 1238477 - RNA, 25 nt, Human
caaccucagccuccugaguagcugg

SEQ ID NO: 1238478 - RNA, 20 nt, Human
caccuccaucugggagcagg

SEQ ID NO: 1238479 - RNA, 23 nt, Human
caccuccaucugggagcaggaug

SEQ ID NO: 1238480 - RNA, 24 nt, Human
cacgccuguaaucccagcacuuug

SEQ ID NO: 1238481 - RNA, 19 nt, Human
cacugcagccucgacuucc

SEQ ID NO: 1238482 - RNA, 24 nt, Human
cagaaaagacugacaccaccaagu

SEQ ID NO: 1238483 - RNA, 20 nt, Human
cagccuccugaguagcuggg

SEQ ID NO: 1238484 - RNA, 24 nt, Human
cagccucgacuuccuaggcucaag

SEQ ID NO: 1238485 - RNA, 19 nt, Human
caguccugggacucguggg

SEQ ID NO: 1238486 - RNA, 20 nt, Human
caucugggagcaggaugagg

SEQ ID NO: 1238487 - RNA, 22 nt, Human
ccacugccugcaccuccaucug

SEQ ID NO: 1238488 - RNA, 20 nt, Human
ccagcagcacuggccuccuc

SEQ ID NO: 1238489 - RNA, 22 nt, Human
cccacuugaaaggcugagacag

SEQ ID NO: 1238490 - RNA, 19 nt, Human
ccccagggcugccgccuuc

SEQ ID NO: 1238491 - RNA, 22 nt, Human
cccccuuccccaucugucuucc

SEQ ID NO: 1238492 - RNA, 20 nt, Human
ccuaggcucaagccauccuc

SEQ ID NO: 1238493 - RNA, 19 nt, Human
ccucagccuccugaguagc

SEQ ID NO: 1238494 - RNA, 24 nt, Human
ccuccaaccucagccuccugagua

SEQ ID NO: 1238495 - RNA, 19 nt, Human
ccucgacuuccuaggcuca

SEQ ID NO: 1238496 - RNA, 20 nt, Human
ccucgacuuccuaggcucaa

SEQ ID NO: 1238497 - RNA, 19 nt, Human
ccugcaccuccaucuggga

SEQ ID NO: 1238498 - RNA, 22 nt, Human
ccugcaccuccaucugggagca

SEQ ID NO: 1238499 - RNA, 20 nt, Human
ccugcucaguccugggacuc

SEQ ID NO: 1238500 - RNA, 22 nt, Human
ccuguaaucccagcacuuuggg

SEQ ID NO: 1238501 - RNA, 22 nt, Human
cucacgccuguaaucccagcac

SEQ ID NO: 1238502 - RNA, 24 nt, Human
cucacgccuguaaucccagcacuu

SEQ ID NO: 1238503 - RNA, 24 nt, Human
cucagccuccugaguagcugggac

SEQ ID NO: 1238504 - RNA, 24 nt, Human
cuccaaccucagccuccugaguag

SEQ ID NO: 1238505 - RNA, 25 nt, Human
cuccaaccucagccuccugaguagc

SEQ ID NO: 1238506 - RNA, 20 nt, Human
cuccucacugagcuuggucc

SEQ ID NO: 1238507 - RNA, 23 nt, Human
cugcagccucgacuuccuaggcu

SEQ ID NO: 1238508 - RNA, 23 nt, Human
gaagggcaggaaaccacugggag

SEQ ID NO: 1238509 - RNA, 21 nt, Human
gaccacugccugcaccuccau

SEQ ID NO: 1238510 - RNA, 19 nt, Human
gccucgacuuccuaggcuc

SEQ ID NO: 1238511 - RNA, 24 nt, Human
gcuaguuucuucaaaaaaagucaa

SEQ ID NO: 1238512 - RNA, 24 nt, Human
ggacgcgguggcucacgccuguaa

SEQ ID NO: 1238513 - RNA, 20 nt, Human
ggagcaggaugagggaaggg

SEQ ID NO: 1238514 - RNA, 23 nt, Human
gguggcucacgccuguaauccca

SEQ ID NO: 1238515 - RNA, 24 nt, Human
gguggcucacgccuguaaucccag

SEQ ID NO: 1238516 - RNA, 23 nt, Human
gugaggauguggagccacagggg

SEQ ID NO: 1238517 - RNA, 23 nt, Human
guggcuggacgcgguggcucacg

SEQ ID NO: 1238518 - RNA, 19 nt, Human
guucaccgcccccuucccc

SEQ ID NO: 1238519 - RNA, 24 nt, Human
ucacccaggcuggagugcaguguu

SEQ ID NO: 1238520 - RNA, 22 nt, Human
ucaccgcccccuuccccaucug

SEQ ID NO: 1238521 - RNA, 19 nt, Human
ucacugcagccucgacuuc

SEQ ID NO: 1238522 - RNA, 23 nt, Human
ucacugcagccucgacuuccuag

SEQ ID NO: 1238523 - RNA, 24 nt, Human
ucacugcagccucgacuuccuagg

SEQ ID NO: 1238524 - RNA, 23 nt, Human
ucagccuccugaguagcugggac

SEQ ID NO: 1238525 - RNA, 20 nt, Human
ucaguccugggacucguggg

SEQ ID NO: 1238526 - RNA, 22 nt, Human
ucccugcuccagugucugagga

SEQ ID NO: 1238527 - RNA, 18 nt, Human
uccuaggcucaagccauc

SEQ ID NO: 1238528 - RNA, 19 nt, Human
uccuccaaccucagccucc

SEQ ID NO: 1238529 - RNA, 24 nt, Human
uccugaguagcugggaccccuggc

SEQ ID NO: 1238530 - RNA, 21 nt, Human
ucgugggguggagcauucacc

SEQ ID NO: 1238531 - RNA, 19 nt, Human
ucuccccagggcugccgcc

SEQ ID NO: 1238532 - RNA, 24 nt, Human
ucugacucugucacccaggcugga

SEQ ID NO: 1238533 - RNA, 22 nt, Human
ucugaggaggacuugagcauag

SEQ ID NO: 1238534 - RNA, 21 nt, Human
ucugccagugccucccugcuc

SEQ ID NO: 1238535 - RNA, 24 nt, Human
ucugucacccaggcuggagugcag

SEQ ID NO: 1238536 - RNA, 26 nt, Human
ugaaaggcugagacagaaaagacuga

SEQ ID NO: 1238537 - RNA, 24 nt, Human
ugacucugucacccaggcuggagu

SEQ ID NO: 1238538 - RNA, 22 nt, Human
ugaggauguggagccacagggg

SEQ ID NO: 1238539 - RNA, 22 nt, Human
ugagggaagggcaggaaaccac

SEQ ID NO: 1238540 - RNA, 22 nt, Human
ugcaguguugcgaucucagcuc

SEQ ID NO: 1238541 - RNA, 19 nt, Human
ugccagugccucccugcuc

SEQ ID NO: 1238542 - RNA, 23 nt, Human
ugccugcaccuccaucugggagc

SEQ ID NO: 1238543 - RNA, 19 nt, Human
uggagugcaguguugcgau

SEQ ID NO: 1238544 - RNA, 19 nt, Human
uggagugcaguguugcgau

SEQ ID NO: 1238545 - RNA, 23 nt, Human
uggagugcaguguugcgaucuca

SEQ ID NO: 1238546 - RNA, 21 nt, Human
uggcagaggcaccaucgaggc

SEQ ID NO: 1238547 - RNA, 20 nt, Human
uggccuccucacugagcuug

SEQ ID NO: 1238548 - RNA, 22 nt, Human
uggcucacgccuguaaucccag

SEQ ID NO: 1238549 - RNA, 24 nt, Human
uggcucacgccuguaaucccagca

SEQ ID NO: 1238550 - RNA, 20 nt, Human
uggcucuccgcuccagcagc

SEQ ID NO: 1238551 - RNA, 20 nt, Human
ugggaggcgcugggugggag

SEQ ID NO: 1238552 - RNA, 24 nt, Human
ugggaggcgcugggugggaguucg

SEQ ID NO: 1238553 - RNA, 24 nt, Human
uguugcgaucucagcucacugcag

SEQ ID NO: 1238554 - RNA, 25 nt, Human
uuccagugauuccuccagaggcugc

SEQ ID NO: 1238555 - RNA, 24 nt, Human
uuccuaggcucaagccauccucca

SEQ ID NO: 1238556 - RNA, 23 nt, Human
aagaucaagguuagucaguuuuu

SEQ ID NO: 1238557 - RNA, 21 nt, Human
acaccaaaaggcagacguccu

SEQ ID NO: 1238558 - RNA, 25 nt, Human
acaccaaaaggcagacguccugaac

SEQ ID NO: 1238559 - RNA, 19 nt, Human
caccaaaaggcagacgucc

SEQ ID NO: 1238560 - RNA, 21 nt, Human
caccagugccacccuguggca

SEQ ID NO: 1238561 - RNA, 20 nt, Human
gucccagccagaaguggggc

SEQ ID NO: 1238562 - RNA, 24 nt, Human
uaagccucgugucugggaaacaau

SEQ ID NO: 1238563 - RNA, 19 nt, Human
uccgacaccaaaaggcaga

SEQ ID NO: 1238564 - RNA, 20 nt, Human
uccugaacuucuaguaagcc

SEQ ID NO: 1238565 - RNA, 22 nt, Human
uccugaacuucuaguaagccuc

SEQ ID NO: 1238566 - RNA, 19 nt, Human
ugaccauugauaagugaua

SEQ ID NO: 1238567 - RNA, 18 nt, Human
aaacaugcuuuauuuguu

SEQ ID NO: 1238568 - RNA, 22 nt, Human
aaaguuuacuuaguuuucuaaa

SEQ ID NO: 1238569 - RNA, 25 nt, Human
accccgguuccuucagaaccucagg

SEQ ID NO: 1238570 - RNA, 18 nt, Human
auaaagcgucuugagccc

SEQ ID NO: 1238571 - RNA, 23 nt, Human
auuucaaccaugcaguauguugc

SEQ ID NO: 1238572 - RNA, 21 nt, Human
cagcggccucgaggucccggu

SEQ ID NO: 1238573 - RNA, 22 nt, Human
ccccagcagcggccucgagguc

SEQ ID NO: 1238574 - RNA, 25 nt, Human
cccgcagaguccgcagaaggaggcg

SEQ ID NO: 1238575 - RNA, 19 nt, Human
ccggucgccagcaccccgg

SEQ ID NO: 1238576 - RNA, 18 nt, Human
ccuccccagcagcggccu

SEQ ID NO: 1238577 - RNA, 20 nt, Human
ccucgggagccgagggugag

SEQ ID NO: 1238578 - RNA, 22 nt, Human
cgaggucccggucgccagcacc

SEQ ID NO: 1238579 - RNA, 23 nt, Human
cgccuccgcccccugcacgcugg

SEQ ID NO: 1238580 - RNA, 19 nt, Human
cguguggcgggaaccccgg

SEQ ID NO: 1238581 - RNA, 21 nt, Human
cugccggggagggucccgcag

SEQ ID NO: 1238582 - RNA, 19 nt, Human
cuggccagcguccucccca

SEQ ID NO: 1238583 - RNA, 24 nt, Human
gcaguauguugcuucuggggucug

SEQ ID NO: 1238584 - RNA, 19 nt, Human
gccagcguccuccccagca

SEQ ID NO: 1238585 - RNA, 18 nt, Human
gccccgccuccgcccccu

SEQ ID NO: 1238586 - RNA, 20 nt, Human
gcggcggcggagcggcggcc

SEQ ID NO: 1238587 - RNA, 19 nt, Human
gcggcggcggcggagcggc

SEQ ID NO: 1238588 - RNA, 23 nt, Human
ggcgggagaugggagccucccgg

SEQ ID NO: 1238589 - RNA, 20 nt, Human
ggguugugcggggcgggaga

SEQ ID NO: 1238590 - RNA, 22 nt, Human
gguuuuguuaccgggcggcagg

SEQ ID NO: 1238591 - RNA, 18 nt, Human
gugcggggcgggagaugg

SEQ ID NO: 1238592 - RNA, 22 nt, Human
uaaagcgucuugagcccuaccg

SEQ ID NO: 1238593 - RNA, 20 nt, Human
uccgcccccugcacgcuggc

SEQ ID NO: 1238594 - RNA, 24 nt, Human
ucgccgauaaagcgucuugagccc

SEQ ID NO: 1238595 - RNA, 18 nt, Human
ugcccggguugugcgggg

SEQ ID NO: 1238596 - RNA, 18 nt, Human
uggccagcguccucccca

SEQ ID NO: 1238597 - RNA, 23 nt, Human
uugugcggggcgggagaugggag

SEQ ID NO: 1238598 - RNA, 25 nt, Human
aaacauauacaaauaucaaauacaa

SEQ ID NO: 1238599 - RNA, 22 nt, Human
aagucaaaaaaguucagauuca

SEQ ID NO: 1238600 - RNA, 20 nt, Human
acaaaaaccaagaaaaccaa

SEQ ID NO: 1238601 - RNA, 25 nt, Human
agaaauaaauagggaaaaaauaugc

SEQ ID NO: 1238602 - RNA, 18 nt, Human
agaauaaagacacaauca

SEQ ID NO: 1238603 - RNA, 21 nt, Human
agaggucauccuauaugugug

SEQ ID NO: 1238604 - RNA, 19 nt, Human
aggaagaaaaaaagcuuuc

SEQ ID NO: 1238605 - RNA, 21 nt, Human
aguucagauucauacauuucc

SEQ ID NO: 1238606 - RNA, 24 nt, Human
auagcaaucaaacauauacaaaua

SEQ ID NO: 1238607 - RNA, 20 nt, Human
auguuuguuaacucuuuuau

SEQ ID NO: 1238608 - RNA, 27 nt, Human
cacaaaaaccaagaaaaccaagaaaaa

SEQ ID NO: 1238609 - RNA, 21 nt, Human
caccacuggcaaccuuaaagu

SEQ ID NO: 1238610 - RNA, 22 nt, Human
cacucgcgcccaaagccgaaag

SEQ ID NO: 1238611 - RNA, 22 nt, Human
cccgagaagccgaaccgacacc

SEQ ID NO: 1238612 - RNA, 21 nt, Human
ccuuaaaguuaccucccuugg

SEQ ID NO: 1238613 - RNA, 24 nt, Human
cucaaaaaguaauagcacagagcc

SEQ ID NO: 1238614 - RNA, 20 nt, Human
gaagccgaaccgacaccaac

SEQ ID NO: 1238615 - RNA, 22 nt, Human
gaagccgaaccgacaccaacug

SEQ ID NO: 1238616 - RNA, 19 nt, Human
gaccgcggaauccgacccg

SEQ ID NO: 1238617 - RNA, 18 nt, Human
gagaagccgaaccgacac

SEQ ID NO: 1238618 - RNA, 18 nt, Human
guacauguacaaaauaug

SEQ ID NO: 1238619 - RNA, 23 nt, Human
guagacaacuuagccuaacggag

SEQ ID NO: 1238620 - RNA, 23 nt, Human
uaaaaaaaaaaucaaacaaguac

SEQ ID NO: 1238621 - RNA, 22 nt, Human
uaauagcacagagccauaaauc

SEQ ID NO: 1238622 - RNA, 25 nt, Human
uacaaauaucaaauacaaacacugu

SEQ ID NO: 1238623 - RNA, 25 nt, Human
uacauguacaaaauaugacauaaga

SEQ ID NO: 1238624 - RNA, 19 nt, Human
ucaaaaaaguucagauuca

SEQ ID NO: 1238625 - RNA, 19 nt, Human
ucaaacaaguacaaaaaau

SEQ ID NO: 1238626 - RNA, 22 nt, Human
ucacaaaaaccaagaaaaccaa

SEQ ID NO: 1238627 - RNA, 24 nt, Human
uccuagagaaacaaugacagucuu

SEQ ID NO: 1238628 - RNA, 21 nt, Human
ugauaaggcacuuuaaagaua

SEQ ID NO: 1238629 - RNA, 25 nt, Human
ugcaaaagcaguaaccacagaaaua

SEQ ID NO: 1238630 - RNA, 18 nt, Human
ugcaaagcucaaaaagua

SEQ ID NO: 1238631 - RNA, 21 nt, Human
ugcuggggauauagaauaaag

SEQ ID NO: 1238632 - RNA, 24 nt, Human
ugugacccuguuuuaggugcuggg

SEQ ID NO: 1238633 - RNA, 23 nt, Human
uuagugaauguugugugacccug

SEQ ID NO: 1238634 - RNA, 26 nt, Human
uucacaaaaaccaagaaaaccaagaa

SEQ ID NO: 1238635 - RNA, 23 nt, Human
uucauacauuuccuagagaaaca

SEQ ID NO: 1238636 - RNA, 21 nt, Human
uucauucugaguauauacaga

SEQ ID NO: 1238637 - RNA, 20 nt, Human
uugcaaagcucaaaaaguaa

SEQ ID NO: 1238638 - RNA, 24 nt, Human
uuuagugaauguugugugacccug

SEQ ID NO: 1238639 - RNA, 20 nt, Human
acugagcagcuguauucuuu

SEQ ID NO: 1238640 - RNA, 18 nt, Human
aaaacucucccauucucc

SEQ ID NO: 1238641 - RNA, 23 nt, Human
agcccuggacuaaaacucuccca

SEQ ID NO: 1238642 - RNA, 19 nt, Human
cacuaggcacauacccaac

SEQ ID NO: 1238643 - RNA, 22 nt, Human
uaaaacucucccauucuccaga

SEQ ID NO: 1238644 - RNA, 21 nt, Human
uaccagauauuuaauucucau

SEQ ID NO: 1238645 - RNA, 21 nt, Human
uaggauauccugguaggugaa

SEQ ID NO: 1238646 - RNA, 22 nt, Human
uaggcacauacccaaccagccc

SEQ ID NO: 1238647 - RNA, 19 nt, Human
ucaaaacaaagagugcaca

SEQ ID NO: 1238648 - RNA, 23 nt, Human
uugccauagacuaccagauauuu

SEQ ID NO: 1238649 - RNA, 18 nt, Human
cacuggucuugaaggcac

SEQ ID NO: 1238650 - RNA, 21 nt, Human
cuggggugucagcacucugca

SEQ ID NO: 1238651 - RNA, 21 nt, Human
gggagcuggacagccuggacc

SEQ ID NO: 1238652 - RNA, 23 nt, Human
aaaaagcaggguggcuaaggaua

SEQ ID NO: 1238653 - RNA, 20 nt, Human
aaaacaggagagcagcgagc

SEQ ID NO: 1238654 - RNA, 18 nt, Human
aaccaugauuacaaauuc

SEQ ID NO: 1238655 - RNA, 24 nt, Human
aagaaagaggacuugagaaaaugu

SEQ ID NO: 1238656 - RNA, 21 nt, Human
aggaggaaaaaagcagggugg

SEQ ID NO: 1238657 - RNA, 25 nt, Human
aggauaaagaaagaggacuugagaa

SEQ ID NO: 1238658 - RNA, 19 nt, Human
agugcugaagaggggaggg

SEQ ID NO: 1238659 - RNA, 19 nt, Human
caaagugcagaaucauuca

SEQ ID NO: 1238660 - RNA, 19 nt, Human
cccccuugggguccuacgc

SEQ ID NO: 1238661 - RNA, 22 nt, Human
cccccuugggguccuacgccuu

SEQ ID NO: 1238662 - RNA, 25 nt, Human
ccggugccgcugucccgagcggcuc

SEQ ID NO: 1238663 - RNA, 18 nt, Human
ccucucgccucccccuuu

SEQ ID NO: 1238664 - RNA, 24 nt, Human
ccuucuggcacgcggcuccuccaa

SEQ ID NO: 1238665 - RNA, 18 nt, Human
cgagaggguccugggucc

SEQ ID NO: 1238666 - RNA, 19 nt, Human
cgcagagcggcgaagggag

SEQ ID NO: 1238667 - RNA, 23 nt, Human
cgccucccccuuuggugggguua

SEQ ID NO: 1238668 - RNA, 19 nt, Human
cggccucgcagagcggcga

SEQ ID NO: 1238669 - RNA, 21 nt, Human
cuccgauuuuuuaaaaaagga

SEQ ID NO: 1238670 - RNA, 25 nt, Human
cuccuuguccccccuugggguccua

SEQ ID NO: 1238671 - RNA, 21 nt, Human
gcagcgagcaaaagcaaagau

SEQ ID NO: 1238672 - RNA, 21 nt, Human
gcggcgaagggagacucggga

SEQ ID NO: 1238673 - RNA, 18 nt, Human
ggagagcagcgagcaaaa

SEQ ID NO: 1238674 - RNA, 21 nt, Human
guccuccuuguccccccuugg

SEQ ID NO: 1238675 - RNA, 18 nt, Human
uaaaaaaggaggaaaaaa

SEQ ID NO: 1238676 - RNA, 23 nt, Human
uacaaauucuguggcugaggcaa

SEQ ID NO: 1238677 - RNA, 24 nt, Human
uacaaauucuguggcugaggcaaa

SEQ ID NO: 1238678 - RNA, 18 nt, Human
uacgccuucuggcacgcg

SEQ ID NO: 1238679 - RNA, 26 nt, Human
uagaaaucacuguuuucccuuuuccc

SEQ ID NO: 1238680 - RNA, 19 nt, Human
ucaguccaccgcuucggcc

SEQ ID NO: 1238681 - RNA, 22 nt, Human
ucagugcuguuuacaaagugca

SEQ ID NO: 1238682 - RNA, 23 nt, Human
ucaguguugaaauggacgaaggu

SEQ ID NO: 1238683 - RNA, 23 nt, Human
uccaaauguaggaaccacggauc

SEQ ID NO: 1238684 - RNA, 23 nt, Human
uccuccggugccgcugucccgag

SEQ ID NO: 1238685 - RNA, 21 nt, Human
ucuggcacgcggcuccuccaa

SEQ ID NO: 1238686 - RNA, 23 nt, Human
ucuguggcugaggcaaauguuuu

SEQ ID NO: 1238687 - RNA, 19 nt, Human
ugaaaaacaggagagcagc

SEQ ID NO: 1238688 - RNA, 20 nt, Human
ugaaauggacgaagguagug

SEQ ID NO: 1238689 - RNA, 20 nt, Human
uggcuccucucgccuccccc

SEQ ID NO: 1238690 - RNA, 20 nt, Human
uggcugaggcaaauguuuuc

SEQ ID NO: 1238691 - RNA, 19 nt, Human
ugucgagaggguccugggu

SEQ ID NO: 1238692 - RNA, 18 nt, Human
uguggagaaugaaaaaca

SEQ ID NO: 1238693 - RNA, 21 nt, Human
uguuuacaaagugcagaauca

SEQ ID NO: 1238694 - RNA, 26 nt, Human
uuaaaaaaggaggaaaaaagcagggu

SEQ ID NO: 1238695 - RNA, 21 nt, Human
uucaaaaagacuuuuuacgga

SEQ ID NO: 1238696 - RNA, 20 nt, Human
uucccuuuucccccuuuuuc

SEQ ID NO: 1238697 - RNA, 22 nt, Human
uugagaauuuuuaaauaccacu

SEQ ID NO: 1238698 - RNA, 20 nt, Human
uugccuuucaaaaagacuuu

SEQ ID NO: 1238699 - RNA, 20 nt, Human
uuucccuuuucccccuuuuu

SEQ ID NO: 1238700 - RNA, 19 nt, Human
uuuucccuuuucccccuuu

SEQ ID NO: 1238701 - RNA, 18 nt, Human
accuuaaaaagaucagaa

SEQ ID NO: 1238702 - RNA, 20 nt, Human
aggucugcagccgcccgcag

SEQ ID NO: 1238703 - RNA, 23 nt, Human
aggucugcagccgcccgcagccu

SEQ ID NO: 1238704 - RNA, 19 nt, Human
auuccgguccccucccgcc

SEQ ID NO: 1238705 - RNA, 21 nt, Human
cacaggcuauaaauaugaagc

SEQ ID NO: 1238706 - RNA, 25 nt, Human
ccagugaaccuuaaaaagaucagaa

SEQ ID NO: 1238707 - RNA, 23 nt, Human
ccgccgcgugccucucgccgucc

SEQ ID NO: 1238708 - RNA, 24 nt, Human
ccgccgcgugccucucgccguccc

SEQ ID NO: 1238709 - RNA, 22 nt, Human
cggcgggccggucuccgcuccc

SEQ ID NO: 1238710 - RNA, 19 nt, Human
cggcgucgggggcggcggg

SEQ ID NO: 1238711 - RNA, 22 nt, Human
cgggccggucuccgcucccagg

SEQ ID NO: 1238712 - RNA, 18 nt, Human
cuccgagccccggcugcg

SEQ ID NO: 1238713 - RNA, 21 nt, Human
cugcggauuccgguccccucc

SEQ ID NO: 1238714 - RNA, 22 nt, Human
gcggcgucgggggcggcgggcc

SEQ ID NO: 1238715 - RNA, 22 nt, Human
ggcggcgggccggucuccgcuc

SEQ ID NO: 1238716 - RNA, 22 nt, Human
gugaaccuuaaaaagaucagaa

SEQ ID NO: 1238717 - RNA, 25 nt, Human
uaccacaggcuauaaauaugaagca

SEQ ID NO: 1238718 - RNA, 20 nt, Human
ucgccgcccgucguucugcc

SEQ ID NO: 1238719 - RNA, 23 nt, Human
ucgggggcggcgggccggucucc

SEQ ID NO: 1238720 - RNA, 21 nt, Human
ugaagcaauauuucagcaaga

SEQ ID NO: 1238721 - RNA, 21 nt, Human
ugaugguaaaaacuaaaaacc

SEQ ID NO: 1238722 - RNA, 20 nt, Human
ugguuaauacaccagugaac

SEQ ID NO: 1238723 - RNA, 26 nt, Human
aaaaauagacaaguuaugauucagaa

SEQ ID NO: 1238724 - RNA, 18 nt, Human
aaacauagaaggcugaca

SEQ ID NO: 1238725 - RNA, 19 nt, Human
aaggaaaacacaaagccuc

SEQ ID NO: 1238726 - RNA, 25 nt, Human
aauaaaaagacacaagguacaagaa

SEQ ID NO: 1238727 - RNA, 25 nt, Human
aauacuuguuaaagggaucccaaaa

SEQ ID NO: 1238728 - RNA, 24 nt, Human
aauguaaaggcccagguguucaaa

SEQ ID NO: 1238729 - RNA, 20 nt, Human
acaaacugaaaguagcacac

SEQ ID NO: 1238730 - RNA, 19 nt, Human
acaaagccucauucagaug

SEQ ID NO: 1238731 - RNA, 21 nt, Human
acaagacacaaaauugagcag

SEQ ID NO: 1238732 - RNA, 22 nt, Human
acaauucuugaaacugucauaa

SEQ ID NO: 1238733 - RNA, 22 nt, Human
accuacaugucacauccaaggg

SEQ ID NO: 1238734 - RNA, 25 nt, Human
acgccaccucaucaggacuguggac

SEQ ID NO: 1238735 - RNA, 26 nt, Human
agaagugagcacaucacccgccuccu

SEQ ID NO: 1238736 - RNA, 21 nt, Human
agacucccucaggggcugcuu

SEQ ID NO: 1238737 - RNA, 21 nt, Human
agagagaaaggggcaaaugga

SEQ ID NO: 1238738 - RNA, 19 nt, Human
agcaaggauugcaaaagag

SEQ ID NO: 1238739 - RNA, 18 nt, Human
agcuagaaguuggcugag

SEQ ID NO: 1238740 - RNA, 19 nt, Human
aggaccccagaugccucuc

SEQ ID NO: 1238741 - RNA, 24 nt, Human
aggagaacauuaguucuccuuaaa

SEQ ID NO: 1238742 - RNA, 18 nt, Human
aggagagcugaggauucu

SEQ ID NO: 1238743 - RNA, 27 nt, Human
aggcagaaaaauagacaaguuaugagg

SEQ ID NO: 1238744 - RNA, 23 nt, Human
aggguuuuuuugguuuuuguuuu

SEQ ID NO: 1238745 - RNA, 19 nt, Human
aguucagaaggcaaauacu

SEQ ID NO: 1238746 - RNA, 20 nt, Human
augaagaacaauuuuacugg

SEQ ID NO: 1238747 - RNA, 26 nt, Human
augaccagagugaguucagugagcua

SEQ ID NO: 1238748 - RNA, 21 nt, Human
augacucccaccugcacauac

SEQ ID NO: 1238749 - RNA, 21 nt, Human
caacaugaaguuccaggaccc

SEQ ID NO: 1238750 - RNA, 19 nt, Human
cacaaaauugagcagcaaa

SEQ ID NO: 1238751 - RNA, 18 nt, Human
cacaagguacaagaauug

SEQ ID NO: 1238752 - RNA, 18 nt, Human
cacauagaaugucaucuc

SEQ ID NO: 1238753 - RNA, 21 nt, Human
cagagaccuccuguugugcug

SEQ ID NO: 1238754 - RNA, 22 nt, Human
cagcaaggauugcaaaagagaa

SEQ ID NO: 1238755 - RNA, 21 nt, Human
cagcuuccugauuuaggcccu

SEQ ID NO: 1238756 - RNA, 18 nt, Human
caggaugcugcgccgggc

SEQ ID NO: 1238757 - RNA, 18 nt, Human
ccaaacgccaccucauca

SEQ ID NO: 1238758 - RNA, 23 nt, Human
ccuaaagagagaaaggggcaaau

SEQ ID NO: 1238759 - RNA, 22 nt, Human
ccucaucaggacuguggacccc

SEQ ID NO: 1238760 - RNA, 23 nt, Human
cuaccuacaugucacauccaagg

SEQ ID NO: 1238761 - RNA, 21 nt, Human
cucaaugacaugucgcugaaa

SEQ ID NO: 1238762 - RNA, 22 nt, Human
cugcugaauguaguuuaccugu

SEQ ID NO: 1238763 - RNA, 24 nt, Human
cuuccuaccuacaugucacaucca

SEQ ID NO: 1238764 - RNA, 22 nt, Human
gagagcaaggaaaacacaaagc

SEQ ID NO: 1238765 - RNA, 25 nt, Human
gccaccucaucaggacuguggaccc

SEQ ID NO: 1238766 - RNA, 21 nt, Human
ggaucucugaaacauagaagg

SEQ ID NO: 1238767 - RNA, 21 nt, Human
gggaucccaaaagguaggaga

SEQ ID NO: 1238768 - RNA, 21 nt, Human
gguuuuuguuuuguuuuuuua
